United States Patent Application Publication US 2017/0009304 A1 - sequence listing, part 12

SEQ ID NO: 237141 - DNA, 90 bp, Homo sapiens
gccaaattcaaaaaggataaggagatcatagcagagtacgatactcaggtcaaagctcctctactagtgacctctccaactatgaccatg

SEQ ID NO: 237142 - DNA, 82 bp, Homo sapiens
gccggttccttgcggtcaagatgctgcaaaacgtgactccccacaataagatcagtttgacaacttagaaaaacacacacag

SEQ ID NO: 237143 - DNA, 97 bp, Homo sapiens
tttgttgctctagcaacaggagaggaagcagatgaagccaccctggcccgtctggatctggagaggaagattgagtcgctggaggaggagatccggt

SEQ ID NO: 237144 - DNA, 90 bp, Homo sapiens
gacagcgacggcagccggcacagctccgaccgcgaggacgacttctccgcagatccgatcacataggacagtatgcaccttaagatcctg

SEQ ID NO: 237145 - DNA, 87 bp, Homo sapiens
cacctttgactcttctactgtctcagaccttaggtgttgacttcaaaatcaaaactgtagagctaagaggaaagaaaattagattac

SEQ ID NO: 237146 - DNA, 92 bp, Homo sapiens
cggcgggaggaacgctcactgtcagcgcctggaaacttgctcactgtactaatggtcacttgatgtgcgctggctgttttatccacctacta

SEQ ID NO: 237147 - DNA, 100 bp, Homo sapiens
gttatagacttccagctgaaggtttaaagaacaagttgaaatcatcgcagaaggataaagttcgtcagtttatgatcttcacacaatctagtgaaaaaac

SEQ ID NO: 237148 - DNA, 100 bp, Homo sapiens
taaaactccagcgagatccgggccgtgaacgaaagcagtgacggaggagcttgtaccaccggtgtcgtgaaaactacccctaaaagccaaaatgggaaag

SEQ ID NO: 237149 - DNA, 50 bp, Homo sapiens
tgtgtctctagcccccatttccaggtggcagagcgagctctctattactg

SEQ ID NO: 237150 - DNA, 51 bp, Homo sapiens
ggatttgcttgttccagtaaagtacaggtgaacaaaggcagagtaaactgt

SEQ ID NO: 237151 - DNA, 50 bp, Homo sapiens
aggccagtggcactcccagctcggccctgggaggagcggggacactgagg

SEQ ID NO: 237152 - DNA, 101 bp, Homo sapiens
cccctgccagcacacacctgagcaggggagagaatggccctgggggcttcatcgtgctcaagtcggccagtaacccccgtgtttgcacctttgtctggatt

SEQ ID NO: 237153 - DNA, 100 bp, Homo sapiens
ttcaggaatggagacacggcttcccccaaggaatatacaggtgctggagatcagaatttatttacctctgtttatccaacgctctctcagcagcttccaa

SEQ ID NO: 237154 - DNA, 100 bp, Homo sapiens
ccgggcacgacctctcggacacggtgcaggcaggtccacgctgcttttatgagctgtaacactcaccgcgaagatctgcagcttcactcctgcgcccacc

SEQ ID NO: 237155 - DNA, 98 bp, Homo sapiens
aaggattccaagtaactcttatttgcggacaaggcaaaatctcagcaagttcggacctctagtacaataaggcgaacctcctctttggatacaataac

SEQ ID NO: 237156 - DNA, 100 bp, Homo sapiens
tctgaccgctgggacaaaatagccagatgtgtcccgtccaagagcaagatatctccggagcatttggataatgtgacagttggaatgcagtgatgtcgac

SEQ ID NO: 237157 - DNA, 127 bp, Homo sapiens
gaatctgatgcagaccctcatggaagactatgagacacacaaatctaaaaggcgcgagagaatggatgatagtagtggtctggctgttcatccaggctggggtgtagcggtgcgatctcagctcact

SEQ ID NO: 237158 - DNA, 97 bp, Homo sapiens
gatccagcttccttctgaaaaggcgatcttcctgtttgtggataagacagtcccacagtccagtgttgaagcatcacacagacatgagcagttcgag

SEQ ID NO: 237159 - DNA, 137 bp, Homo sapiens
gagggggactggcctggcgtgcactccgcacctcggggacattattgcgcgtggaacggctgcttttggaaggtactccaaagattcaggtttactcacgtcatccagcagagaatggaaagtcaaatttcctgaat

SEQ ID NO: 237160 - DNA, 78 bp, Homo sapiens
tgacgtcatgcggctcctcatggccgagctgggcttggagatccccgcctatagcagcaaactgtcatcaggagctta

SEQ ID NO: 237161 - DNA, 126 bp, Homo sapiens
ttcattcagatgtggtggaatatgccaaggaaaaactggagagcttcatcaaaaatagtgatagctttgataagattttctgccgtctcttggcaaaaatggcaaataatgatgctgttctgaaga

SEQ ID NO: 237162 - DNA, 100 bp, Homo sapiens
cttcgatcccttctctgatttgctgtcagccatgaacggatggatgtgatgcctgctagccaaaagggtttatggctacaaatgatttgatgacggaact

SEQ ID NO: 237163 - DNA, 83 bp, Homo sapiens
gtccgcctcgacccaaccggcggccttgagcgctgagcaagcaaagggtgtgggcaagagcagtttactgttgcgttttgcag

SEQ ID NO: 237164 - DNA, 117 bp, Homo sapiens
attggcctgatgaatcctttgatgaaatggacagtacactagctgttcaacagatatttagcttcctgtggtatactgatgagcagaactcttccactacatacctcaattttgcct

SEQ ID NO: 237165 - DNA, 83 bp, Homo sapiens
ccaaagtcgggactatcgatgatgactggcattgctcgggtaccacttgctggagctgctggaggccctggggttggtagggc

SEQ ID NO: 237166 - DNA, 75 bp, Homo sapiens
ccctcgggactttattgattgcttcctgatcaaaatggagaagtgccgaaaacctgatcagcatttcaagcccta

SEQ ID NO: 237167 - DNA, 75 bp, Homo sapiens
gagcgccgcgcacttcgtcatgttcttcgcgccctggtatcatgatattagctggtttgacatcaagtcatttgt

SEQ ID NO: 237168 - DNA, 90 bp, Homo sapiens
gcccggcaccacccatcttgagtatctggtccggcgggcggtggcctccgtggtgggcggctggctgctgtgtctgcgtgaccgttactc

SEQ ID NO: 237169 - DNA, 100 bp, Homo sapiens
cagaattcatgattgaagaaatgcagtgttcaagaatactttgttcgcaaatccaatgcaaagaaaggcatgtttgccagtactcatcttatactgaaag

SEQ ID NO: 237170 - DNA, 75 bp, Homo sapiens
tggcaacatttccgagaaagcttcagacatgcttataagacaactcttagctggtatcaatattcatttagctaa

SEQ ID NO: 237171 - DNA, 100 bp, Homo sapiens
tgaggagctggaaactttcccggcagggtgggaaaccccgtaaacaccggaaggatcggctacaagatttaattgatataggctttggctatgatgagac

SEQ ID NO: 237172 - DNA, 141 bp, Homo sapiens
ggcgaatcgacacatatcttgatattccattggtcatccgaccttatgggtccagccaagcatttgctagtgtggtagcaattgtggtattaggaaacaaaatcgacctttctgagcagagacaagtggacgctgaagtgg

SEQ ID NO: 237173 - DNA, 100 bp, Homo sapiens
gcctttctggacacagaagtatttgtgacaggtctgaaggggcgtctcgattacctgagctctctgaaggtgaagggccttgtgctgggtccaattcaca

SEQ ID NO: 237174 - DNA, 75 bp, Homo sapiens
taggccagccccggtcacagagtgcaccgtatcctgtcacttctggatgtgagacatagggcctgattacattcc

SEQ ID NO: 237175 - DNA, 50 bp, Homo sapiens
cgtggcctgaccaaggacctccaaggaacaggcctttgagagcagccaga

SEQ ID NO: 237176 - DNA, 75 bp, Homo sapiens
cggcgttcggggaaatggctgcgagaccctagaggcctgcggcctgcggtgctttacaaggccaagtacggtcca

SEQ ID NO: 237177 - DNA, 128 bp, Homo sapiens
ctattatccaatgaagaggaaaagaacagagccatcattcaagaagtttgcttcatgatgtgtcgtggaggccgaatgtttgcaccaaccaaaacctggcgccgttggcatcgtagagtgaacacaac

SEQ ID NO: 237178 - DNA, 98 bp, Homo sapiens
tcactttgacgatgaggagacctggacttttgggtcaaaagctgtcggaaaaggtaacagaagatggaactcgaaatcccaatgaaaaacctacccag

SEQ ID NO: 237179 - DNA, 90 bp, Homo sapiens
cttgagaacatggtgtctggagttaaaggtttgaaacttcaaggggccacgtgcaacaacaacaagctgtcactgtccaatgccatctca

SEQ ID NO: 237180 - DNA, 49 bp, Homo sapiens
ccgtgtcttacatcagttcagagaggaagggaaaaggccgaggcatcag

SEQ ID NO: 237181 - DNA, 98 bp, Homo sapiens
ccgagaaggcgctgaagcacatggatggaggcttctcatcgaatgaaaactccagtcaagtacatgaccgggaccactgtccttccatttaacccagc

SEQ ID NO: 237182 - DNA, 100 bp, Homo sapiens
aacacttctccgagccagcgagccagcgagccgccgacccgccgagcaaaatgagcgtttcccaaagtgtattctgcggaactagcacctactgtgttct

SEQ ID NO: 237183 - DNA, 97 bp, Homo sapiens
actattagctcttgctgagcagctgggaaatttcactggcctagtgggaggtcctgactttgcccactgtctgctgaataactgaagtgaagtgatg

SEQ ID NO: 237184 - DNA, 82 bp, Homo sapiens
ccttattcagagaaggaaggatcttctcatgcacagaggcaacaaatggcaactttctgagggctggcaaggtttaattgct

SEQ ID NO: 237185 - DNA, 75 bp, Homo sapiens
attgcttcgtttgccattttcttatggagaactgtccttgttatttgacttgggctcatatgacataaggatgat

SEQ ID NO: 237186 - DNA, 75 bp, Homo sapiens
gccttgggctctgttgcttctctgggtcccagaattctccctctgaagcacagaatttagatgagaatacaactg

SEQ ID NO: 237187 - DNA, 90 bp, Homo sapiens
gaggaatggttgtcagagtttaaggccctggccaacgtcaacattgggagcctcatctgcaatgtaggggccggtggacctgctccagca

SEQ ID NO: 237188 - DNA, 90 bp, Homo sapiens
gctcaaccctgccaacgtgcccactcacctcatggtgctctgctgcgtcttacgaaattacagaagacatccccgtgaagactttgaata

SEQ ID NO: 237189 - DNA, 75 bp, Homo sapiens
atgttttggggattccactctccagtgtaatgattattgacaacaggttgcacataggcaaaggtgtgcagttgg

SEQ ID NO: 237190 - DNA, 51 bp, Homo sapiens
tctgagagagggaagtcgcctctgtgctcgagaaaacgacgctccacacct

SEQ ID NO: 237191 - DNA, 74 bp, Homo sapiens
gtcgcctccaggccaagagggatccttcacccgtgtctggtttcagccatgccacagagctccggcagtcatgg

SEQ ID NO: 237192 - DNA, 100 bp, Homo sapiens
ccgccgttttcgcctgcagctgctcaccggtgtcatggagaaactccagctgggcccagagattctgcagcgggaaaatccaaggcttatttatgccagg

SEQ ID NO: 237193 - DNA, 74 bp, Homo sapiens
gttcattggcatctttgctcaaaatagacctgagaattttttcagcagatcattgagtacacagaggaataccg

SEQ ID NO: 237194 - DNA, 100 bp, Homo sapiens
ccaccgccgccccctccggcgtgttcatgcccccgggattattttcgaaataccagtatttcgactccagggggatgttcatttctatagtattttcagc

SEQ ID NO: 237195 - DNA, 83 bp, Homo sapiens
ggaagtgactgggcggtgccggcgccggagacgatgccgttgctttactgcagatggtgcgtgacgagagccaccagatcctg

SEQ ID NO: 237196 - DNA, 84 bp, Homo sapiens
gcgacaagccgctggcagccgcggatctcaccgccgctcaggaagctggcagggcggagatgctggaccacgccgtcctgcttc

SEQ ID NO: 237197 - DNA, 75 bp, Homo sapiens
actgtgggcacctttgagatggccaaggttctctgtaagctgtgttggggtggaagaggaggaggcgcccgacat

SEQ ID NO: 237198 - DNA, 100 bp, Homo sapiens
aagaagaagcagcctcatttgttttctggtgtcatcgtaggtggccacctatggcttttgggagaggtaaagcattatttgacagatgtatggattcaag

SEQ ID NO: 237199 - DNA, 82 bp, Homo sapiens
cagcgcccactggggatggcaaagacgacatccggtgcgccgaggctgctcacaaaacaattctgtggtgttcttggtcaca

SEQ ID NO: 237200 - DNA, 52 bp, Homo sapiens
cgcccggcagccaccccatctgggaagataaaagaatcagagtgtctcaacc

SEQ ID NO: 237201 - DNA, 82 bp, Homo sapiens
agttcctgggaaggtggagccaccagcctctccttgagtgcctggtgaagaatgtgatgggatcactagcatgtctgcggag

SEQ ID NO: 237202 - DNA, 101 bp, Homo sapiens
agcgaatcctggcccaccgcctgcccaaccgcgtgaccttgattgagttaatgaacttcacgcctcagcgtccaggacgggaaggagtgtgtggtgaagga

SEQ ID NO: 237203 - DNA, 100 bp, Homo sapiens
tgaactctcagtggtcctacctggggatattatcaaatctactactgttcatggcaggcggttcaggaccatcatcctccatagccatagcgggcaccaa

SEQ ID NO: 237204 - DNA, 76 bp, Homo sapiens
ctcggcctttcacattcgggaagcgtcgggattaggtgaaagtaattggtatgtgaaaaagtgtctaaacgacgtt

SEQ ID NO: 237205 - DNA, 98 bp, Homo sapiens
attggacccgaaaccatgcctcactgtcctaggcaagtacaaaattggacagctgtacatgatcagcaaacacagccatgaacagagtgaccggggag

SEQ ID NO: 237206 - DNA, 73 bp, Homo sapiens
gaatgatgaatacttttactactgtgacaacattaacggaagggaaaaggccgaggcatcagcgtgtgaagac

SEQ ID NO: 237207 - DNA, 51 bp, Homo sapiens
ctctggatatagagatagccgcttacagtggacacgtcgatctgacaatgc

SEQ ID NO: 237208 - DNA, 90 bp, Homo sapiens
gagggccagttataacagtgcaggtattttggcctctccccagtctgctcctggaaacttggacaatagtaaaagtggagaaattaaagg

SEQ ID NO: 237209 - DNA, 98 bp, Homo sapiens
cagaggtcaacaaggttctggacaagatgaagtctttctgccagaaggatgccctgcagtggtctcgccatccagctacagtggagggagaggagcca

SEQ ID NO: 237210 - DNA, 100 bp, Homo sapiens
cacgcctggcctcactcaaacagtaaacgaggaggagacatcacagctttcccagatcgggaggaaaaatatggaatgtgttttaccgctgactgaacac

SEQ ID NO: 237211 - DNA, 80 bp, Homo sapiens
accctgtggtggcgatggcaggatcatcctctttgatagttatgaactgactggtttagccagaggtggggaacagttgg

SEQ ID NO: 237212 - DNA, 76 bp, Homo sapiens
ctcgcacccccagccagtccgtcgatccagctgccagcgcagccgccagcgccggagaaaattcctgttccaagag

SEQ ID NO: 237213 - DNA, 100 bp, Homo sapiens
tgcctgcggtgcctgagctgagtgaggccgaggccgggaggccgtgcccggagggccaattcctgtccccccagcagcatggcatcgtgtgctgaaccct

SEQ ID NO: 237214 - DNA, 100 bp, Homo sapiens
ttagcacagccttggggataatgtgtggcccagaggcagagctacacaaccatggaatccaaattaattcctgttctgtgcgactggtggatataaaaaa

SEQ ID NO: 237215 - DNA, 82 bp, Homo sapiens
ccagtggagcccccgcgcgcccggccggcccggagcaccgagctcgcggcacggtaggagcaaacggggattcagcgtccga

SEQ ID NO: 237216 - DNA, 98 bp, Homo sapiens
ggatctgtgagtcttctggcaaacagtgtttgcctctggttcagctcatacaacagcttcttaggtgaagacattcagtgaagcttgcctgatggtaa

SEQ ID NO: 237217 - DNA, 100 bp, Homo sapiens
gctgctgttgtccaacagaacgacctagtatttgaatttgctagtaacgtcatggaggatgaacgacaggcttgttgattggtgctggctgtgccctcta

SEQ ID NO: 237218 - DNA, 50 bp, Homo sapiens
cagcgttctgtggttgtcaacagggttttggccaaattgggcgagggcac

SEQ ID NO: 237219 - DNA, 73 bp, Homo sapiens
tgctcacggtcaacgagcggggcaaccactgcgagtactgcttcaccagggacgcactctctgagatattttc

SEQ ID NO: 237220 - DNA, 83 bp, Homo sapiens
tctgcgcgcgggagttcgaggccctgcggagctgcttcgccgctgcggtccgcgggagagctgtggggcttggtgagtgtttc

SEQ ID NO: 237221 - DNA, 89 bp, Homo sapiens
ctcccgagtagctggaattacagggcctcgattgggtggctctggctgccaggaagattccagccccattccggccccaaatccgctca

SEQ ID NO: 237222 - DNA, 75 bp, Homo sapiens
gccagggaaccctggtcaccgtctcctcaggtcacccgtgtgaacagaaagtgagaggttgtagcacattgccac

SEQ ID NO: 237223 - DNA, 108 bp, Homo sapiens
cggccagccctgctcgcagaattaccgcctcttctttagacaaccctccatatgataagggagccttcagaatcgaaatcaactttccagcagagtacccattcaaac

SEQ ID NO: 237224 - DNA, 90 bp, Homo sapiens
gtaaaagccccgcctctgccttcggatagcacaatcctggaggaagagaaggctcagcaagaagagcgcatgaggatggagtccagaaga

SEQ ID NO: 237225 - DNA, 101 bp, Homo sapiens
gaatagccagatctcagaggagcctggctaagcaaaaccctgcagaacggctgcctaatttacagcaaccatgagatgtgatgactgaagcccaccacaaa

SEQ ID NO: 237226 - DNA, 75 bp, Homo sapiens
aggcggacgacgaccggctcaacaaggagcacgtgaattgcctctgcttacgttcaggccctgtcctaaacccag

SEQ ID NO: 237227 - DNA, 100 bp, Homo sapiens
agaaaatcaaaagaaacttttgcccttatcagtaacacctgaggtgttttcacagtcctgtgtttggtatggagagtgtggaattgcatatggggacaag

SEQ ID NO: 237228 - DNA, 97 bp, Homo sapiens
ggctcgcctcgactccaaatggttgaaaacagatatacagggtggccgtgaattaagtgattttattagctatctacaaagagaagctacaaacccc

SEQ ID NO: 237229 - DNA, 100 bp, Homo sapiens
ttcgcttggtgtcctcctggcctcagcaacctgacaattctgtcgtgtcccgtgccggtggtggtgtgcacattgagccccggtatagacagttccccca

SEQ ID NO: 237230 - DNA, 135 bp, Homo sapiens
gagcgacccgggatgttcagtctgatggccagttgctgcggctggttcaagcggtggcgggagcctgtcaggacaacttataatgggacccaaaggggaaagaggatttcccgggcctccaggaagatgtctttg

SEQ ID NO: 237231 - DNA, 100 bp, Homo sapiens
tgagacagtagccaaacccccaagaggagatgttaaagtaacccatcttgcaggacgacattgaagattggtcttctgttgatctaagatgattattttg

SEQ ID NO: 237232 - DNA, 75 bp, Homo sapiens
cctgttttctgggagcttcgaagctccagtggctgttggataattatgaaacagcggaaggtgtgagtctcccca

SEQ ID NO: 237233 - DNA, 83 bp, Homo sapiens
cgggcttctccctgatgacaagcttaccctcttctgcgagctataataataggcggagtcgatctggaacatacagctcgaga

SEQ ID NO: 237234 - DNA, 99 bp, Homo sapiens
caaagagatgatggctagacacaaacaggaacttacggaaaaagatgctacaattgcttctgaaagctggcagttaaggaaaggagtaagtgaaattgg

SEQ ID NO: 237235 - DNA, 80 bp, Homo sapiens
agctgctggataaacctgagcagtaaagacatttggggagacacatcctttcaccaaacttgtggttgatctgacagata

SEQ ID NO: 237236 - DNA, 75 bp, Homo sapiens
cctacccgagtgtgcgaagctagccaaggtctatgttaacaatgaatgggcaaccagtgttggggaaggagggag

SEQ ID NO: 237237 - DNA, 100 bp, Homo sapiens
aggaaggattggggaatgaagttttgaaaatgtgtcgctctttgtataacaccaagcagatgctgcctgcagaggtagatatagttgtaggtactccggg

SEQ ID NO: 237238 - DNA, 51 bp, Homo sapiens
gagagggctaccttgtgaagaagaaagatccccagcaggccctcaaggagc

SEQ ID NO: 237239 - DNA, 110 bp, Homo sapiens
tggggcttcacccttaaggggggtctggaacactgtgagccgctcacagtgtctaagaaatcatgaccaccccaggaaaagagaactttcgcctgaaaagttacaagaac

SEQ ID NO: 237240 - DNA, 75 bp, Homo sapiens
ggcgaacccgcggcgcaataacgccagttcctgttgcacgaaaactatctgctcgggaacagcgagattgtgagg

SEQ ID NO: 237241 - DNA, 124 bp, Homo sapiens
cgtcgccgcatcccggacggtacttctgccactgctgctccgtggagatcgtcccgcgcctgccgcaggttacgggcaggacttgagtggcttcggacagggcttctcagaccccagccagcag

SEQ ID NO: 237242 - DNA, 83 bp, Homo sapiens
tcacctgggttttcttagccctctacttttcaagacaccaagtgagaggccaaccagatcaatgaactgagccatgttcaaat

SEQ ID NO: 237243 - DNA, 109 bp, Homo sapiens
gtgcctgaagccagtgggctggggactcacggccgggacactcagggcaggtgccctacgagacgctgaacaaacgctttcgcgccgctcagaagaacattgaccggga

SEQ ID NO: 237244 - DNA, 100 bp, Homo sapiens
ctcgcgcagcgctccatgcccgtgtggtgctgccgctgctccctggccggtcatttcaggtgaccattgtgaggtagatattttgttctaattttccaga

SEQ ID NO: 237245 - DNA, 99 bp, Homo sapiens
cagtccgacaaagcggctctccagcaagaaggtggcaaggtgagcaagaggatgctggcggggggcgtgaggagcatgcccagccccctcctggcctgc

SEQ ID NO: 237246 - DNA, 90 bp, Homo sapiens
tacgcagctggcagatattatcatagttgctgcagatgccatggacaatattaccaggcagaaccaattctacgatacccaagtcatcaa

SEQ ID NO: 237247 - DNA, 82 bp, Homo sapiens
tagacgctggatttttttcgggtagtggaaaaccagcgtttagtgggctacagatggcatggcatctaaaaccttacaatgc

SEQ ID NO: 237248 - DNA, 88 bp, Homo sapiens
gcgttcctgttacctctcatcattgtgttaatggtgaagcacagcgattcccgtacagagaactacaacttagtacagaaagcaaagt

SEQ ID NO: 237249 - DNA, 76 bp, Homo sapiens
tgttatcgcccagttctaccacagccctgcggacaacaagcgggaaatgggtcctgatgaatatgaagagatggaa

SEQ ID NO: 237250 - DNA, 90 bp, Homo sapiens
tcatgatacagttgataaaattgttggataaccctattggcaactgggatggaagatttgatggagtgcagctttgtagttttgcgtgtg

SEQ ID NO: 237251 - DNA, 98 bp, Homo sapiens
tgaagaaagtgaggaagggaaagcagcaatttcacaactcagggtaccagctggaggatgagtctgcgcatttggatgaaatgccactaatgatgtct

SEQ ID NO: 237252 - DNA, 100 bp, Homo sapiens
acttctttcctagcctgagtgttgagcagtgtcatgccttggcgtttcagctcctcgttgtctagcttcttacagtacatttctagtgaagtaaaccccc

SEQ ID NO: 237253 - DNA, 80 bp, Homo sapiens
cagagcctcgcctttgccgatccgccgcccgtccacacccgccgccagatctctgttgaggagctggcgcggaatctggt

SEQ ID NO: 237254 - DNA, 75 bp, Homo sapiens
catgaaggctagtttggatgtggaggggaatagactccatctatccatatgagaggaaccgctgctgctggccga

SEQ ID NO: 237255 - DNA, 83 bp, Homo sapiens
cactctgcggagttagcagtcacgacctccagcacagaggctgataaaataccagtaatgcgtggacagtggtttattgacgg

SEQ ID NO: 237256 - DNA, 98 bp, Homo sapiens
ccatcaacattccagacaccatggcccacctcatcagccctctgccctcccccacgggaaccatcagattcacattgacattccaaggacgaatcctc

SEQ ID NO: 237257 - DNA, 100 bp, Homo sapiens
cagggctgaggaaccatgtctccatccccgaccgccctcttctgtcttggacacatgacggaagtgtgtatttttgggccactccacggcaggtccctag

SEQ ID NO: 237258 - DNA, 100 bp, Homo sapiens
gctttctggaagaaaggaaatgttaggatcactttattctgcaagtttatttctgatcgtgaaagtagaagaagtctcacaaacagccatttggaaaaaa

SEQ ID NO: 237259 - DNA, 80 bp, Homo sapiens
cttccgatctttcatattcagagtcagggtcaaagtggagacctacaacctaatagatcagttaaagcccggaggaagat

SEQ ID NO: 237260 - DNA, 87 bp, Homo sapiens
aatgagcagctttggataatgacgacagcaacccgaagacagggaaatttagaacactggaactattttggggctgatgagaatctt

SEQ ID NO: 237261 - DNA, 75 bp, Homo sapiens
ctttatcctggtcatcttctatttccaaaaccatggtgaatccgggcagcagctcgcagccgcccccggtgacgg

SEQ ID NO: 237262 - DNA, 100 bp, Homo sapiens
ttaaaaaaggacacaagtgcgaatgttaaatcagctggagaaggagaagtggagaagaaatcagtcagccgcaggcgcagatcaggcctctataaccgcc

SEQ ID NO: 237263 - DNA, 100 bp, Homo sapiens
gtaccttattgaaacattaaatgacagttcacataagaagttcttcgatgtatctaaacttggcaccaagtatggactttccatgcgtagaaagccaccc

SEQ ID NO: 237264 - DNA, 98 bp, Homo sapiens
cgaactccgcgacccgagcgcaagaaccaggaagacagcgcttccagcaacccgtttgcactccccaactctgtcactccccccttaccgacgtttgc

SEQ ID NO: 237265 - DNA, 100 bp, Homo sapiens
tgccaaaagaaatgtcttagatagtagttctgacttcccttcaagggatcatagacggtatttctatgtaaacgaacagtcgggcgagtctcagtgggag

SEQ ID NO: 237266 - DNA, 51 bp, Homo sapiens
tgggccggcgccctggggccccggagagttcctggccattttctatccaag

SEQ ID NO: 237267 - DNA, 75 bp, Homo sapiens
gcttctcaaagtgctaggactacaggtggagccgccaccaaaatgcagattttcgtgaaaacccttacggggaag

SEQ ID NO: 237268 - DNA, 100 bp, Homo sapiens
cggtgtcagctgcactatttccggaaccggcgcccgggagcttccattcaggagacctgcatctgcttcaacggaccacaccaaaatgccatctcaaatg

SEQ ID NO: 237269 - DNA, 87 bp, Homo sapiens
gctattccttcctgtccctttaccgtctcacgcaggataagaagtacctctaccgagcttgcaagaccatatactccttgacgacag

SEQ ID NO: 237270 - DNA, 73 bp, Homo sapiens
tatgatacattttctgcttttggtaacatcctttcatgtaaggtggttgtgtcaaaccgattggtgacatctc

SEQ ID NO: 237271 - DNA, 100 bp, Homo sapiens
ctcgactcggcaccgctgtgcaccatggcccgggccctgtgccgcctcccgcggcgcggcctctggctgctcctgggtgtcatggagaaactccagctgg

SEQ ID NO: 237272 - DNA, 75 bp, Homo sapiens
aagcctttcgcggagaaaaggctgacatgcccgtcctatatgacagagcacagcaatggaggaaacagctatatg

SEQ ID NO: 237273 - DNA, 100 bp, Homo sapiens
cgtcaacaacgagtacctcaaccctgagctgcgtgagaacccgcccatgaagccagatttctcccaggttccagcgccagaacaagttgaaaaaggtggt

SEQ ID NO: 237274 - DNA, 117 bp, Homo sapiens
gcgatgttaccattgtgaaagaaggttgggttcagaagagggagaaagagatgacttgatgtctgcactagtttccgtaaggagcagcttggcagatacgcagcaaagagaagcaag

SEQ ID NO: 237275 - DNA, 98 bp, Homo sapiens
tttaaggttctccggaagaaacggcgtttagagcaacagatcgtggatctgaaagtgacaagcattttagaaaggtggaatgcaagctttaggacttc

SEQ ID NO: 237276 - DNA, 100 bp, Homo sapiens
cttctgttgggacaggccttgcatcctgtgctgccaactccatcaatcaggaatctgaacctgtgatgttaagaaatcagtaaatattaaaaagaagatg

SEQ ID NO: 237277 - DNA, 75 bp, Homo sapiens
aggatctcgggctcggaacgagactgcacgcggaaggagagttttacatggaagtggcttacagaaacttggcgc

SEQ ID NO: 237278 - DNA, 90 bp, Homo sapiens
cagctacctgcacttctagattggattaccgtttattccatatctggataatttgccgaacttcaatagatcagttgatggaccaatcag

SEQ ID NO: 237279 - DNA, 83 bp, Homo sapiens
gtggcgcctccctgcgactcctggaccaccgggcgctggtctgctcccagccgagacacctatggctgccgatgaaggctcag

SEQ ID NO: 237280 - DNA, 100 bp, Homo sapiens
tggctccggagaatgaaggaaggctggtgcacatcattggcgccttacggacatccaagatcgcagtggaggtgaccaagtccttcattgagtacatcaa

SEQ ID NO: 237281 - DNA, 100 bp, Homo sapiens
ctgtggaaaggatgtggacatcgacagttaccccgacgaagaactgccatgctctgccaggaactgtaaaaagcgggctacattgagagacctcagctga

SEQ ID NO: 237282 - DNA, 74 bp, Homo sapiens
gcagaaccttagcaaagaggagctgatagcggagctgcagaacccagtgacttgattgtaaaaatttacagagc

SEQ ID NO: 237283 - DNA, 97 bp, Homo sapiens
tgcctgtgcgccctcaacctgctttacaccaagcgaatgtctgtgacggagggtggcatcaaatacccagagacgactgagggaggccgccccaagc

SEQ ID NO: 237284 - DNA, 50 bp, Homo sapiens
cttccgccgtcttgatgccaggttattttggagctgttggagcactcctt

SEQ ID NO: 237285 - DNA, 100 bp, Homo sapiens
gccatggcggcgactactgccaaccccgaaatggtggagtcaatgaagaaagtagcagggatggatgtggagctgacagttgaagaaagaaacctcctat

SEQ ID NO: 237286 - DNA, 100 bp, Homo sapiens
cagtgatacaacattggaacttagtgttatgccaaaagatgaagacattctccaagtgattatctttctcaaggaatagatctttctggaatagaagtga

SEQ ID NO: 237287 - DNA, 100 bp, Homo sapiens
cgacatggacaaagccatcaaggtcacagtcaaagtgcctcagaagaactcataagaatcatgcaagcttcctccctcagccattgatggaaagttcagc

SEQ ID NO: 237288 - DNA, 100 bp, Homo sapiens
ccgctcctaaggcaggaagatggtggccgcaaagaagacggaattcctgcccctagaggagtgttactttatggtcctccaggtactggaaaaacaatga

SEQ ID NO: 237289 - DNA, 83 bp, Homo sapiens
gggaagaggcccaccctggagtaaccctcactggagaatccagaggaaatggtgttcacactggccctgaatcaagggaacac

SEQ ID NO: 237290 - DNA, 106 bp, Homo sapiens
gaagaagctggctcccatcacctacccgcagggcctggcactggccaaggagattggtgagaagccctaccactgcaactgggacggctgcggctggaagtttgcg

SEQ ID NO: 237291 - DNA, 50 bp, Homo sapiens
tccgccggcaccggcgacctgtctgtgttcctgatgacgtgcaaaccccc

SEQ ID NO: 237292 - DNA, 113 bp, Homo sapiens
gccgcgccttggagtccggagtaacttggccaggctggccccgagcggaactggagaaagctgagggtgctcctgacctctgataaagctgcagccaatttctcagatcgttc

SEQ ID NO: 237293 - DNA, 75 bp, Homo sapiens
ctgaaaaggatgctttagaaaaacacgatcagctcttagacagtttcttaaacaattaggtctacatcctaactg

SEQ ID NO: 237294 - DNA, 100 bp, Homo sapiens
cacatcgatctgggtatcaaatatgacccaagcattggtatctacggcctggacttctatgtggtatcttatggtgagatggtgggatgtgataaccaag

SEQ ID NO: 237295 - DNA, 75 bp, Homo sapiens
gggacccttgcatggtgtttcaaagggtggtgaagaactaagctggacccgcaggccctgcaggacagagactgg

SEQ ID NO: 237296 - DNA, 83 bp, Homo sapiens
ggacatcaggacaccgggagtgggagagattggactgggagactcagcaggaactgtggctgcaccatctgtcttcatcttcc

SEQ ID NO: 237297 - DNA, 51 bp, Homo sapiens
gctggaggaatgcatcacatctgcatcgagctatgtatgccgaaagggctg

SEQ ID NO: 237298 - DNA, 82 bp, Homo sapiens
gggggttctggagagcggggtgtggggagccttcacgtaaatgggtccagtcatgcctcccagtaagaagccagaaagctca

SEQ ID NO: 237299 - DNA, 75 bp, Homo sapiens
gtacggccagatgtacatcaaggcctccggcagctatgcagacaatgcagatcttcgtgaagactctgactggta

SEQ ID NO: 237300 - DNA, 100 bp, Homo sapiens
acatctgggggccacaaatgctccttctcctggagacgcaactcaagggaaggacatggagcccaacggcccgtcgctgcccagggatgaagggcccccg

SEQ ID NO: 237301 - DNA, 75 bp, Homo sapiens
tcgtttggaggcactggactacttacaaaaatggtatcattgcccagtgcctaagatcttttatgttcagctcac

SEQ ID NO: 237302 - DNA, 100 bp, Homo sapiens
ctacttcatgacatcatccataccaaggagacgctgacacttgtgtttgaatatgtgaaagctgatgtcctgaccactggagctggtaacccagtaggag

SEQ ID NO: 237303 - DNA, 100 bp, Homo sapiens
agtgtggtgcagacacccacttcggctgatggatcccagctggctactgctttgtagaatttgcagatttggccacagctgagaagtgtttgcataaaat

SEQ ID NO: 237304 - DNA, 87 bp, Homo sapiens
cacagccgtcaccctcaactttcccttcaggaattttatcattggaacatctgatgccgcggtgtaccacttaacaacagatgggac

SEQ ID NO: 237305 - DNA, 100 bp, Homo sapiens
gtggaaacaacaattatgaaacaacctggcccatgagatgatagctgtggaagtgaaactggaacgccaagctgaagaagaacgaatacggaagcacaaa

SEQ ID NO: 237306 - DNA, 142 bp, Homo sapiens
atgaaggaggatggaagggcaggacgaggtgtcggcgcgggagcagcacttccacagccaagtgcgggagtccacgggaagaatatttctcagccctccgttctcaagacagatgagtgctttagaaagaggactctgcagc

SEQ ID NO: 237307 - DNA, 83 bp, Homo sapiens
ggggacgacgcgtgcttcgtggcccggcaccgttccgcggacgtgctcgatttttggaagtaccagcacagtgacgcttcctg

SEQ ID NO: 237308 - DNA, 100 bp, Homo sapiens
agaacggatcaagtgcttattacaggtaaaataccatgaagattttgaaaaaacaaaggggagaggctttactcccgtcgtggacgatcctgtgacagag

SEQ ID NO: 237309 - DNA, 100 bp, Homo sapiens
ttagtggaggactacagagccggtgatatgatctgtcctgaatgtggcttggttgtaggtaacaaatatgttcctcgggccatcctcgtggatctggagc

SEQ ID NO: 237310 - DNA, 50 bp, Homo sapiens
gccaactttgaatttcttctatcaacagctggagtttatccagaaatttt

SEQ ID NO: 237311 - DNA, 90 bp, Homo sapiens
gtcataatccacatgctaactcgatatgctcggacacagtttgtcagcccttggaaagagaaaaggcgacggcggattgacagaagtatg

SEQ ID NO: 237312 - DNA, 83 bp, Homo sapiens
gtagagtatttcaaccataaagacatcttaattgggcacgaaagaggaggactggaatgaaattgaccccattaaaaagaaag

SEQ ID NO: 237313 - DNA, 97 bp, Homo sapiens
tctgccttgctgcccccaggtgggccgccaccccctgacctgcctgggtccaaaggctccaggaggccagagctctactgaagcggcggcggccccg

SEQ ID NO: 237314 - DNA, 83 bp, Homo sapiens
gtgaaggcgaacgcggtctgcaagctgacgtatggtgctttcttctgcgacctggtactcatctacctcatcaaaaagagaga

SEQ ID NO: 237315 - DNA, 128 bp, Homo sapiens
caccggtgagtcgccggcgctgcagagggaggcggcactggtctcgacgtggggcggccagcgatgaagccgcctcctgacaaggtgatccgggcgggccccgcaggaattttatcccctcaccggcc

SEQ ID NO: 237316 - DNA, 75 bp, Homo sapiens
aaattgtatctgtttttctcagaagagaattccacaagtaccttggccatgtagaagttgatgaatcaagaggaa

SEQ ID NO: 237317 - DNA, 154 bp, Homo sapiens
gagtttattaaccacttaacctctcagaactgaacaaagacaacattgttcctggaacgccctctttttaaaaaagtttgacacgaatggagatggggagatcaccctggtggagctacagcaggccatgcagagactcctgggggagcggctc

SEQ ID NO: 237318 - DNA, 83 bp, Homo sapiens
cagccacaaggggtcttcctgtggccctcaaacaaaaaatcactgcattacatcagcaggcctaccccttgctcaggttcaag

SEQ ID NO: 237319 - DNA, 98 bp, Homo sapiens
caccatcttcctcttgctgccagtggtagcgctcgtctggcggagctgggttagcatggcctcattgaaagaactagatcaaagactctttgaaaatt

SEQ ID NO: 237320 - DNA, 90 bp, Homo sapiens
cttaaagatgagatgaacaaagagattgaggcgttaattggccttggtcctcacagctccaaaaagaaacaggatctcgataagctctat

SEQ ID NO: 237321 - DNA, 75 bp, Homo sapiens
tctacttcttccgggctgagagcaagtacacatttgaaagttttctggatatgccgcagaaggatccgtgccaga

SEQ ID NO: 237322 - DNA, 98 bp, Homo sapiens
tgtggcctagatcctacatctacacttggcatctattttgaagttgtcaatcaggaccgtataatagacgctggccccaaaggaaactactctcgatt

SEQ ID NO: 237323 - DNA, 75 bp, Homo sapiens
agaggatatcttgggcgggggatgtgagcgctgagcccttggcaggtaggtgagctcgtgaaacaatatgaagag

SEQ ID NO: 237324 - DNA, 83 bp, Homo sapiens
gggaaaaccagctgaggtgtccgtaaagattccagagaagcctgtgaacaaacaccggcatggaccaagcaacttctctgagc

SEQ ID NO: 237325 - DNA, 99 bp, Homo sapiens
ccagacacaagtcttcactccttcctgcgagccctgaggaagccttcaacccaaggagatctgtgcgctggttgggttctgtgatgaggtgaaagagat

SEQ ID NO: 237326 - DNA, 74 bp, Homo sapiens
catcatccagtggcagacactgaaaataaggcttttttccagacttcaagctcccattccaacagtaagagctt

SEQ ID NO: 237327 - DNA, 82 bp, Homo sapiens
ggaggttttaaacagtataacagctcgagcagcacctaaaatagccaatggtaaagcagccagtagcagcagtagcagcagc

SEQ ID NO: 237328 - DNA, 75 bp, Homo sapiens
aaaagagacctcacccgctttgtgaaatggccccgctatatcagattgcagccaaaattggaggcgatgctgcca

SEQ ID NO: 237329 - DNA, 82 bp, Homo sapiens
aacctgctcaccggggagtctgatacacagatcgaacaccagggggacaagctggagatggcgagagagaaacatcaggctt

SEQ ID NO: 237330 - DNA, 83 bp, Homo sapiens
gggtctgctctgtgtgccatggacggcgtccgtctccaagagagtatgaagagagtgcgtctgtagggcagggaagatggcgg

SEQ ID NO: 237331 - DNA, 75 bp, Homo sapiens
aggtcgcgggagtcgtagggaggacgccgggacacctggaagccgagaaatgtgcatgcaagatatgggaaatac

SEQ ID NO: 237332 - DNA, 134 bp, Homo sapiens
ggaagcaggtggaattatgccctgttggttccaatgctgggattggctgcttttcactacatgaggaaataattgacttttataacttcatgtccccttgtcctgaagaagcagctatgagaagagaggtggtg

SEQ ID NO: 237333 - DNA, 74 bp, Homo sapiens
agcacctttcggcttctgagacggcggcagcagcggcattcagacttcaggcccgcatagctcataggatacaa

SEQ ID NO: 237334 - DNA, 100 bp, Homo sapiens
cagcagcctccgccgccgccaccgccgcctccgccgctgcctcaggagcggaacaacgtcggcgagcgggatttagctttggagtcaaacccttctgacc

SEQ ID NO: 237335 - DNA, 85 bp, Homo sapiens
actgcaaaccgagctcccgtctgccttgcagttgacttttgtgccctggtaattctgtatcctgtttaccgtttacctacttccc

SEQ ID NO: 237336 - DNA, 75 bp, Homo sapiens
tgaaaggaccccttatatcatgaaaaccactaagcacttcaatgacgtcctcagccctcgctctcgctggcggag

SEQ ID NO: 237337 - DNA, 100 bp, Homo sapiens
cagcttctggtttctaagtccatgtgccaaaggctgccaggaaggagctgcagtacatcagagagtttgtcaccagttaagcaggctcctcggaagtccc

SEQ ID NO: 237338 - DNA, 76 bp, Homo sapiens
gcagtctttgcacatcattcgtggggaccctgcagtacctgaacaagaaactcctttacgagaagatgaagggagg

SEQ ID NO: 237339 - DNA, 100 bp, Homo sapiens
aactcaaattgccaccaaaagcttccctacttccaggacctccagaagcatctgaagaattttatgtcaagaaagtagtgaagactgtgacaacacggac

SEQ ID NO: 237340 - DNA, 97 bp, Homo sapiens
ctgagatttccttcgtccctgacatcatctctgtgcactgataataaccctgcagagacagaagagatgggtgatgaagaagttttctcctggttga

SEQ ID NO: 237341 - DNA, 100 bp, Homo sapiens
gaccccctattgagagagattgctcctggccccctcaccacaccctctgtcccagatgatggtgtgagcatccccggggagtacacttcctttctggctc

SEQ ID NO: 237342 - DNA, 100 bp, Homo sapiens
aactggacttacagttttccgaagatgagaagaggttgttgttggagaagcaggctggcggaaacccttggtgacatcccggaaccgagataatgacccc

SEQ ID NO: 237343 - DNA, 50 bp, Homo sapiens
tgtcctgaatgtggcttggttgtagggagtctgaagatacagtattgctc

SEQ ID NO: 237344 - DNA, 101 bp, Homo sapiens
cggccgaccagggacctgcccgcctgcggctgctccgggatcagattttattaagacctctactggaaaagaaacagtaaatgccaccttcccggtagcta

SEQ ID NO: 237345 - DNA, 99 bp, Homo sapiens
atgctggctgttatgtacgcaggaggcgaaaattttgaccagagtcctttgagaagaacattcaaatccaaagttctcgcccactatcctcagaatata

SEQ ID NO: 237346 - DNA, 82 bp, Homo sapiens
ggggacaccagtagccgcggacctcggagcaggaactcaaagcagccgctgatggcgtactatctgaagtgaggaaaaaaca

SEQ ID NO: 237347 - DNA, 71 bp, Homo sapiens
acttccctttggatgtagcaaggaagaaattgttcagttcttctcagatcaccggggaacccttgatccgt

SEQ ID NO: 237348 - DNA, 75 bp, Homo sapiens
cttccaggttgttatctgcaggtgtggcaggttgcagaggacagtgggtccgcaagcaggtggtgaacatcccgt

SEQ ID NO: 237349 - DNA, 138 bp, Homo sapiens
cgcccgagcgctcgagaaagtcctctcgggagaagcagcgcctgttcccggggcagatccaggttcaggtgacagagctgaatgaacctctctccaatgaagatcgaaatctcctctctgtggcctacaagaatgtgg

SEQ ID NO: 237350 - DNA, 75 bp, Homo sapiens
ggaggcgtcgcgggagcctttggggcaccacagagatgcgggcgcaacgtgctgagcttgtcccctggaatcgac

SEQ ID NO: 237351 - DNA, 96 bp, Homo sapiens
agaagcaacacattgtcttctccaaagtaacctgatccactacctgggactgagccatcacctgctggcactgaattttatcattgtttcttttgg

SEQ ID NO: 237352 - DNA, 82 bp, Homo sapiens
tgtatgattaggccacaatcttcaatgagtaaacatattcctttacagaatgtctgaaggggacagtgtgggagaatccgtc

SEQ ID NO: 237353 - DNA, 74 bp, Homo sapiens
attaatgaaaagtgccataaactgaaaaaccaaacatgagggtagcaggacatcaatgcaagcttgaataagaa

SEQ ID NO: 237354 - DNA, 100 bp, Homo sapiens
cagagctggtggggagacagcatgccactggaggagtatttgaagacttctgagcggaggagtcgcatgtcagagctgtccttcagaaagataaatcagg

SEQ ID NO: 237355 - DNA, 75 bp, Homo sapiens
gtcatcatcccgccttttgaggacggcactccccggaggtgtgctgggcatcaaggtgaagatcatgctgccctg

SEQ ID NO: 237356 - DNA, 75 bp, Homo sapiens
acaatgtcaagaaagaaaactcctccttgtacctagtaacaaatgtggcaattattttggatctatcacctgtca

SEQ ID NO: 237357 - DNA, 83 bp, Homo sapiens
gtgaaactgctttctaaaacaccagaactcaacctggaggaccagtatgatcatttggatgctgctgacatgacaaaggtaga

SEQ ID NO: 237358 - DNA, 90 bp, Homo sapiens
aaatcaatggccggacgaaagaagctattgaatccttcaaagaagctttgaagcagaaagttgactttattgatgcatataaaagtctag

SEQ ID NO: 237359 - DNA, 99 bp, Homo sapiens
caccaccgtaaacactcgcgtcccatcgtcaccgtgtgggagcgggagctgcggaaagctttgggccagattatgttgtatgtggatggaatgaatgga

SEQ ID NO: 237360 - DNA, 76 bp, Homo sapiens
tcgtcatcttcctgtcagtctgcagctactcaggctagacagcaacaagcagaattggcccaacaggaatggcttc

SEQ ID NO: 237361 - DNA, 100 bp, Homo sapiens
agttttcgaactagagggggctttgggatcaccagtcggagcccttcgtgttacaggcgccatgtcagaaccggctggggatgtccgtcagaacccatgc

SEQ ID NO: 237362 - DNA, 100 bp, Homo sapiens
tccatgtactttgtccaatgctgaaaattcaattagcagagcctcacagacaatggccaaatgtgtcaaagctgtcacagagggtgcccaggcagtagag

SEQ ID NO: 237363 - DNA, 101 bp, Homo sapiens
caaaaaggagaagaaatctctagactcagatgagagtgaggatgaagaagatgactaccagtgtgagaccatgttggaggagtttgaagacattgtgggag

SEQ ID NO: 237364 - DNA, 83 bp, Homo sapiens
acgagtcgttcctgggcaagctgggcggcaccctggccaggaagcggagggcgcgcgagggaacaagatcactcaaggtgaag

SEQ ID NO: 237365 - DNA, 76 bp, Homo sapiens
aaaggggaaaatgtctcagtcgaaaggtcataacattcacatctgatatttcttccaaatacagactgttgttggc

SEQ ID NO: 237366 - DNA, 75 bp, Homo sapiens
gttgaccctgggtctgatctggaccattattttgcatttccagcaaaaaagggagacgctgtccccgctgtgcct

SEQ ID NO: 237367 - DNA, 97 bp, Homo sapiens
cttgcaaatactacattttcaatctatgttaggttgaaaataatctgcatccaagcctgtgttgttcaaggggatcagtgtcatttagggatgtgac

SEQ ID NO: 237368 - DNA, 90 bp, Homo sapiens
ggctttctcttcctctgggtcacaggcagccaccttttgtggtgacattggatgaggtagagctgatccactttgagcgggtccagtttc

SEQ ID NO: 237369 - DNA, 75 bp, Homo sapiens
aaggggtaaggcgtgagcccccaagatttcacggaggaaacaccaattggaagcctccgctcaactgtaagattt

SEQ ID NO: 237370 - DNA, 90 bp, Homo sapiens
ggcttctgctcaccaacagatgaagacagatgcaccaacgagatttgataatgggctgcattaaaagtaaagaaaacaaaagtccagcca

SEQ ID NO: 237371 - DNA, 50 bp, Homo sapiens
ctttgctgtctttcctcgcggagacaggttatcctacgcggagagccagg

SEQ ID NO: 237372 - DNA, 83 bp, Homo sapiens
acgggggagtcgggggagtcgtaaacaaccctgaagagaacagccaggcctgatgttcccgctgcctgtcaccaacgggaagg

SEQ ID NO: 237373 - DNA, 75 bp, Homo sapiens
cgcccacagacctcaaattcaaaggtatatgccctcattttgcttaagacctctggccagagcagggcatggaag

SEQ ID NO: 237374 - DNA, 100 bp, Homo sapiens
gccctttcctcatcatcaaggatcaggaccgcaagtcccgtcttatgggacttgaggccctcaagggttttggccaaattgggcgagggcacaaaataac

SEQ ID NO: 237375 - DNA, 75 bp, Homo sapiens
agtacctgcagaaggtctctggagacatcttcagcagacacgatgaggcgagtggtacgacagagcaagtttcgg

SEQ ID NO: 237376 - DNA, 98 bp, Homo sapiens
cagccccggtcacagagtgcaccgtatcctgtcacttctggatgtgagtttacggagaactgtggaagacaggaatgtttgaacgcatgtctctgcag

SEQ ID NO: 237377 - DNA, 96 bp, Homo sapiens
gccgtgagcaccctggaggagggccacgcccagtacctgacctccttggcaggtctgcgcgtctgttgttcccagcgctctgcgaagcctgaaaag

SEQ ID NO: 237378 - DNA, 74 bp, Homo sapiens
attcctcgtcagcaacatgctcctagcagaagcctatggatctggagctcagtttgcaggggaagacccagtgg

SEQ ID NO: 237379 - DNA, 100 bp, Homo sapiens
caggaacaggcggccaaagctgtcctagctgactgggtgagcgtcagcctcgagtttgaccagcagcaggggtcggtgtgtccctctgaatctgagatct

SEQ ID NO: 237380 - DNA, 51 bp, Homo sapiens
ggaatttgtggctggctggatctctgccatccctccattcattatgaacac

SEQ ID NO: 237381 - DNA, 75 bp, Homo sapiens
tgtccatcttgtgtccacccaagcccagggctgtgaacgtggctttcctcgtggaatggatatgaaagcatacct

SEQ ID NO: 237382 - DNA, 75 bp, Homo sapiens
gccttgttagggcgtggcctgaggcttggataagtgggggccgttgctccagggagaactgcaaatatcttcatc

SEQ ID NO: 237383 - DNA, 88 bp, Homo sapiens
cccggtgtggccacgagtcggatggagaggagaaaacctatggtggctgtgaaggacctgatgccatgtatgtcaaattgatatcatc

SEQ ID NO: 237384 - DNA, 75 bp, Homo sapiens
tggagagcctctctacaatgctgtggatgatgaacaacatgggtggtgatgaggatgtagatttaccagaagtag

SEQ ID NO: 237385 - DNA, 96 bp, Homo sapiens
ccgcgtcaccactgtgaggcctacagctctgccggggaggaggaggaggaggaagaggaggagaagattattcagagctgggagagcttcccccac

SEQ ID NO: 237386 - DNA, 75 bp, Homo sapiens
tggtgccatttcagtaccaagcctttctgctccaggtcaaggtgacaacatccgggaattcttgctgagcctcag

SEQ ID NO: 237387 - DNA, 75 bp, Homo sapiens
ggagcatatttgtttctctctgcctgatttctcctgaatttggaaactatttacggagtctcgctgtcgccaggc

SEQ ID NO: 237388 - DNA, 97 bp, Homo sapiens
cggctctgcgctggccgggggcgcgggcggcggcgccggcaggaaggtgcatggaggactgcaacagaggagtgggggactgaagattggaatgaag

SEQ ID NO: 237389 - DNA, 75 bp, Homo sapiens
ggacaatcgcactttataccacctgcgattactggggaacacacctgaaactagaggaacagcttatgtggtcta

SEQ ID NO: 237390 - DNA, 142 bp, Homo sapiens
tgagcatctgccagcactcaagaaggacacaatatttctatagttggctactaaatgtgctcttagatatggatcagaaactttcgaagttggtagaagagctcacaacttcaggagaaccccgactaaatcctgagaaaat

SEQ ID NO: 237391 - DNA, 75 bp, Homo sapiens
ggaggttttcaggaccaaaattgtggaaaagtcactctgggatttgtcttggctgttactatgacacgggaagca

SEQ ID NO: 237392 - DNA, 95 bp, Homo sapiens
gactaataatgtaaaagacgtcactaaattgaccaagatcactccatggatgaaatgacagctgtggtgaaaattgaaaaaggagttggtggcaa

SEQ ID NO: 237393 - DNA, 50 bp, Homo sapiens
agaaaaccaaatttctctgtgatccgagataatcttgtgccgtggaaatc

SEQ ID NO: 237394 - DNA, 82 bp, Homo sapiens
tctagttcacttgaaggcttccataaccactttgaaatatttgatgatgcgtcacctggaaagcaaaaggaaatccaagaac

SEQ ID NO: 237395 - DNA, 82 bp, Homo sapiens
aaaagaattaggaaggtccttcaggacaaaactttcggtttgaagaataagaaaggagcaaagcaacagaagtttatcaagg

SEQ ID NO: 237396 - DNA, 90 bp, Homo sapiens
gctgctggtggcggtggccgcgctgctactgggcgccgcgggccacctgtaccccggagagggctctgtgtgctccgggatggagcaggt

SEQ ID NO: 237397 - DNA, 82 bp, Homo sapiens
ataagaagagaagatggacagtttcagtgcattacaggatggatgcaaccttgaaagaactgacaagcttagtaaaagaagt

SEQ ID NO: 237398 - DNA, 90 bp, Homo sapiens
gcaccatgccgtcggagaagaccttcaagcagcgccgcaccttcgggcttgatggcctctcagagcgctgtgctcagtacaagaaagatg

SEQ ID NO: 237399 - DNA, 74 bp, Homo sapiens
ttaaggataggacccagcagagtaaacctcagcccccgcagccaagcacaggcaacagcattattgagaaaagc

SEQ ID NO: 237400 - DNA, 100 bp, Homo sapiens
ccactccaggaccaaaagaggaagatagtcttgggacccttgcatggtgtttcaaagggtggtgaagaactaaggtagttgtcctgggaacccctgcaga

SEQ ID NO: 237401 - DNA, 75 bp, Homo sapiens
agtggcaatgagaccagtggaagcagcaccatcggggagacaagcaagctttcatctgagtggcacagtaactga

SEQ ID NO: 237402 - DNA, 100 bp, Homo sapiens
aacgagcaccaaggcattggctttttaaatgaccccaggcgtctgaacgtggccctgaccagagcaagacgatgttaatatttcaagttttcgaggccat

SEQ ID NO: 237403 - DNA, 74 bp, Homo sapiens
actcaagcctgaacagaaggatcagtggagccaacattgtttctgccacccacttagcagacaaggtagaggag

SEQ ID NO: 237404 - DNA, 108 bp, Homo sapiens
gggccatccaggccttccgaagggtcccctgctctgcagactgccaccctgggccgtaacccactccgcttcatcctgcactctgggcgtgtggcccacctgtgtccc

SEQ ID NO: 237405 - DNA, 75 bp, Homo sapiens
ctgtactaggactgggaacggcaggggaaatgctgtctgtagctgagcacttcctggagcagcagatgcacccaa

SEQ ID NO: 237406 - DNA, 100 bp, Homo sapiens
gatgagacatttgctacagcatcccacattaagtcaacgagatttaccgcattgtttctcagaagcaaatgtcagacagacgcgaaaatgacatgtctcc

SEQ ID NO: 237407 - DNA, 90 bp, Homo sapiens
gaagatggtgccgggggtcgctggctctgctgctgccgccggcgaaggaggaggcgttgccggaaaaattgtatggcgacttcttgagct

SEQ ID NO: 237408 - DNA, 74 bp, Homo sapiens
tccgcggcagggtcccgcatggcggcgcacaggaagcacggctaaggcagctggataagcacagccaggccaca

SEQ ID NO: 237409 - DNA, 49 bp, Homo sapiens
ttactccctagcagtgtggtaaggtagagtctgggtatgtctgtgaagg

SEQ ID NO: 237410 - DNA, 51 bp, Homo sapiens
ctcccaagtaactgggattacaggttatcaatactctggctgaccatcatc

SEQ ID NO: 237411 - DNA, 87 bp, Homo sapiens
cgccgcacatccccagccattttcctgagttccctgatccccacacctacatcaaaactccgcagttcctacagaggttgacagcta

SEQ ID NO: 237412 - DNA, 100 bp, Homo sapiens
cgcggagcggcgtcccctgcagccgcggaccgaggcagcggcggcacctgccggccgaggtaacatttgtcgatcacccattgcagaagcagttttcagg

SEQ ID NO: 237413 - DNA, 75 bp, Homo sapiens
tgatgttaatatagatataaaatttcctcccaaggtacgagtggctgctttacagaatctggtgaagataatgtc

SEQ ID NO: 237414 - DNA, 87 bp, Homo sapiens
aagggcaaaaaagacagggacatggatgaactgaagaaagaagtttctatggtgcttgtgaggttagaaggtggaattgggttgtcc

SEQ ID NO: 237415 - DNA, 97 bp, Homo sapiens
gaccccagagcggcgctggacaggtgtcatggagaaactccagctgggcccagagattctgcagcgggaaaatccaaggcttatttatgccaggctg

SEQ ID NO: 237416 - DNA, 60 bp, Homo sapiens
ccgacccgggctcccacctgctcctccagcgcaccagtggagatgccattgcctttgaaa

SEQ ID NO: 237417 - DNA, 100 bp, Homo sapiens
ggctaagaaagtggtgaatcccctgtttgagaaaaggcctaagaattttggcattggtcacgagaagagaatgccttctagatgcaaaatcacctccaaa

SEQ ID NO: 237418 - DNA, 74 bp, Homo sapiens
agcatccattgcaaaccttattaatctcagggaactggatgtcagcaagaatgtcgtgagatggagaataaaga

SEQ ID NO: 237419 - DNA, 50 bp, Homo sapiens
gcggagctgggggcgggcgcacccccagccactgaggcggctcccagctg

SEQ ID NO: 237420 - DNA, 75 bp, Homo sapiens
gttcatgtcacgctgggtaatgaggatttgactgtgaaggttttgcaaaaggcatcaaattaaatcaagttcaaa

SEQ ID NO: 237421 - DNA, 99 bp, Homo sapiens
aaatggagcaacttcgaccccaccggcctggagcgcgccgccaaggcggcgcgcgagctggagcactcgcctctggattaatcgaattacagctgctag

SEQ ID NO: 237422 - DNA, 98 bp, Homo sapiens
aaattcctcaatgattccattgtggaccctgtagattcggagagtgtcaatccatatctacaaggacagagactggataatgttgttgcaaagaagtc

SEQ ID NO: 237423 - DNA, 75 bp, Homo sapiens
cggggccgctggattctgaggaccagcagatggccagtcacgagaacccagctctacgaactcgacggggacccc

SEQ ID NO: 237424 - DNA, 75 bp, Homo sapiens
ggcgcagggaaggagggcgtccgagtcaacaaccgcttcgagctgcgctgataaagcagtttgtgtccgacgtgg

SEQ ID NO: 237425 - DNA, 90 bp, Homo sapiens
tgactggggtagctgaagctgttgtagctgaccaagttttcatgattgactccaagtgtgaatctggaaaaggacgctgctctttcaacc

SEQ ID NO: 237426 - DNA, 82 bp, Homo sapiens
ccttcggcagtccacccaccgccgccgcctcccagggctcccgggagccaggggagatgctacctcggaagctgaagcggat

SEQ ID NO: 237427 - DNA, 83 bp, Homo sapiens
ttcttgaaaacttaagtacccagaagacttgcactatctgccagatgctgcttcctaaccagtgcagttatgcatcacaccag

SEQ ID NO: 237428 - DNA, 101 bp, Homo sapiens
cctggaatatgaaggcttccccgtcccgaagacccttttgaggacttctttgggaatcgaaggggtccccgaggaagcagaagccgagggacggggtcgtt

SEQ ID NO: 237429 - DNA, 100 bp, Homo sapiens
atttactggaggattcagacagtgaagagcattccagatcagattctgtgacaggttttcctttggaatatggataaatacaccatgatacggaaactag

SEQ ID NO: 237430 - DNA, 100 bp, Homo sapiens
ccgacccccaggcagctcgccgctccctagcaccttctccagtcgacactctcgcgcccggagctcttcagtgggtcatctgtgtgtcacagcctcagaa

SEQ ID NO: 237431 - DNA, 82 bp, Homo sapiens
ccgctccccggcagctcgctctctcccctcagcgtgattttcaatgttgggactcaaaggtgaagacactgaaggacagaat

SEQ ID NO: 237432 - DNA, 98 bp, Homo sapiens
cttcagcgcattgctacctaccggctagccggtggagctcacgtttattcaacagccctctttggattccagtacgatgcatcagaccataccatggc

SEQ ID NO: 237433 - DNA, 75 bp, Homo sapiens
ttcagctcgccatggatcccaactgctcctgcgccgccgtgctgaagctgctgaaagatggcagaagaagtggtg

SEQ ID NO: 237434 - DNA, 101 bp, Homo sapiens
ggcacatgatctgctactgggatggctctgctcattatctgatgtacctggtgatggtggcagccatagcatgggagtgatggcttggacaacagtgtagc

SEQ ID NO: 237435 - DNA, 76 bp, Homo sapiens
gacagcaaaaatgacccaccaatggaagcagctggcttcactgctcaggtgaatatgaccatctcccagaacaggc

SEQ ID NO: 237436 - DNA, 71 bp, Homo sapiens
gcctgatcctggaagagactcggggccccccagcctccgccaacccagggcggcgactggcggcgcgatgg

SEQ ID NO: 237437 - DNA, 100 bp, Homo sapiens
cttagctgtgctcgcgctactctctctttctggcctggaggctatccagcaatccacattcatctcaatggaaggatcctgccttaagtcaacttatttg

SEQ ID NO: 237438 - DNA, 76 bp, Homo sapiens
cgaaggatccccaacggggaggccaacgtgaagaaaattcagcttagagaactatcaacacaggacaatgcaagcc

SEQ ID NO: 237439 - DNA, 90 bp, Homo sapiens
atttctcggactgcaattacaacagcttcaatccgtcgtcatagatggagaagagaaggcaggatggggaagcagaatagcaaactggcc

SEQ ID NO: 237440 - DNA, 138 bp, Homo sapiens
atcgaaagcgttggagaggtgttaccggaacggcggcgacaagggtgttcccgaactagagtggagtggcagaatttagtgacatttggaagcttttcaaacatggttccctgtagtcatccatatattggtaccctg

SEQ ID NO: 237441 - DNA, 73 bp, Homo sapiens
ctcattttctttccctgcaccaactagcaggccaagtcatcaaggcatgggacattggggtggctaccatgaa

SEQ ID NO: 237442 - DNA, 103 bp, Homo sapiens
tttgaattttttggcagcagaagggcgactgagtactcaacatattgactgtatttgggctgcagcacagtctttaacacctctgtgtgaagatgacaaccag

SEQ ID NO: 237443 - DNA, 103 bp, Homo sapiens
tattcaccatcaacaaagaagaccacacactgggaaacatcattaaatcggaaaaagacctcgatgaagttctgcagacccactcagtgtttgtaaatgtttc

SEQ ID NO: 237444 - DNA, 100 bp, Homo sapiens
tagaaaatatggatctttacatgttgaatccttgcagcactaaaatttgtgattacagtggcgagatcttgaacaactgctgcgtcatggagtaccacca

SEQ ID NO: 237445 - DNA, 75 bp, Homo sapiens
cttcgggagaggatatgtagcgaggaggaacgcgctaaggcaaagcacctgcttgatgacctcacacaagatctg

SEQ ID NO: 237446 - DNA, 100 bp, Homo sapiens
gtgtctgacatttcttttgtgcaagatgagcctcaagtgcttctgcattacagtctgctggagtttgctggaggtccactccagaccctgtttgcctggg

SEQ ID NO: 237447 - DNA, 101 bp, Homo sapiens
ggcactgctgctatgctgttagcctcttaccatggtttgggaccacagagatcacgtcaacaacagcctgttccaaatagtgatgctgtcttgaattgtcc

SEQ ID NO: 237448 - DNA, 75 bp, Homo sapiens
cagtggtcgcttcttctccttgcctacaacacagcagtcccctcaggatgagcaggaaaagctcttggatgaagc

SEQ ID NO: 237449 - DNA, 51 bp, Homo sapiens
cgatctccttcaccgagatggtgcaggtgcctcagaggacctcatctatcg

SEQ ID NO: 237450 - DNA, 83 bp, Homo sapiens
gtggatgcgcgtctggtcaagggcccggattgcatttctacaaggcgaaagaaaaggtcaagagaacctgaagaaggacttag

SEQ ID NO: 237451 - DNA, 90 bp, Homo sapiens
cggcgagccaaagaggagccggccgcgcgggccgggaggggacggccgccggagccgcgaggccaatcctcatcaccgggggcatcgtgg

SEQ ID NO: 237452 - DNA, 98 bp, Homo sapiens
agtggatgccctggggctgagaggagtcttctggtgcagtcttattttgaaaagtggccaacagtgttgcaaacaggaacccgaggttttcacttcac

SEQ ID NO: 237453 - DNA, 76 bp, Homo sapiens
acaccctcaacaaacaccagcgctttggagatcctgaaggagctagacgagtgctacgagcgcttcagtcgcgaga

SEQ ID NO: 237454 - DNA, 103 bp, Homo sapiens
cagcgggaccccagttcctccgccaagcgcggccgccgcccccgcctcagggagtaccctgacttctaccggaagctctacggcctcttggacccctctgtct

SEQ ID NO: 237455 - DNA, 100 bp, Homo sapiens
cgggggagggaaggggacagaagatggccaagaagagaaagccccccagcatcaagggtgtttaatcaggaaggagaattcatgttgaagtttggctcaa

SEQ ID NO: 237456 - DNA, 96 bp, Homo sapiens
ccccgtgctgcagcaggatgcgcacagctctgtcaccatcacaccccagagaagccccacaggacccgtggcacattcccggtgtgcctgagcccg

SEQ ID NO: 237457 - DNA, 74 bp, Homo sapiens
tcctgaccaccttgcaagagccacatgacaaggtgagcggagaattagagtacatacactttgtttgccagtgg

SEQ ID NO: 237458 - DNA, 99 bp, Homo sapiens
gataaaccttgttgttttacagaccttaaggtgtttgttgacctcttacctgctacacagtgtacaaaagagtcgatggatggagatgaaaaggaacta

SEQ ID NO: 237459 - DNA, 127 bp, Homo sapiens
ctgagtcgcagttaccaccaaacccaggaggagactctccctggaaaacttcccttccctttcgtacttcctcgcgtattgctaaaggaggagttgaccacaccaaaatgagtctacatggtgctag

SEQ ID NO: 237460 - DNA, 82 bp, Homo sapiens
aagaagaggtcccaatcccccactctttccgccctaatggaggtctccagtttcgactgcctctgtcaccgggtccctccac

SEQ ID NO: 237461 - DNA, 90 bp, Homo sapiens
cgggcctgactcacagtcctaaatatctgacagcgagatcgcttgtaggacggggaggtttactgcatcgacgcgcggttctacgggaac

SEQ ID NO: 237462 - DNA, 89 bp, Homo sapiens
aactgctgaatcagcgaggccttcgagatccaggggcagcacgctggctcttctcctgaacttcctcgcctgcctggccagcttctgtg

SEQ ID NO: 237463 - DNA, 100 bp, Homo sapiens
ttgtggcgaatggggctcacgtcgacatggccgaaacagaagccctgtcgaagcttcgggaagacttcaggatgcagaataaatccgtctttattttggg

SEQ ID NO: 237464 - DNA, 100 bp, Homo sapiens
gcagaatcaaagagctgctttgaatcagcagatcctgaaagccgtgcggatgaggaccggagcggaaaaccttctgaaatggagtttcgctcctgttgcc

SEQ ID NO: 237465 - DNA, 99 bp, Homo sapiens
cttgtcgcgagctgctgatacagaagagatggatattgaaatggacagtggagatgaagcctaagaatatgatcaggagatcgacaactgttaccaccg

SEQ ID NO: 237466 - DNA, 74 bp, Homo sapiens
aaaattctgaactcaggacttggcaattacagaatgtctgaaggggacagtgtgggagaatccgtccatgggaa

SEQ ID NO: 237467 - DNA, 90 bp, Homo sapiens
caagcatccgggtcggctcctggccggagcaagatggctgagggcgagcggcagccgccgccaggagagtcgcggttgctgatcgtggtg

SEQ ID NO: 237468 - DNA, 96 bp, Homo sapiens
gtgccacttacgaagccaaaatcaaggatgtggatgagaaagcagacatcgcactcatcaaaattgaccaccagccttcagaagataattattcgg

SEQ ID NO: 237469 - DNA, 87 bp, Homo sapiens
cgagctgcgaaagggcgggaaaggcagttggagaagagagctgtaggtaaaacttgcctactgatcagttacacaaccaatgcattt

SEQ ID NO: 237470 - DNA, 51 bp, Homo sapiens
aaacctgggatccacagaggaaagattcactttataggaacagcttcagct

SEQ ID NO: 237471 - DNA, 98 bp, Homo sapiens
cctcagcactctggaagacctgaacaccagatggaagcttctgcagaaagaaatactcgacgcttttgacaaaatgtgctcgaagctgccgaagtccc

SEQ ID NO: 237472 - DNA, 80 bp, Homo sapiens
cagacattaacagtatttactgagagctcatcaggtcagggaagtcaaagatgcatccctgagttcttcctagcaggcaa

SEQ ID NO: 237473 - DNA, 80 bp, Homo sapiens
cgtggattctagaggggtgacagcgaaacatctgactgcagccatgagcagcaatgagtgcttcaagtgtggacgatctg

SEQ ID NO: 237474 - DNA, 83 bp, Homo sapiens
acccgaacatcgtgaagttgcacaagtactggctggatacctctgaggcctgcgcgaggacggtgatgctttcagaagcccgg

SEQ ID NO: 237475 - DNA, 82 bp, Homo sapiens
caggcggaggcatccttaccaaggaatctgcttttcaagtatgccaccaacagtgaagaggctgatcagctgaccgaagaac

SEQ ID NO: 237476 - DNA, 100 bp, Homo sapiens
tgtggctctgtgacctgcaggtattgggagatccacagctaagactccaggaccctctggaagcctagaaatgcatcaattcctgaagattgccaagccc

SEQ ID NO: 237477 - DNA, 98 bp, Homo sapiens
cgaggacctggggcagatcttcaccatccgcaggtgcccctccacggacccaggtgtgttgaggctcctggaacacggggaggagtacgtattcaccc

SEQ ID NO: 237478 - DNA, 100 bp, Homo sapiens
ctcacacacaacgaaaacatggtggccaaagtggatgaggtgaagtccacaatcaagttccaaatgaagaaggcaattgaagatgaaggtggtaatcctg

SEQ ID NO: 237479 - DNA, 76 bp, Homo sapiens
caggcggcccactggcagttcgagccatcccaggcctcaggacctgagttctccgacgcccacatgacatggctga

SEQ ID NO: 237480 - DNA, 98 bp, Homo sapiens
gctggaaccatgacaggcatgttgtataaatgtacagttccatggaaaatgggagaccacctgatcctgcagactgggccgtgatggatgtcgtcaat

SEQ ID NO: 237481 - DNA, 83 bp, Homo sapiens
tgtggagccggagctgggcgcggattcgccgaggcaccgaggcactcagaggagggaaatcctcattgacgattcaatttgtt

SEQ ID NO: 237482 - DNA, 50 bp, Homo sapiens
ttcctgtacagcctgcagaactgtctccaattgagaaacatggcactgtt

SEQ ID NO: 237483 - DNA, 100 bp, Homo sapiens
ccgggcggcacgcacgcggtgcagggtaacatggcggatgcggaaggtgtgttccggggtggtcatgacatcctggtgcgctcccggctgctgcttttgg

SEQ ID NO: 237484 - DNA, 51 bp, Homo sapiens
ggcaagccccggctgagcctcaagtgatgaattgactctggaaggcatcaa

SEQ ID NO: 237485 - DNA, 101 bp, Homo sapiens
gcaaatccttaaaagagtcttaacggagattacctggggcaattgatgttatcggtcagactataactatcagccgagtagaaggcaggcgacgggcaaat

SEQ ID NO: 237486 - DNA, 80 bp, Homo sapiens
cgatccagcctgcggagcctgtggggcagaggcagaagaggcctggaccttggcgcacacagacccaggaacagatgagc

SEQ ID NO: 237487 - DNA, 76 bp, Homo sapiens
ggggttggtgtgattagcttcgcagtctggaaagctttaggagttcacagtgatggccaggccatgttatgggatc

SEQ ID NO: 237488 - DNA, 78 bp, Homo sapiens
tcgtggagaagaagagctgctgatgaggactgggacagcaacaacaggagatgctggccatgaagcaccagcaggagc

SEQ ID NO: 237489 - DNA, 82 bp, Homo sapiens
ctccaggagttcgtctcttacgtctgcggaagtgcagctgcctcagttcttagcgcagatttctgtccatgctagaagaaga

SEQ ID NO: 237490 - DNA, 113 bp, Homo sapiens
ctgttttagtgctttttatttttccccaattcagcagagaatattttcaagggggatcatgacaagatgtttaagatgagtgaaaagatattactcctgtgtgttggagaggc

SEQ ID NO: 237491 - DNA, 75 bp, Homo sapiens
gttcagcctctacaagaagctgctgactcttttcagagctggccacgaccagggctatttactgaggacccactg

SEQ ID NO: 237492 - DNA, 100 bp, Homo sapiens
cttctgtttgcagccccatttggcctgctgggggagaagacccgccagggtgattctgggggcccacttgtctgtaatggtgtgcttcaaggtatcacgt

SEQ ID NO: 237493 - DNA, 75 bp, Homo sapiens
ctgggcaaaggcagcttcgggaaggtgctggctgctgtctacaaggctctgagtgaccaccacatctacctggaa

SEQ ID NO: 237494 - DNA, 75 bp, Homo sapiens
ctcatctccatcgtgaccaaggagaagggtgacgcatccaaagaagacattgacactgctatgaaattaggagcc

SEQ ID NO: 237495 - DNA, 50 bp, Homo sapiens
gacctggacttttgggtcaaaagatgcaagtgctgctggaccaggcgggc

SEQ ID NO: 237496 - DNA, 97 bp, Homo sapiens
agcgagccgcctgccccggtgcgcagacagagctattccagcaccagcagaggacccttgaacatctgtgaagaaatgactattctgcatggaggct

SEQ ID NO: 237497 - DNA, 89 bp, Homo sapiens
ggagcagctgcatagcatcagcgactctgtgttgtttctgcagatgtgggacctaggaaaaggcctgaagattccccagctataccagt

SEQ ID NO: 237498 - DNA, 100 bp, Homo sapiens
ccggagctgagaccgggcggccacagtccgcagggatgaacctcgagttgctggcttgaaggatgccaatgatgtaccaatccaatgtgaaatctctcct

SEQ ID NO: 237499 - DNA, 100 bp, Homo sapiens
aggccataatcaatcctaccaatgctgacattgaccttaaagatgacctaggcttgaccactatgctatcatcaagtttccgctgaccactgagtctgcc

SEQ ID NO: 237500 - DNA, 74 bp, Homo sapiens
tattttactaggtcatgaagggaagatggctgtggaaggtgttttaaagaaagcaggaattatgtttcaaatgg

SEQ ID NO: 237501 - DNA, 100 bp, Homo sapiens
cggacccagtccctgagccgcccctacacccacagctttagcgtcacctccctcactgggcagcatgggggagaagtcagagaactgtggggttccagag

SEQ ID NO: 237502 - DNA, 73 bp, Homo sapiens
caggtgcccgccgtcgtcagcggggccgcttgatgcgacgcctgtctgactccctggtggtgtgcgaggtaga

SEQ ID NO: 237503 - DNA, 74 bp, Homo sapiens
aaaaggcccgatgccagttggcgtggtaccatgcgacgacgctatgaagatgatggcatttcagatgatgaaat

SEQ ID NO: 237504 - DNA, 96 bp, Homo sapiens
atgagatcaaaggtcacctggaaattgccttattggaaaaacatttcttacaccatcatggagcagttcaaccctagcctccggaacttcatcgcc

SEQ ID NO: 237505 - DNA, 51 bp, Homo sapiens
atggtggatgacaggctagtcacaatgcagtcggagtctagccagtcagag

SEQ ID NO: 237506 - DNA, 100 bp, Homo sapiens
ctgatgttcagtgacacaggacgcaactggaaacagtacaaacaagaagacagcatctggcctgtgcctactacactggcacaagtggatagagaaaaga

SEQ ID NO: 237507 - DNA, 75 bp, Homo sapiens
gccgccgttgcctccgccgccaagagtgagcgagcggacccgcgatggacaatgcagatcttcgtgaagactctg

SEQ ID NO: 237508 - DNA, 83 bp, Homo sapiens
ctctttctggcctggaggctatccagcgcttcaacggaccacaccaaaatgccatctcaaatggaacacgccatggaaaccat

SEQ ID NO: 237509 - DNA, 100 bp, Homo sapiens
tttgtcttctgttgggcttggaacagggctgcacacctttctgctttatctggcatcctctggtatcacgattccaaaacccccaaagccaccagataag

SEQ ID NO: 237510 - DNA, 100 bp, Homo sapiens
ggcaccatgatctgtggctgggataagagaggccctgaattacggatccagatcaggagatttgaggagctgctgccccaagtgtgttggctggtgatgg

SEQ ID NO: 237511 - DNA, 82 bp, Homo sapiens
cgaacgaccaagagggtgttcgactgctagagccgagcgaagcgtggaagttaaacgagctgagcctcgggacagcaagagc

SEQ ID NO: 237512 - DNA, 87 bp, Homo sapiens
gccgggtgcgcacggggaggcggaggcagcggcggcggcggcggcggcggcggcggcggcggagcagatgaagaaactgaggcccgg

SEQ ID NO: 237513 - DNA, 100 bp, Homo sapiens
cgactggaagaccacggcgtagcagaagccattccgacaatgatagacatatggaaagttgatcatgtgctggagcgcttgcagagtgaaagcctggtga

SEQ ID NO: 237514 - DNA, 100 bp, Homo sapiens
agagcctaagagaactatggcaacatcaggtgactgtcccagaagtgaatcgcaggactccagaagacctttccagattcgtggttgagctgcagcagag

SEQ ID NO: 237515 - DNA, 82 bp, Homo sapiens
cttctcacaatgaggctccctgctcagctcctggggctgctaatgctctgggtctctgcacctggaaatggagatggtggca

SEQ ID NO: 237516 - DNA, 75 bp, Homo sapiens
atttcatttgtggaagaagatgtccacccaaaatggattcctggggagctggagtcagatggcagcactatggag

SEQ ID NO: 237517 - DNA, 97 bp, Homo sapiens
cattgcttggttcgcgtggtagcagaggagcttgagacaatgcagatcttcgtgaagactctgactggtaagaccatcaccctcgaggttgagccca

SEQ ID NO: 237518 - DNA, 98 bp, Homo sapiens
cggcagagagggaatggtgcaggcaggcgctgagaaggacgcgcagtccatctctctcagcattcccatggtttggcatggacatcggtggaacgctg

SEQ ID NO: 237519 - DNA, 76 bp, Homo sapiens
cagaccaccaaatgttgacctgacgaaattccacaaaacctcttctggaaacagatcttaccaacagtatcattac

SEQ ID NO: 237520 - DNA, 75 bp, Homo sapiens
aattaggaagctgaatcctgcagcaaaccacagactcagtagtcgtgaaaggtgccaaattggcagaggctcacg

SEQ ID NO: 237521 - DNA, 100 bp, Homo sapiens
ctgccccagctgtaataggactgcccatccactgagacataggccaggtctggattaatggctttaaccttggccgctattggccagcccggggccctca

SEQ ID NO: 237522 - DNA, 98 bp, Homo sapiens
ggcgctgccgcctgaagtgcgggcgcagctggcggagctggagctggagctctcggaggggggacagccgcgccgctgctgcttttccgaagaggtga

SEQ ID NO: 237523 - DNA, 100 bp, Homo sapiens
gaaagaagttcttcgtcggcgcctagcgacgcccaacacctgtccaaacagcctggctacagcaatatggctacctgcctcccggggacctacgtaccca

SEQ ID NO: 237524 - DNA, 80 bp, Homo sapiens
cgattcaacggggttccggaccgcgctgcgctatggagcagaacccttaggagaaatcttgagagtggacagcaattgtg

SEQ ID NO: 237525 - DNA, 75 bp, Homo sapiens
gcctccgcctgccttctgccgccggccggcgcgtcgtccccacagctggaggagcaccggaattcacagaagcag

SEQ ID NO: 237526 - DNA, 74 bp, Homo sapiens
tattcgggggcgcgagctgccccagacaccattcgcttttcacccaagatgatttgatgtcttataaaactctg

SEQ ID NO: 237527 - DNA, 75 bp, Homo sapiens
cttcgatcctggacaggatgcaggcagatggtctaaaattcccaggactccacagctttgcaccagataagcctg

SEQ ID NO: 237528 - DNA, 100 bp, Homo sapiens
gaaaggtgaaactggttccaaatactaaaatccagatgtcatattcaagcatgttactctgaggtttctgaagcaccagcaaatggattaagtaaaggtc

SEQ ID NO: 237529 - DNA, 75 bp, Homo sapiens
cggaaacatacaacgcgcttatgaaaacacttcagagagactgccggggcggcgactggcggcgcgatggacctg

SEQ ID NO: 237530 - DNA, 75 bp, Homo sapiens
ttgttaccgaacatctcataaataaggtcataactccatgcaggaagctcatcttgtgtgctgataacagaaaag

SEQ ID NO: 237531 - DNA, 100 bp, Homo sapiens
cgcgcggagcccacgaaggggacagcgcagccggcccagagctcgggtctccggggaccgagagaaccatggagtctggcagtaccgccgccagtgagga

SEQ ID NO: 237532 - DNA, 101 bp, Homo sapiens
tcgcgtccggagtccccgtggccagtaacagatcaactcctagcaatcatgatcggatacagcgtctgaggcaagaatttcagcaagcaaagcaagatgaa

SEQ ID NO: 237533 - DNA, 113 bp, Homo sapiens
acagtccgacaaagcggctctccagcaagaaggtggcaaggtactccaaagattcaggtttactcacgtcatccagcagagaatggaaagtcaaatttcctgaattgctatgt

SEQ ID NO: 237534 - DNA, 54 bp, Homo sapiens
ctcggattcttcaaaaacttcacctgaagtttctccacagacactacccaaagc

SEQ ID NO: 237535 - DNA, 100 bp, Homo sapiens
attttaccttggataccctgctttggaatggcttattcagaagagcataaaggtatgccctgtggtttcatccgccagaattccggcaactccatttcct

SEQ ID NO: 237536 - DNA, 99 bp, Homo sapiens
gttgccatgaggcgaggctagggaggacctcacttccccggggtgtaataatgttaactgagagagaaaaggaacagttccgtaagctctttattggtg

SEQ ID NO: 237537 - DNA, 98 bp, Homo sapiens
cgagaccctgtggtggcttattactgatgctggggaaatggttcgttcctttgttggtggtttggaacttattgtcaatttactgaaatcagataaca

SEQ ID NO: 237538 - DNA, 87 bp, Homo sapiens
gctgcgcgggggctgtggctccgggactgcggaaaactcctccttaacttggtagatcatactgaagtggtcagagatttaactttt

SEQ ID NO: 237539 - DNA, 100 bp, Homo sapiens
gtgtcagtatacagactagaccatacctttgaggtgtttgacctggtgatgcttttcatcatctatagcaccaatactcagacaaagaagtacattgaca

SEQ ID NO: 237540 - DNA, 75 bp, Homo sapiens
gcagcagcaggactcagaggcgagagtggccccagccgggccagaagcagcacaggagaaaacgacgctccacac

SEQ ID NO: 237541 - DNA, 100 bp, Homo sapiens
cgggtcttgggtcctccgagagcagcagcggaccttctaccgctttgaggctgtgtgggatagctctctgcataactcccttcttctgaaccgagtgaca

SEQ ID NO: 237542 - DNA, 100 bp, Homo sapiens
ttgacatttaattttagggtcctttatatagaagggagagtagttaattggccttggtcctcacagctccaaaaagaaacaggatctcgataagctctat

SEQ ID NO: 237543 - DNA, 74 bp, Homo sapiens
ttccccacgcaaccccagatccatttacactttacagccaggtcagagcagcccaccatgggatggggaggggg

SEQ ID NO: 237544 - DNA, 83 bp, Homo sapiens
caagctggaatgcatccaagagaatccctcaacatgctgcaaaatgatgcttcaacacccaggccaggtctctgcctcggaag

SEQ ID NO: 237545 - DNA, 90 bp, Homo sapiens
catggagagagtaactctgtccttattatcggaccccgaggatcaggaaaaactatgcccacatatgacagtggacatagaggacaacgc

SEQ ID NO: 237546 - DNA, 75 bp, Homo sapiens
cttctccgagccagcgagccagcgagccgccgacccgccgagcaaaatgcattcgttcagtcagagagcataata

SEQ ID NO: 237547 - DNA, 100 bp, Homo sapiens
gctgggccctgggccagaggcagaaaacggacggaagaaaaggtctggccgattacttctctaacaggatcaccagtttgctccacaaagcacaatgtct

SEQ ID NO: 237548 - DNA, 96 bp, Homo sapiens
ttgttgtatccaggtgcatgttacagggatgaattgtaaaagcaacatcagcttgaccagtataaaattacagtggattgctcatctcagtcctca

SEQ ID NO: 237549 - DNA, 100 bp, Homo sapiens
cctgctgcacgacctcagctcccagaggatcaccagcgtgggcaggatgacgcaaaacacggtgattgtgaatggagttgctatggcctctaggccatcc

SEQ ID NO: 237550 - DNA, 90 bp, Homo sapiens
agagctccgacttatttctgtgggcagacattaacattcaggcctccccatggccacccatggaccagtcggcattcacttcctcccttc

SEQ ID NO: 237551 - DNA, 100 bp, Homo sapiens
tggaacttgccctgtctcctcgcagatgaggtacagcagggaagaactggaaactcagagaaagaaactgcccttccatctacaaaagctgagtttactt

SEQ ID NO: 237552 - DNA, 75 bp, Homo sapiens
gagcgcgctcgctccggcgccggcctcgcctcctcgcagcagcgccatgggaaattcaactactgaggaggttac

SEQ ID NO: 237553 - DNA, 95 bp, Homo sapiens
aggagggcttcctggtcaagagggagccaaaaacctgtatatcatctccgtgaaggggatcaagggacggctgaacagacttcccgctgctggtg

SEQ ID NO: 237554 - DNA, 50 bp, Homo sapiens
cgggggagccccgggagccgcacgtaatagctcttcaagtctgcaataaa

SEQ ID NO: 237555 - DNA, 75 bp, Homo sapiens
tttcttctacttcattgcttgcaaggaggagtttttacaagagttctatatacccctggccacactgatgatcac

SEQ ID NO: 237556 - DNA, 82 bp, Homo sapiens
aattacagcagccaacctatgttgccctgagttacataaataggctggagcattggatttgctaaaggagcttaagaatatt

SEQ ID NO: 237557 - DNA, 100 bp, Homo sapiens
taaaaattcatcagagagcattttactactgagctgcaaagcaaccatgtccaagggacctgcagttggtattgatcttggcaccacctactcttgtgtg

SEQ ID NO: 237558 - DNA, 75 bp, Homo sapiens
cttactttgtcttggtatactacatggcaaaatgggaaagggaccagttactctccacaagaaaattcacacaac

SEQ ID NO: 237559 - DNA, 97 bp, Homo sapiens
acaagcttattgtagatggcagaggcaatactagcccctctggagcacggagctccttccccaaagacatgaagctattggagaactcgagctttga

SEQ ID NO: 237560 - DNA, 88 bp, Homo sapiens
ccgctcagctcgagcttccctcgtggccgacggaacaatgaaggctaatagctcgtcagcttgctaaaatccatgctattcatgcaca

SEQ ID NO: 237561 - DNA, 75 bp, Homo sapiens
cctcgtgcccttcgatcacgccgagagcacgtacggcctctaccgggcaccacctacctatgatgccgtggtaca

SEQ ID NO: 237562 - DNA, 100 bp, Homo sapiens
gcccgaggtgctgacgtcgcaaaaaaattggatataacagatcaactcctagcaatcatgatcggatacagcgtctgaggcaagaatttcagcaagcaaa

SEQ ID NO: 237563 - DNA, 74 bp, Homo sapiens
ttcttctactccagtggtgagaagaccatggcaaaagttataaccaccgtactgaagttccctgatgatcagac

SEQ ID NO: 237564 - DNA, 100 bp, Homo sapiens
accattaaatgtcaactgccacgcaagtgatggcagaaagtgtgattgcatcaggcgccctttgaggccagggcaatacagcaccatctctgaagtagct

SEQ ID NO: 237565 - DNA, 71 bp, Homo sapiens
gaaacatgcagattatatcgcatcctatggctcaaagaaagatgattataggtcctcaaagagggcagcgg

SEQ ID NO: 237566 - DNA, 75 bp, Homo sapiens
ggcacccccggccccggagctgcctggaggcggccgcactcgggcttgcccacaggtgacgttcccatggatggc

SEQ ID NO: 237567 - DNA, 83 bp, Homo sapiens
ggcaatttccctgagaaccgtttacttccagaagattggtggagcttgatctgaagtttaaaagattggaagacccgtttgag

SEQ ID NO: 237568 - DNA, 51 bp, Homo sapiens
acagcacaaagaatgtcagacagcagtccggagtaacactggccagaagac

SEQ ID NO: 237569 - DNA, 100 bp, Homo sapiens
ctccaacaccaacgagaccatcaccatgccccacgcggctgcagggaagtcaacatttgtgaatatccttaaacaattgtgtgaagattgggaagtggtt

SEQ ID NO: 237570 - DNA, 96 bp, Homo sapiens
agcggctggaagcgcggggcggccgggagggggcagtcctcgccggcgagttcagcacccaagtcttggattgaggaacaggcaatgggatcattc

SEQ ID NO: 237571 - DNA, 74 bp, Homo sapiens
gttggaccttccggagcttctcagaagacagagggttttcttttgaggagcttgatcctggatagtgtttgtat

SEQ ID NO: 237572 - DNA, 82 bp, Homo sapiens
acggcgagcgcgagcggcgcgagaaagaaggcccgaacaagacaggaacgtcctgtgccctggactgtggagctggcattgg

SEQ ID NO: 237573 - DNA, 100 bp, Homo sapiens
cttcacgctggcgcgagccccgtcctccttcgccgccgcgcacaaccgcacgtgcagtgaaaaatgtgaggttttacaatattctgcaagggaagctcaa

SEQ ID NO: 237574 - DNA, 83 bp, Homo sapiens
cgcacccacacgggcgagaagccctacgagtgcaacatctgcaaggtccgcttcaccagcacatgattaagtaccggtacatc

SEQ ID NO: 237575 - DNA, 50 bp, Homo sapiens
cgcggccaagccatgctcggccccaggaggctctgtcggtggtgagcgac

SEQ ID NO: 237576 - DNA, 87 bp, Homo sapiens
ccagtaatgtcccggcggatatggccaagaagcttgagagaagaaaaatttcagaaaaattgtctcaatttgactagaatatcaatg

SEQ ID NO: 237577 - DNA, 100 bp, Homo sapiens
tgcctccaggtgacagcaatcagctggcctggtttgatactgacctgtaaatcatcctttaggtttgctttaagaaatagtgctcccttcagaatggaag

SEQ ID NO: 237578 - DNA, 76 bp, Homo sapiens
caatggcctaagcaagtgtctgcagtgccaaatgtgtgacccagttgctgctcgggaaggggatgcgcatcctctt

SEQ ID NO: 237579 - DNA, 126 bp, Homo sapiens
ggagaactgtgcccattacttctgcctggactgcattgtcgaatggtccaaggtcccgcagcccccggaagccaatagactccctcagggactctcggtccctcagctactcgcctgtggagcgtc

SEQ ID NO: 237580 - DNA, 94 bp, Homo sapiens
gcaacttacccgagaacgtgcgggaagagaagatcatcgagcatttcaaacgcatttttgaaacgttggggttgttggagtggttggattttcc

SEQ ID NO: 237581 - DNA, 90 bp, Homo sapiens
ctgtgcaggacaaaactcctctctatagtcaactccttcaagcatataagtggtcaaacaagggtttttaagtaccggtgaccaggcagc

SEQ ID NO: 237582 - DNA, 100 bp, Homo sapiens
aggagaggcggcggcggcctcggctgaagaaagaaggtggacgcggagcgtgacggcgtgaaggtgcccaccacgctggccgagtactgcgtgaagacca

SEQ ID NO: 237583 - DNA, 100 bp, Homo sapiens
ctctgcttctcttttcccgttgaaggtgctaccgctgacgacacccctggtggatggcgaggatgagagggctgatcccttatccaacatggttctaacc

SEQ ID NO: 237584 - DNA, 71 bp, Homo sapiens
cccatccactagtaggaagctgctttgaagacttagcagagactaaaagaacatattgctgataagaagaa

SEQ ID NO: 237585 - DNA, 100 bp, Homo sapiens
gcgccccgctctgctgtgggcgctgctggcgctctggctgtgctgcgcgacccccgcgcatgggggaagcgagtagcattatctgatgatgagacaaagg

SEQ ID NO: 237586 - DNA, 75 bp, Homo sapiens
cgggcctagggtaggctctcctgaatcgacaggcgccggacctctgatgtaagacaaaagtctaccctgatgaac

SEQ ID NO: 237587 - DNA, 76 bp, Homo sapiens
atctatgcacgcagatgctggagaagtccccttatgaccaggtgcaaagttccccatcaagtggacggcccccgag

SEQ ID NO: 237588 - DNA, 90 bp, Homo sapiens
gcgaatcccgagcccgggcagcagatctagaaatggccattgcctactggaacttagtgcttaatggaagatttaaattcttagacttat

SEQ ID NO: 237589 - DNA, 90 bp, Homo sapiens
ctggaccattattttgcatttccaggttgcaaaagcttctcatttcagagagatgccaggatcctaagtgcctgccaaacttaccaattc

SEQ ID NO: 237590 - DNA, 100 bp, Homo sapiens
aagaaagaaaaagtgcctgggttagccaagagagacagagaacactggatagacttcgaacatttaaacaggagagaagcaatactgcagagaaactgta

SEQ ID NO: 237591 - DNA, 75 bp, Homo sapiens
tcgttgctgcctctgtgtacgctgaggggggagcagcctctagaagaccagcattctcgtgattatggaggcccc

SEQ ID NO: 237592 - DNA, 98 bp, Homo sapiens
gttgaaagaacccacaggtgcatttcacagcactctgggcgaaaattggatgtgaaaatgaagccagaccgaggtggtccgtactgagaagaacagtt

SEQ ID NO: 237593 - DNA, 100 bp, Homo sapiens
cagacagcgagtggcgacgataatccacattcatctcaatggaaggatcctgccttaagtcaacttatttgtttttgccgggaaagtcgctacatggatc

SEQ ID NO: 237594 - DNA, 75 bp, Homo sapiens
aaaccaacattcccaacagccaccaccaccaccagatgctacgagttccagggagctctgtcctggtgaccgtgc

SEQ ID NO: 237595 - DNA, 75 bp, Homo sapiens
tcagtgagctgaatggaaaaaacattgaagacgtcattgcccagggtttggaaggtttgcagttgctgctcttca

SEQ ID NO: 237596 - DNA, 102 bp, Homo sapiens
aaccgagctacttcaacggaaactagctcatctgtagagactgatttgcaacccttccgggaagccatagctctgcatgccttgcatcccagggatgaagcc

SEQ ID NO: 237597 - DNA, 83 bp, Homo sapiens
ccgacagcacagacagaatccctgctaccatgacagacatcacacctccagtgcaatccctgttcctaagagacaaagctcca

SEQ ID NO: 237598 - DNA, 80 bp, Homo sapiens
tgctacctccagtcaagacaattctgtgaaggagtctactcttcatcttgtgttgagacttcgtggtggtgctaagaaaa

SEQ ID NO: 237599 - DNA, 83 bp, Homo sapiens
tcagctctaagggccgcgatgttgtacctagaagactatctggaaactctattatcaagtcctaaattttggaatgattgtct

SEQ ID NO: 237600 - DNA, 97 bp, Homo sapiens
cagagcctcgcctttgccgatccgccgcccgtccacacccgccgccaggccagcactccttgcccgaggacagagatggcgagcgcccggattgggg

SEQ ID NO: 237601 - DNA, 83 bp, Homo sapiens
caggcttttgctctgcgacggctgcgatgcgggaaagtttcctacactactgaggtttaggggcactgtgaagcaaaagccac

SEQ ID NO: 237602 - DNA, 82 bp, Homo sapiens
ccttgagcagtggtcatgggtcactgcctggaagcccctcgctgcccccaggtgtctgacttccagcaactgctggcctgtg

SEQ ID NO: 237603 - DNA, 75 bp, Homo sapiens
gtctctttttggagctacagtggacaggcatttgtgacagatgacttcaaacctgcttctattgacacttcttct

SEQ ID NO: 237604 - DNA, 100 bp, Homo sapiens
tctctattacatgaatggaggagacgtattacaacttttagctgcagtggagctattctgaaaaagagttccacgtcctcccttatcgagtctttgttcc

SEQ ID NO: 237605 - DNA, 100 bp, Homo sapiens
aagcaattacttgaggacagttcatatagcatctggacagtcaacacgggcaccatgaagcacttcctgaggttttacctcacaaaaactactacaagca

SEQ ID NO: 237606 - DNA, 100 bp, Homo sapiens
ccaggtgtaagcgcagaaagcaggcgaacccgcggcgcaataacggaagtgctctctggcgtggtggtcatatcgagtaaggattcagtccaacaccagg

SEQ ID NO: 237607 - DNA, 100 bp, Homo sapiens
gccgggggttcggtgcgtgccccgacggggcgcgcgcgaagcgagcgagaaggcacggagtcgccgcggagcgcagtgatccgtatgtgaaactttcatt

SEQ ID NO: 237608 - DNA, 95 bp, Homo sapiens
gccaatgcaataatcggtctgccagttgcgatgccctcacagggtcatcaagactcctgagatagcaaacttggccttgcttggctttggagata

SEQ ID NO: 237609 - DNA, 74 bp, Homo sapiens
ggcaactctgaagtcatcctgccagtcccggttggatggcaagcatgtggtgtttggcaaagtgaaagaaggca

SEQ ID NO: 237610 - DNA, 82 bp, Homo sapiens
cttggcttccggctccccccatctggctggaacacacatcagtcacgatataattgatacagcatgtgaagtattggccgac

SEQ ID NO: 237611 - DNA, 100 bp, Homo sapiens
gggatcttcaaccacctcgagcggctgctggacgaagggtgaggtggctttgaccccgggttgcccggccagcacgaccgaggaggtggctggacagctg

SEQ ID NO: 237612 - DNA, 100 bp, Homo sapiens
accaccgggcgctggtctgctcccagccggcctccggtgtggctgtctctgatggtgtcatcaaggtgttcaacgacatgaaggtgcgtaagtcttcaac

SEQ ID NO: 237613 - DNA, 90 bp, Homo sapiens
aacttattaaagaaagagaaacggcaattcggcagctggagggcaggtaagccccctcccggtttacatctggatgtagtcaaaggagac

SEQ ID NO: 237614 - DNA, 87 bp, Homo sapiens
gatcccttgctcccatccctgcagcatgaacaagatcaatgtccgagttaccaccatggatgcagagctggagtttgcaatccagcc

SEQ ID NO: 237615 - DNA, 116 bp, Homo sapiens
cgagagctacacgttcacggtgccccggcgccacctggagagaggccgcgtcctgggcagaggtgtcatggagaaactccagctgggcccagagattctgcagcgggaaaatccaa

SEQ ID NO: 237616 - DNA, 90 bp, Homo sapiens
atggcagagaagaaccgcaaggatgccgaggaatggttcttcaccaagtatgaggagctgcagcagacagctggccggcatggcgatgac

SEQ ID NO: 237617 - DNA, 74 bp, Homo sapiens
ccggggtgatgactggagggtcagcctggaagaccacagcagccaagtgtgaaatggcctttccccgggtcaag

SEQ ID NO: 237618 - DNA, 101 bp, Homo sapiens
aggatgatcgaggttgtttgcaacgaccgtctggggaagaaggtccgcgttaaatacaatattgactcacgcctactccagagtggtcctgagagtcctgg

SEQ ID NO: 237619 - DNA, 98 bp, Homo sapiens
gagaccatagctgcacagccagtatgagaccagggcccgcctagagaggctgtcggcaagttcctccataagctcggctgatctgttcgaggagccga

SEQ ID NO: 237620 - DNA, 116 bp, Homo sapiens
tgacttccgaagatgccggactccggaacagcaagaactgcaccgaaccaggtgctggagaatctggtaaaagcaccattgtgaagcagatgaggatcctgcatgttaatgggttt

SEQ ID NO: 237621 - DNA, 98 bp, Homo sapiens
gctgtccaggagctctgctctcccctccaggtgatctgcaactctttcaccatctgtaatgcggagatgcaggaagttggtgttggcctatatcccag

SEQ ID NO: 237622 - DNA, 75 bp, Homo sapiens
cagatttacaaactggccaagaagggccttactccttcacagatcgatgtcggtgcagatctcttgtccatgtgc

SEQ ID NO: 237623 - DNA, 88 bp, Homo sapiens
ggctgcctccccctccccttgtcccctgccccttgccctgcttctgcagaagcccctgcccggatggcaacagtagttctaggaggag

SEQ ID NO: 237624 - DNA, 75 bp, Homo sapiens
cagacccatttccagtcatgatgaatctacagacctattttctcaggagctcagcctggccttacttcagtgata

SEQ ID NO: 237625 - DNA, 100 bp, Homo sapiens
cggccgcggagacctacctgcggcgtcggcagctgctgctccgaggtgattacgtttttgaagaagaaggacaagttcatcagcctggtgttgaagcaca

SEQ ID NO: 237626 - DNA, 100 bp, Homo sapiens
tgtccatcgtgtgcctgatgatcacgcagctggctggcttcagtggaccagccatgccctcctggaggaggagaaccgggtgtggcacctggtgcggccg

SEQ ID NO: 237627 - DNA, 83 bp, Homo sapiens
gaagaagggaaggcgcgagtgaggaaaggaggtactgtagatttgggaatggatgatgaaggagatgatgacccagttcctct

SEQ ID NO: 237628 - DNA, 75 bp, Homo sapiens
ctggatttaagcactgctgcactttatgagaattcacagatggattcagtggaaaagacaacaaatagaagtgaa

SEQ ID NO: 237629 - DNA, 108 bp, Homo sapiens
gcggcttaggatgtgagctcctgaaaaatctgaaatcaatgtggactgaacataaatcacctgatggaaggacttactactacaacactgaaaccaaacagtctacct

SEQ ID NO: 237630 - DNA, 75 bp, Homo sapiens
caccctccgtcccgacccgggccccgccatgtccttcttccggcggaaagaggcattcgacttacagcagtgtgc

SEQ ID NO: 237631 - DNA, 50 bp, Homo sapiens
caagatgatttatggtaataagggggcagtacccaaaggaaacgctacga

SEQ ID NO: 237632 - DNA, 83 bp, Homo sapiens
ccagatccatttacactttacaggttcagaatctcccatgatgattggtgagttgagaagtgaccttgatgatgttgatccct

SEQ ID NO: 237633 - DNA, 90 bp, Homo sapiens
ccagccagccagcgccttcatcctggggctgcgatgtaaggttcgtgatcctcgggccaattttgatcagtccctacgtgtactgaaaca

SEQ ID NO: 237634 - DNA, 100 bp, Homo sapiens
gcaggatgaaagtgagcagtccagaaagcggcttatcgaacagagccgggagttcaagaagaacactccagaggttcattttccagacactgaaagagca

SEQ ID NO: 237635 - DNA, 50 bp, Homo sapiens
ggctctgctgaccttgtgccttggaactctgcgaccttcaagtcgtttga

SEQ ID NO: 237636 - DNA, 98 bp, Homo sapiens
cgtggtggtgtggaattctcccaagctgccatcagaggaccttctgtggcctgacattggcgtccccatcatggctggagtgcaatggcgcgatctcg

SEQ ID NO: 237637 - DNA, 75 bp, Homo sapiens
gaaaaataccacgacaaaaccaccctagtcatggaaaatggaagatttgcaaaatacaaatattttacccatgtc

SEQ ID NO: 237638 - DNA, 100 bp, Homo sapiens
gagagggctaccttgtgaagaaggtactaggttttgacaagcttgcatcatgcgtgagtataagctagtcgttcttggctcaggaggcgttggaaagtct

SEQ ID NO: 237639 - DNA, 82 bp, Homo sapiens
gggactcaagtacaactcccggcacgagatgtacttctggactcacgggcctggggcccacccagcacagatctctgctgag

SEQ ID NO: 237640 - DNA, 75 bp, Homo sapiens
taaactatggacgactccgaggaacattgagggttaccatcatgaaagataaagataccaggaagagtaaagggg

SEQ ID NO: 237641 - DNA, 50 bp, Homo sapiens
tctgcagcctctctgacaagtgaacttcccattaaaatcttactcatgtt

SEQ ID NO: 237642 - DNA, 75 bp, Homo sapiens
tcagtctctcagatcttccacagcccagtgttctacgcagaaatagaagagctgaaactggtgtatccttatcac

SEQ ID NO: 237643 - DNA, 106 bp, Homo sapiens
tggaatatgaagagacacagtatggtagccacacccccagacatatctgaagagatggattaagaatgctttggattaaggattgtggagcacatttcaatcattt

SEQ ID NO: 237644 - DNA, 100 bp, Homo sapiens
ttttagaacctctcaatgaggagaccttcatcaacaacctcaagaagcgctttgaccacagtgaaatatactgtcagctgggagtgctgccgctcggcac

SEQ ID NO: 237645 - DNA, 83 bp, Homo sapiens
caagtggaatatgccattgaggctatcaaggctcatcagattcaagagatgtttccccaggttccataccatctggtactgca

SEQ ID NO: 237646 - DNA, 50 bp, Homo sapiens
tgcctggtcagagtccatgctgcaaaggaagccactggtgaaggaccggg

SEQ ID NO: 237647 - DNA, 96 bp, Homo sapiens
tttgtatgttatggtgaatgccaaatttgaaggtttgacagatgaaaaagtgaaggcatatctttctcttcacccccaggtattagatgaatttgt

SEQ ID NO: 237648 - DNA, 90 bp, Homo sapiens
cgacgaggcgattgcgggggcctgggctaggttttgcacactagggaccaagaagccctcggggacactgctgagaaaagactgccgaag

SEQ ID NO: 237649 - DNA, 75 bp, Homo sapiens
gctgagggcgcagaggcaggcagtgccttgctttccatgacatttcccctcaagcaccaacacattttctggtga

SEQ ID NO: 237650 - DNA, 101 bp, Homo sapiens
ctggaatgtgaagagacatgagacagtagtcaaatactcagaaatctcctgcaaagaagctgagccatgcaattagtaaatctttggggtgtgtacccacg

SEQ ID NO: 237651 - DNA, 51 bp, Homo sapiens
ataaacatgcaatgaacccaaaaggtgccggtggtggtgtgcacattgagc

SEQ ID NO: 237652 - DNA, 73 bp, Homo sapiens
gcgtgtcctcggagcgcggtccctgtattggtctcctgctcctagaggagaactacgatgacccgcacaaaac

SEQ ID NO: 237653 - DNA, 100 bp, Homo sapiens
gaccaaagagaactttgatgaagttgtgaatgatgcagatatcattctggtggagttttatgccccatggtactggataaaggaacaagattttttcaag

SEQ ID NO: 237654 - DNA, 83 bp, Homo sapiens
cccgtggcagccctggcggacgcaggagcgatggcagcgaccgatatagctcgccaggtggaccaagaatcgccttcagccct

SEQ ID NO: 237655 - DNA, 73 bp, Homo sapiens
tctgcagccatttatattgcttaggctactgctttctgaaaaggatatgagcatgctcgaggagaggattaag

SEQ ID NO: 237656 - DNA, 75 bp, Homo sapiens
aagctacattccctccagctgctacccatttaccagaccgaaatcatgaccaccccaggaaaagagaactttcgc

SEQ ID NO: 237657 - DNA, 98 bp, Homo sapiens
ttcaaagctgaactgaatgagtttcttactcgggagctggctgaagatggctactctggagttgaggtggcccgaggcagccgggatgacagctctcc

SEQ ID NO: 237658 - DNA, 82 bp, Homo sapiens
gacagcaatgaggtgaacccaggggccgaagcccacccagggagttgatggtattgttgcagcatctggcagtgagactgag

SEQ ID NO: 237659 - DNA, 100 bp, Homo sapiens
gaaagtgtcaagatcatcttcaaattacctaatgattctcgagtagagagacgattccacttttcacagtctctaacaaacggccggtttgtgggcgatg

SEQ ID NO: 237660 - DNA, 95 bp, Homo sapiens
actgaagtttccttggggaaattcaccttcgatgttgagaaatcggagattcagactttccacctgcaggtatcgaaggatgatcgcagtgatgt

SEQ ID NO: 237661 - DNA, 98 bp, Homo sapiens
gcagtggtcgcttcttctccttgctttggggccatttggatcacacgatgttttttcaagattttagaccctttctaagtagcagtccactggaccaa

SEQ ID NO: 237662 - DNA, 75 bp, Homo sapiens
ttagacagcgtgtgccaagcagatgagaattcagaagcagtcagttccctgcacccagcacctcacagcccttcc

SEQ ID NO: 237663 - DNA, 90 bp, Homo sapiens
caatgatttataccatgaaatgattgaatctggtgttatcaacttaaaagatgccacctctaaggaggagatgttaaagtaacccatctt

SEQ ID NO: 237664 - DNA, 90 bp, Homo sapiens
tgcaaataatcctggaaaagtacttggcagggtccctccaatgtgtttgctgccaaattcacattatgagcaagtcatgactgcatttgg

SEQ ID NO: 237665 - DNA, 130 bp, Homo sapiens
tatatccatagattggaatattggtgggccagcaatcctcagacgcctcacttaggacaagtgtctgacttccagcaactgctggcctgtgccagggtgcaagctgagcactggagtggagttttcctgt

SEQ ID NO: 237666 - DNA, 101 bp, Homo sapiens
ttacatcgaggactgtgcatctttatgataattggatcaaagatgctgtgtcctgtttcccagaggaacagttcatttcaacagccagggagaaagcctgg

SEQ ID NO: 237667 - DNA, 98 bp, Homo sapiens
agcttcatcaaaaatagtgatagctttgataagtgcctttgaacccttgtgcactttttagttagatctttattaacatgctatgccactgcagggag

SEQ ID NO: 237668 - DNA, 100 bp, Homo sapiens
tcagtatcgcccagtcccttctgttcattacaattcacatctaaaccaaccactgccacaacctgcgcagcagacagggaagcagctcgagagtgtcgta

SEQ ID NO: 237669 - DNA, 78 bp, Homo sapiens
tctgggccaggagaagctgaagctggaggcggagcttggcaacatgcaggggctggggcggaaggtcgagagggcgag

SEQ ID NO: 237670 - DNA, 50 bp, Homo sapiens
ggcggcccggagcggcccggggacgtcctcctgacaaggtgatccgggcg

SEQ ID NO: 237671 - DNA, 82 bp, Homo sapiens
tgcgagagcctcctcacttgggtttggacatatttgactcttttccccccaggttgaattgaccaaagcaatggtgatggag

SEQ ID NO: 237672 - DNA, 101 bp, Homo sapiens
tgcctggaggccggggagccgacgcctggtagttcctgaaatgactgagatattgaagaaaaaatgaatcaggatcatgccttaaaaagaaaacttttgtt

SEQ ID NO: 237673 - DNA, 83 bp, Homo sapiens
ctgacacacagtggagacaaacctttcaaggggaggagtggggccagttaaaagctccccatgccaaccgattcatcttctct

SEQ ID NO: 237674 - DNA, 50 bp, Homo sapiens
tctactttcttctctagaatccacgggaggcagacagtggggaggaagaa

SEQ ID NO: 237675 - DNA, 90 bp, Homo sapiens
cacacattgaatgggccaaggaaaaatcgagcagaaagaatgtctttcaggaacatcatttacagcgagcaatttcagcacagcaagtgt

SEQ ID NO: 237676 - DNA, 105 bp, Homo sapiens
ggatggcttggcagatgtggctgtgggggctgagagccagatgatcgtgctgagaccattaaaaatctcaagtgacgactttgggaaactctggttatccttcgc

SEQ ID NO: 237677 - DNA, 82 bp, Homo sapiens
acaccttttccacagggaattgagttgaaacgggtatgcaggagattagaagccagtgggcatgagcgtggctgccaccagg

SEQ ID NO: 237678 - DNA, 98 bp, Homo sapiens
gcccgagggccggggctggaggagactggcggagctggcggggagtcgcgggcgcctccgcctcagtgatccgtatgtgaaactttcattgtacgtag

SEQ ID NO: 237679 - DNA, 82 bp, Homo sapiens
cctggagcctcagttggaagcagccgatccagcctgcggagcctgtggggcagcagcagcagttgcaagctcagcatctttc

SEQ ID NO: 237680 - DNA, 82 bp, Homo sapiens
gtaatgacagaagaatacaaagttccagatggaatggttggattcatctgctgaacaacaaccacatcagaaagatttccag

SEQ ID NO: 237681 - DNA, 88 bp, Homo sapiens
ccgtgggctcgctggggagccacggcggagacccccgccctcaactgaggtttattgttggccaaaaccaggctttgattgaaccagg

SEQ ID NO: 237682 - DNA, 99 bp, Homo sapiens
atattggaaaaacctcaaaatatgatggtggttggacagtcagcatttgcagactttggtgttaagtgtgatgcttccataatacatttggatgctgtc

SEQ ID NO: 237683 - DNA, 82 bp, Homo sapiens
gttgctcggactcaaacgtccagtcctcgtgcgaccgcgctgggtcggaagtgagcagggtctcactctgttgctcaggctg

SEQ ID NO: 237684 - DNA, 103 bp, Homo sapiens
cactgatagaagacttacagagagaacttgagataccagagcagcaggtatgtgagcgaatcccaaccataagcacccagctcaaaatcctgtccacagtgaa

SEQ ID NO: 237685 - DNA, 95 bp, Homo sapiens
gactcagtgcagacctgcacaaacccactggacaccttcgtcccctttgatccctgtgtgctgaagagatggagtctccctctgttgcccaggct

SEQ ID NO: 237686 - DNA, 75 bp, Homo sapiens
tacaaatacccctttgaattaattatggcttcgtttccacttgttccatgtgacacagaccagcctcaagacaag

SEQ ID NO: 237687 - DNA, 100 bp, Homo sapiens
cacctgcagctgggctccgttctctatcaccacaccaagaacagcgagcaggcgcgcagccacctggagaaggcggtctcggcgcggaagatggccggcg

SEQ ID NO: 237688 - DNA, 75 bp, Homo sapiens
aagatgccagaatctggtttcaagcgattatccagtacacattgataaggaaaatgtttataggaggccttagct

SEQ ID NO: 237689 - DNA, 83 bp, Homo sapiens
agaagctaatcttgtacttcaagaggaggaatcacgctcggaaacaatggccctgggcgctgcctatggcacagccaagagcg

SEQ ID NO: 237690 - DNA, 106 bp, Homo sapiens
agccgccgcggagcctcctcgcccgctcccgccggcgagcaagattactccaaaggtttcggcggcaaatacggtatcgacaaggacaaagtggataagagcgccg

SEQ ID NO: 237691 - DNA, 117 bp, Homo sapiens
actggcaaagcagctacacaaagagggtcatctcttctattgtacctgcagatctgactgcagccatgagcagcaatgagtgcttcaagtgtggacgatctggccactgggcccggg

SEQ ID NO: 237692 - DNA, 80 bp, Homo sapiens
acttgttaccagaggttaaagaagagatgcagggaagaggagaaggtcattccgctggtgctttgcaagatatcaccttg

SEQ ID NO: 237693 - DNA, 75 bp, Homo sapiens
aggagagcatttgtatgttatggtgaatgccaaatttgaagtatggaaccacccctttagtttgggctgcacgaa

SEQ ID NO: 237694 - DNA, 101 bp, Homo sapiens
ctttttggccagatcaaaattcgccaacactaggactttgaggaggaagatgacaaccccgactgggtgtcagagctgaagaagcgagctggatggcaagg

SEQ ID NO: 237695 - DNA, 100 bp, Homo sapiens
aggcattcacgcactacaacatcaaccagagcagattccagcctccacatgtacatataagtggggcagcgtgagcaatccactcttcctcccgctgatc

SEQ ID NO: 237696 - DNA, 100 bp, Homo sapiens
agacccattgcacttcagtatctcaggcggcaccctgtccccgaggaggggaccatgacacaactcagcccacctgcacccaggtgaaataaacagcttt

SEQ ID NO: 237697 - DNA, 82 bp, Homo sapiens
cttcgagaagcaggtcctgcagctgcagggaacccaccaagaccaacctggtcacattcttccataccgacctcagcggtta

SEQ ID NO: 237698 - DNA, 100 bp, Homo sapiens
gggttcacgcggtcccgccggatcccgaagacgagggcctggaggaaacagaatgcatctactcatgcctcgaaatctcctgacagtgttaatggaagtg

SEQ ID NO: 237699 - DNA, 100 bp, Homo sapiens
ttccaccttcagagcgtcacggcgtacgccctcatggggaaaatctccccggtgactttcaggttgtgtggcacctaccctccctcctacaacctgacct

SEQ ID NO: 237700 - DNA, 50 bp, Homo sapiens
acagccatgaggattcaaatggtatatgagaaaatattgactcctatctg

SEQ ID NO: 237701 - DNA, 100 bp, Homo sapiens
gggaccatggccgatcctcgcgtgagacagatcaagatcaagaccggcgtggtgaagcgtgtaaacaggaacatcgataagtagtgtaaaaacttgcaca

SEQ ID NO: 237702 - DNA, 98 bp, Homo sapiens
gggttcttggtctcactgacttcaagaatgaagccacggacccttgcggccattgagaaactagtcgctcttctcaacacgctggacaggtggattga

SEQ ID NO: 237703 - DNA, 49 bp, Homo sapiens
gcttgacctcctgcatcgacctgttggccgccatcaatttgcaaaaact

SEQ ID NO: 237704 - DNA, 97 bp, Homo sapiens
tgccttacctcgctgaatcatcacagccctaggaggcagctgctcccaaccccagaacctttgctgtcttgggacggatcaccgctgcaagagggga

SEQ ID NO: 237705 - DNA, 82 bp, Homo sapiens
gaagttataaatttgccatctccctctgcacaacttacctttgggttatcaatactctggctgaccatcatcatcgtgggac

SEQ ID NO: 237706 - DNA, 74 bp, Homo sapiens
ctaaatgcagattccagaaaaattacagcacatctcagtgaatttgcaagtggaaccagggaaaatgtgtagag

SEQ ID NO: 237707 - DNA, 87 bp, Homo sapiens
gaggtctccgccggctcccggatcaaatgatgccgtttggaaaaatttcccagcagttgtgtggcgtaaagaaactcccatggtcat

SEQ ID NO: 237708 - DNA, 100 bp, Homo sapiens
tggagtcctgcttcagaaaatagttagtgccaagagtttgatggaattcacacatatcatcattgatgaagtccttgaatgggcaagagggcacatgaag

SEQ ID NO: 237709 - DNA, 82 bp, Homo sapiens
cagctgtccaagaacgcagacttgtcagacgcgagaaccctctgcccacagtggagattgccatccggaacacgggcgatgc

SEQ ID NO: 237710 - DNA, 100 bp, Homo sapiens
gtttatgccatagaaaaatcaactgcttttcccagaacacagagagcagagaccattcctcaagaattttgtatccaaggcccaaaagtttgttacccaa

SEQ ID NO: 237711 - DNA, 128 bp, Homo sapiens
cagaggatggagtccgcgctggaccagctcaagcagttcaccaccgtggtggccgacacgggcgacttccacggaggagctggaagacttcccgctgcccacggtgcagcgcagccagacggtcctca

SEQ ID NO: 237712 - DNA, 137 bp, Homo sapiens
atactccttccttcctccccacccattcctttaaatccggagggggaaaaaatcccaaggtctgcaaagtttcagtgcctgtgtaatagaagggtctgtattgtaaaagaagtcaaaagcagccttgaataatcgga

SEQ ID NO: 237713 - DNA, 73 bp, Homo sapiens
taagaaggggtcaaagtttagctgctcgagatcgaggagatgctattccaagttcagatcaaattcgagtagc

SEQ ID NO: 237714 - DNA, 82 bp, Homo sapiens
cgcccaggcgcagatgcgggccctgctggaccagctcatgggcacggctcgggacgatgatatcatcaagttgaatcgaaag

SEQ ID NO: 237715 - DNA, 87 bp, Homo sapiens
ccgcagtagatctcgaagtatctcaaaaagtcgctcccgtgcccagcccacggacttcgacttcctcaaagtcatcggcaaagggaa

SEQ ID NO: 237716 - DNA, 75 bp, Homo sapiens
gcgattgtaaggagaggcggtcccggtgtcctcgggtcccaggaagctgccacttttgctagagagcaaggcttt

SEQ ID NO: 237717 - DNA, 75 bp, Homo sapiens
taccaagtccgtgctgtttgtgtgtctggggtcagtgaagatatgaaattaactgactcagagctaggaaagctg

SEQ ID NO: 237718 - DNA, 90 bp, Homo sapiens
cagtacctgcagaaggtctctggagacatcttcagcaggtttccgccagctgtggatgcctttgacattatgaccgcagaggattccacc

SEQ ID NO: 237719 - DNA, 75 bp, Homo sapiens
gaagtttgtctcctgtcctcctgaccctcacaaagggatcgagtttcactcttgttgcctaggctggagtgcaat

SEQ ID NO: 237720 - DNA, 100 bp, Homo sapiens
ggattccaagtaactcttatttgtttgctaatccagactttacacaacctatctcagaagttgtagatgaagtaattcagaattgtcctattgatgtcag

SEQ ID NO: 237721 - DNA, 101 bp, Homo sapiens
gagactcctgaccctcagaatgggctgtcacatggtgactgaagaacttcattccataacgtttgaaacacagatctgcctctatggcctgaccatagatt

SEQ ID NO: 237722 - DNA, 75 bp, Homo sapiens
cgaagacgcgaccgcggcgcgagtcaccatggatcaaaatacttgctggatggtggactcagagaccaataaaaa

SEQ ID NO: 237723 - DNA, 75 bp, Homo sapiens
catgtagggtcccagacctttgtcaatccacatgtgtcatccttccaagtcattatttagaagcaaggtccttga

SEQ ID NO: 237724 - DNA, 90 bp, Homo sapiens
gaaagaagcagttgacctcactcaatatattctgcagaatggagatgtatgcatttcgattcttcatccgcctgtagatgacccacagag

SEQ ID NO: 237725 - DNA, 100 bp, Homo sapiens
gcacctgggcccggcccctctactgctccccaattacagcccacctcttgcatcgtcacctacagatatggctcgtggacagcagaaaattcagtctcag

SEQ ID NO: 237726 - DNA, 100 bp, Homo sapiens
ctggatcatggctgccgcgccgccgctacgggaccgcctgagctttctacaccgggccaggcagcagcgttcaacgtgaccttccggcgggccaagggct

SEQ ID NO: 237727 - DNA, 75 bp, Homo sapiens
acctggatctcgcgccacaaggagatgcttcgagagctgtgcccaggagtgaacaaccagccctacctctgtgag

SEQ ID NO: 237728 - DNA, 83 bp, Homo sapiens
caaccaaggcgcccgagggcaacggagcggccgagcgccggaaccggagcaggttgacatcatggacatatgtgagtccatcc

SEQ ID NO: 237729 - DNA, 83 bp, Homo sapiens
gattgaccccaaagttgcatttcctcgtcgagcgcaacccaaggatgagctttctgatgttagccaaggcggatctaaagcta

SEQ ID NO: 237730 - DNA, 51 bp, Homo sapiens
agaaaaatctgcatattttatatggagaggcagccatgttgttcagttctg

SEQ ID NO: 237731 - DNA, 75 bp, Homo sapiens
gctttgtaacttatctggaagggaaagcacatgccttcacgggcaggtccagggagctcccagggaagtggtcga

SEQ ID NO: 237732 - DNA, 75 bp, Homo sapiens
gcaacaaatgtgatgaaaaaaaggagagaggacttcctgctggagatgaaaaggtggacaagtcctattttcaag

SEQ ID NO: 237733 - DNA, 100 bp, Homo sapiens
gtttgaagctatgattatgaacagagaaatcaacaatcctatgttcaggcttaagtccactccccgccctaagttctctgtgtgtgtcctgggggaccag

SEQ ID NO: 237734 - DNA, 74 bp, Homo sapiens
gaggtgatggacgtgttctccactgatgacctcaccggatttttacagatttgaaaaagggcgcatctatacgt

SEQ ID NO: 237735 - DNA, 75 bp, Homo sapiens
ttaaggattccaagtaactcttatttggtcaagtacaaaagagattttgaagaaagcaaagggaggggcttcagc

SEQ ID NO: 237736 - DNA, 89 bp, Homo sapiens
agtagccaccccgcagaaggcgtgcgattcttccagcagatatgaagagagtcgaatgatcttggatgcctttgcccagcagtgcagtc

SEQ ID NO: 237737 - DNA, 87 bp, Homo sapiens
ggaccatgatggctcagtttcccacagctatgaatggaattgaatgatctggcacgggaccctccagcacagtgttcagcaggtcct

SEQ ID NO: 237738 - DNA, 83 bp, Homo sapiens
gggaagctggggctggtgcaactttcagaagtggtcccagataaagatgatattgagactccactgctaactgaagcagcccc

SEQ ID NO: 237739 - DNA, 100 bp, Homo sapiens
cttccacaaatcagacggcagcactgtctctgtgcccatgatggctcagaccaacaagttcaactataaccccaccaacaactgaacgctttggtcaggc

SEQ ID NO: 237740 - DNA, 50 bp, Homo sapiens
gcctgcctttgaggaattctgcttgccaacaaagaagtatgccgatgtga

SEQ ID NO: 237741 - DNA, 50 bp, Homo sapiens
aaaaggaagattggactatgctaagaatacttcagagagtcagagttgtg

SEQ ID NO: 237742 - DNA, 73 bp, Homo sapiens
tttgactgtccatgaaaatctcaactttatggccattggacttatcaaactggtttcaaagcacagagctcaa

SEQ ID NO: 237743 - DNA, 87 bp, Homo sapiens
tatgacgactggagaagttgttcacatagattacaatgtttgctttgaaaaaggaggactgacaaatggtagtggtcgatatatctc

SEQ ID NO: 237744 - DNA, 99 bp, Homo sapiens
tggaaacaatggcatttacagaaagagtcaacagcagtggcaacagacctgatggccaaaagaaaggaagaaaatttttcctctcctaaaaatgccaaa

SEQ ID NO: 237745 - DNA, 75 bp, Homo sapiens
ctgataccaaaacagtcttggaccaagctctcagagtatgtcaggaacttgtaatagctggcatcgttgagaatg

SEQ ID NO: 237746 - DNA, 83 bp, Homo sapiens
cacccgctcaccctcaagtgggtggacagcgaagacgttggacctctcgaacaaccagctgagcgagatccctgcagagcttg

SEQ ID NO: 237747 - DNA, 144 bp, Homo sapiens
tggcgtcttcagaatctcccaccaaggctgtacctctggaggagttctaggtttggatttggtcatctcaagaaggagtgagctgagtcgacagaaacttcatacccaagagctgctttctcagctggaaatggcaaatgaaaa

SEQ ID NO: 237748 - DNA, 83 bp, Homo sapiens
cgggcggggagggcatgttccgtggcctcgcccaggccgacggagatgaccaagcgagacgtgcctggcttcgccatcggggg

SEQ ID NO: 237749 - DNA, 120 bp, Homo sapiens
tccgtcgctgtcgctgagagcctcacgagtcgaggtcctgcaggtggagctccggcagccgccctgttggtgcttcccgtgctgctgttgatgctggctttgttcccaatgacatgcaag

SEQ ID NO: 237750 - DNA, 50 bp, Homo sapiens
ctcgtcaccaggacccaaggaaccagccctcgggaccaaggatcacgtca

SEQ ID NO: 237751 - DNA, 75 bp, Homo sapiens
gcgtggactacgagttggcgcccaagtccagaatccgcgcgcaccgcggaggagacatcacagctttcccagatc

SEQ ID NO: 237752 - DNA, 80 bp, Homo sapiens
tgcccaagtgtcccaagtgcaacaaggaggtgtacttcgggcgccctgcgtccggcagaggaggcgagcatcccgctcag

SEQ ID NO: 237753 - DNA, 100 bp, Homo sapiens
gaagaatcaatgctttggcccctggtgacatgtacatggtgtaatgacagcatgatgccttcttctgtagagtgggcgctttgcagaatacgtgttgaat

SEQ ID NO: 237754 - DNA, 50 bp, Homo sapiens
cgctcccagagcagctgcggccagttaacccagtatccactccagttgca

SEQ ID NO: 237755 - DNA, 100 bp, Homo sapiens
tctggatttactctttgagctgttgagagatgtgacgaaaacaccagcccggaagttatgagatccgacactatggaccagccaagtgggtcagcacgtc

SEQ ID NO: 237756 - DNA, 75 bp, Homo sapiens
gcgagagtgggcgagaacgtccactgcgggccggcgaaagctgatattatgcctggtgatcctgatctgcttcag

SEQ ID NO: 237757 - DNA, 88 bp, Homo sapiens
atgccattgaattctccaacaatggaggccagtggctggtctcagggggatatgagactttctactcggaatatcctgagtgttgcgt

SEQ ID NO: 237758 - DNA, 100 bp, Homo sapiens
ctaggagcctggggttcggcgctatggaggagctcgatggcgagccaacagtcactcagtggacgtcagctcagcgaggtcttcatccagctgccctcgc

SEQ ID NO: 237759 - DNA, 90 bp, Homo sapiens
ctgggttctggactttgggcgtcccattgccatgggaccttctgatgaaacccctcatgactatgttctgatgactgaccaatgtctcac

SEQ ID NO: 237760 - DNA, 90 bp, Homo sapiens
cgtgaccctcatgttaagatagaagggaaggacactgatgactggctgtgcgtggattttggtggaatgtaactcaaaactggaccccac

SEQ ID NO: 237761 - DNA, 76 bp, Homo sapiens
cgcaaaccaaggatctggggatcttcgcactatcccaagggcattgacactgagaggcccattctgcaagtggaca

SEQ ID NO: 237762 - DNA, 75 bp, Homo sapiens
tgtttatgtcagccaactggggaaagtggaattgaaatcccataaagatgatgaacaacatgggtggtgatgagg

SEQ ID NO: 237763 - DNA, 75 bp, Homo sapiens
taaagagacccgttcagagtcctacagtggcaggaaactttgagggaaattttgagtcactggaccttgcggaat

SEQ ID NO: 237764 - DNA, 96 bp, Homo sapiens
tcccgaagtgctgggattacaggggccctggtgaaaacagatgaacaagaagtaatcaactttttattaacaacagaaattatccctttatgtttg

SEQ ID NO: 237765 - DNA, 101 bp, Homo sapiens
agacgcaacgagggtgctgcccgagttatcgggaccctgttgggatgcagagattgtgcggacccgggatcccgaaaaactcgcttcctgtgacatcgtgg

SEQ ID NO: 237766 - DNA, 82 bp, Homo sapiens
agcgagcagaggcttaaggtcttcagcggggcgctccaggaggcactcacaggcatggaagaggagatggttcgtgttacgc

SEQ ID NO: 237767 - DNA, 100 bp, Homo sapiens
caacatggaccgggccgcggtccagaccaacatgagagacgtggcagtgctccttttggacttttctctaggtttggcgctaaactcttcttgtgagctc

SEQ ID NO: 237768 - DNA, 100 bp, Homo sapiens
gccagcaccgcacgccctgcaagggaggtttgtcctggttgtggtcaagactggatgatgtaactggctctctaggaagcctcacttggccgtaacctca

SEQ ID NO: 237769 - DNA, 100 bp, Homo sapiens
ccgcgcccgcaggacgccccagccaggaatagccaggccagaagaaggaaggcctgtggtgagtgggacaggaaatgacatcaccaccccaccgaacaag

SEQ ID NO: 237770 - DNA, 90 bp, Homo sapiens
catccgctgtgccgttgcccaccacgcaggccctggctctggctggaccgaaggtggagctggacagaatatttctgtccataagacccc

SEQ ID NO: 237771 - DNA, 75 bp, Homo sapiens
agatatggaattatttcgtgatatccaagaacaagcactgcagattccccgccactgtatgtctgaagatagcaa

SEQ ID NO: 237772 - DNA, 80 bp, Homo sapiens
acattcaagtgaagcaaaagcctttcatgattatacgccctgctggcggacttggagtctaccacctcccacatctccaa

SEQ ID NO: 237773 - DNA, 100 bp, Homo sapiens
caagaatatacctatgtctgattggttgccagcttcctgcctgacacagctcacttcaagaagtgcacaatgtcagaacgtggaattaagtgggcttgtg

SEQ ID NO: 237774 - DNA, 100 bp, Homo sapiens
agcaggaagggtgtcactgaccccaaagaactgaaattctgcgttcaagtggtgcttcatgccccacctccaaccaagatcaaacgggagctgcacagcc

SEQ ID NO: 237775 - DNA, 101 bp, Homo sapiens
gaagaggagctcagacagctcttaccacatgatacaagagccggctggtggaagagtggggaccagaaagctaaaccaggtggacaggtgaaatgtcagta

SEQ ID NO: 237776 - DNA, 50 bp, Homo sapiens
tggccattgcgagcggcatctacctactgatatcagccagcctgggacgg

SEQ ID NO: 237777 - DNA, 80 bp, Homo sapiens
gaaacggattgccagagaattggcagaagggttttcagagaaagatgctgatgaggtgaaaggaatttttgtagatacca

SEQ ID NO: 237778 - DNA, 100 bp, Homo sapiens
ttctgctgcttctgggccctacgcgcggcttgcgcgtgaagatggagctggaaaaacaagcttaataagaaaaattcagggaatagaggagtataagaaa

SEQ ID NO: 237779 - DNA, 100 bp, Homo sapiens
agaaacccctcctcccctagcttcactcaatgttagtaagtccctgcactaggtcagacaatcccctttggggtacaggaaacaaagcaggaggagtttg

SEQ ID NO: 237780 - DNA, 80 bp, Homo sapiens
gctgagaggagcgtggctgtctcctctctccgccatgactaatagggatgccaaaggaaaaatatgatcctccagatcct

SEQ ID NO: 237781 - DNA, 127 bp, Homo sapiens
tttaatcctcagacggtgggcgtgggacgcgcgcgcttcaccacctatgaggttcgcatgcggggccaaaagagaaacattggctactttgacaaccttaaagcggactccaggaatatcaccaaca

SEQ ID NO: 237782 - DNA, 100 bp, Homo sapiens
acagcctcatcacccggctgctggagggtgcgagaagatgtactaaattcattgaataacaactttcttcaaacgctaaatcaagcttggaatgatcatc

SEQ ID NO: 237783 - DNA, 87 bp, Homo sapiens
gcggccggggcggcggaggcggaggcggccggcccgggatgcgaagtacaaaactgcttcggctcattgacttagatttttcattta

SEQ ID NO: 237784 - DNA, 100 bp, Homo sapiens
ttgtgttgcgaggaactatcttggtgaagcagtgagtcgaaatgcgtctctggaagtggcatctccagtggctgttggacaattatgagacagcagaagg

SEQ ID NO: 237785 - DNA, 75 bp, Homo sapiens
ttctctcgatgaggataacatccctccagaagatggtcccactctatgaccagtgggaggatgtgatgaaaggga

SEQ ID NO: 237786 - DNA, 50 bp, Homo sapiens
aggcggtggtgcccgacttcgaccccgttaccggtattgtaagaacaagc

SEQ ID NO: 237787 - DNA, 100 bp, Homo sapiens
tacttctcgtcttgctatcatctctcagtcagtaaaatgtttattggaggcttgagctgggatacaagcaaaaaagatctgacagagtacttgtctcgat

SEQ ID NO: 237788 - DNA, 116 bp, Homo sapiens
gggaaactaggtcgatggtcggcggcgcccggatgggcagctgagggccccgtggttatgaatgtgcttcagtttcataatgcctcctgctatggcagacatccttgacatctggg

SEQ ID NO: 237789 - DNA, 101 bp, Homo sapiens
ctcttcatctcgtctgtacccagtgtgccctgctttacaccagctgtgcagggcagcgtcggctccgcatccataatctggccctgaactgctgcacccag

SEQ ID NO: 237790 - DNA, 75 bp, Homo sapiens
aagaattattttgcaccactggatgttgtttactgtttccctgaaacctgggctcttgaagacgcatcactggag

SEQ ID NO: 237791 - DNA, 99 bp, Homo sapiens
atcagaatgcccagacgaatgcagcttcgtttgatggttcatgtaatcaaagaagtttctttgttgtgtgtatctttacagaacacaacaggaattgaa

SEQ ID NO: 237792 - DNA, 98 bp, Homo sapiens
caccccgcagcacagccgcgacttcaaggtctcagcgtatcctttgccggagcatcgcagcacagccctggcaaaccaagctgccatgctgtacgtga

SEQ ID NO: 237793 - DNA, 97 bp, Homo sapiens
tggtgatcggctccttaccagctcacctctcgccgcacatgtttggagggatcatggcccaagttgcaatgtccaccctccccgttgaagatgagga

SEQ ID NO: 237794 - DNA, 90 bp, Homo sapiens
attatcaatgcgaagataaagaatgttgccttaggagggtattcctagttcttctcatgtaagtaataacatgagtacaccagttttgcc

SEQ ID NO: 237795 - DNA, 82 bp, Homo sapiens
cgagcccagcgtcaacttcctcaagtcgcccaaaggtgaccagcgccatgtccagccaggtggtgggcattgagcctctcta

SEQ ID NO: 237796 - DNA, 50 bp, Homo sapiens
tctgtataaatacaggtgctataaggaatctttgtctgaagtggaagaaa

SEQ ID NO: 237797 - DNA, 75 bp, Homo sapiens
aggtggtgctcatcaagcaggagaaagaccgagtgcggctctatgagtggacaacagagaaggagctgcgcactg

SEQ ID NO: 237798 - DNA, 83 bp, Homo sapiens
gccaagatggcggtgctgtcaggcccactgctcagtggagcgtggaggacgaggaggaggccgtccacgagcaatgccagcat

SEQ ID NO: 237799 - DNA, 85 bp, Homo sapiens
aagaggctatttcttgtcacaaaaaggctgcagctttttctaaaggctcctgtgaacactgcagaactaacagatctcttaattc

SEQ ID NO: 237800 - DNA, 98 bp, Homo sapiens
ctggtgatagaccggcgacgggacaaatggacctccgtgaaggcgtccgtcctgcgcatcgcaagccccagtttgagggacagcgggatatccaccat

SEQ ID NO: 237801 - DNA, 83 bp, Homo sapiens
tgcaggatgacaatgcttctgtgcttgacgtctatttactgactttggtttctgtgcccagatcacccctgagcagagcaaac

SEQ ID NO: 237802 - DNA, 75 bp, Homo sapiens
gaggagccagaaacagatctcagccccgggctcccagctgcccacctcataggacctgggaagagccaacagacg

SEQ ID NO: 237803 - DNA, 75 bp, Homo sapiens
tgccgtcctgggcctcggggactcctcatacgccaagcgggagactctgcaggacgtgtctttcactgtgatgcc

SEQ ID NO: 237804 - DNA, 100 bp, Homo sapiens
cgcccgccgggcacacaagaatggtcactattaagcctgatcaagatgacaacctcccaaaagcaccgagacttcgtggcagagcccatgggggagaagc

SEQ ID NO: 237805 - DNA, 90 bp, Homo sapiens
gcccgccgcgcggagcgccccttcgcgtcccctgcaccatgagctggggcaccgagctctgggtcttattagtaggtaagaaacagctgc

SEQ ID NO: 237806 - DNA, 75 bp, Homo sapiens
agaattgacccttgaaggaatcaaacagttttatattaatgttgagagagagcttgtagaccctggagttaaggc

SEQ ID NO: 237807 - DNA, 90 bp, Homo sapiens
gctctgtacacatatgaagatggctccgatgacctcaagcttgcagcatcaggagccgcttacaaacacgcagatggcaagaagattgat

SEQ ID NO: 237808 - DNA, 83 bp, Homo sapiens
ggcggcggcggcggccttgggccggtggacgtacccagcgctcggaccaagaatcgccttcagccctgtctggtgcatccttg

SEQ ID NO: 237809 - DNA, 101 bp, Homo sapiens
ccgctgagcgatcccaccgaagcagcgtgtcctccgtgggagcccgagatagaagctttggagaaaatgaatgaagatcacgttcagaagaatggaaggaa

SEQ ID NO: 237810 - DNA, 90 bp, Homo sapiens
cggaaatccaaaggcagacagtacgggctcccttcgccaaactcttcattttctctgcattgtgtggctgctcaattaatgtaccaacac

SEQ ID NO: 237811 - DNA, 95 bp, Homo sapiens
gacgatgcagcagaatctctgattgagcaaaccacagctctcaacaagcgagtagaagccatgaaacagggtttcctatcgctgaagtgttcacg

SEQ ID NO: 237812 - DNA, 100 bp, Homo sapiens
atctgctctaaaccttatagcctgcttatgggggaagcacacactcacgggacacagtgggaaagtgctgtctgctaagttcctgctggacaatgcgcgg

SEQ ID NO: 237813 - DNA, 75 bp, Homo sapiens
gcgcgagcgaggcgccctagacatcttctccctcccttgcctcaggttggggtgactcagtgggaacgccatctg

SEQ ID NO: 237814 - DNA, 85 bp, Homo sapiens
tggaggtctatggtgtccactttgagttacctgaccttggaccaattgagccaggccgaggcccactacaaaggaagtaaacatg

SEQ ID NO: 237815 - DNA, 87 bp, Homo sapiens
tctactgctccatacggaaacctcagacatctccagttacagcccgaacactggaaactctgattcgactggccacagcccatgcga

SEQ ID NO: 237816 - DNA, 87 bp, Homo sapiens
aaaactgtttgaaaagagtacaggacttcctcacaaaggacatgttcacattacagacttcaacatagcgacggtagtgaaaggagc

SEQ ID NO: 237817 - DNA, 74 bp, Homo sapiens
ttcgatttgcaaatcattcagtgaatcccaactgttatgccaaagggtggctgaggtcctggaaggcaaaggag

SEQ ID NO: 237818 - DNA, 80 bp, Homo sapiens
agctgtgctcgcgctactctctctttctggcctggaggctatccagcggacagaagatgagcctgtcggtcctggagggt

SEQ ID NO: 237819 - DNA, 90 bp, Homo sapiens
gtcgtggcaacgttgctggtgacagcaaaaatgacccaccaatggaagcagctggcttcactgctcagctgcattctgccctggctaagc

SEQ ID NO: 237820 - DNA, 75 bp, Homo sapiens
ctaaaccatctgaattggctcaatgatgagtgttttccaagcagtgaagcacttgccgtgttgaactgaatgcac

SEQ ID NO: 237821 - DNA, 85 bp, Homo sapiens
acaagagtcctcaatccaacagcccagtgcttctgtctcgactgcactttgagaagtttgaaggatgacctctaggaagaaagtg

SEQ ID NO: 237822 - DNA, 74 bp, Homo sapiens
tcctgcaccaccaactgcttagcacccctggccaaggtctcagagcatcagcacccagaatgtaaggaactttg

SEQ ID NO: 237823 - DNA, 51 bp, Homo sapiens
acgtgggacaggagaattctctagtcacgcacgttgaaccatgggagaaag

SEQ ID NO: 237824 - DNA, 82 bp, Homo sapiens
ccgagagcgcgaatatcgtcatcgttagaaggaactgctgttgtaagcggctcatcaagagttgaacttcacgtagccttgt

SEQ ID NO: 237825 - DNA, 100 bp, Homo sapiens
tcattttcacctcgcgtcgcgcccgggaggaaggaacgaggcaaggagctaaagcagcgtgcgttcagccctgggtggacatcctcatcatggatgatga

SEQ ID NO: 237826 - DNA, 80 bp, Homo sapiens
tgctgtcgctttcacagagtcaatgaaggaaatggcacaagcgcagtggtttggaaattttagcattcaggtgccaggaa

SEQ ID NO: 237827 - DNA, 80 bp, Homo sapiens
ccagagatgaccccttatgaaggtgagaagccctaccactgcaactgggacggctgcggctggaagtttgcgcgctcaga

SEQ ID NO: 237828 - DNA, 83 bp, Homo sapiens
tgtagataaaaacattttcagagactgtaacaagatcgcattttacaggcagaagctcctcctggggtagagacagatcttat

SEQ ID NO: 237829 - DNA, 100 bp, Homo sapiens
caagagacagcaacagagattgcacaaatgaactgtctaattcttgcaagctgtcagtggtagctataggaattaacatatacagaacatcaaatgtgga

SEQ ID NO: 237830 - DNA, 90 bp, Homo sapiens
ctatcctcctggccgtcctcctcacggtcctcctggctgtgctcatatacacctggtggattctgaagagccagtctttgaggctgtcat

SEQ ID NO: 237831 - DNA, 100 bp, Homo sapiens
ctttctcctcggcactgtattctttacctgcttcccaatcccactgatgaggatcagcccatgatcttcttcagcagtatcgttctgctgtgtgcaaact

SEQ ID NO: 237832 - DNA, 95 bp, Homo sapiens
gtcgccaagcccatcacccaccagcccaggaagcctgcggaagcagaggataattctgaaataatcagcagaaacggaatggaatgccaagaatc

SEQ ID NO: 237833 - DNA, 97 bp, Homo sapiens
aagccttattgaagagataggaactcttggttgggataagttgcatatggccaagtccttggagttataggatattcattacttcctctcattgtaa

SEQ ID NO: 237834 - DNA, 97 bp, Homo sapiens
tagcgaccgtcgccggcagcgccgcgaaggcggtgctcgggccagcccttctctgccgtccctgggagtcacgccgatgatggagctgaagcccaac

SEQ ID NO: 237835 - DNA, 50 bp, Homo sapiens
cgctcgtcaccagcaagcttgcgggggtgagaactctgtctcagtcgacg

SEQ ID NO: 237836 - DNA, 97 bp, Homo sapiens
accgcctcagaagaaagaagatgacttcctcaacaacgccatgtcctccctgtactcggtgaacagtggtatagcagccactccagcctctgctgca

SEQ ID NO: 237837 - DNA, 100 bp, Homo sapiens
gccacttggttctgccagatgttcctggggttactgtaaatgggaaggacaggcagagctaaacaaggtgtgcaactgaggaacatggctcaagaaacta

SEQ ID NO: 237838 - DNA, 109 bp, Homo sapiens
cgggactcgggtttgggcgaccaggaggtgccggtggccgcgctcggacccgtctgcgggccaggcatcgacatccgcaacgactatcagcagctgaagcgcctggaga

SEQ ID NO: 237839 - DNA, 75 bp, Homo sapiens
atcgcaccctccgacgacgcccgccgcctcactgttatgagccttcaggagcagacgcctccgcctagacctgaa

SEQ ID NO: 237840 - DNA, 100 bp, Homo sapiens
tatttgtttctctctgcctgatttctcctgaatttggaaactatttgtgcaagtgaaagtgtaggaaaacatatgcttgaagcgtgcaacaataatctgg

SEQ ID NO: 237841 - DNA, 76 bp, Homo sapiens
gtgcaatcctggagccccccagtgaggatcctgaggaggatgaaggggctggccctggaggccgagagtgagctgg

SEQ ID NO: 237842 - DNA, 75 bp, Homo sapiens
cacgaagtctgtgaagctcaaggaggccatgggaggtctgcctgagacacccactgcagacccccagcccagcct

SEQ ID NO: 237843 - DNA, 75 bp, Homo sapiens
cgactctgtgcctcgctgagggttctgggccggagaaggggcgacgttcgggcaccccccgaatggacaatcttt

SEQ ID NO: 237844 - DNA, 141 bp, Homo sapiens
gagacagagctgagggagcaagaggtgtcggaggtctcatctttgaactactgccggagcttctgccagggccgcgatgggcctcttggaacattggtgtgttcatctgcattcgatgtgctggaatccacaggaatctgg

SEQ ID NO: 237845 - DNA, 100 bp, Homo sapiens
ccggcgggtcgggccgggcaatgcctcgcgggcgcaatgaatccgcggcaggaagcagttcaggtacttttgaagcattctgcagatgttaatgctcgag

SEQ ID NO: 237846 - DNA, 98 bp, Homo sapiens
cctagatcgagctccctgtgtgcaccgcgcgctgcccgagattacagtagaatgcacattccttgactatataatgggaggatgtcagctgaatttta

SEQ ID NO: 237847 - DNA, 74 bp, Homo sapiens
ctagctgttgacgttggtgctcgtgacctctttatgggtcagtgaagatatgaaattaactgactcagagctag

SEQ ID NO: 237848 - DNA, 87 bp, Homo sapiens
caggatgtgcagacacaactacgagctgggcgggcccatgaccctgcagcgccgagatacaaactggactctcaggacaaaacgaca

SEQ ID NO: 237849 - DNA, 122 bp, Homo sapiens
tactctgtattcagatcttcatgtgtctcttctaagctgaataaagctgttttggaactgtcaggtacctcaaagcatcgagttttggttcgggttagagacttgacaatacaaaaagctga

SEQ ID NO: 237850 - DNA, 100 bp, Homo sapiens
ggcaaagtggaaaaatgtgcgagacaactgaagaattggatgtatccattgatattctaacctcaagggaacagtttttctcagatgaagaaagaaaata

SEQ ID NO: 237851 - DNA, 75 bp, Homo sapiens
aagaccggagggacacaccctgctgggcagctttggaagaagtagaaggtgatgtggcagaattggaactaaaac

SEQ ID NO: 237852 - DNA, 90 bp, Homo sapiens
atacacacatattcatcatcatgggtgcatcggttaatttggagtggcccctggagtcagtttcctacaccatccgaggccccacccagc

SEQ ID NO: 237853 - DNA, 75 bp, Homo sapiens
tcagttggaagcagccgatccagcctgcggagcctgtggggcaggcagcgtctatcccagactaccggggcccta

SEQ ID NO: 237854 - DNA, 100 bp, Homo sapiens
ctcaaaccgcttagcgaggaaaggtcttatatccagatggccaggctcagatgattcaccccaagcctgcagacttccggaatcctggcccagggcggca

SEQ ID NO: 237855 - DNA, 95 bp, Homo sapiens
cccagcgccaggatcgccccttcttcctgtactatgcctctcacgcctcaagctccggggaaaggacattggaaagcccatcgagaaggggccta

SEQ ID NO: 237856 - DNA, 98 bp, Homo sapiens
gtacttcattgaagccagtcccttgcccagcagttatccgggaaaaacaatcttgtagaaaatttcagctgtagcccttggactagaagctgaaataa

SEQ ID NO: 237857 - DNA, 75 bp, Homo sapiens
ctacgagctggctttaatcctgaaagccatgcagcgggacttaaccaccaccatgtcgagcaaaagaacaaagac

SEQ ID NO: 237858 - DNA, 83 bp, Homo sapiens
actggtgtcgagaagtccggaagcttgtggcgctgaaaacgaacgacctagaggatcaagacataatgggagcatttttagac

SEQ ID NO: 237859 - DNA, 100 bp, Homo sapiens
gattgttttaactgtctgcctatagcagccattgtggatgagaagatcttctgttgtcatggaggaaactatggtccaggaggcagtggaggaagtgggg

SEQ ID NO: 237860 - DNA, 75 bp, Homo sapiens
cccatccccagaagatcctggtcccctgctttaaccatcgaaaatgaggtttactcatttggggagatgccgtgg

SEQ ID NO: 237861 - DNA, 82 bp, Homo sapiens
aggaagagccgggcagtccctggagcgggccaggtttggaagaggacagttgccctttattctggcggcagatagcagcagg

SEQ ID NO: 237862 - DNA, 82 bp, Homo sapiens
ggctgatttgccttaaactccctaaaatctccgcagctctggttcctgttgcggccgacaccattcgcttttcacccaagat

SEQ ID NO: 237863 - DNA, 116 bp, Homo sapiens
ccactaaagggcagagcaaagactccagtaacactcaagcaaagaagagttgagcacaatcagaccaccgctgaaacttcacttctacacagaggctttctttcccagaaacccag

SEQ ID NO: 237864 - DNA, 100 bp, Homo sapiens
cacctgggagcaggtaggcgcttacgaggaggtcaagcgcggggcgctgccctcgggagaggtgaggaagatcttctcagtcctccccaggacacaagca

SEQ ID NO: 237865 - DNA, 95 bp, Homo sapiens
atgtcgattgcactttactgggggatttgcctcagatggagttacagtttcctccttatgcaactaatgaaattggcaaagtcactggtttaaat

SEQ ID NO: 237866 - DNA, 82 bp, Homo sapiens
ctgaagaggaggtgcagatggcactttccaaagtggatgcctccggggaggccatcaccatcgaggctgagccaagagctga

SEQ ID NO: 237867 - DNA, 50 bp, Homo sapiens
cctgtttgtcttctgctttggcccagccaaaacctattgatgtacaagtc

SEQ ID NO: 237868 - DNA, 100 bp, Homo sapiens
gatgatgagccagtgacaccaaaggactccctgattgaccggagacgcaccccaggctccagtgtggaagtgaaggaggacaagtgctgggagaaggtgg

SEQ ID NO: 237869 - DNA, 100 bp, Homo sapiens
gaacgatgaggagaacgaagagcgctgggttggacctttacctgtggaggcaacactggccaagaagaggaaagacgggtctcacggccaaggaactgga

SEQ ID NO: 237870 - DNA, 83 bp, Homo sapiens
ccgtcggccgccgtcagcgagggcgccgagcaacttcgggtttccaggcctgaggtgcccgccctggccccaggagaatgaac

SEQ ID NO: 237871 - DNA, 98 bp, Homo sapiens
tcatcatgagcgatgttaccattgtgaaagaaggttgggttcagaagagggcgggagatacagatgacccaccaagaattactcagaaccctgtgatc

SEQ ID NO: 237872 - DNA, 75 bp, Homo sapiens
ccaagaacgtgctcttcgctcacctggatgacaacgagaggagggtctggccctcactgcaggacaggttcagct

SEQ ID NO: 237873 - DNA, 74 bp, Homo sapiens
ggaggaggggctccggctggtctgtggtgagaatgaattcccagttcctgagcagttcaagaccctatggaacg

SEQ ID NO: 237874 - DNA, 75 bp, Homo sapiens
ctggcaaccgccccgtctgagaatattatgatgacacattcccctccatgaaggagcagatggttttcgagaaaa

SEQ ID NO: 237875 - DNA, 106 bp, Homo sapiens
aatgggagattccacgatccgccagtggatggaatacttcaaagccagtatcaacagacattcgtcatgtcctcaaatacaatgcttcaaaaaacgctgctgatct

SEQ ID NO: 237876 - DNA, 97 bp, Homo sapiens
aaaaaccatcgaagaatgaaaccggcttgttgtcttcaattaaaaaatttattaaaggaagcacacctaagggatgtccgtcgcttggtagtggcca

SEQ ID NO: 237877 - DNA, 100 bp, Homo sapiens
cctcgggaccggctgtatgattaggccacaatcttcaatgagtaaacatattcctgctctgacgcccgctctgcggcttcggtgtttgaacaggccacag

SEQ ID NO: 237878 - DNA, 98 bp, Homo sapiens
cggagcgctgaggcgggcgttttcttggatgaattgcttgctttggaggtgatgttctgcaccctgaacacccacaaagtggacatggacaagctcct

SEQ ID NO: 237879 - DNA, 49 bp, Homo sapiens
ctgcaagaccgcgaggcgagacctcttctctggattaatcgaattacag

SEQ ID NO: 237880 - DNA, 76 bp, Homo sapiens
ggaactcaatggaacacaggctggaatggaccaggctggtagataacgtggaatcttgtagaaggaagatcagcat

SEQ ID NO: 237881 - DNA, 83 bp, Homo sapiens
cggcagccgaacggccgcggcagatcacttaggaaaatggctgttggtatgatcctagcatgcctggcatttgcagttgcggc

SEQ ID NO: 237882 - DNA, 90 bp, Homo sapiens
gggaaggggtaccggcaagagaattgttgatccatttcagatacttgtggcagcaaacaaagcagttcacctctacaaactgggaaaaat

SEQ ID NO: 237883 - DNA, 100 bp, Homo sapiens
attttgatgtggatgatgccaaagttttattaggcgcggatcaagaagatcatgcagacggacgaagagattgggaaggtggcggcggcggtgcctgtca

SEQ ID NO: 237884 - DNA, 90 bp, Homo sapiens
gcctccgcggccgagagtgcagcgaaatagctctccagacccccagctggccatgtggtgagttcagggcccaaatcaagtagtaccagc

SEQ ID NO: 237885 - DNA, 100 bp, Homo sapiens
tgaaaatactgaaattgatagcagtttgaatgctctggacatcctgagcccaagtcccccacactcagtgcagtgatgagtgcggaagtgaaggtgacag

SEQ ID NO: 237886 - DNA, 50 bp, Homo sapiens
cgtcaatcagagcgtcctgtgcggtacaatggcttggtgaccggcacgag

SEQ ID NO: 237887 - DNA, 100 bp, Homo sapiens
ccgccgctgcgcccgacgctccctgtctgggaccttctccctgcctggacccctactattgcaacaagatatgctgtgatagcatttggatgtgccagct

SEQ ID NO: 237888 - DNA, 100 bp, Homo sapiens
ccctacggctgcaaggacgctctgcgccagcagctccgctcggcgcgagaggtctcagccttagatccaaggacagtccaaggaagtcctaagaccatgg

SEQ ID NO: 237889 - DNA, 74 bp, Homo sapiens
aggtgagtcgcggtgggtcctcgcttgcagttcagcgaccacgaaatgcactcggtgatggaaagagagccact

SEQ ID NO: 237890 - DNA, 75 bp, Homo sapiens
gatgattgacgtggcggagccaggccagcggaagatcgtcatgcataaggccatgaagtacttgtcatacctgct

SEQ ID NO: 237891 - DNA, 87 bp, Homo sapiens
tctttcatgggaagaggatcggcagaaagtgttgacactggaagaacgttgcagcaaattagaagccgtgctggtatagaggactct

SEQ ID NO: 237892 - DNA, 95 bp, Homo sapiens
gaaaatactacagagtgtgcacactggctatcattgatccagttatggcagagaacgatgtggacaatgagctcttggactatgaagatgatgag

SEQ ID NO: 237893 - DNA, 101 bp, Homo sapiens
ctcgggcctctgtggcctcagagcgtctgggccacactgtctgggaagaggtgctggagaatctggtaaaagcaccattgtgaagcagatgaggatcctgc

SEQ ID NO: 237894 - DNA, 71 bp, Homo sapiens
gcgatggcgctctataacccctaccgccacggtgctggagaatctggtaaaagcaccattgtgaagcagat

SEQ ID NO: 237895 - DNA, 50 bp, Homo sapiens
gcacggaagagacgcctcctcgatatgcaactcttccatggatgtacctg

SEQ ID NO: 237896 - DNA, 51 bp, Homo sapiens
cagaacggatagctccctcctggaaaaggctcttgcagccaatgccggaac

SEQ ID NO: 237897 - DNA, 50 bp, Homo sapiens
acccgccgccgccgttggctggagggcaccatgccggtggaaaggatgcg

SEQ ID NO: 237898 - DNA, 90 bp, Homo sapiens
aaagttcttctcccagaatatggaggcaccaaagtagttctagatgacaaggataaggccaaggtggaaatccggaagctcagcgatccc

SEQ ID NO: 237899 - DNA, 75 bp, Homo sapiens
ccgccgacgcctcagccgcttggggcccgcacggaccctctacttcagttttaaaatcaaagatgggaaaatcgg

SEQ ID NO: 237900 - DNA, 87 bp, Homo sapiens
ccggagcccggcgctttccccgcaagatggacggtttcgccggcagtctcggtgagaattatgaagatgatgacctagtaaattctg

SEQ ID NO: 237901 - DNA, 100 bp, Homo sapiens
aaggttataagaaaggtgcagaagtcattttaaactatggacgactccgaggaacattgagccctggtacctgacagtgtaaagaaggagctcctacaaa

SEQ ID NO: 237902 - DNA, 83 bp, Homo sapiens
atgagaccgggggaggcgacgctaagttgctgatcgtggcggtactctctgaagatggcagaagctcaccaagctgtggcctt

SEQ ID NO: 237903 - DNA, 100 bp, Homo sapiens
agtggatgatgtgcttggtggagcagctgcctgggagaatgttgactctactgcaggcaatggatcacttggagtcctttattgctgaatgtgatcggag

SEQ ID NO: 237904 - DNA, 75 bp, Homo sapiens
ctagtgtggctctcctgttccagcaattggagctgaactagagaaacatggttataagatggagacttcatagca

SEQ ID NO: 237905 - DNA, 114 bp, Homo sapiens
gcgccagcggccgagcgggcggcttcctggcctgggcgctccggtggcggcggagatgaaggatttgggggcagagcacttggcaggtcatgaaggggtccaacttctcgggtt

SEQ ID NO: 237906 - DNA, 98 bp, Homo sapiens
gcatttccagaaggctgcgactcagctgcgaggccacgccgtaattctgaattgctcagctctgcagagtttattgcatttgctgagtagcccaaagg

SEQ ID NO: 237907 - DNA, 74 bp, Homo sapiens
gctaccatggggctgcagctgaacatcactcaggataaggctgcaaagaaaactcaggagctgctggagcggca

SEQ ID NO: 237908 - DNA, 50 bp, Homo sapiens
cttccaaggaaccagtgcgaagagaagatgcaaccagttttgccattttc

SEQ ID NO: 237909 - DNA, 93 bp, Homo sapiens
gcaggcgctgcgccgcaacgccgagcgcaccgacatctgcctgctcaaaggaggatacgaagcgttttcggcttcctgcccggagctgtgcag

SEQ ID NO: 237910 - DNA, 90 bp, Homo sapiens
cattaaggattgcagagcaagagtttattcatggaggacacactgctaagatttcagattttagctggaaccccaatgagccttgggtca

SEQ ID NO: 237911 - DNA, 74 bp, Homo sapiens
gcttcaatatgcaattcctatttcacagatatgggccctcacattttccaaacctgtccatctgctaactattt

SEQ ID NO: 237912 - DNA, 100 bp, Homo sapiens
agaaccctgcttgaccgctccaagtcctatgagctcatccggaagattgaggcctacatggaaggagtacgagagggcctccaaagtggaccagtttgtg

SEQ ID NO: 237913 - DNA, 82 bp, Homo sapiens
agaaagaggtgggcaagatcctgtgcactgactgcgctcttgaggctagtgcgcctctaggcaagatgtccctgcccatcgg

SEQ ID NO: 237914 - DNA, 90 bp, Homo sapiens
cggagaattccccttcctagaaggaccaagatggcagcagtgactctgctggctttggcgtatacacagagacagagtttcaccatgttg

SEQ ID NO: 237915 - DNA, 100 bp, Homo sapiens
gcatgggctacaaggaaaacggcatttccggagagttcttttgaagtcacttcagaaggatctacatgaggaaatgaactacatcactgcaataattgag

SEQ ID NO: 237916 - DNA, 74 bp, Homo sapiens
aggaaggaggaggaataatatttatggagcatatattatggaacacagatatgatgatgcctatagatttgggg

SEQ ID NO: 237917 - DNA, 82 bp, Homo sapiens
tggagctcacggagaagaaggcctccgacatcaggatcctcatgaccagccaaagagaagaagaattaggaagcataaatca

SEQ ID NO: 237918 - DNA, 50 bp, Homo sapiens
gcggttggtgccattcgctacaaagggccgttgctccagggagaactgca

SEQ ID NO: 237919 - DNA, 100 bp, Homo sapiens
gccaagaagttaggaaacaactgcgttttcgccccagccgacttctacctgcgggaggaggacatcggtaaaaaccgggccgaggtatcacagccccgcc

SEQ ID NO: 237920 - DNA, 89 bp, Homo sapiens
gaaaatccagaagagcaaaggcgatgatgccacattacctacgaaagtaggcggtacgaaccctaatggaggcagttttgaggaggtcc

SEQ ID NO: 237921 - DNA, 100 bp, Homo sapiens
accagcccaaaagtgctcaacttcctccagaaactttggcgacaatgttggcctgtctgcaagcttgtgcagggaaatctgaaatagagtactatgctat

SEQ ID NO: 237922 - DNA, 75 bp, Homo sapiens
atgaactttctgcggtgactgtgtcgggtcatgtatacaataatcagtgagttggtccaggtagcaatgatgaga

SEQ ID NO: 237923 - DNA, 100 bp, Homo sapiens
caggagaacgagtccctcttcactttcctcggcaagaaatgtgtgggtgccaaagcatgctttctgcgggacattcctttctcggccatctactttccgt

SEQ ID NO: 237924 - DNA, 100 bp, Homo sapiens
tccaattcaagaggaggagaggggttgttttataaactgcctggccgaatcagccttttcacgctcaaggtggctcctggaggtcaatgcgtccccatca

SEQ ID NO: 237925 - DNA, 75 bp, Homo sapiens
gggagcagcacttccacagccaagtgcgggagtccacggtgcagctgactgcacagacgtcactggggcctgtgt

SEQ ID NO: 237926 - DNA, 74 bp, Homo sapiens
tggtttgtgctgactgccgagtcactgtcctggtacaaggatgaggaggttgggcccgaaggcatcctgcagaa

SEQ ID NO: 237927 - DNA, 76 bp, Homo sapiens
aaagtcatgggagcagagctcagacatgttctcaccacccttgatgggccatcaactgagaaagaccttgacgaaa

SEQ ID NO: 237928 - DNA, 90 bp, Homo sapiens
caagacaagattgaagccctgagtagcaaggctgttgtagtgactgatggagagagaattctgggtcttggagatctgggtgtctatgga

SEQ ID NO: 237929 - DNA, 75 bp, Homo sapiens
aaaaccccaaaagtgtacataagaacgatatcgcattcagagtgaacaatttgaagatctttggctcataaccaa

SEQ ID NO: 237930 - DNA, 90 bp, Homo sapiens
tgccacttttgcaagggcgaggtcagccccaaactaccgggatccatctgtctctaagtctgtagaacgaatctttaaaatctgggaaga

SEQ ID NO: 237931 - DNA, 50 bp, Homo sapiens
ctgctcttccaagcaaggaagtcgacagtgtatgcagagaatatttccaa

SEQ ID NO: 237932 - DNA, 109 bp, Homo sapiens
ctgccgtccttctccactttcgccagcccgtgccgcgagcgcggcctgcaggaggagtctgctacaccatttttgatttgggcttccgctttgatgtggcatggtaagg

SEQ ID NO: 237933 - DNA, 101 bp, Homo sapiens
gactcctacctccaaagtttatactatcagaccttattttcctaaggatgagtttgacaacttaaatgctgcgcatgaaacctctaagttggaaattgaag

SEQ ID NO: 237934 - DNA, 100 bp, Homo sapiens
ccccatgatgatcctgccatgcaggcaggccctgagcacgctgctgtgtgagcagcaggttggctggatatttacagacctcgtctcagaagatacccga

SEQ ID NO: 237935 - DNA, 90 bp, Homo sapiens
gaagcccccagaaccaggcccccaactcagccatctgcggaggtcaaggtcaacaaaaatctctcatttacttcaccaccagcagtttcc

SEQ ID NO: 237936 - DNA, 75 bp, Homo sapiens
tgcggaagctggagatcacaggcgtgtcttgtcgggacgtctatgcgaagcatgttctgccttactcaatacggg

SEQ ID NO: 237937 - DNA, 74 bp, Homo sapiens
cttggagcaaaaatcagtgagagaatacagggccacacagggcctgccttaagtgtgaaagtaatgactgatga

SEQ ID NO: 237938 - DNA, 96 bp, Homo sapiens
aagatggacctccagaaggctgctaccatcccagtgagccaaatctctaccattgcagactttatattcagagcaccaatcaaattaagcaagcct

SEQ ID NO: 237939 - DNA, 75 bp, Homo sapiens
ggaggccaaggacggcgttctggatctcaaagcggttccagcaacagatagaaatgctttaagttcactctgggg

SEQ ID NO: 237940 - DNA, 100 bp, Homo sapiens
gtttgaccaggcccagaggtccgtgcggcagcagctccagagctttgtcaaagattgctgaacctgtttgcatgagttgctcctgacggccctttaggat

SEQ ID NO: 237941 - DNA, 100 bp, Homo sapiens
gcggagctgacggtggaggttcgcggctctaacggggctttctacaagggatatcatgataacacattttgaaccttccatctcctttgagggcctttgc

SEQ ID NO: 237942 - DNA, 87 bp, Homo sapiens
attataaagctgcaaagaagctgttgcactcaggaatgaaaattcttagccagttctccacgcaccatgttttccctctggccacgc

SEQ ID NO: 237943 - DNA, 123 bp, Homo sapiens
ttcctgcagactgcatcaacaagtatgggtctccgtacaccaaaaactcaggcttcgccacctgcgtgcaaaaacctaaaggcagacccagaagagctttttacaaaactagagaaaattggg

SEQ ID NO: 237944 - DNA, 99 bp, Homo sapiens
catctcggactcccgacccgccgccggctccggccgcgtttcccgggtaaagggcgcccgggggctggagaaggccaggcagcagctgcaggaggagct

SEQ ID NO: 237945 - DNA, 74 bp, Homo sapiens
cgggtccgtgcgcccagcgtcccagggcccaggccgagcaggtgagaagccctaccactgcaactgggacggct

SEQ ID NO: 237946 - DNA, 82 bp, Homo sapiens
gaggaccactagttggaccccatcctcgtgctggaggaacagatcaggatcctcatgaccagccaaagagaagaagaattag

SEQ ID NO: 237947 - DNA, 98 bp, Homo sapiens
tgccttgatatacacttttcaaaatgctttggtgggaagaagtagaggactgttattggcagattgctactctggctttactcctgggcggcgctgcc

SEQ ID NO: 237948 - DNA, 75 bp, Homo sapiens
ctgcctaggccgggccctgccagggagcaagtctgcatcgcagaggccagggtttgtccagaggggttgcgttta

SEQ ID NO: 237949 - DNA, 115 bp, Homo sapiens
ggtgccagctcgggcaggccttccgagaggaacctctatgccgacatcgacgccgcctggcaggccctgcgcaccagttcaaggagcagggacaagttacaggaatgttctccaa

SEQ ID NO: 237950 - DNA, 83 bp, Homo sapiens
attctgctcccataaaagttcatcataatcaaacgtgcacactggtttttggctgttgtttgtttccccggtttggaaaaacc

SEQ ID NO: 237951 - DNA, 100 bp, Homo sapiens
tgaccatgtatttgtggcttaaactcttggcatttggctttgcctttctggacacagaagtatttgtgacagaagagaatggcatggatcaagaaaatcc

SEQ ID NO: 237952 - DNA, 100 bp, Homo sapiens
gtcagagcccggggacggcgaggccctcatgtaccacacgggggacaaagtctgggtataccctcctgaaaagaaggagaaaggatacccaaagttgctc

SEQ ID NO: 237953 - DNA, 82 bp, Homo sapiens
ttcggtggactccttcggcagtccacccaccgccgccgcctcccagtgatgaacggcagcagccactcaccaacagccatca

SEQ ID NO: 237954 - DNA, 100 bp, Homo sapiens
gaccagcgcccgaaggccgacacgctggccctgaggcaacggctcatcaggtgtgcctaccgcatgttgccgctgctgtttctgctgggacgtctgactc

SEQ ID NO: 237955 - DNA, 74 bp, Homo sapiens
ccagactgttactacaacctcgggcgtctggtttgatatcgacagctgcacttactacttcagctgggactccc

SEQ ID NO: 237956 - DNA, 90 bp, Homo sapiens
catcgactcagtcagtctcttggtttggtctctaaaagtaaaggcacagtttaatggcaacgagaagcggcagtcatccccctcaccttc

SEQ ID NO: 237957 - DNA, 75 bp, Homo sapiens
cgacgtgcggacgcagcggcgggggctgcctgtgtgaaagctggagagagtgttctggttcatggggcaagtgga

SEQ ID NO: 237958 - DNA, 100 bp, Homo sapiens
gcccaggccctgaggtgggccggacctgggagtggcagtaagactttgaccccgacgcaggcttcagtgattgccgcggatcagaagcctgagcactttg

SEQ ID NO: 237959 - DNA, 101 bp, Homo sapiens
ctcagccatggacgcgtccctggagaagacactctgacctggtcacagccagagacacttggaaatcctccatctccccggcatggtcatgtgatggtggc

SEQ ID NO: 237960 - DNA, 100 bp, Homo sapiens
cgcctgctgagtggacccgggtgccgaatacatcaagcaatggtaacatctttaaatgaagataatgaaagtgtaactgttgaatggatagaaaatggag

SEQ ID NO: 237961 - DNA, 101 bp, Homo sapiens
tgcccctacctcacattcccgccgccatggcatcagatgaaggcaaactttttgttggagggctgagttttgacaccaatgagcagtcgctggagcaggtc

SEQ ID NO: 237962 - DNA, 100 bp, Homo sapiens
attgaagtagatcctgacactaaggaaatgctgaagcttttggtgaagttcatccacgaccagacctccccaaaccccaagtacagaggattcttccacg

SEQ ID NO: 237963 - DNA, 87 bp, Homo sapiens
cagagaatgaaatcactttgtgtcaaaaagaaataactcagctgaagcatcagatgaggacggggacttggttgccttttccagtga

SEQ ID NO: 237964 - DNA, 90 bp, Homo sapiens
cgctgggagccggtgcccagagcgcagggcttccttctgcactggcaacctgagggttcgagcatacgggccaggtttggagaaatctgg

SEQ ID NO: 237965 - DNA, 100 bp, Homo sapiens
cattgaatgggctgaagtggtgatcaatgtgaacaatattctcaagggtgccattattatccatgaagtttatgaagaaggagcagcatgtaaagatgga

SEQ ID NO: 237966 - DNA, 82 bp, Homo sapiens
ctgtccccagagcctcagtttgtgcaggacaccgacatggaacagggactcactgggggttgagcgcaccatcacatctaag

SEQ ID NO: 237967 - DNA, 80 bp, Homo sapiens
tacgcccaagccgccctggatggagactcccagcttctcctcttccttaaagccttttccgaaacagagcagacaaagtt

SEQ ID NO: 237968 - DNA, 100 bp, Homo sapiens
cccttctttcgatcagagatcggcggagaccctcgaagtgcgcaaacttgacactcaccctgaccgggcgatgccagtccctccactccagaggagaacg

SEQ ID NO: 237969 - DNA, 100 bp, Homo sapiens
ggagattatagctctgtatgagaaggacaacacctacttagaagcctcagtgtaaagtctgccgatcatgccctgtggtgcagtcgagccagcacctgtt

SEQ ID NO: 237970 - DNA, 51 bp, Homo sapiens
cttcgccgccgcgcacaaccgcacgtgcagtttcatgataaaattgagcct

SEQ ID NO: 237971 - DNA, 75 bp, Homo sapiens
ggcagctggagatcacctagtccaccactgtccaacatggcaatggagaatacaacttattcgaaaacgattgct

SEQ ID NO: 237972 - DNA, 98 bp, Homo sapiens
tggaaatcagtttgctgaaattaatcaacgattcttgaagttgaagaaaagagtcattttcagagcacatggatgatagcaagcaagaatctaccacc

SEQ ID NO: 237973 - DNA, 98 bp, Homo sapiens
ctttgtattacgtgaccagaactgctatttgagattctggaagccagtgatgcagtcttgcttggagtggtgaaggaggagatctcggatgacaatgc

SEQ ID NO: 237974 - DNA, 88 bp, Homo sapiens
aaagcaactcatgcagaggaacaaggagctggatgtcgttcgggttcaaaccttgtactactcagctgatcacaagctgcttgatggg

SEQ ID NO: 237975 - DNA, 100 bp, Homo sapiens
cgacgcaaccggcagcagcgctgccgccgcgtcctcagccaccgctccctcttcccacgaggcagaagaggcctggaccttggcgcacacagacccagga

SEQ ID NO: 237976 - DNA, 76 bp, Homo sapiens
cttggccgtgcttgccctgtcatcccacctgagaaccatgctcaccgaccctattggctcacagtggttgattgat

SEQ ID NO: 237977 - DNA, 75 bp, Homo sapiens
tgacaatttgcttgcgcttataaggatttagaagaattctgctttaagttttgcatcaatcatttgacagaagtt

SEQ ID NO: 237978 - DNA, 74 bp, Homo sapiens
ggaggtggtgcctctggcagtgacgaggacgaagtgtccgagcatcaaagctaagccagaagatttatcacatt

SEQ ID NO: 237979 - DNA, 83 bp, Homo sapiens
tacccaaggacgggacgggatgggcaaacaagcaggatcagcaagacccaaagaggtccagctgggagctccccgacctccag

SEQ ID NO: 237980 - DNA, 83 bp, Homo sapiens
aggagctaaagcagcgtgcgttcagccctggggaggaacaggaggcagcccggcgccgccagcagcgcgagagcaagagcaac

SEQ ID NO: 237981 - DNA, 73 bp, Homo sapiens
cgaaagtcccgccgcgccgagacctgccgaaggatatggccctgaagccacatgagcggaaggagaagtggga

SEQ ID NO: 237982 - DNA, 75 bp, Homo sapiens
cttcaatactacctttatttccaccataggtaagaatgattgatgttggctgatattggagtgctcattcacatg

SEQ ID NO: 237983 - DNA, 98 bp, Homo sapiens
cccaggaggagactctccctggaaaacttcccttccctttcgagctgccaaatgctgttaaatcaactgagagaaatcacaggcattcaggacccttc

SEQ ID NO: 237984 - DNA, 101 bp, Homo sapiens
gcgcccccactcgcgctgcgatgacgcgctcactgttcaagggaaacttttgggttcgatacaagaggctgttttcctagcgtggcttgctgcctttggta

SEQ ID NO: 237985 - DNA, 75 bp, Homo sapiens
ccgccatggagcccgactcggtgattgaggacaagaccatcgagctcatggaccaggaatcaccttcaagcctat

SEQ ID NO: 237986 - DNA, 101 bp, Homo sapiens
tggggagaagaggattggaggtgtcagtgttaaaggaacctctacaacgaaggtgaagccacggaagataagctgccaatgtcttgctctcagaacaagga

SEQ ID NO: 237987 - DNA, 97 bp, Homo sapiens
cagaaagcaagtcagctgttcaagctgcactggagaagcaaagtggaagatgctttctacaaaggtgaactcaggctgaatgaggaaaaattatgga

SEQ ID NO: 237988 - DNA, 83 bp, Homo sapiens
tcctgacacaacaccactcaggagaagagaagtttacctttattgagaaatgtaacaaccctcgttctgtcacattattgatc

SEQ ID NO: 237989 - DNA, 100 bp, Homo sapiens
ttgtaatcaagttgataaggaaagtactgtccaaatgaattatgtcagcaacgtatccaaggctggacgtaaagaaagaagtgatgcactcaattctgca

SEQ ID NO: 237990 - DNA, 83 bp, Homo sapiens
tgctgagtcagtgtgacagtccatatgtaaccaaatattatggatcctatctgaaggacatgtattcctctgagaaaccttgg

SEQ ID NO: 237991 - DNA, 83 bp, Homo sapiens
ctcttctcgccctggcggggaagggatacccacccaccatcccagggtctacaacatccacagccggaccgtcacccgctatc

SEQ ID NO: 237992 - DNA, 75 bp, Homo sapiens
aactgagagagatgcttaaaaatcaccagttactttaatgagagctagaagcatctgaagaactagatacaattt

SEQ ID NO: 237993 - DNA, 74 bp, Homo sapiens
tgctccacctgggaattatgatacctctgcatatctcacagatttcctctgccagtttgctcagcagccctgct

SEQ ID NO: 237994 - DNA, 75 bp, Homo sapiens
tctggatgccaaacgagattggggccatgccaaggactatgtggagcacaacattctgaaattttttggttattg

SEQ ID NO: 237995 - DNA, 91 bp, Homo sapiens
tcctgaagcagttctgtgtatccaacattaatcagaaggtgaagtttcaggtgtcagcttcctctggtgcaaccagcaagtcttccagtat

SEQ ID NO: 237996 - DNA, 75 bp, Homo sapiens
ggtgggaggcaacctatatggccatttgtcagacaggcactggaggatcgccccagctcactccttgttgaccag

SEQ ID NO: 237997 - DNA, 100 bp, Homo sapiens
cttgttggtgcttcctcatgtattgaagaattccaatcccagttcatttttaaaatatttacaccagcagctccagttcataccaataaagaagatcctg

SEQ ID NO: 237998 - DNA, 96 bp, Homo sapiens
ggacacagcttctagtgttgctttggatcttgtggaaagtcagatgaaagatgtcatgtatatctgcccatttatgggagcagtgagtggaaccct

SEQ ID NO: 237999 - DNA, 75 bp, Homo sapiens
gcttcaaagactgctgccctagaggggattgcagaatctccaacaactttacagctgtccagaccaaaacgaaga

SEQ ID NO: 238000 - DNA, 100 bp, Homo sapiens
ctagacctacaggtggagttggagcagtagctctgctaattgggccaaatgctcctttaatttttgaacgagctctcatttcactcttcagtgttcctgt

SEQ ID NO: 238001 - DNA, 50 bp, Homo sapiens
tccagatggcagccagtcagtggtggagattggtccagaaaagggcgtgg

SEQ ID NO: 238002 - DNA, 51 bp, Homo sapiens
cggaggtcgataagctggaactgatggaccatggccaacctggagcgcacc

SEQ ID NO: 238003 - DNA, 83 bp, Homo sapiens
attgaatgccaagcagaaaattacctaaatgcactctttcgaaagaaaggtgacggcaattgcctcatgcatgccacttctca

SEQ ID NO: 238004 - DNA, 96 bp, Homo sapiens
tctgagtctgtggaatgcaagtctgccgatgaagatgtcattaaggtagaacgtcatgacatgaataccttaagcctgcccctgaacatacgccga

SEQ ID NO: 238005 - DNA, 98 bp, Homo sapiens
ttctgtgggactccagattatatcgccccagagaagatgcctctaatggaggagtttctgagcagcacccctggcccagtggctttgaaagggagctc

SEQ ID NO: 238006 - DNA, 127 bp, Homo sapiens
cggtcccccctcctcacccgaacatcagggccctccagactcaggcgccccaacacacggatgataccatcggggaccttaagaagctgattgcagcccaaactggtacccgttggaacaagattgt

SEQ ID NO: 238007 - DNA, 98 bp, Homo sapiens
gcaccgcaccgagggcgagctccagtgcatacattcccttgaataattacttggtgtttaatgatgtagatgggctgtatacatacacatttgaagca

SEQ ID NO: 238008 - DNA, 83 bp, Homo sapiens
tacagaccgtcgatgctgtgcattgaggaccccctgctgccagcttcagctttagctgcagctgcctctgttcagccacttgc

SEQ ID NO: 238009 - DNA, 100 bp, Homo sapiens
cccagccagcattccctgcaggagccctacacagcctccgtggttctggagagtcttggcttctgggaggaagtcagagggattatctcaggatcagagc

SEQ ID NO: 238010 - DNA, 97 bp, Homo sapiens
agatctcttacctttcaaagtggtgggatattatagatattcagaagaaggatgctgttaaaaggcacatctccctaacacttcctgccaccttccg

SEQ ID NO: 238011 - DNA, 80 bp, Homo sapiens
gggccagggaaccctggtcaccgtctcctcagtttccaaggcaggaaaggtaaagagacaaagaaagtgccttgtacaga

SEQ ID NO: 238012 - DNA, 100 bp, Homo sapiens
ggaatatgccaaggaaaaactggagagcttcatcaaaaatagtgatagctttgataagtagcagcaattgcagagacagatgaatctgcagaatcagaag

SEQ ID NO: 238013 - DNA, 100 bp, Homo sapiens
cagctctcatcaatggccatttgaattcacttcagagcaatccactactgccagaccagaagacttcacagagaatgcagttgtcttgacttcaggtctg

SEQ ID NO: 238014 - DNA, 100 bp, Homo sapiens
attgatggataaatcaggaatagattctcttgaccatgtgacatctgatgctgtggaacttgcaaatcgaagattggtacacagaacagcttggagcttc

SEQ ID NO: 238015 - DNA, 90 bp, Homo sapiens
ctcccagcgtgagcgacgcagaagacgggtgatttctgcatttccatctgaggtgttggaacaggcgatggatatgatctaaaagtccaa

SEQ ID NO: 238016 - DNA, 88 bp, Homo sapiens
gagtcactactgcctgcctgcctgcctgctacgttggccagtcagtgctgaaagatgtaagcaaagtgaagaagctgaagcaatctgg

SEQ ID NO: 238017 - DNA, 75 bp, Homo sapiens
tgtcttggaaatactaagttggatggcagaaacggtggacacaagcgaaatggtcaacggcgctacagaacaaag

SEQ ID NO: 238018 - DNA, 87 bp, Homo sapiens
gaaggacatcatcaccttggaaatgagggagctcatccaggatattggtgctggaaaaggcaaatactatgctgtcaattttccaat

SEQ ID NO: 238019 - DNA, 100 bp, Homo sapiens
ctggggcagtatcaacggagtctccggggtggaatatgtgatcaagtgtgacatgtcagctctgcagaagattctgtatcgccatatgcaagccaagggg

SEQ ID NO: 238020 - DNA, 83 bp, Homo sapiens
gtgggatccggttccttggtgtcatccagccttagcaaaccagagtttaaaaggatgcttaatcgggagctcacccatctctc

SEQ ID NO: 238021 - DNA, 90 bp, Homo sapiens
ctggactttagggctgtggtgatggatgaggtggtgctgacaatcgagcaaggaaacctggattttatttggagagaagcaagcatcttt

SEQ ID NO: 238022 - DNA, 83 bp, Homo sapiens
ccagaacgtgccatggagacgcttaacggttattcagcttctcaaggctggaaaagcgaaggaagtttcctacaatgcactag

SEQ ID NO: 238023 - DNA, 82 bp, Homo sapiens
gctggttttgtgtacagtgaagctgtagccaggcatccagcaagatgaggacatctatgaggaaggaaactatgaggaggaa

SEQ ID NO: 238024 - DNA, 80 bp, Homo sapiens
gatcttcattccagctcttcctgcggctatgagaggttttcctccgagtacccagaattctgttctaaaaccaaggccct

SEQ ID NO: 238025 - DNA, 90 bp, Homo sapiens
ggccgtcctgaacctgttatcacctggagacaccttacaccaactggcacattgcaagcaacccgtgccttgatggtggttggcatcctc

SEQ ID NO: 238026 - DNA, 107 bp, Homo sapiens
ggcccagccggttcagagcaaaccgcagaaggattgctgtggaaactgcagcgacagcgaggaagagctccccacccgcctctagcccccagcccgaggcccccacc

SEQ ID NO: 238027 - DNA, 75 bp, Homo sapiens
tgctgattcctgcagcctcctatgtgctcccagagttaattttcctgagagaccaagacctggtctcctcggttc

SEQ ID NO: 238028 - DNA, 100 bp, Homo sapiens
ctttgtgtcctgagatcaaatggcacttcattggccacctacagaaacaaaatgtcaacaaattgatggcctttaaatctacaagacagcagccttcccg

SEQ ID NO: 238029 - DNA, 74 bp, Homo sapiens
ccgaagcctaaattccaggaggacagaggaactgaaccgcgaggtggccaccaacagtgagctggtgcagagtg

SEQ ID NO: 238030 - DNA, 51 bp, Homo sapiens
gacaattgttcaaaagatgcaaatggctggagtgtaatggcacgatctcgg

SEQ ID NO: 238031 - DNA, 75 bp, Homo sapiens
ggacatcgatagggatgcagaggatcagaaccggtacctggatggcatgtgcctcaacctggtgttcctgctggc

SEQ ID NO: 238032 - DNA, 100 bp, Homo sapiens
cggaacccgagctggagctgaagcgcaggctgcggggcgcggagtcgggagggaccagaggaagaccgagaggcagaatccgagttaacagtaacacagt

SEQ ID NO: 238033 - DNA, 90 bp, Homo sapiens
cttacagctacactcctaggaaagaccaccatcaatgattaccagcaaagaaatgatgactttattgaattagactacaccattctactt

SEQ ID NO: 238034 - DNA, 100 bp, Homo sapiens
agcccacacacaggtgaatttaaaggagcagccctggtgtcacctatcagtaaaaggtgtgggcagaagaaaaagctagtgatcaacagtggcaatggag

SEQ ID NO: 238035 - DNA, 82 bp, Homo sapiens
ccagcttctagaagacccattacagagggattctgatgagatggaggatgggcctggggttcaggattaggccttgaggcac

SEQ ID NO: 238036 - DNA, 100 bp, Homo sapiens
ttcaaactatgttttaactgatgagcaatcactttggattgaagatactacaaaatcagtttatcaaggaccaaagcagtatccttacaataatctgtac

SEQ ID NO: 238037 - DNA, 75 bp, Homo sapiens
gaagatcaatgacttttgccgttctcagtgccctccaattaagggtctctaacagttgaagattgtgtggttcat

SEQ ID NO: 238038 - DNA, 100 bp, Homo sapiens
actcctggcctccagtgatccttctgcctcagcctcccaaggagcgaggaccacaggttccatgcctctgcagcggtgcctcatgtttgctgtgtagttg

SEQ ID NO: 238039 - DNA, 90 bp, Homo sapiens
ggaactggaccagccagcagcctctaagagctcctagacggttgacaatggtctccaggatggtctctaccatgctatctggcctactgt

SEQ ID NO: 238040 - DNA, 100 bp, Homo sapiens
gcttgagagaaaagcccccaaaagcagctattcaggaaaatcagtcgcctatatgccttatgctgaggtcaaacgtgctctagaacaggaagcacagatg

SEQ ID NO: 238041 - DNA, 100 bp, Homo sapiens
gaacaaatttgatttccggagtcagtcattttactgtcaagacatttcttcggcattctgcaacaggaactgtggctgcaccatctgtcttcatcttccc

SEQ ID NO: 238042 - DNA, 100 bp, Homo sapiens
cgagccaggcccggcaaccattgcctgcggaaagatcgtgtcgcacacgcacctcggagtgatgaagtgtcctcttgctagcaccaataaaagatttcta

SEQ ID NO: 238043 - DNA, 51 bp, Homo sapiens
accaaatattatggatcctatctgaaggtccagtggcattgcagagcacgg

SEQ ID NO: 238044 - DNA, 75 bp, Homo sapiens
actatgaggctatccgcagcgagatggagcagctcaaggaggctaggtcctttcacaaaactgttcctgtgaaag

SEQ ID NO: 238045 - DNA, 75 bp, Homo sapiens
cgcactcctcagagtccgactctcccacctgctaaggattctgaaaccttccttgtatccctcctgagacatctt

SEQ ID NO: 238046 - DNA, 83 bp, Homo sapiens
ggaccgcatgctacaggacacggtgctggccgccggttgcaagcagatactggtgcctccgctccgggaattctgaagttctg

SEQ ID NO: 238047 - DNA, 83 bp, Homo sapiens
ccgagctggagctgccgcggcgcagccagacaatgcagatcttcgtgaagactctgactggtaagaccatcaccctcgaggtt

SEQ ID NO: 238048 - DNA, 75 bp, Homo sapiens
ccctgtgggtggacgtggttggtgattggcaggatcctggtatccgctaacagaacacagatggggtgaacttct

SEQ ID NO: 238049 - DNA, 95 bp, Homo sapiens
aaatcaaactgcaaatctgggatacgagcaatatactttgctgcttattcaaactgcaaggaaaagttgaatgatgtatttgatcctgattctac

SEQ ID NO: 238050 - DNA, 83 bp, Homo sapiens
ctctacaaggacggaggcgttgcgattattgaccagtggatctgcgcacacgccaggtgagaagccctaccactgcaactggg

SEQ ID NO: 238051 - DNA, 100 bp, Homo sapiens
cattgaacacccacacacagatgtggtgaaatgtacccagttagtaagaggtcagtttacgttgcgagacatgtatgagcaatttcaaaatatcatgaaa

SEQ ID NO: 238052 - DNA, 84 bp, Homo sapiens
ccgagaccgtcctggcgcgatgcgtcaagtacactgaaattcatcctgagatgaggaagctcttcgtgggcggtcttgactgga

SEQ ID NO: 238053 - DNA, 83 bp, Homo sapiens
ccgatttaaagctgagctgcgaggaaaatggcggcgggagatcaccgaagtggccttggagtacaacaactgtcatggggacc

SEQ ID NO: 238054 - DNA, 89 bp, Homo sapiens
tcacagtgctgagtcagtgtgacagtccatatgtaaccaaatattatggatcctatctgaaggaaacctatgagaatatcccaggccag

SEQ ID NO: 238055 - DNA, 75 bp, Homo sapiens
gtggactcctcttctacatcaacttggctgaccattggaaaggaactgtggctgcaccatctgtcttcatcttcc

SEQ ID NO: 238056 - DNA, 100 bp, Homo sapiens
tgcattgagcttgggtcaggacaattccatttggggaccagagatggacggtcactcagcctatggagaaacctgatgtgagactctctcgaggcagtat

SEQ ID NO: 238057 - DNA, 50 bp, Homo sapiens
cagcctcctgtgtagctgggattacagtaccacctgtactctgagcctca

SEQ ID NO: 238058 - DNA, 50 bp, Homo sapiens
gatttgtaaacaggatggctaaatgagccgtcagactgctacagcattac

SEQ ID NO: 238059 - DNA, 98 bp, Homo sapiens
agccgttgcctccagcaccacttctaatgtaataaaagactagtggccttagtgcccatgcccagtgaccctccattcaatacccgaagagcctacac

SEQ ID NO: 238060 - DNA, 100 bp, Homo sapiens
ggcaacttggcacttagaaccgcagcagggacgtcggtttgctatcgggactcggcgaggacgactatctgttatagtccctgggtcaagacaacaattt

SEQ ID NO: 238061 - DNA, 100 bp, Homo sapiens
atcaggagacacagtatagcttctgacagtggagacactggcattggaacttcctgttctgatagcgtggaaggggtgacagtccaaagattgacttggc

SEQ ID NO: 238062 - DNA, 75 bp, Homo sapiens
cgagtgggaggatggcggaaggatccaggtccggcacgatcaagacccaggctacatgcatcacaagtttgccat

SEQ ID NO: 238063 - DNA, 100 bp, Homo sapiens
cgtcacgtgaatgtttaaaagttgttaccttggagaagaaatggaggaaaggattggctttcggaggtggggcagtacgtgtcccgggctgaggagctca

SEQ ID NO: 238064 - DNA, 75 bp, Homo sapiens
aaaaagatggagccctgcatatgattggctctttagctgaaatacttctgaaggcaggaccagatgctgtgttgg

SEQ ID NO: 238065 - DNA, 100 bp, Homo sapiens
cccatctgaagggaggaaatagtggcaggtgacagtctgcatgtgcagttttcagcatttcacaggacatgcaacgccagtttcgtcactgatgttcact

SEQ ID NO: 238066 - DNA, 75 bp, Homo sapiens
gaagtaatgcaatggtctcaatctctggaaaaacttcttgccaaccaaatgaaagaggagccacgagatgaggag

SEQ ID NO: 238067 - DNA, 100 bp, Homo sapiens
tgaatatattcggcaaggaagcctctctgctaaaccccctggtgagaaggactggcagaaatacgagactgctcggcggctgaaaaaatgtgtggacaag

SEQ ID NO: 238068 - DNA, 49 bp, Homo sapiens
gcagaaatgaggcagaagcggaaagaggcagctcagatcacgggcaaaa

SEQ ID NO: 238069 - DNA, 75 bp, Homo sapiens
gtagggggatttgccaagtggccagacagtcatccaggcataaacttggaggaggcagtggagagagcatcctgg

SEQ ID NO: 238070 - DNA, 80 bp, Homo sapiens
aaggtcggcagagcaaggggcttacgcagaaggacctggccacggtggagccatcgaagcccccacccacaggctgacag

SEQ ID NO: 238071 - DNA, 98 bp, Homo sapiens
attccttttaacctatgtcttacaaaggcccaagacaagagcgaagccaccaggggagctctctcccaaaggccttgtcgccccagacctaactcgct

SEQ ID NO: 238072 - DNA, 75 bp, Homo sapiens
cggagagagaggtggagtccggcccccgaaagaggctttaccgatttgttacaactcaagcaagggccagcagaa

SEQ ID NO: 238073 - DNA, 100 bp, Homo sapiens
ctgcactgtgacctacactagtcgcgggagccacgcagaggacgccggaacaccctggaagccgagaaatgtattccactgaactgaagaaactctactg

SEQ ID NO: 238074 - DNA, 82 bp, Homo sapiens
gtttgtgatccctgcactccaagtagcacattttcagtgaatgcctctggctcaggcagtagccattcttcagaagcactgt

SEQ ID NO: 238075 - DNA, 82 bp, Homo sapiens
atctaaaaagaattaggaaggtccttcaggatgcaacctgaagatcttcaacaaccaggagttcgctgccctcctggcccag

SEQ ID NO: 238076 - DNA, 75 bp, Homo sapiens
ccagatgaaattcctttgcctctggttattggaacgaaagttacagggactatggcagttccaagaggaaatcag

SEQ ID NO: 238077 - DNA, 100 bp, Homo sapiens
cgggcggcgcgctgcccgaggggagcaaggacaggagaaagttactgttatgagcaccattaatccaactaaggacctgttggctgacttgattgggtgc

SEQ ID NO: 238078 - DNA, 100 bp, Homo sapiens
tattggctgccgttaaggaccgttacgtttcccggtggtggctggacctcgtggaagcccctctggctgtgtggctatggactcacgcagagcactgtcg

SEQ ID NO: 238079 - DNA, 80 bp, Homo sapiens
ggagctgacggtggaggttcgcggctctaacggggctttctacaagcaattctgtggtgttcttggtcacacatttatgg

SEQ ID NO: 238080 - DNA, 100 bp, Homo sapiens
gatttaacaacgttaccagcatccattgcaaaccttattaatctcagggaactggatgtcagcaagaatgggcagcccaatggatccaatggtgatgaag

SEQ ID NO: 238081 - DNA, 97 bp, Homo sapiens
gcttcaagtggcaggactttaagtggttgaaatacatcgtctacaaggagagagtggggactgcagccttcagatgcccaccggacccgctgcctcg

SEQ ID NO: 238082 - DNA, 75 bp, Homo sapiens
gttttaattgactatgacaccaaaaggaagtattacttaattcacctctacaggaggaacataacttccccccag

SEQ ID NO: 238083 - DNA, 75 bp, Homo sapiens
ggcagtcccgggagaacctgcggcggccggagcggagggtgaggacaaaatcttcttaatcaacaagcttcactc

SEQ ID NO: 238084 - DNA, 90 bp, Homo sapiens
cgcactgggaccccggaatcccgcgcgctgcccacgattcgcttctgagatgccttcaattaagttgcagagttctgatggagagatatt

SEQ ID NO: 238085 - DNA, 100 bp, Homo sapiens
atgaagaggcagtgcaagtcaaagagcagagcatcctggaactgggatctctcctggcaaagactggacaagctgcaggctcaggcagctgtccaaggac

SEQ ID NO: 238086 - DNA, 100 bp, Homo sapiens
agcagttgcaccctgttttgcaaaaaccatcagtgtttgggaatgattctgatgatgatgatgaggttcaaaactggtcaaatcaatggtgatttgctga

SEQ ID NO: 238087 - DNA, 97 bp, Homo sapiens
ggcgcgctcccgcggagccggagccgcagaggctcccgggctggactcaggcttctcagacaatgcagatcttcgtgaagactctgactggtaagac

SEQ ID NO: 238088 - DNA, 98 bp, Homo sapiens
agtgcgggcgcgggcgcgggcgctcccggcgagccacggtgctggagaatctggtaaaagcaccattgtgaagcagatgaggatcctgcatgttaatg

SEQ ID NO: 238089 - DNA, 100 bp, Homo sapiens
ccgaggcggccgccgctgcaccttcaccgcgtacccgggacccgcccgcccgcgggaggggatgttggaaattactattatggacaaggccacccaatga

SEQ ID NO: 238090 - DNA, 90 bp, Homo sapiens
agcaacttctgttgataagttggatccatccttttacaatccctgctattattcgtccattcagcgtattgaactatgatccacctcaaa

SEQ ID NO: 238091 - DNA, 98 bp, Homo sapiens
tggtggacgtggggggcgagtacgaccctcggagacaccgatatgaccatcaccagaggctgcaggggacagcgctggaccgtacagacctgcctaac

SEQ ID NO: 238092 - DNA, 79 bp, Homo sapiens
gtgactttgaacatgctggtgccgctagccaagctgtcctgcctgggttttgcgtccattcctccttcgtcgaattaag

SEQ ID NO: 238093 - DNA, 100 bp, Homo sapiens
gccaggtttactggagtaggtgttagtaagcccctctgaggaaggcaaagtttgttgagagcccacgaattccagaatccgagcttggctcaccaaccct

SEQ ID NO: 238094 - DNA, 98 bp, Homo sapiens
ggcccgatactacgaggagaagggcgtgcagatggacagggcggtcatgctgtaccacaaggctggcatgactcacatcgtgcgggaagtcgacaggc

SEQ ID NO: 238095 - DNA, 75 bp, Homo sapiens
catctctaaaggtccttctaggagagaggtgaaagaaactaattctgaagcaagcccttatagttgtgctgcagt

SEQ ID NO: 238096 - DNA, 75 bp, Homo sapiens
ttcacttagcccaccacatggcccttggacttctatttttgggaggaggaaggtggtgatgatgtccagcaactc

SEQ ID NO: 238097 - DNA, 75 bp, Homo sapiens
gatgcccctcctccaccagaggactgggaggagcatgtcaacaggatgttcacggaagaccagggtgtagatgac

SEQ ID NO: 238098 - DNA, 100 bp, Homo sapiens
cgaagagcttctgtcgccgctctaggctggtgagcctggccagtgaagtccaggacctgcatctggcccagaggaaggaaatggcctcaggcttcagcaa

SEQ ID NO: 238099 - DNA, 50 bp, Homo sapiens
aactctttgatgatgcatccaggatgtacgaagtaggtccaaagttgttg

SEQ ID NO: 238100 - DNA, 97 bp, Homo sapiens
tggcagtctagccggcctgggtgcttaccagctgtctcaggatccaaggaacgtttgggttttcctagaatggagatttacagacagtcatctgggt

SEQ ID NO: 238101 - DNA, 103 bp, Homo sapiens
gctgctgatggaggcggtggccgtgctcgtcgggcccccttcgggaggtcttgccccagaagctgcgggcacatccacgcctgaaatgcggcgctcagtcctg

SEQ ID NO: 238102 - DNA, 51 bp, Homo sapiens
cctcctgagtagctgtgactacaggtgccttggcatctcccaatggggtgg

SEQ ID NO: 238103 - DNA, 100 bp, Homo sapiens
gtgcctcatggatccaaattaaagagtactattaatcccgtagatgcaatatatcaacctagtcctttggaacctgtgatcagcacaatgccttcccaga

SEQ ID NO: 238104 - DNA, 51 bp, Homo sapiens
gcgacgctaagttgctgatcgtggcggacagacccacgaagtcaagcatgc

SEQ ID NO: 238105 - DNA, 90 bp, Homo sapiens
gtagacctgcccaagtctcccaagtgggcggtactgacctgtggtcactgtttctgtaatgaatgcatttctataattattgaacaatac

SEQ ID NO: 238106 - DNA, 83 bp, Homo sapiens
aaaaaagattcagattacgaggattatggatgaacgtaacagacaggatcatagaactcaatggtggacaaccgcctctaact

SEQ ID NO: 238107 - DNA, 100 bp, Homo sapiens
ttattgcctgcctgccttaacaaagaggagagcaaaacctgtaagtgtggagctcatgaaggacttcagcatttgggtccttttggcaacatccccaaca

SEQ ID NO: 238108 - DNA, 75 bp, Homo sapiens
ctgctacttatggaagatacaaaggatctgaacataaagtctggtctcctctggtgacggaggaagggaagcgtc

SEQ ID NO: 238109 - DNA, 75 bp, Homo sapiens
ccaagacctcatcaacaattaagactacatgaggaaataattgacttttataacttcatgtccccttgtcctgaa

SEQ ID NO: 238110 - DNA, 100 bp, Homo sapiens
ggacagcccgcgcccctagaacgctttgcgtcccgacgcccgcaggtcctcgcggtgcgcaccgtttgcgacttgacggggtctggctctgtcacccagg

SEQ ID NO: 238111 - DNA, 100 bp, Homo sapiens
cgcaccaagctctgctccacactgccaaccggccagaggacgagtgtggggaggagccccagccccgcgacgaggaggaagcggagctggagctgctgag

SEQ ID NO: 238112 - DNA, 82 bp, Homo sapiens
ggagatgaagaagaagattaacctggagttaaggaacagatccccggaggagattctctttgtggccagatgggtttgtatg

SEQ ID NO: 238113 - DNA, 82 bp, Homo sapiens
ctactaagaactacctgagctacctgacagccccggattattctgcctttgaaggcgccaatgcttcggcattagagaaaga

SEQ ID NO: 238114 - DNA, 136 bp, Homo sapiens
acaaaggagactcactggacagcgtagaggctctgatcaaaaaacatgaagactttgacaaagcgattaacgtccagggaaggattttgtacaaccacctaccaagatttgcgtgggctgccccagagatataccc

SEQ ID NO: 238115 - DNA, 100 bp, Homo sapiens
gacgaggccgccgctgccgcagccttcgcagcccctggcgaagcggtgctgcctccagcccagagatgccgccaagatgcccgagagcgcttggaagttt

SEQ ID NO: 238116 - DNA, 100 bp, Homo sapiens
gggaagtttgctctaacatttccagagaagttgcatccaagaattgatgcccggagagctgatgaaaaccttggaatgcttcttgtagaattttttgaac

SEQ ID NO: 238117 - DNA, 100 bp, Homo sapiens
ccgttcttgcctcaggccagtcgcctccaggccaagagggatccttcacccgtgtctggaatgtaagaagcacttggcaggcttgggggctttggggctg

SEQ ID NO: 238118 - DNA, 74 bp, Homo sapiens
taacactggcaactttgaaaatgtctgtacagccaacgctgtcggaaaaggtaacagaagatggaactcgaaat

SEQ ID NO: 238119 - DNA, 98 bp, Homo sapiens
ggacatcctggaagctgggaaatggctatctatgtgcctgctgatgacttgactgaccctgcccctgctactacgtttgcccatttggatgctaccac

SEQ ID NO: 238120 - DNA, 105 bp, Homo sapiens
actcaacagtttgtggcaagacaagctcagaactgagaagctgtcaccacaggtcatcatcagatttgaaatatttaaagtggatacaaaactatttcagcaatg

SEQ ID NO: 238121 - DNA, 83 bp, Homo sapiens
ctggattttctgacatcaagtcccacgcgttcttccgcagcatagactgggacttggggtcgctgtgatgaaattcaagaacc

SEQ ID NO: 238122 - DNA, 82 bp, Homo sapiens
catgccggcccggcggctgctgctgctgctgacgctgctgctgcccggcctcgggattttggatttagtaaaggggacacat

SEQ ID NO: 238123 - DNA, 82 bp, Homo sapiens
gaagatctggaagacgcgctcctgcgccggaccaagaatcgccttcagccctgtctggtgcatccttggcagaaagtgagga

SEQ ID NO: 238124 - DNA, 100 bp, Homo sapiens
tgactttctttgtggtagttagggtgtggtatgtgccactgaggcccacacctattgctgttccccctgctctgaggaagctggaacacttaggagacgt

SEQ ID NO: 238125 - DNA, 83 bp, Homo sapiens
ccgggaggaaggaacgaggcaaggagctaaagcagcgtgcgttcagccctggggtacgaggaacagcaaattcaggaaaaagt

SEQ ID NO: 238126 - DNA, 75 bp, Homo sapiens
cggcaaactccctggtctctgttggtgtagaagccaaaatcagcctacagcctggctcccgcgacgccggaggtg

SEQ ID NO: 238127 - DNA, 75 bp, Homo sapiens
gttaatagtggcatggaagatccatttgagagcccgagcccagcacattgtgccctgtactatatctcagctgct

SEQ ID NO: 238128 - DNA, 100 bp, Homo sapiens
aaaggcaccttgggatgagggaatacaagtgtcatgtctgtggaattaaacaaccaccatgtcgagcaaaaaggcaaagaccaagaccaccaagaagcgc

SEQ ID NO: 238129 - DNA, 101 bp, Homo sapiens
atctttttgaaataaagaaacttcgagaactggaaggctatgataagacagagccaactgttactacttctgatgcagctgtggacctcagttcatttaaa

SEQ ID NO: 238130 - DNA, 100 bp, Homo sapiens
cggactccgtcggcgcacatccccgtcccagcgcagaggtggcgagagaagcatgtccggtcactccgggcctggccacatgatgaaccgaggaggaatg

SEQ ID NO: 238131 - DNA, 76 bp, Homo sapiens
gcggggggctgccgaaactacccaggtttgccatgcagaacttgaattggggacttgttttcaagcagtaaatagc

SEQ ID NO: 238132 - DNA, 100 bp, Homo sapiens
aggattcagaagtgtatttagcatctctagggctccaacaaaagaatcctctgaagaggagtatgactctggagttgaagaagaaggatggccccgccaa

SEQ ID NO: 238133 - DNA, 74 bp, Homo sapiens
agttactgccgcgccaccgagtccggaccggagactttggggcctaactagcttcctttgctccaataagcttt

SEQ ID NO: 238134 - DNA, 75 bp, Homo sapiens
cggcatcaagcaggtccggacccactggctgctggagcttgtcaccaccagtcgaccgtgtgtgagaagatcatg

SEQ ID NO: 238135 - DNA, 100 bp, Homo sapiens
tttttgcagaggaaaaggcggtggcagatacaagagatcaagccgatgggagcagagcatctgtggattccggcagctcaggaccactccaatgacccac

SEQ ID NO: 238136 - DNA, 48 bp, Homo sapiens
ctccacctgagggactggctcctggggatgaaacgaggaggaagagat

SEQ ID NO: 238137 - DNA, 75 bp, Homo sapiens
cgggaagccaagcttgtggagttcgatttcttgggagcactggacattcctgtgaacgagaacgccaagaaggac

SEQ ID NO: 238138 - DNA, 82 bp, Homo sapiens
gaggcctgcccgtatagttcagggccggacagcgagcggcggcgacttgccagtaaggtcaaaatgcagatcttcgtgaaaa

SEQ ID NO: 238139 - DNA, 75 bp, Homo sapiens
ctcctccccatttccgcgctcccgggaccatgtccgcgctggcggaggagatcgccaagcacaaggggcccccgg

SEQ ID NO: 238140 - DNA, 99 bp, Homo sapiens
tacggtcacgtctacaaggcgaggcggaaagatgggtgtcatggagaaactccagctgggcccagagattctgcagcgggaaaatccaaggcttattta

SEQ ID NO: 238141 - DNA, 90 bp, Homo sapiens
ctttataagtgtcagctgtgaggggagggccccaaagctcatattcgtaagctggctgagtgcatccgctggtcgtacggggccgggatt

SEQ ID NO: 238142 - DNA, 97 bp, Homo sapiens
aagctacgatagccatgagccaggaatttcccttagggatagagttccttcgttcagaaaaacctggtctatggcacaactaaaaaggtttgccgca

SEQ ID NO: 238143 - DNA, 106 bp, Homo sapiens
acgaaaataccgagtttgtaatgtgactagacggccagccagtcatcaaacagaattttctctacatgtgcacccatttaaaggactcggcttcaagggaagcagc

SEQ ID NO: 238144 - DNA, 50 bp, Homo sapiens
cttggcatcaataaggagttatatatgggaactgtccaggtttattgctg

SEQ ID NO: 238145 - DNA, 75 bp, Homo sapiens
ctttttctctttagctcggcttattccaggggtgtgtttcgtcgagatgcactttgagtctcaggaagatgagaa

SEQ ID NO: 238146 - DNA, 95 bp, Homo sapiens
atggggattacagagtataacaatcagtgccgagcaattgtgatgagatattctgctgagtggaagcgtcgtctcggagatgcagccaagaaagc

SEQ ID NO: 238147 - DNA, 135 bp, Homo sapiens
tcccgggtgctgctggttagtgtgctctgagggagggtccgagccagccgctgttttgccggaggagcccctcaggccatggctctgagagattcctctgcgaatctgtttttagctatcaagtggcatccacgc

SEQ ID NO: 238148 - DNA, 82 bp, Homo sapiens
aaactttctactataaatcccggttttggctgcttaaactgctggtcagcccaaggccaaccccactgtcactctgttcccg

SEQ ID NO: 238149 - DNA, 98 bp, Homo sapiens
gggaaggtgtgtccggaggtttgcaggggtgcagtgtgtctggtcttatgaggcttgtaatgagccagtgctgcgccgtgttgctgtggacaagtgtg

SEQ ID NO: 238150 - DNA, 98 bp, Homo sapiens
caaaatggcggcgcctgaggagcgggatctaacccaggagcagacagagaagctgctgcagtttcagtcttcccaagggattgttgaagaaacttctg

SEQ ID NO: 238151 - DNA, 75 bp, Homo sapiens
agtactgattgaattactcaaggctgcctctctgcaaagttgagattgcagagggaatggcatacatcgagcgga

SEQ ID NO: 238152 - DNA, 99 bp, Homo sapiens
agaggctggaaaagagggtggaaaaagcagggaggttatgaggcttaataaagaaggagccaaaaacctgtatatcatctccgtgaaggggatcaaggg

SEQ ID NO: 238153 - DNA, 100 bp, Homo sapiens
ggaatttctggaacagttgccaaaagatgaccatgatgattttttcagtacaacacctttacagcatcaaagaatactgctctggacatcctgagcccaa

SEQ ID NO: 238154 - DNA, 82 bp, Homo sapiens
gcctagtaaacggggctgctggtgggccgcgtcgaagacatggaccagggctacggaggtgacttaagagattaaaattaat

SEQ ID NO: 238155 - DNA, 75 bp, Homo sapiens
gagatctacattaaccagctggaagccctgttgctggaagagcaagcagtcagaccaaaatacctactgggtcgg

SEQ ID NO: 238156 - DNA, 82 bp, Homo sapiens
aggacacaagaaactccttcacatctggaagaacttgaagttcagtgatcggattttgtggttggttgatattcctagagaa

SEQ ID NO: 238157 - DNA, 82 bp, Homo sapiens
ctcggcatggctctcctggtgctcggaacaagatcactcaaggtgaaggataatctactaataccagcactttgaatgaaaa

SEQ ID NO: 238158 - DNA, 88 bp, Homo sapiens
ttacagcttcatatgcaccagaaggagatgaagggaagaaggagaaagggccaacccctgaagaagcaatacagaaactgaaggagac

SEQ ID NO: 238159 - DNA, 90 bp, Homo sapiens
gccgccgccaccaccgccaccggaacccgagaccgagtcagaacccgagtgctgcttggcggcgagaattaactcctgaggagagagccc

SEQ ID NO: 238160 - DNA, 98 bp, Homo sapiens
gggccagattcccatggaagcgccgcgatgttcgccccccggctgctggatttccagaagacgaaatacgcgagctacgtgatgcccagttgtgagag

SEQ ID NO: 238161 - DNA, 100 bp, Homo sapiens
tcgaagaccaaagcatgatggggaagtttgtaaaagttgaaagacagatttatgatccccaaaagaagagatatgaagtaccagtaccgttaaacattcc

SEQ ID NO: 238162 - DNA, 98 bp, Homo sapiens
ctcaatgtgcccccatactgcacagagtgccctgaaactctaatctcattgcctggccagaaaaggaagtaatccctagtgtcagcagattcagcggt

SEQ ID NO: 238163 - DNA, 74 bp, Homo sapiens
tcaccaagtcacatgacaagcagcagacctgttatcctaaactaggtgagtcagcttttggtacatgtgatgat

SEQ ID NO: 238164 - DNA, 95 bp, Homo sapiens
ctgctcccgccggtgcccgctcagaagttctcggcgctcacgtcccggctgagacaacaggacatcggcctgaagacccacctggaccagctgga

SEQ ID NO: 238165 - DNA, 75 bp, Homo sapiens
ttgcactcaaaagcaagatatactactaactttgaaatggaataaggttgagaatctgtagtactgagaagtttc

SEQ ID NO: 238166 - DNA, 73 bp, Homo sapiens
ggccggaacttttgtcgataggaacgggtttgcacaatcatggaagggaagtggttgctgtgtatgttactgg

SEQ ID NO: 238167 - DNA, 75 bp, Homo sapiens
aagaaaggagactcacttatgtgcacaatggtagttcctgaaatgactgagatattgaagaaaaaatgaatcagg

SEQ ID NO: 238168 - DNA, 95 bp, Homo sapiens
aactctgcagtggaccacagcattcctgaaatacatccaggaaagacatggagattctcttaaaaagaaaccagcctggacaccaagtctgtgtc

SEQ ID NO: 238169 - DNA, 75 bp, Homo sapiens
gaccgccgaatcgctcctgcagcagagcaaaatgatgcttcaacacccaggccaggtctctgcctcggaagtgag

SEQ ID NO: 238170 - DNA, 100 bp, Homo sapiens
acacgcccgagctgcccctggccccgcggccgctcaaggagggctccatcacgcagaaatatgaacagggattcatcacagaccctgtggtcctcagccc

SEQ ID NO: 238171 - DNA, 100 bp, Homo sapiens
ttaaaatcattggaccatttagtaagaagaattccagtcttataaactgttaagaagaaatcctgaacggcgccttggggctagcgagaaagatgcagag

SEQ ID NO: 238172 - DNA, 100 bp, Homo sapiens
agcgcctcagctgcgcggcgcgtaggtcgcggggagctccgaaccgccggcgcccggccatggcggtctccaggtgtgttccagagaacaagccttcaga

SEQ ID NO: 238173 - DNA, 82 bp, Homo sapiens
ttcgtgttcctgggcctcatcctgtactgtgtgtggtacagaagttggtcctgccctttgggcgactgaactacctgcccct

SEQ ID NO: 238174 - DNA, 50 bp, Homo sapiens
cttttgatctgggtggacatgttcaagtgtgttatccaggattttcaagc

SEQ ID NO: 238175 - DNA, 97 bp, Homo sapiens
tcaccgacatcgcggcctccttcaccctgctggttggcatctacttcccttccgtgaccgagcccatggatttcagaaaattatctacattcagaga

SEQ ID NO: 238176 - DNA, 82 bp, Homo sapiens
cggaaacgcgttcatcgtgtctgccatccccatctgttcctgcacttggccatcatccatgaagaaaaggcactgaccatgg

SEQ ID NO: 238177 - DNA, 90 bp, Homo sapiens
gtgtacgatttgaccaaatttctggaagagtaataaaagactagtggccttagtgcccatgcccagtgaccctccattcaatacccgaag

SEQ ID NO: 238178 - DNA, 96 bp, Homo sapiens
cttggagcgaagagctcggaccaagcgctcaggtgaccgggttattgatgtgggatctgaatggcgaactttcagcaatgacaaagcaacaaaaga

SEQ ID NO: 238179 - DNA, 50 bp, Homo sapiens
cgagagtggccctgacggaggggaggaagacagagcgggatgccaccagc

SEQ ID NO: 238180 - DNA, 100 bp, Homo sapiens
ttccgctaatcagatgggagtatctgccaaacgtagaccaaaggctcagcccacaactcttgtcctaccacctcatgacaatgtcagtgcctactgcctg

SEQ ID NO: 238181 - DNA, 95 bp, Homo sapiens
gtaccaggcgctggagaaggacgaagaggaagccttgtgagtgaccactagtgtttgttaacaaaagtgattggaccacgaagtggcaggctgag

SEQ ID NO: 238182 - DNA, 100 bp, Homo sapiens
gcctcagaccgcctacagcgccgggtggaggaactctgtcagcgagtgtacagccgaggtgatggctggaccggcggaggaggcgggagcccattgtccc

SEQ ID NO: 238183 - DNA, 100 bp, Homo sapiens
agcaggagatcgccacctaccgcagcctgctcgagggccaggacgccaagttgcagatatcaagaaagtcaacaacttcatcagagaacaagacttatat

SEQ ID NO: 238184 - DNA, 80 bp, Homo sapiens
ctgggcgctccggtggcggcggaggtggtcaagtaccccctgcacgccatcatggagatcaaggagtacctgattgacat

SEQ ID NO: 238185 - DNA, 86 bp, Homo sapiens
gttaaggattccaagtaactcttatttgtaagactttgaccccgacgcaggcttcagtgattgccgcggatcagaagcctgagcac

SEQ ID NO: 238186 - DNA, 75 bp, Homo sapiens
ggctcagttttcttggaaactacttaggtccagttccggccgtaccgcacagacgacttcatcacgcgcctgtac

SEQ ID NO: 238187 - DNA, 89 bp, Homo sapiens
gcggggaccttgccttgcccgggccgaggtgctcggtggagtcatggcagtgccctttgtggaagactgggacttggtgcaaaccctgg

SEQ ID NO: 238188 - DNA, 75 bp, Homo sapiens
gttttctatggatttctggcaaaaggtgcaaacagctgcacagcaagtggcagaggataaatttgtttttgactt

SEQ ID NO: 238189 - DNA, 82 bp, Homo sapiens
cgccgttgttgcctaatccgtatattatggctccagggctgttacatgcctacccggaagaaaaaatgctgggcatcttggt

SEQ ID NO: 238190 - DNA, 96 bp, Homo sapiens
ggctagaagcagagacaccaggacagaaaagacagtgttctgctttcatggagttcacagaagagtcgaggagggtgatcagcccatgacctaaac

SEQ ID NO: 238191 - DNA, 83 bp, Homo sapiens
cccgtttgggttctccacgcattctagactcccgaagagacgagccaaactcaggctgtaccttgagcagctcaagcaactgg

SEQ ID NO: 238192 - DNA, 98 bp, Homo sapiens
attcccttcaattcaagtaacaggtggataaatatttgaaagaaattcttcaagatttggttaagaaccttacaagcaatatgtggcgagttcgagaa

SEQ ID NO: 238193 - DNA, 98 bp, Homo sapiens
gagtctccgccgctgcgggcccgctccgacgcggaaggagcccgctgcgaggccaacaccttcgatggtgagcgctgcctctatggggcactgagtga

SEQ ID NO: 238194 - DNA, 100 bp, Homo sapiens
gtctgtatcagcgtctgtcgcgctgggacccacactggcttttaaggaggacacccggacacctggaagctgggaaatggctggagtgcaatggcgtgat

SEQ ID NO: 238195 - DNA, 51 bp, Homo sapiens
aaggattccaagtaactcttatttgtccctggatggctttgtatttgcact

SEQ ID NO: 238196 - DNA, 80 bp, Homo sapiens
aatccttgtgcaaataaatgcttagtcaaaatgcagatcttcgtgaaaacccttaccggcaagaccatcacccttgaggt

SEQ ID NO: 238197 - DNA, 75 bp, Homo sapiens
tggagatgaacctctaacacagtggaaaggaaccgttctggatcagggactcggagatcatgcagcagaagcaga

SEQ ID NO: 238198 - DNA, 100 bp, Homo sapiens
ttcatctggatctcgttcatagacagctactttgaaatcctcttgtcaaaatgcagatcttcgtgaaaacccttaccggcaagaccatcacccttgaggt

SEQ ID NO: 238199 - DNA, 50 bp, Homo sapiens
ctcaaagtgtgccttctcggggtgctggagaatctggtaaaagcaccatt

SEQ ID NO: 238200 - DNA, 100 bp, Homo sapiens
tgtgaagaatctgctaccaaaatcactaggatcccatggtccattattgcctttaccaagtcgttacagaatgggctctcgagatacacctgaacttgtt

SEQ ID NO: 238201 - DNA, 73 bp, Homo sapiens
ttttttctacctgttgacgtgtcaagcactaactatgatgttgaatttgaagtatcatcggaccgacggactg

SEQ ID NO: 238202 - DNA, 132 bp, Homo sapiens
gctacgccttcgtggactaccccgaccagaactgggccatccgcgccatcgagaccctctcgggtgattttcttccacccccacctccacctctagatgattccagtgcccttccatctatctctggaaact

SEQ ID NO: 238203 - DNA, 87 bp, Homo sapiens
gaggcctcgcgaccgccgagcctgcagcctgccccgcggccaacatgagcttcttgtttgaattctacgaacccaatgccctcatga

SEQ ID NO: 238204 - DNA, 99 bp, Homo sapiens
gttggcagtaaatacacctttgaaagcacaattatttatcagtgtgagcctggctatgaactagagggatccacattcttcagcagtgtgacggtagct

SEQ ID NO: 238205 - DNA, 100 bp, Homo sapiens
tgcttctccttttcatgagtgttcctgtggtctctgcacctcctttctgtactccaaagattcaggtttactcacgtcatccagcagagaatggaaagtc

SEQ ID NO: 238206 - DNA, 96 bp, Homo sapiens
gcagccagaatcctttagcagtgggtcccaggacgtgcaccagaaaagagcttggtgttgtggttgccccacatacattaaagttaccagaagagc

SEQ ID NO: 238207 - DNA, 75 bp, Homo sapiens
atgaggaatgtctttcctaccatctaaaatacgaaggtttctggctggcttggatcctagcatgactatacattg

SEQ ID NO: 238208 - DNA, 82 bp, Homo sapiens
gggtaaagtcgagtatctggtgaagtggaaaggatggcccccaaaagatcctgaaggagctagacgagtgctacgagcgctt

SEQ ID NO: 238209 - DNA, 74 bp, Homo sapiens
gctgcatctttctcatgaagcacggggaacgggtcggatggcacagaaaactgaatctgtagataacgagggag

SEQ ID NO: 238210 - DNA, 135 bp, Homo sapiens
gccgggtcaccttcgaggcggacgagaatgagaacatcaccgtggtgaagggcatccgggactctgtctactagtgacgatgtcgaagacagggaaaatgaaaagggtcgccttgaagaagcctacgagaaatgt

SEQ ID NO: 238211 - DNA, 80 bp, Homo sapiens
gtcaaacctgtgagttcaacatgatagagcagagtggaccaccccatgaacctcggttacagagaagatcccagtaaggc

SEQ ID NO: 238212 - DNA, 75 bp, Homo sapiens
gtggccagttatttgcctcagtaaaagatcaagagaatccatcccattaaatgacctgaagtcagaagtatcacc

SEQ ID NO: 238213 - DNA, 49 bp, Homo sapiens
cacggcttcccccaaggaatatacaggagcaacaagggagcagtgggca

SEQ ID NO: 238214 - DNA, 98 bp, Homo sapiens
gaaggagcagatcaagaccctcaacaacaagtttgcctccttcatagacaagggggagcacctggggaccacggaagcgaccgaggccttctttgcca

SEQ ID NO: 238215 - DNA, 74 bp, Homo sapiens
ccggcgcccctgagccggccgagcggcgacggaccgcgagactcgagccttacgcagacccttattatgactat

SEQ ID NO: 238216 - DNA, 75 bp, Homo sapiens
gtttgtggtctcgcgcagggcggccccggttctggtgtttggcgtcgggaaacctcgacctgtctcccagttggt

SEQ ID NO: 238217 - DNA, 75 bp, Homo sapiens
gatgggaaactctacctgtgtgtgtcaagccccaccatcaaggacaagccaggtttgtgtttagtgaatcagagg

SEQ ID NO: 238218 - DNA, 147 bp, Homo sapiens
aaatcggggagcttacccagcttaaagagctccacattcaggggaaccgcctcaccgttctgcccccagaactaggtactaggttttgacaagcttgcatcatgcgtgagtataagctagtcgttcttggctcaggaggcgttggaa

SEQ ID NO: 238219 - DNA, 82 bp, Homo sapiens
cggagcaggacaaggccatcctggatgccggctccaggagcagcagtggaggtcgggaacgcctcattgtggagcccccgct

SEQ ID NO: 238220 - DNA, 100 bp, Homo sapiens
cagatagagacatatggaccacatgttcctgagcttgagatgctaggaagacttgggcatttatgtttgaatcatctttaagtctggcggtcacaaagtg

SEQ ID NO: 238221 - DNA, 100 bp, Homo sapiens
cccacccaactacctgtgccacctgtgcttcaacaaaggacactacatcaaggactgcccccaggcccaagtctgttttggtggtctgagaggaaaaaag

SEQ ID NO: 238222 - DNA, 96 bp, Homo sapiens
acagtcaccgctgtcattgtggttactgtaaaatggggaaaggagaaatttgaaggtgtagaattgaatacagatgaacctccaatggtattcaag

SEQ ID NO: 238223 - DNA, 100 bp, Homo sapiens
ctggactcatggaggctgagcatttattcagggctgatcccttatccaacatggttctaaccttcagtactaaagaagatgcagtttcctttgcagaaaa

SEQ ID NO: 238224 - DNA, 100 bp, Homo sapiens
aagtcactgcttctcaagaaaccccttcgggttgacctcatcctcgagaacacatccaaagtccctgcccccaaagagtttgaccccaggactcccctac

SEQ ID NO: 238225 - DNA, 100 bp, Homo sapiens
tggaagtccgcgagtttgtggattatctgaagattgatgtggacatcttcgagccccaggggatcagcaagctggatgcccaggcctctttcctgccgaa

SEQ ID NO: 238226 - DNA, 96 bp, Homo sapiens
gctccctctgccctatgaacagcttaagcacttttaccgaaaaccttctccccaggtggagtggctgaaacttctcagcaggcgcatctacactag

SEQ ID NO: 238227 - DNA, 88 bp, Homo sapiens
agaagaccattcagatgggatctttccggatcaatccagatggcagccagtcagtggtggagttaccagatgtatgctactcatggtg

SEQ ID NO: 238228 - DNA, 82 bp, Homo sapiens
ttactggaaactggatgcagcaaggaaataggatttaaccgctctctgcctcccaggaaataatgcaaaaggtgtcccaagg

SEQ ID NO: 238229 - DNA, 50 bp, Homo sapiens
tttcggaaatgcccttacagcagcaggatgtaattggctgtactcaggag

SEQ ID NO: 238230 - DNA, 75 bp, Homo sapiens
agaccggctacttctcggcgctgccgtctctggaggagtactggcaacagccttcgcagccgaggcccagaagct

SEQ ID NO: 238231 - DNA, 100 bp, Homo sapiens
tttgagaagaatgtggaaataacggagcaacttgctaatggcaggcattttacaaggtccagtgcacgtgccaacattacactgtcagggaagaagcgca

SEQ ID NO: 238232 - DNA, 98 bp, Homo sapiens
ttgcttctgtagaccagctccaacaggattccatggtagctgggatgttagggctcaggctccaaccaggaatggagacgccattggatgttttgtcc

SEQ ID NO: 238233 - DNA, 90 bp, Homo sapiens
cagaagccacgcagacttctagtcctggttccactgcttactcgctcgcatgtggaagactctcaccttcttcgtcgcgctccccggggt

SEQ ID NO: 238234 - DNA, 48 bp, Homo sapiens
ggggtgagaccctcacttcatccgtgtgaagcctcagtttaggtcatc

SEQ ID NO: 238235 - DNA, 100 bp, Homo sapiens
ttttctttaaggatggtttagaaatggaaaaatgtattgccaatgaagtaattggagaaatgaacttgaaaccagaggaggttttccttgcccaaggtac

SEQ ID NO: 238236 - DNA, 50 bp, Homo sapiens
gcgcctcatgcgggacttcaagaggagccttcacgtaaatgggtccagtc

SEQ ID NO: 238237 - DNA, 75 bp, Homo sapiens
ggtccatcaatcacacgtaccacctggatgttgtggcctctacggcagacacatgcaggccaacccagaaccacc

SEQ ID NO: 238238 - DNA, 72 bp, Homo sapiens
aagcgttattatctggacatcaaaactggaaggcattctgaagtacacgctacggaaaaacctgcgagccct

SEQ ID NO: 238239 - DNA, 98 bp, Homo sapiens
taacaacctgctaccccatgccatcaacctgcgtgaggtcaacctgcgcccccagatgtcccagaaaaagatggaggagctcttattactggccaagg

SEQ ID NO: 238240 - DNA, 135 bp, Homo sapiens
aagaaactgcccttccatctacaaaagctgagtttacttctcctccttctttgttcaagactgggcttccaccgagcagtgacaccacagccaaagccctatgggaagctttactgaacactaagcacaaagagg

SEQ ID NO: 238241 - DNA, 83 bp, Homo sapiens
gccatggccgccgccgatgccgagtgccggtggtggtgtgcacattgagccccggtatagacagttcccccagctgaccagat

SEQ ID NO: 238242 - DNA, 75 bp, Homo sapiens
ctggagggagaatttcaagaactgcagatcctggtgtatagcctggaagcaggacgccgcctcttgaagctgggt

SEQ ID NO: 238243 - DNA, 82 bp, Homo sapiens
caagaaggaagtcatcatgggccggcctggaacagaaatacagcaacaattcctggcgatacctcagcaaccggctgctggc

SEQ ID NO: 238244 - DNA, 75 bp, Homo sapiens
agctcgtccggttaccttcaggaacttcctgaataatttccagacagccaaagagtctctgagtgctgccactgc

SEQ ID NO: 238245 - DNA, 75 bp, Homo sapiens
aaggagttcccgtgcctgggtcaggagggcctggacaagatcctagagattactcttgtctctgctgctcctggg

SEQ ID NO: 238246 - DNA, 101 bp, Homo sapiens
tggcctgtgccatcagtatcttaatgaaggatatgggccctcacattttccaaacctgtccatctgctaactattttgactgcagagccatgtccattgga

SEQ ID NO: 238247 - DNA, 100 bp, Homo sapiens
ttttaaaagacctcgatgaagtcaggataggtgttcttaaacacttgcatgattttctgaagcttcagaggatgattccgaagaagacggagaccataac

SEQ ID NO: 238248 - DNA, 74 bp, Homo sapiens
ttcatggtgcggctcatcttcgagaggaaatctactttcttcaatgtgttaaccaatagtcaggcttcagcaga

SEQ ID NO: 238249 - DNA, 98 bp, Homo sapiens
ggttgaatgagaaccctacttgcctaaatgaggaatgtctttcctaccatctaaaatacgaaggtttctggctggcaacatctgaatgaattgatgac

SEQ ID NO: 238250 - DNA, 100 bp, Homo sapiens
ttatgatctacctaccaatcgtgaaaactatattcacaggggttatggttttgtgaaattcacagatgaactggaacagaagcgagccctgacggagtgc

SEQ ID NO: 238251 - DNA, 75 bp, Homo sapiens
agaaatcacactgcctgaggccaaagataagaacctggatctctggtgctttgatgtcttttccttgaaccaggc

SEQ ID NO: 238252 - DNA, 101 bp, Homo sapiens
ggtgattgttggtctgctggtgggactcaatgttctcgatgccaatctctgcttgaaaggagaagacttggattctcagctcacctgttctccaggaccag

SEQ ID NO: 238253 - DNA, 100 bp, Homo sapiens
actctctctgcaagttttcttcccagtcacgagatactttgtgcagctgcttatctccaggccttattaaaaagctgacaacgccacctgtcaacacccg

SEQ ID NO: 238254 - DNA, 100 bp, Homo sapiens
cgccctgccgcctctccgggccagcaacgctgccgccgcagcccacacgatgagagtccctacactaaatccgccagccagacaaagccgcctgatggag

SEQ ID NO: 238255 - DNA, 75 bp, Homo sapiens
caggaggatcactcgagcccagaagatcaagactagtgtgagcaacaaaagacgtctcccacaacctgctccggg

SEQ ID NO: 238256 - DNA, 74 bp, Homo sapiens
gccgaagactgcatttcaacttcaagaatgctgagtcagtgctgattctctcaaatagagcttgaaggataaat

SEQ ID NO: 238257 - DNA, 82 bp, Homo sapiens
cctcgtggctgcgtcaccgccgcccccccagacaagatggacaccgcggaggaagaccacaccaccccagagccaagtgcac

SEQ ID NO: 238258 - DNA, 46 bp, Homo sapiens
ccccgcgggatacgcctcagcgcgatacttttctgctgtgagaatg

SEQ ID NO: 238259 - DNA, 51 bp, Homo sapiens
ccggcgccgggacgcttcttctaaacatgccaaaggccaggatttgtttga

SEQ ID NO: 238260 - DNA, 100 bp, Homo sapiens
aaactattggattcataacctgctccatgcttgaaaacatggggattggaattcgtgccggtggtggtgtgcacattgagccccggtatagacagttccc

SEQ ID NO: 238261 - DNA, 82 bp, Homo sapiens
atacttattcatcaacagcagtttcagcagttgttaaattctcaacagctcacaccaaaagctgtatacctgcacaagtggt

SEQ ID NO: 238262 - DNA, 100 bp, Homo sapiens
caggatttccagggcagccaggatcacatggtcgggatggacatgctggagaaaaaggggatccaggacctccagagaagctaaaacttacttatgagga

SEQ ID NO: 238263 - DNA, 106 bp, Homo sapiens
cccgcgcacagctgctcccttcgccttcgccctttccacctcgcggcagttcgaaaaatggctacaaacttcctagcacatgagaagatctggttcgacaagttca

SEQ ID NO: 238264 - DNA, 90 bp, Homo sapiens
cgagcggcggcggcggcagcgggtcttgggtcctccgagagcagcagcggctgaagccgacgtagcttctctgaacagacgcatccagct

SEQ ID NO: 238265 - DNA, 99 bp, Homo sapiens
caacgatcgtgaaagaattcaggaagtagcagatgagctgcagaaaatgtatgttcatgcggatgctcctaccaataaaacactggctgggctggtggt

SEQ ID NO: 238266 - DNA, 73 bp, Homo sapiens
ttggcagtgagcattacgatgttgcccgtggggtgcaaaagatcctgcagggattccaaaagaagaagtgaaa

SEQ ID NO: 238267 - DNA, 100 bp, Homo sapiens
cgcctgtccccgccggcttcggcttcagcgccgcggtatgagaataatgttatcactattgatctggttcaaaattcttctcaaaaaactcagaatgatg

SEQ ID NO: 238268 - DNA, 75 bp, Homo sapiens
gtcctgcgcttggggatcctctgtacgcccgttcactgctcaacctgaattcctgaagcagcctactaatatata

SEQ ID NO: 238269 - DNA, 82 bp, Homo sapiens
gcggcagcggagggacggcagtctcgcgcgcagttggaattgatcacaccttttcagttgtacttcaatcctgaattaatct

SEQ ID NO: 238270 - DNA, 111 bp, Homo sapiens
cagaccaccaccagaaccatcacctcggagacccagacaatcacaggggcaagattcttgccaagagaattaatgtgcgtattgagcacattaagcactctaagagccgag

SEQ ID NO: 238271 - DNA, 100 bp, Homo sapiens
agggacagaggccagcgcgctgcaacacaagatcaagaactccatctgacctcagagagctaagatgagattctgggccaaagggaaacaaggggagaag

SEQ ID NO: 238272 - DNA, 75 bp, Homo sapiens
gtgcgaaccccgggcagcccgggaaatctccaagtcagaaaggagtctactcttcatcttgtgttgagacttcgt

SEQ ID NO: 238273 - DNA, 112 bp, Homo sapiens
atcgcaaggctcttccctgaccattttctactgtccctgcgcgagacaatgcagatcttcgtgaagactctgactggtaagaccatcaccctcgaggttgagcccagtgaca

SEQ ID NO: 238274 - DNA, 75 bp, Homo sapiens
ggcaagaagcgtgcggggaccgatggagagaagaagaaggaggttcctgctgtgccagaaacccttaagaaaaag

SEQ ID NO: 238275 - DNA, 83 bp, Homo sapiens
ctctgctccgtgctgccctcgcactggcgctgcaacaagacgctgcccgtcgccttcaaggactcagcccaggagagtgttat

SEQ ID NO: 238276 - DNA, 104 bp, Homo sapiens
ctctgttaaagctggtctgttctaactgagtccacctgatcccggtgtcgactcctaagaatggaatgagtagcaagagtcgaaagagaatcatgcccgaccct

SEQ ID NO: 238277 - DNA, 75 bp, Homo sapiens
acgtgctgggcgacacgctgggcgtcggcaccttcggcaaagtgaagagaattttatcattggaacatctgatgc

SEQ ID NO: 238278 - DNA, 83 bp, Homo sapiens
ctcgcttcgtcctacacttgcgcaaatgtctccggaactagcttctaaaaaatccctgcctatgaattattacacagtattct

SEQ ID NO: 238279 - DNA, 100 bp, Homo sapiens
ccggtacatttttgatgcggagtgtgcactggagaaacttactaccgatcatgagaaaggtcctggacccaagccagaagcctctgcaaagcttccttcc

SEQ ID NO: 238280 - DNA, 75 bp, Homo sapiens
ccaacattcccaacagccaccaccaccaccagatggttcccagaccagaggactgttgttaggtgattggctgtg

SEQ ID NO: 238281 - DNA, 51 bp, Homo sapiens
ggactcatggaggctgagcatttattcagcttacggttattccagaagttt

SEQ ID NO: 238282 - DNA, 89 bp, Homo sapiens
cgcgaggcgggcagccggggcgtccaggtcagccagagcagcctccccatgctgtcctcgccgtcaccgggccagcaggtgcagacccc

SEQ ID NO: 238283 - DNA, 100 bp, Homo sapiens
gttgtgagaagacgtctgtgtcgtgcgacagcccacctgaggatattgaccataaggactcatatctcattacaagaagcatcatggccgagccagacta

SEQ ID NO: 238284 - DNA, 75 bp, Homo sapiens
aggtggcctaccaggaggccaggggtgtcgccatgattagtaagcaactctctgaagaatatgaaaggattgtca

SEQ ID NO: 238285 - DNA, 115 bp, Homo sapiens
acaaagagcttgctccctacgatgagaactggttctacacgcgagctgaaactggcgatggaatatgagaggagccctctggaaagaaaaggacagaccctgtgctttcatgaaa

SEQ ID NO: 238286 - DNA, 75 bp, Homo sapiens
gaaaagtcgcagcgagctggagccgccggaggaggaggacttcatccaacccagcagccgagaagaggcccagca

SEQ ID NO: 238287 - DNA, 73 bp, Homo sapiens
tttaattcaagcacgaagtattggtgctcagaaggctaaacttggacaggtacatcaggaacgtctctatcaa

SEQ ID NO: 238288 - DNA, 98 bp, Homo sapiens
cgcctcttccgccgccgggctcggggcctccgcagcgacaacatggaggccgtgaagaccttcaatagcgagaattatggcctcgaaactgataacat

SEQ ID NO: 238289 - DNA, 100 bp, Homo sapiens
ctcctcatcatctactccttcgtcttctggtgaacagagtatctgtcaggcaagagctgctgtgatggtttatgatgatgccaataagaagtgggtgcca

SEQ ID NO: 238290 - DNA, 100 bp, Homo sapiens
agagttgggtccaaactcttctttgacaagagagacaactctgactttggctgaaggccggatgaggggccccagtgttggagcctcaggaagaaccagc

SEQ ID NO: 238291 - DNA, 96 bp, Homo sapiens
cagctggctaagctcatcattgttactggagttaaagttcctcgtaattttcgcttgttggaagaacttgaagaaggacaaaaaggagtaggcgac

SEQ ID NO: 238292 - DNA, 101 bp, Homo sapiens
ccgccggagaggagtggcctcgcccgcttggagcaagagcagctctacctgaggtcaggtgtggtgtcctctgccaccttcgagcagccgagtcgccaggt

SEQ ID NO: 238293 - DNA, 100 bp, Homo sapiens
tcagcctctccaaagcctgcgcgagaggagccgggacacgcctagcgcgggctccagggatggcaccacagatgtgacgcggacaatgcattttgggacc

SEQ ID NO: 238294 - DNA, 99 bp, Homo sapiens
gattggattgaggttcagatcaacaacgaggaaatatttccaacatgcgtggaggatgtaggaagaagctggtctgctgactgtcatacttgtgaccag

SEQ ID NO: 238295 - DNA, 51 bp, Homo sapiens
tccaatccctgccttttgagtccaggtgcaggctatggaactcagtcaact

SEQ ID NO: 238296 - DNA, 74 bp, Homo sapiens
tcatcgtgatcccggcgacatactacctctggccccgagatcagaatgccgatattgatgatgttaagaagttc

SEQ ID NO: 238297 - DNA, 100 bp, Homo sapiens
gccagagccggtgcggcggccgcgacttccccgacgcggggcgctgagaagcagttttaaaatcaaagatgggaaaatcggagaaaattgcccttcccca

SEQ ID NO: 238298 - DNA, 74 bp, Homo sapiens
ccgctgatgagatcctgcagcagtgtgatggaactctgcgaccttcaagtcgtttgaggaccgagttgggacca

SEQ ID NO: 238299 - DNA, 101 bp, Homo sapiens
ataattctccattgagaagagagaagaacattctcgaatacctagaatggggatctagtgaaaagccatttgatgtatgcggtcagagaagaagtggaggt

SEQ ID NO: 238300 - DNA, 99 bp, Homo sapiens
gcaagtacagttactctggggaggagcattccggaagagtttttcgactacagtttgatgaattccagattgtcagtagttcacatgatgacacaatcc

SEQ ID NO: 238301 - DNA, 96 bp, Homo sapiens
tatggagttctggaacgggactttgcagaaatgtgtgcagactacatggcatctaccataggggcacgtgtggttctcaaatataggcattctgat

SEQ ID NO: 238302 - DNA, 100 bp, Homo sapiens
tgccctgggttctgcccgcacggacccccatgcttcgcaaggcatggtgggtcagctggcggcacggcgggcggctggcgtggtgctggagatgatccgg

SEQ ID NO: 238303 - DNA, 82 bp, Homo sapiens
gtgcgtttgtggccgtccggcctccctgacatgcaggagtctctgagaacaagccagccagaggagaagaaggatgtttctc

SEQ ID NO: 238304 - DNA, 80 bp, Homo sapiens
ttttatgatttactggatgaactgataaaacccaccagtctagaataactgaagtgaagtgatggactccgatttggaga

SEQ ID NO: 238305 - DNA, 100 bp, Homo sapiens
gaaacagataaaacttcagatatgggatacgtcactgttggaggcccatgatattgtggcatcaaagtgttatgattcacctccatcaagcccagaaatg

SEQ ID NO: 238306 - DNA, 75 bp, Homo sapiens
gagaaatccccactcctccaagaaccaacccccaaattggctgggacagaagctaaaccagccccagaaatattt

SEQ ID NO: 238307 - DNA, 100 bp, Homo sapiens
tggctcttctctggaagatcttgtgatgatcatcgagcccaccagcccttgccttctcccagaccctctgcaggaaccgtactaccagccaccctacacg

SEQ ID NO: 238308 - DNA, 75 bp, Homo sapiens
ctggtggggagatgaacccaacctagtgggtgtaatacatcatgaactgcaggacgctaatgaactgaagacgat

SEQ ID NO: 238309 - DNA, 97 bp, Homo sapiens
cagctaccatcagatggaattcccctgcaatattaacgttttcattacttcggaggggaggtcactcctcccggcaaacctgtatgtgggactggtg

SEQ ID NO: 238310 - DNA, 50 bp, Homo sapiens
ggaaaagccattaacattgggcaggaccagttacagaagtggatccgcgg

SEQ ID NO: 238311 - DNA, 90 bp, Homo sapiens
ggagcagattcggagaattatgagacctactgatgtccctgatacaggtcctgcaaccctggttccagtctggcaagcattgtagacctg

SEQ ID NO: 238312 - DNA, 100 bp, Homo sapiens
tagctgaaaacatcatcgttttgaagagttctgcgttttgccagtcacctctcaactgtgtgccaaaggcacttctgtctcctgctgccatgtgaagaag

SEQ ID NO: 238313 - DNA, 83 bp, Homo sapiens
cacctctcaccgcgcatgtttggaggtagctgacagcatctactcctgaagaccggaaacatggcttgtaccatccaaaaggc

SEQ ID NO: 238314 - DNA, 90 bp, Homo sapiens
tggacacttgctcccatctactttcttctctagaatccacgggctttcagtccagtgtaaagctgttggagcgcgggagcaaaggtaaag

SEQ ID NO: 238315 - DNA, 100 bp, Homo sapiens
ttcattgctgcgcgcctctgtggtcaggacctcaacaaaaccagccgacagcagatcctctcagggaaccagctggaagatgaaggctgtcggctgatgg

SEQ ID NO: 238316 - DNA, 82 bp, Homo sapiens
caggcaagtcgccaagcccatcacccaccagcccaggaagcctgcggaagcagagggccccttcacagatgtagtcactaca

SEQ ID NO: 238317 - DNA, 100 bp, Homo sapiens
ggattgggaagatgattctttagctgcagtagaagttcttgttggaaaagaattccatggcaacatcattaaagtgtcctttgccactagaagacctgaa

SEQ ID NO: 238318 - DNA, 82 bp, Homo sapiens
caccatgtcagacgcagccgtagacaccagctccgaaatcaccaccaagtgggtaattccagaattgattggccataccatt

SEQ ID NO: 238319 - DNA, 100 bp, Homo sapiens
gaaatcacagcttcagatcactgaacagcacattagttccagaagaaagatggaaattctgaaaactgaatgtcaagaaaaggagtcaagaacaattcac

SEQ ID NO: 238320 - DNA, 50 bp, Homo sapiens
atagtcaagagcatcacagtctctgatgagtcagtacaagcaagttcacc

SEQ ID NO: 238321 - DNA, 90 bp, Homo sapiens
gtcagacgcagccgtagacaccagctccgaaatcaccaccaaggctccgagctctgtccagtggtgggagtattacatcccctcctcttt

SEQ ID NO: 238322 - DNA, 74 bp, Homo sapiens
gaaatgaccaggaacggagaatgaagcagtttctcttagtgttcagcaggaaacatccaatttaggtcctggat

SEQ ID NO: 238323 - DNA, 85 bp, Homo sapiens
gttctccgcgtggtacccgttcttccgaggcgttaccatcaagaggcattatattgtacttctagcaagtgcaccaacagaaaaa

SEQ ID NO: 238324 - DNA, 98 bp, Homo sapiens
gcgaagcgagcgagaaggcacggagtcgccgcggagcgcagactcattctgatgaaggaaagagcgtccctgtgcagctgcgtgtccttcagttcttt

SEQ ID NO: 238325 - DNA, 95 bp, Homo sapiens
tggaatgaatctgaacccagaagtggaagggacgctaattcgggtacccattccccagttcaaatggtgaaagacgatgacccctcctggaagcc

SEQ ID NO: 238326 - DNA, 82 bp, Homo sapiens
caagaaggcaacgacgttccatctgtggaaggacctaccaaccaggctccagggagcagtgtcagggccagggagacgatgg

SEQ ID NO: 238327 - DNA, 130 bp, Homo sapiens
cgaagccccttcccaggtcctcaactttgaagagatcgactacaaggagatcgaggtggaagaggtgccagtcacgaattgcccgaacattacctgctgatcagaagccagaatgtcggccatactggga

SEQ ID NO: 238328 - DNA, 95 bp, Homo sapiens
taccatcactggatctgctgccagcattagcctggctcaatatctaatcaatgtcaggtctgtgcagacttttgcagacaaatcaaaacaagaag

SEQ ID NO: 238329 - DNA, 100 bp, Homo sapiens
cttgaaggatgagtagaagttcaccaagtgggaaaggacactctaggtcaccaagctccagcagctctcaagccatgcggtcccctttgccacacccagc

SEQ ID NO: 238330 - DNA, 100 bp, Homo sapiens
ggctacggactatgggcgaatagctctgaccacccggcgaaggaatgctgaaatacttttaaagctgataaacctagggaaactgcctcctgatgccaag

SEQ ID NO: 238331 - DNA, 75 bp, Homo sapiens
atatatgattttctttaaggatggtttagaaatggaaaaatgtgcagaaaaagtacatgagttaaatgaagaaat

SEQ ID NO: 238332 - DNA, 100 bp, Homo sapiens
tcgacatgagtgatgtggaggaaaacaacttcgagggcagagacaaggtggagcagacacctcgcagtcaacaagacccggcaggaccaggactccccgc

SEQ ID NO: 238333 - DNA, 75 bp, Homo sapiens
tgacactcaacaggattcccgattccagttcttcagacaaacaatggtccaagtctaacaggattgactactata

SEQ ID NO: 238334 - DNA, 90 bp, Homo sapiens
gccggtctctgttccgcaggatggctgcaggggacagcgctggaccgtacagacctgcctaacatgccagcgcagccaacgcttcctcaa

SEQ ID NO: 238335 - DNA, 87 bp, Homo sapiens
gaagacagagggttttcttttgagtgagagccacgagccaaggtgggcacttgatgtcggatctcttcaacaagctggtcatgaggc

SEQ ID NO: 238336 - DNA, 90 bp, Homo sapiens
agttaatagatctccggcataagctcaatcttcgggtcgttccaggggtagaggaggcatgaaggatgaccgtcgggacagatactctgc

SEQ ID NO: 238337 - DNA, 100 bp, Homo sapiens
tgctagcgctgctgggggccgcccatgaaagcgcagccatggcggcacggaccctgaaaatgggcacatcttcaactgcattcagcgagcccaccagaac

SEQ ID NO: 238338 - DNA, 82 bp, Homo sapiens
tgaaccacagcaagttcatggtcacggagaaggcagcctacatagtaagactttgaccccgacgcaggcttcagtgattgcc

SEQ ID NO: 238339 - DNA, 80 bp, Homo sapiens
gggcaggggtaccttcgggaatctatgagtaacgaaagaggctttgaaaatgtagaactgggagtcataggaaaaaagaa

SEQ ID NO: 238340 - DNA, 100 bp, Homo sapiens
cgggtcgcgggtgaacaccgcggagccccgggacttgtgatcccgaaggtcaccaagcacctgctctcaaaccctgtgttcacctgcatcatcctggccg

SEQ ID NO: 238341 - DNA, 50 bp, Homo sapiens
atttctgttccatcagcgtttgtttgatgagttttgatcatcctgagaaa

SEQ ID NO: 238342 - DNA, 100 bp, Homo sapiens
ggaaaacaacttcgagggcagattaagtgggcagaccaacatccacctcagcaaaaacttcttcctgacgaatcgcgccagggagcgctcagacaccttc

SEQ ID NO: 238343 - DNA, 83 bp, Homo sapiens
cttcggcagtccacccaccgccgccgcctcccagatgcagctgactttgcctgtagcctcatagaacccatcccatggctgca

SEQ ID NO: 238344 - DNA, 87 bp, Homo sapiens
atctttattatctcattgaagcttggaattacatagctggaaaggatcttacaggatgacattttgattaacaggccagcaaagaag

SEQ ID NO: 238345 - DNA, 89 bp, Homo sapiens
ccccacctccccccggagccaggctggtttcggaaatgcccttacagcagcaggtctatgaaaattatcctacttatgatttaactgaa

SEQ ID NO: 238346 - DNA, 98 bp, Homo sapiens
gcagcctcaccaacacagcaccaacagcttccaagatagtaacaggtgctttcgtgctacagaggcgtagttgagtagctgcagcagagatcatatgg

SEQ ID NO: 238347 - DNA, 90 bp, Homo sapiens
agcagataaactgcggctaaagaaattacaggaagagtcagacctcgaattagcaaaggaaacttttgagtttcaagaagtttttaaccg

SEQ ID NO: 238348 - DNA, 98 bp, Homo sapiens
ggcgcgctgctggacgaagagctctcctccttcttcctcaactatctcgctgacacgcaggtatattcagcatgcagctttactttttcaaagattcc

SEQ ID NO: 238349 - DNA, 100 bp, Homo sapiens
agctgttagcaaacattgaccctagtccagccctggtacctgacagtgtaaagaaggagctcctacaaagaataagaacattccttgctcagcatgccag

SEQ ID NO: 238350 - DNA, 50 bp, Homo sapiens
gaaatagatctctcggctctgaggtaagcctgcccctggggtctggcagc

SEQ ID NO: 238351 - DNA, 90 bp, Homo sapiens
gagaaaggcccacctgtgtcctggttgagggtctccagggttctttggggcccgagcccactttccttgtggaactgtccagagtgctgg

SEQ ID NO: 238352 - DNA, 99 bp, Homo sapiens
aagaacagctggctgaggggtgtagactggcacagcaccttgtccaaaagctcagcccaggaacagtacgtatttggcattcaagcacctaccggcttg

SEQ ID NO: 238353 - DNA, 100 bp, Homo sapiens
acctttccaacacagatgtccaagctgccaaaggacaaggatcctcaccggtggccatgcagaaagctcagcaggtatctcagggtctggatgtgctcac

SEQ ID NO: 238354 - DNA, 50 bp, Homo sapiens
agaaccaaaacccatgttttcccatacaatatggaaccacccctttagtt

SEQ ID NO: 238355 - DNA, 101 bp, Homo sapiens
ggaagtgggggttatggtgggaggagccgatactgagcttcttcctatttgccatggattgcccccgaggaattagcacttgttcacaacttgaggaaaat

SEQ ID NO: 238356 - DNA, 101 bp, Homo sapiens
gctgctgaggccgggccggccgcccagacgctgcccgcgggcccggccacggcggagccaagagacacctatggctgccgatgaaggctcagcagagaaac

SEQ ID NO: 238357 - DNA, 100 bp, Homo sapiens
aaggaatggagatccccaatttgagagattccttggttaaaattctgcaagactacaatttgcaagcctggttgcagtatgcctgaaatttgggatgtag

SEQ ID NO: 238358 - DNA, 73 bp, Homo sapiens
aagccgagttcaacatcctcctggccaccgactcctacaagtttctccttggaccaagatgactgatggaaaa

SEQ ID NO: 238359 - DNA, 74 bp, Homo sapiens
aaaatgaagacaaggttaataaagctgccaaggtcttcaatgaaatttatccagtatggacttactcttacctg

SEQ ID NO: 238360 - DNA, 100 bp, Homo sapiens
ggctttggctcagcagtaactcctccataaaaacaagtgtgtgcatctggctgttagaagaattcatgctcatccgggatccagagactccatgaaatct

SEQ ID NO: 238361 - DNA, 75 bp, Homo sapiens
gctgcaggacctctgtcagagaatgaaacactcatcgcatgcttcttggacacttaatgattgttggcaagaaat

SEQ ID NO: 238362 - DNA, 96 bp, Homo sapiens
caagatcatggcgctgaagatggagctggccatggttgcttgttatccgggcaatggaacgggttatgtacgtcatgttgataatccaaatggaga

SEQ ID NO: 238363 - DNA, 100 bp, Homo sapiens
tctttctcagaaagcagaggctcagagcttggagacagacggctcacctccacctccagtaaaagtttcttctgaacctcccacacaagccactccaaac

SEQ ID NO: 238364 - DNA, 100 bp, Homo sapiens
gagaaaatacaaggagctggacatcgagcctgagggaggggaaaggcgcaggacgttcatcttcactgacggggaagatgaggccctggccaggcacacg

SEQ ID NO: 238365 - DNA, 100 bp, Homo sapiens
ggaacgccgactgcagtaagctccgccgccccctaaagcggaaccggatcaccgagggcatttacggcagtacgagctcaactggaggcagtcctgtgcg

SEQ ID NO: 238366 - DNA, 100 bp, Homo sapiens
cggcgggcgagcgagaggccgaggattctggatgaaattgaagaacataacatcaaaatctatcacttacctgatgcagaatcagatgaagatgaagatt

SEQ ID NO: 238367 - DNA, 50 bp, Homo sapiens
gccgacatcaagttttcctctgcaggctcttctcaaccatctgtgagtcc

SEQ ID NO: 238368 - DNA, 75 bp, Homo sapiens
tgcagtgagccctgtttttgccaccacactccagcttggatcatggaagggaagtggttgctgtgtatgttactg

SEQ ID NO: 238369 - DNA, 143 bp, Homo sapiens
tgctgagaatgcagccgtgtgacagtaactgaacattggtctaaagtctttccaaaaggtcaaggttcacaaggactcacaccacccggcaagaactgctcactacggctccctgccccagaagtcacacggccggacccaag

SEQ ID NO: 238370 - DNA, 73 bp, Homo sapiens
tgtgtccggcgatgggcacggggtggcagagtttgtggatgagcggccagaagaggtaaagcagatggaggcc

SEQ ID NO: 238371 - DNA, 89 bp, Homo sapiens
ggaaagcggcggactatgtccgaagcaaggatttccgggactacctcatgaggtggataatattaatgcagctgtgatggatttgaaaa

SEQ ID NO: 238372 - DNA, 83 bp, Homo sapiens
tctcaatcttggaacagcacccccttctttaaggtggagccgccaccaaaatgcagattttcgtgaaaacccttacggggaag

SEQ ID NO: 238373 - DNA, 80 bp, Homo sapiens
ttattcgagtgaccgagaccgcggccgggaccgagggatgaaacgaggaggaagagatagtgaccgtaattcatcagaag

SEQ ID NO: 238374 - DNA, 100 bp, Homo sapiens
ctcaccccgccagctactctgggggtggcgtggcatagtgagaggagcgctaagttgttgggaggcctgggttaacggcacagccaacaagatgaacgga

SEQ ID NO: 238375 - DNA, 100 bp, Homo sapiens
tgacgatcctcaagttcccaagtagaggagaggaagcggcagagggaggtgaacttcacggtagaccagatccgcgccatcatggacaagaaggccaaca

SEQ ID NO: 238376 - DNA, 87 bp, Homo sapiens
tcttcctcccttcgctcgcaccatggtatggctttgtaattgctgtcaccaccattgacaatattggtgctggtgtgatccagccag

SEQ ID NO: 238377 - DNA, 100 bp, Homo sapiens
cgccgcccccgacgtttgcactggcgcatattaaatttcctattgactacccctattcaccacctaccttcagattcttgaccaaaatgtggcaccccaa

SEQ ID NO: 238378 - DNA, 75 bp, Homo sapiens
gtgcagcagccttcagcttttggcagcatgaaagttagcagtttccgccagctgtggatgcctttgacattatga

SEQ ID NO: 238379 - DNA, 50 bp, Homo sapiens
gggggcgcccctggaaggccgaggttatgaagacagtatggagtttccag

SEQ ID NO: 238380 - DNA, 99 bp, Homo sapiens
attgaagctctctttccacaaaaatttggaagatggaccgactatgcaaaaagatactgtaatgcacacatcagacaagccatctatgatgcatttgac

SEQ ID NO: 238381 - DNA, 100 bp, Homo sapiens
cagtttcttgagggctccccagccatgcttcctgtacagcctgcaaaactgtgaaaggtgtagcagtcactcggcctacacccacagcatcgaccttgtg

SEQ ID NO: 238382 - DNA, 80 bp, Homo sapiens
agccgcagaggctcccgggctggactcaggcttctcagcttccccgggcgctgcctggacaggcctgcctgcgtgctggg

SEQ ID NO: 238383 - DNA, 75 bp, Homo sapiens
agaaggacaaggacagaatcaccagcactggctgaagaaggggaaactgaggcccaaggaaattgagtatctctg

SEQ ID NO: 238384 - DNA, 75 bp, Homo sapiens
cctgcccaccccaatgaccagtaaatcggcatcagagctgcggtgcaaccctgggcagtttgcgtgtcgcagcgg

SEQ ID NO: 238385 - DNA, 100 bp, Homo sapiens
agacattgaacgggaaatcggcgccatccttcagaatgcaggagaggctcgggctgtgctgaagtgggcagatggcaaaatgatcaagaatgaagtggac

SEQ ID NO: 238386 - DNA, 96 bp, Homo sapiens
ttcccttttgacaataggtatccgagagtgtaactactttatgcattcctgggagatggtcgggaagaagaagggagtctcaggccagaaggatgg

SEQ ID NO: 238387 - DNA, 49 bp, Homo sapiens
gagcagcgaaacctgagcgagcagtggcagcatggaacctgcatttcat

SEQ ID NO: 238388 - DNA, 100 bp, Homo sapiens
gggctggacctgctggtgttcgcccacgaccatgcaaatggttatgagccttagagtttctgaactccaagtactgttgggctacgccgggagaaacaag

SEQ ID NO: 238389 - DNA, 90 bp, Homo sapiens
acaaggccggcgacagcagcaggttccccagcggtgctgctacccccgtatgatgatgccactgtgaatggtgctgccaaggagccaccg

SEQ ID NO: 238390 - DNA, 87 bp, Homo sapiens
gtgagcgagcagaggcttaaggtcttcagcggggcgctccaggaggcactcacagatgcacccactgggcctatgtaataacaatga

SEQ ID NO: 238391 - DNA, 101 bp, Homo sapiens
gatggctgccgcggctacgctgaggctctccgctcagatctggagcccatacaagcagccaggatgtactggagacctcgacggtcggattgaggacgatt

SEQ ID NO: 238392 - DNA, 98 bp, Homo sapiens
ccatgtggctgctggggccgctgtgcctgctgctgagcagcgccgcggctctaagcgaaagacatgaggcctcagcctgaaatgaggttgttttgagg

SEQ ID NO: 238393 - DNA, 51 bp, Homo sapiens
cccttccacagtgcaaggaagacgccgagcctactcaatgtgaagatgatg

SEQ ID NO: 238394 - DNA, 82 bp, Homo sapiens
gcgtcatcctaaggaacatcgacgatttttagactctgaggagcagttggagctaatccacattatggaaatggaaaccacc

SEQ ID NO: 238395 - DNA, 83 bp, Homo sapiens
ggagccgcggcggcggagctgtggtccagaacacatattacataatggagccgggagacagactagggctggcttgatccggc

SEQ ID NO: 238396 - DNA, 100 bp, Homo sapiens
gaatgagccagagggacacgctggtgcatctgtttgccggagggttgaatataagctgggattccaagtggacaatgttttggcaatggatatgccccag

SEQ ID NO: 238397 - DNA, 90 bp, Homo sapiens
atgctgtctctagactttttggacgatgtgcggcggatgaacaagcggcaggacctcagcagccatgtcgaagccccatagtgaagccgg

SEQ ID NO: 238398 - DNA, 82 bp, Homo sapiens
gctggaaggaaccgctctcgcttcgtcctacacttgcgcaaatgtctccgacaatgcagatcttcgtgaagactctgactgg

SEQ ID NO: 238399 - DNA, 100 bp, Homo sapiens
aggcagtttggcatctgtggccgagttgctgttgccgggtgatagttggagcggagactgatatttgggatataccagtggcctttccttgttgtgtatg

SEQ ID NO: 238400 - DNA, 78 bp, Homo sapiens
agccaaggaagttcctggagcaagtggagcagccccgtgtgcgttccccctggtcctggtccagtggcgggaagctgt

SEQ ID NO: 238401 - DNA, 97 bp, Homo sapiens
ccagccttcatggagcctatattctgtaaggcatcaagcatgatggaaccatgtgtgatacctgccgccagcaaccaatcattggcattcgatggaa

SEQ ID NO: 238402 - DNA, 100 bp, Homo sapiens
agccctcctcaggtgagctggagctgcccggctcggcagcgggaaggtagctacagcaagctgggtagcaggcagatccaaaggatatcatgaagtttcc

SEQ ID NO: 238403 - DNA, 100 bp, Homo sapiens
ggacagcacctagtcgtggccggaggagtctcagagctgtcagaaaggcgtggattctcagatagtggaggaggacccccagccaaacagagagaccttg

SEQ ID NO: 238404 - DNA, 83 bp, Homo sapiens
gatctaccttctggaagctactactacgtggtgcttggaaagagtgttctgccagttctggataatccactgtccaagaaggt

SEQ ID NO: 238405 - DNA, 100 bp, Homo sapiens
tcgccggcttttagcactgcaattcactcagcaaactgggactgttggtcaccctacctggcagccagtgataagggttgttatgaggctcaaaggaacg

SEQ ID NO: 238406 - DNA, 89 bp, Homo sapiens
ggaccccaactgctcctgctcgcctggttttctgtctcaactggtctctgacaagcctctgactgaatgtatccgtgctggccactatg

SEQ ID NO: 238407 - DNA, 113 bp, Homo sapiens
cgctccgtggccttagctgtgctcgcgctactctctctttctggcctggaggctatccagctaaaatgtttattggaggcttgagctgggatacaagcaaaaaagatctgaca

SEQ ID NO: 238408 - DNA, 74 bp, Homo sapiens
cttgccttgagtcagtgcgccgctctccagcccgcttgaacgacaaatttacatgtattggagaccagaccaga

SEQ ID NO: 238409 - DNA, 101 bp, Homo sapiens
cagacaccgagcttcagcaagctctctccaacgggaatatccccggctcggctgtgctggtgtttgacatccatgtgatcgacttccacaacccttcggac

SEQ ID NO: 238410 - DNA, 106 bp, Homo sapiens
tgtccaagccctgaatgccaatgtgtggtccaatgtagtgatgaagaatgtcactcagcctctgaagaagcttcgggttcagactcaggcagtcagtcggaaagtg

SEQ ID NO: 238411 - DNA, 83 bp, Homo sapiens
gtttacagagcactagaagctccttccattcagatccagggaaccctactctggaaactgtcagtcccagggcactggggagg

SEQ ID NO: 238412 - DNA, 83 bp, Homo sapiens
cagagctccacagaaaagagtccgatcaagagacatctttccaggaacagcgtgaggaggacagaagcacccaacaggactgc

SEQ ID NO: 238413 - DNA, 73 bp, Homo sapiens
agagaggccctacatcatcgcgggcttacactttgaccaggtactggtggagaatggaacaaaagctgggcac

SEQ ID NO: 238414 - DNA, 100 bp, Homo sapiens
tggaacttcatcatcatctacttcacaggaattgccatttgcgacgttgtggacgtttaccagcgggagttcctggcgctgcgcgatcggttgcacgcag

SEQ ID NO: 238415 - DNA, 83 bp, Homo sapiens
ccgcgcgctgagggtctcggggcgggcgccgcgggacctctccgggccatgggtgtccctggccagtgtccttccacctgtcc

SEQ ID NO: 238416 - DNA, 80 bp, Homo sapiens
ttgggaggacccgggacaccgcacagccgggaaatggcttgggcactgtttaaaggaaagttccgagaaggcatcgacaa

SEQ ID NO: 238417 - DNA, 74 bp, Homo sapiens
gccgccgcgggccggagccgagcagccgtcggcagggtaactataactacccaatattgcagccatggagtcca

SEQ ID NO: 238418 - DNA, 50 bp, Homo sapiens
cctgcatatgatatttagatccattccgaaatttttaacctctgaagctg

SEQ ID NO: 238419 - DNA, 75 bp, Homo sapiens
cacctttgtttcctagtgagaaccgagtcagtgctcttacccagagaatgtccaagcacacagatgcagcagaag

SEQ ID NO: 238420 - DNA, 88 bp, Homo sapiens
gaagatttacagcctcagctgcggcaagtcccttcctgagtggattgtattacacagagcatgaatatacttctttaggttacacgca

SEQ ID NO: 238421 - DNA, 74 bp, Homo sapiens
aataaagaaattcagaaggagatggatcaaagtaatcagttcaagaagttccctcagatgacctcatatcaccg

SEQ ID NO: 238422 - DNA, 75 bp, Homo sapiens
tctccttggcctctcctgggatcggcccaaggccagttctccgcaggaaggatctgagtctctccctgcggagac

SEQ ID NO: 238423 - DNA, 75 bp, Homo sapiens
caagaggtcacttttcatgtccaggctgcatggtgctgtaacacctgtgaagatgtgcgggaggcatatcgccgt

SEQ ID NO: 238424 - DNA, 75 bp, Homo sapiens
cagaacctcctcattaatgagaaaggagaattaaagctagcagattttgatttctggtgttcagcaaattcagtt

SEQ ID NO: 238425 - DNA, 75 bp, Homo sapiens
agcagatacatggcaagttgttggaacagtgacttgcaagattcaaccctatgaaaagataaaggccaggggctt

SEQ ID NO: 238426 - DNA, 88 bp, Homo sapiens
accctttctgccatcctgtccaggtctacagagctacctcccagtgccaagtgtataagcgtgtccagaattggtgggtctcactgac

SEQ ID NO: 238427 - DNA, 75 bp, Homo sapiens
ggtgtcagagcaaggagaagctgttgatatcccgcccaggtacccgttccaagccctgccaccgcactacgggag

SEQ ID NO: 238428 - DNA, 90 bp, Homo sapiens
cgctaattagactcatgccacttgaggaataaaggttggggagactacacctgacaaacttttcactcttatagaagtggaatgtttagg

SEQ ID NO: 238429 - DNA, 98 bp, Homo sapiens
tgaagaggaaataaaaacagaacaggaggtggtagagggcatggatatctctactcgctccaaaggctcaactttaaagaagcttctacacactggaa

SEQ ID NO: 238430 - DNA, 100 bp, Homo sapiens
gatggcctggagattcatgacaaaatcatggagtcctgacacagctctccctgaggagcagccacattccagctcccagtgcgcccctctccactgtctc

SEQ ID NO: 238431 - DNA, 82 bp, Homo sapiens
ggcctcccaaagtgccgggattacaggtgagaacaccaaggcccagggaagatatatcacatttgaacccagattcagattt

SEQ ID NO: 238432 - DNA, 100 bp, Homo sapiens
gcgggctgtaactggtggcatttgtcccgggaccagggaaacactactatgaagtatcctgtcatgaccaagggttatgcagggtcgggtggtctaccat

SEQ ID NO: 238433 - DNA, 100 bp, Homo sapiens
cggggtcctggtcggggtggtctgtctgctcctggcatgccctgccacagccactgggtccggtccataatcatgttacaggaaaaggcccaggacaggg

SEQ ID NO: 238434 - DNA, 74 bp, Homo sapiens
attgagagagagagagagagatagacggagatctctggagcagacctcaaggatccagtttgtgtgttctctgt

SEQ ID NO: 238435 - DNA, 95 bp, Homo sapiens
taccatcagagtcaaagaatcatcttcacacaacaacacaaatggctggtactgggaacagcttttgatcctttcttaggaggaaaaaacttcga

SEQ ID NO: 238436 - DNA, 83 bp, Homo sapiens
gttttgagaagccttccgctattcagcagagagctattattccctgtattaaagatcagtgtgcgtgtgaccaccatggatgc

SEQ ID NO: 238437 - DNA, 98 bp, Homo sapiens
gggcgtcacagccatcatcttctgtgtggagctcagcggctacgacctgaaactctacgaggataaccagacaacgcatcttctctccagactgccga

SEQ ID NO: 238438 - DNA, 75 bp, Homo sapiens
gggggtcgagcacataacggggttcgggtgtctcgtgtgtgaacatcacaggacaagcttctctgagcatctctg

SEQ ID NO: 238439 - DNA, 80 bp, Homo sapiens
gatattcctcatgtatcatgcaaggatattcctcatatatcataatcctgatgtccatccaacagaagcaactccctcat

SEQ ID NO: 238440 - DNA, 50 bp, Homo sapiens
agccgcgcagtcccgaagagtggagctgtgatacacaagttgggcatcac

SEQ ID NO: 238441 - DNA, 75 bp, Homo sapiens
aagtcctacaacagtttggcgtgcaacatggggcttgagaaagggaagacataggccaaggagccagacttcctg

SEQ ID NO: 238442 - DNA, 110 bp, Homo sapiens
aagacttattccatcggatttctgaggttctgcaaacagactcttccagctggagttggaggctgacgccctagtgaatttccatcagtattcttcccagctgctaccct

SEQ ID NO: 238443 - DNA, 87 bp, Homo sapiens
agctgctgctgtccaagggctctgacatcaacatccgagacaacggtgatattcatgaggatttttgcagcgtttgcagaaaaagtg

SEQ ID NO: 238444 - DNA, 75 bp, Homo sapiens
acaaacgctattcctctcacaaatcttacaggctggtgttaaaggaacttcggaatcccttaaaggtgtgaaacg

SEQ ID NO: 238445 - DNA, 75 bp, Homo sapiens
gatggtgcagaagatggaggagggaaagcaggcaggatgggagagtcgccgatagaaccacctcttccctgcctc

SEQ ID NO: 238446 - DNA, 73 bp, Homo sapiens
agaagtttgtgaagatcggccgcccgggctacaaaggtaatgtgaggctacaggagatgatggcaacaatgtg

SEQ ID NO: 238447 - DNA, 87 bp, Homo sapiens
caacatctcctgctattccttgggctgcctttcctgcagcaggactctggactgtcttcacactaggtggtgtgggcagcaaagcgg

SEQ ID NO: 238448 - DNA, 82 bp, Homo sapiens
gggggctccctggacaactccgagcaggtgagcatgggtttatgcgtcttaggcattattgtgatggcgagcaccaattctc

SEQ ID NO: 238449 - DNA, 75 bp, Homo sapiens
cgctatatcaggatgagataactgaaagggaagcagaaccatactatgaggagatgttaaagtaacccatcttgc

SEQ ID NO: 238450 - DNA, 133 bp, Homo sapiens
ggcggggccgctgctgctgctgctgcttgcccggcccccgcctgcctccgccggctacagcgggaagagcgcttcggaaccaaaaagaagcttcccagagccggggccaggagccccaagcgccctctagcag

SEQ ID NO: 238451 - DNA, 75 bp, Homo sapiens
cgacctgattgtgcagcacgtgcacagccagctggaggaggaggagatgttaaagtaacccatcttgcaggacga

SEQ ID NO: 238452 - DNA, 100 bp, Homo sapiens
cagcgatcctcccgcttcagcctctagagtagccgagaccacaggcgtctactagaaaaatctcagagggtagaagccatcattgcatctatgcaggcta

SEQ ID NO: 238453 - DNA, 75 bp, Homo sapiens
ctggtggagcgctccacgctcaaagatgaggaaaatgaggcccaaagaagtgatgccacttggttaaggtcccag

SEQ ID NO: 238454 - DNA, 98 bp, Homo sapiens
aagattttaaagagcagactagacttctcaagggagaaaactggttgtcctggatgtttgaaaagttggtcgttgtcatggtgtgttacttcatccta

SEQ ID NO: 238455 - DNA, 100 bp, Homo sapiens
aagagacagatgaagatgcagaaaggaaatgttctccttatgtttggtctactattgcatttagaagctggttctgggccggagaaggggcgacgttcgg

SEQ ID NO: 238456 - DNA, 100 bp, Homo sapiens
gcagttcatcttcctccctgtgtactttccatttgccttcctgggcattaccacaggagtcttggttcgagaacacagcaacctctcaactctagagaaa

SEQ ID NO: 238457 - DNA, 90 bp, Homo sapiens
ccagcggaccaagaacatatccgctatcagcaccccagccctatccctttacgtcatccctgagcaccatcaactatgatgagtttccca

SEQ ID NO: 238458 - DNA, 100 bp, Homo sapiens
taacatcaaggagagaaatcaggaagattatgggagattattgtggatgatgatgacagtaagatatggtcgctctatgacgcgggcccccgaagtatca

SEQ ID NO: 238459 - DNA, 100 bp, Homo sapiens
gtgtccgctgtgcccgggcctgcaccatgagcgtcccggccttcatcgacatcagtgaagaagatcaggtggatgaagacctgatcattgaagttcacca

SEQ ID NO: 238460 - DNA, 100 bp, Homo sapiens
ctcatgcagtcttcagtggataataccaaaatgaccaggtggatgcaacccttattcctattacaaatttcagctgtgggatatttgctggtattctggc

SEQ ID NO: 238461 - DNA, 90 bp, Homo sapiens
cgctgcggagccggaggaggaggggagaggcctggaggacaccaacatggtgaagtggatcctaaagagaggatagcacgccaacgaaaa

SEQ ID NO: 238462 - DNA, 51 bp, Homo sapiens
gccacccattgtgtcttctcaagaagatgctgggtgcggagccccgtggtg

SEQ ID NO: 238463 - DNA, 83 bp, Homo sapiens
gtgacgcgcgctgccggggcgaggttctgacaacaaaggagattgtgacatattgctgggcctaacactaaggtgatgttagt

SEQ ID NO: 238464 - DNA, 98 bp, Homo sapiens
cctgctggaccagctcatgggcacggctcgggacggtgctatgacaagcgtctgtggcctcgaatggacctgagccggcggaagtcactgaccccgcc

SEQ ID NO: 238465 - DNA, 51 bp, Homo sapiens
gcttgaaaacatggggattggaattcggacttcattgacttaactagagag

SEQ ID NO: 238466 - DNA, 75 bp, Homo sapiens
ggagcggctgcggcgcgcgctggaagtgtgaccgcaacaagggaaaacatggcttatactgtggaatgcctgcgg

SEQ ID NO: 238467 - DNA, 100 bp, Homo sapiens
gtcccctgtgtcatgagaacttcagccctggagaagaggttccttcaatggtgccttagctgctgttcctgtccaggacctgggctccactgtcatcaaa

SEQ ID NO: 238468 - DNA, 100 bp, Homo sapiens
atgacttcattgcactgctgcaactgccttctccagacctcttgccagcttacaagagcagtgattcccaggctttctcagcaatgtaccccatttcctg

SEQ ID NO: 238469 - DNA, 100 bp, Homo sapiens
ccgggcctcccagccgacatgtctctagtggcggaagccttcgtctcccagattgcaggatttgtgtacatcaatggcagaatcatccagcgaatcagat

SEQ ID NO: 238470 - DNA, 100 bp, Homo sapiens
tgctaaactctactgtaatcggggtacggttaattccaaggtcagtggcttcaaagactccagttggattcattggactgggcaacatggggaatccaat

SEQ ID NO: 238471 - DNA, 100 bp, Homo sapiens
tatcaccacacgactgggtatatttcctctctgctctagaggacaaaatcccagtccttggcacaaactcaggaaatggaagccggagtctgttttttgt

SEQ ID NO: 238472 - DNA, 98 bp, Homo sapiens
ggaaaggaatggggttccttctactactcctttaaggtgtgatgaatgcagactctgctaccattttggctgtttggatcctcctttgaaaaagtctc

SEQ ID NO: 238473 - DNA, 100 bp, Homo sapiens
ggccagcgtcttggagcagctgaacgtcattaacggcatcctcttcattcctctcaggttaaaaataagaagttggttgagctgctgagaaggaaagttc

SEQ ID NO: 238474 - DNA, 100 bp, Homo sapiens
tgtgattttcagaggggaatactaagaaaatacatccagcctgtgtgcctcccagctgccggccaggccctggtggatggcaagatctgtaccgtgacgg

SEQ ID NO: 238475 - DNA, 90 bp, Homo sapiens
atcagacttttgtgttgcagttcggggctgccaggcgcccagctgtgcccagatggatgggacagagacccggcagcggaggctggacag

SEQ ID NO: 238476 - DNA, 75 bp, Homo sapiens
ttcaaatccatcaagctcatcaaaagaaaaactgcttaaggttgaaaagagaaatttaagaaattgctgacggaa

SEQ ID NO: 238477 - DNA, 74 bp, Homo sapiens
tttcatcccagctttctaatctacagaaagagaaaaggcgacggcggattgacagaagtatgattggagagccc

SEQ ID NO: 238478 - DNA, 98 bp, Homo sapiens
gtgtggccaacgagctcaacgccaggcgccgctcctttacaggttcgatacaagaggctgttttcctagcgtggcttgctgcctttggtaagaacatg

SEQ ID NO: 238479 - DNA, 100 bp, Homo sapiens
tcgcctacctcattgaacgcgtgcagaacaacctgcacatcgtgctctgcctcagccccatgggggatcccttcagaaacattgaatgaggaggataaag

SEQ ID NO: 238480 - DNA, 100 bp, Homo sapiens
acactgccggggcccaaccacaagacgactcaataggaggaagcagtctgagctatcagctgaagaaagtccagaaaaattaggaacctcccagctacat

SEQ ID NO: 238481 - DNA, 125 bp, Homo sapiens
catttctataacaagtctctggcagagcaccgaaccccagatgtgctcaagaaatgccagcaggtgaacctgccgctgctcaccctgagccagcccctgctgttgggcatcgcccgaaatgagac

SEQ ID NO: 238482 - DNA, 76 bp, Homo sapiens
aaaacattgaagttaaagtatgcagagatgccttcaattaagttgcagagttctgatggagagatatttgaagttg

SEQ ID NO: 238483 - DNA, 75 bp, Homo sapiens
gacagggacaagtttgacggtcattccaacctccttccctggacacatcccggactgtggaccccttcatcctag

SEQ ID NO: 238484 - DNA, 101 bp, Homo sapiens
ctgcatgggcagcgcccgcgccccgccgctgagccgtcgcggagccgcgcagccctcggagcacggttatcaatagtctggctgtctatcgtcatcgtgag

SEQ ID NO: 238485 - DNA, 83 bp, Homo sapiens
cgaacgcggagagcacgccatgaaggcctcgggcacgatcgggtgctaccaaggttttgcttttgcatggaaatgtctactgc

SEQ ID NO: 238486 - DNA, 82 bp, Homo sapiens
gcgcccgggaggaaggaacgaggcaaggagctaaagcagcgtgcgttcagccctgggtgctctggcgctgcttcagcaccgt

SEQ ID NO: 238487 - DNA, 90 bp, Homo sapiens
ggacgatgtgcggcggatgaacaagcggcagaatggtaccaaaccaccactggatgcagatgtaaatttggaagcaattgctggtgacct

SEQ ID NO: 238488 - DNA, 75 bp, Homo sapiens
tcacctcccgaggcaaatgaccactgtcctgagaggacgtgggtgaggggcagttggacacgagcctgaacattg

SEQ ID NO: 238489 - DNA, 90 bp, Homo sapiens
cccgctcccggggtccccggccggccaagcaggagtggctgtaaggtgaagaagcatgaaactcagtctctcgccctggatgcatgttct

SEQ ID NO: 238490 - DNA, 74 bp, Homo sapiens
gaacttccatgcctctaacactcatcttcaaaagactggaatgatgagaagacagcagctgattacaagatttt

SEQ ID NO: 238491 - DNA, 82 bp, Homo sapiens
ggcgctgccgcctgaagtgcgggcgcagctggcggagctggagctggagctctcggagggagtgtgaggaagaggctgtctg

SEQ ID NO: 238492 - DNA, 102 bp, Homo sapiens
cgatctctccagtttccatatgttgagattctacttattcatcagtttgttgtgcttgtcaagatcagtgttctggacttggtgcctctttctgttatatgc

SEQ ID NO: 238493 - DNA, 83 bp, Homo sapiens
cggcccgaatgccagcgcctcttctaccggggcaagcaggtgtggacactgccagcggctgcagccgacttggaatgacctgg

SEQ ID NO: 238494 - DNA, 50 bp, Homo sapiens
agcctcccgagtggctgggattacaggtggaggctccaacccattccagc

SEQ ID NO: 238495 - DNA, 98 bp, Homo sapiens
aggaatcctctgcaggcatactgggaacgcaaaggaaggatgaactggagcagaggatgtcggccctgcaggagagcaggcgggagctgatggtccag

SEQ ID NO: 238496 - DNA, 90 bp, Homo sapiens
gagcccgagccgtaagggaagccgtgatgagggccgtgttgacgtggagagataaagccgagcactgacagcccacctgaggatattgac

SEQ ID NO: 238497 - DNA, 100 bp, Homo sapiens
gcctggtccgtgtccggtcccccaaatctgtcgtccctgcccccaggggtctcgactctgaagacagagttcctgccgctcctaagtgtgtcatttgtct

SEQ ID NO: 238498 - DNA, 76 bp, Homo sapiens
caaaggcagggcaaggaaactggccacaagttaaacccatccagagtaatggctgcggccttacccaggaccctgg

SEQ ID NO: 238499 - DNA, 100 bp, Homo sapiens
tcaaggcctcccagtacgttgtgtgaagagtatcattcgacagactatcttgctaatcatggccggttaaatgagtctgaagccaggcgaaaattctggc

SEQ ID NO: 238500 - DNA, 51 bp, Homo sapiens
accgcaactctcagttcgagagtaaaggtggctttctagaagatgaccata

SEQ ID NO: 238501 - DNA, 75 bp, Homo sapiens
tgagtacaaactgaaagaccactatctggagtttgagtggatggaactgaggttcaacactctggcaaaatgccc

SEQ ID NO: 238502 - DNA, 100 bp, Homo sapiens
gaacatgctggggcttttgcggcaccgagggctcaggccaacctcttctcttctagccgctccatttttggctccatgctacctgcatctgcctcagcac

SEQ ID NO: 238503 - DNA, 90 bp, Homo sapiens
gtgaaacccaagagctactgaggacagaaattgttaatcctctgagaatgtccccttcccctgagcccatctacaatagcgaggggaagc

SEQ ID NO: 238504 - DNA, 82 bp, Homo sapiens
agttggaagcagccgatccagcctgcggagcctgtggggcagacactggccaaaagaagaccctagacaagaaagatggaag

SEQ ID NO: 238505 - DNA, 82 bp, Homo sapiens
ctcaatgagcacatgaccagcttagcttctgtcctaaaggggaaactgactctactctgtgatgccaagacagatgggagtt

SEQ ID NO: 238506 - DNA, 100 bp, Homo sapiens
gcaatcgatcctaatggttatgttttattacatccaaatcttcagccaaaggatctaccatacccattgactaactatggaagattataccaaaatagag

SEQ ID NO: 238507 - DNA, 100 bp, Homo sapiens
tttatatctgcgtgattttcgaggtgagtgtcccagcccggggcgcggtagcgccgccaagcggaagaagaagcagcggcggaaccgcaccacgttcaac

SEQ ID NO: 238508 - DNA, 98 bp, Homo sapiens
aaaccttcatcttcacatttggtttctagaccatctacctcatctagaaggagagcaattagtgagacagagaggaacgaagggcatcctacgactat

SEQ ID NO: 238509 - DNA, 74 bp, Homo sapiens
tacaccaagatctgtgctgaccacaggaattggatctactagtgcagggttattttggagctgttggagcactc

SEQ ID NO: 238510 - DNA, 100 bp, Homo sapiens
gtatgacatctgggggaacacagtgaatgtctctagtcgtatggacagcacgggggtccccgaccgaatccagcgacctggcatgtcaccagggaaccgg

SEQ ID NO: 238511 - DNA, 100 bp, Homo sapiens
cgtcagtgcaattgaggaactcgtgaaaagcaagatgatcaatgagctgagcaatgttcctgttcctgtcatgctaatgccagatgacttcaaagcctac

SEQ ID NO: 238512 - DNA, 50 bp, Homo sapiens
ctgcgagggatcattgaccaaatccaagctgcgcaccaagctgtcatcac

SEQ ID NO: 238513 - DNA, 85 bp, Homo sapiens
ccatgcagacctattgggacaccttctggagtatggggatggacagtgattcagaaccgtcaagacggtagtgttgactttggca

SEQ ID NO: 238514 - DNA, 75 bp, Homo sapiens
gatagctttagttgctcttttggttgaacagtctcgatcagaaagacaaactgggaagattgagcctgtggtcct

SEQ ID NO: 238515 - DNA, 96 bp, Homo sapiens
catgtactgggggattcgcagggaggatgtcgggacaccccggaagctgggaaatgaacatccatgatagcagtcttctgtaaatcgaacttttca

SEQ ID NO: 238516 - DNA, 98 bp, Homo sapiens
aaattatctttcctccaataaagacagatcaccaagtcaacggttcaactactttaccaatctccataaatacggatggataatataattcaagatgc

SEQ ID NO: 238517 - DNA, 75 bp, Homo sapiens
gaggagtttgaggggtctgaagactgaaagagtcgaatggtttgttggcaggtcacagtaatgaaaggcagtaat

SEQ ID NO: 238518 - DNA, 75 bp, Homo sapiens
acctaagcatgtttgtgcttctgcccaacgacatcgatggcctggagaagtataaagtttggataaagcctggtg

SEQ ID NO: 238519 - DNA, 83 bp, Homo sapiens
atttgaggaaccttcggcagctcaggccactcctcaggatagtcaggaaggaacctttgggtcagagcattcagcgtcaccat

SEQ ID NO: 238520 - DNA, 100 bp, Homo sapiens
ataaagaccagatcttgctggaaaaagaagctgagtttcttgcagaacataaattattaggaaacattaaaaatgtggccaagacagctaacaaggacca

SEQ ID NO: 238521 - DNA, 100 bp, Homo sapiens
ccactgtggtctgttgtaccccactgctggggtggtggttccaatgagacagggcacaccaaactccatctggaattcatgatttgttcctgtagctgaa

SEQ ID NO: 238522 - DNA, 50 bp, Homo sapiens
ttcagacccatttccagtcatgaagtccgcttagtggaaagaggatcccc

SEQ ID NO: 238523 - DNA, 82 bp, Homo sapiens
ctgcaggcggcccactggcagttcgagagaggtggagaagagcgagtacttgagaaagaagaggaagaagatgatgatgaag

SEQ ID NO: 238524 - DNA, 100 bp, Homo sapiens
ctctttgcaacatttcaggaaaacagagaaagaagtgataggagggctctgtaggtcaaaatgcagatcttcgtgaaaacccttaccggcaagaccatca

SEQ ID NO: 238525 - DNA, 74 bp, Homo sapiens
aacagtctcgttgctgcctctgtgtacgctgaggggggaggtctccaggaaaagttgggctttcaacattcaag

SEQ ID NO: 238526 - DNA, 100 bp, Homo sapiens
gaaaaactctttggatgattctgccaaaaaggcaagtgtcaattgaggagggagagaggaaagccaaagagctgaatgttatgtttattgaaactagtgc

SEQ ID NO: 238527 - DNA, 83 bp, Homo sapiens
cgtgggcaacgtggccgacagcacagacgttgagaaagaagggccttaatggctgtgacagcccagaccccgatgcggacgat

SEQ ID NO: 238528 - DNA, 88 bp, Homo sapiens
caaggatttctctttgggaaactaaatttcactgttacatgccttgaagtgatgaggaggtttctgttactatatgctacacagcagg

SEQ ID NO: 238529 - DNA, 98 bp, Homo sapiens
gtcgccgccgtcagagccgccctatcagtgtactcgacagattatctctgagaagctaggccgtggctcaagaactgtggaccttgaacttgaagctc

SEQ ID NO: 238530 - DNA, 90 bp, Homo sapiens
atgacactgaccggtgctgggggcccctgcgccgagtggacgcctaccgcatctacttgcggccgccagctcctgctcggtgtccaaaac

SEQ ID NO: 238531 - DNA, 101 bp, Homo sapiens
aaaaatgaccttcggtatattgaaatgcaggtggctatggaggcttttacaacagtgatggatatggaggaaattataactcccagggggttgactggtgg

SEQ ID NO: 238532 - DNA, 96 bp, Homo sapiens
gcaacttggaccaagaactcaaactttttgtatctcgacactctgcaagattctctcctgaagtcccagattataatccatatccagtcaaatatg

SEQ ID NO: 238533 - DNA, 100 bp, Homo sapiens
cctggagcactcggtcatgtacccggtggactcggtgaaggtcctagcttactctgccaccactgcccggcaggaggaagttccccagcagacagtggcc

SEQ ID NO: 238534 - DNA, 74 bp, Homo sapiens
cgaagccgtagtgggagtattgtggaacttataggacacaactcagatgggaagttcatcgcccgggcacagcg

SEQ ID NO: 238535 - DNA, 100 bp, Homo sapiens
ggcggcgcgcgagctggagcactcgcggtccgcaagcaggtggtgaacatcccgtccttcattgtccgcctggattcccagaagcacatcgacttctctc

SEQ ID NO: 238536 - DNA, 74 bp, Homo sapiens
gatcatccacccgtacagcgacttcagatgagcagcaccagcagtaagagggctccgaccacggcaacccagag

SEQ ID NO: 238537 - DNA, 90 bp, Homo sapiens
ctgagactgctccagaagtggagaccagcagaactccaccaggtcacgagaagagaatgccttctagatgcaaaatcacctccaaaccag

SEQ ID NO: 238538 - DNA, 50 bp, Homo sapiens
ctgacccatgctgggccctcaggtcaatgtctgtggagggcggtgctgtc

SEQ ID NO: 238539 - DNA, 100 bp, Homo sapiens
gcggagcggcgccgcgtagcttccatccgccagctgccatgagcgagcgcctccgtcccaggtttggtgcacctcgatttggaggaagtagggcagggcc

SEQ ID NO: 238540 - DNA, 75 bp, Homo sapiens
cgatgaagtgcagaggtttttttctggagtacgaccccagcaaagcgacctttgtgaaggtggtgccaaccccca

SEQ ID NO: 238541 - DNA, 75 bp, Homo sapiens
gcagaccagacttcgctcgtactcgtgcgcctcgcttcggtgacttcatggtcatgacgattttcttcaatgtga

SEQ ID NO: 238542 - DNA, 76 bp, Homo sapiens
gcggaccccagcaggtggcaaaggccttgccttgtcctccaacaaagtcaagcaggatcaaggtgaaaaggagaac

SEQ ID NO: 238543 - DNA, 82 bp, Homo sapiens
agaagctgaggatgaagaagatgccttgttatcagctacagctctgaattatctgctgtctttagttgctatcgtcctgttc

SEQ ID NO: 238544 - DNA, 100 bp, Homo sapiens
ctgtaacatagtccgattgcgttatttcttctactccagtggtgagaaggattaccgagaggatgggatggatctaggcagtgacgccggcagcagcagc

SEQ ID NO: 238545 - DNA, 100 bp, Homo sapiens
gagggacaccgcagtatgaggcagagatgccttcaattaagttgcagagttctgatggagagatatttgaagttgatgtggaaattgccaaacaatctgt

SEQ ID NO: 238546 - DNA, 100 bp, Homo sapiens
aggagtgcggcgccctgggcgggctcttccaggccatagtcaacgacatgaagggggggccctcagcctcttggccttgaacgggctgttcatcttgatt

SEQ ID NO: 238547 - DNA, 90 bp, Homo sapiens
gcaaagctcaagatggcggacaaaacgccaggcggatctcagaaggccagttcaaaggaatgatccctctcttgtcacccaggctggaat

SEQ ID NO: 238548 - DNA, 90 bp, Homo sapiens
ccctgttggccggagcccagcagctgtgggagccccgagaacgcctccagcggggatgacacagaaggttttttgcatgtctgacaccca

SEQ ID NO: 238549 - DNA, 100 bp, Homo sapiens
ccccctgaggccccagaactatcttttcgataaggagtcaggccagggcgggatgacactcattgattctaaagcatctttaatctgccaggcggagggg

SEQ ID NO: 238550 - DNA, 85 bp, Homo sapiens
gatttcaggttcagtgacatcagaaaatgtgtccagagattacaaggtgacttcatggtcatgacgattttcttcaatgtgagca

SEQ ID NO: 238551 - DNA, 89 bp, Homo sapiens
ataacaaatgacaggagaaacaaagagaaagccatagaagaaggaataccagctttcacttctgactggaaataccggcatgcaggatt

SEQ ID NO: 238552 - DNA, 75 bp, Homo sapiens
aacatgcagattatatcgcatcctatggctcaaagaaagatgattatgttacacgcatggggagatactctggag

SEQ ID NO: 238553 - DNA, 83 bp, Homo sapiens
gcgtccccaaattctggaggccccgtcactttttaaaagtaaaaagatggcctatcagaaggtccatgcagatcaaagagctc

SEQ ID NO: 238554 - DNA, 50 bp, Homo sapiens
gccctggccatctaccatgtgggtcacacaagggccatccacggtgacca

SEQ ID NO: 238555 - DNA, 75 bp, Homo sapiens
tgcggagcatgttgcatcacagggaacttgagaacctcaagggcagatcacagttgaaaactttggtgcaacaga

SEQ ID NO: 238556 - DNA, 76 bp, Homo sapiens
gccaacctgaatctcagctccaccatgccttgatgacttacaagccctcaaggggaagcattttctcctggactcc

SEQ ID NO: 238557 - DNA, 74 bp, Homo sapiens
aggaaccaattccggacacataacaagcagcagtgaggacaccaaagtcaccttcaggccattcagaggaggaa

SEQ ID NO: 238558 - DNA, 100 bp, Homo sapiens
cacatagtctacacagagctccccttgctgcccagacaagctgaaggaccacaggaactttatattgctgttggaatatctggagccatccaacatttag

SEQ ID NO: 238559 - DNA, 98 bp, Homo sapiens
aagaaaaagagcaaagataagaagagaaaaagagaagatgaagaaacccagcttgatatgttgtgtgcaaagatccaccttacaaagtagaagaatct

SEQ ID NO: 238560 - DNA, 73 bp, Homo sapiens
ggtgccacctgaccagcaggacaaagtccagtggctgttttgctgcagcttctgaagtgttaaagcacttgaa

SEQ ID NO: 238561 - DNA, 71 bp, Homo sapiens
gaggaatctggagctgtcattttagaaggaggaaacaccaattggaagcctccgctcaactgtaagattta

SEQ ID NO: 238562 - DNA, 82 bp, Homo sapiens
ggagacaggaattgagagtcacagaggaaggacagtggagtctggcatcttattgctcagagtcaagatctccactgaagtt

SEQ ID NO: 238563 - DNA, 90 bp, Homo sapiens
tgaataaagcaaagacgcgcgtctacagggacacagctgagccaaactggaacgaggaatcgacttctatacctccattacccgtgcccg

SEQ ID NO: 238564 - DNA, 82 bp, Homo sapiens
tcactacctgcctaacaactgctgggggtgaagttgaacaaattgctatgatgaaaccaaaaggccagactgaacacgatga

SEQ ID NO: 238565 - DNA, 100 bp, Homo sapiens
gaggatgtggtgctgcccgagaaggtggacgtgctggtgtctgagtggatggggacctgcctgctggctatgtggttgatgttgcagaatgatgagccgg

SEQ ID NO: 238566 - DNA, 100 bp, Homo sapiens
cctttcttacttagggcaaattcattcgcatcaactttgatgtcaatggctacattgttggagccaacattgagacttgacacagaatggtctgcctggg

SEQ ID NO: 238567 - DNA, 101 bp, Homo sapiens
aaagagatgtggggggattctcgacctgctaacagaactggaccttttcggatttgtacacacagatatgacgaaagacttgaaagaagaacatttaaaga

SEQ ID NO: 238568 - DNA, 100 bp, Homo sapiens
catggacattcgccacttcttctctggattgaccattcctgatgggggcgtgcatattgtagggggtgaactgggagatcatgaatcagacagataaaaa

SEQ ID NO: 238569 - DNA, 100 bp, Homo sapiens
gtgtgatagcggcagcgaggggctcggagaggtgctcggattctcgtagctgtgccggagtgctggttctcatgagccaataaaaatacaaaccaggtca

SEQ ID NO: 238570 - DNA, 100 bp, Homo sapiens
tggggatcttggcagcgctgcagggcacgcgggagctgattacacacaatgaatgggggcaatgagagcagtggagcagacagagctgggggccctgtgg

SEQ ID NO: 238571 - DNA, 75 bp, Homo sapiens
aggagcacagcagctgaagttcagcaggtccttttggtgtgaaccatggggtggaacttcactcagatgtgatag

SEQ ID NO: 238572 - DNA, 74 bp, Homo sapiens
gtgccaaaacagaatggaaaatatgagaccgggcaggttccagcaacagatagaaatgctttaagttcactctg

SEQ ID NO: 238573 - DNA, 88 bp, Homo sapiens
ggctgggccgcccccttgctcctgctgctgctccagggagcatggcggacaccgacctgttcatggaatgtgaggaggaggagttgga

SEQ ID NO: 238574 - DNA, 90 bp, Homo sapiens
ctgctggaaacgcaagacggtgccgagaagcagctgcgagcaggaggccactgtctgcagctcccgtgaagatgtccactccagacccac

SEQ ID NO: 238575 - DNA, 88 bp, Homo sapiens
gaagatcaggacctggacaaaatgtttggagcctggcttggagaactagacaaactcactcagatatgggaaaatagtctccacaaag

SEQ ID NO: 238576 - DNA, 100 bp, Homo sapiens
gccaggaagtcggagtttgagccccggaggcagagcggctgccatgtgacatattcgatgccatgttccctgtcactcacatcgctggggagactgttat

SEQ ID NO: 238577 - DNA, 90 bp, Homo sapiens
tggagtcttccatcaatcatatctcacaggtctcctctgagcctccggcctccataagacccaaaacagatgacacctcttcccagtccc

SEQ ID NO: 238578 - DNA, 102 bp, Homo sapiens
ggaggcggctgcgagagtggcagaggagctggcggagagcggcctgcgggcgatcgggccgagattgttcagattccattctgtggggaaattgactgtgag

SEQ ID NO: 238579 - DNA, 51 bp, Homo sapiens
ccgaatcttccttcaggatatcaaggttctaccacagtgtccaggatttgt

SEQ ID NO: 238580 - DNA, 85 bp, Homo sapiens
ccgctctgctgtgggcgctgctggcgctctggctgtgctgcgcgacccccgcgcatgaatttgccattttcagtggaaaacaagt

SEQ ID NO: 238581 - DNA, 76 bp, Homo sapiens
ttcaagctttgaaggttctgggatactttctgaagcatttaggtcacaagactgttatgaacactatccaacaatt

SEQ ID NO: 238582 - DNA, 100 bp, Homo sapiens
cttaaaggaagcagaaaatgtgtggcggattactgggacagatggtcagatgtaccaacagtaccagcaacaggccggctatggtgcacagcagccgcag

SEQ ID NO: 238583 - DNA, 98 bp, Homo sapiens
agaaaatccccgttgtttttcgattgcaagagcaatagtgcagaatccagaatggatgtcctctttgtagccatctttgctgtgccacttatcctggg

SEQ ID NO: 238584 - DNA, 100 bp, Homo sapiens
agctgtggaaagaagttgcaaaacactgggaaaatagttctgcttgcaggatgggcattgttcttattccttgcatataaagtttccaaaacagaccgag

SEQ ID NO: 238585 - DNA, 89 bp, Homo sapiens
accccttctgcccggcgcttcggcccgggccgctcaggtgcagccctgccaaggtaaccctgctggggtcagttatcttcacattccag

SEQ ID NO: 238586 - DNA, 50 bp, Homo sapiens
gcactctctcgatgagtcggagaagtcccttaacaagcacaagccctggc

SEQ ID NO: 238587 - DNA, 102 bp, Homo sapiens
gaacttcgttgcttgcttgcctgtgcgcgcgtgcgcggacatggcctcaaacggtcaaaatgcagatcttcgtgaaaacccttaccggcaagaccatcaccc

SEQ ID NO: 238588 - DNA, 100 bp, Homo sapiens
cggggacggccacatgaaagttttcagcctcatccagcaggcggtgacccgctaccggaaggccatcgccaagatgtttttatacctatgccagagaact

SEQ ID NO: 238589 - DNA, 88 bp, Homo sapiens
tttgttaaggattccaagtaactcttatttgtactttgccagacgtttatcaaaatggggctgctgtcttctttcacttgtagtgacg

SEQ ID NO: 238590 - DNA, 101 bp, Homo sapiens
gaggagatcccaccgttccaccccttccaccccttcccagccctacctgagaacgaagctgctcctgctaaggccaagccggctgaagctcctgctgctgc

SEQ ID NO: 238591 - DNA, 75 bp, Homo sapiens
gctgagtggtttttcggatcatgtctggtggctccgcggattataacagacaggggcaagtgtccgagtggtgaa

SEQ ID NO: 238592 - DNA, 75 bp, Homo sapiens
tgcaccctggggctcctgaaactcacatggcagcctgcttctgcaaagtggtacgatcgaagggactatgtcttc

SEQ ID NO: 238593 - DNA, 98 bp, Homo sapiens
ctgtgaagagagaacgcagtggcacagagtagcagcatgctacaagtgaaaactgatgagaaactgaatgtgtctgatgagaatacagcaagttgccc

SEQ ID NO: 238594 - DNA, 98 bp, Homo sapiens
caaaaaggacacacacagggcggagagctggttaatgagctcctgacaagctggctacggatactatagccatatgaagttgaacatggcagaagaag

SEQ ID NO: 238595 - DNA, 151 bp, Homo sapiens
tgttggggagaagaggattggaggtgtcagtgttaaaggaacctctacaacgaaggtgaagccacggaagataaggtactaggttttgacaagcttgcatcatgcgtgagtataagctagtcgttcttggctcaggaggcgttggaaagtc

SEQ ID NO: 238596 - DNA, 90 bp, Homo sapiens
cgactgctctgagctcgggctgtccgccgttccgggggacctggaccccctgacggcttacctgtaccagcttcagtcccaggaggagac

SEQ ID NO: 238597 - DNA, 100 bp, Homo sapiens
tcagtttggtttcactcagaccggtattaatattagaaccaaccaaaatctatcaaccttcttatttgtctatcaacaatgaagttgaggaaaagacaat

SEQ ID NO: 238598 - DNA, 97 bp, Homo sapiens
agttgccgatttggtactttcttattcaactgtgaatctgctcgagaaagacaggttatcaatactctggctgaccatcatcatcgtgggactgact

SEQ ID NO: 238599 - DNA, 82 bp, Homo sapiens
ttcgagtgacccgggtgccgaggagcgggaagagttgctggggtttacccaaggtccagcctagcccctaggcaccatgtcg

SEQ ID NO: 238600 - DNA, 74 bp, Homo sapiens
ttgggacccttgcatggtgtttcaaagggtggtgaagaactaaggtcctgcaaccctggttccagtctggcaag

SEQ ID NO: 238601 - DNA, 153 bp, Homo sapiens
taggaatcatggcggctgcgctgttcgtgctgctgggattcgcgctgctgggcacccacggagcctccggggctggtactccaaagattcaggtttactcacgtcatccagcagagaatggaaagtcaaatttcctgaattgctatgtgtctg

SEQ ID NO: 238602 - DNA, 82 bp, Homo sapiens
ctcttgacaaccaagggcctccgtctggatttccaaggaagaatttcctctgaagcaccgtcgagtaatcctgcctgtgtct

SEQ ID NO: 238603 - DNA, 87 bp, Homo sapiens
tggtgcggcctcaccatacaggaacagggcagacgttagcgtgagtgatcactctcaatcccggaattcaattcgtcataatctgtc

SEQ ID NO: 238604 - DNA, 89 bp, Homo sapiens
ctaagaagtaaaattacgaactcactgagctggaagtcattcaacgggaattgaataggtatcagcagatgttgcacacaaacttggta

SEQ ID NO: 238605 - DNA, 90 bp, Homo sapiens
cgcgacgcgccccgcctcccccgtccggtccctctctccacgaacccttaggagaaatcttgagagtggacagcaattgtgaagatcgcc

SEQ ID NO: 238606 - DNA, 82 bp, Homo sapiens
ccgaggacatggacctgtacagcatcaactacctgcactttggggagcctaagtcctgcagcctcccgcgacgatgcccctc

SEQ ID NO: 238607 - DNA, 82 bp, Homo sapiens
catcctcctggccaccgactcctacaaggagaatggggtactaagagaaaagcacgaagctgtggatcatagttcccagcat

SEQ ID NO: 238608 - DNA, 97 bp, Homo sapiens
ctggggcctgggcagctgggggctgtggccattctgctctatcttggattactccggtcggggacaggaagatgatccctatgatcttgaagatgtt

SEQ ID NO: 238609 - DNA, 100 bp, Homo sapiens
tcgcgcccctgggagggaggtgggaggctctaggctccaagacgccgtcgcttgagacctgtgaccgcatcaagcagtcagcagctggcaccaagcgtcg

SEQ ID NO: 238610 - DNA, 100 bp, Homo sapiens
cttagcagcgcgcggagaagaacggggagccaggaagaactgtaggaatagtcacagcttgacaaccgaacacaacctgagtgtgctgagaactcatggc

SEQ ID NO: 238611 - DNA, 97 bp, Homo sapiens
tcgtggcagggcagtctgcggcggtgttctggtgcacccccagtgggtcctcacagctgcccactgcatcaggaaatttcgccgccagctttctgaa

SEQ ID NO: 238612 - DNA, 100 bp, Homo sapiens
cgcgccgggactgtgagacgacaggctgtggatgtgtcccccctgcgccgtgtgaaccaggccgccatggcatcagatgaaggcaaactttttgttggag

SEQ ID NO: 238613 - DNA, 100 bp, Homo sapiens
cggatgcgaccctcccagaccggccgctctcccctcctctcacggcacctcccaccatgaaggtatataatgtttacatggcagggaggcagctgtgttc

SEQ ID NO: 238614 - DNA, 100 bp, Homo sapiens
cggcggcctgtgtgtcaacgacctggcggtggggctgcggcgcctgggactgcaccgcaccgagggcgagctccagaccccaagggcctgccagggaccc

SEQ ID NO: 238615 - DNA, 74 bp, Homo sapiens
aagaaatgccaaatgattcagtccttgaaaacaaggttgggtatctacagccattggttgctgttcaggtcagc

SEQ ID NO: 238616 - DNA, 80 bp, Homo sapiens
atacaaatttttggatgatgatggatccatttctcctattgaggagtcaacagtctcactgtcgcccaggctgcagtgca

SEQ ID NO: 238617 - DNA, 74 bp, Homo sapiens
ggaacccttcgctggcgggagcgcggttcggggccgcagaggtatccgttacagcactgatgtgagtgtagatg

SEQ ID NO: 238618 - DNA, 51 bp, Homo sapiens
tccaaacattatcactctaaaggatgaactgttgacattcagggatgtgac

SEQ ID NO: 238619 - DNA, 100 bp, Homo sapiens
ctcatccagtgtattgtgtttggccctcttcgagtgagtgagagacaggtaccctcttaccaattatacttttggtacaaaagagcccctctacgagaag

SEQ ID NO: 238620 - DNA, 100 bp, Homo sapiens
actggaaacaatggcatttacagaaagagtcaacagcagtggcaacaggtcaactttgtagtgtgccaactctttgccttgctagcagccatttggtttc

SEQ ID NO: 238621 - DNA, 75 bp, Homo sapiens
caagagctttggatctgctcaggagtttgcatgggcccacgattcttcagagtctttgcaaaaacagaagcacag

SEQ ID NO: 238622 - DNA, 75 bp, Homo sapiens
ggacactatgcaatcacccgaaagttcttggccaggctgactgagagatttgtgctgggagtggatatgttcgtg

SEQ ID NO: 238623 - DNA, 100 bp, Homo sapiens
gggaagaagctgccacgcaccttctgccagctgatcctggaccccatcttcaaggtgtttgtaaaatgtatgaagaacatctgaaaagaatgaatcccaa

SEQ ID NO: 238624 - DNA, 106 bp, Homo sapiens
ataccaacgccaaacgcacgagtattacccctatctcagcagtgatggggagagccatagcggtactccaaagattcaggtttactcacgtcatccagcagagaat

SEQ ID NO: 238625 - DNA, 90 bp, Homo sapiens
agctcggcagcatggcgtccgtgacgctgagcgaggcggagaaggtgtacatcgtgcatggcgtccaggagacaaggacggcagcaaggt

SEQ ID NO: 238626 - DNA, 80 bp, Homo sapiens
aagcaagagaatctgaacctcgtctgtattcccacttccttccagggtggcccagttgaaatccttcccttcctctacct

SEQ ID NO: 238627 - DNA, 100 bp, Homo sapiens
aagattactttatggccaaagcgatagctgaccgggacatatttggagaagactgtgtaagtgtaaaggatgactctattcttagcgtcacagtggacgg

SEQ ID NO: 238628 - DNA, 75 bp, Homo sapiens
gaagggaattgtggctgcgttttattctggccccagcctgagcgacaaaggggaggtgggctttgagccctgcta

SEQ ID NO: 238629 - DNA, 90 bp, Homo sapiens
cactcctcagcgcgacgtcgtgtcgagttcccaaaaagctccgcaggggctgtagggagtgtcacatttgaagacgagcactgaggatga

SEQ ID NO: 238630 - DNA, 51 bp, Homo sapiens
cagacagaacgggacctgtgtcagcccctggcaaccactaatctgctttct

SEQ ID NO: 238631 - DNA, 75 bp, Homo sapiens
gaaattcaagttaactatcctggaatgtttgaattgatggaagatttacaagggtaattcctctcctgcaattac

SEQ ID NO: 238632 - DNA, 121 bp, Homo sapiens
tcggggaatggtatttggagctccagttccaaaacagtgtctgatcttaggggaacaaataggattggatagctttagtcaaagcagctgctgcagctgcagccaagaacaaaacagggag

SEQ ID NO: 238633 - DNA, 78 bp, Homo sapiens
gagcagccctgcccctcgctgtgaactttctgttcctgctggataatgaagtccctgaggttaccagaagtcgcagtc

SEQ ID NO: 238634 - DNA, 82 bp, Homo sapiens
gcggagctcgggcggccggcgcggagctctttgccgagggcgtgtggtgagagtccccacagcgaccctggttcgagtggtg

SEQ ID NO: 238635 - DNA, 120 bp, Homo sapiens
ggacttcctcgcagaggtggacaagctggtgcagctgattgagtgccccatcttcacatatcataggtatattgaactgttcctgaattcatgtccaaaaggaaaataagactctagggg

SEQ ID NO: 238636 - DNA, 100 bp, Homo sapiens
ctgattacctgccacccattgtgtcttctcaagaagaacgatttcgagatttactactgcctccatctagtcaagactccgaaattctgcccttcattca

SEQ ID NO: 238637 - DNA, 83 bp, Homo sapiens
gcagaaaccccgttgacaaggcactgctttttcatgacgtctcaaaccatgaattatgtgggacagctggctgggcaggtgat

SEQ ID NO: 238638 - DNA, 100 bp, Homo sapiens
tggggccgtcccagttcgcaatgagaaagatcatggaagggaagtggttgctgtgtatgttactggtgcttggaactgctattgttgaggctcatgatgg

SEQ ID NO: 238639 - DNA, 50 bp, Homo sapiens
tcactggatccttacagtaaccgctcgagagtctcactctgttgcccagg

SEQ ID NO: 238640 - DNA, 86 bp, Homo sapiens
ctgccgtctgctcttctgcctcttgatctccgccaccgtcttcaggccagacctgcctagagctggaacgttacctccagagcgag

SEQ ID NO: 238641 - DNA, 96 bp, Homo sapiens
tggccttcgtaccggactggctgaggggcaaggcggaagtcaatcaagagactatccagcgggggtcggcgctttgcctgatgaccctacctctct

SEQ ID NO: 238642 - DNA, 101 bp, Homo sapiens
gaaaagtgagaggtcagactcctaaggtggccagacgggagttccagaccagtgttgtctcccgggacattgacacagcagccaagtttattggtgctggg

SEQ ID NO: 238643 - DNA, 75 bp, Homo sapiens
gagatcaattcttggagaacacaaagaagtgtgatggcgaaagggcgtgtggttgcgcctgaggaagatactttt

SEQ ID NO: 238644 - DNA, 100 bp, Homo sapiens
ctcaaatgtcacagcatctcccacagcccctgcatgccccagtgacaagccagcaccagtccagaagcctccatccagtcccatgcagaatgccaccaag

SEQ ID NO: 238645 - DNA, 98 bp, Homo sapiens
cgagggacgcggacgcaggggacgaggacgaggagtcggaggagccgcgggcggcgcggcccagctcgttccaggacggcccacctccatggagacgg

SEQ ID NO: 238646 - DNA, 100 bp, Homo sapiens
cacccgacaggaaatagttgctcttttaaatgcttttggaagaaatgagccgtcagactgctacagcattacctaccggtacctcgaagtgtccaccatc

SEQ ID NO: 238647 - DNA, 90 bp, Homo sapiens
ggaagatggattcacccattgaaaagtggaacctaataattggcaacttggctttaaagcagaaatgttttagcaagtgcatcagctgac

SEQ ID NO: 238648 - DNA, 90 bp, Homo sapiens
ctgaccattacacgcaaagatattcaaactctaaaccatctgaattggctcaatgatgaggtacccggaaattaaagaggagctggagga

SEQ ID NO: 238649 - DNA, 75 bp, Homo sapiens
gccggtggctgtccaagtgcctgggatgcagagaagcaaatgctggcacaaggataccctgcttacacgacatcg

SEQ ID NO: 238650 - DNA, 100 bp, Homo sapiens
gcgcggagcggacgcgcgtggcgctgcccggtctgggaggggctgaacgtggtgaagacaggccgagtgatgcttggggagaccaatccagcagattcaa

SEQ ID NO: 238651 - DNA, 101 bp, Homo sapiens
taaattttaaccatgagggaaatcgtgcacatccaggctggtcagtgtggcaaccagatcggtgccaagaaatcctaagtaatgcactgaagagaggagag

SEQ ID NO: 238652 - DNA, 99 bp, Homo sapiens
tattgcagaacagcctcagcctgacactgcccatctctaagataagaacctggaaaggggactctgttggccattggaaattgcagaataatgtctcag

SEQ ID NO: 238653 - DNA, 75 bp, Homo sapiens
atctgggccgagaccattccgtatggagagccgggagacagtgtttcacaaaatgattttccttctgaagctccc

SEQ ID NO: 238654 - DNA, 51 bp, Homo sapiens
cctcaccaaaactttctctcttgataagctggttatattctgggcactaaa

SEQ ID NO: 238655 - DNA, 75 bp, Homo sapiens
cttttgtctgcccctattgtaagtgcagatggaacacaacaggtctacttccccagcaggacagcatcattctcc

SEQ ID NO: 238656 - DNA, 101 bp, Homo sapiens
gagaactacagaaacctggtctccctagatccagacatttaatgtggatgcaccatgccagaccgtggaagatttaacgaatggggttgtgatggcccagg

SEQ ID NO: 238657 - DNA, 100 bp, Homo sapiens
ccgcagccccaacccatctccagagagaccaagatccctctctgggcgcattgttggaggtgtgtggtggttctttaccctgatcataatctcctcctac

SEQ ID NO: 238658 - DNA, 100 bp, Homo sapiens
ccttgttcagcagtgacatctacaggcagctgctctataagtctgccaaaatgtctgaaagatcagatctccttcacttcaagtttgaaaattatggaga

SEQ ID NO: 238659 - DNA, 100 bp, Homo sapiens
caggaccccctgggaagcctagaaaaatggatgagagccactcagagtgggtgtcttgtgtccgcttctcgcccaacagcagcaaccctatcatcgtctc

SEQ ID NO: 238660 - DNA, 130 bp, Homo sapiens
cgctcaatgacagggaccaggggggcggcagcgctggacacccagcctccagctgtgatgcagatccatccgccctagcaaaatatgttctggctttggtaaagaaagacaaaagtgaaaaagagttaaa

SEQ ID NO: 238661 - DNA, 90 bp, Homo sapiens
agatgctccagtttgagaaacctggatctgcgatctgtttgtgtccaaaagaaactcttccttcaaaacctgtgaagaaagagaaggaac

SEQ ID NO: 238662 - DNA, 82 bp, Homo sapiens
ctggtacacaaaggatcggatgcagccagctttaccactcctgaaggccctaaaccccgttccagatgctctgactgggcaa

SEQ ID NO: 238663 - DNA, 74 bp, Homo sapiens
gacatcatgccagggctggaaactgctgtcgtctttcaagaaaaggctttggtatcaggatggtgctggcctca

SEQ ID NO: 238664 - DNA, 75 bp, Homo sapiens
gccccagagggaaaagaagcccaaagttttaaaggtgatgggcagaatctgtttacgaaagacgtgacagtgatc

SEQ ID NO: 238665 - DNA, 88 bp, Homo sapiens
cagaaggaaccaattccggacacataacaagcagcagtgaggacaccaaagtctgaagatgatgagaaactgaaaaagaggaaggagc

SEQ ID NO: 238666 - DNA, 82 bp, Homo sapiens
gggcgctccggtggcggcggaggaagcctgcaaccggccccacaaattctagcagtgccaagaagaaggataaaagagttca

SEQ ID NO: 238667 - DNA, 100 bp, Homo sapiens
cagttggagttgcggcggcgggaacgattgggctgagcagaggacgacatgttgcttttcgtggaggccttcatgccccgaggactagcagacaaacaag

SEQ ID NO: 238668 - DNA, 75 bp, Homo sapiens
taagcgaggggatcctcatgagttaagaaacatatttctacagccagttctggtgactcagtccgcagctatagt

SEQ ID NO: 238669 - DNA, 75 bp, Homo sapiens
tttcaacatgcctctgacaatctctagtgcgaactgtgatgaagagccttatacttaggaagacacaactacctt

SEQ ID NO: 238670 - DNA, 90 bp, Homo sapiens
cccatttcttctgagaaggacagagccaatctactcctcctgggttatgctcaaggaagactagagcatcgattgttatctagacaagaa

SEQ ID NO: 238671 - DNA, 82 bp, Homo sapiens
ggaccggctgccatcttagtctagggactgaggagtcgccgccgccccgagtcccggagcacgtgaattgcctctgcttacg

SEQ ID NO: 238672 - DNA, 75 bp, Homo sapiens
cttcttttgagcagttggcactacccgtcttgaggaattttcattcattggctcccatgtactatcgaggctcag

SEQ ID NO: 238673 - DNA, 82 bp, Homo sapiens
tgaagtggaaaggatggcccccaaagaactgtggctgcaccatctgtcttcatcttcccgccatctgatgagcagttgaaat

SEQ ID NO: 238674 - DNA, 100 bp, Homo sapiens
cttcccaggtgctgccctccagctcacagctggtggaagttaaaggccccaatgatcgtctttcacataagcagatgatctggctggctgaactgcagaa

SEQ ID NO: 238675 - DNA, 75 bp, Homo sapiens
tggaagtgtagaacgtcattcagaggttaaacccatccagagtaatggctgcggccttacccaggaccctggggg

SEQ ID NO: 238676 - DNA, 100 bp, Homo sapiens
tggcatttccgagattggagcctaacagtgtagatcctgagaacatcaccgaaatattgatgaactcccagagggcgctgtgaagcctccagcaaacaag

SEQ ID NO: 238677 - DNA, 107 bp, Homo sapiens
tgtcagccatgaacggatggatgtgatgcctgctagccaaaaggatgccttcaattaagttgcagagttctgatggagagatatttgaagttgatgtggaaattgcc

SEQ ID NO: 238678 - DNA, 100 bp, Homo sapiens
gaaacaacaatgaagaggtaattcacttgaacaactttcactgccatcggggacaaggtgaatctggattgggaaagtcgacattaatcaactcattatt

SEQ ID NO: 238679 - DNA, 51 bp, Homo sapiens
ttccaacaaaagaatgctgccgcagagtcatgtgctgttcctggggcttgg

SEQ ID NO: 238680 - DNA, 83 bp, Homo sapiens
cggcagctgctgcctcgcgcccgggagcaggaggagctgctggcgcccgcagatggtgacgcggcgcacggcgcggatggtgg

SEQ ID NO: 238681 - DNA, 100 bp, Homo sapiens
aggcccagaacggagccgccttggcctcggggtctccctacaccaacggagctgcacaccatcttcccatggctggtagaaagcatttttggcagcctag

SEQ ID NO: 238682 - DNA, 82 bp, Homo sapiens
gtgtcccgaggaagtgcaagacccggtcccttcaccgatgttgtcaccaccaacctaaagcttggcaacccgacagaccgaa

SEQ ID NO: 238683 - DNA, 75 bp, Homo sapiens
cattgctggacaggatggagttcgccagtcgagagagacgagttgtactgctgtcacaggaaatggacgctggat

SEQ ID NO: 238684 - DNA, 75 bp, Homo sapiens
tgatgatgaagatgggcaagacaatcagggcacagtgactgaaggagatcagtttgacaacttagaaaaacacac

SEQ ID NO: 238685 - DNA, 76 bp, Homo sapiens
gtgacatcagaaaatgtgtccagagattacaagagctgaactagagaaacatggttataagatggagacttcatag

SEQ ID NO: 238686 - DNA, 75 bp, Homo sapiens
ctggggaccaaaaatgaacctgtgttaaaacctggagacagggtatttcagtgtctgtagacaagatggaatcat

SEQ ID NO: 238687 - DNA, 73 bp, Homo sapiens
tgctggaccacaaaccgctgccagaaaagggactcattctcacagttccggtttgctgaggagaaagaatggg

SEQ ID NO: 238688 - DNA, 95 bp, Homo sapiens
gctaacagttacagagggacactcaagggagtaactattcccagtcagaggcgctatgtgtattattatagctacctgttaaagaatcatctgga

SEQ ID NO: 238689 - DNA, 88 bp, Homo sapiens
agtgattttagctacatcaagtgatgaaaaacacccacctgaaaatatcattgatgggttgtctgcattcaaaagagcattctattaa

SEQ ID NO: 238690 - DNA, 98 bp, Homo sapiens
cagtctcggttcgacgactccattttcctcggtgggggcttagcgcactggaggagcggcgggcttcagacaggaatcagagaagatcattgctgagt

SEQ ID NO: 238691 - DNA, 96 bp, Homo sapiens
gagagaccggagaggtggagagtgaagatagtgatccggggagacaggaacacgggcaagacagcgctgtggcaccgcctgcagggccggccgttc

SEQ ID NO: 238692 - DNA, 99 bp, Homo sapiens
ctgaaagagtaccggatctgcatgccgctcaccgtagacgaggtggccctggtacagtggacggaaagtgtgggcttaaccctggtgggccgagaccag

SEQ ID NO: 238693 - DNA, 100 bp, Homo sapiens
ctgagttacgatgtattgagcgcgtcgtatgcggccagcactaaggtcacgagaagagaatgccttctagatgcaaaatcacctccaaaccagaccactt

SEQ ID NO: 238694 - DNA, 101 bp, Homo sapiens
actggcattggaacttcctgttctgatagcgtggaaggatgaaaactttcggaagagaaagttgcctgtggtaagttcagttgttaaagtaaaaaaattca

SEQ ID NO: 238695 - DNA, 96 bp, Homo sapiens
ctcacacacagttacttgccaagacgattgaacattgatatgaaccatggacaagtatattctgctgccacaaagactgtaaagtgcttcatttca

SEQ ID NO: 238696 - DNA, 82 bp, Homo sapiens
caccccgactcaacgtgagacgcaccgcccggactcaccatgggtggcccagttgaaatccttcccttcctctaccttggaa

SEQ ID NO: 238697 - DNA, 75 bp, Homo sapiens
tcattgccatgaaggaactcaaataacgaaggaggcccaacttcattcaataaggagcctgacggatttatccca

SEQ ID NO: 238698 - DNA, 83 bp, Homo sapiens
gtccatctcgcagtacagcggcaagatcaagcactggaaccgcttccgagaccccgcggcgccatggctcacgtcggctcccg

SEQ ID NO: 238699 - DNA, 75 bp, Homo sapiens
tgagtacttggatagacttatacctcaggaaactcaacagtgtaaatttgatggccaggagacaaaaggatccaa

SEQ ID NO: 238700 - DNA, 100 bp, Homo sapiens
cctgagatcgtcaagtctcccagcgaccccaagcaataccggaactttatattgctgttggaatatctggagccatccaacatttagctgggatgaaaga

SEQ ID NO: 238701 - DNA, 100 bp, Homo sapiens
cggccaagaaagacaaagacccagtgaacaaatccgggggcaaggccaaaaagaagtttagtcatccaacaagaagaaatatgaaattccagcaataaga

SEQ ID NO: 238702 - DNA, 74 bp, Homo sapiens
aaagatggagccctgcatatgattggctctttagctgaaatacttctgaaggaggtgataattgtcctggaaag

SEQ ID NO: 238703 - DNA, 82 bp, Homo sapiens
actggtgtcgagaagtccggaagcttgtggcgctgaaaacgaacggtcgacactcaaagggggtggcaaagacagtaacaaa

SEQ ID NO: 238704 - DNA, 90 bp, Homo sapiens
caatcagattcctcaggttacctctgatggaaaaagacttcagatcgcctctgggaggggagctgcagcaggaggaagacacagccacca

SEQ ID NO: 238705 - DNA, 100 bp, Homo sapiens
gagagggcgggccagggccgcactccggagactcgcggttgctacgcgcaccatggctggaggtgattgctggcttcaaccgccttcggcaggaacagcg

SEQ ID NO: 238706 - DNA, 100 bp, Homo sapiens
taatcctacctatgagaccatgtttgctcctgagacatgaagaggagcatcggcggcgtgaggaagaaatgatccgacacagagaacaggaggaactgag

SEQ ID NO: 238707 - DNA, 100 bp, Homo sapiens
gctgccgctgccgccctgagtcactgcctgcgcagctccggccgcctggctccccatactagtcgccggtgtcatggagaaactccagctgggcccagag

SEQ ID NO: 238708 - DNA, 51 bp, Homo sapiens
attgaagagacgttaaaatacttccgtgttcagtgtgaggtggagctgata

SEQ ID NO: 238709 - DNA, 96 bp, Homo sapiens
tggtcatcatgatgaaacttagacacaatatttccgccaagagctggagcgtttagatgaggggctccggaaagaagacatggctgtgcatgtccg

SEQ ID NO: 238710 - DNA, 90 bp, Homo sapiens
cccctggcctcgcgggccgtgtctccggcatcatgtgtggttcgagaacttgtcttggacaattgcaaatcaaatgatggaaaaattgag

SEQ ID NO: 238711 - DNA, 74 bp, Homo sapiens
tttcggatcatgtctggtggctccgcggattataacagtattggtaaaggttttcaaggtgtcatgaaaagatg

SEQ ID NO: 238712 - DNA, 97 bp, Homo sapiens
aagtatggattcattgccaggagctggtgatttcctaagcagaggtcgctaactacaagaaatgttacactcgatctgaagaagacacttgaatcat

SEQ ID NO: 238713 - DNA, 98 bp, Homo sapiens
tccttcaccacggtggcagatacacctgaaaatcttcgcctgaagcagcaaagtgaattgcagagtcaggattttttatcaagcagaaatgcatcgaa

SEQ ID NO: 238714 - DNA, 50 bp, Homo sapiens
agaagtttgatgacttccagaagccgctgtgattggaaccaggctgcatg

SEQ ID NO: 238715 - DNA, 76 bp, Homo sapiens
ctttttcaagggagctgataaagaacttcttcccaaaatgggatgtacagttacccagcacgtgtacctcctcctc

SEQ ID NO: 238716 - DNA, 75 bp, Homo sapiens
ccttttgcaccttcaccaaccttgcctcctacctttcatccggaagaagcccagccgcagccccagccccagccc

SEQ ID NO: 238717 - DNA, 80 bp, Homo sapiens
ccgagctctgccctcccacttgggtccgcaagcaggtggtgaacatcccgtccttcattgtccgcctggattcccagaag

SEQ ID NO: 238718 - DNA, 88 bp, Homo sapiens
gcaagtcccgtcttatgggacttgaggccctcaaggtcctttcccataacctgtgcacggtgctgaaggttcctcatgacccagttgc

SEQ ID NO: 238719 - DNA, 80 bp, Homo sapiens
cggcacgcgactccccccgggcccaaaattggcggcagtaagcacacaatgaatgatcacctgcatgtcggcagccacgc

SEQ ID NO: 238720 - DNA, 101 bp, Homo sapiens
ataatatagctggtattgaagaggtcttgggtggtgcctatgatgagttcatctttgctcctcggctggacaatctgcacagctgcttctgtgccctgcag

SEQ ID NO: 238721 - DNA, 74 bp, Homo sapiens
agggcggcgacggtggtggtgactgagcggagcccggtgacaggatgtgattcgcctttgccagtctcatctcg

SEQ ID NO: 238722 - DNA, 100 bp, Homo sapiens
cttaaaaaagaagctgcttatccaaattcttccctctttatgtttttcaagggacggatacaacgactagagggtccctgtgttcatgatgaggactctg

SEQ ID NO: 238723 - DNA, 100 bp, Homo sapiens
cgagaagtaaaagacttgaaaaagaaatgcacaagcaactttttgagtccggaaaaacagcttggttctacagccattgggatccagacatcagagggtg

SEQ ID NO: 238724 - DNA, 100 bp, Homo sapiens
ggaccccagcaaaatacccagctggttgaaggtcaacaagatctactatcctgacttcatcgtcccagacccaaagcttgacaaaagtaagctgaagcca

SEQ ID NO: 238725 - DNA, 83 bp, Homo sapiens
gcgcagtgcaggcagataccgtttgacaccaccaacaatgcagatcttcgtgaagactctgactggtaagaccatcaccctcg

SEQ ID NO: 238726 - DNA, 90 bp, Homo sapiens
atcggttcctccaggagaagttagcttcagagttctttgtggatggacttgattctgatgagagcaaactgtgctcacaggagaaactag

SEQ ID NO: 238727 - DNA, 100 bp, Homo sapiens
ttccctggttgcttagctgggtctcggccacggcgtggagagcggcaagtctcattcaggaacgtcgcctgataacactgcaccaccacctccccctcca

SEQ ID NO: 238728 - DNA, 73 bp, Homo sapiens
aaccgccctcctggacaaggtggccgacaacctggccatccagcttgctatggagtttgacgagaaggactta

SEQ ID NO: 238729 - DNA, 101 bp, Homo sapiens
atgcctatactgccctcctcactcacttccggtggcaggtaagtaaggaggtctctgtaccatggctcgtacaaagcagactgcccgcaaatcgaccggtg

SEQ ID NO: 238730 - DNA, 71 bp, Homo sapiens
ccctggccccgggggcagtcgcgcctgtgaacgggaccgatgatgtggcgaccatcagttctgctgcttct

SEQ ID NO: 238731 - DNA, 98 bp, Homo sapiens
tgcgcctgggagatgctgttgaacagggtgtgattgctgccatgagagatggttttggtttcatcaagtgtgtggatcgtgatgttcgtatgttcttc

SEQ ID NO: 238732 - DNA, 97 bp, Homo sapiens
agaaggtggacgtgctggtgtctgagtggatggggacctgcctgctgaactgtttgaggcgaagagatgctggtttgttgaatcagttgcaagagct

SEQ ID NO: 238733 - DNA, 82 bp, Homo sapiens
gtgaagaagaacagctcgagagagcattacaagccagcctctgggaccgagtcatctcagcaaaacttaaggaaaataagaa

SEQ ID NO: 238734 - DNA, 100 bp, Homo sapiens
gaggttttcaggaaacttgcagcaaagccattcgggttggagtaattgggctactacaaagttctgggaaagggaaagctcccaaagcagcctgtcatcg

SEQ ID NO: 238735 - DNA, 99 bp, Homo sapiens
gctttcctttccaagaggaatcctcggcagataaactggactgtcctctacagaaggaagcacaaaaagggacagtcgatactgtggatggtagggaag

SEQ ID NO: 238736 - DNA, 99 bp, Homo sapiens
aaggaagccgcccgccccccaccgccgccccctccggcgtgttcatgcccccgggctcaccatggatgatgatatcgccgcgctcgtcgtcgacaacgg

SEQ ID NO: 238737 - DNA, 129 bp, Homo sapiens
attagattgtgttcaagaactacttcaagatgaggaactattttttggacttcaatcagaggcaaatttctggagatgtgcaatgatctcttagctagagtggagccaccacttcgtagtgttttggaa

SEQ ID NO: 238738 - DNA, 83 bp, Homo sapiens
ttactgtcaagacatttcttcggcattctgcaacagcccgacggccatggaggctgaagagacgatggaatgccttcaggagt

SEQ ID NO: 238739 - DNA, 100 bp, Homo sapiens
gtgattcaccactctccatgaagagctgaactggcacaagtggcaacggtatcccttctccctcccttgtcagccttccttccttctttgaaaggagaag

SEQ ID NO: 238740 - DNA, 75 bp, Homo sapiens
ctgaccttggcgacctcagctccggcctccaagtcatccgtccttggctcaggatttggagagcttgcaccacca

SEQ ID NO: 238741 - DNA, 51 bp, Homo sapiens
cagatgtccagtactactgggatgcctgaaaacttcatgcctcctgttccc

SEQ ID NO: 238742 - DNA, 90 bp, Homo sapiens
cgcgcctggacgccgctgacggccccgagcacggccgcccggccacggactcctcctatttatggagcaggcacccaacatggctgagcc

SEQ ID NO: 238743 - DNA, 90 bp, Homo sapiens
tttttggcaggcgctggttggacagacaaaaaatgatttggtggtcagcttgcctgaggaggtgagcagtaggtcatccagtcccagtgt

SEQ ID NO: 238744 - DNA, 98 bp, Homo sapiens
tgagaggctgctgttctaactcgctcccaggattggcatcttcttctgccccctgctgccctttatccaaatgattatgcttttcatcatgttctact

SEQ ID NO: 238745 - DNA, 100 bp, Homo sapiens
ggcagcggtggcggctgcgctggcgcggcttttggcggcctttctgctcctcgcggcccagttaccggtattgtaagaacaagccgtacccaaagtctcg

SEQ ID NO: 238746 - DNA, 98 bp, Homo sapiens
cagaaggtgaccaagttcatgctgtgtgctggacgctggacagggggcaaaagcacctgctcggaaagaccacagcaagattctttcattcgtctcct

SEQ ID NO: 238747 - DNA, 82 bp, Homo sapiens
ctgcaacaaatatcactgaaatgattcatttctggaagcattctactgactgcatcaaaacatgtaaacaaggacctcggta

SEQ ID NO: 238748 - DNA, 101 bp, Homo sapiens
gagaatcagcatctgaaaagccataatcagcgcctggtggagcaggtgggatcccttcaagatgcgctagaaggaggagatgttaaagtaacccatcttgc

SEQ ID NO: 238749 - DNA, 90 bp, Homo sapiens
agaactggtcgccatcaagaaagtattgcaggacaagagatttaagctagaacgagtaaatctgtctgcagcccagacactgagagccgc

SEQ ID NO: 238750 - DNA, 98 bp, Homo sapiens
ttggagtctggacatctgaaacttggcagaggaccctgcggccttccgcagtgtttgtgtccctgggtacttgagattagggagtggtgatgactctt

SEQ ID NO: 238751 - DNA, 76 bp, Homo sapiens
gtcgacccccaggaaaggaaaaacccacaaacatgttcacaacgggcatggaatcccagtcagaagttccagcctg

SEQ ID NO: 238752 - DNA, 51 bp, Homo sapiens
ccatcttccgcacgacctcagcaaggcagttttgggatttgagattgacgc

SEQ ID NO: 238753 - DNA, 86 bp, Homo sapiens
ccaacttaaccaatgctctgcctcagggtgcaaatgccaaccaagatttcattcactttcaagtaatctgtacgaagaagttgaga

SEQ ID NO: 238754 - DNA, 83 bp, Homo sapiens
ggaagaacggtgaatttcccccgcaggaaaactttattctcaagagatttctcattccgcagaaataaggatctggcatgtca

SEQ ID NO: 238755 - DNA, 98 bp, Homo sapiens
cggcggccgctcacaacatgcacagcctggcgacggctgcgggtcctgatgaagaagctgttgtggatcttggcaaaactagctcaactgtgaacacc

SEQ ID NO: 238756 - DNA, 90 bp, Homo sapiens
ctgcaaatgaagctctcgaggctgctaagagactaacatctgcaaacatagagaattctgggcttccacacaactccagtgctaactcaa

SEQ ID NO: 238757 - DNA, 71 bp, Homo sapiens
aaggcaaatacagccccactgtgcagacccggaggaagctcttcgtgggcggtcttgactggagcacgacc

SEQ ID NO: 238758 - DNA, 100 bp, Homo sapiens
aggcaagaaactgctcaacaagtgcgccgcctcagccgcggaggagagcggggccggcaagaaggacaaggtgaccatggaggctggtggcctccccttg

SEQ ID NO: 238759 - DNA, 82 bp, Homo sapiens
ctcggtcctggaggccctgcagcagcacaggccggtaagccaagatgggtgcatacaagtacatccaggagctatggagaaa

SEQ ID NO: 238760 - DNA, 90 bp, Homo sapiens
ctgggatgatacaccttttccacagggaattgagttggtcacagagatgcggcggaccctgacgcctgccagctccccagtgtcctcgcc

SEQ ID NO: 238761 - DNA, 100 bp, Homo sapiens
actgactcaaaatatttcaccacgaccaagaaagagaacttggcaaacaaggctgacagggaccagtatgagctgctttgcctggacaacacccggaagc

SEQ ID NO: 238762 - DNA, 80 bp, Homo sapiens
agaggagcagcatggcatttcagtcactggtttgcagagtccagaaccagcagatagacacccaaatcgtaaagcaagag

SEQ ID NO: 238763 - DNA, 101 bp, Homo sapiens
ccaggctgtctcggtcatcctgaacttggagcagcaagtgcgaggtaagtggggcagtgtccggaccagtggacgcagcagtggccttggcaccgatgtgg

SEQ ID NO: 238764 - DNA, 100 bp, Homo sapiens
gctggtgaccagcgtcacgctgctggtggcccgggtcttccagaaggctgtagaccagagtatcgagaaggtccagcaagactatgaatctctgttccaa

SEQ ID NO: 238765 - DNA, 49 bp, Homo sapiens
ggccatctggctgtgtactacaggtacagcagggaagaactggaaactc

SEQ ID NO: 238766 - DNA, 98 bp, Homo sapiens
agctgggtcagtccgccgctcaccccgcggccgcaccttcccgccttctcaggtgcccgtggttgacacgagctgtgtccccagctgttcccgtctac

SEQ ID NO: 238767 - DNA, 76 bp, Homo sapiens
aaaatgagccattctcaccccgctgggtaactgtggagaattttttacgggtattaactgggaggatcccacctag

SEQ ID NO: 238768 - DNA, 75 bp, Homo sapiens
ccccgaccagccccggctcagggtcccccttcctggtggctgtgaaggattacaaggcagaggaagacccagcaa

SEQ ID NO: 238769 - DNA, 100 bp, Homo sapiens
ggaggactctggagctgacagcgcgcacttcacccgcagttggtgctggagaatctggtaaaagcaccattgtgaagcagatgaggatcctgcatgttaa

SEQ ID NO: 238770 - DNA, 97 bp, Homo sapiens
aagtggaaataattaatgaccgaacagaaacccctcctcccctagcttcactcaatgttagtaagccaaagccttctactaccccaacttcacctcg

SEQ ID NO: 238771 - DNA, 50 bp, Homo sapiens
cgccgcccgtccacacccgccgccaggatggcacatttcctagaggcaga

SEQ ID NO: 238772 - DNA, 100 bp, Homo sapiens
gcgggcgtgagcggcggcgtcttatccaaccttgcgctgcatccgctcgacctcgtgaagatccgcttcgccggctaaaagagatgctaagagaatgcct

SEQ ID NO: 238773 - DNA, 75 bp, Homo sapiens
ctcacatcgtgcgggaagtcgacaggccgggatccagcgctatagtggcccctggtaaaacccggggagggtcac

SEQ ID NO: 238774 - DNA, 100 bp, Homo sapiens
acaaccggtatattgcaaataccgtagagcacttttcaggattagaagaggctgtgtatagaaacatacaagcttgcaaggagcttgcccaaaccactcg

SEQ ID NO: 238775 - DNA, 100 bp, Homo sapiens
tcaaagagcagtgggggttgctgacccagaggagagttctccaaacatgatcgtttactgcaaattttcggctttgtgagaaaccttaccatcaaacacg

SEQ ID NO: 238776 - DNA, 83 bp, Homo sapiens
tggagatcgtcccgcgcctgccgatcattgagaagcagccaggccacattcggagcagggttttcagggaggtggagatgctg

SEQ ID NO: 238777 - DNA, 80 bp, Homo sapiens
gggcgctctcgcttcagtcagtcgggccgcgccgcgcctcagctctgcaggaacgaatgcaggaatttgggaactgagct

SEQ ID NO: 238778 - DNA, 50 bp, Homo sapiens
tgctggatgtcaacggcctctgaaccacttgaattaaaattcccaaacat

SEQ ID NO: 238779 - DNA, 50 bp, Homo sapiens
tgggcattttgtttatgagcaaggtggggaagctgaaggatggagcccgg

SEQ ID NO: 238780 - DNA, 100 bp, Homo sapiens
ggctgcagggcatttccttcgggatgtattcggctgaagagctcaattgtggaagatatcaataagcgcagagagccgctccccagcctggaggctgtgt

SEQ ID NO: 238781 - DNA, 83 bp, Homo sapiens
cgacaagccgctggcagccgcggatctcaccgccgctcaggatattaataaggcagcggaaagaagaaatatgaatacggctc

SEQ ID NO: 238782 - DNA, 101 bp, Homo sapiens
agctggaggcggccaagaagaacttaagcgaggccctgggggacaacgtgaaacagatgacactcctgtccaggacactaaaatgtgaagaacagctcatt

SEQ ID NO: 238783 - DNA, 83 bp, Homo sapiens
cagggccgtgccgcagatgcccaccggaatggagaaggaagaggagtcggtttccacttgagcggcacagtgacagaacctgc

SEQ ID NO: 238784 - DNA, 109 bp, Homo sapiens
cggtggtggcgggtggaggttcgagcgctgttctcgctccggagccgctgcacatttcgtgggaatgtaagacggacttagatattgcatacaaatttggaaaaactgt

SEQ ID NO: 238785 - DNA, 73 bp, Homo sapiens
cagttcagcctattccttgttgagctgctctcgtttgaggatgtggcgatgtacttcaccagagaggagtggg

SEQ ID NO: 238786 - DNA, 82 bp, Homo sapiens
cttggactgagtcctgcaggacacaggtgctggtgattgggtgtggcaactcagaactgagtgagcaactgtatgatgtggg

SEQ ID NO: 238787 - DNA, 75 bp, Homo sapiens
tacctgatgtgaatgagagaattgaacagttctcacagatgagctttgatccaaaccttctccacaacaatggac

SEQ ID NO: 238788 - DNA, 100 bp, Homo sapiens
gcagggaagagagaccttagaaaggatcaggactggcggaagttttcatgggctgagctgctgagttcagcctgggaactgaggccaacaagggagtctc

SEQ ID NO: 238789 - DNA, 51 bp, Homo sapiens
gcagcccccgggcagaccctgttccgagtggagacctttggcgacttggcc

SEQ ID NO: 238790 - DNA, 97 bp, Homo sapiens
gagcgccaactccgtatacggcttcactggcgcccaggtgggcaagttgccgtgcctggagatctcacaggtctctgacccctcccaaggatcatgc

SEQ ID NO: 238791 - DNA, 75 bp, Homo sapiens
ttatggaacattgcctgaaacacggtcttaaaggttggatggcaagcatgtggtgtttggcaaagtgaaagaagg

SEQ ID NO: 238792 - DNA, 96 bp, Homo sapiens
caaccactattttcttcctgcccctcgttgatgagagcattcgaagtgacctcagcagggcatccaggtgaagagatggcgtttgtgaagagtggc

SEQ ID NO: 238793 - DNA, 75 bp, Homo sapiens
actccaagcggcagcccactggagtcccagtcgccacgacaggcggcagccagttgttgacctcctgtactggag

SEQ ID NO: 238794 - DNA, 82 bp, Homo sapiens
tggaactacagatcaacattcagaatgaaaatgtttataggaggccttagctgggacactacaaagaaagatctgaaggact

SEQ ID NO: 238795 - DNA, 100 bp, Homo sapiens
tcgccgactactttgtcatctgcggactggacacggagaccgggctggagccggacgagctgtcggacatcgatgaatgtggaaatgagctcaatggagg

SEQ ID NO: 238796 - DNA, 74 bp, Homo sapiens
tagaatctgctggctactacttgaaacagccaccgcactgtgttcctgacacgtacagcaacgccacgctctgg

SEQ ID NO: 238797 - DNA, 83 bp, Homo sapiens
gtctgtctgtgcaggtggtcaactgcagccgtgtattcagccttaggatgagacctgcacgcagtggctcacagcagcacgat

SEQ ID NO: 238798 - DNA, 98 bp, Homo sapiens
gtcgctcatcaagcagcaggtccttaaggttaatttggagtggcccctggagtcagtttcctacaccatccgaggccccacccagcacgagctacagc

SEQ ID NO: 238799 - DNA, 50 bp, Homo sapiens
ccaacatatgatgaaaaccccatgaagtctggcttcagccttgtcatgaa

SEQ ID NO: 238800 - DNA, 78 bp, Homo sapiens
tggtgcccgcagcaagcccaaaattgtcactacaacaggtgcagaggctgttgctcccagcactcacccgacatctgc

SEQ ID NO: 238801 - DNA, 75 bp, Homo sapiens
tacatctattaactgctttggagacttcataatttttctaggaaagggtggttctcttcccaaagtggaagccaa

SEQ ID NO: 238802 - DNA, 75 bp, Homo sapiens
cggacgtggaagtgtcgccccaggaaggctgcatcacaaagacaatgcagatcttcgtgaagactctgactggta

SEQ ID NO: 238803 - DNA, 83 bp, Homo sapiens
gccggctgaggagcgccgctgcctcgcctcggtggctattatcatggaaaactaatttttcccagagaatttcctttcaaacc

SEQ ID NO: 238804 - DNA, 75 bp, Homo sapiens
cagcttcggcggcggcagagggatcttagaaatgaagttgaaaaattacgcaatgaagtgaatgaaagagagaaa

SEQ ID NO: 238805 - DNA, 82 bp, Homo sapiens
gctttgttgtggaaatcccggttacctgatttgagttctgtgaacctgcatttgttgttggtaattgcctccagatagcttc

SEQ ID NO: 238806 - DNA, 100 bp, Homo sapiens
cagtagaagaaccatttcttcgaattccttctcaccagaggtatttgtgctgcctgttgatgtagaaaagggtgccttcaccagggatggaagaggcagg

SEQ ID NO: 238807 - DNA, 75 bp, Homo sapiens
ttcactgcacttataaatattcagattacacagacagaggtccagcaaggacagcagcagttcagccagttcaca

SEQ ID NO: 238808 - DNA, 98 bp, Homo sapiens
ccgaggccccgccgctggagcgcgaggacagtgggaccttcagaactctaagaaggagctgatgtggaggagcagctgagacagttcaagatgacgac

SEQ ID NO: 238809 - DNA, 75 bp, Homo sapiens
ccgcgaagtcatggggctctgtcgggaaggttattctcgttcaagttaatccaggtgagactttcacaataagag

SEQ ID NO: 238810 - DNA, 75 bp, Homo sapiens
tcagactcggagacgtctgacagtgacgatgaggcaaggagagcctcatcactgacagtggaaagctgtatgccc

SEQ ID NO: 238811 - DNA, 99 bp, Homo sapiens
acggacacttcaggctatggccagagcagctattcttcttatggccagagccagaacaatcctccaggtcctattgacaatactaagattgcagtcact

SEQ ID NO: 238812 - DNA, 75 bp, Homo sapiens
ctctgccccagcctgtcttctggcccctcctgaaagctgtcacccacaaaccatgctcgacagctgaccaaggcc

SEQ ID NO: 238813 - DNA, 73 bp, Homo sapiens
ggcaacaaggacccatgggttcaggaattgatgagctgtcttgatctcaaagttggatgaaaaatctgacaaa

SEQ ID NO: 238814 - DNA, 88 bp, Homo sapiens
ccgcgccctgctgtcccgcccctggaccggggccggaaaacagacacatgaccctcattgagaactgcagcctgcagtacacgctgaa

SEQ ID NO: 238815 - DNA, 99 bp, Homo sapiens
agaagattatgacagattacgccccctatcctatccgcaaacagttaatggaaaaggttccttatggtgtgttgatccggaatataaacccaatcttat

SEQ ID NO: 238816 - DNA, 75 bp, Homo sapiens
agtgcttggggatggagtgcctccaaaggttgctgaggtcctcagaatggttggaatgaccctccagctttgaac

SEQ ID NO: 238817 - DNA, 100 bp, Homo sapiens
aactacccctaaaagccaaaatgggaaaggaaaagactcatatcaacattgtcgtcattggacacgtagattcgggcaatttcttgcaaccaccaccgag

SEQ ID NO: 238818 - DNA, 87 bp, Homo sapiens
caaataagctatatactttggttacctatgtacctgttaccactttcaaaagtcatctctgaatttgagcaatggtgaaacggaatc

SEQ ID NO: 238819 - DNA, 50 bp, Homo sapiens
tgctgagaaatccagggtcacagatggagtctcgctctgttgcccaggct

SEQ ID NO: 238820 - DNA, 100 bp, Homo sapiens
ggctgaagccattgctccacaggttggcaatgggccatgctatgatagtggaagcttatccaaaataatagatccagaagaagtgacctgaagtttctgt

SEQ ID NO: 238821 - DNA, 101 bp, Homo sapiens
gcccgaggtggacatgagtgaccggggcatctccaacatgctggatgtcaacggcctctgtgaattatgtaacctcattacgctggatgtagctcacaatc

SEQ ID NO: 238822 - DNA, 96 bp, Homo sapiens
cggcggcaccaaggcccccaagccctccttcgtgtcgtacgtacgccctgaggtagtaagcattaataatgtctttcatctttgagtggatctaca

SEQ ID NO: 238823 - DNA, 74 bp, Homo sapiens
gcagggaaactgctgctcgcatccagtactcccctgccctcaacaagatgttttgccaactggccaagacctgc

SEQ ID NO: 238824 - DNA, 82 bp, Homo sapiens
gattccaagtaactcttatttggtttatgaaggcgagcgtgccatgacaaaggataacaacctgcttggcaagtttgaactc

SEQ ID NO: 238825 - DNA, 75 bp, Homo sapiens
tctgttccaaatgctttgctgttatggcagagaacgatgtggacaatgagctcttggactatgaagatgatgagg

SEQ ID NO: 238826 - DNA, 97 bp, Homo sapiens
agtgtttgcctctggttcagctcatacaacagcttcttaggtatggaattgtttgaagaggcattgcgtcgatgggaacaagctctgacctttcgca

SEQ ID NO: 238827 - DNA, 90 bp, Homo sapiens
aaggaaggcatccctcctgaccagcagaggtcagatgcagaagccatttgaagacgcctcgtttgcgctgcggacgggggagatgagcgg

SEQ ID NO: 238828 - DNA, 75 bp, Homo sapiens
cgctgcgctaggggaagcgggcagctgctccctggtggttacctgtgaaaggcgctaactggagacacccagaag

SEQ ID NO: 238829 - DNA, 75 bp, Homo sapiens
ctggagagaactgctggaaggagactggatgatagaattacgcaaacatgcagatctttgtgaagaccctcactg

SEQ ID NO: 238830 - DNA, 75 bp, Homo sapiens
ttcaaagagaaaaggcaacatcctgtcacaggccatgctctggcaaaaacgtcttctttgatgtgaggattggag

SEQ ID NO: 238831 - DNA, 100 bp, Homo sapiens
ggacgcgcgtggcgctgcccggagatacaactcgtcaacgaatcaaattcagtgatgacagagtatgcaagagtcaccttctcaactgttgtcctcatga

SEQ ID NO: 238832 - DNA, 75 bp, Homo sapiens
gtcgtgatatcatcgttgaacttgggaatgtaagacggacttagatattgcatacaaatttggaaaaactgtggt

SEQ ID NO: 238833 - DNA, 50 bp, Homo sapiens
tcctactccctccccggactccgcgggtttctttacctccagaaagaaga

SEQ ID NO: 238834 - DNA, 80 bp, Homo sapiens
gctgaagtcagcatcgaccagtccaagctgcctggagtcaaggaagatgtcatttgtcagagtgaaccgctgtggtcccc

SEQ ID NO: 238835 - DNA, 88 bp, Homo sapiens
gaattgtggctggaggttcggtcgctgccgggaggaggactctgtcgctggagctgaggctggaaaaatggcctgatatgaaggagtc

SEQ ID NO: 238836 - DNA, 83 bp, Homo sapiens
gagagagcgagctgagtggttgtgtggtcgcgtctcggaaaccggtagcgcttgcagcatgaactcccccactggaaaggatt

SEQ ID NO: 238837 - DNA, 100 bp, Homo sapiens
caaccatctcacacctttccaaaggacgcgaccataactctaaaagatcgcccaggaccacaccgcagcgtaactgcaggcctctcagcgaaaaaggggg

SEQ ID NO: 238838 - DNA, 75 bp, Homo sapiens
catttcctgcctatcatttgaagacgttccttgaggaggtttgaaaaagctgctttgtaccgcctcagtggagac

SEQ ID NO: 238839 - DNA, 74 bp, Homo sapiens
tcatcttatcctttttggactatcgggatctaatcaagccaaatttgagtttcatcatggtgactatgaaaaac

SEQ ID NO: 238840 - DNA, 100 bp, Homo sapiens
ggacaaactttcagttcttaggctcagcgtcagttacctgagagccaagagcttctttgatgtggcttttcatggcctgccactgaaaatcaagaaagaa

SEQ ID NO: 238841 - DNA, 74 bp, Homo sapiens
ggaaaacttgcctgctctctacactattttccaaggagagctactcaggaggcggaggcaaaggatcgcttgaa

SEQ ID NO: 238842 - DNA, 97 bp, Homo sapiens
gtcaacgacctggcggtggggctgcggcgcctgggactgcaccgcaccgagggcgagctccagaatggatgatgaacttgttgttggacatagtgca

SEQ ID NO: 238843 - DNA, 90 bp, Homo sapiens
gtcagacctccacatgctcagaacctcacggccacgctgcccactgtccgaatgattgttgatggaagaactgctaaagctttgaggtca

SEQ ID NO: 238844 - DNA, 87 bp, Homo sapiens
gaaatttccaaacatgcaaagaatctcatctgtgctttcttaacagataggtataccaagcttggctacgcaggcaacactgagccc

SEQ ID NO: 238845 - DNA, 88 bp, Homo sapiens
tctttgaggatgagactcccatcactaaccgcagtcgggaggagatatcaccaaacatgatggaacaggcggacagtccatttatgga

SEQ ID NO: 238846 - DNA, 90 bp, Homo sapiens
gacgctcctgctcggctgggtcttcgcccaggtggccggcgcttcagatatacatctccagatttcctctatgttcgttcttggttacca

SEQ ID NO: 238847 - DNA, 82 bp, Homo sapiens
gggacaagatcccgtccatgaatcaggtctcctctgagcctccggcctccataagacccaaaacagatgacacctcttccca

SEQ ID NO: 238848 - DNA, 75 bp, Homo sapiens
ccggaccctgcagcccagactcaagaggtacttcatcgattccaccaacctgaagacccacttccgatccaaaga

SEQ ID NO: 238849 - DNA, 90 bp, Homo sapiens
cagaatcgaatgcaaccttctttaatataagtgctgcaagtttaacttcaaaatacgaaagttcacatccttggctccttccaaaatatc

SEQ ID NO: 238850 - DNA, 100 bp, Homo sapiens
ctacttgggactcctctctcaagagaagctgcaagagcaacatctttcctcaccccaagaaacctccacagctgttgagaaaaaggagaaacctcttcca

SEQ ID NO: 238851 - DNA, 91 bp, Homo sapiens
gcggaagaagctaatcttgtacttcaagaggaggaatcacgctcggaaacaatgggttggtgttcgaggaagagacattgttgttcttggt

SEQ ID NO: 238852 - DNA, 100 bp, Homo sapiens
tcaccatccgggagcttggggggtgcatgggccccatctggtccagttactatggaaactgccgttctctcctggcttatcgtcagccagaaggcgcgga

SEQ ID NO: 238853 - DNA, 116 bp, Homo sapiens
cgtgatcctgttagatatcgaaggtaccacaaccccgattgctttcgtgaagcaggatgaagttaaaggaagtagatcgtacagccatgcaggcatggagccctgcccagaatcac

SEQ ID NO: 238854 - DNA, 80 bp, Homo sapiens
ctcaccaaccgcgtgtgggaggacaggccctcgtccgcaggtggatccataaagaacccagccaacccgcagagggaggg

SEQ ID NO: 238855 - DNA, 116 bp, Homo sapiens
atttggggtcagctggtgcttttataaattatgaaaaaagttgagaaggtaaccatcatgagctttgccgggaagtaaagctttggaggaaaatcaatatcaatgaaagtgctaag

SEQ ID NO: 238856 - DNA, 50 bp, Homo sapiens
ccatgggcttctctgtgaaagaagtggacagcgccatgtccctgatccag

SEQ ID NO: 238857 - DNA, 100 bp, Homo sapiens
gggcttgattctgcagtagatcctgtccagatgaaaaatgtcacctttgaacatgttaaagggtagtggccacagaagaagtagttactgcagaatctgt

SEQ ID NO: 238858 - DNA, 101 bp, Homo sapiens
gctaaatgtagacaatggttagagaagaattttccaaatgaatttgcaaaacttactgtaggatgacaaaagatgtgagtggatctatcgaggctctacac

SEQ ID NO: 238859 - DNA, 98 bp, Homo sapiens
tgaaacggagccagcggctgaggaggggccccagcagcccccgaaggccctatcaggacatggagtatgaaagacgtgcatacatagagacgtgaagc

SEQ ID NO: 238860 - DNA, 100 bp, Homo sapiens
ccagaaggagagagatgttatcatgagggaattccggtcagggtcaagtcgtgttctgatcactactgacttgttggccacagtgggatgggccggtacc

SEQ ID NO: 238861 - DNA, 100 bp, Homo sapiens
ccaggacactgtccggatcttccctccctgtgggtgactgatcgtacccgccagctggctaatgtcataattaacaaagttgctactacatctgcaaagt

SEQ ID NO: 238862 - DNA, 73 bp, Homo sapiens
ttcccttccgttttcgcgtggttcttttgcaaggaacccattcagacctctggatatatttgtaattttgagg

SEQ ID NO: 238863 - DNA, 100 bp, Homo sapiens
acctgaagatttctatcacttctggaagttctgtgaagaacttgatcctgaaaagccatctggaagagtctaacctgtctctgcaagctcttgagtcccg

SEQ ID NO: 238864 - DNA, 50 bp, Homo sapiens
cggctgttcgaggccttgactgtagactgactttatggcctttcaccaag

SEQ ID NO: 238865 - DNA, 83 bp, Homo sapiens
ttgcaacatttcaggaaaacagagaaagaagtgataggagggctctgtagagccttcacgaagtcagtaaaagtgatctcggc

SEQ ID NO: 238866 - DNA, 75 bp, Homo sapiens
ggccctgggagctggaggaaccgcggttaacacagaaatctgcctcctgggccatgccgcttctaaggcctgttt

SEQ ID NO: 238867 - DNA, 82 bp, Homo sapiens
gttgtggagatggggagcgtcctggggctgtgctccatggcgagctgggaagctgcagtaaaggaagatgaagaagaagttt

SEQ ID NO: 238868 - DNA, 100 bp, Homo sapiens
tttttgagaccaaattaatcagcacattgatttataagactgcagttcgtcatgaatcatgcagtggtctctataagttatccctgtcagggctggatgg

SEQ ID NO: 238869 - DNA, 100 bp, Homo sapiens
cacccgggcctggagccccacacccgagcaaaccagtccagctacgggggcccagccagccagcagctgagtgggggttacggaggcggctacggtggcc

SEQ ID NO: 238870 - DNA, 90 bp, Homo sapiens
cggaagacggaggtcctctttccttgcctaacgcagccatgactccgtgggaaggaggcttgtttaaactacggatgcttttcaaagatg

SEQ ID NO: 238871 - DNA, 100 bp, Homo sapiens
gcagactggtgacttcacttttgagtgcaactgccttccaggaagaggatcacctagcccgggtagaagaggcaatcacccgtatgcttgtgtgtgccct

SEQ ID NO: 238872 - DNA, 75 bp, Homo sapiens
gtgagacagtattacacactgctgaaccaggccccagacatgctgcataggtttatgaaggcgagcgtgccatga

SEQ ID NO: 238873 - DNA, 75 bp, Homo sapiens
cgtatctagtctgaagggaatcaagggtagaagttcatctccctcttaacagaaacagaactttcatcagttctg

SEQ ID NO: 238874 - DNA, 100 bp, Homo sapiens
agacaggaggcagtagccaaacacccaggtatgagaaagtgccagtcatcttggttgggaacaaagtggacctggaaagtgagagagaagtatcgtccag

SEQ ID NO: 238875 - DNA, 75 bp, Homo sapiens
aggctgccaggcccgccatccacagccgagaaggaagaggcccagcagaagggactcgctgagccaccccccgcc

SEQ ID NO: 238876 - DNA, 100 bp, Homo sapiens
cgatcctcggccatgtcactgctctgcgtgcgcgagttttgcggcctccaggtggtggatccaatttttcattaggttttgatgaaccaacagaacaacc

SEQ ID NO: 238877 - DNA, 96 bp, Homo sapiens
atctccctgcagtctgagcctgtggtgaccgatgcgttcctggccgtggctggccacatcttctctgcagagccccccaagatgaacccagtggtg

SEQ ID NO: 238878 - DNA, 100 bp, Homo sapiens
gtttaataatgatagaatgaagaccacaataaaagagacctctacttagctcagcaattcttaccttcccatggatgacagtctcattgcatttcgaacg

SEQ ID NO: 238879 - DNA, 98 bp, Homo sapiens
cttctgtagaccagctccaacaggattccatggtagctgggatgttagggctcagctgatgtagaaggccaatccttaagacaccgagacaagcggct

SEQ ID NO: 238880 - DNA, 51 bp, Homo sapiens
tcatgaatttcaagagagtaccattggggctacaccacctgaaactcagca

SEQ ID NO: 238881 - DNA, 46 bp, Homo sapiens
ggaggcctgactctgggagcacgcaatgaaggatttgggggcagag

SEQ ID NO: 238882 - DNA, 76 bp, Homo sapiens
tcttcagtaggaaatactaagtttgttctggacaagatggttgccaccctggggaccacaacatgctgctcctttg

SEQ ID NO: 238883 - DNA, 78 bp, Homo sapiens
ggccgggagctgtacttctatatctacaagggggtccgcaagtacttcctcgcgtattgctaaaggaggagttgacca

SEQ ID NO: 238884 - DNA, 82 bp, Homo sapiens
ggctggctgcggccgccctgggccgggccccaccggacgtcaactgcttggaccagcatgttcggaagtcccccgagagcgt

SEQ ID NO: 238885 - DNA, 99 bp, Homo sapiens
gtggaaaaagcagggaggttatgaggcttaataaagaaggacgctgtgcagagctgcaagtccgtatcactgaggctgtggccacagccactgagcaga

SEQ ID NO: 238886 - DNA, 97 bp, Homo sapiens
ctcagactacctcctccactttgctggttcctgtgcctaacctcgacagggcatgagccagaaggagagctctaagtctgccatgatgtatattcag

SEQ ID NO: 238887 - DNA, 96 bp, Homo sapiens
tttcagaagcggctgcgcacggactgctggagatggtggagtccgtcaattatcctcttgacttgaaccacagtgaaaccttcctgcaaactacaa

SEQ ID NO: 238888 - DNA, 75 bp, Homo sapiens
aaagatgaaacaaagacacaggcaattgtatgtcagcagcttggtgagagttacgtgtgtgcatccaatgaacca

SEQ ID NO: 238889 - DNA, 75 bp, Homo sapiens
aatgttctggttttaaaaaatacatatctggttttggcaattcgaagttttcaagtagcccttcacatctatcca

SEQ ID NO: 238890 - DNA, 100 bp, Homo sapiens
ggatgaatctgacctctatagcctggcccattcctacctcggatggcactggatctttaaaacgcagtggttcctttagcaaactccgggcttccattag

SEQ ID NO: 238891 - DNA, 100 bp, Homo sapiens
gggggattctcgacctgctaacagaactggaccttttcgcttcatcactggtccagctgtaataccagggtacttctccgttgatgtgaataatgtggta

SEQ ID NO: 238892 - DNA, 50 bp, Homo sapiens
gcaagtctgccacagtaaaacctggaatgtcgttgtctgctgggtcttcc

SEQ ID NO: 238893 - DNA, 100 bp, Homo sapiens
cagacctagtgggcgttgcctttagacccaggttcacagctgtaaagaacttgcctggagtctcagatgagactttggactttggacttttgagttgatg

SEQ ID NO: 238894 - DNA, 50 bp, Homo sapiens
aacaaatccaagattagcacagacaggggcaagtgtccgagtggtgaatc

SEQ ID NO: 238895 - DNA, 100 bp, Homo sapiens
acacagccggccaggagaaattcggtggactgagagatggctattatatccaaggctggcatgactcacatcgtgcgggaagtcgacaggccgggatcca

SEQ ID NO: 238896 - DNA, 83 bp, Homo sapiens
gccctcagttgctgctccgacgcggaccccagtaccaaggtcaaaatgcagatcttcgtgaaaacccttaccggcaagaccat

SEQ ID NO: 238897 - DNA, 105 bp, Homo sapiens
cccggcctacctcttcctctggcccgaagccttcctttatcgctttcagatatgatgcttcctggtgtgtttagtggttggtgccattccaattttctgtgctga

SEQ ID NO: 238898 - DNA, 97 bp, Homo sapiens
atttcttcatcagcagctaaacagttcctacaacagcagccagtacccctgatgccgttgacaagtatctcgagacacctggggatgagaatgaaca

SEQ ID NO: 238899 - DNA, 98 bp, Homo sapiens
tttgcgcagccgccgggaccctggcccctgtcgagaaatgggcaagttcatgaaacctgggaaggtggtgcttgtcctggctggacgctactccggac

SEQ ID NO: 238900 - DNA, 98 bp, Homo sapiens
cgccatggctttacttactgcggccgcccggctcttgggaaccaagccggaggcagtttgggcccaaaaccaaggaagaggtgaagatcattgagcac

SEQ ID NO: 238901 - DNA, 100 bp, Homo sapiens
cgcaccagtgggtgtttcccaaggacgttgtcaagcagcaggtgattttctcagcagaacagacttatgagttgatgcggtgtctggaggacttgacgtc

SEQ ID NO: 238902 - DNA, 98 bp, Homo sapiens
gctcgagaaagtcctctcgggagaagcagcgcctgttcccggggcagatccaggttcagctacaagcctatcgtggaattcatcgatgcacaattcga

SEQ ID NO: 238903 - DNA, 88 bp, Homo sapiens
cgggtcatggcgcggctaccgaagctggcagtctttgatttggtgacacccctggatgttgttaaaattagactccaagcccaaaaca

SEQ ID NO: 238904 - DNA, 89 bp, Homo sapiens
caaaattcgatttgcaaatcattcagtgaatcccaactgttatgccaaaggtgttggagcgggccggagagaagtagagtgggctgcga

SEQ ID NO: 238905 - DNA, 74 bp, Homo sapiens
gcccaagtccttggctgctgagtggtgacagtagcccagcccgccggccagagaccatcatgcagacatcagag

SEQ ID NO: 238906 - DNA, 90 bp, Homo sapiens
gctgttgtacagcagcttctggcagcaagagagtttggcctgtcactgctcctcatcctcctgagccgtggtgaagacctacagagttca

SEQ ID NO: 238907 - DNA, 100 bp, Homo sapiens
tgatgttggagaactacagaaacctggtctccctaggcttcagggatgacttcttagggggcaggggaggtagtcgcccaggcgaccggcgaacaggccc

SEQ ID NO: 238908 - DNA, 100 bp, Homo sapiens
cagaaatccaaggccaagagcaaggcccggcgtgaggaggaggaggagggtgtcaagctagggatgcggtccattcccattgccactgcttgcaccattt

SEQ ID NO: 238909 - DNA, 100 bp, Homo sapiens
atcatgaccttccagaattacgggcaagcgctgttcaaacccatgaagttgaaatcacaaagattagacacctttttagataggtgttcttcagcaccac

SEQ ID NO: 238910 - DNA, 75 bp, Homo sapiens
atcccggtggccgccgcgcaggagcctcccggagctgcagtgactcttcgagaagacagtgccaagaggttggag

SEQ ID NO: 238911 - DNA, 100 bp, Homo sapiens
gtgcttcccagctcttctgatgctctcttgtcagacaagcagggtgactctggaggaccactggttagttcagatgctagagatatctggtaccttgctg

SEQ ID NO: 238912 - DNA, 75 bp, Homo sapiens
atcgaggctataaaagcacagttttaagagaggaatactctgaagatagtaactccgagccaaatgtggatttgg

SEQ ID NO: 238913 - DNA, 50 bp, Homo sapiens
cgatgctttaacatacagccactagcaattgcttgttcagagctcttggt

SEQ ID NO: 238914 - DNA, 101 bp, Homo sapiens
atggtgcagaaataccagtccccagtgagggtgtacaaatacccctttgaattaattatggctgaagagagaagggcacagttacctaagtatcaacgtaa

SEQ ID NO: 238915 - DNA, 75 bp, Homo sapiens
ccctggaatatgaagcaacatgagatggtggatgaacccacagcgggtccatatggaatatttgctggtagggat

SEQ ID NO: 238916 - DNA, 87 bp, Homo sapiens
cgaatatcgtcatcgttagaaggtgtatgcaacagcgttattgcaacaggctaacgaaaacagacaaaattcaactggaaaagcatg

SEQ ID NO: 238917 - DNA, 100 bp, Homo sapiens
gtcctaaagagcaagcctaactcaagccattggcacacagaagcccagcaacgtctgcttctggttacagtttttgccctaagtgttcattatcaaccag

SEQ ID NO: 238918 - DNA, 82 bp, Homo sapiens
aacctacggacaggtgtacaagagcttgggaaagtcgaggtgacggtgtttgaccctgactccctggaccctgatcgctgtg

SEQ ID NO: 238919 - DNA, 98 bp, Homo sapiens
ccacccagggaccgctgcccgccaccgtggctgacttttggcagcaaaagttcaaacagaccctccctcagttccaatatgtgacctgtatcctaatg

SEQ ID NO: 238920 - DNA, 74 bp, Homo sapiens
agacaatggttagagaagaattttccaaatgaatttgcaaaacttactgtagacggggtttcaccatctgctgg

SEQ ID NO: 238921 - DNA, 101 bp, Homo sapiens
gccggggcctggggctgcctgccgggcggccgggcgcggcgagcccagatatggccgcgtggaaagtgtcaaaattcttcccaagaggggatctgaaggag

SEQ ID NO: 238922 - DNA, 100 bp, Homo sapiens
cttcatggtgcggctcatcttcgagaggttgtggcagcactgcctgaaggtatgagaccagattctaatctttatggttttccatgggaattggtgatat

SEQ ID NO: 238923 - DNA, 75 bp, Homo sapiens
tccgacccgcgaacccctctgggatccccgccgctctgtctacaacccgaggtatcgagaaccttccctgcgaac

SEQ ID NO: 238924 - DNA, 100 bp, Homo sapiens
tacttattcctgttattggacccagacctaaggattgtcttcggtctattatgagaagagtgaaccacaaagatcctcacgttgctatgcaggctttgac

SEQ ID NO: 238925 - DNA, 90 bp, Homo sapiens
ggccgagtggtctaaggcgccagactcaaggtgagaagccatttaaatgtgatcagtgcagttatgtggcctctaatcaacatgaagtaa

SEQ ID NO: 238926 - DNA, 83 bp, Homo sapiens
atgaagtagacattggtggaaacatttagtggttcccctctctcagcgaagtggtgttcttgaatggtgcacaggaactgtcc

SEQ ID NO: 238927 - DNA, 80 bp, Homo sapiens
aaacaaatccttgaaagaagaagatggagaagaaatagttacctatgatcgaaaccctgatagattggtgtgatgaaaag

SEQ ID NO: 238928 - DNA, 100 bp, Homo sapiens
ctgcgagaaggagaacctcttcatcctggaggaggagcagcggatcaggctggttgtggcagcactgcctgaaggtatgagaccagattctaatctttat

SEQ ID NO: 238929 - DNA, 75 bp, Homo sapiens
ttcggttctgctctgtccgccgccatggcccagagcagatcaatatcaccctggaccaccgctgccgtatcttcc

SEQ ID NO: 238930 - DNA, 100 bp, Homo sapiens
ccggggccacggcaggggcggcggccttacgggttgaaaacgttagcggaagaacttatgcaaacacagcagatgcttttaaacaaggaggaggctgttt

SEQ ID NO: 238931 - DNA, 75 bp, Homo sapiens
gggttgaagtggatgtgagatgagatgggaaagcttagatatgccaacaacagcaattacaaaaatgatgtcatg

SEQ ID NO: 238932 - DNA, 100 bp, Homo sapiens
ctttttcttgatcattgcttcaatagtttgttaaacaggatggtggctggagccactggtccccgtggtcatcttgttctgtgacatgtggtgatggtgt

SEQ ID NO: 238933 - DNA, 83 bp, Homo sapiens
cacattgagaaggaggaaactatggcctccaggcttccgacggcctggtcctgtttatctccagaagaagaagagaaaaggag

SEQ ID NO: 238934 - DNA, 98 bp, Homo sapiens
tcagtccccgccgagccgccaccgcaggtcgaggacggtcggactcccgcggcgggaggagcctgttcccctgagatcctgaggtgcagaggcaattc

SEQ ID NO: 238935 - DNA, 75 bp, Homo sapiens
aacctgtcccgctcattggtccaaaattgaagagaagatgttccttcagttactagaaatagaggaaggctggaa

SEQ ID NO: 238936 - DNA, 75 bp, Homo sapiens
gcagatcgtgcggctgaagaccaaggacaggaagaagcaagtggctgtgccacgaccgtggctatctggtgaccc

SEQ ID NO: 238937 - DNA, 50 bp, Homo sapiens
tgaactagcaggcaatagtgaacaaaggagtggcactcattgcttgtgga

SEQ ID NO: 238938 - DNA, 82 bp, Homo sapiens
gccctggacgtgccttcagggtctggttatgcttcatgacctgcattgtggtcagtggttctccaaaatacttatcattcag

SEQ ID NO: 238939 - DNA, 50 bp, Homo sapiens
tacccctttgaattaattatggctataaagccaccaatccttccaaccgc

SEQ ID NO: 238940 - DNA, 75 bp, Homo sapiens
gaagggatttgccttgtctcagatgagactttggactgtggacttttgagatgtttgggtcattgctgtgattgt

SEQ ID NO: 238941 - DNA, 100 bp, Homo sapiens
gtctctggctccctcctcccagggccaggcgccgctcagaacgggaagaaggagaaagggccaacccctgaagaagcaatacagaaactgaaggagacag

SEQ ID NO: 238942 - DNA, 100 bp, Homo sapiens
cctggatgaacttatcgatgaacttggtggccctgagaacgttgctgagtttcaggaaaatgccagtgaagggaaggcccctgcagaagacgtctttaag

SEQ ID NO: 238943 - DNA, 88 bp, Homo sapiens
ccgcgactccgccgcgctgcgcacgcccagcctaggcgaggacttctaccgcgaggccatcgagcactgccgcagttacaacgcgcgc

SEQ ID NO: 238944 - DNA, 100 bp, Homo sapiens
tgtggtagatggagacttcctcagtgacaccccagaggccctcatcaacgcgggagacttccacggcctgcaggatttcttcaagaagttcttatatgag

SEQ ID NO: 238945 - DNA, 78 bp, Homo sapiens
aagaatgtaagaagaagaagtgccaggggctttgaccagcttcgacttgaaggattgctttgtgatgtgaccctgatg

SEQ ID NO: 238946 - DNA, 102 bp, Homo sapiens
cacgagtcgaggtcctgcaggtggagctccggcagccgccctggcagtgctcggaatgtgaccaggcagggagcagtgacatggaagcagatatggccatgg

SEQ ID NO: 238947 - DNA, 83 bp, Homo sapiens
aaaagactcaggacggacaagcacagtcttcggaagaaccaaaaacttttgctagaaaatcagcttttacgagagaaaactca

SEQ ID NO: 238948 - DNA, 100 bp, Homo sapiens
tcatagattgtgtaggcgttggtcttctgatagcaactttaatgtggtgtaactgtgtggaaccgcataatcccagcaatggcacattgaaggaatggag

SEQ ID NO: 238949 - DNA, 74 bp, Homo sapiens
gagacgagaagcctgaaaagtcgcagcgagctggagccgccggagatatgtgtcacaaagatgtctacacggaa

SEQ ID NO: 238950 - DNA, 75 bp, Homo sapiens
ctcatatgtctcaggcttccatgcagcctgccttaccgatactacttcaagaaagtgagcgacgagtttgactgt

SEQ ID NO: 238951 - DNA, 75 bp, Homo sapiens
gtcgtgttctgatcactactgacttgttgattgactttgaagatgtgattgcagaaccagaagggacacacagtt

SEQ ID NO: 238952 - DNA, 100 bp, Homo sapiens
gcggtgcagcgaatcaagcgggagttcaaggaggtgctgaagagcgaggaggatctgtctggctccattgatgacctccccacgggaacggaagcaactt

SEQ ID NO: 238953 - DNA, 50 bp, Homo sapiens
cggtcatgtacccggtggactcggtgaagtttggaaattttagcattcag

SEQ ID NO: 238954 - DNA, 100 bp, Homo sapiens
ggattctcgacctgctaacagaactggaccttttcggttcaggttcttcggaatgctggagaagaagtgactctaacagtgtcatttttaaaaagagcac

SEQ ID NO: 238955 - DNA, 97 bp, Homo sapiens
cagaaacacaggctagactggaagctttactagaagctgcaggagatgagtatgatgtatgtgccatttgtttggatgagtatgaagatggagacaa

SEQ ID NO: 238956 - DNA, 90 bp, Homo sapiens
ccactggacctccaaggaagccacgtgcagacatctacaaccttcgatctcctgacgagcatccgtgtcattctggaccttactcccaac

SEQ ID NO: 238957 - DNA, 50 bp, Homo sapiens
gcttggagggactcagaggctgtggagttctggaggctgggaagtccaag

SEQ ID NO: 238958 - DNA, 98 bp, Homo sapiens
gattaaaaatatggaaagagctaccactagcaaggaagacccggcctccagcacaggagggattaaaggtaatagcctgcagctggtgttttgagaag

SEQ ID NO: 238959 - DNA, 100 bp, Homo sapiens
aaaagaagctctaagtcacttatataatgaaagtgcttctaccatggagatcttagctgtgcttaaagcctgggcagagtatgggtttagggagtagctg

SEQ ID NO: 238960 - DNA, 90 bp, Homo sapiens
gaactgtctcctggtgaccgagcacccgcctccgggcatcttcaactacggcgcctcatctcccagagatcttccttggagaccctggaa

SEQ ID NO: 238961 - DNA, 82 bp, Homo sapiens
cgccgccgcgcgaggaaatggccgaggagccggagccgcagctgatccagtgtctctttgggccacttcaggcggggccgag

SEQ ID NO: 238962 - DNA, 82 bp, Homo sapiens
ccgaacctgcctggctagccggcgacttgagtgacgagctggacggcagtctggaaacgaccaatgagatcttggactctgc

SEQ ID NO: 238963 - DNA, 82 bp, Homo sapiens
aagaaaccaacattcccaacagccaccaccaccaccagatgcgggctgacgcacgaggcacacaggaaggaggtggagcagg

SEQ ID NO: 238964 - DNA, 98 bp, Homo sapiens
tgaaactctggaatctccatgtcatgaagcatgggtcagttgctctcccctgaaggaagagtattctcggatttcacctcagaggaggaagaattcag

SEQ ID NO: 238965 - DNA, 75 bp, Homo sapiens
tgttcccaatgacatgcaagttggacagacgggaaaaatagtagcaccacagagtcacctgatatgaaaaaggag

SEQ ID NO: 238966 - DNA, 75 bp, Homo sapiens
tgaaactggggaaaagtgcaatgcagggattgcaaatttttatcctgtacactgttagaacaaaagtcttccaga

SEQ ID NO: 238967 - DNA, 75 bp, Homo sapiens
ggattttcagcttcagcaagcagagcctgcattgattctaatgaagatggggacttgagtaaatctaccgtgttg

SEQ ID NO: 238968 - DNA, 90 bp, Homo sapiens
cctagatggaacacatgctctgatgtcactcagcctctgaagaagcttcgggttcagactcaggcagtcagtcggaaagtgagcagggaa

SEQ ID NO: 238969 - DNA, 74 bp, Homo sapiens
caagatcctgtgcactgactgcgccaagaaggatcaagaaggtggagaagaaaagaaatctgtgcaaaagaaaa

SEQ ID NO: 238970 - DNA, 100 bp, Homo sapiens
acaatcctgacttttggggtcctctggctgttgttcttttcttttccatgatatcattatatggacagtttagggtgatgatgaacagtctacacagatg

SEQ ID NO: 238971 - DNA, 100 bp, Homo sapiens
gaaagtgaagaaggcattgaagatgactattttttggagaggcctgatgcccgaatttcaggtcccaactccatctccaaggccaagggttttcacccct

SEQ ID NO: 238972 - DNA, 100 bp, Homo sapiens
tgaggagccgggggaagctggccttggggcaatgaatcgctccctggctaatgtgattcttggaggctatggcaccacttcaacagctggtggaaaaccc

SEQ ID NO: 238973 - DNA, 109 bp, Homo sapiens
gcgagtaaagacgtaggagaccgaggaaagtgtgtgggaggcgttgacctgccccttgtcctggccccggtgtgatgaatgcagactctgctaccattttggctgtttg

SEQ ID NO: 238974 - DNA, 51 bp, Homo sapiens
tcttgggtgaactctagcaattacaaggttatcaatactctggctgaccat

SEQ ID NO: 238975 - DNA, 98 bp, Homo sapiens
ggcagggagtgcatcaaaggtgtgaacacagctgctggaacccaatgtgaatattggactggcggagccttgggaagtgaaccttccataggaagcat

SEQ ID NO: 238976 - DNA, 75 bp, Homo sapiens
gtcgccgtcgccgtcgccctcccagaatgcaaccgcctccacgtttgataaactttcagaatcacagccccaaac

SEQ ID NO: 238977 - DNA, 100 bp, Homo sapiens
agctgctgagtgtcctgcagcaggactcacaccacccggcaagaactgctcactacggctccctgccccagaagtcacacggccggacccaagatgaaaa

SEQ ID NO: 238978 - DNA, 82 bp, Homo sapiens
tggacccaacagggatgggctgctggggacagctgctggtgtggttcggagccgcggaacccagcgggtgccgcttctccac

SEQ ID NO: 238979 - DNA, 100 bp, Homo sapiens
cactctgtgcggagactgggcggccggccgacccttcctgtcgctgacggcgactgcgggaggccagatggcccactgcgtgaccttggttcagctgtcc

SEQ ID NO: 238980 - DNA, 75 bp, Homo sapiens
gatacagttgataaaattgttgattgtgtaacatcgtcctttatccctgtcaagcctttcaacatgatggctcaa

SEQ ID NO: 238981 - DNA, 89 bp, Homo sapiens
gacaacttttgcaaaaatactgaaagagaaaggctatgccactggactcattggagccagatgaccaggatgccccagatgagcatgag

SEQ ID NO: 238982 - DNA, 90 bp, Homo sapiens
attacaataaagccaaaacagtttctgagaatttaaaacagttaatcaactggcccatgcccttcacatggacaaagatttgaaagctgg

SEQ ID NO: 238983 - DNA, 83 bp, Homo sapiens
cgaggaggcagccaagctcgtggcctgcctctgcgtgcgtacgaggaacagcaaattcaggaaaaagtggcgacctttcgact

SEQ ID NO: 238984 - DNA, 133 bp, Homo sapiens
tgtatgacagagtcctgaaatatgcaaatgaagtaaattctgatgctggcgccttcaagaacagcctaaagttcctggtccagaactttacacagaaaaggtgctcaaaggatatttgtttaatgaatgtggt

SEQ ID NO: 238985 - DNA, 74 bp, Homo sapiens
cgaaaaagaacgacatgatgcaatcttcaggaaagtaagaggaacctgagccagcagaagagtacactgagcaa

SEQ ID NO: 238986 - DNA, 75 bp, Homo sapiens
cttgtggaattacaagagatttcgactgtggaaggttcttgatacatatttgccagacttcaagatttcagaaaa

SEQ ID NO: 238987 - DNA, 101 bp, Homo sapiens
cattttccccaagcactctcaggaacctggcaacaggaatgaatctgaagtctgctgcagtaaaacacagaaggctttaaaatgttttcttgcataaaatt

SEQ ID NO: 238988 - DNA, 90 bp, Homo sapiens
gcctccattgcacacagattccacatcatgagagaaaaacacccagagaaattcaacagtagtgagaaagatcagtctaaagaaaaggag

SEQ ID NO: 238989 - DNA, 103 bp, Homo sapiens
ttcaggggaaccgcctcaccgttctgcccccagaactaggctcccttcacgtgggggatgagatcctagaaatcaatggcacaaatgtgacaaatcattcagt

SEQ ID NO: 238990 - DNA, 90 bp, Homo sapiens
atcataagaatatggagtgtcaatcagcacaagatcgatctggaatagaaaacgtcaactctgtggaggctttgcaggaaactctcattc

SEQ ID NO: 238991 - DNA, 75 bp, Homo sapiens
gggaggacgaggagctgaacaaccccatgaaggtgcgggagtatgagttaagaaaaaacaacttctcagatactg

SEQ ID NO: 238992 - DNA, 75 bp, Homo sapiens
cgacaacacattgctgagcttgaaatccagcatgattccacctttccactgatagactcaagttcccagaaccag

SEQ ID NO: 238993 - DNA, 99 bp, Homo sapiens
agtctatatgcttgtgcttctccaaaaacacccatccaggcagggggatatgatgatgaggagtctgatgaggaagctgtgaagaaaaccaacaaatgt

SEQ ID NO: 238994 - DNA, 98 bp, Homo sapiens
taattacattcaagacaagagcagaagctgaagcagattgtctcaaagcttgccaggagcagattgaggcggtgctcctcaatagcctgcagcagtac

SEQ ID NO: 238995 - DNA, 74 bp, Homo sapiens
cttaggagaagcacatgaatggaaccagaatcgtgagtaaagctaaaacattttgagaaatttcaggatacagc

SEQ ID NO: 238996 - DNA, 74 bp, Homo sapiens
gattttgcagaacagagatgacatgccagcccagactttcatgaaggcaacagcccccaggggagcaaccaggg

SEQ ID NO: 238997 - DNA, 83 bp, Homo sapiens
gctccaagccaagggccatcgtggtggatcctgttcatgggagcgagcccagggcgtggtgctgaaagtgctcacaaacttca

SEQ ID NO: 238998 - DNA, 100 bp, Homo sapiens
cacgcctgggcccaggtgtggcgtctctgtccccatctggttttaggtgatgcctcccatgaaacccaggaacctgagtccttctcagcctggtcagatc

SEQ ID NO: 238999 - DNA, 98 bp, Homo sapiens
ccaggccctgcaggacctgctttcggagtacatgggcaatgctccataaaaatacagactcaccagttcctgctttgatgtgacatgtgactccccag

SEQ ID NO: 239000 - DNA, 116 bp, Homo sapiens
cgagcgcactcggcggacgcaagggcggcggggagcacacggagcactgcaggcgccggacaatgcagatcttcgtgaagactctgactggtaagaccatcaccctcgaggttgag

SEQ ID NO: 239001 - DNA, 90 bp, Homo sapiens
cactgagggaagctgagagcagccagatccagcccaccgtctaccctccacttggagaaatccagaagataaggatcctgatttagaaac

SEQ ID NO: 239002 - DNA, 83 bp, Homo sapiens
ggcttcgatgttagccgggacccgactcagcatttaaatcaaacggtattgagatggattgggttatgaaacataatggtcca

SEQ ID NO: 239003 - DNA, 74 bp, Homo sapiens
agctggcgctctgggacccactcgggttcatgacgctctcgatattcctgtgcagaaacctggaccacgtctac

SEQ ID NO: 239004 - DNA, 96 bp, Homo sapiens
gacacagccggggtcgggagccgcccggggcagggctcgggagagcgggatgatcggctgaatgtaacagaggaactaacgtccaacgacaagacg

SEQ ID NO: 239005 - DNA, 82 bp, Homo sapiens
tcgccgccgccaccatgcccaagagaaaggtgtccctggccagtgtccttccacctgtccacaagcatggggaacatcttcg

SEQ ID NO: 239006 - DNA, 75 bp, Homo sapiens
taaagcgtttggaaaatccacaggtcactatcatatgacaaaggctttgccgcagttcatcttcctccctgtgta

SEQ ID NO: 239007 - DNA, 100 bp, Homo sapiens
tatcataacaaccgactcataaaatcttttgagaaggtggggtgccaggtgaaggatgacacagcaagaaggccctcaccagatgctgagcagatgccgg

SEQ ID NO: 239008 - DNA, 51 bp, Homo sapiens
ccagaggggcccactcgctgtccccagcccctgtcaaagggaacaggaagc

SEQ ID NO: 239009 - DNA, 51 bp, Homo sapiens
gaaaaggcctaagaattttggcattggcctgttacatgaacagaatatggc

SEQ ID NO: 239010 - DNA, 83 bp, Homo sapiens
ccgcctagcccttccggatcctgcgcgcagaccttatgccagcctggaccatcttggaggcagtgtaggatcatggaagaact

SEQ ID NO: 239011 - DNA, 90 bp, Homo sapiens
cgcggcgggaggagcctgttcccctgagaaaacctcggatcaattctcagctggtggcacaacaagtggcacaacagtatgccaccccac

SEQ ID NO: 239012 - DNA, 75 bp, Homo sapiens
ttggattttttccagtctgatccttttgttggcaatctgccggaggcgctgggcaatgaccccgggactccaggc

SEQ ID NO: 239013 - DNA, 98 bp, Homo sapiens
atggagcataccaacagcaacgagagtgacagcagtccaggcagatctcctatgcaagccgttaacaacatgctgtaccccaaggaagacaaggagaa

SEQ ID NO: 239014 - DNA, 101 bp, Homo sapiens
acaaagtctccacgcggtccttcatcaaccgcccgaaccagagccggaggcgggaggacgggctgccgcagacctgcgaccgcatcaagcagtccgccagc

SEQ ID NO: 239015 - DNA, 90 bp, Homo sapiens
atggtcccagaggcctggaggagcggactggaccaagaatcgccttcagccctgtctggtgcatccttggcagaaagtgaggaggaaaac

SEQ ID NO: 239016 - DNA, 96 bp, Homo sapiens
tcctgaggagctgggattacagggaatctttaaccagtttcagtgtagtagtgaaaaagtgcttccatctgacactctccgcagtgctctggcaaa

SEQ ID NO: 239017 - DNA, 99 bp, Homo sapiens
ggagtgacttgttgagtgacctccagaaagcagagaccatgctgcagatgcgaggaaagccgtttcctggaacatcggaattctaaccccagggtgaag

SEQ ID NO: 239018 - DNA, 90 bp, Homo sapiens
ccctgcatcctaagactcgaaggcagcacaggacctggaaaaattacatgtagagtggaacccccagctattagaggtcccaccccaaac

SEQ ID NO: 239019 - DNA, 90 bp, Homo sapiens
catcgggcttccagtcagcaccacgcactgtaaggcagtagcaggtttgttggcagatgctcgttctttagcagacatagcaagagaaga

SEQ ID NO: 239020 - DNA, 100 bp, Homo sapiens
gccgccgccgccgccgcagagctgcagctcggggccgagggtggcgggacaggcttcattgggacagccctaacccagctgctgaatgccagaggccacg

SEQ ID NO: 239021 - DNA, 100 bp, Homo sapiens
gtacaccccatcccagacgaagacagtccctggatcaccgacagcacagacagaatccctgctaccaaaacagatgattatgctgagattatagatgaag

SEQ ID NO: 239022 - DNA, 82 bp, Homo sapiens
ccaaggtcatgcagcagcagcagcagaccacccagcagcagctgccccagaaggcagaaggtggtgaagggcagcctgacgc

SEQ ID NO: 239023 - DNA, 75 bp, Homo sapiens
ctcagctccgagtccagggcgagtacttggaccatgagactgtttcagccactttcatcgacagcagtggacagt

SEQ ID NO: 239024 - DNA, 124 bp, Homo sapiens
gtagcagcggggcacagaacagcgacagtacaaagaagactcttgtcacactaattgccaacaacaatgatcctccaggtcctattgacaatactaagattgcagtcactaaatgtggtaatgt

SEQ ID NO: 239025 - DNA, 100 bp, Homo sapiens
tttgctgaccttattcaccatgacttatcagccccctggccactgttctaggtgctgttgttctactaaacaaggaaacagtcaagagtcatcgaatacc

SEQ ID NO: 239026 - DNA, 83 bp, Homo sapiens
ctgtatgattaggccacaatcttcaatgagtaaacatattccttgttgacctaaccaatgaagaaacaactgattccaccact

SEQ ID NO: 239027 - DNA, 82 bp, Homo sapiens
ctaagtaacgatctggatgcccaggtgctgaaggtcgccatcctggctgagaagtacgcggtggactacacctggtatgtgg

SEQ ID NO: 239028 - DNA, 123 bp, Homo sapiens
aagaagagtggcatgctttgacagcaagtggactccgagtccagggcagagcctcagttagggtcaaaatgcagatcttcgtgaaaacccttaccggcaagaccatcacccttgaggtggagc

SEQ ID NO: 239029 - DNA, 82 bp, Homo sapiens
gaggtggagatgacaacgttagagaaagtcatcaatgagacctgggactccctggaggaaaagcggaagcggcagcggtctg

SEQ ID NO: 239030 - DNA, 76 bp, Homo sapiens
cagctctgctcatggctctcaaagaaccagcggacctgagtcttcaatgaaagtgataaatgctgctcattctttc

SEQ ID NO: 239031 - DNA, 74 bp, Homo sapiens
cggtgacagagtggagccatggctagaggaaagatgaatgggagggctgattttcgagagccgaatgcagaggt

SEQ ID NO: 239032 - DNA, 75 bp, Homo sapiens
gccaccgtcatcatgtctgaccaggtgcgagaagatgtactaaattcattgaataacaactttcttcaaacgcta

SEQ ID NO: 239033 - DNA, 100 bp, Homo sapiens
aggagcggaaggtgggaaagggccggaaaacacacgttcctccgaaaccggtttgcaagtccttgtagaggtgctggagaatctggtaaaagcaccattg

SEQ ID NO: 239034 - DNA, 75 bp, Homo sapiens
tcaagaagttcaccttcgtctgcatggctctgtcactcacgaaacctccacagctgttgagaaaaaggagaaacc

SEQ ID NO: 239035 - DNA, 90 bp, Homo sapiens
aggtcagcttcccagagaggaaggatgggcaacactccagattcagcctcagacaacctcggtttccgctgtgctgcagacgcaggccgg

SEQ ID NO: 239036 - DNA, 100 bp, Homo sapiens
gattttcaatttggaagtgatgaagctgcttaccatttaatcattgagctctatgatagggctggcctgggaccccggcgctctcagcagggaccccgaa

SEQ ID NO: 239037 - DNA, 74 bp, Homo sapiens
ccgccgccgcgggagccgctgcccgaactcccggcccgaactccagtgtggacgaatgtggaacctcgctctgt

SEQ ID NO: 239038 - DNA, 92 bp, Homo sapiens
tgtcctgaaggagttccaccaggccgggaagcccatcgggcctgtttaaagaagaaaacccgtatgctagatttgaaaacaactaaagcgct

SEQ ID NO: 239039 - DNA, 75 bp, Homo sapiens
aggatgttggcggtccctgtgacctgtggagacacggccagatctgccctccatttgaaattggcacaatggaag

SEQ ID NO: 239040 - DNA, 100 bp, Homo sapiens
gacctattatcagatcaaccaccaaagtgggaaacattgaaatcaagggcactccacagaaggatgttattatcaagtcagatgcaccggacactttgtt

SEQ ID NO: 239041 - DNA, 100 bp, Homo sapiens
aggagattcaggatgaagttggggagatgcctcaagttgaccatttggtgtttgtggtgcatggcattggacctgtgtgtgacttacgctttaggagcat

SEQ ID NO: 239042 - DNA, 106 bp, Homo sapiens
cctttttcgtttttcggatgatgccttcaatactacctttatttccaccataggttgaaatcacaaagattagacacctttttagataggtgttcttcagcaccac

SEQ ID NO: 239043 - DNA, 83 bp, Homo sapiens
gggcttgccctggtcttgctcggccgatgaagtgcagaggtttttttctgggaaatcctcattgacgattcaatttgttgaag

SEQ ID NO: 239044 - DNA, 100 bp, Homo sapiens
gtttccaggagaagtaaccctgctctgtggaattgcaagaatctatgagggaagtagatcgagattcagatggtcacgtcagctttagagactttgaata

SEQ ID NO: 239045 - DNA, 100 bp, Homo sapiens
gcacaactatttcttatgtggacttaaaggaattcaggatgtacagttacccagcacgtgtacctcctcctcctcctattgctcgggctgtagtgccctc

SEQ ID NO: 239046 - DNA, 75 bp, Homo sapiens
gggagatcgtgggcgagctgggcgacggcgccttcggcaaggtttacaaggtctctaattaacagaagatggcaa

SEQ ID NO: 239047 - DNA, 125 bp, Homo sapiens
gtggaagacattgctgcccgcctcaacatcccagtcagccaggtgaaccccagggcgtcatggtgggcatgggccagaaggactcctacgtgggcgacgaggcccagagcaagcgtggcatcctg

SEQ ID NO: 239048 - DNA, 75 bp, Homo sapiens
gtgagtgtggtctacgagctgtttctcatctttatactcttccagtgatgtcttggcattgcccattttcaagca

SEQ ID NO: 239049 - DNA, 100 bp, Homo sapiens
tacgctacctcatacatctgaggtttcctatcctgggagcaggagagtgtgcctatttgaatgacaaaggtgccagtagtgccaggcactacacagagag

SEQ ID NO: 239050 - DNA, 100 bp, Homo sapiens
ggaaggttaagaaactgcgcctggacaaggagaacaccggaagttggagaagaaaaatggctacaaacttcctagcacatgagaagatctggttcgacaa

SEQ ID NO: 239051 - DNA, 75 bp, Homo sapiens
aaggggacatcatctgtgtgttctcacataagaagactgttagaatgccctcggtaacacagaggctgagagatc

SEQ ID NO: 239052 - DNA, 98 bp, Homo sapiens
tacctattctgacaaccagcctggtgtgcttattcagctagccacagtgcagcctggccagaatttccacatgttcacaaaggaagaacttgaagagg

SEQ ID NO: 239053 - DNA, 99 bp, Homo sapiens
cacgaaaggcagccgcggatcgccgcgctcagcgacaaacaagcttaatgccagaccgggagttggaggtgtccgatctcgagttgggatccagcaagg

SEQ ID NO: 239054 - DNA, 82 bp, Homo sapiens
aaaacaaaagattgagctgcactgtattcctggtgaatttgtaaatgaatacgtcggtgaattaattgatgaagaagaatgc

SEQ ID NO: 239055 - DNA, 80 bp, Homo sapiens
acaccaaccccttcgcggacccagtggatgtaaaccccttccaggaactgtggctgcaccatctgtcttcatcttcccgc

SEQ ID NO: 239056 - DNA, 89 bp, Homo sapiens
cgctggtggcgggcccgggctgcggcgtgtgcgcgcccgccagctgctccggagatacggtaagaatgattgatgttggctgatattgg

SEQ ID NO: 239057 - DNA, 74 bp, Homo sapiens
aagaaaccaggttatccctcgaactcctagctcatttcgacagccttgtttaccgacaagactgtgaaactttc

SEQ ID NO: 239058 - DNA, 100 bp, Homo sapiens
tgagccatcggatctaagatccaaaaggatggaaaggcagatgtaaagtccctcatggcgaaatataacacggggggcaacccgacagaggatgtctcag

SEQ ID NO: 239059 - DNA, 82 bp, Homo sapiens
gaagatcgtaacaacttatgacatggtttctttacctccagaaagaagaatattggccccttgaattctggaagttcattga

SEQ ID NO: 239060 - DNA, 99 bp, Homo sapiens
cccgcctccccggccacgcgagcgggaacagtctcctccactcggagcggcactacctggcagcaccatctaaacctgtatcatctgctgtggtcccag

SEQ ID NO: 239061 - DNA, 100 bp, Homo sapiens
ttagttccacagatggggaggacagtctagagagaaagtctcgctctgtcgtccaggctggagtccaatgctgcgatcttggatcactgcaacctctgcc

SEQ ID NO: 239062 - DNA, 82 bp, Homo sapiens
ggccagtgattcacgaaaacgcaaattgccatgtgatactccaggacaaggctgctgtgacttactcgaagcctcgattggc

SEQ ID NO: 239063 - DNA, 100 bp, Homo sapiens
ttattctctcaggcctgatgggagacactgtgtatacccacttcctgtacaccaggggttggaaaaaccacactaggcaaagaacttgcgtcaaaatcag

SEQ ID NO: 239064 - DNA, 99 bp, Homo sapiens
tcaacagatatctgggatgacagcagcctttttggtatagatatggttcctacaaacttgatgacttttgagtagaagcctgagaaaaaaagagaggtg

SEQ ID NO: 239065 - DNA, 80 bp, Homo sapiens
tgctctcccgccgcccggagaggctctgcagccatgaagccaaccgtcccgaggattttttatcaagcagaaatgcatcg

SEQ ID NO: 239066 - DNA, 74 bp, Homo sapiens
cggaacagccacagcagcctcccaaggagtctgcaagttggatgaaaactttcggaagagaaagttgcctgtgg

SEQ ID NO: 239067 - DNA, 90 bp, Homo sapiens
gaaaaaacaggggcagaagaacaaggaagcggagaggcaagagtaaatacaatcaagtggcatcttaaatttttgctggaagtggagtca

SEQ ID NO: 239068 - DNA, 104 bp, Homo sapiens
tttatttgtattgatgccctttgcctttttctttctggaatcagaaggctttgctggcctgaaaaaggatggagctatgacattgaagagaggaaggttccaaa

SEQ ID NO: 239069 - DNA, 90 bp, Homo sapiens
ggagccagccttcaatgtgtcctacaccaggcagcccccaaatcccggcccaggtttgcctgcaatgagatttcattctctacatttaaa

SEQ ID NO: 239070 - DNA, 50 bp, Homo sapiens
cgcgaatatcgtcatcgttagaagacggatgtttccagtcctaaagatta

SEQ ID NO: 239071 - DNA, 75 bp, Homo sapiens
ctctgctgtttaaaaagtatccctgtggcctctgaagaacacctgaagcagcactacattgacctgaaagaccga

SEQ ID NO: 239072 - DNA, 100 bp, Homo sapiens
tcatcctgaaggttacctgtttggagagaacagcgatctgaactttctggggaacagaccagttgtggtgatctgcaactctttcaccatctgtaatgcg

SEQ ID NO: 239073 - DNA, 100 bp, Homo sapiens
caaatcttcaagtggcaataaaaagcctataatgaggctgtggacccaggctagacagatgggatggtatgcagcaaagtgcatggctgcagcgagttca

SEQ ID NO: 239074 - DNA, 75 bp, Homo sapiens
agtatttcatgcaaagacatcagctacttaagcgccacgagaagcaatggccaatgtacatggtggactatgccg

SEQ ID NO: 239075 - DNA, 115 bp, Homo sapiens
ggaaatatttgtagatgagctacacttggcacgctacttttacgcgatctcagacataaaggtgcgaggaagaagaagaagaggacagtgctccagtgaaagtggaagaacaaag

SEQ ID NO: 239076 - DNA, 108 bp, Homo sapiens
ctcaatatctgtcttcggtggactccttcggcagtccacccaccgccgccgcctcccaggtgtcccgacccaggctaagcttgagcatggctgagcaggagcccacag

SEQ ID NO: 239077 - DNA, 74 bp, Homo sapiens
aggattccaagtaactcttatttgatgagcccattattgaagagccaagccgcctccaggagtcagtgatggag

SEQ ID NO: 239078 - DNA, 87 bp, Homo sapiens
catactaacttagtaactgaagctataaaaaatgatcacctcaggcaaatggaacgtgaaagtcacccttctagacttcagaccaca

SEQ ID NO: 239079 - DNA, 100 bp, Homo sapiens
ggtctctcagtaatgctggggaccctgagatcgtcaagtctcccagcgaccccaagcaataccgcactttcagaccatgctgaagtctaaattgaatgtc

SEQ ID NO: 239080 - DNA, 100 bp, Homo sapiens
caaggagcgcctggctcttctccacaaagacacgtcagtcaggagatcctagagctattaaatactacaacagccaaggaacaatccattgttgaaaaat

SEQ ID NO: 239081 - DNA, 123 bp, Homo sapiens
atgcagaagaatcaacgttattttgttttgcagttcggggccaagctggagggaagtaacaaatgtggcaattattttggatctatcacctgtcatcataactggcttctgcttgtcatccac

SEQ ID NO: 239082 - DNA, 100 bp, Homo sapiens
gcaaactttatgtttgggatttagaagtagaagatcctcataaagccaacctccacaaatgggaagtgttcctgtaatgacgcaaccaaccttaatatac

SEQ ID NO: 239083 - DNA, 80 bp, Homo sapiens
gcgtgctactgtgcgctcgatccagcaccatggggaagcgggacaatcgggtggtgagaagccctaccactgcaactggg

SEQ ID NO: 239084 - DNA, 101 bp, Homo sapiens
gtttgacaagacgcggctgccgtacgtggccctcgatgtgctctgcgtgttgctgggtcgagtctatgctgtcttgtcaaagagagaaggtcgggtacttc

SEQ ID NO: 239085 - DNA, 100 bp, Homo sapiens
atcgacttcggtttcagttggagttggaatttgtgcaatgtttagccaacccaaattaccttaatttcaagtccatcatctccagaaccagctagtcttc

SEQ ID NO: 239086 - DNA, 100 bp, Homo sapiens
gcctactttccaagcggagccatgtctggtaacggcaatgcggctgcaacggcgtggaagatagatgataagcctgtaaaaattgacaagtgggatggat

SEQ ID NO: 239087 - DNA, 98 bp, Homo sapiens
gcgacggtggctccagcatgtatcagccgaggtggagctgcggggccctggcatgaaaggtgcaactgacatgggtgaaccccagggatccatgcgga

SEQ ID NO: 239088 - DNA, 83 bp, Homo sapiens
gagaagtttctggtcactccccaggattatgcgcggagtcatggccggcttcaacatggggggcgacctcagggagcctgccg

SEQ ID NO: 239089 - DNA, 96 bp, Homo sapiens
cccacggccatcctcactcaggactccctgcagatgttcctgccccagtccagggaccttgacccagcccctctcagcagacgcttcatgatagga

SEQ ID NO: 239090 - DNA, 105 bp, Homo sapiens
caagtgtttccggaagtgtatagggaaacctgggggctccctggacaactccgagcagtgtactaatggtcacttgatgtgcgctggctgttttatccacctact

SEQ ID NO: 239091 - DNA, 100 bp, Homo sapiens
catgtctgttagggaggcactcaagatgaaaactacttcaactaaaagccaaccacttgaacaagactctatcaagaagaatatctaatccgtaccttga

SEQ ID NO: 239092 - DNA, 100 bp, Homo sapiens
agagaagacgatctgcacttcgcattttggcattgacatttaattttagggtcctttatatagaagggagagtagatggaagccattgggaagctttcag

SEQ ID NO: 239093 - DNA, 50 bp, Homo sapiens
ctgttgatggtgatgaagacaggcccttcccaacagaagaaagcattaat

SEQ ID NO: 239094 - DNA, 90 bp, Homo sapiens
ctcggtgtggcctacggagccacgcgctacagtgtggtggctggaggtggccgaattgacaaacccatcttgaaggctggccgggcgtac

SEQ ID NO: 239095 - DNA, 75 bp, Homo sapiens
cacctccggccactgggacggcggcgcggagaaggcaggcgtctgtagaggcttctggtgaaatcgcattatgca

SEQ ID NO: 239096 - DNA, 50 bp, Homo sapiens
aggggaccaagctggagatcaaacgtgcactttacaggtccccgatgaac

SEQ ID NO: 239097 - DNA, 50 bp, Homo sapiens
aaagagactcggtgacagatacagtttctgtagaaaatgtttcctgactg

SEQ ID NO: 239098 - DNA, 82 bp, Homo sapiens
atgagaggagaagagcccagcacaacgaaggtttacccaaggtccagcctagcccctaggcaccatgtcggacagtgatcta

SEQ ID NO: 239099 - DNA, 100 bp, Homo sapiens
gagagaggcaccgggatcgtgaccgagaccgtgaccgagagcgtgaccgagagcgcgaatatcgtcatcgttagaagagtgaaagcagcagcagtagcaa

SEQ ID NO: 239100 - DNA, 101 bp, Homo sapiens
ggcggaagaccaagatcatcgagatgggagaagatgtcaaccggacactagaaggtggaaggaaacctcttcattatgcagcagattgtgggcagcttgaa

SEQ ID NO: 239101 - DNA, 83 bp, Homo sapiens
gcgcagtccgcgcagccctcatcgcaactgggcccgcgcgcagggacaagaatccttcaagaaacaggaaaaaactcctaaaa

SEQ ID NO: 239102 - DNA, 82 bp, Homo sapiens
cgggcgagcagcgttgggtttatgtctttatttgacgaaaacggtcagaatggcggcagcggagcatcgtcattcttcagga

SEQ ID NO: 239103 - DNA, 90 bp, Homo sapiens
gctcggtacgccgccgcctcgcacccgcagcctcgcgcccgccgccgcccgtccccagctcctgcccctcctaaagctgaagccaaagcg

SEQ ID NO: 239104 - DNA, 80 bp, Homo sapiens
tgaagagggctccaggcatccggtcctggtccctgctggttggaaggtgctcgggtcttcggggcactgggtcccatcgg

SEQ ID NO: 239105 - DNA, 133 bp, Homo sapiens
ctgtcagaaacagaactgaaacaactggaaactgttttggatgatcttgaccccgagatatcatggaaatcaggacagtggcagttggaattgtggcaatcaaaggggtggaaagtgaattctatcttgcaat

SEQ ID NO: 239106 - DNA, 100 bp, Homo sapiens
gcctcctcccgcctgccccctcagccctgtggctgggggcagagctcaggcaagaaataccgcccacgaatggatcaggaagtctctgaccaagccatta

SEQ ID NO: 239107 - DNA, 98 bp, Homo sapiens
gaattcatgtggaggtcagagtggaagcagagcggttctggtgaggttggaaggatgcagccacccggttgtcatgaaaggcctgtgtgctgaatgtg

SEQ ID NO: 239108 - DNA, 111 bp, Homo sapiens
aacacaatactgtttctgcgtcataacaaagatctagttgcgcaaactgcacagccagaccaacccaattatggaagactatgaccgtctgaggcctttatcttacccaat

SEQ ID NO: 239109 - DNA, 75 bp, Homo sapiens
gtggagctgaacaagatccctaccgtgcgcgccttccttttgatactgaccgagctttatcattactggaagaat

SEQ ID NO: 239110 - DNA, 108 bp, Homo sapiens
cacccctgtggcaagatgcagcgtgaggcagctgaaggagcatatctcactgatgaaaaggcctccaggtttttcacctttccgatcatcacgaataggggaaataaa

SEQ ID NO: 239111 - DNA, 75 bp, Homo sapiens
aatcatttgacaaactgctttcccatagaggtctgtttctgtcgactgtggaccacttatgtgcgatccgtggac

SEQ ID NO: 239112 - DNA, 100 bp, Homo sapiens
gcaatgtttgaacaaactcgaagaacagctgtggaaagaagttgcaaaacactgggacctgaaggagaagaaggagaaggtggaggagaaggcaagccgg

SEQ ID NO: 239113 - DNA, 75 bp, Homo sapiens
gttgtcctgtgctggggctgacaggagccttggtgttcacttctccaaagtccggtctctgacccttgactcatg

SEQ ID NO: 239114 - DNA, 98 bp, Homo sapiens
gaggaggcctacagcctcctcaacgaatacggcgacgacatgtatgggccagaaaagatgtgactggagtgatttgcacccggatgcctagactcgcc

SEQ ID NO: 239115 - DNA, 90 bp, Homo sapiens
gggaaaatctccccggtgactttcagaccaccatcatggcagtggagtttgacgggggcgttgtgatgggttctgattcccgagtgtctg

SEQ ID NO: 239116 - DNA, 82 bp, Homo sapiens
aaagcgaaattggtcattctcgctaacaactgcccagctttgaggatttctataattggcctgatgaatcctttgatgaaat

SEQ ID NO: 239117 - DNA, 98 bp, Homo sapiens
aattgtaagcctagagttccacctgccactgcttttgaaggacatatgttactgtctgggttggttctggacattacacagcatacgcaactcacgaa

SEQ ID NO: 239118 - DNA, 82 bp, Homo sapiens
aactcgggttctgacaagatggccgggctgccccgcaggatcatcaaggacctcagcagccatgtcgaagccccatagtgaa

SEQ ID NO: 239119 - DNA, 100 bp, Homo sapiens
tgaagccatctatgagtgtacagctactaacagcctgggtgagatcaacactagtgccaagctctcagtgctcgaaggcaatttatcatctcaagttccc

SEQ ID NO: 239120 - DNA, 83 bp, Homo sapiens
caaatgcaacaggaaaaagagctaacagaaaacattttgaaagtgccccccaggttcgcctaatagtcttggctacttcccta

SEQ ID NO: 239121 - DNA, 87 bp, Homo sapiens
ggagatccacagctaagacgccgggactccctggaaacctagaaatgtgttttccaagcagtgaagcacttgccgtgttgaactgaa

SEQ ID NO: 239122 - DNA, 96 bp, Homo sapiens
tacgtggggaagaatgaaaaaaccaaaattatcgccaagattcagcaagtcttctgaatattgtgatggagccattttttaaaagagaagtttttg

SEQ ID NO: 239123 - DNA, 100 bp, Homo sapiens
cgcggcagcctcaccatcgccaagctcctgaaggagcaccagggcatcttcaccttcctctgcgaggtttcgagacaaggagtggatcaggccagataag

SEQ ID NO: 239124 - DNA, 101 bp, Homo sapiens
ggagatgaagatgaggaagctgagtcagctacgggcaagcgggcagctgaagatgatgaggtattaacaagtaaaggtgacgcgtgggccaagtacatggc

SEQ ID NO: 239125 - DNA, 74 bp, Homo sapiens
cgagctctcttggggtttgtactcaaaggccgtgacttggcgagcacgaccctccccgggtaccctccacacgt

SEQ ID NO: 239126 - DNA, 100 bp, Homo sapiens
atcagcttcagctccagctccgctctcttcggctgccccaatccccggcagctctctcagatctaattatcatggacctgcgacagtttcttatgtgcct

SEQ ID NO: 239127 - DNA, 75 bp, Homo sapiens
ggcccgtggacatgcgcacctcacacaggtgtccctggccagtgtccttccacctgtccacaagcatggggaaca

SEQ ID NO: 239128 - DNA, 100 bp, Homo sapiens
ttcatgagtggaatccatgtttctggacgcggatttttggcctcatactctgttatagataaacaaggaaagcggcgttatgacaggaagcagagtggct

SEQ ID NO: 239129 - DNA, 80 bp, Homo sapiens
cagcagccaagatggtgaagcagatcgagagcaagcaattctgtggtgttcttggtcacacatttatggagtttctgaag

SEQ ID NO: 239130 - DNA, 90 bp, Homo sapiens
caagatggaacaatagttttaatgggaacatacgatgatggagcaaccaagtgaacagcattcacccagaatgccgatttcatctggaaa

SEQ ID NO: 239131 - DNA, 83 bp, Homo sapiens
cacagcccgatcccgccatggagcagccgaggaaggcggtggtagtgacggaatccacattcatctcaatggaaggatcctgc

SEQ ID NO: 239132 - DNA, 101 bp, Homo sapiens
acataacctatttcctggcccaatagacaactctgggctattttcagggtcaaggtgtcacgggcatgaatgttatcagctccttggttgcgataactggg

SEQ ID NO: 239133 - DNA, 100 bp, Homo sapiens
aagcaagcactatatgaatacgcaagaaggcctcgaaaaagcccaagacagcagaagcagacacctccagtgaactagcaaagaaaagcaaagaagtatt

SEQ ID NO: 239134 - DNA, 100 bp, Homo sapiens
ccgtcccctgccggagccagctcaaccgaacccacagggcggctgtgagtgtggaccccttctatgagatgctggcagcgagaaagaagcggatttcagt

SEQ ID NO: 239135 - DNA, 76 bp, Homo sapiens
gactcaagccagcatggctcacaccacaaaggttaacggcagtgcctcaggtactaggttttgacaagcttgcatc

SEQ ID NO: 239136 - DNA, 75 bp, Homo sapiens
cagaccaaacatttccacatcaagtgtttcacctgcaaagcgtttagtcacatcaagaaatagaacagaattcag

SEQ ID NO: 239137 - DNA, 80 bp, Homo sapiens
cggctgaggagcgccgctgcctcgcctcgccttatgccagcctggaccatcttggaggcagtgtaggatcatggaagaac

SEQ ID NO: 239138 - DNA, 101 bp, Homo sapiens
cccgatcctattcccagtcgtactggatgagctgaacctctcctggtgttttgatttcactgaaaagcatgtacaggtggctgttgcgcatgtgtcagaga

SEQ ID NO: 239139 - DNA, 90 bp, Homo sapiens
cgcccggccccagccctagcgctggccgcgaccccggcggagtctccccaggacagtgctatcacccgggatattaaccgaacattccca

SEQ ID NO: 239140 - DNA, 75 bp, Homo sapiens
agcctcttgagtagctgggattacagaatggagatgtatgcatttcgattcttcatccgcctgtagatgacccac

SEQ ID NO: 239141 - DNA, 100 bp, Homo sapiens
ccaactcccaccccatccagtggaatgcaccacagccatctcacatttccaagtacattctcaggtggagacctcagacagacgaggcggcacagacgga

SEQ ID NO: 239142 - DNA, 114 bp, Homo sapiens
tcgctggttctatcggtggacagtgggacattctgaagggaggcaaggaggcggactgagcgctcccaattgggtaagactttgaccccgacgcaggcttcagtgattgccgcg

SEQ ID NO: 239143 - DNA, 97 bp, Homo sapiens
gcaggaggctgcgaggagccggcgcggtcgcagtctccacggcgcaggcccacggtagcgcagccgctctgaggtgtcatggagaaactccagctgg

SEQ ID NO: 239144 - DNA, 99 bp, Homo sapiens
ggtcgcaggagccctgggagccgccgccatgggctctgacgcccgctctgcggcttcggtgtttgaacaggccacagtccaggagcgcttacattcagg

SEQ ID NO: 239145 - DNA, 75 bp, Homo sapiens
ccatgccgcagtaggacagcaggcccaagtctgcacatcccagacaaatccgggacacagtcagctggattttca

SEQ ID NO: 239146 - DNA, 98 bp, Homo sapiens
cggctcccggccggctcgggggagaaggcgcccgaggggaggcgccggacagatcgcgtttcggaggcggcgcaggaattacatgaacgacagccttc

SEQ ID NO: 239147 - DNA, 82 bp, Homo sapiens
cagtcactggtttgcagagtccagaaaatgtggacacagacttgccaggcagcctggggcagagtgaagagaagcccgtgcc

SEQ ID NO: 239148 - DNA, 87 bp, Homo sapiens
ctgagagctagcaaggaaaactcaggaccatgatggctcagtttcccacagctatgaatgaatgccgggtctaagttgtagatttta

SEQ ID NO: 239149 - DNA, 75 bp, Homo sapiens
agttgcaggaaaacaagctcagggcttccactgattctacattatgtgagatggaagattttcgaggtatagcag

SEQ ID NO: 239150 - DNA, 50 bp, Homo sapiens
aaaaagaggacagctctgacaaaggccatacaatgccaggaagatgaatg

SEQ ID NO: 239151 - DNA, 100 bp, Homo sapiens
tgggagcctagaatgcatcagtgcccttgtggcgaatggggctcacgtcgagagtgacagttcatttagattctttgtattcttcttcgtctatatttgt

SEQ ID NO: 239152 - DNA, 83 bp, Homo sapiens
tctcgaggctgctaagagactaagagaaggaagccaacatccttttggagccatgaatattgtccgaactccatctgttgctc

SEQ ID NO: 239153 - DNA, 75 bp, Homo sapiens
cggctggccgccaggaagcgccctacagctccggctgggcatgccgcattgacaggaagattgagttccccctgc

SEQ ID NO: 239154 - DNA, 75 bp, Homo sapiens
ctgggatattctttgttgagaggtacaagcctatgcagaaagtggatggggttgcagatggtttcacaggaagtg

SEQ ID NO: 239155 - DNA, 100 bp, Homo sapiens
ggaggctccgggcacccccgagggccccgagcccgagcgccccagcccgggtgaccagaagtcagcagcttcccagaagccccgaagccggggcatcctc

SEQ ID NO: 239156 - DNA, 99 bp, Homo sapiens
cctgagcgggaggcagggggacgacaaggagggcatgatcaacctcgtcatgtcctacgcgatgaaggatttgggggcagagcacttggcaggtcatga

SEQ ID NO: 239157 - DNA, 100 bp, Homo sapiens
gggagatacaagtttggaagcaatcttggggtacttacccacaaggctggtggagaccagccatgctgtgacctacaagcaaactaaatagccaacattt

SEQ ID NO: 239158 - DNA, 82 bp, Homo sapiens
catacatctttcttcgacaaaggcatgatgccttcttctgtagagtgggcgctttgcagaatacgtgttgaatgaaatcact

SEQ ID NO: 239159 - DNA, 74 bp, Homo sapiens
gcagacggattcatttagagctgcggaacaggacgccctctgatgaaagagcatctacggtgagcgcttccccg

SEQ ID NO: 239160 - DNA, 75 bp, Homo sapiens
cggtgagataacatcctacatcactgaagatgatgtggtctacagaccaggagttctctcctgcgctatggtgga

SEQ ID NO: 239161 - DNA, 74 bp, Homo sapiens
ggcggcaggtggtccgcggcttctcggagcttgtgtcatggagaaactccagctgggcccagagattctgcagc

SEQ ID NO: 239162 - DNA, 100 bp, Homo sapiens
cgaaatgagactccctcagatccagtgataattgacagttatagaaagttgatatctctgaaaataactgatactgatataagaccgaagatcagtttaa

SEQ ID NO: 239163 - DNA, 80 bp, Homo sapiens
cctgggcttatgtgatcttcccacctcagcctcccaaagtattgagattacaggtcagcccaaggccaaccccactgtca

SEQ ID NO: 239164 - DNA, 82 bp, Homo sapiens
gggaacttgatggccggctgcaattggcagataaaatggcaaaggtccgacagtgctggaagtcttcaatacccttttgaaa

SEQ ID NO: 239165 - DNA, 100 bp, Homo sapiens
cgagctcaacaggagtcagcgcaggccgagaatcacctcaatggcaagaattcctctttgactctgactggagagtcgaggctgtctgtcaacagcgtga

SEQ ID NO: 239166 - DNA, 83 bp, Homo sapiens
agatcgtctctctcatcgaggcccaaaccgccaaggtgagacatggaatccattaaaattgcattatcagttaagaaatgtac

SEQ ID NO: 239167 - DNA, 75 bp, Homo sapiens
gtgtgagcccggcgggctggagaaccgggtctcggcgccgcaggtgtggacactgccagcggctgcagccgactt

SEQ ID NO: 239168 - DNA, 74 bp, Homo sapiens
cagaggccgacgatctactatgtgatgtcagggcctgcgtggaggataagatcaatgccctcattaaagcagcc

SEQ ID NO: 239169 - DNA, 102 bp, Homo sapiens
tgatgcgtcttccatttgcaaggaacggaaaacagttcttccttcaaagcatgcagtacctgaagtaatagaagactttctctgcaatttcttgatcaaaat

SEQ ID NO: 239170 - DNA, 98 bp, Homo sapiens
ggacacctgtgtcagcatgtgggacctggttctctccatcgccttgtctgtggggtgcactggagaagatggggagccccgaggatgacctgattggg

SEQ ID NO: 239171 - DNA, 82 bp, Homo sapiens
tggatttcctggtcgaggccacaaagacagatgttactgtggttaggtttccagtaatactgcattgcatgattgtgcagaa

SEQ ID NO: 239172 - DNA, 75 bp, Homo sapiens
ctcctgtccgaaaataaccgccttcgcatggagctggaaaccatcaaggatgtcctgggctgcaatgtctcacca

SEQ ID NO: 239173 - DNA, 99 bp, Homo sapiens
cagaaaggattgtgacatatcgttggacccagaattgaggtaaaaagatggcctatcagaaggtccatgcagatcaaagagctccaggacactcacagt

SEQ ID NO: 239174 - DNA, 96 bp, Homo sapiens
tccccatccagaactggttcagcagcatcagagcagtcattatggcgaaccttggctgctggatgctggttctctttgtggccacatggagtgacc

SEQ ID NO: 239175 - DNA, 75 bp, Homo sapiens
attttggcagctactaaccgtccagataggatagacaaggttcaatacttcttcaagatcttggataattagtgg

SEQ ID NO: 239176 - DNA, 100 bp, Homo sapiens
ggtgaactttcacggacaacctcagaggacaacgaagtgttcggaaaaggccaaagttgttgagcccctggactatgagaatgttattgcccaaagaaaa

SEQ ID NO: 239177 - DNA, 75 bp, Homo sapiens
gaaggaactgaaaagggaagcccggaatttgctcaaatctcatcttaaccttgcttctcccatggtacaagttga

SEQ ID NO: 239178 - DNA, 112 bp, Homo sapiens
ccatgagccacccctacaccatgacaacgccttacccttcgctcccagcccagctataatgatccagccttttatgaagaatgcaaaatggaatacctgaaggaaagggaag

SEQ ID NO: 239179 - DNA, 75 bp, Homo sapiens
attaccacaccctcagtgacatttcatgtcatgctgcaaagcttggagcccagctggccgatttacaccttgata

SEQ ID NO: 239180 - DNA, 100 bp, Homo sapiens
gggtcccggaggcgccgctccgggcgtgcggcccaccgtttccatggtcgaaggtcagggcgagaagaacgtgaccttctgggggagaccgctgccacgg

SEQ ID NO: 239181 - DNA, 100 bp, Homo sapiens
acagaaaatccttgtgcaaataaatgcttatgtaaacaggaacatcgataagtagtgtaaaaacttgcacaatgaaatccgaagccaaggatggagagga

SEQ ID NO: 239182 - DNA, 88 bp, Homo sapiens
ccaaagcctgaacaggcagggccagacccagagcttggggcttccttggtcgcacccaccacctgcctgcccactggtcagccttcag

SEQ ID NO: 239183 - DNA, 78 bp, Homo sapiens
tctttgtcctgtactttgtgcaggttggtgaaacagagaccaggctggagtgtttgctaaacaataataagaactctg

SEQ ID NO: 239184 - DNA, 100 bp, Homo sapiens
ggcgcggaaggacgaggctgaggcgagaaacgaggtgcatgcctacatcatcagctacctgaagaaggagatgccaagtgtatttggaaaggaaaacaag

SEQ ID NO: 239185 - DNA, 73 bp, Homo sapiens
gttgctttgaatatggcaagagggttaaagtctagagcatgtttggaaaggattcaagaattagaggacttgc

SEQ ID NO: 239186 - DNA, 96 bp, Homo sapiens
ggaaaatgtcactgtcccattggccatattttagggactgctgagatgtcctctattcttgaagagcgtattcttggagctgatacctctgttgat

SEQ ID NO: 239187 - DNA, 98 bp, Homo sapiens
tacccaatcaaggaatgctgatcaagtactggctcctgtatcacccagctctggagttgaaagagctcttcattcctgagtctcctgtaccactgaga

SEQ ID NO: 239188 - DNA, 87 bp, Homo sapiens
actacttcacacgccagtacggggatgagtccactctggccttccagcagctggcaaactgatacaactcagaaactgctcaatgtc

SEQ ID NO: 239189 - DNA, 82 bp, Homo sapiens
tgtatttgtctctaccactagcatccacaagtaaatgtacattacagtcaccaggagactaaagtccatcaaaaacatccag

SEQ ID NO: 239190 - DNA, 100 bp, Homo sapiens
cgcagaggatgtgttagactcagaaaccgtaattcctgggcacacatggcagctcagaaatgttgcctgacctactttgaggagatgatttgagcgaaac

SEQ ID NO: 239191 - DNA, 100 bp, Homo sapiens
tcttgctcggccgatgaagtgcagaggtttttttctgccaagaagtatgatgcgtttttggcctcagagtctctgatcaagcagattccacgaatcctcg

SEQ ID NO: 239192 - DNA, 74 bp, Homo sapiens
atcaaaaatagtgatagctttgataagttgtccgagcggaactgcattgagattgttaataaattgattgctca

SEQ ID NO: 239193 - DNA, 100 bp, Homo sapiens
cccaacggacgtgtctattatgttgaccacaataccaagaccaccacctgggagcggccccttcctccaggcttagcagtgtctgcaaaaacgaatcttt

SEQ ID NO: 239194 - DNA, 83 bp, Homo sapiens
cccatggcggtggccgagctgtacacgcaggttatttggaaatagcggtgcttgcagcgcttgcggacagtcgattcctgcga

SEQ ID NO: 239195 - DNA, 88 bp, Homo sapiens
tccgactgggagcagaggaagccttgaggacctactcacagataggaattgaagaacccagtgacttgattgtaaaaatttacagagc

SEQ ID NO: 239196 - DNA, 50 bp, Homo sapiens
gctattggatcagctcagcagggtgtatgcaacagcgttattgcaacagg

SEQ ID NO: 239197 - DNA, 82 bp, Homo sapiens
ctctgtccagttttcaaaccacacagggggatatgagactttctactcggaatatcctgagtgttgcgtggatgtaaaaccc

SEQ ID NO: 239198 - DNA, 90 bp, Homo sapiens
atttgtttggatatcctgaaagatcaatggaaacaccaggccaaccacagctggggataaaatagcacaaccacaccctgccgtccagcg

SEQ ID NO: 239199 - DNA, 74 bp, Homo sapiens
tgctctgctactatgatcccaattcagcttcgtgctctgtctgatgatggagtatctgatcttgaagacccaac

SEQ ID NO: 239200 - DNA, 101 bp, Homo sapiens
gcgacgcggcgcttgttggcggcgctgcgaggccagagcctagggctagcggccatgatgtgaatcccgatggagcggcccgaggaaggcaagcagtcgcc

SEQ ID NO: 239201 - DNA, 100 bp, Homo sapiens
cagtgacccagaccctctcctttccctttgagaccgtgaagagaaagatgcaggcaactgcctttcccgcagaagtcaaagacttgaccaagagaatccg

SEQ ID NO: 239202 - DNA, 82 bp, Homo sapiens
tcctgctctgggaccggaggagacatcggcctctgcaggcttgccgaagaagggagacatgcaagaaagcacttcagccaag

SEQ ID NO: 239203 - DNA, 74 bp, Homo sapiens
ctacgacatccacttctaccccaccttccgggtcgcgtctccttcttcacctcggggtccgagaacctacaccg

SEQ ID NO: 239204 - DNA, 83 bp, Homo sapiens
gcgggtggcagctccaaagcattggatgctggataaattgaccggtgtgtttaaattcatgccgaagtccaacttaagaatta

SEQ ID NO: 239205 - DNA, 74 bp, Homo sapiens
atctttatgtcagaaacacaaagcagcccaaccaaaggcttttctgggagaagaggctacaaggacttagtgca

SEQ ID NO: 239206 - DNA, 100 bp, Homo sapiens
cggcggtacgggggtggtgccgcgctcctggccccgcgcgggcggacggcggaggcgcctcccagtacgagctcaactggaggcagtcctgtgcggaaat

SEQ ID NO: 239207 - DNA, 74 bp, Homo sapiens
gacagagcccgtggtcgcgcagatgtgatgctgatccttcagccttagccaactatgttgtagcactggtcaag

SEQ ID NO: 239208 - DNA, 98 bp, Homo sapiens
ttaccttgtgatgcacctgggattaaccagcgaggatcagatcctgataacttaagtgactctctcttttccggtgatgaagaaaatgctgggactga

SEQ ID NO: 239209 - DNA, 75 bp, Homo sapiens
cctttatatagaagggagagtagacaaaactgtgtggagttttatcctatattcataattacattgtggatggct

SEQ ID NO: 239210 - DNA, 100 bp, Homo sapiens
ggccacgatcgcagactccaaccagaacatgcagtccctgcttcctgccgggagtccaggttgtcaatcggtcacagagaaagaagcatcttcattcctg

SEQ ID NO: 239211 - DNA, 100 bp, Homo sapiens
ggaaattaagcctttgcaatttgaaattatgattgacagacttgaaaaagccagttctaatcaggaactgcaagcacatgttgaccagataactgaaatg

SEQ ID NO: 239212 - DNA, 98 bp, Homo sapiens
ggggctgcgttgtgtcatccgccccccgctcaatggcgactccctcaccgagtacgaagcgggcgtttgcgaagtacgaggatgtcgtccaggaaaga

SEQ ID NO: 239213 - DNA, 97 bp, Homo sapiens
cggcgggggccgagcccatgagtagggaggagaaacagaagcttggtgccaccatggcaactgcaccatacaactactcttacatctttaaatatat

SEQ ID NO: 239214 - DNA, 98 bp, Homo sapiens
tagatggcagtggccacatactttctcagaaaccttcacatcttggtcaaggatcagttacagttgtggattcgaggcaacgtgagtgcctgtgcgag

SEQ ID NO: 239215 - DNA, 114 bp, Homo sapiens
ccggcccgggactcgggtttgggcgaccaggaggtgccggtggccgcgctcggacccggagctgacatggacccaaatcctcgggccgccctggagcgccagcagctccgcctt

SEQ ID NO: 239216 - DNA, 75 bp, Homo sapiens
gctgggcaactccatcctcgtggacctgctggctatacgggcagctccccaagttccaggacggagacctcaccc

SEQ ID NO: 239217 - DNA, 80 bp, Homo sapiens
aagttcaggcggtatgattttgagtgtctgcaaaggtttatggctacaaatgatttgatgacggaactgcagaaagattc

SEQ ID NO: 239218 - DNA, 100 bp, Homo sapiens
gtgaaggagaagatcacagcttttgtggtggagaggggcttcgggggcattacccagcgctggccctacggctcggacggctgccaggctcacggcttcc

SEQ ID NO: 239219 - DNA, 75 bp, Homo sapiens
cagtgatttccataaattgaagcaaaatgtagatggcggaatggaccaggacatatttgatatcaatgaaggttt

SEQ ID NO: 239220 - DNA, 97 bp, Homo sapiens
tgatatagacattagaggacaggcagagatcctacaagaatccaggatgatgatcccagattgccagcgcaggttggaagccgcatatttggatctt

SEQ ID NO: 239221 - DNA, 100 bp, Homo sapiens
ggccccggcagcgcctgggacaaggctcccgtcttcgtcaggaagattttccacctcgcattgttgaacacccttcagacctgattgtctcaaaaggaga

SEQ ID NO: 239222 - DNA, 80 bp, Homo sapiens
ttaaaagctgcttccagtgggaatccacattaagaagtacaatagcattcgcggtatttcaggacagccaggagggggcg

SEQ ID NO: 239223 - DNA, 74 bp, Homo sapiens
atgatgtggaatctttggtcaggaagtgctttgattctatgagcaggttgtgcggtctgaaagtagaagtggat

SEQ ID NO: 239224 - DNA, 112 bp, Homo sapiens
cgcattttcttattaggactggctgataacgaagcagctattgtccagtctctagtgatccctgaaaagttccagcatattttgcgagtactcaacaccaacatcgatgggc

SEQ ID NO: 239225 - DNA, 83 bp, Homo sapiens
gctggggaaggcgattggcatcgatctctccatcccttccgaggcccgacttcgcaccgaacaagatttgtgatgaaatggag

SEQ ID NO: 239226 - DNA, 75 bp, Homo sapiens
cagcagcacaccgtgctccaggggcagaggctcatagctttcagctgtgagttcaacatggaggcaaatcagtgc

SEQ ID NO: 239227 - DNA, 115 bp, Homo sapiens
ctgaagcctcttgtcccttcattgtcatctgcttttgaggaaggaatcgtgtctcctagtgacctggaccttgtcatgtcagaagggttgggcatgcggtatgcattcattggac

SEQ ID NO: 239228 - DNA, 90 bp, Homo sapiens
ccgctgttctgcaaattttcagtctaatctcattgaaagccactcaacaactctttatgtgacagaggctgaggggatctggcggtggag

SEQ ID NO: 239229 - DNA, 100 bp, Homo sapiens
aatacaggatgcctctcagctgccacctgcctttgacctttttgaagcctttgcaaaaactgggctggcttagatgaagatgaagatgcacatgtctggg

SEQ ID NO: 239230 - DNA, 75 bp, Homo sapiens
ggtggtggcggcagtcggatagacaataccacaacaacacattttgcagaggaatcagagatcattgatttcttc

SEQ ID NO: 239231 - DNA, 100 bp, Homo sapiens
ctgcttcccatggcgcagaggggcagtaaacagacaccaactctacaacattacctgtcatatactgaagaatctcttcttccagttatgcagcacctgg

SEQ ID NO: 239232 - DNA, 75 bp, Homo sapiens
agggaaactagagactaaagctggacacccgcccgccgccatcatcgtctacagactgccgtggacctggaaatg

SEQ ID NO: 239233 - DNA, 97 bp, Homo sapiens
tggacatgactgaagaggaggtgcagatggcactttccaaagtggatgcctccggggaggggtttaaagccaatttgtctctcttgaggaggcctgg

SEQ ID NO: 239234 - DNA, 82 bp, Homo sapiens
ccaacatcctgctcctgctcatggacgacgtggaacacctgcagcaggagactgctgctctgaaaaagcaaatgcaaaaaat

SEQ ID NO: 239235 - DNA, 75 bp, Homo sapiens
cgagaattttgtggacctgctgatcctgataatgctgactacagattatttcagaaaacactcaaattgtgtcgt

SEQ ID NO: 239236 - DNA, 75 bp, Homo sapiens
atcgcctaacttctactgacgaagcttggaagttgcagaaggaaaatcctgccttgcttcgttgggcctatgcaa

SEQ ID NO: 239237 - DNA, 83 bp, Homo sapiens
gtcagcatgagcaaaaactccaaactcctctccaccagcgccaagagtatgccaccacgggctgttccctgaccctgcaccat

SEQ ID NO: 239238 - DNA, 82 bp, Homo sapiens
tttgcgacggaaatgtgtcatcgaaagccaggtggagccttttgccagcttgaccgaggccgtgcggagctcagttccccga

SEQ ID NO: 239239 - DNA, 99 bp, Homo sapiens
gaaacaacatatgatacaagctacaacaacaaaatgccactttcaacacataagggatgagtggatgactgttgattttatgtctgttaaaactgtgtc

SEQ ID NO: 239240 - DNA, 96 bp, Homo sapiens
cagatcgccggggaggcagcgcgggatcccagcctcaggcgtgcgcggacggtgtgcggttggttgaatctggcgatgtggaacccatggatatgg

SEQ ID NO: 239241 - DNA, 75 bp, Homo sapiens
tcagagcgtttgggtcctctgaggccccttgaccaggccaaagaactgccaactctgaaagataatgatttcatt

SEQ ID NO: 239242 - DNA, 118 bp, Homo sapiens
tttgatatcaccaaactggaggatgcctatgtattccctggggatggcgcatcacacaccaaagtaacaaatgtggcaattattttggatctatcacctgtcatcataactggcttct

SEQ ID NO: 239243 - DNA, 98 bp, Homo sapiens
aaaggcggagctgtagccactgtagcagcaaggaggtcctgcacataggaagcgcccacaaccgaagtgccatgccctttaccgcctcgcctgcctcc

SEQ ID NO: 239244 - DNA, 100 bp, Homo sapiens
cagcacgcgcctgcttcccgtctgcgcgagtccacgcagctccccagctgggagtgtccactcgccttccaccagcatggcaacgtcttcacagtaccgc

SEQ ID NO: 239245 - DNA, 83 bp, Homo sapiens
cggggaggcagcgcgggatcccagcctcaggcgtgcgcggacggtgtgcggacctggaatggccaaatatcaaggtgaagttc

SEQ ID NO: 239246 - DNA, 100 bp, Homo sapiens
cgcctcgcgctgattctcacgggcccggctgccggcccccgctctgccctggtcaagagacaactgcctttgaaagagagtgagtgactgtttccaaaac

SEQ ID NO: 239247 - DNA, 82 bp, Homo sapiens
taaagacatcttaattgggcacgaaagagaaactatgttccaacttcctgtcaacaatcttggcagtttaagaaaagcccgg

SEQ ID NO: 239248 - DNA, 100 bp, Homo sapiens
ggacctggcgggagacttttctggataatcttcgtgcggctgggctgtgtgtagaccaggacagagcgggatgccaccagcttgtccaaagggaagttcc

SEQ ID NO: 239249 - DNA, 75 bp, Homo sapiens
ctcgaagaacagctgtggaaagaagttgcaaaacactggtgcacgatctgattttctggagagatgtgaagaaga

SEQ ID NO: 239250 - DNA, 98 bp, Homo sapiens
cctctacggcaacggcttaagctctcggaggagtggcagagtacgatctgaaggaggggcttctggttagcccagaaatctcctgcaaagaagctgag

SEQ ID NO: 239251 - DNA, 100 bp, Homo sapiens
ggagatgtgtgcacactgatgatgtgcctccaggacaaaggactgatcagtgctaacatcttccgtacacttcctccaagtgataatccagattttgatc

SEQ ID NO: 239252 - DNA, 96 bp, Homo sapiens
gatggaaatagcttgtgctgctgctgctgctgctgctgcatgtctaccaggagaggagggaactgcggagcggtttggaaattttagcattcaggt

SEQ ID NO: 239253 - DNA, 90 bp, Homo sapiens
ctcccctttgactcccagaagggtgactgaagttcgtgctgatactggaggacttggaaggatgtcatcatgacaggctcctacaacaac

SEQ ID NO: 239254 - DNA, 50 bp, Homo sapiens
gaaaccggtagcgcttgcagcatgttacagaatgtctgaaggggacagtg

SEQ ID NO: 239255 - DNA, 75 bp, Homo sapiens
ggattccaagtaactcttatttgatgactttgggaaattgctgctggctgaggccctcctggagcagtgtttgaa

SEQ ID NO: 239256 - DNA, 75 bp, Homo sapiens
tgattagcttcgcagtctggaaagctttaggagttcacagtgcaaaatttggtttctctaatattactggaattg

SEQ ID NO: 239257 - DNA, 100 bp, Homo sapiens
tcgggctggtgcagccccgggccaggccgcggccggggcaggagcgcaggatcgaatcatcaatttagttgttggcagcttaacatccttattgattcta

SEQ ID NO: 239258 - DNA, 100 bp, Homo sapiens
gggcttccggcaagccaatggcctctccatccatctgcacacctttcacaatgcagaggttgtggtaggaaccacaaggccagagacgctgcctggagat

SEQ ID NO: 239259 - DNA, 83 bp, Homo sapiens
ctgctgcgtcctgctgaccttcgctgtccaggcagccatcttgtctggagacaagtctgagaatgttcaagatttgctgctct

SEQ ID NO: 239260 - DNA, 119 bp, Homo sapiens
accttcaacagactcaagaactggttatacttgaaaccataatgctacaaactctaggtaattctgttccacaggatatctgctgtatggcagctgatggcagattagtctttgctgct

SEQ ID NO: 239261 - DNA, 118 bp, Homo sapiens
gttacggtgactcttgggtccgaaggggacggacgtcctcccacgtaccatttagaagggtgactatgaccagagcaggaccaaagtgctgcacatgagcctgaaccccaccagtgtg

SEQ ID NO: 239262 - DNA, 83 bp, Homo sapiens
gctggtgaagacatgacgaccctggactccaacaacaacacagggcacgctatcatcactaactacttgttgaactatttccc

SEQ ID NO: 239263 - DNA, 88 bp, Homo sapiens
aagaaaacaaaggtagaacatggaggatcgtcaggctctaaacaaaattctggggtcggcaccaggaattattatagaaagatcggct

SEQ ID NO: 239264 - DNA, 100 bp, Homo sapiens
tggacgccctgtgcggttccggggagctcggctccaagttctgggtatctctcctaaatgtgtgatcaaggaattaccaccaacagagaacagtaataca

SEQ ID NO: 239265 - DNA, 95 bp, Homo sapiens
actgataagattgaatgccaagcagaaaattacctaaatgcactctttcgaaagaaaggtatcttctcagtcctcagcttggcctctgagtgcac

SEQ ID NO: 239266 - DNA, 98 bp, Homo sapiens
accgggcggcacgcacgcggtgcagggtaacatggcggatgcggaagggctgccagaggaacccgaccagaacctgtccagccctgaggaggtgttcc

SEQ ID NO: 239267 - DNA, 83 bp, Homo sapiens
tacttctgaagaacaaattaaagaatattttggagcctttggagagatgatgaggagtctgatgaggaagctgtgaagaaaac

SEQ ID NO: 239268 - DNA, 90 bp, Homo sapiens
tatgaacttctcttcgcatcggcggcggcttccgtcacctccgctcccccgatcctattcccagtcgtgactcagtggcatttgaggatg

SEQ ID NO: 239269 - DNA, 82 bp, Homo sapiens
cggcagtccacccaccgccgccgcctcccagatctctggaaacatggctacagaacatgttaatggaaatggtactgaagag

SEQ ID NO: 239270 - DNA, 85 bp, Homo sapiens
ctgggattttgttgaagccacacaaagaacaaattgcagttgtttgaggtttggtgcacctcgatttggaggaagtagggcaggg

SEQ ID NO: 239271 - DNA, 123 bp, Homo sapiens
cagcccatcgtgtgaactatagagtttgtggacagatttatattgaactgtcagaccttcagcagcctcagctgcctgagcgcagggacagaggactgcggtccccagagccccttcgcccgc

SEQ ID NO: 239272 - DNA, 82 bp, Homo sapiens
gtggaaagaaaccatgtgctgaaatgtttgacgacactgatggtttgggacgcggagcttgcagtggtgagagagcagcgca

SEQ ID NO: 239273 - DNA, 100 bp, Homo sapiens
tgttgacacaagtgttgctaaagaacagagccttccctcagtgatgggagagcacagaatggggattcaacacctcggcaatgcccttttagtgtgcgag

SEQ ID NO: 239274 - DNA, 100 bp, Homo sapiens
gtgaccaaaaagtcatctacatttcagtgaataaccctataccttccaatttgaaatcagaagcaaaaaaggctgccaaaatattaagagaattcacaga

SEQ ID NO: 239275 - DNA, 50 bp, Homo sapiens
gtcaccatgttcctctccgcggtcttcttgtgacttcaccgaagaccaga

SEQ ID NO: 239276 - DNA, 119 bp, Homo sapiens
caagaatccaggatgatgatcccagattgccagcgcaggttggaagccgcatatttggatcttcaacggatactaaaatcagtcaggagacggctgtgaatcctgtggacattgtcagc

SEQ ID NO: 239277 - DNA, 80 bp, Homo sapiens
gcgctgacaggggggcctggccgcgcagccgaagtccattggaatattaagcccaggagttgctttggggatggctggaa

SEQ ID NO: 239278 - DNA, 99 bp, Homo sapiens
cctgtgattggccagatctctggagcttgccgacgcggtgtgaggacgctcccacggaggccggggttacccaccactgacgaagatcctggcaagttt

SEQ ID NO: 239279 - DNA, 100 bp, Homo sapiens
gctattcatcactaatgaaagttgaaaatatgtcttcaaatcagaggcgtgcaaagactccagaattggaggcatgatgaagactctgctgctgtttgtg

SEQ ID NO: 239280 - DNA, 100 bp, Homo sapiens
caaatgcacgcgacaggaaccagacaggtgctctagttcacagctataggggaacaggtggaatatttgaagtttgctggaatgcagcaggagacaaagt

SEQ ID NO: 239281 - DNA, 97 bp, Homo sapiens
cgacctcaaggacatcaacttccggccgcagatgtcccagatatcagttttagagaatgtggcgtggagaaattctcaaggaaagagtaaaatgctg

SEQ ID NO: 239282 - DNA, 110 bp, Homo sapiens
cggggagagtagggtgctgtggtctgagctagagggtgaagctggcggagcaggaggatgggcgggttatgataattcagagagcagtgttcggaaagcttgtgtcttct

SEQ ID NO: 239283 - DNA, 50 bp, Homo sapiens
caccgtggtgacattgtatcattggtgaaaatgtctaatcaacaggagaa

SEQ ID NO: 239284 - DNA, 98 bp, Homo sapiens
agaagcccagtcagcattagactctacatcttcatctatgcagcccagggatcattttggatccaaacacccaaaatattctgatacactgctagatt

SEQ ID NO: 239285 - DNA, 100 bp, Homo sapiens
cccgccccggtgctcgtgatggggctgatcttcgccaaactgtggagcctcttctgtaaccaaggcatcagaacacaccatgatggctgtgacctaagac

SEQ ID NO: 239286 - DNA, 100 bp, Homo sapiens
cgcgcctgggaccatggccactgactcatgggccctggcggtggacgagcaggaagctgcggctgagtcggagaattgaagaactgaatcagagcctggc

SEQ ID NO: 239287 - DNA, 82 bp, Homo sapiens
atggttaaggaacaggaggaaaccattcagaggcctcccccagggaagaacttcactatgcctcggtggtgtttgattctaa

SEQ ID NO: 239288 - DNA, 95 bp, Homo sapiens
agaaaggtgtgccagtgaaacagaacacagctgtaaattccagctccagaaaccactcggctacggttgactgcattcagccagtgccaaaagag

SEQ ID NO: 239289 - DNA, 100 bp, Homo sapiens
ctgcacttcttttttgagaaaggaaggaatatatcctgactgattgtgtcatggagaaactccagctgggcccagagattctgcagcgggaaaatccaag

SEQ ID NO: 239290 - DNA, 100 bp, Homo sapiens
caaacattcgtctcggaaaccccgcctcttacagtcacgagcaaaaattggatgcagagtttcagaaaagactggaaaagaataaaattgctgcagagga

SEQ ID NO: 239291 - DNA, 100 bp, Homo sapiens
cgagggggcatcatgaagcgggctggcggcgctgccgctcccgggcggccgcgggcgggtggtctttgggaagaagcttcctgcctttgccaccatcccc

SEQ ID NO: 239292 - DNA, 115 bp, Homo sapiens
gttggaatttgtgcaatgtttagccaacccaaattaccttaattgagtttcaccacgaaatagtcttgaagtcgtaacccctgaagttcttggtgagagtgaccacggaaactgc

SEQ ID NO: 239293 - DNA, 101 bp, Homo sapiens
cgcgtgttccaagaactgcctgtgcgccctcaacctgctttacacctgagggagataaatctgcaggacatcaaggaagatttagaattggatccagagga

SEQ ID NO: 239294 - DNA, 103 bp, Homo sapiens
agccgcaccatgccgctcctaagcctgcacagccgcggcggcagcagcagtgagagacaaatttacatgtattggagaccagaccagaagcccttctgaatta

SEQ ID NO: 239295 - DNA, 75 bp, Homo sapiens
gtgggagcttcaggctcgctccgtgcggcatggcaaaatgaggaaaccactgacaggtgaagaatttgcacaatg

SEQ ID NO: 239296 - DNA, 83 bp, Homo sapiens
gagaagctgcatcccagaggagcgcgtccaggagcggacccgcgccgtgccgtccctgcagtgacaccgaggtgctcctagcc

SEQ ID NO: 239297 - DNA, 75 bp, Homo sapiens
tactcacagagttagagagagggatggtgatgggggactcaaggagatttcaccaccacccatcctcggcctgtg

SEQ ID NO: 239298 - DNA, 80 bp, Homo sapiens
cactatcatcaccatggaaaaagtgacttgagcaggagaagaacccttggttagattgagtcttactgagagactgggga

SEQ ID NO: 239299 - DNA, 74 bp, Homo sapiens
ttccaggactggctactgcgtacatccacaggttcactaacgggggcaagggtacagctcgcagaaagaagaag

SEQ ID NO: 239300 - DNA, 82 bp, Homo sapiens
gaagtgcttcagatttaaatagatccagtggggatattgtgatgactcagtctccactctccctgcccgtcacccctggaga

SEQ ID NO: 239301 - DNA, 98 bp, Homo sapiens
cagagggtcggcagcggcacctacggggacgtctataagaatcgcctaccagaggaatgacgatgatgaagaggaggcagcccgggaacggcgccgcc

SEQ ID NO: 239302 - DNA, 74 bp, Homo sapiens
tggcagacctcagctgcctggtgcatactccaaatgcttcttccagttcatttttcagccatcagttcaagagc

SEQ ID NO: 239303 - DNA, 75 bp, Homo sapiens
ggctcctactgttcttagagatgtacctttctcagcacctgtggaatcctctcaagaggaacagtcattgtgtga

SEQ ID NO: 239304 - DNA, 97 bp, Homo sapiens
ttcgagagctaccgcgccagacaggtgtcatggagaaactccagctgggcccagagattctgcagcgggaaaatccaaggcttatttatgccaggct

SEQ ID NO: 239305 - DNA, 90 bp, Homo sapiens
accatgttcaccagcaccggctccagtgggctctgcctcatgcattgtgcgtcagcagcaatgtttatggtgaaaaatggcaacgggacc

SEQ ID NO: 239306 - DNA, 75 bp, Homo sapiens
gatgtaccacctttctggcaatgaggtattatagctgcaaatgtccttgtattctgtttatggagagtaccttct

SEQ ID NO: 239307 - DNA, 100 bp, Homo sapiens
agtaggcattgaccccttgtccagttactctaacaagtctggagatgaagtaaagaaggtcttagacaaattttacaagaggaaagaaattcagaaactg

SEQ ID NO: 239308 - DNA, 82 bp, Homo sapiens
ggcagaagttgactgagatcagaggccctgtgatgatcgtgtcagtgaaactggaacgccaagctgaagaagaacgaatacg

SEQ ID NO: 239309 - DNA, 75 bp, Homo sapiens
caagactgagaaatggatggaacgaatacacctcaatgtctctggctatggaggctatgatgattacaatggcta

SEQ ID NO: 239310 - DNA, 100 bp, Homo sapiens
gagaactgcaacgctgtgaggctgaccttgaaggctcctggatttggatttggaattgcaatatctggtggacgagataatcctcattttcagagtgggg

SEQ ID NO: 239311 - DNA, 82 bp, Homo sapiens
ctggagagcttcatcaaaaatagtgatagctttgataagttcatctgcagaagccagcggacgcctctgttcaacttgtggg

SEQ ID NO: 239312 - DNA, 100 bp, Homo sapiens
ggccgtcctcctcacggtcctcctggctgtgctcatatacacctggtgtggccgacgacgatgccctcgctgaggagcgcatgcggagaggccagaacgc

SEQ ID NO: 239313 - DNA, 71 bp, Homo sapiens
tttaaccagcatggctacttcatattttggaaagcagtttttaagacaagatgagagggccttaccaaaag

SEQ ID NO: 239314 - DNA, 75 bp, Homo sapiens
aaaaatggttgacctcacccaggttgtggcagcactgcctgaaggtatgagaccagattctaatctttatggttt

SEQ ID NO: 239315 - DNA, 107 bp, Homo sapiens
tgctgcccaaaaaccacatagcaacaccagaaaactgggaagcattttgaatgaatttggacatcacaagggatttcgaccactgagctgtgagtacaagatggaaa

SEQ ID NO: 239316 - DNA, 75 bp, Homo sapiens
tcccgcggtggttgctgctgctgccgctgctgctgggcctgaacgcaggaactgtggctgcaccatctgtcttca

SEQ ID NO: 239317 - DNA, 90 bp, Homo sapiens
gccagccccccgcgggacgcctgcgtctacagcagctgctactgcttcctggacaagatcgacgtgatcaagcaggctgactatgtgccg

SEQ ID NO: 239318 - DNA, 73 bp, Homo sapiens
gaaggcttcaaaggctgtcgcaaggaggaagagctcccccatccaggaatccactgctcccgagctgccttcg

SEQ ID NO: 239319 - DNA, 100 bp, Homo sapiens
gaaatgcatttgccttatacagctaaagccatggaaaggaaggatctgagtctctccctgcggagacagccctgaagaactcctgtaacgtcaagctggc

SEQ ID NO: 239320 - DNA, 51 bp, Homo sapiens
gagtacttcagcgctgctgatggaagcccagagctgcggttcgcaggcctg

SEQ ID NO: 239321 - DNA, 75 bp, Homo sapiens
gcctatttacccagaagtagtccatatgttcatcagagaagatatgaaatataaagatgctactaataaacacag

SEQ ID NO: 239322 - DNA, 75 bp, Homo sapiens
gagcacctgctggcgctaaaaggtgacagtatgttgactgctgtctctgtggccagagattgtggaatgattcta

SEQ ID NO: 239323 - DNA, 75 bp, Homo sapiens
actacaacaggaaaatcatattatagatggagtaaaggacatgatccacatcgcggacaccaaggtcgccaggcg

SEQ ID NO: 239324 - DNA, 74 bp, Homo sapiens
ctggacgcggatttttggcctcatactctgttatagataaacaagactggggctgtggctgagatgtcacatgg

SEQ ID NO: 239325 - DNA, 90 bp, Homo sapiens
cttagagtttcccgcaagggatgtttatgttccaaacactacttacaggaatgccatctccaaccacactgaagaagtcggagaagtctg

SEQ ID NO: 239326 - DNA, 75 bp, Homo sapiens
tttcaggcactacaccgtgggctcctatgacagcttcgacacttccagtgtcttgggacaaggtgcgcattcctg

SEQ ID NO: 239327 - DNA, 75 bp, Homo sapiens
gagaatccgaggaatcttctgcacagaaacctccacagctgttgagaaaaaggagaaacctcttccaagacttaa

SEQ ID NO: 239328 - DNA, 50 bp, Homo sapiens
gaggaaatgactcggactgaacaagaggggttgcttttgtaatgaagaag

SEQ ID NO: 239329 - DNA, 91 bp, Homo sapiens
caaaggggaaggtccaggagcacctcctggcaaacggagagaccgagcggcttctgacccccaaccccgggtatgggacccaggcggggcc

SEQ ID NO: 239330 - DNA, 101 bp, Homo sapiens
gtggccgccatgtttgagcgagagagctggattgaaagatgtctcaacgaaagtgaaaacaaacgttattccagccacacatctctggggaatgtttctaa

SEQ ID NO: 239331 - DNA, 98 bp, Homo sapiens
cgaagcgctgcgctcgcgcccggatccctcagatgctttcttcacatgtcgaaaaaatgtccttctggcgaacagctcatccccccaggtagagggcg

SEQ ID NO: 239332 - DNA, 90 bp, Homo sapiens
gcccgccaccctgcgctgccgccgctctgaggagttaaaggtgaccaagaatatggcccaggtgaccaaagccctggacaaggccctgag

SEQ ID NO: 239333 - DNA, 74 bp, Homo sapiens
agaggcccccgacggagacaaggacgaacctcttcgacagcatcaagagtgagccattctccatccctgaggac

SEQ ID NO: 239334 - DNA, 100 bp, Homo sapiens
cagctccagagcgacgggaaacgaaagggaccccggagtggagatgacagtgttccggaaagtcagttccacacccccggtgcgctgcagctcccagcac

SEQ ID NO: 239335 - DNA, 100 bp, Homo sapiens
cggtgaccccctccccggctgccgccgccgccgcctcggccgaccagggacctgcccgcctgcggctgctccggccaccattggttcaggcaatcttcag

SEQ ID NO: 239336 - DNA, 100 bp, Homo sapiens
gacagccgcgcgcctcggccagagttattaagcctacgctcagatcaaggtagcagctagactggtgtgacaacctgtttttaatcagtgactcaaagct

SEQ ID NO: 239337 - DNA, 88 bp, Homo sapiens
agagactacgcgctctggaagacattgaacgggaaatcggcgccatccttcagaatgcagagcttgtggacaaatgtataggatcaag

SEQ ID NO: 239338 - DNA, 87 bp, Homo sapiens
taacactgtacaagctttcaaagtcaatggattaaagcctgtggtttccacagaagcaccacctatcatatttgccacaccaactaa

SEQ ID NO: 239339 - DNA, 75 bp, Homo sapiens
gcccagccccttgtcagccagggctgaacccccgcaggaagtgaatattgaatttgaagcttattccctatcaga

SEQ ID NO: 239340 - DNA, 99 bp, Homo sapiens
caaaattaaagaattaaagggggaaaaagtaattcgaccagaatggattgtggaaaggcataaaccttccactcttgaacaaagcagctgctttttaaa

SEQ ID NO: 239341 - DNA, 50 bp, Homo sapiens
tgtgaaaaatagtgcaacctacaatggtcctaggcctacttacaagcctc

SEQ ID NO: 239342 - DNA, 90 bp, Homo sapiens
aaagacgtgcggatcctgctggtgggagaacgggcccagatcattgatctgatgatgctggtcatcgatgtgaccaaggggatgcagacc

SEQ ID NO: 239343 - DNA, 100 bp, Homo sapiens
accatctacatcaggtcagctgtctcagtttggggcaagtttatacgggcaacaaaggctattgagtggccagacttccccaacaaatgccaaattggag

SEQ ID NO: 239344 - DNA, 134 bp, Homo sapiens
tgatgaattgtgctgatattgatattattacagcttcatatgcaccagaaggagatgaaggtacctttgacaggagcgtgaccctgctggaggtgtgcgggagctggcctgagggcttcgggctgcggcacatg

SEQ ID NO: 239345 - DNA, 99 bp, Homo sapiens
tctcttagtaagatgaaatacgatgaaatcacagctacatatttgttattggggagaaaatcttcagaggaaatctgaaatagagtactatgctatgtt

SEQ ID NO: 239346 - DNA, 100 bp, Homo sapiens
cgagtggtaaaagacatggcaacaggaaagtctaagggatatggctttgtctcctttttcaacaaatgggctgttcttgccttagctgcatcttggacct

SEQ ID NO: 239347 - DNA, 87 bp, Homo sapiens
cggtctgcccccagaaccagcaggacagtcattttgtttactcattcagccctgttgcaggtcccaataaactcttcataaggttga

SEQ ID NO: 239348 - DNA, 97 bp, Homo sapiens
aaggcgtgaggcgccgcccgggtgtccccgcggcgcaggaggcggtggagcgcagagcgggcgagcgcgcgttacagtgtttctgccacctctgtac

SEQ ID NO: 239349 - DNA, 105 bp, Homo sapiens
gcgttatcttccgactgatccagctggtggtcctggtctacgtcatcggaaaaatggctacaaacttcctagcacatgagaagatctggttcgacaagttcaaat

SEQ ID NO: 239350 - DNA, 100 bp, Homo sapiens
gccgcggcggcagcagcagtgagaggcatgtcagagcgggagcgacaggtgatgaagaagctgaaggaggtggtggacaaacaacgcgacgagatccgcg

SEQ ID NO: 239351 - DNA, 50 bp, Homo sapiens
gaagacagagggttttcttttgagggcagagcggcttgggtaaatccacc

SEQ ID NO: 239352 - DNA, 100 bp, Homo sapiens
cagaaacaagtgtgaaggaaaatactatgaagtacatggaaacacttaagaataaactgtgcagaccagagggtggcatccttctgcaccctgacagata

SEQ ID NO: 239353 - DNA, 75 bp, Homo sapiens
gataggagatgctattgcccggctcaaggagatacagaagatcattgagacactgacacagcagcttcaggcaaa

SEQ ID NO: 239354 - DNA, 100 bp, Homo sapiens
agccaccatggcgctcctgctgtgcttcgtgctcctgtgcggagtagtgggggctcaatgcgcattgggaaggattttatcctgttcaccaagaaggaag

SEQ ID NO: 239355 - DNA, 100 bp, Homo sapiens
taaacctgataacactgcatgaaatgttagaggctgagtcatcactagagagtgggaagggcagcagcagcagagaatccaaaccctaaagctgatatca

SEQ ID NO: 239356 - DNA, 75 bp, Homo sapiens
ggatcttaaccaccattatcttaactgaggcacccaaaatgaatctacctgttactcgtattttggacaatctta

SEQ ID NO: 239357 - DNA, 110 bp, Homo sapiens
ccgcaagcatgcccaccactgccacaaacgccgcaccaggtcttgtagcagcgcctcctcgctacgagagtacaaggtagtgggtcgctgcctgcccacccccaaatgcc

SEQ ID NO: 239358 - DNA, 75 bp, Homo sapiens
aacagggcagacgttagcgtgagtgatcactctcaatcccgggtctgctgagaacagacccagtccctgaggaag

SEQ ID NO: 239359 - DNA, 98 bp, Homo sapiens
gtgaagaagaaagcagcaaaacgaccactgaaaacaacgccggaatgaatctgaagtctgctgcagtaaaacacagaaggctttaaaatgttttcttg

SEQ ID NO: 239360 - DNA, 95 bp, Homo sapiens
caccatggtggaggagcagtacggccagatgtacatcaaggcctccggcagctatgcagcaaacggggattcagcgtccgatcctttggaacagg

SEQ ID NO: 239361 - DNA, 80 bp, Homo sapiens
cttgcgagatatctggccgcctctgccgcagctggaggtcctggacccaagccagaagcctctgcaaagcttccttccag

SEQ ID NO: 239362 - DNA, 100 bp, Homo sapiens
ccgcagggcagccccgagcccctggtgctccatgaggagacaccgcccaccaccagcagcgactctggttgcaagaaagctcaagtagcctatggagagg

SEQ ID NO: 239363 - DNA, 98 bp, Homo sapiens
gaccaaaaacccaccaattctggacacattgggattaaagcttcctgcctgacacagctcacttcaagaagtgcacaatgtcagaacgtggaattaag

SEQ ID NO: 239364 - DNA, 100 bp, Homo sapiens
gtccacaacctcagccttcctgagagcacactgctgcaggctgtcaccaacactcaggtaagaaccttgatgctgtccatgatatcactgtggcgtatcc

SEQ ID NO: 239365 - DNA, 97 bp, Homo sapiens
taatccggcagtgaccgtgtgtcagaacaatcttgaatcatgaagctactaaccagagccggctctttctcgagtatgaagctgagcagcctccctt

SEQ ID NO: 239366 - DNA, 101 bp, Homo sapiens
caaggatcagttggctttagcaattgggaaggcgaagaatggcaaaggctccgcagtctcctggccccgctcctcctccggcctcaagcggccgcccgcta

SEQ ID NO: 239367 - DNA, 83 bp, Homo sapiens
ctgagaagtgaggagcctctccgcccggcagccaccccatctgggaataagactttgaccccgacgcaggcttcagtgattgc

SEQ ID NO: 239368 - DNA, 75 bp, Homo sapiens
gaggagctggtggagattcgcgcagtgtcatcattaggctgtctttgtgccttaacagtattgatcaggtattgt

SEQ ID NO: 239369 - DNA, 50 bp, Homo sapiens
ggagtcatggactacaagtgaaacaggctggagtgcactggcatgatctc

SEQ ID NO: 239370 - DNA, 75 bp, Homo sapiens
cagaagagaagcagtgaaggagtgcagaggcatcacctgaaagacatttatgcagtgtgtgattctttctaaaac

SEQ ID NO: 239371 - DNA, 98 bp, Homo sapiens
ggaacagcgccgaggccttcaagtgcatgatgtgcgatgtgcggaagggcacctccacccggtggagattttcattttacctttatgtatttacctac

SEQ ID NO: 239372 - DNA, 50 bp, Homo sapiens
tcatcacagatcggaacggaggcctgtgaatgatatggaacctagcaaag

SEQ ID NO: 239373 - DNA, 80 bp, Homo sapiens
accattgcaataaaatagaacttccaactactggcagctgctcccaaccccagaacctttgctgtcttgggacggatcac

SEQ ID NO: 239374 - DNA, 144 bp, Homo sapiens
cctacttggcaactttcctggcccttttgaagaggaaatgaagggtattgccgctgttactgatatacctttagattccagttcttcagacaaacaatggtccaagtctaacaggattgactactatagcagctcatctagtca

SEQ ID NO: 239375 - DNA, 90 bp, Homo sapiens
cgcgcgcagcccgcccgcccggcgaccagcaaggcagttgcagtggtgcagaatggctgacctcagtcttgcagatgcattaacagaacc

SEQ ID NO: 239376 - DNA, 83 bp, Homo sapiens
agcgactcctccacctatgactgcgaggccatcacccagcaccatgccttcctctcaagttggaatcgaagcctcttaaaatg

SEQ ID NO: 239377 - DNA, 88 bp, Homo sapiens
gaggatgaccgggaaatttatgatattggtctcttgcaacgtgtgagctgcctcttgccaagagtgagtggcaaaagaaactaacccc

SEQ ID NO: 239378 - DNA, 101 bp, Homo sapiens
gtgctttttcaagggagctgataaagaacttcttcccaaaatggttgctgatgtatattcaagatgagtggattaggagaaaacttggatccactggccag

SEQ ID NO: 239379 - DNA, 83 bp, Homo sapiens
cctcatcagtgagctgtccctgctggaggagcgcttccgggagaataaaggcagccccgttgatgactgaaaatgacaaagca

SEQ ID NO: 239380 - DNA, 99 bp, Homo sapiens
atggtaaaagaagaaaacagtgaggaaattgactttattcttccttttttaaagctgagctctttggggaagatgctggagacgtgtggagatgctgag

SEQ ID NO: 239381 - DNA, 82 bp, Homo sapiens
tggatatttctccgtggatccagacagccatcagggaaagatgacagcatattaaagtgagtgaccctgcgacccactcttt

SEQ ID NO: 239382 - DNA, 101 bp, Homo sapiens
cccgggctcggggtggcccccgcttcagtcccagggcagtccgtgcactggagaaggcgaggtcaagtgcccaactgcagaccaactacccctcctcagac

SEQ ID NO: 239383 - DNA, 101 bp, Homo sapiens
ctcgacgccacttcatgttccagtgcctcgagcgctcaggatggaggaagactcgatccgcctgcctgcgcacctgcaaaagaggcacagttagatgaaga

SEQ ID NO: 239384 - DNA, 82 bp, Homo sapiens
ggttcaccctggtcaacaagaagaacgctctcatccggaggcaggaccagctgcagctgcttgcccctctcagctgaggagg

SEQ ID NO: 239385 - DNA, 50 bp, Homo sapiens
caggctttctgaaagtgacagagacttcacagagaatgcagttgtcttga

SEQ ID NO: 239386 - DNA, 98 bp, Homo sapiens
caagaaaatcaaaagaaacttttgcccttatcagtaacacctgagcctctgtttctctaccttgctctccagtctgtgcatgagccccttcaggtccc

SEQ ID NO: 239387 - DNA, 83 bp, Homo sapiens
ggcggaggcatccttaccaaggaatctgcttttcaagtatgccaccaacagtgaagagtgtttcctgaggttataggcgggtg

SEQ ID NO: 239388 - DNA, 100 bp, Homo sapiens
ttggaattgatgatcaggattaccagaattcaaagaagctttttcactatttgacaaagatggtgatggaactataacaacaaaggaattgggaactgta

SEQ ID NO: 239389 - DNA, 90 bp, Homo sapiens
cgcagcccagcagccccgcagcggcgccgaggacagtgcagccgagttgcgtctccctcgcgcgaggcctgccgaggaggaactgaagac

SEQ ID NO: 239390 - DNA, 74 bp, Homo sapiens
ctatggtggatgatatgctgcagatctcccttgagtttagaaatctggctgagaaataccaaacagtgattgcc

SEQ ID NO: 239391 - DNA, 100 bp, Homo sapiens
gctccggcccgggcgagcgggtgcgtctgccgcagagtcggcacctgaaggacatggagtgttgcattgatgaatcatagctgttgccccaatgtcattg

SEQ ID NO: 239392 - DNA, 89 bp, Homo sapiens
ctggtcagagatacttcttaaatttcaccagtgatcattaaagaatgggcagcttacaaaggaaagtctcctcaaaccccggaactggt

SEQ ID NO: 239393 - DNA, 74 bp, Homo sapiens
gcttgtcctggctcttgccctcatcctggttctggaatcctcagttcaagtttaagctatgaagaaggacatcc

SEQ ID NO: 239394 - DNA, 89 bp, Homo sapiens
agatatgacacttacaaggtggacaggcatgattattgggccaccaaggtttgtgaagtgtggatatgcaggctctaactttccagaac

SEQ ID NO: 239395 - DNA, 100 bp, Homo sapiens
accagaaataccaagggtggagatgctccagctgctggtgaagatgcatgaataggaggttctgggggaagagaagctgaaggagatactgaaggagcgg

SEQ ID NO: 239396 - DNA, 75 bp, Homo sapiens
cttgtatctcaacaccctgagtgcggatttctgctatgatgacagggaccagttactctccacaagaaaattcac

SEQ ID NO: 239397 - DNA, 121 bp, Homo sapiens
cgagcaaatccgaatcggagtgaagttcaggcaaacctttctctgttcctagaggcagctagtggcttctatactcagattgctctggaagcagccaaagcactggatgacaagaactgct

SEQ ID NO: 239398 - DNA, 88 bp, Homo sapiens
gtgggttctagcctctctgaagccctggacttgatcgagtcggaacaggagtacagctgtgtagtaaagatgccttctggtgaatttg

SEQ ID NO: 239399 - DNA, 98 bp, Homo sapiens
tgcggccggcagccggcagctttgcagcggcgtgttgactgattttgaggggaaggatgtggccaccaaggtcggagaggcctggcaggacaggcctg

SEQ ID NO: 239400 - DNA, 83 bp, Homo sapiens
cccggtgctcgtgatggggctgatcttcgccaaactgtggagcctcttctgtaaccaagacccaacatgagtgaagtttcctg

SEQ ID NO: 239401 - DNA, 90 bp, Homo sapiens
ggttggaagacctattatcagatcaaccaccaaagtgggaaacattgaaatcaaggtgaccaagaatatggcccaggtgaccaaagccct

SEQ ID NO: 239402 - DNA, 96 bp, Homo sapiens
ggagctcaggttggcgccgccggtgcagtgggcattacagctcagagcccgggcgctgtggaagagattctagaccgggagaacaagcgaatggct

SEQ ID NO: 239403 - DNA, 50 bp, Homo sapiens
ccgcagctctggttcctgttgcggccggggaactgatcacagccgcacat

SEQ ID NO: 239404 - DNA, 100 bp, Homo sapiens
ggcagcgcgggatcccagcctcaggcgtgcgcggacggtgtgcggctaagtttggtgcgaacgccattctgggggtgtcccttgccgtctgcaaagctgg

SEQ ID NO: 239405 - DNA, 83 bp, Homo sapiens
tccggccacccattgatttgatgcataaaggcagctttgaaacagctatagaaagcgcaattggtggtaacgcttatcaacac

SEQ ID NO: 239406 - DNA, 107 bp, Homo sapiens
cttggagcaaagggcagtcggcggagcttcgccaaggctggcgcagtcgggaagtcttaagagaagccgacagatctcacctcaggaattcattcatgagctgaaaa

SEQ ID NO: 239407 - DNA, 101 bp, Homo sapiens
agaaactcaaggatgacatccggggcctgcgtgaaaagctgaccgggctgatcaaagtatctgtgtcttcaggaggtgactgcattcgaacatacaaacca

SEQ ID NO: 239408 - DNA, 90 bp, Homo sapiens
gccacagcagagacgcgaaggagaggccctagaaccaccggacaggaacatgagcttatcgagagcatgcccctgttggaatggtttgct

SEQ ID NO: 239409 - DNA, 75 bp, Homo sapiens
gtgcagacgctggagaacagcggggtcctgaaccgcatcaagcttgaattcggagtgatttaccactgcacagag

SEQ ID NO: 239410 - DNA, 88 bp, Homo sapiens
gtgctggaaaggaatgaggagttacagagggccgagaaggacaggatcagtgccctgcaggagagaaatttagaagagaagataaaac

SEQ ID NO: 239411 - DNA, 55 bp, Homo sapiens
ctgaacatgacagagaacatagactgtggctggctgctggcgggatggacaccct

SEQ ID NO: 239412 - DNA, 100 bp, Homo sapiens
aaaattgttgaaccatacaataagatagttgcccggactgcacaactagcaagacttcagaagaatcccagacttcttagagaacccagtgactttttgc

SEQ ID NO: 239413 - DNA, 98 bp, Homo sapiens
ggtttcagacaagaaagccaaacgaggagaggaattaatcaagctatagaagtggtctggagtcaccagcctgcattcttgagctgggtggaaggcag

SEQ ID NO: 239414 - DNA, 82 bp, Homo sapiens
cttccgcaaggaccctttggaaggccgggtgggccgagtctgatcatcggatatcatggagtctggcaagacggcttctccc

SEQ ID NO: 239415 - DNA, 82 bp, Homo sapiens
cgaggcactttcgggaattcacagtctgcagcattgatcctgataacttaagtgactctctcttttccggtgatgaagaaaa

SEQ ID NO: 239416 - DNA, 100 bp, Homo sapiens
gcaagtactgcttcaccatgtaataataacataaatgcagctacagctgtggctctacagaggaattcaagggctccacagtcgtcgagctgatgaagaa

SEQ ID NO: 239417 - DNA, 75 bp, Homo sapiens
tcatgagtcgcttcaagtttatcggagagccagtgtaactccttcaagactggagtgacacacactgcatctgca

SEQ ID NO: 239418 - DNA, 74 bp, Homo sapiens
cacagaagaaaaagtgggactgaagtacactgaagcaggatcaactcactatcctgaaggtccattctcccaag

SEQ ID NO: 239419 - DNA, 100 bp, Homo sapiens
cgctgaggatgaactggcgggtgtggacgccactacagttcatcaacatcaactacgtccctctgaaggaaggatttgatgccctggatccctttattcc

SEQ ID NO: 239420 - DNA, 74 bp, Homo sapiens
gaccagctcgagtctcaagtggacaatgataataacaaggactgttctggtgtgtccttacacctcacacgtct

SEQ ID NO: 239421 - DNA, 75 bp, Homo sapiens
cagaaggggagacacattttatgttgtgtcatttcgaaggattcagtccctgtcaggacgccctcgatcctgtga

SEQ ID NO: 239422 - DNA, 100 bp, Homo sapiens
gaagaaggaatcatcgaggcatgggggtccacactgcaatgtttttgtggaacatgatcatggaagggaagtggttgctgtgtatgttactggtgcttgg

SEQ ID NO: 239423 - DNA, 75 bp, Homo sapiens
gcgcggaatctgggtgcagttcctgcagtaccccactctacgatcaggtgagaaaccttaccactgtgactggga

SEQ ID NO: 239424 - DNA, 76 bp, Homo sapiens
ccccagcagcccccgaaggccctatcaggacatggagtatgaaagacgactgcctctgtcaccgggtccctccacc

SEQ ID NO: 239425 - DNA, 51 bp, Homo sapiens
cttcccctttccagagagccagaaagaaaacgctttaccctgtacagctct

SEQ ID NO: 239426 - DNA, 73 bp, Homo sapiens
tagatgatagcttggttgttggagtgaaaactacatcttctttgaagctggaaaaagacctcgatgaagttct

SEQ ID NO: 239427 - DNA, 112 bp, Homo sapiens
ctggggccagggaaccctggtcaccgtctcctcagaccctacagcttggggcctgggctcctctgaccatcctcattgagaaaggaaagtgagtccagagaagttgatgctt

SEQ ID NO: 239428 - DNA, 75 bp, Homo sapiens
ccctgctggaccagctcatgggcacggctcgggacgacagccagctaaaggtgtggatgagcaaatacggctgga

SEQ ID NO: 239429 - DNA, 75 bp, Homo sapiens
tgtttcggaaggatgaagaactgacttcctcacagagggatttagctgtaagttcttcagtgccctactccacag

SEQ ID NO: 239430 - DNA, 75 bp, Homo sapiens
gacttcaaccagcctttggtcatcaccagggtatttcatggaaacttggagagagaaaagtgatgaagtgatggg

SEQ ID NO: 239431 - DNA, 75 bp, Homo sapiens
aataatgaagtggtagtaggagctgaaagattacgagttttagtcccccgatggtgttatacattaaatatccag

SEQ ID NO: 239432 - DNA, 88 bp, Homo sapiens
aaattggaattttgatatctttctatttgatagactaacaaatggtttgagcacaaaatgaacataattagggaaaataaggatctgg

SEQ ID NO: 239433 - DNA, 83 bp, Homo sapiens
cacgcacgggatccagagcgccgcgcacttcgtcatgttcttcgcgccctggtgtgaatgacagaggtggtgccatccagcgc

SEQ ID NO: 239434 - DNA, 101 bp, Homo sapiens
gccgagaaccgcagggactggccgaggtcagtactcctgcatttgtaccaacgaaaactcacgtgctgcttcatcgaatgagtggaaaaggactagctgcc

SEQ ID NO: 239435 - DNA, 50 bp, Homo sapiens
tgtgtacttaaacagaagttggcttggtatgatctcgtgaaaccttgaga

SEQ ID NO: 239436 - DNA, 50 bp, Homo sapiens
agggagggacccaccgtagagactaagtgtttcctgaggttataggcggg

SEQ ID NO: 239437 - DNA, 82 bp, Homo sapiens
cctggggctggaaattgcgctggaccgtcgccttgctcctcgccgcggcggggactgcagtttaatggatcgagaagtggcg

SEQ ID NO: 239438 - DNA, 100 bp, Homo sapiens
gccaaagccgccgccggtgacctcggcggaacactgcctcatggggatcaaaggaactgtgaagcgtagcacagacggggacttcattcatgctaatgtt

SEQ ID NO: 239439 - DNA, 74 bp, Homo sapiens
agaaacaaaatgtcaacaaattgatggagaggcgtttccatcaaccagttttgcaaggagttcaatgagaggac

SEQ ID NO: 239440 - DNA, 82 bp, Homo sapiens
ccaataaccaggtgcttggcaaaatcgagcgggccattggatgcagcagtctcggccctggctgctctatgcagtgaatatt

SEQ ID NO: 239441 - DNA, 50 bp, Homo sapiens
ggcatcttggctcctccttgagctttcagtccagtgtaaagctgttggag

SEQ ID NO: 239442 - DNA, 75 bp, Homo sapiens
ctttggggcaccacagagatgcgggccaccagcccctcgggttccaagatgcagctactggagacagagttctca

SEQ ID NO: 239443 - DNA, 50 bp, Homo sapiens
gtccacccaccgccgccgcctcccagaagttccacctggtgccaagcatc

SEQ ID NO: 239444 - DNA, 120 bp, Homo sapiens
ctttttgagccttacggagccgtctaccagatcaacgtcctccgggaccggagtcagaaccctccgcagagtaaagttaccttatcccatatcacacaactggtcctcagccataacaag

SEQ ID NO: 239445 - DNA, 89 bp, Homo sapiens
cttcacagctataccaaacttaaaggggcaaaaaggccccgagtcacttcaggtggtgtgtcagagtctcccagtggattttctaagca

SEQ ID NO: 239446 - DNA, 83 bp, Homo sapiens
gaggcaaggagctaaagcagcgtgcgttcagccctgggcatatgcgagaggcggctgaacggcggcagcagctgcagttggag

SEQ ID NO: 239447 - DNA, 90 bp, Homo sapiens
ccttggagacctacctgatggggacgccaggtgtgcaggggcgtggcgcgtaggtaaggggcctggataccaagaagtgactgctcatct

SEQ ID NO: 239448 - DNA, 100 bp, Homo sapiens
gaagctggggtctggaccttgtggagctcatgaaggacttcagcatttgggtccttttggcaacatccccaacatcgtggcagagttgactggagacaac

SEQ ID NO: 239449 - DNA, 82 bp, Homo sapiens
gccactttgcatcccacgccggaggaggcattaacgagaccgggcacaacttcctgaatggaccatgactcccaccaaagat

SEQ ID NO: 239450 - DNA, 82 bp, Homo sapiens
gcgcagtgaagtggtgagcctttttgtcactggtctggcccctctttgtgaaaatatgcccagcggcaaggccaacaagccg

SEQ ID NO: 239451 - DNA, 100 bp, Homo sapiens
cggctgcgctgttcgtgctgctgggattcgcgctgctgggcacccacggagcctccggggctggccagctgcgggccgtccagcggctgtgccacttcta

SEQ ID NO: 239452 - DNA, 100 bp, Homo sapiens
ctgtgaagatactcaatcgacagaagattcggagccttgatgtggtcctgaggcacgtgaatggccaggatcagattgtgcccggcctgtacgcctgtgg

SEQ ID NO: 239453 - DNA, 100 bp, Homo sapiens
gcactttgggtttcatttgtaaaggagccggagccccagatgggaatgatgaacaaccccaatccttatggttcaccatatactcagaatcctggacagc

SEQ ID NO: 239454 - DNA, 75 bp, Homo sapiens
tcttcgggggcgtccttatgaccctatacacagaatgggattttacatatgctggacagaaataagagaatcaag

SEQ ID NO: 239455 - DNA, 83 bp, Homo sapiens
ctcaaccgcttcgtgcaactctccgggcggccgcacctgccagtgtggggtgatcagccccagatttgacgtgcaactcaaag

SEQ ID NO: 239456 - DNA, 82 bp, Homo sapiens
gttaaagatgagcgggtggcagcgacagagccaaaatcagagctggaacctgaggagagagaaaaatggagtgctggcatac

SEQ ID NO: 239457 - DNA, 50 bp, Homo sapiens
atgaaggtggaggcagcgcggctctcaggccctcgggaccaaggatcacg

SEQ ID NO: 239458 - DNA, 87 bp, Homo sapiens
cgccgctcatccccctctcccagcaggttaatttggagtggcccctggagtcagtttcctacaccatccgaggccccacccagcacg

SEQ ID NO: 239459 - DNA, 100 bp, Homo sapiens
gaaaattttatgaagaaaatgggtttctagtaatcaaaaatcttgtacctgatgccgatattcaacgctttcgcttctcacctggggcgggtgggttctg

SEQ ID NO: 239460 - DNA, 98 bp, Homo sapiens
cggaaccagaagcagattgccaacattgaccgtattacaaaattcaaacatctacttctttgggaacatcacagatttcacagaaaataattcctctc

SEQ ID NO: 239461 - DNA, 74 bp, Homo sapiens
gagctgctgaagcccaccgaattaggacgagattgaggagctgcgggccgagatgctggagatgcgggacgtct

SEQ ID NO: 239462 - DNA, 100 bp, Homo sapiens
tacacgaccttcagcaagaggaagacgggcatcatgaagaaggtaagcaaggcagctcgccaggagaagcggtttcaggactataatgagaggtgcactt

SEQ ID NO: 239463 - DNA, 97 bp, Homo sapiens
tttctggacttccagctgggcctgacagagaaggctcactcaaggatcagttggctttagcaattgcttcttctcagcctgttgataaccatgttag

SEQ ID NO: 239464 - DNA, 75 bp, Homo sapiens
ctgagcttggcctcggcgtcctcggccacagcaccacaagttattgttccagattctaagttgatacagcatatg

SEQ ID NO: 239465 - DNA, 58 bp, Homo sapiens
caaagactgaaatatgaagtggaggcattaaagttctttaaggaaaaacagtagtgct

SEQ ID NO: 239466 - DNA, 100 bp, Homo sapiens
gaggatggaagagctgcacaaccaagaggtgcaaaaacgaaagcaactggagctcaggccctcctcagtggggacacacagacagacgccacctctttct

SEQ ID NO: 239467 - DNA, 98 bp, Homo sapiens
gcaggaggaagtgcgccgcgcgggacccggaggaccgtatccccagcccactgggctacgcaggcatctctcgggacaactggcacaagcgccgcaaa

SEQ ID NO: 239468 - DNA, 75 bp, Homo sapiens
tccttccccctcggaaaatggttcccactgccgggcgagggaaatgaggcaagttatcctttggaaatgtgctca

SEQ ID NO: 239469 - DNA, 100 bp, Homo sapiens
cggcatcacgggatcgaaccccgctcccagcggccgcgattcggggaggtaggcgctgggccgaggaggtggagccatcgaagcccccacccacaggctg

SEQ ID NO: 239470 - DNA, 74 bp, Homo sapiens
agggatcccactgattctactttacggtcaaaatgcagatcttcgtgaaaacccttaccggcaagaccatcacc

SEQ ID NO: 239471 - DNA, 76 bp, Homo sapiens
tgcagctgtagtagtttacgatatcacaagcattgaagttgatatcgatgtggagcacggagggaaaagaagccgc

SEQ ID NO: 239472 - DNA, 100 bp, Homo sapiens
aggacatcactttagatgatgcaatggctgccatccggaagaaactggtgattgttggtgatggagcctgtggaaagacatgcttgctcatagtcttcag

SEQ ID NO: 239473 - DNA, 100 bp, Homo sapiens
acctgaaacggtgcacgtactacgagacgtgtgctacatacgggctgaatgtggagagggtcttccaggacgcatgatgccttcttctgtagagtgggcg

SEQ ID NO: 239474 - DNA, 88 bp, Homo sapiens
atgagaatgctggcggaggacgagctccgggatgctgtactccttgtctttgcaaacaaacagtactatggactacaaattttggaaa

SEQ ID NO: 239475 - DNA, 101 bp, Homo sapiens
cgagacgacgggaagttttatttgcagctcggagcctgtggcggatggtgggactctccggccctgtgcagttgattcgcctttgccagtctcatctcgtg

SEQ ID NO: 239476 - DNA, 102 bp, Homo sapiens
gctgttcctattcggccatctttgctcctccctgcaactaactccattcttaattgtacaagccagctgccatgttgtgagcacataccacatagctccatg

SEQ ID NO: 239477 - DNA, 83 bp, Homo sapiens
tggagctgaaggccaggttttgcagtggtctgagttaattggccttggtcctcacagctccaaaaagaaacaggatctcgata

SEQ ID NO: 239478 - DNA, 51 bp, Homo sapiens
gggctcaagcgatcctcttgcctcagcctcccaaagtgctaggattacagg

SEQ ID NO: 239479 - DNA, 100 bp, Homo sapiens
tttttggtttggttttggaactgactccgagggttgggagagcgcgttggtggcgacggccgagtcaggtaaaaagaacgtattctcatggtacttacag

SEQ ID NO: 239480 - DNA, 50 bp, Homo sapiens
ctttactggtgttccagccctaaggtggtcctggctctgccatatgacac

SEQ ID NO: 239481 - DNA, 75 bp, Homo sapiens
cacacatctctctggaggagccccttggggccagcacccaggttgtcccaccagcctcctgacaaggtgatccgg

SEQ ID NO: 239482 - DNA, 73 bp, Homo sapiens
aatttttacaccactgggatgtaacagagataacaacgaacttgatgcaagtgataggtttgccaaggtcaga

SEQ ID NO: 239483 - DNA, 90 bp, Homo sapiens
ctgttgactgtaaaggtgctggtaagatttcttctgttgaaatggatgcagtcagaactgaatgttgaagaagtggtaaatgacaggagc

SEQ ID NO: 239484 - DNA, 74 bp, Homo sapiens
agacattacgagaaatgttagagaagaaagacagctttgtggaagagggctcccagaatggggaccagagatgg

SEQ ID NO: 239485 - DNA, 75 bp, Homo sapiens
ccattgcaaaccttattaatctcagggaactggatgtcagcaagaatggtagcccacctgggaggaattttccag

SEQ ID NO: 239486 - DNA, 96 bp, Homo sapiens
tgtacctgtaggagtggccaaaaaaggagaaattgttgttataaggcagaagctcctcctggggtagagacagatcttattgatgttggattcaca

SEQ ID NO: 239487 - DNA, 80 bp, Homo sapiens
agtggagctgctgaatcctgcccgcgtgaaccacatgcccagcacgggctggagcattggatttgctaaaggagcttaag

SEQ ID NO: 239488 - DNA, 100 bp, Homo sapiens
cagcgctgggtggtactgccactgcacagcgccctgtctgtggccgaccaggacaagctctgggagacgtggaggcctctgaagctgaagaccacttctt

SEQ ID NO: 239489 - DNA, 98 bp, Homo sapiens
acggtctgcccacccaacgcgaagacggtaacccgtgtgactttgactgggggcgccctcgcgcgacgtcctgctggtctctgccatcatcaccgtca

SEQ ID NO: 239490 - DNA, 100 bp, Homo sapiens
atgcttctttgtgaaattttttggaacagaagatcagttagcatacgtatcaaggacagtaactaccatggctcccgaagttttgccaaaacctcggatg

SEQ ID NO: 239491 - DNA, 75 bp, Homo sapiens
gactcacctacgccaacccgcagggctgccaccgcgcagcccagcctcgaaatgcagaacgacgccggcgagttc

SEQ ID NO: 239492 - DNA, 88 bp, Homo sapiens
cgccgcgcagaggcgggcgacgcggtagtggcgaagccgggagtgtgggcgcggctgggccgcagcctgggattccccagggaccccc

SEQ ID NO: 239493 - DNA, 80 bp, Homo sapiens
gctgcctcagttcttagcgcaggatggatagaatgacagaagatgctcttcgcttgaatctgttgaagcggagcttggac

SEQ ID NO: 239494 - DNA, 74 bp, Homo sapiens
ctccatcgtggaacagagactagagagctccttaataagcatttatagtcagtttttggcagcaatagaatcac

SEQ ID NO: 239495 - DNA, 100 bp, Homo sapiens
cttggagttcgcctcagacgcggtggagccgccggagtctgagaagggcaagaatatcacggcatgggcatgagtagcttgaaactgctgaagtatgtcc

SEQ ID NO: 239496 - DNA, 100 bp, Homo sapiens
gggggatcaagagatggagtaattacctgtcaaccaggggactccgaagaaaagagcaattgggtgccacgccgaggggatcagggtcccaagaccattg

SEQ ID NO: 239497 - DNA, 90 bp, Homo sapiens
cgccaaggtgttcggtccttccgaggaagctaaggccgcgttggggtgagaccctcacttcatccgttttttgctccactcaagcctgtt

SEQ ID NO: 239498 - DNA, 100 bp, Homo sapiens
ctgctggcagctcgtgcaattgttgccattgaaaaccctgctgatgtcagtgttatatcctccaggaatactggccagaagcccaccacgggcctgttgg

SEQ ID NO: 239499 - DNA, 74 bp, Homo sapiens
tggatccgttacaagcgtcagggagctgcgcgcttccaccgggccccaaagcccaagaggaaggtggaggtctg

SEQ ID NO: 239500 - DNA, 75 bp, Homo sapiens
gccaatctgaaaggcaccctgcagcccatgcagaatgccaccaagtatggcaacatgacagaggaccatgtgatg

SEQ ID NO: 239501 - DNA, 75 bp, Homo sapiens
aagaaggccttgactacggaggggttgccagatagggtctctctctctgccacccaggccagagtgcagttgacg

SEQ ID NO: 239502 - DNA, 100 bp, Homo sapiens
caaagccgaatccgaacttgaattctgtgcggcggattgcagagctggtggaacctaacttcttgtggaacaagtgttgccagctcagaaggcagtgagg

SEQ ID NO: 239503 - DNA, 100 bp, Homo sapiens
ccgccatcttgtgggagcaaaaccaacgcctggctcggagcagcagcctctgagcataatggcagaacctgtttctccactgaagcactttgtgctggct

SEQ ID NO: 239504 - DNA, 75 bp, Homo sapiens
gaacagtttggccccgtttgtaaaaggccgcggcaggcgaagagagaagaggcctgcactgcccaaagtcttgga

SEQ ID NO: 239505 - DNA, 87 bp, Homo sapiens
actgtaaaaaacccagctgaagaccactttagaaactcaattaaataaacaggggtcacatgacgacagaagccaagagggctgcaa

SEQ ID NO: 239506 - DNA, 99 bp, Homo sapiens
cctttccaccagttagggcaagtccgccaaggtgagagttacgtgtgtgcatccaatgaaccatttcgtaaagtcgattacaccaaaaatattaatcca

SEQ ID NO: 239507 - DNA, 100 bp, Homo sapiens
gtctgcctttaaccgcagcatccatcgggtcttccaggataagcagattgaggacctgaaggagaagaaggagaaggtggaggagaaggcaagccggaaa

SEQ ID NO: 239508 - DNA, 100 bp, Homo sapiens
agaggctctgcaccctggatggaaagcaggtcttgagagctgatgacaataacatgggcaatggctgctctcagaagctggcgactgctaacctcctccg

SEQ ID NO: 239509 - DNA, 83 bp, Homo sapiens
aggggagactctgctgacacccatcacccacatctcacaggtttccaggcctgaggtgcccgccctggccccaggagaatgaa

SEQ ID NO: 239510 - DNA, 100 bp, Homo sapiens
ttgagggaaaagctgcacaggactcgtgtcttgaaatgtctaagacgcatgtcagaaatgcaggtatcttggagatggccgcttccatctggagtctgtc

SEQ ID NO: 239511 - DNA, 82 bp, Homo sapiens
gcagcagcagaaaatcattgccctgcagagtggtttacaagctggtgtcagctgtgatgcatgtttaaaaggaaattttcga

SEQ ID NO: 239512 - DNA, 76 bp, Homo sapiens
ctggcctgccgccctagccggcccaaggatctcattttgcccaacggtggtactccagcaggtacttcaagtccag

SEQ ID NO: 239513 - DNA, 98 bp, Homo sapiens
cctgcagtttgcaatatgactttggaggaattctcggctggagagcagaagaccgaaaggttgtgaccgagattcccgacgagagagactgaggggaa

SEQ ID NO: 239514 - DNA, 100 bp, Homo sapiens
gaaacagactcaaaaaggattttggcttgctcaaggtcacacagcttgtatgaggcagtgctgcaatttaaagccagagatggggtttcgccatgttgcc

SEQ ID NO: 239515 - DNA, 87 bp, Homo sapiens
gctgtcgccgaccgcccgcacatccgtcgggtcacagatgtgacattgatgtgtccactgaagccatgtatgctgcaaccagacgag

SEQ ID NO: 239516 - DNA, 50 bp, Homo sapiens
gagagccttgggacggcagggatggcgagaaacgtctgtctgctctggat

SEQ ID NO: 239517 - DNA, 82 bp, Homo sapiens
gtattaaagcagtgccattccagaatgccatcttgaatgtaaaagaacttggaggctgtgtttgatgtggacaagaagaaag

SEQ ID NO: 239518 - DNA, 75 bp, Homo sapiens
ccgcgccccgccgctgagccgtcgcggagccgcgcagccctcggagcacggtttcaagtgccccatttgctccaa

SEQ ID NO: 239519 - DNA, 100 bp, Homo sapiens
ctgaggggcggaggcgggagaggcgagctcgcgatgagtggtctcggcaggctcttcgggaaggcccagtgtgccatcataatgtttgatgtaacatcga

SEQ ID NO: 239520 - DNA, 98 bp, Homo sapiens
acagtttatcatgaccgtgttcaggcaggaaaacgtggatgattactacgacaccggcgaggaacttggcagtgttaaaagatcactgaagttggatg

SEQ ID NO: 239521 - DNA, 100 bp, Homo sapiens
acgccgcgcacgagttcaccgtgtaccgcatgcagcagtacgacctgcagggccagccctacgaactgcaaggtgtggaatatttctggcttctagtcca

SEQ ID NO: 239522 - DNA, 100 bp, Homo sapiens
cctgcccggcctggcgcccgtcaacttctgcgacgaagaaaaaaagagcgacgagtgcaaggcagcagaagatgtcgttttcattggacctgacacacat

SEQ ID NO: 239523 - DNA, 100 bp, Homo sapiens
cccctggcggagacggcggcaggagctgggcccagagacgcggggacgggccgtgggcccccggaacgaggtctcgctctcgaagcagacattcccgtaa

SEQ ID NO: 239524 - DNA, 101 bp, Homo sapiens
ttattaatgcaatttatgaacctacggaagaagaatgtgaatggaaaccagatgaagaagatgagatttcggttgcaatgaatgtgtatgagttatcatca

SEQ ID NO: 239525 - DNA, 75 bp, Homo sapiens
ctaccccctggacctggtcagagcgcggatggccgtaaccccgaaggaaataattatatccagatcgagagacag

SEQ ID NO: 239526 - DNA, 75 bp, Homo sapiens
atccgaccaccgaggctggagggggagaacacccaggtctataagggagaattccaactacctgactttcttaaa

SEQ ID NO: 239527 - DNA, 82 bp, Homo sapiens
tgagtggttgtgtggtcgcgtctcggaaaccggtagcgcttgcagcatggtgcagagagagctagcagctgttattgctttg

SEQ ID NO: 239528 - DNA, 74 bp, Homo sapiens
tgctctgaaccaggacctggacccggacccaaagtgccatgtctttaatgaagaggagcaggacttggatggtg

SEQ ID NO: 239529 - DNA, 116 bp, Homo sapiens
atgaggctctgcggctggtccaggccttccagtacacagacgagcatggggaaggtgtcatggagaaactccagctgggcccagagattctgcagcgggaaaatccaaggcttatt

SEQ ID NO: 239530 - DNA, 100 bp, Homo sapiens
gtgcgatgtgcggaagggcacctccacccgcatcctgaggttagcattacacttctcccagtggagcccatgacttctgatcaggacgctaaggttgtgg

SEQ ID NO: 239531 - DNA, 100 bp, Homo sapiens
cgctggaccagctcaagcagttcaccaccgtggtggccgacacgggcgacttccacggactggaaggatcaccagcacatatgcggccagtcagcagctg

SEQ ID NO: 239532 - DNA, 101 bp, Homo sapiens
gaagaagaagaaacgggccgcgaaccgcagtatcatgctggccaagaagatcatcattaaggacggaggcacgtcagagcaccataacatggtgtgggaag

SEQ ID NO: 239533 - DNA, 86 bp, Homo sapiens
taaggttccaggtagaatgggagtatatactttgaagttaattggccttggtcctcacagctccaaaaagaaacaggatctcgata

SEQ ID NO: 239534 - DNA, 82 bp, Homo sapiens
gcctaaagtaccttcataagttcttcaatatcccatttttgcagcttcaggttcctgcacttggccatcatccatgaagaaa

SEQ ID NO: 239535 - DNA, 98 bp, Homo sapiens
gatggatagctactccggaccttacggggacatgcgacatatgaagatccatgagaaggaccctaacagtgccacagccacagcccctccatctcctc

SEQ ID NO: 239536 - DNA, 100 bp, Homo sapiens
accgcctgggaactccgccatgtcatccacttcgcccaacctccagatcgagctgggagcattagtacccttgattctttagactttgcaagatattcag

SEQ ID NO: 239537 - DNA, 97 bp, Homo sapiens
accatctatagagaagaccgcccaagtctgcccttgtttgaggccttcacagcatgtggttttgtgcaggtctcctaaaaacccagaacagaagatc

SEQ ID NO: 239538 - DNA, 75 bp, Homo sapiens
tgtccgagaaattataggtgatgaactagtccagatgactgtaattgcaaagaagagcttgctgtgatatctgat

SEQ ID NO: 239539 - DNA, 75 bp, Homo sapiens
ctaaacttcgccaactccgctgcctttgccgccaccatgcccaaaacggccaagatgctgaattatcagggacac

SEQ ID NO: 239540 - DNA, 106 bp, Homo sapiens
cggaaatgtccgaaggccgcagtacttgaccctgtattttgggagtcgaacggagcagaagagcactgatcgtactggctcactcagagaggacgtccttcaacta

SEQ ID NO: 239541 - DNA, 98 bp, Homo sapiens
agatgaggccggagaaaactattccaagagtggtgaaaggacataggaaggagtctggggaactgtactacagcattgaaaaagaaggccaaagaaag

SEQ ID NO: 239542 - DNA, 100 bp, Homo sapiens
gctaaagcagcgtgcgttcagccctggggtttcaagtgccccatttgctccaagtctgtggcttctgacgagatggaaatgcactttataatgtgtttga

SEQ ID NO: 239543 - DNA, 100 bp, Homo sapiens
cggcggatctggacacccagcggtctgacatcgcgacgctgctcaaaacctcgctccggaaaggggacacctgtctgaagatgatgagaaactgaaaaag

SEQ ID NO: 239544 - DNA, 75 bp, Homo sapiens
ccagagcgtgaagatcaagatcgctacgagttccagggagctctgtcctggtgaccgtgcccgggttatgacgac

SEQ ID NO: 239545 - DNA, 83 bp, Homo sapiens
gtatctgatcaagccaacaacagtgacggaatgcctccatacatgtgacagttaaaggatttgaacctttaattcagtttgcc

SEQ ID NO: 239546 - DNA, 100 bp, Homo sapiens
gcagcggcacccccggccccgtagggtccccggcgccaggccacccggccgtcagcagcatgcagggcgcatattaaatttcctattgactacccctatt

SEQ ID NO: 239547 - DNA, 100 bp, Homo sapiens
agaagattgagctgctgatgtcagttaactctgagaagtcgtcctcttcagaaaggagtacaagcgcaagctagccagagtttccctggtgcgcaaagaa

SEQ ID NO: 239548 - DNA, 75 bp, Homo sapiens
gcggcttctggttctcacttgtcgatggagtttcactcttgtctcccaggctggagtacaatggcatgatctcag

SEQ ID NO: 239549 - DNA, 100 bp, Homo sapiens
gggccgggccatggccgcctcggagcggctgtacgagttgtggctgctctactacgcgcagcgtgtccggagcggtgactggaaggggtacacaggcaag

SEQ ID NO: 239550 - DNA, 74 bp, Homo sapiens
acccaatggacagcatgcctcaccaagtcacatgacaagcacttctcaataggtttggcatggacaagatctat

SEQ ID NO: 239551 - DNA, 97 bp, Homo sapiens
ggtccatcttccggctgtgaaactgcggaggcacgtggagatgtaccaatgggtagaaactgaggagtccaggacctacagagacaaccgaaggaga

SEQ ID NO: 239552 - DNA, 100 bp, Homo sapiens
acccagtgacttgaaggagcctccccagcctcctaggaatgaatctgaagtctgctgcagtaaaacacagaaggctttaaaatgttttcttgcataaaat

SEQ ID NO: 239553 - DNA, 85 bp, Homo sapiens
ccaactggtccctcagtcacacatgccagagattgctcaggaagcaatggagagtcacctaaggtcctgcgagtacaagggtcga

SEQ ID NO: 239554 - DNA, 74 bp, Homo sapiens
gttttaagaatggctgttcaacacttgagatctttaaaagaccttagctggatctccaaaatacaagtgaatca

SEQ ID NO: 239555 - DNA, 49 bp, Homo sapiens
tgttgttggaggaacactttccagttttaagacaattatctcctatatt

SEQ ID NO: 239556 - DNA, 113 bp, Homo sapiens
cctgctgcgggggggagagccactgacgccgggaccgggaccgccgccgccgccgccaccatggattggtagcttatgtcgatcttgatgaaagagcaattgatgctctcagg

SEQ ID NO: 239557 - DNA, 100 bp, Homo sapiens
agttgggctatcaatggaagaaaagttgtatgaatcaggttactataacaacagtaccaaggtggctgtgaaaaccctgaagccaggaactatgtctgtg

SEQ ID NO: 239558 - DNA, 75 bp, Homo sapiens
cagacagacagctggcaagaggcagcctgggggccacagctgcttcactactcccgagcccggagaggacccacg

SEQ ID NO: 239559 - DNA, 100 bp, Homo sapiens
ccccgaagggaagaagctgccacgcaccttctgccagctgatcctggaccccatcttcaaggcatttgttgctatcggggactacaatggccacgtcggt

SEQ ID NO: 239560 - DNA, 99 bp, Homo sapiens
gagttttctgtcctccttgtttgcacggagcagcaaacgcagagacaaaagaaacgggccccgactgtttccatagggctgcctgttgtctgcatccga

SEQ ID NO: 239561 - DNA, 109 bp, Homo sapiens
ctccctgagttctccttgcccagctcggcctcagtctccttcagcctgcatacatagagacgtgaagccagaaaatatcctcatcacgaaacattccgtgattaagctt

SEQ ID NO: 239562 - DNA, 83 bp, Homo sapiens
tggatatggtgcctatgatgcatttaagcatgcagtctcgtaatggaactgctggtccatctgaataaacgtataaaaagccg

SEQ ID NO: 239563 - DNA, 51 bp, Homo sapiens
ttccagagaagcctgtgaacaaatgtaaatgagcaaagatggatcaggaag

SEQ ID NO: 239564 - DNA, 98 bp, Homo sapiens
gggtggtgaccatcgaaaggagcaagagcaagatcaccgtgacatccgaggtgcctttctccaaaagacatatctgaagagatggattaagaatgctt

SEQ ID NO: 239565 - DNA, 73 bp, Homo sapiens
aacctaattctgcccttgatgtcacaggatctcttgaagcttttatcaaaatacaactcaaacctagctactc

SEQ ID NO: 239566 - DNA, 83 bp, Homo sapiens
caccttcacgatgtttcccttggtcaaaagcgcactaaatcgtctccaagctgttggagacacagttgcagaagatgaagtgg

SEQ ID NO: 239567 - DNA, 75 bp, Homo sapiens
gaaagacctcagagtgttctcaagatgaggatgacatcaatgatgtgacttctatggcaggggtcaaccttaatg

SEQ ID NO: 239568 - DNA, 101 bp, Homo sapiens
gctttgggaagtatgttaatttcatggtacatgagtggctatcatactggctattatatggcagcacagtcagtgctgatttcattatttgaactcaatac

SEQ ID NO: 239569 - DNA, 101 bp, Homo sapiens
cttcgttagcaccgtgggcatcgacttcaaggtgaagacagtctaccgtcacgagaagcgggtgaaactgcagatctggtcttggacagtaaagcaccaaa

SEQ ID NO: 239570 - DNA, 100 bp, Homo sapiens
acctatgatctcaggtcctcagaccaaccagcccaaggaacatcttgccaatttcaaatcggaatggcttcagttctgtgcaggccacgcagttacagac

SEQ ID NO: 239571 - DNA, 100 bp, Homo sapiens
ctctgagactggagtgagagggtcttctgaacatacatatgatagttgagaaagacacatattctgatcatgaagaaataaacacaagttaaatatgact

SEQ ID NO: 239572 - DNA, 46 bp, Homo sapiens
gatactgatgacattgaccacagagagtgatggtgtgcaacaaaca

SEQ ID NO: 239573 - DNA, 100 bp, Homo sapiens
cctgaatgggggcggcgtgcccgccggggggctagtggccacgctgcagagcctcgccagtttcaagcgcccggtagtgatcctgggacccgtggccgac

SEQ ID NO: 239574 - DNA, 50 bp, Homo sapiens
tgcagccaccgcggcccccgcgggctggatgacaccaaaatcctcccagg

SEQ ID NO: 239575 - DNA, 74 bp, Homo sapiens
ccactggtcaaccctcagctccccatgagaaatgttcctctgaacaacagggagaatatctctgatcccacctc

SEQ ID NO: 239576 - DNA, 75 bp, Homo sapiens
tcatggccaagggcagcctgctggagctgctccgcggggaggaactggacttgcggctcattcggacaaaggggg

SEQ ID NO: 239577 - DNA, 90 bp, Homo sapiens
ctgggttacaagcagcaagtgcgcggttggggccactgcgaggccgttttagcaccacattaaataccagcatttgctgaagaagaaata

SEQ ID NO: 239578 - DNA, 98 bp, Homo sapiens
aagatctcatgtccatcatggaaatgcaggtttgtctgccattgtggatttcctgggcagagtggagtgaaggtgccaaaagccaagaagacactgag

SEQ ID NO: 239579 - DNA, 105 bp, Homo sapiens
agcagctgcctgccagaatggaagcatacagatctgggaccgaaatttgactgcaatgaatcgctccctggctaatgtgattcttggaggctatggcaccacttc

SEQ ID NO: 239580 - DNA, 130 bp, Homo sapiens
tcaagatggcggccaatgtgggatcgatgtttcaatattggaagcgctttgatttacagcagctgcaggaacccagctatttagtggtcgaagtgactttagaatcactaccttgaaattccatccaaaa

SEQ ID NO: 239581 - DNA, 112 bp, Homo sapiens
ctttcttctggcatcattaacggaccttttaccatgaatagttctactccttctacaggtgtgtatggttatcaatactctggctgaccatcatcatcgtgggactgacttt

SEQ ID NO: 239582 - DNA, 100 bp, Homo sapiens
tgaagacagcagcgctaagagtgtttgatcttcctctgacttggtactattctctctcccagtcacgtgaactggaaatttcagtttattggcgtgattg

SEQ ID NO: 239583 - DNA, 83 bp, Homo sapiens
cgcaggagtcgggcaccatcccaaagaagcgatctcttacctcagctagaagctccgagttctcttactcccagcagtgaact

SEQ ID NO: 239584 - DNA, 100 bp, Homo sapiens
gcatttttctgaagttgttcattaagacttcccagcattcctacagatataaatagggcgccatgttttggaagtttgacctgcacacaagctcgcacct

SEQ ID NO: 239585 - DNA, 100 bp, Homo sapiens
tctccaggatgtctacaaaattggtggtaatacgaggaaatagtatcatcatgttagaagccttggaacgagtataaataatggctgttcagcagagaaa

SEQ ID NO: 239586 - DNA, 96 bp, Homo sapiens
acatggccaacatcgcggtgcagcgaatcaagcgggagttcaaggaggtgctgaagagcgaggagggatgaattgtaaaagcaacatcagcttgac

SEQ ID NO: 239587 - DNA, 75 bp, Homo sapiens
tgtcatttctaagattatcatcttcagcagtggtggtgaagttaaatgtgaaattgtctcctaaccctctagttt

SEQ ID NO: 239588 - DNA, 100 bp, Homo sapiens
attgactcctgggcccaactgtgaccgatttaaactgcacataccatatgctggagagacattaaagtgttgacatcatggacatatgtgagtccatcct

SEQ ID NO: 239589 - DNA, 100 bp, Homo sapiens
caggcctcctgtgggacgccagtcaccagcaggagcagccaaccagcagcagccatcatggaggacctgaaggagaagaaggagaaggtggaggagaagg

SEQ ID NO: 239590 - DNA, 95 bp, Homo sapiens
aggcagccgcggatcgccgcgctcagcgacaaacaagtgctggagaatctggtaaaagcaccattgtgaagcagatgaggatcctgcatgttaat

SEQ ID NO: 239591 - DNA, 75 bp, Homo sapiens
tgcacgaggtctatgagaacaagacggacgtcatcctgatcttggaactgtcagagagcttcaaactcgactaca

SEQ ID NO: 239592 - DNA, 100 bp, Homo sapiens
ctacagcaccacgtaggtactgtgtgaggcccaacagcggaatcatcgatgcaggggcctcaattaatgtatctggagctaatttcgttactcgaaaaat

SEQ ID NO: 239593 - DNA, 98 bp, Homo sapiens
tttaaccgaggcacggacaacatcaccgtgaggcagggggacacagccatcctcaggcaaaatccatgtttggtgaccagagctgtatatattgatat

SEQ ID NO: 239594 - DNA, 87 bp, Homo sapiens
atcactgtataaccacccagtaccaaaggcaaatactcctgtaaatttgagtgtggaaaatatgagagccacacccgtgttcacaca

SEQ ID NO: 239595 - DNA, 100 bp, Homo sapiens
cctcaaggttgaagcagaagaataaggagaaggataagtcgaaggggaaggcgcctgaagaggacgaagggttccaaaaggtcccaggtgtcctctccgt

SEQ ID NO: 239596 - DNA, 51 bp, Homo sapiens
gcctttgccgccaccatgcccaaaacgccggatcgagctgggagatgtgac

SEQ ID NO: 239597 - DNA, 96 bp, Homo sapiens
gaaggtgatgacttcaattgggagcaagtgaacaccttgactaaaccgacttctgatccatggatgccatcaggagttcatgatcaagtgttgccc

SEQ ID NO: 239598 - DNA, 76 bp, Homo sapiens
gcgggaggtgttcgagaacgaccccgagacgacccctcctcctgtagagagtggtgctgccctctcgggatgtacc

SEQ ID NO: 239599 - DNA, 84 bp, Homo sapiens
tgggagacaggaattgagagtcacagaggaaggacagtggagtctggcatcttattgacaatgcagatcttcgtgaagactctg

SEQ ID NO: 239600 - DNA, 75 bp, Homo sapiens
ctcttccaggcatggaagctacatataacaccagcggcagtcagacgaggtgacagagctgaatgaacctctctc

SEQ ID NO: 239601 - DNA, 82 bp, Homo sapiens
ctttcggcttctgagacggcggcagcagcggcattcagtgagttattctccccacctcagaagtaccagcttttggtgtatc

SEQ ID NO: 239602 - DNA, 75 bp, Homo sapiens
ggaacgctcacggactgtgtgtctgaaccaatcagagtccttgtgactggagcagctggtcaaattgcatattca

SEQ ID NO: 239603 - DNA, 100 bp, Homo sapiens
cttgagccacgtgcatgaaccaaacccacttcgttcaagacaggtgtttaagctttacaccccgccactcctgagcaccgcacaccggcttcctcccagt

SEQ ID NO: 239604 - DNA, 98 bp, Homo sapiens
aaaaatcttaaccttcaaccatctggggaaaaggcaaaaatcccatctaccgcaactctcagttcgagagtaaaggaagatgttaccgagtacttcag

SEQ ID NO: 239605 - DNA, 82 bp, Homo sapiens
ctcggctttgagatcttcctcagctccttccaggttgaagaagaggatgaacttgaatctggagaccaagaggatgaggatg

SEQ ID NO: 239606 - DNA, 76 bp, Homo sapiens
caatgatggggctcttccccagaactacaggggctctggccatcttcgtgagtgtgaacatggctacgcctcttca

SEQ ID NO: 239607 - DNA, 89 bp, Homo sapiens
agaaactagagcaaataaccgttttgaaattctgcaagtgtccactgcttgggaaagtgtgggaagctgacttggaagcttgtcgattg

SEQ ID NO: 239608 - DNA, 82 bp, Homo sapiens
tggaattggcaacatctctgagagaagctggcagggcggagatgctggaccacgccgtcctgcttcaggtgatcaaagaaca

SEQ ID NO: 239609 - DNA, 97 bp, Homo sapiens
ctacacatcttgaaagagaagctcttcctgtgagatacgtaggtaacctttccagagatgtgacagaagtccttatacttcagttgttcagtcagat

SEQ ID NO: 239610 - DNA, 75 bp, Homo sapiens
cgctcatccgcttccacgtcaaggcccgtgggagtcagcatgccgcgtggctgggccgcccccttgctcctgctg

SEQ ID NO: 239611 - DNA, 82 bp, Homo sapiens
gtggggcctctacatgtccctggttaatgtgggccatgtctgggagtgcatccgccccaacccttttccccctcgtctcctg

SEQ ID NO: 239612 - DNA, 83 bp, Homo sapiens
gctccatggcctctcctggactggctgcgtgaccccgacggctgcttctgggtccctgtgcgttttattgcgacctgccggtg

SEQ ID NO: 239613 - DNA, 83 bp, Homo sapiens
gcggccggggcctggggctgcctgccgggcggccgggcgcggcgagcccagaaaatgctgctcaaattccagtggctactcca

SEQ ID NO: 239614 - DNA, 87 bp, Homo sapiens
agatggcggatgccctgcagtacctgcagaaggtctctggagacatcttcagcagaactgataaatttcaaacggaagagagtggca

SEQ ID NO: 239615 - DNA, 80 bp, Homo sapiens
gtcccgaagccccctgcaggaactctacaacccaatccaggttaaaactctatgctggtcattcccttcaggatttggca

SEQ ID NO: 239616 - DNA, 123 bp, Homo sapiens
cgggcccacatcttccggccaacttccattgaacttcccagcactcgaaagggaccgaaatggagagcaaagtatgccgagattttgctgtcctggaggaccacaccctggctcacagcctgc

SEQ ID NO: 239617 - DNA, 98 bp, Homo sapiens
ttcaacactatccgatgtcaagatctgagtttgggagcagcagcaacaccacatccttcggcacgctcgcgagtcagaatgcccccactttcggatca

SEQ ID NO: 239618 - DNA, 104 bp, Homo sapiens
gagcagagcggagggagccccagacacggactcctcctattttgaggacttctccaacatctccatcttctcctcgtccgtggactccctgtcggacatcgtgg

SEQ ID NO: 239619 - DNA, 90 bp, Homo sapiens
aaaatcttgtggacaaatccaggggaagtgaagtaagaactctgctagagaggaaatggctgcttcatcatcatcctcctcagctggtgg

SEQ ID NO: 239620 - DNA, 50 bp, Homo sapiens
cggaatttcaagatggatcggcacatgattaagtaccggtacatcccgtt

SEQ ID NO: 239621 - DNA, 75 bp, Homo sapiens
tgaggagcctctccgcccggcagccaccccatctgggaatgcgaccaagaccagtgcattcagagcaccaaattc

SEQ ID NO: 239622 - DNA, 90 bp, Homo sapiens
gttgacagcatcgatgctagacagacataggtgatttcaaatcggagaagtccaacggggagctaagtgaatctcctggagctggaaaag

SEQ ID NO: 239623 - DNA, 82 bp, Homo sapiens
attttttagtctaaatgatgggcagtcatggtcccagaaacgtcactatcaagaaggcaaagcagagagcagaggttcttca

SEQ ID NO: 239624 - DNA, 82 bp, Homo sapiens
tctactctgtcgctcttgtgccctagcaccccgagaaccgtcagtttgagccagatgcgacgagtagaacagcccctctatg

SEQ ID NO: 239625 - DNA, 76 bp, Homo sapiens
tgctaccagctctgtggcctcaatgcaaacccagcccttgctgacatctacacagagcacgcccatcaggtggtgg

SEQ ID NO: 239626 - DNA, 49 bp, Homo sapiens
actcagtctctaaaaagctaagggaggtatatcatacaaagagaatgca

SEQ ID NO: 239627 - DNA, 100 bp, Homo sapiens
ctggtcggcggagtagcaagtggccatggggagcctcagcggtctgcgcctggcagcagattcagaatggacagtttagaagaacctcagaaaaaagtct

SEQ ID NO: 239628 - DNA, 75 bp, Homo sapiens
aaggtgcagagaatatgatacagatgtattcaaatggatcttcaaaggctaggcagctggaagagaaagaccgag

SEQ ID NO: 239629 - DNA, 90 bp, Homo sapiens
gtgccatattccaatggctgagccgttttgccccaaaacgagagagttggtagctggcagtgttgtgatggcttttgaagaagtatgccc

SEQ ID NO: 239630 - DNA, 98 bp, Homo sapiens
ggccatggcgcgaggagacgccccgcgggacaggttagcgtccccaaaatgaaacataagccaaccaggcaacagaagaaagtagcaaaaggctattc

SEQ ID NO: 239631 - DNA, 96 bp, Homo sapiens
cagctgcacctggagtaccggttctacaagcagctcagcgccacagtgcgaggacgacgggcagacgttcttcagcctagatgacgggaacaccaa

SEQ ID NO: 239632 - DNA, 98 bp, Homo sapiens
gatgttctgcaggacaattgcaccgctttagagcttccaggaggccaagcattatggcagaaattccaacagaatgggtttcctgaaacggatttgca

SEQ ID NO: 239633 - DNA, 71 bp, Homo sapiens
ggcggtgacagagtggagccatggctagagaggctggaaccgcatcatcgtggagaagcccttcgggaggg

SEQ ID NO: 239634 - DNA, 100 bp, Homo sapiens
atcgtgttgcaaaatgacagatcttctagaagaaggtattactgtgaaacccttgtggaagatgaagaagatctctatgactgtgtttatggggaagatg

SEQ ID NO: 239635 - DNA, 75 bp, Homo sapiens
attccaagtaactcttatttggaaatgattgaagccatccgcgaagcggtggtctacctggcacacacacacgat

SEQ ID NO: 239636 - DNA, 82 bp, Homo sapiens
cgctgccgggcaccgaggaccagctcaatgacagtgcctacaccaactaatgttacaattgaatcctataacatgaacccta

SEQ ID NO: 239637 - DNA, 75 bp, Homo sapiens
gtgcagtatgagctacatgtttgagtacccggagtatcagcttttggaaagaacaaacagtggatttgaagaatc

SEQ ID NO: 239638 - DNA, 100 bp, Homo sapiens
aggagagcatcgactggaccaagatcgagcccagcgtcaacttcctcaagtcgcccaaagaatctccgccacctccctactctcggctgtctcctcgcga

SEQ ID NO: 239639 - DNA, 75 bp, Homo sapiens
ggagtgaccagaggagggacacggctaatagctcgtcagcttgctaaaatccatgctattcatgcacacaatggc

SEQ ID NO: 239640 - DNA, 87 bp, Homo sapiens
cgccgcgggccggagccgagcagccgtcggcagggaagatgagaatgtgcctactgctcctgatcctccaagtcaacatttacgtgg

SEQ ID NO: 239641 - DNA, 75 bp, Homo sapiens
accgtcagtttgagccagatgaggacaagaattttgggcagatttgaatgccatgaacgtgtatgaaacaactga

SEQ ID NO: 239642 - DNA, 75 bp, Homo sapiens
gagaaagtatacagaattacagctggaaattcaggaggaagagtgtccaccaagagatgacttcagtgatgcaga

SEQ ID NO: 239643 - DNA, 98 bp, Homo sapiens
cgggtggctgcggcgcgggagccggcgtgggcggcggcaacggggcactgacctgggtgtcaggtcaattcagtgaagatatgatacccacagtgggc

SEQ ID NO: 239644 - DNA, 75 bp, Homo sapiens
gcaatatttaattcagcctttggaagttttttgtctgagaataaaggattagaaactaccaagaacaatgtagtt

SEQ ID NO: 239645 - DNA, 82 bp, Homo sapiens
caacattaccagctggccgatactctttgaatgtcacatacaagcagtggaatttttcatcagagataaatatgaaaagaag

SEQ ID NO: 239646 - DNA, 82 bp, Homo sapiens
cgcgcgccgcgtccggggccggctggtgcgcgagacgccgccgagaggttatgaagacagtatggagtttccagaccatagt

SEQ ID NO: 239647 - DNA, 82 bp, Homo sapiens
ggggctgaggcggccgcggggcccgagcgcagattcttcgctgctgctgccttaccgccgagaaccaccacccgccaggcgt

SEQ ID NO: 239648 - DNA, 100 bp, Homo sapiens
cagagagccttgggccagagttccaggggctctgggagtggctgccagccaagccctataccaagtcctgttttggggcgaaagccaaatgctagtcagt

SEQ ID NO: 239649 - DNA, 83 bp, Homo sapiens
gaaaaagagctgtttgaacaagggctggcatatcacacctgaaaaattttatgtggaagcttgtgatgatggagcagatgacg

SEQ ID NO: 239650 - DNA, 80 bp, Homo sapiens
caaggagggcatgatcaacctcgtcatgtcctacgcgcggacaaggcaaaatctcagcaagttcggacctctagtacaat

SEQ ID NO: 239651 - DNA, 100 bp, Homo sapiens
ttcttcgagtatttgtagaagggataccggtgaatgtacagataatgcatacatcgatattcagctacgaattgcttccttctcacagaactgtgacatt

SEQ ID NO: 239652 - DNA, 90 bp, Homo sapiens
aaattacagaagaacaaacagagactgcgaaacgatcctctcaatcaaaataaggttttttgcatgtctgacacccatgactccacctgg

SEQ ID NO: 239653 - DNA, 74 bp, Homo sapiens
gagaaactgtggagctttaccaaaaaggcctcgcacattcagttggacagggtactcttcatgagcagaagatg

SEQ ID NO: 239654 - DNA, 100 bp, Homo sapiens
gtcttccatgaagaacagcttcggcctaaagtaccttcataagttcttcaatatcccatttttgcagcttcaggattcttacagaagcagagattgatgc

SEQ ID NO: 239655 - DNA, 75 bp, Homo sapiens
actcggacacagaggacagcggcagcgacgagaacctggatcaggtgtagcccatcagtgttatcatggtttcat

SEQ ID NO: 239656 - DNA, 75 bp, Homo sapiens
agacgagggggcgtctgaggaggaagacctggaagacagatctgtgttgacatccctgcctgcgctggcggtccc

SEQ ID NO: 239657 - DNA, 96 bp, Homo sapiens
tccttctcctggagacgcaactcaagggacattggaggcaatgaaacagtgacactgcgccagtcgtttgtgcctgtgcgaccaggcccccgccag

SEQ ID NO: 239658 - DNA, 101 bp, Homo sapiens
gcgctccaagagcgacacgccgtacctcgcagaggccaggatctcctttaacctgggggcagacgcccactattgcttggttctacttcctttatcccgat

SEQ ID NO: 239659 - DNA, 90 bp, Homo sapiens
ggtccttgagcgcgtccgacagtctgtctgttcgcgatcctgccggagccccgccgccgccggcttggcactgaacttcccagccctgcc

SEQ ID NO: 239660 - DNA, 82 bp, Homo sapiens
ccagaccctggagcctcagttggaagcagccgatccagcctgcggagcctgtggggcagagaggtgtgggaaatggaactgg

SEQ ID NO: 239661 - DNA, 98 bp, Homo sapiens
ccccgtgggagcctgcgaccctgcgccgggtgttcgtggtgggggttggcatgaccaagacctgcgaccgcatcaagcagtccgccagcggaaccaag

SEQ ID NO: 239662 - DNA, 82 bp, Homo sapiens
cgggacatctgaaagccaggaaatgatctgccctccttggcactgtgcttccccagaggggtggcctcgctgttcccatgga

SEQ ID NO: 239663 - DNA, 100 bp, Homo sapiens
cttggatttggctacacacttatagatcttctgcactgtttacaggcacaggttgttgccctggatgcccaaaatattgtagctgtttcatgtggagaag

SEQ ID NO: 239664 - DNA, 97 bp, Homo sapiens
aatgactgctcttgtgccaagatgcaagatctgcttaaaaaagtttgtgaagaaatatgggaacctttttagcttggagcttggtgacatatctgca

SEQ ID NO: 239665 - DNA, 121 bp, Homo sapiens
ctgaaacagctggctgagggacgacaggctcaggttggcagttggaaggtacgacaccgagcttctggtcaggtgatggctcttaagatgaacacattgagcagtaaccgggcaaacatgc

SEQ ID NO: 239666 - DNA, 100 bp, Homo sapiens
ggaagaggaactctaacaaggggagcttttgttggggcgacagctgctcctggctacatagctccaggacactgtcttcagccttttcttcaagtttttg

SEQ ID NO: 239667 - DNA, 50 bp, Homo sapiens
gaagccatgatttaaatatcggcgttaagactgtcaagaacaagtatgcc

SEQ ID NO: 239668 - DNA, 90 bp, Homo sapiens
tgcatgcatgtaccgaccttctgaacaaggccaacacctatgcaggtagtgctcacgaatacagctcctccccagatgacgccattttcc

SEQ ID NO: 239669 - DNA, 82 bp, Homo sapiens
ctgcggagctggaggaccttttgtgggatgcctcacggctgctgaggggctgcagcggggcgtctctggccgagcctctttt

SEQ ID NO: 239670 - DNA, 75 bp, Homo sapiens
ctactgcatccggaactcctctaccaagtcggggaaggctttctgtgaagaattggaatcaatgatacaggagca

SEQ ID NO: 239671 - DNA, 97 bp, Homo sapiens
tggcgtggctggcgattcgtgttcgtgagggccttttctgagtgggtgcagtggaccccatcatggagaagttcaacacatccagcctacgaccagc

SEQ ID NO: 239672 - DNA, 90 bp, Homo sapiens
gacacatccaatttccattcgcatccaaaatggaatccgagacagaaagaggaccttaggttctaagctggtctatgtccatcaccttct

SEQ ID NO: 239673 - DNA, 75 bp, Homo sapiens
gagaaagattatttctccacgatctatagaagatgattatccagccaagaagatgaaaactacagagaagggatt

SEQ ID NO: 239674 - DNA, 83 bp, Homo sapiens
ccgcgccctctccgcgtccccgcccgcgcggccggaccgggcagccagacctgcctgaccagtgcacgcccaacccctgcgat

SEQ ID NO: 239675 - DNA, 74 bp, Homo sapiens
attctcgcctgtcttcccttcacccagagcaaattgagacgtcccggttctggcctataggaacaagacatttt

SEQ ID NO: 239676 - DNA, 76 bp, Homo sapiens
aagagcgccttgggacagggggatttggaaatgtcatccgatggcacaatcagatgacgtccggttgtttgccttc

SEQ ID NO: 239677 - DNA, 90 bp, Homo sapiens
cgcggaaatctggaaccgggatggcgacgtctacactgagtcggaggcgaaggaggaccactctctgtggcaccctggactacctgcccc

SEQ ID NO: 239678 - DNA, 51 bp, Homo sapiens
cctagaggtcaagatcagctctggctagacccaacatgagtgaagtttcct

SEQ ID NO: 239679 - DNA, 90 bp, Homo sapiens
aagacgcaggggggatatccacagttcgatcaagtgaagatagtgatccggggagacaggaacacgggcaagacagcgctgtggcaccgc

SEQ ID NO: 239680 - DNA, 101 bp, Homo sapiens
aaggatttatacagagatgtcatgttggagaactacaggaacttggtatggcttggaaacctctctgaggtctggtcagattccaaccctggacagcagtg

SEQ ID NO: 239681 - DNA, 75 bp, Homo sapiens
taatggggatgctggaagggagatgccctgcccgttgccctgtgatgaagaaagatttaagtgccctgtatgctc

SEQ ID NO: 239682 - DNA, 101 bp, Homo sapiens
gaagtttcatccacttctaatcaggacttgcaattgtgaccaaatatattacaaagggctggaaagaagttcatgaattgtataaagaaaaagcactctct

SEQ ID NO: 239683 - DNA, 75 bp, Homo sapiens
gatccagatcgggatttacgtggagatcaagcgcagcgatggttttatgaatgaagctatggctacagattcccc

SEQ ID NO: 239684 - DNA, 96 bp, Homo sapiens
cggcggccgaacgatgtgcgagaactgcgcagacctggtggaggtgttaaatgaaagagttgctcaatgaactacagaaatttctggaaactgaaa

SEQ ID NO: 239685 - DNA, 90 bp, Homo sapiens
attagatggtgacactgcagttgcttttctgcaattagataaaaaaggaccacaaaaacatcactttgatcagccttcagtagcacccgg

SEQ ID NO: 239686 - DNA, 83 bp, Homo sapiens
catcttcatctggctgcagctggagctctgcgccatggccgtgctgctcaccaaaggtctggccagcatgacccagaacttag

SEQ ID NO: 239687 - DNA, 51 bp, Homo sapiens
gaatcaccagcactggctgaagccgggaagatttccagaggattccagaac

SEQ ID NO: 239688 - DNA, 87 bp, Homo sapiens
cctacttagatgacaatgtcaagaaagaaaactcctccttgtacctaggtcaaaatgcagatcttcgtgaaaacccttaccggcaag

SEQ ID NO: 239689 - DNA, 50 bp, Homo sapiens
cagttacctaacggacaagggctgcaatacttcacagagaatgcagttgt

SEQ ID NO: 239690 - DNA, 50 bp, Homo sapiens
attggatatggagcctttggtgttgtctgaggcagaggaggtggacacgg

SEQ ID NO: 239691 - DNA, 101 bp, Homo sapiens
tgttagtctctcagcaccgcagcactggagctgtcctgaaggtactctcgcaggaaatgggaattctacttgtgtggcacgtcagctaactgttcagatga

SEQ ID NO: 239692 - DNA, 100 bp, Homo sapiens
tctgtttgcaaagcacctgaactggtagcagcaattgcagagacagatgaatctgcagaatcagaaggtgtaattgattctcataaacgtagagaaatcc

SEQ ID NO: 239693 - DNA, 74 bp, Homo sapiens
aacgggacctggacagcatcttccgccgtatcaggtatttattacagtatcaggagccaataccttgtgagcag

SEQ ID NO: 239694 - DNA, 98 bp, Homo sapiens
agatttatttctcttgacaaccaagggcctccgtctggatttccaaggaagaatttcctctgaagcaccgagtccggcagcgtcttctcttgagggag

SEQ ID NO: 239695 - DNA, 100 bp, Homo sapiens
aagaggcctctgggcgtggacgtgcagcgaggcatcggaacagcctacaaaggccatgtcaagatcctcaccaagacaggggagctgcccaggcagccca

SEQ ID NO: 239696 - DNA, 100 bp, Homo sapiens
gctgaacgcctatgtaagagtgaaaaatttttagcagcttgtgcggcagtatcaccttttgccatgatagcatttctttcattggacagttccttacaag

SEQ ID NO: 239697 - DNA, 113 bp, Homo sapiens
gacgctctgtgccgggcgctgtcagctgtccacagccccaccttctgccagctctagaggacaaaatcccagtccttggcacaaactcaggaaatggaagccggagtctgttt

SEQ ID NO: 239698 - DNA, 100 bp, Homo sapiens
cggcggcggcggcggcggagtgtaggaagaggcactgctgagggggcgcgaggggaacggaggccagagctgcgcggaaggcagacagattgctgccaac

SEQ ID NO: 239699 - DNA, 71 bp, Homo sapiens
aagatcctggaggtggatctgaagaacgggaagttggctggaatgtgatgacttaaaaggcccatgttctg

SEQ ID NO: 239700 - DNA, 100 bp, Homo sapiens
tggagataatgcatctgctttcaagggaaaagtctgaagacgcttatgtccaaggggatcctgcaggtgcatcctccgatctgcgactgcccgggctgcc

SEQ ID NO: 239701 - DNA, 75 bp, Homo sapiens
gtaatggaagggcatggcaagactccacctcctggtgaagaaagcaaacactttgcccgaagtttttacatacaa

SEQ ID NO: 239702 - DNA, 82 bp, Homo sapiens
tgtagccagtgatgcccaaattgaaacatacatatgatagttgagaaagacacatattctgatcatgaagaaataaacacaa

SEQ ID NO: 239703 - DNA, 75 bp, Homo sapiens
gcgacgctggctgcagggacccggtgacagcgtgagaggttagctttatacgtctacgaatatttactgcacgta

SEQ ID NO: 239704 - DNA, 98 bp, Homo sapiens
ccagacttacctggtgtcagaacgcctagaaaggcgggatgtagctcattttgggatacgagtctccatcgtggagcctggcttcttccgaacccctg

SEQ ID NO: 239705 - DNA, 74 bp, Homo sapiens
tgatcccaacaatgttatcattgagtagtgttcaagacagcctcaagggtgatcttctgcccagtgtaatcctg

SEQ ID NO: 239706 - DNA, 100 bp, Homo sapiens
tctggtatatggacaacccccagtctccggagtagagatgaagagagaatttctaaacctggggctgtctcaactcctgtaaagcatgctgatgatcaca

SEQ ID NO: 239707 - DNA, 90 bp, Homo sapiens
cagattcgcagtggtcgcttcttctccttgtcctgctattgctgcaaactgagtatgaaagaaggtgacccagccatctatgccgaaagg

SEQ ID NO: 239708 - DNA, 100 bp, Homo sapiens
ttgacatagagttgtggtccaaagaagctcctaaagcttgcagaaattttatccaactttgtttggaaggtaaaatcccagaggaatccaaagccctctc

SEQ ID NO: 239709 - DNA, 82 bp, Homo sapiens
gaccgtgcgcgtgcgcctgggggcaccgctgccgttccgaggccagctgcgggccgtccagcggctgtgccacttctacagc

SEQ ID NO: 239710 - DNA, 75 bp, Homo sapiens
tttaattttagggtcctttatatagaagggagagtagcagccttggaagtggagtttactctccccttgaggaag

SEQ ID NO: 239711 - DNA, 82 bp, Homo sapiens
ctaactgggtgttgcacagagatttggctccagacccagttcctggacctgccctggaaaagaagtatcccgtagagatgag

SEQ ID NO: 239712 - DNA, 100 bp, Homo sapiens
caggatttgattgatgataaagacgccctggtgttcgtgctgattgatgaggagggacagcagtgtgataaaagaggaaatcaaagcctttcttgccaat

SEQ ID NO: 239713 - DNA, 100 bp, Homo sapiens
ggaaatatggcctcaatatgtgccgccagtgtttccgtcagtacgcgaaggatatcggtttcattaaggaaaaatccaagctggagagtgagctagccaa

SEQ ID NO: 239714 - DNA, 100 bp, Homo sapiens
gagtggatggtgcgttgcgtgccctacttcaaggataagggcgacagcaacagctctgccggctggaaggccttggaaaaccattgcagagtgaatggag

SEQ ID NO: 239715 - DNA, 100 bp, Homo sapiens
ctggaacagaccagcatgacaggaaatggctcactcaccatgaccaagctgagcgcccaagtcaaaggctctctcaacatcaccaccccggggctgcaga

SEQ ID NO: 239716 - DNA, 100 bp, Homo sapiens
ttgcagaaccttccctgattacagaatcttgggtaatgcacaggtgacacaaacaaagtttctccccaatgctccgaaagctctcattgttgaaccttcc

SEQ ID NO: 239717 - DNA, 97 bp, Homo sapiens
acctgaagagagattggcctggagtaaaagctgatgatcggaatgattacaggtaccccaaactggctgcaaaacaccgggaatccaacacagcggg

SEQ ID NO: 239718 - DNA, 50 bp, Homo sapiens
caggagctcttagtgaccaagtgaaggtatggcctcacaagtcttggtct

SEQ ID NO: 239719 - DNA, 82 bp, Homo sapiens
aagacagagggttttcttttgaggtgtcttcagtgccctgggtttgcctgtgacccaatgcccactgggactgaatgccaaa

SEQ ID NO: 239720 - DNA, 111 bp, Homo sapiens
tctactgtgacttcagagacactgccaagcagccttagccctagtgtagagttaaacacagtgggaatatcacttttgatgagattgtcaacattgctcgacagatgcggc

SEQ ID NO: 239721 - DNA, 51 bp, Homo sapiens
cgatgaggataacatccctccagaagatgatggagtctcgctctgttgccc

SEQ ID NO: 239722 - DNA, 75 bp, Homo sapiens
gtgctggggaggaaggtcctctatctgccgagcttcttcacctacgacaaatggaatcctgtgctgaacccgaat

SEQ ID NO: 239723 - DNA, 90 bp, Homo sapiens
ggaaaaatggaccaacttctttggcaagtggacattttactggctcaagctgaccggttccctgatgtgttacctgcttctgctactgat

SEQ ID NO: 239724 - DNA, 100 bp, Homo sapiens
ggggaaactaggtcgatggtcggcggcgcccggatgggcagctgaggctgccctgaggatctgtgtttggtgaaaaggagccaaattcacctgcagggca

SEQ ID NO: 239725 - DNA, 82 bp, Homo sapiens
atggagaccctcacggagctgggcgacgagctgaccctgggagacatcgacggggcactatggcagacaaagttaggaggca

SEQ ID NO: 239726 - DNA, 90 bp, Homo sapiens
gaggacctgaaggacaagctggactttgcccctcccaccccaccccattaccctccacatgcctgacatttaccccggtaactgctgggc

SEQ ID NO: 239727 - DNA, 100 bp, Homo sapiens
ctttactaactagccccagtggaccaggctatcatatcatgttgcctttcattactacgttcagatctgtgcagtgctaccttgccctggccaaaggagg

SEQ ID NO: 239728 - DNA, 80 bp, Homo sapiens
gaactgtagatgcccggctgaaattaagtgaggaattgagtggtggtagattgaaggaatgaatctgaagtctgctgcag

SEQ ID NO: 239729 - DNA, 96 bp, Homo sapiens
tggccaagagaggcatcctcaaacatctggagcctgtgggctcgggatgagtttgaaggcctcttcaagcagccagcagaaaatgtcaaccagtac

SEQ ID NO: 239730 - DNA, 83 bp, Homo sapiens
tgatacagcaggcgctcaccatgttccctggagggcgtgatggtgggcatgggtcagaaggattcctatgtgggcgacgaggc

SEQ ID NO: 239731 - DNA, 82 bp, Homo sapiens
gggttatctgcgaacacagtagtggaagatgtaaagcaatatttcgagcagtttggcaagccttatgccagcctggaccatc

SEQ ID NO: 239732 - DNA, 75 bp, Homo sapiens
ctcagaacagttggatcttgctcagtctctgtcagaggaagatcccttggttccttgtagcttggaatactggga

SEQ ID NO: 239733 - DNA, 100 bp, Homo sapiens
gaggctttcagccggagaagcgagtttcagctggtcaaaatgcagatcttcgtgaaaacccttaccggcaagaccatcacccttgaggtggagcccagtg

SEQ ID NO: 239734 - DNA, 100 bp, Homo sapiens
aaacagtttgaaaaatgtggtttgcaggttctaaaggtggagctgaagaagggagccactctcaaaatcacgctggataacgcctacatggaaaagtgtg

SEQ ID NO: 239735 - DNA, 75 bp, Homo sapiens
ttcatttttcggtctggaatggatgaagatttgataaagtggaaggcactgtttgaggaagtccctgagttactc

SEQ ID NO: 239736 - DNA, 100 bp, Homo sapiens
gagaagcagaattatacctagaagtctactaatggacagttagtcacccacctacatgttgaggagattcatatgggacattgtgtaaatctgactgatg

SEQ ID NO: 239737 - DNA, 90 bp, Homo sapiens
ggtggcaatggtcgtggaggccgagggcgaggagcatcaggcggggcaggccccacacttgggcagtggacagccacagcagaatctgta

SEQ ID NO: 239738 - DNA, 82 bp, Homo sapiens
ggcggccacctgagtggcgcggcggtgtcagcatcaagatggtgctcatgtggaccagtggtgacgccttcaagacggccta

SEQ ID NO: 239739 - DNA, 98 bp, Homo sapiens
tctggtaacatggcaaaagatagtcattcaggagagcaggaaagaaaaggccatccctgtggatgtcgcgctgccacagaagtccagcgaaaaggcgg

SEQ ID NO: 239740 - DNA, 75 bp, Homo sapiens
gagcaatcagatacctactgaggtcaggagcaaagctgaggaggtggacaaactgagagtgatgttcctggagat

SEQ ID NO: 239741 - DNA, 99 bp, Homo sapiens
tttacgggccttctggagatgcttccgaactgtgggcaaaaatggcgatcatgacaagatgtttaagatgagtgaaaagatattactcctgtgtgttgg

SEQ ID NO: 239742 - DNA, 99 bp, Homo sapiens
ggctgctcagctcgggccacggagaggagcagcccccggagacagcggcacagaggtgcttctgccaggctgctgctgcacatgaattggagaagatgc

SEQ ID NO: 239743 - DNA, 100 bp, Homo sapiens
ccctcggtgtaagaccaccaaatatcggaacccctccttgaagctgatggtgaatgtgtgcggacacactctgcagaggtggaggagacactgaagcgac

SEQ ID NO: 239744 - DNA, 123 bp, Homo sapiens
ctgggtggatccggatcgcatggaagacgcagcctggccgcgctctcccagtgtcagcagttgagtctttggagggccccctgctccaggtggaaggactgagtgaccttcgactagagcttc

SEQ ID NO: 239745 - DNA, 101 bp, Homo sapiens
gcaccaactccctgactgggtcccggccccccaaggctcggcccactattctcagctcagcagcctggaggctgaagctcaaaagaagcagcacctgttga

SEQ ID NO: 239746 - DNA, 100 bp, Homo sapiens
gtgaaactcaagatccccatggacaacaaggaggtgctgcagggtgcacagctgatcgccgtggcctcctcggaccccgcggcggcgggcgtggatgggt

SEQ ID NO: 239747 - DNA, 100 bp, Homo sapiens
cacaggagccggagcagaagcaaagaggacctggcacttggaactgatgcagaaggacagaaggtgaaagattccatgcgagtactccttccagttctac

SEQ ID NO: 239748 - DNA, 91 bp, Homo sapiens
cgctactctctctttctggcctggaggctatccagcttctgcctcctgggggcattgctggcccccatccgagtgcttctggcctttatcg

SEQ ID NO: 239749 - DNA, 99 bp, Homo sapiens
cctcttgataaaaagagatgtggggggattctcgacctgctaacagaactggaccttttcgggtgttgaaagcagcaggggcctagaagacattaaacc

SEQ ID NO: 239750 - DNA, 87 bp, Homo sapiens
aaatcttatttagttttgggaatttttacgttaattgagggtcaaccggatgcacatcagtcccaacaatcgaaacgccatccaccc

SEQ ID NO: 239751 - DNA, 74 bp, Homo sapiens
tgccttctccagacctcttgccagattgggagagtcatattaataccaaatggtcagcacctcagcagaatttt

SEQ ID NO: 239752 - DNA, 90 bp, Homo sapiens
aatacctcttgggactgggctcgatttgaggaatggaagttggatacactttgtgacttgtacgagacactgaccattacacaggctgtt

SEQ ID NO: 239753 - DNA, 100 bp, Homo sapiens
cttttacacggttttccaacatccagctacgactggtacaaggttggcatggatcctattagctgtgtaatactggaattatcaatgatatgcactggtg

SEQ ID NO: 239754 - DNA, 100 bp, Homo sapiens
aatgacatttcaacgagtttgtcatcatgtgagagagaataggactccctggaggaaaagcggaagcggcagcggtctgaacgcctggaacggattttcc

SEQ ID NO: 239755 - DNA, 97 bp, Homo sapiens
aggccagctgggctatggtgtggtgcctcggcctggccgtcctcagcctggtcatcagccagggggctgacgtagagatggagtttcaccgtgttgc

SEQ ID NO: 239756 - DNA, 98 bp, Homo sapiens
ggccctgagcacgcctcggatgcgcaaaggcccctcaccaaagagaaccctgtacagtaagaaatatggtgtggacctcatcagatacactcatgcag

SEQ ID NO: 239757 - DNA, 98 bp, Homo sapiens
gaaagggaagaaggcgcggtggcaggagctgacagagtgatgggaaacgcgtgagccaggccgagagaaggccaatgatgaggccaatcagagtgata

SEQ ID NO: 239758 - DNA, 75 bp, Homo sapiens
ctcttctatactggcaaacagtcatactattcattaatgcatgaggcaggtggaagtcatcataaagtttctgtt

SEQ ID NO: 239759 - DNA, 75 bp, Homo sapiens
cggccgatgaagtgcagaggtttttttctgtcattatttagaagcaaggtccttgaatgagcgagattatcggga

SEQ ID NO: 239760 - DNA, 100 bp, Homo sapiens
caggaacctgctttctctcgatgaggataacatccctccagaagatggcctgccgaggaggaactgaagacgaagaacatggatgataacacctttgcca

SEQ ID NO: 239761 - DNA, 100 bp, Homo sapiens
ctgttctgccctgctctgctctaacaacatttgaacatcaggagagcattctgggtaataccatgcaaagtgtgattgcattactcagcaatctagttgc

SEQ ID NO: 239762 - DNA, 98 bp, Homo sapiens
acggaggagccgctggggctgccgccacggccgcccggagcaaaacacttactattttggagtttaaagtatgtcatcatggcaaagtttcggagaag

SEQ ID NO: 239763 - DNA, 74 bp, Homo sapiens
gaacgacctagtatttgaatttgctagtaacgtcatggaggatgaacgacagaggaagctcaccagtgtgggaa

SEQ ID NO: 239764 - DNA, 75 bp, Homo sapiens
ctgcagaggacacgaggcggcgggctggagacatggaccgcggcgagcaagggctccacgtgttccccacgtttg

SEQ ID NO: 239765 - DNA, 75 bp, Homo sapiens
cagaacaacggctccaattttcagctggaggaaatttcccgggctcagcttgtgaagagtatcagctccctcgaa

SEQ ID NO: 239766 - DNA, 100 bp, Homo sapiens
cttcaagaacgtgctcagcaaccggcccgtgcacgcctacaaattcttctttaagtccatggaccaggacttcgggtgttacctgcattcacatccagaa

SEQ ID NO: 239767 - DNA, 75 bp, Homo sapiens
gcgccagtaagaagaaaaaagcgtccgcttccagctttgcgcaggtgtaccttgaaagacttttaacatacgcag

SEQ ID NO: 239768 - DNA, 74 bp, Homo sapiens
ttctgtgttctgcgtggggacggccgcctagagtggttcagccacaaggaggccacccgggaccttgcccagta

SEQ ID NO: 239769 - DNA, 100 bp, Homo sapiens
acgagaaccgcaccccgcctcccattccggacctcgttgaggtggagagcagcgtgggtcgcagatatggccagtacactatgaaccaggaaagcaccac

SEQ ID NO: 239770 - DNA, 100 bp, Homo sapiens
cggcgccatgcccgggccggagtgagtgcgcgcgggcgaaaatggcgtacatccaggcagaagtcaattcatctggaaagactatctctgagtcagactt

SEQ ID NO: 239771 - DNA, 96 bp, Homo sapiens
caacagtacaagttctctagacaggtgttttcctcatacactggaaaggaagagattcatgaagcagacacttctgagaaattcatcaggctgtga

SEQ ID NO: 239772 - DNA, 75 bp, Homo sapiens
agctcactttccccaaggaccagcttgacgaggcctggactgagctgatctcccgtccctcgcccccgaccatgc

SEQ ID NO: 239773 - DNA, 80 bp, Homo sapiens
ctgggcgcggattcgccgaggcaccgaggcactcagaggagatgctgtgtgctgtggacccacctggggttcatggagtg

SEQ ID NO: 239774 - DNA, 98 bp, Homo sapiens
cgcggacagcgggctggagcctgacgagctggcggtgatccgtatgtgaaactttcattgtacgtagcggatgagaatagagaacttgctttggtcca

SEQ ID NO: 239775 - DNA, 83 bp, Homo sapiens
gctacgcatagaagccgggattgagcgcatcaagggtatccgctacacacaccccatctgatctcccagtgggaacaagagga

SEQ ID NO: 239776 - DNA, 88 bp, Homo sapiens
cggaaatctggaaccgggatggcgacgtctacactgagtcggaggcgaaggttcgagaacttgtcttggacaattgcaaatcaaatga

SEQ ID NO: 239777 - DNA, 75 bp, Homo sapiens
tcagcgcgacgtcgtgtcgagttcccaaaaagctccgcaggggctgtagggagtgaagaactgaatgtcatcatg

SEQ ID NO: 239778 - DNA, 76 bp, Homo sapiens
ttgagttgataacaaaatttcttcaggcttctctctgggctccacggtgcagtctcacactaaaggaatctggatg

SEQ ID NO: 239779 - DNA, 90 bp, Homo sapiens
acaaaaactgatgaccaagagaatgtgtcagccgatgcaccgagtccagcccaggaaaatggagagctacctctacccagatggaaagac

SEQ ID NO: 239780 - DNA, 74 bp, Homo sapiens
gctgcggccccggctccggcccccgcaggagcaggcgcgggcccaggccgaggccctccgcatcagtgatgtgc

SEQ ID NO: 239781 - DNA, 100 bp, Homo sapiens
cttctgaactgagtgaaaatacagccaagatcttggcaaagcttctccctcagtatttagaccagaggcctcagtgttgtccctgatgaagaagtcattg

SEQ ID NO: 239782 - DNA, 90 bp, Homo sapiens
aggcctcccctggccagaagcggcccctgtggctgtgtaagatctgcagtgagcaaagagagtgaaggagaacgacctgctcagaatgag

SEQ ID NO: 239783 - DNA, 100 bp, Homo sapiens
aaatgtaaagaaggttctctttgtgtgagtaagcaagaacctggtctcacagatttcaagcctggctactggattggtgtccgctatgatgagccactgg

SEQ ID NO: 239784 - DNA, 118 bp, Homo sapiens
gagtggagtgtccgctgtgcccgggcctgcaccatgagcgtcccggccttcatcgacatcagtgaagaagatcaggtattcctgcaacacatggtaaacccaccagttattcaataag

SEQ ID NO: 239785 - DNA, 76 bp, Homo sapiens
caacaccagtggaagatgatcacatcccaggggcactatgaacgaagaggagcagtttgtaaacattgatttgaat

SEQ ID NO: 239786 - DNA, 109 bp, Homo sapiens
aatgacaaaccgatttcgggaaatacttgatttagtatgtaaaagatgttttggagtacaagcgcaagctagccagagtttccctggtgcgcaaagaactcaggtcccg

SEQ ID NO: 239787 - DNA, 98 bp, Homo sapiens
ataaatacaacttagcagtcacagacaagttgaagatgaccttggagagaacattgaaagtattctctaagctatttgaagagagtgactaaatgcac

SEQ ID NO: 239788 - DNA, 75 bp, Homo sapiens
gacggctgccggcctgtgtggtggactgtggcacggggtgctggagaatctggtaaaagcaccattgtgaagcag

SEQ ID NO: 239789 - DNA, 82 bp, Homo sapiens
cgcggatcgaccggagcagagagctggcgagcaaggtttggtgcacctcgatttggaggaagtagggcagggcccttatctg

SEQ ID NO: 239790 - DNA, 90 bp, Homo sapiens
ggcggcctcggctgaagaaagaaggtgggagcggagagcgcaggcgtggtaagagcaaagaggcggaaattaagagaatcaacaaggaac

SEQ ID NO: 239791 - DNA, 98 bp, Homo sapiens
ttgcagcaactgggaacctgaatgcctacttgcaacagggttgcaaactgtcttccagctgtacaggaagaggcacatacaaagaaaagaatccccga

SEQ ID NO: 239792 - DNA, 88 bp, Homo sapiens
aaggaacgccacttcgtcactatctcctctccactggccacgcagatccctcaggcggtggcggaacagccaccaagaccatgtcctg

SEQ ID NO: 239793 - DNA, 51 bp, Homo sapiens
ggcctccccagccacgtgaaactattcacaatgacatcctttcaagaagtc

SEQ ID NO: 239794 - DNA, 98 bp, Homo sapiens
aagaagtcggccagcagctccaagatgatttgatgaaggtcctgaacgagctctactcggatatggctttagttgcccctgaagctccttcagaacaa

SEQ ID NO: 239795 - DNA, 73 bp, Homo sapiens
ccgagaacgccgcgctgcgcatctccaacagcgacctgagcggtctctaattaacagaagatggcaaagccca

SEQ ID NO: 239796 - DNA, 98 bp, Homo sapiens
gaggatcgactgggaaaaactggagaacagggagatccagccaccattcaagcccaaagtggccaaatttgagtccctctttaggacgtatgacaagg

SEQ ID NO: 239797 - DNA, 98 bp, Homo sapiens
tgaggctcagagatgcctgtaccgtgatgtgacgctggagaacctggcacttatgtcctccctgggttttgacctgtagcagagaaccaattctggag

SEQ ID NO: 239798 - DNA, 106 bp, Homo sapiens
gttccttcagctctgccatcactccctgccgggtcagggtgctgaggaacctctaatcatctcccatggatttgtgatcagcgttgcagctctcccagcagccctg

SEQ ID NO: 239799 - DNA, 83 bp, Homo sapiens
ggtggacacgcccatccttggacttcctgaaaatgacccaggacgtgaccacgcagtctgtgatggggtttgatcctctgcct

SEQ ID NO: 239800 - DNA, 83 bp, Homo sapiens
gtccgaccgcaacacgtgcgctggataaacgcttgttaactgggaaagtgatgaccccatggcttatattcactttactgctg

SEQ ID NO: 239801 - DNA, 98 bp, Homo sapiens
atttgtgcatggggtcacagtgaaaaatcgaatgattcgactgcatcctgatggaacagttctctatggactccgcttcagaatggcagaagatgatc

SEQ ID NO: 239802 - DNA, 82 bp, Homo sapiens
tatcgagagcgtcatgaacccgagctatagagaaaggagatgaggctgcccccaagtgtaactccagcactgtgaggtttca

SEQ ID NO: 239803 - DNA, 93 bp, Homo sapiens
agcaacaaaaagaaagctgcgttaatgtttgcaaatgcagaggaagaatttttctatgagtcataccctaatgatcccagcaagataatgtcc

SEQ ID NO: 239804 - DNA, 74 bp, Homo sapiens
tcacggcaacgggctgctctacgccggcttcaaccaggaccacgcctcggaatgctgctcgaataagtgaaaag

SEQ ID NO: 239805 - DNA, 82 bp, Homo sapiens
ctggggatggcaaagacgacatccggtgcgccgaggctgctcacaaaagacgagcctgtggagtgggagacacctgaccttt

SEQ ID NO: 239806 - DNA, 75 bp, Homo sapiens
gcatggctacttcatattttggaaagcagtttttaagacaagctctgcgagagggacccctaccagctgtaccag

SEQ ID NO: 239807 - DNA, 100 bp, Homo sapiens
ccctccccgcgccagtccccccgcaccctccgtcccgacccgggccccgccatgtccttcttccggcggaaagggttttcagagaaagatgctgatgagg

SEQ ID NO: 239808 - DNA, 100 bp, Homo sapiens
ggaaagatcaaaacgatgcactgcaagtggctgtgacgtgaacagtcccagacaaccaggcgccaatggagaaggagaggaagaggctagagatgggcag

SEQ ID NO: 239809 - DNA, 96 bp, Homo sapiens
gattcatgacaaaatcatggaggtaccacgaaaggcagtggtagaaaagccagctcgggcagcagagcgagaggcccgggccctgctggagaagaa

SEQ ID NO: 239810 - DNA, 100 bp, Homo sapiens
ataaagcctttactggattcattgtggaagcagataccccaggaattcagattgggagaaaggaattcctcctgatcagcagagactgatctttgctggc

SEQ ID NO: 239811 - DNA, 96 bp, Homo sapiens
ttgctcggccgatgaagtgcagaggtttttttctggtgtggggttagccaccagaaaactgggaaatttggccaaacccactgtgatcatcagcaa

SEQ ID NO: 239812 - DNA, 100 bp, Homo sapiens
gtactccacctactgccaggcctgctctgctgctgaagagaagccagaagattggccatctgcaagcttcccttctccgtggagagcaggaagacagtca

SEQ ID NO: 239813 - DNA, 98 bp, Homo sapiens
gagctgcagctttggcttcagggtgcacagttgcaaaagcttctcatttcagagagatgccaggatcctaagtgcctgccaaacttaccaattctaag

SEQ ID NO: 239814 - DNA, 74 bp, Homo sapiens
cccgctcccggggtccccggccggccaagcaggaatgtgaattggacccttgctgcgaaggaagtacctgtaag

SEQ ID NO: 239815 - DNA, 100 bp, Homo sapiens
cgcgaagaggctggactcggattcgttgcctgaggatcagctcagctactatttaataaaacaaaatctgtagaattcacgttttgtaatgacactgtcg

SEQ ID NO: 239816 - DNA, 75 bp, Homo sapiens
ccgagaacgcctccagcggggatgacacagaagaacaacaagctcaccctcttccgccagctgcagcagatgacg

SEQ ID NO: 239817 - DNA, 83 bp, Homo sapiens
gagatttatggcagcctcactcccagtagtttctgcatttagtgagataagctcactaccctgggaaatcttacaccttcaag

SEQ ID NO: 239818 - DNA, 100 bp, Homo sapiens
gtgaaaaaagattcagagttggataagcacttggaatcacgggttgaagtctgaacaggaattaagaataactcaaagtgaatttgatcgtcaagcagag

SEQ ID NO: 239819 - DNA, 100 bp, Homo sapiens
ccggggggaaaagctggtgccccgactgcgtgcagggcccgcagccgtgccgggtgctcttcagcatgtccttcatcccggtggccgaggattccgactt

SEQ ID NO: 239820 - DNA, 100 bp, Homo sapiens
cgccaatggcgagatctgcgtcaacgtgctcaagagggactggacggctgagctgggcatccgacacgtactgctgtctctagtgatccctgaaaagttc

SEQ ID NO: 239821 - DNA, 100 bp, Homo sapiens
agggacgacggcctcgtgctgtgaagttcattcggctcctaaagaagtagcagtgtccaaggaacaagaagagaaatctgatagcctagttaaatatttc

SEQ ID NO: 239822 - DNA, 75 bp, Homo sapiens
cccggctaaagtcaactgcttcttccattgagactctggtagtccagggagtcggtagtaagggatggcgggacg

SEQ ID NO: 239823 - DNA, 88 bp, Homo sapiens
gcatgcctccgcctgtgtcttctgcagtgattttaaccaaggcagttggtggaaatgaggatttgaagcattcattaccatctggact

SEQ ID NO: 239824 - DNA, 100 bp, Homo sapiens
aaccattgacgccatgtcgggttattcgagtgaccgagaccgcggccgggaccgagggagaactacgatgacccgcacaaaacccctgcctccccagttg

SEQ ID NO: 239825 - DNA, 75 bp, Homo sapiens
ttctctctgacgaaagatgtgctcttggacgtggcctatgcctatgataaacctctcataatgaaggcccccgct

SEQ ID NO: 239826 - DNA, 100 bp, Homo sapiens
ctcctttgcggagagctgcaagccggtgcagcagccttcagcttttggcagcatgaaagttagcagagaccagttttgattttaaatgttctcaatccag

SEQ ID NO: 239827 - DNA, 75 bp, Homo sapiens
gccgcccgggcatgcgaagccgtccctccccgggtgaagagatggcgtttgtgaagagtggctggttgctgcgac

SEQ ID NO: 239828 - DNA, 75 bp, Homo sapiens
tactgacctgtaaatcatcctttagctcaaatagctataactgtaccaaagacatggaagaaaccaaaagatcgg

SEQ ID NO: 239829 - DNA, 97 bp, Homo sapiens
ccaaggacttcattcgccggctgctcgtcaaagatcccaagttcttcgtgaactttgtggttgggcaggatccgggctcagacgtcgccttccactt

SEQ ID NO: 239830 - DNA, 80 bp, Homo sapiens
ccctggagcctcagttggaagcagccgatccagcctgcggagcctgtggggcagaactcttaaaacgcctagatgacgtg

SEQ ID NO: 239831 - DNA, 50 bp, Homo sapiens
aaccagaagaaaacctgaatctctgaggcccttaggatcggaaaacctgc

SEQ ID NO: 239832 - DNA, 90 bp, Homo sapiens
tgttcaccatcctggccccggaagttctgggaagtcatcagtgatgagcatggcatcgaccccagcggcaactacgtgggcgactcggac

SEQ ID NO: 239833 - DNA, 110 bp, Homo sapiens
ggccgcgcagggagctctcgaggcaacgccggggcgcccgaggtctggaaggcgcagcacctcaatgacctgaagaaggagaacttcagcctcaagctgcgcatctactt

SEQ ID NO: 239834 - DNA, 100 bp, Homo sapiens
acagggggattggccggctttttcggagccggcggagcaggttactcgcacgcggatttggctggcgtcccgcagttgatctctctaatgtattagatct

SEQ ID NO: 239835 - DNA, 83 bp, Homo sapiens
cctcccagccgtgcttcctgttaagcctgtgaaactccgtgtaggagactcaccaatacctggagctggagcctatgctgacg

SEQ ID NO: 239836 - DNA, 98 bp, Homo sapiens
actgcagctagcgaccagaagcaagagggcaaggagttggtgcacacctacaagggctgcatcaggtcccaggactgctactccggcgttatatccac

SEQ ID NO: 239837 - DNA, 80 bp, Homo sapiens
aatgccctcacaccagacctacggagggagctggaaattcctgacgttcattgatctgctgcagcaaaaaattattcctg

SEQ ID NO: 239838 - DNA, 100 bp, Homo sapiens
gcgtgactctgcaccctgcccagaggtccctcagcaaagatggtacaaaagagtctttggaggatgcggctttgatggtttgtggggacattcatggaca

SEQ ID NO: 239839 - DNA, 82 bp, Homo sapiens
gaaggctccaaacctcgacaaaatggctgatgatttgctggcagctgctgacaagttggaatcgaagcctcttaaaatggca

SEQ ID NO: 239840 - DNA, 75 bp, Homo sapiens
ggctttgttgtggaaatcccggttacctgagaccatcatgcagacatcagagactgggtcggacacaggctcgac

SEQ ID NO: 239841 - DNA, 100 bp, Homo sapiens
cacagggaagaaagtgactgaagagcttctgaccgataatagtcaagtctctatttatgaggtggacaagcaagattgtcgcaaattttgcactactggc

SEQ ID NO: 239842 - DNA, 82 bp, Homo sapiens
cgccaagatcccagtcacaattatcaccgggtatttagcctcccgcgacgatgcccctcaacgttagcttcaccaacaggaa

SEQ ID NO: 239843 - DNA, 75 bp, Homo sapiens
ccagagcgtgaagatcaagatcggctcagtagatgaaggcgtttctgagggcttgcctacacttcaaagcacgtc

SEQ ID NO: 239844 - DNA, 50 bp, Homo sapiens
ctcctcccctctggatttctcagagacaagttggatggcttgaggactgg

SEQ ID NO: 239845 - DNA, 98 bp, Homo sapiens
agagtgatgggaagaagtctctgaggtcttctaaatcagaatcaagatgaggcgtctaaactggatccagtgggcttccctcctgactttatttttgt

SEQ ID NO: 239846 - DNA, 83 bp, Homo sapiens
cgtcgtggaagcaggactgcgccgcgtcttcctcaagtgcaaatggtcaagaaaaggcttcatccggacgaggtggtgcattg

SEQ ID NO: 239847 - DNA, 83 bp, Homo sapiens
ccctgaactacttcctcggtggctgcgccggaggcctgactctgggagcacgcagacagagcgggatgccaccagcttgtcca

SEQ ID NO: 239848 - DNA, 98 bp, Homo sapiens
gtggctctccatggagaagcagaaagagaatcgtgttttcttgcagaggcattgagtgttatagttttgccgctggactcttccctcccttcccccac

SEQ ID NO: 239849 - DNA, 100 bp, Homo sapiens
tggagccgcacgtgctcggcgcggtcctgtactggctgctgctgccctgcgcgctgctggctgggccatgaagcccccaggaggagaatcgagcaatctt

SEQ ID NO: 239850 - DNA, 83 bp, Homo sapiens
aagctgtctctgatccgcaagcatgctcagaccttcattgctctgtgtgccaccgctgtccccaatctcttcatgctggaaac

SEQ ID NO: 239851 - DNA, 120 bp, Homo sapiens
tcagatgaaatggatttgcatcttgtaatgtgtttaacaaagccacgaataacctataatgggagatcttgtgcgaaaactcaaagaagataaagcaccccaagtagacgtagacaaagc

SEQ ID NO: 239852 - DNA, 82 bp, Homo sapiens
ctagaactggacacctcgggggtttcctgctttatggcgaagggtgagaagccctaccactgcaactgggacggctgcggct

SEQ ID NO: 239853 - DNA, 83 bp, Homo sapiens
cagggaaccctggtcaccgtctcctcagataacgaaggaggcccaacttcattcaataaggagcctgacggatttatcccaga

SEQ ID NO: 239854 - DNA, 100 bp, Homo sapiens
gcctactctgtgaccggggccaagcaggtgaatatgaccatctcccagaacaggccttctatatggtgggacccattgaagaagctgtggcaaaagctga

SEQ ID NO: 239855 - DNA, 98 bp, Homo sapiens
ctctgaagcctcctcgccgccgtttctgagaaggatcccaggagggcactcatggtggtttatgggactctggactcctgagaagcggccttgagtct

SEQ ID NO: 239856 - DNA, 101 bp, Homo sapiens
ttaccagcatccattgcaaaccttattaatctcagggaactggatgtcagcaagaatgttgacggactggacaaagcttctatagcaaactcagatggccc

SEQ ID NO: 239857 - DNA, 75 bp, Homo sapiens
gcatcatccacggggtgctgcagatcctgttccaggcatccgtgggctctgagaagctctttgcgccgggaaccg

SEQ ID NO: 239858 - DNA, 49 bp, Homo sapiens
caccaaccaagtctcctctcggaaggcctcccagtagcattggatgcag

SEQ ID NO: 239859 - DNA, 82 bp, Homo sapiens
gtctcgttgctgcctctgtgtacgctgaggggggagatctgccttctggagactgcgccgtcctcccgggagagccagaaag

SEQ ID NO: 239860 - DNA, 97 bp, Homo sapiens
ccggaagcagtacgttggagcagcccatggcatggctggaatttactatatgttaatgcagttaattggccttggtcctcacagctccaaaaagaaa

SEQ ID NO: 239861 - DNA, 100 bp, Homo sapiens
ccacgagcgcaagcggcgggtggagctcaagtgcatggagctgcaggagatgatggaggagcagggattgactttgaagatgtgattgcagaaccagaag

SEQ ID NO: 239862 - DNA, 82 bp, Homo sapiens
tgtaccaggcgaagctggccgagcaggctgagcgatacgacgagctcccctgaacagcagctgcagcagccatggccccgcc

SEQ ID NO: 239863 - DNA, 98 bp, Homo sapiens
taaatacaacttagcagtcacagacaagttgaagatgaccttgagacattttaaatccaaaggatgtgattagtgtccagctggaagacactacctct

SEQ ID NO: 239864 - DNA, 100 bp, Homo sapiens
caacatcctgctcctgctcatggacgacggtcctcactgagcagcgagtcgtcccccgtgtcctctccggccaccaaccacagctcccccgccagcacac

SEQ ID NO: 239865 - DNA, 75 bp, Homo sapiens
tgaaagctcttcttgaaaaatgcaaagatgtagatgagagaaatgagggtcatggaggacgctggcggcggcgag

SEQ ID NO: 239866 - DNA, 100 bp, Homo sapiens
tccttcgggagttgatctctaatgcttctgatgccagaagcctgtcttagatgttcatgcagaactagacagaattacacgaaaaccagttacagtttct

SEQ ID NO: 239867 - DNA, 76 bp, Homo sapiens
cttcgagacaaggctgtcagcccctaggttatcaatactctggctgaccatcatcatcgtgggactgactttggtg

SEQ ID NO: 239868 - DNA, 96 bp, Homo sapiens
gtcggtcagtgcgagatccgctgctgctgaggagaggagcgtcaacagcagcaccatgggtctggccgtgggcctgggcttcggggcactggcaga

SEQ ID NO: 239869 - DNA, 100 bp, Homo sapiens
cccgccactccagaaatccaggagattgttgataaggttggaagcgaagtggaagcactgaacctccaggtgacatctctgtttaaggagcttcaagagg

SEQ ID NO: 239870 - DNA, 101 bp, Homo sapiens
tgacgaggctgcggtgtctgctgctattctccgagcttcgcaatgattcctggtcgggtggcttccagtggtcttcagtctgtcgtgcaccgatgagaact

SEQ ID NO: 239871 - DNA, 75 bp, Homo sapiens
cccctggggagattggacaagtatgctgcaagtgagaacatatttaacagcaatgaggtcttactgtgtagccca

SEQ ID NO: 239872 - DNA, 75 bp, Homo sapiens
gaccttctccctgcctggacccctactattgcaacaaggacagtcggcccaatatgtcaagacctctgatcacta

SEQ ID NO: 239873 - DNA, 96 bp, Homo sapiens
agctgttgaaacagaagaagttgagcctgatgaagaagaagttgctccttgagggcaggacagttcttatggctttatccgttgcgtaagcacaga

SEQ ID NO: 239874 - DNA, 100 bp, Homo sapiens
tttaaaacaacttaaagacaggtatcctcggaaacggtttgtggctggagtaggagcaaacagcaaatgccaacgtccggcggtacctccagctgacaca

SEQ ID NO: 239875 - DNA, 113 bp, Homo sapiens
ctgggtttgaacggaatgctggagtcagtggaagacggagctggtcggcccgaaggtattgttgcagcatctggcagtgagactgaggatgaggacagcatggacattccctt

SEQ ID NO: 239876 - DNA, 51 bp, Homo sapiens
cgagctgcgcatcgtggatctgattaaagaaggggaaactgaggcccaagg

SEQ ID NO: 239877 - DNA, 51 bp, Homo sapiens
attccaagtaactcttatttgattggtgctctcctctgtctcagactattt

SEQ ID NO: 239878 - DNA, 100 bp, Homo sapiens
ggctcggacccacggagccggcagcccagcactccgaatgttgtaccatctttgggtaggcagacttccctgacgacatcagtgatacccaaagctgagc

SEQ ID NO: 239879 - DNA, 50 bp, Homo sapiens
agagcagccccacagctgggaagaaggttcagcttgttggtttagatgag

SEQ ID NO: 239880 - DNA, 51 bp, Homo sapiens
acgaactgcttcagcagcggaacataagatccagctccaggtcccacaggg

SEQ ID NO: 239881 - DNA, 100 bp, Homo sapiens
acacctgggtctgggcttcccgggcgagcggtgggctgaagccgacgtagcttctctgaacagacgcatccagctggttgaggaagagttggatcgtgcc

SEQ ID NO: 239882 - DNA, 100 bp, Homo sapiens
tctacgtgtttggagaactgctggacatgcccaatgttagagaggtctgtgacagccttgggcggcgacacatgtctacctgtgccctctgtgacttctg

SEQ ID NO: 239883 - DNA, 98 bp, Homo sapiens
aaagagttgattgaaattatctctggtgctgcagctctctacaggccaaatttgagcaccttaagagacttcaccaagaagagagaatgaagcttgaa

SEQ ID NO: 239884 - DNA, 50 bp, Homo sapiens
cggaggaggacctgaagcagctgatcggcttcagctccccaggaatatga

SEQ ID NO: 239885 - DNA, 82 bp, Homo sapiens
agacggcgatccgggcgctcgagacttaccagagccacaaggattcactccttctccagttgcacagccacacccttcagct

SEQ ID NO: 239886 - DNA, 74 bp, Homo sapiens
acaaatcacagagtccagagcagcattgccttcctgtgtgggaaaaccctgctctttcgacgtgtagcagcagc

SEQ ID NO: 239887 - DNA, 97 bp, Homo sapiens
gcggacgagggaggtgccgccgtcgcccaggatgggctgggaatgaagcgatgtagccttttaagttcttgagcaggccagagtggaaatccccctg

SEQ ID NO: 239888 - DNA, 97 bp, Homo sapiens
tcaaactgccattctgatttgctgccttatctttctgactctaagtggcattcaagggtaccggaagctggtgaaggacatggaggacggcctgatc

SEQ ID NO: 239889 - DNA, 100 bp, Homo sapiens
gtaatcttttacttcctgctgctgtcagtggtaataataataataagtattttcaatgtggagttctatgcaggtatctactgtgcgtttcagtcaacaa

SEQ ID NO: 239890 - DNA, 100 bp, Homo sapiens
aagaaattgaagaactcagatcaaaacctgttactgaaggaactggtgatattattaagtttgaaggaagaaagtactgtgaacatgactttcagatgct

SEQ ID NO: 239891 - DNA, 96 bp, Homo sapiens
gagattgtaacagatgatggtgaaaatctgagaccaatagttattgatggcagcaatgtggcaatgaggtacggattttcaaatatgcgctatatt

SEQ ID NO: 239892 - DNA, 100 bp, Homo sapiens
ttgtttattttcctcaccactgaatctacagatggtaaggttgaagttacaaaagaaggtgtgaagttgtgtaccatgggtccaggaaaagtgtttgggg

SEQ ID NO: 239893 - DNA, 96 bp, Homo sapiens
gcatgactcatccccgggagtgttgagttatcactgtgaatataagatgcggacaggaaggaaacctgatggctgtgctatttgcttcaaacattc

SEQ ID NO: 239894 - DNA, 100 bp, Homo sapiens
gaagagcctgctacagatggtcaaaaaggcattggaatggatacttgtgtcattcctttgaggcacggtgggctttccttggttcaaaccacagattaca

SEQ ID NO: 239895 - DNA, 100 bp, Homo sapiens
actcctcccggaggcgacatggggcacccggtgtaccgcggcgagaagccccagctgcactacgcggtgaatgaaaactttgccattgatttgatagcag

SEQ ID NO: 239896 - DNA, 90 bp, Homo sapiens
ttggaaatggaggaagaagaaaagcgaaaagttcaaacacacgtcagcagacaaaagcaagccgggaggctggctgcctctcctcctgct

SEQ ID NO: 239897 - DNA, 75 bp, Homo sapiens
acaaaagaaccattgaaaaatttgagaaggaggctgctgaggtaatgagagatccaaacaccaagcgctccaggg

SEQ ID NO: 239898 - DNA, 95 bp, Homo sapiens
ttctgcagtgattttaaccaaggcagttggtggaaatgaggcatggaagaggagatggttcgtgttacgcagtggccgtttaactggagatccag

SEQ ID NO: 239899 - DNA, 75 bp, Homo sapiens
cataatcggaatgtgatcacagagcctatttacccagaagtagtccatatgcgagtgatagacagccaagcagag

SEQ ID NO: 239900 - DNA, 100 bp, Homo sapiens
cgactatgaagctgcttctgatttttataggaagggagttgatttactcctagaaggtgttcaaggaattgaagccattttttatgaaggaagttggcag

SEQ ID NO: 239901 - DNA, 100 bp, Homo sapiens
ctggagaatatggtgcagaggccctccacgaccattactgggacttccacccccaccacgtgcacagcgagttcgagagcttcgccgagaacaacttcac

SEQ ID NO: 239902 - DNA, 132 bp, Homo sapiens
aagtaaactggaagatattgcaaatgcagcgttagcagctagtgcagtaacacaagtagccaaggtcctctggtgatgttcttgagacgttcaatttcttagaaaatgccgatgacagtgatgaagatgagg

SEQ ID NO: 239903 - DNA, 75 bp, Homo sapiens
atccagtcacctatgtggtccagaagcagtttatgaggtaaatcagtggcacagtatactgcctccttgtgcctc

SEQ ID NO: 239904 - DNA, 76 bp, Homo sapiens
cccagcaccgggcgagggagcccgcgtcgcgcggagggtgaggtggctttgaccccgggttgcccggccagcacga

SEQ ID NO: 239905 - DNA, 83 bp, Homo sapiens
atgcaaagagagctggaccattcatccttgatgcttgctctgtcaaggcacagcctattgtctcctttgctcagtgtgacatc

SEQ ID NO: 239906 - DNA, 97 bp, Homo sapiens
ggagctggtcgccgccgcggccgcctggaattgtgggagttgtgtctgccactcggctgccggaggccgaaggtcagtatcattgacagtgttcaac

SEQ ID NO: 239907 - DNA, 75 bp, Homo sapiens
gccttccagtacacagacgagcatggggaaggtgggcaaacgcagaggcgggaacaaactagccctcaagacggg

SEQ ID NO: 239908 - DNA, 74 bp, Homo sapiens
tcaaaacctgtaaccctcccgatgctggtccgatggttgtgcactgcagcaagattcttggatttatgaaaact

SEQ ID NO: 239909 - DNA, 75 bp, Homo sapiens
tcttacccgtgacaaaatgtgttccatggtcaaaaaatggcagcatgaactggaaaatattgaacctactcaagg

SEQ ID NO: 239910 - DNA, 100 bp, Homo sapiens
ctgaaacgcaggaagtccctcaagcagaagaagaagcggattatacttactcagctgttaagagtaggcaatttcttcagttcttccacaagaaatcaaa

SEQ ID NO: 239911 - DNA, 82 bp, Homo sapiens
tctgggcggtgctacaactgggctggcggccaggatggttcttaggcggtgcgtctttctacgtgaataggattttgtggct

SEQ ID NO: 239912 - DNA, 74 bp, Homo sapiens
acagctcatgtagaggctggcataacaggacaagagttggaaagacagttgttgacctcctgtactggagagac

SEQ ID NO: 239913 - DNA, 75 bp, Homo sapiens
aagcaaccaacttcgggcgcgctgtacagcaagtcaatgccatggtcaagtctggcaccatctttgacaacttcc

SEQ ID NO: 239914 - DNA, 100 bp, Homo sapiens
aagatgaaaaggaatatgcattgaagcaaattgaaggcacaggaatatccatgtcggcttgtagagagattgcagtgaagagtcacagtttgagatggac

SEQ ID NO: 239915 - DNA, 100 bp, Homo sapiens
gtgaggggatccgacttgccggcagaacttacgctgcgggaccccgggcactgttgctgctgcgggagcatcccagccatcactcttccacctgctcctt

SEQ ID NO: 239916 - DNA, 83 bp, Homo sapiens
ctctgctagtgaatctgacccgactggattcctccatgactcaaggcacagactctccagtggagcccacagtgaccatctcc

SEQ ID NO: 239917 - DNA, 130 bp, Homo sapiens
acatgactgccgccccatgtgtgtgagaggcgtcctctgggagagcatggatcctgaggtcccaggctcttactctctgtcagtccgcctcagccgccctgcatcctgggaccggatcagacactacagg

SEQ ID NO: 239918 - DNA, 51 bp, Homo sapiens
gtactgctcttcccgaagagcaaaggatcaatgtgactctaagaacaaatg

SEQ ID NO: 239919 - DNA, 98 bp, Homo sapiens
cagacctgagccactgcgcccagccttgatcttgaggtctgctaaaaggtcagagtaatgcagaatgcgtgccttcatctcagatttgttcatcacag

SEQ ID NO: 239920 - DNA, 80 bp, Homo sapiens
taaagatgacaccttgcattccctatttagctgtccaggcagccatcttgtctggagacaagtctgagaatgttcaagat

SEQ ID NO: 239921 - DNA, 83 bp, Homo sapiens
gaccagcagatggccagtcacgagaacccagtatggtttgaagtggtgaacatggatttttctcggcttcacatgtacagtcc

SEQ ID NO: 239922 - DNA, 100 bp, Homo sapiens
gcgctgccagcacctgcaggcggagaagaagaagatgcagcagaacatccagagatcgacatcacatgctgggatgcagacccagttccagaagaggagg

SEQ ID NO: 239923 - DNA, 75 bp, Homo sapiens
attctgtagcttacacatttgaagaggatggccgagcctcgatttaacaacccctacttctggccccctcctccc

SEQ ID NO: 239924 - DNA, 104 bp, Homo sapiens
tgcgactcatccacctccggctgaagctccaggagctgaagtggttatggccagtgagaatgtgcggtgttgcattgcagaagaagctaggaaagctcatctgg

SEQ ID NO: 239925 - DNA, 74 bp, Homo sapiens
ggccacaaagaactcccacctgcgacacatcgagcacatggagggtcaccgaagtccccacacgctggctctcc

SEQ ID NO: 239926 - DNA, 90 bp, Homo sapiens
tggagaagctgggattggagattccacccaaacttgctggtcactgggagaaacatgccaaaggccaggatttgtttgatcagattgtgt

SEQ ID NO: 239927 - DNA, 83 bp, Homo sapiens
cacaggggtctttcgaggcccggtactacccaaacgtcagtcgaatcacaggcaggagacatatctgaagagatggattaaga

SEQ ID NO: 239928 - DNA, 83 bp, Homo sapiens
caaagaatcaagttgcaatgaaccccaccaacacagtttttggtcaaaatgcagatcttcgtgaaaacccttaccggcaagac

SEQ ID NO: 239929 - DNA, 100 bp, Homo sapiens
ttatagtcctgattcaagtgttggcggatggaagggaggagactcctgaccctcagaatggagcggcctattgccaattcatggacatgctcttccctgg

SEQ ID NO: 239930 - DNA, 75 bp, Homo sapiens
tttgccttggggaatgaaaagggcaaggccctgatgtatagtcgtgagatggagaataaagaaactctcaaaggg

SEQ ID NO: 239931 - DNA, 98 bp, Homo sapiens
tcaagactggtccacggagtgtatgaccacaaacagccatcaaggaggcccagaagattaacaatggctcaagccaggcggatggcactctcaaacca

SEQ ID NO: 239932 - DNA, 101 bp, Homo sapiens
ccttattggaaaaacatttcttacgtgtcgtgaaaactacccctaaaagccaaaatgggaaaggaaaagactcatatcaacattgtcgtcattggacacgt

SEQ ID NO: 239933 - DNA, 75 bp, Homo sapiens
gacagaagcagtggtcgaatccagtagaaaactggtcaaggaagctggggcagctggcattttatgctatgtggg

SEQ ID NO: 239934 - DNA, 97 bp, Homo sapiens
ccgtcctccaccgtttcctccaggacagcacctagtcgtggccggaggagtctcagagctgtcagaaagctttcaggatgccaacccgcccctgaag

SEQ ID NO: 239935 - DNA, 100 bp, Homo sapiens
ggaagaggccttggtccaacacaaattgcctccttatgtctccaacatggaccgcctgggggactcggaactagctaatccagacagagctgcaccatgt

SEQ ID NO: 239936 - DNA, 51 bp, Homo sapiens
gcctggtgccaatcattgacaatattatggaactgactcagcacaagaaga

SEQ ID NO: 239937 - DNA, 100 bp, Homo sapiens
cggcgggagcgcgaacgagcgacggcggaacccgtgggcctgtggactgcagcctcggcggtcagcagaccaagatcactccatggatgaaatgacagct

SEQ ID NO: 239938 - DNA, 75 bp, Homo sapiens
gcgtggaccacatagacatttacgcggatgtcggcgaagagttcaaccagcaggttcaggagaagtggcacctgg

SEQ ID NO: 239939 - DNA, 98 bp, Homo sapiens
aggcggcaaaatggcggaccgcttctcccgcttcaacgaagaccgagactttcagtggtttgagtccagccaatgacactggagccaaaaagaagaaa

SEQ ID NO: 239940 - DNA, 71 bp, Homo sapiens
agaaactgcaaagaggacatagttaccatggtcctcaaattaaagtgaagctgtggtctaccaatctagac

SEQ ID NO: 239941 - DNA, 83 bp, Homo sapiens
caatgtcagagaaatctttgacaagatagaagagtgatggatgtcatttctcgttcacagctttacttggatgatcttttttc

SEQ ID NO: 239942 - DNA, 80 bp, Homo sapiens
atgacctggaaaatgtgtgcaattgggtagtggacacttgtttacacaaggtgttgccacatctgcaaacttcctgggag

SEQ ID NO: 239943 - DNA, 100 bp, Homo sapiens
cagcctgctcaagaactgcagcattgcagccgccaagacgtcatggctccgatcttcatcttgaagaagagtgacattgggtgactgctgcttggaaaac

SEQ ID NO: 239944 - DNA, 100 bp, Homo sapiens
acagatcagcagcccccaaacttgatttcagaatcagctcttccgacttccctgggggccacaaacggatttcggcctggcccgggcctatggtgtccca

SEQ ID NO: 239945 - DNA, 100 bp, Homo sapiens
tccaacatggacatcctgaagccaatcctgaatgtctgtaaacctgtggaggagacacagcgcccgcccacactgcaggagatcaagcagaagatcgaca

SEQ ID NO: 239946 - DNA, 83 bp, Homo sapiens
ttgtcactccaacctcttttcgctggagccttcacgtaaatgggtccagtcatgcctcccagtaagaagccagaaagctcagg

SEQ ID NO: 239947 - DNA, 100 bp, Homo sapiens
ggctgcagaagaagcacacctgaaacatgaatttgatgcagacttacagctattagaagggctgaataaagggaacatgcagctctgcagcaatattctg

SEQ ID NO: 239948 - DNA, 100 bp, Homo sapiens
ctctgacgtctctcaagccactttagccagtgtagccccagtatttactgtgaatccatccttaaagtcaaaaactaatgatggagaagaaaaaatggaa

SEQ ID NO: 239949 - DNA, 90 bp, Homo sapiens
ccatcaaccgccagatcaacctggagctctacgcctcctacgtttacctgtccatggtctgcggacgctgtataccctcctccacttccc

SEQ ID NO: 239950 - DNA, 82 bp, Homo sapiens
gacagattcgcagtggtcgcttcttctccttgaatgtttctccatcccagagagatgaagtaattcaatggctggccaaact

SEQ ID NO: 239951 - DNA, 101 bp, Homo sapiens
ccagaggagaggcgcccccgccggccgccgcgccgcccggcagcctcggcaggcaacatattgctgaacgttctgattccacccaatatgccatgtacgcg

SEQ ID NO: 239952 - DNA, 98 bp, Homo sapiens
agacttcttagacttggaggaggtatgcctggactgggccagctgctctgttaaaagcgaaaatgaaacaattgcctgcggcaacagttcgactcctt

SEQ ID NO: 239953 - DNA, 83 bp, Homo sapiens
tgctctcctgaaataattctggagtcatgcctgaaatgccagaggacatggagcagctgcatcttcctcccgtgaggctggcc

SEQ ID NO: 239954 - DNA, 75 bp, Homo sapiens
ggtgaaacaccactgaagcattgccaagggctaagttctaaaaacatcagttcatctccaagcgttgagagtttg

SEQ ID NO: 239955 - DNA, 75 bp, Homo sapiens
cctcagcctcctgaggagctgggattacagtccatgctccgagggagaggaggttgttacaaacacacattctat

SEQ ID NO: 239956 - DNA, 100 bp, Homo sapiens
tcgtgtaaccagtctatgggaagtgagatgcagacagacatgctgaactatctggaagtccactgaaaagcaaaagcactaggaagcctttggcatgtat

SEQ ID NO: 239957 - DNA, 74 bp, Homo sapiens
taccactgctggcgctgaccttcatcacagacaacagcctggtggcagcggatcagggagcttccaaggcattt

SEQ ID NO: 239958 - DNA, 90 bp, Homo sapiens
actccagcttctggtgaaagaggaatgttcaaaccttgtactactcagctgatcacaagctgcttgatgggaacctactagatggacagg

SEQ ID NO: 239959 - DNA, 87 bp, Homo sapiens
gcagaagatgaagctttgagtaacattgccagagaggtacttgaagaagcagaagctcaacatttatatcagtccatcttgcctgat

SEQ ID NO: 239960 - DNA, 100 bp, Homo sapiens
acttcagaggacgaggaaacaatcgtggctacaaaaatcaatctcagggctacaaccagtggcagcagggtgaaattggagaattattacaaacaagggg

SEQ ID NO: 239961 - DNA, 90 bp, Homo sapiens
aacaactgctacttcagttgcgcagacagtatcaatgatcttcctcctgacatcaatagatttgaaataactcttagtaataaaacaaag

SEQ ID NO: 239962 - DNA, 132 bp, Homo sapiens
ctcccgcccagcagttcctccacgcaggggctccggaatcgcccgaccgcacacgttgccaccctgagctcgagagtcaggatgtctcagatttaacaacagttgaaagggaagactcatcattacttaatc

SEQ ID NO: 239963 - DNA, 97 bp, Homo sapiens
cctggagtccggtggctcacacttccactggaaatcaagggaacctcagaacctgttctggatccacagcaaatccaagcatttgatcagctttgcc

SEQ ID NO: 239964 - DNA, 98 bp, Homo sapiens
ggcaaggactctgcgtgcattctccactgccgtctactcggccactccggtcccgacacctagcctgcgaaactgttaaggcagcaataatagaagag

SEQ ID NO: 239965 - DNA, 100 bp, Homo sapiens
ggggatgccagtaagcgaaaggctattgttgcagaccggaacactggagatgatcagacttcctgaatagagaaagcttatgtgctttgttacattgggg

SEQ ID NO: 239966 - DNA, 80 bp, Homo sapiens
cctggagaaccacctgcgcggccggaagaaagcattgtggtatcgagaaccttccctgcgaacttcagaggaacttccag

SEQ ID NO: 239967 - DNA, 100 bp, Homo sapiens
tgagcggcgcgggctccagactcgccgtggtcaagttcaccatgagagggccaactgcaagcaaatgcttattgtgaaaatccagatatagtattaattg

SEQ ID NO: 239968 - DNA, 100 bp, Homo sapiens
cgcgccgccagccgccgctccgagaggctgcaccggccgccggtcatcgtcctgcagcgcggagcctgcggccaagatatctttagaggacattcaagct

SEQ ID NO: 239969 - DNA, 87 bp, Homo sapiens
agaacgtccactgcgggccggcgaaagctggtcgagtcccagacaccagaagtctgaatttggagaaggctggggtagatactagcc

SEQ ID NO: 239970 - DNA, 75 bp, Homo sapiens
acaaaacttcaagccaaacatcaagcagaatgtgatttgcttgaagatatgagatctgttacctaaagcaataaa

SEQ ID NO: 239971 - DNA, 97 bp, Homo sapiens
accagtgaataaagatttggaatttcagctccatgaaccatttcttctgtatagaaatgcaagctgccaccaggaaaccctccccgaagaatgggta

SEQ ID NO: 239972 - DNA, 75 bp, Homo sapiens
gccgatccagcctgcggagcctgtggggcagcaccagtggcagttcgcagcctccaggacttggctcgcatcgcc

SEQ ID NO: 239973 - DNA, 74 bp, Homo sapiens
ttagaatgtgaacgtaatcaaaccctggttcaaactgcctgagtctcgctctgtggcccgcccaagctggagtg

SEQ ID NO: 239974 - DNA, 98 bp, Homo sapiens
gctgcccttccagaggttggtgagggagatcgcgcaggatttcaaaaccgacctgaggtttcagagcgcagccatcgatgcctggagttactgtaaaa

SEQ ID NO: 239975 - DNA, 83 bp, Homo sapiens
gaaccttcgcattcagaatttgaccatcttggtgagaaacattaagacctactaccagagctccaaacgagaatggaagccgc

SEQ ID NO: 239976 - DNA, 82 bp, Homo sapiens
tggcgatggtcttcctgctggggctcatgtttgagcgttacagtgtttctgccacctctgtacaaaagacaattttacttgt

SEQ ID NO: 239977 - DNA, 90 bp, Homo sapiens
gggtgtccgagttgccgccggagaggagtggcctcgcccgcttggctgaacatatgcagaagaaaaggagaaaacaagaaaacaaagatg

SEQ ID NO: 239978 - DNA, 75 bp, Homo sapiens
cagatgcagaagagaatttggaagatgccatggaggagattgactttcttcgttccaatcccaaaatctggaatg

SEQ ID NO: 239979 - DNA, 100 bp, Homo sapiens
tcagcagcagacaggggaccgaggagagcagagcccaggaactggacagcagacaaggaagggctgtgcctgcgcccagaagcagctacacttcatggac

SEQ ID NO: 239980 - DNA, 75 bp, Homo sapiens
ctccttcgccgccgcgcacaaccgcacgtgcagacaaatttacatgtattggagaccagaccagaagcccttctg

SEQ ID NO: 239981 - DNA, 90 bp, Homo sapiens
cgagcggtggtttggacgccggcggagacgcgggcgagaattccagaagattgccatggcaacagcaataggatttgctataatgggatt

SEQ ID NO: 239982 - DNA, 74 bp, Homo sapiens
tggcgtccaaagtcacagatgctatagtctggtatcaaaagaagatgttgatgttagtgaagattcacctcctc

SEQ ID NO: 239983 - DNA, 100 bp, Homo sapiens
taggttgtcaaaattcacaaggcaaggtgactttgaaagactcccaaaagccaggctgccgaggccaccaaagtggctattgacgtaggcttccgccata

SEQ ID NO: 239984 - DNA, 74 bp, Homo sapiens
acagtgatttcattgtcaagtatcgtggtgtcagctatggcccggtttgatggtgctgagggctcctggttcca

SEQ ID NO: 239985 - DNA, 85 bp, Homo sapiens
gcagtacaactgctctgacgatgaggtactgatttacagtgtttctgaaagatctatccagcactccgatggccagcaacaacac

SEQ ID NO: 239986 - DNA, 100 bp, Homo sapiens
cctacctgcagccccaaatcacgccgaatcctgtaactcagcacgttcaggaatgctttgtgtggaaagcttcagtgtgagaatgtacaagagatacctg

SEQ ID NO: 239987 - DNA, 75 bp, Homo sapiens
cgctgacaagatcgagggcttctgtttcaagtgccccatttgctccaagtctgtggcttctgacgagatggaaat

SEQ ID NO: 239988 - DNA, 60 bp, Homo sapiens
cgggagtattatgaaaagatcgcgccttggtgctgaattggggaagtctgttgtatatca

SEQ ID NO: 239989 - DNA, 82 bp, Homo sapiens
ttcggtggactccttcggcagtccacccaccgccgccgcctcccagaaccaaaaacttttgctagaaaatcagcttttacga

SEQ ID NO: 239990 - DNA, 50 bp, Homo sapiens
aaaggaagtgattcagacccatcccaggcctggactttgccggattcact

SEQ ID NO: 239991 - DNA, 100 bp, Homo sapiens
tgaacatttcaataaattgatggccagacctgcagttgctctacactttcagggtcttgctctatcgcccaagctggagagcagaggcatgatcacatct

SEQ ID NO: 239992 - DNA, 100 bp, Homo sapiens
ggcggggcccaggtgagaaaggcccacctgtgtcctggttgagggtctccagggttctttggggcccgagggactttcagttaccttgatgatgtcccat

SEQ ID NO: 239993 - DNA, 90 bp, Homo sapiens
ccgccgacgacccagcagccgccatggctctgctccgagagctttcagcagaggccaaggcagcattgcttgaatttgaagaaagggagc

SEQ ID NO: 239994 - DNA, 50 bp, Homo sapiens
ctcatcacacatcccttccatgttacgttatgatgatgaagtgaagcggg

SEQ ID NO: 239995 - DNA, 90 bp, Homo sapiens
ggagccatcacgcccagctagccatcttctaattttcattccttcaaaggtaatgctatgggctatgtacgaatgataagatctggtggt

SEQ ID NO: 239996 - DNA, 101 bp, Homo sapiens
gacgtggcagcaagcgggagtcggggatagtgtcatcggttcggtaaagtttctgttctctggctcatgcacaattagttcgagaagttgatgtggagaag

SEQ ID NO: 239997 - DNA, 50 bp, Homo sapiens
gggaccatgggctccaggatcaagagtcttttagtcctgctatacagctg

SEQ ID NO: 239998 - DNA, 100 bp, Homo sapiens
catgacgccatcctgccgcagctggcgcagcccacgctcatgatcgacttcctcacccgcgcctgcgacctcgcacccaccaaggctccggatgtgttcc

SEQ ID NO: 239999 - DNA, 100 bp, Homo sapiens
gtggacctcacttgtgaatctttagagcctgtggtggttgatctgactcacaatgactctgttgtggtcctgggaactccaacaagggagcaaatcagag

SEQ ID NO: 240000 - DNA, 90 bp, Homo sapiens
ggctgcgctaccggaatgtcatccagcgagtgattagcaacaaggagtgaggatcttcataatgctctacaaagaggtggaactcgctct

SEQ ID NO: 240001 - DNA, 83 bp, Homo sapiens
caaggattcagagcagatgtgatctgcgctaggtggcatctcctctcacggatgcctcgctcagattggtcctccagaagtac

SEQ ID NO: 240002 - DNA, 101 bp, Homo sapiens
gggtggcggcggtcgacatgttccaggtcccggatagcgagggcggccgcgccggctccaggacaaattgatggccaggagatcactgccaccgccgtgct

SEQ ID NO: 240003 - DNA, 100 bp, Homo sapiens
gctatttttgaaagaacatgaccaccttcgaaaattctgaagactactttgaggtcaacattccaacagacctacgagcaaaacattctggggaaataag

SEQ ID NO: 240004 - DNA, 100 bp, Homo sapiens
gcaagctccagtgctacgtgtccctggcattttaggtgtcggttgggtaggttggagtccgtgcggctggagtaccgtgcggggctgaagaacatcgcaa

SEQ ID NO: 240005 - DNA, 97 bp, Homo sapiens
cgagcgagcgcgcgcgcgaaaactccgggcagggggagctgatcaccttctattactattggaagaagacccccgaagcagccagctcccgagccca

SEQ ID NO: 240006 - DNA, 97 bp, Homo sapiens
ggggagtggaaaggctctcagtgaaaaaggccaacagagattttgagaaacacattgaaggatctgttaacacttgatatacccaataaaagcagtg

SEQ ID NO: 240007 - DNA, 75 bp, Homo sapiens
aacgtgggggatccctccatccgcaaagccagtgagaaagatcagtctaaagaaaaggagaagaaagtgaaaaaa

SEQ ID NO: 240008 - DNA, 98 bp, Homo sapiens
ctcactctgcccatcacgtgccacatttgcttggggaagaaacttggggactgtggcagccatggagccagtgtagtgccacatgtggggatggtgtc

SEQ ID NO: 240009 - DNA, 75 bp, Homo sapiens
ggtatagatgaagagcaaggccctcaggtgattatcctgaaccatccaggccaaataagcgccggctatgcccct

SEQ ID NO: 240010 - DNA, 82 bp, Homo sapiens
aacagccaaaacagttcattcatattcagcgctgattactctgagtgcaaaccttttcactgttccagagaggagcctgaca

SEQ ID NO: 240011 - DNA, 100 bp, Homo sapiens
cttgactactcgcatcgcgcactttttggatcggcatctagtctttccgcttcttgaatttctctctgtaaaggagctgaattcttgccgccaggatggg

SEQ ID NO: 240012 - DNA, 75 bp, Homo sapiens
tggacatgatctttaacagtatagggtcatttcaagctaaacgatatccacatgaaatgaagatcacctctgcct

SEQ ID NO: 240013 - DNA, 98 bp, Homo sapiens
gacaatgacatggtcaagattgagaacctgaccaaggccctgaccctcatcatcttcatctgcttcacggcctccatctctgcctacatggccgcggc

SEQ ID NO: 240014 - DNA, 100 bp, Homo sapiens
tctctgccttgctgatctgagctcagacctgccaatttaccagagataattgataacaccctgtaacagctgagaaactactaaagttcctggggaagca

SEQ ID NO: 240015 - DNA, 98 bp, Homo sapiens
gattggaatgctaataatgggcgcgaggagcaaacacaattgttctgagtccacagctgcggcacttttaatgacagcttggatttacactgggcaac

SEQ ID NO: 240016 - DNA, 98 bp, Homo sapiens
tgcccgaggcccagaacggctggctctacggcaagctggagggctcgtccgcgaggtggacatctataccgtcaaggtggaagacctgaccttcacct

SEQ ID NO: 240017 - DNA, 75 bp, Homo sapiens
gcgcttctgctctcagtgtcccggacttcaggagccttcacgtaaatgggtccagtcatgcctcccagtaagaag

SEQ ID NO: 240018 - DNA, 83 bp, Homo sapiens
ttctcatggctgccctgtggggcctctacatgtccctggttaatgtgggccatgtctggagcatcagatccatgctgctgctg

SEQ ID NO: 240019 - DNA, 98 bp, Homo sapiens
agccctggtgccaggtgtccatccccgtgctgaggtacgtgaacacactcctgaaactcatcccgctggtgctgggtctgcaggaacaactgcggcag

SEQ ID NO: 240020 - DNA, 75 bp, Homo sapiens
ttcagaagagccaaggaataaacatgcaatgaacccaaaaggctttctacaagttctgattaaagtcagaaatag

SEQ ID NO: 240021 - DNA, 82 bp, Homo sapiens
cacaagcagatctactactcggacaagtacttcgacgaacactacgagtaccgtttgctggcctagacctgaactcttcaga

SEQ ID NO: 240022 - DNA, 74 bp, Homo sapiens
tatgaaatatctcagcaggacattaaagtgtcaatgtgtgcggataagggttattcccattgtgttgatgttta

SEQ ID NO: 240023 - DNA, 113 bp, Homo sapiens
gtccgagtctccgccgctgcgggcccgctccgacgcggaaggtgctggagaatctggtaaaagcaccattgtgaagcagatgaggatcctgcatgttaatgggtttaatggag

SEQ ID NO: 240024 - DNA, 82 bp, Homo sapiens
agttgatgaatcaagaggaatgcacatctgtgaagatgctgtaaaaagattgaaagctttatttctcaaactctgaggctgc

SEQ ID NO: 240025 - DNA, 75 bp, Homo sapiens
atggaggagatgcatggccagtgcctcggccccaacgacaccaagcccatcaagataaagaaatgggggctccga

SEQ ID NO: 240026 - DNA, 74 bp, Homo sapiens
cattatgtcgtgtgcttccccgaccagcatctcagacatgtcgaaaaagatgttttgatccctaaaataatgag

SEQ ID NO: 240027 - DNA, 89 bp, Homo sapiens
accagagtcggcgtaactatcgcctgacagggtatctgaagtaaaaggggggccagatgcagatggctggagatgggtgcagatcccag

SEQ ID NO: 240028 - DNA, 98 bp, Homo sapiens
tgcagcagctgagaaaggagctcggggactcccccaaagacaaggcccgccaagctgccccctgtgtgctattctttgatgagctggattcgattgcc

SEQ ID NO: 240029 - DNA, 128 bp, Homo sapiens
gtgtcagtgttaaaggaacctctacaacgaaggtgaagccacggaagataaggggcagtggaagccgttggagggcctcaggcaggaacacaaggtgtcgtggcagaaaggaagaaggggccgggcac

SEQ ID NO: 240030 - DNA, 82 bp, Homo sapiens
gggactccccgtgaacaacatcttccagcagatctcccccgtgggacacctgctccacttcaccttttgccatgagtaaaag

SEQ ID NO: 240031 - DNA, 74 bp, Homo sapiens
gctacagacgttatttttcacgaatcagctacgaaaggtagaacagcggctggagccggccaagcgggcagccc

SEQ ID NO: 240032 - DNA, 100 bp, Homo sapiens
gtctgcagccctggatctattaaagggagcattccgatcatctgaggaacagcagagcttgttcatcgagtgaaaagaagagctgacccagatcccatga

SEQ ID NO: 240033 - DNA, 98 bp, Homo sapiens
acgcggcggccgtgctcctgctggtgatcttaaaggaacagccttccagcccggccccagtgaacggttatgaagacagtatggagtttccagaccat

SEQ ID NO: 240034 - DNA, 100 bp, Homo sapiens
tatcaccatgcaagctttgtcggaagaggaccggaggctctggatggaagccatggatggccgggaacctttccttatcagcagaatccttacaatccac

SEQ ID NO: 240035 - DNA, 100 bp, Homo sapiens
tggtcagtgaacagacacgggtgaatgctgctaaaaacaagactggggctgctcccatcattgatgtggtgcgatcggcaacaaaatgaagtttctccac

SEQ ID NO: 240036 - DNA, 90 bp, Homo sapiens
gagaaaaccggcatctgcaaaattcggccgcccaaggttaacacagaaatctgcctcctgggccatgccgcttctaaggcctgtttcttc

SEQ ID NO: 240037 - DNA, 100 bp, Homo sapiens
tctgcagaaagttgtggttttgttgcatcgcttacaaaggatggcagtttcttctcctcggtatcagaagctctgtaagcaattctgtggtgttcttggt

SEQ ID NO: 240038 - DNA, 75 bp, Homo sapiens
gaagatagtgcctttcagccctaccaggctatgaccagggccagagcactcagatctcagtcagaggagtctgct

SEQ ID NO: 240039 - DNA, 75 bp, Homo sapiens
ttgcgggcaccgcagtcgccgtgaagatggcgtctaccagccgcatccagttttggatgaaccaatagcagaagc

SEQ ID NO: 240040 - DNA, 76 bp, Homo sapiens
aacagtccaaagaattcttctagaaccctataaatacttacttcagttaccagatggcctgatatgaaggagtcac

SEQ ID NO: 240041 - DNA, 107 bp, Homo sapiens
agaaaaagcagccggtagacttaggtctgttagaggaagacgacgagtttgaagagttccctgccgaaggcccagctgtgagatacagtaagttcaagatgtcagag

SEQ ID NO: 240042 - DNA, 83 bp, Homo sapiens
cttcgaaaaagtgcctgaagtgacacaacacatgttttcttctggtatctggctaaatgccctctggtggtcagaagatgctg

SEQ ID NO: 240043 - DNA, 100 bp, Homo sapiens
ggcagcaccaagaggaccaatacgggcgcacacgtgtcaaagttcgactccttccacgagaacaccaggccccccatgcccatcttggagcagaagctgg

SEQ ID NO: 240044 - DNA, 100 bp, Homo sapiens
ctcgctctcggcttgaccgcattcttcctcccagaattctctgagctggtgacaggtgccacaggcactggggatctcaccagaaaggaaccgacggagc

SEQ ID NO: 240045 - DNA, 82 bp, Homo sapiens
aggaccaaactctgctgctaaagatcatggatcaagctgctaatccccagctcagcgaagcgcagctcaggcagttcacact

SEQ ID NO: 240046 - DNA, 100 bp, Homo sapiens
taataattcagatggagaatatatggctggacagctagctgcttatggctataaaattacaggtaatggaactgctggtccatctgaataaacgtataaa

SEQ ID NO: 240047 - DNA, 78 bp, Homo sapiens
tttgtggagggtacttcattgatgccacaaccataatagaatgtctacattcctctctgtatgaaaaagctgatatca

SEQ ID NO: 240048 - DNA, 82 bp, Homo sapiens
aagaggctgtgcttcggcgctccggctcctcagagagcctcggctaggaggccaacggtcctgctgatggctacgcagccat

SEQ ID NO: 240049 - DNA, 100 bp, Homo sapiens
cggcgcagtacaccaacgcggtgcgcgaccgggagctggacctccggggctttccttaaagtttcccatgtctcaatggactcctgaatataacgagctc

SEQ ID NO: 240050 - DNA, 96 bp, Homo sapiens
agaagttgtccatgttcacactgggtgaaggaagctgaaaccacagacatgactgagtcctccatgaagagagaagacagactgctgctttggacc

SEQ ID NO: 240051 - DNA, 83 bp, Homo sapiens
ccgaagaatcaaggctgggccggacccggtggcctggcaacagggggttctttccagcccttgtcctcctaattggattatat

SEQ ID NO: 240052 - DNA, 88 bp, Homo sapiens
agctccagagcccagacttgcaggtttcagcagccagggaagaggtacctggtcgacgaggttttccaggttacatgtatacagattt

SEQ ID NO: 240053 - DNA, 82 bp, Homo sapiens
caccaacattcttggcattacgcaggccagcaactcccagctcaatgcaatgtatgagttggccacaggccgatttccttat

SEQ ID NO: 240054 - DNA, 74 bp, Homo sapiens
ttttctgaagatgggaaaagccctttggacaagacgaaatctcacaaaactgtcccttatcttcagtcacatgc

SEQ ID NO: 240055 - DNA, 75 bp, Homo sapiens
ggtgggccgcagcattggcatgatgggccaggggtcccacaggcatctaataggattcaggaatcaaagaatcag

SEQ ID NO: 240056 - DNA, 50 bp, Homo sapiens
ccgggcggaggccctacgacctggaccgggaagtctgttagaactgctgt

SEQ ID NO: 240057 - DNA, 82 bp, Homo sapiens
caaggtcgccctcaaggccatgatcaaaactgtcagagatggctttggattccccgttctgtgtgctgctgtctggctcctg

SEQ ID NO: 240058 - DNA, 100 bp, Homo sapiens
gtgtgccgcgggtgcgctgccggtgacagtactatactggcaattgctggagaagattttgcaattgttgcttctgatactcgattgagtgaagggtttt

SEQ ID NO: 240059 - DNA, 74 bp, Homo sapiens
gttgaagtggcctatcccaggacaggtggcactctttcagcaagccagggctgagcaggaagaagaattcatta

SEQ ID NO: 240060 - DNA, 73 bp, Homo sapiens
tagacttggaggaggtatgcctggactgggccaggtgtatcaaaccgaatgataaaaaagcagcacacatctt

SEQ ID NO: 240061 - DNA, 100 bp, Homo sapiens
ggaaaggctgcggcgcgcagagcgaggctgcgggaccccaggatgggggacaggaggctgcggggcctcagagagaagaagaaggaggttcctgctgtgc

SEQ ID NO: 240062 - DNA, 75 bp, Homo sapiens
acgacacctccaacttttgccctggattacaggtgttggggatgtcctttgcactgaccctgaactgccagattg

SEQ ID NO: 240063 - DNA, 100 bp, Homo sapiens
tccagtgttcaccatcctggccccggaagaactggcctatgatctggatgtggatgatgcgcctggaaacagtcagcaggcaactccgaaggacaacgag

SEQ ID NO: 240064 - DNA, 83 bp, Homo sapiens
atgacagcaagccctactgagcgtgctcccctctgagactggagtgagagggtcttctggtctggccagcatgacccagaact

SEQ ID NO: 240065 - DNA, 100 bp, Homo sapiens
ccggctgccccacttcgacctgagctgggaggccactagcagccagttccggcccgaggacaccgactaccagcagaaacttcagtgctctcaagaagga

SEQ ID NO: 240066 - DNA, 83 bp, Homo sapiens
acgccccttcgccgggacctggcacccgaatccggcctgccggggaaatcctcattgacgattcaatttgttgaaggccaatt

SEQ ID NO: 240067 - DNA, 100 bp, Homo sapiens
cactgcattagaaaacagtgaagatgcaattgaaattacaagcgaagaccgttttatacagattgatgaactcccagagggcgctgtgaagcctccagca

SEQ ID NO: 240068 - DNA, 100 bp, Homo sapiens
ggatctggtgtaccaggcgaagctggccgagcaggctgagcgatacgacgggtttccaggcctgaggtgcccgccctggccccaggagaatgaaccagcc

SEQ ID NO: 240069 - DNA, 75 bp, Homo sapiens
gcaatacgtggaacaacactggccactttgaaccagatgatgggacgagatgtgggctctcttgatgagaagatg

SEQ ID NO: 240070 - DNA, 98 bp, Homo sapiens
cgtagctgaatccagtaccaaaaacgtcaacaacagttttacggtctgagtgtacggtttgcagatatgcctggaaaatcaaggaagaaaaagaagaa

SEQ ID NO: 240071 - DNA, 100 bp, Homo sapiens
caaatggtcttttcagagacagttatcacatctgtgggagacgaagaaggcagaaggagccactttgggaagcagcatattgagaacctcttcagtgacc

SEQ ID NO: 240072 - DNA, 75 bp, Homo sapiens
gccgggggcagccgccatcggcagcgccaggtctatcagccacagtctctgcaagtttccaagagcagcagaaaa

SEQ ID NO: 240073 - DNA, 82 bp, Homo sapiens
agtaccgcctccttcccagccgcgcggcttcctccagacctctcggcgcggattgacgtgagtgaattcagatataactcaa

SEQ ID NO: 240074 - DNA, 100 bp, Homo sapiens
tgcggcagcgaactgggtggcgaacggggcgagcctggaggattgtcactccaacctcttttcgctgaaaccaggcgatgcggaagaagctaatcttgta

SEQ ID NO: 240075 - DNA, 83 bp, Homo sapiens
cctcctcctcctgtggtggaggagaaggaaagggagtgcatccgccccaacccttttccccctcgtctcctgtgagaattccc

SEQ ID NO: 240076 - DNA, 92 bp, Homo sapiens
aggcgagattgcctgacccaggcctgctcggccctcacagggagcatcagatccatgctgctgctgactcggagccccacagcttggcacag

SEQ ID NO: 240077 - DNA, 75 bp, Homo sapiens
tgcacattaggttgcagtatgtggccagttatttgcctcagtaaaagagtcatgctttcagaacgaaaaggcaca

SEQ ID NO: 240078 - DNA, 100 bp, Homo sapiens
cgggctcggggcctccgcagcgacaacatggaggccgtgaagaccttcaatagcgaggtttgaccttattgataccttaccttctgacgaccaagaaaaa

SEQ ID NO: 240079 - DNA, 100 bp, Homo sapiens
cctggaaatccggcggcgccagccactcggagctaatccacaatctccgcaatcatggaagggaagtggttgctgtgtatgttactggtgcttggaactg

SEQ ID NO: 240080 - DNA, 75 bp, Homo sapiens
acggctgggcgacttgcgaggatgagagcgacgaagccaactgtccagatttaatccagagactgacttcactat

SEQ ID NO: 240081 - DNA, 100 bp, Homo sapiens
ttaccagtgtgcagaagttctcgaatcattctttgtacagaaattgaaaggcttcaaagctagcaggagtttcaattactgaaaattacttggaaataga

SEQ ID NO: 240082 - DNA, 82 bp, Homo sapiens
catggtgttgctgctgtactccttctccggttgacatcatggacatatgtgagtccatcctggagaggaagcggcatgacag

SEQ ID NO: 240083 - DNA, 74 bp, Homo sapiens
ccaaggccaaccgcgagaagatgacccaggacttcggcagtctgtccaaccttcaggtcactcagcctacagtt

SEQ ID NO: 240084 - DNA, 98 bp, Homo sapiens
acggggttcgggtgtctcgtgtgtgaacatcacaggaacttaagagatttgagaacttcataaaatctcgtcctccttttgatgttgtcattgatggt

SEQ ID NO: 240085 - DNA, 81 bp, Homo sapiens
tggcggatgccctgcagtacctgcagaaggtctctggagacatcttcagcagggatccaggtccggcacgatcaagaccca

SEQ ID NO: 240086 - DNA, 100 bp, Homo sapiens
ccagcccctccgccgcgcggagcccacgaaggggacagcgcagccggcccagagctcgggtctccggggaccgagtatgcagttggcagtagatgtgcag

SEQ ID NO: 240087 - DNA, 75 bp, Homo sapiens
atgaaaaccttactgcttctctcttcaggcgctaatgtgcatgctacaacagcaacaggagacacagccttaacc

SEQ ID NO: 240088 - DNA, 100 bp, Homo sapiens
aaaaggttgtgaaaccttttaactctccacagtggagtccattatttcctctggcttcctcaaattcatattcacaggactctagtatgggattcctttc

SEQ ID NO: 240089 - DNA, 90 bp, Homo sapiens
gcgaagcgcggcgggcaggcgctacgagagtgcctggaagagctgggatgtctggttgagtcctatggcatgaatgtttgccaaccaacc

SEQ ID NO: 240090 - DNA, 75 bp, Homo sapiens
gctggtccaggccttccagtacacagacgagcatggggaagggatctaccgaacagaaagggacaaagggacatt

SEQ ID NO: 240091 - DNA, 50 bp, Homo sapiens
cttgtggacaaatccaggggaagtggtactgactgtcctcacccacaccc

SEQ ID NO: 240092 - DNA, 100 bp, Homo sapiens
gatttttattgcaaggcgctctctcttagagaacatggagctgatccaggacacctcccgcccgccactggagtacgtgaagggggtcccgctcatcaag

SEQ ID NO: 240093 - DNA, 100 bp, Homo sapiens
atgcaccacagccatctcacatttccaagtacattctcaggtggagacctcctgatgaaaacaaaggcgatatgcattatgatgctgagattatccttaa

SEQ ID NO: 240094 - DNA, 96 bp, Homo sapiens
ctggcaagaaagctaagcattgatattgtgactcgaaaagccctgtttcctggtgactctgagattgaccagctctttcgtatctttcgtatgctg

SEQ ID NO: 240095 - DNA, 71 bp, Homo sapiens
gcaccaagctctgctccacactgccaaccggccagaggacgagtgtgatgctgaggtgctgctggacagtg

SEQ ID NO: 240096 - DNA, 90 bp, Homo sapiens
ctatttctctagctattgccttattttttctcatggatgttcttcttcgagtatttgtagaaggcccggccgcaccacctgggtctccgc

SEQ ID NO: 240097 - DNA, 100 bp, Homo sapiens
cactttgagcccaacgagtacatccattatgacctgctagagaagaacattaacattgttcgcaaacggttccacaaatcaacaagacttttcttcaggg

SEQ ID NO: 240098 - DNA, 82 bp, Homo sapiens
agagcaagatggaatgattttttctgttctctgttctgtttcccaatgcagaaaagaagggatgccacttcaaatgaacaac

SEQ ID NO: 240099 - DNA, 80 bp, Homo sapiens
acaagaggggacaagtacctttatgaaccagtgtatcccaagcctcgaaaaagcccaagacagcagaagcagacacctcc

SEQ ID NO: 240100 - DNA, 75 bp, Homo sapiens
taaggaaatgctgaagcttttgatggtttgtgaagaaggtgacaagctaacctactcaaaatatgggcgattttg

SEQ ID NO: 240101 - DNA, 82 bp, Homo sapiens
aagcctgccataatgaagttcccctttttaggtattttaagcctggaatattgtgtgggtattattggtggcaaacctaaac

SEQ ID NO: 240102 - DNA, 100 bp, Homo sapiens
attgaaaaggctttgagaaattttgagtcctcgagtgaatgggcggatctcatatcttcacttggcaaactcaacaagaagtggtgaaaatacagcatca

SEQ ID NO: 240103 - DNA, 77 bp, Homo sapiens
ctgacgactgtgcaggaagaaaacgagccagtgatttacaatagagcaagggacacagcgggtcaggaaagattccg

SEQ ID NO: 240104 - DNA, 85 bp, Homo sapiens
aaattggactaaattaccagaatgcaggggtgaggaagatcttctcagtcctccccaggacacaagcacagggttagaggaggtg

SEQ ID NO: 240105 - DNA, 101 bp, Homo sapiens
aaatgttttgccacgtggatgtgaagatttcctctaaaagaaacatgatcaggggcaagtcttgttggatgtcgtcttcaagcatctagatttgactgagc

SEQ ID NO: 240106 - DNA, 101 bp, Homo sapiens
tggcaaccgccccgtctgagaagtaggtggagagttttcaaacactgttatcggccagatgaagaaatttggaaggattgccatatgtggagccatctcta

SEQ ID NO: 240107 - DNA, 99 bp, Homo sapiens
tgagcaactggattatactgtactgcccatgaaaaaggatgttgaccggacaggtgccagcgagatttcagattcctgtaaacctctaaagaaaaggag

SEQ ID NO: 240108 - DNA, 75 bp, Homo sapiens
aaggcaacacttccttgaagaaacaagcttacagctatcatggtgaacttacttcagattgtgcgggaccactgg

SEQ ID NO: 240109 - DNA, 90 bp, Homo sapiens
gcgaaggaggcgggagcggagacctcgctgcgctcatggcgtcgcccggagacacctatggctgccgatgaaggctcagcagagaaacag

SEQ ID NO: 240110 - DNA, 100 bp, Homo sapiens
ctgaagtcggtgtttggagaaaaggactcagtttgctaatccagactttacacaacctatctcagaagttgtagatgaagtaattcagaattgtcctatt

SEQ ID NO: 240111 - DNA, 82 bp, Homo sapiens
ctgcaggaaagccagccaggaaacgcagaggcaagtgaggcctatctggttggcctttttgaagacaccaacctgtgtgcta

SEQ ID NO: 240112 - DNA, 100 bp, Homo sapiens
aggaaattgtgatctgcgatcgagcctcggtcaaggagccttgaaaagatcttttgaggtcgaggaggtcgagacacccaactccaccccaccccggagg

SEQ ID NO: 240113 - DNA, 50 bp, Homo sapiens
tcgagcagaaagaatgtctttcaggtctgaatctgcaagaggagccatct

SEQ ID NO: 240114 - DNA, 75 bp, Homo sapiens
gaagaggctgcagaatatgctaaacttttggccaagagaatgaaggagacagacttattactagatgattcgctg

SEQ ID NO: 240115 - DNA, 100 bp, Homo sapiens
agaaataatggcaaataacttttccttggagagtcataacatatcactgactgggctgatcccttatccaacatggttctaaccttcagtactaaagaag

SEQ ID NO: 240116 - DNA, 101 bp, Homo sapiens
atattatggctaataacacaacaagtttagggagtccatggccagaaaacttttggggcgcatattaaatttcctattgactacccctattcaccacctac

SEQ ID NO: 240117 - DNA, 102 bp, Homo sapiens
gtatgaagcggttggcaccactgaagtgaccgaatgagattgcttccaagtatgatcatcaggcagaagaagatcttcgcaattggatagaagaggtgacag

SEQ ID NO: 240118 - DNA, 99 bp, Homo sapiens
ctgatgacaaaaagcttcagagttctctaaaaaaactggctgtgaataatatagctggtattgaagagcaatcatttggggaagaatctacagttgctg

SEQ ID NO: 240119 - DNA, 83 bp, Homo sapiens
gatcaacctcgtcatgtcctacgcggtgtggacactgccagcggctgcagccgacttggaatgacctgggagacaaatacaac

SEQ ID NO: 240120 - DNA, 100 bp, Homo sapiens
gcagaaatggaaattgacagaattctctttgaaattacagcagtttcagaagaggagccccgccgaggcatgagggccgtgctccccccagaggaaggga

SEQ ID NO: 240121 - DNA, 75 bp, Homo sapiens
ttttggagaagaatccaatgagtttactaatgactgggatggaattactctgatcaccaaagaggaagcctctgg

SEQ ID NO: 240122 - DNA, 101 bp, Homo sapiens
gcgaggaggagccggagcgggagtgacaccgagccggacccagcgcgacctgcggcggctccggggtgtgttccagagaacaagccttcagacatttgcta

SEQ ID NO: 240123 - DNA, 87 bp, Homo sapiens
gacgcccatgcactaccacctgcgggagatcatcatctgcacctaccgccagatgtgcaacatgctgggcctgggggacatgaacgc

SEQ ID NO: 240124 - DNA, 100 bp, Homo sapiens
aacgtcccgctggatctgacccgaggcgtgccttcagatgctgattcttctgctgccagtaataaaataagtggtgcaagtaattctaagccaaatcgcc

SEQ ID NO: 240125 - DNA, 100 bp, Homo sapiens
ttgctctctggcctggtctgccagagccctggggacgctggggatcagctcccaaacaccctcaagcagggcgtctgcctgagcccgcttttctacaaga

SEQ ID NO: 240126 - DNA, 90 bp, Homo sapiens
tattatgcccagacaagtccccagggaatgccacagcatcctccagcacctcaggttttgcggctagttggctattcaagaaacctcgcc

SEQ ID NO: 240127 - DNA, 83 bp, Homo sapiens
tcttcagaaaccaggctgctttcaggaacattgctgtggattcccaggtgctggagaatctggtaaaagcaccattgtgaagc

SEQ ID NO: 240128 - DNA, 80 bp, Homo sapiens
cggacggtacttctgccactgctgctccgtggagatcgtcccgcgcctgccggtacacggtcctcttctcgcacggcaat

SEQ ID NO: 240129 - DNA, 74 bp, Homo sapiens
cggcctcccagaaaaccagagctgctacaggaggaggatgaagaaggttataacgatggagaggtagatgacga

SEQ ID NO: 240130 - DNA, 75 bp, Homo sapiens
tgggcctctgagatatgccgtttacgggtcggaatgaactgatcgcccgctacatcaagctgagaacggggaaga

SEQ ID NO: 240131 - DNA, 100 bp, Homo sapiens
ctgctcggggtccgcgcggcctccgcggagccagggaagcccgtcagcctgagctacagatgcccatgccgattcttcgaaagccatgttgccagagcca

SEQ ID NO: 240132 - DNA, 118 bp, Homo sapiens
gagagagcgagctgagtggttgtgtggtcgcgtctcggaaaccggtagcgcttgcagcatgctcaccatggatgatgatatcgccgcgctcgtcgtcgacaacggctccggcatgtgc

SEQ ID NO: 240133 - DNA, 98 bp, Homo sapiens
gttacctatgtacctgttaccactttcaaaagtttcctatcctgggagcaggagagtgtgcctatttgaatgacaaaggtgccagtagtgccaggcac

SEQ ID NO: 240134 - DNA, 98 bp, Homo sapiens
gggattcgtggtgaaggtccggggcttgccctggtcttgctcggccgatgaagtgcagaggtttttttctggttgaggaacaggttagcaccactgag

SEQ ID NO: 240135 - DNA, 100 bp, Homo sapiens
cggcatggaggggacggccgtggccgtgttcgaggagcgcctggaccatgctgctgagcgcctactggcacggcctccacccgggctactacctgagctt

SEQ ID NO: 240136 - DNA, 98 bp, Homo sapiens
cttctgtcaaaaacacagggatgagttggaaatgcagaaatcacctgtcttctgcgtcgatcaggctgggagctgcagaccggagctgttcctattcg

SEQ ID NO: 240137 - DNA, 102 bp, Homo sapiens
gcgtccgccgattcctcctccttggtcgccgcgtccttggctggcgtacctcctgccccccgaggtctgcagtctcctgaacccagcagccatctacgccaa

SEQ ID NO: 240138 - DNA, 75 bp, Homo sapiens
ttcttcctcaactatctcgctgacacgcagcataagcttaaatcgtctcagaaggacaaggtccgccagtttatg

SEQ ID NO: 240139 - DNA, 97 bp, Homo sapiens
acaactatactcatgatgttttcatgaatgtggaagttgatgggtcgaaactaaatgtgaccagcacgtggaacctggcttcgcccttattgtctgt

SEQ ID NO: 240140 - DNA, 97 bp, Homo sapiens
gagctgtcgccggcggagggtgcatgtttgcgaggaagccgccgggcgccgcgcctttggtccacctaaacccactgtgttcatctctggggtcatc

SEQ ID NO: 240141 - DNA, 101 bp, Homo sapiens
acacagcaatatctctgggctttcacagaaatcatgagtggaggatctcaagtccacattttttggggtgctccaattgctccactgaaaatcacagtatc

SEQ ID NO: 240142 - DNA, 83 bp, Homo sapiens
ttgcaatatgactttggaggaattctcggctggagagcagaagaccgaaagatgaaggatttgggggcagagcacttggcagg

SEQ ID NO: 240143 - DNA, 83 bp, Homo sapiens
gtcctcgagtgaatgggcggatctcatatcttcacttggcaaactcaacaagggactttgaacatgtcggggatcgccctcag

SEQ ID NO: 240144 - DNA, 83 bp, Homo sapiens
aaattaacggggtgtctctctcctgatgaagaggtacaatgactcttcttgcttttcacctaagttgaataagcaccctgtgc

SEQ ID NO: 240145 - DNA, 100 bp, Homo sapiens
gtcagctacgggcaagcgggcagctgaagatgatgaggatggatctgtagtccttgactcttgtgaagtgtcaacagaaaatgatcaaagcactcgattt

SEQ ID NO: 240146 - DNA, 98 bp, Homo sapiens
tgacagagaaggctcactcaaggatcagttggctttagcaattgaattagctacatccatctgatggcacattttcgaatgcacactcaaataaaaaa

SEQ ID NO: 240147 - DNA, 75 bp, Homo sapiens
ggcctggaggacgggcaaaacggatcagcttgaacgggtctttttacgacttggccatgctgaaacagatgaaca

SEQ ID NO: 240148 - DNA, 98 bp, Homo sapiens
cccaaggaagataccgagtgggagaaaagatcctcttcattagggcgcagcagcttactgatctggaacaaaaattagctgtagccaaaaatgaactg

SEQ ID NO: 240149 - DNA, 82 bp, Homo sapiens
cctaagaagacagcttgaacctagactggatacacgtctgtttaactacgcaaaaggtaatgctggcatggcttactgggac

SEQ ID NO: 240150 - DNA, 60 bp, Homo sapiens
ttcctgttattcttgctcgtgtggctgtgcgcttctctgaagtagctttggaaagtagag

SEQ ID NO: 240151 - DNA, 46 bp, Homo sapiens
gaagcaaaagccttccatgattacggttctctataaaggtgtctta

SEQ ID NO: 240152 - DNA, 100 bp, Homo sapiens
tgggaggacccgggacaccgcacagccgggaaatgcccgagcgggaagaagttccgcagcaagccgcagctggcgcgctacctgggcggctccatggacc

SEQ ID NO: 240153 - DNA, 101 bp, Homo sapiens
agcggggaccgagcctgggaggccggccggtgccagcacctttcggcttctgagacggcggcagcagcggcattcaggaatcatattgacaggtcatgaaa

SEQ ID NO: 240154 - DNA, 90 bp, Homo sapiens
ctggcctcataccttgtccacacagagttcctgtacaaggttcctgacctgtgcattcagagagaagaatcgacctgcactgccatccac

SEQ ID NO: 240155 - DNA, 83 bp, Homo sapiens
aacatagcgagaccctatctctaccataaaaaaggccctgggaggagcggggacactgaggacctctctccaaattggcctct

SEQ ID NO: 240156 - DNA, 89 bp, Homo sapiens
aaggtcaaaggctatgacaacctctttgctatggctatgtccaaactgggtcttcggcaggttacaggagttactagagtcactatccg

SEQ ID NO: 240157 - DNA, 76 bp, Homo sapiens
tcttacctctttgatctcgacaataagatgtccggtctgtgctacgacagcaaaatgttccaggtgcatcaggtgc

SEQ ID NO: 240158 - DNA, 100 bp, Homo sapiens
ccgagacaagcgtttggcacttgtagaccctggaacttgatactaaatttgggactctttgctgcgggagtttggctggccaggaacttgagtgacattg

SEQ ID NO: 240159 - DNA, 100 bp, Homo sapiens
atgtgtgtgccagcgatgtccccatccgccgccgagaggaggcctatgagaatcaggtattctggatggtgaaatggaccccaaaggtatgtgttcctca

SEQ ID NO: 240160 - DNA, 75 bp, Homo sapiens
cccagaaacgtccacatgtgggtactgcattcctaccggtgtgacaggaacttaaaaggagtctagaaaatccag

SEQ ID NO: 240161 - DNA, 109 bp, Homo sapiens
agcagctccacgaaaggcagccgcggatcgccgcgctcagcgacaaacaagaccaagaatcgccttcagccctgtctggtgcatccttggcagaaagtgaggaggaaaa

SEQ ID NO: 240162 - DNA, 100 bp, Homo sapiens
caaatatgagaaagctaggccatctgaataactttactaaggtggatagatacttctcaagacatcacacagcgtgagtcaatcaaggagggaagccaca

SEQ ID NO: 240163 - DNA, 83 bp, Homo sapiens
cggccggaggagccatggactgcagcctcgtgcggacgctcgtgcacagatacgtcaccgacgatgagggcgcacctgctgtc

SEQ ID NO: 240164 - DNA, 80 bp, Homo sapiens
tgtgcgcgcgaaggagcggaagaatggcagtgctcaaactcaccgaccagtgctgcaggtggagaaattttcagcctgtg

SEQ ID NO: 240165 - DNA, 50 bp, Homo sapiens
tctcccaccgactgcctgtttaaggagggtgaggacaaaatcttcttaat

SEQ ID NO: 240166 - DNA, 100 bp, Homo sapiens
cataatgacattgtggacagtgacagcgatgctgaggatcgaggaacgttgtctgcttcggaaccaaaaagaagcttcccagagccggggccaggagccc

SEQ ID NO: 240167 - DNA, 75 bp, Homo sapiens
cgtggagggcctcgccatgtcctgctgcccggtattgttgcagcatctggcagtgagactgaggatgaggacagc

SEQ ID NO: 240168 - DNA, 100 bp, Homo sapiens
acagcctgcagcttatgttagtgctcctgtcacccaccaactagcacaacctgttgtgaaaacatttaaagttgatgatatgttatcaaaagtagagaaa

SEQ ID NO: 240169 - DNA, 100 bp, Homo sapiens
aacaaattctgcagttttgttttggcatatgctggttacattccccctagcaaagagacagacaattttcccgcagagcccaattacatgggcagcaggc

SEQ ID NO: 240170 - DNA, 85 bp, Homo sapiens
cgccgccgcgggcgccgggagcgagctgggagggagccgcgcgcctttgtgcgcgcgccgagcttcgggctcagaatcaggttct

SEQ ID NO: 240171 - DNA, 82 bp, Homo sapiens
agagaaacccactgaagacgtctgcgtgagaatagagaccaccgagacccaacatgagtgaagtttcctgcaagaaacggga

SEQ ID NO: 240172 - DNA, 75 bp, Homo sapiens
tcagagaagagcaactcggagttttgggggtgtgctttgtaagaatcaggccttattggagacattcaagcaaag

SEQ ID NO: 240173 - DNA, 100 bp, Homo sapiens
gcagaaagcatttaaccagcatggctacttcatattttggaaagcagtttttaagacaaaagtccaaggcttgcgagaaggtcatttccgtgggtcaaac

SEQ ID NO: 240174 - DNA, 75 bp, Homo sapiens
aggacctcaggctggtcaccaaccgggctggcaaaccaaagggcctgtcccagtcggctttaccctatcgacgca

SEQ ID NO: 240175 - DNA, 82 bp, Homo sapiens
ggaagggccgctttttttgcagagtcagcgctttgggaccaagccattgagacccagagcagcagttctgaagagatagtgc

SEQ ID NO: 240176 - DNA, 100 bp, Homo sapiens
aaggattccaagtaactcttatttggaaaatcagtcgcctatatgccttatgctgaggtcaaacgtgctctagaacaggaagcacagatgcacaatactg

SEQ ID NO: 240177 - DNA, 100 bp, Homo sapiens
ctggaattttgccgatttcatgactaaccagtgacagagcgggatgccaccagcttgtccaaagggaagttccaggagctcctggtgggcatcgttgtgg

SEQ ID NO: 240178 - DNA, 83 bp, Homo sapiens
aacccttcaactcctgttggctctcctccatctctctcagacctagaggatcaagacataatgggagcatttttagacaagcc

SEQ ID NO: 240179 - DNA, 100 bp, Homo sapiens
tcagcccacttcctagctgaacagcgcgaggcggcggcagcgagccgggtcccaccatggccgcgaatgtcatggaggcggagcagaccaagaccaggag

SEQ ID NO: 240180 - DNA, 101 bp, Homo sapiens
ttccggattctcaagctgattgtcaggaggtctggaagctccgagtttatcttgggaactcaagaggagaggatcacccagttcacaggtatttgaggata

SEQ ID NO: 240181 - DNA, 75 bp, Homo sapiens
cctggcaagattcttctgaattgtgctgccttggccaaaagagggtatcctgtcttggtagtgaatggaagaggg

SEQ ID NO: 240182 - DNA, 100 bp, Homo sapiens
gcaaaggtggaggcggctccagttacatggaggagatgtacttcgcctggttggaaaacccccagagtgtccacaaggtacttgaagaagcagaagctca

SEQ ID NO: 240183 - DNA, 90 bp, Homo sapiens
ggcgggcggcagcatgtcggtggcggggctgaagaagcagttctacaaggcgagccagtgtgaagcctcagtttaggtcatctggtggtt

SEQ ID NO: 240184 - DNA, 103 bp, Homo sapiens
cgggacgcgagcggcgagccggagcgcggagcccggctcccgcaccatggaggaggacgacagctacgtactatactggcaattgctggagaagattttgcaa

SEQ ID NO: 240185 - DNA, 100 bp, Homo sapiens
cacccaggaggcatttgaagttccaggtttcatcaccttaaatggttttgaaccaatgaaggtgtattcccttaaaaagacggacagcccatcgtgtgaa

SEQ ID NO: 240186 - DNA, 100 bp, Homo sapiens
aagtatgacagcgaccgcacaaaatgctgagccgattatcaggattagcaaatgttgttttgcatgaattatcaggagatgatgacactgatcagaatat

SEQ ID NO: 240187 - DNA, 90 bp, Homo sapiens
cttttaccgatgctttaacatacagccactagatggccatgactaccctcgagcagcctaccagcaagtgatccagccggctctgcctgg

SEQ ID NO: 240188 - DNA, 126 bp, Homo sapiens
ttgaaattgaaattgagagacaaaaggaaatgcttcgaaataatgaatccaaaatccttcatttacagccaaactggcaagacgcagtcaagaacgggacaatcttggcatgttggtctggtcacc

SEQ ID NO: 240189 - DNA, 97 bp, Homo sapiens
acttccatcatctttagacctaactcaaaggtcttgccaagaaatattgctgttccttactgccaactctccaagaaactggaactgcctcctattt

SEQ ID NO: 240190 - DNA, 98 bp, Homo sapiens
cagtgctgtccaaatactactctctatcccttcccactggaggcatgtgatgagaggaaatcaccgaaaacgtggctgcttcaaggatcctgagccag

SEQ ID NO: 240191 - DNA, 98 bp, Homo sapiens
tccagtgaaactcgcctagcagtgtctcgggtcatcacttggacaacagaacccaaaagttctgatgttcggaagatcaccggcgtaatcaacccagc

SEQ ID NO: 240192 - DNA, 100 bp, Homo sapiens
aaacgtgttcgctgcccagaagaagggaaggcgcgagtgaggaaaggaggtactgtaggtgctcttacagcctgttccaagtgtggcttaatccgtctcc

SEQ ID NO: 240193 - DNA, 97 bp, Homo sapiens
tttacgcgcacgttggaaccgaagagagctctgttgttgcaaggctgaggggatctggcggtggagcgctaggatcagacgcccccgcgatgaccag

SEQ ID NO: 240194 - DNA, 50 bp, Homo sapiens
ctttcacaggattcagcaaatggccctggccaacgtcaacattgggagcc

SEQ ID NO: 240195 - DNA, 98 bp, Homo sapiens
ccggagattgtgcctgccaccctacgccgtagccgtccagagactggcaggcctcggcctaaagaagtcatacatgtgaaattaaagatgacagtcaa

SEQ ID NO: 240196 - DNA, 115 bp, Homo sapiens
accaagcatgtggctcctggtcagtgtaattctaatctcacggatatcctctgttgggggagaagttgtgaagtgtttaccagtgacagcaccagagaatggaaaaattgtcagt

SEQ ID NO: 240197 - DNA, 90 bp, Homo sapiens
gctgcccggtttggcactgctcctgctggccgcctggacggctcgggcgctggaggggtccctgtgaaggtgaccaacgtcaaggatggc

SEQ ID NO: 240198 - DNA, 100 bp, Homo sapiens
gaaattctggaacacctatatgggtgacagaaacgaggaggtcagagccgtgggccagggcgtgctacgagcgctggagagccggcagcctgagggaccc

SEQ ID NO: 240199 - DNA, 74 bp, Homo sapiens
atgtggacttgattgtggaagtgctaagatgcatttttagatgaattcactaactggtcaagaataaatcccaa

SEQ ID NO: 240200 - DNA, 100 bp, Homo sapiens
gcttgctattaattaacagactttgtggggaaaaaaaggagcttgccttctgagctttgtaccaaagacctgggaaaaatattaataaggcagcggaaag

SEQ ID NO: 240201 - DNA, 96 bp, Homo sapiens
cgtgaccgagagcgcgaatatcgtcatcgttagaagaagcgatccaagcagcggaagttacagcagaaggccttccgcaagaggcagctgaaggag

SEQ ID NO: 240202 - DNA, 100 bp, Homo sapiens
cccaataaaaataacaccagaatcttccagatactttctccataaggcgaaaagattgtcactgctgttccaagggcacacgcagagggatttggaattc

SEQ ID NO: 240203 - DNA, 100 bp, Homo sapiens
gatgatgaacagtatgcttgggagtcttctgctggaggttccttcactgtgcgtgctgaccatggtactgggcctaatcgctacgtgcctctttggctat

SEQ ID NO: 240204 - DNA, 74 bp, Homo sapiens
attcggggaggtaggcgctgggccgaggagatgccatggacaatattaccaggcagaaccaattctacgatacc

SEQ ID NO: 240205 - DNA, 101 bp, Homo sapiens
ataaatttggattaaggaacagcgagctgtttgacccctttgacctcttcgatgtgcgagactttggaaaggcaaggatatcctgaaggatactatagttc

SEQ ID NO: 240206 - DNA, 100 bp, Homo sapiens
ctcagtacatcacagacgcagaaggtatgacgctgggcgggatggcttcatcgacctgatggagctgaagctgatgatggagaagctgggggccccccag

SEQ ID NO: 240207 - DNA, 75 bp, Homo sapiens
cagctccatttcccctggctctgcaacgcttctcagtagtattggaaattatgcccttgctcagcactgtttcat

SEQ ID NO: 240208 - DNA, 73 bp, Homo sapiens
caacctatgttgccctgagttacataaatagaaaaccaaatatggcatcttccatgaggagcttgttttctga

SEQ ID NO: 240209 - DNA, 75 bp, Homo sapiens
tttgatgcagttgatcactgatattccactcttcatggcttctcgctgtttctgggatgctgacactgacaacta

SEQ ID NO: 240210 - DNA, 90 bp, Homo sapiens
ctcgcgctactctctctttctggcctggaggctatccagccttcctgatttctcccgattccttccttctccctggagcggccgacaatg

SEQ ID NO: 240211 - DNA, 75 bp, Homo sapiens
gcaccactgaagtgaccgaatgaggagccggatgaaacggccctccaccttgcagtcagatccgtggatcgaacc

SEQ ID NO: 240212 - DNA, 78 bp, Homo sapiens
aaacatcaaagaggtctagcaaagtgcgtaaattcacagagaaacacgaatgggtaacaacagaaaatggcattggaa

SEQ ID NO: 240213 - DNA, 96 bp, Homo sapiens
gaacattgatttgaggaggatgcttcgcagtttacgaagttttgattcccaccatggccatcacccagtttcggttatttaaattttgtacctgcc

SEQ ID NO: 240214 - DNA, 50 bp, Homo sapiens
cggtgctgcgagggcagaacctgggattacaaggcagaggaagacccagc

SEQ ID NO: 240215 - DNA, 50 bp, Homo sapiens
gatgtatcagccactgctggctgttgttaccttatcccatatcacacaac

SEQ ID NO: 240216 - DNA, 100 bp, Homo sapiens
gaagatgaaatccctgttcttaaaacagctttattaaaccgcctggagcgaattttcgaagcatgttttccttccatacttgtccctgatgctgaagagg

SEQ ID NO: 240217 - DNA, 100 bp, Homo sapiens
aggcggcgcgcgagctggagcactcgcggtggatgtgaacactgaccggaagatcagtgccaaggagatgcagcgctggatcatggagaagacggccgag

SEQ ID NO: 240218 - DNA, 75 bp, Homo sapiens
cgaggagtgtctgaaggactcgccccgcttcaggttcttctgtgtggcagttcagaatgatggatcaagctagat

SEQ ID NO: 240219 - DNA, 50 bp, Homo sapiens
cgcgatcctgggctaccggtctgtgggcctttggacaagcacacacaaac

SEQ ID NO: 240220 - DNA, 100 bp, Homo sapiens
tctccatcatggtagccaacatcctgaggctcttccaggagtcagaaataccatcagaggaggggtactgtgactttaatagtaggccaaatgagaactc

SEQ ID NO: 240221 - DNA, 75 bp, Homo sapiens
ggacatcttcatttacagagcaacttgatgaaggtacacccaatagagagaatcctgctgcatcacagaagctgg

SEQ ID NO: 240222 - DNA, 75 bp, Homo sapiens
aaccaatttctcctgcaaaccagggtatcagagcttcttggacacttaatgattgttggcaagaaatgtgctgct

SEQ ID NO: 240223 - DNA, 101 bp, Homo sapiens
ttatgaactcgaaatgaagcggaaagcagatatgcgcgtcagcatactttggcggtgctcaacaggaaccttggattatattttacaacgctgtcagttgg

SEQ ID NO: 240224 - DNA, 105 bp, Homo sapiens
gtgtgctgacttgataagaggcgcaaaagaaaagaatctcaaagtgaaaggaccagttcgaatgcctaccaagcatgacgacagagatgatggtgtggattattg

SEQ ID NO: 240225 - DNA, 90 bp, Homo sapiens
cgtgacctaaagctggagtattttgagattggagaattaagtcatccgtccttggctcaggatttggagagcttgcaccaccaaaaatgg

SEQ ID NO: 240226 - DNA, 109 bp, Homo sapiens
aaattatttggaacttatggtagaacttccttggaacaaaagtacaactgggatgaggggaaatgcgtagaaggaattctggaaatctttgacatgctcctggcaacta

SEQ ID NO: 240227 - DNA, 75 bp, Homo sapiens
cgttaactctaacgtgaacgcggaccaggaggctctgaagagcggccattcctcagattcgaagctgaacacatc

SEQ ID NO: 240228 - DNA, 90 bp, Homo sapiens
cgccggatgagttgcttttaggcttgctggcccgcggggctgtccaggcacgcgaggcccctcaggccggaaggtggtggtcgtacgctg

SEQ ID NO: 240229 - DNA, 48 bp, Homo sapiens
acacctggaagtccttaatgtcagaccaaccctggaatggtccccagc

SEQ ID NO: 240230 - DNA, 100 bp, Homo sapiens
tattgatgctgccaaatttcctcttccaatggaagtgtttaaggctttgaagacaagattcccaaaaggagattctctgagatgcaaaatgaaagacgag

SEQ ID NO: 240231 - DNA, 98 bp, Homo sapiens
gagcttctcagaagacagagggttttcttttgagggcgccctgcgtccggcagaggaggcgagcatcccgctcaggtgatgaggaacccctcgcgcac

SEQ ID NO: 240232 - DNA, 100 bp, Homo sapiens
gttttcatggatgtaaggatgcccaagggatcttcaatattcatgttattttctcctttggtcttatatgattgttacctttatgaagctttagtgatta

SEQ ID NO: 240233 - DNA, 90 bp, Homo sapiens
ccatgctggtccttgccatggactgtggggtcaactgcttcatgctggacccggtccaggtgaaggccgtgctgggccacctcctggcaa

SEQ ID NO: 240234 - DNA, 82 bp, Homo sapiens
cagaaacgtgaggatcaagaagccggactacaaggtcgcctacgtgcagctgactagacgcttgaagcaaagctgccatccc

SEQ ID NO: 240235 - DNA, 100 bp, Homo sapiens
tgaagagagaagacatattctacacttcaaagagaatggatcttggagaatgtctgaaagtccatgacctggctttaagagcggattatgaaattgcatc

SEQ ID NO: 240236 - DNA, 96 bp, Homo sapiens
agctcctggccctggccctgatcatcctgctgggcttcgtccagatcgggaaggacggttgatgatgaagcgccggccgtgtaaatgaagatcggg

SEQ ID NO: 240237 - DNA, 74 bp, Homo sapiens
tgttctctaggccttttagaaaacatgccaggtgattggtgaaaacactaaacaaccctgagcccagggccaac

SEQ ID NO: 240238 - DNA, 74 bp, Homo sapiens
gactgtgcaggaagaaaacgagccagtgatttacaatagagcaagtgaaggagaacgacctgctcagaatgaga

SEQ ID NO: 240239 - DNA, 75 bp, Homo sapiens
ccgtcgtggaagcaggactgcgccgcgtcttcctcaagggtgccaagctgttctacctttctggaatggtgcatg

SEQ ID NO: 240240 - DNA, 100 bp, Homo sapiens
acgaaataaagctcctgggcaaggggacgtctgcagctgagatttttttcccaggaagccatcccgtcagaggggttcaagtgatgaaagttggcaaact

SEQ ID NO: 240241 - DNA, 75 bp, Homo sapiens
ggcagaaattataaagaaggttgaaaggagcagggaaaagatccagaagcatgtatgtcgagagtaccaacgtgg

SEQ ID NO: 240242 - DNA, 75 bp, Homo sapiens
ctgaaatcactgcaccttaaaaacaaaagattgagctgcactgtattcctgtgtgactgcacagaaaagttacaa

SEQ ID NO: 240243 - DNA, 83 bp, Homo sapiens
ctgtgctgccaggtcgcaggcgccgccgccgccgcacttccgggtgccattgcagggactggtgattgcagctggaagtgccc

SEQ ID NO: 240244 - DNA, 74 bp, Homo sapiens
acaccaagggtcgctttgctgtacatcgtattacacctgaggaggccaagctctggggcataatcaagcaagga

SEQ ID NO: 240245 - DNA, 100 bp, Homo sapiens
gggaacctcttccagttggaattgaagaatattcccaagtccttcacccgggctgagaagaaagccaaggtcattgcaggaatgaatgctgtggaagaaa

SEQ ID NO: 240246 - DNA, 75 bp, Homo sapiens
cgtggagtgacggtgccaccgcggcgcgttctgactcctcaggagcaaaaaacataacctgaagagggaggaagt

SEQ ID NO: 240247 - DNA, 74 bp, Homo sapiens
aaatggcacttcattggccacctacagaaacaaaatgtcaacaaattgatggatgaccacctaagaaaggagga

SEQ ID NO: 240248 - DNA, 75 bp, Homo sapiens
cttggccccctctgatctgcgccgggtcgccacatactgggccgtgcaggcctgcccagctgccagcggtggccc

SEQ ID NO: 240249 - DNA, 89 bp, Homo sapiens
gaaacagtcagagccaccagccaatgatcttttcaatgctgcgaaagctgccaaaagtgacatgcagggctctctttacctatgaaggc

SEQ ID NO: 240250 - DNA, 75 bp, Homo sapiens
tgttccaaagcctcctggaccgtccaagaaacctgcgaccgcatcaagcagtccgccagcggaaccaagcggcgc

SEQ ID NO: 240251 - DNA, 96 bp, Homo sapiens
cgcatgcacaccgtgattgctcactccaactgcatcgaggtctttcccgaagttatgcagctcccagagatcaagagaccatcaagcttcagatga

SEQ ID NO: 240252 - DNA, 90 bp, Homo sapiens
gggccgtgcagagcagcacctccatcaggtacaacctcgaggagctctaccaggtcctgctcaatctggaattttgtcagatcgtgaagt

SEQ ID NO: 240253 - DNA, 75 bp, Homo sapiens
gtaattggccaaatcactcagctgataggaaaccttaaaggaaactatcagaagctatggagatattttgcatag

SEQ ID NO: 240254 - DNA, 50 bp, Homo sapiens
gcggcaacggggcactgacctgggtgcccgttttacggagaagactttta

SEQ ID NO: 240255 - DNA, 101 bp, Homo sapiens
ggtctctgggtctctgacccccatccggccctcatggctttgtgtctggagctcttgaagcaatggctctgggctacttgggatgctgaaaggaaaaaaaa

SEQ ID NO: 240256 - DNA, 78 bp, Homo sapiens
atgtggaacccgctgacgtggatggctgactgtattgtggtattaaagataatcaaacattatcaagaagaaggacaa

SEQ ID NO: 240257 - DNA, 51 bp, Homo sapiens
catctgcaggatagacctgaagatttaagcgagagcctcactggttcccag

SEQ ID NO: 240258 - DNA, 100 bp, Homo sapiens
ggcatttggcgagaaggctggcgttagtgaagcgcgcccggcgtcacggcatgctcagtccctggctgcgctgcaggcttactctcactggttagcacag

SEQ ID NO: 240259 - DNA, 75 bp, Homo sapiens
accgcaacattccttatccaatcccttaccggggccttgccttagagatgtctctgaacaatttggaccctgaca

SEQ ID NO: 240260 - DNA, 88 bp, Homo sapiens
tagatacatggagcccatcagaatggcagatggcttatgaaccacagcacaagctccgggtggataaggcagctgctgcagcagcggc

SEQ ID NO: 240261 - DNA, 124 bp, Homo sapiens
caaattcctgctggagtacattgcgcccatgacggagaagctctaccccggctactacaccagggtggtgatctttgtgaagtctgtgcagcggtgcattgccttggcccagctactagtggag

SEQ ID NO: 240262 - DNA, 100 bp, Homo sapiens
ccctgggctttaccatctttgtggctgtgcttgccaggcctggctccaaagcgggcttttgccatgttgtccaggctggtctctactcctgggctcaagc

SEQ ID NO: 240263 - DNA, 75 bp, Homo sapiens
gttgctgccgggattttggaggccggggccgcgctgagggcgcccagctgaatgaagaagcagtacgacgtctca

SEQ ID NO: 240264 - DNA, 75 bp, Homo sapiens
cgcctccctgcgactcctggaccaccgggcgctggtctgctcccagccgatggtggatgcttccaaaagcatcga

SEQ ID NO: 240265 - DNA, 100 bp, Homo sapiens
gcagcatctaccccatcaccagaacccagcagcttgccagcatcgttgcaggcctgttacatgaacagaatatggcaaaaatgagactacttacttttat

SEQ ID NO: 240266 - DNA, 82 bp, Homo sapiens
ctttgacaatacaggaaatgtttgcgagtatgggctccggaacaaacgtgaggtctggagggtcaaatttaccctggccaag

SEQ ID NO: 240267 - DNA, 100 bp, Homo sapiens
tgggcaaagtgtggaaacagcagatgtaccctcagtacgccacctactattacccccagtatctgcaagccaagcatcgagagtaaacatgaggttacga

SEQ ID NO: 240268 - DNA, 100 bp, Homo sapiens
ccagtggatttccttgcggaaaggatgttggcggtccctgtgacctgtggagacacggccagatctgccctccatgcaaatgaagatgatgaagtcttct

SEQ ID NO: 240269 - DNA, 74 bp, Homo sapiens
gcggagtatacaccatgagcaaagctcaccctcccgagttgaaaaagtgccatcaacaaatatcccaccgaaga

SEQ ID NO: 240270 - DNA, 100 bp, Homo sapiens
cgaagagttgaagttaatggagaacatgcaacagtacgttttgctggtgttgtccctcccgtggcaggttatcaatactctggctgaccatcatcatcgt

SEQ ID NO: 240271 - DNA, 51 bp, Homo sapiens
tcctatggctcaaagaaagatgattatttctggagaccagaaggccaaaat

SEQ ID NO: 240272 - DNA, 100 bp, Homo sapiens
atttgccttaaactccctaaaatctccgcagctctggttcctgttgcggccgggcggcaccttcctacttctgcccagccacagccctcccctcacagtt

SEQ ID NO: 240273 - DNA, 83 bp, Homo sapiens
tccccaggtctgcagggaccgagggcctacactgcctcctcccacgccgtgcttaggctacaacagatgaggatgaggaaggg

SEQ ID NO: 240274 - DNA, 100 bp, Homo sapiens
gggagcctgacccacttccctcttccctcccgggacccactgctccaggattgggcgaacctcagagccccccaagatgaacccagtggtggagccactg

SEQ ID NO: 240275 - DNA, 75 bp, Homo sapiens
ccaagaagcagtagagggtgccatgcacattcaggtcgctctggtgcagtggacagagagtgtgggcctcacgct

SEQ ID NO: 240276 - DNA, 75 bp, Homo sapiens
tcagtttcggcgaaaggtcttagcagtcacagactcacctgccaggaagaaagccatctctgtcctggagatgga

SEQ ID NO: 240277 - DNA, 90 bp, Homo sapiens
gggtgccctcagggctcccagacctcaagctcctccaggtggccgtgaagaacaacatcgatgtcttctacttcagcaccttgtacccac

SEQ ID NO: 240278 - DNA, 50 bp, Homo sapiens
ctaaagcgactaatagcattacagccctggtacctgacagtgtaaagaag

SEQ ID NO: 240279 - DNA, 100 bp, Homo sapiens
tgttgcaggtgggataagaccccctcaaggtgctggagaatctggtaaaagcaccattgtgaagcagatgaggatcctgcatgttaatgggtttaatgga

SEQ ID NO: 240280 - DNA, 75 bp, Homo sapiens
gtaaattcttcagctgctcggacagatgaagctccccaaggagctgcagtggatgaggatcgcagtacggaacct

SEQ ID NO: 240281 - DNA, 90 bp, Homo sapiens
ggtttggaattgatgatcaagatttccaggaaacctgtccagtttaagtcgtcttggtctgagatataacagactgtcagcaatacccag

SEQ ID NO: 240282 - DNA, 82 bp, Homo sapiens
catccattctcctgccacccccagacctcctcagctccagacaatgcagatcttcgtgaagactctgactggtaagaccatc

SEQ ID NO: 240283 - DNA, 75 bp, Homo sapiens
cacatcctcacgaagcaggtccagaagcccttcctcagaccggaaataatgaagatgtttcattttcaagaccag

SEQ ID NO: 240284 - DNA, 74 bp, Homo sapiens
ttggccaccaagacctgggaacaagtcaagcattttccctgaagatgagatcccagagaaggcctgcaggcgcc

SEQ ID NO: 240285 - DNA, 74 bp, Homo sapiens
cttttctgagaatacttgctgaaaaggaagttttctggaatggaacaaaagtgcatttttatgtggagttatga

SEQ ID NO: 240286 - DNA, 98 bp, Homo sapiens
tctgatgacgatttggatgaatatacccttagaaaaaatgtggcagttctgttcgagaagtcacaggctacgtgttagtggctcttaatcagtttcgt

SEQ ID NO: 240287 - DNA, 50 bp, Homo sapiens
ctatattaaacatcccctacagaacaggccagacgggtgcagggaacaac

SEQ ID NO: 240288 - DNA, 76 bp, Homo sapiens
caagacacgtcggatgttgcagcagagccagcagctagcgcagcaagagtgagccatggagctacgtgtggggaac

SEQ ID NO: 240289 - DNA, 75 bp, Homo sapiens
gcttcaaaggttaaacaacttgtcttcgattgcacagctaacaagagagtgactcctctttcttcccagagtgtg

SEQ ID NO: 240290 - DNA, 90 bp, Homo sapiens
tgagacacagacaggacttcgaagcctgtccagatgaggcagttggaatctccccagcttgtggggctgtttgcagacaaggtcccaaag

SEQ ID NO: 240291 - DNA, 83 bp, Homo sapiens
cagcccctgcgtcgccgggaccctcgcgcgcgaccgccgaatcgctcctgcagcagagtgtggacgaatgtggaacctcgctc

SEQ ID NO: 240292 - DNA, 75 bp, Homo sapiens
ttggatttaaaagacagtcctcgtcagcactgactttcagctatggaatcgaccaagatcactccatggatgaaa

SEQ ID NO: 240293 - DNA, 100 bp, Homo sapiens
cggcctcttcctgttgcaccaggttcttcgaaaactgaagcagatgttgaacaacaagtgaagctgtggtctaccaatctagacaactcagtggcaagca

SEQ ID NO: 240294 - DNA, 97 bp, Homo sapiens
agccccgacgaacatttctgggtgacactcaacaggattcccgaacctgctgacatggccaagcatggagccgacgagccatcctccaggtcaggga

SEQ ID NO: 240295 - DNA, 100 bp, Homo sapiens
cagaaagaaactcctgtatatattcaaacaacgtcctactgctctgttggctcatgaaataggttttggaagtaaagttacaacacaccctcttgctaaa

SEQ ID NO: 240296 - DNA, 82 bp, Homo sapiens
agtccctctccccaccgcccagtaccggcagcctcagcaatagtcgcacgcttccgagaaatctggcattttttaaagtttg

SEQ ID NO: 240297 - DNA, 98 bp, Homo sapiens
gaaggcaatgatttataccatgaaatgattgaatctggtgttatcaacttaaaagatgccacctctaaggtctcagacttgatccgcagtggaaaacc

SEQ ID NO: 240298 - DNA, 83 bp, Homo sapiens
ataaactgctgatccacatgagagtccactctggggagaagcccaacaagtgtacgagccgagactgtctgaagctgggccca

SEQ ID NO: 240299 - DNA, 100 bp, Homo sapiens
caggacttcgacctggagccgtcccaggactgtgcaggggactctgtcacagttccagcaacagatagaaatgctttaagttcactctggggaaagctgg

SEQ ID NO: 240300 - DNA, 75 bp, Homo sapiens
gggctgcagccgcacgcggagcccggcggctactcggggccggacggacattgagtgcctgtgaagaaaacgggg

SEQ ID NO: 240301 - DNA, 100 bp, Homo sapiens
ctggagatcctttcctgcttttggtttccctggcaggggttgaactgtggagtgtgtggctgtgtgttctcatttcacccaaaacctttggacagtgcag

SEQ ID NO: 240302 - DNA, 100 bp, Homo sapiens
gatgagcaactggattatactgtactgcccatgaaaaaggatgttgaccggacagacttgtgcaccatggacaattttgctgagggagatttcactgtgg

SEQ ID NO: 240303 - DNA, 111 bp, Homo sapiens
cgaattcagaaggatatcgacgtcgtgatccagaagtccagagctgaggactgcctgtttgcagacaaatttacatgtattggagaccagaccagaagcccttctgaatta

SEQ ID NO: 240304 - DNA, 75 bp, Homo sapiens
gaaagagctgaagtgctcaaatctgaagattgagaaagatcagtctaaagaaaaggagaagaaagtgaaaaaaac

SEQ ID NO: 240305 - DNA, 100 bp, Homo sapiens
ctctgctcttcctcccttcgctcgcaccatggttcttgctggtgtgaaatgactgagtacaaactggtggtggttggagcaggtggtgttgggaaaagcg

SEQ ID NO: 240306 - DNA, 75 bp, Homo sapiens
tggaagaagaggattttcacccaccactcagcagctgtagccataaaggagaggagcggaagaccttctggtgtg

SEQ ID NO: 240307 - DNA, 100 bp, Homo sapiens
ggaccatcccccaatcctctcatcttgtcctacctgaagtatgccattagttcccagaaggaacccagccagccggcggaatgcaagcagcagtaggaag

SEQ ID NO: 240308 - DNA, 88 bp, Homo sapiens
aaaagccccgcctctgccttcggatagcatcaacaaagagagcattgtggatgtagaaggtgttgtgagaaaagtgaatcagaaaatt

SEQ ID NO: 240309 - DNA, 75 bp, Homo sapiens
cgagaacgtgcgggaagagaagatcatcgagcatttcaaacggctcttgtcaggatggtgaagctgttcatcgga

SEQ ID NO: 240310 - DNA, 100 bp, Homo sapiens
gagaagctgggattggagattccacccaaacttgctggtcactgggagctggaagaagaaagatctgtgctcaataatcagttgttagaaatgaaaaaaa

SEQ ID NO: 240311 - DNA, 101 bp, Homo sapiens
aatcactgtgttactggatgaagttgcagaaggaagtatcaaaactccgctgtcagcttgctaaaaaaaaacaaagtgagacaaaacttcaagaggaattg

SEQ ID NO: 240312 - DNA, 100 bp, Homo sapiens
aggcggcggcaaaatggcggcgcctgaggagcgggatctaacccaggagcagacagagaagctgctgcagtttcagacccaacatgagtgaagtttcctg

SEQ ID NO: 240313 - DNA, 99 bp, Homo sapiens
ggagtacacagggagcaaatatatcggggaatatgtagatgggagtctttcccagggaactccgatgaagtgttccaacaaaatgagcgagtgaaccaa

SEQ ID NO: 240314 - DNA, 88 bp, Homo sapiens
agaagatccagctttgttgaaaagcgaagccgttagtcccttaatacaaaggtttcaccagtgatcattaaagaatgggcagcttaca

SEQ ID NO: 240315 - DNA, 75 bp, Homo sapiens
atctgatgcacgacccagcaatggatgaagagctggaacggctgcctctcaatcctccctccatgatcttcgcat

SEQ ID NO: 240316 - DNA, 87 bp, Homo sapiens
aagatgtccaaccgagtggtctgccgagaagccagtcacgccgggagctggtacacagcctcagggtgtgctgatctgcaaaccctg

SEQ ID NO: 240317 - DNA, 90 bp, Homo sapiens
ttacacctaaaccaacactctttgaagaggagatcccagaactggagattgacgtggatgagctcctggacatggagagtgacgatgccc

SEQ ID NO: 240318 - DNA, 100 bp, Homo sapiens
ctactgcatgcccagcaccattcctaggctgggagcaaaacgggtgtgggccgaagatatgctcatgtggtgttgaggaaagcagacattgacctcacca

SEQ ID NO: 240319 - DNA, 76 bp, Homo sapiens
gttcctacagagattcatatgagagttatgtttcagcaagaaaaacatctgccagccagtgacccggaaaaccttc

SEQ ID NO: 240320 - DNA, 95 bp, Homo sapiens
ctgtcctggtagactacattcgtgtcctcgactttgatgtcaagcgcaagtcattgaatctttgggaattattatttataaagcactggactatg

SEQ ID NO: 240321 - DNA, 76 bp, Homo sapiens
ctccgctcgattttgtcaccgttatgtgggaagcgaatccaatccaggaggctgcaagccagggcctgaaattcgt

SEQ ID NO: 240322 - DNA, 50 bp, Homo sapiens
ctggagacatggaccgcggcgagcaaggctgtgggtgagcgtggaggatg

SEQ ID NO: 240323 - DNA, 100 bp, Homo sapiens
gatctctctcatctcgctcggctgcgggaaatcgggctgaagcgactgagtccgcgatggagggaagaaatgatttcccttggggatggagacatcagga

SEQ ID NO: 240324 - DNA, 74 bp, Homo sapiens
aaactccaaaagaaggtgtgaaagttaacaaggttattctcgttcaagttaatccaggtgagactttcacaata

SEQ ID NO: 240325 - DNA, 115 bp, Homo sapiens
gtccggttttgcttcaaaaaggaagcacaaagattgcgctatatggtttaggggctgcatcttcttcccagtttcaaggcttaccttcccgcagtgcaatctttcagcagcaacc

SEQ ID NO: 240326 - DNA, 75 bp, Homo sapiens
ccgcctgctccaaactccaccagccccgtgtccttcattgccacgtacaggatgtacagttacccagcacgtgta

SEQ ID NO: 240327 - DNA, 83 bp, Homo sapiens
ggcaggccctgagcacgctgctgtgtgagcagcaggagtggagtcaacatatcaatggagcaagtcacagtcgtcgatgccag

SEQ ID NO: 240328 - DNA, 100 bp, Homo sapiens
atttctcctagctgttgacgttggtgctcgtgacctctttatgcagcaagatgaagagcgacgtcggcagctgagagagagagctcgtcagctaatagca

SEQ ID NO: 240329 - DNA, 82 bp, Homo sapiens
agtattactttgcttctgatgcaaggtttccaatacttatctacaggaatcgccatgaccccagctctgagggaggcaacag

SEQ ID NO: 240330 - DNA, 100 bp, Homo sapiens
ctcaacgatacctattttctagtgctgagatcctgagacaatgagtcaacttttataacactgttactgggaatacttgacttactaagcttttactgaa

SEQ ID NO: 240331 - DNA, 82 bp, Homo sapiens
ggctgggcaagaagctgatcgagcccctcaccaatctcatccacagatccagagacaatggccccgatgggatggagcccga

SEQ ID NO: 240332 - DNA, 74 bp, Homo sapiens
cccaggtccgcccagcagccgcgcttcagccaggaacctagaaagattgtacaatgaatggtgattctcgtgct

SEQ ID NO: 240333 - DNA, 82 bp, Homo sapiens
cgtgtcaccgctctgaagtcaaggaggggtgagcccctccagactccgaataggagatcaagagtttgattcattgcctgct

SEQ ID NO: 240334 - DNA, 108 bp, Homo sapiens
cgtggtgcagttcaagatcaagaggcacacgccgctgagcaagctgatgaaggcctactgcgagaggcaggcatcagtgtcatttgaggacgtgaccgtggacttcag

SEQ ID NO: 240335 - DNA, 75 bp, Homo sapiens
caaggtttgaaaagcagctggcctgcaaggatctcattgactcagatgagctgctggatccagaagatttgaaga

SEQ ID NO: 240336 - DNA, 73 bp, Homo sapiens
cgacctgctcttcatctccctgctctggatcatcgaactgaatgattttatgcgacaagcaggtgaagtaacc

SEQ ID NO: 240337 - DNA, 100 bp, Homo sapiens
agcagctggcttagaagcagatctggaatgcaaacagatctggcaaaatttgggtggaaagaggccagaagatcagtgagcagattgtcattggcacccc

SEQ ID NO: 240338 - DNA, 100 bp, Homo sapiens
agaacatgacgccgtcacccttcctgcgattctacttaggaagaatgtggccattagccttcggttctggcatgggattaggaatggcttattccaactg

SEQ ID NO: 240339 - DNA, 75 bp, Homo sapiens
tgaagtggtgagcctttttgtcactgacactcatgccaacaagaacctgtgcccctccttcctaacctgaggcct

SEQ ID NO: 240340 - DNA, 100 bp, Homo sapiens
tgagactataggctcccacctccactcctagcctcagggtctttttggagttcctgagctgagtgccccagaaggatttcatattgcacaagaaaaagcc

SEQ ID NO: 240341 - DNA, 100 bp, Homo sapiens
agcaggcacccaagcgggcggcaggcccagaataaagagaccagtgttttagctgctgcaaaagtgattgacactaaatctgaagaagaacttgaagatt

SEQ ID NO: 240342 - DNA, 90 bp, Homo sapiens
gtgaggtacaggctcagtctgcggccaagactccgtcctgcaagatgtaggtgcaaaaaactacagacatctctgtgctgtttattacaa

SEQ ID NO: 240343 - DNA, 82 bp, Homo sapiens
tttccgcccgcttcgatcgcctcgcgccggctgctctttccgggtcatgcagaaggcttttgtatgatgtgtacaatgcaag

SEQ ID NO: 240344 - DNA, 82 bp, Homo sapiens
gcgcgccggcccggactcggcgggcatcgccctctacagccggtcccctggaagtgacgctgactcagccagtgaggagcgg

SEQ ID NO: 240345 - DNA, 90 bp, Homo sapiens
ggctgagcttctgcgctgtggagaagccagatatgatgcttcctggtgtgtttagtggttggtgccattccaattttctgtgctgaaatc

SEQ ID NO: 240346 - DNA, 101 bp, Homo sapiens
atactttagatagtctccgtatattcaatgacaaggaactttatattgctgttggaatatctggagccatccaacatttagctgggatgaaagacagcaag

SEQ ID NO: 240347 - DNA, 98 bp, Homo sapiens
gctgttttgcagattggactacaagaatgcaggctcaacagtaccagcagcagcgtcgaaaatttgcagctgccttcttggcattcattttcatactg

SEQ ID NO: 240348 - DNA, 100 bp, Homo sapiens
ggggatttttgtacagcatcgagtctcagccctgccagtggtggatgagaaggggcgctgatggacgagaccatgaaggagttgaaggcctacaaatcgg

SEQ ID NO: 240349 - DNA, 98 bp, Homo sapiens
cgggaactggctgcgagtagtgtcccgccgcactcgggcagagaccacgtacaagggcaaatcctccttccagacctactcggactacctgcgctggg

SEQ ID NO: 240350 - DNA, 100 bp, Homo sapiens
ggagtacaaaaacggcccttggatgatggagtcttccctattcattggggaaccttcatttgaaatttttggcattagaaggaaatcctttgagaacaat

SEQ ID NO: 240351 - DNA, 74 bp, Homo sapiens
ggaagcacctgcgggatacagtggagctacaacttctgaaggcctgtctctcttgctgatcgagaggtgatatc

SEQ ID NO: 240352 - DNA, 82 bp, Homo sapiens
tccgcgtcacagatgaggcgggccacccagtgccctcgcagaacaagattgtggaccagtgtgagaggctgcagttacagag

SEQ ID NO: 240353 - DNA, 146 bp, Homo sapiens
gaggaactagtttgtgaatggctcaaagaaaagcaaaccgatgtccaggggtcttgtgcaggacctgaaagtaatcctgttacacctgggatttaggcactttcaatctgaaaaaatacatatcctttcagcactctggacggact

SEQ ID NO: 240354 - DNA, 100 bp, Homo sapiens
gttgcacccagctgccctcccgggaggctgcctgcctcctcaggcccagagccagcacgagacatccgctgcgagttctgtggtgagttcttcgagaacc

SEQ ID NO: 240355 - DNA, 100 bp, Homo sapiens
aggaggctgagggcggagaggcgcatcgtgttcgaggcggagaccgagggggagccccgcgcgcggcgtcgcaatgtctcaggctgtgcagacaaacgga

SEQ ID NO: 240356 - DNA, 83 bp, Homo sapiens
atggaacccgaagaagaaaggattcgttacagccagagattgtgttctggacttggtgcctctttctgttatatgctttccta

SEQ ID NO: 240357 - DNA, 82 bp, Homo sapiens
ctcgtctcagtaacaataacaagaaaaacagcctagactagacgcacatcaggaagacagagatgtggtatggtgtattcct

SEQ ID NO: 240358 - DNA, 100 bp, Homo sapiens
cgcctacttctataaagtcatccaggtgtacttggtagattatggccttgcttatcggtactgcccagaaggagttcataaagaatacaaagaagacccc

SEQ ID NO: 240359 - DNA, 74 bp, Homo sapiens
attggactgacttttcttatgctgggatgtgccttagaggattatggtatcagaggttctggtgatagcagtca

SEQ ID NO: 240360 - DNA, 100 bp, Homo sapiens
acagggacacttccgttctccttgtaggactggtgaaaccgtaatgaagaacacccctaaactcccataatcggctgtcccttactccagagaatttaag

SEQ ID NO: 240361 - DNA, 101 bp, Homo sapiens
ttggagacatccaggtctgcaccatggttgctccttgagggcaggacagttcttatggctttatccgttgcgtaagcacagagaggtctgcgaggtcaaaa

SEQ ID NO: 240362 - DNA, 104 bp, Homo sapiens
actgaagataatgactcacctggggccacatttgaacattgtaaacttgctgggagcctgcaccaagtcagcatttgccatctatcaatcgctgccttattttg

SEQ ID NO: 240363 - DNA, 82 bp, Homo sapiens
ggaagatatcaaactgtatgatatggcagatgtatgggtgaagatccaagatgttctacagacaatgcagatcttcgtgaag

SEQ ID NO: 240364 - DNA, 83 bp, Homo sapiens
cgcaaccattgacgccatgtcgggttattcgagtgaccgagaccgcggccgggaccgagggagcggaaagaatgtcggagcgg

SEQ ID NO: 240365 - DNA, 90 bp, Homo sapiens
ggcactggagcaggtgacaaaagtgctggaggacttcgtggatggagaccacgtcatcctgcctggagatttgaaaaagagaattgaatc

SEQ ID NO: 240366 - DNA, 98 bp, Homo sapiens
cgcatcgcgcactttttggatcggcatctagtctttccgcttcttgaatttctctctgtaaaggagcctcagaatattctgttgacaagtgaatctcc

SEQ ID NO: 240367 - DNA, 75 bp, Homo sapiens
gaccgtgatgggagctgcagcacagtcgggggtgtaggttatgggggtcgtcaaagtcctacattttagctttca

SEQ ID NO: 240368 - DNA, 74 bp, Homo sapiens
ctgaggccccagaactatcttttcggctatgtatgtcaaaaaggatgttcctttgtggcaaaaacatggacgga

SEQ ID NO: 240369 - DNA, 98 bp, Homo sapiens
atagacaatggactccatcccactgaggaccaaatgggacgtcggtcatcagatactgaagaagaaagcagaagcaagagaaaaaagaaacaccgtag

SEQ ID NO: 240370 - DNA, 100 bp, Homo sapiens
ggcctcccaaagtgctgagattacaggagtgtttttgggcctaggcctgagtggaatcattcctaccttgcactatgtcatctcggaggggttccttaag

SEQ ID NO: 240371 - DNA, 100 bp, Homo sapiens
gtttcttcggggcttgccgttcgttcgtttccagcctcaggaatttatggtcgcctttttgaatgagggtaagatgatcatgcaggataaactggagaag

SEQ ID NO: 240372 - DNA, 100 bp, Homo sapiens
gtccaccgtgctaaccatccctgagatcatcatcaagggtaatcggggtgaaggactgagagtggaagctgatcagctggagcatctttctggtcattca

SEQ ID NO: 240373 - DNA, 98 bp, Homo sapiens
aatccttctgtgattagccttttgaaacatatgctgcaggtggatcccatgaagagggccacaatcaaagatatcagaatggcttcctttgggtggaa

SEQ ID NO: 240374 - DNA, 145 bp, Homo sapiens
tggacagtgacttactttgattcttttgaaccaggaatgtttcctcctactcctctttcacctgccaggttcaagtgatggcttggacaacagtgtagcttcccccagcacaggtgacgatgatgaccctgataaggacaaaaag

SEQ ID NO: 240375 - DNA, 100 bp, Homo sapiens
cctgcagcacatcagcgaccgggagaacatagacgatgccagcacgagccgccgcttcacgccgccttccaccgcgctgagcccaggcaagatgagcgag

SEQ ID NO: 240376 - DNA, 83 bp, Homo sapiens
gagaagagcatgccctggaacgtggacacgctcagcaaagacggcttcagcaaggatatttcatgtctgaatcgggacccagc

SEQ ID NO: 240377 - DNA, 100 bp, Homo sapiens
atgacgggagcaatgatgtcgttgatcttttgccgaggacggagatcagggacaccatgtggcggatctttactggatcgctgctggtagaggagaagtc

SEQ ID NO: 240378 - DNA, 75 bp, Homo sapiens
cttcacaacctgacacagccaattatacatcgtgacttgaacagttgcaaactccaacactggcagtggctcccg

SEQ ID NO: 240379 - DNA, 101 bp, Homo sapiens
ccctggacgcagcagccaagctcttcgctggctcccgggggctctcccgggttcctctcattgcaggctgaaggtcgctacccacaggagaacaagggaac

SEQ ID NO: 240380 - DNA, 157 bp, Homo sapiens
agagagttatgcattggctggggagacccatctggactaccaaggagaagctatagactacttctactccaccaggaagttaaactccattgatgatgcacagttgacaagaattgcccctccaagatctcattgctgtttctgggaagtaaacgct

SEQ ID NO: 240381 - DNA, 90 bp, Homo sapiens
cagcttctagcaatgaaagtcccaaatgtgctcacctttgacttcatgtcgaagccatctccaggcatccgtgtcattctggaccttact

SEQ ID NO: 240382 - DNA, 75 bp, Homo sapiens
ctttctggcctggaggctatccagcggtcctgccctccggaggagcagcctcgaggctggtggttttcagagcag

SEQ ID NO: 240383 - DNA, 100 bp, Homo sapiens
ctgcaagaggcctacgtgcgggtggtcaccgagaagtccccgaccgactggtgtgatccctcacatccacaaatctctgattggaaagaagggacagcag

SEQ ID NO: 240384 - DNA, 100 bp, Homo sapiens
ctagctataaaggtcttatgagacttttgcactgtaaaactttacacattgtgctattcactctgctttacaaggttttagctaaagaagatactgaggc

SEQ ID NO: 240385 - DNA, 90 bp, Homo sapiens
cttgtccagtggcttaatttatcttggactggcaatagaggcttcatctctgttgcaggatttagcagttcaaatctgaacatcaatgat

SEQ ID NO: 240386 - DNA, 50 bp, Homo sapiens
ggggaaaatggagcccttcaccaatggttatatcttaagtgtggtgctgc

SEQ ID NO: 240387 - DNA, 81 bp, Homo sapiens
atagaaactcacatgagacaaatgcgctcagcttcaattgtcccacagtgttttgttcgccccacggaggccaagaaagcc

SEQ ID NO: 240388 - DNA, 75 bp, Homo sapiens
cagaaccttagcaaagaggagctgatagcggagctgcagatacgtaggtaacctttccagagatgtgacagaagt

SEQ ID NO: 240389 - DNA, 90 bp, Homo sapiens
gtaaattgaaaatattggggccatttagtaacttctttgcaaggttgcccccaagtttcctggcagtgtgtgatactgaggaggtgagct

SEQ ID NO: 240390 - DNA, 75 bp, Homo sapiens
gggaggtgaatttccatgtcaacatagtcctggagaggagaggcagcagcatggcgagtgtcctgtcccgacgcc

SEQ ID NO: 240391 - DNA, 100 bp, Homo sapiens
gagggtactaaggccgtcaccaagtacaccagcgctaagtaaacaatgagtgaccgaggaggtggcgttcctttgaggaaaattgacagacttttcaact

SEQ ID NO: 240392 - DNA, 93 bp, Homo sapiens
cgtgccgttacggccatcacggcggccgcagtggcgtcctggagccctcctcaggacagtggtgattatcctcttaccatgcctggacctcag

SEQ ID NO: 240393 - DNA, 100 bp, Homo sapiens
ggaagagagcactgcagccagtgaaaccactgagattttctggcatccttaaatcttgtgtcaaggattggttataatataaccagaaaccatgacggcg

SEQ ID NO: 240394 - DNA, 83 bp, Homo sapiens
ctggatgggaagttaatgtttacggcgaagtctactcaacgtttccaaggtgacttaagagattaaaattaatttggttgctg

SEQ ID NO: 240395 - DNA, 75 bp, Homo sapiens
ggggaactgagacaagaacccccttcttcctcccccaggagggatattgggagtgtgtggcatgcatcctcatca

SEQ ID NO: 240396 - DNA, 99 bp, Homo sapiens
ctgccgttctttaatatgctggatgagctgctgaagcccaccgaattagggggacttgatctcatcttcatgccaggccttgggtttgacaaacatggc

SEQ ID NO: 240397 - DNA, 97 bp, Homo sapiens
ttttctgatatgatgggaaatacaaatgaaccaagcacacgtgtccgagttatacattggctcttcaaagacgttcacctcatcagagaaatccctg

SEQ ID NO: 240398 - DNA, 100 bp, Homo sapiens
gtctgtctgagggagatggtgacaagctcaaggcctgcgagattatggatgattggccagggtatgacttgaatttattcacgtacccacagcactatta

SEQ ID NO: 240399 - DNA, 99 bp, Homo sapiens
atgctgccaccaccggaaggaggcagaccgagtgacggttctctacaggagcaaagccattcgctatacctggccttgtccatttcctatggccgactc

SEQ ID NO: 240400 - DNA, 100 bp, Homo sapiens
ggaggatgtatacaattatgtcttctgaggaagcagcaaatggaaagaaatcccactgggcagagcttgaaataagtggagtggagtcaacatatcaatg

SEQ ID NO: 240401 - DNA, 74 bp, Homo sapiens
tgggcggctttgaccgagaggctgctggagctcgtgtttggacgccagtcctgcgttaactgcggccgggaggc

SEQ ID NO: 240402 - DNA, 100 bp, Homo sapiens
taacctgggaagtggaaccggatatttaagtacaatggtgggcttaattttaggtgactgtggggatcatgttgttataatgaacacaagacacattgca

SEQ ID NO: 240403 - DNA, 82 bp, Homo sapiens
cagattcccagactctgccactggaaatggctgcacttggggcgtggcataccaagtgcaaggggagcaggtaagcaaggcc

SEQ ID NO: 240404 - DNA, 90 bp, Homo sapiens
gagtgttctggctttcagaggaatccctatagaagaagtcagagatgccatggaaaatgaaatgagaacccagcttcgccgacaggcagc

SEQ ID NO: 240405 - DNA, 95 bp, Homo sapiens
ctcatcccaaaacaatgcctttgcacaaaataaaccaactggctttggcaagtatgtattcccgtgtgccagagtgccaggtcaccacatactat

SEQ ID NO: 240406 - DNA, 90 bp, Homo sapiens
tcggcctggtgctgaatcatgagcccaatgtctccaaaaggatcaagcaaccccttctgagcctgagattgacctggaagctctcatgga

SEQ ID NO: 240407 - DNA, 98 bp, Homo sapiens
aagaaattattggtacctgcatcgtgagatggagaataaagaaactctcaaagggttgcacaagatggatgatcgtccagaggaacgaatgatcaggg

SEQ ID NO: 240408 - DNA, 100 bp, Homo sapiens
tcccctgtgtttctccattctgttggttttatgcatctttatccaatcaagtgcccttggacaaagcctgaaaccagaaaagaggcacagttagatgaag

SEQ ID NO: 240409 - DNA, 51 bp, Homo sapiens
ctacagtgtcatgatccagaaggtggcaagtgcaggcagctgtcccggtta

SEQ ID NO: 240410 - DNA, 100 bp, Homo sapiens
ccggcgccggcaaggggacccagtgcgcccgcatcgtcgaggttgatgcccagctacaggtagtaaggaaactggaagagaaggagcatctgttacagag

SEQ ID NO: 240411 - DNA, 88 bp, Homo sapiens
ctgtgtccggagcctgagctgtgagcctcttagcaatgcataccacgagttagcacaagtgtattcaaccaacaacccctcagaactc

SEQ ID NO: 240412 - DNA, 100 bp, Homo sapiens
caccatccgggagcttggggggtgcatgggccccatctggtccagttactatggaaactgccgttctctcctggtctccgatgatgacctcgacccatcc

SEQ ID NO: 240413 - DNA, 103 bp, Homo sapiens
gccctggggcagctgaactgagcgtatgtgccacgccgcccaggagacccctctgctgcaccacttcatgataagtatgctgtgcgcttcatccctcgggaga

SEQ ID NO: 240414 - DNA, 97 bp, Homo sapiens
caacccctggggaagagcctccgctcatgcaggaaatcaccgccatgcaagatcggtgcctgaatccctggctatcttcttcagtgactgctccatc

SEQ ID NO: 240415 - DNA, 85 bp, Homo sapiens
gaatcttggatccaaaaatatgacagttggtagataaacttaataccaacactgaaatggaagaagtaatgaatgattacaatat

SEQ ID NO: 240416 - DNA, 83 bp, Homo sapiens
ccccgcagctgcagccgcctgaccacggcgactggacttacgaggagcagtttaagcagagtgcctggtgaagaatgtgatgg

SEQ ID NO: 240417 - DNA, 100 bp, Homo sapiens
tggctcctccattctgcttttaacaagtagaaaccagtccagagacgagcaggtcttctgacgcttttaccactcagcatgctctccgtcaagcgcagat

SEQ ID NO: 240418 - DNA, 83 bp, Homo sapiens
tgtgcagccgcgaggaggcgcgggaggtgttcgagaacgaccccgagacgatcttgagccagatgattgtgcatccatttaca

SEQ ID NO: 240419 - DNA, 82 bp, Homo sapiens
ctggagaagctcccagaattcaacaggtgctggaaacgtgcgtagcaacagtaggccgagtatccaacgttgatcataacaa

SEQ ID NO: 240420 - DNA, 75 bp, Homo sapiens
cgaggaagttctcgtcctgacagatctccagctattgaaggctcctacagaagaagggaaaaaagagctgctgtt

SEQ ID NO: 240421 - DNA, 100 bp, Homo sapiens
gccccaccctggtcacttccccaccggaggtttatcacaaggaatcagagatcattgatttcttcctgggggcctctctcaaggatgaggttttgaagat

SEQ ID NO: 240422 - DNA, 100 bp, Homo sapiens
ccatcttcgacttgagcgaagttttatgcaaggtaaagagaaatgtgtatgaccttacaagtatccccgttcgccaccaattatgggagggctggccaac

SEQ ID NO: 240423 - DNA, 75 bp, Homo sapiens
gtcgaccacagtattccaaccctcctgtgcagggagaagtgatggagggatataactggtgccatgaccggaatg

SEQ ID NO: 240424 - DNA, 51 bp, Homo sapiens
gcacggatgacttctatcagctgaagcttctagtgaacaataaaatcatta

SEQ ID NO: 240425 - DNA, 100 bp, Homo sapiens
cctccgcagagggccctgctggcacgaggcactaagtgagtgagatcattggccgagacctgagtggcttccctgcacctcctggagaagagcctcctgc

SEQ ID NO: 240426 - DNA, 101 bp, Homo sapiens
gctctgggcacagccttggaaagtcaggaccgcgacggcagcagagcaatccacagaccagcatggctgccactgctgctgtgagtcccagtgactacctg

SEQ ID NO: 240427 - DNA, 75 bp, Homo sapiens
atagcaccaaggcagcgtgggactccatccagtcatttcccatgcagaatgccaccaagtatggcaacatgacag

SEQ ID NO: 240428 - DNA, 100 bp, Homo sapiens
gatccgcagccccgggatggggccggccccgctgccgctgctgctgggcctcttcctccccgcgctctggcgtagagggtgacgcagacttacgatgcag

SEQ ID NO: 240429 - DNA, 73 bp, Homo sapiens
aatgcctggtaggaattgctagcgttgcccctgccaactctcaggcctgcagaggtgccgacatggggcttaa

SEQ ID NO: 240430 - DNA, 98 bp, Homo sapiens
tgccggcagaacttacgctgcgggaccccgggcactgttgctgctgcgggagggctacagaactggctacccttatcgataccctgctctgagagaga

SEQ ID NO: 240431 - DNA, 83 bp, Homo sapiens
ccgttgacaaggcactgctttttcatgacgatgtagccgcctgtcccgggagcctggactgtgccctgaagaggcgggcaagg

SEQ ID NO: 240432 - DNA, 75 bp, Homo sapiens
caggggtgcagtgtgtctggtcttatgaggttaatgttgaagaaggaaaatgcggaagtcgtcatttgacaagtt

SEQ ID NO: 240433 - DNA, 75 bp, Homo sapiens
actgagcaggagtcgtccgcttatagtggaggctgctaggagccggtcagagggaattggattcaagtacgtggc

SEQ ID NO: 240434 - DNA, 90 bp, Homo sapiens
cgcgaccgcgggtgcatccagtttctgcgcccagactctcagcgttctcatctctcttccttcaccatgaagctgatggacaaattccac

SEQ ID NO: 240435 - DNA, 101 bp, Homo sapiens
atgcaagttttgccctttgtatgtttgtggcggctgcaggggcctatgtccatatggtcactcatttcattcagcctccccagtttaaattagacccccgc

SEQ ID NO: 240436 - DNA, 100 bp, Homo sapiens
ggcccacgtgattgctgcctgcctctacctggtctgccgtacggagggcacgccgcttcttcagattattaaggaatcccagcagcagcatggtttacgg

SEQ ID NO: 240437 - DNA, 100 bp, Homo sapiens
atctccctgctggagcaagaggcagagctgtgggcggtggagtctagacttccccaaggcgtgtacccagactagacgcttgaagcaaagctgccatccc

SEQ ID NO: 240438 - DNA, 100 bp, Homo sapiens
cagctctggaaaatgacagccttcatttctctgaacatactgccttatgggacagatcaagcatttgcaagtaaaatcactggcatgttgttggaattat

SEQ ID NO: 240439 - DNA, 82 bp, Homo sapiens
cagagagatgctgtcccgtggatattgatatgctggaggaatttgcctacttgagaactcaggaaggtgggaaaattcatct

SEQ ID NO: 240440 - DNA, 100 bp, Homo sapiens
gtagccgtcagcgacgggcgccacatgttcgtctggggcggctacaaggaagaggagttgtacgcatgtcagagaggttgcaggctgttttcaatttgtc

SEQ ID NO: 240441 - DNA, 75 bp, Homo sapiens
gaggaacaattaagcttctgtccagagcagtcatgcatgctgtgtgtgagcaggaaaagctgcaggtagccctgc

SEQ ID NO: 240442 - DNA, 80 bp, Homo sapiens
aacagcttccgccaggcggtgatgaagaatccccccgaaaggaccccccagattcccaaatgctggaaaatcctctttgc

SEQ ID NO: 240443 - DNA, 50 bp, Homo sapiens
gtgtggcaaacctttcttgagctcagacagccctcagcgcctttttccag

SEQ ID NO: 240444 - DNA, 83 bp, Homo sapiens
caaaacctcgctccggaaaggggacacctggtctgctgagaacagacccagtccctgaggaaggagaagatgttgctgccacg

SEQ ID NO: 240445 - DNA, 90 bp, Homo sapiens
ccggaatctaaaaagccctcagtaccagagacagaagcagatggattcgtccttttaggcatgttatgttacccagagaactttccaaac

SEQ ID NO: 240446 - DNA, 100 bp, Homo sapiens
accacgcaggcaaacgagaattaaatgccgagaaggccagtacgagccctatgagtttgtctctctggaatggctgcaaaagtggttggatgaatcaaca

SEQ ID NO: 240447 - DNA, 111 bp, Homo sapiens
tgaccgagaccgtgaccgagagcgtgaccgagagcgcgaatatcgtcatcgttagaaggagacgttgatccagcagcacgtgtcatttcattaggtcctgtatctgatgtt

SEQ ID NO: 240448 - DNA, 75 bp, Homo sapiens
ggaagaggagcgcgtccccggggaaatgagttttcggctttgtgagaaaccttaccatcaaacacgatggccagc

SEQ ID NO: 240449 - DNA, 99 bp, Homo sapiens
gtgaaccgcttgtaccccggggagagacgagccccgagcccggctggacgccgctgcctcaggcagaaacgtagtatgggactgaccttggctgaaagc

SEQ ID NO: 240450 - DNA, 75 bp, Homo sapiens
ctgctaaaaggctccttcagtgagcaaggcatcaacgagtttctcagggggtccactggacggggcctgagctac

SEQ ID NO: 240451 - DNA, 100 bp, Homo sapiens
aggaaaatggcagcaaactcttcaggacaaggcccacccccagagattgttatctatcaggagcttcgcatggaagcttttgtcgtctaccgctggcaag

SEQ ID NO: 240452 - DNA, 75 bp, Homo sapiens
aaagaacgacatgatgcaatcttcaggaaagtaagaggggaggagatatcaccaaacatgatggaacaggcggac

SEQ ID NO: 240453 - DNA, 101 bp, Homo sapiens
caaagggaaagaggagaggcacccgatatatgttctctaggccttttagaaaacatgtctgggttctgcccgcacacattcctcgccaccttcttggtgtc

SEQ ID NO: 240454 - DNA, 82 bp, Homo sapiens
gtcgcgcgcgcctgtagctcgcgggcctcgcaggtgtcgtgaaaactacccctaaaagccaaaatgggaaaggaaaagactc

SEQ ID NO: 240455 - DNA, 98 bp, Homo sapiens
ttcaacacaatgaacatgaagaccagcacagcctagatttgggaatgaatctgaagtctgctgcagtaaaacacagaaggctttaaaatgttttcttg

SEQ ID NO: 240456 - DNA, 100 bp, Homo sapiens
ctgccaatttaccagagataattgataacaccctgtaacagctgattaatgaaggagttcccccttctgagtatgttcaatatccatgaaaaccttttag

SEQ ID NO: 240457 - DNA, 100 bp, Homo sapiens
gttgattactcagtctctaaaaagctaaggaatcaattcatttacagctttccagtttttccagcctgcaagaggaggataaatctaggaaagatgactc

SEQ ID NO: 240458 - DNA, 100 bp, Homo sapiens
cccgccagtcgctggaggtgaagatgaacctggaagagcagagccagcagcaggcaccaggatcatctacgaccgaaagttcctgctggagtgcaagaac

SEQ ID NO: 240459 - DNA, 83 bp, Homo sapiens
ccaagagcaacctcacacggtgtgggctgaatgaagagctgccagatcccacagggtgaaaaggaacagcctgtatttgcaat

SEQ ID NO: 240460 - DNA, 101 bp, Homo sapiens
caaaagaaggagggtcctctcagtgattaaggtggataagattgtggaccagctgcagcagttaatgcaggtgtatgacttggctgcccttcgggattatt

SEQ ID NO: 240461 - DNA, 90 bp, Homo sapiens
aggaaacgattctttgccttgccttatgtggaccattttctcagttggcaaccagaacgccaggttccatttaatgaagttagattacca

SEQ ID NO: 240462 - DNA, 100 bp, Homo sapiens
gctgatcttgtacttggattcagcaaggaaccttccgctcattcttggaatcccagaacaggccttaagtcttctccacatggccatcgagcccatcttg

SEQ ID NO: 240463 - DNA, 90 bp, Homo sapiens
gtctggagtttatctggagtgaggtggccggttcttggtgggatctgagcagtgatgattcctgcgtattccaagaaccgggcctatgcc

SEQ ID NO: 240464 - DNA, 100 bp, Homo sapiens
cagtatcttacaccagaagagatgaatgcaagtgggctggaaaagacatcctgggtacttttgacttcagtgacattgctgtctatatattcaataaacc

SEQ ID NO: 240465 - DNA, 49 bp, Homo sapiens
gtgacacgagagctcaaggacagataagcatggattcctggttcattct

SEQ ID NO: 240466 - DNA, 90 bp, Homo sapiens
cagcgacggcgtcgggagagcgcgcctagccggctcgcgaaacaatcaaccatgacgaccgaatctggatcagactcggaatccaagccg

SEQ ID NO: 240467 - DNA, 97 bp, Homo sapiens
tattactgtccttggcccgcggaggggtctgcgcagtgcaggcagataccgtttgacaccaccagtcctcgatgggcttcctggaatattggtgtgt

SEQ ID NO: 240468 - DNA, 83 bp, Homo sapiens
gttttgatgattggcagagacccactgtctgtgagacggtttaagcggaagcatcttactgccattgactgccagcatttggc

SEQ ID NO: 240469 - DNA, 98 bp, Homo sapiens
gaagaagaagggcaaggagaaggcggaagcacagcaggaggaggagaacggggctgaggaggaagaagaagaaactgccgaggatggagaggaggaag

SEQ ID NO: 240470 - DNA, 50 bp, Homo sapiens
tacaagccagcctctgggaccgaggatgggaagcacaaaatgcaagagga

SEQ ID NO: 240471 - DNA, 100 bp, Homo sapiens
ttttctcatggatgttcttcttcgagtatttgtagaagggttgactgttacagactcggacggagccactaactctacaactgcagccctaatagtgaac

SEQ ID NO: 240472 - DNA, 82 bp, Homo sapiens
cgccgctctgtctacaacccgaggtgccaacatcgcctctggtgaggaagtcgccatcaagctggagtgtgtgaagacaaag

SEQ ID NO: 240473 - DNA, 100 bp, Homo sapiens
aaggaaaatatggctgctctttgccggacagcagagtcccagggtacagccaaagaccggagctttggagagatgaagtttaaacagtgtcctacagaga

SEQ ID NO: 240474 - DNA, 98 bp, Homo sapiens
gaagcgtcatccatacaagatgaatttagcctctgaaccccaggaggtccaacacacttgacaaaaccaaccaccacgtcctcgtccgagcgggagcg

SEQ ID NO: 240475 - DNA, 75 bp, Homo sapiens
ggaagattgaaggatttgaggtactgaagaaagtgaagccaaaacagagtggagtacgagaaaagggtccgagca

SEQ ID NO: 240476 - DNA, 82 bp, Homo sapiens
cccttgagttggtcacttgaaccttgggaatattgaggttggatggcaagcatgtggtgtttggcaaagtgaaagaaggcat

SEQ ID NO: 240477 - DNA, 98 bp, Homo sapiens
cgggaccccagttcctccgccaagcgcggccgccgcccccgcctcaggtgagcacctgcggatctgtccccagggctacacctgctgcaccagcgaga

SEQ ID NO: 240478 - DNA, 100 bp, Homo sapiens
gggagatgattattagttgcgttgagtcatcaggcaaagtcgcacggggcaggcggttgcagttcgagccaaggcctttggattcagcgtcatattttat

SEQ ID NO: 240479 - DNA, 76 bp, Homo sapiens
atatttgggtccaactgtgaagccagatgataagggctttttggtggtgctggagttggcaagactgtactgatca

SEQ ID NO: 240480 - DNA, 82 bp, Homo sapiens
tgctgctgaagatctggaagacgcgctcctgcgccgttatctatgtcaagcagtagccgcattgtgacccatgacatcccca

SEQ ID NO: 240481 - DNA, 100 bp, Homo sapiens
tgagtggacagtaaagcaccgctacagcgacttccatgacctgcatgaaaagggaccagttactctccacaagaaaattcacacaaccacagtgctcttc

SEQ ID NO: 240482 - DNA, 101 bp, Homo sapiens
atgatattttccaaaagcccagagcaacagctttcagcaacacagaaattcaggaagctgctttcaaaagataaatctaccacattctcagtgaccataaa

SEQ ID NO: 240483 - DNA, 71 bp, Homo sapiens
gagctgggcgcggattcgccgaggcaccgaggcactcagaggaggtctccacctctgggcaggagagttgc

SEQ ID NO: 240484 - DNA, 90 bp, Homo sapiens
cagagaggggaagtgatttgcctcagcttgtactttgcagaggaaagtggtcgcttatggtcagaggagcagcctgctcaccctctccag

SEQ ID NO: 240485 - DNA, 100 bp, Homo sapiens
cctcaaatacaagaccctgcttgtgaagctcatccacaccctggaggagcagcccagcttttcccagagggatcgctgccatgtggcttcgctgctgtcg

SEQ ID NO: 240486 - DNA, 101 bp, Homo sapiens
gctgcaggcggcccactggcagttcgagcaccactgccggaactgtggccacatcttctgcaacacctgctccagcaacgagctggccctgccctcctacc

SEQ ID NO: 240487 - DNA, 100 bp, Homo sapiens
gaggtactgagaggatggaaatcagcgcggagttaccccagacccctcagcgtctggcatctcttgtcgtcacgcagctgggctatgacacacgtgtgac

SEQ ID NO: 240488 - DNA, 100 bp, Homo sapiens
gcagtttggagtggtctatggaggctgggctaagcagttccaagctttccatgtccaaggccctccctctcaccaaagtggttcagaatgatgcatacac

SEQ ID NO: 240489 - DNA, 75 bp, Homo sapiens
taaactgcgaggacagagccactgggtgttggggatgtcctttgcactgaccctgaactgccagattgacaaaac

SEQ ID NO: 240490 - DNA, 95 bp, Homo sapiens
tggcttacatcttcctgaatcgagcagagaaactgagtctactcttcatcttgtgttgagacttcgtggtggtgctaagaaaaggaagaagaagt

SEQ ID NO: 240491 - DNA, 83 bp, Homo sapiens
ggtcccgacacctagcctgcgctgcggagacttttgatggtggaagtggtgaaacccaaacaacatctcctgctattccttgg

SEQ ID NO: 240492 - DNA, 74 bp, Homo sapiens
gcgaaccccttttgaagttgaggccaagaaaggatcttgtagaggtaactcaactggacccaaataaatcatta

SEQ ID NO: 240493 - DNA, 89 bp, Homo sapiens
agctgtctctgatccgcaagcatgctcagaccttcattgctctgtgtgccaccgatgccatggacaatattaccaggcagaaccaattc

SEQ ID NO: 240494 - DNA, 100 bp, Homo sapiens
ctggtgctcggtacggcagaaggtcttcttgcagaacaaagctcgccgagaggacttctgtcctcggaagctgcggcagatgcacctgatgattgaccag

SEQ ID NO: 240495 - DNA, 100 bp, Homo sapiens
gcacccccagtgggtgctcacagctgcccattgcctaaagaaaattctcaatcgcaatcctctgactactgtcgaagatccatatctctttgaactgccg

SEQ ID NO: 240496 - DNA, 90 bp, Homo sapiens
gaaagaagctgcagcggaggaaggcgaggtgtctgacttccagcaactgctggcctgtgccagggtgcaagctgagcactggagtggagt

SEQ ID NO: 240497 - DNA, 106 bp, Homo sapiens
gcccctccccctcggcctcgcggcgacggcggcggtggcggcttggacgactcggagagccgacaatgcagatcttcgtgaagactctgactggtaagaccatcac

SEQ ID NO: 240498 - DNA, 76 bp, Homo sapiens
gatgaggtgacttggtgattttcctggaaaattatagagtccagcctctgatgaagcaggagagaaagaagccaag

SEQ ID NO: 240499 - DNA, 82 bp, Homo sapiens
cgagccgtgcgatctggacgcggcgctgctgaccgacatcgaagaacatccagtcatggataaaaatgagctggttcagaag

SEQ ID NO: 240500 - DNA, 90 bp, Homo sapiens
gctatatcgtggagaatgatgtcatcatgcatgctctcactaagcagttggaggctgtgtctggcagaatatctcttcaagaacaatcct

SEQ ID NO: 240501 - DNA, 100 bp, Homo sapiens
ggagagcggagacctggagttgtttgacttagtggaggaggtgcagctcaacttctaccagttcctcggggtgcagcagagagtgaatctgtccttcgat

SEQ ID NO: 240502 - DNA, 100 bp, Homo sapiens
cggacatctgctttatatttctctcagaccattcccatcagtgagcattacaggtcacctcatcatctcaaggaggagcattcccctgggctaaggcact

SEQ ID NO: 240503 - DNA, 100 bp, Homo sapiens
gccaggagccaggggcccagaagactgaggctgatgtgaatccaaaggcctatccccttgccgatgcccacctcaccaagaagctactggacctcgttca

SEQ ID NO: 240504 - DNA, 100 bp, Homo sapiens
gcagtggtcgcttcttctccttggaaggacacgtctgccacatcccagtcagttaatggatcaccccaagcggaacaaccttcattggaatctacaagca

SEQ ID NO: 240505 - DNA, 88 bp, Homo sapiens
ggcattgacatttaattttagggtcctttatatagaagggagagtagctccatttatcttaaagaaattggacagcatatgaagacag

SEQ ID NO: 240506 - DNA, 50 bp, Homo sapiens
cattgatgaaatttatggcattcagaacattcgatatctcaatgcctata

SEQ ID NO: 240507 - DNA, 83 bp, Homo sapiens
ctgatggctcccttggcgaaggagtctgtttttcaacccaggaagttttctgactcagaatgtgccaaaaaggctttggaaca

SEQ ID NO: 240508 - DNA, 83 bp, Homo sapiens
ggacaagactccgactccagctctgacttttttcgcggctctcgggttgaaaggaggagcaggaggtactgatggacaaggag

SEQ ID NO: 240509 - DNA, 83 bp, Homo sapiens
tctccttatttttgtttctggaaaagttgtattaacaggaattacatgaacgacagccttcgcaccgacgtcttcgtgcggtt

SEQ ID NO: 240510 - DNA, 101 bp, Homo sapiens
gtctggtgtcctagagcggacgaaagcaggtgactctctagtcaacttccgacttggactccgaagatcgatggagtttctccctgtcgtccaggctggag

SEQ ID NO: 240511 - DNA, 74 bp, Homo sapiens
ggtacatgagtggctatcatactggctattatatggcgaatctttctgcattgaatttgaagatttctgaacag

SEQ ID NO: 240512 - DNA, 100 bp, Homo sapiens
tataccaggagacttacatcgatgaccttggacacctccatgttatggacacggtctttcttattcaggccctgactgcagagatcgtgaagaccatccg

SEQ ID NO: 240513 - DNA, 75 bp, Homo sapiens
ccagaaaccggggaccttaacaatccacctaagaaattcagagaaataagcgggttttgaaaacaaaaaaaagaa

SEQ ID NO: 240514 - DNA, 88 bp, Homo sapiens
aagtccagaaatctggaaacatgatacaatctgcaaatggacagagttcattcaaagaggcaggatttcaatcacaggggttggattt

SEQ ID NO: 240515 - DNA, 83 bp, Homo sapiens
cttttccgcccgcttcgatcgcctcgcgccggctgctctttccggaaagtttcctacactactgaggtttaggggcactgtga

SEQ ID NO: 240516 - DNA, 98 bp, Homo sapiens
accttcgacctgctcttcatctccctgctctggatcatcgaactgaatggtatcactggtccttctggcccgattgggcctcctgggccccctggcct

SEQ ID NO: 240517 - DNA, 50 bp, Homo sapiens
gctgacgccggagcagctcctaacccaggctgaccccgcactacatctac

SEQ ID NO: 240518 - DNA, 50 bp, Homo sapiens
accaagcctttctgctccaggtcaagagactcttgaagacaactctgaaa

SEQ ID NO: 240519 - DNA, 74 bp, Homo sapiens
ggagtgggctcccctaaactggggcctggaaaaggagagaaaaggaacagttccgtaagctctttattggtggc

SEQ ID NO: 240520 - DNA, 100 bp, Homo sapiens
gaagaaaccccaaacctgagactttcaggaagatattttcgattcagataaagaagttcctatcgaatccacttttgttcgcatcaaagaaactccttct

SEQ ID NO: 240521 - DNA, 49 bp, Homo sapiens
ttcctgtacagcctgcagaactggacaaactctgcctgggcgagtcctt

SEQ ID NO: 240522 - DNA, 75 bp, Homo sapiens
ctgaacggcagccccaagaacggaaaggaagcaggagctggccaacagctcggatgcgaccctcccagaccggcc

SEQ ID NO: 240523 - DNA, 74 bp, Homo sapiens
tcagaaccacattttgggtttgaagaatcttctacatgattacgtgtgaaaatgaacttgtgcaaacccaaccc

SEQ ID NO: 240524 - DNA, 98 bp, Homo sapiens
gaaatcgacacacaaagaatagagttgagcctgtgggacacttcggatgaataatacggcagctagtccaatgtctactgcaacttcaagtagtggaa

SEQ ID NO: 240525 - DNA, 88 bp, Homo sapiens
gaaagagcgccttgggacagggggatttggaaatgtcatccgatggcacaatcaggtagaattagaagatcatgtgatgttggagtag

SEQ ID NO: 240526 - DNA, 88 bp, Homo sapiens
ttgcctgaagaataccaaggaggatcttttaggacaaggagcatccaagatacctgatcccagaactttgcaaacagttttaccattt

SEQ ID NO: 240527 - DNA, 75 bp, Homo sapiens
aacttattggcatgatggagtgacaggaaaaacagctggcatggaaggtgattgatatgcccgagcacaaccctg

SEQ ID NO: 240528 - DNA, 75 bp, Homo sapiens
agggcacgtgtttgcggttcagccctttgatgaccgcagcaggatttggtgctatggagaaatttttggtagaat

SEQ ID NO: 240529 - DNA, 75 bp, Homo sapiens
cctcctgcacggaggagtcggcctgccgccgcggcggcatctggctcagggagccaatggtactctggagaaccc

SEQ ID NO: 240530 - DNA, 80 bp, Homo sapiens
gacagcagtacagacagctcaggctgcccagatggtggctcccggagtccaggtgcagagcattgtagaccaaggagcca

SEQ ID NO: 240531 - DNA, 76 bp, Homo sapiens
gtgggaccggtgtctggcggatgcggtcgtgaagataggaacaagctgaaagctggatacctaatgtcagtggagt

SEQ ID NO: 240532 - DNA, 100 bp, Homo sapiens
tcgctctgtgacctgctggcattgaatgatttatagctaagactccaggacacccctgaagccgagaaatggaagctcttcgtgggcggtcttgactgga

SEQ ID NO: 240533 - DNA, 74 bp, Homo sapiens
gacatgagtgatgtggaggaaaacaacttcgagggcagagagattagcagaggcatttcatatcagtgaggatt

SEQ ID NO: 240534 - DNA, 101 bp, Homo sapiens
tgatcggcaactcaatggagaattctggtcactcagtgacacacacaactcgggcctccccagcgacaaaaagaggcacagttagatgaagaaggacagtt

SEQ ID NO: 240535 - DNA, 96 bp, Homo sapiens
ctgatagtggcggacggcgcgaacccctatgccatggacaatattaccaggcagaaccaattctacgatacccaagtcatcaaacaagaaaacgag

SEQ ID NO: 240536 - DNA, 75 bp, Homo sapiens
gtcggaaaggaagaggttaccagaaaatgcctgggggttatgtcccggaaatagatccttttatcctgccacacc

SEQ ID NO: 240537 - DNA, 75 bp, Homo sapiens
ctattttactgaagacaacaaatagagcctctgtcaaaatgcagatcttcgtgaaaacccttaccggcaagacca

SEQ ID NO: 240538 - DNA, 83 bp, Homo sapiens
gttcctggggatggggctaccaagcttacgaggaaatatttcagtaaaagcagttaaaaaagaagtagaaaagaaactccgat

SEQ ID NO: 240539 - DNA, 80 bp, Homo sapiens
cacggtgccgctgacagcagccatcgaggcgagccagagcctgcagtcccacacgcctaatcacacggatgctacagaga

SEQ ID NO: 240540 - DNA, 82 bp, Homo sapiens
gccaccctgtggacatcagcgccatccccgagcagcggtggaagctgacaatgcagatcttcgtgaagactctgactggtaa

SEQ ID NO: 240541 - DNA, 82 bp, Homo sapiens
ataaatgtaaacaactcttgcaggctttggaagtgataaagcagttaaaagagaaaatgaagatagaacgtgctcacatgag

SEQ ID NO: 240542 - DNA, 74 bp, Homo sapiens
ctgaatccagtaccaaaaacgtcaacaacagttttacgttaactctgctgtttgctgcatgctgcatgagaccc

SEQ ID NO: 240543 - DNA, 100 bp, Homo sapiens
ggaagcgccgcgatgttcgccccccggctgctggatttccagaagacgaaatacgcgaggaattgaatgatctggcacgggaccctccagcacagtgttc

SEQ ID NO: 240544 - DNA, 83 bp, Homo sapiens
cgacaagccgctggcagccgcggatctcaccgccgctcagggttttgggatttgagattgacgcggtgaactctgtccagttt

SEQ ID NO: 240545 - DNA, 83 bp, Homo sapiens
ccgcgtgctaatggtggaaacccacaacggtcatcatcagatttgaaatatttaaagtggatacaaaactatttcagcaatgc

SEQ ID NO: 240546 - DNA, 98 bp, Homo sapiens
ccaatccggccatgctcgaagccagctctgcagctcagccaatcagtgacatcattgtcctcctccgcctcctcctctctgcatgcgcgtcagagccc

SEQ ID NO: 240547 - DNA, 98 bp, Homo sapiens
cgaagacctgcgaagtccctctccagctgtgaaagtgaagtttggcttgaaaacacattctgccagtgcaaatccaaaaagtatcaagacaggattct

SEQ ID NO: 240548 - DNA, 112 bp, Homo sapiens
ctgtgtcttgctattggcagaccagagccaactgtgacatggagacacctgtcagtcaaggcttgatgattccctgaatcagatccgtaagctccagaggtctctggatgaa

SEQ ID NO: 240549 - DNA, 101 bp, Homo sapiens
cacggcggaggcagcggagccctgggccatcggtctccgtgaggccgggtgacgctccagaatgggagacaagccaatttgggagcagattggatccagct

SEQ ID NO: 240550 - DNA, 83 bp, Homo sapiens
tcccgcccgccttccgccgtctcttcgagttcttcgtgctgctcaagacctgcctagagctggaacgttacctccagagcgag

SEQ ID NO: 240551 - DNA, 100 bp, Homo sapiens
gttcaatgtaaggaacggatatggtttcatcaacagggtaatgatggtggcaaagaaattcctggatgctgggcacaaactcaactttgctgtagctagc

SEQ ID NO: 240552 - DNA, 75 bp, Homo sapiens
cagacattcaacatgattgcatttgaaatgctgcacttaaaaggatgcttgttttgatgtcctgctcattgtttt

SEQ ID NO: 240553 - DNA, 80 bp, Homo sapiens
aaaatggctctggtgaaactggcaaatggatccaaacttctacagcaaaaacttacttcttttaggaaagacatacttga

SEQ ID NO: 240554 - DNA, 75 bp, Homo sapiens
gtcaagtcgtgttctgatcactactgacttgttgatgcttgtggttggtggcatcgaccgggtttatgaaattgg

SEQ ID NO: 240555 - DNA, 49 bp, Homo sapiens
cagaaagctgtatggacctctgtgtggtgccggtggtggtgtgcacatt

SEQ ID NO: 240556 - DNA, 98 bp, Homo sapiens
gaactgcagaggttcctctacagcaagacttgaaagagggctccagaaaaagtagatgcgtatctgtacaaacagatcctactgatgaaattcccact

SEQ ID NO: 240557 - DNA, 95 bp, Homo sapiens
aagaaacgggccgcgaaccgcagtatcatgctggccaagaagatcatcattaaggacggaggcacgttggattggatgctgctggcaagacaacc

SEQ ID NO: 240558 - DNA, 82 bp, Homo sapiens
tgaaggccgaggccaagatggcggtgctgtcaggtttggtgcacctcgatttggaggaagtagggcagggcccttatctgga

SEQ ID NO: 240559 - DNA, 90 bp, Homo sapiens
cagaggagaccgaaaagtggatggaggaggcgatgcacatgggcttctggtacagttttcactgctactgacgttgcactgggacaggag

SEQ ID NO: 240560 - DNA, 74 bp, Homo sapiens
gacagtacaaagaagactcttgtcacactaattgccaacaacaatgaatcctcactatggatgggctcattgag

SEQ ID NO: 240561 - DNA, 99 bp, Homo sapiens
gtcagaatggctgtatcctgggagatgagatgggcctggggaagacctgccaggtgaatgaaaactttgccattgatttgatagcagagcagcccgtga

SEQ ID NO: 240562 - DNA, 83 bp, Homo sapiens
ctttcgccagcccgtgccgcgagcgcggcctgcaggagcttgctgagcgagagcgagaagcggcccttcgtggaggaggcaga

SEQ ID NO: 240563 - DNA, 98 bp, Homo sapiens
aagtggtccgctttgccaagaagatggacaagatggtgcagaagaagaacgcggcccgatgagagaaagggaaagttaaggatgctggagcagaacaa

SEQ ID NO: 240564 - DNA, 100 bp, Homo sapiens
tgaggctgaaagaaacaaggggccagggcagagggcacctgagcggctggagagcctgttggagaaacacaaagagtgagaaagatcagtctaaagaaaa

SEQ ID NO: 240565 - DNA, 50 bp, Homo sapiens
tggagaggttccttcaggaggatcagactaatagggatgccaaaggaaaa

SEQ ID NO: 240566 - DNA, 97 bp, Homo sapiens
cagcggagtcctcacctgcaggcacaggtgtgcgcacttcgcatctcgaaggccggccagcaagcttcagccctgaaggatggctgccatattggga

SEQ ID NO: 240567 - DNA, 50 bp, Homo sapiens
attcgcagtggtcgcttcttctccttgtcccctgcctcaagattctcctc

SEQ ID NO: 240568 - DNA, 83 bp, Homo sapiens
gccgactcgcaagatggcgccggttgcagatatcaagaaagtcaacaacttcatcagagaacaagacttatatgctttgaaat

SEQ ID NO: 240569 - DNA, 90 bp, Homo sapiens
aagaaagctgaagacttgagttcattaaatggtcagctgcaggtgtgcaagcatttcctggaagctattgaaaacaacaagtatggctgg

SEQ ID NO: 240570 - DNA, 82 bp, Homo sapiens
cctggagcctcagttggaagcagccgatccagcctgcggagcctgtggggcaggagcatcagatccatgctgctgctgactc

SEQ ID NO: 240571 - DNA, 100 bp, Homo sapiens
ccgggtgtccccgcggcgcaggaggcggtggagcgcagagcgggcgagcgcggctgaccggttccctgatgtgttacctgcttctgctactgatccaaac

SEQ ID NO: 240572 - DNA, 100 bp, Homo sapiens
tttgacagctattaaaaccagggctccacagttaggagggcttcgtgggacacatatgcaacatgcctatgatttttacaagcctgatatgctatctgaa

SEQ ID NO: 240573 - DNA, 98 bp, Homo sapiens
tgggagatccaagagattcagtatcactcgctcccttgatgatcttgaggcatttatgtttgaatcatctttaagtctggcggtcacaaagtggggac

SEQ ID NO: 240574 - DNA, 75 bp, Homo sapiens
tgactttcagctatggaatcggagggtgaggacaaaatcttcttaatcaacaagcttcactccatctacgagagg

SEQ ID NO: 240575 - DNA, 96 bp, Homo sapiens
acgggcatccttgactccatcgggcgcttctttggcggtgacaggggtgcgcccaagcggggctctggcaaggcatcaagcatgatggaaccatgt

SEQ ID NO: 240576 - DNA, 82 bp, Homo sapiens
cgggggtcctgagcctgccccagccagtaccagcgccgtgattttgagaagagggggaaaaaggaagtttgtcctgtcctgg

SEQ ID NO: 240577 - DNA, 50 bp, Homo sapiens
agcctcctgaggagctgggactacagttggaactgataatgggagagaag

SEQ ID NO: 240578 - DNA, 53 bp, Homo sapiens
aaaagagcttctctccagagtagaaagatggagtctcgctctgtcgcccaggc

SEQ ID NO: 240579 - DNA, 82 bp, Homo sapiens
gaacggaaacaaagttattttgctcgccatcttctctacgaagagtgactattgcctctttacccagaaatattggaaatgc

SEQ ID NO: 240580 - DNA, 100 bp, Homo sapiens
acggatctccatcgttaagtgacgcatgactagctcaaatgatacttttcccacagcaatgcacattgctgctgcaatagaagttcatgaagtactgtta

SEQ ID NO: 240581 - DNA, 78 bp, Homo sapiens
gcctggaatgactgcttgtatcgaatgcacgctggaactttatccaccacagcaattacaaccccaaggaggaccaca

SEQ ID NO: 240582 - DNA, 94 bp, Homo sapiens
caggagatcgagaccatcccggctaaaacggtgaaaccccgtctctactaaaaatacaaaaaaaattagccgggcgcggtggcgggcgcctgta

SEQ ID NO: 240583 - DNA, 96 bp, Homo sapiens
aaagacttatgcgacagattttagaaggtgttcactttttacacactcgtgatgtagttcatcttgatttgaaggagtccccggcgtgcagtggag

SEQ ID NO: 240584 - DNA, 74 bp, Homo sapiens
cagatccttgcatttgtccaaggtcatacagcagatggaacaaaaaaaattacaacaaggaattcctccatcag

SEQ ID NO: 240585 - DNA, 83 bp, Homo sapiens
ggactcagtgatctgccttaagggcagtcaatggtcagatattgaagagttctgcaatcgatattagaaatggctactcccca

SEQ ID NO: 240586 - DNA, 75 bp, Homo sapiens
caggcatcgtggggatcttggcagcgctgcaggcaaacatgtctgacaaagagctaaagaagctacgtaataaac

SEQ ID NO: 240587 - DNA, 75 bp, Homo sapiens
aaaccagtattcttttcacacagactttgttgtcgctgcccggaggagtcgagactggtacccggaggagctgtc

SEQ ID NO: 240588 - DNA, 100 bp, Homo sapiens
ggaaggcttcaaaggctgtcgcaaggaggaagggactcgcaagaagctgcgcctgtaccagttcctgctggggctactgacgcgcggggacatgcgtgag

SEQ ID NO: 240589 - DNA, 100 bp, Homo sapiens
cctcgagcggctgctggacgaaggactctggattgatttggaaatgtcctacaatgggtcctttctgatgactctcgagaccaaaatgaatttgaccaaa

SEQ ID NO: 240590 - DNA, 83 bp, Homo sapiens
cgactggattcctccatgactcaaggcacagactctccaggctggctacagcaaacatcattcaagatgtccagcaaagggag

SEQ ID NO: 240591 - DNA, 74 bp, Homo sapiens
cgagagtgaacgattcaacccgggggagctcaggaggttgctcaaagaagtacagtctttaaaacaaccatacc

SEQ ID NO: 240592 - DNA, 90 bp, Homo sapiens
ggggcgcagcggggtcgctgaggcgagggtgtcatgtcagacaacgaggacaatttcagtcattcagtcagtaccgctgtaagactgcca

SEQ ID NO: 240593 - DNA, 83 bp, Homo sapiens
gttttaacaacctggatcttcgaacttttgacacggctttggaaacgacgtcatgtgttagaaatggctgcaagcaactgacc

SEQ ID NO: 240594 - DNA, 49 bp, Homo sapiens
cggggaacccaagccagccaccagctctggcaggctgccctgagcacgc

SEQ ID NO: 240595 - DNA, 75 bp, Homo sapiens
atggatgcaagtttaggaaatctatttgccttcacagttgttgatcacatagcatggtcatccactcacagctta

SEQ ID NO: 240596 - DNA, 52 bp, Homo sapiens
ctggggcttcctgctccagctgaaaagtgggagatagatccatctgagttgg

SEQ ID NO: 240597 - DNA, 100 bp, Homo sapiens
cagatttgccaccaccttcatcatctagtcatgctggattctttcagtgacctgtatagttcctatgtaatcttttacttcctgctgctgtcagtggtaa

SEQ ID NO: 240598 - DNA, 90 bp, Homo sapiens
aggaaggaagagctactgttaaccaggatacaagattagacaacagagtcattgatcttaggatgccagcctgttattgcgctccaggcc

SEQ ID NO: 240599 - DNA, 100 bp, Homo sapiens
ttggtccttcgccgtcagtatttgaggagaaagcatttggaagaatcctgtaagtacaatcccaagtattctgttgctaatgacaccggctttgtggaca

SEQ ID NO: 240600 - DNA, 98 bp, Homo sapiens
ccaggaagagggactggaaccatctcagaagccatgcccctcaggctggaacttgccctgtctcctcgcagatgagcctctgctgcgagaagttctgg

SEQ ID NO: 240601 - DNA, 75 bp, Homo sapiens
ggtgctgaatagactgcacctggctatcccaaccaggagggacgataagtcccgcacttacagacggctcgctgg

SEQ ID NO: 240602 - DNA, 75 bp, Homo sapiens
ctgcggcgcctgggcgctctgagccaaaattgcctggaaaagagcagtgagaggagtccgggagatgtgtgatgc

SEQ ID NO: 240603 - DNA, 50 bp, Homo sapiens
acgatctccatatttcattgcaagtgttccttgcctgtatctccccttgg

SEQ ID NO: 240604 - DNA, 90 bp, Homo sapiens
gctcggggagggggcggcggcagcgggcggacggccggcgggggcggcgtgcggcctagcgtctcagtactatactggcaattgctggag

SEQ ID NO: 240605 - DNA, 86 bp, Homo sapiens
agcggatggagttgctgcaggcagagggagccacaggtgagaagccctaccactgcaactgggacggctgcggctggaagtttgcg

SEQ ID NO: 240606 - DNA, 73 bp, Homo sapiens
gcacaagtgcgcattggtgggaaagccctggccaacgtcaacattgggagcctcatctgcaatgtaggggccg

SEQ ID NO: 240607 - DNA, 50 bp, Homo sapiens
tttgcaacgcagttcggagttattatgagaaaaagcttgtggtgaagggg

SEQ ID NO: 240608 - DNA, 99 bp, Homo sapiens
atcttcacggtggatgccaagaccacagagtgctacagcctgctgtcgaggccttctttctggtccatgccacagagcgggagagcaagcctcctgtcc

SEQ ID NO: 240609 - DNA, 100 bp, Homo sapiens
agtggattaaaatctcccaagaggaatgacaaacaaccagctcttcagctccgacagttagttaatatgtgcatcaacccagatccagagaagcgaccag

SEQ ID NO: 240610 - DNA, 82 bp, Homo sapiens
ctgcagaggacacgaggcggcgggctggagacatggaccgcggcgagcaagatcctcctactactaccacccttcagcctac

SEQ ID NO: 240611 - DNA, 100 bp, Homo sapiens
ccccagatgtctgacagccctgtgtgacaccaagataagtaacaccctgcttttacatggaaacatcatcacctctcttagaatggcacctgcttaccta

SEQ ID NO: 240612 - DNA, 99 bp, Homo sapiens
cgacaagccgctggcagccgcggatctcaccgccgctcaggtgcagagcagagcgggcggaggaccccgggcgcgggcgcggacggcacgcggggcatg

SEQ ID NO: 240613 - DNA, 75 bp, Homo sapiens
cacacactgggaaacatcattaaatcgtttcttgagtacaggcgatcaggctgcaaaggggaactatggactcct

SEQ ID NO: 240614 - DNA, 90 bp, Homo sapiens
gcagcggcggatcatattccttcatctaccatggctcagccgggaactctgaacctcaataacgagatggaaatcctgtatgaatgtgga

SEQ ID NO: 240615 - DNA, 82 bp, Homo sapiens
aggcgacagcgacctgcggcagacaatgcagatcttcgtgaagactctgactggtaagaccatcaccctcgaggttgagccc

SEQ ID NO: 240616 - DNA, 95 bp, Homo sapiens
gttagcacagcagttggaaagacataaagaagaagtgcttgagactgctgataaagagcttggggaagcaaagggatgccagtaaaactgtgagc

SEQ ID NO: 240617 - DNA, 100 bp, Homo sapiens
gccccgtatgctgccgtggatctgatcagctgaggcctgagacacaggaccaggtggaatgaatcttacttgttgaatatcttctggttactagttggat

SEQ ID NO: 240618 - DNA, 74 bp, Homo sapiens
agcgactgagtccgcgatggaggtcctagcagaagatgtgactcagactgcctctgggtggggctggctggccc

SEQ ID NO: 240619 - DNA, 82 bp, Homo sapiens
agcactgactttcagctatggaatcggctgaccccgcactacatctacccaccagccatcgtgcagcccagcgtggtgatcc

SEQ ID NO: 240620 - DNA, 83 bp, Homo sapiens
agagttggatactcagcgtcgctggcagccgctgtacttggttcccgtgtcagtggctatgatgacacctcaagttatcactc

SEQ ID NO: 240621 - DNA, 107 bp, Homo sapiens
cggcgcaccgactggaccgggaaggagcatcccaggacctaccagaatctgtctgtgatcaaaacagggcgactgctaatcagtcacgaggctcccttgacaggcgg

SEQ ID NO: 240622 - DNA, 74 bp, Homo sapiens
ggaaggacaaggaattacataacatcaaacgtgggaaatgcacaattttgaggaagagttaacttgtcccatat

SEQ ID NO: 240623 - DNA, 100 bp, Homo sapiens
gcttctaccggaggcgggacatctccagcaccctcatcgccctggccgacaagcacgcaagagcaggccgggctctcgccatgggtcactgtcgcctctg

SEQ ID NO: 240624 - DNA, 82 bp, Homo sapiens
gccgatccagcctgcggagcctgtggggcaggccaagtttcttcctaacagtggtgattctactctggccatgtgtgcccgt

SEQ ID NO: 240625 - DNA, 75 bp, Homo sapiens
atggggggaccccggtacggacctgtgcaggtgggccatgcacagacacagctcatgtctcattaatcacaccaa

SEQ ID NO: 240626 - DNA, 82 bp, Homo sapiens
tttctctatttcttaagatccagggttccagataagctgtcattggaaggaatagtggtacaaagagctgaatgccgaccag

SEQ ID NO: 240627 - DNA, 99 bp, Homo sapiens
catttttaaaagcctttggcaaaacatagctcaccatggcacctttatggaggagttcaaggtgtatgtacaaagacttttgaagaggtgtgggagcac

SEQ ID NO: 240628 - DNA, 82 bp, Homo sapiens
tcatacaggtcggagaggtcagcaacagggacatcgtggagacggtgctcaacctggtgtctgcttttggggcagagttttc

SEQ ID NO: 240629 - DNA, 50 bp, Homo sapiens
ctcgagtgcctgcaggatgtgagggaggcaatggtcgagacagttaacaa

SEQ ID NO: 240630 - DNA, 98 bp, Homo sapiens
gacgctgagggcagccccgtccagggatgttttagaagaatgtatgtctcttcccaagctatcttcttattctggatgggtggtagagcacgtcctac

SEQ ID NO: 240631 - DNA, 82 bp, Homo sapiens
gggcagagtggagtatctggtgaaatggagaggctggtcgcccaaagacggagtttcgtcatgttggccaggcccatttgag

SEQ ID NO: 240632 - DNA, 100 bp, Homo sapiens
ccgcgggtctacttcctcaaagacatatctgaagagatggattaagaatgctttggattaaggattgtggagcacatttcaatcattttaggattgtcaa

SEQ ID NO: 240633 - DNA, 89 bp, Homo sapiens
atcctagttcctcacagtctacgtcaggctcaagcaagcttccgggatgggaggtgtcccaagcccctgaagaaccgtgatgtcatcac

SEQ ID NO: 240634 - DNA, 97 bp, Homo sapiens
gagactgctgagcccgtccgtccgccgccaccacccactccggacacaggattttttatcaagcagaaatgcatcgaacaacgagaatcaagatcac

SEQ ID NO: 240635 - DNA, 96 bp, Homo sapiens
cagcattacacgatgcacttaatgaccctaaaaatggcgattctgcaaccaagcacctgaaacagcaggacaaaattcttctaagcagtggacgag

SEQ ID NO: 240636 - DNA, 100 bp, Homo sapiens
cctggcgctgctggctgcgctctgcccggcgagtcgggctctggaggaaaagaaagcgaagaaagctaccgtgaatttactgggtgaagaaaagaagagc

SEQ ID NO: 240637 - DNA, 83 bp, Homo sapiens
gagcgggtggaaaccaggcggccagccagctggaggggacatcgcggtggaggaagatctcagcagcactcccctattgaaag

SEQ ID NO: 240638 - DNA, 75 bp, Homo sapiens
ggcgggcgcggagtttctttgtgggatgcggtggaaggcttgcagccaatttactggagcagggatgacgtagcc

SEQ ID NO: 240639 - DNA, 75 bp, Homo sapiens
aagcagctccagggccccgagaaggagccgcccaagccagagctcctgcagctctgggagaaaaacggctacttc

SEQ ID NO: 240640 - DNA, 100 bp, Homo sapiens
aaagaccccaaagaaaaaatattccgatgatgatgaagaggaggaatctgaggagaatagtagagactctggctgaccaactgactgaagagcagattgc

SEQ ID NO: 240641 - DNA, 82 bp, Homo sapiens
tctaagggacactgtgttcctgaaagttttgattcccaccatggccatcacccagtttcggttatttaaattttgtacctgc

SEQ ID NO: 240642 - DNA, 75 bp, Homo sapiens
cgcgccggaggaaagatggaagactaccaggctgcggaggagttaagtgggcagaccaacatccacctcagcaaa

SEQ ID NO: 240643 - DNA, 75 bp, Homo sapiens
cagctgcacccatggacgttcgccagtgggttgacacagatgtgttacagggtcttgattatttacataccaagt

SEQ ID NO: 240644 - DNA, 82 bp, Homo sapiens
agatcgggagcgcaaggtcgccctcaaggccatgatcaaaacatgtccagctcgccgctgtccaagaaacgtcgcgtgtccg

SEQ ID NO: 240645 - DNA, 75 bp, Homo sapiens
gttgggggcaaggagaagatcctggttgcatcataaatacaaaggactgaagttataaaagagaaaagagaagtt

SEQ ID NO: 240646 - DNA, 88 bp, Homo sapiens
accacttggccccctctgatctgcgccgggtcgccacatactggttttgcacactagggaccaagaagccctcggggacactgctgag

SEQ ID NO: 240647 - DNA, 100 bp, Homo sapiens
atagacgcctgcccattcggcccggcagtgtgtgaggcgcctttcaaaccggagggattggcaaggtgatggcatcagctgagaagggaaggaagcccat

SEQ ID NO: 240648 - DNA, 80 bp, Homo sapiens
ccctgcggtgtgcaagtccgactggaacagtacctggagtagaacagaaaaattattatgtctgtgttcccttgggactc

SEQ ID NO: 240649 - DNA, 101 bp, Homo sapiens
ggcggatctggaggagcagttgtctgatgaagagaaggtatcgagaaccttccctgcgaacttcagaggaacttccagctgatgcgagagctggaccagag

SEQ ID NO: 240650 - DNA, 88 bp, Homo sapiens
agagaagccttttccgttgccggtgccggcctagcgtcctggaattacttcaatcaaatgagtctctgtcaagcaagcagacatcagc

SEQ ID NO: 240651 - DNA, 100 bp, Homo sapiens
tggtggcgggcccgggctgcggcgtgtgcgcgcccgccagctgctccggagatacgataggaccatctagtctcaggaaaacaagctcagaacgctcgcc

SEQ ID NO: 240652 - DNA, 75 bp, Homo sapiens
gcagatgttgtcaaggtggcctaccaggaggccaggggtgtcgccatggcagaggtgatcatgaactaccatgtc

SEQ ID NO: 240653 - DNA, 75 bp, Homo sapiens
tgagaaaatggacgctgacatcaatgtcacaaaagcggatgttgaaaagcggacgcccgtggtttactgtgtgag

SEQ ID NO: 240654 - DNA, 100 bp, Homo sapiens
tgtatttaatgatggtaaagttggatttattacaccagtgtcaagtagatttactgcagagccctgccaaggtaaccctgctggggtcagttatcttcac

SEQ ID NO: 240655 - DNA, 89 bp, Homo sapiens
tgaagacaaggttaataaagctgccaagattcgatgggaactttaataccaatgtgtctagaacaattagttgtgatcgactttctact

SEQ ID NO: 240656 - DNA, 112 bp, Homo sapiens
aaaaggagttcgagcagatcgacaagtccgggagctgggcggccatttaccaggagtaaaagtccctcgcaatttccgactgttggaagaactcgaagaaggccagaaagga

SEQ ID NO: 240657 - DNA, 100 bp, Homo sapiens
ctagtacaaacaggctgctggcattgagaggagaagcgcatctaccgggtgcctgttttcacagcgcccttctgccaggccctgctggaagagctggagc

SEQ ID NO: 240658 - DNA, 101 bp, Homo sapiens
ggaatatgcattgaagcaaattgaaggcacaggaatatccatgtcggcttgtagagagattgcatttttcctactccacaaacgtaacagtaaggaaaaaa

SEQ ID NO: 240659 - DNA, 90 bp, Homo sapiens
gatgaagaagtgatgtgtttaaatggaaactggacggaaccacctcaatgcaaagtatctggagtccatctttcaccatcttctcctgag

SEQ ID NO: 240660 - DNA, 100 bp, Homo sapiens
gcattgttggcgccatcatcatgccccacaacatctacctgcactcggccctggtcaagatttcaggtatgctgctgaaagtgggaatcctctacattgg

SEQ ID NO: 240661 - DNA, 95 bp, Homo sapiens
cggcgggctgtggggcctccgcgccgcggccgttagtcatgtcggttttccaagagataacttcaccaagatgtccagtgataggcaaaggtccg

SEQ ID NO: 240662 - DNA, 89 bp, Homo sapiens
cagcctgctgctcctgctactaacccacctccccctggctctggggagtcccatgcttgatgctggtactttcggaacaatgggagttg

SEQ ID NO: 240663 - DNA, 100 bp, Homo sapiens
ccctgcgtgaggccgcggagcgccagctcaatgaagctaacctctgctttgtggacattgacaaccacttcattgagttgccagaggacttgccacagtt

SEQ ID NO: 240664 - DNA, 75 bp, Homo sapiens
cgagtgaccgagaccgcggccgggaccgaggctcaaattgaaattattccatgcaagatctgtggagacaaatca

SEQ ID NO: 240665 - DNA, 82 bp, Homo sapiens
aagacattcaggatcaacttgaacgaatatttctggaaagagctgatcctctctggcactttaaatccaattaaggatttac

SEQ ID NO: 240666 - DNA, 98 bp, Homo sapiens
caggccactccttacatcgctgttttgatacaaccaagtcggatgggcagtttaagaagacagccagtaacagcaagctgaggacctacctgcccgac

SEQ ID NO: 240667 - DNA, 75 bp, Homo sapiens
agaggagcagcatggcatttcagtcactggtttgcagagtccagccatccctccattcattatgaacactttgga

SEQ ID NO: 240668 - DNA, 100 bp, Homo sapiens
cgccgcgctcagcgacaaacaagaatgtatcctgtcaggtataatgtcagtgaatggcaagaaagttcttcatatggatcgaaacccttactacggagga

SEQ ID NO: 240669 - DNA, 82 bp, Homo sapiens
ccggagggagacgcgctgccgaggagaacccagcggatagactgggagctccatgaggtccgagacaacctgaagacgccca

SEQ ID NO: 240670 - DNA, 50 bp, Homo sapiens
ctgccccgccggagcagcatcatcaagtgggtaattccagaattgattgg

SEQ ID NO: 240671 - DNA, 83 bp, Homo sapiens
gagctgtcctttcaggaaggagccattatttatgtcatcaagaagaatgacgatgggaggataagacagagcagcttgtggac

SEQ ID NO: 240672 - DNA, 75 bp, Homo sapiens
atcatcagctcggtccagaagctggttctgtatgagactagagcttggtggtcaaaatataaccatgatgggcag

SEQ ID NO: 240673 - DNA, 90 bp, Homo sapiens
ggacgatgttggcaatctgatccagcctggggacattatccggctcaccaaagggtgaatgaaaactttgccattgatttgatagcagag

SEQ ID NO: 240674 - DNA, 100 bp, Homo sapiens
gaaagagacagcttgagaaaagggactttggaaaaaggctgtctctagacagcagtcttgtgaattaaggaagttcactggagtaaaatggaggcctcag

SEQ ID NO: 240675 - DNA, 97 bp, Homo sapiens
tgaaagggtcaaagtctttgaggaatgctctggcatggcagagagaaatgctaattttgaagcccttcctgaggattggagagcaaggctgaagaga

SEQ ID NO: 240676 - DNA, 101 bp, Homo sapiens
tggcctttgatgccctggtgaccttctgtgaagaactgggccatgtgtgagatgataaagatcatgcaagagtacggggaggtgacctgctgcctgggcag

SEQ ID NO: 240677 - DNA, 82 bp, Homo sapiens
cagattaattccaaccaaatcccggggctcatctggattaataaagagccttcacgtaaatgggtccagtcatgcctcccag

SEQ ID NO: 240678 - DNA, 83 bp, Homo sapiens
ctttagaccctccacctaattgcaggaaaatgtttataggaggccttagctgggacactacaaagaaagatctgaaggactac

SEQ ID NO: 240679 - DNA, 96 bp, Homo sapiens
ggtgtattttgtcagtctcgtcatctttgggtcatttttcgtactaaatcttgtacttggtgtattgagcgggcacggtggctcacgcctgtaatc

SEQ ID NO: 240680 - DNA, 100 bp, Homo sapiens
cttcatcatcccgcaggagcaccaccaagagcccaggaccgtccaggcgtagcaagtcccctgcctccaccagctcagatagcaaagccattgtggatgg

SEQ ID NO: 240681 - DNA, 88 bp, Homo sapiens
ggagacggtgtcccagctggattcggtgcgggtctggctgggcaagcactacaagaaggctgaccggttccctgatgtgttacctgct

SEQ ID NO: 240682 - DNA, 82 bp, Homo sapiens
ctggaggcggcgggatggaggcggcggccgaggccacaagaggaagctgaatgaagaggacgccgccagcgagtccagcagg

SEQ ID NO: 240683 - DNA, 96 bp, Homo sapiens
cttttttcctacccaaggacatgactatgtacttgcagaaaaacagattttctaccctagcaaggatggtacgaagattccaatgttcattgtgca

SEQ ID NO: 240684 - DNA, 90 bp, Homo sapiens
aattgctgaacttaaaaagcagtctaaacctgtgaccacccctgaagaaattgcacagatcggacagctggcttttaaaggaatgaagag

SEQ ID NO: 240685 - DNA, 85 bp, Homo sapiens
agacacaggtcactcaaataggcaggtacacatttaatgaggatgagggggagcttccggagtggtttgtgcaagaggaaaagca

SEQ ID NO: 240686 - DNA, 75 bp, Homo sapiens
tcctgcagttcttttgtccccgggtagagtctcggagtcggagagcgcgcctcgcttccagagcccccggacccg

SEQ ID NO: 240687 - DNA, 100 bp, Homo sapiens
cctcgatgtgctctgcgtgttgctgggtcaccatccttgtcagcctggccctagctttccttgcgtgcatcgtgttcctggtggtttacaaagccttcac

SEQ ID NO: 240688 - DNA, 137 bp, Homo sapiens
aaagcaatagtgagccaaccacctgggccagtattatcaggcatggagatgctactgatgtcaggcactattcctgatcagagaactccagttgcttcaacacacagtatcagtagtgcagccaccccagatcgaat

SEQ ID NO: 240689 - DNA, 100 bp, Homo sapiens
cgaggacagcgcgtgcccgcgaggagccgccgcgcgcccgcgccctccgcgcgacgccagtatggtttgaagtggtgaacatggatttttctcggcttca

SEQ ID NO: 240690 - DNA, 100 bp, Homo sapiens
aaagctgtgctccatgctgtggctccatactggaataatggagcagagacttcttggcaggagaaattacgacaactacgagactgcattattgggaaaa

SEQ ID NO: 240691 - DNA, 75 bp, Homo sapiens
aagagtatggacaaatagaatctgtacgatttcgttctctggcttcacaggctgctcaagaagccgagatcaatg

SEQ ID NO: 240692 - DNA, 100 bp, Homo sapiens
gatgaaacttatcacttctgatgtattagagattgttaccagcgcttagaattcctgggagatgcgattttggactacctcataaccaagcacctttatg

SEQ ID NO: 240693 - DNA, 50 bp, Homo sapiens
tctgcgctcccttcctcagcgtttcaagtgtcgagaagcacttacaaccc

SEQ ID NO: 240694 - DNA, 83 bp, Homo sapiens
caagctctgcgaggccatctgccccgcccaggactacgcccaagcaaggtttgatgcctatttccaccagaagaggaagcttg

SEQ ID NO: 240695 - DNA, 100 bp, Homo sapiens
aaaatggagcacgtccaggctgaccacgagcttttcctccaggcctttgagatgtcttgggacaaggtgcgcattcctggtgtgctgcagcgattgggag

SEQ ID NO: 240696 - DNA, 98 bp, Homo sapiens
gcgcctagatggctttggtcacggtccagcggtcacctacccccagcaccacctccagcccctgcgcctcggttcggtggtgagaggaagcctcgcag

SEQ ID NO: 240697 - DNA, 90 bp, Homo sapiens
tggaggttcgcggctctaacggggctttctacaagtttgaaattggcacaatggaagaagctggaatttgtgggctaggggtgaaagcag

SEQ ID NO: 240698 - DNA, 82 bp, Homo sapiens
cgagaagtatagacctgcctccgcctcagtatcggctctgattggagccgagaggccccagcaacatgcagctacaattcca

SEQ ID NO: 240699 - DNA, 96 bp, Homo sapiens
tgcggccggcctgggcaggtgtcttcctcgagaggcaggcaggggatcccggacaatgtcacaggtagactaatggttggcctacgttggtggaat

SEQ ID NO: 240700 - DNA, 90 bp, Homo sapiens
ctgagattgttaagcagattacttccatcagtattgagccaggagttgaggtggacaaggctcttcttggttcagtgaaggacagcatcg

SEQ ID NO: 240701 - DNA, 88 bp, Homo sapiens
gcgcacaagtcaggtccggcacatgtttccgcggagcggacccagcaatgacgcaagacttcaaggactgcattcgtaggcaaaggtt

SEQ ID NO: 240702 - DNA, 76 bp, Homo sapiens
catatcgtatcagatggcagacatacatcatttaaagggtgtaaaaggaagagaatgtctcctggacctaattgcc

SEQ ID NO: 240703 - DNA, 100 bp, Homo sapiens
ggtgacctgactctctgaggctcattttgcagttgttgaaattgtccccgcagttttcaatcatgtactgccaaatctgtcgaaagggagataatgaaga

SEQ ID NO: 240704 - DNA, 100 bp, Homo sapiens
catatgtttcttacaaagtggaggtttgtggcagccctgcatggagcaagtctgtcagcaccatctttctaacaacctgcaatgcttcttttgccacccg

SEQ ID NO: 240705 - DNA, 82 bp, Homo sapiens
ccagctccccatcgcagaggccatgctgacctacaagcagaagagccattgagacccagagcagcagttctgaagagatagt

SEQ ID NO: 240706 - DNA, 99 bp, Homo sapiens
gttgattgcatctggaccattaaagccactccaaaagctaagctgtcggaaaaggtaacagaagatggaactcgaaatcccaatgaaaaacctacccag

SEQ ID NO: 240707 - DNA, 100 bp, Homo sapiens
ccctcctgccgtcgagatcgccgccgacgccgctgctgtggccgctgctgctgctgctgctcctggaaaccggttgaatcgctcctagctgacccctcac

SEQ ID NO: 240708 - DNA, 75 bp, Homo sapiens
cctggtgcagatcatctacgacgagaaccggatcatggaagggaagtggttgctgtgtatgttactggtgcttgg

SEQ ID NO: 240709 - DNA, 101 bp, Homo sapiens
agtggatatagcacaccatccccagccatgcctgtatggagtggaatgaatgttgctggtgtctctctgaagactctgcacccagatttagggactgataa

SEQ ID NO: 240710 - DNA, 75 bp, Homo sapiens
tgggtcgaggcggacgcgcggctgcgtcaggagtgatttgggccccgatgttggctatgaagctattggtcttgt

SEQ ID NO: 240711 - DNA, 100 bp, Homo sapiens
cgcagatgcccgggccgtggctctagcaggctccactaactggggctacgactctgatgggcaggaggaagctggcccagttgcaggtggcctatcacca

SEQ ID NO: 240712 - DNA, 75 bp, Homo sapiens
gggccatgcctgcccgtggaggaaagcggcgttccggagacagggaagaacgattggcagcactcacagctgctc

SEQ ID NO: 240713 - DNA, 80 bp, Homo sapiens
tgctacctgattgcccccgggtctcagcagaaatctcctttacagacaataggtgaagaacaaacccagaatccctacac

SEQ ID NO: 240714 - DNA, 50 bp, Homo sapiens
gggaggccgaggtgggcggatcacgaggtgaccaaagccacgtaatgtcc

SEQ ID NO: 240715 - DNA, 100 bp, Homo sapiens
caattcatgaagcagcttatcacaactctgtagaatgtttgcaaatgttaattaatgcagatggacgaatgccttttccggtgaaccatggcgccagttc

SEQ ID NO: 240716 - DNA, 75 bp, Homo sapiens
tctcgggctcggaacgagactgcacggtttaactgaactgaatgacagtccagttcccctagaacttgagcgctg

SEQ ID NO: 240717 - DNA, 100 bp, Homo sapiens
ctcacgttcatcatggtgcctggctgccaggcaggatggcacatttcctagaggcagaatcctacaacttccactccaagtgagaaggagattcaaactc

SEQ ID NO: 240718 - DNA, 100 bp, Homo sapiens
aggccggtgctcttgcaactgacgcagtcactgcagcactggtggaacttgaggtgtatgtggaatttgatgatcttgaatgggataaacgagagtgggt

SEQ ID NO: 240719 - DNA, 100 bp, Homo sapiens
gaagaatgagtataaaggatgggttttaactacagacccagtctctgccaacctctgaccccactcaggatcttcatttcactccgttgctttcaccgag

SEQ ID NO: 240720 - DNA, 97 bp, Homo sapiens
agaagggaaggcgcgagtgaggaaaggaggtactgtagatacttggtgcttgaaaaactgaagaaggaagacgctgaccgaattcatatattcagtt

SEQ ID NO: 240721 - DNA, 83 bp, Homo sapiens
ttttgctcatccagatcttaatgatgccacaacccttacgcaaagaaagatgtgcgggacatcctcaccccaattcagattga

SEQ ID NO: 240722 - DNA, 80 bp, Homo sapiens
ttctttcttgacattaccttttcaccagactatccgtttaaaccccctaagaatataacaccagcaatcctgacttgttg

SEQ ID NO: 240723 - DNA, 74 bp, Homo sapiens
cgtggtcgtggtgggcgctttggttccagaggaggcccaggaggagggaggattggccaccaaagcctgtttat

SEQ ID NO: 240724 - DNA, 80 bp, Homo sapiens
cgcagctgggaaagctgctcaaggagcagaagtacgaccggcagctgaggttatcccatcatcaggtagcaagttgaaac

SEQ ID NO: 240725 - DNA, 50 bp, Homo sapiens
tcaaatcattcctgtgatgccaggtaagaatgattgatgttggctgatat

SEQ ID NO: 240726 - DNA, 100 bp, Homo sapiens
cgccgcctccccgcggccccggcgagcagccgccgcccgccgcacccatgagtaaatcaacaggattacctttcccttaataatcttcaaaatgtccacg

SEQ ID NO: 240727 - DNA, 74 bp, Homo sapiens
actgtgtggggcgcggatgggatccagctgttagtcgggtaggcatagctcagcgacccttccctctatgatga

SEQ ID NO: 240728 - DNA, 100 bp, Homo sapiens
cgcggctgggcgttcatctaccacgctttcgttgcatgcaagatatgggaaatactaaagcaagactactctatgaagccaatcttccagagaactttcg

SEQ ID NO: 240729 - DNA, 100 bp, Homo sapiens
gttctgcagggcatgcaggtgcgccgggtgcccctggagatcccggaggagcagcatccagttggacttccccgaaccacaggccccatgcagtcctccg

SEQ ID NO: 240730 - DNA, 78 bp, Homo sapiens
tgcctcagcttcctcagtagttgggattacagattatagcatttgatgagctgaagactgattacaagaatcctatag

SEQ ID NO: 240731 - DNA, 100 bp, Homo sapiens
cccggtagagcccagctcagcgcccggcagccttcgacgcgatgttccgccggagcttgaatcgttttagagatggaaccatgtaaccaccacgaccaag

SEQ ID NO: 240732 - DNA, 75 bp, Homo sapiens
gcagaggaccattctggcttttgtctctggcatcttcttcatactatcggagtaaagatgctggtatcaggactt

SEQ ID NO: 240733 - DNA, 100 bp, Homo sapiens
ggagttatcagaccgtacaggttgagggatgggactggaaatcaaatgttacaggttgctacatgggtggatgaaactttaagttctgtggcttctaaat

SEQ ID NO: 240734 - DNA, 82 bp, Homo sapiens
ccgagtcgcgcggaggcggaggcttgggctccctgtgctgtcaggaatctacaggacttggctcgtatttacattcgacgca

SEQ ID NO: 240735 - DNA, 90 bp, Homo sapiens
ccaggcctgacagctctgcggctcgggccctgaggttttgaacgaagaatgtgatcagaactggtacaaggcagagcttaatggaaaaga

SEQ ID NO: 240736 - DNA, 51 bp, Homo sapiens
acttaaaccggcccggagatgtgcgggctgaagtgcaatgttgtgatctcg

SEQ ID NO: 240737 - DNA, 100 bp, Homo sapiens
catttctcagctccctggattccttcccctaaattaggacctattatttacctgtaggttcaagtgctggattgtgtcatgtgaccatcccaaaactcag

SEQ ID NO: 240738 - DNA, 100 bp, Homo sapiens
tgctcctcactttcttcctccgcacggatgctgagaggcagagcttgggatatggctttgtgaactacattgaccccaaggatgcagagaaagctatcaa

SEQ ID NO: 240739 - DNA, 100 bp, Homo sapiens
accattgacgccatgtcgggttattcgagtgaccgagaccgcggccgggaccgagggtgtttgagaagtcccccctgcgggtgaagaacttcgggatctg

SEQ ID NO: 240740 - DNA, 150 bp, Homo sapiens
aacagcgccccggcaccatcaagcatggatcggcgctggacgtgctcctctccatggggttccccagagcccgcgcttccagggtctccctccactgctgtagtaacccgggtccggggcctcggtggtgctcctgatgcccctcaccca

SEQ ID NO: 240741 - DNA, 87 bp, Homo sapiens
ggatcagatgatgaggagcaagaggaccctgcggactactgcaaaggctagtcaaatgaagcagtgggatatgctgcattttcaaaa

SEQ ID NO: 240742 - DNA, 134 bp, Homo sapiens
attttccaacaggaaggaatatgtggagagggccattgaatatcgacttcatgagatggacagacagggaagaggagcacagcagtaacgctgatgggaagaaggtgctgacagatggactcactggggtcacg

SEQ ID NO: 240743 - DNA, 90 bp, Homo sapiens
cagagctgaggttcttctctgccaccccctcctgtcttgcagacagtggctgagtgcgtcctctattactacctgactaagaagaatgag

SEQ ID NO: 240744 - DNA, 98 bp, Homo sapiens
cttgcatgtatttggaacaaaaaaaggagatgcctggcagccccgctctctgcagaaagcagatggtggagctgaatatgccacttaccagactaaat

SEQ ID NO: 240745 - DNA, 101 bp, Homo sapiens
aacttcgccaactccgctgcctttgccgccaccatgcccaaaacggatttgaagcctagcaacattgttgtgaaatcagactgcaccctgaagatccttga

SEQ ID NO: 240746 - DNA, 83 bp, Homo sapiens
ctttgcttcagccgcagtcgccactggctgcctgaggatgaccgagtgggagacagcagcaccagcggtggcagagaccccag

SEQ ID NO: 240747 - DNA, 90 bp, Homo sapiens
gcaggtgtctcttctcgccctggcggggaaggttctgcgttagacctgcatcttagcaatgtgaatattgcatccctagagaaggacctg

SEQ ID NO: 240748 - DNA, 82 bp, Homo sapiens
gcccgacgcaaaccaaggatctggggatcttcgcactatcccaagttcacatgagagatcctaataatcaacttcacgtaat

SEQ ID NO: 240749 - DNA, 75 bp, Homo sapiens
ccaatgtgtggtccaatgtagtgatgaagaatggggactcattctcacagttccggtttgctgaggagaaagaat

SEQ ID NO: 240750 - DNA, 100 bp, Homo sapiens
aggtggagccaccagcctctccctgtgccggtggtggtgtgcacattgagccccggtatagacagttcccccagctgaccagatcccaggtgttccagag

SEQ ID NO: 240751 - DNA, 87 bp, Homo sapiens
gcaagaacgggaacaaaactctgagttctaaagttcctgttgcttcagacaatggatgagcaatcacaaggaatgcaagggccacct

SEQ ID NO: 240752 - DNA, 95 bp, Homo sapiens
ctggtgagcaaggtgacattgaaccccgaagaatggtgattatcctgaaccatccaggccaaataagcgccggctatgcccctgtattggattgc

SEQ ID NO: 240753 - DNA, 98 bp, Homo sapiens
tcactgcagaggtgctggagctggcaggggtgagcccctccagactccgaataggagatcaagagtttgattcattgcctgctttactggaattctac

SEQ ID NO: 240754 - DNA, 80 bp, Homo sapiens
gcacagtgcttgccatccaggagctcccagtcccaatgaggaaccagcagaggttgacggatatattcagacgttacgac

SEQ ID NO: 240755 - DNA, 100 bp, Homo sapiens
tactctgattaccgccatgctccaagacccgcactgacagtccccacgtgtcctgtggccaggcggaaagcagtgagaagcccaacgctgaggacatgac

SEQ ID NO: 240756 - DNA, 75 bp, Homo sapiens
gccaacactagtggaatatgatcacatcccaggaggaggagctggctaccctatctgaggaggagattgctatgg

SEQ ID NO: 240757 - DNA, 82 bp, Homo sapiens
gaaagtagccaccagtccaactcgggtcgcccccaccattatttcgggtttccaggcctgaggtgcccgccctggccccagg

SEQ ID NO: 240758 - DNA, 75 bp, Homo sapiens
atgcaggcttcaaaaagattgagggccttcctccggatgctcttccccgagaagctggatggagacaagaagggg

SEQ ID NO: 240759 - DNA, 113 bp, Homo sapiens
gtctcaatatctgtcttcggtggactccttcggcagtccacccaccgccgccgcctcccagaaattccgggtagatatgcctggctcaggcagtgcattcatccccaccatca

SEQ ID NO: 240760 - DNA, 83 bp, Homo sapiens
cccggccccgcgtcccggagcgcccgcacccggccccgccgccgcctcaggaaataatgcaaaaggtgtcccaaggctcctga

SEQ ID NO: 240761 - DNA, 98 bp, Homo sapiens
cgatatttgggagcggccccgagacgcgcctggcgcggggcccggtcggactaggacccgcggcctgagagacgctggaggatgcggacgcggaggcc

SEQ ID NO: 240762 - DNA, 83 bp, Homo sapiens
tgcagacagcagcttcatgatattactgtaccgttagaagtttttgacactgccagtgaaagatgtagaagataaacctgaac

SEQ ID NO: 240763 - DNA, 74 bp, Homo sapiens
gaacgcccctccagccttcgagtcgttcttgctcttcgagggcgagaactcatgggcctcctgagtgacccaga

SEQ ID NO: 240764 - DNA, 75 bp, Homo sapiens
cctggttcttgtgtctcttggtggccaatgttcctgatagttttaatgaaggctgttgccaaaatggttcaacag

SEQ ID NO: 240765 - DNA, 98 bp, Homo sapiens
acggcaaaggtgtcgtggtggtcattaagcggagatccggtcccccacggcccttcaggatgaaagctgcggtgctgaccttggccgtgctcttcctg

SEQ ID NO: 240766 - DNA, 75 bp, Homo sapiens
cggaagtccccgaggcagcctccgcggaggagcagaagaatacaatgacagattccacaatacttttggaagatg

SEQ ID NO: 240767 - DNA, 75 bp, Homo sapiens
aggcgaccactcctgtgatcgttgcggctggggctggaggggaggaaggggaacacttaagaatctgtcctcagg

SEQ ID NO: 240768 - DNA, 100 bp, Homo sapiens
atacaccaccaaactttgttcttgctcttgttttgccctcaattgtaattctggagagactagcttgcaaaattttcctcatattgaggtggttcggaaa

SEQ ID NO: 240769 - DNA, 50 bp, Homo sapiens
ttgaacatctctgtgccagcgagtttggtgctggagaatctggtaaaagc

SEQ ID NO: 240770 - DNA, 100 bp, Homo sapiens
tttatggccggcacaaggagtatctcagcagcctcgtaggcaccgactttgagatggtgaaaggtgtagcagtcactcggcctacacccacagcatcgac

SEQ ID NO: 240771 - DNA, 51 bp, Homo sapiens
gaaataactcagctgaagcatcagtggtattggaaggaactggccctgggc

SEQ ID NO: 240772 - DNA, 142 bp, Homo sapiens
gggcgccagaagtgggactggagcgaagtagaggatgccgaggagaaaacagcaggcacccaagcgggcggcagttactccacaggatccgctgaacataggatgttgccacaaaatctacctcgtgtatttttctctttca

SEQ ID NO: 240773 - DNA, 90 bp, Homo sapiens
gggcgagcgggtgcgtctgccgcagagtcggcacctgaaggacatggaggagtgggaatagctttgcgaaaaatgggcgcaatggccaag

SEQ ID NO: 240774 - DNA, 74 bp, Homo sapiens
ggcaacatccagcggatcagccaagccaaagaagcgtgtggagggccctggctccctgggcctggaggaatcag

SEQ ID NO: 240775 - DNA, 75 bp, Homo sapiens
aagtccagagctgaggactgcctgtttgcaggtaacacgtacacagacctctcggccggaatctccagggatgac

SEQ ID NO: 240776 - DNA, 75 bp, Homo sapiens
aaggacaaggaattacataacatcaaacgtggtattggtaaaggttttcaaggtgtcatgaaaagatggggattt

SEQ ID NO: 240777 - DNA, 83 bp, Homo sapiens
cggcgcgcacgctccggcctgcgctattcaggattatgaaactgctcaggaacacaatgaaaatgatcagcagattcgagaag

SEQ ID NO: 240778 - DNA, 101 bp, Homo sapiens
gattcaagcatggcattgaggctgacacctttgaaaacattgaagtctataacttaatgtgtgaattggagcgttattcagtatattaatgtcttattgat

SEQ ID NO: 240779 - DNA, 88 bp, Homo sapiens
atgcagaggacggcaccacctccaaatactttggtcacccctcctaatttctcagtgtcacaagtgcccaacatgcccagctgtcccc

SEQ ID NO: 240780 - DNA, 100 bp, Homo sapiens
agtcgaagactctccctccctggattgttgtcacaagcatacatctgtggatggatatactgaaccacacatccagcctaccaagtcgagtagcagacag

SEQ ID NO: 240781 - DNA, 90 bp, Homo sapiens
aaatgggagatgaaaatgcggaggtggggtggaagacaacccgtgagtattacaccttcatgtgggttactttgcccattgacctaaaca

SEQ ID NO: 240782 - DNA, 100 bp, Homo sapiens
ccgggagtcgcgcttcttccccactcccgagacaggaggcttcgacggcttccagggctgctgtcccgatctgtgctctgaggcccccgcccctgcgctg

SEQ ID NO: 240783 - DNA, 75 bp, Homo sapiens
gccggagccgaggcgagcgccgcgcgcaccactgggagatgttaatctctgtggccctaggccaggtgttatccc

SEQ ID NO: 240784 - DNA, 137 bp, Homo sapiens
gcgaggaggcgtgagtgccgaggtgtacaccgaggaggacgccgtgtcctacgtcaggaagatcctggctctgcagagagaacagcccagaaaagaaagttccccagccctccacattcttccaatggccactcgcc

SEQ ID NO: 240785 - DNA, 100 bp, Homo sapiens
gatgatcgagaggatctggtgtaccaggcgaagctggccgagcaggctgagcgatacgacggctgctcccggcagatcggcttctcctttgtacgaccca

SEQ ID NO: 240786 - DNA, 119 bp, Homo sapiens
ctgactcaggcattacttgaagctggtgccaaagtggttgcgctcgaaagtgacaaaacttttattccacatttggagattctccccgaggagaggcggagagctgagcttgactaccg

SEQ ID NO: 240787 - DNA, 113 bp, Homo sapiens
tcgctaaccggacggtggtcgccagggcgagaggcgggagccggagagctgttgaaggctggattctctttgtaactggagtccatgaggaagccaccgaagaagacatacac

SEQ ID NO: 240788 - DNA, 83 bp, Homo sapiens
cgtccgtccgccgccaccacccactccggacacaggtgttgcaccctggcctgctcgctcaggtgcatatggacctgctgctg

SEQ ID NO: 240789 - DNA, 89 bp, Homo sapiens
cgcaggaggcgctcctccttcccaccgcaaactgaaaccgtgtcagttcagtcttcggtattggggaagggtgtaaaacatcgaccccc

SEQ ID NO: 240790 - DNA, 75 bp, Homo sapiens
gggcacggacgcacgccactttttctctgctgatccaggtcagatgggcagacctggaagagaagaaggatgcag

SEQ ID NO: 240791 - DNA, 133 bp, Homo sapiens
ttgcttggattgctacatggaccccctgagactatcattattacctcctagggccaggaagccaggttctcactctgtcgcccaggcttagggtgcagtggtgccatcacagcttactgcagcctcgacctct

SEQ ID NO: 240792 - DNA, 75 bp, Homo sapiens
ccgcccctctattgaccagatcctgcgccatgacttctttaccaagggactggtgattgcagctggaagtgccca

SEQ ID NO: 240793 - DNA, 75 bp, Homo sapiens
aggatggcttgcagaagacgctatttgtcattgagactgcctcttctcaaagggacactgtcctcagcactttat

SEQ ID NO: 240794 - DNA, 74 bp, Homo sapiens
ggccgcgggcgcgaccggaggcaggaagagtgtcttccaaagtgttcttcactctttttgccctgcttggtttc

SEQ ID NO: 240795 - DNA, 73 bp, Homo sapiens
cgccggcctcctccgtgcggagaagaagctgcggccgcacctggccaagggtgactatgaccagagcaggacc

SEQ ID NO: 240796 - DNA, 73 bp, Homo sapiens
cgcctacctctacaaacagggctttgccatccccggctccagcttcctggagtcagtggatcggtggggaaaa

SEQ ID NO: 240797 - DNA, 75 bp, Homo sapiens
cctcctgctgccttcccgtcgccgctcccgaagcttttccaggaaagaagcacttgtaaggaaatatagcatcca

SEQ ID NO: 240798 - DNA, 100 bp, Homo sapiens
cgctgacatgaatatggagtagttttctctagcaaagcagatccagagccagagctctacctcgatcctttctgccctccgggtttctccagtcagaaat

SEQ ID NO: 240799 - DNA, 75 bp, Homo sapiens
aacagaaccttccaaatttccttttccaactaaggaagagagagaaaatccttcaaaacggagtagaattgaacg

SEQ ID NO: 240800 - DNA, 75 bp, Homo sapiens
gttgggatcaaatgtgagcctatggatcaaggaatactctgaagatagtaactccgagccaaatgtggatttgga

SEQ ID NO: 240801 - DNA, 76 bp, Homo sapiens
ggctcacgcagcttcaggacgctgtgaattcggtgcgtgctctggaggaggccaacgccgacctggaagtgaagat

SEQ ID NO: 240802 - DNA, 100 bp, Homo sapiens
ttattgagcacctgtcagtggtattcccatgttacaacaggcagcctgcttctgcaaagtggtacgatcgaagggactatgtcttcattgaattttgtgt

SEQ ID NO: 240803 - DNA, 101 bp, Homo sapiens
tgacaaaccctttctatgtactgcgcctggatgtggccagaacctcagagtgacagagccaaaagaccagtgcctcattttgctgacatggaaaaggaaac

SEQ ID NO: 240804 - DNA, 82 bp, Homo sapiens
gcctagcgtcctggaattacttcaatcaagagccttcacgtaaatgggtccagtcatgcctcccagtaagaagccagaaagc

SEQ ID NO: 240805 - DNA, 75 bp, Homo sapiens
agataacagccatcctattgaagaacaggagtacagctgtgtagtaaagatgccttctggtgaatttgcacgtat

SEQ ID NO: 240806 - DNA, 87 bp, Homo sapiens
catggatgttcttcttcgagtatttgtagaagggagccggtgaaacctgaagaaggcagagatatggcaaacaggattggcgctttt

SEQ ID NO: 240807 - DNA, 96 bp, Homo sapiens
ggtgggaaggctcaagatggcgtgcttgttggagaccccaatccgcatgagcgtcctttcgcatgcagcagaactgattaaaacagtggcatctcg

SEQ ID NO: 240808 - DNA, 60 bp, Homo sapiens
ggacgagctcggagcagcagccagaacaagttgaaatcatcgcagaaggataaagttcgt

SEQ ID NO: 240809 - DNA, 82 bp, Homo sapiens
gtttggctgtgtcttaaatgtggccatcaggctttatcctgtggataaacgcagagtgaacgagtttggggagtcctacgag

SEQ ID NO: 240810 - DNA, 87 bp, Homo sapiens
aaaaagagagagaacgtcgacaaaaaggcctccctcaagtgaaaccggaaactgcaagtgaggccccagacctaaagcaggaggagc

SEQ ID NO: 240811 - DNA, 75 bp, Homo sapiens
caccattttcataaagaaccacatccgtttccccaaattcaacttctccaaagttatggagtggctgccagcaag

SEQ ID NO: 240812 - DNA, 78 bp, Homo sapiens
tggatcccagaaggtcgcgaaggcagtaccgtttcctcagcggcggtcacctcggctgaatcctgcagtaacctgtgc

SEQ ID NO: 240813 - DNA, 82 bp, Homo sapiens
ccttcctcaacgacgcggacatggtcatgagctttgtgaacctgggtgaaaggtgtagcagtcactcggcctacacccacag

SEQ ID NO: 240814 - DNA, 98 bp, Homo sapiens
aaacttccagaacatctgggagaatatttaatggaaaatcgcttggttaaaacctgacacttttaacaggtactactgagcgagtgtgcttgatccag

SEQ ID NO: 240815 - DNA, 75 bp, Homo sapiens
ttcaaactctaaaccatctgaattggctcaatgatgagatactgcaatgaacatttgctatgtcccccacacatg

SEQ ID NO: 240816 - DNA, 80 bp, Homo sapiens
tggcagcaaggtgggcccggacggcacaccctacgttaccgtgctcaaggcgccatgtcagaaccggctggggatgtccg

SEQ ID NO: 240817 - DNA, 101 bp, Homo sapiens
cctggtgcctgaagaggagtcggaggtggcaattttggaggtagccccggttatggaggaggaagaggaggatatggtggtggaggacctggatatggcaa

SEQ ID NO: 240818 - DNA, 123 bp, Homo sapiens
ctaaagaaagctttaaaagaaaaagaaaacagattattattgcaacaaagggaatctagagcaacagcaaagctgaggtcaaactaccgtaaggatggacaccaaggaagctgtgtttgggac

SEQ ID NO: 240819 - DNA, 51 bp, Homo sapiens
cctctggagagcccaccaacaggtttgcctgaatccatcattgcagctgca

SEQ ID NO: 240820 - DNA, 90 bp, Homo sapiens
tgcacagccgtcaccctcaactttcccttcagatacgtaggtaacctttccagagatgtgacagaagtccttatacttcagttgttcagt

SEQ ID NO: 240821 - DNA, 75 bp, Homo sapiens
tgcagtttttgatgaaattgtagagaactgtttcagcaagcagatggtggaaattcttcacaaacataatattca

SEQ ID NO: 240822 - DNA, 103 bp, Homo sapiens
gccgttcaaatgtcctttctgtagctacgcctgtagaagaagggacgccctcacaggacacctcaggacccattctgcttccatgaggcaggctgaacctgca

SEQ ID NO: 240823 - DNA, 98 bp, Homo sapiens
tatccttttcttctatgaaaagatccagaaaagaggcaaagcaagcgagaagtcgcgggcccagcccacagcaggagctcccagctcctccagcagcc

SEQ ID NO: 240824 - DNA, 89 bp, Homo sapiens
cctgatccatggacccgatgaacatagacacagattttaccaaatgttgcaagaactctggagttcttatggtagtaaaatgccggaaa

SEQ ID NO: 240825 - DNA, 88 bp, Homo sapiens
gatttgttcgtactctttttagtgctgcacagctaacagctgaatgtgcaatagtaactttggcccctagcagtcttcttgatgcttt

SEQ ID NO: 240826 - DNA, 75 bp, Homo sapiens
ctttcaagaaaggagagaagatgaaagtcctggaggagttcaacttttagatacaaagagacaactggatacaga

SEQ ID NO: 240827 - DNA, 51 bp, Homo sapiens
gttaacgtgtatggcgtgtgcgtgccagaatagcctaacatggcagaccag

SEQ ID NO: 240828 - DNA, 84 bp, Homo sapiens
cccggcacccccggaccgaccatgggcagatcccagatgaacgactttcgaagtaaaatgcaatcaatatttccaacaattccc

SEQ ID NO: 240829 - DNA, 90 bp, Homo sapiens
aatggagattggatggatgcacaatcggagacaaaggtcccccacggcccttcaggatgaaagctgcggtgctgaccttggccgtgctct

SEQ ID NO: 240830 - DNA, 98 bp, Homo sapiens
agtttgtggtgttttctatcccagttctttggcttttactaaaaatggacgcctggcaaccaagaaacgattatatatggaagtatttgaatatactc

SEQ ID NO: 240831 - DNA, 100 bp, Homo sapiens
cctggagcggccgccttccagcggactggtttggctgaaagacaaagaagcaacacattgtaaactttgtgaaaaggaattctcactctctaagagaaag

SEQ ID NO: 240832 - DNA, 115 bp, Homo sapiens
ccagtttgataagcctggcgcggaacggtcgtggagaagaagagctgctgatgaggactgggacaggactctgtctactagtgacgatgtcgaagacagggaaaatgaaaagggt

SEQ ID NO: 240833 - DNA, 82 bp, Homo sapiens
cggccccttagcgcggtcaggccgccctccttttccagcatgaagaggaaccacctcagaatatgaaaccacaatcaggaaa

SEQ ID NO: 240834 - DNA, 97 bp, Homo sapiens
ccacactggtgatggcaccacctctagaggaaggcttgggtggagcaatggaaggcattgcactgatgatgtggaatacgttcttagttaaaagatt

SEQ ID NO: 240835 - DNA, 83 bp, Homo sapiens
ctcctgagtagctgggactgcagctgaaggtttagaataaaatgggttatgtctggacccacttcaaaatggctccaggagac

SEQ ID NO: 240836 - DNA, 95 bp, Homo sapiens
tccaactatgtggtagccttcatactagtcagccatcgctcccagccccaacagccttcccagccccagcggaccctgctccagcatgtggctca

SEQ ID NO: 240837 - DNA, 74 bp, Homo sapiens
ttttctccagccgagaggacgcggctgtgatatacgaagcagctcttcagtgggtcatctgtgtgtcacagcct

SEQ ID NO: 240838 - DNA, 92 bp, Homo sapiens
aaggatcatgtctgcgagccaggattcccggtgagaagccctaccactgcaactgggacggctgcggctggaagtttgcgcgctcagacgag

SEQ ID NO: 240839 - DNA, 98 bp, Homo sapiens
ctcttggcatttggctttgcctttctggacacagaagtatttgtgacaggtttttgaagaaccctccatcagcctttttgctctggagcattgtgagg

SEQ ID NO: 240840 - DNA, 112 bp, Homo sapiens
ctccctgcatatctgaagcggctcccagtccctgaaagcattaccgggttcgctaggctcacaggttggtcaaagaaaaagtgatgtatgaaaaagaggcaaaacaacaaga

SEQ ID NO: 240841 - DNA, 80 bp, Homo sapiens
tcgcagtggtcgcttcttctccttgccattcgttcctggttaactcggaaacacatccagaggctgcatgcagctgccac

SEQ ID NO: 240842 - DNA, 116 bp, Homo sapiens
ttggcagagctgtaccatggttaccatgccatccatcgccacacgcttgccctgcagggacattcaaggccagccaggaagctgaaggctgctcccactgcccctccaacagccgc

SEQ ID NO: 240843 - DNA, 100 bp, Homo sapiens
ttagctaagaaagcagaggttaatacaatccctggctttgatggagtagtcaagtaaaccaagaggagttcattgctattatgactggtgacatttaaag

SEQ ID NO: 240844 - DNA, 82 bp, Homo sapiens
gaaatcgggctgaagcgactgagtccgcgatggagggcggagggctctgaagctgcagagctggcagaaatctatgccaaac

SEQ ID NO: 240845 - DNA, 98 bp, Homo sapiens
gaccgcatcctagccgccgactcacacaaggcagtccacctggaaggccgctgtggtggaaggatgtttgactgcagagatgtggcattcactgtggg

SEQ ID NO: 240846 - DNA, 100 bp, Homo sapiens
ctttcctgcttttggtttccctggcaggggttgaactgtggagtgtgtgggtgttgacttcaaaatcaaaactgtagagctaagaggaaagaaaattaga

SEQ ID NO: 240847 - DNA, 83 bp, Homo sapiens
ctgactctgactctcggactgagaaacgcaaggatgaaacgaggaggaagagatagtgaccgtaattcatcagaagaaggaac

SEQ ID NO: 240848 - DNA, 95 bp, Homo sapiens
gcttggcctcccaaggtgctggaattacaggctggacctgtaccgagcctcgggtaaatttgagcttcttgatagaattcttcccaaactccgag

SEQ ID NO: 240849 - DNA, 97 bp, Homo sapiens
tgaagaccccattcggaaagacacctggccagcggtccagagctgatgcaggttcgagaacttgtcttggacaattgcaaatcaaatgatggaaaaa

SEQ ID NO: 240850 - DNA, 100 bp, Homo sapiens
caggtctctgtcgagcagcggacgccggtctctgttccgcaggatggaaagaccacagcaagattctttcattcgtctcctcctagcctgggggaccagg

SEQ ID NO: 240851 - DNA, 98 bp, Homo sapiens
gggtctcgggggccgctctgggatcccggccaccagcaattgtccgggcattttccctgaaacatatatccatttgaaagaggcaactgtggaagacc

SEQ ID NO: 240852 - DNA, 90 bp, Homo sapiens
tgaggggtttaggcctgtctccagatctgactgtttgtctgtgggatataaacgcaggaccaaaagaaggcaaaattgtggatgctaaag

SEQ ID NO: 240853 - DNA, 82 bp, Homo sapiens
cacagcacagttcctgggaaggtggagccaccagcctctccttggcctcaggagtgcaagtagctgatgaagtatgtcgcat

SEQ ID NO: 240854 - DNA, 100 bp, Homo sapiens
aatgccgagaaggccagtacgagagacaagagagacacctccaacttcgacaaagagttcaccagacagcctgtggaactgacccccactgataaactct

SEQ ID NO: 240855 - DNA, 100 bp, Homo sapiens
aggccacgcctcctcccgcctgccccctcagccctgtggctgggggcagagctcagctattgtggacgatgaaaggctctctgcagaggagatggatgag

SEQ ID NO: 240856 - DNA, 99 bp, Homo sapiens
tgtattatctaaagcaagaagttattggaaatgagtgtcagaaagtatttgatggagttgatgcaagaagcattcctgcgtaaatactgctgtaatact

SEQ ID NO: 240857 - DNA, 82 bp, Homo sapiens
agaagaagaagaaccggaagaaactgtccgagaagcccaaagtaaatgagctggatggtatcccgttgatcctggacaactg

SEQ ID NO: 240858 - DNA, 100 bp, Homo sapiens
gctgccagtatggacagagtgccaaaggttactcccagcagtgccatcagcagcatagcaagttaccaggcagtgacattgccagtgggagtgatgtact

SEQ ID NO: 240859 - DNA, 100 bp, Homo sapiens
ctcgtccccagcggtcccgcccaacgcccgactctgttcttcctcaagttcttcctcaaatgcaaccagaactgcctgaagaatgcggggaatcccagag

SEQ ID NO: 240860 - DNA, 100 bp, Homo sapiens
ccggggtgctgatgcccactgtgctgcaggcattacctgacaggacttccaatagtagtcagacattatcatcctgtcatactatggagccatgtacatc

SEQ ID NO: 240861 - DNA, 83 bp, Homo sapiens
gggaaatgaggcaagttatcctttggaaatgtgctcacactgagacacttctaaaggaggcatagctaaagttactcaatcca

SEQ ID NO: 240862 - DNA, 83 bp, Homo sapiens
tgctgatcgcctgggtggttgttggcgtgtccctgcagcgaaggatcctggttgccctgggcgctgcctatggcacagccaag

SEQ ID NO: 240863 - DNA, 100 bp, Homo sapiens
gatttccagaagacgaaatacgcgagcaaaaaggcattgggatgaacgagccgctggtggactgtgagggctacccccggtcagacgtggacctgtacca

SEQ ID NO: 240864 - DNA, 82 bp, Homo sapiens
ccgagcgttaccagaacctgtctccagtgggctctggcgcctatggctctgtgtggggccatggcacctgcaaggtgtttct

SEQ ID NO: 240865 - DNA, 90 bp, Homo sapiens
gacaagtgtatggcagtctggagtgaagatggacagcaggatgtagccaatcaaatgtgcaccaagaccaaggaggagtgtgagaagcac

SEQ ID NO: 240866 - DNA, 76 bp, Homo sapiens
gaaacataagttggaggttctggaatctcaggtttctgacgtagaagagcttacccctccagagcatctttctgat

SEQ ID NO: 240867 - DNA, 50 bp, Homo sapiens
gtcggggaaccatggctgccccgagagaaggagggacgtgtgaagtgata

SEQ ID NO: 240868 - DNA, 82 bp, Homo sapiens
gccggggcacccgggcacgcagggcgcgcctggcgagcgccccgggaggagggtgtgaagacagagaatgaccacatcaacc

SEQ ID NO: 240869 - DNA, 75 bp, Homo sapiens
aaggagatcgtctctctcatcgaggcccaaaccgccaaggtgaccaagaatatggcccaggtgaccaaagccctg

SEQ ID NO: 240870 - DNA, 51 bp, Homo sapiens
gaggcggcggcggagatctggtcaggatggctaaaggtgaccccaagaaac

SEQ ID NO: 240871 - DNA, 95 bp, Homo sapiens
cgcagcccgcaccctccccgcccgacctgcgagcgccgcccgggcatgcgaagccgtccctccccggggcagcccaatggatccaatggtgatga

SEQ ID NO: 240872 - DNA, 50 bp, Homo sapiens
ttcttcgagtatttgtagaaggacaaactttctgcctccttggaaagctc

SEQ ID NO: 240873 - DNA, 97 bp, Homo sapiens
tacaggatgcctctcagctgccacctgcctttgacctttttgaagcctttgcaaaaaacgaggtcactcggacactatggtgttcttttacctgtgg

SEQ ID NO: 240874 - DNA, 83 bp, Homo sapiens
gggaattctgaatacaattgatacacttcttagtgtagttgaagatcataaagagggccggcagacattccaccgctttgaca

SEQ ID NO: 240875 - DNA, 75 bp, Homo sapiens
gggggggtcagccccccgcccggccagccgccccgtccgggagggcttgctctcaattttgcgcaagttgaaaag

SEQ ID NO: 240876 - DNA, 95 bp, Homo sapiens
aaactcaggaccatgatggctcagtttcccacagctatgaatgttgttgacctcctgtactggagagacattaagaagactggagtggtgtttgg

SEQ ID NO: 240877 - DNA, 75 bp, Homo sapiens
cgtgtccctgcagcgaaggatcctgcagggtttccaggcctgaggtgcccgccctggccccaggagaatgaacca

SEQ ID NO: 240878 - DNA, 75 bp, Homo sapiens
ggcgaacccgcggcgcaataacgtcaggatggctaaaggtgaccccaagaaaccaaagggcaagatgtccgctta

SEQ ID NO: 240879 - DNA, 100 bp, Homo sapiens
ccgcgggcctggttcctgccaccggcctgcctgagccactgcgtgaggctagcactcatccgcttccgggtcaaggaacgacagattcagctgattcgag

SEQ ID NO: 240880 - DNA, 110 bp, Homo sapiens
aaccaatgcatttcctggagaatatatccctactgtaatctgatgttccagcagaaatccaggtgttaaaagaacccctacaacagccaaccttcccttttgcagttgca

SEQ ID NO: 240881 - DNA, 100 bp, Homo sapiens
gcaggcagtggccacaagagcgaggagaagcgagaaaagatgaaacggaccctctgtgtgttctcatttcacccaaaacctttggacagtgcagggcata

SEQ ID NO: 240882 - DNA, 74 bp, Homo sapiens
ccattcctggaaggtcttgaagaaagaccacagagaaaggcacaggttgctacaactatctgtataggatgaaa

SEQ ID NO: 240883 - DNA, 75 bp, Homo sapiens
ttcttttccttattcttctgatgtggatccagaagaaaaagtcagcactttttgaagtgtctgaggttataccag

SEQ ID NO: 240884 - DNA, 76 bp, Homo sapiens
caggctgtggccatcttcaccgtgtacctgggctcgagcctgcacatgaagcatcagtgagcctccttcagctccc

SEQ ID NO: 240885 - DNA, 100 bp, Homo sapiens
caaagaggctactgataaatctttacaagcttgtaaaatctcaggattggtcttgatttgagcaatggtaaacctcgagacaacaaacaagcaggggtgt

SEQ ID NO: 240886 - DNA, 54 bp, Homo sapiens
ccgccgccaccacccactccggacacagactagacgcttgaagcaaagctgcca

SEQ ID NO: 240887 - DNA, 100 bp, Homo sapiens
gaggctgaagaggccggcttgcctctgcaggtctcatagatgatggtgaaaccccagaagcagctgctctccgggagcttgaagaagaaactggctacaa

SEQ ID NO: 240888 - DNA, 98 bp, Homo sapiens
tcatccacaatgatttctccagtgctcatcttgttctcgagttttctctgccatgttgctattgcaggacggagtgaaaggtgtagcagtcactcggc

SEQ ID NO: 240889 - DNA, 75 bp, Homo sapiens
gacatcctggaacctgggaaagggttgattcttcaccacactgaaaccattaggaaaaatccttgtggttaacag

SEQ ID NO: 240890 - DNA, 75 bp, Homo sapiens
aaatgatgggatagcgttgcaaatccttaaaagagtcttaacgagcattggggagtcagcaatgtccgttgtgtt

SEQ ID NO: 240891 - DNA, 73 bp, Homo sapiens
ttccgtcagtacgcgaaggatatcggtttcattaagattccacctgctcctacgaagcccgactttgatggtc

SEQ ID NO: 240892 - DNA, 100 bp, Homo sapiens
cccagcggcttcagctgtcaggaggacgatttcctggggggcatggagtgcaccctggggcagatgcagaggccaggatgtgggcccagccctgtgccag

SEQ ID NO: 240893 - DNA, 100 bp, Homo sapiens
cagagcaggacgaaccgccaatcgcaaggcacctctgagaacttcaggaccgccgggagagcctgcccacctccccaccctggacgccgggcgcgtcccg

SEQ ID NO: 240894 - DNA, 90 bp, Homo sapiens
caaaaattgtctgactcacagaaaatgcccacttcatggttagcaggagcctccagaagatgatgcaaacatcattgagaagatcctggc

SEQ ID NO: 240895 - DNA, 90 bp, Homo sapiens
gcggaatcggggagcgtccggagctagctggatcctctaggcagctggtcccagattcgctgctggagtgctggatggagcctttctctg

SEQ ID NO: 240896 - DNA, 97 bp, Homo sapiens
cgtgtccggtggttgctgttgcttggcctggtgggcccagtcctcggtgcggcgcggccagacttgaaggaaatgtgccttagtgctttggccaacc

SEQ ID NO: 240897 - DNA, 82 bp, Homo sapiens
ctgtagagaggaccccggtacatctgaaagccgggaaatgccgagcctcttgaagccattcttacagatgatgaaccagacc

SEQ ID NO: 240898 - DNA, 100 bp, Homo sapiens
ctctcatctcgctcggctgcgggaaatcgggctgaagcgactgagtccgcgatggagtgaagggccatttttccatctcaatccctgtgaagtcagacat

SEQ ID NO: 240899 - DNA, 100 bp, Homo sapiens
gatcgcgttgggtgaaggtgacggcgtcgagcaccttcacggcatggtgcaactcccacctgcggaaggcaggcacacagatcgagaacattgatgagga

SEQ ID NO: 240900 - DNA, 101 bp, Homo sapiens
ccggaccccagcacacagaagccgagacgatcagtgaaaagcatgatgtggtgttcttgataaccaagtatggttatatccacctctatgatcttgagact

SEQ ID NO: 240901 - DNA, 59 bp, Homo sapiens
gattcctttcagaaaacaaagaatttgccagatgtttgaacctaaaggcagacccagaa

SEQ ID NO: 240902 - DNA, 50 bp, Homo sapiens
cacttcgagtcctttattgtggagcttttcaggctgcctttcgagctcag

SEQ ID NO: 240903 - DNA, 98 bp, Homo sapiens
agaagatgatggaagaatttgtaccccatagcaagtttgaaattggcacaatggaagaagctggaatttgtgggctaggggtgaaagcagatatgttg

SEQ ID NO: 240904 - DNA, 100 bp, Homo sapiens
gataccacaggcagctaggatgacacgtcaaatgacaaccacgaacttgagtgtgtggtccttgcccaggatctcctcgttgcataaaatgtccagctgg

SEQ ID NO: 240905 - DNA, 100 bp, Homo sapiens
ctatcaaagactgtgcaacggtgtttgctctgagcactatgactagctctgtccagctgacagcagccatggcgagcggcagtggagacagcgtcacccg

SEQ ID NO: 240906 - DNA, 50 bp, Homo sapiens
ctccttttccctctccctttccctaaggtttaactatagatcaacacatc

SEQ ID NO: 240907 - DNA, 142 bp, Homo sapiens
ccgggatcgtgaccgagaccgtgaccgagagcgtgaccgagagcgcgaatatcgtcatcgttagaagcactggccccctcaccttttcctttccagctgtttggggctcagctaagtgaccacacaggagagcagtgaggcc

SEQ ID NO: 240908 - DNA, 83 bp, Homo sapiens
cagggaaccctggtcaccgtctcctcagaacaagttgaaatcatcgcagaaggataaagttcgtcagtttatgatcttcacac

SEQ ID NO: 240909 - DNA, 100 bp, Homo sapiens
agcgttaatgaaactggatctacggccctttccatagccagagcagtacaagatgttcacttggcaagaagagtgcttcaattagaaaaacaaaactcgc

SEQ ID NO: 240910 - DNA, 100 bp, Homo sapiens
gcgcctttgtgcgcgcgccgaggcccacggatgacagtaaccagcccccgggccggggtgtcctctccatgcatggactgacctatggggtcattcgtgt

SEQ ID NO: 240911 - DNA, 83 bp, Homo sapiens
gcccaccatgtctcgccgcaagcaaggcaaaccccagcacttaagcaaacgggaattctcgcaatatatacagccctgctctg

SEQ ID NO: 240912 - DNA, 100 bp, Homo sapiens
ggggaatctggaagaggctggggagtctgtgtccttccagctgcagatacggagtgggctcgggatgagtttgaaggcctcttcaagcagccagcagaaa

SEQ ID NO: 240913 - DNA, 100 bp, Homo sapiens
gtttttgcaatttgttcaacttgatgtatatgtctcgagtccacggtatgcaccctaaagagaccacccgtcagctgagcttagctgtgaaagatggtct

SEQ ID NO: 240914 - DNA, 100 bp, Homo sapiens
ttgtagaaactgtctttaacctggaaaacgggccttactatacatcatatcccccatcaccagatttgtgacctgccatctttcagtgcttcttggttcc

SEQ ID NO: 240915 - DNA, 100 bp, Homo sapiens
tggtggtggaggacctggatatggcaaccagggtgggggctacggaggtggttatgacaactatggaggaggccgggcacaacttctacaacgtggacat

SEQ ID NO: 240916 - DNA, 82 bp, Homo sapiens
atatctgtcttcggtggactccttcggcagtccacccaccgccgccgcctcccagacatatgtagagtgtgtcggtcagaag

SEQ ID NO: 240917 - DNA, 90 bp, Homo sapiens
gggctgcagtactcgggcaagaccaccttcgtcaatgtcatcgcgggtgtatgccatgtacaattccgtaaagggatcctgctccgagcc

SEQ ID NO: 240918 - DNA, 75 bp, Homo sapiens
ggagtagcgagtcggcaacccggagatcaatgtccgagttaccaccatggatgcagagctggagtttgcaatcca

SEQ ID NO: 240919 - DNA, 83 bp, Homo sapiens
cagagacattacatcaggaagatactgcagagatattctactccatctcattcattgtacagcaaaatgatgcttcaacaccc

SEQ ID NO: 240920 - DNA, 100 bp, Homo sapiens
aaaaaagagaggatttgcttttgtaacttttgatgatcatgatacagttgataaaattgttgtcaatcaccttctgctgcttggatgggtggatttggtg

SEQ ID NO: 240921 - DNA, 100 bp, Homo sapiens
tccggcagctggagatgtccgagcccaaggcaattgatcccaagttgtcgacgaccgacagggtggtgaaagcactattggaaataattatgaaaaatgg

SEQ ID NO: 240922 - DNA, 99 bp, Homo sapiens
ggccagctcgaagaaggcgagcagggtgcgggagagccccttgcagaagacgccgtacgaggctggtgagattggagagatgaaggatggagtcccaga

SEQ ID NO: 240923 - DNA, 83 bp, Homo sapiens
gcgggccccgggacctgggctgggaacccgcggtggagcgggacacgaacgtggtgccagaaccctgtggagcatcatgaact

SEQ ID NO: 240924 - DNA, 98 bp, Homo sapiens
gtccatgccaagcttactgtcctccgaggtgttggagcgggccggagagaagtagagtgggctgcgaggagaaggaaacaggcctttcggaggctcct

SEQ ID NO: 240925 - DNA, 83 bp, Homo sapiens
aaagatcctcaatcgagaaattgattgagaggatccagaatccagatctctggaatagctaccaggcaaagaaaaaaactatg

SEQ ID NO: 240926 - DNA, 99 bp, Homo sapiens
gaggcaggatgaagatgactgtggatttcgaggagtgtctgaaggactcgccccgcttcagaaatgggacgtcggtcatcagatactgaagaagaaagc

SEQ ID NO: 240927 - DNA, 74 bp, Homo sapiens
gcccagtggtagaaaaaattatgagcagtcgttcagtaaaaaagcagatatgctgtgatagcatttggatgtgc

SEQ ID NO: 240928 - DNA, 76 bp, Homo sapiens
gctgaggagctcctggtcgatgaagaggatgatgtttttggtgaagaaatacaggtatcaggatgaagatacacct

SEQ ID NO: 240929 - DNA, 87 bp, Homo sapiens
gagagccgagcggcggcgctccgagagctccaggagaagcaggctctgatggagcagcagagacgacatatctgaagagatggatta

SEQ ID NO: 240930 - DNA, 50 bp, Homo sapiens
cttcagtggaccactctgcaatgacctgacaatttcaacaagcacctttt

SEQ ID NO: 240931 - DNA, 73 bp, Homo sapiens
atccactgcttcaggagcctaaagcgtgggtccagtcaacctgcaaccaaaacgagactttttagcacgcttg

SEQ ID NO: 240932 - DNA, 82 bp, Homo sapiens
ctcggaactcgggcatcatggcctcaggtttggtgcacctcgatttggaggaagtagggcagggcccttatctggaaagaag

SEQ ID NO: 240933 - DNA, 78 bp, Homo sapiens
agaccagcgcgagggccctgggcaaggcccgacaggctgcgctgaacatcttaaagttgctgtctgagttggaccaac

SEQ ID NO: 240934 - DNA, 50 bp, Homo sapiens
ctgcagcagagcgcggcgcagaagggtccaaattccaagcctgtagtgtc

SEQ ID NO: 240935 - DNA, 80 bp, Homo sapiens
gttgccttggcaagagcagtgcctagaaagtatgaatctgatgaacaagaaaagagtgcctatcaagagtatgacagtga

SEQ ID NO: 240936 - DNA, 50 bp, Homo sapiens
gaggacgacatgttgcttttcgtggagtccaagccttatgcatttgatcg

SEQ ID NO: 240937 - DNA, 80 bp, Homo sapiens
gacgcgggtcgcgtcgttgtcctccgcgagcgtccggattgcagttgtatcacggactgattcaccgagcccaaccgtac

SEQ ID NO: 240938 - DNA, 83 bp, Homo sapiens
agggcatttggtggacacttttgcttgcagttaggtcaagtggaggcctccggtgtggctgtctctgatggtgtcatcaaggt

SEQ ID NO: 240939 - DNA, 82 bp, Homo sapiens
tgatggtggtcgccgcggcggcgtgtgcgcccctcagacaatgcagatcttcgtgaagactctgactggtaagaccatcacc

SEQ ID NO: 240940 - DNA, 75 bp, Homo sapiens
cccaacttgctgtatcagaagtttgtgaagaaggaggatgggcttttgcccaaaccactctcttctgggggagag

SEQ ID NO: 240941 - DNA, 100 bp, Homo sapiens
cgctccgtggatgaggctctgcggctggtccaggccttccagtacacagacgagcatggggaagcatcacagccacagctgccagtattggggcagctgg

SEQ ID NO: 240942 - DNA, 83 bp, Homo sapiens
ccatggtttaaacaggactggctacctcatttgcagacatatctgaagagatggattaagaatgctttggattaaggattgtg

SEQ ID NO: 240943 - DNA, 85 bp, Homo sapiens
gttgttgattactcacagtttcaggaatctgatgatgcagtgagaaagatcagtctaaagaaaaggagaagaaagtgaaaaaaac

SEQ ID NO: 240944 - DNA, 100 bp, Homo sapiens
gcagaagcttattgaatttatttaccttttcagagtttccctttaagcactacttttgcctcatcctacaaattttgaatgccaatactggggctcagag

SEQ ID NO: 240945 - DNA, 97 bp, Homo sapiens
agaaaccgacaggggccaggcgcccggtggctccgaagcggggaagtgggacaagatggtttacatctcgaacgcaatattcacaacctcagcaggc

SEQ ID NO: 240946 - DNA, 75 bp, Homo sapiens
caaggattggagcacagaggctcagaagcaagtccaggaacgtgaagatgagtcttcctctatgtttgacgaata

SEQ ID NO: 240947 - DNA, 75 bp, Homo sapiens
gtggctactctgcctcggggacgaaagcagaatcctcactatggatgggctcattgaggacattaagcatcggcg

SEQ ID NO: 240948 - DNA, 90 bp, Homo sapiens
atctttcaccaatgtaagtctgccttatgttcctccagccaattgcaaaggccccacaccagtgagaagcatcagcaccgtgaacttgtc

SEQ ID NO: 240949 - DNA, 100 bp, Homo sapiens
aaaatctatcgtgaggttcagctgatgaagcttctgaaccatccacacatcataaagctttaccaggctgctgctgagtcagcagaagcccagaccatcc

SEQ ID NO: 240950 - DNA, 100 bp, Homo sapiens
tcgggacccaactctgcgagccagatgggtctaggaaagacaatccaggcaattggaattacttacttctataaagaggaatggcctctgttaatagtgg

SEQ ID NO: 240951 - DNA, 100 bp, Homo sapiens
cgcgggtctgctctgtgtgccatggacggtttggtaactctcattcgacatccatctgaactaatgaatgttcctcttcagcaacaaaacaaatgtacag

SEQ ID NO: 240952 - DNA, 88 bp, Homo sapiens
tgaaggcaaatattattgcacttcttgccacaatgttacagaggggcatggtctagtggcccagtcaggacgcggaaacactccctgg

SEQ ID NO: 240953 - DNA, 130 bp, Homo sapiens
gaacagctgcggtgctctgccatattgtgtcttccccggccggtccctcgcctcccggccgagctgacgaaaccaaggtgtatgttggtaacctgggaactggcgctggcaaaggagagttagaaagggc

SEQ ID NO: 240954 - DNA, 96 bp, Homo sapiens
tgctccgagtgtgcttagcgatggcctggaaatccggcggcgccagccactcggagctaatccacaatctccgcattggacagagagactctgaag

SEQ ID NO: 240955 - DNA, 90 bp, Homo sapiens
ttggggaagtgggggagctggcagaactcttgggtagtaaaaagaatcattcctgcagtagcttccacaaatgcagtcattgcaggtgag

SEQ ID NO: 240956 - DNA, 88 bp, Homo sapiens
ccccttttaaactccctcttcaaaactcatctcctgggtgactgttgacgaaggatcagagattggtgtattcgggcagactgcttcc

SEQ ID NO: 240957 - DNA, 74 bp, Homo sapiens
gaacatggatgataacacctttgccatggtgagaaagatcagtctaaagaaaaggagaagaaagtgaaaaaaac

SEQ ID NO: 240958 - DNA, 50 bp, Homo sapiens
caaatgattcagtccttgaaaacaaggtgagaaaaaccagaagcttgaag

SEQ ID NO: 240959 - DNA, 101 bp, Homo sapiens
agaaaacattgtaatggccatcgctggaaacaagtgcgacctctcagatattagcctctgaagagccaatccattcaggatgggaaaccacgcaggcaaac

SEQ ID NO: 240960 - DNA, 75 bp, Homo sapiens
agtctgtggaagaggtggttcgagggtgctgaaaagtcacccaccacttcagctgaccttaagtcagacaaagcc

SEQ ID NO: 240961 - DNA, 100 bp, Homo sapiens
taaaattttacataagaagttacctttttcagctgtatgacaaaattaacacaaagtcttcaccacaaatcaggaatcctccaagcgatgcagtacagag

SEQ ID NO: 240962 - DNA, 75 bp, Homo sapiens
gtggccggaggagtctcagagctgtcagaaagctgctctgttaaaagcgaaaatgaaacaattgcctgcggcaac

SEQ ID NO: 240963 - DNA, 90 bp, Homo sapiens
tacagctgctgttggagtgctgaaggctgtgcactgtggagagtggcatttccggagagttcttttgaagtcacttcagaaggatctaca

SEQ ID NO: 240964 - DNA, 75 bp, Homo sapiens
tctggatctcagctgctcttgaaggcccagcttcccgatcagtggagacgttgaaggagatgattaagtctggaa

SEQ ID NO: 240965 - DNA, 76 bp, Homo sapiens
gggaggatgacaaagacagtgaccaggaaactgttgatgaagaagttgatatgaaataccgagaccgagctgcaga

SEQ ID NO: 240966 - DNA, 75 bp, Homo sapiens
aagcaaagaagagttgagcacaatcagcttctcaataggtttggcatggacaagatctatgaaggccaagtggag

SEQ ID NO: 240967 - DNA, 100 bp, Homo sapiens
agtcgcatcttactagtgaagtattctgccaatgaagtaaaggcatgacttcctggcaccacagggaaaatcgggtgcaagcccagaaactatttcccca

SEQ ID NO: 240968 - DNA, 75 bp, Homo sapiens
aatgtcggccattgagaaattgttgaggcagagtacccaagtggccttggaccatctggagtctgtgcctgagaa

SEQ ID NO: 240969 - DNA, 88 bp, Homo sapiens
gctgagtgtgcctgggcctccagtcttgtccctggaggcctctgaggaagtggagcttggatcagtgaagtggagcccaaatactatg

SEQ ID NO: 240970 - DNA, 98 bp, Homo sapiens
tggcggccatggtgttgctgctgtactccttctccgactcaaggcacaggagggaagaaagtcattcagactgatgagtggagaaatggccctgtcga

SEQ ID NO: 240971 - DNA, 100 bp, Homo sapiens
ctcgaagaactcgagcgacagagacaagctgagcttgccgcacaaaaagctagagaggctcttcttcgtggggtcccgggaaggccacctgccctccatc

SEQ ID NO: 240972 - DNA, 74 bp, Homo sapiens
cggcgcggcggccccgggaccaaggaggttatgaagacagtatggagtttccagaccatagtagacatttgcta

SEQ ID NO: 240973 - DNA, 108 bp, Homo sapiens
gcgcttccgacggggcggccgggggctcagagatccaagtgcgcgccctggcgggtccggaccaaggtactccaaagattcaggtttactcacgtcatccagcagaga

SEQ ID NO: 240974 - DNA, 75 bp, Homo sapiens
tggagatctcctgtgctgcgaccactgcccggctgccttccacctccagtgctgcatcacaggacatggccccct

SEQ ID NO: 240975 - DNA, 73 bp, Homo sapiens
accatatatgtcattgggcagggatcaggaatgggtaccacagaccatgtcatcgtcctggcgtccacgaacc

SEQ ID NO: 240976 - DNA, 75 bp, Homo sapiens
gtctgtgtcaaacatccatatcataagtggaattttggagatattcaaaggcagaagtcaattcatctggaaaga

SEQ ID NO: 240977 - DNA, 58 bp, Homo sapiens
tccaggaaagacatggagattctcttaaaaaggtgccatgtttcagaacagagtaaga

SEQ ID NO: 240978 - DNA, 75 bp, Homo sapiens
tgaacattactcttccagaagagagaatggatcttggagaatgtctgaaagtccatgacctggctttaagagcgg

SEQ ID NO: 240979 - DNA, 80 bp, Homo sapiens
attgaagctatcactgtcagtgctgcacagactggccactcagctctcctagcccaatggatgcaccatcagttaaaata

SEQ ID NO: 240980 - DNA, 154 bp, Homo sapiens
tctgatccggaaatatggcctcaatatgtgccgccagtgtttccgtcagtacgcgaaggatatcggtttcattaagtctttcccagggaactccgatgaagtgttccaacaaaatgagcgagtgaaccaagaagaggatgacattagatccagg

SEQ ID NO: 240981 - DNA, 75 bp, Homo sapiens
gtgcggaagggcacctccacccgacccaagtcttggattgaggaacaggcaatgggatcattcctcagtgtggcc

SEQ ID NO: 240982 - DNA, 100 bp, Homo sapiens
aggtttgctgagctggttggccctgtgatccctcaagactggtccacggagtgtatgaccacaaacagccatcaagctaccaagtcaggattgttacccc

SEQ ID NO: 240983 - DNA, 100 bp, Homo sapiens
ggtgggaatgacctgtgtgtgtggaaccgaaaattagatctcctgtgtaagactagccacctttctgatacagctcgcatgtggaagactctcaccttct

SEQ ID NO: 240984 - DNA, 75 bp, Homo sapiens
caagggagtgatgccggttatctctgtgaatctcagctccctgcggtttctgagttctccaccagtgagaccatg

SEQ ID NO: 240985 - DNA, 100 bp, Homo sapiens
ggaagctcgtccccacagctgcaggtaaaggccagagccatggcccacccacccctccaaccaccccgaagacagagctgcagtcgggcaaggcagaccc

SEQ ID NO: 240986 - DNA, 80 bp, Homo sapiens
ctcagaagccatgcccctcaggctggaacttgccctgtctcctcgcagatgagtgagatggaagattttcgaggtatagc

SEQ ID NO: 240987 - DNA, 82 bp, Homo sapiens
tagccctggagtgacctactcgcccgtcagtggttataataagctcttccgccctctctggatgagggaacagaagtggagg

SEQ ID NO: 240988 - DNA, 75 bp, Homo sapiens
ggcgtgtcccatgtttttgagtatatccgttctgagacatacaaatagaatctctgaaggaagaagatgaatcag

SEQ ID NO: 240989 - DNA, 100 bp, Homo sapiens
ggaggagggctggttccggctgcagcccgaccagtccaagagccggcagcatgacgaagacattttaaatccaaaggatgtgattagtgtccagctggaa

SEQ ID NO: 240990 - DNA, 100 bp, Homo sapiens
ggaggcgaggaggagagactgaggagcaccgaacagccagttccctgagcagtggtgcccttacgtggacaaagaaattcagcctagattatttggccct

SEQ ID NO: 240991 - DNA, 100 bp, Homo sapiens
tggcacaagttcgtgagtcccgtgggaaagctaacctcaccaagatcaccccttctgtgtcattctctgaggaaaacaagttcttctcaaggaggaaagt

SEQ ID NO: 240992 - DNA, 82 bp, Homo sapiens
agtcagctgtgtgtccagaacgtgccatggagacgcttaacgacaaaaagtaaccttcctgaagaggacatgtgattggaag

SEQ ID NO: 240993 - DNA, 103 bp, Homo sapiens
gatgttgaacaacttggaattccaggccgcatcatcgagtgcacacactgtggctgtcgtggctgctctggctgaggctggcgcgctccaccctggactctgg

SEQ ID NO: 240994 - DNA, 90 bp, Homo sapiens
ccgggatccagttaggaaccttcacccccccaaggatgaaggacccaaggacatcgctattgcggttccgaggcagtgggaagagatgcg

SEQ ID NO: 240995 - DNA, 74 bp, Homo sapiens
cttattgatgctgccaaatttcctcttccaatggaagtgtttaagaatgcttccaggaccactcatgatgtacc

SEQ ID NO: 240996 - DNA, 82 bp, Homo sapiens
gcaagagctttttcaagcgaagcatccgccgcaacctcagctacacctgccgccgcggcgagtcctttgcacatgttggcaa

SEQ ID NO: 240997 - DNA, 100 bp, Homo sapiens
atacagcagtgcaattggcagcttataatctgcaaggggcctcaaatctgaccctatcggaaactcaaaatggagatgtatctgaagaaacaatgggaag

SEQ ID NO: 240998 - DNA, 75 bp, Homo sapiens
gaaaatactatgaagtacatggaaacacttaagaataaactgtgcagctgccgggccgcaagtacagccctgggt

SEQ ID NO: 240999 - DNA, 98 bp, Homo sapiens
ttaggcatctcccaggcgaccggctccgcagcaagatggcggacgagaaggacagggaaggggacggcaaaacagaacagaaaggcggagataaaaag

SEQ ID NO: 241000 - DNA, 75 bp, Homo sapiens
tcacagagcctatttacccagaagtagtccatatggaaaaatatattcagggggaagagatgtaatagatttcac

SEQ ID NO: 241001 - DNA, 82 bp, Homo sapiens
gcttttatgtgaagctgctacctctgacatggatattggaaagcgaaagagtggacccaagtggagagattgtggaactggc

SEQ ID NO: 241002 - DNA, 100 bp, Homo sapiens
ggaaaagcatccccctcaaaatgtgctacgtcactcggagtatggccttggccgaccctgagaacaggtatggtgctgggtgcagatgcagtgtggctct

SEQ ID NO: 241003 - DNA, 75 bp, Homo sapiens
cccgagaacgtgcgggaagagaagatcatcgagcatttcaaacgtcaggatggctaaaggtgaccccaagaaacc

SEQ ID NO: 241004 - DNA, 50 bp, Homo sapiens
tttcagctcgatacaatttcacacctgatcaccatccatcttcaagaagc

SEQ ID NO: 241005 - DNA, 50 bp, Homo sapiens
tttggcaaagttctagagggcatggcctgcggcgtagactttgagattcg

SEQ ID NO: 241006 - DNA, 101 bp, Homo sapiens
atttgttaaggattccaagtaactcttatttggggaacgcccttttgcttgtgactggcagggctgcgacaagaagttcgcccgctccgacgagctggccc

SEQ ID NO: 241007 - DNA, 83 bp, Homo sapiens
cggagcagccccgggcccgcccgcccgcatccagggcgtgatagagttctcactgtgtctgctgtttgccaagctggtcagct

SEQ ID NO: 241008 - DNA, 100 bp, Homo sapiens
cgcttcccggcggtggcggcgtctctggccggccttggtgcggcgagccgagcgaggcagctctgagccgcgcgagtgcctggtgaagaatgtgatggga

SEQ ID NO: 241009 - DNA, 90 bp, Homo sapiens
gtaaaagccccaatcttagcaagtgcggggaagagctgggtcgactcaagggagcgctgacccagctgatccagctctatcatcgcttcc

SEQ ID NO: 241010 - DNA, 100 bp, Homo sapiens
gttgaaagcgacaagtggaggcgccgctctagcggccgggactctgaactatggcggcgggtgccacgtctatgtgggcttcgtgctgtgggctgctgaa

SEQ ID NO: 241011 - DNA, 90 bp, Homo sapiens
gaggaagaattacagtttgatttatctctcgtcattgaagaacagtcagagggaattgttaagaaggttaagaatagacccaccagcatt

SEQ ID NO: 241012 - DNA, 100 bp, Homo sapiens
ggcatcaaatgtcagccctggagttccatgataccacacgaacacagggaaggagattacagcagaaacttttatggagaagttggacaatggtgccttg

SEQ ID NO: 241013 - DNA, 97 bp, Homo sapiens
acggcagcggcctggggacccagcaaggcggtggaagcagggcagagccgaagcagcccgctcctcaagaggccggtgcggacccaggcggtgctgg

SEQ ID NO: 241014 - DNA, 75 bp, Homo sapiens
ctccccctttccaatctggcaatcccaggtgccttagctggaccaattattgtggagccacatgtcacagcagta

SEQ ID NO: 241015 - DNA, 75 bp, Homo sapiens
ccgagaccgcggccgggaccgagggggtgataatgagaagcaatggactagaggattcaagtggaagagtcttca

SEQ ID NO: 241016 - DNA, 100 bp, Homo sapiens
cccagagacaacgagatgaactgaggcaagtgaggcctatctggttggcctttttgaagacaccaacctgtgtgctatccatgccaaacgtgtaacaatt

SEQ ID NO: 241017 - DNA, 90 bp, Homo sapiens
agataagcttgacattacagccaagatggtgctgtcccagagacaacgagatgaactaacttaaagcagcagtattacacaggatacaca

SEQ ID NO: 241018 - DNA, 90 bp, Homo sapiens
cagaggaagccattgcccactgctgccgcccagtgttggtgaagtaccatgcaagcatttcttaaaggtacatccatcagtactaaaccc

SEQ ID NO: 241019 - DNA, 96 bp, Homo sapiens
aacagacagaagaaggaagtggctaatgcttccagttccaaccatcagtgccccgagtcgctgggtgtgggatcaagaggaggagcggaagcggca

SEQ ID NO: 241020 - DNA, 74 bp, Homo sapiens
aggagcagcccccggagacagcggcacagaggtgcttctgccagcatcggtgtgtggctatttttaaagacaaa

SEQ ID NO: 241021 - DNA, 75 bp, Homo sapiens
ctggctttaatcctgaaagccatgcagcgggtcaaaatgcagatcttcgtgaaaacccttaccggcaagaccatc

SEQ ID NO: 241022 - DNA, 75 bp, Homo sapiens
ctgagcgcgtccaggcctgacagctctgcggctcgggccctgaggtttactcctggcttgggggcattaggaagc

SEQ ID NO: 241023 - DNA, 95 bp, Homo sapiens
cagattattcacgaagctctagaaagatatggaaaacgatccagcccagagacactgatttcagacctcttgatgagagaaagcacagaaaatgt

SEQ ID NO: 241024 - DNA, 83 bp, Homo sapiens
cactgagagttgcattaaaaaccagcatgtcaaaatgcagatcttcgtgaaaacccttaccggcaagaccatcacccttgagg

SEQ ID NO: 241025 - DNA, 100 bp, Homo sapiens
cgcgcccgggacgcgcggcggcaccgggaggccgggccgagcgccactatcgaaaacgatcggcatcccggggtcgctctggaagtcggtctagaagtcg

SEQ ID NO: 241026 - DNA, 75 bp, Homo sapiens
caaaatgtcaacaaattgatgggtatatttgcttacttaaactaccatgttcctcgaacgagacgagaaatcctg

SEQ ID NO: 241027 - DNA, 87 bp, Homo sapiens
gagctgttcctattgggccatcttggctccaccaccctgtcatccgtccttggctcaggatttggagagcttgcaccaccaaaaatg

SEQ ID NO: 241028 - DNA, 82 bp, Homo sapiens
tcgggtggagtgtaggtcatatcgccgcgctcctgtccaaatatgacccccagaaggaggcagagctccgcacctggatcga

SEQ ID NO: 241029 - DNA, 75 bp, Homo sapiens
tgctgtggtgcagagctagttcctctccagctcagccgcgtaggggtgctacatccattgtgtacagatgcaaac

SEQ ID NO: 241030 - DNA, 51 bp, Homo sapiens
ttgaacaaaataattgggacttagtggtgtctgcttttggggcagagtttt

SEQ ID NO: 241031 - DNA, 75 bp, Homo sapiens
cttccgtttgttggtggaggaggtggcaggcctcggcgcacctgaactcctggggggaccgtcagtcttcctctt

SEQ ID NO: 241032 - DNA, 83 bp, Homo sapiens
ggcgtcttccgtgggcaacgtggccgacagcacagggccaattcctgtccccccagcagcatggcatcgtgtgctgaaccctc

SEQ ID NO: 241033 - DNA, 100 bp, Homo sapiens
catgatttaaatatcggcgttaagtgattcgcctttgccagtctcatctcgtgtctgctttgttaagttccatgatccagactcagcagttgtggcacag

SEQ ID NO: 241034 - DNA, 82 bp, Homo sapiens
ctgagcgggcggtcattcgcatcgcaggagcgcagctcagctgggctggaactgccctcctggaactcccccagcctacaac

SEQ ID NO: 241035 - DNA, 51 bp, Homo sapiens
gcttcatagcattcgcctactccgtgaaggctcttgcagccaatgccggaa

SEQ ID NO: 241036 - DNA, 75 bp, Homo sapiens
acttacactgttgagaaagtggaagttcatcgtctgattaggaaatgctcggaacttctttacgtttttcaaacg

SEQ ID NO: 241037 - DNA, 100 bp, Homo sapiens
cttgcacccacccagccccgccgtcgccccgccgcgccgcgctccaaccgcctcctcctcctcagtaacgcggtgttgcatctgagccaagaaaacttta

SEQ ID NO: 241038 - DNA, 100 bp, Homo sapiens
ttgaaaaccctgctgatgtcagtgttatatcctccaggaatactggccagatggagtcgggtggtacagttttgagtaccaactggtctgatgtaggtaa

SEQ ID NO: 241039 - DNA, 100 bp, Homo sapiens
caaacagcagtatgatgaactggaggctgagtacgacagcctcaaacaggagctggagcagctcaaagaggatattggtgctggaaaaggcaaatactat

SEQ ID NO: 241040 - DNA, 78 bp, Homo sapiens
atccgtataccagatgtcgaacctgctgcttttctcgctatgctgaacggagcgtgctttggacaccatgaattttga

SEQ ID NO: 241041 - DNA, 82 bp, Homo sapiens
cccgctcacctgcgctgtgatgcctgcagagctgtggcttaccaggtctgaatgactgggatgatgatgagatcctagcttc

SEQ ID NO: 241042 - DNA, 100 bp, Homo sapiens
gagctgtaatcaattgtgctgacaacacaggatggagaagagttcctgggaaatacatgagaggagaatgaaggaacagtaccttatggctatctcagat

SEQ ID NO: 241043 - DNA, 82 bp, Homo sapiens
aggcggcgaggagcgcctgcctgaggagagcagggtggattacgtggactctttggggcgttcccggcgctgtatgagaaag

SEQ ID NO: 241044 - DNA, 75 bp, Homo sapiens
cacctgcctgaggaagatatttcctggcctctctccagtggtcggcactcttcaccctcccgagccctgcccgtc

SEQ ID NO: 241045 - DNA, 99 bp, Homo sapiens
tgctgatggcgataagtcattaccacagccccgccggctgctgtgggagcggcggccgtccctctcctggaggtcgtctcctggcatcctcggggccgc

SEQ ID NO: 241046 - DNA, 100 bp, Homo sapiens
ctgaccatcaccgtcaaccccatggagacctatgtgcccaccgtgttcgaaaattacacagcctgtttggagacagaggaacagagggtggagcttagtc

SEQ ID NO: 241047 - DNA, 100 bp, Homo sapiens
gcacatttccagaggacaacagaggagacagaggggctgtgtgtaatgctgtgtcatggagctaaaatcggatttttccaaggagatatcaggctgctca

SEQ ID NO: 241048 - DNA, 100 bp, Homo sapiens
aattacgggctcaacatgccatgttaggacattatgtaaattgtgaggattcttatgtggctagtttgcagatcggacagctggcttttaaaggaatgaa

SEQ ID NO: 241049 - DNA, 101 bp, Homo sapiens
gcagcgccagcggccgagcgggcggcttcctggcctgggcgctccggtggcggcggagaaggaagaggcccagcagaagggactcgctgagccaccccccg

SEQ ID NO: 241050 - DNA, 150 bp, Homo sapiens
tctgtctttgtgtcctgagatcaaatggcacttcattggccacctacagaaacaaaatgtcaacaaattgatgggaaagtacataacatttatcctggaccccttccagtaccagctagtgataaaaaatcataaacaattaagctttcg

SEQ ID NO: 241051 - DNA, 76 bp, Homo sapiens
cggacttgtccttctacctcaccacctttgctaatcttccagtaccaacaattgcagcaatagatggactcgcttt

SEQ ID NO: 241052 - DNA, 75 bp, Homo sapiens
tggtctagcatttccttttaaacatcctgatgaatggagagcatgtcttgtggatgagcagcagaaagttcggac

SEQ ID NO: 241053 - DNA, 100 bp, Homo sapiens
ggatgctgtagtagcaaatcaggtggtaataagctgcagtcaacaggaaataaagcagaagacataaaaggaaccgaatgtgttaaaagtactcctgtca

SEQ ID NO: 241054 - DNA, 51 bp, Homo sapiens
cactccagaggagctactgtatacatgtgtcccggcatggatatccggaac

SEQ ID NO: 241055 - DNA, 100 bp, Homo sapiens
cttccacaacctcaaccatggcacctccatccgcgaagacatcctgtcccttcaccgatgttgtcaccaccaacctaaagcttggcaacccgacagaccg

SEQ ID NO: 241056 - DNA, 100 bp, Homo sapiens
gaagttggcactgcagcagacagctccctgggcaccaggcagctaacagagaacactgctccctagaccatcggaaaaccagtcccacaacgtttgttcc

SEQ ID NO: 241057 - DNA, 98 bp, Homo sapiens
tcgcctttacaatggcagagcagctgaggggtattgtccagtcagaagaaaaacttgtcatcagtgcatcctgggcaaaagatgatgatatcagcaga

SEQ ID NO: 241058 - DNA, 99 bp, Homo sapiens
ccagcagctggactatggcatctatgttatcaaccaggaaactctgatgaggaagaaagtgcttcagaatctgaactttggaagggtccactaccagag

SEQ ID NO: 241059 - DNA, 100 bp, Homo sapiens
gctgcgagcgagccgcgaaccgagcgggcggcgggcgcgcgcaccatgggggagaaacccgggaccagagcagcccgacggccatggaggctgaagagac

SEQ ID NO: 241060 - DNA, 51 bp, Homo sapiens
aagaagccacccgagcggactcccgagatattaacctggctgcagagccaa

SEQ ID NO: 241061 - DNA, 83 bp, Homo sapiens
gggaatgctcctggctggtgcggacacaacccaataggtggtccattatggctgacatgcaaaatctggtagaaagattggag

SEQ ID NO: 241062 - DNA, 82 bp, Homo sapiens
aagcaagcgagaagtcgcgggcccagcccacagcagggtggaggcttccattctggtggcaaccggggtcgtggtcggggag

SEQ ID NO: 241063 - DNA, 100 bp, Homo sapiens
cagcctcaggcgtgcgcggacggtgtgcggagttcttggagtctctgcggagtccctgggccagatctcacagtgaaagctgcaggatcttccttctgac

SEQ ID NO: 241064 - DNA, 74 bp, Homo sapiens
ccagcgagccgccgacccgccgagcaaaatggaaataatgcaaaaggtgtcccaaggctcctgaccagtgaaca

SEQ ID NO: 241065 - DNA, 74 bp, Homo sapiens
acttgccggcttatggtttcaatgctggatggcttggcaactcttgtgaaatttcatagatctcgtcgcttact

SEQ ID NO: 241066 - DNA, 100 bp, Homo sapiens
taagactccaagtaaggaagaaattgagaaagaatgtgaagataccagtttgcgtcaggagacacagcaagccctggatgaaaacatggacctcttggaa

SEQ ID NO: 241067 - DNA, 100 bp, Homo sapiens
aagcaaaagatctccaggagttcattcctcttatcaaccagattacggccaaattcaagccaaatgctagaaaggaggatctttttggccgtccaagtca

SEQ ID NO: 241068 - DNA, 100 bp, Homo sapiens
gtctgcccggccaagaggcaaaggggaggttacgcagcaaaccatccagaagcttcatggcggctgaagagatgcattggcctgtccctatgaaggccat

SEQ ID NO: 241069 - DNA, 83 bp, Homo sapiens
gggagccgggcgcggggagctgcgcgaagccggggcggagcacgcgagctatggttttaaaatcaaagatgggaaaatcggag

SEQ ID NO: 241070 - DNA, 85 bp, Homo sapiens
ctggcgctggaggcagcggtgcacgtgcagttgtcgagatgtccacagaaggaggatttggtggtactagcagcagtgatgccca

SEQ ID NO: 241071 - DNA, 75 bp, Homo sapiens
agcttcgggacaagtacatgtttgctacaaaggtggtggtctttctgtctgagtggaaggagcacaaagttgcac

SEQ ID NO: 241072 - DNA, 90 bp, Homo sapiens
gcccctttcccggcgggacgctttgagccgccccgaactaagcagggcggtcgggggtggggaagaaaacatgacagaaacagatgcctt

SEQ ID NO: 241073 - DNA, 50 bp, Homo sapiens
agatggacctcgggaacccagaagtggcacaagatctctgtaaagtagca

SEQ ID NO: 241074 - DNA, 82 bp, Homo sapiens
ctggccacttgcttgggatcctttatcctggtcatcttctatttccaaagtgagttgctacagtggctggagagacgacatc

SEQ ID NO: 241075 - DNA, 98 bp, Homo sapiens
cctgcacgtgggtgatggcatgtgcttatgccccatcgggatgtgccattgcttgtgggtgcaatatcagctacttagaagaatggcttaaagataag

SEQ ID NO: 241076 - DNA, 82 bp, Homo sapiens
agagaaggaaggatcttctcatgcacagaggcaacaaatggcaactttctgagatatgggccctcacattttccaaacctgt

SEQ ID NO: 241077 - DNA, 50 bp, Homo sapiens
tgatcctatcgttttgacgccagtgccgtattcacctggaccaacctgct

SEQ ID NO: 241078 - DNA, 100 bp, Homo sapiens
ctttggacaggtttacacagaagccaaggggtctggttgctgcttacagtggtgacagtgacaatgaggaggagctggtggagagacttgagagtgagga

SEQ ID NO: 241079 - DNA, 110 bp, Homo sapiens
tcagggaagccaggaaaagaacaagcttccaaccggtacaagtctggaggaatttcacagcctctcaaactacgctccataatgggagaagtaaagaacaaagacttaag

SEQ ID NO: 241080 - DNA, 98 bp, Homo sapiens
cgagccccgtcctccttcgccgccgcgcacaaccgcacgtgcaggaattggcagcaatgaaacagattctcgttaagatgcatagtaaacattctgag

SEQ ID NO: 241081 - DNA, 90 bp, Homo sapiens
actaggagacaagatccatggattcaccgtaaaccaggggctcacaacgaagtaagacagtagatgacaattctgcaaagcagactgcgc

SEQ ID NO: 241082 - DNA, 80 bp, Homo sapiens
atcggcaactccatggtcattttggctgtgacgaagaacaagaagctccggaattctgagttttccgtctgatgaaggtt

SEQ ID NO: 241083 - DNA, 100 bp, Homo sapiens
aagctaccacctgccagtctgaagcaccgagatgcggatgtgatgctggtacaacccagagtagaatttattctgtctttcattgaccacattgctggag

SEQ ID NO: 241084 - DNA, 98 bp, Homo sapiens
ggaaaactcaggaccatgatggctcagtttcccacagctatgaatggaagcctggaagcacgcaatccagaaggccaagcacatgcccgacccctggg

SEQ ID NO: 241085 - DNA, 74 bp, Homo sapiens
cgctggcccggaggctccagaaacgggtcctgctgctcaccaaggtgtcgtgaaaactacccctaaaagccaaa

SEQ ID NO: 241086 - DNA, 75 bp, Homo sapiens
caccaccctggtggcctttccctccagctctgtctatcctaccaagggcactccagtgtttgtccatgctggccc

SEQ ID NO: 241087 - DNA, 87 bp, Homo sapiens
accacaagatcctcatcgacagttttccaagagataacttcaccaagatgtccagtgataggcaaaggtccgatgatgagagcccca

SEQ ID NO: 241088 - DNA, 75 bp, Homo sapiens
cgcccttctgaggaggctgcggctaacagggcccaggtacggaatggccacatcaaaagaatcactgataatgac

SEQ ID NO: 241089 - DNA, 75 bp, Homo sapiens
agcctcttcaaggagggaaaagaaagaatgtatgaggagaattctcagcctagtatgaagtgtaacagaacagac

SEQ ID NO: 241090 - DNA, 100 bp, Homo sapiens
ctcgcggcgagcggacggggtcgagtcagtgcgttcgcgcgagcattatgccagtacatacaggcttctaaagccagggatggtgccagccctttcattt

SEQ ID NO: 241091 - DNA, 80 bp, Homo sapiens
aggtgtgctgacgacctgctacaacagaagtccggggatcccgagctgtcctgcagctgtaccctgagaactcagagcag

SEQ ID NO: 241092 - DNA, 87 bp, Homo sapiens
gggtagcgttgctgcctttggctcctgggcttctcggatcccccctctctccagaattgtttgcgaggagcgatcgcatttgcctta

SEQ ID NO: 241093 - DNA, 83 bp, Homo sapiens
ccgcgctgagcacgttcttccaagaaaccaacattcccaacagccaccaccaccaccagatgagtccgaaattgaagttcaga

SEQ ID NO: 241094 - DNA, 75 bp, Homo sapiens
cggaaagccccccaggctgagtgcggcatgatctccatcaccgaatggcagagtgctggagaatctggtaaaagc

SEQ ID NO: 241095 - DNA, 75 bp, Homo sapiens
catgcaggttgaaaggttccagtgcccaagatggtgaagctttgttctaagaatatttgtttcatctagtttatg

SEQ ID NO: 241096 - DNA, 150 bp, Homo sapiens
ttaagaaacttaaatttcagggttgggataaaacatcattggaaaacacattcattcataacactgggaaaacagataaacctctcataatgaaggcccccgctgtgcttgcacctggcatcctcgtgctcctgtttaccttggtgcaga

SEQ ID NO: 241097 - DNA, 50 bp, Homo sapiens
tggtctgactaccagtggctctgcagagggagagtcccgtattctcagag

SEQ ID NO: 241098 - DNA, 100 bp, Homo sapiens
atctgaccttgaatgcgctctatgtatgagcactggaagaagtacgacatctatgagaagcaaaccaaggaggaaaccgactctgtagtgctgatagaaa

SEQ ID NO: 241099 - DNA, 75 bp, Homo sapiens
gcactccaatttgtatgccatatcagggttctgagcaaggttcaaccagtcaagaacaggccttatctgctcagc

SEQ ID NO: 241100 - DNA, 100 bp, Homo sapiens
gtgaagagcaggctagaagagctcgatgagaggccaaactgttttcagatagtagttcagcactttagtgaagaacattacatcttttactttgcaggag

SEQ ID NO: 241101 - DNA, 95 bp, Homo sapiens
actccctggtgctcatccccaaagccaagccactcactctgctctgggacgccttcctgagtcctggatctttcttccttctggaaatctttgac

SEQ ID NO: 241102 - DNA, 136 bp, Homo sapiens
ggcaggttcccgcccggaagaagcgaccaaagcgcctgaggaccggcaacatggtgcggtcggggaataagtctggctcttgctgattgaattcctttggtgcagtttagcatgttcctctgtgttctgcatctcc

SEQ ID NO: 241103 - DNA, 75 bp, Homo sapiens
tgggataattatccaaataaattgcaagcattctatccaaatgggatttgcttcctaaggagaagaacttggaaa

SEQ ID NO: 241104 - DNA, 90 bp, Homo sapiens
aaggattccaagtaactcttatttgattctgtgtcataaataccttattggagtgttagcatatttgacagaactggcaatttttcaaat

SEQ ID NO: 241105 - DNA, 83 bp, Homo sapiens
tatgagagtcccatcttcagcagaggtgatgtgtccaatctagatcccaacttctcatttgaaggcaccaaactggatgtggg

SEQ ID NO: 241106 - DNA, 82 bp, Homo sapiens
cgccgccaccacccactccggacacagggggcgacgcttcagagactgacaacctctgggctgatggggaagatggagtatc

SEQ ID NO: 241107 - DNA, 90 bp, Homo sapiens
ccgggagttacaccgccaccgccagagccctatgagtttgtctctctggaatggctgcaaaagtggttggatgaatcaacacctaccaaa

SEQ ID NO: 241108 - DNA, 87 bp, Homo sapiens
gtccaccatttgaccaaccaatgagtcgaaggtctcgtagagcttccttaagccagctctcccaggcgctgaacggactgtcagaca

SEQ ID NO: 241109 - DNA, 82 bp, Homo sapiens
ctattcagccattgggtcacaagcgatgaaaagagcaccttgaagatgagctttgatccaaaccttctccacaacaatggac

SEQ ID NO: 241110 - DNA, 90 bp, Homo sapiens
cgccagtgtttccgtcagtacgcgaaggatatcggtttcattaaggtgcacattcaggttcccgagcacaaacatcaagataacgttcac

SEQ ID NO: 241111 - DNA, 100 bp, Homo sapiens
gtgcaccacccccggagcccccctcaacacggaccgcgcccgccgggcacacaagaatggtcacttttgtttcgacgccggaccgcgtaagagacgatga

SEQ ID NO: 241112 - DNA, 100 bp, Homo sapiens
ctgtccaagctgaaagggcagctagaagaaatgaaatccagggtgcaattcctcagcttggtcaagaagtatctgcagggaatctctggagattggttca

SEQ ID NO: 241113 - DNA, 83 bp, Homo sapiens
taccaggcgaagctggccgagcaggctgagcgatacgacggagcggtggtgccccccccgggcacggggccatgtacaacggg

SEQ ID NO: 241114 - DNA, 124 bp, Homo sapiens
gcatgtacatcagccccccaaaagactggtgggacgccggagacccttctctccccatcagtgtgacagtgacagtgaccaggaagagaaggtaagaccccccctcccccattgtgggcacagc

SEQ ID NO: 241115 - DNA, 100 bp, Homo sapiens
gatccgggagcacgtcatctccatcgaggggcagcttgtgcagctggaagagaaagggcagggttcagtgccctggtcagtatatggtgtctacatccag

SEQ ID NO: 241116 - DNA, 75 bp, Homo sapiens
tgggattcaccaaggccaaagggtacagcaccatgaactactgctggtctggaatcactcgagcctgagccccgt

SEQ ID NO: 241117 - DNA, 74 bp, Homo sapiens
ttggatgaggtgaaagactatgtggccaaggatatggctttagttgcccctgaagctccttcagaacaagccag

SEQ ID NO: 241118 - DNA, 100 bp, Homo sapiens
tctgaatatgatgattttttggacgaattcatggaggcagtttcttccaaaggtcctgctgtactagccaccaaagcagctgctggtactaagaaatatg

SEQ ID NO: 241119 - DNA, 100 bp, Homo sapiens
cgtggaataggtgtatcaagtaatggtgcaaagcctgaatatctacagtcggtgaggcctcttatgaaggaagaagacttcaaacggatgacagcacttg

SEQ ID NO: 241120 - DNA, 101 bp, Homo sapiens
ctccaggagccgctgggagctgccgccaggagctgtcaccatgacggaagctgaatatggtgggcatgatcagatagatttgtatgacgatgtcatatctc

SEQ ID NO: 241121 - DNA, 100 bp, Homo sapiens
cccgtggactaagaacgcattgccgccggtcctgaccaccgtgaacggacagtcccccccagagttgctggagaatgtaaccctaatccataaaccagtg

SEQ ID NO: 241122 - DNA, 97 bp, Homo sapiens
caatatcgaactgaagaaaggagggaaggatataccagtcactatccacaatttagaggagtatctaagaggaaggcagcctctggagtgttctggt

SEQ ID NO: 241123 - DNA, 75 bp, Homo sapiens
ctttttaccttttgtgctgagccaactcgagccaggctgcaaaaagttggaaatggaggatgaagatacaattga

SEQ ID NO: 241124 - DNA, 82 bp, Homo sapiens
cagattggaaattcttttagaaatgagatctcccctcgatctggactgatcagagtcagttgctcaggtacctgaatattgg

SEQ ID NO: 241125 - DNA, 50 bp, Homo sapiens
atgacttgaacaaacctgaagcaggtggacccccaaaagtacaagggcat

SEQ ID NO: 241126 - DNA, 97 bp, Homo sapiens
cacatcagcatcgacagcagtggcagaaacgtcaggccgtagccgaagcctcggaaggagcggcccacggcaaagggccatgaagcccccaggagga

SEQ ID NO: 241127 - DNA, 100 bp, Homo sapiens
atttttggacctgaaacagaaattctggaacacctatatgggtgaatcctggttctttcgttggctacctggaaagaaaaagacagaagcttatttgcca

SEQ ID NO: 241128 - DNA, 96 bp, Homo sapiens
gctacatccaggagagaatgctgacagtcctgcaggttctccttactatgacaatgtccgccccctctcttaccctgattcggatgctgtgctgat

SEQ ID NO: 241129 - DNA, 100 bp, Homo sapiens
ctggaaaacttcccttccctttcggatcaaaatggtttcaatcccagaatactatgaaggcaagaacgtcctcctcacaggagctaccggttttctaggg

SEQ ID NO: 241130 - DNA, 75 bp, Homo sapiens
gaggagtgcggcgcggcggccccgggaccaaggaggccatgacgctgatggagtacctcatcaagaccggctcgg

SEQ ID NO: 241131 - DNA, 82 bp, Homo sapiens
caggacttcggaactagacgaggacaatcatctatctctccttggtgtatgtgcttggccatgtgatcaagtccttgggtgc

SEQ ID NO: 241132 - DNA, 88 bp, Homo sapiens
acagggagggtctattgttaatgtaggcacagggtggtggtttcctatcctcctcagagtgaggcagaacttgaacttaaagaaggag

SEQ ID NO: 241133 - DNA, 100 bp, Homo sapiens
catcagaaagtggccataatgagaaacattgagaagatgcttggagaggccttggggaacccacaagagcaaacggatgtttcagaagacagcaatgatg

SEQ ID NO: 241134 - DNA, 90 bp, Homo sapiens
ctgctggcacagagactcagccggacctgcttccgccagtggagacaacagagctctgcgtgcctcttgctgtgccctacctggacaaac

SEQ ID NO: 241135 - DNA, 90 bp, Homo sapiens
attatttacaatgctaccctgctttttctggtgtcctgaacctggaagttgtgctttttaaggtgctcctgacctctgataaagctgcag

SEQ ID NO: 241136 - DNA, 100 bp, Homo sapiens
acatcaactcggcgccttgggaaccgctcgagcctaccagttaatcagctgtgttcagcgaatacttatgaacagaaggctccagcagcagtacaatcag

SEQ ID NO: 241137 - DNA, 82 bp, Homo sapiens
agagaattaccttatcagtgcaggagaggattgtgtctgcttggtgtggagccatgaagcctggcagcaggtgcaacagcag

SEQ ID NO: 241138 - DNA, 98 bp, Homo sapiens
ttcatctcaaaaacaaaattctgaactcaggacttggcaagtgcttgaggaatccaaagccctcgtgcgctgcaacatgaagatggagctggagcagg

SEQ ID NO: 241139 - DNA, 74 bp, Homo sapiens
gcagagagcagagacatcccgatctggggaagtgatgtacagttcattgattatgaatattctggatacaacta

SEQ ID NO: 241140 - DNA, 75 bp, Homo sapiens
gcttagtacacagaaattctgcagatggtttcaggcacagaactgtatatccaataatagtgaaatggatcccac

SEQ ID NO: 241141 - DNA, 73 bp, Homo sapiens
tggtccagttggcttggataaaatgttggtggatgatattggtgaatgctgtctctgcaatttgagaggaggt

SEQ ID NO: 241142 - DNA, 50 bp, Homo sapiens
catgactcaaggcacagactctccaggaatggttttagggaagactgttg

SEQ ID NO: 241143 - DNA, 100 bp, Homo sapiens
ctgcccgcttcccaggaaaggtccgaggagtaataagaagctctttgaactttttacgattcatctgatgcttcaagaaatacaaaggacaacaaaccca

SEQ ID NO: 241144 - DNA, 48 bp, Homo sapiens
gagcttcagccgattcacacggctacggaagcctggccgcctgcccga

SEQ ID NO: 241145 - DNA, 80 bp, Homo sapiens
acggagagctcgccttggagagcccaggagcaggggagacatgctcctggccactctgaatccacttcctggctctggat

SEQ ID NO: 241146 - DNA, 74 bp, Homo sapiens
taccgcgtctgcaatgtgacccggcggcccgccagtcaccaaacgtcagaatggcggcagcggagcatcgtcat

SEQ ID NO: 241147 - DNA, 83 bp, Homo sapiens
tggaagcttatacacccaagttaactcaggctcttctgactgcagtgacttccccacacattgaaattcatgagggtactatc

SEQ ID NO: 241148 - DNA, 99 bp, Homo sapiens
ccagcaccgcagatgttgtcaaggtggcctaccaggaggccaggggtgtcgccatgctggtcatcaatgctgctttgggatttgacacatttgttgtca

SEQ ID NO: 241149 - DNA, 101 bp, Homo sapiens
caggatcgtgcaggatacagcaccacccctcaattattactgggttcctatactggctgtaacagaagacaagtacgaaatactgcaatctgtcgacgatg

SEQ ID NO: 241150 - DNA, 100 bp, Homo sapiens
caacgcgctggccggagcagtgaaccagcacggggggtccctgagtgccagaggtggtggtgttgcttatcttctggaaccccatgcagccagatcccag

SEQ ID NO: 241151 - DNA, 71 bp, Homo sapiens
ggaagacagcattggtactaatggccaactcaaggctctgtggatagcaactggatcgtgggtgccacgct

SEQ ID NO: 241152 - DNA, 82 bp, Homo sapiens
ctgccccgtggccgcggccgtctcgtggacggcctgttcatcatcgggtggatgtacctgcctccccatgacccccacgtcg

SEQ ID NO: 241153 - DNA, 90 bp, Homo sapiens
gtttatgttaccagcaatgacactacgaatgccagctgatgaagaccgagaggccgcgacccaacacctttgtcatacgctgcctgcagt

SEQ ID NO: 241154 - DNA, 51 bp, Homo sapiens
cagcctcccaaggagctgagattacaggagagaagcctcatcagtgccaag

SEQ ID NO: 241155 - DNA, 75 bp, Homo sapiens
tcctacaaccattcctgatggcatgggagccaacagagacagaggagctggaggaggagaagtcaggcctgcaga

SEQ ID NO: 241156 - DNA, 108 bp, Homo sapiens
acgccatcacacccgccttttctgtgctgacaagaatgagcgagacccgctggggcccagcccctactcatggtgcccagaagacctggctatggcaccatgggcaaa

SEQ ID NO: 241157 - DNA, 90 bp, Homo sapiens
ctcttacagtgcgtggaccacagcacccatcctgactgtgccttaaagtcgaccacagccgctttgtcaactgtgtgcgattctctcctg

SEQ ID NO: 241158 - DNA, 100 bp, Homo sapiens
cgtatggtgctgctgtccaggctggtgtgctctctggtgatcaagatacagatgtggaagatgtgaaatttgtcatcaattatgactaccctaactcctc

SEQ ID NO: 241159 - DNA, 50 bp, Homo sapiens
agaaggttgtgactttagtatacaaacccacaatacattatatgcaccag

SEQ ID NO: 241160 - DNA, 75 bp, Homo sapiens
cagattgagctggagaagcccaagcccatcccctatatttatggcagtaagactttgaccccgacgcaggcttca

SEQ ID NO: 241161 - DNA, 98 bp, Homo sapiens
cggggagagtagggtgctgtggtctgagctagagggtgaagctggcggagcaggaggatgggcgtttgtcactgtgcagaccatttctggaactggag

SEQ ID NO: 241162 - DNA, 100 bp, Homo sapiens
gcaggggcggaggcggaggcagaggtggaggcgctttgaaagcatgtagagcgcatgaagtacaggacaataaagcttcctacacatatcaccaggagga

SEQ ID NO: 241163 - DNA, 83 bp, Homo sapiens
gactgcttgctcagctcagtatcaacacttatgtgtgaagattgctcctggagcagttgtatgtgtagaaagtgaaatcagag

SEQ ID NO: 241164 - DNA, 100 bp, Homo sapiens
ctgtgctggggctttgattgcaaaagactgggtgttgactgcagctcactgtaacttgttcgcatggctctgaaaaaggccgaaaaagaatttgaactga

SEQ ID NO: 241165 - DNA, 96 bp, Homo sapiens
cgcggtctggacaagcgaggaagtttctttaagtggaaggaatgaaggccagctgaatggtgaaacaaatacacccattgaaggaaaccaggcggg

SEQ ID NO: 241166 - DNA, 75 bp, Homo sapiens
accgagaagatatttacagctctgcaaagaaggttctacttagccaaacacagtggtcgacagctcacactccag

SEQ ID NO: 241167 - DNA, 50 bp, Homo sapiens
tcaccaaggcctcaagattgacctagaggactcagaattcatgattgaag

SEQ ID NO: 241168 - DNA, 140 bp, Homo sapiens
cgcggaaaccgatctgcccgttgtgtttgtgaaacagagaaagataggcggccatggtccaaccttgaaggtactaggttttgacaagcttgcatcatgcgtgagtataagctagtcgttcttggctcaggaggcgttgg

SEQ ID NO: 241169 - DNA, 101 bp, Homo sapiens
aagctgtgttccatggcagggaacttttggcagagctcccactatgttccttgcctgtatctccccttggttcaatagctaccagatttttggaagaggag

SEQ ID NO: 241170 - DNA, 83 bp, Homo sapiens
cgcgcctgcgcagaggcggcagcaccaccggggttgactccgggggcgcggcgaggagagtcttgctctgtcacccaggctgg

SEQ ID NO: 241171 - DNA, 75 bp, Homo sapiens
caagcaagcagcagccactgcagtcagggtttccaggcctgaggtgcccgccctggccccaggagaatgaaccag

SEQ ID NO: 241172 - DNA, 90 bp, Homo sapiens
cttagtgccctcttggacttttgggccgagccctggcctcccacgactacatcctgaagattgtgcccacggtttatgaggacaagagtg

SEQ ID NO: 241173 - DNA, 75 bp, Homo sapiens
attcacaatgcctccataatgaatgctgtaggctgctgtggtttacaggatttctccagtgatgattctaagtta

SEQ ID NO: 241174 - DNA, 100 bp, Homo sapiens
aggacatgatccccacggagatgcagcggctgaccaagtaccccctgctcctgcagagcatcgggcagaacacagccaatggagatcttcgtggatgatg

SEQ ID NO: 241175 - DNA, 75 bp, Homo sapiens
tggtactctaccttctggccaatgatctgactgcagccatgagcagcaatgagtgcttcaagtgtggacgatctg

SEQ ID NO: 241176 - DNA, 83 bp, Homo sapiens
ctgtcttcggtggactccttcggcagtccacccaccgccgccgcctcccagtatacctgaggtgcaccggaggtgaagtcggt

SEQ ID NO: 241177 - DNA, 74 bp, Homo sapiens
tgagcttgccgcacaaaaagctagagagggatcgtggaagaataccaattgccatattacaacatggtaccgag

SEQ ID NO: 241178 - DNA, 75 bp, Homo sapiens
atacagaaaccccgacagagcaatctcccaggcaattgacttctgacagctctctccatggaaggaggcggcggc

SEQ ID NO: 241179 - DNA, 75 bp, Homo sapiens
ggcagtgtctgcagggaggcctcctttgacggcatcagcaagataggaccatgagactgtggaatattgaagaaa

SEQ ID NO: 241180 - DNA, 98 bp, Homo sapiens
tctgatgcaattctcatcaacaagaacataattgaagacttgaattctgtgattcggggaactcaaccctatgtatgaaggatatctacagcatgatg

SEQ ID NO: 241181 - DNA, 83 bp, Homo sapiens
ccggtgtgtggcgcgcccagagccccgcgtttcagccctagggaagaggctgaggggatctggcggtggagcgctaggatcag

SEQ ID NO: 241182 - DNA, 100 bp, Homo sapiens
tgaaacgtcagctgcgctcccctaggagtgctgagcccgcggaaccgcagccatggaaaaccaattctgtgtcctcggaggaccacagcccagttgggcc

SEQ ID NO: 241183 - DNA, 98 bp, Homo sapiens
ccatccatttcgtggttcacccgctgccgggcaccgaggaccagctcaatgacagacaattgcagcatgactttcccagggccctgattttcagcacg

SEQ ID NO: 241184 - DNA, 82 bp, Homo sapiens
ttggaaaaaaaattggatgtggcaattttggagaattacgattagggctgatcccttatccaacatggttctaaccttcagt

SEQ ID NO: 241185 - DNA, 90 bp, Homo sapiens
ggagactgggggcaaggaggaggccagcggaagcctgccacctcctatgtgcggaccaccatcaacaagaatgctcgcgccacgctcagc

SEQ ID NO: 241186 - DNA, 99 bp, Homo sapiens
ctgcgggaaatcgggctgaagcgactgagtccgcgatggaggcgatcagtgggtgaccgcggctgcgagggactttgtcatccgtcctccaggatctgg

SEQ ID NO: 241187 - DNA, 75 bp, Homo sapiens
ctgaggcggcgcggcagcggagggacggcagtctcgcgcgaacatacatatgatagttgagaaagacacatattc

SEQ ID NO: 241188 - DNA, 82 bp, Homo sapiens
gctgcgggatcccaaatcggaagtgaattcggattgtttgctggtcccttcaccgatgttgtcaccaccaacctaaagcttg

SEQ ID NO: 241189 - DNA, 101 bp, Homo sapiens
gtcagtttcttgagggctccccagccatgcttcctgtacagcctgcaaaactatttcctcctagagtgccaaaatcttttccattcaacacctcagtcgtg

SEQ ID NO: 241190 - DNA, 88 bp, Homo sapiens
gccgcggttcccgagttgctgcagcagcaggaggaggaccgcagcaagattgctgctaaaattgattcaattcctcacttgaataatt

SEQ ID NO: 241191 - DNA, 99 bp, Homo sapiens
gatcttggtgcagcagatcatcaagaatatcacgtatttggaaaccatgttcacactactttttcagttactgcagcaagttacagaatgtgacacaaa

SEQ ID NO: 241192 - DNA, 100 bp, Homo sapiens
tgcgctcccctaggagtgctgagcccgcggaaccgcagccatggtcgtgtacaacgtgggactctgcatttgtctgtttgatatcaccaaactggaggat

SEQ ID NO: 241193 - DNA, 82 bp, Homo sapiens
ccgagaggagctgagcgagcgcggaagacaatgcagatcttcgtgaagactctgactggtaagaccatcaccctcgaggttg

SEQ ID NO: 241194 - DNA, 98 bp, Homo sapiens
gtgtatcaaccacaagctgagagactggacgcccccccggcttcctgttacatcagatctcgaaaaccatcaacatgcttgtgcgctggtatgtggac

SEQ ID NO: 241195 - DNA, 83 bp, Homo sapiens
cacgagaccgggctggccatgatctatgtcttatgatgtaatcagcgcgatttcacttcctgaatttcgatgaattctaagac

SEQ ID NO: 241196 - DNA, 101 bp, Homo sapiens
gccaaaaattacttggagcaaagggcagtcggcggagcttcgccaaggctggcgcagtcgcagagcatcctggccagaacaagccaaggagccaagacgag

SEQ ID NO: 241197 - DNA, 80 bp, Homo sapiens
tgcctcggcccggacgcgcccgcgcccccgcggctggagggtgacagccctcagcgcctttttccaggagaccaacatcc

SEQ ID NO: 241198 - DNA, 82 bp, Homo sapiens
cgggacggccggtcaggctcgccgccgagctggttgattcttcaccacactgaaaccattaggaaaaatccttgtggttaac

SEQ ID NO: 241199 - DNA, 75 bp, Homo sapiens
ggcagagagacgacgcattcaggagaagaaggatgaggaattacatgaatgacagtcttcgaaccaatgtgtttg

SEQ ID NO: 241200 - DNA, 82 bp, Homo sapiens
cctggtgactgccagcccaactcggtgctgattatcacaactgtttggtgacctacttcactgacctgtgaggattccttcc

SEQ ID NO: 241201 - DNA, 100 bp, Homo sapiens
tccttgctcatctaaaagaggcaatcaccgttcagatccagtttgctgaccagaagcaagaattcaacaaacgtcccaccaaaattggacgtcgctcttt

SEQ ID NO: 241202 - DNA, 83 bp, Homo sapiens
cggcgctggactggagcagaaccccaggactgcgcccccgggagcgggcgcccagagggaatgcagagagcaaccaatgtcac

SEQ ID NO: 241203 - DNA, 100 bp, Homo sapiens
gaatcggtcgcctggaggaccagtatttcccatggagggtattgttgcagcatctggcagtgagactgaggatgaggacagcatggacattcccttggac

SEQ ID NO: 241204 - DNA, 101 bp, Homo sapiens
ggggaagacctgtgtcctgttccgcttctccgaggacgccttcaactccacttttatctccaccataggtgttttccgagtacttcaaggagctggaggag

SEQ ID NO: 241205 - DNA, 131 bp, Homo sapiens
ggaacaagtaccgcctgggacggaagatcgggagcgggtccttcggagatatctacctggagtttgaggaagaggcaaagaaccctggcctggaaacacacaggaagagaaagagatcaggcaacagtgat

SEQ ID NO: 241206 - DNA, 75 bp, Homo sapiens
agtttcttccctgccggaggtgggatacacggtagcatcatggtcgagtggactaaagaggatggacatagaact

SEQ ID NO: 241207 - DNA, 100 bp, Homo sapiens
tggtaattcctctttagatgctgtcattttcagaagaagctgatgtaaatgcctctacaacctaaagcccaggaaatttggtgagcggcctccacctaaa

SEQ ID NO: 241208 - DNA, 100 bp, Homo sapiens
ctgaaaatggggcggaagaaaatacaaatcacacgcataatggatgaaaggaaccgacagaatctgatgttccagcagaaatccaggtgttaaaagaacc

SEQ ID NO: 241209 - DNA, 100 bp, Homo sapiens
tggagaaaaagttcagtgggaagcatgtcgtctttatcgctcaggttacagagaagatcccagtaaggcatttatatacaaaagatattgacatacatga

SEQ ID NO: 241210 - DNA, 97 bp, Homo sapiens
cagaaacccaggaaatcgagactcatgactcccagagaggatggcatctagaagcaattaccagctctggctgggtcgccacaacttgtttgacgac

SEQ ID NO: 241211 - DNA, 75 bp, Homo sapiens
tccagggaacctgaagctctttgaaaggagccaaggcaaagagggaccactgtgctcatggacccatcgctgcct

SEQ ID NO: 241212 - DNA, 82 bp, Homo sapiens
ttgcctaatatacctgtccagacaatctccagagctgctgcagaaaagctgtttgggagaatggtgttgaacgcgtgtgtcc

SEQ ID NO: 241213 - DNA, 100 bp, Homo sapiens
cgcgacgctatggcgcactggagtaccctgttcctggcaaaaataaacagagttgtctttgttggaaactttttacgtgtcaataccctctcaatgaaac

SEQ ID NO: 241214 - DNA, 82 bp, Homo sapiens
caaaagatgactacaaacataggatgttttggcgagagatgtattcagtggaggaagctgctggtcacctgacttttgaatg

SEQ ID NO: 241215 - DNA, 75 bp, Homo sapiens
gcaaatgtgcaaaaaggtttcaggtggagcagatcggagagaataaataccggccgcttacaaacacgcagatgg

SEQ ID NO: 241216 - DNA, 51 bp, Homo sapiens
ggaaaatcttgacaacatcagaaagatggccctgctgtggcaccagtgacc

SEQ ID NO: 241217 - DNA, 73 bp, Homo sapiens
tcctcgacaccatggtggacacttttcttcagaagctggtcgccgccggcagagagcccgagcccagcacatt

SEQ ID NO: 241218 - DNA, 75 bp, Homo sapiens
cagagcgccgcgcacttcgtcatgttcttcgcgccctgacttgtgcaccatggacaattttgctgagggagattt

SEQ ID NO: 241219 - DNA, 100 bp, Homo sapiens
gctggacaaaggagtgatactacatgcagaagaagagttcaacatagagaaaggtcggcttgtgcaaacccaaagactaaagattatggaatattatgag

SEQ ID NO: 241220 - DNA, 83 bp, Homo sapiens
cctagtaaacggggctgctggtgggccgcgtcgaagacatggaccagggctacggaggcgacgttgtggacgtttaccagcgg

SEQ ID NO: 241221 - DNA, 90 bp, Homo sapiens
gccacaccaggctggagaatatggtgcagaggccctccacgggtgtcaaattgagaaccaggtagatccccaccacctacagtaaaaagg

SEQ ID NO: 241222 - DNA, 97 bp, Homo sapiens
gtggcattatccttcagtggggctattggactgacttttcttatgctgggatgtgccttagaggattatggtcgcccaaaatgtgtggatgaagttg

SEQ ID NO: 241223 - DNA, 83 bp, Homo sapiens
ggaaggtgaagtaggaccgaattcctgtgccgaagaggcctgcagtgggagagcagggtcgcaatggaagaagagatcgccgc

SEQ ID NO: 241224 - DNA, 100 bp, Homo sapiens
aacggatcgctctcgcccaccgcccgaacccaggaacgaatttcatatacacctccagagagcccagtgccgagttacgcttcctcgacgccacttcatg

SEQ ID NO: 241225 - DNA, 98 bp, Homo sapiens
gaggattgtttgtggagtcactgaagtcacaacttgccaggaggttgtcatagccttagctcaagcaataggattttggtgaatttatgagggaaaac

SEQ ID NO: 241226 - DNA, 120 bp, Homo sapiens
ttgttcaagataaagtgattttttgcctttgttgattaactggacaaattcagcagcctctagaagaccagcattctcgtgattatggaggcccctctgtcttttctgtgacgggagcaa

SEQ ID NO: 241227 - DNA, 90 bp, Homo sapiens
tataatgggagaggatgatgactcacacccctctgagatgagactgtgctgggtaggccaggtttcagcatcgcagacaagaagcgcagg

SEQ ID NO: 241228 - DNA, 83 bp, Homo sapiens
ccacacattactctgaatccaacattccagtgtctcgccccatcctcaccctcagggttcccagggcccaggctgtggtgggg

SEQ ID NO: 241229 - DNA, 76 bp, Homo sapiens
caaccatgagtggttccatgatgggaagtgacatgaaacgcttcgttaagggactcaggcagtacgggaagaactt

SEQ ID NO: 241230 - DNA, 100 bp, Homo sapiens
gggcaagaccaccttcgtcaatgtcatcgcggcttgaacatgacaagcagatttgggagtccaaggcccagacagaggtccagcttcagcagaaggtctg

SEQ ID NO: 241231 - DNA, 75 bp, Homo sapiens
atgccaccctcacccagctcgccactgcctgggtcagcctggccacgagctcctccaagttccccctgatgacgc

SEQ ID NO: 241232 - DNA, 100 bp, Homo sapiens
ggaggaattacaacttcattttacttatgaagaaaaatctcctggcaattacagctgaccggttccctgatgtgttacctgcttctgctactgatccaaa

SEQ ID NO: 241233 - DNA, 50 bp, Homo sapiens
catagctggaaaggatcttacagctctgcggccgtcacgatgttctggaa

SEQ ID NO: 241234 - DNA, 51 bp, Homo sapiens
gccggttgccgggaggtgaaccgagcgccgtgccgtccctgcagtgacacc

SEQ ID NO: 241235 - DNA, 75 bp, Homo sapiens
tgtgtttcacttaccagaatactacgttcagctaaattaagaaataggaaggttgttgattactcacagtttcag

SEQ ID NO: 241236 - DNA, 88 bp, Homo sapiens
gcggccaagcagccaaccatgctcaacttcggtgcctctctccagcagactgcggattttttatcaagcagaaatgcatcgaacaacg

SEQ ID NO: 241237 - DNA, 74 bp, Homo sapiens
atagcacctgaggacagaacatatcagcaattcaattaaaccccagctatatcagggcaatattgaggagagca

SEQ ID NO: 241238 - DNA, 90 bp, Homo sapiens
cggcgttcttccgctggctcagccgcaagtacccgtccatcatagtcaactgcgtggaagagaagctccggcaggagcctgtggtggtgt

SEQ ID NO: 241239 - DNA, 75 bp, Homo sapiens
tgatgagtatgactactgatgactttgtaaaaatgttttcagaaatctggttaagaagtactgccccaaacgttc

SEQ ID NO: 241240 - DNA, 51 bp, Homo sapiens
gcctgtaggtttaattgcaggtgccagttggagtgcttagtgcagttggtg

SEQ ID NO: 241241 - DNA, 100 bp, Homo sapiens
gatcaaagccactcacattaagttaccaagaacaaccacagaatctgaggcggtggatgaattttattccaagatagaaggccagaaaattgacttaaaa

SEQ ID NO: 241242 - DNA, 82 bp, Homo sapiens
aagctctccctgccgtggctgctcaacaaggagctgggctgcatcaactcgatgagcgggatcgtgtgcagaagaaaacctt

SEQ ID NO: 241243 - DNA, 100 bp, Homo sapiens
ccaggcagagctgcacccgctgccccagctcaaaggagaagattggctggcgaaaggatgcactgcatttgctggtgttcacaacagatgatgtgcccca

SEQ ID NO: 241244 - DNA, 98 bp, Homo sapiens
ggaagaggttgttaccgtgggcaactctgtgtactaatggtcacttgatgtgcgctggctgttttatccacctactagcagatgcccggctgaaggag

SEQ ID NO: 241245 - DNA, 82 bp, Homo sapiens
tcagaaagggtctggagaagaagggggctgtgacaggtggggaagagtatgaaaacaaagttgcagtacgtgacagagtggc

SEQ ID NO: 241246 - DNA, 90 bp, Homo sapiens
ggggagcgtccggagctagctggatcctctaggcaggagaataaaggcagccccgttgatgactgaaaatgacaaagcatccacctaaca

SEQ ID NO: 241247 - DNA, 75 bp, Homo sapiens
cccctgtccaggctgaagaagactctgagaatctggacgaggctagagaacagaaagaaaagagtcctccagacc

SEQ ID NO: 241248 - DNA, 82 bp, Homo sapiens
gcaggaccagcgggcgggggcccacgagttccccctaaaggactcaaaacgtctaatccaatggttaaaagctgttcagagg

SEQ ID NO: 241249 - DNA, 83 bp, Homo sapiens
ggccagatagtaccatgatagctgtatcaaatgacagcccatatcaaggcggtgtattctttttgacaattcattttcctaca

SEQ ID NO: 241250 - DNA, 98 bp, Homo sapiens
acagcaatatctctgggctttcacagagcctgaaccccaacctgctggccgtggtgacagagagcacagacgcgcaccatgagcgcacctttattggc

SEQ ID NO: 241251 - DNA, 100 bp, Homo sapiens
cgtgtggaccccaaacaagtctgcgcaaaatttgtcgaggaggtttgccgcggcaggtggagtattgctcctggaaaatccaaaaggtgacaataggttg

SEQ ID NO: 241252 - DNA, 82 bp, Homo sapiens
caagagtaacagcagcgccgtcccgtccgacagccaggcccgggagaagccgagacgcatccagagctttcgtgaccgggga

SEQ ID NO: 241253 - DNA, 90 bp, Homo sapiens
ggaagactaatcaaagaatagataacaagtgcagtattactcttgtctctgctgctcctgggaaagtgatttgtgaaatgaaagtagaag

SEQ ID NO: 241254 - DNA, 82 bp, Homo sapiens
ccgggtcgcgcgcggccgagtcgcggaggcgcctccgctgcagtcgctgcgtctccaaggtgtgaatgacagaggtggtgcc

SEQ ID NO: 241255 - DNA, 75 bp, Homo sapiens
agcctgagaatccttccggaaacacaaggcttgtctggagcgggaaagactactgtgagcatggccttggaggag

SEQ ID NO: 241256 - DNA, 50 bp, Homo sapiens
tgggaagtgagacttgttaaacttgaaagtttcaccagtgatcattaaag

SEQ ID NO: 241257 - DNA, 100 bp, Homo sapiens
ggttcccacaaagagtataagcgagggaagtcgtgcacgaacaccaagattgaaaaggaagatcaggccaaccccaaagaagaagtgaccaaggaggagt

SEQ ID NO: 241258 - DNA, 75 bp, Homo sapiens
aagactttggaccaggcaaaagaacacgacttaatgctctccgagaggtacaacccgtagaacttcctaactgta

SEQ ID NO: 241259 - DNA, 50 bp, Homo sapiens
tagataacaggatcatttcatctaaggtatttcaggacagccaggagggg

SEQ ID NO: 241260 - DNA, 100 bp, Homo sapiens
tgaggcctccccagccatgtggaactgaaatgcatctacaaccacaactgtgatagacagcaaaaatggatctgtgcccaaatcccccggaaaagtgctg

SEQ ID NO: 241261 - DNA, 75 bp, Homo sapiens
catggggaggcatcagtcttggcccccctgaccctggtccctgtggaggtaaactttcctgagaatggctttctc

SEQ ID NO: 241262 - DNA, 132 bp, Homo sapiens
ggaagtttcaacccagctggcccgtgctttcactatggactgtattactttggaaggtgtccttaagtttgctcgcttggtcaagtcctacgaagcccaggatcctgagatcgccagcctgtcaggcaagct

SEQ ID NO: 241263 - DNA, 100 bp, Homo sapiens
tgagcatagacagtctgtgtaagaagtactccagggaaacctcccagaagaggaggcggtagacgcgaccacagaagatgtcgggccaaacgctcacgga

SEQ ID NO: 241264 - DNA, 75 bp, Homo sapiens
ctcagcatggtcagtgccgtttaacctttattgtggtggagtccaccccgctgtgcaacgaagtaaacgaggagg

SEQ ID NO: 241265 - DNA, 97 bp, Homo sapiens
aagatagtctgggactttcaaatcttcagaagagccaaatccaggggaagtagcaggcttgcaatcttcagtttgtgaagtgtggatatgcaggctc

SEQ ID NO: 241266 - DNA, 74 bp, Homo sapiens
taaaagcacagttttaagagagtccttcagtgaatctacagacctattttctcaggagctcagcctggccttac

SEQ ID NO: 241267 - DNA, 100 bp, Homo sapiens
gacagttgcacacactaggagatctcctcaaagaagtttgtccttctgctattgatcctgaagcttcttctcagcctgttgataaccatgttagcccatc

SEQ ID NO: 241268 - DNA, 74 bp, Homo sapiens
tgcctccgggcacacccggctccccggacgcctcggtgagaaaccttaccactgtgactgggacggctgtggat

SEQ ID NO: 241269 - DNA, 75 bp, Homo sapiens
ccgagatgcccgcatgcgcctcatgaaacatgatgttaacttcggatttcggcctggcccgggcctatggtgtcc

SEQ ID NO: 241270 - DNA, 75 bp, Homo sapiens
caagaactcaagagcagaatctccggatctgtgccagttcagaagcaggcgagcctcttccctgatgaaaaagaa

SEQ ID NO: 241271 - DNA, 100 bp, Homo sapiens
ctggagtctgcgaaggccgggacccggttccccggcccacagtgggggtgtgcaaacccgagagaactgggaaagtgtgctgtgttgtcattcaaggact

SEQ ID NO: 241272 - DNA, 90 bp, Homo sapiens
gaggattattgacactcccatatcagagctccagaaacatgacaaggaggactttcctgcctcttggagatcagaggaggaaatggcagc

SEQ ID NO: 241273 - DNA, 75 bp, Homo sapiens
aggatgatgctgactttgatgaaggtaaatggccaagacctaaagaacctgctgcaccaggatgctgtagacctc

SEQ ID NO: 241274 - DNA, 98 bp, Homo sapiens
gccagatctcagaggagcctggctaagcaaaaccctgcagaacggctgcctaatttacagcaaccatgagaggcttcgtgacggagttatcagagaca

SEQ ID NO: 241275 - DNA, 100 bp, Homo sapiens
ccagcgccctggccctctcgctgttgctggtctctggctccctcctcccagggccaggcgccgctcagaacgaaaagaatggtttgtcattcattgaaac

SEQ ID NO: 241276 - DNA, 88 bp, Homo sapiens
tttggaccagaagaagccgaaggaagtcttctaaggcgtcttcactcgaggacagctgggcctgatagacatcatcttccagtacatt

SEQ ID NO: 241277 - DNA, 51 bp, Homo sapiens
atgggctcgcctgtcaacgcgcagactccactccacttggctgtgatcacc

SEQ ID NO: 241278 - DNA, 83 bp, Homo sapiens
cattgctagcaatgagctcccaaagccatccagtgttatagttttgccgctggactcttccctcccttcccccaccccatcag

SEQ ID NO: 241279 - DNA, 91 bp, Homo sapiens
ttctcctggagacgcaactcaaggtgtccctggccagtgtccttccacctgtccacaagcatggggaacatcttcgccaacctcttcaagg

SEQ ID NO: 241280 - DNA, 83 bp, Homo sapiens
actcacgtccgtcgctgctgcaaccccaagatgtcggagacacggtggaaacgcttatggtttggtgcacctcgatttggagg

SEQ ID NO: 241281 - DNA, 110 bp, Homo sapiens
tcaccttctgtctccacagcaggacagccgaactggaatctggatgagcagctcaagcagctatagcaactagattccaccactttgggcttttacacagaactacagta

SEQ ID NO: 241282 - DNA, 100 bp, Homo sapiens
gagactgatctttgctggcaagcagctggaagatggacgtactttgtctgactacaatattcaaaagttctttatagctccaagctctacagattcttca

SEQ ID NO: 241283 - DNA, 83 bp, Homo sapiens
gcgggcggctgagacaaaggcgacgggctgccagaggaacccgaccagaacctgtccagccctgaggaggtgttccactctgg

SEQ ID NO: 241284 - DNA, 96 bp, Homo sapiens
cagcaggaagatcttttgaggtgcctgatttgagatggggtcccaggtctcggtggaatcgggagctctgcacgtggtgattgtgggtgggggctt

SEQ ID NO: 241285 - DNA, 146 bp, Homo sapiens
gcagtcctcctccacctcctcctcttcccagcaattcgttctgcaaattaatgccatccaaacaatcctacatggctccttactatgaagccttgtgcaaatccctcgactggcagatagacgtggacctactcaataaaatgaag

SEQ ID NO: 241286 - DNA, 100 bp, Homo sapiens
cggctcctcccaggtggcctcccgcgtgctggccatgaagataccccagaatcttccatgctccgtcacactgcagccaggcccagaggatacaggaaag

SEQ ID NO: 241287 - DNA, 100 bp, Homo sapiens
ctttctcagcaccttggcgaagccttgggtttctttcttaaaggactgatttttagaactccacatttgaggtcagagatgtcatcatcgctgcaagcgt

SEQ ID NO: 241288 - DNA, 100 bp, Homo sapiens
tgagaaaagcctcaccctcaaagaagtcttcagactagctactcttggaggaagccaagttgactatattgtggagtatgactatgatgctgtacatgat

SEQ ID NO: 241289 - DNA, 88 bp, Homo sapiens
cgcgcagctggctggcggagcatgagcgccccaggagcgggacggtatgcgggccatcctggggtcctacgacagcgagctgaccccg

SEQ ID NO: 241290 - DNA, 83 bp, Homo sapiens
cagaccctggagcctcagttggaagcagccgatccagcctgcggagcctgtggggcaggccaaacaccagagcaccctagaag

SEQ ID NO: 241291 - DNA, 75 bp, Homo sapiens
cagatatttccagagaatgaccacaacctcttcagtagaagtactatactggcaattgctggagaagattttgca

SEQ ID NO: 241292 - DNA, 75 bp, Homo sapiens
cgtcgttgccttgtatttccagagaacagggccgttgctccagggagaactgcaaatatcttcatccacccccac

SEQ ID NO: 241293 - DNA, 83 bp, Homo sapiens
gggcttcgcgtggcatctcagaataagtttggacagttttgtacagtaggaatgtgttgtaattggtctgcagtctacaggag

SEQ ID NO: 241294 - DNA, 75 bp, Homo sapiens
cccgggccacctgggcccccgggttccgccggcactctcgccaccaccgcgtggaaatgagagctgcagtgaaaa

SEQ ID NO: 241295 - DNA, 98 bp, Homo sapiens
ggcgagggccgccgcagcaccgagtccgaggtctacgacgacggcaccaacaccttcttctggaaagtggagaatgaggacatgaataaagaccagat

SEQ ID NO: 241296 - DNA, 50 bp, Homo sapiens
gctactaaccagagccggctctttctcgaattcaattcgtcataatctgt

SEQ ID NO: 241297 - DNA, 82 bp, Homo sapiens
gacattaccggacaggccttgtccggcaataccaagtaagaagacatgttggataacaagaagaggtgtagagtttgcatat

SEQ ID NO: 241298 - DNA, 74 bp, Homo sapiens
aaccctggtcaccgtctcctcagttggaatcgaagcctcttaaaatggcagatgacttggacttcgagacagga

SEQ ID NO: 241299 - DNA, 80 bp, Homo sapiens
cggccaagggaccaaggtggaaatcaaacaacatacatatgatagttgagaaagacacatattctgatcatgaagaaata

SEQ ID NO: 241300 - DNA, 109 bp, Homo sapiens
cctgccgtccttctccactttcgccagcccgtgccgcgagcgcggcctgcaggaggcctccggtgtggctgtctctgatggtgtcatcaaggtgttcaacgacatgaag

SEQ ID NO: 241301 - DNA, 100 bp, Homo sapiens
accctaatcagagggacttatacagggatgtgatgttggagaactatagaaacctggtatcactgggactgtggtctggagctcaatgatgaagatggcc

SEQ ID NO: 241302 - DNA, 75 bp, Homo sapiens
tcccggatcccaggagaggagacagatgcgtctgttactagagtggagagtctaccttcgtctcacatgtgccac

SEQ ID NO: 241303 - DNA, 100 bp, Homo sapiens
ggaagtccccgaggcagcctccgcggaggagcagaagatgaggagcgggaaggcctcctgcaccctggagaccgtgtgggaagacaagcacaagtatgag

SEQ ID NO: 241304 - DNA, 98 bp, Homo sapiens
tgccgcttcagttctcccggtgtggccacgagtcggtgaatggtagtgtctagaaagggtatgtcccttcaagagagaggtgccaatgtccaaccggc

SEQ ID NO: 241305 - DNA, 74 bp, Homo sapiens
taacccggagtttgaaaatgaagaattgctccatgatgcgttatctgggtctggaaacccaaaccctcaaggat

SEQ ID NO: 241306 - DNA, 114 bp, Homo sapiens
cgcgctcaccggggccgagtcccatgagctgcaggacgtcctggaagagaccaatgccacagatgctatggcccacgtggccggcttcactgtggctcatgacgtgagtgctcg

SEQ ID NO: 241307 - DNA, 100 bp, Homo sapiens
cacgccggcaacctaccagctaactgaagagggcacctttaaggtggtggatgaagaggccatggagaaggttttaaaatcaaagatgggaaaatcggag

SEQ ID NO: 241308 - DNA, 83 bp, Homo sapiens
ttgactgtatttgggctgcagcacaggtctgtttctgtcgactgtggaccacttatgtgcgatccgtggaccacttgcgtgcg

SEQ ID NO: 241309 - DNA, 75 bp, Homo sapiens
gaggaggtggcggcggcgggaagatccaaaacagagtggagtacgagaaaagggtccgagcacaagccaagaagt

SEQ ID NO: 241310 - DNA, 74 bp, Homo sapiens
agaatattcagagtatatataccattaggtagcggaattggtactggtccaggagttatccaggatagattttc

SEQ ID NO: 241311 - DNA, 98 bp, Homo sapiens
agtcggaaagttggaacctctgacaagaccaagtactaccttcaaggttgtaaagaagaaagttctaccctttctgtcaaaatgaagtgtgattttaa

SEQ ID NO: 241312 - DNA, 100 bp, Homo sapiens
gaactctcaccacaacatttcaaagggaatacattgccagaacttggaatactctactggacaaacatttcctccaaggctggagcattggatttgctaa

SEQ ID NO: 241313 - DNA, 78 bp, Homo sapiens
atatgctgtgggagaagagtgtgacttcgagcaaaatgatgcttcaacacccaggccaggtctctgcctcggaagtga

SEQ ID NO: 241314 - DNA, 82 bp, Homo sapiens
ggagcggccggggcctggggctgcctgccgggcggccgggcgcggcgagcccagacgccgcaccaggctgcaggccagccct

SEQ ID NO: 241315 - DNA, 97 bp, Homo sapiens
acatgatacgtatattttgtattacagtgggcacacccatggtacaggagagtgggctctagcaggagcatttcatactactgaagctgaagctagt

SEQ ID NO: 241316 - DNA, 100 bp, Homo sapiens
cagttccaaagatgatgaatctgaaaggaaatccggaattatcacagagtgccagaaccctgtggagcatcatgaactgggaagagtagctgagccccag

SEQ ID NO: 241317 - DNA, 154 bp, Homo sapiens
ccacgccttggccagatgattgtggattatgaaaaccctttaaagaagatgatggaagaatttgtaccccatagcaagatcctgaggtactccggagactgacatcctcagttagttgtgcactggatgaagctgctgctgcactgacacggat

SEQ ID NO: 241318 - DNA, 88 bp, Homo sapiens
aacttcttgttaaatggggttgtagcatagaagatgtggactacaatggaaaccttccagggtgtgtgttgtattgatgaatttgata

SEQ ID NO: 241319 - DNA, 100 bp, Homo sapiens
aactttttgagccttacggagccgtctaccagatcaacgtcctccgggaccggagtcagaaccctccgcagagtaaagaggagctctacggtgactttga

SEQ ID NO: 241320 - DNA, 50 bp, Homo sapiens
cgtcgggagtgatcacctaccctacaggaacagcatatgccatatatgag

SEQ ID NO: 241321 - DNA, 82 bp, Homo sapiens
cggcggagtagcaagtggccatggggagcctcagcggtctgcgcctggcagcaggatttttagactctgaggagcagttgga

SEQ ID NO: 241322 - DNA, 75 bp, Homo sapiens
atttcctggggggcatggagtgcaccctggggcagggcctcctcccaaggagaacatgagaccacttcatatctg

SEQ ID NO: 241323 - DNA, 82 bp, Homo sapiens
ctcgtcagcactgactttcagctatggaatcggaagaggatcacctagcccgggtagaagaggcaatcacccgtatgcttgt

SEQ ID NO: 241324 - DNA, 90 bp, Homo sapiens
agatggagctaaaggaactgcttatttaatacatttgaacaacttttggggtacttagaaggttggaaagggcaaagaaattacaagaac

SEQ ID NO: 241325 - DNA, 100 bp, Homo sapiens
cgggggtcctgatggtgggccccaacttccgcgtcggcaagaagatcggctgcggcaacttcggggagctccgcctagagtgtgaacatggctacgcctc

SEQ ID NO: 241326 - DNA, 83 bp, Homo sapiens
gctgcttatggcggcgctggagagggggcgctgagctgttgggcgtgagtgcatctccatccacgttggccaggctggtgtcc

SEQ ID NO: 241327 - DNA, 74 bp, Homo sapiens
atctttgatgagaagacagggatgtgtcttgctgaatcagggctctcttatccctgccatcgacttacagtggg

SEQ ID NO: 241328 - DNA, 112 bp, Homo sapiens
gttggtgacgggacagagcggtcggtgacagcctcaagggcttcagcaccgcgcccatggcagagccagaccgattccagtggaatgacactggtgatgcttgccgccgccg

SEQ ID NO: 241329 - DNA, 101 bp, Homo sapiens
ggattttggaagagggagtcaccactggacctccaaggaagccacgtgcagacatctacaaccttcgatctcctgacgaaattccagaagattgccatggc

SEQ ID NO: 241330 - DNA, 101 bp, Homo sapiens
ctgctccaaagagatctcagcgctcaccgacttctctggtactaggttttgacaagcttgcatcatgcgtgagtataagctagtcgttcttggctcaggag

SEQ ID NO: 241331 - DNA, 75 bp, Homo sapiens
tggcaggaatgcatggattatgcagtaactctagcaagacaagctggagaggagaattctcaccaaatgttccca

SEQ ID NO: 241332 - DNA, 100 bp, Homo sapiens
cctaagagaactatggcaacatcaggtgactgtcccagaagtgaatcgcagtctcagaccagtatccttcaggggttctcttactctgatttgcggaaat

SEQ ID NO: 241333 - DNA, 96 bp, Homo sapiens
gaagatgtgccgccgctgccaacgtcgagcggcgacggctggttgctcgtgggggccccgcgggcagaagcgcttccactgcagagagccaacaga

SEQ ID NO: 241334 - DNA, 82 bp, Homo sapiens
gctctttccccgtcagcatcccagccgtgctcacggtgcgcgcggagccatggttatcatgtcggagttcagcgcggacccc

SEQ ID NO: 241335 - DNA, 90 bp, Homo sapiens
tgattgtgaggcctccccagccacgtggaactagcaaacgaggcccctgagagctccacctagttcacaggataaaatcccacagcagaa

SEQ ID NO: 241336 - DNA, 50 bp, Homo sapiens
ccgagaaaccgcagcactacacgtatactgtgatgtcaggaacacctgaa

SEQ ID NO: 241337 - DNA, 100 bp, Homo sapiens
ccggccggagccacgcagccgcggcttccggagccctcggggcggcggactggctcgcggtgcaggaaagaccacagcaagattctttcattcgtctcct

SEQ ID NO: 241338 - DNA, 96 bp, Homo sapiens
gccaaccgcaaccattgacgccatgtcgggttattcgagtgaccgagaccgcggccgggaccgaggcagggcactgtgacctttgaagatgtggct

SEQ ID NO: 241339 - DNA, 100 bp, Homo sapiens
ttcaatcatcattttgagctcaaagttaagggaagaaagtcggaggctggctttggctgcgaaaagagaaaaaagaaaagagaagagaaggaagaaaaag

SEQ ID NO: 241340 - DNA, 50 bp, Homo sapiens
tggatagataccgaattcttatcacaaagattgagaacctagatccccga

SEQ ID NO: 241341 - DNA, 83 bp, Homo sapiens
gtaccgcttatgccaggccgatcccgacctggactcagacaaggttttaaaatcaaagatgggaaaatcggagaaaattgccc

SEQ ID NO: 241342 - DNA, 100 bp, Homo sapiens
aaaaacaggagtattaaatgaaaacacagtttctgcaggaaaagatctctctacttctcctaaggaacttgcatcagcactgaagtcagccttatctggc

SEQ ID NO: 241343 - DNA, 135 bp, Homo sapiens
cgtcttttgccaagaatctggttatgatacaatcttgcgtgtcctgggctctaatgtcagagaatttctacaggatctagtgaaaagccatttgatgtatgcggtcagagaagaagtggaggtcctcaaagagca

SEQ ID NO: 241344 - DNA, 88 bp, Homo sapiens
accttgaatagaggaaatgggatatcatctgactgctttctgattccaaacagttcaacattttaagaaaagcaagatcttatataaa

SEQ ID NO: 241345 - DNA, 50 bp, Homo sapiens
gcaatgtctgtgtctaatctatcatggttcaaaccttgtactactcagct

SEQ ID NO: 241346 - DNA, 100 bp, Homo sapiens
ggcgccgcgcagaggcgggcgacgcggtagtggcgaagccgggagtgtgggcgcggctggccaaaagcgtttgaacaatacttgaatctggaagatggca

SEQ ID NO: 241347 - DNA, 100 bp, Homo sapiens
ccggcagccgacggcaaaggtgtcgtggtggtcattaagcggagatccgagctagagccggtgcaggccacgcagaacaagacagggaagtatgtgccgc

SEQ ID NO: 241348 - DNA, 100 bp, Homo sapiens
aagcatggcactctggcgggcataccagcgggccctggccgctcacccgtggaaagtacaggtcctgacagctggagaagtacagcatcggggagcccac

SEQ ID NO: 241349 - DNA, 90 bp, Homo sapiens
tggataggcagaagaaagaagaggagaaggagcagtccgtgctcaagttacgagaagtttctgagaagctgaacaaatataatttaaaca

SEQ ID NO: 241350 - DNA, 101 bp, Homo sapiens
gaagcctcgtctcctggaggaaaatggtgatggcatcagctgagaagggaaggaagcccatgtgaggacactgaagaaggagtgagcagacaataagaagc

SEQ ID NO: 241351 - DNA, 102 bp, Homo sapiens
ttttcaagaattggtagaaggtgtgttttacatacataacatgggaattgtgcaccgagatctgaagatttctctatgaatcatcatcaagaactctgggag

SEQ ID NO: 241352 - DNA, 75 bp, Homo sapiens
acatcgcggtcatcaagtactaagatgggggtgaagttgacaccccacaacaaggagacggtgcagcacagtgat

SEQ ID NO: 241353 - DNA, 75 bp, Homo sapiens
tctacagggagctggacctcaacaggttgacctgacagttcaagaaaaggagaaatatcttaatgtgtctcgctg

SEQ ID NO: 241354 - DNA, 75 bp, Homo sapiens
gggcctccacacgggcctccgaagagctgccgcgacgcccggcccgcagggcagttgtcatttacgtgctgaagc

SEQ ID NO: 241355 - DNA, 75 bp, Homo sapiens
gaatcatctctacagagaactgaaatttcttcttgttgagcaatgtttaaagcgtttgaaaaacatgaatttgga

SEQ ID NO: 241356 - DNA, 98 bp, Homo sapiens
ctgtggtccagggcagggccactccaggtgctggagaatctggtaaaagcaccattgtgaagcagatgaggatcctgcatgttaatgggtttaatgga

SEQ ID NO: 241357 - DNA, 83 bp, Homo sapiens
agagactgctgagcccgtccgtccgccgccaccacccactccggacacagcggagctggagtttgttcagatcatcatcatcg

SEQ ID NO: 241358 - DNA, 51 bp, Homo sapiens
cagcctcccgagtacctgggactatagctcaaaaagtttccaagaagacag

SEQ ID NO: 241359 - DNA, 100 bp, Homo sapiens
tcagctttttgtgctgccagcaagaaatgatcagtagcaccagtgtttatgattgggctaatggatactacagacaacagagaaaacttgttgaagagat

SEQ ID NO: 241360 - DNA, 82 bp, Homo sapiens
atatttctcttttgtctgcccctattgtaagtgcagatggaacacaacagcttcttaatgaagaggataactcagaatcatc

SEQ ID NO: 241361 - DNA, 99 bp, Homo sapiens
cacgcactactggcccctgatccggttcttggtgcccctgggcatcaccaacatagccatcgacttcggggagcagctggaggagagcaggagtgttca

SEQ ID NO: 241362 - DNA, 88 bp, Homo sapiens
attttttggcagcagaagggcgactgagtactcaacatattgactgtatttgggctgcagcacaggcaatttgaatcaacccatagaa

SEQ ID NO: 241363 - DNA, 82 bp, Homo sapiens
acggtggaagcgtgattctgctgagtgtcagatgtggacgagtgctcactagcagaaaaaacctgtgtgaggaaaaacgaaa

SEQ ID NO: 241364 - DNA, 100 bp, Homo sapiens
aaaacggatgtaaataagattgaggaatttcttgaagaagtcttatgccctcccaagagaaacctcaattatttttccaatgcttatgcagctgcagtta

SEQ ID NO: 241365 - DNA, 75 bp, Homo sapiens
agtagacttacagaaaaagaagaagcggaaacaacgttctcccgcaaaaagtgaagccaccactcgctctcgaat

SEQ ID NO: 241366 - DNA, 99 bp, Homo sapiens
cctcttcttctgacacagatttgagtttgacacccaaaactgaaactatggaggagtatatgttggcctaccatctgaagctgtcaatatggtgtccag

SEQ ID NO: 241367 - DNA, 97 bp, Homo sapiens
atttgatgaagtgcaaagttcaggcggtatgattttgagtgtctgcaaagatcattatgtagaagttctggaatgcaaaatacagtgtgaagagaac

SEQ ID NO: 241368 - DNA, 50 bp, Homo sapiens
tggagttgccggagagacagcccagggatagctgggagtatggccaccct

SEQ ID NO: 241369 - DNA, 75 bp, Homo sapiens
tgctgaatctttaaaattctatcacaaagggattgcttccttaacaaggttggagcaatcactgaagaaactgaa

SEQ ID NO: 241370 - DNA, 100 bp, Homo sapiens
ggctggacaccaggatggcatcaccttcattgacagcaagaatcatcggactcaggtacatctgtgagtgagaacaggtgtcaccttgaaggtgggagtg

SEQ ID NO: 241371 - DNA, 83 bp, Homo sapiens
gccgccaccacccactccggacacagatgaaggtcaccgtgtccaaagggggcgaccgggacagtgacgacgacagcgtcctc

SEQ ID NO: 241372 - DNA, 100 bp, Homo sapiens
aggtggacggggagccctgggtccaggccccggggcacatgatcatctcagctgctggccctaagggggtccactggacggggcctgagctacaacttca

SEQ ID NO: 241373 - DNA, 75 bp, Homo sapiens
ggccaactggtaggaccagcaccccataccccgaagccagccaagattctacattgctcatctgggcatctgagc

SEQ ID NO: 241374 - DNA, 83 bp, Homo sapiens
tcgctgcatcaagcccaacagccagggccaggcgcagacctttctccaagaggagtttttccaggggcattgttatttgtgac

SEQ ID NO: 241375 - DNA, 96 bp, Homo sapiens
ggaaatactaatcgagcactttggcaagataacagacgagtacctttggaaaggtcacgctctcgccacaatggagctatctcatctaagtgattc

SEQ ID NO: 241376 - DNA, 100 bp, Homo sapiens
ttacacacccatatgagttcgatttttacctctgtagccatgctggaatacaggctaaagaattacctccaaagccattgtcaagaccacagcagtcatc

SEQ ID NO: 241377 - DNA, 140 bp, Homo sapiens
ggatcctccagccccacttggagaaccaggaaaacctttcaatgaactgtgggattatgaaggtttttcgttggaatatacgttgcacatttatggcgattctgagtgtgagggcagacttctgccaggctcagcacagc

SEQ ID NO: 241378 - DNA, 75 bp, Homo sapiens
aatcctgaggacttcatccggtcaccatctacctattcttcaaatggttatgtgggtcatgaatttattttggac

SEQ ID NO: 241379 - DNA, 90 bp, Homo sapiens
gggctggtggcccacagggtagcagacatgcacatgatggtgtccaagccagaacagtgggtaaagccaatggctgtagcaggagccaat

SEQ ID NO: 241380 - DNA, 83 bp, Homo sapiens
ctggggatcggtttgatgtggtggttttggcccctttgctgcaaagtgtttgcagctcaccttgtgaagatgaaatatccaag

SEQ ID NO: 241381 - DNA, 100 bp, Homo sapiens
ccaagcatgtggctcctggtcagtgtaattctaatctcacggatatcctctgttgggggagaagcattttaagtcttccacatcaagcatctccagtatc

SEQ ID NO: 241382 - DNA, 100 bp, Homo sapiens
agatctgctgcaaggaactgatagcttatggttctccattgtgatgaaagcacatggtacagggatatctctaagtttgctatgcattatataatagaag

SEQ ID NO: 241383 - DNA, 80 bp, Homo sapiens
ctttgaagtgggagcccagttggaagcccgggaccgtttaaaaaactgggaactctaatgatccaggacaaagaagttac

SEQ ID NO: 241384 - DNA, 90 bp, Homo sapiens
cgggattactatgacagaggatatgatcggggctatgatgatcgggactactatagcagatcatacaggagcaggaaaattcagattcga

SEQ ID NO: 241385 - DNA, 75 bp, Homo sapiens
cacacgccctgcatcgagcagctggagaaggagtctactcttcatcttgtgttgagacttcgtggtggtgctaag

SEQ ID NO: 241386 - DNA, 73 bp, Homo sapiens
gtgcagttccaggacatgtgtgcaaccattggcgtggatccgctggcctattgttgatccatttcagatactt

SEQ ID NO: 241387 - DNA, 100 bp, Homo sapiens
ggcgcgagtgaggaaaggaggtactgtaggaccatggccaacctggagcgcaccttcatcgccatcaagccggacggcgtgcagcgcggcctggtgggcg

SEQ ID NO: 241388 - DNA, 50 bp, Homo sapiens
cagctgtcctcatgtctctccagcaggtgaaaggtgtagcagtcactcgg

SEQ ID NO: 241389 - DNA, 99 bp, Homo sapiens
aaccctgggagctcaggaaggaaggagcgcccagaagcagggacagggagctggttggggtggaccagaaatcagacggggtctcactctgtcgcccag

SEQ ID NO: 241390 - DNA, 82 bp, Homo sapiens
tgctgcggcgcggggaccgctgtgctctcgctgcatcttcctcccgtgaggctggccgagctccacgctgatctgaagatac

SEQ ID NO: 241391 - DNA, 80 bp, Homo sapiens
agcagaacagcgtgggatgttcacaaaggtcaaaatgcagatcttcgtgaaaacccttaccggcaagaccatcacccttg

SEQ ID NO: 241392 - DNA, 100 bp, Homo sapiens
cgcaccacctcctgctgccttcccgtcgccgctcccgaagcttttccaggtggtattaaagataatcaaacattatcaagaagaaggacaaggaactgaa

SEQ ID NO: 241393 - DNA, 100 bp, Homo sapiens
tcaacaaatgctgtggcctttgtgtctgcccatgtaatagagggcagctgtgtacaggatgaatcggaaccacagaggcctctgtgtcattgtcaacaac

SEQ ID NO: 241394 - DNA, 101 bp, Homo sapiens
aacctagtgggtgtaatacatcatgaactgcagggtatttaccttgctgtggattgctgactggatggtccatcacttctggaggaaaggaaaggacccgg

SEQ ID NO: 241395 - DNA, 75 bp, Homo sapiens
ccgtgtcctcccccgcatgacccccttggttacccatgcagttgttactgtaccagcctattttaatgatgccca

SEQ ID NO: 241396 - DNA, 98 bp, Homo sapiens
gacgcgcccggcccggagcccccagcgcagcggccgcgtaccttctccaggcaaattccgttcccctgcagcaccatctcctttggctcttcggcaac

SEQ ID NO: 241397 - DNA, 75 bp, Homo sapiens
cggcggccaatcacagtccactttggacagagtaaccagagagcacagagaaatgctggtgaaactggccaaaca

SEQ ID NO: 241398 - DNA, 82 bp, Homo sapiens
cttcctcttgctgccagtggtagcgctcgtctggcggagctggtcacccacaaaagctgtatataatgccagacattggaat

SEQ ID NO: 241399 - DNA, 98 bp, Homo sapiens
ccaggaaagggacatctgctcctccaaggcagagcggctcccccctttcgttttttacaggctggtggataatgattgatgcagctgtggtgtatcct

SEQ ID NO: 241400 - DNA, 100 bp, Homo sapiens
aagttgcaagagattccaaccttccagccccttttgaaagtttgcctgagaatacagatcaacccacagaacaaagcggatttccaaggcatctccccag

SEQ ID NO: 241401 - DNA, 96 bp, Homo sapiens
tgtttcctgagttgctgtttcttgggactgcgaagctatacaggctaagttggacggactagcgaagatccggactgctcgggaagctccatccga

SEQ ID NO: 241402 - DNA, 100 bp, Homo sapiens
acaactcgacctcctatgactctgcagttaggaataactattcgaccactggtggagtttcttgatgtcaagaggtccaataagaaacaacaagctgtca

SEQ ID NO: 241403 - DNA, 101 bp, Homo sapiens
cgggactcagtcccatcactccaaggagagaagcatcaacaacagcaacttgtgattggcggtgaccggatattcagttgcacatccccacatcaatgcac

SEQ ID NO: 241404 - DNA, 90 bp, Homo sapiens
attaccacgagataggcaatacgaaaggctgtcaccttgaactgtgcccacagtttctgctcctactgtatcaatgaatggatgaagcgg

SEQ ID NO: 241405 - DNA, 74 bp, Homo sapiens
aaaaagtaccatcatttgaaacagcggggatctgatgagcttctttcttctggcatcattaacggaccttttac

SEQ ID NO: 241406 - DNA, 75 bp, Homo sapiens
gcaagagtccacaaagggacctgatgaagcgaagatcaagaggctgacgcttgtgcttgccctggcaaccctgat

SEQ ID NO: 241407 - DNA, 75 bp, Homo sapiens
catcacccaggcgcggagggaagacgccctggtgctcaccaagcaagggcagcccaatggatccaatggtgatga

SEQ ID NO: 241408 - DNA, 75 bp, Homo sapiens
tccccatgtggcactccaaacaacggtgtgtgagatcatcgagagccccctctttctgaagttgaaccctatgac

SEQ ID NO: 241409 - DNA, 75 bp, Homo sapiens
ggagaacctgcagctgaaatccaagcttcacgacctggaattgggcttccgagtggacctgccaatcaagtcggc

SEQ ID NO: 241410 - DNA, 50 bp, Homo sapiens
tacatcgtgggttacaaccaatgacggagtcttgctctgttgcccaggct

SEQ ID NO: 241411 - DNA, 76 bp, Homo sapiens
gaagctccgggatggtgatcgatgaagttgcggagaataatgaacatgatgtcacttctactgaattagatccctt

SEQ ID NO: 241412 - DNA, 50 bp, Homo sapiens
ttctgagaccacagtttacctcagagtctcgctctgtcacccaggctgga

SEQ ID NO: 241413 - DNA, 73 bp, Homo sapiens
tcattggccacctacagaaacaaaatgtcaacaaattgatggaataatgcatatactgccatgtcagattcct

SEQ ID NO: 241414 - DNA, 51 bp, Homo sapiens
ctggaagagtcgctggccgaagttgtatcacggactgattcaccgagccca

SEQ ID NO: 241415 - DNA, 85 bp, Homo sapiens
ccgccatccgggagaagctggcctgggccaagtgccggatggagtgctgtgatgtgccagccgagacactctacgacgtcctaca

SEQ ID NO: 241416 - DNA, 83 bp, Homo sapiens
ggaaaagacctattatgagaggcttccatatcgcttgatccagctggaggccttcctgagccgcctgtgctgcacatgtgaag

SEQ ID NO: 241417 - DNA, 86 bp, Homo sapiens
ggatttgttaaggattccaagtaactcttatttgtgtgtcccggcatggatatccggaacaacctcactaggttgcatgagctgga

SEQ ID NO: 241418 - DNA, 137 bp, Homo sapiens
ccgaccttccttcgagtctgtttatccgttgcagcctcccttccccacgacggggcgcctctgcaactcacaaatggagatttacagacagtcatctgggtggaggacacccttttgggatcagcactgaaagtgac

SEQ ID NO: 241419 - DNA, 100 bp, Homo sapiens
tcaagagaaatggagcccttctccaagattctgaaggaagatttccattaggtaatttgtttaatcagtgcaagcgaaattaagggaaaatggatgtaga

SEQ ID NO: 241420 - DNA, 90 bp, Homo sapiens
ctgctgcaccgacctcgacgtcttgcctgtgtcccacttgttcgcggcctataggcccagggccccggccagtgcccagccccgctggga

SEQ ID NO: 241421 - DNA, 50 bp, Homo sapiens
gacggacaagcacagtcttcggaagattctcagagagagttcaacagcag

SEQ ID NO: 241422 - DNA, 100 bp, Homo sapiens
tggaggtccaagtgctgcaagggagattgctgcgatgattgacactgagtttgccaagcagacctccctggacgcagtggcccaggccgtcgtggaccgg

SEQ ID NO: 241423 - DNA, 83 bp, Homo sapiens
caaaaagcggcggccgttggaggtggctgcggcagctgtgcctccggagccagcgtggtggccatagacaacaagatcgaaca

SEQ ID NO: 241424 - DNA, 50 bp, Homo sapiens
ctccagagtagctgggattacagatggggcacactgagaggagcacaagg

SEQ ID NO: 241425 - DNA, 97 bp, Homo sapiens
ctgctggttagtgtgctctgagggagggtccgagccagccgctgttttgccggaggagcccctcaggccatcaaccttttcggccttccttgtcccg

SEQ ID NO: 241426 - DNA, 100 bp, Homo sapiens
ggctgaggaggcggcggcggagatctggggtgctgaaaagtcacccaccacttcagctgaccttaagtcagacaaagccaactttacatcccaggagacc

SEQ ID NO: 241427 - DNA, 100 bp, Homo sapiens
ctggagttcttgaagagagataaagtggatatcaaagtattgcagagtgccttagcagccatccgacatgcccgctggttcgaggaaaatgcttctcagt

SEQ ID NO: 241428 - DNA, 75 bp, Homo sapiens
aaaaaatttcaggattggtactacaagttttctggatatgccgcagaaggatccgtgccagaagcaagcctgtga

SEQ ID NO: 241429 - DNA, 100 bp, Homo sapiens
cttcaagcttaggaccacccaccatgcctatccagactccctgccctcggaccctgtacagccgcagtatggggcatggctcagcctggtggaccgtgcc

SEQ ID NO: 241430 - DNA, 50 bp, Homo sapiens
gtacgcggcactcagcggccagaaagccaggtgctgcccacctacgacag

SEQ ID NO: 241431 - DNA, 100 bp, Homo sapiens
caccgggatcgtgaccgagaccgtgaccgagagcgtgaccgagagcgcgaatatcgtcatcgttagaagttggagtgcttagtgcagttggtgagagcgg

SEQ ID NO: 241432 - DNA, 100 bp, Homo sapiens
cttcactttcttcattcacaatcccaagcgccaggaccttgaagttgagccttccttgaatccagaagctggcaaacagcatcagccatgcagacctatt

SEQ ID NO: 241433 - DNA, 112 bp, Homo sapiens
ctcgagtccaccctccgggccttctgcccctgatcgcttggttttccttgcagtcgcctgctgctgtcgtcgggagtaccttctccaggcaaattccgttcccctgcagcac

SEQ ID NO: 241434 - DNA, 100 bp, Homo sapiens
gtcgttgccttgtatttccagagaacagggaaggatggagacgctgaaggataagaccctgcaggagctggaggagttgcagaatgactcggaggcgatt

SEQ ID NO: 241435 - DNA, 88 bp, Homo sapiens
tctgatcgggtcttccttcatattcctgtcttggtcacacagataagttcaaccaatcatccagtgaaagtcggactgtccgatgcat

SEQ ID NO: 241436 - DNA, 82 bp, Homo sapiens
gacgctgccagcatcgccgccgccagattgtcactgctgttccaagggcacacgcagagggatttggaattcctggagagtt

SEQ ID NO: 241437 - DNA, 100 bp, Homo sapiens
gatgagccaggggacacagaagagaagcccactatctcatttaatctttacaactctcttgcaaggtgccctttaaggaggcagaattacgattatgcag

SEQ ID NO: 241438 - DNA, 100 bp, Homo sapiens
gtggtttcgactggatatctcttttaacggaggccagttcatcagagaagatatgaaatataaagatgctactaataaacacagccatctgcacagagaa

SEQ ID NO: 241439 - DNA, 90 bp, Homo sapiens
cggggcgcccgcgcgcggggaccccacgggagtggagactgctgcacggactctggaaccatgaacatatttgatcgaaagatcaacttt

SEQ ID NO: 241440 - DNA, 100 bp, Homo sapiens
caagaaagaccatcaagtttaccagcctggtctccaagtcctctcctaagaagcctcgtggacgtaacatcttcaaggcccttttctgctgttttcgcgc

SEQ ID NO: 241441 - DNA, 87 bp, Homo sapiens
aaacattaccgtcatattccacccattactaaggttgtttttgagcacgttcactctcgcagtgtcagctggggctgttttgctttt

SEQ ID NO: 241442 - DNA, 100 bp, Homo sapiens
tgaaaacatcctggaatcaaatagtgttacggcaacaagaaacaggtggcatctgcatcgcaccacggccctcggaagaaggggcggaaatcctccctgc

SEQ ID NO: 241443 - DNA, 99 bp, Homo sapiens
ttctcccaccaaaagccctttcaagataccaccggtaactttcatcaatgaaggtgaccaagaatatggcccaggtgaccaaagccctggacaaggccc

SEQ ID NO: 241444 - DNA, 100 bp, Homo sapiens
caatccctgccttttgagtccaggtggtactccccgctggccgagcagttctcccaccagttcccatctcatgacctgccgtccgttcttgccaagttct

SEQ ID NO: 241445 - DNA, 90 bp, Homo sapiens
gaatcaaagataaatccaaatactgcatatcagaaacaacagcgtgaagacacagcgcatctccccgctgtaggcttcctcccacagaac

SEQ ID NO: 241446 - DNA, 74 bp, Homo sapiens
caaaaatgtgcatactcacagagttagagagagggatggtgaggagctctacggtgactttgaagacttggaaa

SEQ ID NO: 241447 - DNA, 130 bp, Homo sapiens
cttttttcatttccatttctaccttgtatgcctcaatttgctggatttaagcactgctgcactttatgagacatccacgacagcgatggcagttccagcagcagccaccagagcctcaagagcacagcca

SEQ ID NO: 241448 - DNA, 75 bp, Homo sapiens
ggccttccagctgtttgaccgaacaggcattgaatgccccagaggagcccgaaacctcccaggcttggtgcagga

SEQ ID NO: 241449 - DNA, 50 bp, Homo sapiens
gggaccacggtcaccgtctcctcaggcataatcaccagcaacacccggga

SEQ ID NO: 241450 - DNA, 98 bp, Homo sapiens
tcagcctgaatactttgctgttggatactatggacagggctttccttctttcctacggggcagcaaggagcgcttccactggcagagccacaacgtga

SEQ ID NO: 241451 - DNA, 75 bp, Homo sapiens
taaagaggatcctgccaacattttacagctccataatgggagaagtaaagaacaaagacttaaggaacagcttgg

SEQ ID NO: 241452 - DNA, 87 bp, Homo sapiens
ctgggcccacagtcgcgccgcgctcgaccgcctggagaagctgctgcgctgctcgcgttggcagctgttgtgctgtgtatggacgtg

SEQ ID NO: 241453 - DNA, 100 bp, Homo sapiens
tcggccatgagccgctacatactcatcatggggctcctgtacaagccagagactgctgctactttgaaacgtacgatagaggccctgatggacagaggag

SEQ ID NO: 241454 - DNA, 80 bp, Homo sapiens
ttggccaggggaccaagctggagatcaaaccagcaaagtggggcaccaaggccctgtgctaagcactcataatcctctgg

SEQ ID NO: 241455 - DNA, 90 bp, Homo sapiens
ttcaaatgctagcagacacggtggctactctgcctcggggacgaaagcagggtttggattcaggatttgttcctagtgtccaagattttg

SEQ ID NO: 241456 - DNA, 113 bp, Homo sapiens
cagctgaagagcgacaagccgctggcagccgcggatctcaccgccgctcaggggggatatgagactttctactcggaatatcctgagtgttgcgtggatgtaaaacccatttc

SEQ ID NO: 241457 - DNA, 100 bp, Homo sapiens
gcgcggtgctgccggtggagcttcagagtctccgggaccattatggcagtcaagtggacgggtgggcattcttctcctgtcctctgcctgaatgcaagta

SEQ ID NO: 241458 - DNA, 108 bp, Homo sapiens
acggtgatgagccgggcctggcggacgcggcgccatcgcagtcaggggtgagcccctccagactccgaataggagatcaagagtttgattcattgcctgctttactgg

SEQ ID NO: 241459 - DNA, 75 bp, Homo sapiens
ccgagaaccgtcagtttgagccagatgaaagttcgtcgctgcttcctgtgctccaggagaggacatctcctgtat

SEQ ID NO: 241460 - DNA, 75 bp, Homo sapiens
tgtggctgctaccccactcctgggccgtccctgaagagatgtaaaacagatgctcttgaagcttgtagaactccg

SEQ ID NO: 241461 - DNA, 80 bp, Homo sapiens
gtgaaaccagtgttgctcaactctaagttacctgtggatatccttggaagaatcacccggaagttcaggctgaattctga

SEQ ID NO: 241462 - DNA, 100 bp, Homo sapiens
gatgcacatcaaatacatgggcagccacatccctgagcctgagaaattggtgcatcatattctccaggatatgtacaaaaccaagaaaaagaagactcga

SEQ ID NO: 241463 - DNA, 50 bp, Homo sapiens
ctacaagaatctcattatactaggcttcctttctgtctgaccagcctgag

SEQ ID NO: 241464 - DNA, 85 bp, Homo sapiens
ggagctccaggcccgtcggcgcggaggtgtcagttgtacccgaggcgttctcagcagcagcaagtacctgtggtggatttccagg

SEQ ID NO: 241465 - DNA, 89 bp, Homo sapiens
cagctcagcgtgcccatcccggggggcagcaacggcgacatccagcaaggtttaccaaagatgcaggtcattaggaactattctggaac

SEQ ID NO: 241466 - DNA, 82 bp, Homo sapiens
ctcagttggaagcagccgatccagcctgcggagcctgtggggcagaaagaatcttcaagagggagacatagggaaaaggaag

SEQ ID NO: 241467 - DNA, 101 bp, Homo sapiens
tggactgttgcgggccccgggacctgggctgggaacccgcggtggagcgggacacgaacgtgggatcatagacggtatttctatgtaaacgaacagtcggg

SEQ ID NO: 241468 - DNA, 100 bp, Homo sapiens
acgtgatactcacacagtggcttctgctcaccaacagatgaagacagatgcaccaacgagacagatcttggagctgccctggaaggaggaaactttcttg

SEQ ID NO: 241469 - DNA, 75 bp, Homo sapiens
gggaaacctgtgcctccagacactgctccctgtgaaattctgaagtttccaaggcaggaaaggtaaagagacaaa

SEQ ID NO: 241470 - DNA, 74 bp, Homo sapiens
caacgtggacgtggtcaagtacgagagtggccctgacggaggggaggaagttgtacctacaacagatcatatag

SEQ ID NO: 241471 - DNA, 90 bp, Homo sapiens
accaattcccttggtcaaagaagtgaccaaaaagtcatctacatttcagcacttaaatatagatccggtggtatggatgagaaaacaatt

SEQ ID NO: 241472 - DNA, 80 bp, Homo sapiens
ggacggcacaccctacgttaccgtgctcaagcctcccgcgacgatgcccctcaacgttagcttcaccaacaggaactatg

SEQ ID NO: 241473 - DNA, 98 bp, Homo sapiens
gggaggccggccggtgccagcacctttcggcttctgagacggcggcagcagcggcattcaggcaaagcactggcatattgaaaactgccttttccttc

SEQ ID NO: 241474 - DNA, 82 bp, Homo sapiens
gccaatctggctagtaaaaaggacagaattgaatcacttgaaaagaggctcgagatggataatgtgcttatggtgtaaccag

SEQ ID NO: 241475 - DNA, 75 bp, Homo sapiens
cagtgggctctggaacaacacggtgttcatcttttctacaggtttcaccaaaactcatgccaatgcagcagatcg

SEQ ID NO: 241476 - DNA, 97 bp, Homo sapiens
ggaggccactagcagccagttccggcccgaggacaccgactaccagcaggagggagccatggatttgctgcgggagctgaaggccatgcctatcacg

SEQ ID NO: 241477 - DNA, 100 bp, Homo sapiens
gatgtaccatcctgcctactgggtcgtcttctcggcgacaactgccctgctcttcatcccagtgcctgaaacagtatgttgagctcttgatcaaagaagg

SEQ ID NO: 241478 - DNA, 75 bp, Homo sapiens
aattccaacaacttcaaagtaaaatcagtttaatttcagaaaaggagtccatagaggccactgtattctattgaa

SEQ ID NO: 241479 - DNA, 100 bp, Homo sapiens
atcaaaggtcacctggaaattgccttattggaaaaacatttcttaccaccaagaaggaccgagccccgcgggaggtgcagaggctgtggcagaggccgtg

SEQ ID NO: 241480 - DNA, 90 bp, Homo sapiens
ggaaccaggggacctccctcacggggaggacacatgggaacagcatatgccatatatgagctggctgtggcttcatttcccaagaagcag

SEQ ID NO: 241481 - DNA, 75 bp, Homo sapiens
tcttgccctcatcctggttctggaatcctcagttcaaggctggaatgagctgctcatcgcctccttctcccaccg

SEQ ID NO: 241482 - DNA, 50 bp, Homo sapiens
acgagatcttccgccactacgaataagaactccattttctgttgatgtgg

SEQ ID NO: 241483 - DNA, 75 bp, Homo sapiens
ttcagagcagtctagcgttggcacccaacactcctattcagactcagattgatggacaacttttcttaattaagc

SEQ ID NO: 241484 - DNA, 98 bp, Homo sapiens
ctcatcagagggaagatctttttcctcaattggtgtgatgaatgcagactctgctaccattttggctgtttggatcctcctttgaaaaagtctcctaa

SEQ ID NO: 241485 - DNA, 101 bp, Homo sapiens
ccgggcctcaaaatggccacacgcgtacccccgtagcggaaaaacgcgagcccacaccttaaccgtgctcttcatcctcacctgtacgcttggctatgtga

SEQ ID NO: 241486 - DNA, 100 bp, Homo sapiens
tgggattcctacacaatgcgttgcctggctccacgccctgctgggtcctacctgtcagagccccaagttggatatgtcaagtgaccagatagctgccaat

SEQ ID NO: 241487 - DNA, 100 bp, Homo sapiens
atcccgcagtggaacaacaatgcctgccttcacgatgaatttttagatgtgatctactggttccgacagatcattgctgtggtcctgggtgtcatttggg

SEQ ID NO: 241488 - DNA, 88 bp, Homo sapiens
aatacctggcattgacctctcagatcccaaacaactggcagaatttgctaggcattatattgtacttctagcaagtgcaccaacagaa

SEQ ID NO: 241489 - DNA, 136 bp, Homo sapiens
ctcaatatctgtcttcggtggactccttcggcagtccacccaccgccgccgcctcccagacttcccaagtaagaagcggaagaggagccgctggaaccaagacacaatggaacagaagacagtgattccaggaatg

SEQ ID NO: 241490 - DNA, 73 bp, Homo sapiens
gatgtgtgattcccactggtcgcctgcaggacttgattattcttagaaatgcacttgacctgcttttgccaaa

SEQ ID NO: 241491 - DNA, 100 bp, Homo sapiens
ggaaccttcaaaggcacttcgtggggtcacaggtgcggtggctactaaagttcgaaggcacgatatgcgtgtccatccttaccaaaggattgtgaccgca

SEQ ID NO: 241492 - DNA, 82 bp, Homo sapiens
gtcgcgtctcggaaaccggtagcgcttgcagcatggaagcgccgcggagccatcaacagcaagcagctcacctacctggaga

SEQ ID NO: 241493 - DNA, 73 bp, Homo sapiens
caactgaagcaaagaggaaagcagacccatggctcaggaaacaaagcttagcaggagaggagagccagagaag

SEQ ID NO: 241494 - DNA, 100 bp, Homo sapiens
ctttgcctttgttacatttgcagatgatcaggatgaatagccttggaagatagagatcgtgtctccctccagagcaaagggcagattagcttcaatgatg

SEQ ID NO: 241495 - DNA, 83 bp, Homo sapiens
agcttcttggtacattcacaaatacgtacaggttttagatggagcaggattagatattgatttccatcttgcctctccagaag

SEQ ID NO: 241496 - DNA, 87 bp, Homo sapiens
ggaaaacatatattggagctacatggatcctgcctagggtagttaaaagacgagtgaatgctctcaaaaacctgcaagttaaatgtg

SEQ ID NO: 241497 - DNA, 82 bp, Homo sapiens
cttgggggtcgagcacataacggggttcgggtgtctcgtgtgtgaacatcacaggtgacttaagagattaaaattaatttgg

SEQ ID NO: 241498 - DNA, 82 bp, Homo sapiens
tcatcactcccttggagaagtttcgaaaggaacagatcggggctgccaagttgcagaatgaagaagagtctggagaacctga

SEQ ID NO: 241499 - DNA, 90 bp, Homo sapiens
cgctgcgggcccgggccatggccgccgccgatgccgaggctgctttgaatgctgcatcaagtgtctgggaggagtcccctacgcctccct

SEQ ID NO: 241500 - DNA, 100 bp, Homo sapiens
aataagactctttaaagaaggcaaggagagaatgtatgaagaacagtcacaggacaggtaatcacagacctggaggagcagctaaaccagctgaccgagg

SEQ ID NO: 241501 - DNA, 75 bp, Homo sapiens
aacaataacaagactgtccttcggacaagttttaggttctccgtgctggagcaggtcagcgtcctcttactccca

SEQ ID NO: 241502 - DNA, 51 bp, Homo sapiens
atgcagtggataatagtaattgcacttttcaggattagaagaggctgtgta

SEQ ID NO: 241503 - DNA, 95 bp, Homo sapiens
aagcagcatagagaatgagatagccgtcctgagaaagccaagctataacatcagaaatggtgaatgaatacaagaaaattcttttgctgaaagga

SEQ ID NO: 241504 - DNA, 100 bp, Homo sapiens
ggcgtggaggaagaggcattgaggactttccttacctgtttttccagctcacccactgccagcagaggtatcatgatattagctggtttgacatcaagtc

SEQ ID NO: 241505 - DNA, 90 bp, Homo sapiens
ctctttccgccctaatggaggtctccagtttcggcagtatttggcagtcgtattcagagataaacccctggagctatgggatgttaggac

SEQ ID NO: 241506 - DNA, 74 bp, Homo sapiens
taaagacatcttaattgggcacgaaagaggttgtaaagaagaaagttctaccctttctgtcaaaatgaagtgtg

SEQ ID NO: 241507 - DNA, 50 bp, Homo sapiens
ttgaacaaggcaaatatggttttgtcttccccagctcctcaggaggggtc

SEQ ID NO: 241508 - DNA, 104 bp, Homo sapiens
cccgctgcccgacgagcaggacttcatccaggcctacgaggaggtgcgcgagaagtacaaagacaatgcagatcttcgtgaagactctgactggtaagaccatc

SEQ ID NO: 241509 - DNA, 97 bp, Homo sapiens
ttttaagtgtggagcgagagcacacaaagaatgtttgggaagagtagacaattgtggcagagttaattctggtggaaaaccaattctgtgtcctcgg

SEQ ID NO: 241510 - DNA, 83 bp, Homo sapiens
cgtccttccggctccgtcgtggaagcaggactgcgccgcgtcttcctcaaggttatttggaaatagcggtgcttgcagcgctt

SEQ ID NO: 241511 - DNA, 51 bp, Homo sapiens
gagaactatagcaatctggttttcttgggggaaagctctggcaatttaaat

SEQ ID NO: 241512 - DNA, 100 bp, Homo sapiens
tcaaaagcaagatatactactaactttgaaatggaataagggcaagcaggaggacttcaagacgacagttctggagggtatggagacggccaagcatcag

SEQ ID NO: 241513 - DNA, 90 bp, Homo sapiens
cctcaagaagacaggcaaggaggtggtgctggaggtttgtcccatgaggagcacccccatagccatcctctctatggacatggtgtatgc

SEQ ID NO: 241514 - DNA, 75 bp, Homo sapiens
cgggtggaatctgcagaaatagaagtggtacatgccagagtcctgctctcccggcccttgtccgtccaccagccc

SEQ ID NO: 241515 - DNA, 100 bp, Homo sapiens
cgccagttccatccactcagccgcagctcacagaaggatcacatttcatgtgtgtgtagtcttagaagaagagatatctgaagagattataggatcaccc

SEQ ID NO: 241516 - DNA, 75 bp, Homo sapiens
cggagagccccggagtgagcggagtagcgagtcggcaacccggagattcactttataggaacagcttcagcttca

SEQ ID NO: 241517 - DNA, 100 bp, Homo sapiens
cggactcactgccctgcaccaggatgttgagaaagagaaggaaacccacagttacctcagcaaagaggagatcaaagagaaagttcataaatacaactta

SEQ ID NO: 241518 - DNA, 75 bp, Homo sapiens
attgggctgagcagaggacgacatgttgcttttcgtggaggtaccaaaaactgtggaagagttatgtgaaacttc

SEQ ID NO: 241519 - DNA, 100 bp, Homo sapiens
atatccttctcaaccttgtgggatgtgaaaactctgttactgaaggtctggggtcctgaggctgctggcagactatgggtacaacggccagcacagccca

SEQ ID NO: 241520 - DNA, 98 bp, Homo sapiens
ctgcgggcgtcgggcgcgggcaaggccatcggcgtcctgaccagcggcggcgacgcgcaagaggagcccaaggtgggcatcaagaccatcaaggtgta

SEQ ID NO: 241521 - DNA, 90 bp, Homo sapiens
cattgcaaggctttgttatagtcatggtccactgcattcttcggagagaggccacgtttaagggatggatggatattatgtatgcagctg

SEQ ID NO: 241522 - DNA, 99 bp, Homo sapiens
gtgcgagaggaccaacggagcgctgaggcgggcgttttcttggatgaattgcttgctttggagagccagcccctgggcaacaaagtggaaatggagatt

SEQ ID NO: 241523 - DNA, 97 bp, Homo sapiens
gcccaccgcgcactcggagatgcagccgctggtaaagagtgtgtacaacagttagctgaaaacaccaggtatttcaggagacgcctgaaagagatgg

SEQ ID NO: 241524 - DNA, 82 bp, Homo sapiens
atttgctaaaggagcttaagaatattcctatgaccctggaattactgcagttaatcagctgtgttcagcgaatacttatgaa

SEQ ID NO: 241525 - DNA, 75 bp, Homo sapiens
gggaaggcgcgagtgaggaaaggaggtactgtaggaagtacatgacctgctcagtgactatgagctcaaatactg

SEQ ID NO: 241526 - DNA, 90 bp, Homo sapiens
tgaaagctgctcagtcccgagacttcacagtgaaagacattatctacctccatccttcaaatataagagttcggaccgcccagcacacaa

SEQ ID NO: 241527 - DNA, 50 bp, Homo sapiens
gccccagctccgtctcggcggcggcggagtaaaggtgctagtgctggaag

SEQ ID NO: 241528 - DNA, 98 bp, Homo sapiens
catccttgtctgtgaagctaaactcaatgctgctgtgtgggaagaagatttgtaaagaaaactcttagggaccagttactctccacaagaaaattcac

SEQ ID NO: 241529 - DNA, 97 bp, Homo sapiens
agacaggagccctggaatgtgaagagacatgagaccatagccaaacccccaggtgtcatggagaaactccagctgggcccagagattctgcagcggg

SEQ ID NO: 241530 - DNA, 100 bp, Homo sapiens
atcccttggagctttcagacctgcaggagctgtgggatgatctctgtgaagattatttgccgctccgggtccagaacatagataccctggagcgaatagc

SEQ ID NO: 241531 - DNA, 100 bp, Homo sapiens
ctggtatagtcccaggctggagctgggtaccacctcatgtacaagccacctcccaccatggagatccaggctcgcctcctgcagaacccaaaggatgctg

SEQ ID NO: 241532 - DNA, 100 bp, Homo sapiens
actggagggaccgcctgctgaagatgaaggcctgtggcttgaacaccctcaccacggtcagtatagaccttctgatttgctgtgccctgagacatatgtt

SEQ ID NO: 241533 - DNA, 100 bp, Homo sapiens
aaaagaagcagttcctgatgttacaaatgaacaaggatctcccagggcatggatttcattggtcgcgacgccctcctgcagcagaagcagaatggagtgt

SEQ ID NO: 241534 - DNA, 75 bp, Homo sapiens
aagaagttgcgaaggatccccaacggggaggccaacgtgaagaacagcatctccctctcatcagcactgttgaaa

SEQ ID NO: 241535 - DNA, 100 bp, Homo sapiens
cgggagctgtgatgccatcagcggcctgtgtctgtgtgaggctggctacgtgggcccgcggtgcgagcagcggaaggtgctgagctactggtgcttcagt

SEQ ID NO: 241536 - DNA, 83 bp, Homo sapiens
ggccgagcgggcggcttcctggcctgggcgctccggtggcggcggagcaggttacgggcaggacttgagtggcttcggacagg

SEQ ID NO: 241537 - DNA, 95 bp, Homo sapiens
ttctggatgtgcagcaatcagatttatcattcggttgctgtctctgctggccttcatctgtgaagaagttgtatcacaatgtactttatgtggag

SEQ ID NO: 241538 - DNA, 88 bp, Homo sapiens
atctggaggagcagttgtctgatgaagagaagcaaggtgtccctgccttcactgtgctccaacctgaaggtcccctggcagtgctgag

SEQ ID NO: 241539 - DNA, 75 bp, Homo sapiens
cctacatcatgaagaccatgggcatgtcctccgacgacgcctacaggaggaggagaacggggctgaggaggaaga

SEQ ID NO: 241540 - DNA, 100 bp, Homo sapiens
caggactaagagaagtcacaaaacagcagatttcccaagagcagcggaaaatgatccagtcacagccgtcattgtgtggcactggacggggaatcaagag

SEQ ID NO: 241541 - DNA, 74 bp, Homo sapiens
ttgtacttacaaagtccatgctaacctactatgagggtcgagcagagatatttcagcagttgaatcagttgaat

SEQ ID NO: 241542 - DNA, 98 bp, Homo sapiens
caactcaaaattggacccaacaaagaccactctcctcaagctgaagacctaactgcagcatgtctgtatttggagatggggcctctacagaagtcatt

SEQ ID NO: 241543 - DNA, 74 bp, Homo sapiens
cactggccgtggagcccatgaagtttgtctacagaggcaggccataaaattttgagtagaaaaatccagaaatt

SEQ ID NO: 241544 - DNA, 90 bp, Homo sapiens
ctactagaccatgggccaaagagggtcgacctgcaaacttgcaagatgtatcggcaagcagtgtaaacggaggacttggggaaaaaggac

SEQ ID NO: 241545 - DNA, 100 bp, Homo sapiens
caagatgccgatgcctgagccctgtgagctggaggaaaggttcgccctggtgctggtgtgcctgcacaggagacagcaccagccaagctgattgtgtatc

SEQ ID NO: 241546 - DNA, 100 bp, Homo sapiens
cggagatcacctgctgccccgcagacccctgtcccttcctcccggaccagcagctagagatcctaatgctttggctggccagaatggccctgaccatgct

SEQ ID NO: 241547 - DNA, 100 bp, Homo sapiens
cgccgcctgaggaggcgagctagccgggagttacaccgccaccgccaggtcattcccaaaagcaagttcgtcttggtgaagttcgacacccagtacccct

SEQ ID NO: 241548 - DNA, 75 bp, Homo sapiens
ctgcccgctggcccctcgcgcgtgaggatctatctcagcataagcagtactataatggatgtagacagcacaatt

SEQ ID NO: 241549 - DNA, 141 bp, Homo sapiens
gcttgccgccggcggccaagcagccaaccatgctcaacttcggtgcctctctccagcagactgcggtactccaaagattcaggtttactcacgtcatccagcagagaatggaaagtcaaatttcctgaattgctatgtgtc

SEQ ID NO: 241550 - DNA, 83 bp, Homo sapiens
ccctaagccagaggacccagctaagccacgttcaacttcctgacctgtcaggcactttgctgatggtggacagtgaggaggag

SEQ ID NO: 241551 - DNA, 74 bp, Homo sapiens
gagaaagagaaaggatttctaagcaggaactccccaggttttttgcatgtctgacacccatgactccacctgga

SEQ ID NO: 241552 - DNA, 101 bp, Homo sapiens
acaagatgtcacctgaaagtggtcacagccgcatctttgaaggtgattaaagtatacagtgaagatgaaaccagcagggctttagatgtacccagtgacat

SEQ ID NO: 241553 - DNA, 100 bp, Homo sapiens
gatcaacggagagctgacctcagctgacagagaaacagcagaatgatgccaatgggtggaatgatgccacctggaccaggaataccacctctgatgcctg

SEQ ID NO: 241554 - DNA, 75 bp, Homo sapiens
gtgaggaaaaacgagccaaacttcgtgaaattgagaattaaacatgtggacatgaaccaaaagagcatattatgg

SEQ ID NO: 241555 - DNA, 51 bp, Homo sapiens
ctgctgtcaatggtgttgtccagtcgatggccaggtggtcttcataaacta

SEQ ID NO: 241556 - DNA, 74 bp, Homo sapiens
ccgagggcggcgcaaggcctgaggcccagcacagagaatgctgtgtatacctttgggctgggacaatttggtca

SEQ ID NO: 241557 - DNA, 75 bp, Homo sapiens
ctatgagaactacaacaagttcatctcagccacaggttccccacattggcagacaaaattagaagcggcacagaa

SEQ ID NO: 241558 - DNA, 134 bp, Homo sapiens
gcggagcagcttccccccgcgcctctcttcgcctcgcctcgggacccgcggtccccgctcttgctggtgaatccgccatactacatcccgctggttgagctggtcccccacccggagacggcccctacgacagt

SEQ ID NO: 241559 - DNA, 87 bp, Homo sapiens
tcaagccttcctttgatgtgaagatcatcaatgggctgcgaaggtttgaaattgagtaccagggggacccggagctgcagcccatcc

SEQ ID NO: 241560 - DNA, 75 bp, Homo sapiens
agacccagtacagctggacgtttgccgtccactctgagtttcagggtctagccattgccccctgcctgctgctcc

SEQ ID NO: 241561 - DNA, 100 bp, Homo sapiens
cagccagtaccgggcggaggcgtcagagccgcgcaccgcggacgagcaggcccaggagtacatcgatgcccaccctgagaccatcgtcctggacccgctc

SEQ ID NO: 241562 - DNA, 95 bp, Homo sapiens
tgggattggagattccacccaaacttgctggtcactgggagggtttgccttcccggattgggcctacaagccagagtcgtcccctggctcaaggc

SEQ ID NO: 241563 - DNA, 100 bp, Homo sapiens
ctctgagaccgttgggcaaagctgcttccctgttgctggagatcctgggcctcctgtgcaaaagcatggctaaagaacgtgccaatggaatggagcttga

SEQ ID NO: 241564 - DNA, 82 bp, Homo sapiens
cagaggcttaaggtcttcagcggggcgctccaggaggcactcacaggcccaagtctgttttggtggtctgagaggaaaaaag

SEQ ID NO: 241565 - DNA, 136 bp, Homo sapiens
gtgctggtgcgtaataagaaggtgggcgttatcttccgactgatccagctggtggtcctggtctacgtcatcggatattttatccagaaacaacagatgtctatgatcggaaaaacataccaagaatgatatattg

SEQ ID NO: 241566 - DNA, 80 bp, Homo sapiens
cgagagtggccctgacggaggggaggaagttttaaaatcaaagatgggaaaatcggagaaaattgcccttccccatggcc

SEQ ID NO: 241567 - DNA, 75 bp, Homo sapiens
cttctgaaggcatcagaaagaagctggtggaagctgaggtgatctgtgaaaatggttcgctattcacttgacccg

SEQ ID NO: 241568 - DNA, 122 bp, Homo sapiens
cgctggggacccgcgggggctgcgccgcgcccgcacccgcgccgcgcgccgaggacctcagcctgggagtgccatccgggtgacctgcataggttcctgcggggtctccaacaaggctaatg

SEQ ID NO: 241569 - DNA, 50 bp, Homo sapiens
gttcactctaggaggaacaaatacagatgcggaaaacgccatgcggtaca

SEQ ID NO: 241570 - DNA, 96 bp, Homo sapiens
gcactggtacctccaggacctggagtgtactggaagaaatggtgcagtccaggaagccaaattggcagagaatgcttgtaccctggctgacctgac

SEQ ID NO: 241571 - DNA, 74 bp, Homo sapiens
ggatcatggctgccgcgccgccgctacgggaccgcctgagctttctacaccggtctgcgggccaggcatcgaca

SEQ ID NO: 241572 - DNA, 121 bp, Homo sapiens
tgaagagcgacaagccgctggcagccgcggatctcaccgccgctcagggtgtccctggccagtgtccttccacctgtccacaagcatggggaacatcttcgccaacctcttcaagggcctt

SEQ ID NO: 241573 - DNA, 74 bp, Homo sapiens
attgcagtaaaaaatattggagatattaatcaagatggctacccagggttcttgatggtgctagacattcccca

SEQ ID NO: 241574 - DNA, 82 bp, Homo sapiens
ggacagtgggcagtgctcccggaacacaagctgtgaaacactaggcacaacgtgtttgattgctctgctatcagataaagac

SEQ ID NO: 241575 - DNA, 80 bp, Homo sapiens
tgttccgagggagaatatggaggccatttcacctctaaaaaatgggatgggttcaatcaattctcctgcttcaacctccc

SEQ ID NO: 241576 - DNA, 83 bp, Homo sapiens
tggacatcagccccaaacaggacgaaggcgtgctgaaggttgacatcatggacatatgtgagtccatcctggagaggaagcgg

SEQ ID NO: 241577 - DNA, 87 bp, Homo sapiens
agacctgccttccctctgggaatctggagcttcagtaacaggttgtctgcattcaaaagagcattctattaaagctaccttaatttg

SEQ ID NO: 241578 - DNA, 78 bp, Homo sapiens
gcaaaggcggctcgggagattcagccgtgaagcaagtgcagatagatggccttatgtcctaaacgatgctatatttga

SEQ ID NO: 241579 - DNA, 76 bp, Homo sapiens
tgtgaccccaacgaagagtggagaacggcaacccatccagatcaccatgccgatgggcctgcgggtgctgcaccgg

SEQ ID NO: 241580 - DNA, 83 bp, Homo sapiens
cgacgtcttgcctgtgtcccacttgttcgcggcctataggttgaaatcacaaagattagacacctttttagataggtgttctt

SEQ ID NO: 241581 - DNA, 100 bp, Homo sapiens
gaatgactcaagtctggacctgggacccactgcagggaaattggattccaagatccatcaaggagcaaagaaggggttaatgaagcagaataaagctgtc

SEQ ID NO: 241582 - DNA, 97 bp, Homo sapiens
cctggatcttcacacagctgcttccattggccagtatgaagtggtgaaggagtgtgtgcagcggttacattgattacccacctagtacaacatctta

SEQ ID NO: 241583 - DNA, 100 bp, Homo sapiens
ttttgttgaacaaatttgatttccggagtcagtcattttactgtcaagacatttcttcggcattctgcaacaggtctctaattaacagaagatggcaaag

SEQ ID NO: 241584 - DNA, 100 bp, Homo sapiens
catagcagggaataatttcaatttgaaaacaagtggaatagtgctgtcttccttggagaggagttcattacttcggaagtggtacaatttaatgatacaa

SEQ ID NO: 241585 - DNA, 82 bp, Homo sapiens
cgcagtttctcacgacgggccgagcctgccactatcaacagtacaaattctgaagtttgtaaacttgctgatggtggtggta

SEQ ID NO: 241586 - DNA, 75 bp, Homo sapiens
tgtgtctacggcagcctggggatatagttttgatggtacagtccaggtctatgatgccacatcttgggatggaac

SEQ ID NO: 241587 - DNA, 98 bp, Homo sapiens
ggcggccgggccgggctgggctgcggagcgcgggcctcggcggcgcaggttgaaatcacaaagattagacacctttttagataggtgttcttcagcac

SEQ ID NO: 241588 - DNA, 98 bp, Homo sapiens
gaagctgagtttcttcagaagctactgccaggctattacatggtatgttcgcaattcgtgctgatcatgattttgtagtacaggaagacttcatgaaa

SEQ ID NO: 241589 - DNA, 80 bp, Homo sapiens
ccgcagcaccatggcgaccaccgtcagcactcagcgcgggccggaaagatgaatgggagggctgattttcgagagccgaa

SEQ ID NO: 241590 - DNA, 83 bp, Homo sapiens
acagcagatgtaccctcagtacgccacctactattacccccagtatctgcaagccaagatattctatattgagcgcattatac

SEQ ID NO: 241591 - DNA, 76 bp, Homo sapiens
agcaaaccggggtctccctcccaggacacaggagtcaaggagtctcatagaagagaaagtcaatgaaattaaagaa

SEQ ID NO: 241592 - DNA, 75 bp, Homo sapiens
ttcagctgagattgctgcaattcgtcgtctcggagatgcagccaagaaagccatcagtaaattgacaaccaggac

SEQ ID NO: 241593 - DNA, 100 bp, Homo sapiens
ccacgatccagaccgcaattaacaatggtacaggcccgtggtcgagccagagctgatgagagcacctacgtcctggttgctcacagtggttcaggagtta

SEQ ID NO: 241594 - DNA, 100 bp, Homo sapiens
cagtggtcaacaatggagctgctgcagatacgtcggtaacctttccagagatgtgacagaagctctaattctgcaactctttagccagattggaccttgt

SEQ ID NO: 241595 - DNA, 100 bp, Homo sapiens
tcattcagtgttggcccagaaactacaggctgaaaagcatgacgtaccaaacaggcacgagataagctctggtagctgaagaacatctcacagtggacgc

SEQ ID NO: 241596 - DNA, 82 bp, Homo sapiens
ccggaacctggttgtccgagatcgctgtgggccttattggaaggagaaagtaatccagagatagtgatctgggctgagcacg

SEQ ID NO: 241597 - DNA, 75 bp, Homo sapiens
gtttgtttctgccagtgaaaaccaccaaaacaatccagctgttccctcagatactggctccaatactacagaatg

SEQ ID NO: 241598 - DNA, 100 bp, Homo sapiens
ctactcggaaaggaaacaaaattcgatttgcaaatcattcagtgaatcccaactgttatgccaaaggaatttttaccattcgcctgcccaaagaaacccc

SEQ ID NO: 241599 - DNA, 80 bp, Homo sapiens
gacagtcctcgtcagcactgactttcagctatggaatcgaatgcctaccgcaggaatgggatggcttttctagcctgctg

SEQ ID NO: 241600 - DNA, 75 bp, Homo sapiens
ggaggacctcacttccccggggtgtaataatgttaactgaggtaaatgagctggatggtatcccgttgatcctgg

SEQ ID NO: 241601 - DNA, 83 bp, Homo sapiens
gccaaatcacgcagccacagaggaggccagggaagctctagaggcgttttttggccaagggtttaaggaagaaatctctaaac

SEQ ID NO: 241602 - DNA, 100 bp, Homo sapiens
gaatcacacgtgtaactactacctgcagccagaggaagacgtgaccattggagtctgttgacaacacttactacaaagaggcagaaaaagaaaatcttgt

SEQ ID NO: 241603 - DNA, 101 bp, Homo sapiens
acttctatggtatggactacgcgacctccaaggatgcccgtgagcctgttgtcggggccagggcggcaccttcctacttctgcccagccacagccctcccc

SEQ ID NO: 241604 - DNA, 98 bp, Homo sapiens
tgccatgttgaccatcactttctgcctggaggatggaccaaagagatatagagatctgcccaaggagaatccatatgaggatgtggacttaaagagcc

SEQ ID NO: 241605 - DNA, 100 bp, Homo sapiens
ttcaccaaataagctatatactttggttacctatgtacctgttaccactttcaaaagtgaaaacactgaggcactgagacgcaaaataacttgcccaaag

SEQ ID NO: 241606 - DNA, 75 bp, Homo sapiens
actggatccacccagtgaccggacttctcacccccaggatgtcatcgagggtatttaaaccatgtcagagctgcc

SEQ ID NO: 241607 - DNA, 82 bp, Homo sapiens
gagagtgggaacatgacgcaggtgcaggtgtctcttctcgccctggcggggaaggcagcagcccagacgcggcacagagagg

SEQ ID NO: 241608 - DNA, 75 bp, Homo sapiens
tttgcattcaacattcaggctatcaggactgccattttcattaagaactgccacttagaggtaccaaaataaagg

SEQ ID NO: 241609 - DNA, 83 bp, Homo sapiens
gctccctctgctcttcctcccttcgctcgcaccatgatgatgataattccgaagaaggcttccacactattcattcaggaagg

SEQ ID NO: 241610 - DNA, 50 bp, Homo sapiens
atgaactaaataatggggttagtagagtttcactcttattgcccaggctg

SEQ ID NO: 241611 - DNA, 100 bp, Homo sapiens
cttccaagaaaccaacattcccaacagccaccaccaccaccagatggactcatctgatgatgtgagaagagttcagaggagggagaaaaatcgtattgcc

SEQ ID NO: 241612 - DNA, 100 bp, Homo sapiens
ggtctggcttgccaacaatatagtttggtgtttcggaagccaagttttccaagagataacttcaccaagatgtccagtgataggcaaaggtccgatgatg

SEQ ID NO: 241613 - DNA, 100 bp, Homo sapiens
atcctggtattttttggagcttccatcctggttcttccaaagtgcccggacccaaaacaggaaacatgcaagaaagcacttcagccaagcagaagggagc

SEQ ID NO: 241614 - DNA, 96 bp, Homo sapiens
gcccgtactgcacatcgtggtggtcggatttcaccacaagaagggctgccagaggctaagaatattgtacacaaagattcttgatgttcttgagga

SEQ ID NO: 241615 - DNA, 100 bp, Homo sapiens
tctggatatccttcacttcaaaatagcttcataaagtcagggtttgggggagataccattagatactccttcagcaaaaggaagacgatctcatactggc

SEQ ID NO: 241616 - DNA, 100 bp, Homo sapiens
acttagccaccatctttctggcggttgtgatggccttattgagcctgcactgcttagcagcctttaaggcctggacgactccaccggggggacccccctc

SEQ ID NO: 241617 - DNA, 100 bp, Homo sapiens
ttcgacttagccctgctccaggaatgggacctcgagtcactgtgggctcaagggttcttgttgatgcacgagataagcttggcattccttggcagtattc

SEQ ID NO: 241618 - DNA, 50 bp, Homo sapiens
cctggtgtcacctatcagtaaaaggagtccccggcgtgcagtggagcctc

SEQ ID NO: 241619 - DNA, 100 bp, Homo sapiens
gatccagatccggcaggactggagacacctgggagtcgcagcggtggtttgggatgcgattgatcagggaccatgaaaagaaacttgtgcttcaccgaag

SEQ ID NO: 241620 - DNA, 100 bp, Homo sapiens
cggtgtgcagacacaactacgaggtggcgttccgcgggatcttgcagaggagaggtgattttctcagcagaacagacttatgagttgatgcggtgtctgg

SEQ ID NO: 241621 - DNA, 100 bp, Homo sapiens
acatggtactcagtaatctagctgcagttttgatgcacagaggatgaccagtgtcccagtgaaggaacgagtgaaggtgtctcagaactggagactgggg

SEQ ID NO: 241622 - DNA, 50 bp, Homo sapiens
ggaaagcgcatacaggaccctaaacagttgacaatgacacaccagttact

SEQ ID NO: 241623 - DNA, 82 bp, Homo sapiens
ctgaagaagcagttctacaaggcgagccaggtgagaagccctaccactgcaactgggacggctgcggctggaagtttgcgcg

SEQ ID NO: 241624 - DNA, 75 bp, Homo sapiens
gaagagtcaggggcacagagagatggagagagacctagttagatggagtcgggtggtacagttttgagtaccaac

SEQ ID NO: 241625 - DNA, 75 bp, Homo sapiens
ttttgatggccatggcataaggaactctatcccaggaatacagctttgcattagccaaggccacctttgatgcca

SEQ ID NO: 241626 - DNA, 75 bp, Homo sapiens
tcggcagcaagcctctgcaaatctgggacaaaaaggaagacaactgttagttttgtggcttactgctgctccacc

SEQ ID NO: 241627 - DNA, 82 bp, Homo sapiens
catcctgccgtccttctccactttcgccagcccgtgccgcgagcgcggcctgcaggaggcctgacctctcgggacacaccca

SEQ ID NO: 241628 - DNA, 75 bp, Homo sapiens
ttgcaggaaaacaagctcagggctcccacggattctacattatggaactgtggctgcaccatctgtcttcatctt

SEQ ID NO: 241629 - DNA, 99 bp, Homo sapiens
aagctcatgagcagcctgcccaacttctgcgggatcttcaaccacctcgagcggctgctggacgaaggtgcagaggccaagaccgttttgcccaagaag

SEQ ID NO: 241630 - DNA, 98 bp, Homo sapiens
cgggagctgggccgcctgaagcagctgctgtcccgggcctaccccctggactccctggagaagcagatggaaaagggtgattctgggggtccacttgt

SEQ ID NO: 241631 - DNA, 75 bp, Homo sapiens
gttctcatctcgctgcaggaggctaaagatatttgcgaggagcaggtcaacgtgtctgacttccagcaactgctg

SEQ ID NO: 241632 - DNA, 100 bp, Homo sapiens
cttagccatgtcgtccttgatcagaagggtgatcagcaccgcgaaagccccaggggccattggaccctacaggcaactgcgatgtctgtggactgtcttg

SEQ ID NO: 241633 - DNA, 98 bp, Homo sapiens
taacatttgggagaaacacagccagaaggaagaaggtagataatgactataatgcccttcgagaaagactcagcaccttgcctgataaattgtcttat

SEQ ID NO: 241634 - DNA, 101 bp, Homo sapiens
ttaaatatcttcgagctgaacctgaggaccattattttttaatggactttttttatgaagacatggagtccttgacgcagatgcttagggccttggcaaca

SEQ ID NO: 241635 - DNA, 100 bp, Homo sapiens
gcttacccagcttaaagagctccacattcaggggaaccgcctcaccgttctgcccccagaactaggctattctcatggatcacaactgccctattaaaac

SEQ ID NO: 241636 - DNA, 133 bp, Homo sapiens
gggcctcgcctccgccctccgccacctcgagctgcggtagcagcgactcatgagagcgcggccggaggacagatccgagcagttggcagactaaaaagagagcggtctatgagtgaaaatgctgttcgccaaa

SEQ ID NO: 241637 - DNA, 87 bp, Homo sapiens
catggccaccatcacaatgcaggcctacagccgaggattcctggcaaggaggaggtatcgaaaggaaaaatatctccctggacgggg

SEQ ID NO: 241638 - DNA, 51 bp, Homo sapiens
ggccagcaggaggctgatgaagacatgcacatgatggtgtccaagccagaa

SEQ ID NO: 241639 - DNA, 98 bp, Homo sapiens
atggttggcagcggaggcgttggcaagtcagccctgacgcttcagttcatgtatgacgaggtagtaaacctattgatggcaattttgctgactgtgga

SEQ ID NO: 241640 - DNA, 100 bp, Homo sapiens
gttcctgatttccattcagaaaaccggggcattgtgacagctgaggacctgaacaactaccgtgctgagctgatcgagcacccgctgaacatcagcctgg

SEQ ID NO: 241641 - DNA, 100 bp, Homo sapiens
cagtgtccaagcaacaagcctccgctcctccttcctgcaccctggggctcctgaaactcacatgttggtctcttcccatggcgatgtccatctgccaccg

SEQ ID NO: 241642 - DNA, 100 bp, Homo sapiens
atccgctgctgctgaggagaggagcgtcaacagcagcaccatgggatattaaaggactcagcaaaaagagaaagatgtattctgaagataaacctttatc

SEQ ID NO: 241643 - DNA, 90 bp, Homo sapiens
ctgcctttctgctggagggaagtgttttcacaggcaatagccctctggaacaagacaattcatgtgagataagaaagaagagcccacaag

SEQ ID NO: 241644 - DNA, 96 bp, Homo sapiens
ctgccgtggagctgggtgctggcacggggctggtgggcatagtggctgccctgctggcttcgcagaatcaagaacggctatgtgcgtttaaagatc

SEQ ID NO: 241645 - DNA, 74 bp, Homo sapiens
tcactctgagtacggtctcacagacaacgttgagagctggaagtcgagtgtgctactcaactcaggagatttgg

SEQ ID NO: 241646 - DNA, 75 bp, Homo sapiens
tgccaatcagcatttcacattcctcatggttggttcaaagtttgtcagggagccactggtgatgtggatggggca

SEQ ID NO: 241647 - DNA, 90 bp, Homo sapiens
aaaatggagttccacttctccccgcagacctaggcaagaaagtgaaggggggctccagcaagctgacaggccgtgtccttgctctgtcct

SEQ ID NO: 241648 - DNA, 82 bp, Homo sapiens
attcgccgaggcaccgaggcactcagaggagccttgccaacattccactaacccccgagactcagcgggaccaggagcggcg

SEQ ID NO: 241649 - DNA, 51 bp, Homo sapiens
tcatactaaagaacacatctggaaggactaatttattattgtgcaactgcc

SEQ ID NO: 241650 - DNA, 96 bp, Homo sapiens
gcgggagccctcgcgacgcgcccggcccggagcccccagcgcagcggccgcgggctacaggggaagaattgaaagtgaaggcatacctaccaacag

SEQ ID NO: 241651 - DNA, 78 bp, Homo sapiens
ctcaccacccccatcaagatcgccctgcgctgcttaccgtgacaatcagagctttgttgcagaacctgaaggaaaaga

SEQ ID NO: 241652 - DNA, 80 bp, Homo sapiens
ggaattttggagatattcaaaggcaacatcttcgtggtcagtctctctgtggccgatatgctggtggccatctacccata

SEQ ID NO: 241653 - DNA, 82 bp, Homo sapiens
ggctggagagcctgttggagaaacacaaagagctgggaaaacggcaatggattaataacaagaaattaatggtgaagtggtg

SEQ ID NO: 241654 - DNA, 75 bp, Homo sapiens
cttctcacccccaggatgtcatcgagggctctgaaaattggaaaaccaagaaggttttgatgttttgtgtgacgc

SEQ ID NO: 241655 - DNA, 51 bp, Homo sapiens
agctctcgctccagaagcttcactttggttacctgtcctgctgccgattcc

SEQ ID NO: 241656 - DNA, 101 bp, Homo sapiens
gccccgccgcccgctcgccgctttctcgcggggctggctatgccgggtggcggctcccaggttcgagaacttgtcttggacaattgcaaatcaaatgatgg

SEQ ID NO: 241657 - DNA, 99 bp, Homo sapiens
acatgcccgtcctatatgacaggtgttacacataatattgcattacttcgagaggtgataatcaactcacgctttgtaaaaggagacatcagcactaaa

SEQ ID NO: 241658 - DNA, 75 bp, Homo sapiens
caggctccaggcatctctctcccagagtgttgcggagataggaacatgggagagaaacaatctgggtaacatgaa

SEQ ID NO: 241659 - DNA, 100 bp, Homo sapiens
gccaacacggtcttgctgaaagccagggaaggtagagtacgtgtttacagataaaactggtacactgacagaaaatgagatgcagtttcgggaatgttca

SEQ ID NO: 241660 - DNA, 99 bp, Homo sapiens
gggaccagctggaccagctgggcatgcgcatgcagcacaacctggagcagcagatccaggccaggaaagtcatctcccaaaactcattacacctgcgga

SEQ ID NO: 241661 - DNA, 82 bp, Homo sapiens
tccactcggctcctgtcgtccgttctctcaggctcccgttcaggttgccagtcctgctccatccctcatgtcctggaagaga

SEQ ID NO: 241662 - DNA, 122 bp, Homo sapiens
ggacatattcctctcctgatctggcctcatctgttccagggaggtgggattgagtgaacatgattaaagatgatgggacagttattcatttcaacaatcccaaagtccaagcttccctttct

SEQ ID NO: 241663 - DNA, 82 bp, Homo sapiens
ccaccccttcgcctgcaccccagcagtacatcgtggtcactgtctctggctataatagatgaatttgagcagaagcttcggg

SEQ ID NO: 241664 - DNA, 110 bp, Homo sapiens
gtcctccacaaggtccttcgagacgggcaccccaatacttcacagagaatgcagttgtcttgacttcaggtctgtctgttctgttggcaagtaaatgcagtactgttctg

SEQ ID NO: 241665 - DNA, 83 bp, Homo sapiens
cgccgccgcctctccttgctgcagccatggagagtgcgccggtctcggggaaatgcccggttccttcgtgcccacggtcaccg

SEQ ID NO: 241666 - DNA, 50 bp, Homo sapiens
ctatggctcaaagaaagatgattatagaagaggcaaggaccccacagaac

SEQ ID NO: 241667 - DNA, 75 bp, Homo sapiens
attgcaagcagtgatagtgctaatgtgtcagaaagtgactattttaccccacagggagaattccgtgtagacaaa

SEQ ID NO: 241668 - DNA, 100 bp, Homo sapiens
agttggatgccatgctggaggagttcaagaagggtgtcagctgtgatgcatgtttaaaaggaaattttcgaggtcgcagatataagtgtttaatttgcta

SEQ ID NO: 241669 - DNA, 75 bp, Homo sapiens
ctattcagatcatccaagtggaggttcctacagagattcatatgagagttatgatctaattatcatggacctgcg

SEQ ID NO: 241670 - DNA, 98 bp, Homo sapiens
gaaggaggaggcacccacaggctgctgggaggagagcataagacatatggaaagttgatcatgtgctggagcgcttgcagagtgaaagcctggtgaac

SEQ ID NO: 241671 - DNA, 82 bp, Homo sapiens
ccgctacatactcatcatggggctcctgtacaaggtgctggagatcagaatttatttacctctgtttatccaacgctctctc

SEQ ID NO: 241672 - DNA, 82 bp, Homo sapiens
tttgttccatatcgtgactcagttctcacttggctgctcaaagggctagtgacatttgaagatgtagctgtggatttcaccc

SEQ ID NO: 241673 - DNA, 75 bp, Homo sapiens
gtggataatgattctggaatgtggctatacttactgctctattaacattaaggatgtaatccctgttcattacta

SEQ ID NO: 241674 - DNA, 101 bp, Homo sapiens
tgcggcgagtcctgagcggccaggacgacgaggagcagggcctgactgcgcagcgcgttccttcacctcgggcagaataactttgcagaagcccacaggtt

SEQ ID NO: 241675 - DNA, 50 bp, Homo sapiens
ggtgatttctgcatttccaactgagagtcaaggaaacttttcttttgagc

SEQ ID NO: 241676 - DNA, 100 bp, Homo sapiens
cagctttcctcagcaacatgaagtctcgacacaggctcagtctgctggagcgggtcagtgccgaggctgtgaccaccaccctgcaccaggtgacccggga

SEQ ID NO: 241677 - DNA, 98 bp, Homo sapiens
gggagtcctacgataagaaaatcggagtaagccctgaaccaattcatcttaagattttttcacccaacgttgtcaatttgacacttgtggatttgcca

SEQ ID NO: 241678 - DNA, 90 bp, Homo sapiens
gggagctcatcaggactatgggggattgggcagaggtacccgtttgatggagctgcaccgccagtgggaattacttttggagaagatgcg

SEQ ID NO: 241679 - DNA, 100 bp, Homo sapiens
ctgaagaaagcatcgtcctaggaatggatttctcctctaatgacagaaaagcacttggttctgcttcgagatggaaggacacttataggctttttaagaa

SEQ ID NO: 241680 - DNA, 98 bp, Homo sapiens
caacactgcgggccgcctgggtgcagacaaccgccctgtgagcttctacaagaaaatatatgcagatgatgaacattcttaagccaattgcctttgat

SEQ ID NO: 241681 - DNA, 82 bp, Homo sapiens
gtgacagtctagggaggaaggcagactgcagaagaagcctgagaagatgatgcacagatagagaggcaccaggacttgagag

SEQ ID NO: 241682 - DNA, 136 bp, Homo sapiens
agaagacgatctgcacttcgcattttggcattgacatttaattttagggtcctttatatagaagggagagtagccccacaccagtgagaagcatcagcaccgtgaacttgtctgagaatagcagtgttgtcatccc

SEQ ID NO: 241683 - DNA, 98 bp, Homo sapiens
acctgcatcaacccctctaactggtgtgatggcgtgtcacactgccccggcggggaggacgagaatcggtgtgattcttctactcaaaacaaaagagc

SEQ ID NO: 241684 - DNA, 100 bp, Homo sapiens
cgccgatcctccaggcatgccccgctacgagctggctttaatcctgaaagccatgcagcggggatcaagcatgaattgcaagcaaactgctacgaggagg

SEQ ID NO: 241685 - DNA, 82 bp, Homo sapiens
cccgcctgccctgaggagtccccgctgcttgacaatgcagatcttcgtgaagactctgactggtaagaccatcaccctcgag

SEQ ID NO: 241686 - DNA, 74 bp, Homo sapiens
gggatctcaggtcctcgggggcggcggccacgccaaggacgggccctcgggaccaaggatcacgtcatgactcc

SEQ ID NO: 241687 - DNA, 100 bp, Homo sapiens
agcgaagctaccagttctgggatacgcagcccgtccccaagctgggtgagctgggtgaacccagtagcttcagccacagctgggaactgaagcagcatct

SEQ ID NO: 241688 - DNA, 128 bp, Homo sapiens
tagatacaaatttttggatgatgatggatccatttctcctattgaggagtcaacagagaatagtaatctgcatcaccaagtggaagagatgcttcaaaaaatttctcctctacagaaatgtcaggaag

SEQ ID NO: 241689 - DNA, 90 bp, Homo sapiens
ccagaggcgcggggcgccgccgctgcagctgccgcgcgtgactacactttgttatatgaagaggcaaaatattttcagcttcagcccatg

SEQ ID NO: 241690 - DNA, 100 bp, Homo sapiens
agacaatccagaagaaaaaccagaagaagagaaagaagaggttatagatgaccaggagaacctagctcatagcaggaggtggagacggagtttcaccgtg

SEQ ID NO: 241691 - DNA, 100 bp, Homo sapiens
cgctcctttaccctcatcgtggaggcctgggactgggacaacgataccaccccgaatgattccctcccaggctgtccctcgccgccttgctacagccccc

SEQ ID NO: 241692 - DNA, 83 bp, Homo sapiens
aaattggatgtgaaaatgaagccagaccgaggtcaaaatgcagatcttcgtgaaaacccttaccggcaagaccatcacccttg

SEQ ID NO: 241693 - DNA, 75 bp, Homo sapiens
ctttctgcatttgacagataaagatggtgaacaacctcaaatactgctgtcctcaaccactgaagaagaagcttg

SEQ ID NO: 241694 - DNA, 100 bp, Homo sapiens
ggccgcgctgagggcgcccagctggatgcgtattggatagcaatgaatagttctctgaaatgtaaaaccctcagcgacatctttctgcttttcaagagtt

SEQ ID NO: 241695 - DNA, 101 bp, Homo sapiens
gagctgtccggagcttgtacagcagctaagagggtgtaacttgggccaagaaatcgtgatgtgagtaggtcacacagtgttgagggccaaaaccctcgact

SEQ ID NO: 241696 - DNA, 100 bp, Homo sapiens
gcagctcttcctccagggcgtggcggccgtcttcatgtttgctttcgcttccctctacacgcaaatcccaggcaagtagcctgcagtatgaaatgctgct

SEQ ID NO: 241697 - DNA, 95 bp, Homo sapiens
gattcttacctctttgatctcgacaataaggccatcatgaggaagccacgagcagccgtgggaagtggtcacaggaagcaggcagccagccagga

SEQ ID NO: 241698 - DNA, 82 bp, Homo sapiens
ccggaagatgcccacggactacatcaggaacggggtgctctacgtcacggagaaggctgggttacgacccctacaaccctga

SEQ ID NO: 241699 - DNA, 90 bp, Homo sapiens
ctgagaaggaggggtatgagccacacatccccgaccacttgcggcctgagtatggtctcctctgagcctccggcctccataagacccaaa

SEQ ID NO: 241700 - DNA, 99 bp, Homo sapiens
tcgaggaacagctgaacgaaccctggccacactctcagatgtgcagcacattaagaggagagacatcgtgctgaagcgagaactgggtgagggagcctt

SEQ ID NO: 241701 - DNA, 75 bp, Homo sapiens
gagacccggcaagaagttttggagatgaggctaaagtaaataatgccagcctgattggactgggttatactcaga

SEQ ID NO: 241702 - DNA, 75 bp, Homo sapiens
attctgcacgacgatgaggtgacagtcacggtactaatttggtcgaagcagataaccaagcggagtggaccgacg

SEQ ID NO: 241703 - DNA, 50 bp, Homo sapiens
cgtcagagcttctccgtgaaagacccaagatgcagaggccaggatgtggg

SEQ ID NO: 241704 - DNA, 98 bp, Homo sapiens
gtggtcattgggatgtgtgattgcagaattatttcttggatggccgctctacccaggagccttggagtatgatcagatgcttgctctgtcaaggcaca

SEQ ID NO: 241705 - DNA, 82 bp, Homo sapiens
gacgcggtggagccgccggagtctgagaaggttgatgataattagaagcatgctttccactgaacttcccgacaacatttgt

SEQ ID NO: 241706 - DNA, 100 bp, Homo sapiens
gagaagccgcactccactctgactcccaggacgggcaccaggtgcgtatagcagcaaaattcatcattcatgcccctcctggagaatttaatgaggtttt

SEQ ID NO: 241707 - DNA, 102 bp, Homo sapiens
cttccggtcacgccatcgttgctgccttcttcgtcaagagcccacccacctttgggttcctgttggacatcgatggagtgcttgtgcggggccacagagtga

SEQ ID NO: 241708 - DNA, 100 bp, Homo sapiens
ctgggacattcgaaaacctcagagtactatactggcaattgctggagaagattttgcaattgttgcttctgatactcgattgagtgaagggttttcaatt

SEQ ID NO: 241709 - DNA, 100 bp, Homo sapiens
gcttcttgtgcaagtaatcagtctttgacaagtgatgagaagctgtcggagcttcccaaggaggatgaaattttgaacagatcaccaagaaacagaaagc

SEQ ID NO: 241710 - DNA, 100 bp, Homo sapiens
aaaggagaaggaagaagcagatcttcttttggagcagcagagactgccgggaagatttccagaggattccagaacttgccatcaacccactgggggaccg

SEQ ID NO: 241711 - DNA, 98 bp, Homo sapiens
taatggtctttttgttcaagataaagtgattttttgcctttgttgattaactggacaaattcaggtttggtgcacctcgatttggaggaagtagggca

SEQ ID NO: 241712 - DNA, 75 bp, Homo sapiens
aagatggcctaccctcctgtacttgttccaactcaagttggaatgttgcatcagcaggtagaagaacatgaaaaa

SEQ ID NO: 241713 - DNA, 51 bp, Homo sapiens
ggcatcatccgctatgcaattgggctgtgccagcaggagaagctgagggat

SEQ ID NO: 241714 - DNA, 100 bp, Homo sapiens
acttttgagctacagtgacaagaaagatcacctaactgtggaagaactggctcagtttttgaaggtggagcaaaagccctcaggcgaaccgcaaattgag

SEQ ID NO: 241715 - DNA, 75 bp, Homo sapiens
ggactgagcgtcccccggagagggtccggttttgggatttgagattgacgcggtgaactctgtccagttttcaaa

SEQ ID NO: 241716 - DNA, 101 bp, Homo sapiens
ccggcgccgctctccgagctcgatccgctgctcgcacgggagccagctgggtggaggctgaaagggaaacatcagccgcccggggggagttaaaatgagtg

SEQ ID NO: 241717 - DNA, 87 bp, Homo sapiens
gagcatgtactggccgcagcaaagcacttttcaggattagaagaggctgtgtatagaaacatacaagcttgcaaggagcttgcccaa

SEQ ID NO: 241718 - DNA, 97 bp, Homo sapiens
cagacagaaataaattagtgtccttaccaaaagaggaaagcactgtcttagaacctggctcacctgattttgccgatgagtcaactttgaagtgtgc

SEQ ID NO: 241719 - DNA, 90 bp, Homo sapiens
cgggacaccccggaagctgggaaatgaccatggtgaatccgggcagcagctcgcagccgcccccggtgacggccggctccctctcctgga

SEQ ID NO: 241720 - DNA, 73 bp, Homo sapiens
tgatgcgtcacactacgacagtgagaaaggagcattccaaaatatgcccggtgctatccgcccagctgctcct

SEQ ID NO: 241721 - DNA, 75 bp, Homo sapiens
aaaaggctccttcagtgagcaaggcatcaacgagtttctcagggttatgtggtccgaatcagtggtgggaacgac

SEQ ID NO: 241722 - DNA, 96 bp, Homo sapiens
agttcatgtgacagactggatagagaagaaactggagcaagagtttcagcttggatttacactgggcaacgtggttggaatgtatctggctcagaa

SEQ ID NO: 241723 - DNA, 101 bp, Homo sapiens
aagattctcatcgtggagatctttggcagcgccattggcctctttggggtcatcgtcgcaattcttcaggtacttcctggactctacctcggaaacttcat

SEQ ID NO: 241724 - DNA, 101 bp, Homo sapiens
ttctgtgtggtacgctggattcaaggatgcctgcataagctgtggccatgactactgaagtaggctctgtgtctgaagtgaagaaggactctagccagtta

SEQ ID NO: 241725 - DNA, 82 bp, Homo sapiens
aagaagtttctaggaaaggccggacaccagaaaggacccaggagcgataacagtaaatcaaataagatatttgtcggtggaa

SEQ ID NO: 241726 - DNA, 75 bp, Homo sapiens
gcggagttggacatcgggcagcactgccaggtggagcattgccggcagcgagcttagaccatgctcagcctccaa

SEQ ID NO: 241727 - DNA, 100 bp, Homo sapiens
ccggagccggacctccggagcatggtcagccccgtcccctccccgacgggcaccatcaggttgggtatctacagccattggttgctgttcaggtcagctt

SEQ ID NO: 241728 - DNA, 95 bp, Homo sapiens
ctgtctgcactccaattctaccaggatggctctcttcgctggtggcaaactggagcctcctcaacaagcccaagagtgagatgaccccagaggag

SEQ ID NO: 241729 - DNA, 100 bp, Homo sapiens
cggccaccggcccggcctgaagaaatccaggatgtcctggccctcctcgttccagggactcaggcgaacccctgaacagtgcccaagtgttgtctctttg

SEQ ID NO: 241730 - DNA, 100 bp, Homo sapiens
tccacacagtgcggcagcccccacttgtacccacatgttccttcgaacaagaacaacctcaggatgctcacaactgtattcctgagctggacagtgagac

SEQ ID NO: 241731 - DNA, 82 bp, Homo sapiens
aagatttaacgaatggggttgtgatggcccaggttcttcaaaagatgcatcaagcatgatggaaccatgtgtgatacctgcc

SEQ ID NO: 241732 - DNA, 90 bp, Homo sapiens
acacggtgccccacaggccactgtgcaggatctccactcggccctgacacaggcggaattctccacgagttttgagcagcctcgggtttc

SEQ ID NO: 241733 - DNA, 88 bp, Homo sapiens
gcacttagcacagcgcctggcgcaaggctttgatcactcagactcgagccaaacaggcagctaccatgagtgaagtggagtggagagg

SEQ ID NO: 241734 - DNA, 100 bp, Homo sapiens
cccctctccgccccccaggaggggcgagagggagccgcagctgatgtcagattgtgcttgagaacagtagtcgagaagacaagcatgaatgtccctttgg

SEQ ID NO: 241735 - DNA, 98 bp, Homo sapiens
caagaactcaaactttttgtatctcgacactctgcaagattctctcctgaagtcccagcatcgtctgtgtcggcggagatggtatgttcagcgaggtg

SEQ ID NO: 241736 - DNA, 100 bp, Homo sapiens
ctgctgtcccgcccccgctgagcagtagcccactctatagccgaggacagagcgggatgccaccagcttgtccaaagggaagttccaggagctcctggtg

SEQ ID NO: 241737 - DNA, 50 bp, Homo sapiens
accaggggatgctggactgcatgcaggttcaggagaagtggcacctggtg

SEQ ID NO: 241738 - DNA, 98 bp, Homo sapiens
tggatttcagcctgcacggatggtcttgaaacacaaatggtttttgaatgaaatgaatgatgtgcctttctttgatatccaactgccttacgaattgg

SEQ ID NO: 241739 - DNA, 80 bp, Homo sapiens
ccttatgaactgactgaaggggacatcatctgtgtgttctcacagatcagttccatgacaagaccccttatacgattatg

SEQ ID NO: 241740 - DNA, 51 bp, Homo sapiens
cccagatgtgcaacaaagtgcgatgacgtgaagccctccaatatgctagta

SEQ ID NO: 241741 - DNA, 100 bp, Homo sapiens
ccctggagaccatcgacatcaacaagtaacaaatgtggcaattattttggatctatcacctgtcatcataactggcttctgcttgtcatccacacaacac

SEQ ID NO: 241742 - DNA, 74 bp, Homo sapiens
tggtggatggtaaagtcccagatacactcaggaagtgtttctcagaggtgcacttttcaaggagattgtgtaca

SEQ ID NO: 241743 - DNA, 90 bp, Homo sapiens
cagcggtccggacgccgcccgaacatggactccgccggccaagccctggtccagcgcctccctctctcagcatggacgaggagagcctgg

SEQ ID NO: 241744 - DNA, 50 bp, Homo sapiens
gtcagccttcccagtagctggaactacagtcgtagtcgagatcgggatcg

SEQ ID NO: 241745 - DNA, 75 bp, Homo sapiens
cactctgggaaaaggcactgaagttggaatgaacaaaatggttatcaaccacttggagaagttgtttgtgacaaa

SEQ ID NO: 241746 - DNA, 96 bp, Homo sapiens
ttctatcagtgcattgctgaaaatgatgttggaaatgcacaagctggagcccaactgataatccttgaacatgcttcagtatcagacacagcacag

SEQ ID NO: 241747 - DNA, 100 bp, Homo sapiens
tttcgggtgaaaaagatgagtctgaagttatatcgcaaaatgaaacgtgctctccagatggatctgtctgtagaaactctgttcagcttcatgcaggagc

SEQ ID NO: 241748 - DNA, 100 bp, Homo sapiens
tggtgacgaccaacttggcccctcacggtgatcagggccaaagcggtcagtgagaaggaagtggactctggaaacgacatttatggcaaccctatcaaga

SEQ ID NO: 241749 - DNA, 100 bp, Homo sapiens
tgtggcttcactgcttacctatatcccaaacagtgctgtctggtggcccttctatcacttctatgcaggtctccggataactgtgctcctgacatccttc

SEQ ID NO: 241750 - DNA, 89 bp, Homo sapiens
gactggaacaagactcaccatcatacccagtttaactatagatcaacacatcatcttgcatctcatgggttctatgaatttttaaattg

SEQ ID NO: 241751 - DNA, 76 bp, Homo sapiens
gcttacgtctctgctcttcagtacaatcctgaagctttctttggaaaagatcttctagatacaagtagacaaagca

SEQ ID NO: 241752 - DNA, 75 bp, Homo sapiens
gtggaattcatccttccgaggactgagatgaggacggaaaatgaaccatcggagcatattaatgaaaagtgccat

SEQ ID NO: 241753 - DNA, 83 bp, Homo sapiens
cgggaaatcgggctgaagcgactgagtccgcgatggaggattcagtggcctttgaggatgtggctgtgaacttcaccctggag

SEQ ID NO: 241754 - DNA, 90 bp, Homo sapiens
cttcttcatcaccgatggaaagtacaactccaccctgctgggaatcccgttcttcgccatggaaatgcactcggtgatggaaagagagcc

SEQ ID NO: 241755 - DNA, 101 bp, Homo sapiens
ggccgtgactacaggacctgtctgacgatagtccaaaaactgaagaagatggtggataagcccacccagggccacgactgcttcccggtgctgttcaccta

SEQ ID NO: 241756 - DNA, 90 bp, Homo sapiens
gatgaaatagatggattagctccagttcgctctagcagacaagatcagatccacagtgtttgaaagatgtatggtgatcttgaaacctcc

SEQ ID NO: 241757 - DNA, 100 bp, Homo sapiens
aactcagcttgcaaaagcccagggccatatatctcagagggcagctgtgtacaggatgaatcggaaccacagaggcctctgtgtcattgtcaacaaccac

SEQ ID NO: 241758 - DNA, 82 bp, Homo sapiens
attctgaaagaaagaaaacaaagaaaaacatactccagaattcctaatagaacaatgctgcacaacaaacatgtcatggtcc

SEQ ID NO: 241759 - DNA, 83 bp, Homo sapiens
tgtcgctctgcctttgacaggagaggctgcttcttgtagaggtaccaggatcatctatgaccggaaattcctgatggagtgtc

SEQ ID NO: 241760 - DNA, 97 bp, Homo sapiens
gtcgcctccaggccaagagggatccttcacccgtgtctgatgagcagcaccagcagtaagagggctccgaccacggcaacccagaggctgaagcagg

SEQ ID NO: 241761 - DNA, 100 bp, Homo sapiens
ttcccaaagtgttgggattataggcgtgagccactgcacctggcacagagacaatgaccatgtttgaaaatgtcacccgggccctggccagacagctaaa

SEQ ID NO: 241762 - DNA, 100 bp, Homo sapiens
gaaaaacagtctgaaaccagtatccatcaatacttggacagtatttatgatgaaatggaagagaagtggtcaaaacagaaggcgaaatggaagaaggatg

SEQ ID NO: 241763 - DNA, 128 bp, Homo sapiens
gaaggggacgtccgatgatgatgtcccgtgtccgggctacctgtttgaagagattgctaatcttttggagaaatctcgtgctatccgccaagccaaggaagaacggaccttccacatcttctattatc

SEQ ID NO: 241764 - DNA, 100 bp, Homo sapiens
caaatctagatgcagctacttatcaggcatggaaagctcacctgatgggcccagccggctgcacgatgaacctgcgcaagacacacattctgcagaaggc

SEQ ID NO: 241765 - DNA, 80 bp, Homo sapiens
gtggtattactgcaccctgaccattcgggagagcattctcatcagcaacggctcaagggcaagaagactatgaccggctg

SEQ ID NO: 241766 - DNA, 123 bp, Homo sapiens
ttgcacactgaggtgtccagttgcagcccatggagatccagttcaattatgaatctcaggaacaccaccttctgtcagttggggaatggcggtcaatgtgtattctacctcgataacccaaga

SEQ ID NO: 241767 - DNA, 100 bp, Homo sapiens
cgcccactgcacctcgtcctgctcagtgcctccctggctggcctcctgctgctcggggaaagtcgatgagttccacccgttcatcgaggccctgctgcct

SEQ ID NO: 241768 - DNA, 100 bp, Homo sapiens
atctgttatttcgagcaggagaatgactggtactgggcctaatcgctacgtgcctctttggctatgatgcctatgtcaccttccccgttcggcagccaag

SEQ ID NO: 241769 - DNA, 82 bp, Homo sapiens
ccatttcttctgtatagaaatgcaagctgaactgtggctgcaccatctgtcttcatcttcccgccatctgatgagcagttga

SEQ ID NO: 241770 - DNA, 74 bp, Homo sapiens
gaggaggcagccaagctcgtagcctgccactccgtgcgcagaagctcctcctggggtagagacagatcttattg

SEQ ID NO: 241771 - DNA, 104 bp, Homo sapiens
ggcgcctccttcatcgggatcctggacattgccggcttcgagatctttgattgtccccatgaactcccttgtccccagttgaccaacctggcctgtagcttctc

SEQ ID NO: 241772 - DNA, 100 bp, Homo sapiens
tgcggcctcactgggacccccaggaggtgaccctgcagatgttcttggcagccctgtcattcagctatattgctaaagcactaggtggaatcattatgaa

SEQ ID NO: 241773 - DNA, 107 bp, Homo sapiens
gaggaaccatgtctccatccccgaccgccctcttctgtcttgctgcacagttggggatcttcaaaccaagatagatggcttggaaaagactaactcaaagcttcaag

SEQ ID NO: 241774 - DNA, 98 bp, Homo sapiens
ctacatcgatgacgtcaccgtcaccaccggcgtgaagcgagacagtggtgagggcttctgggtgtggagagaagctcgggaccgcatcgtgggcttcc

SEQ ID NO: 241775 - DNA, 83 bp, Homo sapiens
gccacgctgtccgtccgcagtaccgacgcctgcagactacgtctactttgagaactcctccagcaacccatacctgatccgga

SEQ ID NO: 241776 - DNA, 50 bp, Homo sapiens
cagaatctgcccacagagttcgggtactggttttggattaggaattgttt

SEQ ID NO: 241777 - DNA, 75 bp, Homo sapiens
cgcgtctgccgcccacgtacatgcacgccatgtgggtgtacaacagaaacgtccttctgaggctcaaagtgttat

SEQ ID NO: 241778 - DNA, 75 bp, Homo sapiens
gatgtgaggaaaggcacctccaccagtcgggaagacgtctctgattacgaggttcatgtacgacagcttcgacaa

SEQ ID NO: 241779 - DNA, 82 bp, Homo sapiens
ggagcgacagtgcccaggggtctgagtctcacagcttgtaaaggaacgtcaaggtcgtgggaaataaaaggcagttctacac

SEQ ID NO: 241780 - DNA, 100 bp, Homo sapiens
aaacaccagtttgatcatggagagactatatcatcatgtacatagaaaaatccaaaggattctgcaaaaaagctactagaaccactgacttcatcaagat

SEQ ID NO: 241781 - DNA, 100 bp, Homo sapiens
tttatgatggaaaaagaagtctttacaccgccaatccacttcctgtggcaactacaggggagatgcagaaactaccagaggccgttcagctaattgagaa

SEQ ID NO: 241782 - DNA, 75 bp, Homo sapiens
tgagcgaaagctacacgctggaggttggctgatcaagatgacactgagtaacccttcagaactagatgaacttat

SEQ ID NO: 241783 - DNA, 75 bp, Homo sapiens
accaagaaaagaacctctgtagccttgcttctgagagtgcaggtttgttacaggactctggctactggagatggg

SEQ ID NO: 241784 - DNA, 101 bp, Homo sapiens
ctgccatcaaggcccttaatgctacaggacaagcaaacctcagcctggaggcacttttccagatttctgcacctaatgaatttgatgtcatgtttaaactg

SEQ ID NO: 241785 - DNA, 100 bp, Homo sapiens
ggcgagaacgtccactgcgggccggcgaaagctgaaacctctgtagaggagcaggatgcaaccgacaggctgtggccggacagctgctgcccagcacatg

SEQ ID NO: 241786 - DNA, 100 bp, Homo sapiens
aagcccagcttttccatcctggagatctacaggatttatcaaatcgagtcactgtcaagtttggacatatttgactcttttccccccaggttgaattgac

SEQ ID NO: 241787 - DNA, 97 bp, Homo sapiens
gacccgccctccaagtacgtggtgtcatggagaaactccagctgggcccagagattctgcagcgggaaaatccaaggcttatttatgccaggctgag

SEQ ID NO: 241788 - DNA, 75 bp, Homo sapiens
taccaccaccctgtgaatctgcctgcacagtaccaacagacggtagtaagcattaataatgtctttcatctttga

SEQ ID NO: 241789 - DNA, 82 bp, Homo sapiens
agcactgtggaggccgtcctcggtggtacagaagttggtcctgccctttgggcgactgaactacctgcccctggaacagcag

SEQ ID NO: 241790 - DNA, 74 bp, Homo sapiens
aacagtgccacccaatcttcgaaaactggatccagaactccattctgtgcaagttcattcgcaaacgtcctaga

SEQ ID NO: 241791 - DNA, 75 bp, Homo sapiens
ttagtagctaatgtgattacagcaggagattatgaccttaacatcagtgtgtctctggagaatggttcgactgtt

SEQ ID NO: 241792 - DNA, 80 bp, Homo sapiens
aaagagccgagcacgcgggtctgtcatcatgtcgcgttacgggcggtacggaggagccgcttacaaacacgcagatggca

SEQ ID NO: 241793 - DNA, 101 bp, Homo sapiens
caaccgcaatcggctccgctcaaggggaggaggagagtcccttctcggaagtcaatggagaatggcttaaactacatggctgtggcatttgctatgcagtt

SEQ ID NO: 241794 - DNA, 100 bp, Homo sapiens
cttccagttgaagtgtcattctacagtgtttcagatgacaatgctccctctccttatatggttgatgataattagaagcatgctttccactgaacttccc

SEQ ID NO: 241795 - DNA, 100 bp, Homo sapiens
ctggaggcggagaggcacggaggagccgctggggctgccgccacggccgcccggagtcaaataaagtgcccgtggtgcagccatcccatgcggtccatcc

SEQ ID NO: 241796 - DNA, 100 bp, Homo sapiens
agaggtgccacccgaggagttccgcccctttctggcaaagatgagggggattcttaagattcaaccctatgaaaagataaaggccaggggcttgcctgat

SEQ ID NO: 241797 - DNA, 90 bp, Homo sapiens
ccagagcattgaagatcagtacaaaaattcttcaagaaatctaagaggaagctcaccagtgtgggaaggggcttctcatccactgccagg

SEQ ID NO: 241798 - DNA, 100 bp, Homo sapiens
tctgaaagagaacaaagtaattttctgaagggaagctgcagaatatggaaaacatatattggagctacatggatgtaccgcttaaatctaagtcaagatg

SEQ ID NO: 241799 - DNA, 100 bp, Homo sapiens
cgaagctggccaaagcctgcccagacggctcacctgtgcgggatggaacaaaagaaaaacaagagctggatctcagaggatgacttctaccggccttccc

SEQ ID NO: 241800 - DNA, 51 bp, Homo sapiens
caggactccaaaatggcgtcagttgggtctcgactctgaagacagagttcc

SEQ ID NO: 241801 - DNA, 104 bp, Homo sapiens
ccgaagatgccggactccggaacagcaagaactgcaccgaaccaggaagggatgagaccatgcagcctgcgaaaccatcctttcttgaatattttgaacaaaaa

SEQ ID NO: 241802 - DNA, 83 bp, Homo sapiens
ccaacctatgatgtgtcttccattctaacatccatacagttaattcatctgcctacactatttacatgggaaaagataaatat

SEQ ID NO: 241803 - DNA, 97 bp, Homo sapiens
agattcgcagtggtcgcttcttctccttggactggacctacagagacatctgggattttctgcgtcagctgtttgtcccatactgtatcctgtatga

SEQ ID NO: 241804 - DNA, 100 bp, Homo sapiens
tgccgaggaaacagtgaccctgagcgaagccaagccgggcggcagatggcccactgcgtgaccttggttcagctgtccatttcctgtgaccatctcattg

SEQ ID NO: 241805 - DNA, 74 bp, Homo sapiens
taacttcagcggtggcaccgggatcggttgccttgagcctggttttaccaattcttgagattctgtatcatgtt

SEQ ID NO: 241806 - DNA, 100 bp, Homo sapiens
cagtggaggccatcaggggccttgataacacagagtttcaaggttagtaactttggaaaacagtccatgtattacaccagagttgcttcgtatatttcag

SEQ ID NO: 241807 - DNA, 117 bp, Homo sapiens
ttccacctacctcaacaacccgtacgtgcggaaggccctcaacatcccggagcagctgccacaatgggacatgtgcaactatcagttgagggatttgcagttgataaaatggctgga

SEQ ID NO: 241808 - DNA, 100 bp, Homo sapiens
ccgaagttggaagtgtctcttagcagcgcgcggagaagaacggggagccagacaaatttacatgtattggagaccagaccagaagcccttctgaattaag

SEQ ID NO: 241809 - DNA, 75 bp, Homo sapiens
atgtttgaggctattggatggataaccctaaggaatatcttggatgtcttcacggggcttatgacttattctgag

SEQ ID NO: 241810 - DNA, 83 bp, Homo sapiens
acgccgaagcactcgttccgggggtgaagcctcctgcgccggccttgcctcggaaaaagatgttgctggtccatttgacgaag

SEQ ID NO: 241811 - DNA, 50 bp, Homo sapiens
gagagagctgtgcgagcgtgggggagaggaccatgggctgtggctgcagc

SEQ ID NO: 241812 - DNA, 99 bp, Homo sapiens
atgaagattcaccaaataagctatatactttggttacctatgtacctgttaccactttcaaaagtggacgaaaaggaatgcccctgcccagtggaggcg

SEQ ID NO: 241813 - DNA, 75 bp, Homo sapiens
aagctgagctggactctctgccacatcgttcggttcccacaacagcctgaaaccctgaacattgtccttgtgggg

SEQ ID NO: 241814 - DNA, 75 bp, Homo sapiens
tagaaaggctcaacgagaacaagctatcaggatcgaagcagctcaatgtccagatgttgtggtagctcaaattga

SEQ ID NO: 241815 - DNA, 101 bp, Homo sapiens
gatagttgcttattcctctattgctgcaaaaaatgcagaactagaacaggagcttatgattgtcaaaagagtggggaatggtgaggaaacgccgatgattg

SEQ ID NO: 241816 - DNA, 89 bp, Homo sapiens
ctcggggtccgcgcggcctccgcggagccagactatgtgaaagggtttggaggaaaatttggtgtgcagacagacagacaagacaaatg

SEQ ID NO: 241817 - DNA, 100 bp, Homo sapiens
gcggggatggcgtcccccgggggcccgtactgcacatcgtggtggtcggatttcaccacaagaagggctgccaggactggaatgtcacgtggaataccag

SEQ ID NO: 241818 - DNA, 100 bp, Homo sapiens
tggtagttccatgctgtctgttcagacttcagcttggtattgctttattcaccaagtgaaaaacagtctctacaatgctgccagcttatttggattccca

SEQ ID NO: 241819 - DNA, 83 bp, Homo sapiens
ttcaggttattcttccagttacacaattgttaaaggaaatgggctggcaggaagacagtgaaaatgatgaaacatgtgctccc

SEQ ID NO: 241820 - DNA, 88 bp, Homo sapiens
caaaggctgctctgaagcgcacgacctccgactactttctccttcaaggtgacattgcattccggttccttaattatgttcagtccca

SEQ ID NO: 241821 - DNA, 98 bp, Homo sapiens
agccagcaaagcagcagaattctttgatgattggcacttctctgtttgatgaagagggagccaagattgtcaaagacctaatgtccaaagctgagaag

SEQ ID NO: 241822 - DNA, 100 bp, Homo sapiens
gaagatggaagacttcgagacccatttaggatcacggcgctacgggagtcctttgcaagagcaaaaaattgggttaaagaacttcagaggcaagcaagtc

SEQ ID NO: 241823 - DNA, 74 bp, Homo sapiens
ttcggcagtccacccaccgccgccgcctcccaggatgcctttgtggaactgtacggccccagcatgcggcctct

SEQ ID NO: 241824 - DNA, 109 bp, Homo sapiens
cagaagtcgcgtgtctaggtgagtcgcggtgggtcctcgcttgcagttcagcgaccacgacctcctgccccccgaggtctgcagtctcctgaacccagcagccatctac

SEQ ID NO: 241825 - DNA, 83 bp, Homo sapiens
gatccagcctgcggagcctgtggggcaggaattacatgaatgacagtcttcgaaccaatgtgtttgttcgatttcaaccagag

SEQ ID NO: 241826 - DNA, 83 bp, Homo sapiens
gaggcggcttcctatgctatctctcttccgaggttctcacagagttcaggattacattgcagtgaaggagaagtatgccaagt

SEQ ID NO: 241827 - DNA, 98 bp, Homo sapiens
gcctcatgcggatcaccctgcggaacctggaggaggtggagttctgtgtggaagggaaaagtctgaagacgcttatgtccaaggggatcctgcaggtg

SEQ ID NO: 241828 - DNA, 96 bp, Homo sapiens
gtacaaaggagagtttaaacagccaaaacagttcattcatattcagcattctggacaatcaggaagtccaagccacaatgatcctgccaagaatcc

SEQ ID NO: 241829 - DNA, 82 bp, Homo sapiens
ccgtactacaggatgatggctttctcttcctctgggtcacaggcagagttcagttgattccaccatctctagttcttcttcc

SEQ ID NO: 241830 - DNA, 101 bp, Homo sapiens
atccacctgctggagtcggaggccaacagtgctggtgaaaggaagcatgtttacaccaatgccaaaaagcagatgctaatttctcttgctcctcctgttct

SEQ ID NO: 241831 - DNA, 100 bp, Homo sapiens
gcggactcccctcgccaccgcccgagcccagctcctgcccctcctaaagctgaagccaaagcgaaggctttaaaggccaagaaggcagtgttgaaaggtg

SEQ ID NO: 241832 - DNA, 73 bp, Homo sapiens
cccactccctattactggtatacggatcaggaccctgatgctcccataagacagaaaatgccccttgatgatc

SEQ ID NO: 241833 - DNA, 93 bp, Homo sapiens
cacatttaagagagctctggacaagctggaatgcatccaagagaatccctcaacatgctgacctgcctagagctggaacgttacctccagagc

SEQ ID NO: 241834 - DNA, 83 bp, Homo sapiens
aaagctgagtttacttctcctccttctttgttcaagactgggcttccaccgagcagccatcactggtgcaagctatatttaac

SEQ ID NO: 241835 - DNA, 83 bp, Homo sapiens
tgctcctcggtcgcccacccgcctgcccgccatgtgaggctactcacagtcgaactacaactccccggggtccggccagaact

SEQ ID NO: 241836 - DNA, 82 bp, Homo sapiens
gtgaactctgtccagttttcaaaccacacagcgctcctggttgcagccagaatgcatgacttcaggaggactgtgaaggagg

SEQ ID NO: 241837 - DNA, 111 bp, Homo sapiens
ctactgtggggccgcggccggaccgagcgcctcgacctcggtctgagcgtgagtgcatctccatccacgttggccaggctggtgtccagattggcaatgcctgctgggagc

SEQ ID NO: 241838 - DNA, 75 bp, Homo sapiens
tccatgagattacagttgtaacttcatagactcccaaagggaaattcttgactgtttatgaccagtggttcatca

SEQ ID NO: 241839 - DNA, 101 bp, Homo sapiens
aaacgggccgcgaaccgcagtatcatgctggccaagaagatcatcattaaggacggaggcacgacgcccactattgcttggttctacttcctttatcccga

SEQ ID NO: 241840 - DNA, 87 bp, Homo sapiens
ggccgccaggccggagcgcgaatgtcgtgctcaccctgcctccttcccgccgccccctgggggggattcccgaagtcttccgttttc

SEQ ID NO: 241841 - DNA, 101 bp, Homo sapiens
tctgacacctgctctcccggcaaggaaacttcgcaggctggttggaagctgtgtactgtgggtgttacccactttgtcctaaagatttggtttatcccgaa

SEQ ID NO: 241842 - DNA, 100 bp, Homo sapiens
cctcatcctggttctggaatcctcagttcaaggtgtgccttcttcctgctcctcctcctcactggaaaacatgcttttgtttaacagtccttctgttggc

SEQ ID NO: 241843 - DNA, 75 bp, Homo sapiens
caagtatgctgcaagtgagaacatatttaacagaatctaggtcaacctattaagatacgtttccaggaatctgaa

SEQ ID NO: 241844 - DNA, 117 bp, Homo sapiens
cccacccgcgcctgggaccatggccactgactcatgggccctggcggtggacgagcaggaagctgcggctgagtcgagccagatttcacactgagcagctgcagtcggagaaatcag

SEQ ID NO: 241845 - DNA, 82 bp, Homo sapiens
gtctgatattgaagaggaagaactgaccagagctgatcccgagcagcgtcatgtacccctacccttcgcaggtgttacagtc

SEQ ID NO: 241846 - DNA, 100 bp, Homo sapiens
gggtgcagatgcagtgtggctctggatagcaccttatggacagggtgtggatgaatggaacatagctcgcctcaatacagtcttggatgtggttgaagaa

SEQ ID NO: 241847 - DNA, 100 bp, Homo sapiens
cacccatgtgtgtcaaccctaccccaggagggaccatctctcgaggatggacagattcctggtgaaaggggctcaagggggccttttgaggaagcaggag

SEQ ID NO: 241848 - DNA, 82 bp, Homo sapiens
cggaacaggacgccctctgatcagcccctgtcaaagggaacaggaagcagtccacggagggtgacgccctagacccacctgc

SEQ ID NO: 241849 - DNA, 51 bp, Homo sapiens
catccttctcacctaacactggtgttggagagctggctggactacactggg

SEQ ID NO: 241850 - DNA, 138 bp, Homo sapiens
ggtggctgaggggtccaggcggcgggacgactctggccttttgaagaccggggtgggtgctctctcgggacgaccctgggacagtctccactggggcagatccagctgaccatccggcacagctcgcagagaaacaag

SEQ ID NO: 241851 - DNA, 83 bp, Homo sapiens
ctgaagttgccaggcttcccaacattcttgtctgtgaatgaaatgaatgatgtgcctttctttgatatccaactgccttacga

SEQ ID NO: 241852 - DNA, 90 bp, Homo sapiens
gtcagtaatttcacctggcccatcaaaattcaggtacctccctctgcaggatatcatgtgtatggaatgtctttcccggaagctaaagga

SEQ ID NO: 241853 - DNA, 75 bp, Homo sapiens
ggagatgctgaaaatgttgcttcatatgagggttgtagaaggtgatttagctgccatagaagcatacaagtcatc

SEQ ID NO: 241854 - DNA, 85 bp, Homo sapiens
atcctgaaccgcgcggccgaaccctccgttggaatcgaagcctcttaaaatggcagatgacttggacttcgagacaggagatgca

SEQ ID NO: 241855 - DNA, 103 bp, Homo sapiens
ttcagggatgagtcatgtggcagtggaaaatgcgctcgggctggaccagcagggactttgaacatgtcggggatcgccctcagcagactcgcccaggagagga

SEQ ID NO: 241856 - DNA, 82 bp, Homo sapiens
cggggccccatcgagaaatggccgcgtcggcaggtgtggacactgccagcggctgcagccgacttggaatgacctgggagac

SEQ ID NO: 241857 - DNA, 83 bp, Homo sapiens
cagcgatgctgaggatcgaggaacgttgtctgcaagagtgagccatggagctacgtgtggggaacaagtaccgcctgggacgg

SEQ ID NO: 241858 - DNA, 94 bp, Homo sapiens
gaaaagaacccagaatggttgaaggataaaggaaagtggtgatagtggactggatgggttaggaggaccaggtgtacaactaggaagcccagat

SEQ ID NO: 241859 - DNA, 75 bp, Homo sapiens
tacatacgagaatggcttgtgaaatcatgcctctgcaaaggtgctgactgggttacttttttaaacactaggaat

SEQ ID NO: 241860 - DNA, 98 bp, Homo sapiens
atcgcgttccttaagaaagtgcatgaagaggtggcccgtaagctggtcatcattgagagcgacctggaacgtgcagaggagcgggctgagctctcaga

SEQ ID NO: 241861 - DNA, 88 bp, Homo sapiens
gcgatccgctggcgctagtctgaccctccgccaggcaaaaggaaggtgctggagaatctggtaaaagcaccattgtgaagcagatgag

SEQ ID NO: 241862 - DNA, 90 bp, Homo sapiens
ccaggggctctgggagtggctgccagctgtccaggcagccatcttgtctggagacaagtctgagaatgttcaagatttgctgctcttgga

SEQ ID NO: 241863 - DNA, 51 bp, Homo sapiens
attattccaagcaacagaatgtggaacaatccaaagttttaatcaaagaag

SEQ ID NO: 241864 - DNA, 83 bp, Homo sapiens
ggctgtaaagtcatcacctcctgggatcagatgtgcattgagagattcagttgtggaaattctttttgaacaagataatgaag

SEQ ID NO: 241865 - DNA, 89 bp, Homo sapiens
tacaaagcagccagtatgcattgtcaggagctgatggccacaggtgaccaagaatatggcccaggtgaccaaagccctggacaaggccc

SEQ ID NO: 241866 - DNA, 100 bp, Homo sapiens
cttagttcaatggctgaaacacagtcgaaaagaatactgtgaattatgcaagcacagatttgcttttacaccaagtaacccaggtttttctgccttttat

SEQ ID NO: 241867 - DNA, 100 bp, Homo sapiens
tgaccaggggcttgagagctgggttctattttccctcctcaaactgactttgcagccacggagagatgggaacagcgagagctgcccaacggacgtgtct

SEQ ID NO: 241868 - DNA, 51 bp, Homo sapiens
ctctgaccagcatcgtctgtaaagatatccttggaacagaagatcttattg

SEQ ID NO: 241869 - DNA, 80 bp, Homo sapiens
cctcagttggaagcagccgatccagcctgcggagcctgtggggcaggaaccacgtgaatgttgagggggcgacacacaag

SEQ ID NO: 241870 - DNA, 100 bp, Homo sapiens
gggacatctccagcaccctcatcgccctggccgacaagcacgcaatgctcaggcaggcgctgcggcagaagcaccaggaagcccagcaggcctgccggcc

SEQ ID NO: 241871 - DNA, 100 bp, Homo sapiens
gtggaagcgccgggccctgctgcgggggggagagccactgacgccgggaccgggaccgccgccgccgccgccaccatgggtgtttgtgaaccgaagttta

SEQ ID NO: 241872 - DNA, 88 bp, Homo sapiens
cgtgcactgcgtccctctagagtcatcagtgagttctgcctcagtcagctcccaagtgaggacgcagtcacctttgaagactccggag

SEQ ID NO: 241873 - DNA, 82 bp, Homo sapiens
gtgaagcgtgaggccggcatcgtctttccgtcctctgaggcgacggccgcggctgcacagatgtggcctcatggatgagctg

SEQ ID NO: 241874 - DNA, 83 bp, Homo sapiens
ctgggtgcagttcctgcagtaccccactctacgatcagcagaaaggacccaggagcgataacagtaaatcaaataagatattt

SEQ ID NO: 241875 - DNA, 87 bp, Homo sapiens
gagacgcagatgtggacttgaaagaagctgcagcggaggaaggcgaggacttgaaagaggagattgatattcgactctccagggttc

SEQ ID NO: 241876 - DNA, 75 bp, Homo sapiens
caggtaatgagaatcttcgccttgcggttccccctaaaggactcaaaacgtctaatccaatggttaaaagctgtt

SEQ ID NO: 241877 - DNA, 75 bp, Homo sapiens
agagattgctaatgagatgattgaggcagccaaggcagaggtgatcatgaactaccatgtcggggagacggtgct

SEQ ID NO: 241878 - DNA, 90 bp, Homo sapiens
ctcagattccctgaagctctgctgccccgcaggcaccttcgggccctcctgccttcgtggggaagctgaggcaggaagccctttagtcac

SEQ ID NO: 241879 - DNA, 75 bp, Homo sapiens
accaacttctttggcaagtggacattttactggctcaacttaacaaacaacagttgcagttactgaaagaacggt

SEQ ID NO: 241880 - DNA, 88 bp, Homo sapiens
caatttgtagaggctgcagcacacgagagtgaacagcagaaagaggcttcttggaaacataaccagtttgttagctttaggactgaag

SEQ ID NO: 241881 - DNA, 101 bp, Homo sapiens
ggccgagtcacctagccgggacgtcgtgggatccggaacagttccatcaccgggacagcttcaacacagggtccacagcgtggggcatttcccagtgtcta

SEQ ID NO: 241882 - DNA, 100 bp, Homo sapiens
cagagagctattattccctgtattaaaggttcaaaccttgtactactcagctgatcacaagctgcttgatgggaacctactagatggacaggctgaggtg

SEQ ID NO: 241883 - DNA, 83 bp, Homo sapiens
caagcatgctcagaccttcattgctctgtgtgccaccgccttatgccagcctggaccatcttggaggcagtgtaggatcatgg

SEQ ID NO: 241884 - DNA, 74 bp, Homo sapiens
ggcccagagaccaagatcactgataagaaatgttctcgacagcaaggaatgggaatggaaggcataggatttgg

SEQ ID NO: 241885 - DNA, 106 bp, Homo sapiens
gagggcctgggagcttgctgcagcttcaggagcatcagatccatgctgctgctgactcggagccccacagcttggcacaggctctctcagctcaagcctcgggtcc

SEQ ID NO: 241886 - DNA, 90 bp, Homo sapiens
ccctgctccctctcagcacctgggcggacggtgttgacagctcttctaccacaagcagtgcttctccaatgcccaacagttatgatgccc

SEQ ID NO: 241887 - DNA, 100 bp, Homo sapiens
aactcgcgtttccacttcagagatctggaatcaaacattttaagtccagtgcaggatggaacaaagaaacctcagattgacagcaacaagagcaataact

SEQ ID NO: 241888 - DNA, 90 bp, Homo sapiens
gctgtgcggagctgtgatgctgggcaactacagaaacttggtcttgacgtcattgtccctgagaatggagaaccagtaggcaccagagag

SEQ ID NO: 241889 - DNA, 88 bp, Homo sapiens
ccttgatcttggacttcccatcttccaggaagaacaaatcacctgctgcagtaacagaaccagagacaaataaatttgatagtaccgg

SEQ ID NO: 241890 - DNA, 78 bp, Homo sapiens
ttgtgaatgctgtgtatgataccttacttaatactgcgagcccacaccttaaccgtgctcttcatcctcacctgtacg

SEQ ID NO: 241891 - DNA, 100 bp, Homo sapiens
ctgctgctgctgctgctgctggtggcccctttgcagcttgcaaaccatactgggtacatcaaagttgactggcaacgagtggagaaggacatgaagaaag

SEQ ID NO: 241892 - DNA, 87 bp, Homo sapiens
tttctgagaatacttgctgaaaaggaagttttctggaatgggcagtgaaatcaactgtgcagaccatcactgttggaggagtgagca

SEQ ID NO: 241893 - DNA, 75 bp, Homo sapiens
gctatgacaaaccttcagcctgaagacccgggagggaaaaatttatgggagagctgttcattcccagtgttaatc

SEQ ID NO: 241894 - DNA, 100 bp, Homo sapiens
attaagaaagcagttgctgttcgaaagcatcttgagaggaacagaaagcataccataaagtctccaaaggatggcacagtaaagaaagtgttctacagag

SEQ ID NO: 241895 - DNA, 101 bp, Homo sapiens
attcatacgcagctggcagatattatcatagttgctgcaggatcaaaaccattcaagtgcaagatatgccattttgcaacagctcagcttggagatgccag

SEQ ID NO: 241896 - DNA, 50 bp, Homo sapiens
tgtcaaccgcattattactgaaaaggatggctggctgtggtgaaattgat

SEQ ID NO: 241897 - DNA, 75 bp, Homo sapiens
gaagagctctcctccttcttcctcaactatctcgctgacacgcagatttgtcttcagcgaagcggaagtttgcag

SEQ ID NO: 241898 - DNA, 115 bp, Homo sapiens
ttctaggagcctggggttcggcgctatggaggagctcgatggcgagccaacagtcactgtgaaatgacaatggatgctctgttggctcgattgaaacttctgaatccagatgacc

SEQ ID NO: 241899 - DNA, 75 bp, Homo sapiens
agaccgtgaccgagagcgtgaccgagagcgcgaatatcgtcatcgttagaagggacctgttgcaatgagagtggc

SEQ ID NO: 241900 - DNA, 90 bp, Homo sapiens
gatcttcacagcacagttcctgggaaggtggagccaccagcctctccttggtatgtaaccactgaagtacacacacatgacatggagccg

SEQ ID NO: 241901 - DNA, 100 bp, Homo sapiens
gtcttcaagctcactgccgacttcagggaggatccggacccccgcaaggtcaacctgggagtgggagccctggcctcccacgactacatcctgaagattg

SEQ ID NO: 241902 - DNA, 75 bp, Homo sapiens
ctgctgctgctgctgctggtcccactctgtcaggcagttcctgctccgactggggctcctccaggtggtcagcca

SEQ ID NO: 241903 - DNA, 108 bp, Homo sapiens
cgaacatcacagtacattggtatctacaagacattatagagcacctgaagttattttagggtaattgggatacttctggcagcgaactgagtgaaggggaattggaaa

SEQ ID NO: 241904 - DNA, 75 bp, Homo sapiens
aatggcttccagaggccgacgatctactatgtgatgtcagggcctgcgtggccgattctttgatgaaaatgaatc

SEQ ID NO: 241905 - DNA, 88 bp, Homo sapiens
cgaccaagagggtgttcgactgctagagccgagcgaagcgtctcctctgagcctccggcctccataagacccaaaacagatgacacct

SEQ ID NO: 241906 - DNA, 97 bp, Homo sapiens
gcggacctccagtggccggctccggaggcttggtgactccagtggcccagaactacacgcagtacatccctctgtccatatatgacctgcagacgtg

SEQ ID NO: 241907 - DNA, 83 bp, Homo sapiens
cctgactacgggagttgggaggacccgggacaccgcacagccgggaaatgtgtgcaggatgacagaattcgagtcgaaaggat

SEQ ID NO: 241908 - DNA, 83 bp, Homo sapiens
cgcagtttctcacgacgggccgagcctgccactgtttacccaaggtccagcctagcccctaggcaccatgtcggacagtgatc

SEQ ID NO: 241909 - DNA, 100 bp, Homo sapiens
ccctggcaagtgctgcctcccaaaatggtaaaggccgaggggcaaagaaaaggaaagcatctggctctgaaaatgaaggcgattataaccctggcaggaa

SEQ ID NO: 241910 - DNA, 83 bp, Homo sapiens
cctcggcctcggcgtgctgcgcctccgcggctgccctgcgccagagtgcctggtgaagaatgtgatgggatcactagcatgtc

SEQ ID NO: 241911 - DNA, 50 bp, Homo sapiens
gtccaccatgtgcttttgcacatccaaatggagatgtatgcatttcgatt

SEQ ID NO: 241912 - DNA, 75 bp, Homo sapiens
tttctcagatgttggatatttgcttggaaaaacgtgtgggtacgaccttggaacctctttcaggagctataaaag

SEQ ID NO: 241913 - DNA, 100 bp, Homo sapiens
ggataacacaagtcccttgccgagacacgctgtgaacaagacaggccttccccaaccacagcgccccctgcgccacccagcccctcgccctcacccgtgc

SEQ ID NO: 241914 - DNA, 99 bp, Homo sapiens
tgttggtgacaacaccgtggccctgttctgggatgagcaaggtgtaaaggcgtgcaatggaattgagttttgccctggtaaatgggaataatatccgag

SEQ ID NO: 241915 - DNA, 50 bp, Homo sapiens
tttaaacaagagatttccacagaaggtttacccaaggtccagcctagccc

SEQ ID NO: 241916 - DNA, 99 bp, Homo sapiens
gcaggagtacaggaggagtgcgcaggacggcccagccccagcagtgagacggtttaagcggaagcatcttactgccattgactgccagcatttggctcg

SEQ ID NO: 241917 - DNA, 100 bp, Homo sapiens
aaagcctgaagaccccggagcccctttagccatgtggatacctacggagcacgagaaatacggcgtggggcctgctttcttccccgggcgatgtgcagag

SEQ ID NO: 241918 - DNA, 100 bp, Homo sapiens
ggaagcttgacgcgcacctgtgcaagcacacgggggaggtggcattggtgaggctgtgtccagtgcagtagtgggcgagcctggcatcactgtcacccac

SEQ ID NO: 241919 - DNA, 75 bp, Homo sapiens
ctcctgtcgctgcccgtgtgattactgagactcagattgggaaaatgaggtacgttagtgttcgcgattttaaag

SEQ ID NO: 241920 - DNA, 100 bp, Homo sapiens
ggtgttcggtccttccgaggaagctaaggccgcgttggggtgagaccctcacttcatccggttcatcatgcctagtggcgtataagaagaccccgccacc

SEQ ID NO: 241921 - DNA, 100 bp, Homo sapiens
gatgtttggaaatgatacaattacctgcacgacacatggaaattggactaaattaccagaatgcagggggtggctgttgcaccacgccctccctcctgcc

SEQ ID NO: 241922 - DNA, 100 bp, Homo sapiens
cgacaaccttcccagaaagtccaagctcgtgggtatacagggagctaccctgtgtttctgagaccctttgtgacatctcacattttttccaagaagatga

SEQ ID NO: 241923 - DNA, 80 bp, Homo sapiens
ttcatctgtggatggagtattggtgtgggcaataatagtgaaggtggaagaggaaaggcaggtgcaaagcttttccaaga

SEQ ID NO: 241924 - DNA, 96 bp, Homo sapiens
tctaattcaacaaatcataacttggtttttcgttggaatatacgttgcacatttatggcgattctgagtgtgagggcagacttctgccaggctcag

SEQ ID NO: 241925 - DNA, 80 bp, Homo sapiens
ctggagacatggaccgcggcgagcaagatccctgcatgtcactgagtccaccatgctttacagaagaagacagatttagt

SEQ ID NO: 241926 - DNA, 75 bp, Homo sapiens
tgtcaacacttttaccttctaccattgatggtttcctatcctgggagcaggagagtgtgcctatttgaatgacaa

SEQ ID NO: 241927 - DNA, 83 bp, Homo sapiens
acacactatggcgctgaaacggattaataaggaatggaaactgaaagtggaaatcaggaaaaggtaatggaagaagaaagcac

SEQ ID NO: 241928 - DNA, 83 bp, Homo sapiens
cgcccgccggatcccccggaccccccgaccattacagccacggccttcaggagtgaccatagacgaatcctttctcacagaag

SEQ ID NO: 241929 - DNA, 100 bp, Homo sapiens
ccagagacgggagtcctgggcccagagccgagatgagcagaacctgctgcagcagaagaggagatggtaacctgcacctcaatgtgacggcggaggcctt

SEQ ID NO: 241930 - DNA, 101 bp, Homo sapiens
ggtctgctggtgggactcaatgttctcgatgccaatctctgcttgaaaggagaagacttggattctcagaggaagttcagaagcagaaggaactttccaaa

SEQ ID NO: 241931 - DNA, 75 bp, Homo sapiens
cggaagctcctggaggtcagaggccctttcatcatcaggttctccttactatgacaatgtccgccccctctctta

SEQ ID NO: 241932 - DNA, 100 bp, Homo sapiens
tcagagatccaagtgcgcgccctggcgggtccggaccaaggtgctgctgttttttcaaacgaaggaaaaggaaaaccatacagcgccacaaatgactctg

SEQ ID NO: 241933 - DNA, 82 bp, Homo sapiens
cggggagtgtgtgttgccatcgcgtctccgcctgcagcaagagtgagccatggagctacgtgtggggaacaagtaccgcctg

SEQ ID NO: 241934 - DNA, 74 bp, Homo sapiens
gagtgcagacctgcatcaacctgatcaccagccaggagtacgccgtcaagatgcaagtgctgctggaccaggcg

SEQ ID NO: 241935 - DNA, 88 bp, Homo sapiens
caaatgtaatttataaacgtgatgttggaggccatgaagcccccaggaggagaatcgagcaatctttttggaagtccagaagaagcta

SEQ ID NO: 241936 - DNA, 100 bp, Homo sapiens
cagctgcagcaggagattaccagagtattgggaaagggtcgttgtggtgcatagacccagagtatagacaaaatctaattcaggctttgaaaaagacacc

SEQ ID NO: 241937 - DNA, 100 bp, Homo sapiens
cttctgttgctctgggacctgcaggtcccggaaggtccttagggaggaccccagacaccggagactgggaaatgtgattcgcctttgccagtctcatctc

SEQ ID NO: 241938 - DNA, 50 bp, Homo sapiens
ccgacagccaggcccgggagaagcagcctgcttctgcaaagtggtacgat

SEQ ID NO: 241939 - DNA, 76 bp, Homo sapiens
tttgagtgctgtctccatgtttgatgtatctgagcagctcatcacaggcaaggaagatgctgccaataactatgcc

SEQ ID NO: 241940 - DNA, 100 bp, Homo sapiens
tgcacgacgtgggaggctacccagaggcatcctgacatcgaggcccaggagagaggagtccggtgtctacttgagaaacagctccccaatggcgactggc

SEQ ID NO: 241941 - DNA, 135 bp, Homo sapiens
ccggctccatctcagcttctggtttctaagtccatgtgccaaaggctgccaggaaggaggtgcaaagttccccatcaagtggacggcccccgaggcagccctgtacgggaggttcacaatcaagtctgacgtgtg

SEQ ID NO: 241942 - DNA, 75 bp, Homo sapiens
gaaatgtcatgcctctgaaaatgaagcagcttcatggagtttggccacaagatgttgttgacggaacgtgtgtag

SEQ ID NO: 241943 - DNA, 83 bp, Homo sapiens
ataaactaaaaacagatctcaaacgccatcaggtgaaaaaccatacaagtgtcaaatttgcaatcagtcttttagaattaaga

SEQ ID NO: 241944 - DNA, 82 bp, Homo sapiens
cgcgcgctgagggtctcggggcgggcgccgcgggacctctccgggccatgggtggctattatcatggaaaactaatttttcc

SEQ ID NO: 241945 - DNA, 83 bp, Homo sapiens
ccacacttcgcgccgccaatggcaagttggagggagagatgcaaataccaggtgagaagccctaccactgcaactgggacggc

SEQ ID NO: 241946 - DNA, 90 bp, Homo sapiens
aggacattgttggtgacttcagaggcttctataggcagctcacaagtgatgggcagctcagatggggtcttaccaggatgtgcttccagc

SEQ ID NO: 241947 - DNA, 100 bp, Homo sapiens
cagaggcccggcacccccgcacaggcgcctctgccctgcacgtggctgctgccaagggctacattgaggtgatgagaaaggagaatcacttgaacccagg

SEQ ID NO: 241948 - DNA, 75 bp, Homo sapiens
caagaaaatccatgctggcgatgaagtgattcaagttaatcatcagactgtgctgtggccagaagagctccgaag

SEQ ID NO: 241949 - DNA, 100 bp, Homo sapiens
ctgcgctcatcttcttcgccatctggcacaattccttgtgtggatatcagatccggatggaatctcgagcttgtgaatctaccaggttactctattgtac

SEQ ID NO: 241950 - DNA, 75 bp, Homo sapiens
gctgaaatggcaccacagatcgattatacagtgatggttttagctgaaaaggttcatatgagagctatgtccatt

SEQ ID NO: 241951 - DNA, 99 bp, Homo sapiens
gcctgctcttgaggttcacagatgatacctttgatccagaacttgcagcaacaataggctcttctcaaccatctgtgagtccaggggaaccgtctccac

SEQ ID NO: 241952 - DNA, 74 bp, Homo sapiens
aatgcaagaagactgatggagcaggcttgcaatattaaagagctggacacaccatttagactctatggactgac

SEQ ID NO: 241953 - DNA, 100 bp, Homo sapiens
gtcttcacttggaaacagaatcacgccttgtgaagagatcatccctaagcaggagagaagctactaaagcatgattctggaacagagtgcacaccaggag

SEQ ID NO: 241954 - DNA, 100 bp, Homo sapiens
ctggggatcgctacggaccttaaaatacccgcaacagccccttcgtcccaagaatccctaacactggaggatgtggctgtggacttcacctgggaggagt

SEQ ID NO: 241955 - DNA, 98 bp, Homo sapiens
aaagcttgaattacctacatggtaaatattccggattggattgttgaccttcgccatgagttgacccacaagaaaatgccccatataaatgactgccg

SEQ ID NO: 241956 - DNA, 100 bp, Homo sapiens
cgtgtggcgatgtcttagacaatcttaaaggagactgctatcaggacccagatgatgtggtaccagttggccaaagaagagcctggtgttggtgcatgtg

SEQ ID NO: 241957 - DNA, 75 bp, Homo sapiens
cagtagatgatgatgtagcagaagagactctgacctgtttttgttggacacccgtgtagtatgggcctcagaaga

SEQ ID NO: 241958 - DNA, 100 bp, Homo sapiens
atttctgaagactattgtggaagaagcatccattaagatcaaccaagttacccatgatcaagcagtggtgctacaaagtgcccttcagagcattcctaat

SEQ ID NO: 241959 - DNA, 100 bp, Homo sapiens
agcattctccagggaaaggatgacatatttttggacctgaaacagaaattctggaacacctatatggccctgggcagtgacggggttcgggtgaccatgg

SEQ ID NO: 241960 - DNA, 51 bp, Homo sapiens
gtcgcatggattgattaacgtgtacaagaagctggaagaccttctggagaa

SEQ ID NO: 241961 - DNA, 100 bp, Homo sapiens
gccacctgttcctcagttccaaccacagagaaaattcctgttccaagagaaaataaggcaacatcaatgaaggagagaagagccagccagaaattatcca

SEQ ID NO: 241962 - DNA, 101 bp, Homo sapiens
ctgggtttcccgggagatcccaggcggtgacagagtggagccatggctagagggagtaccctgacttctaccggaagctctacggcctcttggacccctct

SEQ ID NO: 241963 - DNA, 75 bp, Homo sapiens
caatgatgctcactgaaagttgtaagctgcgaggtcttcatcacaggttcttgggtgtctctggggagtccctgg

SEQ ID NO: 241964 - DNA, 83 bp, Homo sapiens
gggaccggcggcgcgcggcggccgaggccagtgttctaagaacggaagcatctgggctggatggaatttagcatcaagcagag

SEQ ID NO: 241965 - DNA, 98 bp, Homo sapiens
tccggctcctccagctaccggcccaaggccatctacctggacatcgatggacgcattcagaagcgctgtgcttcgccgtgagccgctcgctgctgctg

SEQ ID NO: 241966 - DNA, 94 bp, Homo sapiens
aggcattctgatgggaacttgtgtgttaaagtaacagatgatttagttgtgaccaagaatatggcccaggtgaccaaagccctggacaaggccc

SEQ ID NO: 241967 - DNA, 82 bp, Homo sapiens
acagtgaagaagaaattagagaagcattccgtgtgtttgataaggcatttttagatgaattcactaactggtcaagaataaa

SEQ ID NO: 241968 - DNA, 82 bp, Homo sapiens
cgcggatcgaccggagcagagagctggcgagcaaggctgaaggtgatgtggccgccctcaaccgacgcatccagctcgttga

SEQ ID NO: 241969 - DNA, 50 bp, Homo sapiens
agaggagctgaaagtagatgaggtaagaatgattgatgttggctgatatt

SEQ ID NO: 241970 - DNA, 98 bp, Homo sapiens
gatgtctcttcttctattagcacttactgggattggtcagatagcgagtttgaatggcagaacatggtttcattggatattcacccgaactgctacag

SEQ ID NO: 241971 - DNA, 83 bp, Homo sapiens
gagcgctcgcgagcggctgcgggacgcgaggtttccggaccatggtgaatccgggcagcagctcgcagccgcccccggtgacg

SEQ ID NO: 241972 - DNA, 95 bp, Homo sapiens
cggaggaccgtgtcggagatccgctcgcgcgccgaaggccgagacgcatccagagctttcgtgaccggggactgttctgaagcaggcctcgtgga

SEQ ID NO: 241973 - DNA, 82 bp, Homo sapiens
taacgactccgaagaggttgcaagtatttatactccaaccccaagacaccaagcaaagtacccacgtttgttcgaatgctgg

SEQ ID NO: 241974 - DNA, 100 bp, Homo sapiens
aaatcactggcagattccggagttagcccgaaaagttaatacagaggttcaccaagttgaagagtcttaacctttccaataatcatttaggggacttccc

SEQ ID NO: 241975 - DNA, 87 bp, Homo sapiens
aaaacaagcaaatgctgccttccttgttggatgctacatgtgacatgggctcgagggttggctaccccgctcaggtttacaaaactg

SEQ ID NO: 241976 - DNA, 98 bp, Homo sapiens
gccggaagtcgtcttcatcctgggggatatctttgatgaagggaagtggagcacccctgagtcccttaagctcctaggatttttagatgttgaaaata

SEQ ID NO: 241977 - DNA, 83 bp, Homo sapiens
cgcagcaccatggcgaccaccgtcagcactcagcgcgggccgacttcccaagtaagaagcggaagaggagccgctggaaccaa

SEQ ID NO: 241978 - DNA, 51 bp, Homo sapiens
gaacctttaagcgtaacagagtcacctgcttctgcagaaagccgtcattac

SEQ ID NO: 241979 - DNA, 88 bp, Homo sapiens
agtgctattgaaacagcctgaagaatgcaatcttaatttgcctgtatgggacccaaggaaagcacagctgagtacaagctaactggag

SEQ ID NO: 241980 - DNA, 100 bp, Homo sapiens
gtgtacttgggaacgaggggtgaagcggcccaggtgaggactctaaaatagagctcaagcttgagaagagagaaccactaaagggcagagcaaagactcc

SEQ ID NO: 241981 - DNA, 75 bp, Homo sapiens
cttctacaaacccatttcagaccaatgccagaggagcaacagcctttggaggtgagaagtggaaaacaaatgttt

SEQ ID NO: 241982 - DNA, 100 bp, Homo sapiens
aacacagacgtggtcacagaggagatgcttcaagaggctgccagcctggagaccagctgcccatctgtgtcctactcctcggacctgccagccaccagcg

SEQ ID NO: 241983 - DNA, 83 bp, Homo sapiens
ccaggtttctgcacaggaatatcgagagcgtcatgaacccgagctatagagaaaggagatgagactcggtgaaatacctggag

SEQ ID NO: 241984 - DNA, 88 bp, Homo sapiens
aaagaacggcagtaaatacgggcccgacgggctgccctacctcaaggttctcaaggagacggtggctcagggagtaaaggaaggccag

SEQ ID NO: 241985 - DNA, 99 bp, Homo sapiens
cctgcatggagtcttgtgaaatcgcgtggactgcaacacccagcagcgcggtgctggagaatctggtaaaagcaccattgtgaagcagatgaggatcct

SEQ ID NO: 241986 - DNA, 100 bp, Homo sapiens
cggcgcccccgagcgggaatcagaacggcgccgagggcgaccagatcaacgccagcaagaacgaggaggacgcggggtcaaaatgcagatcttcgtgaaa

SEQ ID NO: 241987 - DNA, 88 bp, Homo sapiens
cagctggagcgcattggactgttcagtcatgcggagattaagctcaacgagaacctttgacaagagcacgaagtgaagaaatggggag

SEQ ID NO: 241988 - DNA, 98 bp, Homo sapiens
caccgccccaggcagcggccacaccatccagaggctgggaggcggcagaatgcagccagaggagggcacaggctggctgctggagctgctgtccgagg

SEQ ID NO: 241989 - DNA, 98 bp, Homo sapiens
atgtgatgttggagaactatagcaatctggttttcttggtggatccaaacttctacagcaaaaacttacttcttttaggaaagacatacttgaaacta

SEQ ID NO: 241990 - DNA, 90 bp, Homo sapiens
cacctcaagaggaacatcgtggtgaagaccgtggagatgcgggatggagagcacttcgtgaggcagatgtagactgcttgactttaggac

SEQ ID NO: 241991 - DNA, 97 bp, Homo sapiens
tgtattctttacctgcttcccaatcccactgatgaggatcagcccatgcctaccgatgttcaccgtgctcaggaaattcaccattccacttacctta

SEQ ID NO: 241992 - DNA, 83 bp, Homo sapiens
gggatcgaccgggacagctaccggcgcatccttatgcgtccagcctgcatgccgtgcggactgcacccaccagcaaggtgatc

SEQ ID NO: 241993 - DNA, 78 bp, Homo sapiens
aatttcccagctgctaaaggaagaggaagtcatccgtccttggctcaggatttggagagcttgcaccaccaaaaatgg

SEQ ID NO: 241994 - DNA, 100 bp, Homo sapiens
aaagttagaccttccagaacctggctttgaagacaagattcccaaaaggagattctctgagatgcaaaatgaaagacgagaacaggcacagcggactgtt

SEQ ID NO: 241995 - DNA, 75 bp, Homo sapiens
tcagctctcggcgcacggcccagtgccggtggtggtgtgcacattgagccccggtatagacagttcccccagctg

SEQ ID NO: 241996 - DNA, 100 bp, Homo sapiens
ggagccacgaaaatcaacatcacggagatgtacaagagcaacaactatttggcttccttcaaaatgtctactgttcacgaaatcctgtgcaagctcagct

SEQ ID NO: 241997 - DNA, 75 bp, Homo sapiens
aaagaacaagagaagacctcagatgtgaagtccattaaaggacacattcagctaacgtattttagcaggtggagt

SEQ ID NO: 241998 - DNA, 101 bp, Homo sapiens
ggcttcagtgaaataaaggagcaagaaatgttcaaaggaacaacatctttaccatctcatctcaagaatggaggggaacaacctatcttcagcactcgagc

SEQ ID NO: 241999 - DNA, 82 bp, Homo sapiens
ggtgcggcaagatcgtgtatcccacggagaaggtgaactgtctggataaggttgtgaccgagattcccgacgagagagactg

SEQ ID NO: 242000 - DNA, 90 bp, Homo sapiens
cagaaaggctatctgaagaaaagtagaaggaaaaacagaacgttgcaaactctggaaaaaaacttggatactttcattcagaaaaccaag

SEQ ID NO: 242001 - DNA, 99 bp, Homo sapiens
tggtgcgcaccgatgaggacggcttgatggtgtcaggctatgctgtgactggggctgtcctgggccaagacaggctgatcaactatgccaccaatggtg

SEQ ID NO: 242002 - DNA, 75 bp, Homo sapiens
aagggttgtagacatggcggccatcagggatttgtactgtgttcgcagtgacctggggaacctgctcaaagccct

SEQ ID NO: 242003 - DNA, 75 bp, Homo sapiens
ggcaatgttttgaaactggcaaaatcagagcccatggatttcagaaaattatctacattcagagaaagttttaag

SEQ ID NO: 242004 - DNA, 95 bp, Homo sapiens
atacaaggtattcacacagaccacaatacactgaatttgaaagttgagagcagcatgttttgcccactgaaactcatcctgctgccagtgttact

SEQ ID NO: 242005 - DNA, 75 bp, Homo sapiens
tacacgggcggcgaggactgcacagccaggatctgggacctcaggccactgcggacgatgcggagaccagtgagg

SEQ ID NO: 242006 - DNA, 101 bp, Homo sapiens
cttgttggggccctcttgataaaaagagatgtggggggattctcgacctgctaacagaactggaccttttcgcaaagaacagtctgaacttgatcaagatt

SEQ ID NO: 242007 - DNA, 75 bp, Homo sapiens
aaaccatggaggagcactgcaagcttgagcaccagcagacagcctgaccctggattctggccttctcatgacctc

SEQ ID NO: 242008 - DNA, 98 bp, Homo sapiens
ctacgcgtatgtgaacttccagcagccggcggacggaggaatgccagctcctgagcaggcctcattggtggaggaggggcaaccacagacccgccagg

SEQ ID NO: 242009 - DNA, 100 bp, Homo sapiens
agagctcagctccgtggcagccggcaagggtgattcggacctcatggagcctgtattccgatacctggccaagagctgtcagccttgatgcagcgcctgg

SEQ ID NO: 242010 - DNA, 74 bp, Homo sapiens
acattcaggcaaatctggaggatgagttagtaaaggaagctcttaaaacggtgtccctggccagtgtccttcca

SEQ ID NO: 242011 - DNA, 99 bp, Homo sapiens
taacagaagaggaactattggacagagaatttgaccttctaagatcaagaagcatagtgagtgtgggcgatcctaagaagaaatatacacggtttgaga

SEQ ID NO: 242012 - DNA, 101 bp, Homo sapiens
cctcggcccggccctgaggatggacccaggagatcccgctggtgaccctgccgctggcgagcgccaccgcatgggagcaggccgggctctcgccatgggtc

SEQ ID NO: 242013 - DNA, 95 bp, Homo sapiens
gccgagatgacgggctttctgctgccgcccgcaagcagaggttctcggtgagatgactgagctgctgtcctcctccagaaactacgacaattacc

SEQ ID NO: 242014 - DNA, 74 bp, Homo sapiens
gcaaaggcttgagtgacatccaccacaggacacctgctccacttcaccttttgccatgagtaaaagctccctga

SEQ ID NO: 242015 - DNA, 75 bp, Homo sapiens
tgctcctgtgatctgaaggctgcgtgaagaagatgaggcttggaaaatagatatggctcgtggacagcagaaaat

SEQ ID NO: 242016 - DNA, 100 bp, Homo sapiens
gaaagatgcgctctaagaaagaagattcctctgacagtgaaaaagcttgtggtgaaggggggcaaaaaaaagaagcaagttctgaagttcactcttgatt

SEQ ID NO: 242017 - DNA, 100 bp, Homo sapiens
cagtctccactggaaaaaaagatcttggaaccagtgaccttccgggatgtggctgtggactttacccaggaggaatgggggcagctggaccctacccaga

SEQ ID NO: 242018 - DNA, 100 bp, Homo sapiens
gagttcgtctcttacgtctgcggaagtgcagctgcctcagttcttagcgcagctggaccagctattccttctgttgtggcgtatccgaaaaggagtcaga

SEQ ID NO: 242019 - DNA, 102 bp, Homo sapiens
tccctcgaactttaaagtccgcttctttgtgttaaccaaagccagcctggcatactttgaagatcgtcatgggatgtgtatatctcatgattgatatggaga

SEQ ID NO: 242020 - DNA, 100 bp, Homo sapiens
gattctcatctgcccataatcatggacacagccccaggatgtgcagggttttggcccgaaccgcgacttcaacaaaaaataagagaagaaaggaatattt

SEQ ID NO: 242021 - DNA, 100 bp, Homo sapiens
tcatatggacagatggacttcaaatgctgtttgtattccagagactagagctaatccagacagagctgcaccatgtgaggacactgaagatcatgacccg

SEQ ID NO: 242022 - DNA, 100 bp, Homo sapiens
ggcggccgtgtcagtttggggcatctccgcggtccggcccggggccccgggatctcggctgtccttcctcccggttgcactgctgtgatccatcctcatc

SEQ ID NO: 242023 - DNA, 75 bp, Homo sapiens
attcgcagtggtcgcttcttctccttgttcatttctgtgtgacgtgaccatgaaatcagtggatggaaaggaatt

SEQ ID NO: 242024 - DNA, 90 bp, Homo sapiens
aaggaaggcaagcctgcctgcttctgcatcgacagatagccgtcttcagcttgagccccatcactaggctcttgtcaggatggtgaagct

SEQ ID NO: 242025 - DNA, 102 bp, Homo sapiens
gtgtggttaaaaactttatgattcagggtggggacttcagtgaaggaggagatgttaaagtaacccatcttgcaggacgacattgaagattggtcttctgtt

SEQ ID NO: 242026 - DNA, 90 bp, Homo sapiens
ttttctggtcttcacttttttgaggcaggaagagaatgatgaggagcaggaggcactgccatctctggataaacctggctggtactccca

SEQ ID NO: 242027 - DNA, 100 bp, Homo sapiens
ttactcttctggatgatgaggatcataaattggaatatttgaaaatccaggatgaacaacacctggtaattgaagatatgattgacaatctgctgtcccc

SEQ ID NO: 242028 - DNA, 75 bp, Homo sapiens
cccatgcacctccgaagggcctacatgagtgttcttcagacccagaagaagaaagtgttctctactccaaccgag

SEQ ID NO: 242029 - DNA, 96 bp, Homo sapiens
acgcggcgccgcggcccgcctggcctgcagcgctcccacccccggcggcggcacgatgccctttgacttcaggagttaccgaagtgcatgtttggg

SEQ ID NO: 242030 - DNA, 90 bp, Homo sapiens
cagggggcgagcatggccgctccgcgaggcaagattgtggcagagcgtcctggcactaactcaacaggccctgcacccatggcccctcca

SEQ ID NO: 242031 - DNA, 100 bp, Homo sapiens
tgaccaagatgctatgtgagatcttgaaagtgggcgagttgcaattacagaggatcatgtgattcagcatgggctggtagtggatgggaccagcctatct

SEQ ID NO: 242032 - DNA, 90 bp, Homo sapiens
tgcgtgggggaccggctgttggcgggaaagaccacagcaagattctttcattcgtctcctcctagcctgggggaccaggctcgaactgac

SEQ ID NO: 242033 - DNA, 96 bp, Homo sapiens
ggagcatgggttaccagcgacgcaccctaggcggggtttcaccatgttgcccagactggtcttgaactcctgagcttaagcaatccacctgcctcg

SEQ ID NO: 242034 - DNA, 76 bp, Homo sapiens
gcctcaagggcttcagcaccgcgcccatggcagagccagaccgttaaagctgaagctcaacaaagatatagtgatc

SEQ ID NO: 242035 - DNA, 100 bp, Homo sapiens
atcggacactacgtgctgggcgacacgctgggcgtcggcaccttcggcaaagtgaagacctccgggaggagttcctgggacacagccattgctgcccaat

SEQ ID NO: 242036 - DNA, 100 bp, Homo sapiens
gcgcctgtcctctccaagatgcagttttttgatgctgaggagctcctggtcgatgaagaggatgatgtttttggtgaagacatgccttgaattggaacgc

SEQ ID NO: 242037 - DNA, 98 bp, Homo sapiens
gggcggcaccgcgatcatcaggtggcagctttgagtgagcgctatgacaaattgaagtgctgctcaacaagagttcgaagacaactggacaggaatct

SEQ ID NO: 242038 - DNA, 75 bp, Homo sapiens
gaggcagaggtaaacttggagagacgctgcatccaggtagtacacaaactgctctgctaccagaagaagtgtcgg

SEQ ID NO: 242039 - DNA, 75 bp, Homo sapiens
aaatctcccaaaatctccagagctagcaaatcacccaaactcccaagtgatcctgccatgaagcagtttctgctg

SEQ ID NO: 242040 - DNA, 51 bp, Homo sapiens
agcggctctcataaagatctggctggcaaccttgatacatcatcaaaggca

SEQ ID NO: 242041 - DNA, 90 bp, Homo sapiens
cttccgacgtgggcggtgggccccagccccacagaccagcccagcattcagatgcctgaaatgtgcagatgccccgtgtcagaagagctg

SEQ ID NO: 242042 - DNA, 100 bp, Homo sapiens
ggaagattagcggccatgtattccaatgtgataggaactgtaacctctggaaaaaggaaggaaaacaggcttcgttggctgcagacttctccatcactca

SEQ ID NO: 242043 - DNA, 100 bp, Homo sapiens
ctcccagctacagagggtaccgggatgcctgcaccattactgaccctggaagctgtcctgaatttcaaatactctggaggcccgggccacactgaaggat

SEQ ID NO: 242044 - DNA, 75 bp, Homo sapiens
gactttgctccagcctggcttaatttccctactccaccatcatcaacaaaggaagagtctaacctgtctctgcaa

SEQ ID NO: 242045 - DNA, 75 bp, Homo sapiens
gtaggaggactcgcaggctatcctggaccagctgaggagatgttaaagtaacccatcttgcaggacgacattgaa

SEQ ID NO: 242046 - DNA, 96 bp, Homo sapiens
gccggtcctctcgcacgtggagagcggaagaagagtgtagttgagagctcggccccaggagccaataacctgcagctccaagaggccttcgggtgg

SEQ ID NO: 242047 - DNA, 100 bp, Homo sapiens
ataatccagattttgatccagaagaggatgaacccacgcttgaggcctcttggcctcacatacaggatcccagaacctcaaaaacctcaactgaagccac

SEQ ID NO: 242048 - DNA, 100 bp, Homo sapiens
atgagtgttcctgtggtctctgcacctcctttctggccgttgctccagggagaactgcaaatatcttcatccacccccacatttaaaaacgcagttggag

SEQ ID NO: 242049 - DNA, 51 bp, Homo sapiens
gaactatagcaatctggttttcttggcctgaacccccgccaacaaacaaat

SEQ ID NO: 242050 - DNA, 98 bp, Homo sapiens
cagacgcgggcgagctgcggctcggacgccagcggacacgcgggcgaggacatgtctcaggaaggctatggaactagatctcaacctcctctggcccc

SEQ ID NO: 242051 - DNA, 89 bp, Homo sapiens
agtatgaacccaacaacagcctcgccagaaaaggtgttacagaacatcctggacactgaaaaagaatatgctaaagaacttcagtctct

SEQ ID NO: 242052 - DNA, 75 bp, Homo sapiens
tttttggtgtctcccagtgatcaaaaagagagtggttgtgaatgttgtaccatctttgggtaggcagacttccct

SEQ ID NO: 242053 - DNA, 75 bp, Homo sapiens
gcggttcttttataccaagtccttcgtgaagcactccatggaggtgaccctggcaaagatgagagtgcacatttc

SEQ ID NO: 242054 - DNA, 75 bp, Homo sapiens
tggcgtcttccgtgggcaacgtggccgacagcacagaggaacaatcctgcaccatgactcaacagccacttcgag

SEQ ID NO: 242055 - DNA, 100 bp, Homo sapiens
ctaaatagagtttagtaacatcgtaaaaaggaacattaaccaggtggtatttgttggaaatttcttgagaattaatacgatcgccatgcggcttttggca

SEQ ID NO: 242056 - DNA, 127 bp, Homo sapiens
caacaatacattaaaggctgataataacacagttattaatggactgcttggaaatatagctagagaccgttggatggcagcttaaccttcagatggctcactctgctcaagcaaaactaaaatctcc

SEQ ID NO: 242057 - DNA, 109 bp, Homo sapiens
tcctgaggttttcctaagccatcccctggcggaaccgcccccagaccagatgatgtgcttctgcatcgcactcatgatgagattgtcctcctgcattgcttcctctggc

SEQ ID NO: 242058 - DNA, 50 bp, Homo sapiens
ccacaccaggctgcacaggcagagctgtggtgctcccattcaagtttccg

SEQ ID NO: 242059 - DNA, 90 bp, Homo sapiens
gaaagctagaagaaaaggtgtacttgcaagaaacctcaggacttgagtaacagcaacatgagtgatcagcagctggactgtgccttggac

SEQ ID NO: 242060 - DNA, 100 bp, Homo sapiens
gcggcggcggcggggatcgtctccggcagtgctggagaatctggtaaaagcaccattgtgaagcagatgaggatcctgcatgttaatgggtttaatggag

SEQ ID NO: 242061 - DNA, 80 bp, Homo sapiens
gcagggtcagccaccagggctacagcactgaggctggtgagaagccctaccactgcaactgggacggctgcggctggaag

SEQ ID NO: 242062 - DNA, 100 bp, Homo sapiens
ccgaagctaagagcccccttcagtcgcagcctcactctagggcctcactctggagctcctgcgtggtgctgcccctgctggcgctcacctggatgtctgc

SEQ ID NO: 242063 - DNA, 100 bp, Homo sapiens
caaggtcagaaggaagcaccacacagaggactcaagcacagagggttcggaaaccgcgttgctgcacggggccccaggggctgcttccccgatattctga

SEQ ID NO: 242064 - DNA, 100 bp, Homo sapiens
cgcggacatcgtctcctgtgtggcgatggtcttcctgctggggctcatgtttgagagagaagaagaaggaggttcctgctgtgccagaaacccttaagaa

SEQ ID NO: 242065 - DNA, 100 bp, Homo sapiens
ttccccgccaaccgcaaccattgacgccatgtcgggttattcgagtgaccgagaccgcggccgggaccgaggacccgggaaaaggagaagatgaaggaag

SEQ ID NO: 242066 - DNA, 100 bp, Homo sapiens
tgcagagattgtctcggctcttgagtacttgcactcgcgggacgtggtataccgcgacatcaagaacctgtctccagagaagattttccacgtcattgtg

SEQ ID NO: 242067 - DNA, 89 bp, Homo sapiens
ctgggcttgggatctgacaaaggactccaacagagcaagatccacaagaaggtgctgtggtggttctccctgcagactctcagcagcgt

SEQ ID NO: 242068 - DNA, 98 bp, Homo sapiens
aattacagctactccagcaacatcttgtccataaggctgaaccggcaagaaggaggctgcagtgtgccagtagccgtgcatacagctatgaaggatgg

SEQ ID NO: 242069 - DNA, 97 bp, Homo sapiens
ggtgaaaaacctttccaagctcaaaaacaagggccgagatggacgaaaaaatgtggttccttgtgttctctctgtaaatggggacctagaccgaggc

SEQ ID NO: 242070 - DNA, 82 bp, Homo sapiens
agctcaagcaagggctgtatgagctctcagcaagcaactttgagctgcacgttgcacaagatatggtccggcttgctttcac

SEQ ID NO: 242071 - DNA, 82 bp, Homo sapiens
gtaccgaacagatttgcttgttgggtcgaacttgtggctattcatttattctcaccaggtttgaaagatgatgacagtgggg

SEQ ID NO: 242072 - DNA, 82 bp, Homo sapiens
gtggccaacgcgcaggagctgctgcagggttgtgagtcccggcccagcccctccacccccctgcccccccgatgcgaccatg

SEQ ID NO: 242073 - DNA, 102 bp, Homo sapiens
aggagattcgcaagaccttcaatatcaaaaatgactttactgaagaggaggaagcccagtatcacaggtatattgaaattgctataaagcagtgcaggagct

SEQ ID NO: 242074 - DNA, 107 bp, Homo sapiens
cgaagccacagaaaccgtccctgctacagagcaggagttgccgcagccccaggctgagacaggagagaagatgactgaggaggaggtggagaccgttctggcaggac

SEQ ID NO: 242075 - DNA, 82 bp, Homo sapiens
ttttgaaaaaaagtggacagatactttcaaattgacattttgctaaaggctgtgggagacactcctattatgaaaacaaaga

SEQ ID NO: 242076 - DNA, 83 bp, Homo sapiens
caataagcagacagaagagccaagcagctatggaggaaaatcagtgatgatgaatgtcttgaacaaaaaccagctcagcccgg

SEQ ID NO: 242077 - DNA, 97 bp, Homo sapiens
ggaagaacagcctgaagaagggctccctcgtgaagaacctgaaggacacactaggtgtcatggagaaactccagctgggcccagagattctgcagcg

SEQ ID NO: 242078 - DNA, 100 bp, Homo sapiens
gccaggtggagcggcaggaaggccactcacagggcttcaacaagctagctgagggtgcaacaccggaggatttcagcaacctcccacctgaacaaagaag

SEQ ID NO: 242079 - DNA, 74 bp, Homo sapiens
tgcaggtgaactcacagccaatgaggaacttgaggctttggaaaatgacgtaattatggtgacaagctgaacat

SEQ ID NO: 242080 - DNA, 83 bp, Homo sapiens
acatcaagcagaatgtgatttgcttgaagatatgagttcactgagacttttttgacggagagggacaaacaatccaagtggag

SEQ ID NO: 242081 - DNA, 100 bp, Homo sapiens
gcaaattgtagacaaaaccataataaatgcagataaggatggagatggaagaatatcctttgaagaattctgtgctagctccttaataagcatttatagt

SEQ ID NO: 242082 - DNA, 50 bp, Homo sapiens
aagaaacccagcttgatatgttgagtgatgatgcgggtgtgctggttggt

SEQ ID NO: 242083 - DNA, 75 bp, Homo sapiens
ctctgcgaaaggccgagagaagctggtcctgctcacgagagaaaaaggagactccaattccagggtttcagaacc

SEQ ID NO: 242084 - DNA, 50 bp, Homo sapiens
gccgcgtccttggctggcgtctgtgctgactccttagttgctgagatgag

SEQ ID NO: 242085 - DNA, 75 bp, Homo sapiens
tcagatccatcacgaaatccgtatgtcctgagacctcctgaatcttaagttgctgaacctgtttgcatgagttgc

SEQ ID NO: 242086 - DNA, 96 bp, Homo sapiens
ggcggcgctgcggccacccggcaggtttctacagaagaaggcttgagtcttgcccaagaatataattgtggtttttttgagacctctgcagccctc

SEQ ID NO: 242087 - DNA, 73 bp, Homo sapiens
cgacaccttcagcgccctggtcaagacgctgcagcgggactgcctggttaatttggagtggcccctggagtca

SEQ ID NO: 242088 - DNA, 75 bp, Homo sapiens
ggcagcagcacggcacagcacgctcgacttcatgctcggcgccaaagtgttgttacagatcttataacagtcggt

SEQ ID NO: 242089 - DNA, 100 bp, Homo sapiens
atgtcgtccttgatcagaagggtgatcagcaccgcgaaagccccaggggccattggaccctacagtaaggatgagtctgccttcatggtccacccgctga

SEQ ID NO: 242090 - DNA, 90 bp, Homo sapiens
tgtcggtgggaaaagtctttcaccctgactactggacttggaggatcagcagttgcaggtcatgcctcagacaagattgaaaacatggtg

SEQ ID NO: 242091 - DNA, 105 bp, Homo sapiens
atggaatacttcaaagccagtatcaacaggtcctggaaggaggaagcaacaatcctgagtgaaacctcgacaagaagtatccaataggtagacaaagggattggg

SEQ ID NO: 242092 - DNA, 75 bp, Homo sapiens
gaagaaaagggtgaaggaggcgaattttcagttgataggtatgcatcttctattgatgatattttggaagatgaa

SEQ ID NO: 242093 - DNA, 73 bp, Homo sapiens
tgatacttttaaggcttctctcgtcaaaaatggtgcagaatttacggtcacaagctacctaactaagaagttt

SEQ ID NO: 242094 - DNA, 96 bp, Homo sapiens
gccgacccttcctgtcgctgacggcgactgcgggaggccaggacatgaaagatcagatgtcaacttcatctgtgcaggcattagctgaaagaaaaa

SEQ ID NO: 242095 - DNA, 87 bp, Homo sapiens
cgccgtcggcagcaagaacagagagagaggtggacagatctgagagatactgagcactgaacctaccagatgtatttgggttggtcg

SEQ ID NO: 242096 - DNA, 100 bp, Homo sapiens
catggaacagggactcactggggagataattgacgaccttgccaacctagtggagaacacagatgaaaaacttcgcaatgaaaccaggcgggtaaacatg

SEQ ID NO: 242097 - DNA, 100 bp, Homo sapiens
cttaatccacagcaagctcccttatatttggttgaatctggcgatgtggaacccatggatatggagggctgactatatacaccatgttttttcctggcac

SEQ ID NO: 242098 - DNA, 75 bp, Homo sapiens
acaaccttcttttggacagcaaggatgatgatgacgacatgggagaggatgaagatgaggacgatggtttctttg

SEQ ID NO: 242099 - DNA, 75 bp, Homo sapiens
attccccggaatcgtgtgctgggctggtcccccttgatattatgcctggtgatcctgatctgcttcagtgcctcc

SEQ ID NO: 242100 - DNA, 75 bp, Homo sapiens
atgaagattttaaagagcagactagacttctcaagattcgtattttacatggagaagtgaacaaagtgaaactgg

SEQ ID NO: 242101 - DNA, 100 bp, Homo sapiens
tccaggagttcgtctcttacgtctgcggaagtgcagctgcctcagttcttagcgcagattgggctaatggatactacagacaacagagaaaacttgttga

SEQ ID NO: 242102 - DNA, 98 bp, Homo sapiens
ggaaaacaacttcgagggcagaggcaatgtattccaagatgcagtcttcaatcaaacagttacagttattgaaagagaggatgggttagatggagaaa

SEQ ID NO: 242103 - DNA, 120 bp, Homo sapiens
ccagaggtggaggggaggattttgaggacacttgtggagagctcgaattccagaatgatgaaattgtctctgggaaaccaaggttttgcagtctaaagcaacagaagacttcttcagaaa

SEQ ID NO: 242104 - DNA, 75 bp, Homo sapiens
ataccacctcccctacctcctaaggtttaatagactacaacttccactgtttccgaaaagctattcatgaggttt

SEQ ID NO: 242105 - DNA, 97 bp, Homo sapiens
ctgactgagaagatgcatgccagagacttcacagtttctgctctgcttgatgaagaaatctctggaattgtggaagtggttggaagagtaaccgcca

SEQ ID NO: 242106 - DNA, 100 bp, Homo sapiens
gtgattttcctgcatggattgggagatactgggttttactcaagtgaacatgaatacagtggattaaatatagttcgaccttcaactgggaaaattgtga

SEQ ID NO: 242107 - DNA, 90 bp, Homo sapiens
gcaaaacacggagtctccagcagggcccggatggcctccggaagcagcaccaacgatgatgcttttgagcctgtggaggtcagcctgcca

SEQ ID NO: 242108 - DNA, 94 bp, Homo sapiens
ccgcgccgagcggaggaggaggaggaggcgaggaggagagactgcggtgcgtctttctacgtgaataggattttgtggctggccagatacactg

SEQ ID NO: 242109 - DNA, 78 bp, Homo sapiens
caaaattatcaacaccaaaaagctttctgctaggggaattacatgaatgacagtcttcgaaccaatgtgtttgttcga

SEQ ID NO: 242110 - DNA, 89 bp, Homo sapiens
gccaaggaaaccattcccttacaggagacctccctgtacacacaggtggctctgagggtcctgttccccgaccgctacgtcctacaggg

SEQ ID NO: 242111 - DNA, 75 bp, Homo sapiens
tgccacttcccctgccgtggccctctcagcaaacggtcctgcacaacagattaacaagtggtggaataacctaag

SEQ ID NO: 242112 - DNA, 75 bp, Homo sapiens
aagctcaaggccgaagccgagcagaggatctaaatacaagagtggcctattgtgatgatgatgatgattttgatg

SEQ ID NO: 242113 - DNA, 83 bp, Homo sapiens
ctgcacttcgcattttggcattgacatttaattttagggtcctttatatagaagggagactttgtgtccctggtgatgttgga

SEQ ID NO: 242114 - DNA, 100 bp, Homo sapiens
cgccatcgatgcatcccagacccccgatgtcgtgttcgcaagcatcctagcagccttctccaaagccacatcaatgccctgccctaaggaagacactccc

SEQ ID NO: 242115 - DNA, 101 bp, Homo sapiens
cttcggtcggtttttcatcctttgatcccgcggtcccttcctgtaccttgtcctcaggtgtgggccatgtttgaggattgccccagcattcagttctatga

SEQ ID NO: 242116 - DNA, 99 bp, Homo sapiens
cccggagctgctgaaccctgagcccaggagactgagcccaggtttccaggtcttggcaacctttgaaattccaattccatttgagagagctttgacgag

SEQ ID NO: 242117 - DNA, 78 bp, Homo sapiens
ggatcccgcggccgcggttcggacccgccggcgacatggccagctccggagagcgttgtagaatgaatgaagacactg

SEQ ID NO: 242118 - DNA, 120 bp, Homo sapiens
aattcttcccacagtcctctgaggacagaatatgcaatcccttggctgaacggtacaggtttgcagattccgccagcagcacagcaagctctacagatgagtggctctttggcatttggt

SEQ ID NO: 242119 - DNA, 97 bp, Homo sapiens
cgattcctctcgggctcttgggcgctgctctgagggagacattagagaagcaagtattttctctctggaggcagaagatgtttcagcatcgagaaaa

SEQ ID NO: 242120 - DNA, 82 bp, Homo sapiens
ccgccctggccatctaccatgtggcaccatgactcctgtgaggatgcagcactccctggcaggtcagacctatgccgtgccc

SEQ ID NO: 242121 - DNA, 90 bp, Homo sapiens
agctaagacaccgggacctcctggaagccaaaaatgtgtcacttatgagccagacttcaattctgcagaactattagccaaagagctgta

SEQ ID NO: 242122 - DNA, 100 bp, Homo sapiens
ccatctaatcacagactcctatttgaagtatttgacgaaaatagactggtgtgggccatgtttgaggattgccccagcattcagttctatgagtaataaa

SEQ ID NO: 242123 - DNA, 83 bp, Homo sapiens
gcgctgctggggggatctgggcatgagaccccttctcccaggaggggagaaaaatggctacaaacttcctagcacatgagaag

SEQ ID NO: 242124 - DNA, 100 bp, Homo sapiens
tgtctgccgagttctcacgtgcccatcagtgacagcaagtccattcagaaaacgagtccctggagaggcagatgcgcgagcaggaggagcggcacgtgcg

SEQ ID NO: 242125 - DNA, 88 bp, Homo sapiens
tggaagatatcaatgtttctgtctgttcgtgaggactccgtgcccaccacggcctctttcaggaagatggatgttttgaaagctaccg

SEQ ID NO: 242126 - DNA, 155 bp, Homo sapiens
ctccaatgttcggtgcagttcagagtgttagagacggtctggaaaagcggtacattgcttcttatttagcactcacagcatcaattcctgaagattgccaagcccctctccagcctcactccactgattgctgcagctaaggaggcaacaaagaa

SEQ ID NO: 242127 - DNA, 100 bp, Homo sapiens
catctcactgactgaaacctgagttttgattcaccagatgacaagagcacctcaaaggcagcagcctcaaggagcagccatggccccagacttgtcgcac

SEQ ID NO: 242128 - DNA, 74 bp, Homo sapiens
gtgcccctgcgttgtaccatccgcctgtgggacacctaccaggttctgcggcatgaggaatttgaagaaggctg

SEQ ID NO: 242129 - DNA, 100 bp, Homo sapiens
cagctgtggagaagggaaatggtgtatcaacggcaagtgtgtgaacaaaaccgacagaaagcattttgatatggatttacatcactggcttccctggttc

SEQ ID NO: 242130 - DNA, 74 bp, Homo sapiens
aaatacagaagctgatgggccagatacatcagctcagatccgaattacaggccaggcacctcattgagaagtca

SEQ ID NO: 242131 - DNA, 103 bp, Homo sapiens
gattctcctgcctcagccccctgagtagctgggattacaggcacgcgccaccactcccaggtggattggtgatagaaaagcagtgctttgatcccacctgtac

SEQ ID NO: 242132 - DNA, 75 bp, Homo sapiens
gcttgaagaaatccatgccatgaagctgggctcaaaatgcagagaactcaaagatattcatttcggccagtgtta

SEQ ID NO: 242133 - DNA, 100 bp, Homo sapiens
caagttatttcttgtaatgtctgtcagcttcgctttaactcagatgtatgggcactaggaaaagacttcttccatcaagcttaattgttttgttattcat

SEQ ID NO: 242134 - DNA, 78 bp, Homo sapiens
tgaaactcactgaagtactaaacaggtaccccaagaagctagtgcagacttattcagtgtttccctaccaggacgaga

SEQ ID NO: 242135 - DNA, 75 bp, Homo sapiens
cggggaagcagtgggaaaatcgcaaggaagccgggaattactctgcttaatgtaagcaagctgaacattttgaag

SEQ ID NO: 242136 - DNA, 75 bp, Homo sapiens
agcaacttggcagagagaatcaaggtttctgttgcttacaactcattagattttgaaccagagatattctttgcc

SEQ ID NO: 242137 - DNA, 52 bp, Homo sapiens
ctgggggaccgctggttcctgcgggtggaagacaggcaagatctcaaccggc

SEQ ID NO: 242138 - DNA, 100 bp, Homo sapiens
gcctgtcttcctattcaccgtgggcagcagagggatggctgctcagctgctgactgatgaggcactgagcccgcggttcccttcaaaaagcggctgcaag

SEQ ID NO: 242139 - DNA, 100 bp, Homo sapiens
cacctgaaaaggggacacattgaggactgtgggcactggacacagatggacaagtatcatgatattagctggtttgacatcaagtcatttgtgagtcatc

SEQ ID NO: 242140 - DNA, 100 bp, Homo sapiens
acggaaaagcctcgaggacaacgtcccagcagctggggttccccctcagcccgtgagcagccatgtccaaccccagcgccccaccaccatatgaagaccg

SEQ ID NO: 242141 - DNA, 90 bp, Homo sapiens
aaagagacagaaggcaccaagatcaaaattgataagtgtgcttaagcatccacctccagatcgacaggcagtacctggaagaccaggccc

SEQ ID NO: 242142 - DNA, 90 bp, Homo sapiens
atggctgatcttgaaggtttacacttgtcaacttcctcttcagtcatcagtcctctgtttctctaccttgctctccagtctgtgcatgag

SEQ ID NO: 242143 - DNA, 73 bp, Homo sapiens
ctgaagaccatggatcacaaccggaaccgcaggatcatggaagggaagtggttgctgtgtatgttactggtgc

SEQ ID NO: 242144 - DNA, 80 bp, Homo sapiens
ccgggcgccatcgagccttggcggcggacgtgcagataacgaaggaggcccaacttcattcaataaggagcctgacggat

SEQ ID NO: 242145 - DNA, 74 bp, Homo sapiens
gtggataacgggaggtgaatttccatgtcaacatagtcctggaggtatatcgaattccaaagaaaagtcaaact

SEQ ID NO: 242146 - DNA, 75 bp, Homo sapiens
tttgtcattaaacccatcgacaagaaggcacctattataagcgccatggctatggctagtgttaaattgcttgcc

SEQ ID NO: 242147 - DNA, 50 bp, Homo sapiens
ctgtcattcacaaccccctgaaagcatttggtcgtattgggcgcctggtc

SEQ ID NO: 242148 - DNA, 100 bp, Homo sapiens
atgctgatggcgataagtcattaccacagaaaattttaagagcttgcattgaacaagtgaaaaagtattcagaattctatactctccacgaggtcaccag

SEQ ID NO: 242149 - DNA, 80 bp, Homo sapiens
aataatgaactgacggttaatgaaggagaaatcatcacaatcacaaatccggcatggagaatggtggaaagcaaagtccc

SEQ ID NO: 242150 - DNA, 100 bp, Homo sapiens
ccctgggtctggacgcgacgccccaggaccaggccgttctgcaccggaaccgggccgcctgccacctcaagctgaatcactatcagtggcccctgaggag

SEQ ID NO: 242151 - DNA, 75 bp, Homo sapiens
cccttgcccagcagttatccgggaaaaacatgctggccagaagagctgtgcaggagtacatcattacagcaatca

SEQ ID NO: 242152 - DNA, 82 bp, Homo sapiens
caggaccagcgggcgggggcccacgagacgagattgaggagctgcgggccgagatgctggagatgcgggacgtctatatgga

SEQ ID NO: 242153 - DNA, 73 bp, Homo sapiens
tccgataaatcacccggtgggctgcaagcggaaactggccatgtcaagactgagaacaacgatcatattaatt

SEQ ID NO: 242154 - DNA, 98 bp, Homo sapiens
tttgacgccctggtgaagatgggggagctggccagcgagagccagggctccaaagaactcgatgaaggatttgggggcagagcacttggcaggtcatg

SEQ ID NO: 242155 - DNA, 83 bp, Homo sapiens
accgccagctctgtccgctgcccacagcctagcagtcgggaccgtactgagtcagagcaccataacatggtgtgggaagtgaa

SEQ ID NO: 242156 - DNA, 100 bp, Homo sapiens
ctccccgaggccggccgcctggtcatggcgcagccgggcccggcttcccagcctgacggttctctacttttagagtcgaaaataaatcctaacactgcat

SEQ ID NO: 242157 - DNA, 100 bp, Homo sapiens
tcctgaaggacatgtggcctgtgtgtctagccatgggtgtatatggagccctcaccaaagccccagtgccagggactccagactcactctccagtgggag

SEQ ID NO: 242158 - DNA, 75 bp, Homo sapiens
ggtagcgctcgtctggcggagctggcctctgcgacttgatatcaaaagaaagctaactgctagatctgatcgagt

SEQ ID NO: 242159 - DNA, 50 bp, Homo sapiens
ggtgcgagcagcgcacttccgactgattcttgctattccaaatcctcttc

SEQ ID NO: 242160 - DNA, 75 bp, Homo sapiens
tgcgctactgcgagaacaagtttaacgacaagcacatcaccactctgcagtctgaagatgatgagaaactgaaaa

SEQ ID NO: 242161 - DNA, 119 bp, Homo sapiens
caaaatggatttagagaaaaattatccgactcctcggaccagcaggacagcttcaaggttactgactttttatgatgtttggtggctatgagactatagaagcatacgaagatgatctt

SEQ ID NO: 242162 - DNA, 98 bp, Homo sapiens
gaaggcccgcggcgccccgtgctgcaggtgaccttgggaaaggtgttgaaagtgatcgtcgtcatgcggagcctgttcattgatcgaacaatagtaaa

SEQ ID NO: 242163 - DNA, 76 bp, Homo sapiens
cccagcagcccccgaaggccctatcaggacatggagtatgaaagacgagccagctctcccaggcgctgaacggact

SEQ ID NO: 242164 - DNA, 100 bp, Homo sapiens
cagaagatggcggaggcggggtgggaaaacagagtatcagaccacaaaaaccaataaagcaagaagatcaacatcctttgaaagaaggcccagcaaacga

SEQ ID NO: 242165 - DNA, 82 bp, Homo sapiens
tggagtttgagagccagtctttcctgtatagacagggctgaaggcctttcggcagcagctgaggaagaccacgcggaccaaa

SEQ ID NO: 242166 - DNA, 82 bp, Homo sapiens
gcgggtctgctctgtgtgccatggacggctccttccgcttccagccgttcgagtcctatgactccaggccctgcctgccgga

SEQ ID NO: 242167 - DNA, 100 bp, Homo sapiens
ctggaggaaatttcccgggctcagcttgtggccactggagaatgcacggcaaccgtggggaagaggagcagtacgaaattctccgtggctacccagacct

SEQ ID NO: 242168 - DNA, 100 bp, Homo sapiens
cggcgatcctgggctgcgggcaaggcgatcagtgtgcgtgtgaccaccatggatgcagagctggagtttgccatccagcccaacaccaccgggaagcagc

SEQ ID NO: 242169 - DNA, 82 bp, Homo sapiens
agtgaaggacggaagaggccctgcggaggcggcggtgcagcgctccgcgccatcatgaccgggtcctataacaacttcttca

SEQ ID NO: 242170 - DNA, 76 bp, Homo sapiens
ggggaagcggcggcggcaaagggatctttcgaagatggtttggctgccttggagatttggagatctgatgccacga

SEQ ID NO: 242171 - DNA, 100 bp, Homo sapiens
gctaagacttggcgaagcgctgcgctcgcgcccggatccctcagtgtactaatggtcacttgatgtgcgctggctgttttatccacctactagcagatgc

SEQ ID NO: 242172 - DNA, 82 bp, Homo sapiens
agacgccgtgtgtctgtttcacggtaccgaggagaaggcattgtatatgggacactagaggaggtgtgggactgtgtgaagc

SEQ ID NO: 242173 - DNA, 100 bp, Homo sapiens
cttactgagctcccttctggaaatgacacctctgggcttgagaataagactgttgttgtcaccacaattttgctctcatttcactcttcagtgttcctgt

SEQ ID NO: 242174 - DNA, 75 bp, Homo sapiens
gatggatccctctgtgcttctggaggcaagttccgccaagacgtcaccaagtgtcttttcctaggtattatttcc

SEQ ID NO: 242175 - DNA, 100 bp, Homo sapiens
cgaggatgagagcgacgaagccaactgtccagatgaaccagaaactcgagatgcatggtgggcagaaatcagacaagaaataaaatcacatgctaaagca

SEQ ID NO: 242176 - DNA, 75 bp, Homo sapiens
actagggagcgtctccggctgcacagcgctcagcggacaaggcaaaatctcagcaagttcggacctctagtacaa

SEQ ID NO: 242177 - DNA, 102 bp, Homo sapiens
tccttcaatacactgttgatgctatgcagaaagcatgcttgaatggcagcaataagtacctggaatggaaacacaaaagtagccataaagactcttaaacca

SEQ ID NO: 242178 - DNA, 100 bp, Homo sapiens
cctccccaccaccaccatctccatcacccaccaacaacaccacaataatccacagccaagtgaccgattagcactgctccaggtccgggctatcctccag

SEQ ID NO: 242179 - DNA, 100 bp, Homo sapiens
gtgcccattgctctttcactgctttcaactggtagttgtgggaatggtctggaacacggacctggtggagaccctggagctgcagaacctgatgctgtgt

SEQ ID NO: 242180 - DNA, 101 bp, Homo sapiens
accacgctgaggggctgggagccgcgcacaccaccatcaccttcctgtccacttccaacgaagcggtctataagatctttgatgacagcccctgcccattt

SEQ ID NO: 242181 - DNA, 100 bp, Homo sapiens
ctctaagataagagcctggaaagaggactctgttggctgttggaaattgcagagtaatgcctcaggatgctgaaaacgccattcaacagatgggtggcca

SEQ ID NO: 242182 - DNA, 51 bp, Homo sapiens
cggatcaacttcgacaaatacaataccagtttccagtgtgatccattattg

SEQ ID NO: 242183 - DNA, 96 bp, Homo sapiens
agctgcgggcacgccagatcacggcacagcagatcaacaagctggaggagctgtggaagacattctaagtgagactgtccacatcatctaggaaaa

SEQ ID NO: 242184 - DNA, 101 bp, Homo sapiens
ctttgaccaggccttgctacggcacattgtgaaggagttcaagagagaggccaacagagcacttatggcaaggcatctcgagggggtggcaatcaccaaaa

SEQ ID NO: 242185 - DNA, 90 bp, Homo sapiens
gcagccgcgcagcttccgtgtttgctgcgcccgcactgcgattggttgtgatcgtagccaaaaccttgtggacatttgtagagagaggca

SEQ ID NO: 242186 - DNA, 100 bp, Homo sapiens
ggtggaggatgtggtgctgcccgagaaggtggacgtgctggtgtctgagtggatggggacctgcctgctgggagactcatgcatctgtatgccgtgtgcg

SEQ ID NO: 242187 - DNA, 101 bp, Homo sapiens
cgcgcagccgagaagatgtctccgacgccgccgctcttcagtttgcccgaagcgcggacgcggtttacgagtgaagacatttccacctggacacctgacca

SEQ ID NO: 242188 - DNA, 82 bp, Homo sapiens
cgtacccgccgccgccgttggctggaggctgcctgctgtttcccggggagatcatgaaacgaggtcgccttcccagcagcag

SEQ ID NO: 242189 - DNA, 87 bp, Homo sapiens
ttctttgagaagtcaaattgtcaggatcaggaatgtatgttttcttccatctggattctagccgcagggccgtaggcagccatggcg

SEQ ID NO: 242190 - DNA, 90 bp, Homo sapiens
acgtgtttggagggaaatgggaatgtacacgataattaaagagtaaagttgtgctcaacggtagctacagcaagctgggtagcaggcaga

SEQ ID NO: 242191 - DNA, 76 bp, Homo sapiens
atcaggggaaggaagagcttgaggggacagtggagaagcaggaggcccgacaacaagctcaaatacgtcaccaaat

SEQ ID NO: 242192 - DNA, 96 bp, Homo sapiens
attcatcaaagacgtaatcaaagacggcaacgcgcttatcagcgctatgagaagcctgcaggacaagctgaacaagagggacaaagaggtgacagc

SEQ ID NO: 242193 - DNA, 98 bp, Homo sapiens
aagcctccttgttctcattgaggccataggaaaaggatacagagtagagtttcatgaacctgaaacttggtggaaatttgatcctgaagaattagaaa

SEQ ID NO: 242194 - DNA, 82 bp, Homo sapiens
ccagcggagcgaacccgagagcgtggagcgggctgggccagatgaaggatttgggggcagagcacttggcaggtcatgaagg

SEQ ID NO: 242195 - DNA, 75 bp, Homo sapiens
gtgcctgtcccgcggggcctcgggcatccagggcctggccagatgccaagtgacaagaccattgggggaggagat

SEQ ID NO: 242196 - DNA, 87 bp, Homo sapiens
tcgccttcgcctcctaatccctagccactatggctggcgcccatgcggctctacacgctctccaagcgccactttgtcctcgtgttt

SEQ ID NO: 242197 - DNA, 98 bp, Homo sapiens
caagacagcaccacagagatgctactgggagctctgggtgccaagattgtgaacagccgagatgccaaaggacgtctcactctgtcacccaggctgga

SEQ ID NO: 242198 - DNA, 98 bp, Homo sapiens
tcctcccaaaagcaagcttgctgaaggggaggaagaaaagccagcaatcccacagagtattgatgaggaaactgaagtttggagcgatcacatcattt

SEQ ID NO: 242199 - DNA, 96 bp, Homo sapiens
ctgccttccacctccagtgctgagcccccctccatgcgcctgaaggcccgacccagcagccctggcttttccgtgcttacctgcagcgccttctcc

SEQ ID NO: 242200 - DNA, 75 bp, Homo sapiens
ttctttgtagcagacactgcaaatgaagctctcgaggctgctaagagactaagagccaaaaacctgtatatcatc

SEQ ID NO: 242201 - DNA, 82 bp, Homo sapiens
gcagccaccctcgctccctctgctcttcctcccttcgctcgcaccatgcagcccctgtcaaagggaacaggaagcagtccac

SEQ ID NO: 242202 - DNA, 50 bp, Homo sapiens
ttcaagcagcgccgcaccttcggacacaatgtttgcacgaggactgaaga

SEQ ID NO: 242203 - DNA, 75 bp, Homo sapiens
agaagaccttgaaatgcatccgctggtcgctgccggaaatggccaggtactctctgaagatggcagaagctcacc

SEQ ID NO: 242204 - DNA, 83 bp, Homo sapiens
ggagttcgagcagatcgacaagtccgggagctgggcggccatttaccagatcaatgtccgagttaccaccatggatgcagagc

SEQ ID NO: 242205 - DNA, 100 bp, Homo sapiens
tggagtttctgtagatggaaaagaagtctggtcagaaggtgagaagccatttaaatgtgatcagtgcagttatgtggcctctaatcaacatgaagtaacc

SEQ ID NO: 242206 - DNA, 97 bp, Homo sapiens
tgctggaccctgcccaaaggacactgtacagggatgtgatgctggagaactgcaggaacctggcctcactagggattgttcattgctgctggaggaa

SEQ ID NO: 242207 - DNA, 97 bp, Homo sapiens
gcgtcgcgcgggccgggatgagggactgtggcggcgcggcccgcgcgcagccggccggaaatcacattctgcctgatgaagatctggcttcctttca

SEQ ID NO: 242208 - DNA, 100 bp, Homo sapiens
ccaggagcaatgaggaggtctttacccagcacatcctctacgagatgtggacgagtgctcactagcagaaaaaacctgtgtgaggaaaaacgaaaactgc

SEQ ID NO: 242209 - DNA, 75 bp, Homo sapiens
tttaaacttaaggaaagagtgggaaagtgagggtagctcaagtggagtacagaaggctgtaacaagaacaaaaag

SEQ ID NO: 242210 - DNA, 112 bp, Homo sapiens
ttgacgtccagaagaccaagtacctgcagatcctgacctctctgatgagatggatcgggattgtcaatgaggcagatcagattccgatttgacgggcaaccaatcaatgaaa

SEQ ID NO: 242211 - DNA, 73 bp, Homo sapiens
cttgaacaaggcaaatatggttttggccatccgttgcacactggtaaactgcacatgtgaatgttttcagcca

SEQ ID NO: 242212 - DNA, 100 bp, Homo sapiens
agacagttatagtcaacatggttgacgttgcaaaggcgcttaatcggcctccaacgtattcgacacctcttagaggctgcaatcccagagagagttgaag

SEQ ID NO: 242213 - DNA, 100 bp, Homo sapiens
tctggagggatgcagagcctttccttaggacaaacaagcttgcccagtttcgacaaagaaaagctcagtcggatgggcagagtccttccaagaagcagaa

SEQ ID NO: 242214 - DNA, 97 bp, Homo sapiens
gtcaaagtcagtatctctgagcagtggaccccaagtgcttttaacacgtcagttgagctgcctgtggaggtttcatatggacccatctgggaccttt

SEQ ID NO: 242215 - DNA, 100 bp, Homo sapiens
tttctgtggaagaatttcaagctcagataaatgcagcctcactggaaaaggtcaaacagtacaaccagaagctcagtttttttcaccgctcaaccctgtg

SEQ ID NO: 242216 - DNA, 100 bp, Homo sapiens
gcctggctaccttcctacctcgctggcttggcatcctcagcaaagtgaagtctttgtctttggagatacaactcgtcaacgaatcaaattcagtgatgac

SEQ ID NO: 242217 - DNA, 101 bp, Homo sapiens
ggcctagacctgaactcttcagataatcagagtggaggaagtacagccagcatatttgactacagtcattccttatgagaaaaaaaacggaccaccgtctg

SEQ ID NO: 242218 - DNA, 100 bp, Homo sapiens
tcctcccgggctggcgtgcgccagaggatccgcaaagtgctgaacagggtgagcagggcagcatttccttctcccactgctgctgagatggcagaaatta

SEQ ID NO: 242219 - DNA, 50 bp, Homo sapiens
gttggatttctcgcaaaccaaacatatgctgtcaggaggataagagatgc

SEQ ID NO: 242220 - DNA, 90 bp, Homo sapiens
gtcatcaagaagaatgacgatgatttagctttggagtcaaacccttctgaccatccaagggcaagcacaattttcctgagcaaatctcaa

SEQ ID NO: 242221 - DNA, 101 bp, Homo sapiens
agacaagtcaagaatccttttggcttagagatcactaatccatcttcagcttcaattacaaaggtcctgctgtactagccaccaaagcagctgctggtact

SEQ ID NO: 242222 - DNA, 85 bp, Homo sapiens
ccagcctgcggagcctgtggggcaggaccctgatgcttggtgtgacctgagtaaatttgacctccctgaggaaccatctgcagag

SEQ ID NO: 242223 - DNA, 100 bp, Homo sapiens
ggatgatcccacagcacagtcattgcaagatgtttcagatgaacaagtgctggttctctttgaacagatgctggatgataaggatgccttctatgtggca

SEQ ID NO: 242224 - DNA, 78 bp, Homo sapiens
gactgacttgttcacatgtggcaaatgtaaaaagaagaattgcacttacacacagtcaggtcaattcagtgaagatat

SEQ ID NO: 242225 - DNA, 90 bp, Homo sapiens
gaagatgctgcccacctttgtgaggtccactccagatgggacaggttttaaaatcaaagatgggaaaatcggagaaaattgcccttcccc

SEQ ID NO: 242226 - DNA, 82 bp, Homo sapiens
cggagccaggaggggaagcgatggctgggcccgcgtggatctctaaggtatcatgatattagctggtttgacatcaagtcat

SEQ ID NO: 242227 - DNA, 83 bp, Homo sapiens
cttctacctgactccggaaagcttcgatcagaaggtcaaaatgcagatcttcgtgaaaacccttaccggcaagaccatcaccc

SEQ ID NO: 242228 - DNA, 100 bp, Homo sapiens
accgagagcgcgaatatcgtcatcgttagaaggagatgcatttagaagatactaccagattctgtcccaaagaagaaagagaaagtgaacaaacatcttt

SEQ ID NO: 242229 - DNA, 90 bp, Homo sapiens
atcctgcagcccaaggtgacggagagccctaatttgtttagaactgtaatatgcacagttaaaacaacttgtcctctcaggaccttttgc

SEQ ID NO: 242230 - DNA, 98 bp, Homo sapiens
gaaaggctgcggcgcgcagagcgaggctgcgggaccccaggatgggggacaggaggctgcggggcctcaggccatgacgctgatggagtacctcatca

SEQ ID NO: 242231 - DNA, 75 bp, Homo sapiens
ctttacctgcttcccaatcccactgatgaggatcagcccatgcttattccactaagctcaacaaatttcctgtat

SEQ ID NO: 242232 - DNA, 83 bp, Homo sapiens
gaggggcgactggagccatggcggagtcggcgcctgctcggaataccctctaccatctgctttggtcagggtgccgctcgagg

SEQ ID NO: 242233 - DNA, 99 bp, Homo sapiens
taacagatatcaccgaagccattaaactagactcaggagtcgtcaagaggctctgcaccctggatggaaagcagatcttggcatatacagaagggctgc

SEQ ID NO: 242234 - DNA, 100 bp, Homo sapiens
atcatcattgttggagatgagatccttaaggtgtcagttgtacccgaggcgttctcagcagcagcaagtacctgtggtggatttccaggctgaactgagg

SEQ ID NO: 242235 - DNA, 100 bp, Homo sapiens
gtccgcgaggccgcggcggcagctgtgcaggcccggggagcagccggccgggcgagcctcgggaatcagagatcattgatttcttcctgggggcctctct

SEQ ID NO: 242236 - DNA, 100 bp, Homo sapiens
ccagggagaatcctgacttggcttgtctccagtcaattatttttgatgaggagcgttctccagaaggactactgttcgaagatttttggaagaatactga

SEQ ID NO: 242237 - DNA, 100 bp, Homo sapiens
ctacagaagatgctgaagctgaggacacacccaggaaaagactcaggacggacaagcacagtcttcggaaggtgactctgacatcattagaagcatgcca

SEQ ID NO: 242238 - DNA, 82 bp, Homo sapiens
gggaagtctgcagccgagagtccagcccccaaatacatcaagatgtttgtactggatgaagctgacgaaatgttaagccgtg

SEQ ID NO: 242239 - DNA, 108 bp, Homo sapiens
gattatgaagtattaattcttccactgatatctcaaaaggtgatctggacaaaggaacaggtatctcaggtgaccaagaatatggcccaggtgaccaaagccctggac

SEQ ID NO: 242240 - DNA, 99 bp, Homo sapiens
accggctgtatgattaggccacaatcttcaatgagtaaacatattcctgttctgcggggagtgtctccagccctgcctgcaggtgccatccccgctgtg

SEQ ID NO: 242241 - DNA, 90 bp, Homo sapiens
gcagacagtccacccccatcctacccaacacagcagaacaccaagctgaaaggttatcagaaaagagacgtgaagcttggaggcctcgga

SEQ ID NO: 242242 - DNA, 75 bp, Homo sapiens
gcaagagtttgttatatagcagaaggcgcaatggcgaggaagttatctgtaatcttgatcctgacctttgccctc

SEQ ID NO: 242243 - DNA, 75 bp, Homo sapiens
ttggcgtgggtgcccagttcctggcccttggcactgatcattcccagtgaccccttctgggtgccaactactgag

SEQ ID NO: 242244 - DNA, 97 bp, Homo sapiens
acgtgaacaacctgaacgtcaccgaggagaagtaccaggaggcgttggccaagggtatgaaaactttcaaagacgactagcacagaaccctctcttt

SEQ ID NO: 242245 - DNA, 75 bp, Homo sapiens
ccacatcaagagcagcgtggtgggcagtgagcggaagcgagtggatcagtacaagggaaagcgggatttggagtc

SEQ ID NO: 242246 - DNA, 75 bp, Homo sapiens
attctctacatttgtgaaagtcagtttctgaggaatttcatcagaattttccagttcatatgaagaggtgatctc

SEQ ID NO: 242247 - DNA, 100 bp, Homo sapiens
cagggatgtctacctggtaatagaggacttgaagcagaaagcaagtgaatacgagtcagaaggttactgatgtcaaggagaaactgaaacaggccaagaa

SEQ ID NO: 242248 - DNA, 98 bp, Homo sapiens
ggcacttttgtgccagtggatacagtctaaattgcaggagggcactccacagaaggatgttattatcaagtcagatgcaccggacactttgttattgg

SEQ ID NO: 242249 - DNA, 96 bp, Homo sapiens
aagagagacatttctggctctgaaggcgaacgcttcgctggccatttaggagctctgctcaaagccagacggaggactcagagagagtaatgataa

SEQ ID NO: 242250 - DNA, 80 bp, Homo sapiens
ggctcaagcaatcctaccatgtcagccttcccagtagctggaactacaggccaggcagcagcgttcaacgtgaccttccg

SEQ ID NO: 242251 - DNA, 100 bp, Homo sapiens
agagacagaagcagatggattcgtccttttagaaatgagccgtcagactgctacagcattacctaccggtacctcgaagtgtccaccatcccagagggtg

SEQ ID NO: 242252 - DNA, 90 bp, Homo sapiens
gccggcgtggcgctcatcgagggacgcccggcccaagtgatccatccttttacaatccctgctattattcgtccattcagcgtattgaac

SEQ ID NO: 242253 - DNA, 75 bp, Homo sapiens
tgtctctgcccacgtcgagcgtgcccgagacccgagatcatgatgctgccgccaccgccgccaccacggagcgag

SEQ ID NO: 242254 - DNA, 80 bp, Homo sapiens
tgatttcatgtgcgatgatgaggaggactacgacctgggatcgcttacacctgagacgaactacagaacagcacgtacca

SEQ ID NO: 242255 - DNA, 74 bp, Homo sapiens
cccgccccgccgcggccatggaggacgagcggaaaaacggagcctacgtaatccagtccctcatagcactggtg

SEQ ID NO: 242256 - DNA, 82 bp, Homo sapiens
cctgtcacaggccatgctctggcaaaaactctgaagatgatgagaaactgaaaaagaggaaggagcgatttgggattgtcac

SEQ ID NO: 242257 - DNA, 74 bp, Homo sapiens
aaggattatggcagctggcttgatattgggacaaggaacgagcatccggcacccttgtgcatgtaccctacaat

SEQ ID NO: 242258 - DNA, 98 bp, Homo sapiens
tttcattgtctcggacgtgcggggcctgggcctcccggtccgcaagcaggtatggaacctggctaactgcaagctgaagaccaaccacattggccaca

SEQ ID NO: 242259 - DNA, 109 bp, Homo sapiens
cacaggcctgaccagggcctgcacaggttaaccgtcagacttccggggcattcagtgtggacgaatgtggaacctcgctctgtggctgtgttcccttggcactccttag

SEQ ID NO: 242260 - DNA, 98 bp, Homo sapiens
agatatgggatgctggaggacatctgggggccacaaatgctccttctcctggagacgcaactcaagtgttctaagaacggaagcatctgggctggatg

SEQ ID NO: 242261 - DNA, 50 bp, Homo sapiens
ctgagtcagtcaactccatccgtcggggcactgttcatggagcccacact

SEQ ID NO: 242262 - DNA, 101 bp, Homo sapiens
ttgtgggcatgatccataatcggtttcaagccaccgaaacgtgatgatgaggttgaatctacagctgaccatgggaaccttctctctttcgctctttggac

SEQ ID NO: 242263 - DNA, 96 bp, Homo sapiens
ctttccgaaagaatccttctgaccccagagtggctgatgacttcctgctgtacctggaccctcactactgccagcccactgtggatgtcagccagg

SEQ ID NO: 242264 - DNA, 90 bp, Homo sapiens
gtccgcccactccgcggcgttcggggaaatggctgcgagaccctagaggcctgcggcctgcggtgttggtaaatcatgcttattgctaca

SEQ ID NO: 242265 - DNA, 100 bp, Homo sapiens
ctgtcctttgttttggattacataaaccagtcacccaagtgcattgcctttggaaacgagtcacgtgaactggaaatttcagtttattggcgtgattggc

SEQ ID NO: 242266 - DNA, 82 bp, Homo sapiens
gatgaagaaattgtttatgccaaatcaactgccttacagtttcatgctttgagtggcaaaaatatgtgcaactaccagctgg

SEQ ID NO: 242267 - DNA, 104 bp, Homo sapiens
caccatgccgctcctaagcctgcacagccgcggcggcagcagcagtgagagtggacggctgcattcatcgggccgccggccccctgcttaccgacgagtgccgg

SEQ ID NO: 242268 - DNA, 90 bp, Homo sapiens
tggctccttgggagacagaagcaaatccgtcccaggcctcaatgtggatatgaggagaaggcagagcccccccaggctatgaatgccctg

SEQ ID NO: 242269 - DNA, 82 bp, Homo sapiens
gctcctgcatctgcctccccattacgagctcaactggaggcagtcctgtgcggaaatctgaagaaaaaacagatacaaagcg

SEQ ID NO: 242270 - DNA, 101 bp, Homo sapiens
tgagccacagtgtgatcccagctttaaaggagatgcaggagaaaatacggcattgctagactctgaagaagaagctatggagactacaccagccaaaggaa

SEQ ID NO: 242271 - DNA, 74 bp, Homo sapiens
aactgaagtttcttctgggtccatcaccaaagagcagatgccaaatctgagtaaaagccaccaccagtctgtgc

SEQ ID NO: 242272 - DNA, 100 bp, Homo sapiens
tgggagcctacttggggagccccatctacatgggtactcactttgtccagttatgctgccaaagaaatattcctctgctgttccttcaaaacattactgg

SEQ ID NO: 242273 - DNA, 96 bp, Homo sapiens
ttctgattgaagtgaatccccagacccgaattcccagaacctttgaccgcttttgtggcctcatggatattgatgatgttaagaagttcaaaccgg

SEQ ID NO: 242274 - DNA, 90 bp, Homo sapiens
tggtgctcctggcggcggcgcccgcagccagcaagaaccatccgggtatggctgaaaagagacagtggtcaatactggcccagcatttac

SEQ ID NO: 242275 - DNA, 100 bp, Homo sapiens
gtggaggcgagaacactgaggaggacagagcgggatgccaccagcttgtccaaagggaagttccaggagctcctggtgggcatcgttgtggagaatgacg

SEQ ID NO: 242276 - DNA, 75 bp, Homo sapiens
cagctggatactcttgttaccagaattccaaaggttctgatggagtttcgctcttgtagcccaggctggagtgca

SEQ ID NO: 242277 - DNA, 75 bp, Homo sapiens
aggaagagctgcagtctttgtgggacaagtacgtttcaggagacggcagcgaggctaccttgcatggtgtggtgg

SEQ ID NO: 242278 - DNA, 83 bp, Homo sapiens
agctcctcaagaatctcgtgctcaccggtttctcccacatcgacctgttagtgtgactctggatccagatacagctcatcacg

SEQ ID NO: 242279 - DNA, 83 bp, Homo sapiens
cctgacccaggcctgctcggccctcacagggttcgtgctggccgtgggcagcgccgtctttgatgccatgttcaacgggggaa

SEQ ID NO: 242280 - DNA, 98 bp, Homo sapiens
caaagaaagagtgcccatcctctggcatttcctgcagaagatttgcttgtaaatgcatcacgaagaggcagcccagaatgaagaaagcaagcaggagt

SEQ ID NO: 242281 - DNA, 75 bp, Homo sapiens
gatcttaagcaaacgcttaccaggctcatggcacatctttttggagatgatatcaatgaatgcttggaggacaag

SEQ ID NO: 242282 - DNA, 100 bp, Homo sapiens
aactctttgggaaagccactcgaaaagtggtggacttgctttgtgaagagacagttcatgaacaagagtctttcaggacctggacagtgaagggagcccg

SEQ ID NO: 242283 - DNA, 82 bp, Homo sapiens
cttgtggagccggagctgggcgcggattcgccgaggcaccgaggcactcagaggaggtcccgcaggctcccgatggcgagat

SEQ ID NO: 242284 - DNA, 50 bp, Homo sapiens
gggacaagaagatactgccctgatcgtctatgcggaaagacctctcacag

SEQ ID NO: 242285 - DNA, 73 bp, Homo sapiens
gcccagcggattctacattgcctccggagaaatgagccgtcagactgctacagcattacctaccggtacctcg

SEQ ID NO: 242286 - DNA, 75 bp, Homo sapiens
taattttagggtcctttatatagaagggagagtaggttgcagatattttattccaaactgcccaaaatgcaggca

SEQ ID NO: 242287 - DNA, 74 bp, Homo sapiens
ttctacttcaccagcagcagcgttgcctttccccatcttcctggttctgctccttcgtggcctagtcttgtgga

SEQ ID NO: 242288 - DNA, 75 bp, Homo sapiens
atttgggtcagatagatttggaagagttgccgatatggagctgctgagccacataccattgctgcattcttgggg

SEQ ID NO: 242289 - DNA, 100 bp, Homo sapiens
agcctcccaagaagctgggattacagatgaggtctccaagggaccagatggagaacagatgcaaccacactgaagtcagaatcgcagcttgcctccgaca

SEQ ID NO: 242290 - DNA, 82 bp, Homo sapiens
tttaagaaagaagatgttaactttcaggaattacatgaatgacagtcttcgaaccaatgtgtttgttcgatttcaaccagag

SEQ ID NO: 242291 - DNA, 98 bp, Homo sapiens
cttcgacattgccgtcgacggcgagcccttgggccgcgtctcctttgagggaaagctactattacctccaggcacggatggtggcaaagaaggcccgc

SEQ ID NO: 242292 - DNA, 100 bp, Homo sapiens
cgagcaggcactggaagaccacttcagcagtttcggacctatctctgagggtatcagaagagcaaggtcaagaaaacccagcagaccacgatcctattca

SEQ ID NO: 242293 - DNA, 100 bp, Homo sapiens
atccagtcactggtcccaagaagacctatatcacagatcctgtttcagccccctgtgcgccaccattgcagccaaagccgggggccattgagactgccat

SEQ ID NO: 242294 - DNA, 100 bp, Homo sapiens
aggcgcggctgccggcggctgggactgaagagggacgggtcccgcggcgagcgagctcctgagaaagagaatgcgaacttcctaaaatagatgtacactt

SEQ ID NO: 242295 - DNA, 98 bp, Homo sapiens
atgaagaacaaagaaaacagttacaggacatagcaactctggctgatcaaagaagagcagcccatgctgcaggacaagttcgagcatcttaaaatgat

SEQ ID NO: 242296 - DNA, 80 bp, Homo sapiens
atgaagacttgaacttaatacagcaagaaagaccatcaagtttaccagcttctaaccctcctttatgtgactcagagaaa

SEQ ID NO: 242297 - DNA, 50 bp, Homo sapiens
attcctgacgttcattgatctgctgaccatgccactgcctcggtacggct

SEQ ID NO: 242298 - DNA, 100 bp, Homo sapiens
ggcctttatcaaaatcccaggctgtcggaagcaagaaaacatgtctcaacttagcgaggaagaacagaataaagattatcaagactgtagcaaaaccact

SEQ ID NO: 242299 - DNA, 97 bp, Homo sapiens
ggcaaccgagggacccgcgtccaggtgtcatggagaaactccagctgggcccagagattctgcagcgggaaaatccaaggcttatttatgccaggct

SEQ ID NO: 242300 - DNA, 97 bp, Homo sapiens
taccacagccacactgggagccctgatccccaaggtgttctggaggtctattacacaagcttgaggtgtagatgtgtccaagagagctcagtcttta

SEQ ID NO: 242301 - DNA, 98 bp, Homo sapiens
cgaaacaccggtaggagcggggaggtgggtactacacaaccgtctccagccttggtctgagtggactgtcctgcagcctcgatgacttacgagccctc

SEQ ID NO: 242302 - DNA, 75 bp, Homo sapiens
ctcggagaggtgctcggattctcgtagctgtgccggtttctgtagaaaatgtttcctgactgcaatgagggaaag

SEQ ID NO: 242303 - DNA, 75 bp, Homo sapiens
ccgacagctcagccagacttcccctatggtcagtatgacagtggtgaccgaggattttagccacttgcccccaga

SEQ ID NO: 242304 - DNA, 98 bp, Homo sapiens
acctctgtcctgtgaacgcatatccaaatgtcattccagttggcacaactatggataaagttgtcgaaatggaactccaaattcagctaatacccaag

SEQ ID NO: 242305 - DNA, 98 bp, Homo sapiens
agcctcccgagtagctgggactatagatacggaatttttgaacgatgtaaagagttggtagaagcaggatatgatgtcaggcaaccagataaagaaaa

SEQ ID NO: 242306 - DNA, 98 bp, Homo sapiens
ggtgatttctgcatttccatctgagcactgttgcaagaattcaattccgtcttcctgatggttcttcctttacaaatcagttcccttctgatgctcct

SEQ ID NO: 242307 - DNA, 98 bp, Homo sapiens
ttgcatcttctacacactacagctattgttagcaaaccagtccagctacgggggcccagccagccagcagctgagtgggggttacggaggcggctacg

SEQ ID NO: 242308 - DNA, 75 bp, Homo sapiens
aagccactcaacaactctttatgtgacagacatatctgaagagatggattaagaatgctttggattaaggattgt

SEQ ID NO: 242309 - DNA, 78 bp, Homo sapiens
tcagctctcggcgcacggcccagtatttgattttcatcaagcagctgatggtatccaggaacaacagagacaagaaca

SEQ ID NO: 242310 - DNA, 123 bp, Homo sapiens
gcttgggcaagaacggggtattcgtggacggcgtgttccagaggcgcggggcgccgccgctgcagctgccgcgcgtggctccttcacctaccaaacgcaaagaccgctcagatgagaagtcca

SEQ ID NO: 242311 - DNA, 100 bp, Homo sapiens
aacctcctgaggctgctcaataaactgaccaaatggaaacattcccggaccatgattgctaagaagcctcgaacgccaacctctggtccagtaatcacga

SEQ ID NO: 242312 - DNA, 87 bp, Homo sapiens
tgacatctttgtgggcaaggaagggacccgcatgaaggtggctgatgttgaggctgctgagtgtgcagggaagctctttctattcca

SEQ ID NO: 242313 - DNA, 82 bp, Homo sapiens
agagtttgtagcctattggaggaaaacacaccaagatgtgtcttgctgaatcagggctctcttatccctgccatcgacttac

SEQ ID NO: 242314 - DNA, 90 bp, Homo sapiens
gggaaacaaggcttccagtgccaagctctacattaatcatactcctccaccactgtccaagagtaaggagagagaaatggacaagaaaga

SEQ ID NO: 242315 - DNA, 100 bp, Homo sapiens
tggggcaccaagagcagccccggtctctcggacaccattttctgccgctggacgcaaggtatttatgagcctccatttcttatactactgcagtgaacca

SEQ ID NO: 242316 - DNA, 100 bp, Homo sapiens
cgcagatatagaacatttcttttatcacatgaatgaactcattcttaaacagaagcaaagatttgaggaaaagaggttcaaattggaccactcagtgagt

SEQ ID NO: 242317 - DNA, 99 bp, Homo sapiens
ttggaaccaacatcttccaaactcctgtttgaatagctctctggttccagtttgaagctgaaaaggttaaattctacctgaaggatgaaaacaaccaac

SEQ ID NO: 242318 - DNA, 100 bp, Homo sapiens
acctgaaggctgcgcaggaggagtatgtcaagcgagccctgctgtgatgaattccactggtggcagtagcagtggcggtggcattgggctgaccctcggg

SEQ ID NO: 242319 - DNA, 87 bp, Homo sapiens
cgcttctcgtagtcctgggagcacagcagaagtaagttggtgagatggcaaagcagtatatagagaaaagtcttttggttccagacc

SEQ ID NO: 242320 - DNA, 51 bp, Homo sapiens
catacatgctggtacatgctggatggtttcacccaaatatcactggtgtgg

SEQ ID NO: 242321 - DNA, 100 bp, Homo sapiens
gcgacagcggcgagcagaactacggcgagcgggagcttactccacgggaacagcctctagataatctgagttgttgaaaatacgaagcctgttactcgtg

SEQ ID NO: 242322 - DNA, 75 bp, Homo sapiens
tatgacctatgcagttcgaaaactggataacactaagtttagatctcatgagtttgtgatggacgcctctgaccc

SEQ ID NO: 242323 - DNA, 100 bp, Homo sapiens
ccaacctggcctactggttcatccagcacaaggtctactctcccaacatgcgctggatcatccaggtgccccggatttatcataccctaatgatcccagc

SEQ ID NO: 242324 - DNA, 100 bp, Homo sapiens
aatgatatttccaaagtttgcagaaaagaatatgaggagctcttgaaacaacatcaaagtgacaccttgcaattagaagagctgagaaaaaccaaagagg

SEQ ID NO: 242325 - DNA, 100 bp, Homo sapiens
ggcacctcccagcctgcgcatgccacccactgtgcgggccttcgtggcctcccgcggcaccaagcaggctgcagtataactgaagcatgccttggagaga

SEQ ID NO: 242326 - DNA, 100 bp, Homo sapiens
gctgtgcgggccccgctccgcttcgaatggttcatttgatgaatacagttcagaacttaaatctggaaggttggaatggagtcctgtgcacaaatctgag

SEQ ID NO: 242327 - DNA, 74 bp, Homo sapiens
tgttcccgcgctttatcaagattatcgagatgactgtccaagtgcctccaaagtgtacaaagcatcagattcag

SEQ ID NO: 242328 - DNA, 100 bp, Homo sapiens
gcacctgcaccgggccggggtggtccacagttttcagtgaagacctacactccagcctctactttgtcaatgcatctctgcaagaggtagtgtttgccag

SEQ ID NO: 242329 - DNA, 90 bp, Homo sapiens
cttgtgtttgctggctgcttgatgaagatattcctcttcgtcaagttatagctgaggaatgtgttgcctttatgttaaactggagagaaa

SEQ ID NO: 242330 - DNA, 86 bp, Homo sapiens
ggcaaaggctacaagctgtccccagaggactacacgctcaagcttccccgggcgctgcctggacaggcctgcctgcgtgctgggac

SEQ ID NO: 242331 - DNA, 100 bp, Homo sapiens
cccaggacctgcctggttgggggaattggaggcttctaggaggcctgggcggatgatgtggagcggtttcagaaaatgttcagacacccaagtcatgtac

SEQ ID NO: 242332 - DNA, 100 bp, Homo sapiens
ctggagcagaaccccaggactgcgcccccgggagcgggcgcccagaggacctggcctgggccgtcagctactacatccggttcttcatcacctacatccc

SEQ ID NO: 242333 - DNA, 98 bp, Homo sapiens
ttgctacagctgtggagcagtatgttccctctgagcaaaatcaccaggacagccaatacaagtggtttatgtaccatcccatctctatcacatggtgt

SEQ ID NO: 242334 - DNA, 100 bp, Homo sapiens
caccttatcgggggcgagaatggggtactatgtgggcgacaccatggacgttctgtttgagaagtggttctactgcaaggacctcggcacgcagttggcc

SEQ ID NO: 242335 - DNA, 90 bp, Homo sapiens
agccaggagtcatgagcgacagcggcgagcagaactacggcgagcgggaccgtataatagacgctggccccaaaggaaactactctcgat

SEQ ID NO: 242336 - DNA, 90 bp, Homo sapiens
cggatgtcgaatcgctgccgcgtggggggttccgctgctgcctctgccacgttactacagccaaccccaacttctctttgcctgaaaaat

SEQ ID NO: 242337 - DNA, 118 bp, Homo sapiens
ccaaccctgatttcctgcttctccttttcatgagtgttcctgtggtctctgcacctcctttcttaaactgtttcacgttagacctgtaacccaaggagatgtgtatagagctgaaact

SEQ ID NO: 242338 - DNA, 100 bp, Homo sapiens
tgatcagagatcttcttcgtttatctacaagttcatacagtcaggtgatcaaagaagcctacagtggttgtagtggccccgtggattcagagtgtcctcc

SEQ ID NO: 242339 - DNA, 97 bp, Homo sapiens
ggcgactgctaatcagtcacgaggctcccttgacaggcggctttgcatcggaaatcagctctacagttcaggtgaccaagaatatggcccaggtgac

SEQ ID NO: 242340 - DNA, 96 bp, Homo sapiens
caggacatgcggagactggtgcacggccatcatctgtgcgatctctgcggtggacgaggtggactacaagacggctgaggagaagtacatcaaggg

SEQ ID NO: 242341 - DNA, 90 bp, Homo sapiens
gacatggcagtgtcaggatcaagggccttgtatgaagcaggagaaaggagaaaggggacagacgtaaacgtgttcaataccatccttacc

SEQ ID NO: 242342 - DNA, 100 bp, Homo sapiens
cgcgctgccgaggagaacccagcggatgccctgctctctgacctggagactaccacctcgcacatgccaaggtcaggggctcccaaagagcgccctgcgg

SEQ ID NO: 242343 - DNA, 83 bp, Homo sapiens
agaaggtcagtgtgcttgcttggagatcaggacgcaaagggaatatatacattgtatccatttattaactcaagaattattac

SEQ ID NO: 242344 - DNA, 75 bp, Homo sapiens
cgcgccgcctctcgctgttcctggtcctggtggtcctctcctctcttgtgctgggattacaagcgtgagctacca

SEQ ID NO: 242345 - DNA, 101 bp, Homo sapiens
gctgccagggccggacacctaggctgagccctcagaatttaagggacgctgtgaagcaatcatggatgcaatgaagagagggctctgctgtgtgctgctgc

SEQ ID NO: 242346 - DNA, 98 bp, Homo sapiens
ctcgggtaggggggctggagagcccccaggtggaccatggcggtgagattccaggctccttcgagagcagtggatccgggccaagtacgagcgacagg

SEQ ID NO: 242347 - DNA, 100 bp, Homo sapiens
gagtctgcgcactaagttgtctctgataatgagaaatgaagaagctagtaagcagctggaggtcagatgggcagacctggaagagaagaaggatgcagat

SEQ ID NO: 242348 - DNA, 97 bp, Homo sapiens
aggtggcacgcccgagcggcctcgcctgagctccgggggtcgtcgccccgcaggaggaagaagcccctccagatggtgctgttgccgaatacagaag

SEQ ID NO: 242349 - DNA, 100 bp, Homo sapiens
tggccgggctggctgcggccgccctgggccgggccccaccggacggtcatcatcagatttgaaatatttaaagtggatacaaaactatttcagcaatgca

SEQ ID NO: 242350 - DNA, 90 bp, Homo sapiens
agttgaaaaaaatatatcatgaacaagagcaagctcttcaagaactcggcaacaagcttagcgaagagcacgttttcaatatcataggag

SEQ ID NO: 242351 - DNA, 83 bp, Homo sapiens
gggacatctatttggcgatcaacatcaccaacggcgagaattggaacatcgatcagttaaaaaggctggcattgaggtccagg

SEQ ID NO: 242352 - DNA, 75 bp, Homo sapiens
gccggtgcagcagccttcagcttttggcagcatgaaagttagcaccaccagctgaacaggccaaagccagactac

SEQ ID NO: 242353 - DNA, 129 bp, Homo sapiens
ccccgccaaccgcaaccattgacgccatgtcgggttattcgagtgaccgagaccgcggccgggaccgaggagtttatgtggccgaggcagacaagtggaattaggccttgctgcaggggacttcatttc

SEQ ID NO: 242354 - DNA, 97 bp, Homo sapiens
gtgggggtgtcctggtgcacccccagtgggtgctcacagctgcccattgcctaaagaatgagaaagatcagtctaaagaaaaggagaagaaagtgaa

SEQ ID NO: 242355 - DNA, 100 bp, Homo sapiens
aagccaaggactgtctgaacgtgctgaacaagagcaacgagggactttgtgttgctgaaagagcggactctggacgaggcccctcggcctcccaagaagg

SEQ ID NO: 242356 - DNA, 100 bp, Homo sapiens
acagggatgtgatgttggagaactacagcaacctgatctcattggatttggattcaagatgtgaaataatcagcgatgggaaaatgcagctttataggaa

SEQ ID NO: 242357 - DNA, 101 bp, Homo sapiens
gaggaggggagaggcctggaggacaccaacatgatctttaatctcatgaagtacgacagctacagccgcttcttaaagtctgacttgtttttaaaacacaa

SEQ ID NO: 242358 - DNA, 100 bp, Homo sapiens
ggggcttcatcgtgctcaagtcggccagtaacccccgtgtttgcacctttgtctggattcttaatacagatctcaagagctcaggccccggggcctccag

SEQ ID NO: 242359 - DNA, 100 bp, Homo sapiens
gatggtcggaattaagtgagagagatgccatctacaaagaattctccttccacaattttaatcaggatcaggagcgtctgggcaagcagctcaagttacg

SEQ ID NO: 242360 - DNA, 80 bp, Homo sapiens
tgtacctgtggagcagcttctttatcccttcatctgtggataagcaggcacagcttcttcaaccaagcggagcacttcta

SEQ ID NO: 242361 - DNA, 101 bp, Homo sapiens
cagaatcagatgtttcacaatctcagaattccagactgccatccagggccatgcagcaaacaagcaacagggaaatatcccactatgcaatcctattttga

SEQ ID NO: 242362 - DNA, 100 bp, Homo sapiens
agtaattcgaccagaatggattgtggaaaggtacatgatgttgattgatggcacaaatgaagtttttatgattgatagagacaattcagtatttcatgtt

SEQ ID NO: 242363 - DNA, 75 bp, Homo sapiens
cgggcaccgcggtgctgctggtcacggccaacgtgggctcgctcttcgacgactggtgccaccacacgagacctt

SEQ ID NO: 242364 - DNA, 100 bp, Homo sapiens
gccatgaatttgtcacattctcctgccctggcgctgacaagggtccagcctccgatatatggaatgtgcagatgtcccactattaactccaagcagcaaa

SEQ ID NO: 242365 - DNA, 75 bp, Homo sapiens
gcttcgcagtctggaaagctttaggagttcacagtgtgaatggaagagaatccgaagaagaaaatctcaataaat

SEQ ID NO: 242366 - DNA, 102 bp, Homo sapiens
aaacaatcgcttcaatgatgggaaggtggatcccgccgggaggtactttgctggtacaggtttgcagattccgccagcagcacagcaagctctacagatgag

SEQ ID NO: 242367 - DNA, 100 bp, Homo sapiens
ctgcgcggtccccgccagcgccccatcctgagccggtctctcaggcagctgcagagcttcaacagtactgtatgcagaatgcctgcaaggatgccctgct

SEQ ID NO: 242368 - DNA, 88 bp, Homo sapiens
acaaccccgattgctttcgtgaaggtggtgaagcagtattttccaatttgaagattcatttgaaggtggctcctgccacctgctaata

SEQ ID NO: 242369 - DNA, 82 bp, Homo sapiens
cgagggccagctgacggagatggtgcagaagatggaggagctgctggctaccaatattctactttctgtctctatgaatgtg

SEQ ID NO: 242370 - DNA, 100 bp, Homo sapiens
ctggggcagaagcgcgtggtcaagatgagctgagctggacaactaaaagcacctgtagcagttctccccaacacagcactgagcacaagtctaggcagtc

SEQ ID NO: 242371 - DNA, 74 bp, Homo sapiens
tttcttggttttgcaggaaatcctggagtctgaagaaaaaggtggtgaagccccctaatgtcctgactccacag

SEQ ID NO: 242372 - DNA, 90 bp, Homo sapiens
taaacctgaaatcagcatgagaagattgaattggttaaagaacaggcattctcgtcgcacatactggaaccaatagaagaactttcagag

SEQ ID NO: 242373 - DNA, 100 bp, Homo sapiens
gcatcgtgttcgaggcggagaccgagggggagccccgcgcgcggcgtcgaaatggctgagcaggagcgctttctactgcatcaggagaccctacctgaac

SEQ ID NO: 242374 - DNA, 82 bp, Homo sapiens
caccggagcgtcccagctgcgaggagacttcccaagtaagaagcggaagaggagccgctggaaccaagacacaatggaacag

SEQ ID NO: 242375 - DNA, 82 bp, Homo sapiens
ggctgagcccgccgtctacccgtggccgctgccggtctacggccgagaactactggtggcgtggccagaacacacggacgct

SEQ ID NO: 242376 - DNA, 90 bp, Homo sapiens
ttctcggcgcggcgtgatcaccgaccagaactcggacggctactggtgaaaggtgtagcagtcactcggcctacacccacagcatcgacc

SEQ ID NO: 242377 - DNA, 100 bp, Homo sapiens
cgaaggggagtttccacagtgattgatgctgcctcaggccaagtcctgtatctgccatgtctgtggcgtccacctcaacaggctgcattcctgcctctac

SEQ ID NO: 242378 - DNA, 73 bp, Homo sapiens
acagctgcagtctgacgagagggagccggtgccatctgtgggggctttgggccaggggtctccggacagcatg

SEQ ID NO: 242379 - DNA, 85 bp, Homo sapiens
gaatctctgttccaaatgctttgctgaaagtgttgtgaagagcgaagacttttcgctcccagcttatatggatcggcgtgaccac

SEQ ID NO: 242380 - DNA, 73 bp, Homo sapiens
cggcggtccacggccggaatggcagcaagctcaggttaaaaagatcaagtggcatgagcagccttttggggaa

SEQ ID NO: 242381 - DNA, 82 bp, Homo sapiens
tggagtcttccatcaatcatatctcacagtattaagggacatcagcgagagaggcagggatcttgagcagattttatctcag

SEQ ID NO: 242382 - DNA, 51 bp, Homo sapiens
acttggatcacatcagatcctctcgaggtgttggagcgggccggagagaag

SEQ ID NO: 242383 - DNA, 100 bp, Homo sapiens
aacaaccaattacaaacctgttgctaatcatcaatacaatgtggagaacgaccaggagcggttcctgagtgacctgcgtcgtgatgtccagaaggttgtt

SEQ ID NO: 242384 - DNA, 110 bp, Homo sapiens
cgaggcgctagggaagatcgcaccgcggacgcccgctgagcttggcgcacgggccgaccagtgtctccagaacgctatagctatggcacctccagctcttcaaagaggac

SEQ ID NO: 242385 - DNA, 98 bp, Homo sapiens
tcaccaggaaccacatctgccagcaccttgatcttgaacttctcagcctccagaacggactcaggaggtgaacctgaagaaaatgaggaaaaaatagt

SEQ ID NO: 242386 - DNA, 100 bp, Homo sapiens
tggtttttaaatatcttcgagctgaacctgaggaccattattttttaatggtgaaatccgggtccccggccgtgctggcattcgcaaaggagaagtcttt

SEQ ID NO: 242387 - DNA, 82 bp, Homo sapiens
gcttggacgaagatggggagaaggaagcgagactcatacgcaacctcaatggagcaggccgggctctcgccatgggtcactg

SEQ ID NO: 242388 - DNA, 82 bp, Homo sapiens
gctaaagcagcgtgcgttcagccctgggggctagttgcacatagtgatttagatgaaagagctattgaagctttaaaagaat

SEQ ID NO: 242389 - DNA, 51 bp, Homo sapiens
ccgaaacgctctgaaaatcgagccgctgaagaaaaggtgactggtctcatg

SEQ ID NO: 242390 - DNA, 90 bp, Homo sapiens
ctccggccaggacgctgggagctgcctgcgggaaggtgcggggagcggagccatggcctccggaatggtttgcagtgtatgtggaactta

SEQ ID NO: 242391 - DNA, 100 bp, Homo sapiens
aggggttcccagaagtcagaatccaagatgttaattggccttggtcctcacagctccaaaaagaaacaggatctcgataagctctatgagctgaagtcca

SEQ ID NO: 242392 - DNA, 82 bp, Homo sapiens
gtccgtccgccgccaccacccactccggacacagggtttccaggcctgaggtgcccgccctggccccaggagaatgaaccag

SEQ ID NO: 242393 - DNA, 82 bp, Homo sapiens
ctgtgatggaaatgaaaactcttttatggtagtaaatgctttaggagacaggatgtggctttgtttgagatgaatcagtcgg

SEQ ID NO: 242394 - DNA, 103 bp, Homo sapiens
ggggacccagaccctggagcctcagttggaagcagccgatccagcctgcggagcctgtggggcagaggagcaggagcggcttcgcttggagcaggagcgagag

SEQ ID NO: 242395 - DNA, 75 bp, Homo sapiens
aaagccagagtgcctgaacaacggattgagctatatcagagtgtgaacatggctacgcctcttcattcccgtcca

SEQ ID NO: 242396 - DNA, 87 bp, Homo sapiens
tgttggaccttccggagcttctcagaagacagagggttttcttttgaggacatgtattcctctgagaaaccttggacagcagatttt

SEQ ID NO: 242397 - DNA, 75 bp, Homo sapiens
aacagaagatttgctctatgatcgtgataaagataccatgtttgtgtggaagtgccccgtgtttgctatgccgat

SEQ ID NO: 242398 - DNA, 100 bp, Homo sapiens
tcattttccacctctgctcagtgttcaacatctgacagtgcttgcaggatctctcctggacaaatcaatcaggaccctcatcggggatgtctgtgtcctg

SEQ ID NO: 242399 - DNA, 51 bp, Homo sapiens
cggcaaccgtgcagcatcttggcaggtgggaccagggagattggatctgct

SEQ ID NO: 242400 - DNA, 80 bp, Homo sapiens
caacatattgactgtatttgggctgcagcacaggagtccttcaataatgttaaacagtggctgcaggaaatagatcgtta

SEQ ID NO: 242401 - DNA, 90 bp, Homo sapiens
cggctgagctgggcatccgacacgtactgctgggtcctgatgaagaagctgttgtggatcttggcaaaactagctcaactgtgaacacca

SEQ ID NO: 242402 - DNA, 88 bp, Homo sapiens
cgaagctatggcctgaagacgggattctttagactccctgccctcggaccctgtacagccgcagtatggggcatggctcagcctggtg

SEQ ID NO: 242403 - DNA, 75 bp, Homo sapiens
cgtttgcccattgaatcagctgaaaccattcgatcctttggtacagaagacagaccgacagatcgtccaatacca

SEQ ID NO: 242404 - DNA, 100 bp, Homo sapiens
gacatctgggggccacaaatgctccttctcctggagacgcaactcaaggtcagaatggcggcagtggagcatcgtcattcttcaggattgccctactggc

SEQ ID NO: 242405 - DNA, 96 bp, Homo sapiens
agcagcgtgagcagccggaggatcgcggagtcccaatgaaacgggcagccatggccctccacagcccgcagtttgaaggatgacctctaggaagaa

SEQ ID NO: 242406 - DNA, 74 bp, Homo sapiens
ggaacacctcgccaaagcagagaaatagggcaagattcttgccaagagaattaatgtgcgtattgagcacatta

SEQ ID NO: 242407 - DNA, 80 bp, Homo sapiens
gcgttacaagctttgtctccttcgacttggagtctttgtccaggacggttaaacccatccagagtaatggctgcggcctt

SEQ ID NO: 242408 - DNA, 101 bp, Homo sapiens
cgcccgacgctccctgtctgggaccttctccctgcctggacccctactattgcaacaaggattcactggcaaaatttgctggcagaaaactgaaagactgt

SEQ ID NO: 242409 - DNA, 76 bp, Homo sapiens
agaaagaccatcaagtttaccagatttttagactctgaggagcagttggagctaatccacattatggaaatggaaa

SEQ ID NO: 242410 - DNA, 75 bp, Homo sapiens
aacagccctccatcttgcagcccagaaggttcgccatcggtggtgtgaactcattgttaagcacaagttcacgaa

SEQ ID NO: 242411 - DNA, 100 bp, Homo sapiens
aacatttcaataaattgatggccagacctgcagttgctctacactttcaggccggatcacctcaacagtcacgtcagacaagtgcactcaacagaacggc

SEQ ID NO: 242412 - DNA, 95 bp, Homo sapiens
atggccaagctggagtaccagcgccgcgaggcctttaagttccaacaggatggattcctggtgctggaaggattcttgtctgcggaagagtgtgt

SEQ ID NO: 242413 - DNA, 100 bp, Homo sapiens
atctgatggtcaccagtcaatctttgagggtaaaggagctggaagtgcgaaaattgatgcatgtgagaggagatggaccctggtattactatgagacaat

SEQ ID NO: 242414 - DNA, 100 bp, Homo sapiens
tgagcggagcccggtgacaggatggtcagattgagttgtacactcacctgcctgtgatgaaacagctggtccagcagctcgagcagtgggagttccgagt

SEQ ID NO: 242415 - DNA, 118 bp, Homo sapiens
caaggctgaagatttaagaactgaatgtgcaacttgcaagggaactggagacaatgaaaatcttgtcagagggcgcaatcagagcttgcagctcatcagaaaaaaattctccatgttg

SEQ ID NO: 242416 - DNA, 98 bp, Homo sapiens
tagataaattctctgctgtgcctgatcccatcccgcagtggaacaacaatgcctgccttcacgactctggctactggagatgggcgcccggctatcgc

SEQ ID NO: 242417 - DNA, 90 bp, Homo sapiens
tctggagtaattggagccaagaaatgagtatagggaaatcctcattgacgattcaatttgttgaaggccaatttgtggactcctacgatc

SEQ ID NO: 242418 - DNA, 100 bp, Homo sapiens
cgcggaacagcaggcccgagcccaccgcgccgggccccggacgccgcgcggaaaagcagcctcccgcgacgatgcccctcaacgttagcttcaccaacag

SEQ ID NO: 242419 - DNA, 87 bp, Homo sapiens
cgcggggccgaggccgcctccgagcgccaggttatcaatactctggctgaccatcatcatcgtgggactgactttggtggaagtcct

SEQ ID NO: 242420 - DNA, 75 bp, Homo sapiens
tgcagcttataatgttccattgccaaagaaatcgtacatttggcctggtagattcagatggaccttgctatgcag

SEQ ID NO: 242421 - DNA, 75 bp, Homo sapiens
cagtttcagtctccaccccaaatgcagctttgaaaagtccagccgcatttcatgagcagagaaggagcttggagc

SEQ ID NO: 242422 - DNA, 100 bp, Homo sapiens
gatcccactgtcctctgatgcacagattatatcaaatccagtccctaaaatggaagaagccaaaagccaaagtttggaggaagactttgaaggacaggcc

SEQ ID NO: 242423 - DNA, 90 bp, Homo sapiens
cctgggaagaactgatatctgagaacaacttaaacggcgattttagtgaagttgacgctcaagagcaggagttcatgatcaagtgttgcc

SEQ ID NO: 242424 - DNA, 87 bp, Homo sapiens
gcgggaggtgttcgagaacgaccccgagacggccgccatggcatcagatgaaggcaaactttttgttggagggctgagttttgacac

SEQ ID NO: 242425 - DNA, 74 bp, Homo sapiens
atcgtgcacatccaggctggtcagtgtggcaaccagatcggtgccaagagggagacgctgttgcggcagctgga

SEQ ID NO: 242426 - DNA, 82 bp, Homo sapiens
cttcggtggactccttcggcagtccacccaccgccgccgcctcccagcgtggatcctttggtcaccttcagatattttagag

SEQ ID NO: 242427 - DNA, 83 bp, Homo sapiens
aggtcctcatgctgctgtggtcattgctggtcatctttgtgcctccggagccagcgtggtggccatagacaacaagatcgaac

SEQ ID NO: 242428 - DNA, 100 bp, Homo sapiens
cggagctcgtccagctgcgtgcctaggtatgtcacaacttgtgcttttgcacctaatacccttttacttgctactggttcaatggacaaaacagtgaaca

SEQ ID NO: 242429 - DNA, 75 bp, Homo sapiens
agatcaagaaggagaccggctgttacaactgatggaaaaccaaaaatcgttgatatcattgatacaacaggaagt

SEQ ID NO: 242430 - DNA, 95 bp, Homo sapiens
caattagtgtctccaaatgcaacactttggtctgctctaaacttatccatctctgtccattactggaacaactccgcaaagtccttattccctaa

SEQ ID NO: 242431 - DNA, 88 bp, Homo sapiens
tggtcatcttctatttccaaaggtcttactgaagtaacacaaagcttaaaaatggaaaatgaagagtttaagaagaggttcagtgatg

SEQ ID NO: 242432 - DNA, 83 bp, Homo sapiens
cttgactcaagattgactctacagactcagaagatgatgctaacagtggtactcactttgtccagttatgctgccaaagaaat

SEQ ID NO: 242433 - DNA, 100 bp, Homo sapiens
gcgacggccttgagcgaggaggagctggacaatgaagactattactcgttgctgaacgtgcgcagggaggaccacctttcactcacctgaggactccaca

SEQ ID NO: 242434 - DNA, 100 bp, Homo sapiens
ctgaattaattggtcctgctgaagctcactcagattccctcattgatacctttcctgagtgtagtacggaaggatcacctgctgttaccagctaccaccc

SEQ ID NO: 242435 - DNA, 100 bp, Homo sapiens
tgaggacatggcctccgacgaggacatgccaagactaaggggctgcagagcggggtggacattggcgtcaagtactcggagaagcaggagcggaatttcg

SEQ ID NO: 242436 - DNA, 142 bp, Homo sapiens
cgtgggtgccctgtactctgaggagcggaactacagccagatgcggatccgggccaagcagtgggccgaggagaactacgatgacccgcacaaaacccctgcctccccagttgtccacatcaggggcctgattgacggtgtg

SEQ ID NO: 242437 - DNA, 83 bp, Homo sapiens
cttagctgtgctcgcgctactctctctttctggcctggaggctatccagcttgccaggtataaactccgaattgttaagccac

SEQ ID NO: 242438 - DNA, 100 bp, Homo sapiens
cagaacgcagatcagaggtagtcggacctttcccgctggcgcgcagcctcagctaggacactggggttgggaaatcaagcatcgtgtgtcgatttgtcca

SEQ ID NO: 242439 - DNA, 82 bp, Homo sapiens
gggctggagcggcggcgggcaggcgtgcggaggacactcctgcgaccaggcttcctgtgtccagtaccggttagtggtccgg

SEQ ID NO: 242440 - DNA, 100 bp, Homo sapiens
acctgcgctacctgtcggaggaggagaccatggcgagcccagggaaagacaattatcgaatgaagagctataagaacaatgctctaaaccctgaagaaat

SEQ ID NO: 242441 - DNA, 75 bp, Homo sapiens
aagccaacagaccatttctcagctccattctactgttcacctgattttgttggcccccatttgaccaaaaaagtg

SEQ ID NO: 242442 - DNA, 75 bp, Homo sapiens
cttggaaaacggagagactggggagaatggaggcgctccatttgggaacattaatggctgcccacggctacttct

SEQ ID NO: 242443 - DNA, 100 bp, Homo sapiens
accctcgccttccttctctgcagcttccccgcaggttgatccaactaatggaagaaataatggctgaaaaggaaaacaaaacaataatatttgtggagac

SEQ ID NO: 242444 - DNA, 87 bp, Homo sapiens
ttggtgggccagcaatcctcagacgcctcacttaggacaagccccttcacagatgtagtcactacaaatcttaaattgcgaaatcca

SEQ ID NO: 242445 - DNA, 100 bp, Homo sapiens
gcagtgccagcagcgtgaaaagcacaagagcagtattctacaactccgtaaatggtcttaagcacaagaaatgaaaataagctgcttcctaaacatcctc

SEQ ID NO: 242446 - DNA, 101 bp, Homo sapiens
cgagaagctctacccactgccctcggcccgcggggggcattctcagtggtgagaagatgtatgaaaattcctactggacaagaatatgctgccaaaattat

SEQ ID NO: 242447 - DNA, 100 bp, Homo sapiens
acctcggcaggcaccggggggatgtggcgattctacacagaagattcacctgggctcaaagtgatcagtttgacaacttagaaaaacacacacagtgggg

SEQ ID NO: 242448 - DNA, 100 bp, Homo sapiens
gacgagctctagctggatgggcgcagagggttgaaaggaggagcaggaggtactgatggacaaggaggtaccttccggtacacctttcatggcgatcctc

SEQ ID NO: 242449 - DNA, 50 bp, Homo sapiens
ctggaccattattttgcatttccagactctttttgatcagaacaatgctg

SEQ ID NO: 242450 - DNA, 100 bp, Homo sapiens
accattacctgtgcctgtccctcctattcctgttcctgcacctataacagtgccacctccacaggttagctgctgaatcaaagcttcaaacagaagttaa

SEQ ID NO: 242451 - DNA, 100 bp, Homo sapiens
caaggccgaggtgcagaatctcggcggggagcttgttgtctctggggaggtaaagatggaccagtgggatttgctgattttgtttataagcacattgtcc

SEQ ID NO: 242452 - DNA, 90 bp, Homo sapiens
tcggtgccccctgcccgggccctcctgaagaggcggcgctcagacagacgcagaagaaacatgtccttcattcaccaggctgagctttca

SEQ ID NO: 242453 - DNA, 51 bp, Homo sapiens
caagatggtgaagcagatcgagagcaaggtctattgaatgatggaactgtg

SEQ ID NO: 242454 - DNA, 82 bp, Homo sapiens
gaagctcttctccggggtcctcatggatctgtccaaaagtatggaggggctcccggagggcctgcgtttcccggacaaactc

SEQ ID NO: 242455 - DNA, 152 bp, Homo sapiens
tggaaattaactgcctccattacactgctgagtcacacacaacgcttgttatgttttcatcacttctctccagaagcaatgtcttgcaggtcttgtgtctataagaatgatcaagctgcaaaggataatccaactaaaagtcttcaggaaga

SEQ ID NO: 242456 - DNA, 98 bp, Homo sapiens
agggtgcccccgcctcacctgcagaggggccgttccgggctcgaacccggcaccttccggggggctctgccctttgatgacgacaacctccgccagct

SEQ ID NO: 242457 - DNA, 100 bp, Homo sapiens
ggacggcgtggaccacatagacatttacgcggatgtcggcgaagagttcaaccaggcattgccgtctgcaacgtgcccgcggcgtctgtggaggagacgg

SEQ ID NO: 242458 - DNA, 96 bp, Homo sapiens
ggatggaccagaatacgaggaggaagaggtggccataccgttgaccgctcctccaactaaccagcatgtggcgtcatagtagaattaatcaaaagc

SEQ ID NO: 242459 - DNA, 88 bp, Homo sapiens
attacagataatggtgttggctatgcttttataaagccaactcagcctggttaagaacacctgttgaagaactagtgcaggcgtttgg

SEQ ID NO: 242460 - DNA, 96 bp, Homo sapiens
cggcaactactttggattcacccacagcggggcggcggcggcggcggctgcggcccaatatagcattcctctgaatattgatttgctgaatagccc

SEQ ID NO: 242461 - DNA, 76 bp, Homo sapiens
agtctacctggatgaaaactacaaatcccaggagcacttcacggaagcaaaatgtggattcagcaaacaaattctg

SEQ ID NO: 242462 - DNA, 100 bp, Homo sapiens
aaaatacaaatcatggagccgctggggtcccttttgcctcagatactattttgaaggagcgagaacccgagcagcgccatgagcaacactaccgtcgtcc

SEQ ID NO: 242463 - DNA, 97 bp, Homo sapiens
gtggccagacatggcattctgcaggtggcagtgagtgacctgcaggaagaaggcaagaatgccatcaactcaccgatgtcccccgccctggtggatg

SEQ ID NO: 242464 - DNA, 100 bp, Homo sapiens
tagacatcttgagcctcctgaaacagacctgtgaccgcatcaagcagtcagcagctggcaccaagcgtcgggtgtttatcattgagactatgggtggcta

SEQ ID NO: 242465 - DNA, 100 bp, Homo sapiens
gcgagactccgtgggcgtaggaccctccgagccagatctggaaagcatgaagactgggctttttttcctatgtctcttgggaactgcagctgcaatcccg

SEQ ID NO: 242466 - DNA, 100 bp, Homo sapiens
ggccgccccatgaacattcagcttgtcacgtcacagattgacgcacagcggaggcctgcacagaggtgtcccgacccaggctaagcttgagcatggctga

SEQ ID NO: 242467 - DNA, 50 bp, Homo sapiens
caagatgcggatccgggcctttccgaatagcattgaagaacttgatggtg

SEQ ID NO: 242468 - DNA, 101 bp, Homo sapiens
tcagccatgaggctggctgtgcttttctcgggggccctgctggggctactggcaggctattttggcattctgctggatatatgttcgtaaataccaaagtc

SEQ ID NO: 242469 - DNA, 75 bp, Homo sapiens
gagctgtttgaacaagggctggttccaggagagactcaaggtgacagttactttactggaaagaaaactattgaa

SEQ ID NO: 242470 - DNA, 75 bp, Homo sapiens
ggtcatctcttctattgtacctgcagatgacaagagcacctcaaaggcagcagcctcaaggagcagccatggccc

SEQ ID NO: 242471 - DNA, 75 bp, Homo sapiens
gaggagctagggctggagcctctccagcctcccgcgaagttggtagctggcagtgttgtgatggcttttgaagaa

SEQ ID NO: 242472 - DNA, 83 bp, Homo sapiens
gccatcaaatgtggaacctatggaaaagggtgtggccactgtaagaaaatgaagccggagtttgagaaggcagcagaagccct

SEQ ID NO: 242473 - DNA, 98 bp, Homo sapiens
tgcgagctgtgtgatgtggagctggctgacctgggctttgtgaagaatgccggcagggagtaccctgacttctaccggaagctctacggcctcttgga

SEQ ID NO: 242474 - DNA, 90 bp, Homo sapiens
gaagcggatagcgtggagtgacggtgccaccgcggcgcgtatgaggatacatgggctgcacttcacagaagagccaaagactgtgcaagt

SEQ ID NO: 242475 - DNA, 75 bp, Homo sapiens
aaaaggtggaccagatgacagaggctgctgtacaggacagattgaatgagcaagagggcgtacctagtgttttca

SEQ ID NO: 242476 - DNA, 82 bp, Homo sapiens
aatggcacaaagttctctcgatcagggcatacatctttcttcgacaaaggggggaaactcggccgatatcctccttggccag

SEQ ID NO: 242477 - DNA, 100 bp, Homo sapiens
ctgcgggcgaggagggcacaaggccaggttcccaagagctcagaaacactttgtgctactctgtggggctttggaaaagcatgttaaatgtgatattagg

SEQ ID NO: 242478 - DNA, 74 bp, Homo sapiens
cgactcatgcaccggacccgttaacgcgttgattcgttccgtgctgctgcaggccgactcgcgggccgctgcac

SEQ ID NO: 242479 - DNA, 75 bp, Homo sapiens
ccgggggcaaggccaaaaagaagggtgtgaacaaagactcctatctgatcctggagacgctgcccacagagtatg

SEQ ID NO: 242480 - DNA, 93 bp, Homo sapiens
gtccagccagcatggaaccaaagcggatcagagagggctaccttgtgaagaagggggatatgagactttctactcggaatatcctgagtgttg

SEQ ID NO: 242481 - DNA, 80 bp, Homo sapiens
accactcccacaagccccccgtgtttgacgagaatgaggaagatgccatggacaatattaccaggcagaaccaattctac

SEQ ID NO: 242482 - DNA, 99 bp, Homo sapiens
taaagatgagtataagcagtgatgaggtcaacttcttggtatatagatacttgcaagagtcagtgatgctattgctgagattagagccatttgtattga

SEQ ID NO: 242483 - DNA, 75 bp, Homo sapiens
tttggggggacttcatattcagaagtctatataaaggtgccgtgagcgatgtggagatgcaggaacactatgatg

SEQ ID NO: 242484 - DNA, 75 bp, Homo sapiens
catgccttctctaatttattggctaaagaatcttagagtcttcaggaaaaaggcaagttatcagctgaagaaaat

SEQ ID NO: 242485 - DNA, 97 bp, Homo sapiens
ccggccttgatgaggcaatggaatgggttgattacattttaaatgttaccagagaaatcgataatttttttcctggcttatttgcatatcataacat

SEQ ID NO: 242486 - DNA, 75 bp, Homo sapiens
agaggcctgcgagcactccggcgaggccaaggccttccaggactatataaactcatcctgaaagtcgctgttgtt

SEQ ID NO: 242487 - DNA, 87 bp, Homo sapiens
ccgacagtcctagctaaacttcgccaactccgctgcctttgccgccaccatgcccaaaacgggggagaagcgagcggacatccagct

SEQ ID NO: 242488 - DNA, 75 bp, Homo sapiens
tcgccttttgccacctttccctttatttccggagttggatatgtcaagtgaccagatagctgccaatctgcaagc

SEQ ID NO: 242489 - DNA, 100 bp, Homo sapiens
caggcgatagcaatgcacagccaatttcatgctccactataggaactgaaattaccattcacttttttaagtggacatattcatgaattgaggattcatg

SEQ ID NO: 242490 - DNA, 97 bp, Homo sapiens
gattatgtcagccaaagctactcctactcatctattttgaataaatcagaaactggtgctaagtgtggtggctcacacctgtaatctcagctacttg

SEQ ID NO: 242491 - DNA, 82 bp, Homo sapiens
tggagaccaaagcaactcagaacttcaaagtggttggttttgaccctcaccccccgatgcgggccacaggcctcccctcaag

SEQ ID NO: 242492 - DNA, 100 bp, Homo sapiens
ctcccttcagctttggtccctcggggcgtctgggcagcctacgctttccgatggagatggacacatggatcatttactgccaggctgtgaagataaaaat

SEQ ID NO: 242493 - DNA, 129 bp, Homo sapiens
aactttacctcgttccctggtttccctgatgaggcagttggaaggaggaggcagaccagtcctgatccccagctcaagggtatagtgaccaggttatattgcaggcaaggctactacttgcaaatgcac

SEQ ID NO: 242494 - DNA, 100 bp, Homo sapiens
caaagttctctcgatcagggcatacatctttcttcgacaaaggcagcgatggattttgggtggggaagtcctccttgcggagttggcgccagctagctct

SEQ ID NO: 242495 - DNA, 89 bp, Homo sapiens
cggacgctcgtgcacagatacacgtttgatgcaaatgatttgtatcaggggcagaattttaacaaggtcctcagttccttagtgactct

SEQ ID NO: 242496 - DNA, 80 bp, Homo sapiens
ctttgcatccggagagtggacaagaaaggaaatttgtgcacagagataacacaggggatatgccatatgaagatgaaggc

SEQ ID NO: 242497 - DNA, 75 bp, Homo sapiens
ctcagagcagaagtatggtgcactggtcaataactttgctgcctgggatcataaaaagcttgtggtgaagggggg

SEQ ID NO: 242498 - DNA, 100 bp, Homo sapiens
agaccagcccagccgtcctgtcctgccagctctgctgccacctctgacagagatcccactggcattgttggtggtaggcctgggcgggggcagcctcccc

SEQ ID NO: 242499 - DNA, 139 bp, Homo sapiens
ggttagacttgtttcttatatgtgatgccattccagcactggactcatggaggctgagcatttattcaggttatcaatactctggctgaccatcatcatcgtgggactgactttggtggaagtccttggttacatgtca

SEQ ID NO: 242500 - DNA, 99 bp, Homo sapiens
ctggaacaaactgggtcccaatgatcaatacaaggactcgctgattcttgagaagagtcaaaactggagctctcaaaaaatggaccatattctgatttg

SEQ ID NO: 242501 - DNA, 88 bp, Homo sapiens
ccacctccagtagtaaattatgaagaagatgcacgatcagttacatctatgaccgagacatgggtgcccggcaccgcgcccgagccca

SEQ ID NO: 242502 - DNA, 100 bp, Homo sapiens
attaatgattataaccggagattctcagggcaacccagatcttctttctctaatacacagaattctaggaaggaggctgttcttttagccaaaatgaaac

SEQ ID NO: 242503 - DNA, 82 bp, Homo sapiens
gggaaagtgctaaagccgctgagctgttgacagatctatgactgccagtctgagtgacgctcgggatgctctagtgaatgca

SEQ ID NO: 242504 - DNA, 98 bp, Homo sapiens
tcagattcaagtaagaccattcaacgcattgaagactaagaatatgagaaacctgaatccagaagacttcacagagaatgcagttgtcttgacttcag

SEQ ID NO: 242505 - DNA, 82 bp, Homo sapiens
ttgtgggcgcgcggcacgcagccgggaggccgaggactcggagttcacctgcagggaaatcctcattgacgattcaatttgt

SEQ ID NO: 242506 - DNA, 90 bp, Homo sapiens
cctggaaggactttacgataaaacgtgtcaattccttagcattggccgaagagttaaggactttgtgttttatgccccacgtctgagaat

SEQ ID NO: 242507 - DNA, 75 bp, Homo sapiens
agaagattagcaaaggtgctaatccagtggaaatcaggagaggtatcttgcaatatattcagaactctccctcct

SEQ ID NO: 242508 - DNA, 75 bp, Homo sapiens
tgataatattctcttcagagattctgcaaatgcgacaagcctcccagtggaaggagaacatgaatctctcagagg

SEQ ID NO: 242509 - DNA, 75 bp, Homo sapiens
cgacgggaggacaatctcaacgacagctctcagcagctacagaaagggtggattttttgtggatctctttgtaag

SEQ ID NO: 242510 - DNA, 50 bp, Homo sapiens
ccagcctcttctgaaacactggggctatggtgaactaaacggtaatgctg

SEQ ID NO: 242511 - DNA, 80 bp, Homo sapiens
ccaccatcctgctggacgggcggcgggtgaagctgcagctctgtgcctccggagccagcgtggtggccatagacaacaag

SEQ ID NO: 242512 - DNA, 98 bp, Homo sapiens
cggctgctgctgctgctgacgctgctgctgcccggcctcgggagcctgagcccttgtgaagccggcaatgacaagtctgtatggtcgccatgccgaga

SEQ ID NO: 242513 - DNA, 89 bp, Homo sapiens
gcttttgatggtggctttactgtcaagaccagacctggtctgttaaatagcaaactccatggtctgaaaaagttcttttcttgtcgtgg

SEQ ID NO: 242514 - DNA, 75 bp, Homo sapiens
tacatggattgtgagctgaagctttctgaatcaggtgtaatcctgagagattcacatggtgttgcacaagtacgt

SEQ ID NO: 242515 - DNA, 75 bp, Homo sapiens
cgttcacctagtgctggcatcctgcgcactcccatccaggacctgaaggagaagaaggagaaggtggaggagaag

SEQ ID NO: 242516 - DNA, 98 bp, Homo sapiens
ccgcccgcgtccttccccgccgagccggcggccgctcccttccccgcgcagccccgcacggcccgggcccacgctgttaaaagacataatctgactaa

SEQ ID NO: 242517 - DNA, 83 bp, Homo sapiens
ctacgaacacgtgaaggaaaagcagctccgtccacaacgccgcttcggggctcctaggtgttgtgactgcagtgcctccctgt

SEQ ID NO: 242518 - DNA, 100 bp, Homo sapiens
atagccaaagacaagacgcaggagaaaatcgagacctcaagtaatcattcccaacacacagcaagaaggaggccatcagcaaactgggaagaggaccctc

SEQ ID NO: 242519 - DNA, 75 bp, Homo sapiens
cacaagcagatctactactcggacaagtacttcgacgaacactacgagtaccgggtgaggtggctttgaccccgg

SEQ ID NO: 242520 - DNA, 101 bp, Homo sapiens
ggggtgcagtaccccagctccatcaacctcacgctgcacctgggctcccagccaacctctgataaaccctcccagcggccatcagagagcacaaattgtag

SEQ ID NO: 242521 - DNA, 75 bp, Homo sapiens
caagcacacactatggcgctgaaacggattaataagtgtgaaaaactcaaattactgtcttccatcatataccgc

SEQ ID NO: 242522 - DNA, 100 bp, Homo sapiens
atgcatttgacctctgaagaactgatcgtcagtatttaaacagatcacatcatgcgtgagtacaagctagtggtccttggttcaggaggcgttgggaagt

SEQ ID NO: 242523 - DNA, 100 bp, Homo sapiens
tcagccaacgcctctgtcatccttaatgtgcaatagcaagccatgggccacagccaggaccggctcaccaccttccaggagaaccaagcccgcactcacg

SEQ ID NO: 242524 - DNA, 75 bp, Homo sapiens
gaggaaggccccgagatcccaggcactgagtgactgcatactgtggtattaaagataatcaaacattatcaagaa

SEQ ID NO: 242525 - DNA, 100 bp, Homo sapiens
ctcctgtgcaccctcttcatcagctccgaagcgacacatgttgtgatggaagagacctcagcagaggaggccgtcagctggcaggagcgcaggatggcag

SEQ ID NO: 242526 - DNA, 50 bp, Homo sapiens
agcaacttctgttgataagttggaaatgacctccaccttcaacccccgag

SEQ ID NO: 242527 - DNA, 90 bp, Homo sapiens
gagtacaacctgaacttctcaggaagcagtactattcaagagtgcacacacccagaagctatgtccttcggcagtaaaagttttacagca

SEQ ID NO: 242528 - DNA, 74 bp, Homo sapiens
gtgttgtttgtctacctgggactaatcggcttcaccaccgaccctcggatggcccgctcctccccctaccccac

SEQ ID NO: 242529 - DNA, 75 bp, Homo sapiens
gtctccatgccaggggacatctcaggagatctataaggacaggcagaaattctcagaacaggttttcaaagtggc

SEQ ID NO: 242530 - DNA, 95 bp, Homo sapiens
tcaaacgcactgccccaagttttactaaaaatactgacctttctctagaagatgcctgtgaggagccaccaacatttgaagctatggagctcatt

SEQ ID NO: 242531 - DNA, 100 bp, Homo sapiens
ttttctagaagcctgtcgaaaaatgggggtgcctgaggacggggaggtttactgcatcgacgcgcggttctacgggaacgtcagccggttcatcaaccac

SEQ ID NO: 242532 - DNA, 100 bp, Homo sapiens
ctccaagtcaatatagccaacagagcagcagctacgggcagcagaaatgtttggaatggttttggaaaaaattattattcctgaaattcagaaggtatct

SEQ ID NO: 242533 - DNA, 75 bp, Homo sapiens
cctgagactgctccagaagtggagaccagcagaactccaccagaagccctagacccacttttcatggatccagac

SEQ ID NO: 242534 - DNA, 100 bp, Homo sapiens
ggcagcggcggctggcgcttcctgcgcatcgtctgcaagaccgcgaggcgagacctcttggaagatggagagttggaagaaggtgaattggaagatgatg

SEQ ID NO: 242535 - DNA, 100 bp, Homo sapiens
cggccggtgccagcacctttcggcttctgagacggcggcagcagcggcattcagtcaacaggtgaaaagaatggaaaactgtggtctccagatgaagagg

SEQ ID NO: 242536 - DNA, 100 bp, Homo sapiens
gaatgccgactctatgctaatggacccagatgatgtggtaccagttggccaaagaagagcctggtgttggtgcatgtgctttggactagcatttatgctt

SEQ ID NO: 242537 - DNA, 89 bp, Homo sapiens
gctcaccttcattgatgctgaactcaaggccccaggaaacgggagacccagaagttctgcctcactcccagactcagcctgcagctcta

SEQ ID NO: 242538 - DNA, 88 bp, Homo sapiens
cgaagagaactgtctcctggtgaccgagcacccgcctccgggcatcttcaactttgctgtggttggctgataaatatttgtcgaagaa

SEQ ID NO: 242539 - DNA, 74 bp, Homo sapiens
ccggtttttagtccattgactatgcagcctaatgctctctgatgtaaaggatggagtaaatcaagcagcacctg

SEQ ID NO: 242540 - DNA, 100 bp, Homo sapiens
attttatgggaattggtccgagaagacacacccaaaggattaccctcaataacctgaagcccccacaagcaaaaaggaagatacaacatgttacttggcc

SEQ ID NO: 242541 - DNA, 95 bp, Homo sapiens
gggatgccagtaagcgaaaggctattgttgcagaccgggttgcaaaagcttctcatttcagagagatgccaggatcctaagtgcctgccaaactt

SEQ ID NO: 242542 - DNA, 90 bp, Homo sapiens
ttacaacatggcagacattgacaagttagaaccatcagagagccttgaggaaaaccagcggaacctccttcagatgactgaaaagttctt

SEQ ID NO: 242543 - DNA, 96 bp, Homo sapiens
ttaatcgaattacagctgctagccaggaacatggactgaagtatccagcgctcattgggaatttagttaaggggagggccccaaagctcatattcg

SEQ ID NO: 242544 - DNA, 100 bp, Homo sapiens
gcaagaaggccctggacacagcaatatctctgggctttcacagatgtcaagccctccaacatcctagtcaactcccgtggggagatcaagctctgtgact

SEQ ID NO: 242545 - DNA, 90 bp, Homo sapiens
ttgtgagctccgtattctctgaagcctggaaacgaggcactcagttggaagagtccagcaagtttggaaattttagcattcaggtgccag

SEQ ID NO: 242546 - DNA, 96 bp, Homo sapiens
ctctttaattggttgcagttgagctaatggtggagccaaaatgctattgccctgtcttcatcaacatttaatcacttttaacctggagacttgccg

SEQ ID NO: 242547 - DNA, 90 bp, Homo sapiens
cccagaagttagcatcagtgggactcggaagctccgatctcaacaagtccttatgtcgtcagaagatcgagaagctcaggaggatgaatt

SEQ ID NO: 242548 - DNA, 76 bp, Homo sapiens
tacaaatggaggaggaggaggacgacgacgatggggatatcggcactactgcagtcttcagttaagcaacaagtag

SEQ ID NO: 242549 - DNA, 75 bp, Homo sapiens
gacagcttgagtgacgatggagtagatttgaagactcaaccagtacatcaggaacgtctctatcaagaatacaat

SEQ ID NO: 242550 - DNA, 100 bp, Homo sapiens
gcatcaaggccattgtgcaactggtgaatgagcgacagccccaggcccgggttgtggtgctgatcctgcaccctgaggaatgcatgtatgctgtgggcca

SEQ ID NO: 242551 - DNA, 90 bp, Homo sapiens
cgaatcttcactcccgctgtctcagcagtctacagcacgggtttgtgtttagtgaatcagagggatctgcattagaacagtttgaaggtg

SEQ ID NO: 242552 - DNA, 100 bp, Homo sapiens
tcaaagaacagacgagagagaacagaactgaagcctgatttctttgatccagcttcaattatggatgaatcaattactttctatgaagacaaaaattttc

SEQ ID NO: 242553 - DNA, 146 bp, Homo sapiens
ggaccagatgttggatatgggatttgctgatcaagtggaagagattttaagtgtggcatacaagaaagatactaatggaccatactaccaaggaccagtccacctgaaccacacactctaaagaaatattttttaagataactttt

SEQ ID NO: 242554 - DNA, 74 bp, Homo sapiens
atttgttaaggattccaagtaactcttatttgttttgatggcgacgactttgatgatgtggaggaggatgaagg

SEQ ID NO: 242555 - DNA, 101 bp, Homo sapiens
cccggaccgagtcgcgagtgtgcgccgtccgccgcccgccggatcccccggaccccccgaccaacccagcgggtgccgcttctccacccgaggcttccacc

SEQ ID NO: 242556 - DNA, 50 bp, Homo sapiens
tcttattgatcctccagtcgaggacccctccttttagttcagaggaggag

SEQ ID NO: 242557 - DNA, 98 bp, Homo sapiens
ccggcccccgagagccgccgacatgaagaaagacgtgcggatcctgctggtgggagaacattgaaaatcttcaagagcagcttagagacaaggaaaag

SEQ ID NO: 242558 - DNA, 83 bp, Homo sapiens
aggagatgcttcagagagaggaagccgaaaacaccctgcaatctttcagacagatctcacattcttgaaggtggcattgaaga

SEQ ID NO: 242559 - DNA, 101 bp, Homo sapiens
ttggaaactctttgggaaagccactcgaaaaggatgttcaagatccttcagtatttgtaactttccctttggaagaagatgaaactgtatctttagttgct

SEQ ID NO: 242560 - DNA, 50 bp, Homo sapiens
tcctcaggtgtccagcctgctcagatttctcactatgtgcaatagacact

SEQ ID NO: 242561 - DNA, 82 bp, Homo sapiens
aaatggcacttcattggccacctacagaaacaaaatgtcaacaaattgatggctgttgacagtgtcttgaagaggatgacaa

SEQ ID NO: 242562 - DNA, 100 bp, Homo sapiens
tatctgttcaattcttatagccattcttatagttgtaagggccgttgctccagggagaactgcaaatatcttcatccacccccacatttaaaaacgcagt

SEQ ID NO: 242563 - DNA, 101 bp, Homo sapiens
cccgggaaagggtcagaggcttcctaacgcagactcgagtgcgaagcgcgcagtcgccggatggaggagatgtataagaaagctcatgctgctatacgaga

SEQ ID NO: 242564 - DNA, 88 bp, Homo sapiens
cactgtcgctgcccgcctgccctgaggagtccccgctgcttgaccatcatcaaagaggggatgctgaccaaacagaacaattcattcc

SEQ ID NO: 242565 - DNA, 101 bp, Homo sapiens
gcaccctcttctacggaggaaggaacgggcacagcaggatgaagtttccaaatgtgtatgtcgctgtgaagatctggagaaacaaaacagattacttcatg

SEQ ID NO: 242566 - DNA, 75 bp, Homo sapiens
caccgagccgggcccacctccccaccaaggaaggtcctgcacacccatgaagcgactgacccagctggtctgaag

SEQ ID NO: 242567 - DNA, 80 bp, Homo sapiens
gtgaggcttcacctcttgagcctgagaagcagaggcctcttcaacctgcgccagatcgtcctcgccaaggtggaccaggc

SEQ ID NO: 242568 - DNA, 74 bp, Homo sapiens
caagctcatccggctggtaaatgcgcagcaaatcagccggcaccaggagcagttcatccagatgctgaacgagc

SEQ ID NO: 242569 - DNA, 83 bp, Homo sapiens
gcacacgtacctgcccagtgcttggaattccttccgtggctattgtggacccccaaaagtacaagggcatatttaacggattc

SEQ ID NO: 242570 - DNA, 75 bp, Homo sapiens
atcagatccgccgacgactgcaagcagtttcgggaggagttcaacaataccctctaccatctgctttggtcaggg

SEQ ID NO: 242571 - DNA, 98 bp, Homo sapiens
gacatagacaagaatgattacccaggtgaagttaaaatgaactatttgggcaaaccatatgtagccatggttacaacataccaaatggcagttcttct

SEQ ID NO: 242572 - DNA, 76 bp, Homo sapiens
gctcgaccagttgcctgacgagagtctccctgacttggtcccagaccccaactatgtgcaagcatccacttatgtg

SEQ ID NO: 242573 - DNA, 76 bp, Homo sapiens
cttcggaaaggaggatgaacgagggtcatcatcagatttgaaatatttaaagtggatacaaaactatttcagcaat

SEQ ID NO: 242574 - DNA, 83 bp, Homo sapiens
ctggaagccgtggctgcgctctcttccctctgctgggcgtcctgttcttccagggctcggttttccgggacgagtttgatctg

SEQ ID NO: 242575 - DNA, 75 bp, Homo sapiens
gatacagttcgccgtcggggagcaccgagcccagatgcagattgagttcataaaacaaggaagcatgaatttcag

SEQ ID NO: 242576 - DNA, 97 bp, Homo sapiens
ccctgcagcaggcagcctcccggagcccctcctttggtgacccacagctatcccctgaggcccgacccaggaagaaatgttggctatttggcgatga

SEQ ID NO: 242577 - DNA, 50 bp, Homo sapiens
taaaaagggaaggataaccccatcacaggcatggaagaggagatggttcg

SEQ ID NO: 242578 - DNA, 82 bp, Homo sapiens
cagggctccaccccgtcgcctcgacaggaacgggaggatgaaattgctactatggagtgcatcaacaatggcaagtccatct

SEQ ID NO: 242579 - DNA, 50 bp, Homo sapiens
cctgtggatatctgtctaagtaaggctggaacctatttgcctcagtccta

SEQ ID NO: 242580 - DNA, 87 bp, Homo sapiens
tccagaaagcggcttatcgaacagagccgggagttcaagaagaacactccagagaatgtgaaagatgttgcagaagtgttccagaag

SEQ ID NO: 242581 - DNA, 96 bp, Homo sapiens
tgaatatccacaatttagcatcaggcaaaggaagcaccgcacatttttcagatcattcatttttctgaagccagaagatgagaactatcaaatgtg

SEQ ID NO: 242582 - DNA, 76 bp, Homo sapiens
cacaattcctgataattctcgatattctcaagacatgcactgcctaattaattccgttgccaactcgtccccattg

SEQ ID NO: 242583 - DNA, 80 bp, Homo sapiens
tgctcttcttccagatccttatgaatcagaaagacctctgcatgttgctgcccgaaatgggctaacaatggtggttcagg

SEQ ID NO: 242584 - DNA, 103 bp, Homo sapiens
gcttcataccagctgaagagcgacaagccgctggcagccgcggatctcaccgccgctcaggaaacctgtttccctccaatcttgtggttgcagctttccgtac

SEQ ID NO: 242585 - DNA, 75 bp, Homo sapiens
gaagaattcctcactaatgagctctccagaaaattgatgcagattgaggagagcaccacagtggtcaccacacag

SEQ ID NO: 242586 - DNA, 83 bp, Homo sapiens
catcgtctccgtgtggcaccgcgagctccgcaaagcaaccatgtccaagggacctgcagttggtattgatcttggcaccacct

SEQ ID NO: 242587 - DNA, 74 bp, Homo sapiens
acatgtggaaggtgcgcgagctggtggacaaagctgtatgtggtagaagaccaaagaagagatgagctaggacc

SEQ ID NO: 242588 - DNA, 100 bp, Homo sapiens
aaccgcgagaaggcccagcgcttcctgcagaaggccgagaagctctacccactgccctcggcccgcgtacgaattggagcaatgttggcttatacacctc

SEQ ID NO: 242589 - DNA, 71 bp, Homo sapiens
agggcaacgagcacaacaggagctacgaggagttgtgccggtggtggtgtgcacattgagccccggtatag

SEQ ID NO: 242590 - DNA, 101 bp, Homo sapiens
aaacaactgaagcaaggaatgccttaattgaacaagtccagggtggcgcgtggctgctgagcccccgcctgtgcgacgccctcatggccatggacgtcatg

SEQ ID NO: 242591 - DNA, 75 bp, Homo sapiens
aaggaatccaccttcttacgctatggcagggagagcttatggatggagaccaaacatccagatctggagtgccgg

SEQ ID NO: 242592 - DNA, 100 bp, Homo sapiens
agcggcgcaaggagatactgggaaagaccacagcaagattctttcattcgtctcctcctagcctgggggaccaggctcgaactgaccctggacatcaaag

SEQ ID NO: 242593 - DNA, 78 bp, Homo sapiens
cgaaaaagctcaatgcctcagaaattcattgcttggaactgcagttggctttttgctaccaccagttttagtacccaa

SEQ ID NO: 242594 - DNA, 80 bp, Homo sapiens
cctggggatattatcaaatctactactgttcatggcaggttactttccgcaccagaatctatcactgcaacatcaacagt

SEQ ID NO: 242595 - DNA, 100 bp, Homo sapiens
atccaaagactgtggaacttttaagtggagtggtggatcagaccaaagatggattcatgatgttgctatcaaaagttgagaaattgtcagaagaaatcat

SEQ ID NO: 242596 - DNA, 101 bp, Homo sapiens
gcggaaggcattgctgggagcctgaaaactgtgaatggtcccgtgggagtagggctgaatgaactgaaacgaaagctgctgatcagtgacacccagcacta

SEQ ID NO: 242597 - DNA, 90 bp, Homo sapiens
cgactcccatgcatcggctaatagcccggagacaagcatccagctccaggtcccacaggggctcttcttccccacgaaaaagatcttatt

SEQ ID NO: 242598 - DNA, 87 bp, Homo sapiens
gtgttcagtcatcacaaccctcaaaggacatgaagaccacattgtgcaacacatcattggacaacccaacccagagaaacaaggatc

SEQ ID NO: 242599 - DNA, 82 bp, Homo sapiens
ctggaagagaataaccgaaaaattgcagaagcacaagccaaactgggaagaaggagaaagggccaacccctgaagaagcaat

SEQ ID NO: 242600 - DNA, 75 bp, Homo sapiens
gggagaatgggttgctcttaatccattaaggaaatgtcagagccgagtgatagctactttcacatgttcaggaga

SEQ ID NO: 242601 - DNA, 95 bp, Homo sapiens
tggtgaccttctctgttcatatgaccctgggcttcgatctgacagcagcacaggctacgggggctacgaggagtacagtggcctcagtgatggct

SEQ ID NO: 242602 - DNA, 129 bp, Homo sapiens
gtgagaaatccaattcagctttttgtgctgccagcaagaaatgatcagtagcaccagtgtttatggtgcttttgaagatgatgatatcacgcacgttgaaggaagtgtagatcctattcgagatataga

SEQ ID NO: 242603 - DNA, 100 bp, Homo sapiens
tcctcccatgcaatcctcccaaaggcctcccacctttacacatttattggatgaatattgactgggctggcttagatgaagatgaagatgcacatgtctg

SEQ ID NO: 242604 - DNA, 75 bp, Homo sapiens
atggaatctgctttgttgggagtgatggatggacaggcccttggactggacagtgccaatgagaaaggcttgtat

SEQ ID NO: 242605 - DNA, 90 bp, Homo sapiens
gttggatggattcattaaaaaatttgttctctgtcctgaatgtgagaatcctgaaacagatttgcatgactttgttcgacgagaccggcc

SEQ ID NO: 242606 - DNA, 86 bp, Homo sapiens
cccgtcccgaccctggccgccccgagcggagcctggaggacggggaggtttactgcatcgacgcgcggttctacgggaacgtcagc

SEQ ID NO: 242607 - DNA, 100 bp, Homo sapiens
gtcgctcacgctgggagctgtagatcgcagctgttcctattcggccatcttggctcctccattctgcttttaaccgataacagtagaactctgaacgtgg

SEQ ID NO: 242608 - DNA, 100 bp, Homo sapiens
cggctggcgcggcggaatccagggccgacccgggccggaccgaccccaggcggcgggccaattcctgtccccccagcagcatggcatcgtgtgctgaacc

SEQ ID NO: 242609 - DNA, 75 bp, Homo sapiens
gcccccagcgcagcggccgcgcggaccatgtgtcaacttatgccgcgtttgtacagacgcatagaccaacagggg

SEQ ID NO: 242610 - DNA, 108 bp, Homo sapiens
catctcaaaaacaaaattctgaactcaggacttggcaagaaacttggatttaactggccagaagcaggtattcaaagcagagaacaatccctgggtgacccccattgc

SEQ ID NO: 242611 - DNA, 98 bp, Homo sapiens
gcgctgcctggtcgctggtgaagcccgcggcgcgcgcctctcccggaccctgcagggtgataagaagtacatcatggggcccaagctttccactcttg

SEQ ID NO: 242612 - DNA, 50 bp, Homo sapiens
gagaagatcatcgagcatttcaaacggtacgaagatgccctggtgctcct

SEQ ID NO: 242613 - DNA, 83 bp, Homo sapiens
gtcaaaagcgcactaaatcgtctccaaggtgccagaaccctgtggagcatcatgaactgggaagagtagctgagccccagagc

SEQ ID NO: 242614 - DNA, 75 bp, Homo sapiens
cttttccctctccctttccctaagtgacctgaccaacggtgcagatgggatgctggccacaagctccaatgggtc

SEQ ID NO: 242615 - DNA, 99 bp, Homo sapiens
tggcaatgagaccagtggaagcagcaccatcggggagacaagcaagaggaagataccaactagagataaaaataccagaaacatacccatttaatcccc

SEQ ID NO: 242616 - DNA, 100 bp, Homo sapiens
ccgcgtacccggcgcagccagagccaccagcgcagcgctgccatggagcccagcagcaagacaaatttacatgtattggagaccagaccagaagcccttc

SEQ ID NO: 242617 - DNA, 100 bp, Homo sapiens
tcagcaacaaaaacataaagctctcagaaagagtactgattcctgtcaagcagtatccaaaggttgccaggcaggaggggaggatcattctgacgtcggg

SEQ ID NO: 242618 - DNA, 100 bp, Homo sapiens
gattccatctttatccaaaccatctgtataccatgaagcagaagctcctcctggggtagagacagatcttattgatgttggattcacagatgatgtgaag

SEQ ID NO: 242619 - DNA, 75 bp, Homo sapiens
tgtgtacctcctgctccggcagccttttgacaagtatgcgcccaagctggacagcccctacttccgacattccag

SEQ ID NO: 242620 - DNA, 90 bp, Homo sapiens
ccaggacccgcctggctgcgagatatgccccttcacagatgtagtcactacaaatcttaaattgcgaaatccatcggatagaaaagtgtg

SEQ ID NO: 242621 - DNA, 114 bp, Homo sapiens
cggagagcagcagccgcccgcttcaaccccaggggaccagaggaactcagccctgattgcgtggttatggccagtgagaatgtgcggtgttgcattgcagaagaagctaggaaa

SEQ ID NO: 242622 - DNA, 73 bp, Homo sapiens
tccagatcatagacagcaatggatagatgccattgaacagcacaagataagtttataccatggatagcacaaa

SEQ ID NO: 242623 - DNA, 90 bp, Homo sapiens
agaatactgtgaattatgcaagcacagatttgcttttacaccaagttatgaagacagtatggagtttccagaccatagtagacatttgct

SEQ ID NO: 242624 - DNA, 90 bp, Homo sapiens
gaagatagcaaaaccatacagggctatgatgctattgtggttgaacaatggacagtcctggaagttccgaggtgcaccgattatacccgt

SEQ ID NO: 242625 - DNA, 82 bp, Homo sapiens
caacaagaggaaagacacacctaccaagaagccagtcaagcggccagatataacacgtgggaaccggaggagaacatcctgg

SEQ ID NO: 242626 - DNA, 100 bp, Homo sapiens
gaggtgctgatatcaacacggtcaacgtggacggcttgacagccctgcaccagagtcctttgtcatggataaaaggcttgaaatggggggaatacgtggg

SEQ ID NO: 242627 - DNA, 98 bp, Homo sapiens
accacattggcgtggccgtcaaggagctggacctctacctggcctacttcgtgcgtgagcgagctgtccccaatctcttcatgctggaaacagtggat

SEQ ID NO: 242628 - DNA, 82 bp, Homo sapiens
ggagatccaggtcaccagcatccactggagctacaagaatgacgacaacccccccgtgtcttttgtgaagttctccccgaac

SEQ ID NO: 242629 - DNA, 100 bp, Homo sapiens
gaacttgacaactgcccttctgtgtctccttacctcagttgttgatcattatgaaaatcctagaaacgtggggtcccttgacaagacatctaaaaatgtt

SEQ ID NO: 242630 - DNA, 100 bp, Homo sapiens
cctattgtctttctccgcggcgaaggtgaagagttgtcccagctcggcccgcgggggagccccgggagccgcacgattttgagatacagagtgaaaatgg

SEQ ID NO: 242631 - DNA, 82 bp, Homo sapiens
tgcaaccttagcgacatcaggaagaacagggtcgaggatcgaggagtccaaaactacttacctggaagaccttccaccaccc

SEQ ID NO: 242632 - DNA, 100 bp, Homo sapiens
tacgagctggctttaatcctgaaagccatgcagcggggggcagctggcattttatgctatgtgggagcctatgtcttcatcacttatgatgactatgacc

SEQ ID NO: 242633 - DNA, 98 bp, Homo sapiens
gttaattcagtggctgctcttaaaatacaagttccttgcattgactccatggagagtatatcacctgatttccgtcatgatacttgggcgtgttatta

SEQ ID NO: 242634 - DNA, 90 bp, Homo sapiens
gtttgtcatccttgtacagcaatctcctcctccactgccactacagggaagtgcatcacatgtcagatgcctgtgaggagccaccaacat

SEQ ID NO: 242635 - DNA, 75 bp, Homo sapiens
ctcctggactggtttaaaacggtcactgaaggagcctcacgacacgctctcccatcctctcaacaggaaagattc

SEQ ID NO: 242636 - DNA, 51 bp, Homo sapiens
gggaaaacatccagtgtggtggaaatggccttagaaaatttacgtgtatac

SEQ ID NO: 242637 - DNA, 75 bp, Homo sapiens
ctcagagcagtcaagaagaattgtgatagaagtattcattagagcagaagatggcctttgtagagaggtggtaaa

SEQ ID NO: 242638 - DNA, 75 bp, Homo sapiens
cccgaagccttcctttatcgctttcaggttatgaagacagtatggagtttccagaccatagtagacatttgctac

SEQ ID NO: 242639 - DNA, 100 bp, Homo sapiens
ccctgcttgaccgctccaagtcctatgagctcatccggaagattgaggcctacatggaaggaaaacggacgatgtattactaagctggaaaacatggggt

SEQ ID NO: 242640 - DNA, 100 bp, Homo sapiens
atgagcaacaaatgcgacgtggtcgtggtggggggcggcatctcaggtacaccaggggttggaaaaaccacactaggcaaagaacttgcgtcaaaatcag

SEQ ID NO: 242641 - DNA, 75 bp, Homo sapiens
cagagctgtgcactgtgcgcaaagacctccaccagaactgtccccattgccaacccacaccagttatcctattga

SEQ ID NO: 242642 - DNA, 85 bp, Homo sapiens
ttgagaaactatcccagatatcatcatagagtcttctgctcttcctcaactaccaaagaacaccttccaccatgaccacctcagc

SEQ ID NO: 242643 - DNA, 50 bp, Homo sapiens
ctttgctgctagtggtttggagttaatggggttgacctgaggaactccag

SEQ ID NO: 242644 - DNA, 50 bp, Homo sapiens
gacgtgaagtttgagtacctgcaggtgcatcccggccccacgccccaggc

SEQ ID NO: 242645 - DNA, 73 bp, Homo sapiens
attgaagcagaggacaacatgaactgccagatcttcagtttagatcttggaggcatatcaactgtggttctaa

SEQ ID NO: 242646 - DNA, 76 bp, Homo sapiens
gtttggaaagacccaggagaagccgcccaaagaactgggattaaagcctgtggtttccacagaagcaccacctatc

SEQ ID NO: 242647 - DNA, 80 bp, Homo sapiens
ctcagcagatgaaatacatgaaggagacctagtggaagtggttctttcaggcttcgaacctaatgaacaatccccagatt

SEQ ID NO: 242648 - DNA, 100 bp, Homo sapiens
aaagtcatcacctcctgggatcagatgtgcattgaggacaagcagtgggaagagctctgttatcaatgcaatgttgtgggataaagttctccctagtggg

SEQ ID NO: 242649 - DNA, 75 bp, Homo sapiens
ggctttggacgccggtggagacgcaggcgagagatgtgctgaatttcctgcgctcaggggacctcccacccaggg

SEQ ID NO: 242650 - DNA, 90 bp, Homo sapiens
tcctaaacccgtgtttgccttccatcatgctaacttcccacgacctgagagtcagtatactaagactgcccaggagattgtgaacgtctg

SEQ ID NO: 242651 - DNA, 75 bp, Homo sapiens
gcaaattcctccctggagatatggtggagccagggcaagatttactgcttgctgctttgagtgagagtggaatta

SEQ ID NO: 242652 - DNA, 98 bp, Homo sapiens
ctgccgcttcagtccgaaggaggaagggaaccaacccactttctcggcgccgcggctcttttctaaaagtgcatggtctacatggctggacttgtttt

SEQ ID NO: 242653 - DNA, 101 bp, Homo sapiens
cgaggccctgctgcacgacctcagctcccagaggatcaccagcgtgggtgaaattcgatgctactgtgatgctgcccactgtgtagccactggttatatgt

SEQ ID NO: 242654 - DNA, 76 bp, Homo sapiens
aaaacgtgcaataccacctcccctacctcctaagcaggaggatgcattagcacaacaggcctttgaagaggctcgg

SEQ ID NO: 242655 - DNA, 100 bp, Homo sapiens
aaaataacttgctccagacactgtccatcttcgacagtgaggaagatatcaccaccttcgtcaagggcaagatacacctcatggatttacagtcgcactt

SEQ ID NO: 242656 - DNA, 100 bp, Homo sapiens
cacattttcagtgacgtttgttgatggcaacaaccctttccaagcagttcaagaagatgtggtggtacagtgggagctattctgacatgtccactggaag

SEQ ID NO: 242657 - DNA, 96 bp, Homo sapiens
agagacctgcagaggacctcaacatccgagtggaaaggtgttggagcgggccggagagaagtagagtgggctgcgaggagaaggaaacaggccttt

SEQ ID NO: 242658 - DNA, 82 bp, Homo sapiens
ggaaagtcgtggatctggccaacaagaaggtggatcagtacaagggaaagcgggatttggagtcactgagggagtacgtgga

SEQ ID NO: 242659 - DNA, 74 bp, Homo sapiens
gcaagatggctgaactcaatactcatgtgaatgtcaaggaaaagtttcagaagaggagccccgccgaggcatga

SEQ ID NO: 242660 - DNA, 100 bp, Homo sapiens
aatgtgggatcgatgtttcaatattggaagcgctttgatttacagcagctgcagagtgcagcagctgccccgagccccgtgcttggcaacattcccccca

SEQ ID NO: 242661 - DNA, 96 bp, Homo sapiens
aaaggagaacttgaaagttcggaccagcgtgatggcaatgggaagctgggcctggtggagttcaacatcctgtggaaccgcatccggaattacctg

SEQ ID NO: 242662 - DNA, 75 bp, Homo sapiens
cacctaaggagcggaccccgcatcttcgccgtctggaaagaactgaagcaggcccagaccctgatgagctccctg

SEQ ID NO: 242663 - DNA, 50 bp, Homo sapiens
gccgcgccaggccgggcgggcgacgcaaacatgcagatctttgtgaagac

SEQ ID NO: 242664 - DNA, 50 bp, Homo sapiens
agaggctgctgcactgaaatgtggaataacactcccatggatgaagcact

SEQ ID NO: 242665 - DNA, 100 bp, Homo sapiens
gtggaggtctgcttggcagagggaacttgccccacattggcggtggccatatccccctcggcctgcctctatccggctgtggaggtcacgtctgggccgg

SEQ ID NO: 242666 - DNA, 75 bp, Homo sapiens
caaccgtctccagccttggtctgagtggactgtcctgcagacccccccaagacacatatgacccaccaccccatc

SEQ ID NO: 242667 - DNA, 50 bp, Homo sapiens
ctgtattctgacgtttacaaaactacagaaatggaacaaaagtgggactt

SEQ ID NO: 242668 - DNA, 75 bp, Homo sapiens
cccatcgagaaatggccgcgtcggcaggtttggtgcacctcgatttggaggaagtagggcagggcccttatctgg

SEQ ID NO: 242669 - DNA, 75 bp, Homo sapiens
ttccatcagccgccttcatcaaatcaaacaggtctcggcgcggaagatggccggcggcgtggacggccccatcgg

SEQ ID NO: 242670 - DNA, 82 bp, Homo sapiens
tccgtctccccgctccggagcccaggcggcggcgagtactcgggactgcttttggcttctggatgccctcctccagtacaca

SEQ ID NO: 242671 - DNA, 78 bp, Homo sapiens
aagtcattaggaacaatggtgcaagatgtcctcctcgcactttcttaccagccctttgcaaaatttttcttgatgaaa

SEQ ID NO: 242672 - DNA, 83 bp, Homo sapiens
aacgaggcaaggagctaaagcagcgtgcgttcagccctggggagtgttggaggaagcagaattttacaatatcacctcattaa

SEQ ID NO: 242673 - DNA, 100 bp, Homo sapiens
ggacatttgaggttggagttacctcccagttcatctccaagaaagaggagaaggcagagcccccccaggctatgaatgccctgatgcggttgaaccagct

SEQ ID NO: 242674 - DNA, 75 bp, Homo sapiens
tgtctgtctgtccatccactcaggacatctgcagggctgttgataatcaggtgtatgtggccacagcctctcctg

SEQ ID NO: 242675 - DNA, 75 bp, Homo sapiens
ataaatccaaatactgcatatcagaaacaacaggctatggagttactagtagagaaagcaatcagcagtgcttct

SEQ ID NO: 242676 - DNA, 75 bp, Homo sapiens
ttacttccagaagattggtggagcttgatctgaagaaaaggttgaaagctgctgaagcagacagcaaactgaaac

SEQ ID NO: 242677 - DNA, 100 bp, Homo sapiens
ccccggcggcggcggcggcggcgcgcgggggcgacgcgcgggaacaacgcgagtcggcgcgcgggacgaagccgtgctggtatagaggactctaagaagt

SEQ ID NO: 242678 - DNA, 50 bp, Homo sapiens
cttcgcctcctaatccctagccactatggcgagaaccgaagtttggaggt

SEQ ID NO: 242679 - DNA, 100 bp, Homo sapiens
tcgtttcccagcgctgcgcaggacttctcctggcggcgctgcggatccagggggtcggctgccaggtacagctctggatgccgggcaggttggtttggca

SEQ ID NO: 242680 - DNA, 101 bp, Homo sapiens
tgcgaggagccgccgccccccctcgcagatctttgtggagttcacctctgtgtttgactgccagaaagccatgcagggcctgacgggccgcaagttcgcca

SEQ ID NO: 242681 - DNA, 90 bp, Homo sapiens
cggatatttaagtacaatggtgggcttaattttagggaacttaggctgcggaactatgtcccggaggatgaggacctgaagaagaggagg

SEQ ID NO: 242682 - DNA, 82 bp, Homo sapiens
caaagattctgataactggcaaaacaagatacagaaggtggtcatggcactaggagactacatgggcgcctcctgtcacgcc

SEQ ID NO: 242683 - DNA, 98 bp, Homo sapiens
cgggcgggaagtggtgtgccacgcctcggcttgggacttctacaacaggaaagacttcagcccctctgaaatcaaagagatcttgcatctggctggac

SEQ ID NO: 242684 - DNA, 100 bp, Homo sapiens
agatgatgaagaggaacaggatcataaatcaggtctggagcccggcactgtggtcataacagagcaggcagtggatacctgcttcaaggcagagtttgag

SEQ ID NO: 242685 - DNA, 98 bp, Homo sapiens
atcgaactgggtgcggggacaggcatcgtggggatcttggcagcgctgcaggacgaacccgccccctggagttctcccgctgccgccgccccaggtct

SEQ ID NO: 242686 - DNA, 83 bp, Homo sapiens
catatttgagtcatttccttcgtacccacagtgcttcatgagaggcaccgtctgcgtcctgctgtccttccccttcatcttca

SEQ ID NO: 242687 - DNA, 51 bp, Homo sapiens
ctcccatcattgatgtggtgcgatcgggttcttgaagcttttgagattaac

SEQ ID NO: 242688 - DNA, 90 bp, Homo sapiens
cttttcacttctgctgcactgctttcagcatgcaaaaactggcgatggaatatgagaggagccctctggaaagaaaaggacagaccctgt

SEQ ID NO: 242689 - DNA, 82 bp, Homo sapiens
caaccctgacgcagatgccaaagcgctgcggaaagccatgaagggactcggtcttagtcctgggtaacaagcgagaccttcc

SEQ ID NO: 242690 - DNA, 100 bp, Homo sapiens
cagagtgtatcatctcctgaagcaacatctggttctacaggccactgagaatgcaaaggaggaagtgaggcgaattctggggctgctggatgcttacttg

SEQ ID NO: 242691 - DNA, 96 bp, Homo sapiens
tggtggcacgcagcctggggactctgcctcgtgccgctgagcctggcgcagatcgttgtcacaggtagtactgatggaattggaaaatcatatgca

SEQ ID NO: 242692 - DNA, 75 bp, Homo sapiens
tggcagctttttgtcgatccattacaaagtttccacttgagcggcacagtgacagaacctgcaatacaatcggag

SEQ ID NO: 242693 - DNA, 98 bp, Homo sapiens
gggcctcccagccgacatgtctctagtggcggaagccttcgtctcccagattgcagattagtgggatggtttggccatgaactcagcaccagatttaa

SEQ ID NO: 242694 - DNA, 98 bp, Homo sapiens
cgcagccatgtctggggacgagcatgcatatgcgctagaacttctatttgatcagttgcatgaaggagctaaagctcttgatgtaggatctggaagtg

SEQ ID NO: 242695 - DNA, 50 bp, Homo sapiens
caagagcaacatctttcctcaccccaagataaagcatatgatggctttca

SEQ ID NO: 242696 - DNA, 50 bp, Homo sapiens
cctacttctataaagtcatccaggtttgccatgcagaacttgaattgggg

SEQ ID NO: 242697 - DNA, 50 bp, Homo sapiens
gaattacataacatcaaacgtggctttctcctctaaatcttggtctcttg

SEQ ID NO: 242698 - DNA, 97 bp, Homo sapiens
gcgaagagctcggaccaagcgctcaggcactgttggataagaagaataaagttcttgaagtaaagaaaccccctcgcttccttcaaagaaacccaat

SEQ ID NO: 242699 - DNA, 100 bp, Homo sapiens
atttgtgataacttcccatattatagagaggctggcagtggttggaagtttcttcaggacacgttggatgccctcttcaacatcatgatggagaactcag

SEQ ID NO: 242700 - DNA, 82 bp, Homo sapiens
aagagggtttgaaaaccttgtaccttatacttcaactgttaggaagctcttcgtgggcggtcttgactggagcacgacccaa

SEQ ID NO: 242701 - DNA, 90 bp, Homo sapiens
gctatatactttggttacctatgtacctgttaccactttcaaaactgagctccttgccaaaaaacagccattaaaaaccagtgaggtcta

SEQ ID NO: 242702 - DNA, 50 bp, Homo sapiens
gaggacatcgctgagatcacagagatgaaggcaattctcaagttcaacta

SEQ ID NO: 242703 - DNA, 100 bp, Homo sapiens
ctcggaggggagggggcgttagccccgcgcagccgccggcgtcgccgccatggacctagaacccagcgggtgccgcttctccacccgaggcttccacctc

SEQ ID NO: 242704 - DNA, 83 bp, Homo sapiens
ggccagaaagttccgccatgagctggggcacggagctgtggtttcctgttttccagcacccaacataacttgtaaggattcca

SEQ ID NO: 242705 - DNA, 100 bp, Homo sapiens
tcctttggttgaatccccaggcccttgttggggcacaaggtggcaggcaagatgatgatgaatgaagtcctggcagcttcctgtgtcccaggccttgtag

SEQ ID NO: 242706 - DNA, 51 bp, Homo sapiens
aaaaatattaatgaggctatgagctgcaagctttcttcctggtggcagatg

SEQ ID NO: 242707 - DNA, 74 bp, Homo sapiens
atattgaccatgatggaatgcttgacagagatgagtttgcagtttgagaaagatcagtctaaagaaaaggagaa

SEQ ID NO: 242708 - DNA, 98 bp, Homo sapiens
ctgaaacaggagatggtgcggacagatgtcaacctggaaaatggcctggaacccgctgaaacccacaggtatccagctcacatagaagacattgacta

SEQ ID NO: 242709 - DNA, 75 bp, Homo sapiens
agaggccaaagatctgacagaactggttcagcggagaataacatatcttcagatgtgagtatgcagtgctcacag

SEQ ID NO: 242710 - DNA, 89 bp, Homo sapiens
tttttcttggatggttgggagcagatcgattttaccttggataccctgctttggggtgtactctgtgtgaccgcgcctatccctcggac

SEQ ID NO: 242711 - DNA, 83 bp, Homo sapiens
gccaacgccccggtggagaagctgagtgtcaacagcatctccaccctggagcctgtgagccggtgccagcgcctgagtgagct

SEQ ID NO: 242712 - DNA, 80 bp, Homo sapiens
acacttcccactgtgcagaaggcactggcgtccacatgcaaaccactccgacagttagttaatatgtgcatcaacccaga

SEQ ID NO: 242713 - DNA, 90 bp, Homo sapiens
aaaaagaaatatgtcaccctgtgtgacaatggcgtgctgacctatcatcccagtttacatgaagaggcagaaatccaggcagaacttgaa

SEQ ID NO: 242714 - DNA, 96 bp, Homo sapiens
gtgcttccaggcggccgtgcagctggcgctgcgggcaggacagtaagactttgaccccgacgcaggcttcagtgattgccgcggatcagaagcctg

SEQ ID NO: 242715 - DNA, 82 bp, Homo sapiens
acagcgggaggcagagggaggaacctggacgccggaagccgggaaatgctctggccctgccccatctcccagtagcttcctg

SEQ ID NO: 242716 - DNA, 80 bp, Homo sapiens
ccaggacaagtactttatgatagattttggtttcagtaacctcttcactcctgggcagctgctgaagacctggtgtggca

SEQ ID NO: 242717 - DNA, 100 bp, Homo sapiens
ctggtctctgttggtgtagaagccaaaatcaggctctacagattctcccctgcccctggagaaggaggagcaggtccgacttcaggctcggaagtggctg

SEQ ID NO: 242718 - DNA, 88 bp, Homo sapiens
gtcgtttggtttgatcttgttgactatgaggaagttctagctggagaagaagcaggcgctccctccattccagccacagatcacagac

SEQ ID NO: 242719 - DNA, 83 bp, Homo sapiens
gacggagtcggcgagcccccgcggcgacagcagcgatggattttgggtggggaagtcctccttgcggagttggcgccagctag

SEQ ID NO: 242720 - DNA, 98 bp, Homo sapiens
tcctccttggcgtgctgctgctgcccgggaccctgcgactggcaggaattgtgggaacgtattctgctccagttgttgtaaccagaaggttccagttc

SEQ ID NO: 242721 - DNA, 82 bp, Homo sapiens
atggttaaaacccgaatgcagctagaacagaaaacggcgactacaacaagccgatccccgcccagtacttggagcacctgaa

SEQ ID NO: 242722 - DNA, 73 bp, Homo sapiens
ggtaaggaagaatccagtgaaaagttcaggcaggtggaaaagagtactgagatatctagatgatctcaatgaa

SEQ ID NO: 242723 - DNA, 75 bp, Homo sapiens
ctgtggaagtacctacaacttcagagataaggtctcaccatgttgtccagactggacttgaactcctggcttcaa

SEQ ID NO: 242724 - DNA, 90 bp, Homo sapiens
ctcttcccggcgctctcctggctcccttctgccccagctccgtctcggcggcggcgggtatctcattcagttgctaaacttatattagtt

SEQ ID NO: 242725 - DNA, 98 bp, Homo sapiens
gccatccagagctgtgcctcccagcaccacagtccttctgcagtccctcgtccagccacccccagcacgttcggaacgttaccgccatctgggctccg

SEQ ID NO: 242726 - DNA, 83 bp, Homo sapiens
aagagcttctctccagagtagaaagcttcttggacacttaatgattgttggcaagaaatgtgctgctgatctgggcctgaata

SEQ ID NO: 242727 - DNA, 97 bp, Homo sapiens
tttcttcaccatatgcaggggctgctggatttgccccagccattggatttcctcaagctacagctgccatgtccacgcagagacttcggaatgaaga

SEQ ID NO: 242728 - DNA, 102 bp, Homo sapiens
tctgacgacattgaagctagccgaataatagctctccagacccccagctggccatgtggtgagttcagggcccaaatcaagtagtaccagcaatcagggaac

SEQ ID NO: 242729 - DNA, 51 bp, Homo sapiens
cttttttcttgctgaaacattaaatttatctgcagggctgttgtttccagc

SEQ ID NO: 242730 - DNA, 80 bp, Homo sapiens
gaggctcctgggctccgtggtcttcatccaccgccaggttctgcggggagtgtctccagccctgcctgcaggtgccatcc

SEQ ID NO: 242731 - DNA, 74 bp, Homo sapiens
tgcaatgctgatgtttgataaaactaccaacaggcacagagggtgagcttgtcggccacagactgctacattgt

SEQ ID NO: 242732 - DNA, 82 bp, Homo sapiens
gaagatcctggtcccctgctttaaccatcgaaaatgaggactcagtggcttttgaggatgtgtctgtgagcttcagccagga

SEQ ID NO: 242733 - DNA, 88 bp, Homo sapiens
gaaaaattacagcacatctcagtgaatttgcaagtgaacatcgatatattgaactcttcttgaattctactcctggaggcggctctgg

SEQ ID NO: 242734 - DNA, 82 bp, Homo sapiens
aaagcgtttccgcagacagaagtggggagaagcggaggtctctaattaacagaagatggcaaagcccagccacagcagctat

SEQ ID NO: 242735 - DNA, 100 bp, Homo sapiens
cgggcaccatgagcgacgtggctattgtgaaggagggttggctgcacaaacgagtggccagagcccccttcccaggcagagatttccagtacctgacagt

SEQ ID NO: 242736 - DNA, 100 bp, Homo sapiens
ttgtagaatatgacttaccagcactcctggaccaagagctctttgaggaaggtcagcctttaaagctacctgacactaagaggacactgttgtttacatt

SEQ ID NO: 242737 - DNA, 50 bp, Homo sapiens
cgcttctggccgcgggaaggagagttaacaagcacaagccctggctggag

SEQ ID NO: 242738 - DNA, 82 bp, Homo sapiens
ctgtattggtctcctgctcctagaggcctttggacaagcacacacaaaccacaagaaggtggctgctgacggagagagccgg

SEQ ID NO: 242739 - DNA, 120 bp, Homo sapiens
ggcgacctgggcaccagcaggacccgaggccaggagccaggggcccagaagggtgcttcaaggatgaccgcatcgtcttctggacttggatgttctccacctacttcatggagaaatggg

SEQ ID NO: 242740 - DNA, 98 bp, Homo sapiens
caaaacaagaaatttcaaaacttgatcaagggtcagccagcagccggcccggggtgtcagccaccccacccaagtccccggtctacctggacctggcc

SEQ ID NO: 242741 - DNA, 50 bp, Homo sapiens
ctttctcttcctctgggtcacaggcagttcatttctgtgtgacgtgacca

SEQ ID NO: 242742 - DNA, 100 bp, Homo sapiens
tgccgccttgtcacgggtcacaaggccacggcgctgcaggagaatttttccctagattggtgtaaacagccagacgtgggccttcccaaacccgacctgg

SEQ ID NO: 242743 - DNA, 100 bp, Homo sapiens
gtcagtgtgaatgcatcggccacccctttccaacagccgagtggatatgggtctcatggatacaacactggatgctttgcgtgtgggatggaaaatggat

SEQ ID NO: 242744 - DNA, 74 bp, Homo sapiens
atcaatccagatggcagccagtcagtggtggaggaaacccgaaccctagcggagattgccaaagtggagctgga

SEQ ID NO: 242745 - DNA, 75 bp, Homo sapiens
agacgaggttcctgtgcaactcttcacaggccataaaattttgagtagaaaaatccagaaatttgaaaatcagta

SEQ ID NO: 242746 - DNA, 83 bp, Homo sapiens
acaagctgccgcccaacaccggtgtcctgtggccaggcggaaagcagtgagaagcccaacgctgaggacatgacatccaaaga

SEQ ID NO: 242747 - DNA, 151 bp, Homo sapiens
ctctcataagccaggtcttagaggctcccggagtgtatgtctttggagaacttctggagctggccaacgtgcaggaggctacagaagaagtttccaaaaatctggttgccatgaaagaaattctgtatggcacaaatgaaaaagagcctca

SEQ ID NO: 242748 - DNA, 97 bp, Homo sapiens
atcagaaacctgaagttagaaaggctcaacgagaacaagctatcaggtggctcagaagttagttcaaagaggaaaaaagatgaaacagccaaaaaga

SEQ ID NO: 242749 - DNA, 82 bp, Homo sapiens
ggcctagtgcgccagggcctcaagtgcgatggtgatgcaggttctgaatgctgatgccattgttgtgaagctgaactcaggc

SEQ ID NO: 242750 - DNA, 50 bp, Homo sapiens
agcaatattgtccagatgaaggacggtaagaatgattgatgttggctgat

SEQ ID NO: 242751 - DNA, 51 bp, Homo sapiens
ggcgaaggtcgtattgaatggtgttgtagattacaggagcttattaatcat

SEQ ID NO: 242752 - DNA, 83 bp, Homo sapiens
gctcgctggcaccccgaacgggttgcttcccccgctgcgaggtgacttaagagattaaaattaatttggttgctgttggttct

SEQ ID NO: 242753 - DNA, 75 bp, Homo sapiens
cggatggccccaggtgtaagcgcagaaagcaggcgaacccgcggcgcaataacgctggcctgctgctgtgggtct

SEQ ID NO: 242754 - DNA, 100 bp, Homo sapiens
gcgacagcggcggcgagaggatgaacaacaagttcgacgcgccctactgaagatggactgccagggcctggtggtcagactcatccaggactttgtgctc

SEQ ID NO: 242755 - DNA, 109 bp, Homo sapiens
acgaggggctggaacacctcgccaaagcagagaaatagtgctggagaatctggtaaaagcaccattgtgaagcagatgaggatcctgcatgttaatgggtttaatggag

SEQ ID NO: 242756 - DNA, 74 bp, Homo sapiens
gatattaagccatcaaatgtggaacctatggaaaagcaaactgaaaccgtgtcagttcagtcttcggtattggg

SEQ ID NO: 242757 - DNA, 75 bp, Homo sapiens
ctcaaacttcgatgagtttccagaatctgatattcttaagccaacaggatcttcaacaggatggcagagatgcac

SEQ ID NO: 242758 - DNA, 101 bp, Homo sapiens
cccagctcgggaagtggacagactgggcgtcatgacccttgttggaagcgaagtggaagcactgaacctccaggtgacatctctgtttaaggagcttcaag

SEQ ID NO: 242759 - DNA, 90 bp, Homo sapiens
cggccatgttcgtgaacggcgcttcccttggtgcacctgtggccgccatgtttgagcgaggctgctctttggcgtaaattgcaatcgatt

SEQ ID NO: 242760 - DNA, 83 bp, Homo sapiens
agcacctacgtcccgctgccgtcgccgccgccaccatgcccaagagaaaggttcctgcacttggccatcatccatgaagaaaa

SEQ ID NO: 242761 - DNA, 76 bp, Homo sapiens
gtcatcggtcaccggtcgctctcaggaacagcagaaccagcctttcaaacagtttccagagatggattatcctact

SEQ ID NO: 242762 - DNA, 74 bp, Homo sapiens
ataatttccccagagcgtcttgatccttttgcagatggagcacggtctgaatctgcacagagcaagatgctgag

SEQ ID NO: 242763 - DNA, 75 bp, Homo sapiens
ggcagcgcgggatcccagcctcaggcgtgcgcggacggtgtgcggcaaaagttcaaacagaccctccctcagttc

SEQ ID NO: 242764 - DNA, 87 bp, Homo sapiens
cagaactgttctcaggactcattattttaacatttgggagaaacacagccagaagtccctgagattctgcagctcagcgatgccctg

SEQ ID NO: 242765 - DNA, 75 bp, Homo sapiens
aggaaccattggataaggataaagacaaatcttcctattttcaagctgaaagaatctactgttagaagaagatac

SEQ ID NO: 242766 - DNA, 75 bp, Homo sapiens
cttaggaagttcgtcttctccacggaggagaggccccagaggtgatccgaatgcaggataacaacccattcagtt

SEQ ID NO: 242767 - DNA, 124 bp, Homo sapiens
atttatttcctttatcttagccggaggacctgctgatctaagtggagagctcagaaaaggagatcgtattatatcggctacagaagttgtgcaacttgggccccctgagctgcttttcttgctg

SEQ ID NO: 242768 - DNA, 95 bp, Homo sapiens
gagtacctgcctgggcagagactactaagcggaaaacatcttcagatgccgtgtggttttgccatgttctgttcaggaggtgagtttttcttgct

SEQ ID NO: 242769 - DNA, 75 bp, Homo sapiens
gccctgaggtgggccggacctgggagtggcagcaggttcaggagaagtggcacctggtggaggacctgtcgcgac

SEQ ID NO: 242770 - DNA, 82 bp, Homo sapiens
acggcagccgctgtacagattcatcaccacggtgtccctacaccacaccgaagatactcaccttgtggagattggaaggatg

SEQ ID NO: 242771 - DNA, 99 bp, Homo sapiens
tttccacatcggtcagaaaaagatgaccagatctttatggaaaatgtaggtgcagtgaagcaactgtgcaaactaactaacaaccttgaggaaagaata

SEQ ID NO: 242772 - DNA, 97 bp, Homo sapiens
atcccaaacaactggcagaatttgctagcatgaacaggctgaacactttgccacgaggcttcggctccctgccagctcttgaggttctggacttgac

SEQ ID NO: 242773 - DNA, 89 bp, Homo sapiens
gaccggttctcagggacagtgcacgcagaccctgtccccagaggggctggttctgccatgagtactgatgcttacccaaagaacccaca

SEQ ID NO: 242774 - DNA, 73 bp, Homo sapiens
gatgccctgcagtacctgcagaaggtctctggagacatcttcagcaggaagcgcctcttggacgcgtgtgacc

SEQ ID NO: 242775 - DNA, 100 bp, Homo sapiens
cgagtctggcagatccagtcttgctcagctctcacaggagagggcgttcaggccaatagcttcaccgtctcctctgtcgccgccccttcctggcttcacc

SEQ ID NO: 242776 - DNA, 75 bp, Homo sapiens
ccgcggcctcggagctcggacctcagtggtttggagacacctgtgctgccccccaccatcaccgaccagatccgg

SEQ ID NO: 242777 - DNA, 75 bp, Homo sapiens
gaaacaccatggctgcggcggcccagctctctctgacacaggctcatgctgaagattcggttatggaccatcatt

SEQ ID NO: 242778 - DNA, 85 bp, Homo sapiens
gcttgtgatgacttggatgaagctgctagaatgtttgaacgccatgaccctgtggatgggagaattactgagaggcagtttggtg

SEQ ID NO: 242779 - DNA, 75 bp, Homo sapiens
atgatgactaccgagactatgacagtccagaggctcaggggagagagaaagcccagaaagaaagctactccaggg

SEQ ID NO: 242780 - DNA, 101 bp, Homo sapiens
tacatcaccgctctgcaggctgttcctcctcgggcatgtaaggaggaatcaagaagctgtgacatattctgaggacctccaaagaacaacttgctactgac

SEQ ID NO: 242781 - DNA, 75 bp, Homo sapiens
gagaaaatcggcagctgagacggccttggccggacagagcgggatgccaccagcttgtccaaagggaagttccag

SEQ ID NO: 242782 - DNA, 83 bp, Homo sapiens
ctggcctgggcgctccggtggcggcggaggtgcagaggccaagaccgttttgcccaagaaggagaaaatgaagctgaggcgtg

SEQ ID NO: 242783 - DNA, 99 bp, Homo sapiens
ttgaactgccaagagagtatcgaaaccgtttccttcatatgcatgagctgcaggaatgggcaccagtgtcttgtcacctggactccacataggactaat

SEQ ID NO: 242784 - DNA, 100 bp, Homo sapiens
gccgctgagattctgtcgtgtcgtcgctgctggcacttcaggctctggagaaggaagccaacatccttttggagccatgaatattgtccgaactccatct

SEQ ID NO: 242785 - DNA, 85 bp, Homo sapiens
aagcagagctgggggggcggtggccggcaccgcaacaatgcagatcttcgtgaagactctgactggtaagaccatcaccctcgag

SEQ ID NO: 242786 - DNA, 90 bp, Homo sapiens
atgaacagggttcctggggcatcgacgatctccatatttcattgcaaggtacagcagggaagaactggaaactcagagaaagaaactgcc

SEQ ID NO: 242787 - DNA, 50 bp, Homo sapiens
ctctcacagatgaaggcctagacgcagggtggccattcagggcaactggg

SEQ ID NO: 242788 - DNA, 74 bp, Homo sapiens
tcgcccgtgggggctgagcccgccgtctacccgtggccgctgccggtctacgtcttattagtaggtaagaaaca

SEQ ID NO: 242789 - DNA, 100 bp, Homo sapiens
gataaaatctctaagagctacattacagattttttcaacaggaagtatcacagtaacaggaaaaccagtagattcccagacatcgcgaagtgaatctgaa

SEQ ID NO: 242790 - DNA, 75 bp, Homo sapiens
ggacagtgatgatgacagcagtgatgacgagcaggaaggtaaatactacagtgaggaggccgaggtggatctgcg

SEQ ID NO: 242791 - DNA, 83 bp, Homo sapiens
tgacctccgcgcgacgtacccgccgccgccgttggctggaggaattgaatgatctggcacgggaccctccagcacagtgttca

SEQ ID NO: 242792 - DNA, 50 bp, Homo sapiens
gcgaggagctgagggaccctggctgtgggctgcatactggccgagctgct

SEQ ID NO: 242793 - DNA, 97 bp, Homo sapiens
cgagggcggccgcgccggctccagattgctcgctgtaagcagctcatctgtgaccccagctacgtaaaagatcgggtagaaaaagtgggccaggtga

SEQ ID NO: 242794 - DNA, 83 bp, Homo sapiens
cgcagagcagcgccctggccgggccaagcagcacctgaactcctggggggaccgtcagtcttcctcttccccccaaaacccaa

SEQ ID NO: 242795 - DNA, 75 bp, Homo sapiens
ttcggacacatctggtgacttccgcaagctgatggttgccctggcaaagggcaagatcacctgttgcctgaagca

SEQ ID NO: 242796 - DNA, 87 bp, Homo sapiens
tttccagaaactgtgccaggatcacgaggagaattctgcctaagccaactcgaaaaagccgtacaaaaaataagcaaaagcgtccca

SEQ ID NO: 242797 - DNA, 87 bp, Homo sapiens
tatagaacagtgcctggcacataataggtgctgagttcaggaagatttgactgaagagaaaaaaagggaactggagcataatgctga

SEQ ID NO: 242798 - DNA, 100 bp, Homo sapiens
gaaatgccaaatgattcagtccttgaaaacaaggccacaattgctgccagtcggcaggccagctccccaaacaccagcactacacagcagcagactacca

SEQ ID NO: 242799 - DNA, 100 bp, Homo sapiens
ctgaggactaccctgaccctccaataccccacagctattctagtgataggattcacagcttgagctcaaataaggcattgaaaaacatggcagtagtaaa

SEQ ID NO: 242800 - DNA, 90 bp, Homo sapiens
cacccgcagacggcccttctgggcttcctgttggataaaaaaattggagtaaatcaaccaaaacgaattgaaaatgctaaaattcttatt

SEQ ID NO: 242801 - DNA, 100 bp, Homo sapiens
aacgctccgtctggaacggcgcaggcatgtcgggccccaggcctgtggtgctgagcgggccttcgggagctgggaagagcaccctgctgaagaggctgct

SEQ ID NO: 242802 - DNA, 100 bp, Homo sapiens
cggcagcggcggcgcggaggcggctgaggtgcgagccgcattgcagtgtcgagatggctatgaaccctgtgtaaatgaaggaatgtgtgttacctaccac

SEQ ID NO: 242803 - DNA, 100 bp, Homo sapiens
ccggagtacgtcgttcccgctgcgctaggggaagcgggcaggctatcaagaattttaatggagctggatggaccaaattggcgggagaagctgtcaccta

SEQ ID NO: 242804 - DNA, 90 bp, Homo sapiens
ggaatcaattttggtatgcagataatcactgggctcatgggtcttgctctttacaaagaggaaatcctaggagtgcctcatgcatctgaa

SEQ ID NO: 242805 - DNA, 75 bp, Homo sapiens
caggatgcaggaggagctggcgtgggagaccgacggccgcacaactccagatgttccgagctcagtggatgtttg

SEQ ID NO: 242806 - DNA, 50 bp, Homo sapiens
ctgaaatgtttgacgacactgatggtttgccaaacatcatgtcaatggca

SEQ ID NO: 242807 - DNA, 101 bp, Homo sapiens
cttgcagagagaaatgaaataacctttgacaagattttcaatcagaaaattgttcagaatgaccgaagaagcatgccgaacacggagtcagaaacgagcgc

SEQ ID NO: 242808 - DNA, 80 bp, Homo sapiens
gagaaggatgacaccggagtttgacgaagaggtggtttttgaggtgcagtctttgcaagccacatttggaacttttgagt

SEQ ID NO: 242809 - DNA, 97 bp, Homo sapiens
ccgcggcgcccaacccaggtccccgaagcaagcctcctgatttaaaggaatttggataaagagagggcagtgctactacaacgccggaaaagggaaa

SEQ ID NO: 242810 - DNA, 95 bp, Homo sapiens
cagaacagttaatcctcaatttaagcctgatctaacccctagaaacaggttttggaatcattttcaaataaaactccccctcacaccacccaact

SEQ ID NO: 242811 - DNA, 96 bp, Homo sapiens
gccatgaccgtggagttcgaggagtgcgtcaaggactccccgcgcttcaggccctgggaggagcggggacactgaggacctctctccaaattggcc

SEQ ID NO: 242812 - DNA, 73 bp, Homo sapiens
cgcagagcaccaggcccaccgtgaaaggtattacacaatggcctcgttatggagatggagcatccaactgtgg

SEQ ID NO: 242813 - DNA, 75 bp, Homo sapiens
agattcgcagtggtcgcttcttctccttgtggaatcaactatgaaattataatcatagatgatggaagcccagat

SEQ ID NO: 242814 - DNA, 100 bp, Homo sapiens
cttcccagccttcagaaattgccggtctgggagttgggggcaaggagaagatcctgaccagcatctcagacatgtcgaaaaagatgttttgatccctaaa

SEQ ID NO: 242815 - DNA, 78 bp, Homo sapiens
tggcaggaggaggaggaggggctccggctggtctgtggtgaggtgaccattgtgaggtagatattttgttctaatttt

SEQ ID NO: 242816 - DNA, 75 bp, Homo sapiens
ctggataccactacatgcagcagcttcctgtggatatcttgatattgcagagaattaagtagactggctggacag

SEQ ID NO: 242817 - DNA, 82 bp, Homo sapiens
cgccagcggccgagcgggcggcttcctggcctgggcgctccggtggcggcggaggttgaatcgctcctagctgacccctcac

SEQ ID NO: 242818 - DNA, 100 bp, Homo sapiens
tccataatatacagaaatctccagagccacctgtctttaccagtttccaagactatgttactgggcttcagactttaatttccaatgttgtggatcatat

SEQ ID NO: 242819 - DNA, 126 bp, Homo sapiens
gaagagccaatccattcaggatgggaaaccacgcaggcaaacgagaattaaatgccgagaaggccagtacgggcctattccactagaagcaagatggctgaactcaatactcatgtgaatgtcaag

SEQ ID NO: 242820 - DNA, 87 bp, Homo sapiens
agaaataaatctgatattgcaccttcacagcaacaagcttggacagcttttagcagctacatgcaaagaacttccaggccctaaaga

SEQ ID NO: 242821 - DNA, 98 bp, Homo sapiens
ctgggaccttaacagggagccatggaatctggaaaaccaggggctcatgtaactgtgaagaagctgtttgttggcggaattaaagaagatactgagga

SEQ ID NO: 242822 - DNA, 100 bp, Homo sapiens
gatgaggctctgcggctggtccaggccttccagtacacagacgagcatggggaaggcaaaagtcaacaactctagcttaattggagtaggctatactcag

SEQ ID NO: 242823 - DNA, 87 bp, Homo sapiens
tagcgtcctggaattacttcaatcaagtagagtggaacccccagctattagaggtcccaccccaaactcagtttgattacacagtca

SEQ ID NO: 242824 - DNA, 75 bp, Homo sapiens
caggacaattccatttggggaccagagatggacggtcactcagcctatggaggcgtcctgcctctgcggctctgc

SEQ ID NO: 242825 - DNA, 98 bp, Homo sapiens
ccacctctttctttgtgggccggatgggtccttgagttggtttgaagaaaagcagcagcaatttgagaatctggatcagcaacttaggaaacttcatg

SEQ ID NO: 242826 - DNA, 100 bp, Homo sapiens
gccgttcagctttaccttctttgcagactttggttggtggaggctgtggcaatggaacaggcttgagaaacagaatatgatgctttggcaaaagtgattc

SEQ ID NO: 242827 - DNA, 75 bp, Homo sapiens
ccccggggcatctatgccagtgagaggcccaagtccctagggagatgtcctttgcttctcagatgtaaatgcact

SEQ ID NO: 242828 - DNA, 147 bp, Homo sapiens
atgacaacggctttccagtacatcattgataacaagggcatcgactcagacgcttcctatccctacaaagccatggactgaccactgagcagatgctgagaaaagaccagaagactatctatagacaaggcgtcaaggtggccatta

SEQ ID NO: 242829 - DNA, 100 bp, Homo sapiens
cctgccttcaagtacctggcccgaaggggaacagtttgtgaagaaaatcggtggtatttttgccttcaaggtgaaagatggccctgggggtaaagaggcc

SEQ ID NO: 242830 - DNA, 98 bp, Homo sapiens
atcggcggagaccctcgaagtgcgcaaacttgacactcaccctgaccggacttgcaattgtgaccaaatatattacaaagggctggaaagaagttcat

SEQ ID NO: 242831 - DNA, 75 bp, Homo sapiens
cttgaatgactggaaactgattggaaactctttgggaaagccactcgaaaagactctgatgccagtatggactgg

SEQ ID NO: 242832 - DNA, 75 bp, Homo sapiens
tccctctcgcgtctctggctgcaggcttgggcactgtttaaaggaaagttccgagaaggcatcgacaagccggac

SEQ ID NO: 242833 - DNA, 75 bp, Homo sapiens
cctgagtcagaactccatcacaggggaacacagccaactgttagagtcattcttatagaagagcatcagaggaag

SEQ ID NO: 242834 - DNA, 90 bp, Homo sapiens
tgagcgattgttcagcttttgtgaaagcaacagaggatcggctgttttgactctcctgttggccggctatttggcacaacagtatttacc

SEQ ID NO: 242835 - DNA, 75 bp, Homo sapiens
cctttggggagactttacagaaaacatttaggttgtatcagagtaagatggacggtagctttgattgtgattgtg

SEQ ID NO: 242836 - DNA, 100 bp, Homo sapiens
ttccagaaaaagggaagccccgtggtggcccttgaaaagtaaaaggaagttgggaagtgaatgaagtgaggagtagcccatcgaagccagagcagtgaag

SEQ ID NO: 242837 - DNA, 100 bp, Homo sapiens
gaatcagatggtacagattgctgcagtggaaaatcaggtgacatgcttcgttatattcaggagagtaaggaacgagctgcagaaatggtaaaagcagagg

SEQ ID NO: 242838 - DNA, 98 bp, Homo sapiens
tcccttagccagcccgagcaagtaaagattggatcagttccatgacaagaccccttatacgattatgtttggtccagataaatgtggagaggactata

SEQ ID NO: 242839 - DNA, 83 bp, Homo sapiens
ctcgacatttacaagaagctgagcaaaccaaaaacagtggcactgagcactggatcgtgtcctgataaaccgtattgacctcg

SEQ ID NO: 242840 - DNA, 100 bp, Homo sapiens
caccgcggaggccgccgtgtacatgttcagcatgaagcgctgcccaccaggcatctggccatcccacaaaagcaaaagatacagatattgtggatgaagc

SEQ ID NO: 242841 - DNA, 74 bp, Homo sapiens
ggagcctcagttggaagcagccgatccagcctgcggagcctgtggggcagatccatcttcggttgtgaatccgg

SEQ ID NO: 242842 - DNA, 100 bp, Homo sapiens
aaggactcctggaatgccacaaatgcaaatacttgtgcactgggagaggttctaagctggtctatgtccatcaccttcttggagaaggagcctttgccca

SEQ ID NO: 242843 - DNA, 101 bp, Homo sapiens
agttcgctgacaggtccagttgcagatacaaacttggattttttccagtctgatccttttgttggcatttaattggttggggtcagataagaagaggagtg

SEQ ID NO: 242844 - DNA, 100 bp, Homo sapiens
tgcatttgttctgcctgacttggaccctggaaaacctggccctcttcaatttctgacaaaaggatgctgaaaacgccattcaacagatgggtggccagtg

SEQ ID NO: 242845 - DNA, 100 bp, Homo sapiens
gccgagtggtctaaggcgccagactcaagattcatgatgttgctatcaaaagttgagaaattgtcagaagaaatcatggagataatgcaaaatttaagta

SEQ ID NO: 242846 - DNA, 100 bp, Homo sapiens
cacagcctggatctcctccatcctgctggccatgctctacgggacaggctccccacaggtgcaggaagccgccgcccagccatggacggggaggagcagc

SEQ ID NO: 242847 - DNA, 73 bp, Homo sapiens
tgggccgccgctgctacctgcagcgccgtgtggcacgacacaaaaatcagagacctgtctgggccgcagagag

SEQ ID NO: 242848 - DNA, 107 bp, Homo sapiens
tctggacagaccaacctgtcagtgctgcaagaatggacaatcagaccgttctggctgtccagtcattattggatggccaaggagcagtccctgatccgacaggccag

SEQ ID NO: 242849 - DNA, 75 bp, Homo sapiens
aacccaaagatcgtgcagctcttggcaggagtagctgatcaaaccaaggatgggatctcacttgcttatctgaag

SEQ ID NO: 242850 - DNA, 75 bp, Homo sapiens
gtgtttgctctcatgaacatgcaatgagaagactgatcaatctgggcttccgttacaagatgaggtctgtgtatg

SEQ ID NO: 242851 - DNA, 82 bp, Homo sapiens
cggcggccgaaagcggagagatgctgggcgtggcggccgggatgacccacaggaagaaggtagataatgactataatgccct

SEQ ID NO: 242852 - DNA, 83 bp, Homo sapiens
ggaagcctacgccctggggctggacaccgctgctccagttacagcaccacccggccgctgcacccggctgctcccaggccccc

SEQ ID NO: 242853 - DNA, 100 bp, Homo sapiens
tactatggacttcatcgctttatacttccctctgtgtgttgcagtcctgtggcattatgcatgccccctcccagtgaccccaggctttttatggctgtga

SEQ ID NO: 242854 - DNA, 50 bp, Homo sapiens
aagtttgtgacttgaagtggatacataatggagtcttgctctgttgccag

SEQ ID NO: 242855 - DNA, 74 bp, Homo sapiens
gcgagccccgtcctccttcgccgccgcgcacaaccgcacgtgcagagtgtgaacatggctacgcctcttcattc

SEQ ID NO: 242856 - DNA, 74 bp, Homo sapiens
atcctatggctcaaagaaagatgattattaattttatgcgtcaggagtgtttggattccagatttgtattcgat

SEQ ID NO: 242857 - DNA, 80 bp, Homo sapiens
gctcggtgctggagaacttcgtgggccgaaataccgctaccaagatgaagacacgccccctctggagcacagcccggccc

SEQ ID NO: 242858 - DNA, 83 bp, Homo sapiens
tgccggtctagatccaagcaaccagggcacacgtgtttcacgttgacaggtttgcttgggacgctagtaaccatgggcttgct

SEQ ID NO: 242859 - DNA, 74 bp, Homo sapiens
gaccacaggccctcgttgcccagatagtaaaagccaccaccagtctgtgcgaatcggaactgcatggaaaaccc

SEQ ID NO: 242860 - DNA, 100 bp, Homo sapiens
gccatctgagacccggtagtaccgcccatgctgcagcgggaaagagaacagagagtcctggggacaggttcgtgctggccgtgggcagcgccgtctttga

SEQ ID NO: 242861 - DNA, 50 bp, Homo sapiens
cattcatgcaatcttgagatcagaggaagctgcagtaaaggaagatgaag

SEQ ID NO: 242862 - DNA, 75 bp, Homo sapiens
tcctcgggggcggcggccacgccaaggacgggtcacggtctagatcacattctcgatccagaggaaggcgatact

SEQ ID NO: 242863 - DNA, 90 bp, Homo sapiens
aggcaactgcataactttggaattaaggtgaccctggcagcaaccccaacaaacgccagaggcagccccctctcctgggagatcaccccg

SEQ ID NO: 242864 - DNA, 75 bp, Homo sapiens
gcctcttcgagcgccgcggacgcgtcatcgagtgtgacgtggtgaaagggcaagttaaagtcttcagagccctgt

SEQ ID NO: 242865 - DNA, 75 bp, Homo sapiens
ggcgtcagttggtgagtgtccggccccaggtaattgaacggcgcattcggcaagagctgcctttcatggccacag

SEQ ID NO: 242866 - DNA, 75 bp, Homo sapiens
cagctgtgtgtccagaacgtgccatggagacgcttaacgtgtaaggagaggatgaggcccgtgaaaaaggcactg

SEQ ID NO: 242867 - DNA, 100 bp, Homo sapiens
atgctgctattgtcatcttccttgaattctttgcgtggggccttttgacaactccaatgttgactttttccacctatttccctggatattttgatggtca

SEQ ID NO: 242868 - DNA, 90 bp, Homo sapiens
agaaacccagcgtggagacccgtctgttatttctgctttattgaaaaggcttgaggccgtgaaaccaacagttggtatgaaacgttcaga

SEQ ID NO: 242869 - DNA, 98 bp, Homo sapiens
cggccggcggcggcggcggcggcggcggcggcgcagctgggatctagcaattgggaggcagcagacttgggtaatgaagagagaaaacaaaagttctt

SEQ ID NO: 242870 - DNA, 98 bp, Homo sapiens
agtctgcaacatggctagagactgccgggactggtcagatgaacccatcaaagagtgcggactcaaatggatagtgaagtccaaaacggaaagcggca

SEQ ID NO: 242871 - DNA, 98 bp, Homo sapiens
tcggcagtcgcgaagcagcaaccatggaacatgcttgccaactcagccagcgtgaggatcctcatcaagggaggcaaggtggtgaacgatgactgcac

SEQ ID NO: 242872 - DNA, 51 bp, Homo sapiens
ctggtggcatttgtcccgggaccaggctgcagagactgcaagtctggaaga

SEQ ID NO: 242873 - DNA, 101 bp, Homo sapiens
agggggcgcccgcgcctttgcccccgtgcgcacccccgccccgctcaccttagccccgcgcccgaggagtgttcagcctgggtgttcctgtagatgctctc

SEQ ID NO: 242874 - DNA, 100 bp, Homo sapiens
gatgaagtgcagaggtttttttctggccttggacaagattcgctatgagagcctgacagacccttcgaagttggacagtggtaaagagctgaaaattgac

SEQ ID NO: 242875 - DNA, 95 bp, Homo sapiens
tggttctccattgtgatgaaagcacatggtacagaattgatagatgtcacatgtaccctgctgcttctaaacccagactttaccactgcatggaa

SEQ ID NO: 242876 - DNA, 100 bp, Homo sapiens
cgcgcacaatcggggcaccgagctcgcaggaacgaatttcatatacacctccagagagcccagtgccgagttacgcttcctcgacgccacttcatgttcc

SEQ ID NO: 242877 - DNA, 100 bp, Homo sapiens
acctgcctccacgtctggaataatgggtactctttcctcgtggaatttgaagattctacagataaatcagttaatcagctgtgttcagcgaatacttatg

SEQ ID NO: 242878 - DNA, 50 bp, Homo sapiens
agaagattgtggttgaattcagcaatctgaagaggatgtaagtcagtttg

SEQ ID NO: 242879 - DNA, 116 bp, Homo sapiens
cgaagatgaggccggtgaagagcagcaccaccatggagaggaaggagaagaccacgcacacgcagccagcggcttatgtacagaagtacgtcgtgaagaattatttctactattac

SEQ ID NO: 242880 - DNA, 83 bp, Homo sapiens
gaacctgcctggctagccggcgacttgagtgacgagcctccggtgtggctgtctctgatggtgtcatcaaggtgttcaacgac

SEQ ID NO: 242881 - DNA, 82 bp, Homo sapiens
tggactacgcgacctccaaggatgcccgtgagcctgttgtcggggccagaaatgctttgtggtctacagccacaccacccca

SEQ ID NO: 242882 - DNA, 98 bp, Homo sapiens
taggcggcagaggattcgctcccagagcagctgcggccaggtaccacaagagccaggccatctatctggagtcaaaggacaaccagaaactgagctgc

SEQ ID NO: 242883 - DNA, 75 bp, Homo sapiens
cagcaccgccaggcctggatgggccccatctgccagctggccttcccgtggctgcaggtttcgtcctccgccagt

SEQ ID NO: 242884 - DNA, 83 bp, Homo sapiens
ccaggacgaaggccctactgggcaagcccccaggctccgctcttgccagagggacaggagccatggctcagaaaatggactgt

SEQ ID NO: 242885 - DNA, 96 bp, Homo sapiens
aagaaactagatcaaaactacaggagattgatattttcaataatcagctgaagggaactctaatgatccaggacaaagaagttaccctggagtatg

SEQ ID NO: 242886 - DNA, 98 bp, Homo sapiens
ttacagaatcagaggtgcagccgcaagaaaggactcatatgaacgagcaaaacatatcttgaaaactcatgcaaaggagcataagaatctcgcagaag

SEQ ID NO: 242887 - DNA, 83 bp, Homo sapiens
ccccttccccacgcaaccccagatccatttacactttacattctggacttcagtgaccccttcagcactgaagtgaagccgag

SEQ ID NO: 242888 - DNA, 82 bp, Homo sapiens
ggacccgggacgacgagtacgactacctattcaaagatatctcccggggccaattcagcatctctacctggccatcctaaca

SEQ ID NO: 242889 - DNA, 100 bp, Homo sapiens
aaagcccaggaagaagacgaggatgacctgtcatttactccatcctttatagtgatgctacaggacgaagaggaatggataaaaacattggcgagcaact

SEQ ID NO: 242890 - DNA, 73 bp, Homo sapiens
caacgagctatcggtgctcaaggatgaggtcctagagttaagtgggcagaccaacatccacctcagcaaaaac

SEQ ID NO: 242891 - DNA, 75 bp, Homo sapiens
aagtacaccgtggtgacattgtatcattggttggaatcaactatgaaattataatcatagatgatggaagcccag

SEQ ID NO: 242892 - DNA, 100 bp, Homo sapiens
agagatggaacccacctttccccagggtctcctctgagcctccggcctccataagacccaaaacagatgacacctcttcccagtcccccgcgccttccga

SEQ ID NO: 242893 - DNA, 101 bp, Homo sapiens
tgcatgtgaagttatcaaaaacaggtagcacagagtgaagctgaaaagaaattgaagaaggatgacaagaagaaagaattgcaggagctaaatgagctgtt

SEQ ID NO: 242894 - DNA, 98 bp, Homo sapiens
cccgggagatgcagccagtttacagccatatccagaagacccagcagtttataaaccactctcccaggaagagctgcaaaggataaagaatgagaaaa

SEQ ID NO: 242895 - DNA, 100 bp, Homo sapiens
ctgggatgtcgacgactgggacaatgagaacagctctgcgcggctttttgagcggtcccgcatcaaggctctggcagattctggacaatcaggaagtcca

SEQ ID NO: 242896 - DNA, 76 bp, Homo sapiens
gctcgtatgattttactgtaaggatgagcaattcttaggttttggctcagatgaagaagtcagagtgcgaagtccc

SEQ ID NO: 242897 - DNA, 75 bp, Homo sapiens
gggagatgctgacagcacagaatcgttacagcaattggaacttgcacagatacagcatagagacgctaatctcac

SEQ ID NO: 242898 - DNA, 80 bp, Homo sapiens
gccgtctccaagatgtagctaatgaccgtggttcccactgagcttagcagtgtctgcaaaaacgaatcttttcctacaac

SEQ ID NO: 242899 - DNA, 76 bp, Homo sapiens
ctcagattggccatgtctatcctgcaattgagaacacagaagcagtacatcaacaattccaaaagtttttgactga

SEQ ID NO: 242900 - DNA, 98 bp, Homo sapiens
gaagaggagtgcggaacccgcgggagggcgtctctggccgagcctctttttgtggaaaacgacagcagcagcagtggcctggaagacgccaccgctaa

SEQ ID NO: 242901 - DNA, 100 bp, Homo sapiens
caagtatggagaacatgaagccagtcctgacaatgggcagaacgaattcagtgatatcattaagtccagatctggtgactgcttagaaaactgcacagca

SEQ ID NO: 242902 - DNA, 75 bp, Homo sapiens
ggtgcccgtggaccacaggccctcgttgcccagatggcgtgatggtgggcatgggtcagaaggattcctatgtgg

SEQ ID NO: 242903 - DNA, 100 bp, Homo sapiens
gaagacagaggtgctgatggagaacttccgcagggccattgaccatccttcctgctgctgcccaggatgtttattaccgggatgagattggcaatgtttc

SEQ ID NO: 242904 - DNA, 100 bp, Homo sapiens
aaggagccacgatggaccttgaaatcttcaaccttcctaatgtggagatcagcaaagccacagtcagacttgttggggcttattcaggtcatgattgtgg

SEQ ID NO: 242905 - DNA, 75 bp, Homo sapiens
ggaaccatgacaggcatgttgtataaatgtacaggacccagatgatgtggtaccagttggccaaagaagagcctg

SEQ ID NO: 242906 - DNA, 76 bp, Homo sapiens
cataccctgactcagatactcactcacagccctgtgctgaaaggtgaccctggcagcaaccccaacaaacgccaga

SEQ ID NO: 242907 - DNA, 73 bp, Homo sapiens
taaacctgtgaccacccctgaagaaattgcacaggaaaaagaagatgtccctgtggaaatgtccaatggtgaa

SEQ ID NO: 242908 - DNA, 101 bp, Homo sapiens
aaaatgtttgagtcaattctgaaagctccggtattattctttgatagaaatccaatagttactgtaaaatggggaaaggagaaatttgaaggtgtagaatt

SEQ ID NO: 242909 - DNA, 100 bp, Homo sapiens
gaaaaaacttccagaacatctgggagaatatttaatggaaaatcgcttggttaaaacctgacacttttaacaggaacctgaagggccgagaagtcctgct

SEQ ID NO: 242910 - DNA, 98 bp, Homo sapiens
ggattttatgtgctacagtctgcggaacggagcagtatttcaatgtggagcctcactgtgaggaatgaagaaagaggggaaaatgcgggaagacccac

SEQ ID NO: 242911 - DNA, 83 bp, Homo sapiens
ctcaaggcacaggtggcccgatcccagcaggacattgaaaggcgtccgacctccgatcatgaacgggcccctgcacccgcggc

SEQ ID NO: 242912 - DNA, 100 bp, Homo sapiens
gggctcggcgctgaggtttcgccctggctacaacgaccccatgtcaggagctgcagagagacaaggcggcggcggctgctgtgctgggtgcagtgaggaa

SEQ ID NO: 242913 - DNA, 98 bp, Homo sapiens
atctgcagcccggacagtttcgactacgtgaaggccctgcggcagcgcatcgcggagaccagggacagagtccccaagtgggtgcacgtgttaatcgg

SEQ ID NO: 242914 - DNA, 100 bp, Homo sapiens
aaaaggagtggagcatggtcccgctgccataagagaagctggcttgatgaaaaggctctccagtttgggttgcacgttttcaaaaaatacctaatggtga

SEQ ID NO: 242915 - DNA, 80 bp, Homo sapiens
cgccgccccggccggacctcgaccctgagctctatctcagtgtacacggttccagatgcgacatccagatgacccagtct

SEQ ID NO: 242916 - DNA, 90 bp, Homo sapiens
cagaggatctcttctaacatccagaagatcacacagtgttgagtcattgcagttttcagtagaggtgtacttctgagaagtggcttcttg

SEQ ID NO: 242917 - DNA, 100 bp, Homo sapiens
cccaagaagctcactcccaaaaaagatttctcgagagagtctacaaggagattgaacaggtggttggcccacatcgccctccagcgcttgatgaccgagc

SEQ ID NO: 242918 - DNA, 100 bp, Homo sapiens
ttgctgggctgtgggttgctcagcgtctcggccgccgcggcaatgtctcaggctgtgcagacaaacggaactcaaccattaagcaaaacatgggaactca

SEQ ID NO: 242919 - DNA, 98 bp, Homo sapiens
tacggcttagaggacttccctttggatgtagcaaggaagaaattgttcagttcttctcagggaacatccttctgtatcagaaattcccatgtttccat

SEQ ID NO: 242920 - DNA, 98 bp, Homo sapiens
ctcgacctgctaacagaactggaccttttcgcatccgcacttccactaatagccaagtagacaagctgaccctgtcagggagtgacagcgtcatcctt

SEQ ID NO: 242921 - DNA, 73 bp, Homo sapiens
cctggctgatgcaaagtggattttgcacaactgcatcatttataatgggggcatagaatgtcaagctaaccag

SEQ ID NO: 242922 - DNA, 101 bp, Homo sapiens
gaagaatatgatgtggaagcacatggaggaagtctaacaggagctgtatttaatccagctttggcactttcgctacatttcatgtgttttgatgaagcatt

SEQ ID NO: 242923 - DNA, 101 bp, Homo sapiens
cggcggcggcggccaggtccctgctgaatcacacgccgccatccgggaggcccagggaaggaaaatgtttataggaggccttagctgggacactacaaaga

SEQ ID NO: 242924 - DNA, 82 bp, Homo sapiens
ggaagcagcacgggatcccagcctcaggcctgcacggacggtgttggttggggtaaaataccatgaagattttgaaaaaaca

SEQ ID NO: 242925 - DNA, 100 bp, Homo sapiens
taacattaccatgagagtttggcttggattatctcaacattctgttgaggagaaggcagagcccccccaggctatgaatgccctgatgcggttgaaccag

SEQ ID NO: 242926 - DNA, 75 bp, Homo sapiens
ttgtgcctccaaggaaaatccacctcgcagcttgtaaatctacagggattttatattggaagacatggatcttgc

SEQ ID NO: 242927 - DNA, 100 bp, Homo sapiens
cgagacttgtctcttatttagttctggggagcgcctcgtcgacatgagtgatgtggaggaaaacaacttcgagggcagacctttccgctgtgcccattgc

SEQ ID NO: 242928 - DNA, 83 bp, Homo sapiens
ttctattttccctacgaaaaacagatctttttaagacaatgcagatcttcgtgaagactctgactggtaagaccatcaccctc

SEQ ID NO: 242929 - DNA, 82 bp, Homo sapiens
ccaccctcgtgtctgccaccatcttcgacttgagcgaagttttatgcaaggtgccagaaccctgtggagcatcatgaactgg

SEQ ID NO: 242930 - DNA, 101 bp, Homo sapiens
agccctgtcatcttctaaacagagcagcagcagcagagatgataacatgtttcagctccttcagctagattttgactttgaaaaaattcctttggaaaaac

SEQ ID NO: 242931 - DNA, 100 bp, Homo sapiens
ttggtcaaaagcgcactaaatcgtctccaagggggagagcaaggacctgctgtttatcttgacagcgaagtacaatgcctgcatcctggagtataaacag

SEQ ID NO: 242932 - DNA, 96 bp, Homo sapiens
gaaacaccactgaagcattgccaagtgctgacttgctcatcagttttgcacagtggcaattttgggactgatttagaacagaaactccattggaac

SEQ ID NO: 242933 - DNA, 75 bp, Homo sapiens
aagaatgatggatgcatctgtatatttacaaagagaagtttttttggtctgtctgggaaccctgcagatctggag

SEQ ID NO: 242934 - DNA, 75 bp, Homo sapiens
ctcaggggttggaaagtcttgccttcttcttaggtttgcaaattatatccagatcgagagacagaagattctgaa

SEQ ID NO: 242935 - DNA, 100 bp, Homo sapiens
cctagtgccttagaagccactgacagcccccagggcaggtgagccctgcatctggaataaggttttgaagtacaggaagaaggttatctggcaaaaatcc

SEQ ID NO: 242936 - DNA, 102 bp, Homo sapiens
aagcattcagatgctgactcctacatatccagttcaatcacatggtggaaactatatgggtcagagcattcaccaagtaactgttgcccaaagctatagcct

SEQ ID NO: 242937 - DNA, 96 bp, Homo sapiens
cttttcggactcctgatggcatgcctgtaaagaacttgcagttgaaggagtataacacagcgaatgacaacagagctgctcaaggcgggaactctg

SEQ ID NO: 242938 - DNA, 75 bp, Homo sapiens
aatagctacctgcgagaccagtggttccattctctgcaatggaaggtgatggtgtttgtacatgctcgaaatgcc

SEQ ID NO: 242939 - DNA, 105 bp, Homo sapiens
catggagcacccgcccccactccccaactcgcgcctcttccatctgacctgattcctcagacctctgccctatcggaagggaagcagaaaatgatcaggtctcag

SEQ ID NO: 242940 - DNA, 90 bp, Homo sapiens
cttggcagtttcggtgcatagaaaatcagatcatggaagggaagtggttgctgtgtatgttactggtgcttggaactgctattgttgagg

SEQ ID NO: 242941 - DNA, 76 bp, Homo sapiens
tgggatccagtacgagttgaatcattgttcaaataaggtggtccattatggctgacatgcaaaatctggtagaaag

SEQ ID NO: 242942 - DNA, 98 bp, Homo sapiens
ggaggaggtgcagaaggtggacagggtaaaagaaagagacttttttctaaagaatggattaatgaaaatcaagttccatcctcagacaagaggtaaag

SEQ ID NO: 242943 - DNA, 100 bp, Homo sapiens
ggacatttggtgtaaataataaaggacagtgtggacgagatactggtgccatgaaccaaggtgggaaaggtaagaatgattgatgttggctgatattgga

SEQ ID NO: 242944 - DNA, 75 bp, Homo sapiens
aggggagacaaagagacccgcagcgacaagcccttcagatatttcaacactcctctcagcatcctccacttcccc

SEQ ID NO: 242945 - DNA, 82 bp, Homo sapiens
gagccagtggcaatgacccagacccggacgacccccattgctgagccagcggagctgcttgatggagtcttgctctgttgcc

SEQ ID NO: 242946 - DNA, 87 bp, Homo sapiens
acctgttcctcgccagcaggccttggctccttgaacttttggccgccatgtgcttcccgaagctatgaaacccacgtagtcgaacac

SEQ ID NO: 242947 - DNA, 100 bp, Homo sapiens
gaacttctgaaaaagttagtctccgtgaccaataatactaggagcttctaagtaggacatccttagaaactcagaagttggatctgatggctgaaatatc

SEQ ID NO: 242948 - DNA, 97 bp, Homo sapiens
ccgccagagctgcggccgccaagttactgtaaaatggggaaaggagaaatttgaaggtgtagaattgaatacagatgaacctccaatggtattcaag

SEQ ID NO: 242949 - DNA, 74 bp, Homo sapiens
gagtttctactagtccagttggttaccacattctcatctggagccaggaggaagccaggacacggaagtgagag

SEQ ID NO: 242950 - DNA, 100 bp, Homo sapiens
agtagagtatttcaaccataaagacatcttaattgggcacgaaagagccactgaggcggctcccagctgcgttggcgacatggccgacacccccagagat

SEQ ID NO: 242951 - DNA, 143 bp, Homo sapiens
agagacggcgggggaaagggagacggcgagacgcgcagcgccggcgcccgggagacccaggaggagcccgcaggtcaaaatgcagatcttcgtgaaaacccttaccggcaagaccatcacccttgaggtggagcccagtgaca

SEQ ID NO: 242952 - DNA, 100 bp, Homo sapiens
gtaagcgcagaaagcaggcgaacccgcggcgcaataacggtgctcttacagcctgttccaagtgtggcttaatccgtctccaccaccagatctttctccg

SEQ ID NO: 242953 - DNA, 100 bp, Homo sapiens
gacgagaaggccataatgacctatgtgtccagcttctaccatgccttttcaggagcgcagaagaatgagctgaaagccagtggtggcgaaatcaaaattc

SEQ ID NO: 242954 - DNA, 100 bp, Homo sapiens
ttcgaagagcttttgaagctggatggggttttgccctcaccaaaactttctctcttgataaggatcagttcgacagcttagacaagcatacacaatgggg

SEQ ID NO: 242955 - DNA, 74 bp, Homo sapiens
tgattggaaaaggaggcaagaatattaaggctctccgtacagactttaaggaagaaatctctaaacgttttaaa

SEQ ID NO: 242956 - DNA, 75 bp, Homo sapiens
ctgagccctgggacctctgaagtgaacactgcagggccatttgtgggtgtataacattctcgacaagaaggctga

SEQ ID NO: 242957 - DNA, 99 bp, Homo sapiens
ttccagtccagggccgctgagagtgggggtggctgggagcagcgcagcctccggaggaggaggcggaggccgagggcagcccaatggatccaatggtga

SEQ ID NO: 242958 - DNA, 98 bp, Homo sapiens
tcctggcggccgaccgagaacgcagcatccacggcagtggcgattttgacagccacataccctgtgggtcacatgccatacggctggttgacggaaat

SEQ ID NO: 242959 - DNA, 101 bp, Homo sapiens
tgttcacgaaatcctgtgcaagctcagcttggagggtgatgtttctaagcatgaattgaggaacagaagaagcagagcagatgatcggagcagcatttgtt

SEQ ID NO: 242960 - DNA, 83 bp, Homo sapiens
ggggtcaccacgcctgccccagggaaccgcacaggttgtgaccgagattcccgacgagagagactgaggggaagagaggaagg

SEQ ID NO: 242961 - DNA, 82 bp, Homo sapiens
cgccagcgcccaccctggctcaccgtgcggatctgcctccgcagaagccccagcatgagaccagatgtaagctctcctccat

SEQ ID NO: 242962 - DNA, 100 bp, Homo sapiens
gtagcagaatttagcatctattgggatgtcgattgcactttactgggggatttgcctcagatggagttacaggaacaagtacttgttactcaacaaccag

SEQ ID NO: 242963 - DNA, 75 bp, Homo sapiens
tgggagccacatctcctccaatcgagcgtatgattttctgtacggtctgcaattaaggccttacgtcctggaggg

SEQ ID NO: 242964 - DNA, 100 bp, Homo sapiens
cagcagcaacagcagcagcaagttagtggattaaaatctcccaagaggaatgacaaacaaccagctcttcagatgccttcaattaagttgcagagttctg

SEQ ID NO: 242965 - DNA, 80 bp, Homo sapiens
tattgtaagtgcagatggaacacaacagaagctccaccatgaggcgaggtggatggaggaagcgagctgaaaatgatggc

SEQ ID NO: 242966 - DNA, 100 bp, Homo sapiens
aggcgtttctgtacatggattatctggccttggatggtatactgtaaattcagcatatggagataccattatcataccttgccgacttgacgtacctcag

SEQ ID NO: 242967 - DNA, 82 bp, Homo sapiens
gaggtcctgccgtccatgcggaagatcgtcgccacctggatgctggaggccgccatggcatcagatgaaggcaaactttttg

SEQ ID NO: 242968 - DNA, 75 bp, Homo sapiens
cggcccggcgcggcccagcgccctcaggaaagaccacagcaagattctttcattcgtctcctcctagcctggggg

SEQ ID NO: 242969 - DNA, 92 bp, Homo sapiens
gtggaggacatcgacatccaggcgaactcggcctatcgctaccctccgaagtccgacaatgcagatcttcgtgaagactctgactggtaaga

SEQ ID NO: 242970 - DNA, 50 bp, Homo sapiens
ggtgtagaagtggcagcacggcagcctgatgtgtgagaagcggatattgg

SEQ ID NO: 242971 - DNA, 100 bp, Homo sapiens
cttggtgatgcccatgactggaaccagaacagagagaaacttgcccaggccaaagaagagaacgtgggcttacatcagacactggatcagacactaaacg

SEQ ID NO: 242972 - DNA, 82 bp, Homo sapiens
cggcgactctcggcgtgcggtgatagccaagccatgggagacaagaagagccccaccagggctgaaatctctttaatgatgg

SEQ ID NO: 242973 - DNA, 75 bp, Homo sapiens
gcctctcttgaccccatcaaggaatggttgaactcctcttttgacttggactatgactttcaacgggactattat

SEQ ID NO: 242974 - DNA, 90 bp, Homo sapiens
ggggactgcggggccagcctcagagcttacaagaccctatgaaaaaattagttgagaaagaagagaagaagaaaatcaaccagcaggaaa

SEQ ID NO: 242975 - DNA, 85 bp, Homo sapiens
gcgggcactgctttccactcggctcctgtcgtccgttctctcaggctcccgttcagttcaaatctgaacatcaatgatgtactag

SEQ ID NO: 242976 - DNA, 96 bp, Homo sapiens
cgcgactcgggctgagggagctcgggccaatcagagggacggccccagaatggcatgcctggtgagacgagtggaccggatggagcattccatcgg

SEQ ID NO: 242977 - DNA, 100 bp, Homo sapiens
gtcggcgtggttgcatttcagaatggagataaactgtttcacgttagacctgtaacccaaggagatgtgtatagagctgaaactgaagaaattcctaaaa

SEQ ID NO: 242978 - DNA, 100 bp, Homo sapiens
ggataattctttttatgtgcgaacatgtaacaagaatccaaagaaaacaaaatggtggtatcatgaggctgtgacaacactgaaaacagtattggatcag

SEQ ID NO: 242979 - DNA, 107 bp, Homo sapiens
cagcggcggcgccagcagttccagtccgttgctttactttttgcttcaccgacatagtcattatgccgaagagaaagcccaagacctgcaaaatttacagagcgccc

SEQ ID NO: 242980 - DNA, 82 bp, Homo sapiens
tcggctgccccaatccccggcagctctctcaggacagaggtcagatcaaggccaccccttcaggatgaccttcttttctttg

SEQ ID NO: 242981 - DNA, 83 bp, Homo sapiens
cgggcggcgaccggggcctgggtccacgccgagggcaggacgaacttcaccaggaagctcttcgtgggcggtcttgactggag

SEQ ID NO: 242982 - DNA, 98 bp, Homo sapiens
ctgggagtcaccacatcagatacatcctactcagatatggctgctggatcagagtatgatctcgtgaaatcttgagagaaactgaatgacgaatgaaa

SEQ ID NO: 242983 - DNA, 74 bp, Homo sapiens
gtatcaaaaaatgcagtcccctcatgccaagatgtgaagttcatttccaatccgccctccatggtggcagcggg

SEQ ID NO: 242984 - DNA, 90 bp, Homo sapiens
acagattattgaagactggaattgaacatggagccatgccagaacaggtggtacatgccagagtcctgctctcccggcccttgtccgtcc

SEQ ID NO: 242985 - DNA, 100 bp, Homo sapiens
taccatgtccttcatatcaacactaccaaaaataatccagtgatgtcattgcaagatcaggagagattaaacagattctagaaaatgaacttcagatacc

SEQ ID NO: 242986 - DNA, 100 bp, Homo sapiens
atccctacgcgtccctttgggtttagcacgatgagctcaatcggcactgggtgtgctgctctggttggtgaagaccagcctctttgcccagatcttcctg

SEQ ID NO: 242987 - DNA, 80 bp, Homo sapiens
gaccctggagcctcagttggaagcagccgatccagcctgcggagcctgtggggcagggtgagaactctgtctcagtcgac

SEQ ID NO: 242988 - DNA, 82 bp, Homo sapiens
aagagttgtcccagctcggcccgcgggggagccccgggagccgcacggcatgttatgttacccagagaactttccaaacaag

SEQ ID NO: 242989 - DNA, 98 bp, Homo sapiens
ctggacccacgtctgtctggtgataccaggggcagagggaccactctgacaggccagaagcggactcctagaagaggggagcagcaaggatggaatga

SEQ ID NO: 242990 - DNA, 120 bp, Homo sapiens
ggaacctccacctcgactccagcggccccgacagcacggaagcagctggataaagaacaggcagtcgatgatgtgaagaaaggttacatcaaagcagaagaaaagtcctatcaattacag

SEQ ID NO: 242991 - DNA, 76 bp, Homo sapiens
ctggccgcctggacggctcgggcgctggagaggaaatatcattctgcaaaagaagcttatgaacaacttttgcaga

SEQ ID NO: 242992 - DNA, 75 bp, Homo sapiens
ggctgccggcggtggactcgtcggagccgcgggcggtcagtagagacggagtttcaccgtgttagccaggatggt

SEQ ID NO: 242993 - DNA, 75 bp, Homo sapiens
ccttaaaatacccgcaacagccccttcgtcccaagaacaagatcactcaaggtgaaggataatctactaatacca

SEQ ID NO: 242994 - DNA, 75 bp, Homo sapiens
cccaaggataaaattcaggatttcttaaaggatagccaattgcagtttgaggctcatttgccatctatcaatcgc

SEQ ID NO: 242995 - DNA, 50 bp, Homo sapiens
tgaagtctgctttaatgaagaggatatcctcagaccatctcaaaaaggag

SEQ ID NO: 242996 - DNA, 100 bp, Homo sapiens
ctggtggaagtggttggaaatggcacctatggacaagtctataagaacgccaatctgaattgccaacgcaaagcaaagcgagcttccccagtattctcag

SEQ ID NO: 242997 - DNA, 83 bp, Homo sapiens
gcctgccgcccctgcgccgccgagccagctgccagaacactctgctccagccaaggtggtgagggcagctgttcctaaacagc

SEQ ID NO: 242998 - DNA, 75 bp, Homo sapiens
tccagcctgcggagcctgtggggcaggatagtggccaaagcctccaagaacctcatgtccacgcaaagcttgggg

SEQ ID NO: 242999 - DNA, 100 bp, Homo sapiens
tcacccattgaaaagtggaacctaataattggcaacttggctttaaagcaggaccccaggagcaagcacaagttcaaaatccacacttacggaagcccca

SEQ ID NO: 243000 - DNA, 82 bp, Homo sapiens
cccagtgacgggtctggagtgcgtgggggaccggctgttggcggcactttcatttggacccgtggatacccattgaacagat

SEQ ID NO: 243001 - DNA, 82 bp, Homo sapiens
aacgtgattgagcgccaccctgtggacatcagcgccatccccgagcagcggtggaagctgtttaacttacatgtgtagagct

SEQ ID NO: 243002 - DNA, 83 bp, Homo sapiens
ctgtcctccacagaggctttttgtgtgttttatcatctaaaatccaatccctcggtggatactttaatactgataagccacac

SEQ ID NO: 243003 - DNA, 96 bp, Homo sapiens
cgtggccctcgatgtgctctgcgtgttgctggctttggacatcagacagtgcaggagaagaatgtgatgcggcagaaggggctgaaaactaaatcc

SEQ ID NO: 243004 - DNA, 121 bp, Homo sapiens
acggccgaggctgcccagaggcgcctcctccacaccccccgccgcagcagcaccggcgacaggtgtcgtgaaaactacccctaaaagccaaaatgggaaaggaaaagactcatatcaacat

SEQ ID NO: 243005 - DNA, 74 bp, Homo sapiens
attgagcaacagcagataaggaacgccctggaaaacatcaggtgtgactgaagaaatatcaaatgtttcctagt

SEQ ID NO: 243006 - DNA, 100 bp, Homo sapiens
actagtcgcgggagccacgcagaggacgccggaacaccctggaagccgagaaatggtcatttattggggaggcagtgttccctaaacaccttaccagcag

SEQ ID NO: 243007 - DNA, 100 bp, Homo sapiens
actccgtctttaccctgtatgaactgactaatggggaagacacagaggatgaggctttgctgtctgcatgccgacatgctgggctcactgggccccaagg

SEQ ID NO: 243008 - DNA, 75 bp, Homo sapiens
gtgcaactgaaaatgacattgctaatgtctctagcatcaattcacgctttgccaaagtacacatcctgtatgtgg

SEQ ID NO: 243009 - DNA, 75 bp, Homo sapiens
caaaaagagccttcagatcctacatacttttaccaacagtcacttttcaggattagaagaggctgtgtatagaaa

SEQ ID NO: 243010 - DNA, 101 bp, Homo sapiens
agagtgaggagccagacgacaagcacacactatggcgctgaaacggattaataagagtaattccctcctggtcccagacagtctaagaggcacagataaac

SEQ ID NO: 243011 - DNA, 90 bp, Homo sapiens
agaagaggcccggactcatacagagattgaaatgttccttagaaaggagcagcaggttggaaagggcaaagaaattacaagaacagcgag

SEQ ID NO: 243012 - DNA, 74 bp, Homo sapiens
tcccgggcatgggcggcaactctttgatgtactactataatgggaaagcgatctcccttgagtttagaaatctg

SEQ ID NO: 243013 - DNA, 90 bp, Homo sapiens
cacttgaagaaaagggtgaaggaggcgaattttcagttgataggacgtgtttagctttcaagtgtctcctaatatgaatcctatcaaagt

SEQ ID NO: 243014 - DNA, 83 bp, Homo sapiens
ttaaaacatttttcagggacgtagccatccagagtttctgatgaagaattgaaaagaagagtagctgaggagctggcattgga

SEQ ID NO: 243015 - DNA, 77 bp, Homo sapiens
tcagggactatcgcatcgatgagaagaactttgtggtcgtcatggtgaccaaggatgagttccacccgttcatcgag

SEQ ID NO: 243016 - DNA, 103 bp, Homo sapiens
gttcacgcacgggatccagagcgccgcgcacttcgtcatgttcttcgcgccctgttggaatcgaagcctcttaaaatggcagatgacttggacttcgagacag

SEQ ID NO: 243017 - DNA, 98 bp, Homo sapiens
ttttaccatgaatagttctactccttctacaggtgtgtatggggctgcttgctctcggtgactacatgaatgtccagtgccatgcctgcattggaggc

SEQ ID NO: 243018 - DNA, 74 bp, Homo sapiens
tttcttccaaggtcaaaggacgaaggcaagaaactatattcagtctttgactcagatgccgaagatgaactttg

SEQ ID NO: 243019 - DNA, 100 bp, Homo sapiens
catcgacatcgccagcatcgacatggtttccgaagtcaacatgcatgcagcagattggaataaatatgatgaccgattgatgaaagcagcagaaaggggg

SEQ ID NO: 243020 - DNA, 90 bp, Homo sapiens
tacgccagcggcgtcgagaggaccatcctgggtgctggccctgtgctggaggaaaccgaatgcggtgctacaactgtggtggaagcccca

SEQ ID NO: 243021 - DNA, 100 bp, Homo sapiens
ggattgcatagcaagaaggaagtgcctatccaccgtgttgcagatatatctgggcaaatgcagccctgaggatttggctactgcatataacaacaggggg

SEQ ID NO: 243022 - DNA, 101 bp, Homo sapiens
gcaaggaggttggcttcttcatcatccgggccagccagagctccccaggggacttctccatctctgtcaggatcgagcggtccacggaccaggtcatcaag

SEQ ID NO: 243023 - DNA, 75 bp, Homo sapiens
cggaggaggacgaggactacgtgccgtcggatccacattgtttgaagttattgtgagtgcctcgaggaccaagga

SEQ ID NO: 243024 - DNA, 74 bp, Homo sapiens
aacaagtgctcctttcttcacccagaacctgttgtggggagtaagaccttgaagcatgacactgctgcagtcga

SEQ ID NO: 243025 - DNA, 100 bp, Homo sapiens
ccgcgcgactccctctttggccctcggagcgcagcacccggcggacaagcggcgggacgccaggacgcggcgagcaagtgtgctggagaagagaaacgag

SEQ ID NO: 243026 - DNA, 51 bp, Homo sapiens
ctaagacctaggcgcaaaggcttggaggctgataaaataccagtaatgcgt

SEQ ID NO: 243027 - DNA, 101 bp, Homo sapiens
cagacagaatccctgctaccagttacaatggccaacattggaataaatggaaatcattctctggaaacctgtgaaacaacactttttgctctccgaatggc

SEQ ID NO: 243028 - DNA, 100 bp, Homo sapiens
cgacgaaatcctccaggaggagatcaaggagtacaagtctatccagaagttaaaggagagattgctcgtaaagatgaaaagctgctgtcgtttctaaaag

SEQ ID NO: 243029 - DNA, 100 bp, Homo sapiens
gggcgccatcgagccttggcggcggacgtgcagagcttggggcttccttggtcgcacccaccacctgcctgcccactggtcagccttcagggaccctgag

SEQ ID NO: 243030 - DNA, 80 bp, Homo sapiens
cttttttgacatcgcgcactatctagtgtcagtgatggcggtgaaacgtcagccggatcagcttgaacgggtctttttac

SEQ ID NO: 243031 - DNA, 50 bp, Homo sapiens
atcagctctctgttttggaaaatggagaaaaaagggttgctcattttggg

SEQ ID NO: 243032 - DNA, 89 bp, Homo sapiens
accacagtgtgctctcatgtccagctcctttctggagaatctagagggctggtttacaacaaaacatccagggccacccagtttcctga

SEQ ID NO: 243033 - DNA, 96 bp, Homo sapiens
ccgggcaccgaggaccagctcaatgacaggaccagtggttttggcgagtgagaaacaacagggtgatggatggatacccaatgcaaattacttact

SEQ ID NO: 243034 - DNA, 100 bp, Homo sapiens
caacttcgaggactggaattccgaggccccttcacagatgtagtcactacaaatcttaaattgcgaaatccatcggatagaaaagtgtgtttcaaagtga

SEQ ID NO: 243035 - DNA, 90 bp, Homo sapiens
gggacaccgagaaagattattaccactgtctgtcggatatgaagaccctggagtaggtgatgttctgcaccctgaacacccacaaagtgg

SEQ ID NO: 243036 - DNA, 96 bp, Homo sapiens
gagaaggatgaaactgtgagtgactgctccccacacatagccaacatcgggcgcctggtagagtgaaaattgataccaaggccattccactgtttg

SEQ ID NO: 243037 - DNA, 75 bp, Homo sapiens
cggacctgtcgcgatgtcagggctgcgcctctctgcagcaggctggacgtaaagaaagaagtgatgcactcaatt

SEQ ID NO: 243038 - DNA, 90 bp, Homo sapiens
ctcctggttcggcctccccgcgcactagaacgagtggacaagattacatctgaaaatgcaccaactaaagaaaccaataacattcccaac

SEQ ID NO: 243039 - DNA, 99 bp, Homo sapiens
agaacagcaaagcctggaagcaagccgccgtggagaaggaagaactgtgctgagatcgcccggggcttgcctgtgttgagagaatagaaaagtaccaag

SEQ ID NO: 243040 - DNA, 80 bp, Homo sapiens
caaaacttcaagccaaacatcaagcagaatgtgatttgcttgaagatatgagggtccaatgtgtgacttgctgtggtcag

SEQ ID NO: 243041 - DNA, 73 bp, Homo sapiens
cggtccctgcatgatgccatcatgatcgtcaggagggccatcaagatcagtggtcgtgaagtgtttgaatttc

SEQ ID NO: 243042 - DNA, 96 bp, Homo sapiens
ctgccgccaaggtgttcggtccttccgaggaagctaaggccgcgttggggtgagaccctcacttcatccggcaaataatctccccaaagccatcgc

SEQ ID NO: 243043 - DNA, 75 bp, Homo sapiens
cagagaaagagaatgatgaagagaaaggcccggagactatattaacctggctgcagagccaaaagtgaaccgagg

SEQ ID NO: 243044 - DNA, 96 bp, Homo sapiens
attctcaaggaaacacaagagaaattctatggcctaccatatgttccaaatactgtgttggaaatcaatagctcttctagcctttgcattgtttaa

SEQ ID NO: 243045 - DNA, 100 bp, Homo sapiens
cttcatgaccctgcccttgccagaatttcctgcgctgttccacctcattcaacttcaggttcttctgtgtggcagttcagaatgatggatcaagctagat

SEQ ID NO: 243046 - DNA, 80 bp, Homo sapiens
tggaactaatgtcacagcatggatgtaatgcctggaaagtatacaatgagcatgcatatcattctgtttcaactccccct

SEQ ID NO: 243047 - DNA, 82 bp, Homo sapiens
ccaaggaataaacatgcaatgaacccaaaaggcagcagccgctcttctaaaacattcaaaccaaagaagaatatccctgaag

SEQ ID NO: 243048 - DNA, 98 bp, Homo sapiens
gcggagaccctcgaagtgcgcaaacttgacactcaccctgaccgatcatacatctgtcggtggcctgggagacagtttttatgaatacttactgaaag

SEQ ID NO: 243049 - DNA, 98 bp, Homo sapiens
gaaggccgtatttgggtctatgacgttggagagctatacctgcaggcccgcttcacttggcgaggagcccgcctgctccggcccctcctgcagttcac

SEQ ID NO: 243050 - DNA, 75 bp, Homo sapiens
gctggaatgactggcaacccagattactcttgtctctgctgctcctgggaaagtgatttgtgaaatgaaagtaga

SEQ ID NO: 243051 - DNA, 88 bp, Homo sapiens
gcagcccggcgggaggataaagaccaccacggcattgagatgttccacaagagcctggagagggccgaggccggagataacctcgggg

SEQ ID NO: 243052 - DNA, 82 bp, Homo sapiens
tgaaccagttcgatgttgtgataagaaagaaatgaccgcccggatgtgccactgagagccccgcgggtctcccggtgcccga

SEQ ID NO: 243053 - DNA, 50 bp, Homo sapiens
tgaaaatgtgatctcccttaaaaaggtgaaagaacttgtcctggacaaca

SEQ ID NO: 243054 - DNA, 75 bp, Homo sapiens
tgggaaatctcctgctcgaaatagggcctgctttcttccccgggcgatgtgcagagatctttgccaggggtcaaa

SEQ ID NO: 243055 - DNA, 73 bp, Homo sapiens
gggaccttaccgttgtcccaagcttccagcagtctgagcacaacaggcaccccccgagcccagctccacacac

SEQ ID NO: 243056 - DNA, 83 bp, Homo sapiens
cccattgcaggccgaagcactctcagtcaatgagtcgcacgtacaggtttgcagattccgccagcagcacagcaagctctaca

SEQ ID NO: 243057 - DNA, 90 bp, Homo sapiens
tgagaaataaggacaaaagccaagaggaggacagttcgctacacagcaatgcatcgagaacaaaatccagtctcatagcagaggagaata

SEQ ID NO: 243058 - DNA, 100 bp, Homo sapiens
cgagatccagtcttgcatgggacgcctggagacggcagacaagcagtctgtgcacagatgtaaatgaagaccctggagaagatgtggccctcctctctgt

SEQ ID NO: 243059 - DNA, 75 bp, Homo sapiens
aaagaagctattattacaagaataaaggcaggaatcaatccattcaatgttctggacatggcaagacatgtgcca

SEQ ID NO: 243060 - DNA, 100 bp, Homo sapiens
ggcggcggcggccaggtccctgctgaatcacacgccgccatccgggaggcccagggaaggagctgactgctgggcaggaacgtctctcaggagaaagagt

SEQ ID NO: 243061 - DNA, 101 bp, Homo sapiens
ctcggagtgaaacatggagttcttctgactgaagttattctcccattcggcttcttgaagtatgtgttccactccccaaaatattcattaagcgtcaggcc

SEQ ID NO: 243062 - DNA, 51 bp, Homo sapiens
atgtttttgacttacatggaaacagtgagaaagatcagtctaaagaaaagg

SEQ ID NO: 243063 - DNA, 74 bp, Homo sapiens
atcctacacaactcatggcaccgtgcacgtggtcgtcaacaaccaggaacttccatgtctggaatgagtgctgg

SEQ ID NO: 243064 - DNA, 98 bp, Homo sapiens
gactttgatgctagcctgtccgggatcggccaggaactgggtgctggtgcctatagcatgagcagaaccttctaagtctcagacacgtaaacccaagt

SEQ ID NO: 243065 - DNA, 75 bp, Homo sapiens
gcctagggaggcgaggttcccgcaccggataggtcatgcaagacaagataatctgccttccgaaaagagtgcagc

SEQ ID NO: 243066 - DNA, 83 bp, Homo sapiens
tgcatctggctgttagaagaattcatgctcatccgggtagaacgtcatgacatgaataccttaagcctgcccctgaacatacg

SEQ ID NO: 243067 - DNA, 82 bp, Homo sapiens
gtttctgcacaggaatatcgagagcgtcatgaacccgagctatagagaaaggagatgaggcattgccgtctgcaacgtgccc

SEQ ID NO: 243068 - DNA, 75 bp, Homo sapiens
tcaaggagaaagagaaagaggagcggaagaaacagcaggagaaggaagactcgccagccagatgccaaagatggg

SEQ ID NO: 243069 - DNA, 82 bp, Homo sapiens
ctgggagctggaggaaccgcggtgaagattgtccccagtggatggtccctatcacaatctctactagtgaagaccccaacca

SEQ ID NO: 243070 - DNA, 90 bp, Homo sapiens
ccggaatcattcccttggctgttaatttctcagaggatgatccactcacaaatctgaatacggcttttgacgtggcagagaagtacctgg

SEQ ID NO: 243071 - DNA, 80 bp, Homo sapiens
gagcccaccgctgccccacaccccgtgctgaagcagttatctccagaagaagaagagaaaaggagaatccgaagggaaag

SEQ ID NO: 243072 - DNA, 50 bp, Homo sapiens
aaaaaccaactatctaactccactcaggcctggcaacctcattctttaac

SEQ ID NO: 243073 - DNA, 96 bp, Homo sapiens
ttggagtttccctcaggaagtagccgagcgatttctcagggtgatgacttggcaaggggacggcaaaacagaacagaaaggcggagataaaaagag

SEQ ID NO: 243074 - DNA, 75 bp, Homo sapiens
aggagctgtagagaggaccccggtacatctgaaagccgggaaatgttccagaaagctgagtctgatctggattac

SEQ ID NO: 243075 - DNA, 50 bp, Homo sapiens
gggggactttgtcacagcttggatggtgaatcttggaagcaaccagtacc

SEQ ID NO: 243076 - DNA, 100 bp, Homo sapiens
aatgctgaggagcagacgagtggccaggcttctggggctgactcaactggcgccatgtcagaaccggctggggatgtccgtcagaacccatgcggcagca

SEQ ID NO: 243077 - DNA, 100 bp, Homo sapiens
agagttggaggactctgttcagcagatgtatacaaccaatcaggagcagttacaggaaattgagttcttctcaccactaaatccaatacgagttcatatt

SEQ ID NO: 243078 - DNA, 86 bp, Homo sapiens
gcgtccgccgattcctcctccttggtcgccgcgtccttggctggcgtaacctgggccctttcctgggattgtggacatgttcggaa

SEQ ID NO: 243079 - DNA, 82 bp, Homo sapiens
atgaatgcaggcatcttacagactatttcaccttcaaacaggaataacagttcctctccccactctggggtgtccagacagg

SEQ ID NO: 243080 - DNA, 96 bp, Homo sapiens
cgcggctctaacggggctttctacaagatggcccactgcgtgaccttggttcagctgtccatttcctgtgaccatctcattgacaaggacatcggc

SEQ ID NO: 243081 - DNA, 98 bp, Homo sapiens
gccggggccgcgctgagggcgcccagctgaatccggggcaccagctaccagagccctcacggcatccccatagacctgctggaccggctgcttatcgt

SEQ ID NO: 243082 - DNA, 100 bp, Homo sapiens
ttttgctctccctcgagaagctccagatggcgtcttccgtgggcaacgtggccgacagcacagaatataacaccagcaatcctgacttgttgctagtcat

SEQ ID NO: 243083 - DNA, 75 bp, Homo sapiens
tggaagattccagacctcagcatggatccctatgatggctacggtcagagtggtgctgggaacaactgggccaag

SEQ ID NO: 243084 - DNA, 75 bp, Homo sapiens
gcacaggatcatcgaggtcgtcgacgccatcatgaccacggcccagagaacccgagcaacttcccgagaagagaa

SEQ ID NO: 243085 - DNA, 74 bp, Homo sapiens
ctgggcgcggattcgccgaggcaccgaggcactcagaggagcctgcccctgcgcttctgggtgaacgtgatcaa

SEQ ID NO: 243086 - DNA, 75 bp, Homo sapiens
ggaggtggagttgctgcccttccggagtccgccccgtgaggagaatgaaagtccatgagatgctgaagaaggggt

SEQ ID NO: 243087 - DNA, 99 bp, Homo sapiens
caccggtccccaacgcatcatgccagggagccaagcgtcctgcccggccatccattacaagattttggcttttctgttgaaaagtgttccaagcaatta

SEQ ID NO: 243088 - DNA, 101 bp, Homo sapiens
gcccccagcaatccccggctcctgcgggtggcgctgctgctcctgctcctggtggccgccagccggcgcgcagcagataagtatgctgtgcgcttcatccc

SEQ ID NO: 243089 - DNA, 96 bp, Homo sapiens
cagcacaggcaaggtacaactgaccagggacatcatcaaaaggaatatccagacagccctgcacctccgggctcggcggaacttccgggacttcag

SEQ ID NO: 243090 - DNA, 100 bp, Homo sapiens
gctcattatagcctcaaactcccaggctcaagcaatcctaccatgtcagccttcccagtagctggaactacaggccacggcatatgcctccaaggacggg

SEQ ID NO: 243091 - DNA, 83 bp, Homo sapiens
cttctttcttcagccgaggccgccgccgcctctccttgctgcagccatggagttttaaaatcaaagatgggaaaatcggagaa

SEQ ID NO: 243092 - DNA, 75 bp, Homo sapiens
cagctcgcccagctcgcccagcgtccgccgcgcctcggccaagtaatctcaggggcgatataatcaatgaggtgg

SEQ ID NO: 243093 - DNA, 94 bp, Homo sapiens
gaaaaacaaagcagtcaatggagcagagaatgatccctttgttagaccaaatttaccacaactacaggtgatttggcttctgcacagttaggag

SEQ ID NO: 243094 - DNA, 100 bp, Homo sapiens
gcatgaaggacatgcgcaaagttctgagaacattacagcagatcaagaaatccagctcaatgctttctcctgctcaagacagccacacgaacacggatct

SEQ ID NO: 243095 - DNA, 100 bp, Homo sapiens
acatcgccgccgtctcctatgttcgggatgacgctgcacacctggtggtcctgaagacagacttcctcttcaaattcctggtgattggcagtgcaggaac

SEQ ID NO: 243096 - DNA, 101 bp, Homo sapiens
ggagtcggcgtccaggctcggagcgcgacacggagactaggtggcagatcctgtttgaccaaactcagagatcaattaaggcacagcttcagaactttgtt

SEQ ID NO: 243097 - DNA, 75 bp, Homo sapiens
tcgaacccccgcttcgcagctcaggagcctgaggtccgaaaggtgctttcgtgctacagaggcgtagttgagtag

SEQ ID NO: 243098 - DNA, 90 bp, Homo sapiens
gggaagaactacgaggcctccatgtcccacgtggacaagttcgtcaatacctcctaaatggctctactttgaacctgctgggcaaggaag

SEQ ID NO: 243099 - DNA, 100 bp, Homo sapiens
ctgtgagcttggccttggagcgaggctatcacaagctgcaccagcttctaaccgaaccctgagagatggttggtgccatgtggaaggtgattgtttcgct

SEQ ID NO: 243100 - DNA, 75 bp, Homo sapiens
cctcacattgtggcagccttagtttggctaatagactgcatcaagtggtggacttgctttgtgaagagacagttc

SEQ ID NO: 243101 - DNA, 90 bp, Homo sapiens
ttccaccacctgcgcttcttggaggagctgtaccagcttcagtcccaggaggagaccaaggagaggcgacattcccataccattggtggg

SEQ ID NO: 243102 - DNA, 90 bp, Homo sapiens
atggaagagcctgggcccccaggtgggctcagccaagaccaagctgagctcctgtgacggccacgacgggctgcggaggcaggactccag

SEQ ID NO: 243103 - DNA, 90 bp, Homo sapiens
atgaagaggatttcaacagacagaaaatgtttcgatgaaagatcctccggacttattggacaggcagaaatgcctgaacgccttggcgtc

SEQ ID NO: 243104 - DNA, 71 bp, Homo sapiens
acacagaatttctgcaagtaattgacttaattcagtgcacaaatgagatgaatgtgaacatcccacagttg

SEQ ID NO: 243105 - DNA, 83 bp, Homo sapiens
cacaatctgtcttttgatgaaatcaacaaagcctttgaactgatgcattctggaaagagactctgcacttgatggatcagctg

SEQ ID NO: 243106 - DNA, 75 bp, Homo sapiens
tttggcctggcttgtttgcaaagcttggtatgtgctgtgagttatacaactcaggctggagaaaaaatgtatttc

SEQ ID NO: 243107 - DNA, 60 bp, Homo sapiens
cggttgctggatccactggagcaggcaagaagctccaccatgaggcgaggtggatggagg

SEQ ID NO: 243108 - DNA, 100 bp, Homo sapiens
agcataacgaacctaaccctcagagaacaaaatccagtctcatagcagaggagaatataatgtttacagcaccttccagagccatgaaccagagtttgac

SEQ ID NO: 243109 - DNA, 82 bp, Homo sapiens
gaccaaccaattcagatttatgaaaagattgtttctggaaagttccatggaaaatgggagaccacctgatcctgcagactgg

SEQ ID NO: 243110 - DNA, 100 bp, Homo sapiens
ccgggagcgccgagcgtcgccgccgccgccgccatgaacaactcgggcgccgacgagatcgggataaacatcacgatgctgctcatgaaatcatcgagac

SEQ ID NO: 243111 - DNA, 100 bp, Homo sapiens
cagcttgagccccatcgtggattccaagacatccctgctgagagagccaaggctccaggaggccagagctctactgaagcggcggcggccccgggggcca

SEQ ID NO: 243112 - DNA, 50 bp, Homo sapiens
ctggactttgggcgtcccattgccatggttttagctaaagaagatactga

SEQ ID NO: 243113 - DNA, 88 bp, Homo sapiens
attccgggagcacagttccgccgatggtctggaactgaaagtgatgcgtatttctgagttatgcctgtatttaagaagctgagtgaaa

SEQ ID NO: 243114 - DNA, 87 bp, Homo sapiens
tatgaccgagggagaacaccatctcgccaccgcagctacgaacggagcagatatctgtgtgaggctggattttctttgcctactcca

SEQ ID NO: 243115 - DNA, 90 bp, Homo sapiens
acaagatctatgaatttgattatcatctgtatggccaggtttctaagcatgaattgaggaacagaagaagcagagcagatgatcggagca

SEQ ID NO: 243116 - DNA, 74 bp, Homo sapiens
gggacacctggaaggttgctcacctgaagagcactgcagtttcctcctgaaggctggctccggctctccctcaa

SEQ ID NO: 243117 - DNA, 83 bp, Homo sapiens
cgccaagatgaagggctacccacactggccggcccgggtgctggagaatctggtaaaagcaccattgtgaagcagatgaggat

SEQ ID NO: 243118 - DNA, 102 bp, Homo sapiens
ggccaggacgctgggagctgcctgcgggaaggtgcggggagcggagccatggcctccggaggcctcatgggacctgtcaggatgatttcatctggacacgag

SEQ ID NO: 243119 - DNA, 90 bp, Homo sapiens
ccggagtccccgccgccgtcatgcagtccccggcggtgctcgtcacctccaggagaagtggaggcctctcagttaagaagactgaatata

SEQ ID NO: 243120 - DNA, 87 bp, Homo sapiens
agaaggtggcagacccggtttgctgatcgccccagggatcaggagcttttcatgcaacacccaacacttataagcggaagaacacag

SEQ ID NO: 243121 - DNA, 100 bp, Homo sapiens
cggtccggcgcggctggggcgcggcagaggcttgcccgatcctcggccatgtcactgctctgcgtgcgcgggactttcagttaccttgatgatgtcccat

SEQ ID NO: 243122 - DNA, 82 bp, Homo sapiens
gcagccgatccagcctgcggagcctgtggggcaggtgtgggaaccgctgagcagaacaccctcccccagcgggaaatccggg

SEQ ID NO: 243123 - DNA, 95 bp, Homo sapiens
gccaggtgaagggccccgtaaattggaaggatgcacaagttccaaggttacgtttcagtttttgatgagaagtactttctggtggaaatggatga

SEQ ID NO: 243124 - DNA, 82 bp, Homo sapiens
tgcggccacggagagcgcggcggagctggcccgcagttgtctggatttctcgaacttttagtcgagtactttagaaaatgcc

SEQ ID NO: 243125 - DNA, 88 bp, Homo sapiens
gagaatatatcctctaaatctgatctttggaggaattttttacatcacttgtgaagcaagaaatggtgaatatgcctcgtgggatata

SEQ ID NO: 243126 - DNA, 51 bp, Homo sapiens
gccatggtgcggttcaagcacagattgaccctcttgctggaatgacatctc

SEQ ID NO: 243127 - DNA, 100 bp, Homo sapiens
tgatgctgaaccaagagagaggttacagcttagcttccaggatgatgaatgctcgtgtacaagtttgccagaaaacaccacatcactttaactaatctaa

SEQ ID NO: 243128 - DNA, 83 bp, Homo sapiens
cctcagttggaagcagccgatccagcctgcggagcctgtggggcagaagatgcagatgcctccagctattacgagtcccatgg

SEQ ID NO: 243129 - DNA, 83 bp, Homo sapiens
ccgagaagtagctcagatctctggaaaaattccggaactgttggcttcgggcatggttgataacatgaccaaacttgtgctag

SEQ ID NO: 243130 - DNA, 80 bp, Homo sapiens
gacagagcagctaccctcagctctagctgatactacagacagtacaacaggtcagcccaaggccaaccccactgtcactc

SEQ ID NO: 243131 - DNA, 99 bp, Homo sapiens
cactgcgtcaagcaggtgccccgaataactttggaaattttagcattcaggtgccaggaatgcagatgggacagccagtgccagaaacaggcccagcta

SEQ ID NO: 243132 - DNA, 98 bp, Homo sapiens
ctcaagtgggacttacggtccacagatgagccagtatggaccacaagatgaacgactttcgaagtaaaatgcaatcaatatttccaacaattcccaag

SEQ ID NO: 243133 - DNA, 82 bp, Homo sapiens
gagagatgcttaaaaatcaccagttactttaatgaacacaaatgccagaccctaagaccttcaagcagcactttgagagcaa

SEQ ID NO: 243134 - DNA, 100 bp, Homo sapiens
tgggctgcacctcagtcatctgctccgacaagacgggcacgctcaccaccaatcagatgtctgtctgccggtttccctccctaaagtacatccacgttat

SEQ ID NO: 243135 - DNA, 75 bp, Homo sapiens
gaaacagttacactgcttgtagctcttaagggcaagtgtccagagaatggctgggatgaaagtacacttgaactc

SEQ ID NO: 243136 - DNA, 100 bp, Homo sapiens
agggccccgggccctcagcctctcttatctgcacattcattgcaaccttcttctggtgatgaaatatctactaatgtatctgtccagctttacaatggag

SEQ ID NO: 243137 - DNA, 99 bp, Homo sapiens
cagggctgaagagaagatggaggagctggtggtggaagtgcggggctccaatggcgctttctacaaggctttgatgcggcctggaagaattgatagaat

SEQ ID NO: 243138 - DNA, 123 bp, Homo sapiens
cctatgattttcgggatgaaagaatgatgagaaacttaaaagatctggctcaccgaatagccagtggcgaagaggaaaatgtttataggaggccttagctgggacactacaaagaaagatctg

SEQ ID NO: 243139 - DNA, 51 bp, Homo sapiens
gtttgctcagctctttgccattcctcatgtatgtccctgggaagctgcatg

SEQ ID NO: 243140 - DNA, 101 bp, Homo sapiens
cagagagggcctgggagcttgctgcagcttcagggcaacaggtttgtctatgctggctctaactcgggcgtggtccaggccccgctggccttctgtgggaa

SEQ ID NO: 243141 - DNA, 110 bp, Homo sapiens
cccagaccctggagcctcagttggaagcagccgatccagcctgcggagcctgtggggcagggtaaatgggaagttggtagctctgaaggtgatcaggctgcaggaagaag

SEQ ID NO: 243142 - DNA, 88 bp, Homo sapiens
ccctagaaaggttggagctgccgccgcctgcagtcggtgaccgcgcgactcggcgcccgcccgcggcccgaaatgcagaaaaggccat

SEQ ID NO: 243143 - DNA, 75 bp, Homo sapiens
cgtcccctggactctctcaaataagccaatggacacgtcagtgttatctgaagaaggaggagagccttttcagaa

SEQ ID NO: 243144 - DNA, 97 bp, Homo sapiens
atctgcacttcgcattttggcattgacatttaattttagggtcctttatatagaagggagagtaggttatttccagaaagaagagaatggcaaagta

SEQ ID NO: 243145 - DNA, 88 bp, Homo sapiens
agtgttaacccaaatgacacctgtctggctgtaaccaatggtcaaggtgaaaataagatgaaaaatttacctgtgcctgtctatctca

SEQ ID NO: 243146 - DNA, 100 bp, Homo sapiens
gcccattgggcagtgcctgtgccaggcaggctacgagaaggtggaggatgcctgccagggtatctacgagaccccagcaggcaccatcctttaccatgct

SEQ ID NO: 243147 - DNA, 73 bp, Homo sapiens
ttcgtctcttacgtctgcggaagtgcagctgcctcagttcttagcgcagatcagtacaatggaacatgaattt

SEQ ID NO: 243148 - DNA, 92 bp, Homo sapiens
tcggcggctcagttgtccatgaccctgaaggtccaggagtacccgaccctcaagatatggatcagaaactttcgaagttggtagaagagctc

SEQ ID NO: 243149 - DNA, 82 bp, Homo sapiens
gcagccttcagcttttggcagcatgaaagttagcaggaatgacagaggaagaggaagacaaacttctggcactgaaagactt

SEQ ID NO: 243150 - DNA, 100 bp, Homo sapiens
tgtgaacagctgtgtgtttgttcatcagactcttcaccaggggtatagaacaggctatgcttacaggcatcctctcattcgagagaagcctaggcacaag

SEQ ID NO: 243151 - DNA, 75 bp, Homo sapiens
ggccagggaaccctggtcaccgtctcctcagacaggggcaagtgtccgagtggtgaatcagctacttacagagat

SEQ ID NO: 243152 - DNA, 50 bp, Homo sapiens
cgacaacctggccaaggaaaaccgagtagagacggggttttgccatgttg

SEQ ID NO: 243153 - DNA, 100 bp, Homo sapiens
tttctctgcctcctgtggacaaaaaaagatgctttcttcacatgtcgaaaaaatgtccttctggcgaacagctcatccccccaggtagagggcgactttg

SEQ ID NO: 243154 - DNA, 75 bp, Homo sapiens
aaaggcttttccagtttgcataatgtctataatgacggatctatactacctcagtcagacagatggagcaggtga

SEQ ID NO: 243155 - DNA, 98 bp, Homo sapiens
atctagaatcaactgagagagatgcttaaaaatcaccagttactttaatgagatttgcagatttacagaatggctgcacattaatggaaagagaagca

SEQ ID NO: 243156 - DNA, 83 bp, Homo sapiens
tcggaaagcatctattgtgaaaaacctaaaggataccttaggatattagaaatggctactccccagtcaattttcatctttgc

SEQ ID NO: 243157 - DNA, 90 bp, Homo sapiens
tcagaacaggcgctgcggctgatcatctccatcttcctggaatggaaccatccagtgtgaaactctaatctgcccaaatcctgactgccc

SEQ ID NO: 243158 - DNA, 100 bp, Homo sapiens
gtgcaatcctggagccccccagtgaggtgtgtgctgtatttgtgggccttgaaaattctctaccccaaaacactgtttttacttcgtggaaatcatgaat

SEQ ID NO: 243159 - DNA, 51 bp, Homo sapiens
ccctgggcccaagacaagagctgctgctggcccctggccccaacatggccc

SEQ ID NO: 243160 - DNA, 80 bp, Homo sapiens
ggacggcaggactgtggccgtgggggacatcgtctggggttttaaaatcaaagatgggaaaatcggagaaaattgccctt

SEQ ID NO: 243161 - DNA, 82 bp, Homo sapiens
tgatcgaatgacatttcccgaggaactagatatgagtacttttattgatgttgaagatgagttcgtaatggacctgaaagtg

SEQ ID NO: 243162 - DNA, 75 bp, Homo sapiens
attaggccacaatcttcaatgagtaaacatattcctgcgcattggagtgactgtctggcatcaccaagatgacac

SEQ ID NO: 243163 - DNA, 90 bp, Homo sapiens
atgaatgctgtaggctgctgtggtttacagcttcttccagaccagctggtcttgcttctggagcatctcttggagcagaagactctgagc

SEQ ID NO: 243164 - DNA, 82 bp, Homo sapiens
agtttgtacccctcaaaacaccccatcaccgtggagatcaatggaatcaacccaggttcccaagtggggcccaggctcggac

SEQ ID NO: 243165 - DNA, 104 bp, Homo sapiens
atgaagatggacgaggtcctgtacagcatcgccgagaagggcatctttcacttccagctgggccggggtgagcccatgctgcacacgcgcctgcgtccacactg

SEQ ID NO: 243166 - DNA, 50 bp, Homo sapiens
gagttcacgactctgagtgctgagatggtggccacacagcaggagatgat

SEQ ID NO: 243167 - DNA, 90 bp, Homo sapiens
tttgaagatgtgcagatgctgagaaagacagtgaaggacgaggctcatcagggctcccaatattacaagtctgttcttgacaaggaagtt

SEQ ID NO: 243168 - DNA, 75 bp, Homo sapiens
ttgaaaacaagtggaatagtgctgtcttccttggaccttaaagaagccaacttcgacatcaatcagctatatgac

SEQ ID NO: 243169 - DNA, 75 bp, Homo sapiens
cctcaggagagttgctggcacaccctgtggagatttattgctaaacatgggtgcatttttggataaacccaaaac

SEQ ID NO: 243170 - DNA, 87 bp, Homo sapiens
gagaagaaatagatgcaatggatgttcagcagctttcacaaatagtaccaaagatggcagtcttgggcacgtccatctgtaaacctg

SEQ ID NO: 243171 - DNA, 83 bp, Homo sapiens
aggacaaagagcccctcatcgagctcttcgtcaaggtgcggctctatgagtggacaacagagaaggagctgcgcactgagtgc

SEQ ID NO: 243172 - DNA, 95 bp, Homo sapiens
caaggttccccacatctacttggaaatctttgggatgctcaatggttgtttacattcagagctctatcaataagaggaatacatattacagtgaa

SEQ ID NO: 243173 - DNA, 100 bp, Homo sapiens
cgaacccctggacgggagagtctgccggcggagaatataagcttgatgtgtttgatgctgctgagcggtaccagcaggcaggccttcccctgatcgttct

SEQ ID NO: 243174 - DNA, 50 bp, Homo sapiens
ggactgcagcctatggccactttggtgtgatgttagctgttgatgctgta

SEQ ID NO: 243175 - DNA, 50 bp, Homo sapiens
ctacctgttcagcatcagtgaggttggtggttctgtcagatgaaagcaaa

SEQ ID NO: 243176 - DNA, 83 bp, Homo sapiens
gagaacctcagtgcagatggagaaggcgggcgctaatattgacacctgctcagaagaccagaggaccccgttgatggaagcag

SEQ ID NO: 243177 - DNA, 100 bp, Homo sapiens
gttgcatccactttttggctgttctgaagagtgttactgtgaacattcatgcacaaatttttatgtggaggtcaatgagtggtcattgaagataagaaag

SEQ ID NO: 243178 - DNA, 89 bp, Homo sapiens
tagcttcgcagtctggaaagctttaggagttcacagtgctccacttaacactcctgtaacagaagacagatttggaattttaacagaga

SEQ ID NO: 243179 - DNA, 99 bp, Homo sapiens
gaacaaagctgaggtccagatgaaagagaagtttctggtcactccccaggattatgcgcggtggatggaagcatgcctaggggaagatctgcctcccac

SEQ ID NO: 243180 - DNA, 124 bp, Homo sapiens
cgaggcggaagaccgcgcgcagggcctgcagcgggagctggacggcgagcgcgagcggcgcgagaaaccatgccagtgacggtaacccgcaccaccatcacaaccaccacgacgtcatcttcgg

SEQ ID NO: 243181 - DNA, 75 bp, Homo sapiens
ttcctccagagattgtggagcagatggtggccacagatgtctttaattccaaaaacctggccgttcaggcacaaa

SEQ ID NO: 243182 - DNA, 82 bp, Homo sapiens
aggattccaagtaactcttatttgggggatatgagactttctactcggaatatcctgagtgttgcgtggatgtaaaacccat

SEQ ID NO: 243183 - DNA, 100 bp, Homo sapiens
gtcgccatcttggatccgcgggacaagaaaattcatgcggacagaactgtaccgctctctttttggccagctccaccctcccgacgaaggccacggggat

SEQ ID NO: 243184 - DNA, 51 bp, Homo sapiens
ccgcctgcgcctgcgggagccgttcttctgtgtggcagttcagaatgatgg

SEQ ID NO: 243185 - DNA, 98 bp, Homo sapiens
gaagtttcaacccagctggcccgtgctttcactatggactgtattactttggaaggccttttcagatattaatggcaaagttcagaccattgttttga

SEQ ID NO: 243186 - DNA, 50 bp, Homo sapiens
ctcctatgtcttccatccagacaatgctgcatgaagaccccgtttggaaa

SEQ ID NO: 243187 - DNA, 100 bp, Homo sapiens
ggcagggagcctggtggggtggcggagggggagactgtgccgtggagggcctcgccatgtcctgctgcccggagggtcacgcagcacaatgccagctctg

SEQ ID NO: 243188 - DNA, 90 bp, Homo sapiens
agacaggtggcgacggcagaggagtatggaacgccgtggactccgggcactgcctgcagacctactccctgcacacagaggcagtgcggg

SEQ ID NO: 243189 - DNA, 74 bp, Homo sapiens
atgaagaagaggaagaaagtgaaaatgattgggaagaggttgaagtacctggctttcctccgcaagcggatgaa

SEQ ID NO: 243190 - DNA, 75 bp, Homo sapiens
ggcggcgcatgacgcgactgggactaggccggaggcagcgggggaccggcagtgccctggttcccaagaaccatt

SEQ ID NO: 243191 - DNA, 78 bp, Homo sapiens
ggaggcggcgggcggaggcggcggaaatgaaaattggacatttgacatttgaacctctctcctgtgtttggaaaactc

SEQ ID NO: 243192 - DNA, 84 bp, Homo sapiens
gagtaaagtcagcatgagcaaaaactccaaactcctctccaccagcgccaagaggctactgcagcactggggtgtcagttgttg

SEQ ID NO: 243193 - DNA, 100 bp, Homo sapiens
ccttccctgtcccatcgcaaacccaaagatccccgttcctggagattctgattgagatcaggatcctcatgaccagccaaagagaagaagaattaggaag

SEQ ID NO: 243194 - DNA, 80 bp, Homo sapiens
agatgccgcagcccgagtcccagaaggcggcgatcctgggctgcgggcaaggcggccccttcccagctgcctgcctgccc

SEQ ID NO: 243195 - DNA, 100 bp, Homo sapiens
tcattctgcaagcaggcaacctgaatacagatattgatgatgctcaaatacttccccgctcaactagagtcagacatttttcacaaagtgaagaaactgg

SEQ ID NO: 243196 - DNA, 98 bp, Homo sapiens
cggatgagtacgataccgaagcgggctgtgtgccccttctccacccagaggacgtggtgggtcctctggtgcgaaattccggatttccttgggtcttc

SEQ ID NO: 243197 - DNA, 100 bp, Homo sapiens
gctcgagtctcaagtggacaatgatgcttctgatgatctagatgacttgaacttctttaatcaaaagaaaaagaagaaaaaaactaaaaagatatttgat

SEQ ID NO: 243198 - DNA, 83 bp, Homo sapiens
aggacgccagcatcatacaccggctgttcgaggccttgactgtaggtcaacaacggttccagcctcagggatgagtgcatcac

SEQ ID NO: 243199 - DNA, 100 bp, Homo sapiens
ggaaggactcctgaaccagctcgtcctggagcacctgcagctggcgcctctgcagtgggggctcaaaatttgggcggggaactggactcactcagccttc

SEQ ID NO: 243200 - DNA, 83 bp, Homo sapiens
tctctggacaagatgaccacactccaggaatgccagtgcatcttttgcacagctgatattggtgctggaaaaggcaaatacta

SEQ ID NO: 243201 - DNA, 97 bp, Homo sapiens
gctgctgctgctgcccgcgtccgaggctcgcgggcggcgggcccgggttgtccttctattcaggccactcttcgttttccatgtactgcatgctgtt

SEQ ID NO: 243202 - DNA, 101 bp, Homo sapiens
agaagatcctcataaagccaagtaattattgaacatctacttgctgcctactttcaacatctgcatgtgtgtgtgaatattaaatatcacaccaagacatt

SEQ ID NO: 243203 - DNA, 85 bp, Homo sapiens
aacggccaacttcggcaagatccagatcgggatttacgtggagatcaagcgcagcgatggaatacaggagtttccagaaaatata

SEQ ID NO: 243204 - DNA, 82 bp, Homo sapiens
gtgtgcgtgacgtcagttggcacccctttgaagagaagattgtcagcagttcgtttgcagagcagtctctgatgaagaatgc

SEQ ID NO: 243205 - DNA, 100 bp, Homo sapiens
caacttttttcgaaagctgggtttcccgggagatcccaggcggtgacagagtggagccatggctagaggttaatttggagtggcccctggagtcagtttc

SEQ ID NO: 243206 - DNA, 98 bp, Homo sapiens
tgattttgtcgtgtgggacctgttctggctgctccagccccaggaaggacccaggacacccggaagccggaaatgagtgcgcccccacccctgtgtcc

SEQ ID NO: 243207 - DNA, 79 bp, Homo sapiens
tgaagtgaaatgacatcaagagacctatcaagacctgtatccaggaaaaggaagtgacctcacaatgactcaagctacc

SEQ ID NO: 243208 - DNA, 75 bp, Homo sapiens
gcctgcaggacggcgcggcagagtccccgtacgcctacagtaacgatggcccactgcgtgaccttggttcagctg

SEQ ID NO: 243209 - DNA, 90 bp, Homo sapiens
tgaagctgcttaccatttaatcattgagctctatgataggctaggtcttgactccactaacggggacttctcatacggctttgaacttgg

SEQ ID NO: 243210 - DNA, 75 bp, Homo sapiens
gataaaatctttcgccgggattctgacctgacttgtttgcagaaaactgctcactagaagctcagcccaaatatg

SEQ ID NO: 243211 - DNA, 97 bp, Homo sapiens
ccagaactcggttggggagatcacagtccatgccaagcttactgtcctccgagggagttcatttatgggacttgcaagacagagttttagtaagaaa

SEQ ID NO: 243212 - DNA, 75 bp, Homo sapiens
caccattgtggcccagtacagacctgaaggctttggggtggcctgccaccttggcgtccttacagacctgccgtg

SEQ ID NO: 243213 - DNA, 100 bp, Homo sapiens
accgccgcctgaatgtacctcgctcccgggagccggacggcccagtagggcgcactggaggacgctccgctgcgggaggatagctagcggccaggagaaa

SEQ ID NO: 243214 - DNA, 83 bp, Homo sapiens
accattcttccatggacaggacaactatgaccagcccctgcctgacttctcacgagtccctggtctgacattgcccagtggag

SEQ ID NO: 243215 - DNA, 51 bp, Homo sapiens
gttttctgctcaaggaatggggcacagaaaactgaatctgtagataacgag

SEQ ID NO: 243216 - DNA, 90 bp, Homo sapiens
gaacaaagtaattttctgaagggaagctgcagaatatggaaaacatatattggagctacatggatgatgttgagaaagagaaggaaaccc

SEQ ID NO: 243217 - DNA, 49 bp, Homo sapiens
caaccttcgatctcctgacgagaggcgatcgagatcggatgacagcaaa

SEQ ID NO: 243218 - DNA, 82 bp, Homo sapiens
gtggttgacaagaaagaggagacgcagccgcccgtggcgcttaagaaagaagaatccacattcatctcaatggaaggatcct

SEQ ID NO: 243219 - DNA, 75 bp, Homo sapiens
gacgcggagcccggagctggggcgacgaggcgattgcgggggcctgggctagctccttcgagaactcatagaacg

SEQ ID NO: 243220 - DNA, 75 bp, Homo sapiens
gctgacaagggtccagcctccgatctcaatctgaaattgaagtgtctgtctctgcaaggaatatcagaaggctac

SEQ ID NO: 243221 - DNA, 100 bp, Homo sapiens
ccagaaccaaatgacccagaagagccccaggaggtgtccagcacaccttcagacaagaaaggactacgcccaagcaaggtttgatgcctatttccaccag

SEQ ID NO: 243222 - DNA, 50 bp, Homo sapiens
agggccctcatggcgtgcggccgttctccaaggagaagtacatcctggac

SEQ ID NO: 243223 - DNA, 82 bp, Homo sapiens
ggggccttccacaccccctccgtgggtgtgtgcttcgagagctgtgcccaggagtgaacaaccagccctacctctgtgagag

SEQ ID NO: 243224 - DNA, 113 bp, Homo sapiens
tttgcagccaaatttattgtaccttatgatgtgtgggccagcaactacgtagatcctggtccgacccccagtggcactaacgtgggatcctcagggcgctctcccagcaaagc

SEQ ID NO: 243225 - DNA, 90 bp, Homo sapiens
cggaggagtctcagagctgtcagaaagcttcctgcctgacacagctcacttcaagaagtgcacaatgtcagaacgtggaattaagtgggc

SEQ ID NO: 243226 - DNA, 90 bp, Homo sapiens
cggggcaggggcggaggcggaggcagaggtggaggcgctttgaaaggggagagaccattctaacacaggtaccgtccagacagtgcctct

SEQ ID NO: 243227 - DNA, 59 bp, Homo sapiens
ccagaggtaacaactaatattttgcggaccatagcaaaatatgctcccaagtttgatgg

SEQ ID NO: 243228 - DNA, 71 bp, Homo sapiens
tcgagatggcctatgcgcggcaagacctgaaggagaagaaggagaaggtggaggagaaggcaagccggaaa

SEQ ID NO: 243229 - DNA, 83 bp, Homo sapiens
tacccgcaacagccccttcgtcccaaacaatgcagatcttcgtgaagactctgactggtaagaccatcaccctcgaggttgag

SEQ ID NO: 243230 - DNA, 97 bp, Homo sapiens
agatgcaaaaccagcgtggcggccgcgctctcttccaggacatcaaggtctctgagcggcccctgatgttcctgttggacactcctggcgtgctggc

SEQ ID NO: 243231 - DNA, 75 bp, Homo sapiens
ggtgaagagtaggcggcggggcagagagcggcctccgagggatgatgactttgagttcactggcagccacctgac

SEQ ID NO: 243232 - DNA, 75 bp, Homo sapiens
tggcccctgtgctcagtaaggactcggcggacatcgagaaaacctcggatcaattctcagctggtggcacaacaa

SEQ ID NO: 243233 - DNA, 73 bp, Homo sapiens
tatacttgaattttctaaggtgtcattagcttgacaaaagtaagctgaagccaggaacaagagttgctttgga

SEQ ID NO: 243234 - DNA, 100 bp, Homo sapiens
cacacgtcggctgctgggaagatctggattctcgtttcaggctaacaatgctaagagaggcctctgatgaaattgtggctgaaaaagaggctgaagttaa

SEQ ID NO: 243235 - DNA, 98 bp, Homo sapiens
gctgatcaagaatggcaagaaaatcacagcctttgtacccaatgacggttgcttgaactttattgaggacctgaaggagaagaaggagaaggtggagg

SEQ ID NO: 243236 - DNA, 98 bp, Homo sapiens
gtcatcattgatgtgaagccgaaggacctagggctgcctacagaagcgtacatttcagtggaagaagtccatgatctgtgggatgctgccagtggctc

SEQ ID NO: 243237 - DNA, 98 bp, Homo sapiens
ctcctggtcagcacttaccggctgccccagatcgcgcgcctggacaacggttcattttgatggttgggaccataagtatgactactgggtggaggcag

SEQ ID NO: 243238 - DNA, 100 bp, Homo sapiens
acagtctctgcacctcgcgccccagcagatggagatcttataacaatttttgatagttctgacctttcctttgcaattcagtgcagtaggatactgaaac

SEQ ID NO: 243239 - DNA, 51 bp, Homo sapiens
cgcagtggtcgcttcttctccttgtcttgaatccagataatagttttgaaa

SEQ ID NO: 243240 - DNA, 97 bp, Homo sapiens
gcctcagcctccggagtagctgggattacagtgtactcaaagtgaagaccgtaagaatgaagatcttcatgattatccacgtccacttaatgaatgg

SEQ ID NO: 243241 - DNA, 74 bp, Homo sapiens
cccagggcagcggagcacgcgggctgctcatcgtcagcagggagaggctggtctgggaggggctgaacgtggtg

SEQ ID NO: 243242 - DNA, 101 bp, Homo sapiens
cccaccaggaccagtacagcttcagcactgacacggtggagtgccgcttctacagatatcatggaaatcaggacagtggcagttggaattgtggcaatcaa

SEQ ID NO: 243243 - DNA, 100 bp, Homo sapiens
ttttgcttttaaaatggcaagtggagcagccaacgtggtgggacccaaaatctgcctggaagataatgtgtagtgaaatcaaagttatccaaagaatata

SEQ ID NO: 243244 - DNA, 98 bp, Homo sapiens
ataatgtagatggcctccttgttcagttgcctcttccaggagagaagatgactgaggaggaggtggagaccgttctggcaggacacgaggacagcaac

SEQ ID NO: 243245 - DNA, 89 bp, Homo sapiens
tcaaggagacagatgctggaagatgcagaaactgaggcccagcagagattgagtaacttatgcgagttgtcactcacctcacacgcccc

SEQ ID NO: 243246 - DNA, 75 bp, Homo sapiens
gttagtaaactctctgctgaaaaaggtactccaaagattcaggtttactcacgtcatccagcagagaatggaaag

SEQ ID NO: 243247 - DNA, 114 bp, Homo sapiens
ccggagggcgtcaagcagcatgtgaaggagaccaagatgtgcactcccagcaacacccctgccacgccgcccaacttccccgatgcgctggccatgttctccaagctccgcgcc

SEQ ID NO: 243248 - DNA, 87 bp, Homo sapiens
agcaacctctgggttcagcttttgccaagcttcagcattgcagtgtcgagatggctatgaaccctgtgtaaatgaaggaatgtgtgt

SEQ ID NO: 243249 - DNA, 101 bp, Homo sapiens
cccagctcatgaattcgagcggctctcataaagatctggctggcaagtactaggttttgacaagcttgcatcatgcgtgagtataagctagtcgttcttgg

SEQ ID NO: 243250 - DNA, 101 bp, Homo sapiens
agcagatgaaatacatgaaggagacctagtggaagtggttctttcagggaagcttcctgcaggatccgcctgttccgatgtacacatggcgttgtgtgccg

SEQ ID NO: 243251 - DNA, 95 bp, Homo sapiens
ggccgcccggagtccggccagggccggcgcggcgatgatgaacaggttccgaaagtggctctacaaacccaagactgcctgctgatgctggtcta

SEQ ID NO: 243252 - DNA, 99 bp, Homo sapiens
gcctcctggaaccacagagtcggttcagtctgtggattactactgtgatagttcgacgaggtgctttataaatcatctcaggactttcaacccaggcat

SEQ ID NO: 243253 - DNA, 101 bp, Homo sapiens
gcgacctccaaaggcaccagaagacttttctcaaaactggaaggcgctgcaagaggtgctgtaccctgtgtgccatgtgcgtaacctgatgctgtggagtg

SEQ ID NO: 243254 - DNA, 82 bp, Homo sapiens
actctgggcgaaaattggatgtgaaaatgaagccagaccgagaataccctctaccatctgctttggtcagggtgccgctcga

SEQ ID NO: 243255 - DNA, 96 bp, Homo sapiens
ctgtcgccgctgctgggagatgggcctactcgcccgccaccctgcgctgccgccgctctgaggagttaaaggcctctctgctgatggtggtgccaa

SEQ ID NO: 243256 - DNA, 50 bp, Homo sapiens
catgagacagtagtcaaatactcaggcctggagctgctgaagactgctat

SEQ ID NO: 243257 - DNA, 100 bp, Homo sapiens
ctttacgatgaacatgttagacattggtggaggattcacgggaactgaatttcaattggaagaggattttcttactggagtgcaatgtgagagaagtacg

SEQ ID NO: 243258 - DNA, 76 bp, Homo sapiens
aaggaaaaaaagcagagaggagcggggagcaatgcaggtcaaaatgcagatcttcgtgaaaacccttaccggcaag

SEQ ID NO: 243259 - DNA, 142 bp, Homo sapiens
tatgccctgtactaccattttgaggatctggactccgtttcctgccttgctctttggaccacattgtcaattcacaccgattgtctctggtcagaatgtgtgccccagtaatagcatgggaagcccgtgcattgaagtcgac

SEQ ID NO: 243260 - DNA, 50 bp, Homo sapiens
gaagtttctaggaaaggccggacaccagtaattcgccaaaatgacgaaca

SEQ ID NO: 243261 - DNA, 75 bp, Homo sapiens
ccggagcacccgacccctgagtgagccctattcccagaggcaggtggtgctgaccctgtaacccaaaggaggaaa

SEQ ID NO: 243262 - DNA, 100 bp, Homo sapiens
ggtttggcttctgaagatacaaagaaagaggtcaagcagtctcagggtgttttgaatgctgtatcaaatgcctggggggcattccctatgcctctctgat

SEQ ID NO: 243263 - DNA, 50 bp, Homo sapiens
ctcgggggcggcggccacgccaaggacggatctttccagttggaagactc

SEQ ID NO: 243264 - DNA, 100 bp, Homo sapiens
gagacccaaggaacagtgccaagttagatgccgattacccacttcgagtcctttattgtggagaaactcattttaaccagcagtgccagtgtcatctttg

SEQ ID NO: 243265 - DNA, 101 bp, Homo sapiens
aaaaagaaaaagacgcaggaagaagtcatggccctcaagcgggaaaaagaccgactagtacatcaattaaagcagcagtctgggattatatcaatggagtg

SEQ ID NO: 243266 - DNA, 83 bp, Homo sapiens
aggcgctgatcaccaagcagaatgtccagcgggtcctggaggctgctaacctcttccagtatgccaccacgggctgttccctg

SEQ ID NO: 243267 - DNA, 100 bp, Homo sapiens
cagaaggactagacccagatcttcttgattctttattggtgaaaacatgaatccagatggcatggttgctctattggactaccgtgaggatggtgtgacc

SEQ ID NO: 243268 - DNA, 100 bp, Homo sapiens
ccatgctgtcccagatgaacgtcacagcccccaccagtccaccagtgcagcagaatatgatgaactcggcttcagcaatggtgaactagacccctggtca

SEQ ID NO: 243269 - DNA, 100 bp, Homo sapiens
gaataacgagggagaggagaaagggtgaatcaccaggattttcaactgagaaatttaagaataattgaacctaacgaggtgacacactcaggagacacag

SEQ ID NO: 243270 - DNA, 75 bp, Homo sapiens
tccgagcgcaaggacagcgcgaggtccgcgcagcccagcgcagccatgttttgggatttgagattgacgcggtga

SEQ ID NO: 243271 - DNA, 100 bp, Homo sapiens
gggccgagaccattccgtatggagagccggtgatggaatggggagaagatattaaagcagtttcaaaagatgaagcagtgatgttggtgaatcatcaggc

SEQ ID NO: 243272 - DNA, 75 bp, Homo sapiens
ctgggcagctgcgcggagaactggggtttactcctggcttgggggcattaggaagcactggaggctcttcgggaa

SEQ ID NO: 243273 - DNA, 100 bp, Homo sapiens
cctccagaggacataccacctccaggatcaggatgcagaggattcactccttctccagttgcacagccacacccttcagctggccttaatgttgactttg

SEQ ID NO: 243274 - DNA, 73 bp, Homo sapiens
cggcggcccagctctctctgacacagtgtttaactgctgaagagatcttttcccttcatggcttttcaaatgc

SEQ ID NO: 243275 - DNA, 95 bp, Homo sapiens
gtgaaaaaattcaaagtcgaatatcatgctggtggctctacccagaattcaattaaagtggctcaggtgtgctcagtgaaggaacggcatgccag

SEQ ID NO: 243276 - DNA, 75 bp, Homo sapiens
gggccagcgacccgctgctcagcgtcctcatgtggggggtaaaccactcgaatctgcaaaatggctgataatttg

SEQ ID NO: 243277 - DNA, 97 bp, Homo sapiens
ctttccgggagactggagtcgaaggccgtgagacgagatgatgcctattggccagaaggaaagcgtgtggcaatggaggaccgatatcgtgcagact

SEQ ID NO: 243278 - DNA, 99 bp, Homo sapiens
ctggggaacctgctcaaagccctgggtcgcttggaagaagccaaggttctaaattagttccattctggagctggctacaaatgggtaaagacctacttt

SEQ ID NO: 243279 - DNA, 83 bp, Homo sapiens
gaaaagactgggcttgtccttgctggtgcatgcgtcgtcggcctctgggcagcagtaccatggggcgcaagttggaccctacg

SEQ ID NO: 243280 - DNA, 93 bp, Homo sapiens
cttcggcagtccacccaccgccgccgcctcccaggtggaagttaaacgagctgagcctcgggacagcaagagccaagcgccgggacagccagg

SEQ ID NO: 243281 - DNA, 82 bp, Homo sapiens
gaacctccctcctctgtcagtcatggagcaaaaggatctatcttgggatcccatggctttctttactgggctctggggcccc

SEQ ID NO: 243282 - DNA, 75 bp, Homo sapiens
ccgggaggtgtggaagagccgggtgttgactttaaggtgaaaacaatttcagtggatggaaataaggctaaactt

SEQ ID NO: 243283 - DNA, 100 bp, Homo sapiens
gaggaagaggacgaggacgacgaggaggaggaggaggaggaaaaagggaccagttactctccacaagaaaattcacacaaccacagtgctcttcatagtt

SEQ ID NO: 243284 - DNA, 101 bp, Homo sapiens
aagatccttcaggtgctggaaaggaatgaggagttacagagggccgagaaggacaggatcaggttattaatgctgcactggctttagcagcaaaaccacag

SEQ ID NO: 243285 - DNA, 51 bp, Homo sapiens
catggggatgaacatgatttcaaagagacggggtttcaccttgttagccag

SEQ ID NO: 243286 - DNA, 98 bp, Homo sapiens
gatgtccccctggatcttcacacagctgcttccattggccagtatgaagtggtgaaggagtgtgtgcagcgcatctgtgagcgggtcacccccaggct

SEQ ID NO: 243287 - DNA, 100 bp, Homo sapiens
gattcaggagtacctggagaaagctttaaacaagtgcatggctgcctcctaatcccatagtccagaggaggcatccctaggactgcgggcaagggagccg

SEQ ID NO: 243288 - DNA, 75 bp, Homo sapiens
ggaatgtttacctactatcaagattcaaatctcttgtggttttcagacacggtggtgaagcagtattttccaatt

SEQ ID NO: 243289 - DNA, 100 bp, Homo sapiens
actgagcggccgcggccatggcgtacgcctatctcttcaagtacatcataatcggcgacacagttttcagataactattatcgtgcagaaatgattgatg

SEQ ID NO: 243290 - DNA, 90 bp, Homo sapiens
tccgactctacgcagtggtcaccaaggagcccatctacattgtcaccgagtacatggccagaggtaccgagcccctgaactgctgttggg

SEQ ID NO: 243291 - DNA, 50 bp, Homo sapiens
ctgatgtcgtgcccatgacagcaggagcaagatcttgtgcaaaccctgag

SEQ ID NO: 243292 - DNA, 50 bp, Homo sapiens
ttccagaccatcatcagcgacatgaagacaatgcagatcttcgtgaagac

SEQ ID NO: 243293 - DNA, 100 bp, Homo sapiens
tggggtgaccaacaccattgactaccacaaaaccttggcctgtgcaagttcattcgcaaacgtcctagaagtggaactgctgggtcaaagtgcattcccc

SEQ ID NO: 243294 - DNA, 75 bp, Homo sapiens
ccgggacatggccaaggcgggccgtgcaggtaattcagtaccaaactgttcgatatgatatcctccccttatctc

SEQ ID NO: 243295 - DNA, 73 bp, Homo sapiens
tgaaaccctctacaaaggcattagtcctatcttgtaagttttttgctccactcaagcctgttagaatcaccat

SEQ ID NO: 243296 - DNA, 76 bp, Homo sapiens
caacaagcggctggagcaccagggcatcaagatcgagttcatcgggcagatcggctgaccccgcactacatctacc

SEQ ID NO: 243297 - DNA, 95 bp, Homo sapiens
ccatgggggaggccagtgtgggttggatggcaagcatgtggtgtttggcaaagtgaaagaaggcatgaatattgtggaggccatggagcgctttg

SEQ ID NO: 243298 - DNA, 87 bp, Homo sapiens
cctgcagcgggagctggacggcgagcgcgagcggcgcgagaaagagggctccccgaggactttctgaactccctggagaagatggag

SEQ ID NO: 243299 - DNA, 90 bp, Homo sapiens
cagccggcgtataccaacccaccccacatggcccacgtacctcagatcttagcaaagcaatgtctcaagatggtgcttctcagttccaag

SEQ ID NO: 243300 - DNA, 98 bp, Homo sapiens
gtggaatcaggccggctggtgagggtacaggtatttgtaggcaaaataccaagggatttatatgaggatgagttggtgcccctttttgagaaggccgg

SEQ ID NO: 243301 - DNA, 116 bp, Homo sapiens
ccgctccagtcgtgggctcttctggaggggtgtatgctctcgtctctgcccatctggccaacattgtcatgaacacagttatgggtcgcaagaagaagaagcagctgaagccgtgg

SEQ ID NO: 243302 - DNA, 75 bp, Homo sapiens
tttacacggttttccaacatccagctacgactggtacaaggattaacacagattcctcagatccagaagactgaa

SEQ ID NO: 243303 - DNA, 98 bp, Homo sapiens
gaacttcagcaaaggcttggagaagtccagggcgacaacaaggtgaagctctgaaagtatcagctgagagatttacagatgacccctgttttctccca

SEQ ID NO: 243304 - DNA, 100 bp, Homo sapiens
cagcatagacatggtctccgaagtgaatatggtaaaataccatgaagattttgaaaaaacaaaggggagaggctttactcccgtcgtggacgatcctgtg

SEQ ID NO: 243305 - DNA, 76 bp, Homo sapiens
catgaactcagaagtaattgtggaccctatacaggcagaggtggaggagacactgaagcgactgcagagccagaag

SEQ ID NO: 243306 - DNA, 80 bp, Homo sapiens
aggctgtgcggtctgccaggagctgcggccccgtccggcccgggctggaaaatgtttataggaggccttagctgggacac

SEQ ID NO: 243307 - DNA, 98 bp, Homo sapiens
ttattcaaataaaggagaaacttcttgccaccagtgtgaccctgacaaatactcagtcttaggaaaagtcctcagtgctgtgggcagtgcccagctac

SEQ ID NO: 243308 - DNA, 50 bp, Homo sapiens
gagcgcctggctcttctccacaaagacacctgtttgcagacaaggtccca

SEQ ID NO: 243309 - DNA, 98 bp, Homo sapiens
agcaaggatgggaccagcgacgtgcctgccgagatctgcgtggtgatcggcggcgtccgcaaccagcagacccttgggctgagccggatcttgaagac

SEQ ID NO: 243310 - DNA, 99 bp, Homo sapiens
agcaccggtctgggaaactgctggcctggcctaacacctggcgctgtggtgcaggcaagaaaaggagaaggcccagttggcagcagaagctctaaagca

SEQ ID NO: 243311 - DNA, 75 bp, Homo sapiens
gtacttgaagccctacgccgtggacttccagcgcaggctcacctccacctccagtaaaagtttcttctgaacctc

SEQ ID NO: 243312 - DNA, 90 bp, Homo sapiens
atgatgaagaaggtgaagaagcggatgaggtagaggaaatgaaggagtcaaagcttccaggtgataaaggacttgtgttgatgtctcggg

SEQ ID NO: 243313 - DNA, 90 bp, Homo sapiens
gcccattcatccatctcacatagccatgcaactcacagtcggcgcttgttggcaaggtggtaacaccagatggacatgggaagaaccgag

SEQ ID NO: 243314 - DNA, 90 bp, Homo sapiens
ttttgttggaggaagaaccaacaaccagtcatggtcagctactgatctacttcttgcctggaatcccatttgtttggggttggtagaagg

SEQ ID NO: 243315 - DNA, 98 bp, Homo sapiens
gagctacgacagttgcgtcaaaaatatcaagacgacaacatcatgaggtctctccagctgtttcaaaatgtcatgtaactggtgacactcagccattc

SEQ ID NO: 243316 - DNA, 75 bp, Homo sapiens
cagaatgtttgattacacagatgatcccgagaaaatcttttcaagccatacaccaattcaatttggaaggatgga

SEQ ID NO: 243317 - DNA, 98 bp, Homo sapiens
ttgtgggcactggggacctgtttgctgccatgctcctggcgtggacacacaagcaccccaataacctcaagtggggcccagccagggcagaggaggag

SEQ ID NO: 243318 - DNA, 100 bp, Homo sapiens
tgagagcccatttatgttttccttacatctcaatgaagcaagggactatgaagagaagcatgccatagggacattgtgaatttgcaagtggagatgatta

SEQ ID NO: 243319 - DNA, 82 bp, Homo sapiens
agcgcgtatggagtggaaacgcttgtagggtttcaccagatcaggatcctcatgaccagccaaagagaagaagaattaggaa

SEQ ID NO: 243320 - DNA, 75 bp, Homo sapiens
gacgcggggcccatggccaggaccaccagccagctgcaggatacagacgtccctcaccagtgccagcttggggtc

SEQ ID NO: 243321 - DNA, 75 bp, Homo sapiens
gaggcctccccagccatgctgaactataaagctgtacaccaagcatgggactttgaaataccagacagactgtgc

SEQ ID NO: 243322 - DNA, 78 bp, Homo sapiens
tcgctggagcgggcggagctgtgcgagagcctcctcacttggaatctggcaatgggggcaggagctgttggagctttg

SEQ ID NO: 243323 - DNA, 100 bp, Homo sapiens
actgtcagctagcaagaagaaacgaattagtaaacagtgcaagttgatgcgtcttccatttgcaagttgtggacatcggatacccaaggagacgaagctg

SEQ ID NO: 243324 - DNA, 101 bp, Homo sapiens
aaggcgatcctaatcttcaacaaccacgggaagccgcggctctccaagttctaccagccctacgcttatgcatctggatgtgacattgtaatactgggaag

SEQ ID NO: 243325 - DNA, 82 bp, Homo sapiens
cgccgaggcaccgaggcactcagaggaggctgaaggggatgctaagggagataaagcaaaggtgaaggacgaagtaagtcat

SEQ ID NO: 243326 - DNA, 74 bp, Homo sapiens
ggagaagtggcctaaaacttcggcgttgggttggtcttggacaactgcacctgcacggagggcgtggagtagaa

SEQ ID NO: 243327 - DNA, 90 bp, Homo sapiens
tcagaggaggaattacaacttcattttacttatgaagaaaaatctcctggcaattacagttgggggccgtcccgctcctaaggcaggaag

SEQ ID NO: 243328 - DNA, 98 bp, Homo sapiens
tgctgggagccatctgtgccatcatcgtggtagttattgtaaccccctgatgctgaacgacagtggctcagcacattccatgcccaagtatagccggc

SEQ ID NO: 243329 - DNA, 100 bp, Homo sapiens
ggaaaactcagtgaaaattcatctgaaattaaaaagggaaggataaccccatcacaggaggccagcaagcgcatctccagccacatccctttgatcatcc

SEQ ID NO: 243330 - DNA, 100 bp, Homo sapiens
atgggggccgtcatgggcaccttctcatctctgcaaaccaaacaaaggcgaccctcgaaagacatgcgtcgggatgtccaggaaatttttcgcatgaccc

SEQ ID NO: 243331 - DNA, 82 bp, Homo sapiens
ctgtgctcgcgctactctctctttctggcctggaggctatccagcaccggagtacactgggaagcatcaaagaaggaatctt

SEQ ID NO: 243332 - DNA, 98 bp, Homo sapiens
caggattggtgcgcctttcaagcgatgcagaccttgttatgttgctgagatgtgcaacaaatggcgattgactggctcactcgaaatctctattttgt

SEQ ID NO: 243333 - DNA, 82 bp, Homo sapiens
aaaaagaaagctgctgttatcatcatggctgtagaggatgaaattgattctgcagtaaagatgttggtgtcattaaaaatga

SEQ ID NO: 243334 - DNA, 100 bp, Homo sapiens
taaggttgcttagactgcggcccacgtggaaggctcttagccaccctgcctggcccgagggcagctgcaatgactctccgcacggtattattgtcattgc

SEQ ID NO: 243335 - DNA, 101 bp, Homo sapiens
agatggaagggaggctgctggagtccctggggcagctttatcggaacctaaataccgccagacaaattggagacaatctgattgttcctggaggagtgaag

SEQ ID NO: 243336 - DNA, 98 bp, Homo sapiens
cagccttgtcaaagatgccagatgtgggagacacgccaaagctcccaaggtgaatatgcaggttttgatgagacgcagccaacagctgaatctggtgg

SEQ ID NO: 243337 - DNA, 100 bp, Homo sapiens
tttccagctcacccactgccagcagaggtcctggctataagtcaccatggcacagcaagctgccgataagtatctctatgtggataaaaacttcatcaac

SEQ ID NO: 243338 - DNA, 83 bp, Homo sapiens
ggggatgtggacgaaggggccgacctcctaggttcgagaacttgtcttggacaattgcaaatcaaatgatggaaaaattgagg

SEQ ID NO: 243339 - DNA, 100 bp, Homo sapiens
attttggcattgacatttaattttagggtcctttatatagaagggagagtagctccgccgcatgcaagagatgattgcaaggatgcaggcgcagatgcag

SEQ ID NO: 243340 - DNA, 82 bp, Homo sapiens
tgtgcaccattaatgtgagtggcctgaagttctccaagggaattgatgttgatgctgaaaattgtgcagtgtgtattgaaaa

SEQ ID NO: 243341 - DNA, 75 bp, Homo sapiens
gggcgcccggcgccaggggagccgccacaggtgacgcattgctggatgccggcgagtccatgaagcgcctggcag

SEQ ID NO: 243342 - DNA, 90 bp, Homo sapiens
gggtaccttcctcccggaccgctgggggtgcagggcgccttgggtgtagcacccagaacactgtccttggagtacacaatttgctcaaca

SEQ ID NO: 243343 - DNA, 75 bp, Homo sapiens
acgtgcccagcgggcagatcatggcagtgaagacatctaggcttgctgtcaaggcttctgatcaacatgagatga

SEQ ID NO: 243344 - DNA, 75 bp, Homo sapiens
aaagcaaaggagaagagacaggacgcgggaccgtgcagccgacagacctcctgccccccgaggtctgcagtctcc

SEQ ID NO: 243345 - DNA, 75 bp, Homo sapiens
caactgcttagcacccctggccaaggtggagcgaatcaaggagcgtgtggaggagaaagagggaatccccccaca

SEQ ID NO: 243346 - DNA, 100 bp, Homo sapiens
cttggagtgtcccccagataggtcattccacattggtgcctcatgggcagcatctcatcacggcagttgctgaccatctatttaagctgaagacaacatc

SEQ ID NO: 243347 - DNA, 98 bp, Homo sapiens
tgtgcttggctggaaaaccccaaaagtgtacataaggcagtgaaatcaactgtgcagaccatcactgttggaggagtgagcacatcacagtttaagac

SEQ ID NO: 243348 - DNA, 83 bp, Homo sapiens
gtctgcgagccaggattcccgggtgaggtggctttgaccccgggttgcccggccagcacgaccgaggaggtggctggacagct

SEQ ID NO: 243349 - DNA, 74 bp, Homo sapiens
cggctgccgcacaatcccgggttgtccgggtcctgtcaatgtcactgaaagtgatgtcaagcagctctggttgc

SEQ ID NO: 243350 - DNA, 82 bp, Homo sapiens
gacaggatcaaccggttcctcccaggcggcaagggaaagcaggcaggatgggagagtcgccgatagaaccacctcttccctg

SEQ ID NO: 243351 - DNA, 98 bp, Homo sapiens
ggggaacggcccgggactcgcacgtggaggtggagcgcggacgcctccctcagccagggcaagactaaggagctggggtccctccaatgtgtttgctg

SEQ ID NO: 243352 - DNA, 74 bp, Homo sapiens
gggtttgtggtctgcagtgtcgtgaggctgagcactgccagtgaaagatgtagaagataaacctgaacaacaaa

SEQ ID NO: 243353 - DNA, 101 bp, Homo sapiens
tcaatgagatcgaagacactttccggaaattgggatggcggttcttgttaagctcccctatgccgcccagcaggaaaccagtcaccgtgtcctcgtctccg

SEQ ID NO: 243354 - DNA, 100 bp, Homo sapiens
ctttgattgagaaacttcatggggaactgcaagacaggaagagaggccgtgcccctcaggacattctgagcatgtgagacctgaggactgcaaacagcta

SEQ ID NO: 243355 - DNA, 76 bp, Homo sapiens
ttcgggcctagcggagccgggactggagaaaagactgtatcttcaccattgacccatcaaccgcccgagacctcga

SEQ ID NO: 243356 - DNA, 96 bp, Homo sapiens
cgttgagtgcggctccgagcgctgcaacatcctggaggtgaaatgtaacgagcagcctaacagagtggaaatctacgagaaaaccgtggaggttct

SEQ ID NO: 243357 - DNA, 89 bp, Homo sapiens
cactcagttgttctgctgctttcagacccccgccagctaaataaagacatgacctatgcgcagttgtactccttcctgaactgcctcca

SEQ ID NO: 243358 - DNA, 100 bp, Homo sapiens
gtagcctgtataccagcacggccaggacttgaaagaggagattgatattcgactctccagggttcaggatatcaagtatgagccccagctccttgcagat

SEQ ID NO: 243359 - DNA, 83 bp, Homo sapiens
cctcgggcctcatcatggccaggaaggctaaccttgccgcgggccgagccctgcctcgccatggaccaggactatgagcggcg

SEQ ID NO: 243360 - DNA, 83 bp, Homo sapiens
gcgctttgacaagtgcctggaagagttctatgcactctgtgaccagctggagctgtgcctgcccagacacatggccccaggcc

SEQ ID NO: 243361 - DNA, 76 bp, Homo sapiens
gtcaacaaccgtggctcacaagatgaaagagcacgtttttagaacttcagccataaaaatgggcagaattttcctt

SEQ ID NO: 243362 - DNA, 99 bp, Homo sapiens
gcaaggatgtgatgccagaggtcaacaaggttctggacaagatgaagtctttctgccaggcctccggtgtggctgtctctgatggtgtcatcaaggtgt

SEQ ID NO: 243363 - DNA, 123 bp, Homo sapiens
ccccggcggaatcgggataccatgatgagtcttctgaagactgtggtcattgtgcttgcaaattcttcttcatgctagagaaaactcaacaaaagttgtatttctcatcactgatggatattc

SEQ ID NO: 243364 - DNA, 100 bp, Homo sapiens
cagcgggtgctggtggagccggacgcgggcgcaggtctcggcgcggaagatggccggcggcgtggacggccccatcgggatcccgttccccgaccacagc

SEQ ID NO: 243365 - DNA, 90 bp, Homo sapiens
caggaatgttctccaagcagcaatccaaaagagtctcaaggatccttcaaataacttcagggagcataaggagaattattttttactccc

SEQ ID NO: 243366 - DNA, 88 bp, Homo sapiens
cagatcttcacagcacagttcctgggaaggtggagccaccagcctctccttgactgattcttgctattccaaatcctcttccacgttg

SEQ ID NO: 243367 - DNA, 100 bp, Homo sapiens
agcgcagcggcgttggcggcggcggcggcggcagcggcagcgcggcggggccgggtacatgtcccagagcaagcacacggaggcccgggagctcatgtac

SEQ ID NO: 243368 - DNA, 98 bp, Homo sapiens
atgccctgcagtacctgcagaaggtctctggagacatcttcagcaggagaaggagaggaacgcgcggaggaagaagaagaaagcgccggcggcggcca

SEQ ID NO: 243369 - DNA, 103 bp, Homo sapiens
cttagctgtgctcgcgctactctctctttctggcctggaggctatccagcgatgggaaggccattgtgactatgtggtgattacagttgtcttactactgagt

SEQ ID NO: 243370 - DNA, 51 bp, Homo sapiens
gtccctccggaactcacactccagatgccagaccagtttgaccaggcggtt

SEQ ID NO: 243371 - DNA, 74 bp, Homo sapiens
aaacattgaaatcactgtaacactttttaagattcagtatgatgttggccggattaagcagaagatgaaagaat

SEQ ID NO: 243372 - DNA, 148 bp, Homo sapiens
ggcgctgcctgtggagatccgcggaggccgacaggattcgttggctgccgtccccgctgctgtgcattggggaactgctcgcagaaagaagaaggtggttcatagaacagccacagcagatgacaaaaaacttcagttctccttaaag

SEQ ID NO: 243373 - DNA, 98 bp, Homo sapiens
cccccagctccatgaatggaaatcggctccgcagaaccttcgagatctgcggtctggggtctggttgaaagatggcggccctcactaccctgtttaag

SEQ ID NO: 243374 - DNA, 101 bp, Homo sapiens
aaagggtggggagcagaataccgtacttcctcgcgtattgctaaaggaggagttgaccacaccaaaatgagtctacatggtgctagtgggggacatgagag

SEQ ID NO: 243375 - DNA, 74 bp, Homo sapiens
acatcaggaagatactgcagagatattctactccatctcattcattgtacaggaggatacgaagcgttttcggc

SEQ ID NO: 243376 - DNA, 100 bp, Homo sapiens
gtcggccgcctcttgagtgctttggacgatcttcagctggccaacagcaccatcattgcatttacctcggatcatggatggagctatgacattgaagaga

SEQ ID NO: 243377 - DNA, 98 bp, Homo sapiens
ggctctaggaaacatatgttacgatagccaatgatatggaacctagcaaagctgttccactgaatgcatctaagcaagatggacctatgccaaaacca

SEQ ID NO: 243378 - DNA, 83 bp, Homo sapiens
gcgccgacctggtcatgagcttcgttaacatgggtgagaagccctaccactgcaactgggacggctgcggctggaagtttgcg

SEQ ID NO: 243379 - DNA, 50 bp, Homo sapiens
agcagccagggttgcaaccccacataaagacttatcaaactggtttcaaa

SEQ ID NO: 243380 - DNA, 75 bp, Homo sapiens
gagaacaaggggaacagaaccaaccaggctttacaggctgaactcacgggaatcaaatggcgtaggtacaatttt

SEQ ID NO: 243381 - DNA, 51 bp, Homo sapiens
ccccttcagtcgcagcctcactctagcttctatagtgtttatggggtggac

SEQ ID NO: 243382 - DNA, 75 bp, Homo sapiens
ggaaacctaggcccgcgagtgcccgggcccagcccggcctagttcaggcattttctctgtatgaagatgaaatca

SEQ ID NO: 243383 - DNA, 90 bp, Homo sapiens
cccgaggagcttgggccgccgcaggtgggagacctacctgatgcagatattaaacctccagaaaatgtactgtttgtgtgtaaattgaac

SEQ ID NO: 243384 - DNA, 100 bp, Homo sapiens
ggcctgagaaagaaggaggagtgggggaggcgaacagtctcgttgctgcctctgtgtacgctgaggggggaggcgatttgacagatctgttgagaaatgg

SEQ ID NO: 243385 - DNA, 100 bp, Homo sapiens
attaaaaagaccactgaggagcaggtgcaggccgccatggcatcagatgaaggcaaactttttgttggagggctgagttttgacaccaatgagcagtcgc

SEQ ID NO: 243386 - DNA, 75 bp, Homo sapiens
actgctgacgcttgatgagaaggacccacggcgtctgttcgaaggacagagcgggatgccaccagcttgtccaaa

SEQ ID NO: 243387 - DNA, 98 bp, Homo sapiens
tcaagcagtcctaccatgtcagccttcccagtagctgggaccacagttaaacttaggaacagttgggttttatcggacccagtacagctctgccatgc

SEQ ID NO: 243388 - DNA, 90 bp, Homo sapiens
ccggaatcgcccgaccgcacacgttgccaccctgaggtttcatgtccttagcaagctactgagtttcatggcacctattgaccatactac

SEQ ID NO: 243389 - DNA, 100 bp, Homo sapiens
aaacccctcggcggcgttcttctgtgtggcccgcctgcaggatgcctccattgcacacagattccacatcatgagagaaaaacacccagagaaattcaac

SEQ ID NO: 243390 - DNA, 89 bp, Homo sapiens
tgaagaagtgaagaaattattggtacctgcaagatatgcagcccctactcagtgccctgccaaatgtgggcatgtttgaccccagcttc

SEQ ID NO: 243391 - DNA, 100 bp, Homo sapiens
gaccaagatgctatgtgagatcttgaaagtgggcgagttgcaggatgttaagcaagtttttggacagaccacaattcatcaacatattccatttaactgg

SEQ ID NO: 243392 - DNA, 99 bp, Homo sapiens
tgagagttcttgggcaagaggggaatctgctgctgcatcggagtcagaaataccatcagaggaggggtactgtgactttaatagtaggccaaatgagaa

SEQ ID NO: 243393 - DNA, 96 bp, Homo sapiens
cctgtccagccggggcaagaagggtctggatggtattattgaatatgatgatttcaaattgaactcctccattgtggaacccaaggagccagcccc

SEQ ID NO: 243394 - DNA, 75 bp, Homo sapiens
cttccgtttgttggtggaggaggtggcaggcctcggcgatgtccagctcgccgctgtccaagaaacgtcgcgtgt

SEQ ID NO: 243395 - DNA, 74 bp, Homo sapiens
actcacgccatgcagctgctgacggcaggattactacagcatcccatttcccacacccactactccgctgactg

SEQ ID NO: 243396 - DNA, 100 bp, Homo sapiens
actagtgatccagccgaagtactcgtcaaaaatagccagccgccgccatgatcctgctggaggtgaacaaccgcatcatcgaggagacgctcgcgctcaa

SEQ ID NO: 243397 - DNA, 50 bp, Homo sapiens
tttgatgctattaacttcgtagacgagaattcaattcgtcataatctgtc

SEQ ID NO: 243398 - DNA, 126 bp, Homo sapiens
ttcgcaacatcaagggagttttccggggccctctcagcaagaacgggaacaaaactctgttttccaagagataacttcaccaagatgtccagtgataggcaaaggtccgatgatgagagccccagc

SEQ ID NO: 243399 - DNA, 100 bp, Homo sapiens
gaacatcttctggacctttgtccaggtcagtttgctgagaacgaaaccaatgaggtcaattttagagagataccttcacatgtgctatcgaaagtatgca

SEQ ID NO: 243400 - DNA, 90 bp, Homo sapiens
ctggtgtaccaggcgaagctggccgagcaggctgagcgatacgacggcttcaacggaccacaccaaaatgccatctcaaatggaacacgc

SEQ ID NO: 243401 - DNA, 74 bp, Homo sapiens
aagaatttcgatctccgccctggggtcattgtcaggctgacaccccttcagactgagttatacaagaggtttct

SEQ ID NO: 243402 - DNA, 100 bp, Homo sapiens
ggtgtggccaagatgagccccaaggacctgtttgcaaactaaaggattccgaagccaaaaacagagaattattagaagaaatggaaattttgaagaaaaa

SEQ ID NO: 243403 - DNA, 90 bp, Homo sapiens
gcagctggactatggcatctatgttatcaaccaggtgactctgacatcattagaagcatgccagaacagactggtgaaaagtaaaccttt

SEQ ID NO: 243404 - DNA, 75 bp, Homo sapiens
tgtgcaggacaccgacatggaacagggactcactggggtttaaaattggtggtgaatggtggacatggatcgatt

SEQ ID NO: 243405 - DNA, 88 bp, Homo sapiens
cgccgactgaggcacgagcgggtgacgctgggcctgcagcgcggagcagaaagcagaacccgcagagtgtcctgccatacttcgtagc

SEQ ID NO: 243406 - DNA, 95 bp, Homo sapiens
aaacgggccgcgaaccgcagtatcatgctggccaagaagatcatcattaaggacggaggcacggagaagatggtataaactggtccatcagtgac

SEQ ID NO: 243407 - DNA, 74 bp, Homo sapiens
tctaatggatgggaacatgggggacatgagagatggctttagaagaaaaagtttctactcttcccattatgcga

SEQ ID NO: 243408 - DNA, 100 bp, Homo sapiens
taatcatcctcagtacccagcagtatatgcttgttagcagtggcacaagatcttacagaggatgaagaaacagtagaagattccataattgaggatgaag

SEQ ID NO: 243409 - DNA, 100 bp, Homo sapiens
tagcatggaaatggagggcatcttcaaccacaaagtgaataaccctataccttccaatttgaaatcagaagcaaaaaaggctgccaaaatattaagagaa

SEQ ID NO: 243410 - DNA, 116 bp, Homo sapiens
cgcgagtccagctcgcaggaggaggaggtcatcgacggcttcgccatcgccagcttcagcaccctggaggccctggagggactggtgattgcagctggaagtgcccatgaccgagc

SEQ ID NO: 243411 - DNA, 82 bp, Homo sapiens
tgaaagaggatgaaggaaggagagagagtattaatgcatcaaattgcaatttggaggagaggcagcacaagcagaagcctgg

SEQ ID NO: 243412 - DNA, 97 bp, Homo sapiens
ccagcagagctacctatctatggagaaaatcattcaagtggccaagacctctgctgcacaggtacggttcctggagcagcagaacaagatgctggag

SEQ ID NO: 243413 - DNA, 51 bp, Homo sapiens
gcacccccagccgcagcccccgctgttgatattcactgatggactccaaag

SEQ ID NO: 243414 - DNA, 80 bp, Homo sapiens
cgcagtggtcgcttcttctccttgcgccggcatcggccgcacaggcaccatcattgtcatcgacatgctcatggagaaca

SEQ ID NO: 243415 - DNA, 75 bp, Homo sapiens
acggcggcagcagcggcattcaggcagaggtggaggagacactgaagcgactgcagagccagaagggagtgcagg

SEQ ID NO: 243416 - DNA, 73 bp, Homo sapiens
agaacctcaacaccgagtccccagcaggagcgagaacccgagcagcgccatgagcaacactaccgtcgtcccc

SEQ ID NO: 243417 - DNA, 73 bp, Homo sapiens
acaattggaatccaccctgtctgtgcagagaaagacgagaatccaggacttgaatcgtatcttcccactttct

SEQ ID NO: 243418 - DNA, 95 bp, Homo sapiens
cgagctgaccctgggagacatcgacgatcagcttgaacgggtctttttacgacttggccatgctgaaacagatgaacaattacagaatattatat

SEQ ID NO: 243419 - DNA, 100 bp, Homo sapiens
acagggacgtgatgttggagaactacaggaacctgctttctctcgatgaggataacatccctccagaagatggtcaatcagttgaacttttaaccttgag

SEQ ID NO: 243420 - DNA, 50 bp, Homo sapiens
tcctgagtagctggaactacagattcctataggcaatggaaactgatctc

SEQ ID NO: 243421 - DNA, 100 bp, Homo sapiens
ggcccaaagaagatttatgttcaggaccatttagtctggtttcatcaccttaaatggttttgaaccaatgaaggtgtattcccttaaaaagacggacagc

SEQ ID NO: 243422 - DNA, 100 bp, Homo sapiens
ctgaagatggtcctgccatcaaagatggcagaattcatgctgctgctgggccccttgacatgtctctgccttccacaccagacatcaaaatcaaagaaga

SEQ ID NO: 243423 - DNA, 100 bp, Homo sapiens
cttggctatgtgacgctgctggaggaaacacctcaggacacggcctacaacaccaagagatgtgatgactgaagcccaccacaaatatgaccactctgag

SEQ ID NO: 243424 - DNA, 83 bp, Homo sapiens
tctttgcagactttggttggtggaggctgtggcaatggaacaggcttgagaaacagatggatggtgacagttctacaacagat

SEQ ID NO: 243425 - DNA, 100 bp, Homo sapiens
gcctatattgttacaattttttttcaagaactgccgtcttctttgcctgcactaatggtacagaaggtttgggattcagcatcacttccagagatgtaac

SEQ ID NO: 243426 - DNA, 75 bp, Homo sapiens
ccggagcaagcggagctcccccaagagccggaaaggtgagcactgtgggctatgggatggatgaggtggagcagg

SEQ ID NO: 243427 - DNA, 82 bp, Homo sapiens
gcccggatgtctgcaccttcgcttggacgctttgtcccaaggctgtccatctctgccgtggtgatgtcctatctgcagaatc

SEQ ID NO: 243428 - DNA, 75 bp, Homo sapiens
cagacccttctgctcccggccgccgctttccgccggggcgagacccccaggttgatgacaacaagaaactaggag

SEQ ID NO: 243429 - DNA, 100 bp, Homo sapiens
tcctggtcattatcttggtcatctcattgggcatgaaggtcctggaagtctgttatcagaacttaagtcaaaggattttggctatggaaaggggaaatgt

SEQ ID NO: 243430 - DNA, 99 bp, Homo sapiens
gctccatcttgcgggagaccgggttgggctgtgacgctgctgctggggtcaggatgtttcgtctgaactcactttctgctttggcagaactggctgtgg

SEQ ID NO: 243431 - DNA, 74 bp, Homo sapiens
tgggaaatagtaaccctgccaaatacatcagcttgtaggagacagagatatttggagttcttacaacatggcag

SEQ ID NO: 243432 - DNA, 100 bp, Homo sapiens
caggccggtggtcgtgtccaactgctcctgcacccgggaggactatgagtggatgagagggccttaccaaaaggagatttcttccctcctgagcgtccac

SEQ ID NO: 243433 - DNA, 76 bp, Homo sapiens
gaggaggaggaggaggcttgggcttgcgccgttgaagtgcaaggatgatgctgaaaggaataacaaggcttatctc

SEQ ID NO: 243434 - DNA, 100 bp, Homo sapiens
gtgaagagacaggaggcagtagccaaacacccaggagtccaggcatgataaagaaaagatagaaaagaaagagaaacgggacagttcaggaggaaaggaa

SEQ ID NO: 243435 - DNA, 75 bp, Homo sapiens
taaaacaggatcagtaaagaaggaaaaagcagtaaagccagaggaaggtttattcactggatctctgaataccca

SEQ ID NO: 243436 - DNA, 82 bp, Homo sapiens
agcagcgccagcggccgagcgggcggcttcctggcctgggcgctccggtggcggcggaggcccactgctcagtggagcgtgg

SEQ ID NO: 243437 - DNA, 100 bp, Homo sapiens
aatgctgcaggaactggtgaacgcaggatgcgaccagcgccagcagccctgtggtggcgacgacgatggaccaggagccagtgggcggtgtggaacgagg

SEQ ID NO: 243438 - DNA, 100 bp, Homo sapiens
cttccttcgctaacgcctcccggctctcgtcagcctcccgccggccgtctccttaacaccgaacaccgtttttggattcaaagcataaaaaccattacaa

SEQ ID NO: 243439 - DNA, 75 bp, Homo sapiens
tggaggatgcagtgaaagaaacttcctcagtaaagcatgcctgaaaacttcatgcctcctgttcccatcacatca

SEQ ID NO: 243440 - DNA, 100 bp, Homo sapiens
aggagatgcaccggctcacggaaaatgtctataaggttgaaatcacaaagattagacacctttttagataggtgttcttcagcaccactgacaacacggt

SEQ ID NO: 243441 - DNA, 48 bp, Homo sapiens
cacccagaggaccaggcggcggactacgccgacacagagctcctgctt

SEQ ID NO: 243442 - DNA, 82 bp, Homo sapiens
tggccctcttcaatttctgacaaaaggaaagatgaatgggagggctgattttcgagagccgaatgcagaggttccaagacca

SEQ ID NO: 243443 - DNA, 100 bp, Homo sapiens
caagatgccggtggcgcgacttgtggttgccgaagttggatttctcgcaaaccagccgagacgcatccagagctttcgtgaccggggactgttctgaagc

SEQ ID NO: 243444 - DNA, 82 bp, Homo sapiens
cttataagaaaacgctttttgtgccttggatggggtgagccagccatgagagggtatcttgtggccatattcctgagtgctg

SEQ ID NO: 243445 - DNA, 75 bp, Homo sapiens
aagatgaccagaggactagacctgaagtttcaaagagccagagcccagaggtggagcagttagggagggttgtgg

SEQ ID NO: 243446 - DNA, 98 bp, Homo sapiens
ggacacgggaagaacaaagacttagactcggtgatctgcaactctttcaccatctgtaatgcggagatgcaggaagttggtgttggcctatatcccag

SEQ ID NO: 243447 - DNA, 82 bp, Homo sapiens
caacagcaacagagagagtccagatgtgacaagccgaggcggtgagccgggcaggaggaaggagcctccctcagggtttcgg

SEQ ID NO: 243448 - DNA, 74 bp, Homo sapiens
gcaagagcagaccacgagcagcagattaagaggatgtgctgtggtttaaaccagtggaactgagaacgaagtgg

SEQ ID NO: 243449 - DNA, 100 bp, Homo sapiens
cggttatctctgtgaatctcagattgatgccaagaaggaacagctagcagatgcccggagagacctgaaaagtgctaaggctgatgccaaggtcatgaag

SEQ ID NO: 243450 - DNA, 90 bp, Homo sapiens
tcttaatggaaaggatcctgattcctcttcaaaggtaccgggtgtctggtccgagccgtggagatggccgcccagcgccaggccgacatc

SEQ ID NO: 243451 - DNA, 90 bp, Homo sapiens
atcacatcacaaggctatgaacaaatatgcaaggtttcagtgagctcaaccctttagctttatacacgacatccagtggagggccagagg

SEQ ID NO: 243452 - DNA, 101 bp, Homo sapiens
aacttcggatgagaaagaaagtaaaagatgtcattgggatgcttgaagatggaaagaaatttgattcctcccgggacagaaacaagccctttaagtttatg

SEQ ID NO: 243453 - DNA, 75 bp, Homo sapiens
acggcgagcagtctcaggcctttagtgatgatggcgacctgggagacccagccagtaccgcccagacggacttcg

SEQ ID NO: 243454 - DNA, 82 bp, Homo sapiens
cacatggttaaggaacaggaggaaaccattcagagcgggagatacagatgacccaccaagaattactcagaaccctgtgatc

SEQ ID NO: 243455 - DNA, 101 bp, Homo sapiens
aatgaagcagaagaaaaacatagttcagaagctactgaggtgaaccctgagagcctgggccgagtgtactacttcaaccacatcactaacgccagccagtg

SEQ ID NO: 243456 - DNA, 76 bp, Homo sapiens
gaaacaaaaccaaaggccgaagtacaagatctaaggctcttgtctgactatgtcttcagcagtggtgcagttatat

SEQ ID NO: 243457 - DNA, 75 bp, Homo sapiens
ggtgcagcagccttcagcttttggcagcatgaaagttagcacggagctccctgggtcctcagcagtgaggctggc

SEQ ID NO: 243458 - DNA, 100 bp, Homo sapiens
gccaagcatgtagaaagccggaaggaagcccaccataatgagaagagcggggccaacacccatgtcactgtggagaagtacagaatatgcaatggaagag

SEQ ID NO: 243459 - DNA, 124 bp, Homo sapiens
aggttttaaatcaagatttaacattccaacacataaaaattatttatccaacagctcctcccaggactgttgggaaagatcctgatggctatccgagatgcaggttttgaaatctcagctatgc

SEQ ID NO: 243460 - DNA, 82 bp, Homo sapiens
gctggccgcgccgggagcggcgctggccccaaggcgctgccctgcgcaggctcggtcaaggagtgtgatgactggcgagcag

SEQ ID NO: 243461 - DNA, 50 bp, Homo sapiens
ggactactggtgcctgcgctgaaaaagacaacaaatgaagttgttttggc

SEQ ID NO: 243462 - DNA, 100 bp, Homo sapiens
ggctccccacagaagctcatccgcaaggtgtccacgtcgggtcagatccgacagaagatttattgctaaacatgggtgcatttttggataaacccaaaac

SEQ ID NO: 243463 - DNA, 100 bp, Homo sapiens
gcagcgatctgaactatatcctgggttccagaaaaggcagaggttcttaccgaaagcaggcagaagaagagttcaacatagagaaaggtcggcttgtgca

SEQ ID NO: 243464 - DNA, 100 bp, Homo sapiens
agcctctgccctttcagccccactgacccaggctggcccgcattcatgcgcatcaacccactgctgtccacgctggcagtgtgggtgaagtggcccatcc

SEQ ID NO: 243465 - DNA, 90 bp, Homo sapiens
cgcggccaggcgattcggtgaagcgattcctgcaggcgttggttcccctctttgacctgaatatgtaatggatgtgttgatggatcagca

SEQ ID NO: 243466 - DNA, 75 bp, Homo sapiens
gcttatagacccaatcaaaaaagaaactagcaaactttttaatgaggaaaattcctggaaaactcaagcaattcg

SEQ ID NO: 243467 - DNA, 75 bp, Homo sapiens
aaaaactccaaactcctctccaccagcgccaagagggaatgacagaggaagaggaagacaaacttctggcactga

SEQ ID NO: 243468 - DNA, 82 bp, Homo sapiens
tggtttcagctcgctggcggaaggctacatgcggttagatgacagtgggattgagtgagcgattacagtctgacctggtagt

SEQ ID NO: 243469 - DNA, 83 bp, Homo sapiens
ctgctctgaggactacgacagtcaccgcaggttcgaaggtcgcaatggaagaagagatcgccgcgctggtcattgacaatggc

SEQ ID NO: 243470 - DNA, 83 bp, Homo sapiens
gaacgaggcaaggagctaaagcagcgtgcgttcagccctggggcaccgtctgcgtcctgctgtccttccccttcatcttcagc

SEQ ID NO: 243471 - DNA, 75 bp, Homo sapiens
gctggttgacccgggcagcggagagaggaggtgctgctagctgaggaggggatagctcctctttcttctgcagga

SEQ ID NO: 243472 - DNA, 76 bp, Homo sapiens
ggaggagtgctatgtcacagaaattgaccaagatgtataaagggttccaagccttaggggatgccgctgacatccg

SEQ ID NO: 243473 - DNA, 78 bp, Homo sapiens
ttctgctgaacatcatcgaacggctccttcagcagctccaggtggccatggtgcccggccctgcctcatagcaggctg

SEQ ID NO: 243474 - DNA, 101 bp, Homo sapiens
cgacccaccattttgatcatgcctagtcacagacaggggcaagtgtccgagtggtgaatcagctacttacagagatggatggtctggaagcacgccagcag

SEQ ID NO: 243475 - DNA, 100 bp, Homo sapiens
tgaaaaaaatggtggtgttgttactacagccttctatgatccaagaagtctgggtgttggtaaatcatgcttattgctacagtttacagacaagaggttt

SEQ ID NO: 243476 - DNA, 50 bp, Homo sapiens
gatcgtgctgggcaccggcctgacggcatacttttttgatgcaccagaga

SEQ ID NO: 243477 - DNA, 100 bp, Homo sapiens
cggagacctggagttgtttgacttagtggaggaggtgcagctcaacttctaccagttcctcggggtgcagcagactgtggatattcataaggagaaagtg

SEQ ID NO: 243478 - DNA, 124 bp, Homo sapiens
aggagccagacgacaagcacacactatggcgctgaaacggattaataagacagactaccacatgaacctgaggcacttctacgtgttcgcagcctattttgggctgactgtggcctggtgcctg

SEQ ID NO: 243479 - DNA, 83 bp, Homo sapiens
gtgcagtaccccagctccatcaacctcacgctgcacctgggtaagaatgattgatgttggctgatattggagtgctcattcac

SEQ ID NO: 243480 - DNA, 97 bp, Homo sapiens
ccgggaagcgacgccccggggcgggggcgatggcggcggcggcggccggagcttctctcagccggtgtgggttgctgaccgaggaaataaaagaatc

SEQ ID NO: 243481 - DNA, 80 bp, Homo sapiens
acgccctggagtgggtccaatatggagcttctggaagaggtgaagaaggaattgcagaaagtgaaagaggaaatcattga

SEQ ID NO: 243482 - DNA, 83 bp, Homo sapiens
caaagaatagagttgagcctgtgggacacttcggaaatgggacgtcggtcatcagatactgaagaagaaagcagaagcaagag

SEQ ID NO: 243483 - DNA, 100 bp, Homo sapiens
acctcttagcagcttcaaatgattttgcaagccgaatctggactgtggatgattatcgattacggggtggctttgtccactatggtgaagtgaccaatga

SEQ ID NO: 243484 - DNA, 75 bp, Homo sapiens
acgtgtaccctgggcgcaggggtctagatgttgatggaatatatcgagttagtggcaatctggcaacaatacaga

SEQ ID NO: 243485 - DNA, 75 bp, Homo sapiens
gtggcgctggatccggcagcagctgttggttaccacagagaagcgcttcctcaaagacagtttgtacaatgaagg

SEQ ID NO: 243486 - DNA, 97 bp, Homo sapiens
ctccagcgccggcctcctcagtgcgaagaagctgcagccgcacctggccaagggctaagagagcagaaaggacttcacgcctgcaagggctacagca

SEQ ID NO: 243487 - DNA, 99 bp, Homo sapiens
tgtcttccacaagggctcttacctgcggaacggctggaacgtcatggacttcgtggtcgtcctcacaggggtggcaagtatacagagtgaacctggtca

SEQ ID NO: 243488 - DNA, 75 bp, Homo sapiens
ctcggaaaatggccttgtctccggtcgttcccgttcaggagcaggtgcggattgatgagtacgattactccaagc

SEQ ID NO: 243489 - DNA, 75 bp, Homo sapiens
cacggttcaggctgtccagaagtaaaaggcgtactgagcgctttgggcagggaggtgcggggcctgtgggtggac

SEQ ID NO: 243490 - DNA, 98 bp, Homo sapiens
ttctgacttgagcctgcagtgtgctgtgagagatctaccactaggagatcatgaatcagacagataaaaatcaacaagaaatcccatcataccttaat

SEQ ID NO: 243491 - DNA, 100 bp, Homo sapiens
gtgcagaagaagctcacccgcgcgcaggagaaggtttgtgggggagagaaaccttatttgtctccagacattctagaggagaagcactgtgaattcaaac

SEQ ID NO: 243492 - DNA, 100 bp, Homo sapiens
ctgtgcggagactgggcggccggccgacccttcctgtcgctgacggcgactgcgggaggccagggcgtctctggccgagcctctttttgtggaaaacgac

SEQ ID NO: 243493 - DNA, 75 bp, Homo sapiens
ggcgctctggctgtgctgcgcgacccccgcgcatgaacgaggtcactcggacactatggtgttcttttacctgtg

SEQ ID NO: 243494 - DNA, 76 bp, Homo sapiens
aatacttgtacacctccaaggctgaatcagagatcattgatttcttcctgggggcctctctcaaggatgaggtttt

SEQ ID NO: 243495 - DNA, 49 bp, Homo sapiens
ctcaccctgctgtgactccaccacagaacattgacatcaccaatttcag

SEQ ID NO: 243496 - DNA, 87 bp, Homo sapiens
atgcagaactgcacactcagtccctctgtgctccaggactccctcaataatatggcaggggcaggggttcctttctctgccaatgga

SEQ ID NO: 243497 - DNA, 100 bp, Homo sapiens
agctattcttcctatgcagtttcattcctttgacagcagtcagtggaagagcatctgcaatgtcaaacactcctacccacagtattgctgcatccatttc

SEQ ID NO: 243498 - DNA, 74 bp, Homo sapiens
ctgttcctcagttccaaccacagagagtgataatgaactctcaagtggaacaggtgatgtgtctaaggattgtc

SEQ ID NO: 243499 - DNA, 100 bp, Homo sapiens
tgatattgcaccttccacagatgacttgggaaggaaaatacccgtacagccaacttccttgagggttcgttcttttgcatcagggtgtctcaaactcctg

SEQ ID NO: 243500 - DNA, 100 bp, Homo sapiens
tgtaactgtcttcatctttacagaggaatagtctacaaaggaagacttgtaacctggagaagaggcctatatgaacccaatagcaatggcgagatcaagg

SEQ ID NO: 243501 - DNA, 74 bp, Homo sapiens
cctcacgtcaagtacatctgtccccatgcggatgctgctgtacaatgggcagaagcgagtcccagggagcccca

SEQ ID NO: 243502 - DNA, 50 bp, Homo sapiens
cttcatctggccctatggtcccctgggacgtgttggtgcaacatctttct

SEQ ID NO: 243503 - DNA, 103 bp, Homo sapiens
ctctcactaaccacaggcatcagttggtactcgccatgaaactcaaagatcgagagtgaacagcagagaatttcaaaggaccttgctaatatctgtaagacgg

SEQ ID NO: 243504 - DNA, 83 bp, Homo sapiens
caacaacaaggcatacaactgaccacccaatgcagtgcatattaacaagggtagattttgagctgaggcttcgaagacctcag

SEQ ID NO: 243505 - DNA, 98 bp, Homo sapiens
ctctaatcttgttcttcacggtgatattccacaagcactcctggaagcctgcactttccgtagaccttaaaatctcagaggtagggctgccaccaagg

SEQ ID NO: 243506 - DNA, 100 bp, Homo sapiens
tgatgcttgatgctgcaacgcttaaaacgatgaagatttctcgtttcgaaagggtggaccaaactacgaattaacatgcttcctgctacaataatttgtg

SEQ ID NO: 243507 - DNA, 101 bp, Homo sapiens
aagacgaggaaagaggaggaaaacaaaagctgctacttatggaagatacaaagggcagcttcaaaagatggtccatgatattaaaaacaatgaaggtggaa

SEQ ID NO: 243508 - DNA, 100 bp, Homo sapiens
gtcgctggtgcagcttcacctggccgggctgcgtcgcttcgatgccgcgcagtctcaggatgcaggaatcaagaccatcactatgctggatgaacaaaag

SEQ ID NO: 243509 - DNA, 97 bp, Homo sapiens
tgctggaagatttggagagggagcttgatgaacctagacagcagggatccatatggctttggagacagtcgagattcaaggcgtgatcgatccccaa

SEQ ID NO: 243510 - DNA, 82 bp, Homo sapiens
atcctgcgcaaggccgtgcagaaggtctccacctctgggcaggagagttgccgaccacctcgggggtgctttctctgcgctt

SEQ ID NO: 243511 - DNA, 51 bp, Homo sapiens
ggctgaatgaagagctgccagatcccacagtactatactggcaattgctgg

SEQ ID NO: 243512 - DNA, 75 bp, Homo sapiens
caaaggggaagttgctgcgctctgctcggtgtcgtggcctcgcagatgatgatgtgatgccagccacttactgtg

SEQ ID NO: 243513 - DNA, 75 bp, Homo sapiens
atcagttgggtcaaagatggagctactagccaggcctgagacctgaggagctcatatccttattttccatgacag

SEQ ID NO: 243514 - DNA, 75 bp, Homo sapiens
ctgctcttcctcccttcgctcgcaccatgaccatggtgaatccgggcagcagctcgcagccgcccccggtgacgg

SEQ ID NO: 243515 - DNA, 90 bp, Homo sapiens
gtgcgggatcgacgcggacagcgggctggagcctgacgagctggcggatctatgcagttagatcagttgttcccaacaaaagcaataatg

SEQ ID NO: 243516 - DNA, 96 bp, Homo sapiens
atgacttttctttttattctgctgatacaaaaagcccagattacgtttcacaagaaatggaatgtatcctgtcaggtataatgtcagtgaatggca

SEQ ID NO: 243517 - DNA, 98 bp, Homo sapiens
aggactgcgccgcgtcttcctcaaggcctccggtgtggctgtctctgatggtgtcatcaaggtgttcaacgacatgaaggtgcgtaagtcttcaacgc

SEQ ID NO: 243518 - DNA, 75 bp, Homo sapiens
tggcagtggccacatactttctcagaaaccttcacatcttggtcaaggcctccccatggccacccatggaccagt

SEQ ID NO: 243519 - DNA, 50 bp, Homo sapiens
gaacaaaccctggctcctccaaggaagaacagttagaagctatattgtca

SEQ ID NO: 243520 - DNA, 90 bp, Homo sapiens
caccattggcaaaactgtggagtatctgcactcacagggggtatgatctcgtgaaaccttgagagaaactgaatgacgaatgaaactatt

SEQ ID NO: 243521 - DNA, 75 bp, Homo sapiens
ctcacctgtgcgggatggaacaaaagattagcctgaggcctgctcagtcgttcctaatgaataaaaatcaagtgc

SEQ ID NO: 243522 - DNA, 82 bp, Homo sapiens
gaaactcatcaggacggaagcacaggggccactcagagtcgcccgagaagctgaaggtgatgtggccgccctcaaccgacgc

SEQ ID NO: 243523 - DNA, 101 bp, Homo sapiens
cagggatataacagtccactttggaaagaagatttctcagaggagaggagacgccgtgagcgggacgaccagatgtaccgagagcggctgcgcaccttgct

SEQ ID NO: 243524 - DNA, 83 bp, Homo sapiens
cctcgcgccggctgctctttccggcagcccctgtcaaagggaacaggaagcagtccacggagggtgacgccctagacccacct

SEQ ID NO: 243525 - DNA, 75 bp, Homo sapiens
taatacgttgtggggaatggtgtgtcctgccgagaccccagagatgttgatgcctaagaagaaccggattgccat

SEQ ID NO: 243526 - DNA, 75 bp, Homo sapiens
ccgaattcaggtcggcaagaatgaacctgtgtcatttaggtaccactgtcgattgtacaacgagtggcgtcggac

SEQ ID NO: 243527 - DNA, 100 bp, Homo sapiens
ctgtcttcagatcttcacagcacagttcctgggaaggtggagccaccagcctctccttgataagaccatcatcatgtggaaactgaccagggatgagacc

SEQ ID NO: 243528 - DNA, 100 bp, Homo sapiens
tacaccactgggatgtaacagagcatctgcagaaaaagaggcaatcaagggtacatactccaaagtactggatgcatatggactcttaggtgttctgcgg

SEQ ID NO: 243529 - DNA, 90 bp, Homo sapiens
tctcgcttccaagaactcctgctgcttcccgggtccccagccccaccccagccccaaaggaggctgttcgagagggacgtcctccggagc

SEQ ID NO: 243530 - DNA, 98 bp, Homo sapiens
gggtcctaaaacaggatcagtaaagaaggaaaaagcagtaaagccagaggaaggaaccctaaggactctgcaatatgaataattccctagagaacacc

SEQ ID NO: 243531 - DNA, 100 bp, Homo sapiens
aaataagctatatactttggttacctatgtacctgttaccactttcaaaagatctatctggttcaatagatgacctccccatggggacagaaggagctct

SEQ ID NO: 243532 - DNA, 100 bp, Homo sapiens
ctgaagaagcagttccacaaagccagccaggcttgttagagtgctgtgcaagatgtctggtaggggccccctttgcttccctggtggccactggattgtg

SEQ ID NO: 243533 - DNA, 78 bp, Homo sapiens
cagccactgaacctgaccattggggtcacggtgtttgccgtggggaatccctgaagaggaaggagaaggaatatgagc

SEQ ID NO: 243534 - DNA, 76 bp, Homo sapiens
tgttcttcctagcttccctgtatgtgatgatgaccgtcaccaactggttcaaaacatgaacttcatgaggacagag

SEQ ID NO: 243535 - DNA, 100 bp, Homo sapiens
gatattttgtgatacctgtgaagctgttgcccgcctgcatcagtgcaaaactcctattatccaccgggacctgaagattcaaccctatgaaaagataaag

SEQ ID NO: 243536 - DNA, 82 bp, Homo sapiens
ccagcacagaagtgtctggagtggttgattcacaggtgaatcaaaaactctggttttaagcaacctctcctacagtgcaaca

SEQ ID NO: 243537 - DNA, 75 bp, Homo sapiens
tgcctttgctttaaaacagtattacttgcgttcctgagggaagacctcaattaccatgacccaacagtgaaacac

SEQ ID NO: 243538 - DNA, 101 bp, Homo sapiens
gactgcaaaggagacccaaggaacagtgccaagttagatgccgattacccacttcgagtcctttattgtggaggtgatgacacatctccacgtgattgaag

SEQ ID NO: 243539 - DNA, 110 bp, Homo sapiens
cgggatcccagcctcaggcgtgcgcggacggtgtgcgggctgtgggtgagcgtggaggatgctcagatgcacaccgtcaccatctggctcacagtgcgccctgatatgac

SEQ ID NO: 243540 - DNA, 97 bp, Homo sapiens
gcctggggcgatggatccgtttacggagccctctccagggtcaccctagaatcagatctgctccccagcatcttctgtttcctggtgagtgattcct

SEQ ID NO: 243541 - DNA, 98 bp, Homo sapiens
gcccgcagaacctccacagtcaagaggacggcacttccgttccggcgcccctccggtcatcaacccgctgggcaccagcttcccggacgacaccgcgg

SEQ ID NO: 243542 - DNA, 90 bp, Homo sapiens
ggaggaggtgaacaaggagctgtgagcgccagcaggtggagcttgacgtgacgtcttaacaaaagacctcagcagggcccaggttccagc

SEQ ID NO: 243543 - DNA, 75 bp, Homo sapiens
ctgacatggctcgtcaataggctgccagaacctgcacttgttgccaagtcttccatcttactagatgtgaaacct

SEQ ID NO: 243544 - DNA, 96 bp, Homo sapiens
gaagtcagaggtacagagaagctgcctttttaggccgctcacatgaaagcattgcagtgtcgagatggctatgaaccctgtgtaaatgaaggaatg

SEQ ID NO: 243545 - DNA, 80 bp, Homo sapiens
attcagaagatcaggtacacaaatgcacgcgacaggaaccaggtgtaatggataggtaacagagaagacctcgtcccttc

SEQ ID NO: 243546 - DNA, 90 bp, Homo sapiens
ctgctcctgaagtaaagagagactcacctgcaagtactagctctgataacttgggttctttacaaactcagattgatggacaacttttct

SEQ ID NO: 243547 - DNA, 75 bp, Homo sapiens
caaagtggtgcaagatcttagtggtgaacatatggatgaaaactttcggaagagaaagttgcctgtggtaagttc

SEQ ID NO: 243548 - DNA, 82 bp, Homo sapiens
ggaacctcaagccagacagaaaagcttactgaaacaaatgcaggtatcaagtgcttggactccatgtgctgtttcccggaag

SEQ ID NO: 243549 - DNA, 75 bp, Homo sapiens
agcttgagagaaaagcccccaaaagcagctattcagatcagcttgaacgggtctttttacgacttggccatgctg

SEQ ID NO: 243550 - DNA, 73 bp, Homo sapiens
ccggagccggcgtggcgctcatcgagggacgcccggcccaagtgaaaaggcatatggaaggagcatttctctt

SEQ ID NO: 243551 - DNA, 101 bp, Homo sapiens
cagtggccgctatgaagagctggctcggatgctgatggggctggacctgctggtgttcgcccacgaccatggtttttcgttggaatatacgttgcacattt

SEQ ID NO: 243552 - DNA, 82 bp, Homo sapiens
gcccgtgccctcccgctcggccccgccagcagcactgtggaggccgtcctcggggatttgggagcagcttgtcttacacaag

SEQ ID NO: 243553 - DNA, 100 bp, Homo sapiens
ggaagattcaggtcactcagacttgaaggatgccactagaacttatatgtgaaaagtctataggtacttgtaatagacctttgggcgctggggaggcctt

SEQ ID NO: 243554 - DNA, 75 bp, Homo sapiens
cagcaacaagtaatagttcagaggaagcagaaagtgaaggaggccaggctatgatgaccttaatcctgattggag

SEQ ID NO: 243555 - DNA, 75 bp, Homo sapiens
ggcaggtgacagtctgcatgtgcagttttcaggtcacgagaagagaatgccttctagatgcaaaatcacctccaa

SEQ ID NO: 243556 - DNA, 90 bp, Homo sapiens
caaatatgcagcaaagattacaccaagatctgtgctgaccacaggaattggatctactagtgcaggccccttcacagatgtagtcactac

SEQ ID NO: 243557 - DNA, 90 bp, Homo sapiens
tctgcggggccgtggcgctcggctgcgcgctgctcctcgccctcaagttcacctgcagccttcccagaggagcttccggcagacctgaag

SEQ ID NO: 243558 - DNA, 82 bp, Homo sapiens
gactcatagtcactgccagaaagaaccatggccaactgtgagcgtaccttcattgcgatcaaaccagatggggtccagcggg

SEQ ID NO: 243559 - DNA, 100 bp, Homo sapiens
gagtccggcggtagcagcggtggtgctggtggcggcggcgctttcggcgcgggcccgggccccgagcgcccgaacagcgtcttctgggacctgtactgcg

SEQ ID NO: 243560 - DNA, 50 bp, Homo sapiens
cctcgacttcctggagacccccaggatgcaagaagccagtgtctgcctca

SEQ ID NO: 243561 - DNA, 87 bp, Homo sapiens
cttgagcctgtgaaggacactgacattcaggatctgcataaagtattacaaacaaaatcctcttgatgagcaacacatttttcagct

SEQ ID NO: 243562 - DNA, 90 bp, Homo sapiens
ctggggccggcgatgtgccaccgaggctgaggatgatggtagattgccagatcatgagcgtcttgttgttcatcgagcactcagtagagg

SEQ ID NO: 243563 - DNA, 88 bp, Homo sapiens
tcagggtgccagacctcatcgtgcaagaattgtttatccgtgattatggagagatttttaatgtccagttaccggataaagaagaacg

SEQ ID NO: 243564 - DNA, 82 bp, Homo sapiens
ccgacgcgccacccgccgacgcctcagccgcttggggcccgcacggaccctctacttcagtttggtgcacctcgatttggag

SEQ ID NO: 243565 - DNA, 100 bp, Homo sapiens
ttcgaggcggcgggggacaagtcggcgccccagagcggacgaggtgacttaagagattaaaattaatttggttgctgttggttctgaacaaataatgagt

SEQ ID NO: 243566 - DNA, 100 bp, Homo sapiens
tcttttcctgctggtaaataacactgaaatgtccacagagtccatgtgaacggacagatatcaggatggcaatagtagccgatcacctgggacttagttg

SEQ ID NO: 243567 - DNA, 100 bp, Homo sapiens
atgcagaccagacctatgatggatgggtgaccacaggccccaggaccctcctggaggctgagaactcccggctgcaaacacctggcggtggctccaagac

SEQ ID NO: 243568 - DNA, 98 bp, Homo sapiens
ggcttttcacagtgggctttactgtgttgaggtaccagctggaggatgagtctgcgcatttggatgaaatgccactaatgatgtctgaagaaggcttt

SEQ ID NO: 243569 - DNA, 100 bp, Homo sapiens
cattgatacacctgtatttgaactaaagccgccaccggcaactaacctatgaccttctgacctctgaactcttcacccaatgatgacctgaccatgcctg

SEQ ID NO: 243570 - DNA, 117 bp, Homo sapiens
tccagcacctacgtcccgctgccgtcgccgccgccaccatgcccaagagaaagcacatgattaagtaccggtacatcccgttcacacatgggaagagaaggtacagaggcaaggagg

SEQ ID NO: 243571 - DNA, 96 bp, Homo sapiens
ctgtgagccgagaccgcgggccgcggagctcgggcggccggcgcggagcttcatcgcagtaggaatggcagccccatctatgaaggaaagacaggt

SEQ ID NO: 243572 - DNA, 90 bp, Homo sapiens
ccccaggacactgtccggatcttccctccctgtgatgagctactcctgggtcatgagaaggcccctgccttcagagactatgtggctgtg

SEQ ID NO: 243573 - DNA, 89 bp, Homo sapiens
ccatagtcaccacttcacttcacctctttctggaaaccaggtacaaaaggaagttacctctgtgacatcttggatgtaaacacttggat

SEQ ID NO: 243574 - DNA, 51 bp, Homo sapiens
cgctgctcgcacgggagccagctgggtgagcctgctcagcctgccggtctg

SEQ ID NO: 243575 - DNA, 90 bp, Homo sapiens
gacaccatgctgaaggccatgttcagcgggcgcatggaagtgctcaccgacagtgaaggccatcagcatcagcaaagccatcaacaccca

SEQ ID NO: 243576 - DNA, 75 bp, Homo sapiens
gataaagtgttttggttttgatatggattatacccttgctggatggagagcaatacatcatcatctttggagaat

SEQ ID NO: 243577 - DNA, 80 bp, Homo sapiens
ggtgggaaggtgtgtccggaggtttgcaggggtgcagtgtgtctggtcttatgagaacctaaaggcagacccagaagagc

SEQ ID NO: 243578 - DNA, 100 bp, Homo sapiens
gctcggtgtgtgtcagccccaatggacagcatctagcatcaggggaccgtatgggcacacttagagctggctttatgtgctggggcagaagagatccgat

SEQ ID NO: 243579 - DNA, 75 bp, Homo sapiens
ggagctgtagagaggaccccggtacatctgaaagccgggaaatggtttggtgcacctcgatttggaggaagtagg

SEQ ID NO: 243580 - DNA, 153 bp, Homo sapiens
ccaacagcgccccggcaccatcaagcatggatcggcgctggacgtgctcctctccatggggttccccagagcccgcgcttggtgtaatacggtgcccagtatgccgccaagaatgcagacagatagaccttgtggataattattttgtgaaag

SEQ ID NO: 243581 - DNA, 101 bp, Homo sapiens
gaagaaagccccacagccactgttgctgagcagggagaggatattacctccaaaaaagacaggggagtattaaaggtgaatgttggatgtgtacccaaaaa

SEQ ID NO: 243582 - DNA, 75 bp, Homo sapiens
ttccagtcagggacagccgtggagagaccagggaccagaatgaaactagtgatcgagaagatggcctccccaaag

SEQ ID NO: 243583 - DNA, 50 bp, Homo sapiens
atggaacagggactcactgggggatcgaatcatcaatttagttgttggca

SEQ ID NO: 243584 - DNA, 49 bp, Homo sapiens
ccctaatggaggtctccagtttcggtctcctctgagcctccggcctcca

SEQ ID NO: 243585 - DNA, 85 bp, Homo sapiens
tagacggccagccagtcatcaaacctgtggaataatggcaacagaaagactggctaactacaccggaggcatctatgccgaatac

SEQ ID NO: 243586 - DNA, 97 bp, Homo sapiens
aagctggccaaagcctgcccagacggctcacctgtgcgggatggaacaaaaggcgacgttgtggacgtttaccagcgggagttcctggcgctgcgcg

SEQ ID NO: 243587 - DNA, 82 bp, Homo sapiens
cccgcgtggacttcgtgggcgaagtcacctctttccgtctggtgtactaatggtcacttgatgtgcgctggctgttttatcc

SEQ ID NO: 243588 - DNA, 75 bp, Homo sapiens
cagattggaaaagtgaatggtgtgcatcacattaagattcccagttctcaatcttccttcctccttacaagatac

SEQ ID NO: 243589 - DNA, 96 bp, Homo sapiens
ctgaaatgaaactctttgctcaacaatgcaaggaggtagacatccttatcagcacagcacttattccagactgggctggcttagatgaagatgaag

SEQ ID NO: 243590 - DNA, 83 bp, Homo sapiens
ctatggtgggcaaactaagccgattttccggaaaaaggttgctgctgactcagccattctagaagttcttcagtccaacattc

SEQ ID NO: 243591 - DNA, 83 bp, Homo sapiens
aggcagcgccatggcggagcagacctactcgtggaagttctccagcagctgattgtaatgaatttgcccaatgttttgatgat

SEQ ID NO: 243592 - DNA, 90 bp, Homo sapiens
gtgactttgttgagtgtcaaaacatcctcaaggatacttttgtggaactctatgggaacaatgcagcagccgagagccgaaagggccagg

SEQ ID NO: 243593 - DNA, 50 bp, Homo sapiens
gtggagagcgccagagtaatgggtgctggagaatctggtaaaagcaccat

SEQ ID NO: 243594 - DNA, 83 bp, Homo sapiens
cttctccactgttcctggaggaatccgagaagagcagagcggagggagccccagacacggtggtgtttcataagatgtcaccc

SEQ ID NO: 243595 - DNA, 89 bp, Homo sapiens
ggaggagtcagtcagaggggcgagcaggagcgattccgtcgccaaacagacaatgcagatcttcgtgaagactctgactggtaagacca

SEQ ID NO: 243596 - DNA, 73 bp, Homo sapiens
actatggacttcatcgctttataggaagacatgtaaggaatttgcataagacagttatgcaaaatggagctgg

SEQ ID NO: 243597 - DNA, 83 bp, Homo sapiens
cgtcaccagagccccaacccaccgccgccatggtaggaaaaggtgccaaagggatgctgactccatcaagaatgctggaggaa

SEQ ID NO: 243598 - DNA, 75 bp, Homo sapiens
cgcgaaggccgctggcgccgcctcggccagcccttcccgcgcggcgcctgaagctggcccagtttgactacggga

SEQ ID NO: 243599 - DNA, 133 bp, Homo sapiens
ttggctgcactgacctggacatcactgaatattgaggcttatttagaaaacacttttgcaaagatcaggtttcgaaaaaacgatgaaatgaaagctatggatgttttaccaattttgaaggaaaaagttgcat

SEQ ID NO: 243600 - DNA, 82 bp, Homo sapiens
tgagtggaaaaatacccatggtgggcaggaagagatgaagactggcccatttgcagagcactccaaccagctgtggaacatc

SEQ ID NO: 243601 - DNA, 82 bp, Homo sapiens
ggcgacagcaacagctctgccggctggaagctaagaagaaatttcctgacttgtttgtcttcttggaagattcctcctcatg

SEQ ID NO: 243602 - DNA, 98 bp, Homo sapiens
cagaggacacgaggcggcgggctggagacatggaccgcggcgagcaagggaacaatggcaaaagcctttgatgaagcattttcctctgagacaacagc

SEQ ID NO: 243603 - DNA, 83 bp, Homo sapiens
gtattttgggagtcgaacggaacaatgcagatcttcgtgaagactctgactggtaagaccatcaccctcgaggttgagcccag

SEQ ID NO: 243604 - DNA, 100 bp, Homo sapiens
ccctgcgccgcggctacgtgcgcgtccagtggtacccggagggcgtcaagcagcatgtgaaggagaccaaggttgtggcagcactgcctgaaggtatgag

SEQ ID NO: 243605 - DNA, 100 bp, Homo sapiens
gcttgcactgctcagaatcaggagttacagaggaaagtcttgcatctcgagaagcaaaacctccggaaggaatcagaatgaacaaaactgtggctgttcg

SEQ ID NO: 243606 - DNA, 75 bp, Homo sapiens
acccctctccgtccatggccccagatgacacttcaggtgttcagtgtgaggtggagctgatagagtccatagagg

SEQ ID NO: 243607 - DNA, 100 bp, Homo sapiens
gtgcaatcggtgcaacgaggtcttctgcttgcgacctctggatcttgagttcatgaaacacctcagcaaggttgtgaacatcatccctgtcattgctaag

SEQ ID NO: 243608 - DNA, 98 bp, Homo sapiens
gacatcagccccaaacaggacgaaggcgtgctgaagatttgtgacccagaaggaaatctctgacctcagctgtggctcttggtgctggccagaagcca

SEQ ID NO: 243609 - DNA, 75 bp, Homo sapiens
atacaaagaagtgatgctggaaaatctcaggaatctggtctcattgggcagatcgggagcggtgccgagaaaaat

SEQ ID NO: 243610 - DNA, 95 bp, Homo sapiens
ctcaatggaacccctgctctggcctacctggcgctgcctcccgaatgatcaccaacagcctgaaccatgactctccacccagcacaccccccagg

SEQ ID NO: 243611 - DNA, 75 bp, Homo sapiens
gcagcagctgatgctgagcgcggcgctgcggaccctgaagctctctatcaatatcagctcacatcattgaaaaga

SEQ ID NO: 243612 - DNA, 100 bp, Homo sapiens
ccatgaacgagtattcagctcttcacagggggtagaacaagtggtactaggattatacattgtaagaggtgacaacgtattcatgatgttgctatcaaaa

SEQ ID NO: 243613 - DNA, 50 bp, Homo sapiens
atctgcaaaggacaaccagccagggattaaagcctgtggtttccacagaa

SEQ ID NO: 243614 - DNA, 90 bp, Homo sapiens
ccctgccgcgccccatccgcaacctggaggtcaagttcaccaagtgctgaagctgctgaaagatggcagaagaagtggtggtagtagcca

SEQ ID NO: 243615 - DNA, 97 bp, Homo sapiens
gtcaggactaagagaagtcacaaaacagcagatttcccaagagcagcggaaaatgatccagtcacagaaaaggcaacagatggctccctgcaaagtg

SEQ ID NO: 243616 - DNA, 90 bp, Homo sapiens
cagaagtaccttgcagagagaaatgaaataacctttgacaagattttcaatcagaaaattgcaaagtgcctgcattcgtgaggatgattg

SEQ ID NO: 243617 - DNA, 125 bp, Homo sapiens
aagagaaaggaggcttatgagagagaaaaaaaagtgtgggaagagcatgaactcattatacaatgacaaatggaggcagcattaacagttctacacatttactggatcttttggatgaaccaatt

SEQ ID NO: 243618 - DNA, 100 bp, Homo sapiens
tgctgcctggtctgcaaagaagtcctttcaagtctctaggactggactcttcctaagcaagtccgattgccacggcagtgaagtttctacagaattcccg

SEQ ID NO: 243619 - DNA, 75 bp, Homo sapiens
ccggggacccttccgtatctgcctaggcattttgctgtctcctcctaatacggcaaaatgtcgtgactttgagaa

SEQ ID NO: 243620 - DNA, 50 bp, Homo sapiens
cgtcactgaggttgcagttggcgtgaagactgccttttcaaggtgtgccc

SEQ ID NO: 243621 - DNA, 100 bp, Homo sapiens
aaggcgcgggcaggagcctggcgaggatgcaccttcccctgccttggaaaggtcctcagaatggttggaatgaccctccagctttgaacagagtacccaa

SEQ ID NO: 243622 - DNA, 100 bp, Homo sapiens
gccgctgctgggagatgggcctactcgcccgccaccctgcgctgccgccgctctgaggagttaaagctggtgaagacacacaacctgctgaccaccagga

SEQ ID NO: 243623 - DNA, 90 bp, Homo sapiens
tggagcactgtgaatgtccgcaaggctacacagggacctcctgtgagaatttgaaagacatattggctgacctgatacctaaggagcagg

SEQ ID NO: 243624 - DNA, 75 bp, Homo sapiens
tgaaggttgaagtctgggatgtagtagacaaagtggagacctttggcgacttggcctttggcgacatcttcctcc

SEQ ID NO: 243625 - DNA, 82 bp, Homo sapiens
cttgtgaacaaggatctggatatttattataagactcttgaccagttgggggccgtcccgctcctaaggcaggaagatggtg

SEQ ID NO: 243626 - DNA, 96 bp, Homo sapiens
gtttgtcatccttgtacagcaatctcctcctccactgccactacagggaagtgcatcacatgtcagatgacccctaaatccaaaaggaagagtatc

SEQ ID NO: 243627 - DNA, 80 bp, Homo sapiens
aaattcatcccagaaatctaagaggctcgggttatgtatgattttgctgctgaacctggaaataatgaactgacggttaa

SEQ ID NO: 243628 - DNA, 96 bp, Homo sapiens
ctagacgccagttagccttgaagctgactcctgagttctcacaacgcttgaccaataagattcgggagcttcttcagcaaatggagagaggcctga

SEQ ID NO: 243629 - DNA, 86 bp, Homo sapiens
gcggagaagctgtgcatttacaccgacaactccatcaagcctcaggagctgctgacaatgcagatcttcgtgaagactctgactgg

SEQ ID NO: 243630 - DNA, 75 bp, Homo sapiens
ttcttttattttcctgtaatatatctgtatcatcggaggtgtgactgcacagaaaagttacaaaacaaatttgac

SEQ ID NO: 243631 - DNA, 131 bp, Homo sapiens
ggggaagatgccgctggcgcagctggcggacccgtggcagaagatggctgtggagagcccgtccgacagcgctgagacaatgcagatcttcgtgaagactctgactggtaagaccatcaccctcgaggttg

SEQ ID NO: 243632 - DNA, 101 bp, Homo sapiens
accctgtcgaagatgataaagaaaaaaaagaacttggttatttaacagtagaaaatggaattgcaccaaaccatgggatgttatcggcttcaatatggctg

SEQ ID NO: 243633 - DNA, 100 bp, Homo sapiens
agctattttgggaagatgttccgaaccccaagaattgttcctgggcacaaggacttaattttcagaaggtattaaaaagtgtcagcaaactgcattgaat

SEQ ID NO: 243634 - DNA, 98 bp, Homo sapiens
cacaggtgaatttaaaggagcagccctggtgtcacctatcagtaaaaggtctgcgcaggcatggcactaagtgtcccatggcacatttggccctcatg

SEQ ID NO: 243635 - DNA, 90 bp, Homo sapiens
aaggtgccacagcagagacgcgaaggagaggccctagaaccatatatgtaatcgacagtgcagacagaaaaagatttgaagagacgggtc

SEQ ID NO: 243636 - DNA, 99 bp, Homo sapiens
cgggcccgcaggtcgcagggcggcctgcagctgggccgcggccgaggaggcagcgcgacctccgcacggatgtttcgtctgaactcactttctgctttg

SEQ ID NO: 243637 - DNA, 96 bp, Homo sapiens
attttggaggaagtctgtatgctagacaaggagaataactgaagtgaagtgatggactccgatttggagagtagtaagacgtgaaaggaatacact

SEQ ID NO: 243638 - DNA, 100 bp, Homo sapiens
cctcggccccccaatggacagtctcccattgcccttgcttcaggacagaggaatgatgtatttaaaatccactggctgatggcggcccttcctttcacca

SEQ ID NO: 243639 - DNA, 100 bp, Homo sapiens
gaccagcaagaggatggggccctggatgagggggaagggcctcaaagccagaagggtcactcaggatgtgtcaactgtctggagtggaatgagaaaggag

SEQ ID NO: 243640 - DNA, 101 bp, Homo sapiens
tcagcagtcccctgtctcatcgcacagtggccggtgtccagctgcctactttctgcccggatctctggctcctcatctctccggtctccgcagactaaagc

SEQ ID NO: 243641 - DNA, 97 bp, Homo sapiens
aagttctccagtgccattggcctggtgctgctgatggaggcggtggccgtgctcgtcgggcccccttcgggagtggtggtcctgctccatgatgtcc

SEQ ID NO: 243642 - DNA, 76 bp, Homo sapiens
tggaacctgccacgatacaaccggagcccttggtgcccacaactgatgccctgctctctgacctggagactaccac

SEQ ID NO: 243643 - DNA, 83 bp, Homo sapiens
ccggcctggaagcctacgccctggggctggacacctgcgcgtcccgggacgactggcgctgtgcgcgctccatgcacgagttt

SEQ ID NO: 243644 - DNA, 100 bp, Homo sapiens
ttgtgctcaagggggatcagctctattatttcaaagatgaagatgaaaccaagcccttggaaacttggctgtaacttcaaaagaagatttgattctttat

SEQ ID NO: 243645 - DNA, 83 bp, Homo sapiens
cacgctgaacggcttgaggctccagtcaaaaaccattaaggattttttatcaagcagaaatgcatcgaacaacgagaatcaag

SEQ ID NO: 243646 - DNA, 100 bp, Homo sapiens
ttgactactgccacaattccgcggagctcccacctccatatacagccattgccagtccagacgccagtggtattccagtaataaactgccgtgtgtgcca

SEQ ID NO: 243647 - DNA, 141 bp, Homo sapiens
gcgcgaggccgcagagctaaatgggggcctctccagggagtgctctgttcacggctccatcgctgttagccccttcacagatgtagtcactacaaatcttaaattgcgaaatccatcggatagaaaagtgtgtttcaaagt

SEQ ID NO: 243648 - DNA, 90 bp, Homo sapiens
gttcaaggaggccttccagctgtttgaccgaacaggctctccccggaggctcagccccctctgctccccatgggcaactgccaggcaggg

SEQ ID NO: 243649 - DNA, 75 bp, Homo sapiens
cagtgcagtcttggaaggggccgaggcggggtttcaccatgttgcccagactggtcttgaactcctgagcttaag

SEQ ID NO: 243650 - DNA, 98 bp, Homo sapiens
ggggaactgctggggaaggcgattggcatcgatctctccatcccttccgaggcccgacttcgcaggaggagcaatctcagaactgttatgaagacctt

SEQ ID NO: 243651 - DNA, 75 bp, Homo sapiens
cgagccggagcgcggagcccggctcccgcaccatggaggaggacgacagctacgtgatcagggccaaagcggtca

SEQ ID NO: 243652 - DNA, 90 bp, Homo sapiens
cagggcctctggaacattccgacctacaagtgctgggcgtcctcttctttgccatagcctgcttcttatacaagcccctgtcggagtctt

SEQ ID NO: 243653 - DNA, 100 bp, Homo sapiens
tgacctctacttccaggactcggggctctcacgctttctgctcaagtcctgtcctcttctgaccaaagagcatggctctgtgagcgctgatgaggctgcc

SEQ ID NO: 243654 - DNA, 99 bp, Homo sapiens
cttggccgcctgagcccttgagttggtcacttgaaccttgggaatattgagacatgaagacatcttatccatcctcactgctgtcaacgatgatgtgag

SEQ ID NO: 243655 - DNA, 98 bp, Homo sapiens
catcaccccgttacaggccgtggcccagactttgagaatcactacaagaaaaactccttgtggtgaaggttctaagacgtgggatcgtttccagatga

SEQ ID NO: 243656 - DNA, 75 bp, Homo sapiens
cttcccggagcgtgccctcgccgctgttgctgaacctgtttgcatgagttgctcctgacggccctttaggatact

SEQ ID NO: 243657 - DNA, 76 bp, Homo sapiens
gtggctttcgtggttgcacagtttggctaacaggtcacagtgtccatgtaactaactcctggttaagaggatatgg

SEQ ID NO: 243658 - DNA, 98 bp, Homo sapiens
cggctctccgccgtccccagccctgcctctccctgggctctggccatgtcaaaggacgccctgaatctggcgcagatgcaggagcagacgctgcagtt

SEQ ID NO: 243659 - DNA, 101 bp, Homo sapiens
gaaggtgaagaccagtttgatgtgtgtatgtactagctgtggtgccacttctgatccgctgcctttcatccagatggtacattatatctccaccacttccc

SEQ ID NO: 243660 - DNA, 100 bp, Homo sapiens
caggccccgggcacctagagacggatggtcgcacgcatgattgtcggcatctcacagagttgaagtattgataacaccaaggaactctatcacaatttga

SEQ ID NO: 243661 - DNA, 100 bp, Homo sapiens
aggcaggaggacctgcagagaggtcgcctgtctcgtcccgaggccgtggctgaggtgaagagcttgaaggatgccaattctgcgcttctcagtaactacg

SEQ ID NO: 243662 - DNA, 82 bp, Homo sapiens
gcttacaaagggcatcattaccctggacctggaaaccatttttgacagtcattttgtttactcattcagccctgttgcaggt

SEQ ID NO: 243663 - DNA, 90 bp, Homo sapiens
atcacccttctgcagtgaatgtcctcacggaacacagttttagaaagagcgttttcgctacgtaaagcacattcgataaaggatatggaa

SEQ ID NO: 243664 - DNA, 50 bp, Homo sapiens
gtccggcaagatcgagaaagcaggtgaaaatcgcattgaggttctggctg

SEQ ID NO: 243665 - DNA, 75 bp, Homo sapiens
aacctctacaaggccaagttcatctcctccgtcaccagccacatctaccagcaaaatgatgcttcaacacccagg

SEQ ID NO: 243666 - DNA, 74 bp, Homo sapiens
attcaagttcatgtcacgctgggtaatgaggatttgactgtgaagcctgaagcaggacattctaaatgaaaaga

SEQ ID NO: 243667 - DNA, 50 bp, Homo sapiens
tatccaggatgcagatcaagagatacagtaccaatgaaggggagacctgg

SEQ ID NO: 243668 - DNA, 80 bp, Homo sapiens
ttttagtagagggcaataaatgccacatgagatgatcacctcagcagaaaactatgaaaccagcttgtataaaagccctt

SEQ ID NO: 243669 - DNA, 90 bp, Homo sapiens
acaaggagcctgacactcaggatgcagatgaagtgaagcccccaaggagaagccctctagggttggtgggtaccgagccagagtctgaac

SEQ ID NO: 243670 - DNA, 75 bp, Homo sapiens
gttcttgtttgtggatcgctgtgatcgtcacttggccacggcgtatgcctccgaggacggggtcctgaccgaggc

SEQ ID NO: 243671 - DNA, 109 bp, Homo sapiens
caggaccacgtcaagacttgtggcaagtgtcgagtcccttgcagattccacgccatcggctgcctcgagacgggcccagcatcgcactggacacagcctgctcctccag

SEQ ID NO: 243672 - DNA, 75 bp, Homo sapiens
gagctgggtcaccggcttgaggggctgcgtgaggcgcggaggcagccatctgtgagaaagacacactgcagtgga

SEQ ID NO: 243673 - DNA, 106 bp, Homo sapiens
ggacgccggtctctgttccgcaggatgggcattttgtcagtgatgctgatctttgccttcttccaggaacttgtaatagctggcatcgttgagaatgaatggaaaa

SEQ ID NO: 243674 - DNA, 100 bp, Homo sapiens
cctcacgatgactacctctccgatcctgcagctgctgctgcggctctcactgtgcgggctgctgctccagagggcggagaagtctcaggggatccagaac

SEQ ID NO: 243675 - DNA, 89 bp, Homo sapiens
gggacatgcatcgtcccctggactctctcaaggatcgcttacacctgagacgaactacagaacagcacgtaccagaggtggaagtccaa

SEQ ID NO: 243676 - DNA, 88 bp, Homo sapiens
ttgcagcccaggtggataaggaacatctcttcccagcggctcagaattgtcgagaacggtcaagaaagagtagaagttgaagaagatg

SEQ ID NO: 243677 - DNA, 75 bp, Homo sapiens
aagcggaagaagatggcgctcaccagatgtaaaaaaagattggtctgaccatgctctctggtgggaaaagaagag

SEQ ID NO: 243678 - DNA, 76 bp, Homo sapiens
gatagtgagagacctgctcaagctctcttaagagattatggtggaagcctcttcggcctgctgagcaagaacaatc

SEQ ID NO: 243679 - DNA, 90 bp, Homo sapiens
ccgagagtcctggtgactttgaacatgctggtgccgctagccaagctgtcctgcctggatctccagtctatgtgctgaagaagcagcagc

SEQ ID NO: 243680 - DNA, 96 bp, Homo sapiens
tttagcgatgcaattgaatcagggaaaatttgagtataatggatcgtgcgggtcttaaagaaagtgcagaagagatggtcaaaaacaaattggaag

SEQ ID NO: 243681 - DNA, 86 bp, Homo sapiens
cggacgagaactggagagaactgctggaaggagactggatgatagaattgctttatactttagaaggaaaacttgttgagagtgga

SEQ ID NO: 243682 - DNA, 50 bp, Homo sapiens
taaaaggccttcagcctggagataaggagggcatcctggctgtttcaccc

SEQ ID NO: 243683 - DNA, 100 bp, Homo sapiens
cagaacctcctttacacagtatcagaaccccgtggaacacagagcattcctaatgacagtcctgcccggggtgagggcacccattctgaagaggaaggct

SEQ ID NO: 243684 - DNA, 90 bp, Homo sapiens
tgcagccattaatgatcccaagataggagaaaaaagggcatcatccccattccgaagggtcagggaggaggaaattgaggtggattcacg

SEQ ID NO: 243685 - DNA, 100 bp, Homo sapiens
tttgttcttccggccctgctgtctgcctccccggctgattggattcgttactgctttgcaacgcgcacctaactccaggcaggagaatcacttgaacccg

SEQ ID NO: 243686 - DNA, 90 bp, Homo sapiens
atgacgagctctagctggatgggcgcagaggcctccccaaagccagtcctgtgtcaccaatcaaaggaaaggaagccgtcagcagagatg

SEQ ID NO: 243687 - DNA, 82 bp, Homo sapiens
gccatgaaggcctcgggcacgaggagaaggcagagcccccccaggctatgaatgccctgatgcggttgaaccagctgaagcc

SEQ ID NO: 243688 - DNA, 100 bp, Homo sapiens
aagatcgctgatgtggtgttgctgcagaagctgcaggtgtccctggccagtgtccttccacctgtccacaagcatggggaacatcttcgccaacctcttc

SEQ ID NO: 243689 - DNA, 75 bp, Homo sapiens
gacggggtgagcctcttcttgtgtctggagattctgaagctgcggtgcaaccctgggcagtttgcgtgtcgcagc

SEQ ID NO: 243690 - DNA, 75 bp, Homo sapiens
caattctgttgatcttcaaaatgctgcagaaatgctcactgcaaaagtgaaagtctatgactttgaaagaagcca

SEQ ID NO: 243691 - DNA, 83 bp, Homo sapiens
tacctttagagtttgtgaaacagctttgtttaaagatacaatctgaaagaccaggtagttgatgtcacttggcgatattcctg

SEQ ID NO: 243692 - DNA, 100 bp, Homo sapiens
gagttaacttctgtttacatggaactcagacatctgcaaatcatggatctgggattggcacaagactctgctaccagcacaaagagcccaatccttcttg

SEQ ID NO: 243693 - DNA, 100 bp, Homo sapiens
cagccaccgcccccgccccaagccggcctaccccagatcatccaaaaggtgtcgtagtcattcttcagcacaattcttaattggagaccaagaaccctgg

SEQ ID NO: 243694 - DNA, 121 bp, Homo sapiens
atcttgtgggagcaaaaccaacgcctggctcggagcagcagcctctgagcatctgggctgatgggccgtaccctgcaccgtgagccacccgcaggagaccaggagggcacagcactgcacc

SEQ ID NO: 243695 - DNA, 50 bp, Homo sapiens
ggccagtggcactcccagctcgctgcgccagggccccgcggggctggggc

SEQ ID NO: 243696 - DNA, 99 bp, Homo sapiens
catgcttccccatctggtcgtctccatcattcatcatgttacagccttcaaagaaaaacctcggtatccaccaagtcaggctcaagcagctcttcaaga

SEQ ID NO: 243697 - DNA, 95 bp, Homo sapiens
tgaaacagcatgggaagcaaaggccatggcagtaatagcgtgtttatctgacacggactgtggccatgaggtctgccggaagtgacttgttggtg

SEQ ID NO: 243698 - DNA, 96 bp, Homo sapiens
ccatgaggcgccagcctgcgaaggtggcggcgctgctgctcgggctgctcttggaggtctggagcccggcactgtggtcataacagagcaggcagt

SEQ ID NO: 243699 - DNA, 75 bp, Homo sapiens
gcgcaggagtaaggcaggaaaccgacgagaggacctcagctccaagagatcctgcatattttgatgaaaattggc

SEQ ID NO: 243700 - DNA, 75 bp, Homo sapiens
actggcggctgctggtagttccatgctgtctgttcagacttcagcttggtgcttgggaacaatgggccgaggcat

SEQ ID NO: 243701 - DNA, 97 bp, Homo sapiens
aagtcctagaagcagagatgctcctgctggcagtcccccggcctctccagggccccagggccccagcaccaaggctggagtgcggtggcgtgatctt

SEQ ID NO: 243702 - DNA, 83 bp, Homo sapiens
gcgacgtgcagcggaggagggcaaggactacccctttgccaggttcaataagtgcctccggagccagcgtggtggccatagac

SEQ ID NO: 243703 - DNA, 100 bp, Homo sapiens
aacaaagcaagatagaactcctcttaccaaagatgtttcacttctagatctggatgattggatatagctagtgcaataaaagaacttcttgatacagtga

SEQ ID NO: 243704 - DNA, 100 bp, Homo sapiens
cccacctgtgctgaagtcctgcagcggtggcggtgtgagatctgggcacgaaagcttctctctgtcccttggcttctgtgtggtcccagaagatatgcct

SEQ ID NO: 243705 - DNA, 83 bp, Homo sapiens
aggcaaactgtcagaaaagagtagcctgggctgtctggaaatctgaggttatttggaaatagcggtgcttgcagcgcttgcgg

SEQ ID NO: 243706 - DNA, 96 bp, Homo sapiens
gacatgtcagtgtcctttcacacccatgtgaaagaggaagatgagaatgtgcctactgctcctgatcctccaagtcaacatttacgtgggcatggg

SEQ ID NO: 243707 - DNA, 90 bp, Homo sapiens
agaaacctggatctgcgatctgtttgtggttgcagtgtaggattttggaagtcctccctccatcacatcaaaatggttttgctaatggac

SEQ ID NO: 243708 - DNA, 100 bp, Homo sapiens
actgagcggagcccggtgacaggatgatgagtttgatgcctacatcattgtgtctttcgtgaatgccaccctagtgttgtccattggagaaactgtagaa

SEQ ID NO: 243709 - DNA, 75 bp, Homo sapiens
gagcctcagttggaagcagccgatccagcctgcggagcctgtggggcagaaactacgcccgccgacagaaacatc

SEQ ID NO: 243710 - DNA, 75 bp, Homo sapiens
atggaagaggagggcaagaagggcaagaagggacttatgtacagcatttgggaaggatgtactgaaattagtaga

SEQ ID NO: 243711 - DNA, 75 bp, Homo sapiens
cgtgcctgacctgctgctgccactgacgtccttctatggccgcttcaggcacttcttggatatcatcgaccctcg

SEQ ID NO: 243712 - DNA, 51 bp, Homo sapiens
ccttgtcatgccactggaagagaaggatttccagatgtgacttgcactcag

SEQ ID NO: 243713 - DNA, 82 bp, Homo sapiens
gcgtgccctacttcaaggataagggcgacagcaacagctctgccggctggaaggctggacggcagtctggaaacgaccaatg

SEQ ID NO: 243714 - DNA, 97 bp, Homo sapiens
aggccgcacccgcctccggcggggctctcaggtctcagccaatttcttctccagtcatcctccagtttggtcatgcagagactcttcttccactgct

SEQ ID NO: 243715 - DNA, 88 bp, Homo sapiens
cggaggcaagtttggtgtccagatggacagagttgatcaggccatgaccttgcctcctttcctggagttcggtgtcccgtccccagcc

SEQ ID NO: 243716 - DNA, 83 bp, Homo sapiens
cgtccgccgattcctcctccttggtcgccgcgtccttggctggcgtgtcttgaggaccggcccagctcaggctcctggggcag

SEQ ID NO: 243717 - DNA, 100 bp, Homo sapiens
tgcagtacctgcagaaggtctctggagacatcttcagcaggtccctggtgctgaaccgcctgcgtccagttgccagcgggggtgggaaagcccaaccggg

SEQ ID NO: 243718 - DNA, 82 bp, Homo sapiens
gagtatctggtgaaatggagaggctggtcgcccaagtgtcgtgaaaactacccctaaaagccaaaatgggaaaggaaaagac

SEQ ID NO: 243719 - DNA, 82 bp, Homo sapiens
ctggagcctcagttggaagcagccgatccagcctgcggagcctgtggggcaggcttctcaaccagatgagttgaccattgag

SEQ ID NO: 243720 - DNA, 100 bp, Homo sapiens
accgtttctgcgatacctgcctgcaggagttcctcagagagaagaagaaggaggttcctgctgtgccagaaacccttaagaaaaagcgaaggaatttcgc

SEQ ID NO: 243721 - DNA, 98 bp, Homo sapiens
cgaggccgccaccatcttttgggtccgggaggagatggtgacattcaaggatgtggctgtggtcttcaccagggaggagctggggttgctggaccttg

SEQ ID NO: 243722 - DNA, 100 bp, Homo sapiens
gaagagctatggtgaaacaccactgaagcattgccaagtgtcctgggtcatgaaacttaatccacagcaagctcccttatatgtgagtaaatcatgagat

SEQ ID NO: 243723 - DNA, 83 bp, Homo sapiens
ttcgtttgccattttcttatggagaactgtccttgttggcacaagagactatagtccccggcagatggcagttcgcgagaagg

SEQ ID NO: 243724 - DNA, 100 bp, Homo sapiens
tggaagcggccaccgactactgtcagcagctgtgccaggcttgcttccggcgtcatggctcaaagggccttcccgaatccttatgctgattataacaaat

SEQ ID NO: 243725 - DNA, 100 bp, Homo sapiens
ctacgaaggcggctacttcaagctcaaactttggaacaaataccgaatttccaacattccatcactaatattcctcgacgccaccactgggaaggttgtg

SEQ ID NO: 243726 - DNA, 100 bp, Homo sapiens
gcaagtggatccctggggcagagaggaagcttctagtgtactcttactttgaaaagtgaaactggaacgccaagctgaagaagaacgaatacggaagcac

SEQ ID NO: 243727 - DNA, 82 bp, Homo sapiens
cgtggctgctgccaagggctacattgaggtgatgagctggagcagatccgcagggacatccgagacttccggtctagcgcgg

SEQ ID NO: 243728 - DNA, 100 bp, Homo sapiens
ctgggaaagtggatcccacctacggtctggagagcagctgcattgcaggcacagggcccgatgagccagagaagcttgggagaagtctgttggaacttgg

SEQ ID NO: 243729 - DNA, 100 bp, Homo sapiens
gtgggagtcctgccggaaacccgccagcttggacatctggcactgcgagtccacgctcagcagcggctttgcacttctgggaggacatccttgttttctt

SEQ ID NO: 243730 - DNA, 60 bp, Homo sapiens
agcctcccaagtaggtaggaccacaggtgtacagaaacaagtgttgaaaatgttaaaggc

SEQ ID NO: 243731 - DNA, 97 bp, Homo sapiens
cttggtgtcgtttttccttgagctgaacgtcttgcaacagtggccgcacgcatagactctaaaatagagctcaagcttgagaagagagaaccactaa

SEQ ID NO: 243732 - DNA, 75 bp, Homo sapiens
gtgctggctccttagaaggaaaaacagatgcatgccaggtcaaacctggttccacttgcgtcgtctttggcctgg

SEQ ID NO: 243733 - DNA, 101 bp, Homo sapiens
agctttgaagctggataggagtctccagtcttcctcttgatccatatgtttcagcttagaccatgctcagcctccaagcagccttgtcatcgacaaagaat

SEQ ID NO: 243734 - DNA, 75 bp, Homo sapiens
tctgcctgggtgacaatgccttggtttcaacactatcggaatggtcatgctgacagccctgctcctgtgaacggg

SEQ ID NO: 243735 - DNA, 100 bp, Homo sapiens
cttggccactgatcccccgaagagcttctgtcgccgctctaggtccacaagaatcggaatgtcagttaatgctattcgcaagcagagtacagatgaggaa

SEQ ID NO: 243736 - DNA, 100 bp, Homo sapiens
gttatgaagttctaaaagcaagtcttaatcaggaagtgtccttgatcaccaacggctcgcccagtccaatatcagatggaaatgatgcggagccttcgcc

SEQ ID NO: 243737 - DNA, 74 bp, Homo sapiens
gggagtgttcgttgtgccagcgactaaaaagaggagacgacctcatgcgctgtgtggatctctacaaccaggcc

SEQ ID NO: 243738 - DNA, 50 bp, Homo sapiens
ccggccgctctcctatccacagacggacctggtgtccaagatgctacacg

SEQ ID NO: 243739 - DNA, 83 bp, Homo sapiens
gtgaagatggcggcagccgaggccgcgaactgcatcatggagcaaacttcagcgtgcccgtcgtcagcgccccccacagcccc

SEQ ID NO: 243740 - DNA, 80 bp, Homo sapiens
acgtcccgctgccgtcgccgccgccaccatgcccaagagaaagcacggggtcactctggtgcccattgaggagttcagcc

SEQ ID NO: 243741 - DNA, 90 bp, Homo sapiens
ggcggctgcgctgttcgtgctgctgggattcgcgctgctgggcacccacggagcctccggggctggccaggtcagagcagcccaccatgg

SEQ ID NO: 243742 - DNA, 100 bp, Homo sapiens
gatcggaccggccactcaatattgcacaccttatacgggagggagatatgtcagtattgaattctcccagacatcagagctgtataatgcatgttgatat

SEQ ID NO: 243743 - DNA, 93 bp, Homo sapiens
cgggccagcgctgcaagaggcctacgtgcgggtggtcaccgagaagtccccgaccgactgacaatgcagatcttcgtgaagactctgactggt

SEQ ID NO: 243744 - DNA, 88 bp, Homo sapiens
cacagattctcctctgcgctatgtggacattgccatcccatgcaacaacaagggggaggcccccgctgagatgggggcgctgctgctg

SEQ ID NO: 243745 - DNA, 100 bp, Homo sapiens
gctggttggacagacaaaaaatgatttggtggtcagcttgcctgaggagaaggtcctacagtgtaggggaagcaatggaagaacttctacctgatggaca

SEQ ID NO: 243746 - DNA, 128 bp, Homo sapiens
ggcggccgtgaacctcctgctgggcgtcttccaggtcctgctgccctgctgtcgcccgggaggggctcagggacaaggtaatagcctgcagctggtgttttgagaagccctactgctgaaaacttaac

SEQ ID NO: 243747 - DNA, 127 bp, Homo sapiens
gggcaatacagctgcatctatcgggttggggagctctggtcagagcccagcaacttgctggatctggtggtaacagacatagggcctgattacattccaacagaggaagaaaggagagtcttcgcag

SEQ ID NO: 243748 - DNA, 90 bp, Homo sapiens
taaaataatgagagaaaaggccaaagagaggtgttctgaacaagttcaaggaaaatgtttataggaggccttagctgggacactacaaag

SEQ ID NO: 243749 - DNA, 100 bp, Homo sapiens
acggagagcagcagccgcccgcttcaaccccaggggaccagaggaactcagccctgattgcgagtaattccctcctggtcccagacagtctaagaggcac

SEQ ID NO: 243750 - DNA, 75 bp, Homo sapiens
ggaaaaacaaaggatatcgtcaatgggctgaggaccatggccaacctggagcgcaccttcatcgccatcaagccg

SEQ ID NO: 243751 - DNA, 102 bp, Homo sapiens
agaaaatgttcttatttgtctaagaataattattgagctacacaaacagttcaggccaccgatcacacaagaaggtcatgtggttatgggtaacaatgcagt

SEQ ID NO: 243752 - DNA, 75 bp, Homo sapiens
gtacctgcagaaggtctctggagacatcttcagcagaggtctgcggggtttccgagaggctcgccgggatttctg

SEQ ID NO: 243753 - DNA, 101 bp, Homo sapiens
acaacattggaacttagtgttatgccaaaagatgaagacattctccaagtgacgtgccaccttgcttagcgcccgtcaaggaatgatgtctgcacgaggag

SEQ ID NO: 243754 - DNA, 100 bp, Homo sapiens
ccgggagcagctggaggaggaggaggaggccaagcacaacctggagaagcagatcgccaccctccatgcccaggtggctaaagcagtgacccaggctctg

SEQ ID NO: 243755 - DNA, 82 bp, Homo sapiens
aaggagttcctgctaaggggaggtgcaggagggcgtctctggccgagcctctttttgtggaaaacgacagcagcagcagtgg

SEQ ID NO: 243756 - DNA, 75 bp, Homo sapiens
tcaagtcagacttcattacagaaaggttcccagtctaagtgggtgactttccaagatagaggcagatcatttctc

SEQ ID NO: 243757 - DNA, 100 bp, Homo sapiens
atttggggaccagagatggacggtcactcagcctatggaggagcaggacatcgagactttacatggctctgttcacgtcacgctgtgtgggactcccaag

SEQ ID NO: 243758 - DNA, 85 bp, Homo sapiens
aaggacatctgcaaatctttcaccaatgaatccctttgcccacgtccagctgaagccgacagtgaccaacgacaggtctgccccc

SEQ ID NO: 243759 - DNA, 74 bp, Homo sapiens
ggagggaggaagctgggacacccgggagtcaggaaatgtgccctaaagtacatgccccacgcagtcctcaaact

SEQ ID NO: 243760 - DNA, 74 bp, Homo sapiens
cgggacgccaggaggcggaggcggagtggagttagatttcaacactacacttgcacaatgtctttgaaaccaag

SEQ ID NO: 243761 - DNA, 50 bp, Homo sapiens
aatgtgctttagaagttaaaaagggagccaccatcaagcgccacgagatg

SEQ ID NO: 243762 - DNA, 88 bp, Homo sapiens
agttggagttggaatttgtgcaatgtttagccaacccaaattaccttaattgatttggaactagctctggttttggatgcagcaccac

SEQ ID NO: 243763 - DNA, 83 bp, Homo sapiens
agcatcccagccgtgctcacggctccctggggaagggaatgcagggttgctggggctgggcccagaagcagcagcaccaggga

SEQ ID NO: 243764 - DNA, 100 bp, Homo sapiens
aagatggcgcctggcagggcagccagctggccaggggggcccgtctgggccagccacctggtgtccggctgttcacggaagaccaggatgtagatgaggg

SEQ ID NO: 243765 - DNA, 50 bp, Homo sapiens
ctcccgagtagctgggactgcaggaggtgatacgttcctgtgctgcaaaa

SEQ ID NO: 243766 - DNA, 98 bp, Homo sapiens
ggcgggactgcactcgagtgtccagacctgctcgatgacaatgcagatcttcgtgaagactctgactggtaagaccatcaccctcgaggttgagccca

SEQ ID NO: 243767 - DNA, 100 bp, Homo sapiens
cacgtcacctggagagatgcacaggggtcgggccccggctcagtggtcccaggcagctcgggtgtcggaacccccagacagttcacgcgacaaagaatca

SEQ ID NO: 243768 - DNA, 100 bp, Homo sapiens
ccgtccccgctgctgtgcattggtggagaagatccagccctcagaagcataaaagctgtccgcagaaccagccctgcaggtactttaggagaaaagccag

SEQ ID NO: 243769 - DNA, 90 bp, Homo sapiens
gaggatccagtgttcaccatcctggccccggaagggttgaaaaataccggccacagaccctgaatgatctcatttctcatcaggacattc

SEQ ID NO: 243770 - DNA, 75 bp, Homo sapiens
ggcgcgaagaggctggactcggattcgttgcctgagagtggagactgctgcacggactctggaaccatgaacata

SEQ ID NO: 243771 - DNA, 100 bp, Homo sapiens
gaaaaagatgagcaggaatgttttgctacaaatggaggaggaggaggacgacgacgatggggatatcgcatctattgttggggtgatcggacctaacacc

SEQ ID NO: 243772 - DNA, 83 bp, Homo sapiens
cagcgacagagccaaaatcagagctggaacctgaggagagaggttttaaaatcaaagatgggaaaatcggagaaaattgccct

SEQ ID NO: 243773 - DNA, 51 bp, Homo sapiens
tctcagcaagaacgggaacaaaactctgatctcccttgagtttagaaatct

SEQ ID NO: 243774 - DNA, 75 bp, Homo sapiens
gaaaaagaagcaccgctttgggctaccccctcctgacaaggtgatccgggcgggccccgcaggaattttatcccc

SEQ ID NO: 243775 - DNA, 75 bp, Homo sapiens
atcaagttcaaaaccagcaatttcaacaagacactaagggcgactaccagaaagcgctgctgtacctgtgtggtg

SEQ ID NO: 243776 - DNA, 74 bp, Homo sapiens
cctccttgctgcctagaaaataatcgcagatacgtgcaaaaaggctctggaagaggatctgaaccagaagaagc

SEQ ID NO: 243777 - DNA, 89 bp, Homo sapiens
gaggaggagtgccctgcgactctgcggaaatacctgaaatacagcaaaaatatcctggaccggcaaggcatcgacatcctgtactcggg

SEQ ID NO: 243778 - DNA, 82 bp, Homo sapiens
agactgctgagcgactatattgagaaggaggtaaagtttttcagaagaagtgaagtcaagatgaagaaccatttgcttttct

SEQ ID NO: 243779 - DNA, 83 bp, Homo sapiens
cgacgtcttgcctgtgtcccacttgttcgcggcctatagagtgcctggtgaagaatgtgatgggatcactagcatgtctgcgg

SEQ ID NO: 243780 - DNA, 75 bp, Homo sapiens
cgacttcaacagcaagagggacgagatgtggaaaaaggacaaccttaaacttccaccacaagaggaatataaaga

SEQ ID NO: 243781 - DNA, 82 bp, Homo sapiens
aaataaagtggatgaagaatttgtgcctgtggacatctctacagcaatgagtgaacgggcacttgctcagaaaagactcagt

SEQ ID NO: 243782 - DNA, 88 bp, Homo sapiens
aaacctcaggacttgagtaacagcaacatggagctggagtcagagaggacgtgtttctcgtttggcaagagatggaggaagcctgcag

SEQ ID NO: 243783 - DNA, 51 bp, Homo sapiens
cttatagactatggacattttcacttcctgtccacttccaacgaagcggtc

SEQ ID NO: 243784 - DNA, 50 bp, Homo sapiens
ctgacagcaacaccactgcagcatctaattccttgacaaggatatcctag

SEQ ID NO: 243785 - DNA, 100 bp, Homo sapiens
actgactccagtgatgacgcaggccttaaggagaaagtttcaggtgaatgaaaactttgccattgatttgatagcagagcagcccgtgagcgaggtggag

SEQ ID NO: 243786 - DNA, 82 bp, Homo sapiens
ctaggggcagcgagcaagacagcaagcagggcgaccattgacgaggtggagacggacgtggtggagattgaggccaaactgg

SEQ ID NO: 243787 - DNA, 50 bp, Homo sapiens
tccagaaattatgttgaattccaagctcagagtcaagatctccactgaag

SEQ ID NO: 243788 - DNA, 100 bp, Homo sapiens
cagagatttattcgtaatgcgactcaaagctgcacggcagtctgtttatgaggaggtcaaagtaaactgggcaaccacaccaagtagccagaaaaaagat

SEQ ID NO: 243789 - DNA, 75 bp, Homo sapiens
aagcctctcagcttcggagaatggagtcttccatcaatcatatctcacagatactttggtgttgaacatttggga

SEQ ID NO: 243790 - DNA, 100 bp, Homo sapiens
cgcgaagctgccaaagccttagacaagtccgggtttggtaatcacgtccccctcaggctctcttgtgaccacagcatcatcagctcagaccttccccatt

SEQ ID NO: 243791 - DNA, 82 bp, Homo sapiens
cccgccagcgcctgagcatccccgtcatggtggtcaccctgggtgctggaggacaatgactatggccgggccgtggactggt

SEQ ID NO: 243792 - DNA, 100 bp, Homo sapiens
cgaccaccggagaattcctggggcgcaccgccaagagctggggatctcattttgcccaacggtggtactccagcaggtacttcaagtccagcttcttcat

SEQ ID NO: 243793 - DNA, 96 bp, Homo sapiens
ccctgggaaaataggtctgcagccagaaaactgaaggtcagagagggaaatggagcagactagaagtgcagttgatgaggaccggaaaatgtatct

SEQ ID NO: 243794 - DNA, 82 bp, Homo sapiens
ctccctgcctgccgatgtgcatcggtacatgaagatgtcaaaatgcagatcttcgtgaaaacccttaccggcaagaccatca

SEQ ID NO: 243795 - DNA, 100 bp, Homo sapiens
tcctgagagctatgtagagacttcagccagtggaggtacagccaccaaagtccttggcactgtcaaatggttcaacgtcagaaatggatatggatttata

SEQ ID NO: 243796 - DNA, 110 bp, Homo sapiens
gcaagagtaacagcagcgccgtcccgtccgacagccaggcccgggagaaacctgcctagagctggaacgttacctccagagcgagccctgctatgtttcagcctcagaaa

SEQ ID NO: 243797 - DNA, 100 bp, Homo sapiens
cgggttctgccgcttatcttcaggagcgaagagctgcttctgtatcttaagctacaaggctttggccgaccaagtgtgtaccatgctgctattgtcatct

SEQ ID NO: 243798 - DNA, 60 bp, Homo sapiens
acttggaactctgggacaaatagagagcagttgaagacatctcttcatcgaggactaacc

SEQ ID NO: 243799 - DNA, 75 bp, Homo sapiens
taaatacaaggtcacctaaaagaaaccagagggttgcaatggttccacagaaccctcggcctcaggaaagtcgga

SEQ ID NO: 243800 - DNA, 96 bp, Homo sapiens
ggggcccaaagggaccataaagattgtctttggtgcaacactaacaaggcttgtctggactacccagttacaagcgtcttgccaccggcttccctt

SEQ ID NO: 243801 - DNA, 122 bp, Homo sapiens
gatcaagcaggttttaaatcaagatttaacattccaacacataaaaattatttatccaacagctcctcccagaaaagaggcacagttagatgaagaaggacagtttcttgtcagaataatat

SEQ ID NO: 243802 - DNA, 50 bp, Homo sapiens
gcgcggaccgggccaggctgcttgaagccggcacagtcttcactaccgta

SEQ ID NO: 243803 - DNA, 75 bp, Homo sapiens
tctggataaggaccagtacctgcccaggaaactggcatccgtgtcattctggaccttactcccaactaccggggt

SEQ ID NO: 243804 - DNA, 100 bp, Homo sapiens
accactggagctgggctgtgcagtggctacagaagaagatgggtgcatacaagtacatccaggagctatggagaaagaagcagtctgatgtcatgcgctt

SEQ ID NO: 243805 - DNA, 100 bp, Homo sapiens
caacgaccacgtctccaaaatgagtcgcatcttcaacccccatctgtcaaaatgcagatcttcgtgaaaacccttaccggcaagaccatcacccttgagg

SEQ ID NO: 243806 - DNA, 100 bp, Homo sapiens
ttcatgaaatggaaatacagctgaaagatacattaactggactgatcaacgtgggcagtatagattgccaacagtatcattctttttgtgcccaggaaaa

SEQ ID NO: 243807 - DNA, 74 bp, Homo sapiens
aattacgggcaagcgctgttcaaacccatgaaaatgaactctggaagcccagccagggacaatgcaccttcaca

SEQ ID NO: 243808 - DNA, 74 bp, Homo sapiens
ttctcatggatgttcttcttcgagtatttgtagaaggctctttacaatattggagacatggtacatgctgcccg

SEQ ID NO: 243809 - DNA, 88 bp, Homo sapiens
ggagttactcaggatcacatcaagagccttcattgcatgataccagactataatgtaactgcaaactccaagctggtcattatcacgg

SEQ ID NO: 243810 - DNA, 100 bp, Homo sapiens
ggacactttcgcaacatcaagggagttttccggggccctctcagcaagaacgggaacaaaactctgaaggtgggtgcggctgctatttggacgagagttc

SEQ ID NO: 243811 - DNA, 75 bp, Homo sapiens
cctgcaggtctctgtcgagcagcggacgccggtctctgttccgcaggatgctggttgtcttcttgcctgccctgt

SEQ ID NO: 243812 - DNA, 50 bp, Homo sapiens
gcaggtttcggcacatggagattgatggcatcgcaggcacagatgtagca

SEQ ID NO: 243813 - DNA, 77 bp, Homo sapiens
tttctcagagatttcaaatcatgaaggttgatagggaggatgaagaaggttataacgatggagaggtagatgacgag

SEQ ID NO: 243814 - DNA, 50 bp, Homo sapiens
gtataataccaagaaagccccacttgatgttgctgctgaggaggaatgta

SEQ ID NO: 243815 - DNA, 82 bp, Homo sapiens
cagaatagacctgaagacaaaaatccagaagtacaagcagtctggaatgggtaccacagaccatgtcatcgtcctggcgtcc

SEQ ID NO: 243816 - DNA, 75 bp, Homo sapiens
cttcccacagccacgacttcctagattcaccaatgacccctagtgtggatgaggtcaccattgtcaacattttga

SEQ ID NO: 243817 - DNA, 100 bp, Homo sapiens
ccggtttccctcggcgtgctactgtgcgctcgatccagcaccatggggaagcgggacaatcgggtgttaatgaaggagttcccccttctgagtatgttca

SEQ ID NO: 243818 - DNA, 75 bp, Homo sapiens
ctcagagagggaagagattcagccagcacactcctcgcgagcaagacgtggctggtggctattcatattccatgc

SEQ ID NO: 243819 - DNA, 82 bp, Homo sapiens
gggagcgaaggctgaggtggcagcggcaggagagtccggccgcgacaggacgctatacacagaatgggattttacatatgct

SEQ ID NO: 243820 - DNA, 74 bp, Homo sapiens
ccccgacagcacggaagcagctggataaagaacaggcgaatctggctttgggggaagaggaagaaaagtcggat

SEQ ID NO: 243821 - DNA, 100 bp, Homo sapiens
ggcctgcagcgggagctggacggcgagcgcgagcggcgcgagaaagcccattgtggacctcattggtgccatggagacccagtctgagccctctgagtta

SEQ ID NO: 243822 - DNA, 78 bp, Homo sapiens
tcttccaggaatattgggatactgtaaggcccttgctccagaggcagtcgacaagtactttaagcttcctcatgcttc

SEQ ID NO: 243823 - DNA, 100 bp, Homo sapiens
ctgtgacgggcacgacacctggggcaggtgacttcatggtcatgacgattttcttcaatgtgagcaggcggtttggctatgttgcctttcaaaactatgt

SEQ ID NO: 243824 - DNA, 100 bp, Homo sapiens
atccgccagtcaataggaagtacgagtgaatacaaacagaagcttgcacgagtaacccaggtccgcaaggaactgaaatcccatattcagagcttgccag

SEQ ID NO: 243825 - DNA, 100 bp, Homo sapiens
ggggcctccgtattgaatgaaagacccagtgcaaagacatcaccatgaacactagcacttaactcaggtgattcgaaagtttgccaagcaactggatgag

SEQ ID NO: 243826 - DNA, 97 bp, Homo sapiens
cccaatgcggccgcgagaagcagcgggggggcaggcgatcgaagttcctcagatgttagcaatgatggttgatttggaagaagatgaggactgggca

SEQ ID NO: 243827 - DNA, 84 bp, Homo sapiens
cgctgctcaaggacacggtctacaccgacttcgacgttggaatcgaagcctcttaaaatggcagatgacttggacttcgagaca

SEQ ID NO: 243828 - DNA, 98 bp, Homo sapiens
taaaaataattttagaatgatactaaagctacaatagaggcctttctgagaaaagtctacagcattctttctctgcaggttctcttaactacagtgac

SEQ ID NO: 243829 - DNA, 90 bp, Homo sapiens
gtgcgtcaaggactccccgcgcttcaggtcttcgccttgatcgtgttctcctgcatctatggtgagggctacagcaatgcccacgagtct

SEQ ID NO: 243830 - DNA, 97 bp, Homo sapiens
aagaagggaaggcgcgagtgaggaaaggaggtactgtaggccagtactaaagtggaagtggacatggagaaagcagaaagcctgcaagtgacgagag

SEQ ID NO: 243831 - DNA, 100 bp, Homo sapiens
gtccgtcccccgcggccggcagctcccggggcgtctggatgaacctctagtcttgctttgaaaaaatcattctgtgtaactcttgactgtgactaagttc

SEQ ID NO: 243832 - DNA, 50 bp, Homo sapiens
cgacattgaagctagccgaatgaatactctgaagatagtaactccgagcc

SEQ ID NO: 243833 - DNA, 95 bp, Homo sapiens
ttttgtcttggaggtggcattgttgggagcgctgttttcgtgatcttcagaccccaggttctttggtcctagaccagaaggagcacaggctggat

SEQ ID NO: 243834 - DNA, 82 bp, Homo sapiens
atccgagaagagcagagcggagggagccccagacacggtgtcccgacccaggctaagcttgagcatggctgagcaggagccc

SEQ ID NO: 243835 - DNA, 75 bp, Homo sapiens
tagagctcatattcacaatgggttggtcaaagaaaaagtgatgtatgaaaaagaggcaaaacaacaagaagaaaa

SEQ ID NO: 243836 - DNA, 75 bp, Homo sapiens
cctaatgttttccttcagcaaggacaaagggcaagtgtccagagaatggctgggatgaaagtacacttgaactct

SEQ ID NO: 243837 - DNA, 102 bp, Homo sapiens
tgaagaacttaaaactcaaagttgtatggattgtatagaggtaaatttttccataaccttatggagagaaaggactttgagacatggcttgataacatttct

SEQ ID NO: 243838 - DNA, 99 bp, Homo sapiens
caattttctttctcagaaagcagaggctcagagcttggagacagacggaacgggaggatgaaattgctactatggagtgcatcaacaatggcaagtcca

SEQ ID NO: 243839 - DNA, 75 bp, Homo sapiens
atgacttttccgtgctgatttctttcaacctcggagtctcatgaacagtgtatccagtggattgttaagtttatt

SEQ ID NO: 243840 - DNA, 80 bp, Homo sapiens
caggaccaacctctcctctggatgctctagttggttgaatctggcgatgtggaacccatggatatggagggctgactata

SEQ ID NO: 243841 - DNA, 88 bp, Homo sapiens
cattcgaaaagctaaagaggcaccattcgtacccgttggtactgtgagaatagagatgtttcgaaatatgcagaatgcagaaatcatc

SEQ ID NO: 243842 - DNA, 75 bp, Homo sapiens
gcctcttataccccggactgcaggtcgttccaggggtagaggaggcatgaaggatgaccgtcgggacagatactc

SEQ ID NO: 243843 - DNA, 75 bp, Homo sapiens
gcctgctcctcaacatgctgcagctggatgaaaaagaaagtcggcgtctgttccaacagatcctttctggtgtgg

SEQ ID NO: 243844 - DNA, 100 bp, Homo sapiens
agcaagcggcccccacccaactacctgtgccacctgtgcttcaacaaaggacactacatcaaggactgcccccagattgtgttcacctattgaaaattaa

SEQ ID NO: 243845 - DNA, 90 bp, Homo sapiens
ggaaggctcgcctatccaggcctggcaactcttcgtcaatgagggggcatatgatattttcctgaatgcaaaagagcaaaacattgtgtt

SEQ ID NO: 243846 - DNA, 90 bp, Homo sapiens
ggtagtgccagtttcaatctcagggaacatggtcgtaaatgaagagtgtgtccgaaaagactttgaatccagtatgaatgtagtacagga

SEQ ID NO: 243847 - DNA, 75 bp, Homo sapiens
atttccccagaggagctcaaaatggagttgccggagagacagcccagggccttcctccggatgctcttccccgag

SEQ ID NO: 243848 - DNA, 100 bp, Homo sapiens
ggaagaagcagaaatggaaattgacagaattctctttgaaattacagcaggaattcctcctgatcagcagagactgatctttgctggcaagcagctggaa

SEQ ID NO: 243849 - DNA, 114 bp, Homo sapiens
attgacatgcccccgaaagtgttaagcacatggtggagaggcaagcacggattccaggcaatggtggcttgctatccgggaaatggaacaggttatgttcgccacgtggacaac

SEQ ID NO: 243850 - DNA, 99 bp, Homo sapiens
cgggcgcagaggcctacatcccacagagatacccagacaacaggatcgtctcgtccaagatattctctaagccgctttcatcatgggagaaatagagca

SEQ ID NO: 243851 - DNA, 100 bp, Homo sapiens
gcacctgcgcgaagctggccaaagcctgcccagacggctcacctgtgcgggatggaacaaaagaaagtgaagtcactgcttttgctgtcttggatcaaga

SEQ ID NO: 243852 - DNA, 100 bp, Homo sapiens
ggggagatcaacatagacagcagtggtgaaacagttggatctggagggaaagaatatggcaaagctgatgcaagatgggtttattttgatccaaccattg

SEQ ID NO: 243853 - DNA, 100 bp, Homo sapiens
tgcacaaggaaaggctgcaagccatagcacaacaaaggagagagcgggaagctagaaggcagcaggaacgtgaacagcgaaggagagaacaagaagaaaa

SEQ ID NO: 243854 - DNA, 101 bp, Homo sapiens
gccgctcccgggggccgtgacggatgtaatccctgttcattactacttaatacctccaccaacaaagactaagaatggcagcaaagataaggaaaaagatt

SEQ ID NO: 243855 - DNA, 87 bp, Homo sapiens
gaaacctggatctttgctagaaagagagagcaaatcatggaggaagataaaaaacatggtgcactggtctcccttcgtcatgtcctt

SEQ ID NO: 243856 - DNA, 75 bp, Homo sapiens
ccagccgcgttctcctccgccgctcctccgggcttgccctggagccctcagcctcgctcaaggagcacccccggg

SEQ ID NO: 243857 - DNA, 82 bp, Homo sapiens
ctgcgaaaggatcaagggataaaccatgcgtttatcaatccggaaagagggagatggggaagccaaatctgctaaacctgga

SEQ ID NO: 243858 - DNA, 50 bp, Homo sapiens
aggcagcacaggacctggaaaaattacataatggactgctgaattatgaa

SEQ ID NO: 243859 - DNA, 100 bp, Homo sapiens
agtcagctgtgtgtccagaacgtgccatggagacgcttaacgatacccagacaaatggattctaaaatttgaatagaagagcaaagaaaataggaaccaa

SEQ ID NO: 243860 - DNA, 78 bp, Homo sapiens
ttttgccctcaccaaaactttctctcttgataagttggttgaatctggcgatgtggaacccatggatatggagggctg

SEQ ID NO: 243861 - DNA, 82 bp, Homo sapiens
gttgggactaacagctggagagaacagttcattgaagctatcactgtcagtgctggtggacccccaaaagtacaagggcata

SEQ ID NO: 243862 - DNA, 100 bp, Homo sapiens
tggggagacccatctggactaccaaggagaagctatagactacttctactccaccaggaagtgggtccgccattaggtactcagacagagttaagaccgg

SEQ ID NO: 243863 - DNA, 74 bp, Homo sapiens
gacttttctcaaaactggaaggcgctgcaagaggactactcaccaggggattctccaccagggacaccgccagc

SEQ ID NO: 243864 - DNA, 50 bp, Homo sapiens
ggaagccatggagcagatacgtagcatctttccctggcccattgaaagaa

SEQ ID NO: 243865 - DNA, 83 bp, Homo sapiens
aacggctgcctaatttacagcaaccatgagccagcgtcccatgctcggtggccccagaaaagtcagtgtgtaggcctcagcca

SEQ ID NO: 243866 - DNA, 101 bp, Homo sapiens
tgtcttcagatcttcacagcacagttcctgggaaggtggagccaccagcctctccctgagtctcactgtcgcccaggctgcagtgcagtggtgccatcacg

SEQ ID NO: 243867 - DNA, 100 bp, Homo sapiens
agcctagcacctcttatactgatatttgcctgcaatggataacccagtgtttttggaattacttagattggatagaaatctgccattatattgctacttg

SEQ ID NO: 243868 - DNA, 80 bp, Homo sapiens
caccctctgcttaccacagccaggtcagcccaaggccaaccccactgtcactctgttcccgccctcctctgaggagctcc

SEQ ID NO: 243869 - DNA, 83 bp, Homo sapiens
tggcatctgccggctgctccgcaccccggggtcccaggaagggcggcccaggttccctcggagacatggaggccagagaggag

SEQ ID NO: 243870 - DNA, 96 bp, Homo sapiens
acgtttgatggctcatcaaactgcaatgaacagcgccttttgatagtcctaagtaattgctgctatctagaacgtcacaccttcctaaatatcgca

SEQ ID NO: 243871 - DNA, 96 bp, Homo sapiens
aagttgggtttcttttactggcaaatagtacttcaagagcacagtcttatgtaagatgatatcatcaagttgaatcgaaaggaagggaagaagcag

SEQ ID NO: 243872 - DNA, 136 bp, Homo sapiens
acttcctgatctctctcgctgtgagacatgtctgagactcctgctcagtgtagcattaagccctgtatgatgagattcgtcagtttcgcaaggcctgtggggaggctcatcttaaaactatattagcgacaggaga

SEQ ID NO: 243873 - DNA, 100 bp, Homo sapiens
tcgacttggtcccgtcagccggaccccacctggacggctggggccacttgtggtcgccgggaggaagggaaaaggccgaggcatcagcgtgtgaagaccg

SEQ ID NO: 243874 - DNA, 90 bp, Homo sapiens
cagcaagacaatcactgcagagataccagattccacaccaaatcatccatcacaaacaacgcctgcccaaaagaaaactcccagttcttc

SEQ ID NO: 243875 - DNA, 100 bp, Homo sapiens
ctcaccagaagaggttcttgggggtcgcccttctgaggaggctgcggctaacagggcccagagtcatcttagtgggatttggggaagcaacagggctgtg

SEQ ID NO: 243876 - DNA, 88 bp, Homo sapiens
tgacatgagccatgggtacgtgacagtaaaggacctgggcgtgaccaaggtgggccacatgaagaggatcctgtgtggcatcaaggag

SEQ ID NO: 243877 - DNA, 100 bp, Homo sapiens
gaacccacgaccattatatgctggaatggttccttgtggcagctgccaacaagaagcattagaacaaaccatgctgggttaataaattgcctcattcgta

SEQ ID NO: 243878 - DNA, 100 bp, Homo sapiens
cagtgcagcaactcagagcctgcggggtgttggagacgattcgaatcagtgcagctggctacccatccaggtctttgatttgcgtcagtgtcatcgacag

SEQ ID NO: 243879 - DNA, 75 bp, Homo sapiens
ctgaagcaacccaattagcatctgaacaattgcaagcaaacccgaaaacagtggccaaatgtcaggtaactccca

SEQ ID NO: 243880 - DNA, 83 bp, Homo sapiens
gcggcaagatcgtgtatcccacggagaaggtgaactgtctggataagggaacggcaggagcagctgatgggatatcggaagag

SEQ ID NO: 243881 - DNA, 51 bp, Homo sapiens
tgaagattgtgaagcaatagcctaaggagcctgccagatgtgtctgctaca

SEQ ID NO: 243882 - DNA, 75 bp, Homo sapiens
gtgaccgagaccgcggccgggaccgaggggctgatggagttatgagaacaatgaacacagaaaaactcctaaaaa

SEQ ID NO: 243883 - DNA, 75 bp, Homo sapiens
tggaggcctacttgcagcatattacctatcaggagaggagacagtgtggagcattcattattaagacaattgggc

SEQ ID NO: 243884 - DNA, 100 bp, Homo sapiens
caactgccatttcaaagaatatagatggttttgaaaagttcatgctgtcccttcattgaattttaggtatggcgtgagtcccgagaacattatcctctat

SEQ ID NO: 243885 - DNA, 74 bp, Homo sapiens
ttgtcaaggtggcctaccaggaggccaggggtgtcgccatggtggacccccaaaagtacaagggcatatttaac

SEQ ID NO: 243886 - DNA, 82 bp, Homo sapiens
ctcaggccagtcgcctccaggccaagagggatccttcacccgtgtctgactgcctctgtcaccgggtccctccacccttgtc

SEQ ID NO: 243887 - DNA, 75 bp, Homo sapiens
aggctgcacacccctgcactatgcagctacatcagacacagatggcaagctggtgattagtaactaaagcatatg

SEQ ID NO: 243888 - DNA, 100 bp, Homo sapiens
tcccaaagtactttgtgcagtaggagggaaatctggactctttgcctgtttggatagtgaagtttagcaactgcaatggaaaaagaaaagtacaatatga

SEQ ID NO: 243889 - DNA, 85 bp, Homo sapiens
ggcgccgcgggacctctccgggccatgggagaactacgatgacccgcacaaaacccctgcctccccagttgtccacatcaggggc

SEQ ID NO: 243890 - DNA, 96 bp, Homo sapiens
agacagtccgacctgatgtcaagaaccaggatgatgacatggatatccgtcagtttgtccacatcaaaaaagtattaatgctccctggaaatgctt

SEQ ID NO: 243891 - DNA, 80 bp, Homo sapiens
gtgagcgcgccggaccaagcgggcccagaagcgggttcgtgctggccgtgggcagcgccgtctttgatgccatgttcaac

SEQ ID NO: 243892 - DNA, 100 bp, Homo sapiens
aacttcaaacctgacaaatgtgcaatcttaaaagaaactgtgaagcaaattcgtcagatcaaagaacaaggtcgctctggtgcagtggacagagagtgtg

SEQ ID NO: 243893 - DNA, 100 bp, Homo sapiens
ccgcctcctcccaccctgagcagagccgccgaggatgataaacacccaggacagacacatcatctcagagttggagcacctgacgtttgtcaacacggat

SEQ ID NO: 243894 - DNA, 95 bp, Homo sapiens
cgggcagagaccatgtttgacaagacgcggctgccgtacgtggccctcgatgtgctctgcgtgttgctgggaggaattgttgataaagaccttcg

SEQ ID NO: 243895 - DNA, 75 bp, Homo sapiens
tcctaaatttcgtagtctacactttctgaattttccaggagatatctgaagagattataggatcacccatcccag

SEQ ID NO: 243896 - DNA, 90 bp, Homo sapiens
gagcaaataaccgttttgaaattaggagaaggcagagcccccccaggctatgaatgccctgatgcggttgaaccagctgaagccagggct

SEQ ID NO: 243897 - DNA, 100 bp, Homo sapiens
gcctgcggaacgaaagtgaacaggagccgctcttaggcgacacacctggaagcagaaatcttacaggctggtgttaaaggaacttcggaatcccttaaag

SEQ ID NO: 243898 - DNA, 97 bp, Homo sapiens
aattcctgtggtgacgtcagaccaatttgcttgtaaatgcatcacgaagaggcagcccagaatgaagaaagcaagcaggagtgttggctcagtgcct

SEQ ID NO: 243899 - DNA, 82 bp, Homo sapiens
gaattggaagaggaggcagaagaggagcagcgcatcctccagcagtcagtggaaagtgccattcagaaagctcgccagcgag

SEQ ID NO: 243900 - DNA, 83 bp, Homo sapiens
gatttctcagaccaagaagaagcagtgggattttttatcaagcagaaatgcatcgaacaacgagaatcaagatcactgagcta

SEQ ID NO: 243901 - DNA, 75 bp, Homo sapiens
ccggggtgtgccggggggaaaggggcagcatgatggtctgagatggtccaatgaagcgtcaagtggcagtaaaat

SEQ ID NO: 243902 - DNA, 100 bp, Homo sapiens
tcgggcctggtgctgctcgcctacttcctgccggcgcagggagggtgaggacaaaatcttcttaatcaacaagcttcactccatctacgagaggaaggag

SEQ ID NO: 243903 - DNA, 115 bp, Homo sapiens
tctcacaatgaggctccctgctcagctcctggggctgctaatgctctgggtctctgacctgcctagagctggaacgttacctccagagcgagccctgctatgtttcagcctcaga

SEQ ID NO: 243904 - DNA, 90 bp, Homo sapiens
aaaacaacgacctaagcatgtttgtgcttctgcccaacgacatcgatggcctggagaagagtattgggaaagggtcgttgtggtgcatag

SEQ ID NO: 243905 - DNA, 90 bp, Homo sapiens
ttacaaagtccatgctaacctactatgagggtcgagcagaggtcttgttgcagtaggagaaagagcacaaaagaggtctgggaacttctc

SEQ ID NO: 243906 - DNA, 75 bp, Homo sapiens
cgggcttcatgctccagttctacagtgacaaccatgagtggaaaaaactaattatggttcagcactggcctgaga

SEQ ID NO: 243907 - DNA, 96 bp, Homo sapiens
tgtcgctgtgctacacttacttctacatggtttatgaaatctgaaatcaggtcatacttacctggttgcttgcgcatctagtaatgttggatcata

SEQ ID NO: 243908 - DNA, 100 bp, Homo sapiens
gtgcccactcaccagcttcttcctgcggtcatcgatctggcagaaacttctgcctggtgtcgaaggtggtgggcagatgccgggcctccatgcctaggtg

SEQ ID NO: 243909 - DNA, 98 bp, Homo sapiens
ccatcttgagtctactctgtcgctcttgtgccctagcaccccgagaaccgtcagtttgagccagatgggttctccaaaaaatgtggaatcctttgcat

SEQ ID NO: 243910 - DNA, 100 bp, Homo sapiens
aaaatctccccggtgactttcagctcatgggcctcctgagtgacccagaattaggtccagcagcagctgatggcttctctctgctcatgtctgactgcac

SEQ ID NO: 243911 - DNA, 100 bp, Homo sapiens
ctgatctaggacccaggttgtgcagtgcctatgatttcagaagaaagtggtagcttcctttccaagaacagttctgagcacaggaatggataaccggtac

SEQ ID NO: 243912 - DNA, 98 bp, Homo sapiens
ttcagctcttgggtttagcaaaagttcatctccttctgcatccttaactgagaatgagatggagggagcgaggaaccaccggatcgaagacagtcaag

SEQ ID NO: 243913 - DNA, 140 bp, Homo sapiens
cgatgaggaggtggatgagatgatcagggaggctgacatcgatggagatggccaggtcaattatgaagcctcctgacaaggtgatccgggcgggccccgcaggaattttatcccctcaccggcctcacactagtatcgca

SEQ ID NO: 243914 - DNA, 138 bp, Homo sapiens
gttaaactcctgctctgtttactgtggattggatattctcaaggaaccacacatgtattaagatttgatgcttgtgaccacaccagaaaaatgggatgtagtgacaagaaagagtgttggggatgtagctctttccca

SEQ ID NO: 243915 - DNA, 82 bp, Homo sapiens
ggaggcggcgaggagcgcctgcctgaggagagcagcatcctttcctgaaactggccaaaccgttatctagcttgacaccact

SEQ ID NO: 243916 - DNA, 78 bp, Homo sapiens
catgagaggcgagcacaactcgacctcctatgactctgcagttagtgggaaaggtttttattcctggactgccagctc

SEQ ID NO: 243917 - DNA, 98 bp, Homo sapiens
tccgccccgcgagcacagagcctcgcctttgccgatccgccgcccgtccacacccgccgccaggccttctctgccttcttctacactgtggacttttt

SEQ ID NO: 243918 - DNA, 75 bp, Homo sapiens
gatgtcggcgaagccgcgggcgagcaaaatgatgcttcaacacccaggccaggtctctgcctcggaagtgagtgc

SEQ ID NO: 243919 - DNA, 100 bp, Homo sapiens
tgaatttgcccaatgttttgatgattggcagagacccactgtctggctgctccagttacagcaccacccggccgctgcacccggctgctcccaggccccc

SEQ ID NO: 243920 - DNA, 101 bp, Homo sapiens
ctgccggagcccgagtggatcggggacggagagaacacgagcccatcagtgtgtgttttaatagaaaagttgtcactttccaaaatgccctttagaggtga

SEQ ID NO: 243921 - DNA, 100 bp, Homo sapiens
agaataatttctttctcgctgatcgcctaacttctactgacgaagcttggaagttgcagaagatttgggagcaaaagcaagtctgccactaacctaggac

SEQ ID NO: 243922 - DNA, 90 bp, Homo sapiens
ggggccgggagtttgcggattttgaatatagggtgcctgaaagaagaccctgctaccatgtccctgctgcagagaagccttgatcctgag

SEQ ID NO: 243923 - DNA, 98 bp, Homo sapiens
catctatctctggaaactttcctcctccaccacctcttgatgaagaggctttcaaagtacaggacaatcatatcctgattcagcccttcctccacaaa

SEQ ID NO: 243924 - DNA, 49 bp, Homo sapiens
cagcatattacctatcaggagaggaggccagacggttttgctgtctcag

SEQ ID NO: 243925 - DNA, 113 bp, Homo sapiens
cggttccaacatggcggagctgacggtggaggttcgcggctctaacggggctttctacaagttcagcctgagaaaactcctgagcatgtgcgaaaaagaaaagaagaaaagaa

SEQ ID NO: 243926 - DNA, 83 bp, Homo sapiens
cagagcggagggagccccagacacggttattcagcttctcaaggctggaaaagcgaaggaagtttcctacaatgcactagcct

SEQ ID NO: 243927 - DNA, 73 bp, Homo sapiens
aggaggaggccatcatcatgaaggacgtgcccgactggaagccatggagccagagagggaagggaccgagaga

SEQ ID NO: 243928 - DNA, 75 bp, Homo sapiens
cagcaggatgtcagtcttttgaggaaacagagactacccagtaaagaactaccagattcatcatctccagttcca

SEQ ID NO: 243929 - DNA, 100 bp, Homo sapiens
ggacaaatgacattcttcggctgtttgtggctctgcagggctgtatgtgaaactggaacgccaagctgaagaagaacgaatacggaagcacaaagcagct

SEQ ID NO: 243930 - DNA, 96 bp, Homo sapiens
cgccatcctgtctatcctcctggccgtcctcctcacggtcctcctggctgtgctcatatacacctggtctgaaggggcgtctcgattacctgagct

SEQ ID NO: 243931 - DNA, 82 bp, Homo sapiens
gaggttgcagaccccacggcccaccggaggagcctccagttcgtgggggtcaacggcggaacaaaatccagtctcatagcag

SEQ ID NO: 243932 - DNA, 98 bp, Homo sapiens
ccggtggagcagctgggctcggcgctgaggtttcgccctggctacaacgaccccatgtcagggtgactcccacacgggtcatgctgttgtctcctgat

SEQ ID NO: 243933 - DNA, 82 bp, Homo sapiens
tccagccacggccactggctcctccccgtctcctgtgctaggccagacctgcctagagctggaacgttacctccagagcgag

SEQ ID NO: 243934 - DNA, 75 bp, Homo sapiens
gatctcttaattcaacagaaccatattgggagtgtgattaaggtcagaatagcaatgttggaaagttgaaaacac

SEQ ID NO: 243935 - DNA, 75 bp, Homo sapiens
ccgtcatcaccatcaccttcaatccgctctactggaatgtgtaatctatgccagcaattatgacaatgttagcag

SEQ ID NO: 243936 - DNA, 50 bp, Homo sapiens
taaactgcagaagagcagcctctgttcctgattatgtcactgtaataaag

SEQ ID NO: 243937 - DNA, 95 bp, Homo sapiens
ggcgattcggtgaagcgattcctgcaggcgttggttcccctctttgacctggtacaagaaaattccccaggacacagagctggtttggagccttt

SEQ ID NO: 243938 - DNA, 73 bp, Homo sapiens
agcctctgctgacgcctgataatgtggctaatctggttcctttgcccaaagactcaacaggtgcagcagatcc

SEQ ID NO: 243939 - DNA, 75 bp, Homo sapiens
ccgagctgaacaggaccagtgcaatttagaggtgcatggtcctactgctctgttggctcatgaaataggttttgg

SEQ ID NO: 243940 - DNA, 100 bp, Homo sapiens
tgggaggtcggcggccccaaaaccctgttcacagagacaccccatgacatgacagcacggacgggcgaggacgtggagatggcctgctccttccgcggca

SEQ ID NO: 243941 - DNA, 101 bp, Homo sapiens
ttggcataaaaaatggctatgacttctatcctaaggcactcaaggaaaggatacaggatgagagccactcagagtgggtgtcttgtgtccgcttctcgccc

SEQ ID NO: 243942 - DNA, 75 bp, Homo sapiens
gtcctgcctcatcccagccatgtcatcttatctacgaaatgattcaggtaggagcattgcttttcgtggtgaaag

SEQ ID NO: 243943 - DNA, 75 bp, Homo sapiens
gccagccccgccgccctcgcaacctggcagccgccgccgtggaaggggcgtttatgcaatgagcctttggatatg

SEQ ID NO: 243944 - DNA, 100 bp, Homo sapiens
gctaacctggtgcggagccagcctgggtctcagccccgcgtacggcctttcacgagtcttcaagccttcaggtctcagccaatttcttctccagtcatcc

SEQ ID NO: 243945 - DNA, 97 bp, Homo sapiens
aacaacaattccgatggcaaagccgttgccaaggtccgattcccatcccacttcagttcagatctcaaggaccttctacggaacctgctgcaggtgg

SEQ ID NO: 243946 - DNA, 83 bp, Homo sapiens
ggtcgccctcaaggccatgatcaaaacctttaaggatttttatgaactggagccagagaagttccagaataagaccaatggca

SEQ ID NO: 243947 - DNA, 75 bp, Homo sapiens
ggagtgacggtgccaccgcggcgcgtcaccgaggaggagcccagctccaaccacacggtcatgatccaggagacg

SEQ ID NO: 243948 - DNA, 100 bp, Homo sapiens
tctttgatatgttttttggaggaggaggaaggatgcagagagaaaggagagccacaagtatatggttatgatgacttgcagatgcttcagacaagatttc

SEQ ID NO: 243949 - DNA, 75 bp, Homo sapiens
cgtgggtatcgaggcggacgacgaccggcctgatggagagaagaaggcatatgttcgactggctcctgattacga

SEQ ID NO: 243950 - DNA, 100 bp, Homo sapiens
gcggctcagccgtgggctggtctgggctgccacgacaggtgccttgcacaccaagaggcctcaagtggtcaccaaatatggaaccctgcaaggaaaacag

SEQ ID NO: 243951 - DNA, 100 bp, Homo sapiens
ccgcgccgtccgcgccgcccgttctgactggcagaagaccgaggcccagaagcgacgcgaacagcttctgctagatgagctggtggccctggtgaacaag

SEQ ID NO: 243952 - DNA, 100 bp, Homo sapiens
atttggctgattcacttgttacaggaatcacagctctcaatagcatagagggtgtttataggccctagactggagctggttacagacggaagaagaagag

SEQ ID NO: 243953 - DNA, 74 bp, Homo sapiens
ctgggagtagatattgtcctagatgctggagggagggacattgcttgggcctccagactctgtggttgatgtgg

SEQ ID NO: 243954 - DNA, 100 bp, Homo sapiens
gtagcagagatcactgggagcaaatatccagaacagaaaaagtcgctggagtcgatcaactctaggctccaactcgttatgaaaagtgggaagtacgtcc

SEQ ID NO: 243955 - DNA, 74 bp, Homo sapiens
ggaggtgggcatcaccttctgggtcattcacagggtggcatagaggtgtgggaaatggaactggatagactcaa

SEQ ID NO: 243956 - DNA, 75 bp, Homo sapiens
ctggcgactgggccagcattcattgtgaagaccggagggacacaccctgctgggggatatgagactttctactcg

SEQ ID NO: 243957 - DNA, 80 bp, Homo sapiens
tttgaagcgcttcaaaggaccggacccagagaagaggaaaactctaccggtgcagaccactttacctgcattgtgaaggt

SEQ ID NO: 243958 - DNA, 100 bp, Homo sapiens
cgtgaactgaagggacagggaacagccagacgagagcttcagccatcacgaggatgatttcggaacctggagaaaatcaaagatgtcaaggaagttaagc

SEQ ID NO: 243959 - DNA, 100 bp, Homo sapiens
tctacttggattaaaaaccaagatgacagcttgactgaaacagacactctgggacacttggcattcagggacgtggccatagaattccctcaggaggagt

SEQ ID NO: 243960 - DNA, 100 bp, Homo sapiens
aggccacagcaggatcacccctgggtttcatctgccactgccccaagctcagaggccctatggacagcgatgacagccatggatctgtgctaagactcag

SEQ ID NO: 243961 - DNA, 82 bp, Homo sapiens
ccagtggtggctcgcggcggcgccccgccctcccgaggaagctgatccagttcgggcttatgaagaacctcatcaggcgact

SEQ ID NO: 243962 - DNA, 50 bp, Homo sapiens
ctggaagtactgtgcctgctgcaaggtgggcgacatgaccaacagaaagc

SEQ ID NO: 243963 - DNA, 82 bp, Homo sapiens
acgccctcacggtggacgcccacacagtcgtcagccacccggacaagtactgcttctacgagggcagcgtcatcgcctacta

SEQ ID NO: 243964 - DNA, 75 bp, Homo sapiens
ttgaagtgcttggagtgcagaactgaaagagttggttgaatctggcgatgtggaacccatggatatggagggctg

SEQ ID NO: 243965 - DNA, 80 bp, Homo sapiens
tcctgtagcgtccatcctgccagagactgtactgcttagggtacctggagtagaacagaaaaattattatgtctgtgttc

SEQ ID NO: 243966 - DNA, 75 bp, Homo sapiens
caattcctgtggtgacgtcagaccagtgaatcagctcccggccgactttaggattcttctggattttaaattttt

SEQ ID NO: 243967 - DNA, 120 bp, Homo sapiens
ggtgaccacttttggaccaaaggcctgtgtgctgcagaacccccagaccatcatcccgagaccgaggacgagaagaagcgctttgaggaaggcaaagggcggtacctgcagatgaaggcg

SEQ ID NO: 243968 - DNA, 102 bp, Homo sapiens
ctcctaatgaaaaacaacttttgataacacggataacacagtactatcaccttcaaagtgtttgaagtgagcttgtagtggacaaaacaaagaggaaaaaaa

SEQ ID NO: 243969 - DNA, 100 bp, Homo sapiens
gctgtcctttgttttggattacataaaccagtcacccaagtgcattgcctttggaaacgaggcttttgaacacttgcagcaattagaattaataaagccc

SEQ ID NO: 243970 - DNA, 100 bp, Homo sapiens
tcgtcttccacttgcacgaaagctttcctaggccaaaaagaggttgctccttgagggcaggacagttcttatggctttatccgttgcgtaagcacagaga

SEQ ID NO: 243971 - DNA, 82 bp, Homo sapiens
gctgggtcctgatgaaagcaaacagaaatttgtgctcaaaacccccaaggtactattttgaagcgctggaagaagaactggt

SEQ ID NO: 243972 - DNA, 98 bp, Homo sapiens
gtttcattctggacagctggtaaaagtctgtgccccaatggttcgatattcaaaatgtcagtattgaatatggtggtgaggcgtgaccctggcaacac

SEQ ID NO: 243973 - DNA, 100 bp, Homo sapiens
ctggagcagcgggaggcggcatggaggcgcgaggaggaggtggacccaagtggagagattgtggaactggcgaaaggtgcatgtccctggaaggagcatc

SEQ ID NO: 243974 - DNA, 100 bp, Homo sapiens
agaaatcctgcggatcacagacccaaaggtcaaagaattgactgtagatccaactgctgctggtgatgttcgtccaataatgcaccatccaccaaaccag

SEQ ID NO: 243975 - DNA, 88 bp, Homo sapiens
ttccctgacatcatccatctacaaaaagacagattacatcaatgccagtttcatggatggctacaagcagaagaatgcttacattggc

SEQ ID NO: 243976 - DNA, 51 bp, Homo sapiens
atggcttacaatgttcagcaaggtacctagtagaactgggttgtatcaagc

SEQ ID NO: 243977 - DNA, 75 bp, Homo sapiens
ggctccctcgggcacctccggtaccgctgcagccaccgcggcccccgcggagctagagccggtgcaggccacgca

SEQ ID NO: 243978 - DNA, 83 bp, Homo sapiens
gccaggcggggacaggacggcggggcgagccaggttcagtgtggtgcagggctgaccttactttggagccccccagatcacat

SEQ ID NO: 243979 - DNA, 75 bp, Homo sapiens
gtcaacctcgaggtggatgtggtagacagcaagccagaggactcacaccacccggcaagaactgctcactacggc

SEQ ID NO: 243980 - DNA, 132 bp, Homo sapiens
gcgacgagctcagcaacatcgctatgcaggtgcggaagctggtgggcactcagcaccctctgcttaccacagccagaactttgcagaaaacaccatgaatgaactccttggctggtatggctatgataaggt

SEQ ID NO: 243981 - DNA, 100 bp, Homo sapiens
ggagcgccgagcgtcgccgccgccgccgccatgaacaactcgggcgccgacgagatcgggatgatcggctgaatgtaacagaggaactaacgtccaacga

SEQ ID NO: 243982 - DNA, 98 bp, Homo sapiens
gcacgactacgctctccgaaacctcatgggcagtttctcccgccggcgatgtgccagatgtgacatccagatgacccagtctccatcctccctgtctg

SEQ ID NO: 243983 - DNA, 73 bp, Homo sapiens
ggaggctgtgctgaagctgtctctcgggtcctcaataagcttggagttgctctatatgcaatcagtgctgtct

SEQ ID NO: 243984 - DNA, 89 bp, Homo sapiens
catgagctcagttggccatatttctgtacctggaattcccaccttagctggatctccaaaatacaagtgaatcacccggcagttctgag

SEQ ID NO: 243985 - DNA, 82 bp, Homo sapiens
tgaagagcgacaagccgctggcagccgcggatctcaccgccgctcagggtgctggagaatctggtaaaagcaccattgtgaa

SEQ ID NO: 243986 - DNA, 75 bp, Homo sapiens
gttagcccgtcagtccctgctctgtgcgcgcctccatctgggccatggatggagacacctatggctgccgatgaa

SEQ ID NO: 243987 - DNA, 74 bp, Homo sapiens
agacgaggtgctattcgagtgctagtggtggaacgggaccacacgctgcaagctttcttcctggtggcagatga

SEQ ID NO: 243988 - DNA, 51 bp, Homo sapiens
ggcagaactgtttgaaaatgcttggttgggcttgacattcaggatgagatg

SEQ ID NO: 243989 - DNA, 97 bp, Homo sapiens
ttgtccattggaaatagaacgcatcaaaatcgagagtcttctctacagaattgcctcatttttgcaactgcgtccgtctccaagagagtatgaagag

SEQ ID NO: 243990 - DNA, 100 bp, Homo sapiens
gtcaaagttccattttaacccattaatgatggaaacagtgggatgacaaaggtgcttcaaaggagaatgcagatactgatggaacgtcgaattagaccat

SEQ ID NO: 243991 - DNA, 127 bp, Homo sapiens
taaatgtgttgtccataataccctgagttttcagacactacgcaccacagtcaaggaaggtagacgcaccctctgaagatggtgactccctcctgagaagctggaccccttggtaaaagacaaggcc

SEQ ID NO: 243992 - DNA, 100 bp, Homo sapiens
cacctgtctggagcaaggaaaagatccctggaatatgaagagacacagtatggtagccacacccccaggtgagccgttctccaaccctttggcccccgat

SEQ ID NO: 243993 - DNA, 100 bp, Homo sapiens
gcgctggtgggcctggcggccaacgtgggaccctatggctccggagacagtgcacccctcaggaaagccaccagggtgggtggcgagcctgggatcacca

SEQ ID NO: 243994 - DNA, 100 bp, Homo sapiens
gcgacaggtgtcgcttgaaaagactgggcttgtccttgctggtgcatgcgtcgtcggcctctgggcagcagctgtcctgagagcacgtctctacatctct

SEQ ID NO: 243995 - DNA, 75 bp, Homo sapiens
ggctgtcgcggcccccacctcaggtagcagaggctcaacgggcagagtttagccctgcccagttctctggtccta

SEQ ID NO: 243996 - DNA, 90 bp, Homo sapiens
gccacatgaaagttttcagcctcatccagcaggcggtgacccgctaccggaaggccatcgccaagggttctcatgtatcagccatcttct

SEQ ID NO: 243997 - DNA, 75 bp, Homo sapiens
caatgaagctcctgaagccgacctgggtcaaccacaatggtaagaacaagagagttggaaagcagttagcctcac

SEQ ID NO: 243998 - DNA, 100 bp, Homo sapiens
gggcattcagactaaaatctacaaccttctcattcagacacacgccatggaattccatgaacacttgcacagcataggcaccaaggaaggtttgaaggaa

SEQ ID NO: 243999 - DNA, 100 bp, Homo sapiens
ccagagaaagtcctcgctcgtcaccagcaagcttgcggggtggataatattaatgcagctgtgatggatttgaaaaaaaagaagatccgcagtctaagtg

SEQ ID NO: 244000 - DNA, 100 bp, Homo sapiens
gtcagagtggacagattgctttccgtgccaggacaaaaaggttgggccatgcaggctgctgcctatatcttcattcataggaaatggaaggatgacaaga

SEQ ID NO: 244001 - DNA, 100 bp, Homo sapiens
agtgatagtgatgattcagaaacacaaagctgttcttttcaaaatggcattgctgtatatgatttaggtggtggaacttttgatatttctatcctggaaa

SEQ ID NO: 244002 - DNA, 100 bp, Homo sapiens
acacctgtaaagaatattgacccagtaaagaataagagttgtggaaagtaaaaatgtagccctaccaaaaggaactattgtactggcttctccaggctgg

SEQ ID NO: 244003 - DNA, 51 bp, Homo sapiens
ctactgtggtttatctagctgaagatgggtgaagcaagaagcatttcattt

SEQ ID NO: 244004 - DNA, 82 bp, Homo sapiens
cagaccctggagcctcagttggaagcagccgatccagcctgcggagcctgtggggcaggaagcaggagctggccaacagctc

SEQ ID NO: 244005 - DNA, 82 bp, Homo sapiens
tttgtttactgatctttcaaacaacttcagaaaatggaatacattctgaatttagagaggcatttcatccttcatgaagcca

SEQ ID NO: 244006 - DNA, 98 bp, Homo sapiens
ctgcttatggcggcgctggagagggggcgctgagctgttgggttatataagtttggagagacagtttctattgttttttggacagacacttggagacc

SEQ ID NO: 244007 - DNA, 97 bp, Homo sapiens
aacatctcaccaattttaaatcagaaaaagttagctgctatgcctgaccatacagatgtttccctaagcccagaagagcgagtccgtgccctaagca

SEQ ID NO: 244008 - DNA, 98 bp, Homo sapiens
tggacaggaaaattcagagcctgggagacagcaagaccattcccgaccatgctcgacagctgaccaaggccatgatgcgaaaggccacggccagccgc

SEQ ID NO: 244009 - DNA, 85 bp, Homo sapiens
atccccccacagaccctggaagaaagcccctctcacacagtgtattcctaggaaagataaaggatgcatttgatcgaaacccgga

SEQ ID NO: 244010 - DNA, 74 bp, Homo sapiens
ccctgaagtgcttgatatcacagaggaaactctgcattctcgcttcctggaggctatgagaaatataataccat

SEQ ID NO: 244011 - DNA, 83 bp, Homo sapiens
cacaaatgtgaacacagttttaagaattcctcctaatcattgaaagaaaatcttgcaaggtgttggacacttactgaagcaga

SEQ ID NO: 244012 - DNA, 75 bp, Homo sapiens
cgacataaagcacgtatccgtggactattcagtgctattacccgccaggaggaagaagaggaggatgaggaggct

SEQ ID NO: 244013 - DNA, 74 bp, Homo sapiens
ctgtgtctgcctccttcttgaatagcccagtgaattcatctaaacagccaaagaaagatctccatttcctgatg

SEQ ID NO: 244014 - DNA, 83 bp, Homo sapiens
ctgatctccatgtcctgttgtggggcttttacagcctttggacggtcctaaaatctctacacttgccaaaaaacaacagtctt

SEQ ID NO: 244015 - DNA, 98 bp, Homo sapiens
ggctccgtgtctgcagctagtgtgtcaactcagcgtttctcctctcgtccctgggtcttactctgtcacccaggctggcgtgccatggtgcagtcata

SEQ ID NO: 244016 - DNA, 82 bp, Homo sapiens
tgaacggaagcgtctttgctcaaggatcccagttttctctggatgacgtgctggagaagaagcaggcgctccctccattcca

SEQ ID NO: 244017 - DNA, 88 bp, Homo sapiens
aggatttggctttatccgcttggccctttggacaggcacttcggcccctcctggactccattcagatccagcctccaggagggagctc

SEQ ID NO: 244018 - DNA, 100 bp, Homo sapiens
gacagaagcagtgaccgtgcccacgccaaggctggcaggcgctggtgggcgcaagaaaattttccgtctcagcgacgtgctgaagccccttaccgatgcc

SEQ ID NO: 244019 - DNA, 82 bp, Homo sapiens
tgcgaggcctcccgggctccgggaaaactacactggccaggtgctggagaatctggtaaaagcaccattgtgaagcagatga

SEQ ID NO: 244020 - DNA, 74 bp, Homo sapiens
gtaaagttccagggaggccgcgaaggttggatggcaagcatgtggtgtttggcaaagtgaaagaaggcatgaat

SEQ ID NO: 244021 - DNA, 75 bp, Homo sapiens
ctgtgcttgccaggcctggctccaacttcctagcatgggctgttgtgctggagagaacgagagctacgaagagac

SEQ ID NO: 244022 - DNA, 99 bp, Homo sapiens
tcttggccctggcctcccactgccgggccatgctgacggaccccgtgaggtatttgaagtataccatacaactgttttgaaaatccagcgtggacaatg

SEQ ID NO: 244023 - DNA, 75 bp, Homo sapiens
cgttatttaccatatccagtatgatgactactgtgtgaagacattcacaggacacagagaatgggtacgtatggt

SEQ ID NO: 244024 - DNA, 95 bp, Homo sapiens
agaagctgcggaaggaggacggggtcagggccagcgaggccttgctgaaacagctgaaacaggaaactaccggacgcagctgtatgacaagcagc

SEQ ID NO: 244025 - DNA, 100 bp, Homo sapiens
tttaaaactgaagattgtcatgattgtttatcctaatcccaatgctgaagtaagattgtcttggaaatactaagttgggactccattttctggcaatacg

SEQ ID NO: 244026 - DNA, 75 bp, Homo sapiens
gccgccgtcgccgccgccaccgcggccgagaccgcgcagccggcggatggagatcttataacaatttttgatagt

SEQ ID NO: 244027 - DNA, 100 bp, Homo sapiens
caggccccactggaggagatgaggaaggctgccgaggatctggaaattctccgccgcatgcaagagatgattgcaaggatgcaggcgcagatgcagatgc

SEQ ID NO: 244028 - DNA, 74 bp, Homo sapiens
gagaatgtaactccgttgaagcaaacactctgctccagccaaggtggtgagggcagctgttcctaaacagcgca

SEQ ID NO: 244029 - DNA, 75 bp, Homo sapiens
tgccctgatgaagaagttcctgaatctgagtcttgagtcctagcagaagatgtgactcagactgcctctgggtgg

SEQ ID NO: 244030 - DNA, 100 bp, Homo sapiens
gcaggaactctacaacccaatccagaatgtctgtaaacctgtggaggagacacagcgcccgcccacactgcaggagatcaagcagaagatcgacagctac

SEQ ID NO: 244031 - DNA, 95 bp, Homo sapiens
ttaagcagatgctccagtttgagaaacctggatctgcgatctgtttgtggttcatcacaagacctatgaagatatagataaacgtggaaaatatg

SEQ ID NO: 244032 - DNA, 50 bp, Homo sapiens
gcggaggtcgataagctggaactgatgacagagtctcgctctgttgccca

SEQ ID NO: 244033 - DNA, 98 bp, Homo sapiens
cacccacatacaggagacaccaaagaagagaaagacaaggatgaccaggaatgggaaagccccaggcatgttttccacaaatcctgcgtggatccctg

SEQ ID NO: 244034 - DNA, 100 bp, Homo sapiens
tcctgctagataccttttcagtggagcaaagtgacaagatgctccagaaaacctagatgagcagattaagaaagtgtcccagcagatccttgagaagcga

SEQ ID NO: 244035 - DNA, 100 bp, Homo sapiens
cccccagctccagcctctcctactactcctctggcctccaggatggattccagaatgactatcttgacttacccctttaaaaatcttcccactgcatcaa

SEQ ID NO: 244036 - DNA, 98 bp, Homo sapiens
atgctaagaactgctgggaggatgacagataagtgcaagaaggctgcttccagctccaaagcacctaagaatggaggtaaagcgaaggattcagcaaa

SEQ ID NO: 244037 - DNA, 82 bp, Homo sapiens
cgacgcgctcatctgctggagcccggttatgaagacagtatggagtttccagaccatagtagacatttgctacagtgtctga

SEQ ID NO: 244038 - DNA, 50 bp, Homo sapiens
cctttgttgattaactggacaaattcagtggtgccaccgaacatcgcaga

SEQ ID NO: 244039 - DNA, 75 bp, Homo sapiens
gttggagccgtctgcaaagtgtccccggcaagaaggtgatggctggaccggcggaggaggcgggagcccattgtc

SEQ ID NO: 244040 - DNA, 100 bp, Homo sapiens
tttccggacctctgccaaaatctccaaccagattttccacgaagtgggaaaactcttgcctttgccatcccaatgattcatgcggtgttgcagtggcaga

SEQ ID NO: 244041 - DNA, 75 bp, Homo sapiens
atctcacaactgctcgcgtgacgaccgcattcgtggcaggcatcatggccgccctcagaccccttgtgaagccca

SEQ ID NO: 244042 - DNA, 75 bp, Homo sapiens
gactttggagaaaccaccgtgctggaccgcttttacaatgcaggtacaacaaataacactgtgactccaacctca

SEQ ID NO: 244043 - DNA, 100 bp, Homo sapiens
attgactttggagaaggagcggacatgtgcagaacagattgttgccaaaattgaagaagtattgtgaatggctatgtggtgaaccttttctgggcatttg

SEQ ID NO: 244044 - DNA, 100 bp, Homo sapiens
ctcaatggagtccacttccgagtccagaccaagatcactccatggatgaaatgacagctgtggtgaaaattgaaaaaggagttggtggcaataatggggg

SEQ ID NO: 244045 - DNA, 100 bp, Homo sapiens
gcagagtggaccaccccatgaacctcgataccacttgaaagatgtcattgtagggaagatatacttcctgctggtgagaatcaaaatcaagcacatggag

SEQ ID NO: 244046 - DNA, 90 bp, Homo sapiens
gattcagcaacctctaactaaccagcagccatggcaatgacaggctcaacaccttgctcatccatgagtaaccacacaaaggaaagggtg

SEQ ID NO: 244047 - DNA, 51 bp, Homo sapiens
aaggggagcgcgttgacttcgatattgactggggcgactttggggtagagg

SEQ ID NO: 244048 - DNA, 100 bp, Homo sapiens
cagagctcctggaccaatgcatcttcccaccaccttaaaccactggagtctgagactctatccatgtctgcgatggaatcttttattgaaaaacagacaa

SEQ ID NO: 244049 - DNA, 74 bp, Homo sapiens
ctaattctagatttggatcattgcccaaagttgcacgttcctggatgcctatgctgagcacaagttacagttct

SEQ ID NO: 244050 - DNA, 100 bp, Homo sapiens
ggggctccgggcggctgggaccggcctggggtagctgcgcagcagtcgagcttcgatccccaccaccgtgcccagccaagttacgagcgtccttctttcc

SEQ ID NO: 244051 - DNA, 75 bp, Homo sapiens
ctgtactaggactgggaacggaagcatcagatggtgaaggagaaggagacacagaagtgatgcagcaggagacag

SEQ ID NO: 244052 - DNA, 98 bp, Homo sapiens
tggactggatatttctacctcggccccaggttctctgcagatgcagtaccagcagagcatgcaggtgtttccccccgggccggcctgccgtgacgatc

SEQ ID NO: 244053 - DNA, 75 bp, Homo sapiens
cagctcccctttctcgcccagcgcccccaggccgctcccggggctcacgatgatgattattctccaccgtctaag

SEQ ID NO: 244054 - DNA, 89 bp, Homo sapiens
aaacaagacagtgactccaggatttctgaagactattgtggaagaagcatccattaaggaacctagaaagattgtacaatgaatggtga

SEQ ID NO: 244055 - DNA, 75 bp, Homo sapiens
cccagacccaaagtttgcaacaatcagtcagatatataaactctcttcacaagaagaaagtattgggacattatt

SEQ ID NO: 244056 - DNA, 75 bp, Homo sapiens
gataaagacgatgaagccccctctgatgtatctggagtccatctttcaccatcttctcctgagattgtactggac

SEQ ID NO: 244057 - DNA, 100 bp, Homo sapiens
gaagattttggtagagaagaatgaacattgtattgagaacaatatagatttgcaggttttgctgttactgctcagtgtagtcacaccttgaataagaaat

SEQ ID NO: 244058 - DNA, 100 bp, Homo sapiens
aacgtgggctccaacaccaacgagaccatcaccatgccccacgcggtggaagcatcagttcacagcagtaatgcacactgtacagataagacaattgaag

SEQ ID NO: 244059 - DNA, 87 bp, Homo sapiens
gtggtttggctgcgggcggcttgggcagcccgcgggcgcctcaggttcttgggtgtctctggggagtccctgggccagaccttcctc

SEQ ID NO: 244060 - DNA, 100 bp, Homo sapiens
tctgcagacagatgaagatgaacacagtattgaaatgcatttgccttatacagctaaagccatggaaaggagcatttcatactactgaagctgaagctag

SEQ ID NO: 244061 - DNA, 105 bp, Homo sapiens
ggcggagtggagatcctattcagaggggccggtctctctaaatatgccccagatataattggtgattacaactttcctctataaattaactcttgacactccttg

SEQ ID NO: 244062 - DNA, 90 bp, Homo sapiens
caaatggctgagctatacactaggggttcatgttaaccaggccaaacagtgaaagaactcttttcttctttgggagtcgaatgtaatgtc

SEQ ID NO: 244063 - DNA, 99 bp, Homo sapiens
ttcagcagagctgagtaaaacttcagatgagcgtgaagccgtgcagaagaagaccttcaccaagtgggtcaattcccaccttgcccgtgtgtcctgccg

SEQ ID NO: 244064 - DNA, 75 bp, Homo sapiens
agaagcaaggtgaagataactctactgcacaggtagtttgtgaagctataaaaaatgaaatgaatgttatgctga

SEQ ID NO: 244065 - DNA, 83 bp, Homo sapiens
agaggctcaccgcagtcgtgcaggatctgaaggaggtcactgaattagcaggctacactgctcgagtgtacaatatgttttgg

SEQ ID NO: 244066 - DNA, 90 bp, Homo sapiens
gcacgtagagtcactctgctggttgctgagcaagtgtaaagacctcagccaggtggaggctgcacaaagatgttcagggataactcggcc

SEQ ID NO: 244067 - DNA, 100 bp, Homo sapiens
aaatcacttggaaggactttgtcaataactatctttcaaaaggagtattgcaggaccagctctgccccctaattataaaagcagtagttcagattcatca

SEQ ID NO: 244068 - DNA, 100 bp, Homo sapiens
cgcgtgttcgtggacggcctgtgccgggatgttaatgcaggcgagggcagtgagtttgcagacagtgggattgaaggggccactaccgacacggacctcc

SEQ ID NO: 244069 - DNA, 90 bp, Homo sapiens
taccgcatcgcccagctgtacatgatacaggccatcagcatcagcaaagccatcaacacccaggaggcccccgtgaaggagaagcacgcc

SEQ ID NO: 244070 - DNA, 100 bp, Homo sapiens
cttggtcaaagaagtgaccaaaaagtcatctacatttcagaaatggtggagtcaatgaagaaagtagcagggatggatgtggagctgacagttgaagaaa

SEQ ID NO: 244071 - DNA, 116 bp, Homo sapiens
taaaagcgaactacagtggatgggtgcagttcagggtgagattgggaaggtcacacatcccgggtcctgagtctgaccatgagcccagatggggccacagtggcatccgcagcagc

SEQ ID NO: 244072 - DNA, 90 bp, Homo sapiens
acccccattcattctggattggtggatctgaagtacaaaatattttccagtgcgttcaagattcaacttcacccgtaacccaccgccatg

SEQ ID NO: 244073 - DNA, 83 bp, Homo sapiens
ggcggccacccgagacgcggcgcgcacgctccggcctgcggtttgcctgcaatgagatttcattctctacatttaaaggacat

SEQ ID NO: 244074 - DNA, 82 bp, Homo sapiens
cttgagtgctagaatgatgaggatcttaaccaccattatcttaactgaggcacccaaaatgctccttcatgaccaagtaggg

SEQ ID NO: 244075 - DNA, 51 bp, Homo sapiens
cgagagcgcgaatatcgtcatcgttagaagaatgtcaagctgtcagctgag

SEQ ID NO: 244076 - DNA, 97 bp, Homo sapiens
caattgaccccgtcaggggagaagtcaaagtgaccaaacttctcgaccgagaaacgacaaagaaacagccttggtataatagcacgttagcatcaag

SEQ ID NO: 244077 - DNA, 128 bp, Homo sapiens
ccggagatgcctgacgcatctgtctgaggagcggtcagtgacgcgatggagcgggcaagactgtgccctgtccacggtgcctcctgcatgtcctgctgccctgagctgtcccgagctaggtgacagcg

SEQ ID NO: 244078 - DNA, 90 bp, Homo sapiens
aggaagccttgttctatggtactcggaccatggagccatacaggtctgatgttgtggtcctctgtttttcgattgctaatcccaattccc

SEQ ID NO: 244079 - DNA, 97 bp, Homo sapiens
cgccgtgcaacgcggagtggagctcagccaggggcagccggctctggtgctcccagaagaggtggtggagtttgacaccccatcggtccttctgtcc

SEQ ID NO: 244080 - DNA, 128 bp, Homo sapiens
ttttgatgaaaattggctaaacagaatcaaaactgaagtaggagataattggaggctaaagggacagagcagaatgggctgatatagatccggtgccgcagaatgatggccccaatcccgtggtccag

SEQ ID NO: 244081 - DNA, 87 bp, Homo sapiens
gctctggaaaatccgcaagaccatcatgcaggttattcagcttctcaaggctggaaaagcgaaggaagtttcctacaatgcactagc

SEQ ID NO: 244082 - DNA, 50 bp, Homo sapiens
tgctccaggctgccccataataatcaggatggctaaaggtgaccccaaga

SEQ ID NO: 244083 - DNA, 75 bp, Homo sapiens
cctgcagaaggtctctggagacatcttcagcagctaccaagatgaatgaactaatggagaaatagaaagtcttca

SEQ ID NO: 244084 - DNA, 73 bp, Homo sapiens
gtccaaagtaccctccttctactaccggcccacgccctccgactgccagtcaaaatgcagatcttcgtgaaaa

SEQ ID NO: 244085 - DNA, 74 bp, Homo sapiens
caaattcaacagaatcctctgaaacttccacagctgtggaagtcagatgactttggccagacctggatcatgat

SEQ ID NO: 244086 - DNA, 74 bp, Homo sapiens
ccaagcccacttctatttttcacagatgccccagatattcgatgttgatctgttccagctgcaggtgaacaccc

SEQ ID NO: 244087 - DNA, 74 bp, Homo sapiens
tcagcctcccgccggccgtctccttaacaccgaacaccggtgataaaagaaaatgtggctgaagttacccgaag

SEQ ID NO: 244088 - DNA, 89 bp, Homo sapiens
cttggactcttgattggaatgttctccctgcagcagtcagcccaaaggaaggtctcagaaatattccagtatatacaataaatcgcata

SEQ ID NO: 244089 - DNA, 76 bp, Homo sapiens
atgctcaggctgctcttggctctcaacttattcccttcaattcaagtaacaggaggtgaagtgaaatctgcaagag

SEQ ID NO: 244090 - DNA, 101 bp, Homo sapiens
tctgtgaagctaaactcaatgctgctgtgtgggaagaagatttgtaaagaaaactcttagatctcacattcttgaaggtggcattgaagagcactaagatc

SEQ ID NO: 244091 - DNA, 100 bp, Homo sapiens
cctggagcctcagttggaagcagccgatccagcctgcggagcctgtggggcagcatagaggcgcagactcgggagctgagcagtcaggtccgctctgggg

SEQ ID NO: 244092 - DNA, 82 bp, Homo sapiens
cagtatcatgctggccaagaagatcatcattaaggacggaggcacggttgaagctccattcataccaaagtttagaggctct

SEQ ID NO: 244093 - DNA, 98 bp, Homo sapiens
gagccttggttctcagaggaggaattctcaaaccagagtcacccaactgaggctttacagttctctatactctcccaagagccacagaaaatgaacac

SEQ ID NO: 244094 - DNA, 100 bp, Homo sapiens
gggagcggccagctaggagcgctctgtggtgcctggggctgaacgcggctttctggaacttagtgatttggcccgtgaccctccagcacaatgttctgca

SEQ ID NO: 244095 - DNA, 98 bp, Homo sapiens
tttagccctgatgaattcaatcaattctttgtgactcctcgatcttcagttgaggttgactatagtcaatggggccaatggagccaagtgtatggaaa

SEQ ID NO: 244096 - DNA, 75 bp, Homo sapiens
cttctgcctcagcctcccaagaataatgtatttgtggccttggacatgaggcagtcagtcctctgttgctgttaa

SEQ ID NO: 244097 - DNA, 75 bp, Homo sapiens
gtctatcaagacttggagccgctgatactaacaattgagacaatgcagatcttcgtgaagactctgactggtaag

SEQ ID NO: 244098 - DNA, 87 bp, Homo sapiens
ggcatgattggaaaccaagttaatcgaaaagttctcaattttgaacaagctatcaaggttggtttcagtgctgatgaaacttgggac

SEQ ID NO: 244099 - DNA, 75 bp, Homo sapiens
atttctcagaacggatctccatcgttaagtgacgcatgactgagttcaaagaaggacgcagagccagccacacag

SEQ ID NO: 244100 - DNA, 51 bp, Homo sapiens
agttgaaaaagaaggaatccacgttctaaatcattgcgatgatgagtccag

SEQ ID NO: 244101 - DNA, 49 bp, Homo sapiens
agatgacttacttcacaagttgaatatgttctgtggacactacagatgc

SEQ ID NO: 244102 - DNA, 100 bp, Homo sapiens
gggcgggctcctttgtcttctgggctttcgtcgcgagatggaacgctggggtgtccgcaatgttgccagtgtctgtctgcagattggctacccaactgtt

SEQ ID NO: 244103 - DNA, 101 bp, Homo sapiens
atatgcgaaggaaaaaccacacacaccagcaagatattgacgacctcaagcggcagaatgctcttctggagcagcaagtaaacctctagataatgccagta

SEQ ID NO: 244104 - DNA, 100 bp, Homo sapiens
cgccaggcggccgtcatggcggtgtcggagagccagctcaagaaaatggtgtccaagaaaaggtatagtttggcagtggggcctccaaaaaaagacccaa

SEQ ID NO: 244105 - DNA, 100 bp, Homo sapiens
agcaacctgacaattctgtcgtgtcccgagagaatttatccagttctgtaaaactctgtacagtatgttccatgaagatccagaagaaaatgatttgtat

SEQ ID NO: 244106 - DNA, 75 bp, Homo sapiens
cagtggtcgcttcttctccttggtcctttttcatgatgatggtagtgtaaaaggaattgccactaacgatgtagg

SEQ ID NO: 244107 - DNA, 98 bp, Homo sapiens
gcatatatgtcaactctaccatgtgctagagacagccaacaaaatattcatggttcttgaggacaatagccggaggcagaagcagttgttaaaccaga

SEQ ID NO: 244108 - DNA, 96 bp, Homo sapiens
cgccgcctgaggaggcgagctagccgggagttacaccgccaccgccaggaaccacgtgaatgttgagggggcgacacacaagcaggtggtggacct

SEQ ID NO: 244109 - DNA, 96 bp, Homo sapiens
agagcaggactggaaatgtcctggccgcgccgcctcctgctcagatacctgttcccggccctcctgcttcacgagtaaccagagagcacagagaaa

SEQ ID NO: 244110 - DNA, 100 bp, Homo sapiens
agcttcaccgagtgcagatacaactatactgtttgtaaaaggagaagccaagaagtatgatgcgtttttggcctcagagtctctgatcaagcagattcca

SEQ ID NO: 244111 - DNA, 100 bp, Homo sapiens
tgcattgactggaaacaatggcatttacagaaagagtcaacagcagtggcaacaggagcgagaacccgagcagcgccatgagcaacactaccgtcgtccc

SEQ ID NO: 244112 - DNA, 104 bp, Homo sapiens
acctgtggactctgaccgcaaacaaggagagcctactgagcagcctgagtgggttcagattcagaacaagaaagtggacatctctaaggtctcctccaagtgtg

SEQ ID NO: 244113 - DNA, 82 bp, Homo sapiens
gactgacccgtcctggttcctcttacttcaatttgaacccatttgagtgggttgaccacacaggtgcagcctcacagaagaa

SEQ ID NO: 244114 - DNA, 82 bp, Homo sapiens
ctcaatatctgtcttcggtggactccttcggcagtccacccaccgccgccgcctcccagagttgaagtattgataacaccaa

SEQ ID NO: 244115 - DNA, 100 bp, Homo sapiens
ggcagtccctgctgtgcacctgggggtacagaaatgcctggagttgaagacaagcctgctggcccgccagaggggcacccagtcatccctggaccgcctg

SEQ ID NO: 244116 - DNA, 100 bp, Homo sapiens
cgtaccagctgatgtactccttggacgatgccaaccacaccttctctgggatcgatgctctgccctgaaacatgtatctgatgacatgaagactcacaag

SEQ ID NO: 244117 - DNA, 75 bp, Homo sapiens
agatggctttaaagaatacacttcaagtagaagaccatgatggagaaggtgatgtggctggagatgatgatgatg

SEQ ID NO: 244118 - DNA, 75 bp, Homo sapiens
gggacccaccgctgccctcagctccgagtccagggcgagaacatgaaaggctcccggagcagcgctgactcctcc

SEQ ID NO: 244119 - DNA, 50 bp, Homo sapiens
tggaaaggctctcagtgaaaaaggttgttgatgagcgtgaattttttgag

SEQ ID NO: 244120 - DNA, 75 bp, Homo sapiens
cggtgcagagaccagcatccttggagaagagcaagtgcaccggcacctggaccaacacgaagtgagatacctgca

SEQ ID NO: 244121 - DNA, 74 bp, Homo sapiens
cagggagccaaggccggcagagccaaggctcagtcatgagaatgcgtcagcatttatcccgtttgccaaccatt

SEQ ID NO: 244122 - DNA, 90 bp, Homo sapiens
agatgggaaatctgcctatgtcataccgtgacagcccgcaggatcagggtgacatccagcagctgctctttgtctcggaccaccgggcag

SEQ ID NO: 244123 - DNA, 76 bp, Homo sapiens
ttcggatcccaagatgacaagtaacatggagaggagagccagagaagtgacagggaagctacaggttacaacagat

SEQ ID NO: 244124 - DNA, 100 bp, Homo sapiens
cgcagacatggacaccaaacatttcctgccgctcgatgttccatttaagcagacctcttccatagctgtagctggagcggtaattggagctgttcttgcc

SEQ ID NO: 244125 - DNA, 74 bp, Homo sapiens
cctcagcccacatgggcagtcacgctgcaagctttcttcctggtggcagatgacatcatggattcatcccttac

SEQ ID NO: 244126 - DNA, 75 bp, Homo sapiens
cttcaagacgcggcccaaggtgtcccttggcggcgcgagcaggaaggttcatgcatgggagatctcagaccagtt

SEQ ID NO: 244127 - DNA, 90 bp, Homo sapiens
gctctttcctttccgtctggcggcagccatcaggtgtgctgggcatcaaggtgaagatcatgctgccctgggacccaactggtaagattg

SEQ ID NO: 244128 - DNA, 100 bp, Homo sapiens
gatccagtacgagttgaatcattgttcaaataagccttagattgtaagcaaaagaaatcaaggtcaagatctggaagcaagaagaaaatgctaacattac

SEQ ID NO: 244129 - DNA, 75 bp, Homo sapiens
gaatggacacagtgatgaagaaagtgttagaaacagtagtggagaatcaaggtcaaactgtgctgaaaatatccg

SEQ ID NO: 244130 - DNA, 100 bp, Homo sapiens
atgtgtgagaagaccaccatcaacaatgagtacaactaccgctgctggaccacaaaccgctgccagaaaatatgtgcagaagcttataatcctgatgaag

SEQ ID NO: 244131 - DNA, 100 bp, Homo sapiens
atggatctcagttcttcatcacctatggcaaacagccacatttggacatgaaatacaccgtatttggaaacaaagcagttgagagcttagctgaagcagg

SEQ ID NO: 244132 - DNA, 90 bp, Homo sapiens
ctggacacctcaggtaaattctcctcaggtggtgcaaaggatcaaggctgtggaggggcagactcggctgctggtggtggaccaggagac

SEQ ID NO: 244133 - DNA, 75 bp, Homo sapiens
tcgaggtaagaaacggttgtggatcttgaagctttggaaaggaacgtcaaggtcgtgggaaataaaaggcagttc

SEQ ID NO: 244134 - DNA, 100 bp, Homo sapiens
gtgactatcattgatgccccaggacacagagactttatcaaaaacatgattacagggacatctcaggctgagctggagattcagaaagacgccctggagc

SEQ ID NO: 244135 - DNA, 75 bp, Homo sapiens
ttctgctgtccttctttgtggagagcaagatcaaagccatcggccagacagagttgaatgcaagcaatccagaag

SEQ ID NO: 244136 - DNA, 90 bp, Homo sapiens
cagactacaatgtatcaacagcaacagcagatctgcaagagccagagccccacatgccagatgtgtggagaaaagtttcttaagcattca

SEQ ID NO: 244137 - DNA, 82 bp, Homo sapiens
ggagtgggggaggcgaacagtctcgttgctgcctctgtgtacgctgaggggggaggcagctgttgtgctgtgtatggacgtg

SEQ ID NO: 244138 - DNA, 82 bp, Homo sapiens
tcagagtcggtcggggaaggccacccagagtgaagacatttccacctggacacctgaccatgtgcctgccctgagcagcgag

SEQ ID NO: 244139 - DNA, 75 bp, Homo sapiens
tggacaccaaacatttcctgccgctcggttatgaagacagtatggagtttccagaccatagtagacatttgctac

SEQ ID NO: 244140 - DNA, 100 bp, Homo sapiens
tcttcaggctgacaaaaacctgggctattgctgctaaaattgattcaattcctcacttgaataattccacacctctagtggacccctcagtatatggata

SEQ ID NO: 244141 - DNA, 75 bp, Homo sapiens
ccaaaagaagtagcagaaaccctgtctttcaggattcctgggacacagaggttctgacaacaaaggagattgtga

SEQ ID NO: 244142 - DNA, 95 bp, Homo sapiens
cggcggcccggagtggggcggcggggacctggctgcaggtgctggagaccatcggtgtgctggcggtcattgccaatgggatggtcattgccttc

SEQ ID NO: 244143 - DNA, 75 bp, Homo sapiens
ccttttgacccaatcatatagtggggctcagggccagtgctcactcttattgctgtctcagtgattcagtccatt

SEQ ID NO: 244144 - DNA, 90 bp, Homo sapiens
gtcagccagggctgaacccccgcagataaagccaccaatccttccaaccgccaggaggactgggaatacataattggcttctgtgatcag

SEQ ID NO: 244145 - DNA, 74 bp, Homo sapiens
agaaccgtcagtttgagccagatgaatatcctccgaatcctaaatctagagctccaaggatgctggtcattaag

SEQ ID NO: 244146 - DNA, 75 bp, Homo sapiens
tatagagatgtgatgttggagaactacagaaacctggtctccctaggtctgagagtcactggagctaccagaagc

SEQ ID NO: 244147 - DNA, 100 bp, Homo sapiens
gttcatgctaccacatagcaaagaaccttaaatttttggaagaacaatatattcattttggcattgtgcagagactttgagaatcactacaagaaaaact

SEQ ID NO: 244148 - DNA, 51 bp, Homo sapiens
gtcaggcggagagacccgccgccagcccaacagcatggtggtggaacaccc

SEQ ID NO: 244149 - DNA, 98 bp, Homo sapiens
ggcggctgcaggctaggggcggctcggagtccgctggccacccagctgagaggagaggcgcccccggggacgtgtccgaagttcgcttgaatttagac

SEQ ID NO: 244150 - DNA, 100 bp, Homo sapiens
tgtccaggaactgtcggaacagaaccaaaggctattggatcagctcagcagggagccaaaaacctgtatatcatctccgtgaaggggatcaagggacggc

SEQ ID NO: 244151 - DNA, 82 bp, Homo sapiens
gccgcccccgcaccaggccggtactcagctgaatcgatcaccgttgcttggtccagttgaatgcatgacctgcaatggggag

SEQ ID NO: 244152 - DNA, 83 bp, Homo sapiens
caaaacttcaatcctggagcagcttctgtatgggaaccatgtagtgggctgaacaagctccaaacacttgtgaatgtcatgtt

SEQ ID NO: 244153 - DNA, 80 bp, Homo sapiens
gtcccggcgccgtcgcgccactcctccgagtacatgtcccagagcaagcacacggaggcccgggagctcatgtactcggg

SEQ ID NO: 244154 - DNA, 87 bp, Homo sapiens
aatttaccagagataattgataacaccctgtaacagctgaccctgggcgctgcctatggcacagccaagagcggtaccggcattgcg

SEQ ID NO: 244155 - DNA, 90 bp, Homo sapiens
cccatgttctccaacctggcctctgacgagcagggccacgcaaatcaagacctactcctgggacaacgcccaggtcatcctggtggggaa

SEQ ID NO: 244156 - DNA, 100 bp, Homo sapiens
tgaacctctaacacagtggaaaggaaccgttctggatcagactgccactctccgcccctacctgagtgccgtgcgggccacattgcaggctgccctctgc

SEQ ID NO: 244157 - DNA, 87 bp, Homo sapiens
gtgatgcaccagctctgctcccaggaccacggaggggtgatcgtgaacatcactgccaccctggggaaccgggggcaggcgctccag

SEQ ID NO: 244158 - DNA, 104 bp, Homo sapiens
ggtccccgcaccacctcctgctgccttcccgtcgccgctcccgaagcttttccaggtttgaagactgcttcattctgcctctagtaccagcggtttctctgttc

SEQ ID NO: 244159 - DNA, 83 bp, Homo sapiens
gccgctcctaagcctgcacagccgcggcggcagcagcagtgagaggcccgcaccgccgccatgatgtgcgaggtgatgcccac

SEQ ID NO: 244160 - DNA, 95 bp, Homo sapiens
aagcctaaatgacatcacagcaaaagagaggttctctcccctcactaccaatctgatcagtgccgtgagcgatgtggagatgcaggaacactatg

SEQ ID NO: 244161 - DNA, 100 bp, Homo sapiens
tttgctcctgaagaaatttctgccatggttctcactaaaatgaaagaaaccgctgaggcttatttgggaaagaaggcggatgaagaccccatcatggggt

SEQ ID NO: 244162 - DNA, 97 bp, Homo sapiens
ggctcagtaaggcagaactctcgcccagatacactgaagagatggtgccttggcacccttgcctggaactcgttagcaactgcgagcagaagctttc

SEQ ID NO: 244163 - DNA, 100 bp, Homo sapiens
gatgagcctcggaaagtgctcctgcggctgtatggagcgattttgcagatgagagtaatgccttctagctttttcctgctgttgcggtttttcttgagaa

SEQ ID NO: 244164 - DNA, 80 bp, Homo sapiens
ctgagggtctcggggcgggcgccgcgggacctctccgggccatggttacagaatgtctgaaggggacagtgtgggagaat

SEQ ID NO: 244165 - DNA, 75 bp, Homo sapiens
ttgcctgctcccggagggagacgcgctgccgaggagaacccagcggatctggccagccaggagaaggagcggctg

SEQ ID NO: 244166 - DNA, 82 bp, Homo sapiens
caaggtgaagcgcgagcgcgacgagtataagcggaggtcagcccaaggccaaccccactgtcactctgttcccgccctcctc

SEQ ID NO: 244167 - DNA, 115 bp, Homo sapiens
gagtcaaggaaaactcttgggacaacgaagtctttgcttccatctcaggacctcagcagaagggtggaggccatagtggagtttgactaccaggcccagcacgatgatgagctga

SEQ ID NO: 244168 - DNA, 98 bp, Homo sapiens
aatgagattagattggtttaggttacaggcttttgctcatgtatccaagttgctgtcacagtgtaaatttgatctgttggaagaacttgtggccaaag

SEQ ID NO: 244169 - DNA, 95 bp, Homo sapiens
cctggaatataaagagacatgagatggtagccaaacccccagagacctttggccagagcaagacataaaagattcttttcaacaagtgatactga

SEQ ID NO: 244170 - DNA, 98 bp, Homo sapiens
caagactggtccacggagtgtatgaccacaaacagccatcaagatatgaaaaacagtagctccgtatcgaatacattgacaaatggatgtgtcatcaa

SEQ ID NO: 244171 - DNA, 101 bp, Homo sapiens
aggagaatgcagaccctcgacctccagtgcagttcccaaggtgacatatgtgattctcactttgtgaaactgctttttgaaacagagaaaatagatatagt

SEQ ID NO: 244172 - DNA, 100 bp, Homo sapiens
gatccagaacttgcagcaacaatagtacctggagtagaacagaaaaattattatgtctgtgttcccttgggactcattggaaattgtacagtgacatctt

SEQ ID NO: 244173 - DNA, 87 bp, Homo sapiens
ggaagaccgtgatgggagctgcagcacagtcgggggtgtaggttatggggcttttctgggagaagaggctacaaggacttagtgcat

SEQ ID NO: 244174 - DNA, 83 bp, Homo sapiens
ggaagatgctcccagctacagagggtaccgggatgcctgcaccattactgctgggattctgtccctgaccgtcttcacagtcc

SEQ ID NO: 244175 - DNA, 50 bp, Homo sapiens
cgcacgggagccagctgggtgtattttaaccacatcagcatcgaggactc

SEQ ID NO: 244176 - DNA, 74 bp, Homo sapiens
gactgagtactcaacatattgactgtatttgggctgcagcacagtttattaaccttgcaagaactcttcaggca

SEQ ID NO: 244177 - DNA, 100 bp, Homo sapiens
agtctccaccaggactgaccgctgccgcccagcacgtccagagttcttggagtctctgcggagtccctgggccagatctcacagtgaaagctgcaggatc

SEQ ID NO: 244178 - DNA, 75 bp, Homo sapiens
caagtggagcagccaacgtggtgggacccaaaatctgcctggaagataatgtagccataagtgtgatccttggtg

SEQ ID NO: 244179 - DNA, 100 bp, Homo sapiens
tctctgaaccgtgcactatattgcagttggacatgagaaccgtgcaaatttctgatctagaggtaagagcttctgttcgtgtgcagggaaagcagctcac

SEQ ID NO: 244180 - DNA, 100 bp, Homo sapiens
ggaggcggtcccgggatttcaagggtctacgcgcttttctatggcgaatgcaacccgacgagggagtgggctaaagtccaggaagagattgaatgtgtag

SEQ ID NO: 244181 - DNA, 76 bp, Homo sapiens
acgatgtcacccgcttcctcaacgagatattgctatatggagatttgccaaaaaataaagaaaatataatatattt

SEQ ID NO: 244182 - DNA, 98 bp, Homo sapiens
gcatctgggttttacagcacttggccaagctagatgtcaaggcaggagtagggctgattggagccattgtacagtgtcgggaacataccaggacactg

SEQ ID NO: 244183 - DNA, 101 bp, Homo sapiens
ccagggagcgtctgggctgcagatgaggaccttgagattgaattggttgaggaagagcctccattcctgagagggcacactaagcaaagcatggacatgag

SEQ ID NO: 244184 - DNA, 50 bp, Homo sapiens
aacgtcaacaacagttttacgcttgctttgaccagatcaagttctttaag

SEQ ID NO: 244185 - DNA, 82 bp, Homo sapiens
cagggaaccctggtcaccgtctcctcagagtatggtgtttgcgaaaacttgcggaagctggagatcacaggcgtgtcttgtc

SEQ ID NO: 244186 - DNA, 98 bp, Homo sapiens
ggccggcagctcccggggcgtctggtgatttaaagggagtgatagtcactctgagtgatgatggtcacttgcagtgttcatacctggggacagatcct

SEQ ID NO: 244187 - DNA, 90 bp, Homo sapiens
cttcttcccacgctgctactgcctgggggctgaggatgacaaaaaagccttcatagacagcaactctggaaagtggcttctaactcggcg

SEQ ID NO: 244188 - DNA, 75 bp, Homo sapiens
gttgaccgctcctccaactaaccaggaacaacctatcttcagcactcgagctcatgtcttccaaattgacccaaa

SEQ ID NO: 244189 - DNA, 100 bp, Homo sapiens
atgatgctgggacttatttttgtatagctgataatggaaatgagacaattgaagctcaagcagagcttacagtgcaaggacatgaacaagctgagtggag

SEQ ID NO: 244190 - DNA, 83 bp, Homo sapiens
ggaactgtgatattgtgactgcctgcttgcaggctgtgtcacagaagagaagacattggctccctggattatcaagagtttgt

SEQ ID NO: 244191 - DNA, 50 bp, Homo sapiens
gggaagcagggattccagtgccaagatgacgtccggttgtttgccttcgt

SEQ ID NO: 244192 - DNA, 74 bp, Homo sapiens
tgaccctgggagacatcgacggtggtccattatggctgacatgcaaaatctggtagaaagattggagagggcag

SEQ ID NO: 244193 - DNA, 133 bp, Homo sapiens
agcctcccctgcagcgactcggaagattcgaggcggcgggggacaagtcggcgccccagagcggacgagaatccagactccaaaatgatgcaaatcaacctgactggatttttgaatggaaaaaatgctcgag

SEQ ID NO: 244194 - DNA, 83 bp, Homo sapiens
cgcctccatctgaagagggctccaggcatccggtcctggtccctgctggttggcatgggcaagaaggacgaccccaagctgat

SEQ ID NO: 244195 - DNA, 75 bp, Homo sapiens
ttcgccgtgcccgagaatagctccgtccagcaggtgcagcagtaccgcgtcgccatgactgccaaggactgctcc

SEQ ID NO: 244196 - DNA, 100 bp, Homo sapiens
gtatgtggaaatagcgcggctgtgcaagtacctgccagagaacgacctgaaggttcgagaacttgtcttggacaattgcaaatcaaatgatggaaaaatt

SEQ ID NO: 244197 - DNA, 101 bp, Homo sapiens
tggcggcggctcctcaggagagctggggcgcccacgagaggatccctcacccgaccaactgccagagttttctctgggtgttaacagcggttggactacag

SEQ ID NO: 244198 - DNA, 75 bp, Homo sapiens
ccattcattctggattggtggatctgaagtacaaaatattttccagatggaagatggtaccccaaagcatatcat

SEQ ID NO: 244199 - DNA, 88 bp, Homo sapiens
agccaaggaggaagggttgtccggggattaaagcctgtggtttccacagaagcaccacctatcatatttgccacaccaactaaactga

SEQ ID NO: 244200 - DNA, 81 bp, Homo sapiens
cagatcaacgtcctccgggaccggagtcagaaccctccgcagagtaaagggattaatgaaaatcaagttccatcctcagac

SEQ ID NO: 244201 - DNA, 75 bp, Homo sapiens
ccgaataggagtccttccaaaaataggtgttatgaacataaacagtatagaaatggattgaaattctgtaaacaa

SEQ ID NO: 244202 - DNA, 98 bp, Homo sapiens
gttgcatttcctcgtcgagcgcaacccaaggtcttcaggcaccatggaggacaaacgcaacatccagatcatcgagtgggaacacctggacaagaaga

SEQ ID NO: 244203 - DNA, 73 bp, Homo sapiens
ggtgaataacagcgagtgtgttgcaaacatgaaagtgcatgaacagaagtattgcattaactcaggcgcgcta

SEQ ID NO: 244204 - DNA, 82 bp, Homo sapiens
caggagtcgctggatagactgcacaaggtgaagactgtctgcagcaaggctgaaggggatgctaagggagataaagcaaagg

SEQ ID NO: 244205 - DNA, 100 bp, Homo sapiens
gcactctttcgcccggcctccggttctcgccggctctcggacccgcctccgaagacgtggagcgctgcggcggctggtctatgtacagacatggagcact

SEQ ID NO: 244206 - DNA, 75 bp, Homo sapiens
cgttgcgaagggaccagcgcagccaatcaggcgtcgttgctaccttgatcagggccaaagcggtcagtgagaagg

SEQ ID NO: 244207 - DNA, 98 bp, Homo sapiens
ccgacgccgatccggacagcggcacagaggagggagatccagtttgctgaccagaagcaagaattcaacaaacgtcccaccaaaattggacgtcgctc

SEQ ID NO: 244208 - DNA, 96 bp, Homo sapiens
cggggtccgggtccggagcgccacagtccggtggcagccttcaaggtcgccacgccgtattccctgtatgtctgtcccgaggggcagaacgtcacc

SEQ ID NO: 244209 - DNA, 100 bp, Homo sapiens
tcgggctctggttagagacagtcaacgacgctttgatgcggcctggaagaattgatagaatcatctatgtgcctttaccggatgcagcaacaagaaggga

SEQ ID NO: 244210 - DNA, 100 bp, Homo sapiens
aagacccgacatgagggaaaagggacgtaggaagaagggcaggacctgggcggaggccgccaagacgtttcggagcaacatcccctgtcacctggttgat

SEQ ID NO: 244211 - DNA, 87 bp, Homo sapiens
ctgttccgggccgcgcagctgccgaacgacgtggtcctacagcacacgacggttctgccctttatattaatcgagatgaggacatcg

SEQ ID NO: 244212 - DNA, 75 bp, Homo sapiens
aacagtggataattttgtggccttagctacaggagagggtcgacaagaagatgctgaggaatacttaggcttcat

SEQ ID NO: 244213 - DNA, 100 bp, Homo sapiens
atccacgccagccgcaccatgccgctcctaagcctgcacagccgcggcggcagcagcagtgagaggagccaagccgccatggcctaccacagcttcctgg

SEQ ID NO: 244214 - DNA, 75 bp, Homo sapiens
gattcatgttcaagctgcattttagacatagctggcaagagtattttcgtgggccgttgctccagggagaactgc

SEQ ID NO: 244215 - DNA, 98 bp, Homo sapiens
tttagtgactgctgaagatggtgaaggagctggagaagcacggagttcgggggatggcacagaatgggatattgatgatgctcaaatacttccccgct

SEQ ID NO: 244216 - DNA, 82 bp, Homo sapiens
gttgattctgaccatttctcatgaacagaaacacctaggaagggagaactggtctctaattaacagaagatggcaaagccca

SEQ ID NO: 244217 - DNA, 75 bp, Homo sapiens
gggtgctggagctgttccgggccgcgcagctgccgaacgacgtggtcctacagagctggtgatgctgctggagtg

SEQ ID NO: 244218 - DNA, 75 bp, Homo sapiens
agtgaaaagagatctgttttcaggggccaactcaccctatgcagcacagcccaccagctacgactatgatgcccc

SEQ ID NO: 244219 - DNA, 75 bp, Homo sapiens
ccgcgcagccctcggagcacggggccaaaccagtgctcctgccacctctctggctgccccctagagcctgcccat

SEQ ID NO: 244220 - DNA, 100 bp, Homo sapiens
acgaccaccggataattctttttatgtgcgaacatgtaacaagaatccaaagaaaacaaaatggtggtatcatgggggtccactggacggggcctgagct

SEQ ID NO: 244221 - DNA, 100 bp, Homo sapiens
tctgggatccacataatggagacattctgatggaatttggacacctagctcccctgtttgacaaccctaagttggataaggagctgcgggcaatgctgag

SEQ ID NO: 244222 - DNA, 82 bp, Homo sapiens
acggggaagtgtccttcatcaacatcaagacactcaatgagtgggattccaggtccacaggtcctggctaccctgggaagag

SEQ ID NO: 244223 - DNA, 98 bp, Homo sapiens
ccagattgtcttggaagttccaaagttgcaacgatttctgttcttgatagtccacaatgggtgaaccacagcaagtgagtgcacttccaccacctcca

SEQ ID NO: 244224 - DNA, 142 bp, Homo sapiens
aaaggcgaagagcgatggaagaacaactgaaaagtgatgaggaactggcaagaaagctaagcattgatattggtatttctcaagctgccagatacgtttaccaacgactcatcaacgacgggattttgagccaagccttcag

SEQ ID NO: 244225 - DNA, 50 bp, Homo sapiens
acgccgtggcccttgggagagagtaattcgccaaaatgacgaacacaaag

SEQ ID NO: 244226 - DNA, 82 bp, Homo sapiens
ctggtggcaagtattgctgtgggtgctgggacttcccgtccgcggcgtggagggatgttttagaagaatgtatgtctcttcc

SEQ ID NO: 244227 - DNA, 113 bp, Homo sapiens
aggaggcaggcgcggctgccggcggctgggactgaagagggacgggtcccgcggcgagcgagctcctgagcatgacgacagagatgatggtgtggattattgggccaaaagag

SEQ ID NO: 244228 - DNA, 82 bp, Homo sapiens
ccctgcacagccgtcaccctcaactttcccttcagatgccatggacaatattaccaggcagaaccaattctacgatacccaa

SEQ ID NO: 244229 - DNA, 74 bp, Homo sapiens
aagacggggtccccgagtggttccatggtgcaatctcaagagatcaagctgtattagtcgacaggaccatttac

SEQ ID NO: 244230 - DNA, 74 bp, Homo sapiens
gtctctggactggacagcagtggcgtccgcttttctctaaggaacccgatcgatgctatagaagacaaacaagg

SEQ ID NO: 244231 - DNA, 96 bp, Homo sapiens
gctgaggaggcggcggcggagatctggaggctgggaggcggcagaatgcagccagaggagggcacaggctggctgctggagctgctgtccgaggtg

SEQ ID NO: 244232 - DNA, 99 bp, Homo sapiens
gtgcccgaggaggcagccaagctcgtagcctgccactccgtgcggggggccctcagcctcttggccttgaacgggctgttcatcttgattcacaaacac

SEQ ID NO: 244233 - DNA, 75 bp, Homo sapiens
ctgcggctggccctggatgccatgaggacctgttccccgaggccaagcagaaacggcttgccaagtctccagggc

SEQ ID NO: 244234 - DNA, 100 bp, Homo sapiens
ctcgctgagcttcttgacctgctggacagcagaacaatttcttcatcagcagctaaacagcaacagccaactcagtttataaatccagaaacacctggct

SEQ ID NO: 244235 - DNA, 100 bp, Homo sapiens
caaccagaaactattgctgtaatgagctggatgaagtcctatccatttgtactttcagcaaacctgcatggagaggctactctttaaagacaggcatttt

SEQ ID NO: 244236 - DNA, 101 bp, Homo sapiens
aaagatctgcagagctcccagggcggacagcagcctcgggtgcaatcctggagccccccagtgagggaaaatggcaaatgcacgacagcggcctcctgaac

SEQ ID NO: 244237 - DNA, 100 bp, Homo sapiens
tttgcctacatgaagaagagagaagaggagatgcgtgataccaacgcctctactcttcatggatcttttggatgaaagaacactcgtggcagtagaacgg

SEQ ID NO: 244238 - DNA, 76 bp, Homo sapiens
gcacgctcgacttcatgctcggcgccaaagactaaaatccacggagtcgggtttgtgaaaatccatgccccctgga

SEQ ID NO: 244239 - DNA, 100 bp, Homo sapiens
aaaaagcagaagatggtccgagcagatcccagtttattagatttagctttggagtcaaacccttctgaccatccaagggcaagcacaattttcctgagca

SEQ ID NO: 244240 - DNA, 100 bp, Homo sapiens
ggacatggacgagccctcaccagtccccaatgtagaagaggtgacacttcccaaaacagtacgctgggagcggactcttggagctattgtaagacaaaag

SEQ ID NO: 244241 - DNA, 50 bp, Homo sapiens
gccaagggctccacacaccaagaccaaggacagagcgggatgccaccagc

SEQ ID NO: 244242 - DNA, 100 bp, Homo sapiens
gtgtgccctaagcacacctggagcaacaacctggcggtgctcgagtgcctgcaggatgtgagggaggcgcatattaaatttcctattgactacccctatt

SEQ ID NO: 244243 - DNA, 50 bp, Homo sapiens
ggaacagatgagaaacccggcaatgaaattggtcaagtctgcagttttct

SEQ ID NO: 244244 - DNA, 90 bp, Homo sapiens
gtggctgaagagttccttaagaatatgtgacagcatgggggtggactttgatgtgaagactttctgccacaacttgcgggcgactaagcc

SEQ ID NO: 244245 - DNA, 50 bp, Homo sapiens
gtcggcacctgaaggacatggaggccataaaattttgagtagaaaaatcc

SEQ ID NO: 244246 - DNA, 82 bp, Homo sapiens
ggcagtttggggaagtctggatgggctggctacagcaaacatcattcaagatgtccagcaaagggagcagcacagatggcag

SEQ ID NO: 244247 - DNA, 100 bp, Homo sapiens
gaaaagtgttatttctgttcggggcccatctatcctggacacggcatgatgttcgtccgcaacgattgcaagcacatttaactggacggtccccttcctt

SEQ ID NO: 244248 - DNA, 90 bp, Homo sapiens
ccccttttaccactgcctggttgcagaagtgccgaaagagcactggactccggaagtatttgataggtacaagagttacagcccttatga

SEQ ID NO: 244249 - DNA, 75 bp, Homo sapiens
atgcgttgcctggctccacgccctgctgggtcctacctgtcagagccccaaggagcattgggctcaggatctgaa

SEQ ID NO: 244250 - DNA, 100 bp, Homo sapiens
gggagctctttctgacagctggaggcgccggcggccttcacctctggaagtagagattgctgcgatgattgacactgagtttgccaagcagacctccctg

SEQ ID NO: 244251 - DNA, 74 bp, Homo sapiens
ggagaccccaatccgcatgagcgtcctttcgttcccagtgacctgacagcagaggagcgtcaagaactggagaa

SEQ ID NO: 244252 - DNA, 75 bp, Homo sapiens
aaaaaaggcacctgctgctaaggtgttggggatgtcctttgcactgaccctgaactgccagattgacaaaaccag

SEQ ID NO: 244253 - DNA, 82 bp, Homo sapiens
aagcacatagtggagcaaatggtggctttcattggcagatataatttctacagtagaatttaatcattctggagaattacta

SEQ ID NO: 244254 - DNA, 75 bp, Homo sapiens
gaggaatttctggaggcagtgctgtgccctcccagctgggctttttccctccttcccaatcgagtctgggcgtcc

SEQ ID NO: 244255 - DNA, 100 bp, Homo sapiens
tattactggaatgctcaggaatgtatccaggacttcaacactatgtttacaaattgttacatctacaacaaggcaaatcctgatcctaactgttgtcttg

SEQ ID NO: 244256 - DNA, 100 bp, Homo sapiens
aaaacaagggaggagaagacaagctaaaaatgattcgggaatatcggcaaatggatcacccttggaaaccaactggatgggatccacctactagacccag

SEQ ID NO: 244257 - DNA, 100 bp, Homo sapiens
tcacgagtgccgccagcatgtctgacaaactgccctacaaagtcgctcctgacccctgaggattaccagcgatttctagacctgggcatctccattgctg

SEQ ID NO: 244258 - DNA, 100 bp, Homo sapiens
ctgagatctcctaagcggcactcagtgcaaataacaatagcaactcccccagcaggttctgtacagagtaatgagatgtgtgacggctgcaaaccaggtg

SEQ ID NO: 244259 - DNA, 75 bp, Homo sapiens
gctcatttgatgaagaggataccaaagggattaagggttgctatgcgaaagcaagactgtggtttcattccaatt

SEQ ID NO: 244260 - DNA, 80 bp, Homo sapiens
cgccccctcccggggctgaccgcgtcgtcaaagacaatgcagatcttcgtgaagactctgactggtaagaccatcaccct

SEQ ID NO: 244261 - DNA, 83 bp, Homo sapiens
cttgccctcatcctggttctggaatcctcagttcaagaaatgaaagctcattagcatctacactgaagacgctcctgttcttc

SEQ ID NO: 244262 - DNA, 76 bp, Homo sapiens
agtatgttcgtcactccaaacacaatgggacagagcagaatgggctgatatagatccggtgccgcagaatgatggc

SEQ ID NO: 244263 - DNA, 98 bp, Homo sapiens
ttgcaatgaaccccaccaacacagtttttggttgtaaagaagaaagttctaccctttctgtcaaaatgaagtgtgattttaattgtaaccatgttcat

SEQ ID NO: 244264 - DNA, 89 bp, Homo sapiens
agatcaaagctgcctttgctgaattacacaactgagcatgaagactttttaacagttgcagagtcactgaagaaagaatttgatagtcc

SEQ ID NO: 244265 - DNA, 98 bp, Homo sapiens
ccgcgcagcgcccaggcccagctcgtccagagtctgcggacagcgcacgtccaggctcccaccccgtggccaggtacctaggctccgtggactaccgc

SEQ ID NO: 244266 - DNA, 50 bp, Homo sapiens
gtctgtcctcctagccaaagaaagccatccaacatattctttacaatgga

SEQ ID NO: 244267 - DNA, 97 bp, Homo sapiens
ctggaatgtgtgaaatttgctagccattgtctcatgaaccatcctgatttagcaaaagacttaacagagttagtgctgagggtgctgtactatggcc

SEQ ID NO: 244268 - DNA, 101 bp, Homo sapiens
ggacagagtttgatcgactgaatgagatcaaaggtcacctggaaattgccttattggaaaaacatttcttactattaaaggtggaagaaggtccatatctt

SEQ ID NO: 244269 - DNA, 157 bp, Homo sapiens
catgattggtgctcgattttatactcaattggatgctgctcaaatgagaaatgatgtcatagaggaagaccttgcaaagaacacatctgttcgatttcaaaacagtcagatttcttcaggaacccaggtagaaaaatacaagaaaaattatcttcca

SEQ ID NO: 244270 - DNA, 90 bp, Homo sapiens
ctgctctggaacaccttcacccgcttccgcagcccgctcgtgcccggcttctggtcctgctcctgcccctcctaaagctgaagccaaagc

SEQ ID NO: 244271 - DNA, 100 bp, Homo sapiens
cccgaagctaaagtggattcaggagtacctggagaaagctttaaacaatgcttcttcgggcggaggaggaagtaggggtgcacctcagcactatcccaag

SEQ ID NO: 244272 - DNA, 83 bp, Homo sapiens
acagaactaaagcgggcaaagttagaccttccagaacctgggtaaaatatttggagtaccttttaatgcactgccccattctg

SEQ ID NO: 244273 - DNA, 83 bp, Homo sapiens
cggcggcgcagcggtacagcgcccgactgctgcaggccggctacgagcccgagaggagaacgtatttaccgggcagtcaaaga

SEQ ID NO: 244274 - DNA, 100 bp, Homo sapiens
aagagcctcccagcatgactcagctacttcgagctccttctcctgaaaaagccgaggaggagagtgagaggcttctgagggaactctatttgtttgatgt

SEQ ID NO: 244275 - DNA, 90 bp, Homo sapiens
ctgtgagattgataaatatcgtgtagaaacgtgctgtgtaattgtgatgatgatgatgattttgatgatgaggaagctgaagaaaaagcg

SEQ ID NO: 244276 - DNA, 82 bp, Homo sapiens
tgtaagcgcagaaagcaggcgaacccgcggcgcaataacggtctggccgtgggcctgggcttcggggcactggcagaggtcg

SEQ ID NO: 244277 - DNA, 50 bp, Homo sapiens
gtgctgcaggctgactctgcagatatcactcaccccatcccagacttgac

SEQ ID NO: 244278 - DNA, 82 bp, Homo sapiens
agaggccgcaggagtcatttcatatggatatgtgtgtgccacaaaaattatgaaactgaggaaaatacttgaaaaggtggag

SEQ ID NO: 244279 - DNA, 87 bp, Homo sapiens
tgcgggcttgtgtcatgagcatggcagaggcacccccagggacattagcaagtctcgaagatatgactccaggaccactatattttc

SEQ ID NO: 244280 - DNA, 89 bp, Homo sapiens
caaaggccaatgttggtgctggcaaaaaggtcttcaataaactcatcaggagatataagtatttggagaaggcatttgaagatgaaatg

SEQ ID NO: 244281 - DNA, 100 bp, Homo sapiens
tactgatggtgctgtaaccacctcacagattccagcttcggaacaagagaccctgttaaaagaagatggatgcacagtgttcagccaaggtcaatgcaag

SEQ ID NO: 244282 - DNA, 100 bp, Homo sapiens
cgaatcctccgctccgagcccgtccggactcccccgatcccaggtagtatcttccccagcagatgttgctgaaaaagctgacagaattattacaatgctg

SEQ ID NO: 244283 - DNA, 74 bp, Homo sapiens
aagctaatggacatatccattttgataatgtcagtgtggtatctctacagaaaatatttacaccagcagctcca

SEQ ID NO: 244284 - DNA, 98 bp, Homo sapiens
ggcagcaagaacagagagagaggtggacagatctgagagatactgagtattctaccttgtaaatactgttatttgtatatactgtaaatgatgacatc

SEQ ID NO: 244285 - DNA, 98 bp, Homo sapiens
ccagggcgcgcagccgggccggcccgaccccaccggccatacgagccacccagagttccctcactgaagatctgagcatgacccgggacgaggcactg

SEQ ID NO: 244286 - DNA, 89 bp, Homo sapiens
agctgttggagataatgcatctgctttcaaggtgttactgtagatgatcacatgatgaaggtagagacagttcattgcagcgcttgcag

SEQ ID NO: 244287 - DNA, 100 bp, Homo sapiens
ctactgctgcctctgtcactcctggtgaccagcattcaagatgatgaggagtctgatgaggaagctgtgaagaaaaccaacaaatgtgtactagtctggg

SEQ ID NO: 244288 - DNA, 89 bp, Homo sapiens
cgaagacagtgaaaatgattggagtattaacattggtttccatgttgctgaggccatggagattcccagagctggtcacaccgaccgct

SEQ ID NO: 244289 - DNA, 121 bp, Homo sapiens
aaacacaagaatagaagaggcttgtgaaatgtataccagagctgcaaatatgttcaagatggctaaaaattggagtggtgttgctctcttgccattcgtggatgagcgaaggctacgagct

SEQ ID NO: 244290 - DNA, 50 bp, Homo sapiens
tgttgagttctgcagttgatcatggcaagacttcaaggactgcattcgta

SEQ ID NO: 244291 - DNA, 100 bp, Homo sapiens
cgcctctcgaggtacggactaaggttacagattatgccattgccaggcgcatagtagatttgcattcaagaattgaggaatcaattgatcgtgtctattc

SEQ ID NO: 244292 - DNA, 100 bp, Homo sapiens
gtagaggctgaggaaggccgtgttgtttgtctacctgggactatacaagattctactggacaggatatattgttcgttttccctaaagataagctggtgg

SEQ ID NO: 244293 - DNA, 82 bp, Homo sapiens
atttgctgatgtacttcctgaagcagctgctctagtgaagtgagacctggaaccccttcaaattacagtaccagctgagaaa

SEQ ID NO: 244294 - DNA, 98 bp, Homo sapiens
agggacctcgaatgtgggaccccagcccctctccagctcgaaatcggtaacaagatgctcaactatagtgctcccagtgcagggggttgcctgctgga

SEQ ID NO: 244295 - DNA, 100 bp, Homo sapiens
caagagaggtttagaacattaactcccagctattatagaggtgcacagggtgttatattagcctggttcacctggatctgtaattcctgctcaagcacac

SEQ ID NO: 244296 - DNA, 75 bp, Homo sapiens
cggatgagaacgaggcggaggagggagtgattcacttactttagtgtttgtggagaccaaaaagggagcagattc

SEQ ID NO: 244297 - DNA, 74 bp, Homo sapiens
ccagatgaaaaatgtcacctttgaacatgttaaagggtgtgttaacagggcacaaccattatgtgatgtgtgct

SEQ ID NO: 244298 - DNA, 51 bp, Homo sapiens
aaacttgatccaaagacaatgaaggagataggaacaggtggcacatgtcag

SEQ ID NO: 244299 - DNA, 90 bp, Homo sapiens
gaatcaaagtttaaggaaacaggtgtaattaccccagaagagcttacctgttgattcggtggtaattacagaatctgatgcacagagaac

SEQ ID NO: 244300 - DNA, 75 bp, Homo sapiens
cagcgatcgagagagaccggagaggtggagagggagtgaggattctttggacaccagcctgagagctcacggggt

SEQ ID NO: 244301 - DNA, 95 bp, Homo sapiens
actcagaagaacttgtacagagatgtgatgttggagaactatagcaatctggttttcttggcagcctcgtcttacagcgtgactgcaaagaaaaa

SEQ ID NO: 244302 - DNA, 131 bp, Homo sapiens
ggaggctcggcggcgggcggcagcatgtcggtggcggggctgaagaagcagttctacaaggcgagccagggccaattcctgtccccccagcagcatggcatcgtgtgctgaaccctctgagccctctgccc

SEQ ID NO: 244303 - DNA, 75 bp, Homo sapiens
ggaccatgtgatgcacctgctccagcagcagtgttgtactgctacttctataaacggacagccgtaagactaggc

SEQ ID NO: 244304 - DNA, 107 bp, Homo sapiens
ctccagtttccatatgttgagattctacttattcatcagtttgttgtgcttgtcaagatcaggttggtcaaagaaaaagtgatgtatgaaaaagaggcaaaacaaca

SEQ ID NO: 244305 - DNA, 100 bp, Homo sapiens
tccgatcgacccggtaccaagaaggggagtgcccgcggcagaccagcatctcagacatgtcgaaaaagatgttttgatccctaaaataatgagagaaaag

SEQ ID NO: 244306 - DNA, 100 bp, Homo sapiens
agtctacaatatcatcaccaattttatgcgaacccgggaagaaggctcccgatggccatatcttcttggaagccttctctccagtttacaaatatgccca

SEQ ID NO: 244307 - DNA, 82 bp, Homo sapiens
aaaagagagccagccgagcaccctccaagcagagatgtgaagttcatttccaatccgccctccatggtggcagcggggagcg

SEQ ID NO: 244308 - DNA, 83 bp, Homo sapiens
ctccgggttccccggctcgcggggcccggcgaagggcagggatttcagtcataatcggttgtctaactggaacatcagcttgg

SEQ ID NO: 244309 - DNA, 50 bp, Homo sapiens
ctcccatcatcatcttgaatttagtgaagattacttctctaacaggatca

SEQ ID NO: 244310 - DNA, 106 bp, Homo sapiens
gctgtacttgcgtccgctacagtatgtcaatcgcttgccccagcacaggtgctggagaatctggtaaaagcaccattgtgaagcagatgaggatcctgcatgttaa

SEQ ID NO: 244311 - DNA, 87 bp, Homo sapiens
cagctgaatgcatgctacagtataagaaaaaagctgctgcctatatgaagtctttgagaaagggaagtgttcgccagttactacatg

SEQ ID NO: 244312 - DNA, 100 bp, Homo sapiens
tagactgcacctggaggatctcattacccatcggctatggttgaaatcacaaagattagacacctttttagataggtgttcttcagcaccactgacaaca

SEQ ID NO: 244313 - DNA, 96 bp, Homo sapiens
taaaaacacagctcgacagtacgcctacttctataaagtcatccagaattactttcctagtaagcaagatatcctgctggctaggaaagccaccaa

SEQ ID NO: 244314 - DNA, 100 bp, Homo sapiens
cgcccgccgcagacacgggacccgcttcgaggccgctttggcgccaaatcctgagataaccatgatgactacacagacttctactatgacatttgctcct

SEQ ID NO: 244315 - DNA, 99 bp, Homo sapiens
ctcaatttatggagcatcatgaagaactgcattggaaaagaactctctaagatccccatgccgcttgtgagaagaatgagttgatgacatgctccatac

SEQ ID NO: 244316 - DNA, 102 bp, Homo sapiens
ccatgtcgggttattcgagtgaccgagaccgcggccgggaccgaggcaaacggggattcagcgtccgatcctttggaacagggactcacgtgaagcttccag

SEQ ID NO: 244317 - DNA, 83 bp, Homo sapiens
ctggcggcttccaggcgcactaccgcggctgcctgctgtttcccggggagatcatgaaacgaggtcgccttcccagcagcagt

SEQ ID NO: 244318 - DNA, 75 bp, Homo sapiens
atcaggatgagataactgaaagggaagcagaaccatactatgtaggcgaaaaccaagagtacatcggcctcgttc

SEQ ID NO: 244319 - DNA, 101 bp, Homo sapiens
cctttgctcaggaatctaccagcattaaacctttgagctagataatcttgtgccgtggaaatcagaagggcaaaacgaagcagtcatgatgagaagcacac

SEQ ID NO: 244320 - DNA, 75 bp, Homo sapiens
cagagcctttggggagctcagattggagtaaggcattgctgtcccttgcagggaaaatgtttataggaggcctta

SEQ ID NO: 244321 - DNA, 90 bp, Homo sapiens
ttcaaaacgtgactgacaccaaggccccgatcgacacccccacccagcagctgattcaagatatcaaggccaccagcccctcgggttcca

SEQ ID NO: 244322 - DNA, 98 bp, Homo sapiens
gaacgatgcccccctccacgagatcaacggagaaattgtcgtaaatgaagtcaattttgtgagaaaatgcattgcaacagacacaagccagtacgatt

SEQ ID NO: 244323 - DNA, 100 bp, Homo sapiens
ggtcggctgcccctgggaaaccagagagtcggagggagtccatctggagcggccaagattcactccttctccagttgcacagccacacccttcagctggc

SEQ ID NO: 244324 - DNA, 95 bp, Homo sapiens
cccaagacagagcgctactcctggcagtgcgtcaatcagagcgtcctgtgcggtggaagcagggaaaggcctggagatgaggaagctggttctct

SEQ ID NO: 244325 - DNA, 100 bp, Homo sapiens
cagagattcatctttcatgcagtgacatgttgataaaaaatgatggatgaccgagtgggagacagcagcaccagcggtggcagagaccccagacatcaag

SEQ ID NO: 244326 - DNA, 73 bp, Homo sapiens
ctggtgtcctgaacctggaagttgtgctttttaaggttacagattatgccattgccaggcgcatagtagattt

SEQ ID NO: 244327 - DNA, 106 bp, Homo sapiens
gcacactgggcagaagatgcctctgattggtctgggtacctggaagagtgagcctggtcagaattgaagatgttcctgctccttctacatctgcagataaagtgga

SEQ ID NO: 244328 - DNA, 82 bp, Homo sapiens
ctttgcagctgcgattttcgccctacgttttcaacggaggaatggtcctagtgccagatcgtgtcataaaatgtgcattgat

SEQ ID NO: 244329 - DNA, 105 bp, Homo sapiens
gaagtcctggcggtcatggacactctcgtctctgttgctgctcgagaggtctgggaggggctgaacgtggtgaagacaggccgagtgatgcttggggagaccaat

SEQ ID NO: 244330 - DNA, 50 bp, Homo sapiens
ccttgctgaagagactttccgttacatgatggccacagatgtctttaatt

SEQ ID NO: 244331 - DNA, 101 bp, Homo sapiens
cgccaagccaggagcttgctcttacacagagtgtcggaggtgattccagtgcagaccgactcttcccacctcaggttcaagggcagcaggaaagacgagat

SEQ ID NO: 244332 - DNA, 83 bp, Homo sapiens
ggtgcatctgcagtacaggatatgaagaaattgagggttcttgccatggttggtgttcgaggaagagacattgttgttcttgg

SEQ ID NO: 244333 - DNA, 90 bp, Homo sapiens
aacccatccgcgacttcctggccatcgttttcttcgcctccatagaaatgcactcggtgatggaaagagagccactattctgaagaacac

SEQ ID NO: 244334 - DNA, 116 bp, Homo sapiens
ctggaggtttcagaagacgaggcagacgtggctcctgctgcacatgtatgacagtgacaaggccaccagcccctcgggttccaagatgcagctactggagacagagttctcacaca

SEQ ID NO: 244335 - DNA, 50 bp, Homo sapiens
ccatcgttgctgccttcttcgtcaaggtgcagtagacattgttgcaatca

SEQ ID NO: 244336 - DNA, 90 bp, Homo sapiens
cggaccccgcggtcaacgcgcagctggatgggatcatttcggacttcgaaggtgagcacctgcggatctgtccccagggctacacctgct

SEQ ID NO: 244337 - DNA, 83 bp, Homo sapiens
gtcgcttgaaaagactgggcttgtccttgctggtgcatgcgtcgtcggcctctgggcagcagataaatactgcaacaactgta

SEQ ID NO: 244338 - DNA, 83 bp, Homo sapiens
agaagaataaggagaaggataagtcgaaggggaaggcgcctgaagaggacgaaggtcaaaatgcagatcttcgtgaaaaccct

SEQ ID NO: 244339 - DNA, 74 bp, Homo sapiens
actctcgttctgcgacttataaaggaccagacaaatcaaattagtggttttgtgaagaaaaaatgactgctgcc

SEQ ID NO: 244340 - DNA, 98 bp, Homo sapiens
cagcccccagccctggagaagctcaaaggcaaaggctctgtctcccacaagttcctgtcactaccgatgttggttcgccagctttgggactctgcggt

SEQ ID NO: 244341 - DNA, 98 bp, Homo sapiens
gccgccgccgccgcggtttgtcgccagaaggaagatggcggatctggaggagcagttgtctgatgaagagaaggtcatagaaggttatgaaatagcct

SEQ ID NO: 244342 - DNA, 100 bp, Homo sapiens
cagaaatgttacacacggagtatcaaactctgctgccaagaggagaccttgcctattttgatggacttagtgagactattcttgctgtggggcttgtgaa

SEQ ID NO: 244343 - DNA, 112 bp, Homo sapiens
ggccagagcgtggcagaaggcagagaagtgaacgccccagcaaaagagacgagttgtactgctgtcacaggaaatggacgctggattacaagcatggcagctcaggcagcag

SEQ ID NO: 244344 - DNA, 96 bp, Homo sapiens
attatccgaaaccgcctcactggatttgggtctcgctgtgctagaatattccgtctagttttgcagaagaaacacatagagcagaagcaagtggaa

SEQ ID NO: 244345 - DNA, 74 bp, Homo sapiens
aatcccaatgctgaagtaagattgtcttggaaatactaagttggcttcgcctcaacagcatcaagaagctgtcc

SEQ ID NO: 244346 - DNA, 83 bp, Homo sapiens
ctcattgccacggctgaaccctccttctcaatcttggaacagcacccccttctttaagatctattccagaggggagcttcacc

SEQ ID NO: 244347 - DNA, 74 bp, Homo sapiens
ggagctgcctctgaggaacacgccgcaggtctccaccagctgagcagcccgcgctacaagttcaacttcattgc

SEQ ID NO: 244348 - DNA, 75 bp, Homo sapiens
gccacagaagttgctgctgacgctctgggtgaagaatggaaggttacccatgcagttgttactgtaccagcctat

SEQ ID NO: 244349 - DNA, 100 bp, Homo sapiens
ggccaagctccactgttcagatgcaaagaaaatgatccacagtctatttctcataaactgttccggtgacatatttctagagaagcactggaagagcgtt

SEQ ID NO: 244350 - DNA, 110 bp, Homo sapiens
aagatctcaatgaaggaaaccgcactctcacactggccttgatttggcagctaatgagaaggatactgctggtcaagagaggtttagaacattaactcccagctattata

SEQ ID NO: 244351 - DNA, 98 bp, Homo sapiens
cccgaggcagaggaacagggaagatggcggctgtggtggagaatgtagtgaagctttcaatctcatccctcccagcagctccccttccaccccccggg

SEQ ID NO: 244352 - DNA, 100 bp, Homo sapiens
agcccgactcggtgattgaggacaagaccatcgagctcatgacagatttgaccagttttgggccatcaatcggaaactcatggaatatcctgcagaagaa

SEQ ID NO: 244353 - DNA, 97 bp, Homo sapiens
gaaggaagccgaattttaagtcatcgttctaggataggtgaccaagaatatggcccaggtgaccaaagccctggacaaggccctgagcaccatggac

SEQ ID NO: 244354 - DNA, 82 bp, Homo sapiens
agctttcagactacgtggggaagaatgaaaaaaccaaaattatcgccaagattcagcaaagcaacttttagtgaatttgcag

SEQ ID NO: 244355 - DNA, 75 bp, Homo sapiens
cgatagcgaggtcacctttgcattgcactcagacatccctttaaaagtagttggaatgttcccaagtagaggtga

SEQ ID NO: 244356 - DNA, 100 bp, Homo sapiens
ctccttctgctggatcagacttcgcggcaacctccgggactctgacggtgaccaacttattagaaaaggggagaagtctgttggaacttggaggaaacaa

SEQ ID NO: 244357 - DNA, 50 bp, Homo sapiens
gttggggactcaatgtgtgggcaacaagttcaaaaggtgatgacctatca

SEQ ID NO: 244358 - DNA, 74 bp, Homo sapiens
tggagtcacagcttgacttttggacagagcgggatgccaccagcttgtccaaagggaagttccaggagctcctg

SEQ ID NO: 244359 - DNA, 98 bp, Homo sapiens
gcccagatgactcaactctcagtgaaagtgccaatcaggtctttctggttgggtatctacagccattggttgctgttcaggtcagctttgctcctaac

SEQ ID NO: 244360 - DNA, 76 bp, Homo sapiens
aaaagctgtaaaatgataacagaggctgaccggttccctgatgtgttacctgcttctgctactgatccaaactgca

SEQ ID NO: 244361 - DNA, 82 bp, Homo sapiens
ctgtgtgctgcagaacccccagaccatcatggacccagacatggagctgcgggaagaagcctggtctccggggccgctggat

SEQ ID NO: 244362 - DNA, 83 bp, Homo sapiens
ccaccatcgagcgggagttcgaagagttggatactcagcgtcgctggcagccgctgtacttgctcctgtccaaatatgacccc

SEQ ID NO: 244363 - DNA, 74 bp, Homo sapiens
cggcagagcagggcggcggcgactcgttttagttactatccagcagaaaacttgatagagtacaaatggccacc

SEQ ID NO: 244364 - DNA, 74 bp, Homo sapiens
acaaccgagcaaattgaagagacgttaaaatacttcccagcttcatggagtttggccacaagatgttgttgacg

SEQ ID NO: 244365 - DNA, 83 bp, Homo sapiens
ccgagagccacactttcaagtaaaccagtgtaaatgagcaaagatggatcaggaaggtgggggagatgggcagaaggccccga

SEQ ID NO: 244366 - DNA, 100 bp, Homo sapiens
cggccgatgaagtgcagaggtttttttctgagactgacttgcataccaaatgtgtggtggatgtggatgcaaacaaggttattcttaatcctgtaaatac

SEQ ID NO: 244367 - DNA, 75 bp, Homo sapiens
gtggaagtccaagtcaaacgcagaaggactgcctcactgagcaaccaagaaattatatccagatcgagagacaga

SEQ ID NO: 244368 - DNA, 75 bp, Homo sapiens
gctgacctatcatcccagtttacataataatccagaatggctactctgatctatgttgataaggaaaatggagaa

SEQ ID NO: 244369 - DNA, 99 bp, Homo sapiens
ctgcagaaggcattccaggatgccgagaggaaagtcctgaataccaaaagcaacttgacaattcagaaaggcttttacatcaaatattgataatgataa

SEQ ID NO: 244370 - DNA, 74 bp, Homo sapiens
aatgttcttaacccagaagtagctgaatgtgttactccattgctgaggagtggccataaaattttgagtagaaa

SEQ ID NO: 244371 - DNA, 74 bp, Homo sapiens
ggggattccactctccagtgtaatgattattgacaacagggttatctctttcatacagttgctgggaaacatca

SEQ ID NO: 244372 - DNA, 100 bp, Homo sapiens
cttctccttcgtcacagccctcatgttcagctccatcgtctgcagcgtcccgcacacctggcagcaaaagagcagctccacagctgggtcctgctcctca

SEQ ID NO: 244373 - DNA, 100 bp, Homo sapiens
atttagaagacaaaaacaattttggtgctgaacctccacatcagaatggcttaacagcattgcgcagtgatgaagtgattgatttaatgataaaagaata

SEQ ID NO: 244374 - DNA, 88 bp, Homo sapiens
ggcagagaggaagcttctagtgtactcttactttgaaaaggtatctcagatgaagacatcatcaacattactcttcctactggagtcc

SEQ ID NO: 244375 - DNA, 75 bp, Homo sapiens
ctatcccaggaatacagctttgcattagattgaggaagacacatggcagaaatactacttggaaggagtctcaaa

SEQ ID NO: 244376 - DNA, 120 bp, Homo sapiens
aatgataatgaagaacttatcaaggttgaagggaccaaaattgtcttggggaaacagctaattgagagatttcctcgtcctgtgactgtggagcccatggaccagttagatgatgaagag

SEQ ID NO: 244377 - DNA, 99 bp, Homo sapiens
ggacaagaagcggctcctcctaggcctggatcgtgtgaaatggcctttccccgggtcaagccagcacctgatgaaacttccttcagtgaggccttgctg

SEQ ID NO: 244378 - DNA, 100 bp, Homo sapiens
tgtgcatatccggaggaaagaagtagttgtctacttagatgataaccaaaaaccacctgtgggtgaagggctaaatagggacaggtgacattcagggatg

SEQ ID NO: 244379 - DNA, 97 bp, Homo sapiens
ggatttaagcactgctgcactttatgaggcaatgagaagcacgaccttcatgttacctcccagcagggcagcagtgaaccagttgtccaagacctgg

SEQ ID NO: 244380 - DNA, 90 bp, Homo sapiens
ctcggcgccggtgacgtccctcccgctggtcaccactccggcaccaggtgaggcaatggaacaaggtttacgagactgctgtcgatccat

SEQ ID NO: 244381 - DNA, 100 bp, Homo sapiens
ttacagtcaacatcagaccaaatggataaggaaattgcaaaatctagtgaattcattttccttgaactacacaatcctgtttcacaaagagaagaattga

SEQ ID NO: 244382 - DNA, 75 bp, Homo sapiens
atagtcagtctgggatatggcatcgtcaagtgctactcgtgagcagtagtcgccatccagacagatggattgtcc

SEQ ID NO: 244383 - DNA, 95 bp, Homo sapiens
aaatggaaggggcctccagggtctgcagacaaggcagggttcaaagtacggagggagaagctcctcatgttccagccacttaccagctaggtctt

SEQ ID NO: 244384 - DNA, 88 bp, Homo sapiens
ggcccacccgccagccagccagcgccttcatcctggggctgcgatggacttgaaaatactggaaatctgtccggatccaaattatttt

SEQ ID NO: 244385 - DNA, 100 bp, Homo sapiens
gccgagctcgggaaggacctcatagacttggccacttttaggcctcagccaactgccagtccaagctgaagatggaagatataaaagaagtgaaccaggc

SEQ ID NO: 244386 - DNA, 83 bp, Homo sapiens
cagatatccagatgctaaaatggacccaatgaacatctgggatgacatcatcacaaatcggaaggttatagagatggaataga

SEQ ID NO: 244387 - DNA, 74 bp, Homo sapiens
atttatggtcgcctttttgaatgagacgaagttatacggaagcgtctcctcattgatggagatggtgctggaga

SEQ ID NO: 244388 - DNA, 137 bp, Homo sapiens
caacagctccagctccgggtgcagggaaaggagaaacaccagacactggaagtctcactgtctcgaataacagcgacttgattgcatgtacagtgatcaccaaggatggcggcatggtccagcgattcctggctgtg

SEQ ID NO: 244389 - DNA, 96 bp, Homo sapiens
gacgacgacctgctgcaattcgccatccagcagagcctgcttgaggcgggcagtgagtatgaccagatggagacccagacgcagaggcggggctgg

SEQ ID NO: 244390 - DNA, 75 bp, Homo sapiens
aggtgaccctgaacctctacgacacggccggtattggcaagcttgccagtgtacctgctggtggggctgtagccg

SEQ ID NO: 244391 - DNA, 76 bp, Homo sapiens
aacagacctagtgggcgttgcctttagacccagaacttcacagggccgggggatcctgactccattcgctgcgaca

SEQ ID NO: 244392 - DNA, 87 bp, Homo sapiens
gagattcatctttcatgcagtgacatgttgataaaaaatgatgttactccacaggatccgctgaacataggatgttgccacaaaatc

SEQ ID NO: 244393 - DNA, 97 bp, Homo sapiens
aggtgctaagaaagagaatgtaagacaggaaaataattaaatattcttaccgagtgcctgagattgtgagggagacccaggacctaattgaacaagg

SEQ ID NO: 244394 - DNA, 109 bp, Homo sapiens
agggcacctgagcggctggagagcctgttggagaaacacaaagaggagtgtgaggaagaggctgtctgtgtcattatgtgtgcgtcggtcaagtataatatccggggtc

SEQ ID NO: 244395 - DNA, 87 bp, Homo sapiens
taccacaagaagcggaagtatgagttggggcgcccagctgccaacaccaaggttaaaaagatcaagtggcatgagcagccttttggg

SEQ ID NO: 244396 - DNA, 100 bp, Homo sapiens
cgggctgccccgcaggatcatcaagggatgccagtcccagcgctgttcccgcacccgcagcacgcggagctgccggggaagcactgccgccgccgcaaag

SEQ ID NO: 244397 - DNA, 75 bp, Homo sapiens
ctaacttcagcggtggcaccgggatcggttgccttgagcctgtgccctctggtggtcagaagatgctgtgctgtc

SEQ ID NO: 244398 - DNA, 96 bp, Homo sapiens
ttcaacttctgctccaggaaattcagcctcaaaaccgtcctgctgcttgctgaccaaatgaagcagagcccctggaaaactcacatatgtgtcaac

SEQ ID NO: 244399 - DNA, 82 bp, Homo sapiens
gccgcgcttgctgctggtaacagggccttgcctagtgggccttccttcccagatgccctgtacagacttttggggaactggg

SEQ ID NO: 244400 - DNA, 100 bp, Homo sapiens
cagcccggcgggacagcggggcggctggcgccgggggccggggagcgccagatcggtttgggcttggccagccaggaagaatacctggttctgtgaatgc

SEQ ID NO: 244401 - DNA, 80 bp, Homo sapiens
tctgtgcagcaggacatcaagttcttgccgttcaaggtgtcctgtggccaggcggaaagcagtgagaagcccaacgctga

SEQ ID NO: 244402 - DNA, 112 bp, Homo sapiens
caggctctgtggttcaggactcccgacttgacacgatattttttgctaagcaggtgatctgcaactctttcaccatctgtaatgcggagatgcaggaagttggtgttggcct

SEQ ID NO: 244403 - DNA, 74 bp, Homo sapiens
cgagaacatctactctttcaactacaccagccagcccgaccagcaggttcaggagaagtggcacctggtggagg

SEQ ID NO: 244404 - DNA, 74 bp, Homo sapiens
gccaactccaatgggcctttccagcccgtggtccttctccatattcgaggttatgaagacagtatggagtttcc

SEQ ID NO: 244405 - DNA, 75 bp, Homo sapiens
ttttgccgatttcatgactaaccagttttccaacatggctagatccatcagaaactgaagccgtggagaacgctc

SEQ ID NO: 244406 - DNA, 75 bp, Homo sapiens
accatgtctgcctcctggtgaaaaagcccgtggaccgggagcccgtggaccgggagccggtggtgtgccaccccg

SEQ ID NO: 244407 - DNA, 83 bp, Homo sapiens
gaagatcggcagcggctccttcggagacatctatctcgtttgatgaaggccggaacaactttgaaggggaggtcaccaaggag

SEQ ID NO: 244408 - DNA, 74 bp, Homo sapiens
gaggggctccggctggtctgtggtgaggctgagttggctgtcattcttaaatttgtgctggaccatgaggacgg

SEQ ID NO: 244409 - DNA, 74 bp, Homo sapiens
tgtctgtgcagatgtacgcccaagccgccctggatggagactcccaggacagtcattttgtttactcattcagc

SEQ ID NO: 244410 - DNA, 100 bp, Homo sapiens
tttacttgatgtccaggggaacatcactcagaagtttgatgtagctcagaacgcccagcagctccatgaacgaatccagtcctcgagtatggatgccaag

SEQ ID NO: 244411 - DNA, 100 bp, Homo sapiens
gggagctactgatgcttcttcctacatgtcctaatatgttgatggcattccagaatatctcagatgagcagcccctcttggagtctgtgccttatgaaga

SEQ ID NO: 244412 - DNA, 100 bp, Homo sapiens
atcaaccgcccgaaccagagccggaggcgggaggacgggctgccgcagatagttttgaggcagctgtgccatcaaatagccacattgtttcggaacctgg

SEQ ID NO: 244413 - DNA, 90 bp, Homo sapiens
cattcctacaaccccagcaccaacgagtggctccaggtggcctccatgaaccagaagaggaaacctcgacctgtctcccagttggttgca

SEQ ID NO: 244414 - DNA, 136 bp, Homo sapiens
ctgcacggtgaacctggaccaggaggaggttttcaggaccaaaattgtggaaaagtcactctggtactaggttttgacaagcttgcatcatgcgtgagtataagctagtcgttcttggctcaggaggcgttggaaa

SEQ ID NO: 244415 - DNA, 75 bp, Homo sapiens
tgctcaacaagggcctgccgcttggcgtccttctggacatccagcagcactttggggtcaaggaccgaggcgccg

SEQ ID NO: 244416 - DNA, 87 bp, Homo sapiens
ggacaggggcccgtgatggaaaatgcccagggcttcctgtccacttccaacgaagcggtctataagatctttgatgacagcccctgc

SEQ ID NO: 244417 - DNA, 95 bp, Homo sapiens
cattctccttatctcatctgcacaggaagcaggtctaagctgaagtgagtagtgaatatagtatggacaaggcaatggttgaatttgctacattg

SEQ ID NO: 244418 - DNA, 100 bp, Homo sapiens
tcctgaggagctgggactacaggcacttcaagtaagtgcagcagtttttatctggccaatctactgtgacccagtcaagccaccacccatgtctgggctg

SEQ ID NO: 244419 - DNA, 100 bp, Homo sapiens
aggaaggaatgatcagctttgactgctttatgaccatattaatgcagatgaggcgttctttggttctgtgactccccgaccagtgacctggaaatgcgca

SEQ ID NO: 244420 - DNA, 82 bp, Homo sapiens
ggagcctcagcccggggaggccaggctggcagccctcaccgcaggagacaggccgggctctcgccatgggtcactgtcgcct

SEQ ID NO: 244421 - DNA, 75 bp, Homo sapiens
attcctttaaatccggagggggaaaaaatcccaaggtctgcaaaggtctctaattaacagaagatggcaaagccc

SEQ ID NO: 244422 - DNA, 80 bp, Homo sapiens
aactggacagcgaggacaaggacaaagaaggcaaacccctgctgaaggctgcggcaagacatcagtgctcctacttagtg

SEQ ID NO: 244423 - DNA, 100 bp, Homo sapiens
cacaggtgctaaagagagcagtaccctgatggagtcccttgcagggcgccctgcgtccggcagaggaggcgagcatcccgctcaggtgatgaggaacccc

SEQ ID NO: 244424 - DNA, 100 bp, Homo sapiens
gaaaacatgacgtctccagccaaattcaaaaaggataaggagatcatagcagagtacgatactcaggtcaaagacgatgttccacaggagcccgtgccca

SEQ ID NO: 244425 - DNA, 82 bp, Homo sapiens
ggagatcgtgggcgagctgggcgacggcgccttcggcaaggtttacaaggtatcgctctgaagacttgatgaaggtttgctg

SEQ ID NO: 244426 - DNA, 98 bp, Homo sapiens
ggaggagctggatgccgaagtcctggaggtgttccacccgacgcatgagtggcaggcccttcagccaggtgcactttacaggtccccgatgaaccaag

SEQ ID NO: 244427 - DNA, 50 bp, Homo sapiens
gtgggctggtgtctcgcagctgccatccgggtgacctgcataggttcctg

SEQ ID NO: 244428 - DNA, 100 bp, Homo sapiens
ccgaaacccctcggcggcgttcttctgtgtggcccgcctgcagagaacgccagatcaagtgtcccaagtgtgataagctgttcttgagaacaaatcactt

SEQ ID NO: 244429 - DNA, 74 bp, Homo sapiens
ggaatttccaaggggattcaaacttcaacagaatgtggcaaccaggatctagtttgaagcactaagaagaataa

SEQ ID NO: 244430 - DNA, 75 bp, Homo sapiens
ccaagcccctgtcccctacgtcctacatgagcatgatgccttcttctgtagagtgggcgctttgcagaatacgtg

SEQ ID NO: 244431 - DNA, 75 bp, Homo sapiens
gccagaagcgggcggcgcgggggagatgttcgtgccctcgtgaggctggcatgcaggatggcaggacagcccggc

SEQ ID NO: 244432 - DNA, 82 bp, Homo sapiens
tacctcctcctttaccccagaacctcctttacacagtatcagaacgtagttgatgtcacttggcgatattcctgcaaacatg

SEQ ID NO: 244433 - DNA, 74 bp, Homo sapiens
aaatttcctgaagaactggaacacgtagaaagtgcaagcaaagggccaaaatctatgcaagatggctggtgtgg

SEQ ID NO: 244434 - DNA, 97 bp, Homo sapiens
cagtggatttccttgcggaaaggatgttggcggtccctgtgacctgtggagacacggccagatctgccctccagtgtcatggagaaactccagctgg

SEQ ID NO: 244435 - DNA, 100 bp, Homo sapiens
tttgggaacttcaaggatctactctgaagatccctgtggtagagagaaaaatcctggatctgtatgctttgagcaagcctggaagctccgaccccaggag

SEQ ID NO: 244436 - DNA, 80 bp, Homo sapiens
gaaccactctttgtgccgcagcttcgcaggtggatgttcccaaggccttgattattgttgcagttcaatgtggctgtgat

SEQ ID NO: 244437 - DNA, 100 bp, Homo sapiens
aacaagtatgggtctccgtacaccaaaaactcaggcttcgccacctgcgtgcaaagttggcgtgcagtggtgtgatctcagctcattgcaacctctgcct

SEQ ID NO: 244438 - DNA, 95 bp, Homo sapiens
cttttctacactggtaatgaaggggacattatctggttttgtaataacacggttatttcacagttgaggattttgggcagatccataacagctgg

SEQ ID NO: 244439 - DNA, 90 bp, Homo sapiens
ttgtttgtcatccttgtacagcaatctcctcctccactgccactacagggaagtgcatcacatgtcagaacctaaaggcagacccagaag

SEQ ID NO: 244440 - DNA, 51 bp, Homo sapiens
gccaaggagccgcagttgtcacggttcagtactggagaaaatgaaactggg

SEQ ID NO: 244441 - DNA, 82 bp, Homo sapiens
gggtgtgggacaccgtgggctgcgtgtgggacgggtttagcggcagcctcttcgatctgcaaatgagaaattcacaagcgca

SEQ ID NO: 244442 - DNA, 111 bp, Homo sapiens
gggagctgaaacagaacctgtccaggagctggcatgacgtgcaggtctctagcgcgtactccaaagattcaggtttactcacgtcatccagcagagaatggaaagtcaaat

SEQ ID NO: 244443 - DNA, 100 bp, Homo sapiens
ccagaatctgagatcccagactgtcctgaggatcctaaatggaatggaagatttgatgtgggtcgctatggaggccataggaaaaggatacagagtagag

SEQ ID NO: 244444 - DNA, 75 bp, Homo sapiens
tgaacttccggtgctcagccgccaggcatcaacaggtcccctctgagccctctcaccttgtcctgtggaagaagc

SEQ ID NO: 244445 - DNA, 100 bp, Homo sapiens
ctctcaccacaacatttcaaagggaatacattgccagaacttggaatactctactggacaaacatttcctccaaggtaagaatgattgatgttggctgat

SEQ ID NO: 244446 - DNA, 100 bp, Homo sapiens
ggcggcttccggaggtcaagtcttcatcatcagtgtggagactcatgctgtagagaattcacaatgacaacagtgacagtgaccacagaaattcccccaa

SEQ ID NO: 244447 - DNA, 75 bp, Homo sapiens
tgtcactggcccgctccctggcggtgcagagaccagcatccttggagaaggtccagaggtgtccttctaaagctg

SEQ ID NO: 244448 - DNA, 90 bp, Homo sapiens
gaatgggaaatcctctgcttgacatctctgctgtagtggacaaagatttccttgataagacatgaacaagctgagtggaggcggcgggcg

SEQ ID NO: 244449 - DNA, 113 bp, Homo sapiens
gacattcactaaagtccctggatctggtcaccatgaaaaagctggacagtaagacctccttaactacgtgttttgctcaagaaacttttgggaaacagtacaaacaaactata

SEQ ID NO: 244450 - DNA, 100 bp, Homo sapiens
gtactacacaaccgtctccagccttggtctgagtggactgtcctgcaggaatcctgaagtgggtaaaactgattgacaactttgaaggggaatatgacta

SEQ ID NO: 244451 - DNA, 82 bp, Homo sapiens
cagggatgagtcatgtggcagtggaaaatgcgctcgggctggaccagcaggcataagggccatgtgttctgaaattattttg

SEQ ID NO: 244452 - DNA, 50 bp, Homo sapiens
cgggacaccctggaagccaggaaatggtgagcgagtgctgtgctttcatg

SEQ ID NO: 244453 - DNA, 74 bp, Homo sapiens
tggctgacatccgcaaacagagtgagcccttcttcaaggctgagaacgggaagcttgtcatcaatggaaatccc

SEQ ID NO: 244454 - DNA, 102 bp, Homo sapiens
aagatggcggcggtcggggccgaggcgcgaggagttatttggtagagtgataaaagcaagcattgctattgacaatggaagagcagctgagttcatccgaag

SEQ ID NO: 244455 - DNA, 75 bp, Homo sapiens
agtgactgaattaaaaggtgtcaagaagctcagaatggaaatagacagacggttggaaaaaaaactgaagatcac

SEQ ID NO: 244456 - DNA, 100 bp, Homo sapiens
cgcgcgcgaagcgagcgagaaggcacggagtcgccgcggagcgcagactaatagggatgccaaaggaaaaatatgatcctccagatcctcgcagaattta

SEQ ID NO: 244457 - DNA, 100 bp, Homo sapiens
cccgggtccccgcgttcacagccccagcgcagccctccagaatacccatcatatagcccctgaggtggcatggtgatgtctccatgagggaaccccttcc

SEQ ID NO: 244458 - DNA, 122 bp, Homo sapiens
tgcagaacaaattagacttgcacagatgatttcggaccataatgatgctgactttgaggagaaggtgaaacaaggttaaagcacgaattgggagctctcagcgacatcaccagtcagcagcc

SEQ ID NO: 244459 - DNA, 82 bp, Homo sapiens
ttgttcccccaaatgtctgactctgactctcggactgagaaacgcaaggatgacgatgtcgataccaagaagcagaagaccg

SEQ ID NO: 244460 - DNA, 98 bp, Homo sapiens
ggctgctggaggcggagaggcacggaggagccgctggggctgccgccacggccgcccggagaaacttctattaagacaagctttcccatgactgttaa

SEQ ID NO: 244461 - DNA, 75 bp, Homo sapiens
atttttttcgggtagtggaaaaccaggtttggtgcacctcgatttggaggaagtagggcagggcccttatctgga

SEQ ID NO: 244462 - DNA, 82 bp, Homo sapiens
gcggcgccgacatcaattacgccaatgtggacggactcactgccctgcaccaggtttgggccccatggtatccctgtgacag

SEQ ID NO: 244463 - DNA, 48 bp, Homo sapiens
cggaggagtctcagagctgtcagaaagttactccacaggatccgctga

SEQ ID NO: 244464 - DNA, 90 bp, Homo sapiens
ccacaggctctctccgctcgattttgtcaccgttatgtgggaagcgaatccaattgcaaatagaagagtcttccaaaccagtgaggctat

SEQ ID NO: 244465 - DNA, 82 bp, Homo sapiens
cagagcaagttttctgaaacgtatgtgaagttcatttccaatccgccctccatggtggcagcggggagcgtggtggccgcag

SEQ ID NO: 244466 - DNA, 75 bp, Homo sapiens
catttttacgggccttctggagatgcttccgaactgtgggcaaaaatggcggcactggtgaggtggattgatgat

SEQ ID NO: 244467 - DNA, 74 bp, Homo sapiens
agtgtggtggtatccaccttcccacccaccctcccacacctccctgacagggtctcattctgtcgcccaggctg

SEQ ID NO: 244468 - DNA, 73 bp, Homo sapiens
agagtggaccaccccatgaacctcgccaccagctgaacaggccaaagccagactacagctggttcttgaagct

SEQ ID NO: 244469 - DNA, 100 bp, Homo sapiens
ccgacatggaacagggactcactggggggccatgaagcccccaggaggagaatcgagcaatctttttggaagtccagaagaagctactccttccagcagg

SEQ ID NO: 244470 - DNA, 100 bp, Homo sapiens
cagaacgactcttgaagatgctgagcaacttctggtgctggagaatctggtaaaagcaccattgtgaagcagatgaggatcctgcatgttaatgggttta

SEQ ID NO: 244471 - DNA, 71 bp, Homo sapiens
acctgcggcgtcggcagctgctgctccgagcgtgagtgcatctccatccacgttggccaggctggtgtcca

SEQ ID NO: 244472 - DNA, 90 bp, Homo sapiens
aaaagactttatggctaaaaggcttaacccaggcatttggagggtttctcatttggcctgatgttggaatttctgatgaatctgcagtca

SEQ ID NO: 244473 - DNA, 75 bp, Homo sapiens
taccatgctgccctagcaacaacagaagctgtacattggaatgcgtttacagtcattgtaatggaagcaaaatac

SEQ ID NO: 244474 - DNA, 74 bp, Homo sapiens
cttggaaccagatcgtccagaggtatttgagcagcgagcagaacacaaacgtgcagatatctgatagccctttc

SEQ ID NO: 244475 - DNA, 100 bp, Homo sapiens
cagattcgcagtggtcgcttcttctccttgcacgagggccgggaggaggatcagcggttgatcaacttggtaggggagagcctgcgactgctgggcaaca

SEQ ID NO: 244476 - DNA, 75 bp, Homo sapiens
taatatacttcatagattcatcaaaaggcatttcatccttcatgaagccattcaggattttgaattgcatatgag

SEQ ID NO: 244477 - DNA, 82 bp, Homo sapiens
ggaaagtggactgtccggggccgggctcaggagcagaggctttatcctgtggataaacgcagagtgaacgagtttggggagt

SEQ ID NO: 244478 - DNA, 101 bp, Homo sapiens
tggggaagctggtacccctgaaggagaccatcaaaggattccagcagattttggcaggtgtttgagaagtcccccctgcgggtgaagaacttcgggatctg

SEQ ID NO: 244479 - DNA, 75 bp, Homo sapiens
tgggccagcatcaacggcttctgcgagcagctcaacgaggactttgaggggtttgtctacagattttgagcgttc

SEQ ID NO: 244480 - DNA, 74 bp, Homo sapiens
agtggcctacgagataattctattaagggacaagaatccttcaagaaacaggaaaaaactcctaaaacaccaaa

SEQ ID NO: 244481 - DNA, 83 bp, Homo sapiens
aggggccactgctgggccctgaggctgcaccaagtggcgaaggagccggctccaaggttcatccacgactgggtgtacagcgg

SEQ ID NO: 244482 - DNA, 120 bp, Homo sapiens
gacggcccaggtggcaggatgtcctggtctggccttctccatggcctcaacacgtccctaacttgtgagaatgccacgggtgacctggccaccagcaggaatgcagcggattcctctgtc

SEQ ID NO: 244483 - DNA, 135 bp, Homo sapiens
gcagacccttcctgagggccgagcaacagtgtagtggcgtattccacatagcaaacaggtgttgtgtaacggaccaggaacatgtgttcctatctgtgtatctgcccttctccttgggatactaggaataaagaa

SEQ ID NO: 244484 - DNA, 97 bp, Homo sapiens
aaacgtgatagtgtgggatctggcaagaggagtcaaaatacgatcttatttcaatatggcggtatatattgcacccctaaaagccctagtacgtgaa

SEQ ID NO: 244485 - DNA, 83 bp, Homo sapiens
tggtgctgtaaccacctcacagattccagcttcggaacaagagaccctggcatcaagcatgatggaaccatgtgtgatacctg

SEQ ID NO: 244486 - DNA, 82 bp, Homo sapiens
ggactatgacgaggaggaggaagagtccagtgaaggtcagcccaaggccaaccccactgtcactctgttcccgccctcctct

SEQ ID NO: 244487 - DNA, 88 bp, Homo sapiens
tccatcatggccattgtcaaagccatgggcaacctgcagatcgactttgccgacccctccagagcgggggcagtacccaaaggaaacg

SEQ ID NO: 244488 - DNA, 100 bp, Homo sapiens
ctgcgctggccgggggcgcgggcggcggcgccggcaggaagactgattcttgctattccaaatcctcttccacgttgacagcccttcagatatttcaaca

SEQ ID NO: 244489 - DNA, 75 bp, Homo sapiens
cctgcagaacccaaattggcgtttgtcatcagaatcagaggcctcatattcctgaagcccaacctggagatgctg

SEQ ID NO: 244490 - DNA, 85 bp, Homo sapiens
agatggcacagacggagaagacgagggggcgtctgaggaggaagacctggaagacagatctggacttcctcgttctgcccatctt

SEQ ID NO: 244491 - DNA, 100 bp, Homo sapiens
cgtcccctgggcattgagatgcctctccagatctcactgatgaaaaggcctccaggtttttcacctttccgatcatcacgaataggggaaataaaagaag

SEQ ID NO: 244492 - DNA, 100 bp, Homo sapiens
aactggttctacacgcgagctggtgctgtcatctatatgatctcagtattttaaacatcagcttccagcccatatggtggttcatgcttgtaatatcagc

SEQ ID NO: 244493 - DNA, 82 bp, Homo sapiens
atggagatcagcgtgaaggagttgcggacaatcctcaataggatcatcagcaaacgaatgcctgaactagatgaatacacca

SEQ ID NO: 244494 - DNA, 100 bp, Homo sapiens
ggcctcccaaagtgctgagattaaaggaattgattatggattaagtttaccacttggagaagactatgaacggaagaaacataaattaaaagaagaattg

SEQ ID NO: 244495 - DNA, 100 bp, Homo sapiens
cgggctccagctccccgtgcctcgacctcaggaatccactctgagtgatgactccacgccccccagcagcagccccaagatccccagtgggccctggcag

SEQ ID NO: 244496 - DNA, 71 bp, Homo sapiens
aactgactttgcagccacggagaggttgatggacggatggctacatggatgtgatggagatggtttactat

SEQ ID NO: 244497 - DNA, 73 bp, Homo sapiens
aaatcagagcaggtcaaatagttctaaaagccatggcccaggaggtgaaacagcagaaatgcctgacatgtat

SEQ ID NO: 244498 - DNA, 87 bp, Homo sapiens
ccaggatacagggcacctcctcctccagcccatgaagcttatgaagaatatagttcacagttaccagccaagaaaacttgaaaatga

SEQ ID NO: 244499 - DNA, 74 bp, Homo sapiens
caatcctcagacgcctcacttaggacaagtttgatgatcgtggacggagtgattacgatggcattggcagccgt

SEQ ID NO: 244500 - DNA, 90 bp, Homo sapiens
tccgcggcgggcagccagagcccaggtatggacctgtctgccaatcaggacgaggagaccgaccaggagaccttccagctggagatcgac

SEQ ID NO: 244501 - DNA, 100 bp, Homo sapiens
cagtgaaataaaggagcaagaaatgttcaaaggaacaacatctttaccatctcatctcaagaatggaggattggccatctgcaagcttcccttctccgtg

SEQ ID NO: 244502 - DNA, 75 bp, Homo sapiens
cacgggaagaagcagctggacccgctcaccatctacggcatccggtccccagtggacaggaaagctaaggcctca

SEQ ID NO: 244503 - DNA, 74 bp, Homo sapiens
ggccatcccggtcacctatgtcttcaaccacctggcggcccagcatgaaagctgaacatggttatgcctccatg

SEQ ID NO: 244504 - DNA, 75 bp, Homo sapiens
cctggccgccccgagcggagcctggagggtaaagcatgaatcatcctccagtgatgaggagcgcgcagctgccaa

SEQ ID NO: 244505 - DNA, 100 bp, Homo sapiens
tgggaggcggacattaaagtgaagtggttgcggtaacctggcctgggcctgaagtgagtgagaggcacatgaagttacagaatgtctgaaggggacagtg

SEQ ID NO: 244506 - DNA, 82 bp, Homo sapiens
gggcgacagcaacagctctgccggctggaagcatcccagccatcactcttccacctgctccttagagaagggaagatgagtg

SEQ ID NO: 244507 - DNA, 100 bp, Homo sapiens
ctctatggaataagcaaaggaaggcgatcccagacagtcagtgctatagcaacaacagataacaatgaagatggtgccaaaactgctttctcctttggtt

SEQ ID NO: 244508 - DNA, 88 bp, Homo sapiens
agagcgtgaccgagagcgcgaatatcgtcatcgttagaagccgaatctgtgacctctctgccatcccaaaacaatggaactaccagcc

SEQ ID NO: 244509 - DNA, 100 bp, Homo sapiens
agacaacaaaaacaactgcattgtgtacagcaaaggggagttgctgagtcagcccagaccggaaggagtggcagagatcatttgccccaagaacggcagc

SEQ ID NO: 244510 - DNA, 100 bp, Homo sapiens
cggggatcccacgatgttcttctacctgagcaagaaacttcagaggatgattccgaagaagacggagaccataacaggacatttgatattgcctaacttc

SEQ ID NO: 244511 - DNA, 75 bp, Homo sapiens
ggccctgctgctcctggccctctgcttgcttgtccggcgcaccagagtttattaaccacttaacctctcagaact

SEQ ID NO: 244512 - DNA, 74 bp, Homo sapiens
ctcagctttaacaatatatctaggataagttctgaacgtcgaaaagaaaagtctcgagatgcagccagatctcg

SEQ ID NO: 244513 - DNA, 75 bp, Homo sapiens
tgagataacatcctacatcactgaagatgatgtggtctacagaccaggagagatgtgaagcctgataacatgctg

SEQ ID NO: 244514 - DNA, 96 bp, Homo sapiens
cggcccccccctcgccggggaccgagcgcgctcgctccggcgccggcctcgcctcctcgcagcagcgccatgcttgccttgcgccatggactggca

SEQ ID NO: 244515 - DNA, 96 bp, Homo sapiens
tgggaatcgtggagaatatgagcggcttcacctgcccacactgcacggtgcctgtgaagcatgtgtaccgtgtgctgcagtgccaggaggaggagc

SEQ ID NO: 244516 - DNA, 100 bp, Homo sapiens
accgtgcacattctctgttctaagtgccttaagagaggatcgcccaatccacatgcttttccaggtgctatggtctttagaattgggtcactggatttct

SEQ ID NO: 244517 - DNA, 98 bp, Homo sapiens
aggtccagggctcgatctggccctaaccacagagtcaccttgagtttccctgaaacctgggctcttgaagacgcatcactggagcagatggataatgg

SEQ ID NO: 244518 - DNA, 82 bp, Homo sapiens
ctgtgtcctggttgagggtctccagggttctttggggcccgaggattttttatcaagcagaaatgcatcgaacaacgagaat

SEQ ID NO: 244519 - DNA, 100 bp, Homo sapiens
gcaaggtggttttggaccagacaggcgtgtctaacaagcaggcagctggtgtggaagaatggcggtgagccattcagtgaaggagcggaccatctctgag

SEQ ID NO: 244520 - DNA, 108 bp, Homo sapiens
gggaaaatggcggacgggaaggcgggagacgagaagcctgaaaagtcgcagcgagctggagccgccggaggctatcaagtactagctccaactgcctattatgatcag

SEQ ID NO: 244521 - DNA, 86 bp, Homo sapiens
tcagacattacgagaaatgttagagaagaaagacagctttgtggaagaggagaatggtgttgaacgcgtgtgtcctgagagcctgc

SEQ ID NO: 244522 - DNA, 75 bp, Homo sapiens
ggatccatttctcctattgaggagtcaacctatttgcatgcaaagaacatcatccatagagacatgaaatccaac

SEQ ID NO: 244523 - DNA, 76 bp, Homo sapiens
aaagtattaagtaagctgaatatgaaggagaactgtgtttatgaaactgtagttttgcctttggatgaaagggcat

SEQ ID NO: 244524 - DNA, 100 bp, Homo sapiens
tgactccccagaatacaccttgcttctgtagaccagctccaacaggattccatggtagctgggatgttagggctcagaaatggtggagtcaatgaagaaa

SEQ ID NO: 244525 - DNA, 140 bp, Homo sapiens
aattgaactgcgaaagctgtgatgagaatgaggatgatttcatccaagtcactaaaaatggatcaggagaaactcccatgtatggaatcccactgtatgatttataaacagacaatatgtgagtgccttttgcagaagag

SEQ ID NO: 244526 - DNA, 100 bp, Homo sapiens
attttggcactccagtcataggaaagaaaacaaatagaggaagaagatctaatcatatgaggagatgttaaagtaacccatcttgcaggacgacattgaa

SEQ ID NO: 244527 - DNA, 90 bp, Homo sapiens
cttgaatgtgttcaagaatgatcaggatacttgggactacacaaaccccaatctcagtggacaaggccaaccgcgagaagatgacccagg

SEQ ID NO: 244528 - DNA, 82 bp, Homo sapiens
ggatggtggtgtgtgaccttgggaaccctatggtgtctggaacaaatgagtcctaagcagacttaaagccaagaaaataaga

SEQ ID NO: 244529 - DNA, 82 bp, Homo sapiens
cttagctgtgctcgcgctactctctctttctggcctggaggctatccagcgccaacgtggaacctgttgtgccgtcagaggc

SEQ ID NO: 244530 - DNA, 100 bp, Homo sapiens
tcatattagtgcctgtgatggcatctttcatctaacacgtgggagtaacatctcagaagactatgaagctaattcctgcctcaagacacagagctacaca

SEQ ID NO: 244531 - DNA, 100 bp, Homo sapiens
tccgaaaaaacaaaacaaatatgaactatgataagctgagcagagccctgcgatactattatgacaaggaaagtgactattttaccccacagggagaatt

SEQ ID NO: 244532 - DNA, 80 bp, Homo sapiens
ttgcaggggcaagcaggccacaggactccaggagaggtgtgcaactgaggaacatggctcaagaaactaatcacagccaa

SEQ ID NO: 244533 - DNA, 82 bp, Homo sapiens
cccggagctgctgaaccctgagcccaggagactgagcccaggtcaaaatgcagatcttcgtgaaaacccttaccggcaagac

SEQ ID NO: 244534 - DNA, 98 bp, Homo sapiens
tgcgaaggccgggacccggttccccggcccacagtgggggtgtgcaaacccgagagaactggatggaagatggtaccccaaagcatatcatccagatg

SEQ ID NO: 244535 - DNA, 88 bp, Homo sapiens
ctagaatacagacagttcctgctctaagaggccatctgtgaggctcagtctcccaacacctctggtgtgctgggcatcaaggtgaaga

SEQ ID NO: 244536 - DNA, 98 bp, Homo sapiens
tacctctccttttccctctccctttccctaaggctggtctgatccggatggaggaggaggagttcttcatcgaacccttggagaaggggctggcggcg

SEQ ID NO: 244537 - DNA, 74 bp, Homo sapiens
gtgaggaattttgaagtacaccgtggtgacattgtatcattggtgaggaggaagccaagaatctggtgagcgaa

SEQ ID NO: 244538 - DNA, 97 bp, Homo sapiens
tgcagatggcactttccaaagtggatgcctccggggaggccatcagcatcagcaaagccatcaacacccaggaggcccccgtgaaggagaagcacgc

SEQ ID NO: 244539 - DNA, 100 bp, Homo sapiens
ataaatgcaaagtagttattcaattcttctacagacatggacatggacatcttccagcaacagatctcgagaagacagctggctaaaatccttatttgtc

SEQ ID NO: 244540 - DNA, 76 bp, Homo sapiens
atttggtttctagaccatctacctcatctagaaggagagcaattagtgagacagcacctggaaatggagatggtgg

SEQ ID NO: 244541 - DNA, 100 bp, Homo sapiens
cgccagcagccgtccggagccagccaacgagcggacgtagacaagtttggcaacgagatcacccagctggcccggcccctgcctgtggagtatctcatca

SEQ ID NO: 244542 - DNA, 51 bp, Homo sapiens
gtgatttgcttgaagatatgaggataaaagaatcagagtgtctcaaccctt

SEQ ID NO: 244543 - DNA, 82 bp, Homo sapiens
cggcgagcgcgagcggcgcgagaaaatgtcatgtggcctgtgttttggaccgtggttcgtacctatgctccttatgtcacat

SEQ ID NO: 244544 - DNA, 76 bp, Homo sapiens
tgaagcaaaattcagagagattgcagaagtgagcatgtttttgaacacattaacaccgaagttctacgtggcccta

SEQ ID NO: 244545 - DNA, 100 bp, Homo sapiens
gttgtggtataaatggcacgagtgattggaccagtggcccaccagcatcttgcccctcagatcgaaaagtggagggtgtccgcaatgttgccagtgtctg

SEQ ID NO: 244546 - DNA, 76 bp, Homo sapiens
gtgaacttgaagatgatttacttggagaagatttgctatctggcaaaaaggcctcaggagtgcaagtagctgatga

SEQ ID NO: 244547 - DNA, 74 bp, Homo sapiens
ctttctctcgatgaggataacatccctccagaagatgtcccttcagtctgaatatgttcattactaaggccttg

SEQ ID NO: 244548 - DNA, 75 bp, Homo sapiens
aattccggtcagggtcaagtcgtgttctgatcactactgacttgttggtttgctctggaattagtcacagaaaag

SEQ ID NO: 244549 - DNA, 80 bp, Homo sapiens
tgtttgcctgctttgccactcccgccgtctcgtggcgcctcctgtctgtggatgagagtccggagtgttgtcatgtgaag

SEQ ID NO: 244550 - DNA, 106 bp, Homo sapiens
ccgagcagcgccagcggccgagcgggcggcttcctggcctgggcgctccggtggcggcggagaccatggtgaatccgggcagcagctcgcagccgcccccggtgac

SEQ ID NO: 244551 - DNA, 95 bp, Homo sapiens
ctcaggctgcatcaggatgaatgatgacccaagtatggaagttggatggcaagcatgtggtgtttggcaaagtgaaagaaggcatgaatattgtg

SEQ ID NO: 244552 - DNA, 75 bp, Homo sapiens
ggaattttgaagtacaccgtggtgacattgtatcattggttttgcaggtcgaagtaagaaggaaaccaaatattc

SEQ ID NO: 244553 - DNA, 90 bp, Homo sapiens
tcttggacgcctttcagaaagtggctgacatggccaccaacacacgtgatgaacacaatgacgtacagaagaaaacctttaccaaatgga

SEQ ID NO: 244554 - DNA, 75 bp, Homo sapiens
gaggtcagcgggggtcagcagcagcggctccgagggcgcggcggacgcaggatttttagactctgaggagcagtt

SEQ ID NO: 244555 - DNA, 88 bp, Homo sapiens
gcgagagggagccgcagctgatgtcagctggagaccatggccaaaatggaggtgaaaacctcacttctggacaatatgattggagttg

SEQ ID NO: 244556 - DNA, 100 bp, Homo sapiens
attctgtctttgtgtcctgagatcaaatggcacttcattggccacctacagaaacaaaatgtcaacaaattgatggagggctctgaactcctacttcgag

SEQ ID NO: 244557 - DNA, 90 bp, Homo sapiens
cctgatttgaatgctgtcctttataccaaccgggcagcagcacagtactatctggggtacaggcatccttcacctgctattgttgcaaga

SEQ ID NO: 244558 - DNA, 97 bp, Homo sapiens
actgtggattgaatgaactgtatccatccccatcatgatgtacagaaccaagtctcttcactagttttggctggtgattaaggaagatggacacatg

SEQ ID NO: 244559 - DNA, 74 bp, Homo sapiens
agcagtttcacccattaccagtcaaccaggaagtgaaaatgcctcgtgtaaaagcagctcaagctggaagacag

SEQ ID NO: 244560 - DNA, 100 bp, Homo sapiens
atgtaaatttgcacatccttcgaaaagctgccaagttgaaaatggacgagtaatcgcctgctttgattcattgaaagtttggtgcaagtgccaaagttgt

SEQ ID NO: 244561 - DNA, 73 bp, Homo sapiens
ctaattcaacaaatcataacttgggtctccaactgaattccttgaagagaaaatggcctaccaggaataccca

SEQ ID NO: 244562 - DNA, 100 bp, Homo sapiens
gtcaaagactgaactaggaaagaaagctgagtggcagaagctcaactatgatatccataccctgcggcaggttcgaagggaagtaagaaacagatggaag

SEQ ID NO: 244563 - DNA, 80 bp, Homo sapiens
ggcggggagccccgcctgaggtgccctaaacacactatgaccgagatgcagaggatgctatttatggaagaaatggttat

SEQ ID NO: 244564 - DNA, 100 bp, Homo sapiens
ggaagatgtggcagccggccacggagcgcctgcagagagcagagctgacatctgataaagacatgtaccttgacaacagctccattgaagaagcttcagg

SEQ ID NO: 244565 - DNA, 100 bp, Homo sapiens
ccgcaccacagaccttcgcctcgccccgccggttcctcaccctcggggagcaacatgggtggtatcacggcaacctcacacgccatgctgctgaagctct

SEQ ID NO: 244566 - DNA, 82 bp, Homo sapiens
gtactcttcagggatgagtcatgtggcagtggaaaatgcgctcgggctggaccagcagttgaagaagctggatctggcagct

SEQ ID NO: 244567 - DNA, 73 bp, Homo sapiens
ctgggacagccaagtctgtgacttgcacgggtgtccgcaatgttgccagtgtctgtctgcagattggctaccc

SEQ ID NO: 244568 - DNA, 99 bp, Homo sapiens
agaggggagttactggtacttgatttgcaagatttcccatcagatatcgctaacaagtctctctcagagaccactgcaacaatgctctggaagtccaag

SEQ ID NO: 244569 - DNA, 100 bp, Homo sapiens
gcctcatctcatcttacaggagcagactaggtggaaagccagatgacatcaccgtccttctttcaatagtggctgagtatacagactagctgaggtgtca

SEQ ID NO: 244570 - DNA, 75 bp, Homo sapiens
tttcgtttttcggatgatgccttcaatactacctttatttccaccataggtctttgtactccaactaaacctacc

SEQ ID NO: 244571 - DNA, 100 bp, Homo sapiens
gcgaagctggccgagcaggctgagcgatacgacgggaggagtgagatgtggatgttgcttttgcacctacgggggcatctgagtccagctccccccaaga

SEQ ID NO: 244572 - DNA, 100 bp, Homo sapiens
catacaccgagagagtgaggagccagacgacaagcacacactatggcgctgaaacggattaataagtatgttgcccatattatgaccctgaagttagtaa

SEQ ID NO: 244573 - DNA, 75 bp, Homo sapiens
caaggttccgcgccgggcgtggacggtgtggggcggtcccggccccgcaggagacctgacagatgccaaaacaaa

SEQ ID NO: 244574 - DNA, 74 bp, Homo sapiens
aagatggccaagaactaagtaacgatctggatgcccagggagctgagcacataacgacttacacgttcaatact

SEQ ID NO: 244575 - DNA, 83 bp, Homo sapiens
taccagtccccagtgagggtgtacaaatacccctttgaattaattatggctgtttgggagttgagtgatattgaccatgatgg

SEQ ID NO: 244576 - DNA, 50 bp, Homo sapiens
ggatgtcggcgaagagttcaaccagttccgaaagacccgaaaccccagtg

SEQ ID NO: 244577 - DNA, 75 bp, Homo sapiens
ctgcggccaagactccgtcctgcaaggatcatgtattcataagggatgaggcgggccacggcgatcccaggcctg

SEQ ID NO: 244578 - DNA, 100 bp, Homo sapiens
ggggccagaggaacgttgtgtgtggcagcaaggagcccgcagaggtcttggcctatattctccagcgggagatccaggagcccgagtgcaggcacctgtc

SEQ ID NO: 244579 - DNA, 75 bp, Homo sapiens
tttctctaattttcccatatctgaagaaactattaaacttctcaaaggactcagaattcatgattgaagaaatgc

SEQ ID NO: 244580 - DNA, 75 bp, Homo sapiens
ttttttgaaagaaatttgggggtatactgcaacatccagatggcacagttttgaaacagttacaaccacctccaa

SEQ ID NO: 244581 - DNA, 76 bp, Homo sapiens
aagaaaggagagcccgtcagtgccgaagatctgtttaatgcgctgaaggttcccgtgccagaggataaatatactg

SEQ ID NO: 244582 - DNA, 75 bp, Homo sapiens
tggttcttggcaggaatatggaagacagagaatggatcttggagaatgtctgaaagtccatgacctggctttaag

SEQ ID NO: 244583 - DNA, 71 bp, Homo sapiens
ctcccgagtagctgggactgcagctcaaatccttttaataaagaagagctgacagctattttgaaatttgg

SEQ ID NO: 244584 - DNA, 75 bp, Homo sapiens
gtgaagaagatgaagatgatgatgaaggggaggaaggagagcgaggatgaactggaagaggcaaatggaaacaat

SEQ ID NO: 244585 - DNA, 80 bp, Homo sapiens
ctgaaatgattctccagaatttctcctcataaaaaaggcaatgtgaagtattcatccggccaaccaatgtttcctgacgt

SEQ ID NO: 244586 - DNA, 100 bp, Homo sapiens
ctgccttcttggacgcctttcagaaagtggctgacatggccaccaacacacgtgtcaggtcaattcagtgaagatatgatacccacagtgggcttcaaca

SEQ ID NO: 244587 - DNA, 78 bp, Homo sapiens
gcaccctactgaccgagttcaatgccgcctacgtgccccctggactcatgcccgggctctcaccacacacttgttcat

SEQ ID NO: 244588 - DNA, 101 bp, Homo sapiens
cagaaaaccaagtcataccagtgctgtctcaattgcaggaaaagaaactctttcatctgctgctaaaagttgaccactgaaaaacacacatactatctgac

SEQ ID NO: 244589 - DNA, 50 bp, Homo sapiens
gccggccgggagggcggccgcagcagaggatctgaagaggcaaaatgcag

SEQ ID NO: 244590 - DNA, 83 bp, Homo sapiens
ctcgaggcccggctggcgcacctgggcgtgcaggtgaccaagaatatggcccaggtgaccaaagccctggacaaggccctgag

SEQ ID NO: 244591 - DNA, 100 bp, Homo sapiens
tgaacgacttttaactttcattgtcttttccgcccgcttcgatcgcctcgcgccggctgctctttccggctgttccatttcctccaagtcaccggcttac

SEQ ID NO: 244592 - DNA, 73 bp, Homo sapiens
tgcatttactgtcatcaagaactgtaatacttctggaatccagacagaatggagttgtaagacgttcatcgcc

SEQ ID NO: 244593 - DNA, 83 bp, Homo sapiens
cgctcctcccagttcctaagatgcctacaccaactaatgttacaattgaatcctataacatgaaccctatcgtatattgggag

SEQ ID NO: 244594 - DNA, 51 bp, Homo sapiens
cgcattcaagaaagccgacccccaagccgcggcgagtcctttgcacatgtt

SEQ ID NO: 244595 - DNA, 75 bp, Homo sapiens
cccgcttcgaggccgctttggcgccaaatcctgaggtttttagaacttcagccataaaaatgggcagaattttcc

SEQ ID NO: 244596 - DNA, 88 bp, Homo sapiens
cccgacgactgtgacgaggacgaggaggcagccacggggcccctggacaatgcagatcttcgtgaagactctgactggtaagaccatc

SEQ ID NO: 244597 - DNA, 100 bp, Homo sapiens
tccaagaccagtttaatgaccttgttatcagtgatggctcttctctggaagatcttgtgatcatcagccatgacacccggcgcttccgctttgccctgcc

SEQ ID NO: 244598 - DNA, 75 bp, Homo sapiens
cgcatgcaagccagccacggggagacctttcatgtgctttacctaactacaggatggttcgtggagacccaaggg

SEQ ID NO: 244599 - DNA, 76 bp, Homo sapiens
cagcgagcaggcgcgcagccacctggagaaggcgttcagaatgaccgaagaagcatgccgaacacggagtcagaaa

SEQ ID NO: 244600 - DNA, 75 bp, Homo sapiens
gacggcaaaggtgtcgtggtggtcattaagcggagatccgaggggaccccatatgctggaggtctgttccgcatg

SEQ ID NO: 244601 - DNA, 100 bp, Homo sapiens
cggagtgtatgaccacaaacagccatcaagagctgcaagttctccacattgacttcttgaatcaggacaacgccgtttctcaccacacatgggagttcca

SEQ ID NO: 244602 - DNA, 50 bp, Homo sapiens
atgaattgctcagccttgccagcaggcctgaaagtaagcaggagccagtg

SEQ ID NO: 244603 - DNA, 78 bp, Homo sapiens
catgggcgtggagaaccgaaacccacccgaacagctgcccatcgtcctgcagactccgtgggaaggaggcttgtttaa

SEQ ID NO: 244604 - DNA, 100 bp, Homo sapiens
tgagcggccaggacgacgaggagcagggcctgactgcgcagctctgatccagtatatacggcctgtgttcgtgtcccggtcagaccaggattctcgcagg

SEQ ID NO: 244605 - DNA, 100 bp, Homo sapiens
acggcggcggccgaaagcggagagatgctgggcgtggcggccgggatgacccacaggttttgacacaagggcgcatatcttcaaagcacctagtacctcc

SEQ ID NO: 244606 - DNA, 98 bp, Homo sapiens
atatcggaagagagggccgaagcccaaaccgctagtggtgcaggtgccttatgcccgctcagaggcccacctcacagagctgctggaggagatatgtg

SEQ ID NO: 244607 - DNA, 97 bp, Homo sapiens
ttgtgaagagaggatgttctagaggcatggttgaaattgaattcctatatatgcaaacagatttgcagtaccaacctatgcagccaagcaacctcag

SEQ ID NO: 244608 - DNA, 100 bp, Homo sapiens
agagggattcgtggtgaaggtccggggcttgccctggtcttgctcggccgatgaagtgcagaggtttttttctggtcatcatcagatttgaaatatttaa

SEQ ID NO: 244609 - DNA, 100 bp, Homo sapiens
ggcatccgggaccgagcggtgaagaagctgcgccagtacatcagcgtgaagacgcagagggagacagcatgattccacctttccactgatagactcaagt

SEQ ID NO: 244610 - DNA, 52 bp, Homo sapiens
aaaatgcgctcgggctggaccagcaggctgatcagctgaccgaagaacagat

SEQ ID NO: 244611 - DNA, 50 bp, Homo sapiens
gcatcccattttttatgtccacagatttgccacttgacactgacctggaa

SEQ ID NO: 244612 - DNA, 82 bp, Homo sapiens
gctaatgctaatgtcagcagacagattgaggacactgtattatacggttactatagaggaactctctggaatgaaaaataaa

SEQ ID NO: 244613 - DNA, 100 bp, Homo sapiens
ctgggaatgtacgacgccaaagatgacttccctcttaggaaaacagctgccgggccgcaagtacagccctgggtacaacaccgaggtgggagacaagtgg

SEQ ID NO: 244614 - DNA, 76 bp, Homo sapiens
aaaagggcccctttcgactagcctctgctgaaagctcctgacccctgaggattaccagcgatttctagacctgggc

SEQ ID NO: 244615 - DNA, 94 bp, Homo sapiens
atgtccctgatccctggagcgacgacggccgctgcctaagctggaaaaacacaagcagacattcccaaacattctaaagaagggttacctggag

SEQ ID NO: 244616 - DNA, 121 bp, Homo sapiens
tgggcaaggtgatccagcaaggtcggcagagcaaggggcttacgcagaaggacctggccacgacaatgcagatcttcgtgaagactctgactggtaagaccatcaccctcgaggttgagcc

SEQ ID NO: 244617 - DNA, 100 bp, Homo sapiens
tggaggaccagcgggcttctagaggagctgaatgcagaggcagttggctggggaacagaccagggaattggtggatttggagaagagccgggaattaaat

SEQ ID NO: 244618 - DNA, 83 bp, Homo sapiens
cgagccgcccgcagagcaagcgcggggaaccaaggagacgctcctggcactgcaggatctgccactgtgaaggagatgatgag

SEQ ID NO: 244619 - DNA, 90 bp, Homo sapiens
cttagatgcaagtgatgatggaatcttggccaaaatcgtggattttaagcttgactttggcaattcccaaggcaaaacaagtcaaacttg

SEQ ID NO: 244620 - DNA, 74 bp, Homo sapiens
cagctcagccatgcaggccccaacagggatcactgagattctgatgaacagaccttctgcccgcaatgccttgg

SEQ ID NO: 244621 - DNA, 100 bp, Homo sapiens
aatatcatgctggtggctctacccagaattcaattaaagtggctcaggtggttattaacttggtgatgcttttggctgaaatgaaaatacaggaccgcgc

SEQ ID NO: 244622 - DNA, 112 bp, Homo sapiens
ggcctatgcccccactaacggggacttcacctttgtctcctcagcagacgcggaagagtaaaagcttttagaactttacaagaagctctcaagtgtaactatgaacactggc

SEQ ID NO: 244623 - DNA, 94 bp, Homo sapiens
cgccaccgccgcctccgccgctgcctcaggagcggaacaacgtcggcgagcgggcttcgggctcagaatcaggttctgaaaaaaggtgttgtgg

SEQ ID NO: 244624 - DNA, 100 bp, Homo sapiens
gggaactgctggggaaggcgattggcatcgatctctccatcccttccgaggcccgacttcgaagcatcagatggtgaaggagaaggagacacagaagtga

SEQ ID NO: 244625 - DNA, 82 bp, Homo sapiens
caaataccaggctaccatggtctacaagactctcttcgctctttgcatcttaactgcagcattaacaacagtgtcttcagtg

SEQ ID NO: 244626 - DNA, 100 bp, Homo sapiens
aagcgcttcaaaggaccggacccagagaagaggaaaactctaccggtgcaggctgggatatgaagaacaacagcctgaggttccaattctttatcatgat

SEQ ID NO: 244627 - DNA, 97 bp, Homo sapiens
gtgcatcgcatcccactccatcgccaggatctccttcgccaaggagccccacgtagagcaggatcagtttgacaacttagaaaaacacacacagtgg

SEQ ID NO: 244628 - DNA, 100 bp, Homo sapiens
catccgagccgtgtcacacagggacagccgcaatccggacctggcgtggccaatccgccatggtatagttgaagattgggacttaatggaaaggtttatg

SEQ ID NO: 244629 - DNA, 87 bp, Homo sapiens
gatggtggactcagagaccaataaaaataaactgcttgaacatcctttgactggttagccagataaccagatgcaacgtgaagatct

SEQ ID NO: 244630 - DNA, 75 bp, Homo sapiens
ctggccacttccgtacttccgctttccggcccagccagcgcccgcgatgtcttaggaaaagtcctcagtgctgtg

SEQ ID NO: 244631 - DNA, 80 bp, Homo sapiens
actaaggagaaagtcctacaacagtttggcgtgcaacatggggcttgagaaaggctgtttgcagacaaggtcccaaagac

SEQ ID NO: 244632 - DNA, 75 bp, Homo sapiens
agacaagagtcaaccagaaagagattgggtacttaatggttcattaaagaagcggaagcagaatgaggctgccaa

SEQ ID NO: 244633 - DNA, 75 bp, Homo sapiens
tcaccatgaagacgctggagatccagggcaagcgggtcaagctgaagaaaattcgatcactgcttgttgctggag

SEQ ID NO: 244634 - DNA, 98 bp, Homo sapiens
ggcagcccgtggagtcggctgagggaaaagcgaggcaaggcaggcggttttggaaagacatcgttgatgataatgaagttcgtgacctcatttctgac

SEQ ID NO: 244635 - DNA, 111 bp, Homo sapiens
atgaccccatcgaggcttccctggttgcttagctgggtctcggccacggcgtggagagcggcaaggtcacctgtctgtgtgcccagtttgaagccgtcctgcagcatggct

SEQ ID NO: 244636 - DNA, 83 bp, Homo sapiens
cgtcagactccagcagccaagatggtgaagcagatcgagagcaaggttttctgtctcaactggtctctgacaagcctctgact

SEQ ID NO: 244637 - DNA, 83 bp, Homo sapiens
agaaactgcaccggaaatgtgcctaccaggagtacgagagggcctccaaagtggaccagtttgtgacgcgcttcctgctgcgg

SEQ ID NO: 244638 - DNA, 101 bp, Homo sapiens
atcacagtggcagctggacttgatcgagaagttttgcacactagggaccaagaagccctcggggacactgctgagaaaagactgccgaagggaagaccagc

SEQ ID NO: 244639 - DNA, 140 bp, Homo sapiens
agcccagagctccgatccctgcgcgggctcgagagctcgccccgaacgggggtcttcctcctccgccgttgacaggaaaaacagcactggaggcaatgtttctataaatcaaagaagagacagtgtgagaatgtcagccc

SEQ ID NO: 244640 - DNA, 100 bp, Homo sapiens
tggctgactacttcatcgtggtaggctatgaccacgagaagccagttcacctttcttggatcacatgcaaaggatgtttaggtctgtgaagaaaagaatt

SEQ ID NO: 244641 - DNA, 100 bp, Homo sapiens
tagaagccaatgtggaaaatgcagaggtgcacgttcagcaagcaaatcagcagctgtcaagggcagcagattatcagatgaagttgcggagaataatgaa

SEQ ID NO: 244642 - DNA, 138 bp, Homo sapiens
ggaagaccgcgcgcagggcctgcagcgggagctggacggcgagcgcgagcggcgcgagaaataagactttgaccccgacgcaggcttcagtgattgccgcggatcagaagcctgagcactttggctcgagacaattaa

SEQ ID NO: 244643 - DNA, 100 bp, Homo sapiens
ctaaagtcaaccttttcactctgctcagcctctggatggagctctttccagcagaagcccagcggcaaaaatctcaggaatattggaagcagttagagga

SEQ ID NO: 244644 - DNA, 82 bp, Homo sapiens
gcctcgcgccggctgctctttccgggaactgtggctgcaccatctgtcttcatcttcccgccatctgatgagcagttgaaat

SEQ ID NO: 244645 - DNA, 100 bp, Homo sapiens
gtcaaatcctttctacctccttattcagagaaggaaggatcttctcatgcacagaggcaacaaatggcaactttctgactgaagaggaggcaaatgaaga

SEQ ID NO: 244646 - DNA, 98 bp, Homo sapiens
ggaaactcagcacaggtccatgaaggagaaggggcgcatcgcggcacagctgcagggcattgaggaaccaaatggcgagacaccatcatctttataca

SEQ ID NO: 244647 - DNA, 83 bp, Homo sapiens
tgcgttacaagctttgtctccttcgacttggagtctttgtccaggacgactgtgccctgtccacggtgcctcctgcatgtcct

SEQ ID NO: 244648 - DNA, 100 bp, Homo sapiens
gcggcgacggcggggcagcgcaccggcaggcgggtgacctcaaagcagaagctctgaattcacctctcatctgacgactgacagctgctgccaccgccag

SEQ ID NO: 244649 - DNA, 75 bp, Homo sapiens
cgggacaccccggaagctgggaaatgttgctgatgtatattcaagatgagtggattaggagaaaacttggatcca

SEQ ID NO: 244650 - DNA, 90 bp, Homo sapiens
cggtaccgctgcagccaccgcggcccccgcgggtcctatggccgggctccgaagatgattcacctagagtctaactttgttcaattcaaa

SEQ ID NO: 244651 - DNA, 51 bp, Homo sapiens
cacgtggacgctgactcggaagtgcaggcacctctcccagacacctaccgg

SEQ ID NO: 244652 - DNA, 100 bp, Homo sapiens
ataccaacggcaaaaatctcaagaaagaggtgggcaagatcctgtgcactgactgcgcaaaccagtccagctacgggggcccagccagccagcagctgag

SEQ ID NO: 244653 - DNA, 75 bp, Homo sapiens
agtggtggcaccacaatctcctaccttccaagaccaaagatgtgaccaaggccatggatgagaagaaatttgacg

SEQ ID NO: 244654 - DNA, 96 bp, Homo sapiens
cccttccgtatctgcctaggcattttgctgtctcctcctaatacgtctgagaataaaggattagaaactaccaagaacaatgtagttcagccagtt

SEQ ID NO: 244655 - DNA, 100 bp, Homo sapiens
ctgcaacctgcagcacatcagcgaccgggagaacatagacggaacaagtgtcattcaaggatgtatgtgtggacttcactcaggaagagtggtatctgct

SEQ ID NO: 244656 - DNA, 75 bp, Homo sapiens
tgaggtggtgctgacaatcgagcaaggaaacctggtccaaagaatcctcatcggtgcttagctgtgacatctccg

SEQ ID NO: 244657 - DNA, 85 bp, Homo sapiens
ttatgttctattgtgcgcactggcaaacgtatgtttctggaacattgcgatttggaataccactaaggcttttcttcctacgatg

SEQ ID NO: 244658 - DNA, 96 bp, Homo sapiens
cggatctcctggaagtgttggcggaggaagttctttgacccctggctacacaaagctgcttcagtttatccagaacatcatttatgaggaaggatt

SEQ ID NO: 244659 - DNA, 50 bp, Homo sapiens
tgatcccagctgtgctctggacagggaccagttacagaagtggatccgcg

SEQ ID NO: 244660 - DNA, 95 bp, Homo sapiens
gtcagttccttgtggagccggagctgggcgcggattcgccgaggcaccgaggcactcagaggagggtgtcttttatgaataatcaaaagcagcaa

SEQ ID NO: 244661 - DNA, 90 bp, Homo sapiens
gccactcgcccctggcctcgcgggccgtgtctccggcatcatgtgtggttcaagccaaatgttaccagcttctcctctcagtcttccagc

SEQ ID NO: 244662 - DNA, 100 bp, Homo sapiens
gctggagggcactaccagatggggtaattaataatgcttgtgctactcaagccatagtgagtgtgttactgaactgtacccaccaggatgtccatttagg

SEQ ID NO: 244663 - DNA, 50 bp, Homo sapiens
cctcagagtccgaaatgctgaatttggagtagggacggggtttcaccgtg

SEQ ID NO: 244664 - DNA, 96 bp, Homo sapiens
cgcgagttggaggagaaggtcaaggcagtggaagagctggtggagttgagatctataatggagatcgtaaaataaaggtttccaacaccctggaaa

SEQ ID NO: 244665 - DNA, 88 bp, Homo sapiens
agggggaagtagagagataacaaaagctgctcagagtctcaatgaacttgacaatgcatacagctgtgatccaaggataaaaaagttc

SEQ ID NO: 244666 - DNA, 75 bp, Homo sapiens
gctatatcgtggtaccaaaagaagcggtttttgaaatttccagatgaccccaaagtgagcagtgactttcttgat

SEQ ID NO: 244667 - DNA, 83 bp, Homo sapiens
gtgtagacctggagtggacacgcccctccttcccttcatgattcgtttgtagcgcagtaatagctcttcaagtctgcaataaa

SEQ ID NO: 244668 - DNA, 101 bp, Homo sapiens
cccggccgcggcgggacccgagatcttagcaaagcaatgtctcaagatggtgcttctcagttccaagaagtcattcggcaagagctagaattatctgtgaa

SEQ ID NO: 244669 - DNA, 74 bp, Homo sapiens
acacctgaagagaaaataagggagtactttggtggttttggtgaggtgggatgcagatcttcgtgaagaccctg

SEQ ID NO: 244670 - DNA, 82 bp, Homo sapiens
tggagccgagatggagccctggtgggcacggcgtgcaagctgaggcaacttctcctagaatctcaatctcagctcgatgccg

SEQ ID NO: 244671 - DNA, 99 bp, Homo sapiens
ctcgagaccagcctgggcaacatgaatcgaccacggaaatttgacacctccgggcttggaagcagctctctcctccttccccgctgcttataaacctca

SEQ ID NO: 244672 - DNA, 98 bp, Homo sapiens
tgggcagtcctagtccgaggtgccaccgtggaaggacagaatgatgaagtggctgtaattgatgaaattcaaatgattagagatccagccagaggatg

SEQ ID NO: 244673 - DNA, 76 bp, Homo sapiens
gcaggcaaggacaaggccacagagtcggggtcttcacgactgtgccctgtccacggtgcctcctgcatgtcctgct

SEQ ID NO: 244674 - DNA, 138 bp, Homo sapiens
tgacaatgaggtagacgaagaagaggaagaaggtggggaggaagaggaggaggaagaagaaggtgatggatacaatgtctctttgctatatgaccttgaaaatcttccggcatccaaggattccattgtgcatcaagc

SEQ ID NO: 244675 - DNA, 76 bp, Homo sapiens
catgatcctcatcttttatacactcttagtgctgtccagcatgattccacctttccactgatagactcaagttccc

SEQ ID NO: 244676 - DNA, 82 bp, Homo sapiens
ggagagcgcgcgggagcgagctcaaggcggcgcggcggccactgggcgcagcacccaggtactccaaagattcaggtttact

SEQ ID NO: 244677 - DNA, 83 bp, Homo sapiens
ctgcagagatattctactccatctcattcattgtacagatttgaatataacctgccgctttgcaggtgtattccacgtggaga

SEQ ID NO: 244678 - DNA, 105 bp, Homo sapiens
tcggcggctcagttgtccatgaccctgaaggtccaggagtacccgaccctcaagctacccgtacagtgaggacgcccgccagggtgagcagtacatgaacacccg

SEQ ID NO: 244679 - DNA, 50 bp, Homo sapiens
ctgagacagggcgccacttactagtctctgctttctatccgtcaagatga

SEQ ID NO: 244680 - DNA, 100 bp, Homo sapiens
aagaggaacatcgtggtgaagaccgtggagatgcgggatggagagattcaagatggaaaaggtgatgtaaccattacaaatgatggtgctaccattctga

SEQ ID NO: 244681 - DNA, 75 bp, Homo sapiens
agaagttggactgtgttatagtagtcttcataggagagatgatggatttggacatgcttctatgaagaaatgcca

SEQ ID NO: 244682 - DNA, 90 bp, Homo sapiens
ccgcaccgctcccgggatcatggtgttctacttcaccagcagcagcgtgttctcaggcgctgtggtctcaccttccactggggcaacaat

SEQ ID NO: 244683 - DNA, 83 bp, Homo sapiens
tcacattcggttatctctaacgttggaaaacggaccgcctggcccggtgcaccatgcattgcaacgacaaagccaaagattca

SEQ ID NO: 244684 - DNA, 100 bp, Homo sapiens
gaccgccgtgagagaggaggggtgccggccgggattcgcggcccggagctcgggaccggattctgataatcctgaccttcgagaccggggctatatttat

SEQ ID NO: 244685 - DNA, 100 bp, Homo sapiens
ccttattgctacagatgtagcctcccgtgggctaggtgctggagaatctggtaaaagcaccattgtgaagcagatgaggatcctgcatgttaatgggttt

SEQ ID NO: 244686 - DNA, 75 bp, Homo sapiens
caaaaaaaagcagaaattgctagaagaaaacgttagtgctttcaaaacagatcctgtccctggaggctgtaattt

SEQ ID NO: 244687 - DNA, 100 bp, Homo sapiens
cccggaaggggaagaggaaagcaaaggcgtcaggaatggttcttcctcagatacctcttccaaatgcatgatgaagatgttctcatcaacaggacaaggc

SEQ ID NO: 244688 - DNA, 98 bp, Homo sapiens
gtccccaccctctgtctcctcagagaagctgagcagctctgtcagcatgaacaccttctccgacagcagcacacccgacctcccggacatattgtcta

SEQ ID NO: 244689 - DNA, 113 bp, Homo sapiens
gtttctctgctgcaccgacctcgacgtcttgcctgtgtcccacttgttcgcggcctatagatgagcagcaccagcagtaagagggctccgaccacggcaacccagaggctgaa

SEQ ID NO: 244690 - DNA, 98 bp, Homo sapiens
attacaagaatacgaagaagtctatgctcctgcaaaatcttccttattctgaaaagatgacagttttgtttgtctacaatggccctcatatgctggaa

SEQ ID NO: 244691 - DNA, 100 bp, Homo sapiens
tcgctgctcagcgccgcacccggaagatgaggctcgccgtgggagccctgctggtctgcgccgtcctgggatacatgtgctgcccttttgttctggacaa

SEQ ID NO: 244692 - DNA, 50 bp, Homo sapiens
cctgtgactacaaacactccagcgcagagttttatggacgaggagccccc

SEQ ID NO: 244693 - DNA, 140 bp, Homo sapiens
caaggagctcttacagatggacctgtacgcgctgctaggcattgaggagaaggcagcggacaaagaggagctcttgtccctggcaaagcgaaagcgcagtgactctgaggagaaggagccgcctgtgagtcagcctgcag

SEQ ID NO: 244694 - DNA, 101 bp, Homo sapiens
actatcttgggtttaccgtatttccaaatctctaggactgcgtagtaaagtgctgaggaaaattgaagagctcaggaccaaggttaaatccctttcttcag

SEQ ID NO: 244695 - DNA, 75 bp, Homo sapiens
aacgaccggggcgtcggcatgctcacccgcctctacaacatcaagaaggttgccaacttggcctgttccatctca

SEQ ID NO: 244696 - DNA, 74 bp, Homo sapiens
caggagatgaaatgacaacgtcaaccctccagcacaatcctggaggaagagaaggctcagcaagaagagcgcat

SEQ ID NO: 244697 - DNA, 89 bp, Homo sapiens
gaacgcgagtacgccggggacatcttcgccgaagtcatgaacctagaagtcggaatccggaagaagatcgaacatgacgtggtgatgaa

SEQ ID NO: 244698 - DNA, 75 bp, Homo sapiens
gagaacacagcatccaaccaaaggttttgcctctgtttcagaaaaggttgaatttggaggctttaatcagaactg

SEQ ID NO: 244699 - DNA, 83 bp, Homo sapiens
ggcgggtggaggttcgagcgctgttctcgctccggagccgctgcacatttcgactatctgttatagtccctgggtcaagacaa

SEQ ID NO: 244700 - DNA, 100 bp, Homo sapiens
gtgacagcaaaaatgacccaccaatggaagcagctggcttcactgctcaggccatggcgagtgtcactgcggggaatgcaagtgccatgcaggttacatc

SEQ ID NO: 244701 - DNA, 90 bp, Homo sapiens
gtcgttttttaaagagtatggacaaatagaatctgtacgatttcgttctctggccccttcacagatgtagtcactacaaatcttaaattg

SEQ ID NO: 244702 - DNA, 83 bp, Homo sapiens
acagcaatgggaaagaactatgtgaatgggaagactttccttgagaaaagatgcctgtcttagatgtcaagctgaaaacaaac

SEQ ID NO: 244703 - DNA, 98 bp, Homo sapiens
tggaggaagaatgatagcacagaaaatctctgtcagaactgatggagatggacacatggatcatttactgccaggctgtgaagataaaaattgccaaa

SEQ ID NO: 244704 - DNA, 83 bp, Homo sapiens
gccacagggcactgccacattgatacagactttgagaatcactacaagaaaaactccttgtggtgaaggttctaagacgtggg

SEQ ID NO: 244705 - DNA, 100 bp, Homo sapiens
cctaaggcctcatgatattgcatatctactaataaatgaatactgcattgagggacggacttctggtcttcttcttcctaattgttccccttattgtctg

SEQ ID NO: 244706 - DNA, 100 bp, Homo sapiens
gccccgttccccacggaggccatgggcgacccagcccccgcccgcagcctggacgacatcgacctgtccgccctgcggtgctgggcctaaaggagataac

SEQ ID NO: 244707 - DNA, 82 bp, Homo sapiens
ctcaccccgcggccgcaccttcccgccttctcaggcttgggcactgtttaaaggaaagttccgagaaggcatcgacaagccg

SEQ ID NO: 244708 - DNA, 101 bp, Homo sapiens
tctcaatgcaagaagttaagaagctctttcgaatcaagttgtccccaacagtggaaatatggctacacacacctttctgcaggagagctgcttcgtgatga

SEQ ID NO: 244709 - DNA, 106 bp, Homo sapiens
ttggcccttgttcccccaaatgtctgactctgactctcggactgagaaacgcaagaattcagaaggagctggcggacatcactttagaccctccacctaattgcag

SEQ ID NO: 244710 - DNA, 75 bp, Homo sapiens
gcttcgtggatgccctgcaccgggtccggcagagcattgcttttcaactagagccatgcattggaatcgcctgtg

SEQ ID NO: 244711 - DNA, 90 bp, Homo sapiens
ctgggaagcagagtgtctggatggaacctgagctgggtctctgactcacttctgactttagcaattctgtggtgttcttggtcacacatt

SEQ ID NO: 244712 - DNA, 100 bp, Homo sapiens
cggagctacagctccgcgcccgccagttgcttgatcaggtggaacagattcagaaggagcaggattaccaaaggggccttcatcctagaataatcactga

SEQ ID NO: 244713 - DNA, 50 bp, Homo sapiens
tgacttcttgatcctgcataaaaccaagatcaccggtgtgtccattctgc

SEQ ID NO: 244714 - DNA, 100 bp, Homo sapiens
gcagtgatgtctcttcttctattagcacttactgggattggtcagatagcgagtttgaatggcagtggaagacaagcattccagtgatgccagtagtttg

SEQ ID NO: 244715 - DNA, 75 bp, Homo sapiens
tgccctgtctcctcgcagatgagtgagccaaggagcagcatatagtccagagggtcagcccatggggagctttgt

SEQ ID NO: 244716 - DNA, 100 bp, Homo sapiens
cagatgccttccctctctgttttgtctgtgtgcacagaggaatcatcacctccaaatactggtcccacggatgaagattcagggactgaagtgggagaag

SEQ ID NO: 244717 - DNA, 50 bp, Homo sapiens
agagcatcctggacatgatggcaatgctggacgaggacgaggatgagcgt

SEQ ID NO: 244718 - DNA, 75 bp, Homo sapiens
ttcatgttttcctggaatatgatcaggatgtcatcatcagatttgaaatatttaaagtggatacaaaactatttc

SEQ ID NO: 244719 - DNA, 75 bp, Homo sapiens
agtgctcgggactttattgattgtttcctgatcaaaatggaacaggtgctggaggtggtgagagccaactatgac

SEQ ID NO: 244720 - DNA, 96 bp, Homo sapiens
gttttgagcggctgaaggagcctggtgagaagacaggctggctcattaacatgcatccttgcactcactcttgaggatgagaaaagaatgctgtca

SEQ ID NO: 244721 - DNA, 96 bp, Homo sapiens
cagagattgagaatgtccatggatttgtttctcattctcatatttcaccaataaaggtgatcaatgttgatgggacgaagaggcggaccctcctgg

SEQ ID NO: 244722 - DNA, 75 bp, Homo sapiens
ggcggctggcctcaccgcccactggattcttctgcacagtcagtatcctcgggagttcgtgcaccatctcctgcc

SEQ ID NO: 244723 - DNA, 96 bp, Homo sapiens
acttgtctcttatttagttctggggagcgcctcgtcgacatgagtgatgtggaggaaaacaacttcgagggcagacccgtgtccaggagccccgcc

SEQ ID NO: 244724 - DNA, 75 bp, Homo sapiens
aaagtaccaagaagtggaagaagaccaagacccatcatgccccaggatgttttagaagaatgtatgtctcttccc

SEQ ID NO: 244725 - DNA, 88 bp, Homo sapiens
aaattaccgagccagccagcaggaaatacagcataatagcctaacatggcagaccagagacagcgctcactgtctacctctggggagt

SEQ ID NO: 244726 - DNA, 80 bp, Homo sapiens
ctggaaccctggggactacgacgtccctcaaaccttgcttctaggagataaaaagcagccattgtttgatgtcctgtgac

SEQ ID NO: 244727 - DNA, 75 bp, Homo sapiens
gtggcgccgcccggggcgaggcagggccagcagcaggcgggagatggattaattgcctctgaaggagccataagt

SEQ ID NO: 244728 - DNA, 82 bp, Homo sapiens
cgacaagccgctggcagccgcggatctcaccgccgctcaggatgcggcattccaaaagaactcactgtcctgattgggatag

SEQ ID NO: 244729 - DNA, 100 bp, Homo sapiens
aaagcgtgctccacaaatatttacagtcggaggagtactcggtgaaatcctgtcctgaagactgtaagttggagtgcttagtgcagttggtgagagcggg

SEQ ID NO: 244730 - DNA, 83 bp, Homo sapiens
cctgtactttgtggacttgcaggatgacttagacgactacagccgctcaggaagcaatcttgcatgcgtctggaaatggcaca

SEQ ID NO: 244731 - DNA, 100 bp, Homo sapiens
aaaccatttttggtccatggtcaatgagaatacgaggatgtacattccagaggaaaaccaccaaggtgcagtggaggcttgcctcttgcatcagctgaga

SEQ ID NO: 244732 - DNA, 75 bp, Homo sapiens
actccgggccgcaggcagtcccgcggcagcaggatcacaggccaagactaaggggctgcagagcggggtggacat

SEQ ID NO: 244733 - DNA, 98 bp, Homo sapiens
gcgccacaggggaaagtgaaaaacaattccaggaagccataattgtgtttcaagaagagttacattacttcgttcagaaccatttcacaagtgcaaga

SEQ ID NO: 244734 - DNA, 98 bp, Homo sapiens
cttcctctacttctcacagttcagctgcagagaacaagtttgccaagtgcctcatgacctgtctcaaatgctgcttctggtgcctggagaagttcatc

SEQ ID NO: 244735 - DNA, 100 bp, Homo sapiens
actcaagtgaagcaaaagccttccatgattacgtgggcagtgtcaaaccgggaaatgcttatagctcaaaacagctccttggaatttaagctacacagac

SEQ ID NO: 244736 - DNA, 98 bp, Homo sapiens
acaaggaattgattctcttctcaaactcagacaatgaaagatctataccatctcttgttgatgattccacaccaaatcatccatcacaaacaacgcct

SEQ ID NO: 244737 - DNA, 100 bp, Homo sapiens
tgacattccttacatgtttgaggcccgggaatttcttcgaaaaaagcttattgggaagaagagagtcgtagctgagaagcaggagaaaagaaaccaggaa

SEQ ID NO: 244738 - DNA, 97 bp, Homo sapiens
aaatgaatctgagcaatatggaatattttgtgccacacacaaaaagcatgcttttcacttccactgcatctctcgctggctcaaaacacgacaggtg

SEQ ID NO: 244739 - DNA, 82 bp, Homo sapiens
ccggccccgctgagcgatcccaccgaagcagcgtgtcctccgtgggagcccgagacaatgcagatcttcgtgaagactctga

SEQ ID NO: 244740 - DNA, 83 bp, Homo sapiens
ctgctcaaggacacggtctacaccgacttcgacggtgggaggaggagctcgccaagcgcatgaaccttcagaccatggtggac

SEQ ID NO: 244741 - DNA, 100 bp, Homo sapiens
ctcgggctgcgggagccgggctaggacgccgagcggtgactccccgccgctcccgggggccgtgacgattgtgttcaattagaccttcaggacctctcca

SEQ ID NO: 244742 - DNA, 74 bp, Homo sapiens
gcagtggtcgcttcttctccttgaacttgatggagagtttggattcattgctttgtgcagaaggttctgaaagt

SEQ ID NO: 244743 - DNA, 95 bp, Homo sapiens
ctcgaactaaacaaattcatcccagaaatctaagaggtccatggaattgtacggcggtccagttcatttaatacgggtcgaattgagcatctgta

SEQ ID NO: 244744 - DNA, 83 bp, Homo sapiens
cttgctgcagagagcagcagggcgcatattaaagatcgcatagaggctgtgttatatgcagatcaatgtccgagttaccacca

SEQ ID NO: 244745 - DNA, 100 bp, Homo sapiens
aacaaccctggcttcatgagcatgattggtgctgaagacatggacggcttccaggcagacacggaggaggaggaagaggaggagggcgactgtatgatcg

SEQ ID NO: 244746 - DNA, 100 bp, Homo sapiens
ttccgaggacctgaaggacgcgcaggagaagctggagctcacggagaagaaggcctccgacacaatgcagatcttcgtgaagactctgactggtaagacc

SEQ ID NO: 244747 - DNA, 98 bp, Homo sapiens
acgtcatctttactactaacaggaaacagtgcttcttagtcctacgtcagcagcagtttaatgtccaggctcttgtggcggtgggagaccatgcaagc

SEQ ID NO: 244748 - DNA, 98 bp, Homo sapiens
aggacatgcgagcaatcttcaagcgctatgccaagaagcgaaatgtgctcattggccattcctacgggtgctggcccagcagggggagtacagtgagg

SEQ ID NO: 244749 - DNA, 75 bp, Homo sapiens
ggaaggagggcgtccgagtcaacaaccgcttcgagctgacatgcaagaaagcacttcagccaagcagaagggagc

SEQ ID NO: 244750 - DNA, 101 bp, Homo sapiens
ccgcgttctcgcacgcgtcatgactcggagccgtgggtcccgactgaacatcatcatcatcgctgagggtgccattgaccgcaacgggaagcccatctcgt

SEQ ID NO: 244751 - DNA, 82 bp, Homo sapiens
atggctcaaagaaagatgattatgactctccttcagcaactccagaagcttcagactttggtgatgggcaaggtttctcgaa

SEQ ID NO: 244752 - DNA, 98 bp, Homo sapiens
ttcagctgcaggaaggtatggggccatttcaggatttggtctctctctaattaaatggatcctgattgtcagggcagactgccagattcacttacagc

SEQ ID NO: 244753 - DNA, 95 bp, Homo sapiens
tcttctctccccgaaggcctgccagcacccctggagaagcgcgttaaggagctggctcaggtccagtggcattgcagagcacggatggttgcagg

SEQ ID NO: 244754 - DNA, 99 bp, Homo sapiens
ccggagagtggagaggaggcagtggccctggtggaagacttgcagaaagaacctggaagacagaggctggaggctgtcccttactccagagaatttaag

SEQ ID NO: 244755 - DNA, 100 bp, Homo sapiens
aaatagcagaagaataccatgaggtcaaaaaggaaatcaccctgcttgagcaaaggaagagcttggaccccgattggctgcaatgctgaactttaatctt

SEQ ID NO: 244756 - DNA, 99 bp, Homo sapiens
aatctggcttggctcagaatatccttaacaattacatgagagaggaatggaagttggatacactttgtgacttgtacgagacactgaccattacacagg

SEQ ID NO: 244757 - DNA, 100 bp, Homo sapiens
gcgagcgctgggcgggtccgcggcgcggtcggtcggcgcctgttctcgggctgtttggcgggactctgaggaggaagaaaatgagctggaagctattaac

SEQ ID NO: 244758 - DNA, 75 bp, Homo sapiens
acccattcctttaaatccggagggggaaaaaatcccaaggtctgcaaagacagtcttgcactgtttcctaggctg

SEQ ID NO: 244759 - DNA, 98 bp, Homo sapiens
cattacaacttcaagaaaattacggtggtgccgtccgccaagaggacactggaggtgaagaaggaagctcttgactctcctaaagctgatcccaaagt

SEQ ID NO: 244760 - DNA, 100 bp, Homo sapiens
aaagaagacaaggtggaaaagttgcagtttgaagaggaggactttgatgtagtaactggagttagtcccctgctcttcaggaaactcagtaatcctgaca

SEQ ID NO: 244761 - DNA, 100 bp, Homo sapiens
ctgctgtttcccaggctcaggaattgttcagctcctcacttcaaccatataggccaaagaggtgctgaaaaaatatttggagtccaaggaggatgtggct

SEQ ID NO: 244762 - DNA, 117 bp, Homo sapiens
gatcgaggttgtttgcaacgaccgtctggggaagaaggtccgcgttaaatatgttcccgctgcctgtcaccaacgggaagggccggcccgcctccctggccggggcgcagttcggag

SEQ ID NO: 244763 - DNA, 100 bp, Homo sapiens
tggaaactctttgggaaagccactcgaaaagctcctgggcaacgtgctggtctgtgtgctggcccatcactttggcaaagaattcaccccaccagtgcag

SEQ ID NO: 244764 - DNA, 97 bp, Homo sapiens
cagatgggaccttcttggtccgagatgcctcaacaaaaatgcagggagattatactttgactttgcgagtgtgacatgttggcgagccaagtttatg

SEQ ID NO: 244765 - DNA, 80 bp, Homo sapiens
agctccaggttaggccgagctttgcgggaaagcagcgggcgatgccagtccctccactccagaggagaacgaaaccacga

SEQ ID NO: 244766 - DNA, 88 bp, Homo sapiens
gacacggaaccctcacctcaacaaggagttccatctggaatatgacaaattagaagaacggcctcacctgccatccaccttcaactac

SEQ ID NO: 244767 - DNA, 74 bp, Homo sapiens
gcacacctggatccaggataacggaggctgggaatcaaacattttaagtccagtgcaggatggaacaaagaaac

SEQ ID NO: 244768 - DNA, 75 bp, Homo sapiens
ctacggttgttgttggcgactgtgcttcaagcggctgtccggagtacacatggcttagaagttccattaagccat

SEQ ID NO: 244769 - DNA, 75 bp, Homo sapiens
tcgtgctcaccggtttctcccacatcgacctggaccctgatgctcccataagacagaaaatgccccttgatgatc

SEQ ID NO: 244770 - DNA, 75 bp, Homo sapiens
ccggcggggaccgccgggagcgcgcggatgtcggtgttcctggggccagctagagttgggaagacatcactgatt

SEQ ID NO: 244771 - DNA, 75 bp, Homo sapiens
ctggcggcctgcgcagccacctcaagggtgctgttggcccaaaggttgccctgaagccccccatccagaggaagc

SEQ ID NO: 244772 - DNA, 90 bp, Homo sapiens
tggaaaaccagttattgaatatcaagaggaggagttgttgtaagaagactgttagaatgccctcggtaacacagaggctgagagatcctg

SEQ ID NO: 244773 - DNA, 98 bp, Homo sapiens
cgtccctccactcctgctgaggaagatgaagacgctgacagtccgtttgaaagacatctgttccatgactaaagaaaaaacagctcgcctcattccca

SEQ ID NO: 244774 - DNA, 90 bp, Homo sapiens
gtcgccagcggagcgaacccgagagcgtggagcgggctgggccagagtacccaaaggcaagtggaacagctctaatggggttgaagaaaa

SEQ ID NO: 244775 - DNA, 50 bp, Homo sapiens
ttctcctgctgcgtgccagatcctgcgaatgagtccctggaacgccagat

SEQ ID NO: 244776 - DNA, 100 bp, Homo sapiens
agacagaaagctggaagttgaaatgatgaggtttatataactttccaagacaaggaagttgtgcaaagcctcacagctactaagaggctgggctgggact

SEQ ID NO: 244777 - DNA, 75 bp, Homo sapiens
catatctggacaaggcacccccaccaggcttgccagccgaaacgatcaaggatgccatgcgctcagtgactaagc

SEQ ID NO: 244778 - DNA, 87 bp, Homo sapiens
caaggccaagggcaagtgatttgacagttggctggggaacagaccagggaattggtggatttggagaagagccgggaattaaatcac

SEQ ID NO: 244779 - DNA, 100 bp, Homo sapiens
ttcctacccgttcaccaccctgaagccccacgtcgggatcgtccactacgaaggccacctacaaatagcaggtattgttgcagcatctggcagtgagact

SEQ ID NO: 244780 - DNA, 100 bp, Homo sapiens
ctgcagccttgtgctggagcaccagccagacaacatcaaggctctcttccgcaagggcaaggattctgtttcactgaggccatctatccgatttcaagga

SEQ ID NO: 244781 - DNA, 82 bp, Homo sapiens
ggggcctcaagctgtcccaggacatggacacctgtgaggttactcactataaacaatatccacccaacacaagcaaagttta

SEQ ID NO: 244782 - DNA, 74 bp, Homo sapiens
agctatatactttggttacctatgtacctgttaccactttcaaaactccaaaaggaattcttcatttgtctcct

SEQ ID NO: 244783 - DNA, 71 bp, Homo sapiens
aatactaaagaagattccgggccgagtatccacagaagtagacgcaagaaagtttcctacactactgaggt

SEQ ID NO: 244784 - DNA, 100 bp, Homo sapiens
gacggcggcgacggaggagagcagctcctcactgtcaagcacgagctgcggactgatgttcctcctgctgatcaagagaagctttttatccagaagttac

SEQ ID NO: 244785 - DNA, 100 bp, Homo sapiens
acaccaagatctgtgctgaccacaggaattggatctactagtgcaggggctttgaccacgacctttgaagagcttcattttgagatcaagccccacgatg

SEQ ID NO: 244786 - DNA, 75 bp, Homo sapiens
tcacagagccttgcaaataatagcaagatatgtaccatccaatttcctgatcaaattgtaggatttgttcctaga

SEQ ID NO: 244787 - DNA, 85 bp, Homo sapiens
caggcatgagcccctgagactgcaaataaaccatgctttagagaaggcaccagtttgtagaaaataatttaatactaaagatggg

SEQ ID NO: 244788 - DNA, 76 bp, Homo sapiens
ccagatccggagtaagcaaaactggagtcttctgcctgcgcaggatttgaactcagaggatcaaaaagccttcagt

SEQ ID NO: 244789 - DNA, 50 bp, Homo sapiens
gaatttccatgtcaacatagtccagggacactccggacgcaggcccggcc

SEQ ID NO: 244790 - DNA, 98 bp, Homo sapiens
agcaggagacgcgaaccaacatgctgctggagctcgcaaggtcattagtaattatcagcactttagatgggagaattgctgccttggatcctgaaaat

SEQ ID NO: 244791 - DNA, 51 bp, Homo sapiens
ttatctggcccctggggggctttcaggtaccaaaggcttagaatgttctcc

SEQ ID NO: 244792 - DNA, 98 bp, Homo sapiens
gaccgcgtggcggcggcgcacgggtacctcaacttgggccaggtatccagtgaattttttgaagaaggatttatggctgacgttgacttggatcacag

SEQ ID NO: 244793 - DNA, 101 bp, Homo sapiens
tcaccgacatgaagggaacaggcatcatggactgtgcgcccaagggcgccctgcgtccggcagaggaggcgagcatcccgctcaggtgatgaggaacccct

SEQ ID NO: 244794 - DNA, 110 bp, Homo sapiens
ttcatccgggaagtgcttggggatggagtgcctccaaaggttgctgaggacactgcccatctctaagataagaacctggaaaggggactctgttggccattggaaattgc

SEQ ID NO: 244795 - DNA, 101 bp, Homo sapiens
cgctggtgcccggccccggactgcggataattctaaggcactgatagcatttctggcatttctgattattgtgacatcaatagccctgcttgttgttctct

SEQ ID NO: 244796 - DNA, 75 bp, Homo sapiens
tgaatttaaaggagcagccctggtgtcacctatcagtaaaaggcctgttacatgaacagaatatggcaaaaatga

SEQ ID NO: 244797 - DNA, 75 bp, Homo sapiens
cacaggagccccggacttcacctgagctacctcagcctctgttggaatgctacacaaaactgcgggagaggggag

SEQ ID NO: 244798 - DNA, 50 bp, Homo sapiens
ctgggagcccctacctcattggcctgccaaaacagagtggagtacgagaa

SEQ ID NO: 244799 - DNA, 88 bp, Homo sapiens
cacagtcatctttgctggcttcagtgcagagtccttggctgggaggatcaatgatgtctcacacaggtcccacagcacagaacccggc

SEQ ID NO: 244800 - DNA, 100 bp, Homo sapiens
cactgcaacctccgcctcccgggaacaggaaatatagtggtcattatgattagctatccaaaaggaagagaaattttggagctggtgcaaaaaggaattc

SEQ ID NO: 244801 - DNA, 83 bp, Homo sapiens
tccgggaaggccaagctgacgcacccggggaaggcgatcctggcagagtccttagccaggatggaggctgttgtgaacttgta

SEQ ID NO: 244802 - DNA, 100 bp, Homo sapiens
gcgaccgagggactgggagtcgttagtgagagtgcctggtgaagaatgtgatgggatcactagcatgtctgcggagagcggccctgggacgagattgaga

SEQ ID NO: 244803 - DNA, 74 bp, Homo sapiens
gggccttcttctacaagtttgagctgcagcatggcactgaggagcagggaaaacctgaggtgcttggaggtcca

SEQ ID NO: 244804 - DNA, 100 bp, Homo sapiens
ctgatgctgaagctgtgcaccgaggtccgtgtggccaacgagctcaacgccaggcgccgctcctttacagatcatggaagggaagtggttgctgtgtatg

SEQ ID NO: 244805 - DNA, 82 bp, Homo sapiens
gcagtccacccaccgccgccgcctcccaggtttctgaaacagatcgtgagcttcatcaagagaattcaactggaaaaccaag

SEQ ID NO: 244806 - DNA, 75 bp, Homo sapiens
atctgtggaggatctgccagggagcaaacctgagcctgatgccatttctgttatctccagaagaagaagagaaaa

SEQ ID NO: 244807 - DNA, 75 bp, Homo sapiens
gaggaggaggaagccgagtttggcgaggaggatcttttccaccaacagggagtggagcttggtttcgggatctcg

SEQ ID NO: 244808 - DNA, 50 bp, Homo sapiens
ctcaaggccatgatcaaaacccttcgagaaaactccatcagtcccgaggg

SEQ ID NO: 244809 - DNA, 103 bp, Homo sapiens
ttgaagacatcaagggaaaatggggtgaggaagattttgaagacaatcgtcacttatacagtgagaaagatcagtctaaagaaaaggagaagaaagtgaaaaa

SEQ ID NO: 244810 - DNA, 75 bp, Homo sapiens
gctctccaagttctaccagccctacgctggacgtaaagaaagaagtgatgcactcaattctgcaatagataaaat

SEQ ID NO: 244811 - DNA, 116 bp, Homo sapiens
cgagcccgcgctgaccggggcccgggccggatgggcgctgcgggccggggcgcggaccgcggagcggccctctggacttattggacaaaatgttgacattcaacccacacaagagg

SEQ ID NO: 244812 - DNA, 72 bp, Homo sapiens
aaggtggagccaccagcctctccttgtgctgggcctaaaggagataacatttatgaatggagatcaactata

SEQ ID NO: 244813 - DNA, 98 bp, Homo sapiens
ccaagagctatcaggggaagatatgcatcagttccatcgagccattactacaggcacaatttggaatctaaaggacattattccatgcaagagtcaag

SEQ ID NO: 244814 - DNA, 75 bp, Homo sapiens
tgggagggcgagctctgcgacaccaatgactctggggacgacgacgaggctaccaccccagccgacaagagcgag

SEQ ID NO: 244815 - DNA, 100 bp, Homo sapiens
catctttatgcaaagccagcgttacagtaatgttccagcttcagcgcctgctcctggtcatcactaaccagatttacttggagtacatgtgaaagaaaac

SEQ ID NO: 244816 - DNA, 83 bp, Homo sapiens
gtgccatccattgaatgggttgaacttttcacaggtagtaaacctattgatggcaattttgctgactgtggaagtgactcatc

SEQ ID NO: 244817 - DNA, 99 bp, Homo sapiens
aagttgacatctgacgacgtgaaggagcagatttacaaactggccaagaagggccttactccttcacagatcggtaatgtgaggctacaggagatgatg

SEQ ID NO: 244818 - DNA, 100 bp, Homo sapiens
ccagcattagcctggctcaatatctaatcaatgtcagcatccgcacttccactaatagccaagtagacaagctgaccctgtcagggagtgacagcgtcat

SEQ ID NO: 244819 - DNA, 90 bp, Homo sapiens
tgcctgcccccaaccagcagcccgaggtcttctgcaaccagtgcctccggagccagcgtggtggccatagacaacaagatcgaacaggcc

SEQ ID NO: 244820 - DNA, 75 bp, Homo sapiens
aagtggaaagatgacggatgaaaagaatgaacactgtccttcaaaacgagttgctatcaagatcatagataagac

SEQ ID NO: 244821 - DNA, 100 bp, Homo sapiens
ttcattgtggaagacgtcaacgacaatcctgccacatgccaaaagttcaccttcaggtgcacttttcaaggagattgtgtacattcagagaacttagaaa

SEQ ID NO: 244822 - DNA, 50 bp, Homo sapiens
caagaacaaaggccgcgacttggagatctcccttgagtttagaaatctgg

SEQ ID NO: 244823 - DNA, 75 bp, Homo sapiens
cgcagtggtcgcttcttctccttggttttgggtctagtaatactggttctgtgtttggtcaagcagccagtactg

SEQ ID NO: 244824 - DNA, 99 bp, Homo sapiens
tgtcatactggccgaccagggcacctacggctgcgagagccaccacgatcgcaccctggccaggctcagcgtgaggcagacagagttttgccatgctgc

SEQ ID NO: 244825 - DNA, 98 bp, Homo sapiens
cctgcaggaacatggcagaggagacaccgtctgtcttcacaaaacttcagaagaaacacctacaacaggagaaggagtgcctcatgtccaagctggtg

SEQ ID NO: 244826 - DNA, 83 bp, Homo sapiens
cttccaggccccgggcacctagagacggatggtcgcacgcatgattgtcggcatctcacagatatgtaactggttcatcaatg

SEQ ID NO: 244827 - DNA, 75 bp, Homo sapiens
tataagggttcctgctttcacagaattattccagggtttatgtgtcagggtccgcaagcaggtggtgaacatccc

SEQ ID NO: 244828 - DNA, 96 bp, Homo sapiens
gtcatcttcaacgtgggctccaacaccaacgagaccatcaccatgccccacgcggcccggaagctgaagaaacttggtaatctgaaactacaggag

SEQ ID NO: 244829 - DNA, 87 bp, Homo sapiens
ataaaagtgaaggatgtaatagatcgtggcccttcaatttagaagagattaagaaagttcaggagccctggaaaggagaaggaataa

SEQ ID NO: 244830 - DNA, 100 bp, Homo sapiens
ctcaaatagaaaatgtccatggatatgtcttgcagtctcatatttctcctctgaaggagaaggaagccaacatccttttggagccatgaatattgtccga

SEQ ID NO: 244831 - DNA, 82 bp, Homo sapiens
tctctctttctggcctggaggctatccagcgctccccacaggtgcaggaagccgccgcccagccatggacggggaggagcag

SEQ ID NO: 244832 - DNA, 127 bp, Homo sapiens
gttttgggccgaggcctgggttacaagcagcaagtgcgcggttggggccactgcgaggccgttttaggtgggtcatgataactgggtacgtggagttctgttccattctggggggaagtttattttg

SEQ ID NO: 244833 - DNA, 130 bp, Homo sapiens
tctctcatctcgctcggctgcgggaaatcgggctgaagcgactgagtccgcgatggaggtctacttccccagcaggacagcatcattctcctatatcttctagacatcactcatcttcctcacaatcagg

SEQ ID NO: 244834 - DNA, 75 bp, Homo sapiens
agcagcagcagcagccagtattcgggaaaggcagacaggcaacctaatgaggcctctcttgaattatggtattgc

SEQ ID NO: 244835 - DNA, 100 bp, Homo sapiens
gagcccttatgaaatgtttggggatgaagaagtgatgtgtttaaatggaaactggacagaaccacctcaatgcaaagggccgtgggtcacaaagttttcg

SEQ ID NO: 244836 - DNA, 101 bp, Homo sapiens
ctgagccgcgtctaccccgagcgtccggtgctgcagcagagaacatgttaggcagtttgctgtgcctcccaggttcagggtcagtgcttcttgacccctgc

SEQ ID NO: 244837 - DNA, 75 bp, Homo sapiens
ccggaatcccgcgcgctgcccacgattcgcttctgaggtcctcagaatggttggaatgaccctccagctttgaac

SEQ ID NO: 244838 - DNA, 75 bp, Homo sapiens
gaagcgcaccccgactgccgaggaacgagagcgcgaagctaagagatgaggactcagtgtgtcgtcgtggctgct

SEQ ID NO: 244839 - DNA, 75 bp, Homo sapiens
ctgcacatttgtgatgatagccagtcccgagagccaggaaatgctagtgagtcggaggaagaccgcagcgccggc

SEQ ID NO: 244840 - DNA, 83 bp, Homo sapiens
ccatgccgctcctaagcctgcacagccgcggcggcagcagcagtgagaggctttatcctgtggataaacgcagagtgaacgag

SEQ ID NO: 244841 - DNA, 76 bp, Homo sapiens
aacattgatctcctatttttggcttcaagattttgtgccaaccaggtccctccttgtggtccatttctgggcacca

SEQ ID NO: 244842 - DNA, 75 bp, Homo sapiens
gccagaacgacctgatgggcacggccgaggacttcgccgaccaggaatactcccccagttgcaagaggcgcagga

SEQ ID NO: 244843 - DNA, 100 bp, Homo sapiens
tggagggttatccagcacctggaggatacctgctacctatggtttatgggagaaatattagccagtgtcttcacatgctcattgatgataactgtagctt

SEQ ID NO: 244844 - DNA, 50 bp, Homo sapiens
agcagctggctaaccagaccgtgggcagacacgatgaggcgagtggtacg

SEQ ID NO: 244845 - DNA, 101 bp, Homo sapiens
actccccatcgcgttttgccagcgataatacgcctcagatgttcacccttcctcaaaaggacttcagggctcccaccacctgtctgggccccacctgcatg

SEQ ID NO: 244846 - DNA, 75 bp, Homo sapiens
accaggaactcctgctgcaaaaatggaacaagttccagcacaagtgggggaaatttgcagtggtgagaaaatgta

SEQ ID NO: 244847 - DNA, 98 bp, Homo sapiens
atgtaaaaagtcttggaacagatctgatgaatgaaatgaggaggattacttcggacttcagaattgcacctgttcttcccggagcctatcagcaaagc

SEQ ID NO: 244848 - DNA, 103 bp, Homo sapiens
tgcgaccccagtcggtgctccggggaggtcacctgacgaggagattttggaaataatcagggttattttaaaactatatgagcagtggaagaatttcgatgag

SEQ ID NO: 244849 - DNA, 82 bp, Homo sapiens
gtgagcctgtggcgcggcttctgtgggccggaaccttaaagaagccccatgtgccactcccctgatctgcagcttcggtagg

SEQ ID NO: 244850 - DNA, 75 bp, Homo sapiens
atgacaaggatgatgatattagtgatactttctctgaaccaggaaagaaccggaggctgaagcaggccaaagaag

SEQ ID NO: 244851 - DNA, 75 bp, Homo sapiens
catgaatttgtcacattctcctgccctggcgctgacaagggtccagcctccgattggtatgtgtgcaacagagag

SEQ ID NO: 244852 - DNA, 101 bp, Homo sapiens
cctcctcctccggagaagtagagaaataaatttctcccaccctaaaccagtctatccttcactggagtctgatgatgatgaccctgctttgaaatctcgac

SEQ ID NO: 244853 - DNA, 82 bp, Homo sapiens
ttgccctggtcttgctcggccgatgaagtgcagaggtttttttctgatgcaggccctgacttcctgtgagtgcaccatctgt

SEQ ID NO: 244854 - DNA, 106 bp, Homo sapiens
aagaacatgaagtgcagtgtgaagaacgaccactcagcgtacaagagtctgaaggaattcctgcccaaagaatatatcaagcagagaggagctgaaaagaggatct

SEQ ID NO: 244855 - DNA, 100 bp, Homo sapiens
aaaaactgatgaccaagagaatgtgtcagccgatgcaccgagtccagcccaggaaaatggagagaatacagtcgctttgaatcgaagatacatgacttac

SEQ ID NO: 244856 - DNA, 82 bp, Homo sapiens
gacaagccgctggcagccgcggatctcaccgccgctcagggtgggattcaaagaagcacacaggctacgtcggcttaaagaa

SEQ ID NO: 244857 - DNA, 100 bp, Homo sapiens
aagggacacccactaggcgctacaggctgtgctactcatggacgccgaaaagcgtatccggttactgcagtttgtcacagggacatcgcgagtacctatg

SEQ ID NO: 244858 - DNA, 99 bp, Homo sapiens
attgttataaatgaaggctctcttgatatcaagagactgaaatctcatccttctatcatcatatggagtggcaataatgaaaatgaggaggcgctgatg

SEQ ID NO: 244859 - DNA, 96 bp, Homo sapiens
cctgaccagaaaggaactcccaagcgactgcaggcagaagctgagacggctaaggtgaccaagaatatggcccaggtgaccaaagccctggacaag

SEQ ID NO: 244860 - DNA, 96 bp, Homo sapiens
gcgacgcggtagtggcgaagccgggagtgtgggcgcggctgggtcattgctgtggtcatggacctcttcactgatggtgatatctttcaagacatt

SEQ ID NO: 244861 - DNA, 90 bp, Homo sapiens
cgccgagagctacacgttcacggtgccccggcgccacctggagagaggccgcgtcctgggcagagaaaccaccatcatgggttcgggtcc

SEQ ID NO: 244862 - DNA, 75 bp, Homo sapiens
cgcaggagacacaagaagcggatccagagccccccaagatgaacccagtggtggagccactgtcctggatgctgg

SEQ ID NO: 244863 - DNA, 75 bp, Homo sapiens
tggactccccatcatccaagacgtcatgctagccgaggcccaggtgtttatctcagtggatgatctggaaccccc

SEQ ID NO: 244864 - DNA, 80 bp, Homo sapiens
gcttcatcaaaaatagtgatagctttgataaggatggaagcttcctggcgccaggtggccggtggccgaggccgatcccg

SEQ ID NO: 244865 - DNA, 100 bp, Homo sapiens
ctccactgtaagggtgtcaggatctgaagagctatggtgaaacaccactgaagcattgccaaggcccgatgagagaaagggaaagttaaggatgctggag

SEQ ID NO: 244866 - DNA, 82 bp, Homo sapiens
gcgaggcaggagagaggaggaggagtgcggcgcggcggccccgggaccaaggagccgtgcaggaggagcggcagcgtggcaa

SEQ ID NO: 244867 - DNA, 83 bp, Homo sapiens
gcagcggcggcggcggaagtggccggcgagcccggtccccgccggcaccatggtgctgtaccctgtgtgccatgtgcgtaacc

SEQ ID NO: 244868 - DNA, 101 bp, Homo sapiens
agagctctcacatctgtgacttcatccgaaaaacactgaatgctggggcgtactccaaagttgttcaggaacgggaaatgtttcaacgtgcgcaagcgttg

SEQ ID NO: 244869 - DNA, 75 bp, Homo sapiens
gaaaaccaaggctgaaggggatcgtctaaaagaggcaagatggattctggatatactctgagtattgtaacaacc

SEQ ID NO: 244870 - DNA, 99 bp, Homo sapiens
gtggagggcctcgccatgtcctgctgcccggattacatcccagtagaccaagaagagttaagagattatgtcaaagctaggctgaaggtcttttatgaa

SEQ ID NO: 244871 - DNA, 83 bp, Homo sapiens
tccagcttcacccgtacaggtagccccgccgccgcgcacctgccttcgctcccgcaccgggcagccattctacaaaagtggaa

SEQ ID NO: 244872 - DNA, 100 bp, Homo sapiens
aacccctgaagccgccatgcgacctctccatgcagtcagtggaagtggcgttaataaaggtatccatggagaacactgaaaactcagtggattcaaaatc

SEQ ID NO: 244873 - DNA, 75 bp, Homo sapiens
ctggctattggaaggaggagattctgaagataaggagttttcggctttgtgagaaaccttaccatcaaacacgat

SEQ ID NO: 244874 - DNA, 100 bp, Homo sapiens
tggagtccgagctgagatccatctgcaccacggtgctggtttttagaacttcagccataaaaatgggcagaattttccttgatcatatcggtggtacccg

SEQ ID NO: 244875 - DNA, 100 bp, Homo sapiens
gtcgatttaccatagaaattggtagttgctgcaaaaagagttacacttccaggggctccccactcagtccccagtcatctatcgacagtgagctgagtac

SEQ ID NO: 244876 - DNA, 97 bp, Homo sapiens
tgattatcctcttgtttatcctggctgtcatcaatttaataactgtgggcgccgccctgctgcccgaatgaacaaaaggatccttggaggtcggacg

SEQ ID NO: 244877 - DNA, 74 bp, Homo sapiens
caatggactagctctgctacagaacaccaaggtgaccaagaatatggcccaggtgaccaaagccctggacaagg

SEQ ID NO: 244878 - DNA, 50 bp, Homo sapiens
aaggattccaagtaactcttatttggaatatgacagaactgatggttttt

SEQ ID NO: 244879 - DNA, 83 bp, Homo sapiens
acttcccgtccgcggcgtggaggggaagatcagttttcctgccatccaggctgctccctccttcagcaactcattcccacaga

SEQ ID NO: 244880 - DNA, 80 bp, Homo sapiens
atcccaccgaagcagcgtgtcctccgtgggagcccgagcaatggctgccatccggaagaaactggtgattgttggtgatg

SEQ ID NO: 244881 - DNA, 115 bp, Homo sapiens
cctgtgtgatgcttttgatatctggggccaagggacaatggtcaccgtctcttcaggtcagaaaaagagtgcacgccagtatcacgtacagttctttggtgacgccccagaaaga

SEQ ID NO: 244882 - DNA, 98 bp, Homo sapiens
cattctgataatggccggtgatgaagcaagcacaatagctgaaataatagaggaatgtggaggaagtgaaagtacttagcattgatcaaagaaatttc

SEQ ID NO: 244883 - DNA, 100 bp, Homo sapiens
gatttttggattcttcaacgatggcgaacctcccaccaaaaagcccaggtggcagctgccaacaagaagcattagaacaaaccatgctgggttaataaat

SEQ ID NO: 244884 - DNA, 101 bp, Homo sapiens
tgggactcaatgttctcgatgccaatctctgcttgaaaggagaagacttggattctcaggagattacctggggcaattgatgttatcggtcagactataac

SEQ ID NO: 244885 - DNA, 83 bp, Homo sapiens
cgccgctgccgccgcgacccttggcgcctgcccctgcaacgggaggtgctggggagtcagggaagagcaccatcgtcaagcag

SEQ ID NO: 244886 - DNA, 74 bp, Homo sapiens
agacatatatgggtcctgctctttttgcagtgctgaagacgcggttgaccttgcgtcggacgggccagtacaag

SEQ ID NO: 244887 - DNA, 100 bp, Homo sapiens
ggcgaccactcctgtgatcgttgcggctggggctggaggggaggaagttgaaatggatgcagtcagaactgaatgttgaagaagtggtaaatgacaggag

SEQ ID NO: 244888 - DNA, 87 bp, Homo sapiens
tgatattgagacaaacatgaatttaattggagccactgcagttgaagacaagtaatgttatcatgacagcttcaacttttagaccac

SEQ ID NO: 244889 - DNA, 74 bp, Homo sapiens
aagtttgtgaaagaaaggacagagattgaactcagctatgcaaagcaactcagttcctgagagtggagatctgg

SEQ ID NO: 244890 - DNA, 100 bp, Homo sapiens
ccaactccactacagctgttcccagcttggttgcacttgagaaaattaatgtggcagaagaagctcattcacacagaagacccatttaatgatgaacatc

SEQ ID NO: 244891 - DNA, 74 bp, Homo sapiens
cctgtgcgggagaggctcaagcgggacctgttccagtttaacaagggactggtgattgcagctggaagtgccca

SEQ ID NO: 244892 - DNA, 83 bp, Homo sapiens
aaagagcgggagtccatcatgaaggagttccggtcgggcgccaggttggccgactgcgatgtgagtgacagcagctgcagcag

SEQ ID NO: 244893 - DNA, 83 bp, Homo sapiens
caaaggcaagagtaacagcagcgccgtcccgtccgacagccaggcccgggagaaatcaatgtccgagttaccaccatggatgc

SEQ ID NO: 244894 - DNA, 100 bp, Homo sapiens
tggaggctcaacggcagaagcttcaccacaaaagcgaaatgggcacaccacaggtctatgttaacaatgaatgggcaaccagtgttggggaaggagggag

SEQ ID NO: 244895 - DNA, 51 bp, Homo sapiens
tgaaagattcatcaggccaatgctgatgaccaaacacccaggcaaacgtct

SEQ ID NO: 244896 - DNA, 100 bp, Homo sapiens
agaaggcacgcatgggctcagcgggactcagagatcagccatgcagaagctggggacagaagtatttgaagaggtctataattacctcaagagagcaagg

SEQ ID NO: 244897 - DNA, 83 bp, Homo sapiens
ctcaggcacagagaaatttcccgagctctgtggtgaccatggaggaagaagatgagtctcgagggaagacagaggagtcgggg

SEQ ID NO: 244898 - DNA, 50 bp, Homo sapiens
ggattggacaagcaggcaaagctgagttgggcagatgtacagagtcagct

SEQ ID NO: 244899 - DNA, 100 bp, Homo sapiens
tttccacacccagacccaaagtttgcaacaatcagtcagatgataacaccctatgcccattgtcctgatctgaaaattcttggaaattgttccatgtgat

SEQ ID NO: 244900 - DNA, 100 bp, Homo sapiens
gggcaacgtcagggtcagccgggagctgcctggccacactgatgcagatgcgcttcgatggacgcctgggcttccccggcggattcgtggacacgcagga

SEQ ID NO: 244901 - DNA, 100 bp, Homo sapiens
caaaagaattcgaagggagttggtaaacgctgttgtggaagatatcaataagcgcagagagccgctccccagcctggaggctgtgtatctcatcactcca

SEQ ID NO: 244902 - DNA, 100 bp, Homo sapiens
ctctccggggttcgggctgggagcagcttcatgactacgcggagcgggagagcggccacaccatgcgagttcaaaaggtgatgacctatcaacagccatt

SEQ ID NO: 244903 - DNA, 50 bp, Homo sapiens
tcatcaatgccttctttccagagggggcatatcaagagaggagatttctt

SEQ ID NO: 244904 - DNA, 101 bp, Homo sapiens
ttctgtggattggggaaaaatccagagaccccctgaagattcggtgtcagcatttgcaggtatacaggaacagtcctagtgatgcactatttaatcaaaag

SEQ ID NO: 244905 - DNA, 82 bp, Homo sapiens
cgaggacgaggaggcagccacggggcccctgggttggcgttgcaaacgctatggtcaccgaacgggtgacaaagaatgccct

SEQ ID NO: 244906 - DNA, 50 bp, Homo sapiens
agaaccattggtggagatagaaggtcctacaggtatggatctctggcagc

SEQ ID NO: 244907 - DNA, 75 bp, Homo sapiens
ggcctggagcatcgacctcaagttttctgaatttccagatcccatgtggggttcagattatgtgcagttgtcaag

SEQ ID NO: 244908 - DNA, 90 bp, Homo sapiens
cttgggagtatctccgtattctggagcagtatttcatgaagatatgtgatggcgtccagtttggagctgggataaggttcctgtagccga

SEQ ID NO: 244909 - DNA, 75 bp, Homo sapiens
aaatgtttgacgacactgatggtttggctacagagtgcggtggcgccagcacagaactctgctcaatgtccctct

SEQ ID NO: 244910 - DNA, 90 bp, Homo sapiens
ttccctaaggactgcagaggcagtttggaatacaggagtttccagaaaatataaaaaattgtaaagttttgacaattgtggaggccagtg

SEQ ID NO: 244911 - DNA, 50 bp, Homo sapiens
ctgaactcaggacttggcaactttcccatggtttggcatggacattgggg

SEQ ID NO: 244912 - DNA, 75 bp, Homo sapiens
gaatgtgctgcattgcgggtccggcactcaagtgattgttttaccacgatacagtagagaagatttgtataaaag

SEQ ID NO: 244913 - DNA, 124 bp, Homo sapiens
caacgatgtacgccaagatcgacccctcgttaggaataattgcaaaaatcaatcggactctggaaacggcggtgagcagggcagcatttccttctcccactgctgctgagatggcagaaattag

SEQ ID NO: 244914 - DNA, 82 bp, Homo sapiens
ggattcgccgaggcaccgaggcactcagaggagatacagatcacttggattcagtcgagtttgctttgctccgtgggaactg

SEQ ID NO: 244915 - DNA, 100 bp, Homo sapiens
gctcctcccggggcccttcccgggcaagatggagtttcgctccgtcgcccaggctgaagtgcagtggcgtgatcttggctcgttgcaacctccacctccc

SEQ ID NO: 244916 - DNA, 99 bp, Homo sapiens
gtcgggccgcggcggcgccgccctgctctgcctctcagcgctactcgcccacgaatggtagataacgcagatcatctctggaaaggatattgatccgcc

SEQ ID NO: 244917 - DNA, 100 bp, Homo sapiens
ggggaagtgtctgtagcgtccctccctctcaaccacaataacaggcggagggtcggcgtaggctggacgtaaagaaagaagtgatgcactcaattctgca

SEQ ID NO: 244918 - DNA, 82 bp, Homo sapiens
aaacagatcatccgcaaacacgcgcagaccttcgttgccctctgtgccacagatgcgagccacccctctggctgctcctgcg

SEQ ID NO: 244919 - DNA, 100 bp, Homo sapiens
ggacctcccagcgaccactgcagcctgcggacgaggccgggacttggccgagcggatcctaataaggggaaaatggtacaaggaaatggtagaactagtg

SEQ ID NO: 244920 - DNA, 80 bp, Homo sapiens
cggccttgagcgctgagcaagcaaagggtcaaaatgcagatcttcgtgaaaacccttaccggcaagaccatcacccttga

SEQ ID NO: 244921 - DNA, 100 bp, Homo sapiens
gcggccgcgctgaggctcccggctcagcggccctccaggcactgaagcgtaagaagaggtatgagaagcagctggcgcagatcgacggcacattatcaac

SEQ ID NO: 244922 - DNA, 75 bp, Homo sapiens
cttccggcagcggcagctcaagtggccaaggcaagatgttatgtgtctcggtaccacgtgaaagactcctcacgc

SEQ ID NO: 244923 - DNA, 83 bp, Homo sapiens
ctcgctttccctctcgcgtctctggctgcagttccagggtctccctccactgctgtagtaacccgggtccggggcctcggtgg

SEQ ID NO: 244924 - DNA, 90 bp, Homo sapiens
aaagagaaaagaaaactacttatgcagaaccagtcttcaacaaatcatcctggagctagggatttgtcttggctgttactatgacacggg

SEQ ID NO: 244925 - DNA, 100 bp, Homo sapiens
gccccttgtcagccagggctgaacccccgcagctgcttttctaacccaaactgtatgtcttgatgacactacagtaaagtttgaaatatgggatacagct

SEQ ID NO: 244926 - DNA, 100 bp, Homo sapiens
ccgggagactggagtcgaaggccgtgaggcttacggagttcctatgctagtcagcatagtcagcttgggcaagaccttcgttctgccgtgtctcccgact

SEQ ID NO: 244927 - DNA, 74 bp, Homo sapiens
tactattacccccagtatctgcaagccaaggatcaggagaaggtctggggaaaataatccagagatttccacag

SEQ ID NO: 244928 - DNA, 96 bp, Homo sapiens
cgggcaggagctgtgcatcgcatcccactccatcgccaggatctccttcgccaaggagccccacgtagagcagctccgccgcatgcaagagatgat

SEQ ID NO: 244929 - DNA, 75 bp, Homo sapiens
tgctacatctgttggaggagccaactagcatggaagtgcagggttaaagcacgaattgggagctctcagcgacat

SEQ ID NO: 244930 - DNA, 100 bp, Homo sapiens
ttacttaaatgaatttgaagaacttgccatcttaggaaaaggtggatacggaagagtatacaaggtgacgctggagtgcccgggccacgaggaggtgccc

SEQ ID NO: 244931 - DNA, 100 bp, Homo sapiens
gcgaggacatgtacagtgggatcaccgactgtgccaggttttacacatccataagtagacctttttggagcctcaccagccaattcaatggcgtcctctt

SEQ ID NO: 244932 - DNA, 100 bp, Homo sapiens
cccgtcccacatccctttctccaacaggtctgtctcgttggaaaatccagaacatacccttcctccagagaagcttccgtggatgaaaagaggactcagt

SEQ ID NO: 244933 - DNA, 83 bp, Homo sapiens
gccacgggggccgccgcagcaccatggcgaccaccgtcagcactcagcgcgggccgatgaaggatttgggggcagagcacttg

SEQ ID NO: 244934 - DNA, 100 bp, Homo sapiens
tggagtgtttttcctgttctttggaatgattctcttttttgacaaagcactactggctattggaaattgggctcgggatgagtttgaaggcctcttcaag

SEQ ID NO: 244935 - DNA, 75 bp, Homo sapiens
cgatgttccgccggagcttgaatcgttttattgagaggatccagaatccagatctctggaatagctaccaggcaa

SEQ ID NO: 244936 - DNA, 82 bp, Homo sapiens
acacgtccggcagttgcaggagcggatggagttgctgcaggcagagggagccacagcccgtggaccgggagcccgtggaccg

SEQ ID NO: 244937 - DNA, 99 bp, Homo sapiens
aaggatctcatccacgatgtctctttcgacttccacgggcggcggatggcaacctgctccagcgatcagagcgttaagatattgccgatgtttctgtca

SEQ ID NO: 244938 - DNA, 75 bp, Homo sapiens
ttttggcattgacatttaattttagggtcctttatatagaagggagagtagcaaaagttcaaacagaccctccct

SEQ ID NO: 244939 - DNA, 74 bp, Homo sapiens
tgctttgtggacgctggcaacgcattcaagaaagccgacccccaaggtgccgtgagcgatgtggagatgcagga

SEQ ID NO: 244940 - DNA, 75 bp, Homo sapiens
gacttggcgaagcgctgcgctcgcgcccggatccctcaggccagaacacaaagcgtgaatccggaagaaaagttc

SEQ ID NO: 244941 - DNA, 75 bp, Homo sapiens
gagagggaggaaagggaggcaagaaggaagcagctgctgctgttcttgaagggtttttcagagtcggagaggaac

SEQ ID NO: 244942 - DNA, 75 bp, Homo sapiens
cctggagcctcagttggaagcagccgatccagcctgcggagcctgtggggcaggagtccttcaataatgttaaac

SEQ ID NO: 244943 - DNA, 75 bp, Homo sapiens
acatgagtgatgtggaggaaaacaacttcgagggcagagctcagctgtcgcaggccctggaggagctgggaggcc

SEQ ID NO: 244944 - DNA, 82 bp, Homo sapiens
tggacaagtttgcagatcgggagcgcaaggtcgccctcaaggccatgatcaaaacgctgacacattgtggcctccaagaaaa

SEQ ID NO: 244945 - DNA, 50 bp, Homo sapiens
gggaaaaaagatgcttttgttttggagcatcagcgagagctttctaactg

SEQ ID NO: 244946 - DNA, 75 bp, Homo sapiens
ttctgcctgggtgacaatgccttggtttcaacactatcggaatgctatgctgggactcatgtatgtctactggac

SEQ ID NO: 244947 - DNA, 74 bp, Homo sapiens
aagatggaatcaccaagctaaacaccattggccactatgagaatcgatgatgcaaccaacttggtccagctgta

SEQ ID NO: 244948 - DNA, 113 bp, Homo sapiens
acgcactactggcccctgatccggttcttggtgcccctgggcatcaccaacatagccatcgacttcggggagcaggtgcctgagatcatcagctccatccgtcaggcggggaa

SEQ ID NO: 244949 - DNA, 75 bp, Homo sapiens
cccgcgccgaccgcgttcctatggacagacgcacagacacctgcaggtaagaatgattgatgttggctgatattg

SEQ ID NO: 244950 - DNA, 76 bp, Homo sapiens
ggaaatggaacatacgggcaagtttataagcacgttcacgtccatgttcttcccaggaaggctggagactttcaca

SEQ ID NO: 244951 - DNA, 101 bp, Homo sapiens
ttgaagacttcagcacacatgtcagcattgactgcagccctcataaaactgtcaagaagactgggtacagccaaagaccggagctttggagagatgaagtt

SEQ ID NO: 244952 - DNA, 75 bp, Homo sapiens
gaaggagcggccgggagcccgccgcgctggtagcgatgccatggacaatattaccaggcagaaccaattctacga

SEQ ID NO: 244953 - DNA, 75 bp, Homo sapiens
cacctctgcagtgtcttccacaacctggccatcactggtgcaagctatatttaacggagatcctgatgaagttcg

SEQ ID NO: 244954 - DNA, 97 bp, Homo sapiens
aaggcagcatggcacgctgcatggagccaaaatcgggtctgagattcttcacggaaaaatccagcaaagcctactccttctggatgaagttcagagt

SEQ ID NO: 244955 - DNA, 74 bp, Homo sapiens
gggacccggatcagccgcctgacccggcgggtggaggagatcaaggtgattgaaatctctgaatatcgaaccca

SEQ ID NO: 244956 - DNA, 101 bp, Homo sapiens
cctattctcctttctctgttgaagcgctctccatcctgtactccagctagcaaaggcagacgtgtggacccccaaaagtacaagggcatatttaacggatt

SEQ ID NO: 244957 - DNA, 107 bp, Homo sapiens
acagcaccaggttccaaatcatcaatgaagcaagtaagctctactgagatgaagaaagaaaaagaatacctgctcagctccagagacacgtaaagggacagagattg

SEQ ID NO: 244958 - DNA, 50 bp, Homo sapiens
gatgatcgtgtgtcggatgaggagaaggtcaggatttaagtttacctcaa

SEQ ID NO: 244959 - DNA, 87 bp, Homo sapiens
gcgggccccgggacctgggctgggaacccgcggtggagcgggacacgaacgtggtttggtgcacctcgatttggaggaagtagggca

SEQ ID NO: 244960 - DNA, 100 bp, Homo sapiens
attcatcactggactcctcccaaagggtctccatctgttgtccaaggctggagtgtagtagtgctatcacagctgactgcagcctcaaccttccaggctg

SEQ ID NO: 244961 - DNA, 100 bp, Homo sapiens
tactccagagctccgacttatttctgtgggcagacattaacattcagggcaattgaaggaacagactaaaaatcgtgtcctggaaggaaactacaggtac

SEQ ID NO: 244962 - DNA, 100 bp, Homo sapiens
tgatcacgcagctggctggcttcagtggaccacgtgcctgccagtgtagagccggtggagcagctgggctcggcgctgaggtttcgccctggctacaacg

SEQ ID NO: 244963 - DNA, 75 bp, Homo sapiens
ggaagcttctgccataacccggacaacggtgaaatgacaatggatgctctgttggctcgattgaaacttctgaat

SEQ ID NO: 244964 - DNA, 75 bp, Homo sapiens
cgcagctacgacaagggcctcgcttggtaccggttaatttggagtggcccctggagtcagtttcctacaccatcc

SEQ ID NO: 244965 - DNA, 82 bp, Homo sapiens
ccctaatcccccaacgaggaaggaaggagcagttggttcaatctctggatgtgcacccccgccaatacccctgctacacccc

SEQ ID NO: 244966 - DNA, 83 bp, Homo sapiens
cccagaccctggagcctcagttggaagcagccgatccagcctgcggagcctgtggggcagggatacccacccaccatcccagg

SEQ ID NO: 244967 - DNA, 50 bp, Homo sapiens
cggaagccttcgtctcccagattgcagcgttttaccaacgaggatcattt

SEQ ID NO: 244968 - DNA, 98 bp, Homo sapiens
ctcccaggtagctgggattacagctccttccaactcctcagaacctccactctatggatctggacctctggattcggctttctccctgggcactgcct

SEQ ID NO: 244969 - DNA, 98 bp, Homo sapiens
aaccgccagatcaacctggagctctacgcctcctacgtttacctgtccatgatcatcaatgctgtggtactgttgattttattgagtgccctggctga

SEQ ID NO: 244970 - DNA, 83 bp, Homo sapiens
ggggcttccccggaatggagggctccgggcccaagtttgaggagggaactactggagaccacgtgccgcctggccaacacgct

SEQ ID NO: 244971 - DNA, 99 bp, Homo sapiens
cggggaccctgctggcctcgtgcggcggcgaccggagaatccgcatctggggcacggagggccctggccaacgtcaacattgggagcctcatctgcaat

SEQ ID NO: 244972 - DNA, 90 bp, Homo sapiens
atgggcagaagctgcgagacgccttcacctggaacatgaatgatatctgtgtgaggctggattttctttgcctactccaaccaaagcgac

SEQ ID NO: 244973 - DNA, 99 bp, Homo sapiens
ctgcaacaatggccaagctgacagaatccatgagtatgataagtattatcagcaacataatagttctgggcatcttcattaagtacaaggaacttcgga

SEQ ID NO: 244974 - DNA, 90 bp, Homo sapiens
tggcggcagcgatgcctgcccggctgttggggtggcggtgacgacaggcagcaaaagaccaggttcccacccgaagtggtcaggaagggt

SEQ ID NO: 244975 - DNA, 100 bp, Homo sapiens
ggatgttgtcccgaaggtacgaaggcgaaatacccaaaaatatttgcaagaggaagaaaacagtccaccaagtgacagcccaaagcagtgtccacaccag

SEQ ID NO: 244976 - DNA, 101 bp, Homo sapiens
cagaaaccggggaccttaacaatccacctaagaaattcagaggatctaagcctttcccacgttatggttataaaccctccccaccgaatggatgtggctct

SEQ ID NO: 244977 - DNA, 75 bp, Homo sapiens
ggcggactggctcgcggtgcagcttattccactaagctcaacaaatttcctgtatttaatattaatgatgacttg

SEQ ID NO: 244978 - DNA, 147 bp, Homo sapiens
atttgatgaggtggatctgacagatgccagcgtagctgaatccagtaccaaaaacgtcaacaacagttttacggttttgcactgattgcaaaaataaagtcctccgagcatacaatatccttattggtgaacttgactgcagcaaag

SEQ ID NO: 244979 - DNA, 75 bp, Homo sapiens
atgaggaagtactgagcctgttggaggaactggcccggaaacaggaggacgttggacgtgataagtatgagcctg

SEQ ID NO: 244980 - DNA, 50 bp, Homo sapiens
ggagattgcagcagcgaaccaatcccaagaaaaagcttgtggtgaagggg

SEQ ID NO: 244981 - DNA, 82 bp, Homo sapiens
ctgggcgagcagcggcgggggcccgagggactgtgtcagggaaaagggaggcaaggtcctggtccactgtgaggctgggatc

SEQ ID NO: 244982 - DNA, 113 bp, Homo sapiens
cccggccggagctgggtctggagacgccgtggcagcctgaacggagtgtgcgacggattgggaggtgactccccggacagctcaacaccaaagctttcgcgggcacagcggcc

SEQ ID NO: 244983 - DNA, 111 bp, Homo sapiens
ccacctcggcctcttcctgttgcaccaggttcttcgaaaactgaagcagatgttgaacaacaaggaatacaggagtttccagaaaatataaaaaattgtaaagttttgaca

SEQ ID NO: 244984 - DNA, 75 bp, Homo sapiens
ttcctgtcatggttccccttctactacatgctgaaggtaatactgcattgcatgattgtgcagaatctggaagtt

SEQ ID NO: 244985 - DNA, 100 bp, Homo sapiens
agctgggtgcctgcctcatacttggagaaaggtcaaaatgcagatcttcgtgaaaacccttaccggcaagaccatcacccttgaggtggagcccagtgac

SEQ ID NO: 244986 - DNA, 100 bp, Homo sapiens
ggcaattgctcctgctgtaaggagtgcatgctgtgtcttggggccctttgggacgagtgctgtgactgtgttggcttgttgattggtgctggctgtgccc

SEQ ID NO: 244987 - DNA, 74 bp, Homo sapiens
ggccccgagatcagaatgccggggtactttcattgaattccgaaatgggatgttaaacgtgtcccctattggaa

SEQ ID NO: 244988 - DNA, 100 bp, Homo sapiens
acgtcttccacaaaacctcagtcatcgtcacgagtcctgagtcggttaagaagaaggactaaggctatttgtgggtcctgggggaagtacaacctttggc

SEQ ID NO: 244989 - DNA, 97 bp, Homo sapiens
tgatacctttgatccagaacttgcagcaacaatagtgaatggtagtgtctagaaagggtatgtcccttcaagagagaggtgccaatgtccaaccggc

SEQ ID NO: 244990 - DNA, 76 bp, Homo sapiens
gaagatttgtaaagaaaactcttagacttaattcagtgcacaaatgagatgaatgtgaacatcccacagttggcag

SEQ ID NO: 244991 - DNA, 131 bp, Homo sapiens
ctccaagacagaatggcccgaggcctggacactctctgaggacatctctgcaaaggccccagcggcccaggtatggctctgtgggggcagcatggaggtccttccttgctcacgggtggcccacattgagc

SEQ ID NO: 244992 - DNA, 96 bp, Homo sapiens
cagaaatacaaatggagaactggtcaaaaggtgagccgttctccaaccctttggcccccgatggccacgatgtggatgatcctcactccttccacc

SEQ ID NO: 244993 - DNA, 75 bp, Homo sapiens
caggaccctaacgacaggcgcctccggcccatttacgttgaagaacaagagaggcaggaaaggaatagaggccaa

SEQ ID NO: 244994 - DNA, 75 bp, Homo sapiens
tgatttacctgctgttgtcataagaattccaaatagacaaactcggtgcacgtgccttaacacctcaaactgcag

SEQ ID NO: 244995 - DNA, 80 bp, Homo sapiens
cacgagaattccgcagcccacacgatcgcaccccctccctccctggcggagcccctgaaggagctgttcaggcagcagga

SEQ ID NO: 244996 - DNA, 100 bp, Homo sapiens
attcagacatatcctatacttggtgaaaaaatcacccaagatacactgtactggaacaactataaggcaatttgaatcaacccatagaagtgacagcgct

SEQ ID NO: 244997 - DNA, 100 bp, Homo sapiens
tcccctctcctgcgctagaagaaaggaagacggactcgtatcggtaccccaggacagagcccccagcgcaggccgggatgttcgtcctggtggaaatggt

SEQ ID NO: 244998 - DNA, 97 bp, Homo sapiens
ggtaggctgcgttgaggatctttgctcttccatccgcctttgatcgtcttcctcttcagccatccaggaagaggagatcccagaactggagattgac

SEQ ID NO: 244999 - DNA, 90 bp, Homo sapiens
gcaactgcgatgtctgtggactgtcttgggcagcatgcagtgctttctggattcacagtctgagaatgaggcttcaccagtaaaacggcc

SEQ ID NO: 245000 - DNA, 76 bp, Homo sapiens
cgctctgctcggccgcgggctcccggaggactgcagacaacaagggaggtgtcacagttttccatttagatcaaca

SEQ ID NO: 245001 - DNA, 82 bp, Homo sapiens
cataagaccgttggttctgacgaggcacagcgtttcttgcaagaatgggaggttggtcaaagaaaaagtgatgtatgaaaaa

SEQ ID NO: 245002 - DNA, 82 bp, Homo sapiens
ggacggcgacgcagcccgcggcagaaggtgatggctgtggacacctagtgacttatcaggatagtggcacaatgacatctaa

SEQ ID NO: 245003 - DNA, 101 bp, Homo sapiens
ctgggccagccacctggtgtccggccagcggaagcctgccacctcctatgtgcggaccaccatcaacaagaatgctcgcgccacgctcagcagcatcagac

SEQ ID NO: 245004 - DNA, 98 bp, Homo sapiens
gaagagggaagacacgcggaaacagggcttcgtgggacacatatgcaacatgcctatgatttttacaagcctgatatgctatctgaatatcctatagt

SEQ ID NO: 245005 - DNA, 82 bp, Homo sapiens
atccacacagctcagaacagctggatcttgctcacactctttcaagagaagcttccttggcctggaggaggcagaggccagg

SEQ ID NO: 245006 - DNA, 98 bp, Homo sapiens
caggggacatccgccatgctccaaacaacttggcctcagaaaagcacttggttctgcttcgagatggaaggacacttataggctttttaagaagcatt

SEQ ID NO: 245007 - DNA, 75 bp, Homo sapiens
ctcagatccagtgataattgacaggtttgacatctacaggaaggtgcccaaggaccttacgcagccaacgtacac

SEQ ID NO: 245008 - DNA, 105 bp, Homo sapiens
ggacgccattatcgcatctccccgacaaacaccacgagaattccgcagcccacacggtgaccccagggtttgaagaaaaggagggggagctgctggtgaggggac

SEQ ID NO: 245009 - DNA, 85 bp, Homo sapiens
ggggaggggccgggcccaggagcctcagccccgccggcagccctaagggcaagaatgccagaggattcaacatgagcatacctat

SEQ ID NO: 245010 - DNA, 90 bp, Homo sapiens
caaggtgctgctgcttctccccactcagacttggagccccgtaggagcaggaaatccacgttcgtgacaataaaaaattaagagtaaatg

SEQ ID NO: 245011 - DNA, 75 bp, Homo sapiens
gcggaaaccgaaggggagccatggcggctgacagtcgggaggagaaagcacagtgatgcggtccatgacctcctt

SEQ ID NO: 245012 - DNA, 98 bp, Homo sapiens
gcggctgcggtttaacccgcggtggcggcggcgacggcggccctggcaggaagatgaagtcctcagtacattctgaagaagatgattttgttccagag

SEQ ID NO: 245013 - DNA, 75 bp, Homo sapiens
ccgaaatccagactctttttaagaggcttcgcgcagttccaaccaacaagcagcctgccttggcctcccaaagtg

SEQ ID NO: 245014 - DNA, 100 bp, Homo sapiens
gtaatgactcaggtcatggaggagagtctaatcttgctttgaagcgtgaaacaaagagtcctcttcgtggaaaagaaaaaaatacgctccctttaaacgg

SEQ ID NO: 245015 - DNA, 75 bp, Homo sapiens
ccacacctacatcaaaactccgccgaggcctgcctggagccccagatcaccccttcctactacaccacttctgac

SEQ ID NO: 245016 - DNA, 50 bp, Homo sapiens
tggtctctacgcctgtgtcatcagatgttcttaatagttgctcctctttc

SEQ ID NO: 245017 - DNA, 100 bp, Homo sapiens
aagaacttaagaaacacaacaaaaaagatgattgttggatatgcataagagatcacaaggtttacatctggcacaaacgtagtgaactgccaattgcgga

SEQ ID NO: 245018 - DNA, 98 bp, Homo sapiens
taagaatggtgcctgtcctgctgtctctgctgctgcttctgggtcctgctgtcccccaggagaaccaagatgttccacttacttacatgatcatttcg

SEQ ID NO: 245019 - DNA, 109 bp, Homo sapiens
cgcgagcacagagcctcgcctttgccgatccgccgcccgtccacacccgccgccagcccgcggcgccatggctcacgtcggctcccgcaagcgctcgaggagtcgcagc

SEQ ID NO: 245020 - DNA, 75 bp, Homo sapiens
aaagaaaggacagagattgaactcagctatgcaaagcaactcagcactgcagaaggatctggacgacaacctctt

SEQ ID NO: 245021 - DNA, 99 bp, Homo sapiens
tctctaatttttcatttggctatcctggttcagcctgaaagaattctgacttaccttgtactactagttgctgtgtcagcgtgttatgatgccgtcccg

SEQ ID NO: 245022 - DNA, 83 bp, Homo sapiens
ctgcaagtctataaagaacacgctcaggaggtcccgaagatggcatattcataaagacatcttctgatgattgtgaacatctt

SEQ ID NO: 245023 - DNA, 76 bp, Homo sapiens
gagcctcagttggaagcagccgatccagcctgcggagcctgtggggcagttcaagaacaagcagggaaggcagagc

SEQ ID NO: 245024 - DNA, 50 bp, Homo sapiens
gcgctcatcaccggtatcacaggccaggtctgccatcatggatgttctcg

SEQ ID NO: 245025 - DNA, 100 bp, Homo sapiens
cttggagcagctggtcatcatgttactggggcttccggatgcagatgacgatgcgtttgaagagtacagtgctgacgtggaagaagaggagccagaggcg

SEQ ID NO: 245026 - DNA, 90 bp, Homo sapiens
gacgagggggccaaggcttcctccggggttaccttttcgacaaaatgattcatctagtcattgccagaagagtgggtctcctatttcctc

SEQ ID NO: 245027 - DNA, 100 bp, Homo sapiens
gacaagttgcagtcccgggctctggtgacgccgtggccgcagatttcagctacagaaggcaggaatcctttggacttggccctttatcagtggaatggac

SEQ ID NO: 245028 - DNA, 82 bp, Homo sapiens
aaaatttagctgactttccccgacctgttcatcacaggatacccaactttaaggaacagggcggatacctgaccaactcgtg

SEQ ID NO: 245029 - DNA, 80 bp, Homo sapiens
cagttggaagcagccgatccagcctgcggagcctgtggggcaggtgctgttggcagcagcggtctgcacaaaagcaggaa

SEQ ID NO: 245030 - DNA, 75 bp, Homo sapiens
tcctataagtggagagaggaacacagactctcagcaactcagcagagttcagttccggaaggtgtcttagaggac

SEQ ID NO: 245031 - DNA, 100 bp, Homo sapiens
cggcttcatctggatttacccaacacctgagcacaaagaagaggaagcagggggcttcattgcaaacctggaggttaatgactccagagagtaagatcag

SEQ ID NO: 245032 - DNA, 122 bp, Homo sapiens
ccgcaaagcggggacccagaccctggagcctcagttggaagcagccgatccagcctgcggagcctgtggggcagccatccagtccaatggatcagatgggcaagatgagacctcagccatat

SEQ ID NO: 245033 - DNA, 77 bp, Homo sapiens
gttccaatcgctcctgtttgtcttctgctttggcccaggtcacttggtacatatgaccgtggtctccggcagcaacg

SEQ ID NO: 245034 - DNA, 106 bp, Homo sapiens
cgacagtacaaagaagactcttgtcacactaattgccaacaacaatgattcaccaggcatgtaaactcatctgcagaaaatgtaaacgtcatgtgacagatctaac

SEQ ID NO: 245035 - DNA, 96 bp, Homo sapiens
cgggctgcggacgctcggtcccgcgctgcgcatccccgcggacgccacagcgctgaacctagaaagattgtacaatgaatggtgattctcgtgctg

SEQ ID NO: 245036 - DNA, 74 bp, Homo sapiens
cgtgctgagtggaaagttccgcatcccattttttatgtccacagttcatccagtggaacatccacaagagtggc

SEQ ID NO: 245037 - DNA, 98 bp, Homo sapiens
ctgcttgtgagtctactgcctctaagtcaaagaagaggagaaaggatgaagtatctgtgaaattaaatggtggcagacatgtccaaggaatattgcgg

SEQ ID NO: 245038 - DNA, 51 bp, Homo sapiens
aaggagttgaagtttgtgactttgttgattatggaagattcccacaagagt

SEQ ID NO: 245039 - DNA, 75 bp, Homo sapiens
gaaaaaccgcgaagtcatggggctctgtcgggaaggggttgtagaaggtgatttagctgccatagaagcatacaa

SEQ ID NO: 245040 - DNA, 83 bp, Homo sapiens
atcaaggccaagtatccgccagtcaataggaagtacgagtccggaagaattaacctcgagtctgcacgcttttaagaacaagg

SEQ ID NO: 245041 - DNA, 75 bp, Homo sapiens
gccacggctttagcggtgtcttttgcgatatggaatgtgcagatgtcccactattaactccaagcagcaaagaaa

SEQ ID NO: 245042 - DNA, 75 bp, Homo sapiens
gagccatatgagaatatcaggaatgaagggtccctcaggctccctatcagcccctccagctgcctcagttatctc

SEQ ID NO: 245043 - DNA, 95 bp, Homo sapiens
agcatctcctccttcagctaccgggagatcttgcgggaaaaggagagctcggctgttccagccagggatcctggaggtgatgggatagactgggg

SEQ ID NO: 245044 - DNA, 99 bp, Homo sapiens
aggaaatgaaggaggccttccagaatgcctaccttgagctcggtggcctgggcgagcgcgtgcttgccaagacaatgcaaactccagtgaacattcccg

SEQ ID NO: 245045 - DNA, 74 bp, Homo sapiens
ctcatagaagcatacgttattcaatgtcaggctgaagctcaagaaggtggacccaagtggagagattgtggaac

SEQ ID NO: 245046 - DNA, 75 bp, Homo sapiens
cggcggcaccgggaggccgggccgagcgactgcttctcggaggagtgccgctctgtgatccaggaacaagccgca

SEQ ID NO: 245047 - DNA, 124 bp, Homo sapiens
ccccgccaggcgctctgaccactctccagcaccagcttccagttagtggatatagcacaccatccccagccagaaagatgaatgggagggctgattttcgagagccgaatgcagaggttccaag

SEQ ID NO: 245048 - DNA, 101 bp, Homo sapiens
tgagaattggtgtaagacatcacaatcccattattcagagcgcgtatggagtggaaacgcttgtagggcttcaccagatggagtctcactctgtcgcccag

SEQ ID NO: 245049 - DNA, 120 bp, Homo sapiens
gtggaggagctgtgcagccgcgaggaggcgcgggaggtgttcgagaacgaccccgagacggaaggtgctcgggtcttcggggcactgggtcccatcggtccctcctcacctgggctcacc

SEQ ID NO: 245050 - DNA, 83 bp, Homo sapiens
gagattcagccagcacactcctcgcgagcaaggctgaccccgcactacatctacccaccagccatcgtgcagcccagcgtggt

SEQ ID NO: 245051 - DNA, 75 bp, Homo sapiens
atcaagactgtagcaaaaccacttcattgtgcgcaggaccctcagctcacatttctctagaccctcagacttccc

SEQ ID NO: 245052 - DNA, 100 bp, Homo sapiens
gttttcaatgaatcagttcaaagaaagaatgcagtctttctatacctgtgacagctggagtatcagccttggaagtatatacgccaaaagaaatcttcgt

SEQ ID NO: 245053 - DNA, 75 bp, Homo sapiens
ctgaggtggtcacggggtttgcccagctcacaccaactgcagaaagaagatgctgatatgctacaacacggatga

SEQ ID NO: 245054 - DNA, 100 bp, Homo sapiens
gaagatcgtggcccctacggtgtcccaaatcaatgcggagttcgtgacccagcattttgaaagcgaagcagaagccgtagaatcagcggcgagcctgttg

SEQ ID NO: 245055 - DNA, 90 bp, Homo sapiens
gtgaccgagaccgtgaccgagagcgtgaccgagagcgcgaatatcgtcatcgttagaagatgggctcaaggacagcttgcctgactgcag

SEQ ID NO: 245056 - DNA, 100 bp, Homo sapiens
gagagcgcggggtccggacagccgcgcgctgagggtctcggggcgggcgccgcgggacctctccgggccatggagctgagctcaatgtgcagcaatggat

SEQ ID NO: 245057 - DNA, 100 bp, Homo sapiens
atattctcaatctccactgacaaagagaccagagaaggaatcctttctttaaagaaggctgtgctcatggtacatgacacggttgcccagaagaattttg

SEQ ID NO: 245058 - DNA, 82 bp, Homo sapiens
tgacctggggaacctgctcaaagccctgggtcgcttggaagaagccaagaggctgtggccctgagaaagatcacgtctacct

SEQ ID NO: 245059 - DNA, 90 bp, Homo sapiens
ttctttccaggataaaatactctaagtgacaaatgttgagtacattatcagactaagaaaaatggctttgtcagcccaacagatacccag

SEQ ID NO: 245060 - DNA, 100 bp, Homo sapiens
caggcgcttccgagcctcacctttattctctcagcacactgcaggtgatttgaagatattaaagctagaaattggaactagaaaatcaaaagaattcaag

SEQ ID NO: 245061 - DNA, 108 bp, Homo sapiens
gcggcagaagccgagttcaacatcctcctggccaccgactcctacaaggtacggacattgctgcaggagaagaggttgccatcaagcttgaatgtgtcaaaaccaaac

SEQ ID NO: 245062 - DNA, 100 bp, Homo sapiens
gcggggttcctgcgaggcccagactggtccatccccatcttggactttgtggaacagaaatgtgaaggttggatggcaagcatgtggtgtttggcaaagt

SEQ ID NO: 245063 - DNA, 100 bp, Homo sapiens
ggaacagggacagcacctcatcccctggatgggggaccacaagatcctcatcgacaggctcagcagggagctgctggatgagaaagggcctgaagtcttg

SEQ ID NO: 245064 - DNA, 100 bp, Homo sapiens
gatttcttttgtcaattaggtcacttcaacctcttattggaagattatccaaaaggcatttatgtttgaatcatctttaagtctggcggtcacaaagtgg

SEQ ID NO: 245065 - DNA, 73 bp, Homo sapiens
gagagcgtgaccgagagcgcgaatatcgtcatcgttagaaggttcccgatgagcacttctccaccctgctggc

SEQ ID NO: 245066 - DNA, 98 bp, Homo sapiens
tggacctcatgcaccatattcacatgttgagtaattccctcctggtcccagacagtctaagaggcacagataaacgcagaaatggacctgaattttcc

SEQ ID NO: 245067 - DNA, 100 bp, Homo sapiens
tctcggtcaaacctttttgaagatgcaacgagtgcacttgacatgaagagtatttctggagaagaatcatcccatggagtgattatgacaaggcttaccg

SEQ ID NO: 245068 - DNA, 75 bp, Homo sapiens
gggagagattgttcctgtggagcaaagagctgcatcatgaattcaggagcatcgctgaacttcctgtactgatgc

SEQ ID NO: 245069 - DNA, 98 bp, Homo sapiens
ggtggtgctggtggcggcggcgctttcggcgcgggcccgggccccgagcgcccgaacaggtttggtgcacctcgatttggaggaagtagggcagggcc

SEQ ID NO: 245070 - DNA, 74 bp, Homo sapiens
ccgtcctgcaagatcttatgcggctaggtgcctgggaagtaacagcaagagcttggttctacagccattgggat

SEQ ID NO: 245071 - DNA, 101 bp, Homo sapiens
agttccccagtaagagtgcactgaccaacatctacaagctctttcaccatgcctggatcacttcctttgaatgcagaagcttgctggccaaaagatgtggg

SEQ ID NO: 245072 - DNA, 87 bp, Homo sapiens
gtaccagaattcggccatgagccgctacatactcatcatggggctcctgtacaaggtgagaagccctaccactgcaactgggacggc

SEQ ID NO: 245073 - DNA, 83 bp, Homo sapiens
tggggtagcggcggcgggagtcctggcgctctgcaggctcgggacgtgtacgaggaggccatccggacagtgatgaccgtgcg

SEQ ID NO: 245074 - DNA, 83 bp, Homo sapiens
gtcagggatcgtgaaggacgccagcatcatacaccggctgttcgaggccttgactgtagctggtactcctggttaatcaacag

SEQ ID NO: 245075 - DNA, 83 bp, Homo sapiens
aacagaagttagtatccttgctcgacaaagtgatcagagcgccagtggaacatgtggatcccaggatttggctctgaagaaat

SEQ ID NO: 245076 - DNA, 100 bp, Homo sapiens
ggagtaagaggggttggctgtgaatatgctgctgcagcttcagcaatggtgtcttcatccgccccgtcggtgtacagcgtgcaagccctctctctcctgg

SEQ ID NO: 245077 - DNA, 83 bp, Homo sapiens
gctcctaaacctgctggtgacacgactcagacagaagggcgtgatggtgggcatgggtcagaaggattcctatgtgggcgacg

SEQ ID NO: 245078 - DNA, 90 bp, Homo sapiens
ctttaagaaaggaatgaacatgtatttaaccaagttccaacaaaagaatgctgccgcagattgtgaataagtggaatacagctctcattg

SEQ ID NO: 245079 - DNA, 77 bp, Homo sapiens
cggacatcactttagaccctccacctaattgcaggtttgtttgtaaaaacaatggtgtgttgtttgaaaaccagctg

SEQ ID NO: 245080 - DNA, 98 bp, Homo sapiens
aatatacttcatagattcatcaaaaagaagactgcataaactgggcgtgtcaaaggtcacccaagtggatttcctgccaagggaagtagtgtcctact

SEQ ID NO: 245081 - DNA, 82 bp, Homo sapiens
gccaatggggagcagaaggactcggacacagacctcctgccccccgaggtctgcagtctcctgaacccagcagccatctacg

SEQ ID NO: 245082 - DNA, 101 bp, Homo sapiens
tctagaaggacaaatgaacttcaatgcagattctagccaacataaaggtggagttggcatgaacttaacagcagcagatactgtgatttttgttgacagtg

SEQ ID NO: 245083 - DNA, 73 bp, Homo sapiens
aaaggctatgacaacctctttgctatggcccggaggctgtttgatgtcctgcacgagcccttcttgaaagtac

SEQ ID NO: 245084 - DNA, 90 bp, Homo sapiens
tgtagatgaatatgatcccaccatagaggctacaacatgattcattttaccccattgcagactcttggactatctaggtcatgctactcc

SEQ ID NO: 245085 - DNA, 50 bp, Homo sapiens
cgggaggctgacctagtgatatttcaggcctccaagactgcagagaatgc

SEQ ID NO: 245086 - DNA, 75 bp, Homo sapiens
ttgcccacttcctggtggttcaggaaacgcaactcagcagcaaggtctgtgacagcaaatcctacaagagcaagg

SEQ ID NO: 245087 - DNA, 75 bp, Homo sapiens
ctgcgagaacaactacatacaggtgcactacatcctccaggaggtggtgatgggtgggatggtgttggaaacaaa

SEQ ID NO: 245088 - DNA, 75 bp, Homo sapiens
cgctctgggatcccggccaccagcaattgtccgagtgaagacatttccacctggacacctgaccatgtgcctgcc

SEQ ID NO: 245089 - DNA, 98 bp, Homo sapiens
cgccatggctgccccgtgtttgctgcggcaaggacgagccggggcgctgaaggttggaagatctgctctgagttcgtgggaagctattgtgggcctct

SEQ ID NO: 245090 - DNA, 83 bp, Homo sapiens
atcgtgaggttcagctgatgaagcttctgaaccatccacacatcataaagctttaccagccgtgctatcaagactaatcagga

SEQ ID NO: 245091 - DNA, 100 bp, Homo sapiens
ttgtttctgttattgacatgcccccgaaagtgttaagcacatggtggagaggcaagcacggattccaggtttgaagtttgaggaaattcaaaaaagattt

SEQ ID NO: 245092 - DNA, 100 bp, Homo sapiens
gagggtttcaatgaggtgctgaaacagtgccgacttgcaaacggtaaaatatacccaggaccataaacagatgaaaggtagaccaagtctgattttagat

SEQ ID NO: 245093 - DNA, 107 bp, Homo sapiens
cttcacctgcagaagcgtgtcgttctgcaccagcgccttgatcgagtacttgagacaatgcagatcttcgtgaagactctgactggtaagaccatcaccctcgaggt

SEQ ID NO: 245094 - DNA, 97 bp, Homo sapiens
gcccaaggcgtgaggcgccgcccgggtgtccccgcggcgcaggaggcggtggagcgcagagcgggcgagcgcggtgtcatggagaaactccagctgg

SEQ ID NO: 245095 - DNA, 83 bp, Homo sapiens
ggccaagggacaatggtcaccgtctcttcaggatgaggaagtacagacaattggtcagatagaactgtgcctcactaagcaag

SEQ ID NO: 245096 - DNA, 101 bp, Homo sapiens
attctgaagagggtctggaggagccttctcaagaacagaggtcgccactgggacactgtgaaccaggagtgagtcggagctgccgcgctgcccaggccatg

SEQ ID NO: 245097 - DNA, 98 bp, Homo sapiens
ccagagcgtggagcgctgcgcggcgcggcggccgggccctcgagacggggacgatgccatggacaatattaccaggcagaaccaattctacgataccc

SEQ ID NO: 245098 - DNA, 76 bp, Homo sapiens
gatttccataaattgaagcaaaactttaagaagcttcatgaagctcattttaaggaaatggagtccattgatcaat

SEQ ID NO: 245099 - DNA, 74 bp, Homo sapiens
gggagcccagaagctgccaccgaaccaaggtggcgggacaggcttcattgggacagccctaacccagctgctga

SEQ ID NO: 245100 - DNA, 83 bp, Homo sapiens
ggatgaaaatgaagacgacattcagtttgtcagttgggcgacagatgcgaaagaaacgagttccagtgccaagacgggaaatg

SEQ ID NO: 245101 - DNA, 99 bp, Homo sapiens
ctgcttcacgccggacagcctggcggccctcgtggggcacgctgcagaagtttgtggacgacaccttccaggccattctcagcgtgaaccggcccatcc

SEQ ID NO: 245102 - DNA, 82 bp, Homo sapiens
gtggagctgttcgaggactcgcgggtgtgcagatattgcaggagaagaggctgggtccgatccacactcattatgtctgttc

SEQ ID NO: 245103 - DNA, 101 bp, Homo sapiens
tgaagatgaaaaatatgaagaggttatggctgtccttgggagttttccatatgtgaccatggatataaaatcacaggggccatcactgtgcatgtccccat

SEQ ID NO: 245104 - DNA, 97 bp, Homo sapiens
caccaacctcctgtatctggagctgggagacaagcccgcgcccaacaccttctatgtaggtgagcacctgcggatctgtccccagggctacacctgc

SEQ ID NO: 245105 - DNA, 89 bp, Homo sapiens
tggtggttgaaaactgtaattgaacaggcccggtacaagcagagccttgacccaactgtggatgaagtcaagaagctctgcacgtcctt

SEQ ID NO: 245106 - DNA, 75 bp, Homo sapiens
gtgccggagcagctcgtgcagctaagcagccaactgcagaaacgtcaggtgtctggttgagaagggagatgtggc

SEQ ID NO: 245107 - DNA, 100 bp, Homo sapiens
gacgaggctgcggtgtctgctgctattctccgagcttcgcaatggcgtgagattcaacattttggggtgaaaatcagcatagttgaacctggctacttca

SEQ ID NO: 245108 - DNA, 98 bp, Homo sapiens
gccctcccgcccccaccagccggccggaatcactcggtttcccttgggggctttgaaataacaccaccagtggtcttaaggttgaagtgtggttcagg

SEQ ID NO: 245109 - DNA, 115 bp, Homo sapiens
acttacagatgggacttcacctatagatcatatggaacttgctaaggaagaaaagtgtgaatttctgccattcctgtccccacggaaggttatagtaaaaggtgggagaattgtt

SEQ ID NO: 245110 - DNA, 83 bp, Homo sapiens
ggtgcctctctccagcagactgcgggtgaaaagttcggaccctttgctggagagaagagaatgcctgaagacttggatgaaaa

SEQ ID NO: 245111 - DNA, 100 bp, Homo sapiens
ttaagacggagttcctagtgcaaatgcaaggaggatttgacagctaaggatattgaagaaattattgatgagctcaaggctggcaaaatcccaaaaccag

SEQ ID NO: 245112 - DNA, 97 bp, Homo sapiens
gtctagctggaggattgtaaatgcaccaatcagcatgctgtgtctagctcaaggtgtgcctacaggggttgtggaaggagacgctgcccccggtcta

SEQ ID NO: 245113 - DNA, 51 bp, Homo sapiens
ggaactggtgaacgcaggatgcgaccaggggctggcaaggtttaattgctt

SEQ ID NO: 245114 - DNA, 75 bp, Homo sapiens
gagaagagcagagcggagggagccccagacacgaaggatatggccctgaagccacatgagcggaaggagaagtgg

SEQ ID NO: 245115 - DNA, 75 bp, Homo sapiens
gcgggacctgacagccgggtcagagaacccagcgggtgccgcttctccacccgaggcttccacctccaacgagcc

SEQ ID NO: 245116 - DNA, 75 bp, Homo sapiens
gattctccagaatttctcctcataaaaaagcaacatggccaatctttcctaagctgctcagcttacaagaaaagg

SEQ ID NO: 245117 - DNA, 83 bp, Homo sapiens
gtggtggcttccgtttgttggtggaggaggtggcaggcctcggcgattctgaaagtcaagaagacatcatccggaatattgcc

SEQ ID NO: 245118 - DNA, 95 bp, Homo sapiens
ggaggagtcagtcagaggggcgagcaggagcgattccgtcgccaaacagtttggtgccctggttgtcagatgttggaaagcagtaggacggaaca

SEQ ID NO: 245119 - DNA, 82 bp, Homo sapiens
gtctggagtttatctggagtgaggtggccggttcttggtgggatctgagcagcctttgaagtaaattttatggatgatgtag

SEQ ID NO: 245120 - DNA, 75 bp, Homo sapiens
cattatttatgtcatcaagaagaatgacgatgtgaactcttatgggcacccacaagctccccacctctaccctgg

SEQ ID NO: 245121 - DNA, 74 bp, Homo sapiens
gtgtttggaaccatggttggtggcatccttatccccaacgattggaaccaaccagatggctgtgtgtgccaaag

SEQ ID NO: 245122 - DNA, 96 bp, Homo sapiens
agtgactccttcggagcccctccacaagttccatctaggcctacgagggccccgcccagtgtcccaagggggaaactcggccgatatcctccttgg

SEQ ID NO: 245123 - DNA, 80 bp, Homo sapiens
caaagtccctgcccccaaagaacaatgcagatcttcgtgaagactctgactggtaagaccatcaccctcgaggttgagcc

SEQ ID NO: 245124 - DNA, 98 bp, Homo sapiens
agaccttcaatatcaaaaatgactttactgaagaggaggaagcccagcagaagatggctgtgccacccacgtatgccgatcttggcaaatctgccagg

SEQ ID NO: 245125 - DNA, 83 bp, Homo sapiens
ccagacctacggagggagctggaaattcctgacgttcattgatctgccagagactgctgctactttgaaacgtacgatagagg

SEQ ID NO: 245126 - DNA, 100 bp, Homo sapiens
cttgccggaagtttattaaggccagggaacaacctatcttcagcactcgagctcatgtcttccaaattgacccaaacacaaagaagaactgggtacccac

SEQ ID NO: 245127 - DNA, 75 bp, Homo sapiens
tttatcgtagaccatatgaaaagggtcgcctaatcatcgaatttaaggatgttcaagatccttcagtatttgtaa

SEQ ID NO: 245128 - DNA, 76 bp, Homo sapiens
tggcagatgtctacaaattacttgttcagctgaaagtttggctgtaaacctagctgaagacacagctcatcccaaa

SEQ ID NO: 245129 - DNA, 100 bp, Homo sapiens
tcggggggccctggctcttctcctcctttgctttttcacatctgccagtcaggatctgcagggtcctggagtacaatgccattggaggcaagtataaccg

SEQ ID NO: 245130 - DNA, 97 bp, Homo sapiens
cacctgtagttcagccaagtccaaggtctctaattaacagaagatggcaaagcccagccacagcagctatgtccttcagcagctaaacaaccaaaga

SEQ ID NO: 245131 - DNA, 82 bp, Homo sapiens
gacggagcgcggcaggacttggctggacggcgcggccacggagaagggcgcgcgggctgacgcacgaggcacacaggaagga

SEQ ID NO: 245132 - DNA, 98 bp, Homo sapiens
ccacctacagaaacaaaatgtcaacaaattgatgggagctggagtcagatggcagcactatggaggactattcacaggaggactggggaaaccacagt

SEQ ID NO: 245133 - DNA, 100 bp, Homo sapiens
gacaattcaccatagttttctttaaggaaactaaatatattttgccaactttggaaaaagaattattcttggcagagcacagtgaccttgaagaaggtgg

SEQ ID NO: 245134 - DNA, 80 bp, Homo sapiens
ccagcaagagattaaagatgcagtacgccacggggccgctgctcaagttccagatttgtcgtgagatggagaataaagaa

SEQ ID NO: 245135 - DNA, 90 bp, Homo sapiens
gcagaaccccaggactgcgcccccgggagcgggcgcccagagtgccggtggtggtgtgcacattgagccccggtatagacagttccccca

SEQ ID NO: 245136 - DNA, 75 bp, Homo sapiens
gtctgcatgtggctgcaggacctctgtcagagaatgaaacactcatcgcatggttatggaaacgtggtggagttg

SEQ ID NO: 245137 - DNA, 75 bp, Homo sapiens
agggaagaactgttcttgactttcagtttttcgagcgggtttcaaggattatcgagattgcagcctgtcactcca

SEQ ID NO: 245138 - DNA, 82 bp, Homo sapiens
cttgggggactatgtggtggacttggacacgtcccagctctctctgggcatctggaaagagacccactgctaaggagttatt

SEQ ID NO: 245139 - DNA, 98 bp, Homo sapiens
cttttttgggatgatgtctgtggatcccagacttcctagtcctttcgatatccctcagtgagggtcgctgtctgcccattgatagaggccagattgtc

SEQ ID NO: 245140 - DNA, 83 bp, Homo sapiens
ggaggacctggaggtggacggtcagaaagttgaagttccacagccactgagttgcttggtcgggaggaacctgccatgtccat

SEQ ID NO: 245141 - DNA, 98 bp, Homo sapiens
ccaaagcctcggcgctcacctaagccgcagggagatacacccaactgggaggatcattttacttctccagatgaatatgatgaccctactgtgctcta

SEQ ID NO: 245142 - DNA, 100 bp, Homo sapiens
ggacatggagtatgaaagacggtttctgaattagcaactgtgaaacgtcctcaggagagaagctacatgctgcagaggtggcaagaagatggtggtgtta

SEQ ID NO: 245143 - DNA, 129 bp, Homo sapiens
gttaaactcctgctctgtttactgtggattggatattctcaaggaaccacacatgtattaagatttgtgtctttgcaagatataacaatgaggaaagctttccgaagttctacaattcaagaccagcag

SEQ ID NO: 245144 - DNA, 75 bp, Homo sapiens
aacagctacaggatgttcgagagctggtaaccatgtctgagtctggacacagtcagcctggactctatgggatag

SEQ ID NO: 245145 - DNA, 98 bp, Homo sapiens
accccagttcctccgccaagcgcggccgccgcccccgcctcagaaaaatggctacaaacttcctagcacatgagaagatctggttcgacaagttcaaa

SEQ ID NO: 245146 - DNA, 90 bp, Homo sapiens
agcttggttaacttgggagaaagtttcatctgtggatggagtattggttttgcacactagggaccaagaagccctcggggacactgctga

SEQ ID NO: 245147 - DNA, 100 bp, Homo sapiens
ttttttcttccagaatctcagcagctgggagacggtctggaaaatcccgaagcagaagcccgtattcatctaggcattcaagatctcgtagcaggcacag

SEQ ID NO: 245148 - DNA, 83 bp, Homo sapiens
gaagattgtcagcaaaggaagagatgggaactgtggctgcaccatctgtcttcatcttcccgccatctgatgagcagttgaaa

SEQ ID NO: 245149 - DNA, 98 bp, Homo sapiens
gacggagcacaccgggcgcccgaatccgccgggtcccactcacgcccgccggccgccgctgatcactggagattccatcgttagtgctgaggcagtat

SEQ ID NO: 245150 - DNA, 82 bp, Homo sapiens
ccgggaggaaggaacgaggcaaggagctaaagcagcgtgcgttcagccctggggcctcgtgggctgtgcggctatcctggag

SEQ ID NO: 245151 - DNA, 75 bp, Homo sapiens
tgagatggtcccagaggcctggaggagcggactgtgaccaaagacttgaccactcaaagtccagctccccagaac

SEQ ID NO: 245152 - DNA, 51 bp, Homo sapiens
gagctgcggaacaggacgccctctgatatgctgtcaagtgtaagctgaatg

SEQ ID NO: 245153 - DNA, 101 bp, Homo sapiens
accatttatgtatttctctaccatgaaaaatgtaccggctcacgctgcgcacaagtaaggaagccgtttctcagagattatgtgaattgctctcagcgcag

SEQ ID NO: 245154 - DNA, 100 bp, Homo sapiens
ttaagttcccaggagggactccaggtcgatgggaaaagattgcccacgaattgggtcgatctgtgacagataaatttccatgcagtatcggcatgatgga

SEQ ID NO: 245155 - DNA, 75 bp, Homo sapiens
tgatcctgtttggtggcttccatgaaagtacacgttctgggaagtcatcagtgatgagcatggcatcgaccccag

SEQ ID NO: 245156 - DNA, 135 bp, Homo sapiens
ttgtggtcctcactttcacagccagatgaaaatggacgttttgacaatggctcacagattcctggagatgtctgctttgtgtccctggtgatgttggaacattaatgatggaacatggccaaacttcagtcatga

SEQ ID NO: 245157 - DNA, 154 bp, Homo sapiens
cagacgctggccgtccaaaatccaccaaagaaagtgacctctgagaaagtgagccagaaacatgctgagcctttgacagaaattcgagctcaactggtagaacaacaaaaatgcctggagcagcaaacggagatgcgagttcagcttctccagg

SEQ ID NO: 245158 - DNA, 75 bp, Homo sapiens
cgatagaaaatgtaaaggccaagatccaggataaggaaggaagagaagaaaccaccccctccggtcccaaagaag

SEQ ID NO: 245159 - DNA, 143 bp, Homo sapiens
ctttattttgactcacgttcttggagttgctggtgttctatactggaagaggcatgccagaggtagagcagggacaatgactcattcttcccaggacactggttcttgtggcattcaggaagatggaaagctttatgtggtgg

SEQ ID NO: 245160 - DNA, 98 bp, Homo sapiens
tgctgttgatgctggctttgttcccaatgacatgcaagttggacagacgggaaaaatagtagcaccaatttcgctccctccattgtctgctctatcca

SEQ ID NO: 245161 - DNA, 97 bp, Homo sapiens
cggcagaacattcctgcttccgagttgccagaaggtagaagatagcaccatgccgattcgtcgaactgtgaattctacccgggaaactcctcccaaa

SEQ ID NO: 245162 - DNA, 82 bp, Homo sapiens
cgccgcgtccttggctggcgttgtggacgaatgtggaacctcgctctgtggctgtgttcccttggcactccttagtcccctt

SEQ ID NO: 245163 - DNA, 83 bp, Homo sapiens
tgatcatcagtatttgcctcctgtgtcccaaccggcctgagtcaagcagcaatgaatgtggatcacgaggttaacctcttagt

SEQ ID NO: 245164 - DNA, 75 bp, Homo sapiens
gcccggcagcggcgacatcctcgagtccaggatctcccattaaccagtcataatgaagtaagaacaagaagatgg

SEQ ID NO: 245165 - DNA, 50 bp, Homo sapiens
atttctacagagactccacattcagaactcatctaaagccgcccaagccc

SEQ ID NO: 245166 - DNA, 75 bp, Homo sapiens
tggagaccctcctcctccttacgaaccgcacttttgggaatacctgctactgcaattcagttcttcaagcacttt

SEQ ID NO: 245167 - DNA, 82 bp, Homo sapiens
agctgcacactcttggggctctacctctttttcaaaacaatgcagatcttcgtgaagactctgactggtaagaccatcaccc

SEQ ID NO: 245168 - DNA, 72 bp, Homo sapiens
gacagtttggaaaatttggcagatggtttctacgataaagacagttcagggtggagttctagcaaagataag

SEQ ID NO: 245169 - DNA, 100 bp, Homo sapiens
gtgctccagggggacccaagagcagtttccacccagccccaatcccagtctggcaccagcgatcagagacgatctgccgaccctctgggagaaaatccag

SEQ ID NO: 245170 - DNA, 75 bp, Homo sapiens
ttctctgaacccgactgtccctcttgtcagatggacaatcggagcaagctccggaacatcgtggagctgcgcctg

SEQ ID NO: 245171 - DNA, 100 bp, Homo sapiens
aaacttgacactcaccctgaccggcccctcctcaagtgtctggctgaaagatgccacccagggaagggaactcgggctagctaaggaggccattcttgat

SEQ ID NO: 245172 - DNA, 83 bp, Homo sapiens
agctgtgctcgcgctactctctctttctggcctggaggctatccagcctctggcaggctgccctgagcacgctcaaccccaac

SEQ ID NO: 245173 - DNA, 83 bp, Homo sapiens
cgtcatgttcttcgcgccctgtcaggatggctaaaggtgaccccaagaaaccaaagggcaagatgtccgcttatgccttcttt

SEQ ID NO: 245174 - DNA, 55 bp, Homo sapiens
tgatcaccagccaggagtacgccgtcaagggtgtacagcaagctgtgattcctgg

SEQ ID NO: 245175 - DNA, 74 bp, Homo sapiens
tcgatcaagatcaagatctcattctagaaagaagcgatacaggtaaatgtctgctctaagaagcagacaaccgg

SEQ ID NO: 245176 - DNA, 75 bp, Homo sapiens
cttacgtctgcggaagtgcagctgcctcagttcttagcgcagcaagagtgagccatggagctacgtgtggggaac

SEQ ID NO: 245177 - DNA, 101 bp, Homo sapiens
gtccaaagcagtcgtaagaagaggtcccaatcccccactctttccgccctaatggaggtctccagtttcgaaggacagaataacgggctcccagattcaca

SEQ ID NO: 245178 - DNA, 127 bp, Homo sapiens
cgatgacatccctttccgagtcaactggcccggcaccgagttctctctgggtgccttgtactgtctccttggaaatcacagtggtgtgtgcttggcaaaccttcatgattgggactgtattgtacag

SEQ ID NO: 245179 - DNA, 152 bp, Homo sapiens
ccaagaagctgccacgggctgtcagagtcaaggcttctgggacttccttcactccatgatggcctgagagaaggtgataaaagaagccatggttgaaagcattgaatatagaagacagaatccatctcgttgctctgtttcccttagtaatg

SEQ ID NO: 245180 - DNA, 50 bp, Homo sapiens
cggaaacaaagttattttgctcgtatctacatgaaaatgggattgtccat

SEQ ID NO: 245181 - DNA, 95 bp, Homo sapiens
atctgaaattgatcagtgataaaattggatcacttggattagtaattcgccaaaatgacgaacacaaagggaaagaggagaggcacccgatatat

SEQ ID NO: 245182 - DNA, 83 bp, Homo sapiens
tcagttggaagcagccgatccagcctgcggagcctgtggggcaggcgtccgacctccgatcatgaacgggcccctgcacccgc

SEQ ID NO: 245183 - DNA, 87 bp, Homo sapiens
ccttattttttctcatggatgttcttcttcgagtatttgtagaaggagcctatttgctgcaaaactttaatgaagagggaacaactg

SEQ ID NO: 245184 - DNA, 74 bp, Homo sapiens
tcggctggtgcttggcggcagggacgatctccatgatgcgttatctgggtctggaaacccaaaccctcaaggat

SEQ ID NO: 245185 - DNA, 100 bp, Homo sapiens
ggatcttctgccgcaccaggctcatcctgtccatcgtgtgcctgatgatcacgcagctggctggcttcagtggaccacttatgtccctgatgccaaaaat

SEQ ID NO: 245186 - DNA, 90 bp, Homo sapiens
tcacggcggccgcgctcaacggcctcttctggttctgtcaaaggaagagccctggggctgtgcgggcgctgcttccagaggagaccccgg

SEQ ID NO: 245187 - DNA, 100 bp, Homo sapiens
cagccatcttggaagcataagctctctcaagcacctcttttgccttctttactaaaatgtctcaaggatgttgttcagcagaacaatactctaatagaag

SEQ ID NO: 245188 - DNA, 96 bp, Homo sapiens
ctgaaacatacggagattgacaatcaatgggccatcttggacgattttggtttcagtaacctcttcactcctgggcagctgctgaagacctggtgt

SEQ ID NO: 245189 - DNA, 100 bp, Homo sapiens
ccacacccctgcagattgagaggtctcggcgcggaagatggccggcggcgtggacggccccatcgggatcccgttccccgaccacagcagcgacatcctg

SEQ ID NO: 245190 - DNA, 100 bp, Homo sapiens
cggcaccctgatcatgaaggacagcggtcctgagtttgtgcgcaaacatatcttcaacaagcatgcagagaaaattgaggaagtgaaaaaggaagtcgcg

SEQ ID NO: 245191 - DNA, 88 bp, Homo sapiens
catcttccagcagtactccctcctccaaatccaaagaacttagccttattccagactccatcatttctcgtggtgttcaggtgctccc

SEQ ID NO: 245192 - DNA, 75 bp, Homo sapiens
gagatgcagatgcttcaaaagctgttgaaattgttacttcaacttctgctggcaatttgtgtatggtgattggtg

SEQ ID NO: 245193 - DNA, 78 bp, Homo sapiens
aagaaagctgcagaatggaaaatcaagatagatattatagcagtaatcactggccagcatcgaaatggtgtaatttca

SEQ ID NO: 245194 - DNA, 75 bp, Homo sapiens
ctgggcacagcatgagatccaaaggcagggcaaggaaactggccacaatgcatctgggggaggtgttgtagccat

SEQ ID NO: 245195 - DNA, 100 bp, Homo sapiens
cttgacatctataagaagttcctaactaggatgacaagaatctcagagttcctcaaagttgcagaggttcattgtagggaaggaagaaattcccacacat

SEQ ID NO: 245196 - DNA, 100 bp, Homo sapiens
ccccctcggaacctctgcatcaaagaaggagccaccgccaagttcgaagggcgggaatcaaacttgacgtatggagccaagaaagcccttggaaaaactg

SEQ ID NO: 245197 - DNA, 82 bp, Homo sapiens
tcagcgtcgctggcagccgctgtacttgggtcctgctgcgtgtccgcatgctgtactacctaagacaagaagtgataggaga

SEQ ID NO: 245198 - DNA, 75 bp, Homo sapiens
atttgggataataaaacacctgtttgtgacaggctgttgataatcaggtgtatgtggccacagcctctcctgccc

SEQ ID NO: 245199 - DNA, 94 bp, Homo sapiens
gccttttccgttgccggtgccggcctagcgtcctggaattacttcaatcaagtctgggaggggctgaacgtggtgaagacaggccgagtgatgc

SEQ ID NO: 245200 - DNA, 100 bp, Homo sapiens
ctcgcatcttgcccgaagccgggcggaggagagctcaagctaagatttggtgcttccagatgtgagttatcaggtggaatccagtgaggaggatcagtct

SEQ ID NO: 245201 - DNA, 83 bp, Homo sapiens
gggcaaggaaggcagcatggagaatgagattgctgtcctgcacaagaagaacctctctatccagggcctccgctggtggctac

SEQ ID NO: 245202 - DNA, 100 bp, Homo sapiens
ggcagaggctgcggagccccaggaggcttgcctgggaccagtggcagggaccccggaacctgaaggtgctgacaaagatgacctgctgctgttgagtgag

SEQ ID NO: 245203 - DNA, 75 bp, Homo sapiens
gcggggaaccttggggagaacacgggacaccgcggaagccgggaaatggaatcgggcgcctgattgctgagtgtc

SEQ ID NO: 245204 - DNA, 74 bp, Homo sapiens
aggaataatatttatggagcatatattatggaacacaatatttagcttcctgtggtatactgatgagcagaact

SEQ ID NO: 245205 - DNA, 100 bp, Homo sapiens
cttattttttctcatggatgttcttcttcgagtatttgtagaaggtttctacagcagtataatcactacaaatccaatgtggagattttcaaattgcaac

SEQ ID NO: 245206 - DNA, 96 bp, Homo sapiens
ttcccctcggcactaggcagcggaggagcccgaccgacccgaactctaagaaggagctgatgtggaggagcagctgagacagttcaagatgacgac

SEQ ID NO: 245207 - DNA, 100 bp, Homo sapiens
tcctccctgctcctgcccccaggcgagagaaaacgaatgaagagttgcaaggacctgatcccaaccttgaagaaagtcctaaaagaaaaaatattacata

SEQ ID NO: 245208 - DNA, 100 bp, Homo sapiens
agctttgtgatgtaaaagtggctcaccatggggagaatcctgtggtacgagtggctgctttacagaatctggtgaagataatgtccttatattatcagta

SEQ ID NO: 245209 - DNA, 100 bp, Homo sapiens
tatacacgtttaatttttctaaagagtcttgttatttcttctttgagaaaaacctgaaagatgtctcatgcatgcaagatatgggaaatactaaagcaag

SEQ ID NO: 245210 - DNA, 96 bp, Homo sapiens
ggccgcgcttagaagccgcccagtgccctgagcgtctccatggcctgcctgagcccctcgcagctccagaagggcagcatctcatcacggcagttg

SEQ ID NO: 245211 - DNA, 98 bp, Homo sapiens
gaagaccacaaggagcacggacctcagtaccagtacaggatcatcttccggacccgcgaggtctatcagccacagtctctgcaagtttccaagagcag

SEQ ID NO: 245212 - DNA, 98 bp, Homo sapiens
tcctgcccatggcggtggccgagctgtacacgcaggctttgaacttggcctactccagcatttacggcagctaccggaacttcgtgggacctccacac

SEQ ID NO: 245213 - DNA, 76 bp, Homo sapiens
ctccaagtcagaggcagcagaagccaagtgcttgatgctagctgaaggcatgtgggcacattccatgacagtacag

SEQ ID NO: 245214 - DNA, 109 bp, Homo sapiens
ctggagcctcagttggaagcagccgatccagcctgcggagcctgtggggcagaggccacaagaggaagctgaatgaagaggacgccgccagcgagtccagcagggagtc

SEQ ID NO: 245215 - DNA, 96 bp, Homo sapiens
cacccttggccacctccccaggtgatgcctgaagctcaagggactgtgtccaccctcagggaggaggtacaggagaactgtgtgcggtggcgaaag

SEQ ID NO: 245216 - DNA, 88 bp, Homo sapiens
gcagggcgggggcgtccccaggagccggacaggaatactcccccagttgcaagaggcgcaggaccgtggaagacttcaacaaattctg

SEQ ID NO: 245217 - DNA, 100 bp, Homo sapiens
gtggacgataattcaaaaacactatcccagggagtgcaagcttagagcgtctggccaagaatcagaggaagtgggtcacaaattggttagtgaagtcata

SEQ ID NO: 245218 - DNA, 100 bp, Homo sapiens
gcaggggtcagtgatggagctgcttcagaaacatgccaagggacaagtgttatttgacaaagtgtgtgaacacctcaatctcttggagaaagactacttt

SEQ ID NO: 245219 - DNA, 101 bp, Homo sapiens
agcagcaagtcccatcggaggacctccctgccctgtataccgagggaacagcaaacagtgacgaatctcagcttctgacaccaggaaagatgagtcagcgc

SEQ ID NO: 245220 - DNA, 50 bp, Homo sapiens
aagaggatgatgtttttggtgaagggttttgactctgggaggagggctgc

SEQ ID NO: 245221 - DNA, 101 bp, Homo sapiens
tacccggcacactgtgagttcctggacatcaagggctgcagcagccgctcttctaaaacattcaaaccaaagaagaatatccctgaaggatctcatcagta

SEQ ID NO: 245222 - DNA, 48 bp, Homo sapiens
agcctccggagtagctgggattacagtctgcagatctccaggggagcc

SEQ ID NO: 245223 - DNA, 100 bp, Homo sapiens
ccagcgcgacgtcctctcgcggccctcagggcacagcccaaggctgtcagcctcccggcccaggaatcctatgaggatggttgtgaggattatcctactc

SEQ ID NO: 245224 - DNA, 87 bp, Homo sapiens
atcaacagacgggagactgaacttgaggttatgaagacagtatggagtttccagaccatagtagacatttgctacagtgtctgagcg

SEQ ID NO: 245225 - DNA, 101 bp, Homo sapiens
tttccaacacagatgtccaagctgccaagactgaacgtcttgctcgagatgtgatgaaggagatgggaggccatcacattgtagccctctgtgtgctcaag

SEQ ID NO: 245226 - DNA, 100 bp, Homo sapiens
caagacgcaggagaaaatcgagacctcaagtaatcattcccaagtaatgaggagtacctgatcaatctgatagactctccaggacacgtggacttttcct

SEQ ID NO: 245227 - DNA, 100 bp, Homo sapiens
attcaccaacaggatattttttgccatggtggattttgatgaaggctctgatgtatttcagatgaatccagactccaaaatgatgcaaatcaacctgact

SEQ ID NO: 245228 - DNA, 100 bp, Homo sapiens
gatcctcccaccacctcagcctcctgagtagctggaaccatcatatgcaccagcacgcctggctaaagtttatgtggccgaggcagacaagtggaattag

SEQ ID NO: 245229 - DNA, 100 bp, Homo sapiens
caggaaaatgggttccatgagaagtgacatcctcctcgaatcaaaaggtcaaaatgcagatcttcgtgaaaacccttaccggcaagaccatcacccttga

SEQ ID NO: 245230 - DNA, 90 bp, Homo sapiens
cggggccgcggcagcgccagtcggggcccttccctctaagcaggccgtgcataaggctgtgctgaccatcgacgagaaagggactgaagc

SEQ ID NO: 245231 - DNA, 100 bp, Homo sapiens
gtaatgaaagaatctaaacagcctgcctcacaactccaaaaacaaaagggagatactccagcttcagcaacaggagctcgaggccatgagcagatatacc

SEQ ID NO: 245232 - DNA, 100 bp, Homo sapiens
atgtatgaaggagttggagttgttgaaaccaagggaagcagctcgagagtgtcgtagaaagaagaaagaatatgtgaaatgtttagaaaacagagtggca

SEQ ID NO: 245233 - DNA, 100 bp, Homo sapiens
gcggggaccgctgtgctctcggttattcagcttctcaaggctggaaaagcgaaggaagtttcctacaatgcactagcctcacacataatctcagaggatg

SEQ ID NO: 245234 - DNA, 101 bp, Homo sapiens
gccagactgacacccataccttttgggcttcagaatgcagtgttttcgaattgccaagaagatgcttttagaagaaattaaagccaatctttcctctgatg

SEQ ID NO: 245235 - DNA, 78 bp, Homo sapiens
tcagcctcccgattagctgggattacagggcctcgattgggtggctctggctgccaggaagattccagccccattccg

SEQ ID NO: 245236 - DNA, 75 bp, Homo sapiens
ttggggatggctataatgggtatggaggaggacctggaggttgctccttgagggcaggacagttcttatggcttt

SEQ ID NO: 245237 - DNA, 75 bp, Homo sapiens
gaaaagttctcaattttgaacaagctatcaaggaatggaagttggatacactttgtgacttgtacgagacactga

SEQ ID NO: 245238 - DNA, 96 bp, Homo sapiens
gcctgcccttgccagtgcctgggccgctgggagccgttattggctgccgttaaggaccgttacgtttcccggtgggccgaattcattttgttttcc

SEQ ID NO: 245239 - DNA, 75 bp, Homo sapiens
ctggatgtcatttggaaaaacactagagacagacggctggcagaggtcctgtaataaagagggatccgaacaagc

SEQ ID NO: 245240 - DNA, 100 bp, Homo sapiens
ctgcgtgcattctccactgccgtctactcggccactccggtcccgacacctagcctgcacaatgcagatcttcgtgaagactctgactggtaagaccatc

SEQ ID NO: 245241 - DNA, 100 bp, Homo sapiens
tggcatttaggattaacagcgacaaactgtgctatacttggtagatcagaaactcaggagtgtcttttctttaatgctaattgggaaaaagacagaacca

SEQ ID NO: 245242 - DNA, 76 bp, Homo sapiens
cggcagcagccccagcctcaaggccagggcgcaaccatgtcgccatttcttcggattggcttgtccaactttgact

SEQ ID NO: 245243 - DNA, 75 bp, Homo sapiens
caccacctaccttcagattcttgaccaaaatgtggcaccccaacatttatgaggaggctgtgacattcaaggatg

SEQ ID NO: 245244 - DNA, 100 bp, Homo sapiens
gttatgctcagctattataggactatggaatggcatgaaaagcatgacaatgaggatactgcttcagcttctgatccaaagttcattagtgcccacctca

SEQ ID NO: 245245 - DNA, 90 bp, Homo sapiens
ctgcctacagaaccgtcccaaaatatggcaaagaaacctattctgaggtccagggagtcggtagtaagggatggcgggacgtcaccacct

SEQ ID NO: 245246 - DNA, 88 bp, Homo sapiens
cataatcctatggtaaatgctggagcaattgttgtgacttcactaataaaggctgctgagcttcgtgcttatctgaaatctaaaggag

SEQ ID NO: 245247 - DNA, 100 bp, Homo sapiens
agactgtgggcgtggagccggcagccgacggcaaaggtgtcgtggtggtcattaagcggagatccggttcacaataaaggtgctaagaaagagaatgtaa

SEQ ID NO: 245248 - DNA, 98 bp, Homo sapiens
cctcccccttctttcgatcagagatcggcggagaccctcgaagtgcgcaaacttgacactcaccctgaccgataaactcatcctgaaagtcgctgttg

SEQ ID NO: 245249 - DNA, 102 bp, Homo sapiens
cccggcccggcagcgacatggaagatgatgaataaggtatttggaggtactgtgcacaaaaaaagtgtcagagaagatggagttttcaacattagtgtggat

SEQ ID NO: 245250 - DNA, 75 bp, Homo sapiens
ttctcagaggaggagttccagaagcatgaagctgactggaaataccggcatgcaggattgatggccttatctgcc

SEQ ID NO: 245251 - DNA, 75 bp, Homo sapiens
cagttggcacacatggttaaggaacaggaggaaaccattcagaggtggtgaagcagtattttccaatttgaagat

SEQ ID NO: 245252 - DNA, 74 bp, Homo sapiens
cgcaacccggtgttcccgcgctttatcaagattatcgaggaattaaggataacctagacgacataaagaggata

SEQ ID NO: 245253 - DNA, 83 bp, Homo sapiens
gaagtctttgggacaaaactgtatttaccttggttcctgattatgtcactgtaataaagcaaccaatggacctttcatctgta

SEQ ID NO: 245254 - DNA, 50 bp, Homo sapiens
cctgacctggtttgaattcctgtcggagactcagtggcctttgaggatgt

SEQ ID NO: 245255 - DNA, 75 bp, Homo sapiens
agaagattaacctggagttaaggaacagatccccggaggaggtgcctgctgtcccagctactcaagagactgaag

SEQ ID NO: 245256 - DNA, 74 bp, Homo sapiens
tcgagcgggtcaagctgctgctgcagggcttccgttacaagatgaggtctgtgtatgctcacttccccatcaac

SEQ ID NO: 245257 - DNA, 101 bp, Homo sapiens
gtcgatgttactactgaaaacatcgagagagttctgtcttgcattcctggacctatgcagggcctgtatatcattgggatcaagaactcgagccattggaa

SEQ ID NO: 245258 - DNA, 100 bp, Homo sapiens
gttcactgctcttcagcctcagcggcagtgttctgtgtgcaggtctttgaagaaactggttttgatatcaaagactatatttgtaaggatgattacattg

SEQ ID NO: 245259 - DNA, 99 bp, Homo sapiens
ccggatttccagccagagctgagcggcgcgggctccagactcgccgtggtcaagttcaccatgagaggtcatgcggaggaatccctttggtgtggacat

SEQ ID NO: 245260 - DNA, 85 bp, Homo sapiens
tgatgtgtctgacgtcatcaggcttgttcaagacacaccggaggcgacggccatggccacaggcgcatattaaatttcctattga

SEQ ID NO: 245261 - DNA, 100 bp, Homo sapiens
ctcgataacacagagaggctggaaaggtcatctcggagactagaggctggataccaaatagcagtggaaaccggaaaagtgaaactgcttctgaaggaac

SEQ ID NO: 245262 - DNA, 74 bp, Homo sapiens
ttttatacactcttagtgctgtccagaaaggcctaaagaatgtatttgacgaagcaatattggctgccctggag

SEQ ID NO: 245263 - DNA, 131 bp, Homo sapiens
atctaagatgaactgtgaccgagtcttcaatgtcttctgcttatatggcaatgtggagaaggtgacaatctccaatagacttgtgtcttcaccttgctgcattgtgaccagcacctacggctggacagcca

SEQ ID NO: 245264 - DNA, 87 bp, Homo sapiens
ttcacggacaacctcagaggacaacgaagtgttcggaagacagtgacccgcccattcatgaaagtctcagcatagaaaatacattgt

SEQ ID NO: 245265 - DNA, 74 bp, Homo sapiens
ccagccatcagttattcagtctccacaagtccaaacagttcaggacctgatgacatttgaagatgtggctgtgg

SEQ ID NO: 245266 - DNA, 80 bp, Homo sapiens
cgctggagctgggtcagtccgccgctcaccccgcggccgcaccttcccgccttctcagcagaaaaatatggctcaggaga

SEQ ID NO: 245267 - DNA, 99 bp, Homo sapiens
gaaggacctgagcctgacgcgggccgcgcggggccaattcctgtccccccagcagcatggcatcgtgtgctgaaccctctgagccctctgccccactgc

SEQ ID NO: 245268 - DNA, 114 bp, Homo sapiens
attcgggccgagatgtctcgctccgtggccttagctgtgctcgcgctactctctctttctggcctggaggctatccagctctgcagatctccaggggagcccaccagcctagtc

SEQ ID NO: 245269 - DNA, 100 bp, Homo sapiens
ggaaaggctctcagtgaaaaagattaaccagaagggctcggagaagccacttgagcagacatttgcaacaatggtgtcttccttgggaagtggaatgatg

SEQ ID NO: 245270 - DNA, 132 bp, Homo sapiens
tgaggcgattccagagagcggcggaaaggataagcctcgacttagaagctaccgagttaccctaagaaagattcgcttcaagctcagcttatcaatatgggtgttattcctaccttagtgaaattactgggc

SEQ ID NO: 245271 - DNA, 100 bp, Homo sapiens
gcatgtcggtggcggggctgaagaagcagttctacaaggcgagccagcctgtgcaggagacatggcggacgcagcatctccgtgctctgtggtaaacgac

SEQ ID NO: 245272 - DNA, 87 bp, Homo sapiens
gtctttttgttcaagataaagtgattttttgcctttgttgattaactggacaaattcaggtatcttgcaatatattcagaactctcc

SEQ ID NO: 245273 - DNA, 100 bp, Homo sapiens
aattccatccaaaaccggcagctgttagccgagcaagggtttcttccagaaaacaagttcaatcacactctggctgagcctattcttcgagatacgggcc

SEQ ID NO: 245274 - DNA, 110 bp, Homo sapiens
tgcagaaggaggtcctgccgtccatgcggaagatcgtcgccacctggatgctggaggtgagaagccctaccactgcaactgggacggctgcggctggaagtttgcgcgct

SEQ ID NO: 245275 - DNA, 71 bp, Homo sapiens
gccttcttcctttgcaaaactgcagttttgacagcagatgaattacttactgagccaaagcaactcccaga

SEQ ID NO: 245276 - DNA, 105 bp, Homo sapiens
ggacgagggggccaaggcttcctccggggtactccaaagattcaggtttactcacgtcatccagcagagaatggaaagtcaaatttcctgaattgctatgtgtct

SEQ ID NO: 245277 - DNA, 98 bp, Homo sapiens
cccaggtcggcgaccgtctggtgctcaaagccatcgtgaacaatgccttcaaacatagcttctaaccgaaaatcttcagttggcgtaaaaaagaatag

SEQ ID NO: 245278 - DNA, 74 bp, Homo sapiens
tgggaccaggaccgcttcgagaaggtaccgggaagccagtgttgaagtgatggagataatgtctcgttttgctg

SEQ ID NO: 245279 - DNA, 74 bp, Homo sapiens
cttctcaaaaagcactgcacagaggaggaggcagcagaaccccatgcatccgtgtcattctggaccttactccc

SEQ ID NO: 245280 - DNA, 101 bp, Homo sapiens
ctcagcaacgccgtgcagctgcccatcgaccagaatcttgcctcctggaatccttcaaatcctgaatgtctcttacttgtggtgaaggaacttgtgcaaca

SEQ ID NO: 245281 - DNA, 75 bp, Homo sapiens
atctgtttttctcagaagagaattccacaaggtattcaaaacctttgaccacatggcccgtcaggatgatgagaa

SEQ ID NO: 245282 - DNA, 73 bp, Homo sapiens
ccagcgcccccaggccgctcccggggctcacgttgggatgaatgggttccggagagcagagtactcaaatacg

SEQ ID NO: 245283 - DNA, 74 bp, Homo sapiens
aagaaacaaagagcaaagaacggcagattactggcttcctgaaggagggctgtgagctcatcaatgaggccctg

SEQ ID NO: 245284 - DNA, 100 bp, Homo sapiens
atggaaatgtctctaaaagtgacaaggagactggctttcacagaggtttgggttgggttcagttttcttcagaagaaggacttcggaatgcactacaaca

SEQ ID NO: 245285 - DNA, 96 bp, Homo sapiens
gcggctgcggtcgggccaaggttccgcgccgggcgtggacggtgtggggcggtcccggccccgcagactgggccagtgccattcgcgtcgcagctc

SEQ ID NO: 245286 - DNA, 72 bp, Homo sapiens
tcaatggtatatttggacacaagccttctccaggattattacagtggtggctactatcctgcacaggacccg

SEQ ID NO: 245287 - DNA, 51 bp, Homo sapiens
tgcagaagtggatcatagacctggccatgtttggcaccaactggcccgtgt

SEQ ID NO: 245288 - DNA, 74 bp, Homo sapiens
aaaatggccacacgcgtacccccgtagcggaaaaacgttgagaacttgttgcttagtaaccaagggaccattaa

SEQ ID NO: 245289 - DNA, 74 bp, Homo sapiens
attctaacagatttccccaaattggatcttctcaataggtttggcatggacaagatctatgaaggccaagtgga

SEQ ID NO: 245290 - DNA, 88 bp, Homo sapiens
aacttcacaacatgatagttgatctggataatgtggtcaaaaaggtttatgtagaagtttctaaaatgaaaatcaatgttactgaaat

SEQ ID NO: 245291 - DNA, 95 bp, Homo sapiens
gagcacggcaagcgcctggagcggctggccatcggggttcggtccgagcccggtgggaggctcccggagcgcagcctgggcccagcccaccccgc

SEQ ID NO: 245292 - DNA, 74 bp, Homo sapiens
accgattttctgcagaagatgaagctttgagtaacattgccagagagatatctcccggggccaattcagcatct

SEQ ID NO: 245293 - DNA, 96 bp, Homo sapiens
ctgtctgggaccttctccctgcctggacccctactattgcaacaagatgaaggactgaaccatgaatgcaaactctgcagccagacctttgactct

SEQ ID NO: 245294 - DNA, 80 bp, Homo sapiens
agctgtggaaggctctggataaggaccagtacctgcccaggaaactggattacagatgctttcctcaaagcagatgacta

SEQ ID NO: 245295 - DNA, 147 bp, Homo sapiens
attactttaaaaatcgccaaaaattacttggagcaaagggcagtcggcggagcttcgccaaggctggcgcagtcgactcggtgaaatacctggagtgctcagctctcacccagagaggcctgaaaaccgtgttcgacgaggccatcc

SEQ ID NO: 245296 - DNA, 82 bp, Homo sapiens
gagtcacacaagctaaagacgggccattttccagacctcatccagcagaaaaatatggctcaggagactaaccagaccccgg

SEQ ID NO: 245297 - DNA, 74 bp, Homo sapiens
gaggaaagctggtcacgaagccctcagcattattgtggatgaatataagacccattttcaaagatactcaaggc

SEQ ID NO: 245298 - DNA, 82 bp, Homo sapiens
agcggagcctggcgggcgtgggaacccaggccccgccgaggcggccaggagacaacaaccggatcccagtcatcgggcccct

SEQ ID NO: 245299 - DNA, 76 bp, Homo sapiens
ggctgactacctgctgtacaccctcaacaaacaccagcgctttggctacgagttccagggagctctgtcctggtga

SEQ ID NO: 245300 - DNA, 75 bp, Homo sapiens
catcttggccatcactatacacaacgttccagaattctgcttggtcagaatcgtgatggcattgtgttcagcact

SEQ ID NO: 245301 - DNA, 100 bp, Homo sapiens
gctggctcagaggctctatgcaggttccactgtcaagctcttcacagatggaatcacaaataaacttattggctgttacgtgggaaacaccatggaggat

SEQ ID NO: 245302 - DNA, 75 bp, Homo sapiens
atatgaagagacatgcgatggtagatcaacccccagagctggaagtcgagtgtgctactcaactcaggagatttg

SEQ ID NO: 245303 - DNA, 50 bp, Homo sapiens
gaaatccttcgcccggaaattcatcaagacagagcgggatgccaccagct

SEQ ID NO: 245304 - DNA, 82 bp, Homo sapiens
ataaaatcttacttcaggaacaaagctacgtttttccaggtactccaaagattcaggtttactcacgtcatccagcagagaa

SEQ ID NO: 245305 - DNA, 100 bp, Homo sapiens
gcacaggcagagcacccaactgctggcacagagactcagccggacctgcttccgccagtggagacaacaggtcactgggcaaaaatagcttctgagctgc

SEQ ID NO: 245306 - DNA, 100 bp, Homo sapiens
cagcctgagcgctaaggaccaagacggctgggagccgctgcacgccgcggcctactggggccagggagagtcccgtattctcagagtaaaagttgtttct

SEQ ID NO: 245307 - DNA, 75 bp, Homo sapiens
ggaagatggcggcgggggcgagtgagccccttcaagatacctatagaggaacttgaggacagagtgtttgtgaat

SEQ ID NO: 245308 - DNA, 90 bp, Homo sapiens
cccagctgtggaaaatgagcatcctcaagaataatccagaatggctactctgatctatgttgataaggaaaatggagaaccaggcacccg

SEQ ID NO: 245309 - DNA, 90 bp, Homo sapiens
acttgctgctgatgaagatgatgacgatgatgatgaagaggatgatgatgaagagacaatctctatgggaagcagaaggcaaggaccccg

SEQ ID NO: 245310 - DNA, 83 bp, Homo sapiens
ccagctgaacactttccagccttgtttttcagcagctttgaggaaaagtatagggaaatcctcattgacgattcaatttgttg

SEQ ID NO: 245311 - DNA, 106 bp, Homo sapiens
gccggagctgggcgcggattcgccgaggcaccgaggcactcagaggagaatgattacggacctgaagccaaagaacaagatgcgctagtggacagattgctgacca

SEQ ID NO: 245312 - DNA, 97 bp, Homo sapiens
gtacagcaacagtggatgttcaagattaagattagagtcaagttgtgtgattaagacagaatggacagcaaattatggatgaacctatgggagagga

SEQ ID NO: 245313 - DNA, 144 bp, Homo sapiens
ccgtttccctctgtgcggcggccggcgggaccataagggcttaactcatatatttaacccccctccaaaaaattttaacagcttctctgtggatgatgagtgcttagtgaagttacttaaaggatgttgcctcaagaacttaca

SEQ ID NO: 245314 - DNA, 83 bp, Homo sapiens
ggccttcacaatccaagttccacaatatattgactactgccacaattccggtgtatgcaacagcgttattgcaacaggctaac

SEQ ID NO: 245315 - DNA, 83 bp, Homo sapiens
aggcttaaggtcttcagcggggcgctccaggaggcactcacagggaggaggtacaggagaactgtgtgcggtggcgaaagagg

SEQ ID NO: 245316 - DNA, 100 bp, Homo sapiens
cgctaggccgtccccgaccttgcctgaacaagcgttgacagaaggctacgttggggccctgcacgagaatagacacggcagcgcagtgcagatccgcagg

SEQ ID NO: 245317 - DNA, 106 bp, Homo sapiens
taggacaaccaatatttccaggggatagtggtgtggatcagttggtagaaataatcaaggttttcaaatggaacattttgatgcatcacttagtacctatttcaag

SEQ ID NO: 245318 - DNA, 83 bp, Homo sapiens
gcctccccagccacgtgaaactcttgctcacttccgacagagaaaaacaaaaggtgacagttcgcattcggagaaaaagacgg

SEQ ID NO: 245319 - DNA, 87 bp, Homo sapiens
cgcctccgccgccgcctgaggaggcgagctagccgggagttacaccgccaccgccagatgccttcaattaagttgcagagttctgat

SEQ ID NO: 245320 - DNA, 83 bp, Homo sapiens
gtgaagctcaccgagacggcgatccgggcgctcgagacttaccagagccacaagaccacaccaccccagagccaagtgcaccg

SEQ ID NO: 245321 - DNA, 101 bp, Homo sapiens
ccttggcctcccaaagtgttgggattacaggacaaactgcggacaggcgagaaggcagtggtacgtttccgcttcctgaaacacccagagtacctgaaggt

SEQ ID NO: 245322 - DNA, 80 bp, Homo sapiens
gaaagcatggcgtcggtggtgttggcgctgaggacccggacagccgaggttggacttttcaggaattgaacctgatataa

SEQ ID NO: 245323 - DNA, 89 bp, Homo sapiens
ggactccttcggcagtccacccaccgccgccgcctcccaggcatctgcatctgggaccgacctcctgggctggctgatcaaagaggaag

SEQ ID NO: 245324 - DNA, 100 bp, Homo sapiens
gtggcccagaattttccagtgccctgaaaaatagactacgcccaagcaaggtttgatgcctatttccaccagaagaggaagcttggggtgtgactgtggg

SEQ ID NO: 245325 - DNA, 75 bp, Homo sapiens
cctgaaccggcacctgcacacctggatccaggataacggaggctggattcacaatgacatcctttcaagaagtcc

SEQ ID NO: 245326 - DNA, 100 bp, Homo sapiens
atactttggttacctatgtacctgttaccactttcaaaaggaaatcctcattgacgattcaatttgttgaaggccaatttgtggactcctacgatccaac

SEQ ID NO: 245327 - DNA, 100 bp, Homo sapiens
agtggcagctgcggccccgaccccaagtgcggggacctccggcgaataaagacacgatgaggcgagtggtacgacagagcaagtttcggcatgtatttgg

SEQ ID NO: 245328 - DNA, 97 bp, Homo sapiens
gccaacgatggtctttcctctgcattgctgatcttgtacttggattcagcaaggaaccttccggccaggtgtggtgtcttacacctgtaatcccagc

SEQ ID NO: 245329 - DNA, 74 bp, Homo sapiens
tcgtgatcccggcgacatactacctctggccccgagatcagaatgccgggttgggggatccagctatctgtaat

SEQ ID NO: 245330 - DNA, 100 bp, Homo sapiens
gcacggagggacttctgcagagagagtgcgcagaaggattccgggagcacagttccgccgaggtcccctcctaaccgcaagcgtcctgctaacgagaagg

SEQ ID NO: 245331 - DNA, 83 bp, Homo sapiens
gcttcctggcctgggcgctccggtggcggcggagccgaggaggagctggtggaggctgacgaggcgggcagtgtgtatgcagg

SEQ ID NO: 245332 - DNA, 101 bp, Homo sapiens
ggaagctggtggtgttgatcactcctcaggtgtccagcctgctcagagagaagaagaaggaggttcctgctgtgccagaaacccttaagaaaaagcgaagg

SEQ ID NO: 245333 - DNA, 121 bp, Homo sapiens
acctgatcggaccggccctgccgcccggcttcaaggcccgcggaacagcggaggacgaagagcgggacccgagccctgctcctctggtgcaagtgtggtagctattgacaacaaaatcgag

SEQ ID NO: 245334 - DNA, 97 bp, Homo sapiens
cagaccatccgaagcctgtaactgtgaaaccagtaacaacggaacctagcctggagaaagttcttgtggaattcagtcacaaggagttgtttgattt

SEQ ID NO: 245335 - DNA, 75 bp, Homo sapiens
tgacctcacaaccgagcaaattgaagagacgttaaaatacttcctgcatctgggggaggtgttgtagccattgac

SEQ ID NO: 245336 - DNA, 74 bp, Homo sapiens
cggggagaaggccatcacccaggtcagcaagggcacctgcgagcaaggttggccttcattccacgatgtgatca

SEQ ID NO: 245337 - DNA, 100 bp, Homo sapiens
ggtacttcaaacatgcaagttggaatggtctttctgtctgagtggaaggagcacaaagttgcactctcacagctcaccagcctggagatgaaagatgatt

SEQ ID NO: 245338 - DNA, 80 bp, Homo sapiens
ggccacagatggtgctgcccaacagaactgggcacctccgggctgtgaaaagttagggaagtgtctgacacctccagaat

SEQ ID NO: 245339 - DNA, 96 bp, Homo sapiens
ccagaagtccagagctgaggactgcctgtttgcagatatcagttttagagaatgtggcgtggagaaattctcaaggaaagagtaaaatgctggtga

SEQ ID NO: 245340 - DNA, 90 bp, Homo sapiens
gaccattccaaatctgggaccagtctcggcaaatattacacttctctccttggcatggtgctgatgtgaaatgtgtagactggcatccaa

SEQ ID NO: 245341 - DNA, 50 bp, Homo sapiens
atcgagtccctgattggagcaaactgccaccagcccctcgggttccaaga

SEQ ID NO: 245342 - DNA, 100 bp, Homo sapiens
gagagcgagctgagtggttgtgtggtcgcgtctcggaaaccggtagcgcttgcagcatggttacagaatcagagtgtgcaccaatcccaaccacgggtat

SEQ ID NO: 245343 - DNA, 74 bp, Homo sapiens
tattcttgaagtttgtggatgaaaattgggaaggttccctcaagtccaaggtggagtctcgctctgtcacccag

SEQ ID NO: 245344 - DNA, 82 bp, Homo sapiens
aattacattctctcggccagcgcctccgcgatgtggaagatgtgaaatttgtcatcaattatgactaccctaactcctcaga

SEQ ID NO: 245345 - DNA, 96 bp, Homo sapiens
ctctgtgcattacttgcagtgcaggaggagtatttttaaatggtgctcgcaggaaggaggtatttatccaggaacggtatgggagatttaatctaa

SEQ ID NO: 245346 - DNA, 74 bp, Homo sapiens
cctaattttatggatgtcttcacgtggtctttaccgtttgttggagaaaaaggccctcgggaccaaggatcacg

SEQ ID NO: 245347 - DNA, 100 bp, Homo sapiens
ggcgcccggatgggcagctgagttggttaccacagagaagcgcttcctcaaagacagtttgtacaatgaaggaatcctaattgtatgggacccatctgta

SEQ ID NO: 245348 - DNA, 75 bp, Homo sapiens
ccaaaaggagcggcgcggtcttcgtggtgttcgtggcaggggaaggtgtggctcattgactttaatccatttggt

SEQ ID NO: 245349 - DNA, 98 bp, Homo sapiens
tcagctcccctgatgcttcatggtgctagaagaacttggacaggtcttcgccttgatcgtgttctcctgcatctatggtgagggctacagcaatgccc

SEQ ID NO: 245350 - DNA, 96 bp, Homo sapiens
atggcagcgacggttcttcatcctttacgagcacggcctcttgcgctacgccctggatgagatgggcaacatgcaggttctggtgacttacggtgg

SEQ ID NO: 245351 - DNA, 100 bp, Homo sapiens
ccagtttcaagcagtattaagagtaaatggacctgagggcactcgctttgctcctgtcagtacacactcccaaacagttaaacccagctctaattccaac

SEQ ID NO: 245352 - DNA, 100 bp, Homo sapiens
ggtccacggagtgtatgaccacaaacagccatcaagctttgacagatccaaatgcttctgctgcccagcaggctgttctccagcagcacatcaatagtct

SEQ ID NO: 245353 - DNA, 101 bp, Homo sapiens
tactcgcccgccaccctgcgctgccgccgctctgaggagttaaagtgtggcgtgtggaaagaagaggaaccagaaaagaatgtttgtgaagttctggcttg

SEQ ID NO: 245354 - DNA, 75 bp, Homo sapiens
ctctccgagaggtcgttttcccgtccccgagagcaagaatttggtgttcacttggcagaactgactgtagatccc

SEQ ID NO: 245355 - DNA, 50 bp, Homo sapiens
tgaaagtaaagcagatcctgggcagaagaggaggaagatgactatctctt

SEQ ID NO: 245356 - DNA, 75 bp, Homo sapiens
cggcggaccgcgtcctgcgccggagcagtacctggagtagaacagaaaaattattatgtctgtgttcccttggga

SEQ ID NO: 245357 - DNA, 88 bp, Homo sapiens
ccgtcagagaatagtaatgagtttgagtgggaaggaattacatgaacgacagccttcgcaccgacgtcttcgtgcggttccagccaga

SEQ ID NO: 245358 - DNA, 101 bp, Homo sapiens
agacctaagctttttccagagaagagaagctttactggtgttccagccctaagcttcctggacaagatcgacgtgatcaagcaggctgactatgtgccgag

SEQ ID NO: 245359 - DNA, 140 bp, Homo sapiens
gtggttcaccctggtcaacaagaagaacgctctcatccggaggcaggaccagctgcagctgcttgtgattcttggagcaaatacccggccagacttggatctccgagaccccatctgtgatgacttcttccagttgtggc

SEQ ID NO: 245360 - DNA, 100 bp, Homo sapiens
cagtttatggcttccagtggaggcattttggggcagaatacagagatatggaatcagtggtaggaggactcctgtctgctcatctgctctccaagaaggc

SEQ ID NO: 245361 - DNA, 80 bp, Homo sapiens
tggcctaaaacttcggcgttgggttgtgaccgagattcccgacgagagagactgaggggaagagaggaaggaggggcggg

SEQ ID NO: 245362 - DNA, 90 bp, Homo sapiens
acgagtaggcgaagcaaggactgttttgattcatggattcacccagtcattacttctagatgatgctggctcagttctggccacagccac

SEQ ID NO: 245363 - DNA, 85 bp, Homo sapiens
catgtttgtggctggctttttggagggttacctcactgccccggttatcaatgccgggaagagcacacacaatgaagaccaagcc

SEQ ID NO: 245364 - DNA, 83 bp, Homo sapiens
tctggggccactgtgagatccgaatgcgctacttgaacggactcgatcgtgaatctggattgggaaagtcgacattaatcaac

SEQ ID NO: 245365 - DNA, 100 bp, Homo sapiens
acctgcgccccttcccagcgccccccacccactggttccttgggcaccagaaggttgaaatcacaaagattagacacctttttagataggtgttcttcag

SEQ ID NO: 245366 - DNA, 100 bp, Homo sapiens
gtggactttgatattgatgtgaacgcctctgtgtttgaaacaaacattcgaggactttgtattcagccttctgcatggagctggcctcacgtggctttgt

SEQ ID NO: 245367 - DNA, 83 bp, Homo sapiens
ctcatgtcagggactgtgttcagacctacatccgtgagtggctaatcgtgaaccggaattggaagatctaaggcaaagactca

SEQ ID NO: 245368 - DNA, 82 bp, Homo sapiens
cggtacatctgaaagccgggaaatgatgagttttgatcatcctgagaaaaatgggccttggcctgcagacccaataaacctt

SEQ ID NO: 245369 - DNA, 75 bp, Homo sapiens
caggtctctgtcgagcagcggacgccggtctctgttccgcaggatgatggcccactgcgtgaccttggttcagct

SEQ ID NO: 245370 - DNA, 87 bp, Homo sapiens
aagcacccaacagttacaaactacttctccaaagctgactggaaataccggcatgcaggattgatggccttatctgccattggtgaa

SEQ ID NO: 245371 - DNA, 108 bp, Homo sapiens
agaagaagaaaataaaaaatggcagtaaccctgagacaaccacttctggtggttgccactcacctgaggattcttactactttgaccgcgatgatgtggctttgaaga

SEQ ID NO: 245372 - DNA, 74 bp, Homo sapiens
actcggccctgcgccgcgacaagtacgtggccgagttcctcgagtgggaagcccttcagcggccagtagcatct

SEQ ID NO: 245373 - DNA, 100 bp, Homo sapiens
ccttgatcctcctcctaattgcagtttggaaattttagcattcaggtgccaggaatgcagatgggacagccagtgccagaaacaggcccagctatactcc

SEQ ID NO: 245374 - DNA, 48 bp, Homo sapiens
gaaccgcgattcggcgtgtcagcaccctggaggagaagaggttctgct

SEQ ID NO: 245375 - DNA, 100 bp, Homo sapiens
ctccctgcgcggccccgctgagcctcggtgcggcggcgagcgcggtcgagatcgccatgcctaccctccaatatcagatggaaatgatgcggagccttcg

SEQ ID NO: 245376 - DNA, 100 bp, Homo sapiens
ccagctgtgaccttgccaaggagcagggcccatacgaaacctatgagggctctccagttagcaaaggagctttatttcaggctggagaacttaaatgggg

SEQ ID NO: 245377 - DNA, 100 bp, Homo sapiens
gtcatcaccatcaccttcaatccgctctactggaatgtgggtcgagctgtgcagttttagcgggtacaagatctaccccggacacgggaggcgctacgcc

SEQ ID NO: 245378 - DNA, 100 bp, Homo sapiens
tgcagtttgatctcagactgctgtgctagcaatcagcgagactccgtgggcgtaggaccctccgagccagctcccagttgtgggcagagtctggttaagg

SEQ ID NO: 245379 - DNA, 100 bp, Homo sapiens
caatgcctggcaggtcatcaaaggtgtgctgtttagtgagaaagatcagtctaaagaaaaggagaagaaagtgaaaaaaacaattccttcctgggctacc

SEQ ID NO: 245380 - DNA, 100 bp, Homo sapiens
tacctcactgcagaggtgctggagctggcagggtcccaccttgtggtcaccaactgctccgcggaacacagccacccagctctgtcctgcaagatggctg

SEQ ID NO: 245381 - DNA, 100 bp, Homo sapiens
gaagaaatggacatgattgcctaaatcagccaaacacagggatgtctccccgttcaatgttgtggcctggcacgggaattatacaccctacaagtacaac

SEQ ID NO: 245382 - DNA, 99 bp, Homo sapiens
accgagtcctcaaagagtacaaagatgttatgtccgtggttcagaccctgtattaaagcttttggacgacaatgggaacattgctgaagaactgagcat

SEQ ID NO: 245383 - DNA, 74 bp, Homo sapiens
agggatcaaagagcaaacagattcagtggcctgcattggcacctgaatggacagaagaggacctcagccaactg

SEQ ID NO: 245384 - DNA, 80 bp, Homo sapiens
gccgccttgctgctgctcaaagctgctgccgccccttgggctaaaagaccatggtgaatccgggcagcagctcgcagccg

SEQ ID NO: 245385 - DNA, 89 bp, Homo sapiens
aagccgtcgcagcctcgggagctgcggccgccgcggcattcggggaatctgcagggcagttgtggacatcggatacccaaggagacgaa

SEQ ID NO: 245386 - DNA, 98 bp, Homo sapiens
gccattatcctctgtttctctgctgcaccgacctcgacgtcttgcctgtgtcccacttgttcgcggcctatagcccgcggcgccatggctcacgtcgg

SEQ ID NO: 245387 - DNA, 75 bp, Homo sapiens
agtggcctctgtctaccagagctaccagcctcagctgatgttcctggagaccagcgctctcacaggcgagaacgt

SEQ ID NO: 245388 - DNA, 100 bp, Homo sapiens
gaattccatacgacataatctgtcattgaacaaatgtttccttaaagtgcctcgatctaaggatgaccctggaaaggaacggaaaacagttcttccttca

SEQ ID NO: 245389 - DNA, 75 bp, Homo sapiens
gatggatgaagacggcggcggcgagggtggtggcggtccagcctgatgagtgaagaggctaagcgaggagcaccc

SEQ ID NO: 245390 - DNA, 99 bp, Homo sapiens
caaacagtcagcggggcccaattcccccactggcggcggtggcggaggtggcagtggcggtaccagaatgcgagccaagctagcctttatgggaagcgc

SEQ ID NO: 245391 - DNA, 100 bp, Homo sapiens
cgagccagtggcaatgacccagacccggacgacccccattgctgagccagcggagctgcttgaacaaatcacctgctgcagtaacagaaccagagacaaa

SEQ ID NO: 245392 - DNA, 100 bp, Homo sapiens
cttgttctcggagagggtgagttgaaacgctgcctggaaaggaagtaccaggacttgcacagggttatgtaccgaaggactctaccgtgtcagcgggaat

SEQ ID NO: 245393 - DNA, 82 bp, Homo sapiens
cggaaatgtccggcaagatcgagaaagcaggttcgagaacttgtcttggacaattgcaaatcaaatgatggaaaaattgagg

SEQ ID NO: 245394 - DNA, 100 bp, Homo sapiens
ctggcttagtgaacattgtacctgtcctatgtgcaaacttaatatattgaaggccctgggaattgtggtatctgatggtataattgccccaggatatgaa

SEQ ID NO: 245395 - DNA, 77 bp, Homo sapiens
gcttcctgcagaaggccgagaagctctacccactgccctcggcccgcggcagaaaccactaatactagcctcttgca

SEQ ID NO: 245396 - DNA, 96 bp, Homo sapiens
cacgcagctgaacaagaagagagccatccccaatcagcaggaggccactgtctgcagctcccgtgaagatgtccactccagacccacccctgggcg

SEQ ID NO: 245397 - DNA, 98 bp, Homo sapiens
ggaccttctccctgcctggacccctactattgcaacaaggtcttttccaatggtcaccttggaagtgaagaatatgatgttcctccccggctttctcc

SEQ ID NO: 245398 - DNA, 100 bp, Homo sapiens
tggtcacgctcacccgcagggcgatcaaatggtcccggctgctgcagggcgggggcgtccccaggagccggacagatcatgatcagaagcatcttcctgt

SEQ ID NO: 245399 - DNA, 98 bp, Homo sapiens
ttccacaccccctccgtgggtgtgtggaattgtcttagaagaaagaaggcaagccaccattttacccacgtaaatatatgaatatatttctgacattg

SEQ ID NO: 245400 - DNA, 75 bp, Homo sapiens
caaagcacaggaatctcactctgttaaagctggtctgttctaactgagctggtggagctgtctaaggctcaagat

SEQ ID NO: 245401 - DNA, 100 bp, Homo sapiens
tctcccttcgcccagttccctgcatcctaagactcgaaggcagcacaggacctggaaaaattacatcaccaggaatatcttagatgattttagagaagct

SEQ ID NO: 245402 - DNA, 83 bp, Homo sapiens
ctcgacgtcttgcctgtgtcccacttgttcgcggcctatagccacgccgcaatgaagagcttcttacagtgaaagcaaagtag

SEQ ID NO: 245403 - DNA, 76 bp, Homo sapiens
ggatgcagcccgcagggacaaggaggcaaaacccatttatggcggttggctgctcctggctccagatgggaccgac

SEQ ID NO: 245404 - DNA, 82 bp, Homo sapiens
cgaagatgatgacgagctggcggggaagagccctgaggacctgccactgcgtctgaaggtactgactgcattgcagaaagac

SEQ ID NO: 245405 - DNA, 100 bp, Homo sapiens
ctacgccttcgtggactaccccgaccagaactgggccatccgcgccatcgagaccctctcggattgctcatttagaaagtggatgtgtgggataacatgt

SEQ ID NO: 245406 - DNA, 100 bp, Homo sapiens
gcaactctggctgatcaaagaagagcagcccatggttgcaattgtagctcaagacttggcagcattccatactgcctcatcagaaatggggcaccagcag

SEQ ID NO: 245407 - DNA, 74 bp, Homo sapiens
actcttattgaaacaacagactatgctgggcttattaattatatccagatcgagagacagaagattctgaaagg

SEQ ID NO: 245408 - DNA, 75 bp, Homo sapiens
acaaaatcaacttgtttgcaaaatgaacagtaagaaagctgtggtgattcgtcacttgtataatgaagataatgt

SEQ ID NO: 245409 - DNA, 75 bp, Homo sapiens
gaggatgacaaaaaagccttcataggcctagttccccgagagcgttcagacagtgggggctcaagctcagagcca

SEQ ID NO: 245410 - DNA, 90 bp, Homo sapiens
tgaggtcatcgcctgtgatgagaacccagatgccacctatgattacagaggatgtcctttaactccattgcctccagttagtattgctat

SEQ ID NO: 245411 - DNA, 90 bp, Homo sapiens
aaattgataatgccagagaactacaagaacagagggattctttgactcagaaactacagctttcccatggtttggcatggacattggggg

SEQ ID NO: 245412 - DNA, 75 bp, Homo sapiens
ggaaatcagtttgctgaaattaatcaacgattcttgaagttgaagaaaagatatggatgtaatgaggcccttgat

SEQ ID NO: 245413 - DNA, 100 bp, Homo sapiens
cggaaatccaaaggcagacagtacgggctcccttcgccaaactcttcattttctctgttaccttccgaacaagaatctatcactgtaatattaacagcca

SEQ ID NO: 245414 - DNA, 100 bp, Homo sapiens
cagaagcaacagccttacacagagtgttcagcaagctccaacaattgtgtaagatctgtacccccgatttggtggtattcctggcttgtgctaatcagag

SEQ ID NO: 245415 - DNA, 96 bp, Homo sapiens
ctgtgcatgacctcaatgataaacttgaaaatgaaattgcaaataaagattctatgcatcgacaggttgtggaccttgatcgtgggttagtattga

SEQ ID NO: 245416 - DNA, 49 bp, Homo sapiens
acgatatatgtcagatctaaagcatcagtctccgagagttgaagaccat

SEQ ID NO: 245417 - DNA, 96 bp, Homo sapiens
cgcatcgcgggggtggaggacatcgacatccaggcgaactcggcctatcgctaccctccgaagtccggccggatcacctcaacagtcacgtcagac

SEQ ID NO: 245418 - DNA, 75 bp, Homo sapiens
gaatccgccatgggctactcagtttacagccactgcagtatcacagccaggcagctgctgcttttgtgatgtttc

SEQ ID NO: 245419 - DNA, 100 bp, Homo sapiens
gtggccactgccagcactggggtggcagcctgccacatcgggggcaccaccctccatgcctttgcagcaattcgttctggctcagaagaggtgtttagga

SEQ ID NO: 245420 - DNA, 98 bp, Homo sapiens
cttactgcgggccgctccgacggcggtccatcctgtctcacacaggtcccacagcacagaacccggcttggtgctgacactaggccagggcgacgtgg

SEQ ID NO: 245421 - DNA, 100 bp, Homo sapiens
catccttccacctggctggcagagctacctgtcgcctcagggccggcggtactatgtcaacacgaccaccaatgaaatggcacctcgaaaggggaaggaa

SEQ ID NO: 245422 - DNA, 100 bp, Homo sapiens
ggcggacatcactttagaccctccacctaattgcagctgaccctctggtgggcagcatcgccacacagtacatgaccaacagagcagagcatgaccggat

SEQ ID NO: 245423 - DNA, 96 bp, Homo sapiens
gaagacggaccgtgccgggaagaggtactactgagcgagtgtgcttgatccagggaacggttgaagcactgaatgcagttcatggattcattgcag

SEQ ID NO: 245424 - DNA, 98 bp, Homo sapiens
gctgaccttccggatctctccacacgccttcttccagggtgttaatctttatgtgaaaaatcttgatgatggtattgatgatgaacgtctccggaaag

SEQ ID NO: 245425 - DNA, 82 bp, Homo sapiens
ccagagaattggaggatcccgagtctgccatgctagatacgctggatagaacagagcaaatttttcagaacataaaacaaga

SEQ ID NO: 245426 - DNA, 99 bp, Homo sapiens
gcctcttcgccgtcatccgcttcgaaagcatcatccacgagttcgacccgtgggctgaaaacacagttaaatcactttcaaagttaaaagactattaag

SEQ ID NO: 245427 - DNA, 98 bp, Homo sapiens
ggcgcagctgccctgggaggacggcagtgaaaattgctaccaaggccaatccatggattgggaactccctgaagcctgacagtgtccgatcccagctg

SEQ ID NO: 245428 - DNA, 107 bp, Homo sapiens
ctcgggccgcgggctgcggacgctcggtcccgcgctgcgcatccccgcggacgccacagcgctgcacttccgttccggcgcccctccggtcatcaacccgctgggca

SEQ ID NO: 245429 - DNA, 100 bp, Homo sapiens
tccagtgttaagagaagaaatgaggacatatcagtatcggttttgcacactagggaccaagaagccctcggggacactgctgagaaaagactgccgaagg

SEQ ID NO: 245430 - DNA, 82 bp, Homo sapiens
cagcagctgtcgccgccgctctcagataacgaaggaggcccaacttcattcaataaggagcctgacggatttatcccagacg

SEQ ID NO: 245431 - DNA, 120 bp, Homo sapiens
cgtggccttagctgtgctcgcgctactctctctttctggcctggaggctatccagcagacaagaggagcagcagcggcaccgcccctcaccctggagggtcctgtacaatctcatcatgg

SEQ ID NO: 245432 - DNA, 100 bp, Homo sapiens
gctgttccatgggagagtattttagagacaatggcaaacatgctttgatcatctatgacgacttatccaaacaggcactcaaatctacaggattgcgaac

SEQ ID NO: 245433 - DNA, 87 bp, Homo sapiens
ggcacccagacaggtggcgacggcagaggagtgaaaggtgtagcagtcactcggcctacacccacagcatcgaccttgtgaacccag

SEQ ID NO: 245434 - DNA, 98 bp, Homo sapiens
ttacaaaggcatatgctgacacacagtggagacaaacctttcaagttctgcaggctgtacaggaagtgtggtactggcatttgcttctggggaggcct

SEQ ID NO: 245435 - DNA, 127 bp, Homo sapiens
atgtgacggctgagacatgagatcttcagcctccaggctctccagtttttcgtcgagagattcactatggaatcgaaggacagaataacgggctcccagattcacaagccccaccaagaggatcacc

SEQ ID NO: 245436 - DNA, 82 bp, Homo sapiens
gtccagagctgaggactgcctgtttgcaggagggagccatggatttgctgcgggagctgaaggccatgcctatcacgctgca

SEQ ID NO: 245437 - DNA, 96 bp, Homo sapiens
tggtgactgagcggagcccggtgacaggatgtgctactatatcggggccacagatgatgcagccaccaaaatcatcaatgaggtatcaaagcctct

SEQ ID NO: 245438 - DNA, 100 bp, Homo sapiens
cttggagtcgttggaagatctaggatgctgctgttctcaacaatgtagcacacacatttggcctaatggacacagtcaagaaggttttagacaacagaag

SEQ ID NO: 245439 - DNA, 75 bp, Homo sapiens
tcgagagcggcctgattgggaagaaactcttagcgcaatgataatgctctaccacaagaaaatggcctctcacct

SEQ ID NO: 245440 - DNA, 83 bp, Homo sapiens
agaatgaaacttatcccagagctttgctacattggaacagggccgcctctcaagccaccacatttgctcaaagtatggggttt

SEQ ID NO: 245441 - DNA, 100 bp, Homo sapiens
tttggaattgatgatcaagatttccagttgcaggaccagctctgccccctaattataaaagcagtagttcagattcatcagacagcgatgaagacagtag

SEQ ID NO: 245442 - DNA, 98 bp, Homo sapiens
gaaaacctaaccatgaagacttgaacttaatacagcaagaaagaccatcaagtttaccagctggccctgcataactcccgtttcctgagtctctgctc

SEQ ID NO: 245443 - DNA, 101 bp, Homo sapiens
aataaaagatacacgtgtgagcaggcagctcggcacccatgtcgacttatggctttgcaggaagatagaaaaaacaagaaatggaagaagcaggatctttg

SEQ ID NO: 245444 - DNA, 100 bp, Homo sapiens
caacccgcgcttctggccgcgggaaggagagacgcaaacatgcagatctttgtgaagaccctcactggcaaaaccatcacccttgaggtcgagcccagtg

SEQ ID NO: 245445 - DNA, 152 bp, Homo sapiens
cccggcgccccccgctccccgccgggacgccccgcgccgagccggaggccgcgtggacccgaaagccgctgggaaaagttcatcatgcctagtggcgtataagaagaccccgccaccggtccctccacgcaccacttcaaagccgttcatct

SEQ ID NO: 245446 - DNA, 76 bp, Homo sapiens
tctccatcccttccgaggcccgacttcggtgagatcggactggaactgttcggctgcgaccagaaatttattttcc

SEQ ID NO: 245447 - DNA, 98 bp, Homo sapiens
tgctccctcgccgtcactgttgtataaataaaagaggcacagttagatgaagaaggacagtttcttgtcagaataatatatgatgactccaaaactta

SEQ ID NO: 245448 - DNA, 80 bp, Homo sapiens
acttttctcagatgttggatatttgcttggaaaaacgtgtgggtacgaccttgaagcctaaagaaactgttccaactctt

SEQ ID NO: 245449 - DNA, 75 bp, Homo sapiens
acacctccgggtcggagctggacgggaggtcagcccaaggccaaccccactgtcactctgttcccgccctcctct

SEQ ID NO: 245450 - DNA, 100 bp, Homo sapiens
ttctcaagcagaggcaaaggatgtcggtgctattgacagtcctgggcatgaatctttcggactgcaaatggccaaatttgagtccctctttaggacgtat

SEQ ID NO: 245451 - DNA, 74 bp, Homo sapiens
gctgttttagagctggcagcagcatctcagcccaagagaaggtgattccagatcactgtatctttgccagtaac

SEQ ID NO: 245452 - DNA, 90 bp, Homo sapiens
caccgccacactcatcatagccttcacctctgcagatgactgtccaagtgcctccaaagtgtacaaagcatcagattcagcagaagcaat

SEQ ID NO: 245453 - DNA, 100 bp, Homo sapiens
ctttcccgaatctcagaatgccatgctgaaattttcttctaaggagaaatatcccttatttacttttgtaaatggtcattccagagactatgattttaca

SEQ ID NO: 245454 - DNA, 100 bp, Homo sapiens
gaaagctgtgaaagttctcaagcagcctcagctcataccagccatccaatgcaaggaaggacaacaccaagcccagaggacagttcctggactgatttct

SEQ ID NO: 245455 - DNA, 75 bp, Homo sapiens
cgagtcggcgcgcgggacgaaggtgctggagaatctggtaaaagcaccattgtgaagcagatgaggatcctgcat

SEQ ID NO: 245456 - DNA, 75 bp, Homo sapiens
caaagagcccctcatcgagctcttcgtcaagggaagaggaagaacgtctgagaaataaaattcgagctgatcatg

SEQ ID NO: 245457 - DNA, 50 bp, Homo sapiens
gacaaaagcaacgacttcgtatgtcgagtaatcctgcctgtgtctgtaga

SEQ ID NO: 245458 - DNA, 100 bp, Homo sapiens
cccatcctctccacgccgctgccgctgccgccatgcaaggggaggacgccagatacctcaaaagtgctcagcagaggagcagtcaggttcacaagaaaac

SEQ ID NO: 245459 - DNA, 102 bp, Homo sapiens
caaattttagaaaaccagcgcaattttttaaatgtgaggaggacatgtaccgtgctgcagatgaaatagaaaaggagaaagaattgcttatacatgaaagag

SEQ ID NO: 245460 - DNA, 101 bp, Homo sapiens
acttattccgacattcagagttgtttcctccatttgctaaaggaatagtgtttgggcatcagcagcctgttcagctctctaaaagttgtccggctgctccg

SEQ ID NO: 245461 - DNA, 101 bp, Homo sapiens
cggctgccgccaaggtgttcggtccttccgaggaagctaaggccgcgttggggtgagaccctcacttcatccgaatgttctgaaggatctggaaaagagaa

SEQ ID NO: 245462 - DNA, 75 bp, Homo sapiens
aatgggggcaggagctgttggagctttgcagctgacctacatctcgaagcggaagatggagaaccgtgattaccg

SEQ ID NO: 245463 - DNA, 100 bp, Homo sapiens
attgtgaagaagaatttcgatctccgccctggggtcattgtcaggtcttgggcgtctttggtactggcttttttaggggtctgcctggggattacccttg

SEQ ID NO: 245464 - DNA, 82 bp, Homo sapiens
agaggatgcggagcccgcagaacctccacagtcaagaggacggtctcacagatttcaagcctggctactggattggtgtccg

SEQ ID NO: 245465 - DNA, 75 bp, Homo sapiens
aagagcggaaatgtcaaacgtggaggcttattagaagaagacaaccagtggatgacccagataaatagactccag

SEQ ID NO: 245466 - DNA, 83 bp, Homo sapiens
ggaagatgcccacggactacatcaggaacggggtgctctacgtcacggagaaggggatatgagactttctactcggaatatcc

SEQ ID NO: 245467 - DNA, 95 bp, Homo sapiens
gatgctggctggggaaatctggtgtatgttgtcaactatccaaaaggggctatctgatgggttagagtgcctttgagaagaaatcagtggatact

SEQ ID NO: 245468 - DNA, 107 bp, Homo sapiens
cccggcgggaccatgttcaccagcaccggctccagtgggctctgtttgagcacaaaatgaacataattagggaaaataaggatctggcatgtttctacacaacaaaa

SEQ ID NO: 245469 - DNA, 75 bp, Homo sapiens
aagcctcctgcgccggccttgcctcgggtcggtaggctccacgacaaaagtcaacccttctgtaaatcacctgct

SEQ ID NO: 245470 - DNA, 100 bp, Homo sapiens
tgtccccagagcctcagtttgtgcaggacaccgacatggaacagggactcactggggtactatactggcaattgctggagaagattttgcaattgttgct

SEQ ID NO: 245471 - DNA, 100 bp, Homo sapiens
tgacaaggatgtagtaatgcttcagctgtttttcagagtgacggatgaccgggccaagcaatctgaactgtacttagttggaatgatctgttactatggc

SEQ ID NO: 245472 - DNA, 96 bp, Homo sapiens
cggagtgagaagcaagaaggccctggacacagcaatatctctgggctttcacaggtacaagaatattccacagatgtcctttgatgatacagaaag

SEQ ID NO: 245473 - DNA, 100 bp, Homo sapiens
agttgattactgccttctgctgcagcgaaatcataccctatggtactgcagtatcgaccaagaattgatttcggttagaccaaggggcccagacctcact

SEQ ID NO: 245474 - DNA, 100 bp, Homo sapiens
agctggacaacgttgtcccaagacagtgcctcacccagctccccggatgaaacaggcagaactcacagtttggagatgaaaaaacatttagtgattcatc

SEQ ID NO: 245475 - DNA, 96 bp, Homo sapiens
ggatggtgtgcagatcaacagaagtccgtattcttaccttcaaaatccgcagtcagagagagcaaggtgatcatggaggaagcactttactcccac

SEQ ID NO: 245476 - DNA, 99 bp, Homo sapiens
gcggcgcgcgtggatcctgctcaccttgggcttggtggcctgcgtgtcggcggagtcgacaagttggatggcttgaggactggtactaaaaggaaacgt

SEQ ID NO: 245477 - DNA, 75 bp, Homo sapiens
ggcgagctcgcgatgagtggtctcggcaggctcttcgggaagggaatcagagatcattgatttcttcctgggggc

SEQ ID NO: 245478 - DNA, 152 bp, Homo sapiens
caaccttctgtgagcctagggacccatttctcctcctttgacagggacatcagtggagccttctcagacccacaggtttgtggaaggaatgcttaacatttgttacaatgccgttgatcgtcatattgaaaatggtaaaggggataagattg

SEQ ID NO: 245479 - DNA, 103 bp, Homo sapiens
ggaggacttctccgcggaggaagaggagtcctggtacgaccagcaggacctggagcagggaagctattttgccagccacttcattatgggaggagagaagttt

SEQ ID NO: 245480 - DNA, 95 bp, Homo sapiens
ggagcagagccgctgggcgccggagccgaggcgagcgccgcgcgcaccactggtatcgtcagatcctggaaaaagccattcagttatctggagca

SEQ ID NO: 245481 - DNA, 74 bp, Homo sapiens
cccgcgtccgccgattcctcctccttggtcgccgcgtccttggctggcgtgcaaaatacatatctcagtgcatt

SEQ ID NO: 245482 - DNA, 83 bp, Homo sapiens
tccatcctgctggccatgctctacgggacagcgccgtgccgtccctgcagtgacaccgaggtgctcctagccgtctgcaccag

SEQ ID NO: 245483 - DNA, 97 bp, Homo sapiens
gttgctatacagaatctttggatatgtgcatcagtggtttatgccaaaggaccattcttagtggcactggggaaatcttggcacccagaagaattca

SEQ ID NO: 245484 - DNA, 75 bp, Homo sapiens
ctgtacaccaatggaaagtgcgtcatcctaaggaacatcgacgagcaggccgggctctcgccatgggtcactgtc

SEQ ID NO: 245485 - DNA, 100 bp, Homo sapiens
gtcggactggtctgtctgagggagatggtgacaagctcaaggcctgcgagcatcctgaggttagcattacacttctcccagtggagcccatgacttctga

SEQ ID NO: 245486 - DNA, 87 bp, Homo sapiens
tgaacttctgagttacataaagaagacctaaaactgatggctactaaaaagcagagcatttctgcggaagtgaccgtggtggcttca

SEQ ID NO: 245487 - DNA, 100 bp, Homo sapiens
catatttgagtcatttccttcgtacccacagtgcttcatgagagatccaggatgagaagactgataaaagaagaagctagctgaacagctgtaaaatgcc

SEQ ID NO: 245488 - DNA, 116 bp, Homo sapiens
aggctctgaaagaatacatcaagattctgaatctggtgatgaacttagcagcagctccactgaacagataagggcggcttatgacccctacgcttatcccagcgactatgatatgc

SEQ ID NO: 245489 - DNA, 151 bp, Homo sapiens
ttctccggagtgcgccggcggtggcgcctgcggacctaactagctccaggttaggccgagctttgcgggaaagcagcggtgctggagaatctggtaaaagcaccattgtgaagcagatgaggatcctgcatgttaatgggtttaatggaga

SEQ ID NO: 245490 - DNA, 100 bp, Homo sapiens
cggttccccggcccacagtgggggtgtgcaaacccgagagaactggatgagtactggcagaatcacccagaactacatgacattccaatatactatgcat

SEQ ID NO: 245491 - DNA, 80 bp, Homo sapiens
tgtatcttcagcagcagcagacgtttggaaagttccagaaacgccgctggactgcgaggtctccctgtggtcgtcctggg

SEQ ID NO: 245492 - DNA, 51 bp, Homo sapiens
tttgcttccaaatacaagctgtatagaaggatgccctgcagtggtctcgcc

SEQ ID NO: 245493 - DNA, 75 bp, Homo sapiens
ccgccctggggacgaagagctgcagctcctcctgtgcggcacaacagatttgttttggactgtaaagacaaagag

SEQ ID NO: 245494 - DNA, 50 bp, Homo sapiens
ttgtcttaatatgttgattcagtccttaaactcacctgagctggatgaag

SEQ ID NO: 245495 - DNA, 100 bp, Homo sapiens
cacagaatggtcagaaaccctccataacctgaagattatcttagaagacctaggactccaaaaatgtttcccctgaaggacgctgaaatgggagccttta

SEQ ID NO: 245496 - DNA, 98 bp, Homo sapiens
taagaagtaatctggaatcagaaagcactacgctaaggttatgataattcagagagcagtgttcggaaagcttgtgtcttctgcctggtggctgttca

SEQ ID NO: 245497 - DNA, 100 bp, Homo sapiens
ggtggataccgtcaagctggccaagcacaaagagcttgctccctacgatgagaactggttctacacgcgagctggttgggggccgtcccgctcctaaggc

SEQ ID NO: 245498 - DNA, 98 bp, Homo sapiens
cgccagctcggggccagcgcatggggctgctgagaccgctccggacgtgcgaagcgttcgcggtgcggtagccatcataatgtgaagaagccgaagca

SEQ ID NO: 245499 - DNA, 83 bp, Homo sapiens
gagtgcagatacaactatactgtttgtaaaaggagaaggacttcctccgtcaggcagctggcaggacctgaaggatcacatgc

SEQ ID NO: 245500 - DNA, 85 bp, Homo sapiens
agatggtgttggaaagcactatggtgtgttgctgaacctgtttgcatgagttgctcctgacggccctttaggatacttccatgtc

SEQ ID NO: 245501 - DNA, 99 bp, Homo sapiens
agttgaatgctgtcttccaagaacagaagaaaatgatccaggcccaggttgaaatcacaaagattagacacctttttagataggtgttcttcagcacca

SEQ ID NO: 245502 - DNA, 100 bp, Homo sapiens
ggggataagggtggagataaacaggattgcaagtcaagtagctgctttggaccttggctataagcctggggtggaagcaattcggaagaaccctcccaag

SEQ ID NO: 245503 - DNA, 90 bp, Homo sapiens
aaggattccaagtaactcttatttggtaaaggacatggcctgtctatcacacctctgccagctggtcatatgataggtggaacaatatgg

SEQ ID NO: 245504 - DNA, 100 bp, Homo sapiens
tgtgcagcaagatcttggagaagacggccaaccctcagtggaaccagaacatcacactgcctgccatgtggcttccggaagttcctggtccacaacgtca

SEQ ID NO: 245505 - DNA, 75 bp, Homo sapiens
cacactgcaccatgagctcagttggctgcaggagcagctagcacagatctttgtggagttcacctctgtgtttga

SEQ ID NO: 245506 - DNA, 100 bp, Homo sapiens
gggcacacggcactcagacatgttcctgctgaagccagaggacggaagagaaggttacaagcctgatgaagggaaacgaggggatgcctgtgaaggtgac

SEQ ID NO: 245507 - DNA, 82 bp, Homo sapiens
cttcaactcttttctctcgggcttcatctcttgtgtggggagtttcatcctagcgggccagaacacaaagcgtgaatccgga

SEQ ID NO: 245508 - DNA, 97 bp, Homo sapiens
gacatgatggtcgagggccgcctgctcgttcctgacagaatgatatggaatattatcttgtaaaatggaaaggatggccagattctacaaatacttg

SEQ ID NO: 245509 - DNA, 100 bp, Homo sapiens
caagactgtatgatagtgttagttccacagatggggaggacagtctagagagaaaggtgtgatgaatgcagactctgctaccattttggctgtttggatc

SEQ ID NO: 245510 - DNA, 99 bp, Homo sapiens
acgacgtgaaggagcagatttacaaactggccaagaagggccttactccttcacagatcggaatggccaacctgctgacgggccccaaacggaacctga

SEQ ID NO: 245511 - DNA, 100 bp, Homo sapiens
ccagaggatcggaatgacagatatgaggtggaaagtgagaaatggtacctgtctacagacttcccttcaacatccatcaagacagagccagttacagacg

SEQ ID NO: 245512 - DNA, 100 bp, Homo sapiens
aagagataggaactcttggttgggataaaatgatatggaacctagcaaagctgttccactgaatgcatctaagcaagatggacctatgccaaaaccacac

SEQ ID NO: 245513 - DNA, 100 bp, Homo sapiens
tccagcggcggcagcggcgctcgcagcgcccggtggataggcatgtagacctgctagaagttgcccaggaaactgatgggttttcaggaagtgacctaaa

SEQ ID NO: 245514 - DNA, 99 bp, Homo sapiens
cttcaaaagtctactttactatcaatatgaacctggatgtatctgacgaaaaaatgattactcttgtctctgctgctcctgggaaagtgatttgtgaaa

SEQ ID NO: 245515 - DNA, 99 bp, Homo sapiens
catgagagaagaaatacaggatgcctctcagctgccacctgcctttgacctttttgaagcctttgcaaaaatgggttgtacctggccattggttcccat

SEQ ID NO: 245516 - DNA, 88 bp, Homo sapiens
agatgcaacagcttgagagacaagttattgatgctgaacgtcaagcagaaaaagcttttcaacagattatgtctactttgagaattcc

SEQ ID NO: 245517 - DNA, 73 bp, Homo sapiens
agggaaccaccaattcttcccaggcttcagtgtcatttgaggacgtgactgtggacttcagcaaggaggagtg

SEQ ID NO: 245518 - DNA, 105 bp, Homo sapiens
aaagaaggtctttgaccgacacctccaccctacaagtactgaaaaggcacagattgaagataaaactttccaagtccttggtaatctttacagcgagggagactg

SEQ ID NO: 245519 - DNA, 83 bp, Homo sapiens
cccaccgccgccccctccggcgtgttcatgcccccgggttttctttttaaaagcggaaggagagttttacatggaagtggctt

SEQ ID NO: 245520 - DNA, 100 bp, Homo sapiens
tgggatctttccggatcaatccagatggcagccagtcagtggtggaggcattgaacctggccacatcccaggtaccgtgaacatccccttcacagacttc

SEQ ID NO: 245521 - DNA, 75 bp, Homo sapiens
gcgagtctcaagtgtccatcttgcagtccttgtttggagaggtatgtctgattgacctgggctgcttccgagaaa

SEQ ID NO: 245522 - DNA, 100 bp, Homo sapiens
gtgggagtctccgcgtcccgctcgctgggagagagggtcacctgtctgtgtgcccagtttgaagccgtcctgcagcatggcttgaagaggagtcgaggat

SEQ ID NO: 245523 - DNA, 100 bp, Homo sapiens
gaagtgcaaggcactgcaggaggagaaccgcgacctgcgcaaagccagcgtgaccatcggaatgcagagagcaaccaatgtcacctaccaagcccatcat

SEQ ID NO: 245524 - DNA, 98 bp, Homo sapiens
accggccagtgcgtctgccccgccggctgggtgggcgagcaatgccagcactgcgggggccgcttcaggccagaaatgtacacacaggagagctggct

SEQ ID NO: 245525 - DNA, 87 bp, Homo sapiens
aagaacagctcgagagagcattacaagccagcctctgggaccgagatttattgctaaacatgggtgcatttttggataaacccaaaa

SEQ ID NO: 245526 - DNA, 84 bp, Homo sapiens
ggatcatgtctgcgagccaggattcccgatgtgaagttcatttccaatccgccctccatggtggcagcggggagcgtggtggcc

SEQ ID NO: 245527 - DNA, 98 bp, Homo sapiens
agaatctgactggatctatttccatcctgatgcttctggtagaataatacatgttggtccaaatcaagtcaacctctttgaaatgtgctgctagtggg

SEQ ID NO: 245528 - DNA, 119 bp, Homo sapiens
ttctctcaaggactactgcaccagaatgaaggagaaccagaaacatatctattatatcacagcaaaccagtccagctacgggggcccagccagccagcagctgagtgggggttacggag

SEQ ID NO: 245529 - DNA, 99 bp, Homo sapiens
catgcgtgtttcgctctcgcaacagtcttctcttttgaccgtgttattcagagggatggagcctatagaggtgcctcttgaggaaaatagtgaacggac

SEQ ID NO: 245530 - DNA, 74 bp, Homo sapiens
aaagtcattgaggactttccagcaaaggtccccttcccctgagcccatctacaatagcgaggggaagcggctta

SEQ ID NO: 245531 - DNA, 97 bp, Homo sapiens
acggcgtacgccctcatggggaaaatctccccggtgactttcaggtccacgccatccctctgcgctcctcctgggtcatgacctgtgcatatgcccc

SEQ ID NO: 245532 - DNA, 98 bp, Homo sapiens
gaaagagttcctggatgacctcttcgtctttatgcagaagagggatcattcccagtgaccccttctgggtgccaactactgaggaggaatacttgcac

SEQ ID NO: 245533 - DNA, 73 bp, Homo sapiens
aattccggtcagggtcaagtcgtgttctgatcactactgacttgttggactatggcaaggagtctcaggccaa

SEQ ID NO: 245534 - DNA, 50 bp, Homo sapiens
gggaggccaagcgaccacccaaagaaggagcagcagaaaagagttctaaa

SEQ ID NO: 245535 - DNA, 100 bp, Homo sapiens
attgccgatacttgacctacgcaagagacaatgtcatgtgattcagcctaatatctcacattaaagggcagtatttaaagtcagttggcaagcagtggaa

SEQ ID NO: 245536 - DNA, 98 bp, Homo sapiens
ccgccgcctcgacccagggcccgcgggccaggagagcgctcggcggacggccgaagccctgcagcccacgctacagccggagatgcagctcgagcacg

SEQ ID NO: 245537 - DNA, 50 bp, Homo sapiens
gcagcatgttggccaggatatattgcacatatctgaatgagaagtcgctc

SEQ ID NO: 245538 - DNA, 100 bp, Homo sapiens
gaggagcggctgaagcgcgtgcgcatggttttccagcttgcagctcatctggtgtactggggcaaggccatcatcatctacccgctgtgtgagaacaacg

SEQ ID NO: 245539 - DNA, 75 bp, Homo sapiens
cgacgaggaagttttctactgtaaagtcaccaacgagatcttccgccactacgacaggagcattggtttgaaaag

SEQ ID NO: 245540 - DNA, 75 bp, Homo sapiens
gggaccacggtcaccgtctcctcagacacttcgtgtatgatcatgtgttcgctgagaagatcacttccttgcaag

SEQ ID NO: 245541 - DNA, 100 bp, Homo sapiens
ctataggcaggtgttgggtgcagagagcgcccctcccggacaggctgattcaccccaagagtggccgttcctaccacgaggagttcaaccctccaaaaga

SEQ ID NO: 245542 - DNA, 80 bp, Homo sapiens
cacccctaaaagcacctggccccgctacagcaaaccagggcgaccattgacgaggtggagacggacgtggtggagattga

SEQ ID NO: 245543 - DNA, 101 bp, Homo sapiens
gcttacccctggttactgaggaaacaccttcaggagaagcagtgttctaagaacggaagcatctgggctggatggaatttagcatcaagcagagtcccctt

SEQ ID NO: 245544 - DNA, 101 bp, Homo sapiens
gcctgggcgctgacgccgcggacctccctgcgaccgtcgcggaccatgggcgacaaagggacccgaggtctcggcatctcgtccacagtgagctggtgtcc

SEQ ID NO: 245545 - DNA, 50 bp, Homo sapiens
ataaaattttcccatactgagagccctctggcacaaatggaagaagaaag

SEQ ID NO: 245546 - DNA, 96 bp, Homo sapiens
cttgggtttctttcttaaaggactgatttttagaactccacatttgaggtgtgtggcttttgaagaaaatctcattgctatggacagtgctatcac

SEQ ID NO: 245547 - DNA, 75 bp, Homo sapiens
gtgcttgatatcacagaggaaactctgcattctcgcttcctggaggttgctccttgagggcaggacagttcttat

SEQ ID NO: 245548 - DNA, 50 bp, Homo sapiens
actgtcccattggccatattttagttgtattccctgaatgactataaacc

SEQ ID NO: 245549 - DNA, 100 bp, Homo sapiens
ctcgactctgcccaggttgcggttacctacctgggcaaagtctccaccactggcatgcagtttttgtcaggctgcacagaaaagccagtcattgagctct

SEQ ID NO: 245550 - DNA, 90 bp, Homo sapiens
gttatccaattgatgaactagtagatagagccaaacaatcttttcaagaggcggggtttcaccatgttgcccagactggtcttgaactcc

SEQ ID NO: 245551 - DNA, 100 bp, Homo sapiens
ccatggaggacgtgaagctggagttcccttcccttccacagtgcaaggaagacgccgagctggaccgagtgactactatacagactacgtggctaccagg

SEQ ID NO: 245552 - DNA, 74 bp, Homo sapiens
ctgcagatgaaaaagtgtgacttggcagctgataatacattgacatgattcaaaagtccaaaggtatccaataa

SEQ ID NO: 245553 - DNA, 100 bp, Homo sapiens
gccttcctccaggattaagcctgatgcagaagtggttacactgactacggcaaggttcagaaacagcatatttagaaaacagatctaattctagaccttt

SEQ ID NO: 245554 - DNA, 73 bp, Homo sapiens
atcaggagtgaagtcccagggatattctgtgctggtgtgatcagcactggaaaagatgcctgcccctgctgcc

SEQ ID NO: 245555 - DNA, 87 bp, Homo sapiens
cgatggaattcggctctataattcactgaagtcaaggtgccaggaccattgacaccagaaatggaggcacggcaggctacacggaaa

SEQ ID NO: 245556 - DNA, 75 bp, Homo sapiens
aaaaaattgaatgggagaaagagctgtacgatttgagagtgcctggtgaagaatgtgatgggatcactagcatgt

SEQ ID NO: 245557 - DNA, 96 bp, Homo sapiens
ccatggcggagctaggagctggcggcgacggccacaggggcggcgacggcgcagtgcgaagcgaaacagtgaagaacagtccagactggcagcaag

SEQ ID NO: 245558 - DNA, 100 bp, Homo sapiens
tacgtcgttcccgctgcgctaggggaagcgggcagcggaaggagagttttacatggaagtggcttacagaaacttggcgctgaggtgcagggaagccaga

SEQ ID NO: 245559 - DNA, 97 bp, Homo sapiens
ctgtctttgtgtcctgagatcaaatggcacttcattggccacctacagaaacaaaatgtcaacaaattgatggctatccagtcagttcgctgctatt

SEQ ID NO: 245560 - DNA, 51 bp, Homo sapiens
ggcggagactgcatcaggctctcggcactatgtcgtccgaggcccagagat

SEQ ID NO: 245561 - DNA, 100 bp, Homo sapiens
gaggagaagacatgttaataactggaggccgccatccttaccttggaaagtacaaaggccgcctttttgcctatcctgacactcaccgccatcgcctggg

SEQ ID NO: 245562 - DNA, 88 bp, Homo sapiens
agagggtgctggctgccgcgcggccgagaaatcatgagtggaggatctcaagtccacattttttggggtgctccaattgctccactga

SEQ ID NO: 245563 - DNA, 100 bp, Homo sapiens
ctcggttttcttatgcttataagagtggaacagaaggtagaagatagcaccatgccgattcgtcgaactgtgaattctacccgggaaactcctcccaaaa

SEQ ID NO: 245564 - DNA, 98 bp, Homo sapiens
tcaccttcgagtgcatcgaggacctgtctgaagggggattcccgaagtcttccgttttctgagaatgtgagtgctgttcaaaaattagacttttcaga

SEQ ID NO: 245565 - DNA, 98 bp, Homo sapiens
gctgactacttcatcgtggtaggctatgaccacgagaagccagtgtccgagctgcaggaggagggaatgaacgccatcaacctgcccctcagcccaat

SEQ ID NO: 245566 - DNA, 75 bp, Homo sapiens
aaatacactcacagtatcagaatacaactgtttccttttctccgaatataacaccagcaatcctgacttgttgct

SEQ ID NO: 245567 - DNA, 100 bp, Homo sapiens
gaacccttgaggggaagttaaaggcaagatgatgatgaatgaagtcctggcagcttcctgtgtcccaggccttgtagaaataaatgagacagacgtgctt

SEQ ID NO: 245568 - DNA, 90 bp, Homo sapiens
cggaaccactctttgtgccgcagcttcgcaggaatggctgctttaaatggtggcctgggcagcagtggcctttccaatggcaccgggagc

SEQ ID NO: 245569 - DNA, 89 bp, Homo sapiens
gaggccatctatccgatttcaaggaagccaaggggctttatcctgtggataaacgcagagtgaacgagtttggggagtcctacgaggag

SEQ ID NO: 245570 - DNA, 73 bp, Homo sapiens
atttcctgacaaatttggatcctgtgttcctcacttcaccacaagcaggaatgcagactcagcctcagatagc

SEQ ID NO: 245571 - DNA, 96 bp, Homo sapiens
ccacctcaaaaaagtgctgttctagaaacagaggtactaagatcaaagttttgacattccagacagaacttttcattctacaaatacaacttggcg

SEQ ID NO: 245572 - DNA, 82 bp, Homo sapiens
gggcgccacatgttcgtctggggcggctacaagcgaccccgataacgtggtgttgtgcctgctggcggcggacgaggacgac

SEQ ID NO: 245573 - DNA, 75 bp, Homo sapiens
cagaccagcaacggggtggccgatgaatcacccaacatgctggtgtacagaaagaccccagttattaaagctttt

SEQ ID NO: 245574 - DNA, 99 bp, Homo sapiens
caaaatatcttggctcacgtatttaagagcctgaatattccagatgtggacgagtgccaccgcgtgccgccgccgtgtgacctcgggcgctgcgagaac

SEQ ID NO: 245575 - DNA, 100 bp, Homo sapiens
gtgcggcagtaccgcctccttcccagccgcgcggcttcctccagacctctcggcgcggcttggctgaagaggaaataaaaacagaacaggaggtggtaga

SEQ ID NO: 245576 - DNA, 100 bp, Homo sapiens
tggcatttcagtcactggtttgcagagtccagccccgtgctgatcccattccaatatgtagcttctgtttggggactaaagaatcaaatcgtgaaaagaa

SEQ ID NO: 245577 - DNA, 51 bp, Homo sapiens
ctttgaaagaacttgccagacttaaacagtctgcaggtgtacccaacagct

SEQ ID NO: 245578 - DNA, 95 bp, Homo sapiens
cggcggaacatctggaggctgggaaatgaatatattgtgaggataaacagaccttcttacaggattgtgaggatgatggggaaacagcagctggt

SEQ ID NO: 245579 - DNA, 74 bp, Homo sapiens
gggagaggagctgtggataacgggaggtgaatttccatgtcaacatagtcctgtttgtgaagcctggagctgag

SEQ ID NO: 245580 - DNA, 95 bp, Homo sapiens
tctgaactcaggacttggcaactggaaaggcagctcatcatgcagagtgaaatgagggaaagacaaatggccatgcagattgcgtggtctcggga

SEQ ID NO: 245581 - DNA, 75 bp, Homo sapiens
ggagaactcaaggtcttcatagaccagaaccttagtcccgggaaaggtgtggaagatttccttacaagggccgtg

SEQ ID NO: 245582 - DNA, 131 bp, Homo sapiens
ttctaagtccatcatcacgtgtcgggtgtcccttctggatggtactgatgttagtgtggacttgccagagctgactgctgggcaggaacgtctctcaggagaaagagtggaagagaaaattgtgaactaag

SEQ ID NO: 245583 - DNA, 98 bp, Homo sapiens
atcagaatcaagtcctatagcaggaaaccacccctactcctaatcccccgactacagaagaggagaaaacggaatctaatcaggaggttgctaaccca

SEQ ID NO: 245584 - DNA, 143 bp, Homo sapiens
agaggttagacttgtttcttatatgtgatgccattccagcactggactcatggaggctgagcatttattcaggcatccacaatgtggagggtgtggccgtggactggatgggagacaatctgtactggacggacgatgggccc

SEQ ID NO: 245585 - DNA, 50 bp, Homo sapiens
ccagtgcatgaccttactattgttctttcgggaggaccattgcctcaagg

SEQ ID NO: 245586 - DNA, 101 bp, Homo sapiens
caacagtttggcgtgcaacatggggcttgagaaagggtatatgtctcgagtccacggtatgcaccctaaagagaccacccgtcagctgagcttagctgtga

SEQ ID NO: 245587 - DNA, 90 bp, Homo sapiens
ccgggtggcttacagacgctgccagcatcgccgccgccaggtgtcgtgaaaactacccctaaaagccaaaatgggaaaggaaaagactca

SEQ ID NO: 245588 - DNA, 75 bp, Homo sapiens
cgcgagacgggaaggccctgggcaagaacgctgagaaacgggagccatttgtgcaggccaagctgcggcccgagg

SEQ ID NO: 245589 - DNA, 82 bp, Homo sapiens
ccaagggccctgtaaactcttgtcaaggcaaggatcaatatggaaattatgtaatccaacatgtactggagcacggtcgtcc

SEQ ID NO: 245590 - DNA, 75 bp, Homo sapiens
gaaggactgggatgatacaccttttccacagggaattgagttgggaagtgaatcgtattaaacacagcaagcctg

SEQ ID NO: 245591 - DNA, 123 bp, Homo sapiens
agaaaatctccctgctccgcagcgacatcaccaagctggaggtggacgccatcgtcaacgccggaatactcccccagttgcaagaggcgcaggaccgtggaagacttcaacaaattctgcacc

SEQ ID NO: 245592 - DNA, 87 bp, Homo sapiens
acactggagatcagcaccaaatcccacagaggcatctgaggtgaagctttgttctaagaatatttgtttcatctagtttatgagtcc

SEQ ID NO: 245593 - DNA, 75 bp, Homo sapiens
ttgcagcaccatcaacagatgcccctgataaaggatacgttgctggcataaccttgacaacagattgccttgaag

SEQ ID NO: 245594 - DNA, 75 bp, Homo sapiens
accgccgcgactccgccgcgctgcgcacgcccagcatcattgacaaagaagtttcattaatggcagaaatggata

SEQ ID NO: 245595 - DNA, 100 bp, Homo sapiens
ctcaggtggaaaccaagatagatgtgtcctatgaataccgcttcctggagttcacgactctgagtgctgccacaatggtgcgcatgaatgtcctggcaga

SEQ ID NO: 245596 - DNA, 97 bp, Homo sapiens
ctctactgcgtctaccagagcatggtgctcttcttcttcgagaattacaccggggtccaggtgccattgttatagaacgaccaaatgtgaaatggag

SEQ ID NO: 245597 - DNA, 80 bp, Homo sapiens
atggcggccatcggagttcacctgggctgcacctcagcctgtgtggccgtctataagacaatgcagatcttcgtgaagac

SEQ ID NO: 245598 - DNA, 75 bp, Homo sapiens
ggaatattcaattttcctgcaagaatatctacagccatcactggtgcaagctatatttaacggagatcctgatga

SEQ ID NO: 245599 - DNA, 96 bp, Homo sapiens
cgacatgagtgatgtggaggaaaacaacttcgagggcagagtggtcttcgagggatagcacgaggtggtctgacaggactaacacttaccagcctc

SEQ ID NO: 245600 - DNA, 100 bp, Homo sapiens
ctgacagctcgagtgagcggactgcccaggacttcggaactagacgagtgccggtggtggtgtgcacattgagccccggtatagacagttcccccagctg

SEQ ID NO: 245601 - DNA, 100 bp, Homo sapiens
atcatatttgatgaggtggatctgacagatgccagcgtagctgaatccagtaccaaaaacgtcaacaacagttttacgtgggagctggtgaggtggccaa

SEQ ID NO: 245602 - DNA, 75 bp, Homo sapiens
ttggaagacctattatcagatcaaccaccaaagtgggaaacattgaaatcaagagactaaggtgtcagtatgttc

SEQ ID NO: 245603 - DNA, 100 bp, Homo sapiens
cgcgaagatgcgaaaggtggttttgatcaccggggctagcagggtggaagatgtctatggatgtgacattcctggggacgggtgcagcatacccatctcc

SEQ ID NO: 245604 - DNA, 82 bp, Homo sapiens
gtcggcgtcggcccctgcgccggcctcggccaccgagatcctgctgacgccggctagggacggggaggtttactgcatcgac

SEQ ID NO: 245605 - DNA, 75 bp, Homo sapiens
ccgagaccgcggccgggaccgaggggcgaccattgacgaggtggagacggacgtggtggagattgaggccaaact

SEQ ID NO: 245606 - DNA, 75 bp, Homo sapiens
cttgctcggccgatgaagtgcagaggtttttttctgcaagccacccgaggggactgcctggccttccagatgcga

SEQ ID NO: 245607 - DNA, 98 bp, Homo sapiens
tttgatagtgaaaaaggagtggactttgttctgaattactccaaagcgtctagaattacggagtcaacaaagcaaacctcaagatgcctcttgtctgc

SEQ ID NO: 245608 - DNA, 50 bp, Homo sapiens
ggtggagcaggccctgactccaggtcaaaatgcagatcttcgtgaaaacc

SEQ ID NO: 245609 - DNA, 83 bp, Homo sapiens
ctccaatgggagccgtgaggaatgctactggggccacgtcttctgggaccagcggcttctacgctccggcactctgagttcat

SEQ ID NO: 245610 - DNA, 83 bp, Homo sapiens
cctggagcctcagttggaagcagccgatccagcctgcggagcctgtggggcagcattgactgtgccggaatcctgaaactcag

SEQ ID NO: 245611 - DNA, 98 bp, Homo sapiens
ccatggatgacttgcttgggtaaggacatgaagacagttcctgtcataccttttaaagattctgaaggaagatttccattaggtaatttgtttaatca

SEQ ID NO: 245612 - DNA, 80 bp, Homo sapiens
gtcaccgccagcacgcgcctgcttcccgtctgcgcgagtccacgcagctccccagacaatgcagatcttcgtgaagactc

SEQ ID NO: 245613 - DNA, 83 bp, Homo sapiens
cttttggaatacaaggattgtaccgattttgcgtgaattagaaaagggtcgttgaggacttccacatggagattggcacagga

SEQ ID NO: 245614 - DNA, 90 bp, Homo sapiens
cgcgatgggggcgcaggaccggccgcagtgccacttcgacatcgagatcaaccgggagccggcattcctctgaatattgatttgctgaat

SEQ ID NO: 245615 - DNA, 100 bp, Homo sapiens
tcctgtccatcgtgtgcctgatgatcacgcagctggctggcttcagtggaccaattgataggttatatgattggaaaaagagtcctgactctgatgtggc

SEQ ID NO: 245616 - DNA, 46 bp, Homo sapiens
cctactatgagggtcgagcagagacttgggaagatccccatgaaaa

SEQ ID NO: 245617 - DNA, 89 bp, Homo sapiens
gggcccgtggacatgcgcacctcacacagatccggaacatggtggcggtgctggaagtcatctccagcctggagaaataccctattacc

SEQ ID NO: 245618 - DNA, 48 bp, Homo sapiens
agaaccgtcagtttgagccagatgggagtcgtcgcatggtggatgtca

SEQ ID NO: 245619 - DNA, 75 bp, Homo sapiens
cacgctgcagtgctgctgctgtttggaggtctgtgcatgcatgttcagccatccagtccaatggatcagatgggc

SEQ ID NO: 245620 - DNA, 100 bp, Homo sapiens
tgatgctaagaagttatgtccagatcttctactggcacaagttcgtgagtcccgtgggaaagctaacctcaccaacggatatgttttcccatgaggagaa

SEQ ID NO: 245621 - DNA, 82 bp, Homo sapiens
tttgcagatcttcaacaagaggacccaggagaaattcgccctcaaactgcggttggatttctcacgatgtccagtgttatct

SEQ ID NO: 245622 - DNA, 101 bp, Homo sapiens
cagctgaaaaagttggatgaagatagtttaaccaaacaaccagaagaagtatttgatgtcttagagaaacttggagaaggaacaacaccgatggacttcag

SEQ ID NO: 245623 - DNA, 82 bp, Homo sapiens
ttaaggctctccgtacagacgatgttccaaatcacggatttcgtgtaggaatgaaattagaagcagtagatctcatggagcc

SEQ ID NO: 245624 - DNA, 126 bp, Homo sapiens
cctaagaagaccgagagtcaccacaaggccaagggcaagtgatttgacagatggaggtgcagcgccggccctggttagtgaagtacggggacagcggggagcagattgccggcttcgtgaaggagt

SEQ ID NO: 245625 - DNA, 101 bp, Homo sapiens
gttcccggctccgtggggccgtcttcccggcgagtccgcgacggtcgccgcccacggcgaggtaaaaagaacgtattctcatggtacttacagagctggcc

SEQ ID NO: 245626 - DNA, 75 bp, Homo sapiens
atgctttcttcaagatggaacaaagactgttgagtatgctccatgtagatcacctgttgacagtgtcttgaagag

SEQ ID NO: 245627 - DNA, 75 bp, Homo sapiens
tcagtgatatggagaattggccaacaccaagtgaattagtgaacactggaagtcttggtctgttgcccaggctgg

SEQ ID NO: 245628 - DNA, 98 bp, Homo sapiens
ccctctcctaagagacccaggggaagacccaaaggcagcaaaaacaagagtccctctaaagcagctcaaaagccatgtgacaaatctgcagccccttt

SEQ ID NO: 245629 - DNA, 88 bp, Homo sapiens
cctgttttgaccaacggaaaagagcaaatgcagcatttttgataggtgcctatgcacattccccgtcggagccctttctagagaaacc

SEQ ID NO: 245630 - DNA, 87 bp, Homo sapiens
cgaagctggccaaagcctgcccagacggctcacctgtgcgggatggaacaaaaggtttgtggtaaatatgccagctctagaacacat

SEQ ID NO: 245631 - DNA, 85 bp, Homo sapiens
ctctcgcgggcgggagaacggaaaactcccaacttcctgcaaaatgatgcttcaacacccaggccaggtctctgcctcggaagtg

SEQ ID NO: 245632 - DNA, 90 bp, Homo sapiens
gacacattttatgttgtgtcatttcgaagggatattttaattaactgtcgacgtgctgccacgtctgttgctatttgcccaccaatacca

SEQ ID NO: 245633 - DNA, 91 bp, Homo sapiens
ccacattggtctgttagagttcgaaaagctgagaatcctcagtgtttgctaggtgatgatgaacagtctacacagatggctgcaagttggg

SEQ ID NO: 245634 - DNA, 100 bp, Homo sapiens
tctggattgtagccataagtggacttgctccctgactggcagtcctcacctttccgagctgtctgtgaactcgcaggggggagtggcccctgccaacgtg

SEQ ID NO: 245635 - DNA, 83 bp, Homo sapiens
cagcggcgacacttaatgttcacgcggtggaaacagcagcagcggaaggcagaagctcctcctggggtagagacagatcttat

SEQ ID NO: 245636 - DNA, 100 bp, Homo sapiens
agccttctgcatcctgtgacaaaatattagttataccttctaaagtatggcaaggtcaagccttgaaaagatcttttgaggtcgaggaggtcgagacacc

SEQ ID NO: 245637 - DNA, 75 bp, Homo sapiens
aggatgctttcgataaaggttcactttttggaggctctgtaaaactgggcgcagtaacagtatctccaagtcccc

SEQ ID NO: 245638 - DNA, 82 bp, Homo sapiens
ctgggtctcagccgccaaagaccccgtccggtagtgggtaattccagaattgattggccataccattgtcactgtattactg

SEQ ID NO: 245639 - DNA, 83 bp, Homo sapiens
ctgcagagctgtggcttaccagggaaagaaaccttccaaggaaagattgactgcggatccaggaggctcctcagaaacttcca

SEQ ID NO: 245640 - DNA, 75 bp, Homo sapiens
ctctgctcgtgcctcaaacgcttggattctacagcaacatattgttgttgacctcctgtactggagagacattaa

SEQ ID NO: 245641 - DNA, 89 bp, Homo sapiens
gcagacactgaactttgggcctgaatgagacagggcagggcattgttcatgcactgaccgacctcagcagccccggcatgacctcaggg

SEQ ID NO: 245642 - DNA, 75 bp, Homo sapiens
gatcaacctggagctctacgcctcctacgtttacctgtccatgtttcacgccatggataccttgcaaaggaacgg

SEQ ID NO: 245643 - DNA, 89 bp, Homo sapiens
cccagcagtcaaaccgtacaagaaaaagtcgtgtttctgtgtctccagggagaacttcaggtaaagttctcaaaagtctatggtcctgt

SEQ ID NO: 245644 - DNA, 100 bp, Homo sapiens
aagaagtgcaagagcagaggccttctctagaccttgccaagatggcacagtgctgcttttgacacaaaaacggggttacgtgtggcagtgaagaagctct

SEQ ID NO: 245645 - DNA, 98 bp, Homo sapiens
tttcctttaccaaccagactggcggttcatggagagcaaggagaaggatcgccaggtgctggaggacttcccaacgtggacagaggactgcagaaaat

SEQ ID NO: 245646 - DNA, 50 bp, Homo sapiens
cggcatgcttctggactatttccaggatggagtacagataaggagccttt

SEQ ID NO: 245647 - DNA, 100 bp, Homo sapiens
gaggcaactattgtgcacaaatgaagatgtttccagccctgcctcggcggaccaaaggggcactgaaggctttgtggaactacctgagccagaagggagt

SEQ ID NO: 245648 - DNA, 100 bp, Homo sapiens
gaattacgggctcaacatgccatgttaggacattatgtaaattgtgaggattcttatgtggctagtttgcagtgttctaatcttaggcgcttcaggcgga

SEQ ID NO: 245649 - DNA, 96 bp, Homo sapiens
tgaactgtcttccattcagaatctgaacagggcactgagggagaccctgttagcccaaccagcagctgggcagtttgtgatggacgcctctgaccc

SEQ ID NO: 245650 - DNA, 75 bp, Homo sapiens
ccctttttgtcagattatcaggatgagggtttaccgacaagactgtgaaactttcgggatggtggtgaaaatgct

SEQ ID NO: 245651 - DNA, 100 bp, Homo sapiens
gcagaatggggacaagctccaaaagagacctgagaagcggcagcagtcccttgggggcttctttaaaggcctggattgctgggaggagtaataactataa

SEQ ID NO: 245652 - DNA, 100 bp, Homo sapiens
atggacctgcctgggcatagacttccttaaggttggtcaaagaaaaagtgatgtatgaaaaagaggcaaaacaacaagaagaaaagattgaaaaaatgag

SEQ ID NO: 245653 - DNA, 90 bp, Homo sapiens
cctcggcctcttcctgttgcaccaggttcttcgaaaactgaagcagatgttgaacaacaagtggacagaggactgcagaaaatcaaccta

SEQ ID NO: 245654 - DNA, 82 bp, Homo sapiens
ctctgtccgggggcctggctaaggaaaccctattacctccaggtaattaataatgcttgtgctactcaagccatagtgagtg

SEQ ID NO: 245655 - DNA, 100 bp, Homo sapiens
taggaatctatgatgctgatggtgatggagattttgatgtggatgatgccaaagttttattaggaatcgagcccactggaaacatggtgaagcagccagc

SEQ ID NO: 245656 - DNA, 82 bp, Homo sapiens
cgtcccgctgccgtcgccgccgccaccatgcccaagagaaaggtttacccaaggtccagcctagcccctaggcaccatgtcg

SEQ ID NO: 245657 - DNA, 95 bp, Homo sapiens
ggcagctccactgccgtcaactcctgttctcctcagagcctgcttctgcagaaagccgtcattacacctgattttgaaaaaaaccactgtgttcc

SEQ ID NO: 245658 - DNA, 123 bp, Homo sapiens
aactgttcatcctcacctatgcaaagaaagggaagctattgctgggattttgaggagatctgactgcagccatgagcagcaatgagtgcttcaagtgtggacgatctggccactgggcccggg

SEQ ID NO: 245659 - DNA, 82 bp, Homo sapiens
cactactactgcaagcgccccatctatgagttcaagatcacatggtggatttttagactctgaggagcagttggagctaatc

SEQ ID NO: 245660 - DNA, 74 bp, Homo sapiens
actactcttcgttataagctctcgtctggggcaactcagaagaacagacctacctgttggcctgcctagtagat

SEQ ID NO: 245661 - DNA, 74 bp, Homo sapiens
ctaccctggaggagattctggggcagtatcaacggagtctccggggtacttaagagattatggcatcagaaacc

SEQ ID NO: 245662 - DNA, 87 bp, Homo sapiens
cgagaaccgtcagtttgagccagatgatgccatcccgcccactttctacagaccctacttcagaattgttcgatttgacgtctcagc

SEQ ID NO: 245663 - DNA, 131 bp, Homo sapiens
gaaatatgtaaccctgtccagtaatggctttctactctaccaccccagtattaacgcctggagctgctgaagactgctattgggaaagctggctacactgataaggtggtcatcggcatggacgtagcggc

SEQ ID NO: 245664 - DNA, 75 bp, Homo sapiens
atggttctgaagagtatggagcctacgtagattcataaggataaaagaatcagagtgtctcaacccttgacaaga

SEQ ID NO: 245665 - DNA, 80 bp, Homo sapiens
ctgttttgccggaggagcccctcaggccaccatggtgaatccgggcagcagctcgcagccgcccccggtgacggccggct

SEQ ID NO: 245666 - DNA, 50 bp, Homo sapiens
agacggcaatgtgctgcttcacgaaatgcaaattcaacatccaacagctt

SEQ ID NO: 245667 - DNA, 125 bp, Homo sapiens
atgcaaatgaggaagcgctccagttacctgcaaaagcttgggcttggagaaggatgtgatcttcgtggtggaaagctaaattttaaaaccaccccaatggatgcagacagtgatgttgcattgga

SEQ ID NO: 245668 - DNA, 90 bp, Homo sapiens
gtaccaccttaccaaagagctcaaggagcgaatccgtttagctcgacagattgagaaatctgagtatcggaacttccaggcttgcctgca

SEQ ID NO: 245669 - DNA, 100 bp, Homo sapiens
gtgttcatttatcccagctgtgcaatggtgtcttggactgcccagatgggtatgacgaaggagtacattgtcaggaaaataaacagagttgtctttgttg

SEQ ID NO: 245670 - DNA, 75 bp, Homo sapiens
tggttataaattatgatctacctaccaatcgtgaaaactatattcacagttcaaatctgaacatcaatgatgtac

SEQ ID NO: 245671 - DNA, 51 bp, Homo sapiens
atcctgtgggggccgccgggctgcggcaagtgaacacctacctcttcatga

SEQ ID NO: 245672 - DNA, 51 bp, Homo sapiens
cgagcggaggagcaggcgccggagagatcttgtacaaccagataaacctgc

SEQ ID NO: 245673 - DNA, 140 bp, Homo sapiens
gcagttgaaactaattttgtggatagagaaactgttggaactgctttacaaagtattttacctctacggcagacacatgcaggccaacccagaaccaccgaagaagaataatgacaaatcgaaaaagatcagccggaaac

SEQ ID NO: 245674 - DNA, 75 bp, Homo sapiens
agtgatgcaggctgctgcgaactcagcacaaagcaggtcaccatcagaaaagctaagtttgctgtatagtgagga

SEQ ID NO: 245675 - DNA, 96 bp, Homo sapiens
cacagtatggtagccacacccccagtctatccttcactggagtctgatgatgatgaccctgctttgaaatctcgacccaagaaaaagaagaattca

SEQ ID NO: 245676 - DNA, 90 bp, Homo sapiens
ttcgtcatcctcatattatcaaacttctggatgtggatagtgaagctaagaaactattgggtttaggacagaaacatctggtgatggggg

SEQ ID NO: 245677 - DNA, 75 bp, Homo sapiens
aggaaaccgacgagaggacctcagctccaaggtatcaaactggtttggaaataagcgaatccggtacaagaagaa

SEQ ID NO: 245678 - DNA, 75 bp, Homo sapiens
gccttctccacgctgggccgggtgttgcgcctggcctacagcgaggctgactccagggattagagctcgatctgc

SEQ ID NO: 245679 - DNA, 100 bp, Homo sapiens
tggaagggaaaatagactatggtgaatacatggataaaaataatgtgaggcgacaagcaacaacaatcatagctgatgatgttgaatttgaagtatcatc

SEQ ID NO: 245680 - DNA, 80 bp, Homo sapiens
caggatgctgtagtagcaaatcagggtaagagtaaagtctccaccagaagctggtacccagttaccaaagatcatcttca

SEQ ID NO: 245681 - DNA, 100 bp, Homo sapiens
ctttatcacatgacagctcatggtgatgatgttgatttcccaataggacatccacagttatttcaggaaattcttctagtgccagcgtttcctcgtcagt

SEQ ID NO: 245682 - DNA, 82 bp, Homo sapiens
cgcgcccttgttcctgcagcttgttctaagaacggaagcatctgggctggatggaatttagcatcaagcagagtcccctttc

SEQ ID NO: 245683 - DNA, 75 bp, Homo sapiens
gccgcgaggaggcgcgggaggtgttcgagaacgaccccgagacgatcatgcatgccccgcggtccagggacaggt

SEQ ID NO: 245684 - DNA, 75 bp, Homo sapiens
cgggctggctcaggacccgtgttcctcagtggccaggaacgttatggttacttccaacttgggaaagatgatctt

SEQ ID NO: 245685 - DNA, 75 bp, Homo sapiens
ccgcaatggctggaatgtcatggacttcatcgtggtcctcagtggtatgaagtgtaacagaacagactttaccac

SEQ ID NO: 245686 - DNA, 91 bp, Homo sapiens
gttcggccaagggaccaaggtggaaatcaaacgttcaaggtgtttgcagactatgaagcctacatgcagtgccaggcacaggtggaccagc

SEQ ID NO: 245687 - DNA, 85 bp, Homo sapiens
ctgacaggacctacaccttctgatgtcttcaaacagtactcacaccttacaggcaggatgacgcaaaacacggtgattgtgaatg

SEQ ID NO: 245688 - DNA, 98 bp, Homo sapiens
ggtgtttgcattggagaaaagcgaaggattgtggtcccgcctcacctggggtatggagaggaaggaagaggattggcctaatgaagaagttcaacctg

SEQ ID NO: 245689 - DNA, 100 bp, Homo sapiens
acagacggcggaggaggcgcagccggacatttagccgctcatcttcgttccagtctcatcagattttccatgtcctggtggtggcagcagcctttgtcca

SEQ ID NO: 245690 - DNA, 50 bp, Homo sapiens
gaaacatctcaccaatttcaaatccggtattattgtctctaagccagacc

SEQ ID NO: 245691 - DNA, 75 bp, Homo sapiens
gaggtggcaaacagcttcgcagtcactaatgcttgctgctgcactgaataatgattccagccagaatgtcttgag

SEQ ID NO: 245692 - DNA, 100 bp, Homo sapiens
tctattatcacccccaccccgaagatattaagttccacttgtaccttgtccccagcgacgccttgctaacaaaggtatttgaaatatctcaccaaaaaat

SEQ ID NO: 245693 - DNA, 98 bp, Homo sapiens
gtgcatgatgtgcgatgtgcggaagggcacctccacccggaatgtatcctgtcaggtataatgtcagtgaatggcaagaaagttcttcatatggatcg

SEQ ID NO: 245694 - DNA, 73 bp, Homo sapiens
tcaccgaggagctgccgctcgctgccccgggcaggggcacagatgaaatcgttagcaccttaggagaggggac

SEQ ID NO: 245695 - DNA, 83 bp, Homo sapiens
atgtgaagctcaccgagacggcgatccgggcgctcgagacttaccagagccacaagggctttgttcgcgggggtcacagctct

SEQ ID NO: 245696 - DNA, 100 bp, Homo sapiens
ctgagccctagaatgggtgaggaatgtgttagtgtctggagccatgaaggccttgtgctgaccaagctgctcacctcgaccaccatcatggcagtggagt

SEQ ID NO: 245697 - DNA, 90 bp, Homo sapiens
gtggaggaaggggaacctgaccctgagttcgaggcaatcctggacacggtggatccgaacagcgggcgatgatgagatctcatttgaccc

SEQ ID NO: 245698 - DNA, 96 bp, Homo sapiens
ctacatcagcttcggcctgagtgatctctatggtgacaacagagtccatgaaattgaagatgttcctgctccttctacatctgcagataaagtgga

SEQ ID NO: 245699 - DNA, 88 bp, Homo sapiens
cgccagcggccgagcgggcggcttcctggcctgggcgctccggtggcggcggagctggtactcctggttaatcaacagcttcgtcaac

SEQ ID NO: 245700 - DNA, 85 bp, Homo sapiens
cactgcctttaaccctcagcctcagagtcagatgcaggatgatatgatgctgctggtccaaggactacatttcgagaaccccaac

SEQ ID NO: 245701 - DNA, 125 bp, Homo sapiens
ggattctgctcgtgttccaaatcatcgcctttctggtgggaggcttgattggtgttacctcattttgaaagtcttgggaaacaggaaaaaattcctaacaaaatgtcagcttttcgaaatcattg

SEQ ID NO: 245702 - DNA, 121 bp, Homo sapiens
ttaggatttgttagaaaggagacccgactgcaactgctggattgctgcaaggctgagggacgagaacgaggaaaccacccctactcctaatcccccgactacagaagaggagaaaacggaa

SEQ ID NO: 245703 - DNA, 90 bp, Homo sapiens
agtgggtagatgtcgttctgaaacgcagggaattagaatcatggagatgctgctaaaggaacagtgtggtgcccccttagctgaataaag

SEQ ID NO: 245704 - DNA, 90 bp, Homo sapiens
gtcagagcgcgtgcgcacccgaggggcttactgccacagccgctgcctgaggaaggaagcagccaccctcgccatggcctccccgcccgc

SEQ ID NO: 245705 - DNA, 101 bp, Homo sapiens
cggagaggcgtccgagccccgggccctggggcaggagcacgacatcaccctcttcgtcaagaatcgagagatgcttccgttttggatgaacagcaccggca

SEQ ID NO: 245706 - DNA, 88 bp, Homo sapiens
ttcagctgtcacaagaccaatatttggtatactgggcacaatccatctggtggcagatatttaatgaagatggatccattaaaggagc

SEQ ID NO: 245707 - DNA, 100 bp, Homo sapiens
aagatggcagccaccacgggctcgggaccctgatccatcaatatgactacacatttgattggacaaagttaaagcagaaagcagcacagcaggcagcctc

SEQ ID NO: 245708 - DNA, 75 bp, Homo sapiens
caagcctttgatgacaaaccactgggagtgtccactcgccttccaccagcatggcaacgtcttcacagtaccgcc

SEQ ID NO: 245709 - DNA, 48 bp, Homo sapiens
gagccctgcgatactattatgacaagtgtggataaaaaggggaattac

SEQ ID NO: 245710 - DNA, 75 bp, Homo sapiens
gtcgcctgggtccctgctggagtatgctggtggaggccatagtggagtttgactaccaggcccagcacgatgatg

SEQ ID NO: 245711 - DNA, 114 bp, Homo sapiens
agcaccgcgaaagccccaggggccattggaccctacaggtggataatattaatgcagctgtgatggatttgaaaaaaaagaagatccgcagtctaagtgaagaggtcaaaatag

SEQ ID NO: 245712 - DNA, 98 bp, Homo sapiens
ccagcttcgccttcagctcgcacttcgaccccgccggctcagttcggggaagctgcaggagttcggcgtgggtgatggcagcaagctgaccttggtac

SEQ ID NO: 245713 - DNA, 74 bp, Homo sapiens
gccgaagcaggacccgaagcctaaattccaggagggctggagcattggatttgctaaaggagcttaagaatatt

SEQ ID NO: 245714 - DNA, 100 bp, Homo sapiens
ggagtcactcgtggagacctatgggaagatcatgaaccatgaagtaatggaactgctggtccatctgaataaacgtataaaaagccgccccaaaatacaa

SEQ ID NO: 245715 - DNA, 106 bp, Homo sapiens
ggcgagtttccgatttaaagctgagctgcgaggaaaatggcggcgggaggctgaaggtgatgtggccgccctcaaccgacgcatccagctcgttgaggaggagttg

SEQ ID NO: 245716 - DNA, 130 bp, Homo sapiens
aagctgtgggaagaaaagcagggtgctggtttctaggacactaaacctcatgtttgggaatacctgctactgcaattcagttcttcaagcactttatttttgtcgtccatttcgggaaaaagttcttgcg

SEQ ID NO: 245717 - DNA, 82 bp, Homo sapiens
ctcgccgtggtcaagttcaccatgagaggggtgagcccatcactttctgtgaggagagttttgtaaagcaccgctcaagcgt

SEQ ID NO: 245718 - DNA, 100 bp, Homo sapiens
agacctaagctttttccagagaagagaagctttactggtgttccagccctaagtcactcaagactgcttgcaactgattgcagacagtgaaacaccaact

SEQ ID NO: 245719 - DNA, 100 bp, Homo sapiens
gaggacataaggaactagtcacagtgttgctgcaacatagagctgacattaactgtcagacaaagaaacagccttggtataatagcacgttagcatcaag

SEQ ID NO: 245720 - DNA, 100 bp, Homo sapiens
ggctgctggacgacagcgagtacacctgcaccatccaggaccttaaaggctttgatccaggagagaaatactttcataacacatcatggggtgatgtttc

SEQ ID NO: 245721 - DNA, 83 bp, Homo sapiens
ataaaaaatggcagtaaccctgagacaaccacttctggtggttgccactcacctgaggatggacttgccatgaggtgttgaag

SEQ ID NO: 245722 - DNA, 107 bp, Homo sapiens
tcacagagatgaacctcatagaccgcaaggagctagagcctttgataaaactgtcaatgcaactacatatgaaaaatccaccattgaagaagaaacaactactagcg

SEQ ID NO: 245723 - DNA, 90 bp, Homo sapiens
tgctcatggcgcacagccagcggctgctcttccgaatcggttttttcaagggggaacatggcaaaggtgttcagtttcatccttgttacc

SEQ ID NO: 245724 - DNA, 83 bp, Homo sapiens
ggccgcgccgacctggtcatgagcttcgttaacatgggtatcacctcttctgggctcaagatggacaacaagaagcgcctggc

SEQ ID NO: 245725 - DNA, 97 bp, Homo sapiens
gcagtttaagatccagcagctggccatttctggaatttgagagcgtattttgcggtaaaactggccgaaggctaaagctgaccagaccggactcctt

SEQ ID NO: 245726 - DNA, 100 bp, Homo sapiens
ggcgctttctacctgcccggcctggcgcccgtcaacttctgcgacgaagaaaaaaagagcgacgagtgcaagacaaggcgcctctgtcgaagagccttct

SEQ ID NO: 245727 - DNA, 95 bp, Homo sapiens
ctgagggctgaccctgggggctcgtgaggctgccaccgctgctgccgctacaggattcatactcatatgtaaggtccacagctcctgctgtagct

SEQ ID NO: 245728 - DNA, 50 bp, Homo sapiens
cagagagctattattccctgtattaaagtgtgcttctaaaattggggata

SEQ ID NO: 245729 - DNA, 100 bp, Homo sapiens
atgttacacacggagtatcaaactctgctgccaaggaagagctaaggagcaaatccaagatctgtgccaatgtgttttgtggagccggccgggaatgtgc

SEQ ID NO: 245730 - DNA, 90 bp, Homo sapiens
ctcacggcggaggacgacgcgctcaaccagatcgcgcgggagaaccaagcgcctccaggtctctacacgaagacccaggacccagccaaa

SEQ ID NO: 245731 - DNA, 100 bp, Homo sapiens
aaggctactttgacgccctggtgaagatgggggagctggccagcgagagccagggctccaaagaactcgacttcgacccccaccacttctggcagtggag

SEQ ID NO: 245732 - DNA, 90 bp, Homo sapiens
aataaatcttcctgccaattcaacaatcaaaaagaaagctgctgttatcatcatggctgtagagattgatcagggaccatgaaaagaaac

SEQ ID NO: 245733 - DNA, 82 bp, Homo sapiens
cgcgcagcccagcgcagccatgtgtggacactgccagcggctgcagccgacttggaatgacctgggagacaaatacaacagc

SEQ ID NO: 245734 - DNA, 100 bp, Homo sapiens
ggagcagaagggaggctccaagacctcatcaacaattaagattgatcagggaccatgaaaagaaacttgtgcttcaccgaagaaaaatatctaaacatcg

SEQ ID NO: 245735 - DNA, 100 bp, Homo sapiens
ggagatgggctcagcagcagccaataggacatgatccaggaagagcagtaagggactgagctgctgatgtatttccactacacaaaattttccacctctg

SEQ ID NO: 245736 - DNA, 82 bp, Homo sapiens
tccatattgatcgcctggactgtgcagtatttccagtctgtctcagattccctaaggcgaacccgtctgattctcttcgttc

SEQ ID NO: 245737 - DNA, 82 bp, Homo sapiens
ttgaggctgaggactgactggggttctgagactccctgtcccggaccgcagcaaaatgatgcttcaacacccaggccaggtc

SEQ ID NO: 245738 - DNA, 74 bp, Homo sapiens
tggaattagtcacagaaaagggccatacatttgccgaagagcttcagaaacaacacagtcactcctggcggcaa

SEQ ID NO: 245739 - DNA, 75 bp, Homo sapiens
cttgctcaatggggcctcccagaaggagtctttgttgctggctatgaaagcctgaaaaagaatgaaattcttcat

SEQ ID NO: 245740 - DNA, 75 bp, Homo sapiens
cctgctgctctgcctgctccacaagcggcgccgcgccctcggcctgcacgggggtcctactgggcaatagacacc

SEQ ID NO: 245741 - DNA, 75 bp, Homo sapiens
ccggcgccgtcgcgccactcctccgagagcccatgaaatcaagagcaccacagctacatttggaatacagattct

SEQ ID NO: 245742 - DNA, 75 bp, Homo sapiens
ccttaatgtgcatgatggttgtgttaatgactccagagagtaagatcagattcgtccacaaagagatgggcataa

SEQ ID NO: 245743 - DNA, 90 bp, Homo sapiens
cgccgcacgagcaccagcctagagccagatggattaccgggccttggtgcatgagcgagatgaggcagcctatggggagctcagggccat

SEQ ID NO: 245744 - DNA, 74 bp, Homo sapiens
ggcggcttcctggcctgggcgctccggtggcggcggaggccctgggctgcatcttgtacctgctgtgcttccgg

SEQ ID NO: 245745 - DNA, 95 bp, Homo sapiens
ggagcatgaatggagcaaaatggcggatcatgtgcagaatggctattcaagtggacaagttcaactttgagagtttcccggagtcccctggggag

SEQ ID NO: 245746 - DNA, 75 bp, Homo sapiens
tgattctacatctcaagctcatattttgaagtgtttacgggtggatccaaccgaagagaaaggggtgctccacca

SEQ ID NO: 245747 - DNA, 100 bp, Homo sapiens
caggaggaaaggccagactcacagaaggattcactccttctccagttgcacagccacacccttcagctggccttaatgttgactttgaatctgtgtttgg

SEQ ID NO: 245748 - DNA, 75 bp, Homo sapiens
tcccacttcaaacattcgtctcggaaaccccgcctcttacagtcacgaggttaacctcaccctacagatgaagat

SEQ ID NO: 245749 - DNA, 50 bp, Homo sapiens
cagcagggttcatttaaaatggccatcatctctcagcaaggtgacatatt

SEQ ID NO: 245750 - DNA, 100 bp, Homo sapiens
ctcggcgccggtaggaagagtcagaggggtgaccagagagcccaacgcctggtgctcaagactttctccgaggtggttcgagatcagatctctcactgca

SEQ ID NO: 245751 - DNA, 50 bp, Homo sapiens
cagactgcctcaacagagtgatagacggagtcttgctctgtcgcccaggc

SEQ ID NO: 245752 - DNA, 102 bp, Homo sapiens
cgaacttttgacacggctttggaaacgacgtcatgtgttagaaccctcacacggacgcctggaagagccacggcttggtggaggtggccagctactgcgaag

SEQ ID NO: 245753 - DNA, 101 bp, Homo sapiens
ccgatgatgtgcagatcaatgacatttccctgcaggactatcctattaagtgtaatctcactgcttaatgagcccaacaccttctccccagccaatgtcga

SEQ ID NO: 245754 - DNA, 75 bp, Homo sapiens
agaacatccagtttgatgtttactacaaggtgatttgtggagctatgatttcttcagtggtgaatttgtggtgtc

SEQ ID NO: 245755 - DNA, 90 bp, Homo sapiens
agtttatatacacaggaactttaaatcttgacagggacttgccatgaggtgttgaagccttgtttcactgagttggagagactggaccta

SEQ ID NO: 245756 - DNA, 82 bp, Homo sapiens
tcgtcatgctctttgtagcgtggtgcttctgttgctcacagtgtaaacaggaacatcgataagtagtgtaaaaacttgcaca

SEQ ID NO: 245757 - DNA, 50 bp, Homo sapiens
cccagatgtgcaacaaagtgcgatgatggcctgatatgaaggagtcacgc

SEQ ID NO: 245758 - DNA, 51 bp, Homo sapiens
atccagatggcagccagtcagtggtggaggaacatgtttgacaagctgaac

SEQ ID NO: 245759 - DNA, 75 bp, Homo sapiens
ccgcccgaccccgtcccgaccctggccgccccgagcggagcctggagcttcaggatgagttagagaaaggtgaac

SEQ ID NO: 245760 - DNA, 135 bp, Homo sapiens
aggacttcccctccgtggtgacagcctctgggtcctcggtcggtacagtctctgcacctcgcgccccagcagtatcatcgagaaaggagaagaacactgtggacatctaattgaggcccacaaggaatgcatgag

SEQ ID NO: 245761 - DNA, 98 bp, Homo sapiens
agctctgcacgctggggagtttgttgggggatgaattcatttaaccccatgtccttggggaacgtccagttgccacaagcacccatgggacctcgtgc

SEQ ID NO: 245762 - DNA, 100 bp, Homo sapiens
ggtctgcagacattgatgaagaaaatctgttgcttcttggacacttaatgattgttggcaagaaatgtgctgctgatctgggcctgaataagggttatcg

SEQ ID NO: 245763 - DNA, 90 bp, Homo sapiens
ttttgccaggtgtttgttaccttggagccagaggttagtgaattaaaaagcgtgcagccctctaaccatggcatctaccttccttcggac

SEQ ID NO: 245764 - DNA, 100 bp, Homo sapiens
caggggccaactgtgcccaccagctccccatcgcagaggccatgctgacctacaagcagaagagaacaatgtgagcttcgtggatgacagcttccctccc

SEQ ID NO: 245765 - DNA, 80 bp, Homo sapiens
gcagagtcctgtggagtgggccagggtcatgcagaaaaccaatgtggtgaagctcgtgtgtggagtgccacggtacaatc

SEQ ID NO: 245766 - DNA, 51 bp, Homo sapiens
cctcaacccaggagttaaaaaggcaacgtgttggaccttccggagcttctc

SEQ ID NO: 245767 - DNA, 100 bp, Homo sapiens
cagagacctgatggaagaggaggctgtttgtttacagatgctagaagagactcggcaagttaaaggtttcccaaactctcgattgcctcttgcaagcaga

SEQ ID NO: 245768 - DNA, 75 bp, Homo sapiens
caacaccctctacgaaggcggctacttcaagggattatcttgaacacataacctccattggccccaggactacag

SEQ ID NO: 245769 - DNA, 90 bp, Homo sapiens
agatttggatgaagacacagatccaaaccatatcaagctatctgcacatggaacaacaccctggacatggctccagagatcaacttgccg

SEQ ID NO: 245770 - DNA, 75 bp, Homo sapiens
tgatagcgacgtggagagcccctacacgctgatcgattctgcagcctggcatcctcgctacaacctcattgttgt

SEQ ID NO: 245771 - DNA, 82 bp, Homo sapiens
tcgagtgaccgagaccgcggccgggaccgagggctgaaggggatgctaagggagataaagcaaaggtgaaggacgaagtaag

SEQ ID NO: 245772 - DNA, 75 bp, Homo sapiens
tttcctgtgaccaacagtcgagcgcgaaagatcctgggcatggccttctccatgaccctcttccagcacatccac

SEQ ID NO: 245773 - DNA, 75 bp, Homo sapiens
atccaggaagagcagtaagggactgagctgctggagtcaactgagagttcaaatacaacaattgaggatgaagat

SEQ ID NO: 245774 - DNA, 75 bp, Homo sapiens
taccagaatttccttcttgtagtctattgaagatatccatttggggatgaagtctactttgacagctagcaaggc

SEQ ID NO: 245775 - DNA, 50 bp, Homo sapiens
actgcctggccgacgtggacaccaagataaaataccatgaggagtttgag

SEQ ID NO: 245776 - DNA, 50 bp, Homo sapiens
gacgaaggaagtggagctggacagccttcaagatggtcagcaaggccagc

SEQ ID NO: 245777 - DNA, 80 bp, Homo sapiens
tgcaaggactttgtcaggctgaagaagatcccgacatggaaggagatggcgaaagggggatatgagactttctactcgga

SEQ ID NO: 245778 - DNA, 83 bp, Homo sapiens
cacattcagagcctgctgcgtgggagcctgaaagctccttcctgtcctgtgtgtgtctggggaagagacttacagaagtggag

SEQ ID NO: 245779 - DNA, 116 bp, Homo sapiens
gaacttggaaaaaaggaactgtgtgcagtaccgcaggcattttctggtggacaacagtgtgtttcatgaggacaagaattttgggcagatttgaatgccatgaacgtgtatgaaac

SEQ ID NO: 245780 - DNA, 83 bp, Homo sapiens
tgttaccagggaggagcagtgaaagagaagggaatgctaagaactgctgggaggatgacacttatgtccctgatgccaaaaat

SEQ ID NO: 245781 - DNA, 100 bp, Homo sapiens
gtgtcacagaacgcatccatcaaaccatgcactatcagtttgatgccctagggtggtcccaaccatgtgatgtctggagcataggatgcattcttattga

SEQ ID NO: 245782 - DNA, 96 bp, Homo sapiens
cctcgccacgctcctgatgatcacgtataaaagatcccatgacagattctgttgtcacgtctccttacagagtttgagcggtgctgaactgtcagc

SEQ ID NO: 245783 - DNA, 109 bp, Homo sapiens
cgtgatgttggagaactacaggaacctgctttctctcgatgaggataacatccctccagaagatgaatgaaaaaggcaggcattgacctccctctgaggcagtttccag

SEQ ID NO: 245784 - DNA, 82 bp, Homo sapiens
cccagtgtctctgctgctcaaaatttctcttccaggtgtggacactgccagcggctgcagccgacttggaatgacctgggag

SEQ ID NO: 245785 - DNA, 98 bp, Homo sapiens
ccaaggccatctccaagaacgtgctcttcgctcacctggatgacaacgagaggagtatggtttgaagtggtgaacatggatttttctcggcttcacat

SEQ ID NO: 245786 - DNA, 100 bp, Homo sapiens
tccttcaaaattaaaagaggagcagcatggcatttcagtcactggtttgcagagtccagctgtgtgttctcatttcacccaaaacctttggacagtgcag

SEQ ID NO: 245787 - DNA, 82 bp, Homo sapiens
cagaaaggcaggcgctgcgagacggagacggcaatcgcacctggggccgcctaacagggggatatgagactttctactcgga

SEQ ID NO: 245788 - DNA, 98 bp, Homo sapiens
gtgtcgcccctccagctgaccaacatccaagtgccccagcaggtactgggcctaatcgctacgtgcctctttggctatgatgcctatgtcaccttccc

SEQ ID NO: 245789 - DNA, 50 bp, Homo sapiens
tctctatcgaacaaaagtagagattctgagacgcccatccctgcaacgtc

SEQ ID NO: 245790 - DNA, 83 bp, Homo sapiens
cgaaggtactcgcagcacttggagcgcagaaccggccgcgcccgatctgccgacaccccaggccatcgagccccaggccatcg

SEQ ID NO: 245791 - DNA, 75 bp, Homo sapiens
atttgatggaacaatcattagttcagtgcagtgtctgacttgtgacaggagagggtctcaaaaccaaagatctcc

SEQ ID NO: 245792 - DNA, 88 bp, Homo sapiens
attcgcagtggtcgcttcttctccttgaacttttgagcatgctgttctagctgcaggaacagatttccgttctgacagactgtgggaa

SEQ ID NO: 245793 - DNA, 100 bp, Homo sapiens
ctgtttacgttcttgtcagaactcgtgccttttgagtctccccggtacctgcagcctcctgacaaggtgatccgggcgggccccgcaggaattttatccc

SEQ ID NO: 245794 - DNA, 100 bp, Homo sapiens
ttcgtacacatggagcgggcagaggatgcagtggaggccatcaggggccttgacaacacagagtttcaagttgcttctgcaggaagcctttttggtggca

SEQ ID NO: 245795 - DNA, 96 bp, Homo sapiens
gggtcttgcattcttggcacatctaggaagaacgtgcaaggatgcgaattgtgaatcgcttctccaaacaggtactagatggaaacttgagaaagg

SEQ ID NO: 245796 - DNA, 100 bp, Homo sapiens
gacaaatcagaagatggaaggctaatttatactggcaatatggcccgagcagtgtttgtggtggacttgctttgtgaagagacagttcatgaacaagagt

SEQ ID NO: 245797 - DNA, 101 bp, Homo sapiens
gaaggaggacttggaggagtgggtcaccattgggcgcctcttcagcttcctgtaccagagcagccctgaccaggtggccactaacacggacaccagccgaa

SEQ ID NO: 245798 - DNA, 83 bp, Homo sapiens
cctccgggacacgggtgtgcagggcgtcatgagcgcagactccgccgtggtcatggaggagggaagtccgggcgaggttcctg

SEQ ID NO: 245799 - DNA, 103 bp, Homo sapiens
tcatctcaacccacaacgccttcccagtcatcagctgcctccaccccagcccccaaccttcccaggctcttcgcggccaagtgcagcggctgcatggagaaga

SEQ ID NO: 245800 - DNA, 83 bp, Homo sapiens
aaagcagcgtgcgttcagccctgggctgacatagcccagagatacaggataagcaaatacccaaccctcaaattgtttcgtaa

SEQ ID NO: 245801 - DNA, 83 bp, Homo sapiens
gcggccaagcagccaaccatgctcaacttcggtgcctctctccagcagactgcggtgtccctggccagtgtccttccacctgt

SEQ ID NO: 245802 - DNA, 75 bp, Homo sapiens
gaggcatatgaaattcctcatcgaggaaacactggagatgttgctgttgagatggatctcaataagaccgaggag

SEQ ID NO: 245803 - DNA, 73 bp, Homo sapiens
actttggttacctatgtacctgttaccactttcaaaaacctgtcatttactccatcctttatagtgatgctac

SEQ ID NO: 245804 - DNA, 100 bp, Homo sapiens
ttctaccacccctcagttgcacactcgcttgacccctgctgcaattgggtcctttgccgtgtgtactgcgagagtgaagaccattctcattaatcagact

SEQ ID NO: 245805 - DNA, 100 bp, Homo sapiens
tcaactgccatcagggaaagccgttgcctatggtgaatggaagagaatccgaagaagaaaatctcaataaatctgaaataagtcaagtgtttgagattgc

SEQ ID NO: 245806 - DNA, 98 bp, Homo sapiens
gtcgccgctgctgggagatgggcctactcgcccgccaccctgcgctgccgccgctctgaggagttaaagggacctaatacctatcattgctgctctgg

SEQ ID NO: 245807 - DNA, 82 bp, Homo sapiens
tggagtcgcccgcctcgagccagcccgccagcatgccccagtccaaagcctggtggagttgacagaagagatcctgaagctg

SEQ ID NO: 245808 - DNA, 98 bp, Homo sapiens
ggcagctgcagcagaagagcggaaatgtcaaacgtggaggtgcagtagacattgttgcaatcatgatcggcaatctgaaaggcacaaaaattctgcaa

SEQ ID NO: 245809 - DNA, 83 bp, Homo sapiens
gttaaagatgagcgggtggcagcgacagagccaaaatcagagctggaacctgaggagagagaactcacgtgctgtgtgtcaga

SEQ ID NO: 245810 - DNA, 74 bp, Homo sapiens
tcagtgtgacccatcctgaactgaaagttgataccagaaggccctattgatcaggggccagctataggaagagt

SEQ ID NO: 245811 - DNA, 80 bp, Homo sapiens
cagctgtgatcacagtcactgacaccaacgataatcctccgatcttcaatcccaccacgatcctaagtgtgaacgtgaag

SEQ ID NO: 245812 - DNA, 100 bp, Homo sapiens
caagaaacagttgaaaagttccggcagagaattctggctccctgtaaggtgaatgaaaactttgccattgatttgatagcagagcagcccgtgagcgagg

SEQ ID NO: 245813 - DNA, 97 bp, Homo sapiens
cagaacttctcgcagcagctgctccaggaccacattgaggcctgcagcctccccgaacacaacctcatcacgttacagaatgtctgaaggggacagt

SEQ ID NO: 245814 - DNA, 75 bp, Homo sapiens
agaatgaagctgcggaccctcgtgataatgtggatgcaaatgatcttaagcagttttttgagaccaactattctc

SEQ ID NO: 245815 - DNA, 100 bp, Homo sapiens
tgtataagcacagcaggacaccaggacctggcctgaagacatttcctctcctcccctctggatttctcagaggaaaatgactcaggcactttggacacgg

SEQ ID NO: 245816 - DNA, 74 bp, Homo sapiens
ttccaccttcctttataacactacagattaaagactttctgaatggaccagggttttgacccaccacatcagag

SEQ ID NO: 245817 - DNA, 75 bp, Homo sapiens
cagagttcctccgatggccaggaaccttttagtacttccgaatgaaactagtgatcgagaagatggcctccccaa

SEQ ID NO: 245818 - DNA, 100 bp, Homo sapiens
gacaaagggaagtatgtcatggagctctttgatggcaaaactggacatcagaagacagtggatctctctggacaaggtgggcatatgtggtcgcactggc

SEQ ID NO: 245819 - DNA, 96 bp, Homo sapiens
attaaaagaggagcagcatggcatttcagtcactggtttgcagagtccaggtatggctatcctgatccttcttacctgaaacgtgtcaaagaggag

SEQ ID NO: 245820 - DNA, 51 bp, Homo sapiens
gatcacatgggctaaattttgcaaaaagtttgcctgcaatggtactgtaat

SEQ ID NO: 245821 - DNA, 90 bp, Homo sapiens
cacacatcagtctatcagtgttcggctccagcctgtgaagaagttaactgattcccactggaaattcgttgtatgaatcttattacaagc

SEQ ID NO: 245822 - DNA, 100 bp, Homo sapiens
ccaagtccgtgctgtttgtgtgtctgggcatggctctgtgagcgctgatgaggctgcccgcacggctcccttccacctcgacctctggttctacttcaca

SEQ ID NO: 245823 - DNA, 100 bp, Homo sapiens
aaattgagacggagctaagagatatctgcaatgatgtactgcggagcgtgctttggacaccatgaattttgatgttataaagggcaagccagtacgcatc

SEQ ID NO: 245824 - DNA, 50 bp, Homo sapiens
ctgggacactcctgaagtcgggaaatgaatggctattcgtttgaggattt

SEQ ID NO: 245825 - DNA, 83 bp, Homo sapiens
ccaagagctatcaggggaagatatgcatcagttccatcgagccattactacagattgaagaattagggtctgaaggaaaagta

SEQ ID NO: 245826 - DNA, 100 bp, Homo sapiens
tgcaattcataatggagctactgtactggctattggaaggaggagattctgaagataaggagggaaatccctaagtcagccaacccctcctcccatgcca

SEQ ID NO: 245827 - DNA, 83 bp, Homo sapiens
ggcagcagcggcagcggcaagcaccgtcatcatcagatttgaaatatttaaagtggatacaaaactatttcagcaatgcagac

SEQ ID NO: 245828 - DNA, 101 bp, Homo sapiens
ggctcgcctcgactccaaatggttgaaaacagatatacaggccagtccctgagacgaataggaccttgtccctggatgaggtgtaccttattgactcgggt

SEQ ID NO: 245829 - DNA, 51 bp, Homo sapiens
ctcaatgttttgctcctggcctggaaggtcagtatgggaatcctttaaata

SEQ ID NO: 245830 - DNA, 87 bp, Homo sapiens
ccatccgcagcaaggacgtccgcagcagatgaaggtcaccgtgtccaaagggggcgaccgggacagtgacgacgacagcgtcctcga

SEQ ID NO: 245831 - DNA, 75 bp, Homo sapiens
agaggagcccatggcatcatagttgtgtatgatgtgacagatcagattatttgcaggtgtcttccctcgaatggc

SEQ ID NO: 245832 - DNA, 75 bp, Homo sapiens
gccccgaagctaagagcccccttcagtcgcagcctcactctaggacttcgagtaagaaggtgatttacagccagc

SEQ ID NO: 245833 - DNA, 75 bp, Homo sapiens
ccagacttctgtcttttcagctgcagtgaaggctcggggctgcagaacttggaccacgggaaggcctggggcatc

SEQ ID NO: 245834 - DNA, 82 bp, Homo sapiens
gcccgggaggagaaggaaggcatggaaagttccagccggttcgagagctaggtgcccaaattgctgtctgctctctgtccag

SEQ ID NO: 245835 - DNA, 100 bp, Homo sapiens
gagctcttccacagcagcattgctgaggtctgcatcctgatcacagacgggaagtcccaggacctggtggacacagctgcccaaaggctgaaggggcagg

SEQ ID NO: 245836 - DNA, 75 bp, Homo sapiens
ctctgctgaagagagaagatggcgcttgacggaccagagcagagctggctttatgtgctggggcagaagagatcc

SEQ ID NO: 245837 - DNA, 140 bp, Homo sapiens
gagtcaccactggacctccaaggaagccacgtgcagacatctacaaccttcgatctcctgacgagtgtccttcaagtagtgaagcagagtgttcagatcccagtttttgtgatgattcggccacggggaggtgatttttt

SEQ ID NO: 245838 - DNA, 82 bp, Homo sapiens
ctccgttgggtccggccgctctgcgggactctgaggaaaagctcgcaccagtgccctctggtggtcagaagatgctgtgctg

SEQ ID NO: 245839 - DNA, 98 bp, Homo sapiens
ctgaattctgactcagccatttactaactgtgtgaccttagcatgattatgatatgagggtggatgatttccttcgtcgcacacaagctgttgtcagt

SEQ ID NO: 245840 - DNA, 98 bp, Homo sapiens
ggcccgcgagcagccggaggccccggtcccgttttcggctttgtgagaaaccttaccatcaaacacgatggccagcaacgttaccaacaagacagatc

SEQ ID NO: 245841 - DNA, 74 bp, Homo sapiens
aaagaaacatgaagagctttctataaatagcaatccaggctccatggtccccttctcgatgcgcatcttgcacg

SEQ ID NO: 245842 - DNA, 100 bp, Homo sapiens
ggcgacagcagccaggagtcatgagcgacagcggcgagcagaactacggcgagcgggatcgaacctgcaagcacttatagacagtactcgggaaccaaat

SEQ ID NO: 245843 - DNA, 97 bp, Homo sapiens
caatgatgagaggatgtggtggtctactctgatgtcaatcttgagggctaggaactctattttaagaacctctcaaaacgaaacaagcaaatcatgg

SEQ ID NO: 245844 - DNA, 74 bp, Homo sapiens
ttatagcagtccttggcattctttccattattgcacagcatgattccacctttccactgatagactcaagttcc

SEQ ID NO: 245845 - DNA, 75 bp, Homo sapiens
cggcgcctggcgctggcgctggccaaggctgtgtcgtgaaaactacccctaaaagccaaaatgggaaaggaaaag

SEQ ID NO: 245846 - DNA, 90 bp, Homo sapiens
cggcccggagcccccagcgcagcggccgcggatcccaaaatggctgggcgaaaacttgctctaaaaaccattgactgggtagcttttgca

SEQ ID NO: 245847 - DNA, 74 bp, Homo sapiens
agcttcaagcttaggaccacccaccatgcctatccaggtcctggtgcttgatggtcgaggccatctcctgggcc

SEQ ID NO: 245848 - DNA, 75 bp, Homo sapiens
tggaggacacacctaaacatgtggaatcccaatgccgggagtttgaggacatcaccaatgcgagctttcatctgg

SEQ ID NO: 245849 - DNA, 100 bp, Homo sapiens
catgctgccagacaaccagagcttggtccttggtatagtagtgggagttctccttcaggatcatgatgttcgtcagagtgaatttcagcaacttccctac

SEQ ID NO: 245850 - DNA, 100 bp, Homo sapiens
cagaaacaggtttccattgctgaaggtgctcattcttcaaagaaataaactcagtgacactcccaaggatattgatgatgttaagaagttcaaaccgggt

SEQ ID NO: 245851 - DNA, 100 bp, Homo sapiens
acagaactcgtcagattcttgcctgcagcactagaaagtttgggatttggctcttacatcagtgaagtaaaagaagtcttgcaagagtgtaaaacagtag

SEQ ID NO: 245852 - DNA, 89 bp, Homo sapiens
ggacaaggagttggtcctcgagtaaagagacggccacgccgacagaaacctgggtcccctcctaaccgcaagcgtcctgctaacgagaa

SEQ ID NO: 245853 - DNA, 50 bp, Homo sapiens
aagcaggactgcgccgcgtcttcctcaagctgctcagatggaagataaaa

SEQ ID NO: 245854 - DNA, 83 bp, Homo sapiens
ctttgactactggggccagggaaccctggtcaccgtctcctcaggttttgggatttgagattgacgcggtgaactctgtccag

SEQ ID NO: 245855 - DNA, 100 bp, Homo sapiens
agctgggccagggattgggaaaatctcttcagggtaactactccagacccccagcgtatagtggggtgcccagtgcaagctacagcggcccagggcccgg

SEQ ID NO: 245856 - DNA, 74 bp, Homo sapiens
ctgcacttctatgccaccctgcggcggggcaggagcctcagtctgtcttgccacttgcctagtgaggcttttcc

SEQ ID NO: 245857 - DNA, 100 bp, Homo sapiens
cagccgggaggacatctacaagcggaaggcagacggtaacaagtactccttgctggattgaacttcatctgaatggacctctacagtggttggacaaagt

SEQ ID NO: 245858 - DNA, 90 bp, Homo sapiens
tcagcaacgatcccgatgtcatcaagttgcaagagattccaaccttccagccccttttgaaaggaaaaatgaggaagctgtgagtaccag

SEQ ID NO: 245859 - DNA, 100 bp, Homo sapiens
cgactgatgactggagaggatggctactatttcaccaatctggtatttcagttactaactgatctgaaagagcagcgtaaagaaagtggaaagaataaac

SEQ ID NO: 245860 - DNA, 82 bp, Homo sapiens
aaggtatggataaggccctgagtcatcttcctgagctgaatgatagttaagctgaatgaacagtaagaggaccttgtgcatg

SEQ ID NO: 245861 - DNA, 101 bp, Homo sapiens
taaaattggaaaagtgttgcccgttatgcatgagagtcaccatgctcaaagtgaatatattaaggttgtgagaactgctttattggatgctgctggtgtgg

SEQ ID NO: 245862 - DNA, 74 bp, Homo sapiens
gggatttcatccccgcagtctatggctttatacaaaagcaagccgggaggctggctgcctctcctcctgctgtc

SEQ ID NO: 245863 - DNA, 87 bp, Homo sapiens
gcagctggctggcttcagtggaccatatgaaaactgcctccgaaagttctataagcaccaaaacactgaagttgtactctatttggc

SEQ ID NO: 245864 - DNA, 75 bp, Homo sapiens
gcggctgtcggctggtgcttggcggcagggacgatgtaacctttatcaaaaggatggagttgggaaaaggaaaac

SEQ ID NO: 245865 - DNA, 75 bp, Homo sapiens
ccagtcttaccgttcagtggcttcctgaagtgactaagaaggagctcattgccaagttagatcaggcagaaaagg

SEQ ID NO: 245866 - DNA, 98 bp, Homo sapiens
gaagagacatgagatggtagctaaacatttagaggatgttaagcaagtttttggacagaccacaattcatcaacatattccatttaactgggattcag

SEQ ID NO: 245867 - DNA, 101 bp, Homo sapiens
agtggtgatgcaagaagtttctaggaaaggccggacaccagtaatctatgccagcaattatgacaatgttagcagaccatgcagctcgtcagctgcttgat

SEQ ID NO: 245868 - DNA, 75 bp, Homo sapiens
ggaagaggccctgcggaggcggcggtgcagcgctccgtggatatgctgctgatgaaatcactcactgcatacggc

SEQ ID NO: 245869 - DNA, 74 bp, Homo sapiens
gagatcccaggcggtgacagagtggagccatggctagagagagttaagaaagacgtggacaagggcacacggca

SEQ ID NO: 245870 - DNA, 90 bp, Homo sapiens
accagctgctcgccgggagcggcggcgcccggacgccgactctagccggcccggtccttggactgaaagaatgcaccaggggctcggcag

SEQ ID NO: 245871 - DNA, 83 bp, Homo sapiens
cggcgaacgcggagagcacgccatgaaggcctcgggcacggagcaggccgggctctcgccatgggtcactgtcgcctctgcca

SEQ ID NO: 245872 - DNA, 91 bp, Homo sapiens
gcgccggctatggccgtgccctggggctgagccctcaggtgacttaagagattaaaattaatttggttgctgttggttctgaacaaataat

SEQ ID NO: 245873 - DNA, 75 bp, Homo sapiens
ggggacctgccggagcccgagcgctcgccgcgcccggctgccgatcacccggaagttcaggctgaattctgaagg

SEQ ID NO: 245874 - DNA, 101 bp, Homo sapiens
atgtccacacatcagttttacaggaaatatatgtgtggagacgtacgaggaggaccgggagtacgagagccaggccaagcgtctcaagaccgaggaggggg

SEQ ID NO: 245875 - DNA, 87 bp, Homo sapiens
attacagaggagtttcatggcactaagtcaagatgtttgaagatgccgcatttggattggatgaattccaaattctgcttgcttgct

SEQ ID NO: 245876 - DNA, 100 bp, Homo sapiens
gggaagcagcgtgagcagccggaggatcgcggagtcccaatgaaacgggcagccatggccctccacagcccgcagctgttccaggagctctgagtccttt

SEQ ID NO: 245877 - DNA, 102 bp, Homo sapiens
cgagaaccgtcagtttgagccagatggaaggtgggagtcaatcattttgacaagtctcctgaaaggaacagctagcaggaactgaaacctttttccatttgg

SEQ ID NO: 245878 - DNA, 98 bp, Homo sapiens
agaagaggattccggcgggaactcgactcttggcgccaccgcctcatgcactgtgtagcggttggctttgtgagtgaagacgaatacttggaaattca

SEQ ID NO: 245879 - DNA, 83 bp, Homo sapiens
tgtacggcaaaggcaagagtaacagcagcgccgtcccgtccgacagccaggcccgggagaagagtggagtcaacatatcaatg

SEQ ID NO: 245880 - DNA, 87 bp, Homo sapiens
accatctcgcactaccctgactacagctggagcgcccagaggcgagccctggtggaggaagaggaatgatgagaagacagcagctga

SEQ ID NO: 245881 - DNA, 75 bp, Homo sapiens
ggcccttctcggtggaggccgacccatccagcgcccgggggctggagaaggccaggcagcagctgcaggaggagc

SEQ ID NO: 245882 - DNA, 83 bp, Homo sapiens
ggtgcacaccttcccactctttgccatccggcccatgtacctggccatgaggtgatgagatttccatccatgctgactttgag

SEQ ID NO: 245883 - DNA, 82 bp, Homo sapiens
aatttctacacctacccattggtctaaacttgatccaaagacaatgaaggatcaaaatacttgctggatggtggactcagag

SEQ ID NO: 245884 - DNA, 82 bp, Homo sapiens
caagaagttgagaccgagaatgtggaaacaggaaactaaatatattttgccaactttggaaaaagaattattcttggcagag

SEQ ID NO: 245885 - DNA, 100 bp, Homo sapiens
cgtgcggacagcattgggagcggccgagccatcccaattaaacagatgccttcaattaagttgcagagttctgatggagagatatttgaagttgatgtgg

SEQ ID NO: 245886 - DNA, 98 bp, Homo sapiens
tgtgggtttaatccaacagaagaagaagattctagtgttccagaaactccagataatgaaagaaaagcaagtatatcatatttcaaaaatcaaagagg

SEQ ID NO: 245887 - DNA, 92 bp, Homo sapiens
gcgggagctggacggcgagcgcgagcggcgcgagaaaggagaggatcctccacagtggtatcctgctgcgtgcccctccaggacagcaccca

SEQ ID NO: 245888 - DNA, 74 bp, Homo sapiens
ctcatctgttccagggaggtgggattgaggaagtgttcgccagttactacatgaaaagataagagatgcttata

SEQ ID NO: 245889 - DNA, 121 bp, Homo sapiens
ggagcacagtaacatacagcactttgtggagaaagtcgtcttccacttgcacgaaagctttcctaggccaaaaagaggttagaagtttcatgcattcaaataatggcaccatttctgtggt

SEQ ID NO: 245890 - DNA, 90 bp, Homo sapiens
tgacatctccaccctccaagagggcatctttgcagacgtgacctccctgtctcacctgacccttctgcagaggggctgtcggaggaggtt

SEQ ID NO: 245891 - DNA, 100 bp, Homo sapiens
cgaagatgatttctactgccccgtctgtcaggaggtgctcaaaacgcccgtgcggaccacggcctgtcagcacgttgggtaattccagaattgattggcc

SEQ ID NO: 245892 - DNA, 100 bp, Homo sapiens
ggaggcagagaagggaacgcccggcccagccccacgcccagcggcagcaggatgagtgcggaggcaagcgcccggcctctgcgggtgggctcccgtgtag

SEQ ID NO: 245893 - DNA, 82 bp, Homo sapiens
cggcgggggagcgactcatggagctgccgtaagcaattctgtggtgttcttggtcacacatttatggagtttctgaagggca

SEQ ID NO: 245894 - DNA, 72 bp, Homo sapiens
gggaactggctattattcaaggacctcctggaacaggttggttgtgaagatggatctgtgaaactatttcaa

SEQ ID NO: 245895 - DNA, 98 bp, Homo sapiens
gatcttctgcactgtttacaggcacagacaagttggatggcttgaggactggtactaaaaggaaacgtgactgggaggccattgccagcagaatggag

SEQ ID NO: 245896 - DNA, 82 bp, Homo sapiens
ctggtggcggcggcgctttcggcgcgggcccgggccccgagcgcccgaacaggggttgtgtccactgtggtccccgactctg

SEQ ID NO: 245897 - DNA, 100 bp, Homo sapiens
cctggctcagcaagactctcgagcccatttattttaccaagaaaatggtttgcacgactttgaacatatactatccatgctgatgggacaggatccaata

SEQ ID NO: 245898 - DNA, 100 bp, Homo sapiens
ttcccgggggggcggagacgcacggagcggccgggggctcggccgggccgtcccggcctgcgcagcctgaggatcaacggatgctatgaagcgctatcag

SEQ ID NO: 245899 - DNA, 82 bp, Homo sapiens
gatgcagtacgccacggggccgctgctcaagttccagatttgaatatgagttggaagtaaagagggtgcaagacattctttc

SEQ ID NO: 245900 - DNA, 75 bp, Homo sapiens
ggatcatggccgcagccgctctggggcagcggagctggagtttgttcagatcatcatcatcgtggtggtgatgat

SEQ ID NO: 245901 - DNA, 82 bp, Homo sapiens
tgaaaatgaaaaaaaatgtacccttgaccaagctttcagaggtattctagaagaagaaatttatcaaaggtgcagaatctgg

SEQ ID NO: 245902 - DNA, 82 bp, Homo sapiens
gaatgctggagtcagtggaagacggagctggtcggcccgaagttaccggtattgtaagaacaagccgtacccaaagtctcgc

SEQ ID NO: 245903 - DNA, 51 bp, Homo sapiens
agcgagcgctgcgaggtggcggcctgagctgccaggcgatcggatggggag

SEQ ID NO: 245904 - DNA, 100 bp, Homo sapiens
gctcagctcccaggtcacccaggaactgagctcgtttgacagcaagtttgtttaccagcaaataggactcggaccaattgaagaagacactattcttgtc

SEQ ID NO: 245905 - DNA, 75 bp, Homo sapiens
gcggatcgggtggagtgtaggtcatatcgccgcggtattttgatcacaactatagcctccaagggagaattgcag

SEQ ID NO: 245906 - DNA, 82 bp, Homo sapiens
caggagaagagcgccaggcgccgcgggggtagtagattccatggatgcattagataaagttgtccaggaaagagaagatgcc

SEQ ID NO: 245907 - DNA, 138 bp, Homo sapiens
aggccgggcacctccgagcgcaaggacagcgcgaggtccgcgcagcccagcgcagccatgcaggggaaatggaaggtgatgcagtcgaagccattgtggaggagtccgaaacttttattaaaggaaaggagagaaaga

SEQ ID NO: 245908 - DNA, 75 bp, Homo sapiens
gcataccctggaccagcagaaacctagagtgaatcagcatgattcttcagaggctcttcaggttctcctctgtca

SEQ ID NO: 245909 - DNA, 100 bp, Homo sapiens
ggaagagcgagccagcgcccggagcaagcggagctcccccaagagccggaaagatggaatcgccacttatatatgtttcagttttgcttttgaacatatt

SEQ ID NO: 245910 - DNA, 50 bp, Homo sapiens
agacatatgtctgaatttatggagtacagagatttgggattagaatctac

SEQ ID NO: 245911 - DNA, 83 bp, Homo sapiens
ctcttcagggatgagtcatgtggcagtggaaaatgcgctcgggctggaccagcagcctgaactctttgcttccggaatccggg

SEQ ID NO: 245912 - DNA, 97 bp, Homo sapiens
gaaagacaaagacccagtgaacaaatccgggggcaaggccaaaaagaagatcactggggtgatcctgctggctgttggagtctggggcaaacttact

SEQ ID NO: 245913 - DNA, 125 bp, Homo sapiens
ggcgcccagcacgactcctcgggcagcctcaacgagaactcggagggcaccggagcatcccttcgtcagcagcatcaccagtaacaaggctctgcgggagctggtggctgaggccaaggccgagg

SEQ ID NO: 245914 - DNA, 133 bp, Homo sapiens
cggtgaagcacacagccatggtgtcctggggaggcgtcagcatccccaacagccccttcaggattatgtttgagaccttcaacaccccggccatgtacgtggccatccaggccgtgctgtccctctacgcctc

SEQ ID NO: 245915 - DNA, 50 bp, Homo sapiens
tgtgagaagacgtctgtgtcgtgcgggagaggaggtgggcaggaggaacg

SEQ ID NO: 245916 - DNA, 74 bp, Homo sapiens
ataggatcaaagacaaatggaaagttcctggcggcgactggcggcgcgatggacctgaccgggctcctgctgga

SEQ ID NO: 245917 - DNA, 100 bp, Homo sapiens
atgcagtccctgaccttagatgtactgggaacatctgagctgctggatggcttaaattccttggtccttgatttagattttcctgctttgaggaaaaaca

SEQ ID NO: 245918 - DNA, 51 bp, Homo sapiens
atggcactgtgaccaagaaacagtgtcacaccatgtctgaccggaaggcag

SEQ ID NO: 245919 - DNA, 98 bp, Homo sapiens
atgatgtgtgatgacatcctcattgatgttaatgaatggtgctatacttgaattttctaaggtgtcattaggctgttttggagtcagcggaagatcac

SEQ ID NO: 245920 - DNA, 51 bp, Homo sapiens
catcaagaggcaggcagctcccaggcagatgcttgctctgtcaaggcacag

SEQ ID NO: 245921 - DNA, 87 bp, Homo sapiens
ggaccacggagacagaccccggcccggcgaccgagctgggcccgtgagccactcggcctcaggttatgaagacagtatggagtttcc

SEQ ID NO: 245922 - DNA, 100 bp, Homo sapiens
gtgttgtaccactgacaataataagcagctagctgaaagcagagaacccagcagaggattctgggaaggtcctgggggatggcagagccagcagagagag

SEQ ID NO: 245923 - DNA, 83 bp, Homo sapiens
tgcacatccaggcgggccagtgcggcaaccagatcggcgccaagggggatatgagactttctactcggaatatcctgagtgtt

SEQ ID NO: 245924 - DNA, 82 bp, Homo sapiens
agtacctagaacagtgtgaacactcatttcttcctccaacatcacctggggttcctaaggcccacccttcctccattctgag

SEQ ID NO: 245925 - DNA, 119 bp, Homo sapiens
caagtagtggcaccagccgggagaagaccgcatgtgccattaataagggcttcctcagccgccgcctcaagggctccatcaagcgcaccaagagccagcccaagctggaccgcaaccac

SEQ ID NO: 245926 - DNA, 83 bp, Homo sapiens
gtccctggtcagtttctgctttgagtattgggaaagggtcgttgtggtgcatagacccagagtatagacaaaatctaattcag

SEQ ID NO: 245927 - DNA, 95 bp, Homo sapiens
tttctggtgtcctgaacctggaagttgtgctttttaaggagatttttcaagagcttgggatgttcttcttgaccatatacagtcagcagcactca

SEQ ID NO: 245928 - DNA, 75 bp, Homo sapiens
cggcgctggagagggggcgctgagctgttggggtgtctgcttttggggcagagttttcatcggaggcatgcagag

SEQ ID NO: 245929 - DNA, 90 bp, Homo sapiens
ggaaaggtgtgctgtgcctgaggccagccaccccacgtcatgctgcagcgccgcagagatcatggctgtcctctttttccacaccatgcg

SEQ ID NO: 245930 - DNA, 90 bp, Homo sapiens
caccatcaccaaaagaagaggaaatggatgcaagccttcccagaacaacagctactttgaaacatatgatacatttgtgttaaggctagt

SEQ ID NO: 245931 - DNA, 50 bp, Homo sapiens
cagctgcctcagttcttagcgcagatggaggtaaattgtttaacactaaa

SEQ ID NO: 245932 - DNA, 83 bp, Homo sapiens
gtcaggagcagccgcagcgacggcggcgacagcaggtatcatgatattagctggtttgacatcaagtcatttgtgagtcatca

SEQ ID NO: 245933 - DNA, 74 bp, Homo sapiens
cagctgcaaacccccgaaaaagggaaatcctcattgacgattcaatttgttgaaggccaatttgtggactccta

SEQ ID NO: 245934 - DNA, 100 bp, Homo sapiens
gccttcctgctcatctccaccctgaaggacaagcgcgggacccgctatgaggctgtgaagcttcatggaggtatcgatatcctagtctccaatgctgctg

SEQ ID NO: 245935 - DNA, 101 bp, Homo sapiens
ttgtcatctgcggactggacacggagaccgggctggagccggacgagctgtcgggttgttggaggaagagtcttccaagagggctgaactagaaaagtggc

SEQ ID NO: 245936 - DNA, 100 bp, Homo sapiens
ccggtaacaaacgagggttcccgggattggaccgacgcagccatggtctatagtaaagagatgtggcatctgatgaaaaggaagacaagaagatgcggca

SEQ ID NO: 245937 - DNA, 100 bp, Homo sapiens
acgaagttcctgatggagctgtaaagccacccacaaacaaactacccattttcttttttggaactcatgagacataccatgtttgtgtggaagtgccccg

SEQ ID NO: 245938 - DNA, 75 bp, Homo sapiens
agccatcagcagtgccatccagcttctagaagacccattacagaggatccagggcagcgacgccggctggacttt

SEQ ID NO: 245939 - DNA, 100 bp, Homo sapiens
cccccctccaccccggccgcgcccaagcgcaggggctcctcgggctcagtggacttaattcagtgcacaaatgagatgaatgtgaacatcccacagttgg

SEQ ID NO: 245940 - DNA, 82 bp, Homo sapiens
gccacacatccccgaccacttgcggcctgagtatgagctcaggccccggggcctccagcggcaccagcggagaccacggtga

SEQ ID NO: 245941 - DNA, 100 bp, Homo sapiens
gccagtgatggtgaaacttaagtggggaatggagtacaagggctatctggtatctgtagatggctacatgaacatgcagcctgcctagggtagttaaaag

SEQ ID NO: 245942 - DNA, 71 bp, Homo sapiens
gaggttcatgacaactgaggaaaaagccaaagtgggaccaggactttaccagaatgcaggacatcccggag

SEQ ID NO: 245943 - DNA, 90 bp, Homo sapiens
tacaatctagcgacaaaacaaactccaaaagaaggtgtgaaagttaacaagccctttctaaggcacaaaatgatgtgatggaaatgaaga

SEQ ID NO: 245944 - DNA, 75 bp, Homo sapiens
aaaagaaccattgaagcttgagagaaaagcccccaaaagcagctattcagatggactctcgtcctgtcacccagg

SEQ ID NO: 245945 - DNA, 103 bp, Homo sapiens
tgctctgggaccggaggagacatcggcctctgcaggcttgccgaagaagggaggtccctgtgcgttttattgcgacctgccggtgggaactttgtctccgagt

SEQ ID NO: 245946 - DNA, 100 bp, Homo sapiens
gacagctagtgttttcttatttagccggagtgagaagcaagaaggccctggacacagcaatatctctgggctttcacagctgagtcagtgctgattctct

SEQ ID NO: 245947 - DNA, 83 bp, Homo sapiens
tcaggggcagcattccgacggaagagagggccccgtcaagatgatgataattccgaagaaggcttccacactattcattcagg

SEQ ID NO: 245948 - DNA, 100 bp, Homo sapiens
ctttggaaaagttgtgcccaagacagtggaaaattttgttgctctagcaacaggagaggagccctacatggaaggtgtcaatccattcatcaaaagcaac

SEQ ID NO: 245949 - DNA, 75 bp, Homo sapiens
aagaacgacatgatgcaatcttcaggaaagtaagaggagacgagttgtactgctgtcacaggaaatggacgctgg

SEQ ID NO: 245950 - DNA, 75 bp, Homo sapiens
caggatggaagtacaagtgtcagcacctatgtgctgaatgtggagtaaatgcagatgttgagaaacatcttgaat

SEQ ID NO: 245951 - DNA, 73 bp, Homo sapiens
ttggagagaggagaacgaacatcttctggacctttgtccaggtaatttgcattgtatatagatgatcgtctca

SEQ ID NO: 245952 - DNA, 100 bp, Homo sapiens
gcctcagaagctgccaccttgtttgctgtcgcctggttgggcccggaaatgggacgtcgcgctttctcagggagcgtagaagcagccagggcctctccaa

SEQ ID NO: 245953 - DNA, 110 bp, Homo sapiens
tctgcttcgggcctctggaatttagcgctcgcccagctagccgcaggtattctctactgccgctgatggtcaaacgcaagtggaaattaaagtgtgtcagggtgaaagag

SEQ ID NO: 245954 - DNA, 90 bp, Homo sapiens
aatgagaagaaatgggatctgatctgtgaccagcgcccgattgaccgccagcgatacgacgagaacgaggacttgtcggacgtggaggag

SEQ ID NO: 245955 - DNA, 83 bp, Homo sapiens
ttaagagagctctggacaagctggaatgcatccaagagaatccctcaacatgctggagattacctggggcaattgatgttatc

SEQ ID NO: 245956 - DNA, 80 bp, Homo sapiens
cagcaagcggaggtgctgggagcgagttggctgggtgagaactctgtctcagtcgacgggaagtgcagtgactccacgct

SEQ ID NO: 245957 - DNA, 100 bp, Homo sapiens
cgaattcagtgatatcattaagtccagatctggaaaaccaattctgtgtcctcggaggaccacagcccagttgggccccaggcgaaacccagcctggagc

SEQ ID NO: 245958 - DNA, 83 bp, Homo sapiens
cgagaacgtccactgcgggccggcgaaagctggttatggaaacaaaggacatgctttacatcgtcactgaatttgctaaaaat

SEQ ID NO: 245959 - DNA, 85 bp, Homo sapiens
tgcagcgacttcctcaaaggctactgccccctgggtgcaaaggttaatttggagtggcccctggagtcagtttcctacaccatcc

SEQ ID NO: 245960 - DNA, 82 bp, Homo sapiens
atctgcttttcaagtatgccaccaacagtgaagagatgagtgaccgaggaggtggcgttcctttgaggaaaattgacagact

SEQ ID NO: 245961 - DNA, 100 bp, Homo sapiens
ttgaagacttcctcccatcgcattataattatctgcagtttgcctactataacagttatactactccaactgccccccaggcatacagccagcctgtcca

SEQ ID NO: 245962 - DNA, 90 bp, Homo sapiens
ccgcaaggccgcccgggaactgctgacgcttgatgagaaggacccacggcgtctgttcgaaggttctcgggaccggaagtcaggtgggag

SEQ ID NO: 245963 - DNA, 51 bp, Homo sapiens
cggggatgggacgtcaggagaagacgcagggcagagcggcttgggtaaatc

SEQ ID NO: 245964 - DNA, 90 bp, Homo sapiens
gaacttcagaaggaggttgaccagaggtatgatgagaagaataagcaatttgcaatattaatcatccagctgagtaacctttctgctctg

SEQ ID NO: 245965 - DNA, 85 bp, Homo sapiens
cggagagaagccgcaaccagagccgccgccacgacaatgcagatcttcgtgaagactctgactggtaagaccatcaccctcgagg

SEQ ID NO: 245966 - DNA, 100 bp, Homo sapiens
aaaggttgatctcatagacaagtttgtacatccaaatgctacagttgaaactccagcagcgccggacccgggaagaactggtgagccaagggatcatgcc

SEQ ID NO: 245967 - DNA, 82 bp, Homo sapiens
cttcagggtttccaccgttcgttcaagatagtattgaagccagccttgaggctgcgtcctcgcatgcggaggcagcccgcca

SEQ ID NO: 245968 - DNA, 100 bp, Homo sapiens
cgcaagtacaaggtgaagctggtggagaagcgggcgttccgtgagatccaggcgagagaggctggctgaggatcgtgaccagcacctataaggatgggaa

SEQ ID NO: 245969 - DNA, 100 bp, Homo sapiens
tggcactacccgtcttgaggaatgcttttcctccaaatgcgatcattgtatttttctactgcagtgcagtgactatattcttcacaataatcaaactggt

SEQ ID NO: 245970 - DNA, 100 bp, Homo sapiens
tcccaagctcactgcactcctagcgccatggctacttattctgccacatgtgccaacaatagccctgcacagggcatcaacatggccaacagcattgcca

SEQ ID NO: 245971 - DNA, 90 bp, Homo sapiens
ggcgagcggagccggggctggagagcggcgaccactgcggatctcgggcaagtatatcgcgtcaacacagcgacctgacgggacctggcg

SEQ ID NO: 245972 - DNA, 147 bp, Homo sapiens
ccagagcctggagtctgcgaaggccgggacccggttccccggcccacagtgggggtgtgcaaacccgagagaactggctcagcacattgccagtatcgatgggaggcgcgggttgttcacaggcttaactccaagactgtgttcggg

SEQ ID NO: 245973 - DNA, 50 bp, Homo sapiens
gatgggaggaaggtcctcctacagtccaatatcagatggaaatgatgcgg

SEQ ID NO: 245974 - DNA, 100 bp, Homo sapiens
acagattcgcagtggtcgcttcttctccttgttcccttttagactatggcgacatacctggagttcatccagcagaatgaagaacgggatggtgtgcgtt

SEQ ID NO: 245975 - DNA, 50 bp, Homo sapiens
tttaatatctgatactcagcctgaagcaagctatagtcagcagactggac

SEQ ID NO: 245976 - DNA, 82 bp, Homo sapiens
ctctagaatatacaaagacaaaaggagattctgatgaagaagttattcaagatgcaggcttatggctatgggccatacggtg

SEQ ID NO: 245977 - DNA, 78 bp, Homo sapiens
aaagcccttcacagcaagacccaggaagccgcgggcaaactcagactcgaaggttaaataggattgcgaatcaggtgg

SEQ ID NO: 245978 - DNA, 116 bp, Homo sapiens
gagttctacgtgtcccccgaggatctggaggcacagctgcagtctgacgagaggggctgaccccgcactacatctacccaccagccatcgtgcagcccagcgtggtgatcccagcc

SEQ ID NO: 245979 - DNA, 80 bp, Homo sapiens
agacctagtggaagtggttctttcagcaacagccaactcagtttataaatccagaaacacctggctatgttggatttgca

SEQ ID NO: 245980 - DNA, 80 bp, Homo sapiens
ggagactccggcgctcgccatggccgacgaaaagcccaaggccaagactaaggggctgcagagcggggtggacattggcg

SEQ ID NO: 245981 - DNA, 75 bp, Homo sapiens
ttagctaaagaactccctcaagtttcatttgtgaagcttagaccatgctcagcctccaagcagccttgtcatcga

SEQ ID NO: 245982 - DNA, 82 bp, Homo sapiens
ctttgacagcccaatcacgatgaagaggaggcggggagaccgccggtctaattgaagccaacggagaactcaaggtcttcat

SEQ ID NO: 245983 - DNA, 134 bp, Homo sapiens
tgcagtggcgcctaaagtctgagagagggaagtcgcctctgtgctcgtgagtgcatggggtataaggctactgcagcactggggtgtcagttgttggtccgacccagaacgcttcagttctgctctgcaaggat

SEQ ID NO: 245984 - DNA, 100 bp, Homo sapiens
acagtaaggacttcaactgaccttcctcagactgagaactgtttccagtatatacatcaagtcactgaggctgccgcgggcggacacgccagaggaggag

SEQ ID NO: 245985 - DNA, 82 bp, Homo sapiens
gctgtttctcatctttatactcttccaggtgtggacactgccagcggctgcagccgacttggaatgacctgggagacaaata

SEQ ID NO: 245986 - DNA, 100 bp, Homo sapiens
cagctccaccacagcttccttctttctacaaaattggatctaagcgggccaactttgatgaagaaaatgcactataatgtaactgcaaactccaagctgg

SEQ ID NO: 245987 - DNA, 76 bp, Homo sapiens
ctcgagcggcaacaagagcgttttgatggagcggctgaagaaggagctcgaggccatgagcagatataccagccca

SEQ ID NO: 245988 - DNA, 88 bp, Homo sapiens
gacccggacccaaagtgccatgtctttaatccttgaaaagatcttttgaggtcgaggaggtcgagacacccaactccaccccaccccg

SEQ ID NO: 245989 - DNA, 50 bp, Homo sapiens
ctgctgaagcccaccgaattagggagtgcatccgccccaacccttttccc

SEQ ID NO: 245990 - DNA, 102 bp, Homo sapiens
aactgtgaagttccatgccaggacggggatgattgagtctaacagggtgaaagcccagcctccgtggttcttaatgcctcaggaggactattttcactaaag

SEQ ID NO: 245991 - DNA, 100 bp, Homo sapiens
ctccaagttggaacaaggagaagagccatggatcataaagagacacataccaaattggatctatccagcagccattgtttgatgtcctgtgactgagaaa

SEQ ID NO: 245992 - DNA, 50 bp, Homo sapiens
gtttattaaaagagctgtggctagaatgtgatcaatgggcaggactacga

SEQ ID NO: 245993 - DNA, 99 bp, Homo sapiens
gcccttgggccgcgtctcctttgagatgaacacgtcactgctgggaagcatcggcatgctgaactcggcacctcagctgcgctgcattaaaacctacca

SEQ ID NO: 245994 - DNA, 129 bp, Homo sapiens
ggactcggcgatggagctgttatttttagatacttttaaacacccgagcgctgaggtgtgcattgctaagtgcaacagtacctcttccctggatgcagtgctctcccaggacctcattgtggcagacgg

SEQ ID NO: 245995 - DNA, 100 bp, Homo sapiens
gtcagccatcatgtgtgtcagcatgagagaaagctgacttcatgagaccgaggatctcgttcgttgatcgatgctacatattcagcatgttagataatga

SEQ ID NO: 245996 - DNA, 75 bp, Homo sapiens
actcagagtggaaaaagtaccatcatttgaaacagtaccttctccaggcaaattccgttcccctgcagcaccatc

SEQ ID NO: 245997 - DNA, 98 bp, Homo sapiens
ccatcctgaaggacgtggccactgtggccttctgcgacgcgcagtccacgcaggagatccatgagaagggcagctggtggaatttttgaagaaaatgg

SEQ ID NO: 245998 - DNA, 48 bp, Homo sapiens
actggggtgcatgacattttagcatacttccacaggctgcactcgagg

SEQ ID NO: 245999 - DNA, 96 bp, Homo sapiens
gcagacttcatggcaggctgcactgtgtcccctcggctccacggctgccccgggggcgctgctttcgaaattgaagccaaggaagcttgtgattgg

SEQ ID NO: 246000 - DNA, 83 bp, Homo sapiens
gagcgatccgagggactgcgccgcccggacggcctgcagagcgctgccatcatgagatctgccttctggagactgcgccgtcc

SEQ ID NO: 246001 - DNA, 102 bp, Homo sapiens
tttcaagcccagctcctagcgtcgacgcccctccttccaagacgtttcccagcaggccctgcgcccagtttggatcaagctggagtgcaatggcgcgatctc

SEQ ID NO: 246002 - DNA, 98 bp, Homo sapiens
tggagatgcaatcaattggcccacacctggagagatagcccacaagagtgttcagaacgccaatctgaattgccaacgcaaagcaaagcgagcttccc

SEQ ID NO: 246003 - DNA, 98 bp, Homo sapiens
ctgggaactccaacatatgatgaaaaccccatgaagtcaccaggtgtcaagatgctgcaagtacataggactggactgggcaggctgggggtcagcct

SEQ ID NO: 246004 - DNA, 100 bp, Homo sapiens
gtgcgaggagaactactccgtgacctggtacatcgccgagttctatgacgtccggttgtttgccttcgtgcgcttcaccaccggggatgccatgagcaag

SEQ ID NO: 246005 - DNA, 98 bp, Homo sapiens
tcctgcctagacctcctggtagatcagccccacagcctcctgagtatcctggacgcccagacatggctgtcccagtagggacggggtttcaccatgtt

SEQ ID NO: 246006 - DNA, 75 bp, Homo sapiens
ttcgcctttatcgtggtggagtccaccctggctgtggttctggctccttggcagcaatggctgtatttgaagata

SEQ ID NO: 246007 - DNA, 51 bp, Homo sapiens
ccgagctggagctgccgcggcgcagccagcttcgagagctgtgcccaggag

SEQ ID NO: 246008 - DNA, 100 bp, Homo sapiens
tgtatgcgcgccccatcttcctgcgcctcctgcctgagctgcacaaaacaggggacatccggaacctgctcatctggatcaagaagaatttgctaaaaga

SEQ ID NO: 246009 - DNA, 83 bp, Homo sapiens
ttggggagtctgaggccaatgtcagagaaatctttgacaagcttcaagaccagccagccttgatagtggcagaacatccacta

SEQ ID NO: 246010 - DNA, 83 bp, Homo sapiens
gctccctccggcgagagactttgtcagctcccgcacagtaactaaacggagttccctctcgaagtccaagattagttgcttct

SEQ ID NO: 246011 - DNA, 50 bp, Homo sapiens
gatggcgcatcacacaccaaaggtgttggagcgggccggagagaagtaga

SEQ ID NO: 246012 - DNA, 99 bp, Homo sapiens
gtacagcaacaacggctcggactggaagatgatcatggatgacagcaaacgcaaggcgaagagtgtcaatccatatctacaaggacagagactggataa

SEQ ID NO: 246013 - DNA, 75 bp, Homo sapiens
ccaaagtcatgggcacagctgaatggaaagccagtaggacacgaaggtggtatctctggagacaaagtagagata

SEQ ID NO: 246014 - DNA, 75 bp, Homo sapiens
cgagaatgccatcgtgtggaaagggaagtgatgagctttcctttgatccggacgacgtaatcactgacattgaga

SEQ ID NO: 246015 - DNA, 76 bp, Homo sapiens
gaccacttcctgtgtctgtgggagcactgtgaggacttggatgttgtgggtgatggtatgcagtgtcctccttcac

SEQ ID NO: 246016 - DNA, 90 bp, Homo sapiens
cgggagcgccgagcgtcgccgccgccgccgccatgaacaactcgggcgccgacgagatcggacaaatttacatgtattggagaccagacc

SEQ ID NO: 246017 - DNA, 75 bp, Homo sapiens
agcacgtgaccaagcgggccatcagcacccccgagaactggtcgaattgacaaatcttaccctacagtatgtggc

SEQ ID NO: 246018 - DNA, 90 bp, Homo sapiens
ggagccatctcggagctcacggagagccgcctgaggagcggcacaggaaatactcttaattctaaggaaaacctggaagcacaatgggag

SEQ ID NO: 246019 - DNA, 75 bp, Homo sapiens
cgtagaagaaggaaaaatagatggcatcattgacaaggaagaagaatttggacttgatgaagaagatgaagatga

SEQ ID NO: 246020 - DNA, 101 bp, Homo sapiens
cacctcaaggttgaagcagaagaataaggagaaggataagtcgaaggggaaggcgcctgaagaggacgaagatatttggagttcttacaacatggcagaca

SEQ ID NO: 246021 - DNA, 83 bp, Homo sapiens
caagacatttcttcggcattctgcaacagatgcttgggatttgctttacattctaagtggatttggagaagagacaataaaga

SEQ ID NO: 246022 - DNA, 99 bp, Homo sapiens
cgaggcaaggagctaaagcagcgtgcgttcagccctgggcagcctcccgcgacgatgcccctcaacgttagcttcaccaacaggaactatgacctcgac

SEQ ID NO: 246023 - DNA, 148 bp, Homo sapiens
tcgtattcccggaatcagacggtgccccatagatggccagctttcccccgagggtcaacgagaaagagatcgccaacagagacatggcatccatcgtgtctgagatcatgatgtatgtgctcattgtggtgttgaccatatggctcgt

SEQ ID NO: 246024 - DNA, 75 bp, Homo sapiens
tgaatttgttactttttcttgtccgggtgcggataagggacccgacactgatatgaatgatttcggaatcaagaa

SEQ ID NO: 246025 - DNA, 101 bp, Homo sapiens
aaagagacatgaagaattggtatttcaaatgaccaccatgttgcaaaaggtccagcccagaatcaaatgcaggttccatctggatatggattgcatcatca

SEQ ID NO: 246026 - DNA, 74 bp, Homo sapiens
ctgggcagagtggaccacggggagccccacgagttttctggatatgccgcagaaggatccgtgccagaagcaag

SEQ ID NO: 246027 - DNA, 99 bp, Homo sapiens
cttcatctacaatttttagtggagttgccatctatgttaatggatacacagggaaaggaaaacctcttcagcgcaaggtgaaaccacctaagaagcaag

SEQ ID NO: 246028 - DNA, 100 bp, Homo sapiens
cggagtgtatgtctttggagaacttctggagctggccaacgtgcaggaggtgcgagaagatgtactaaattcattgaataacaactttcttcaaacgcta

SEQ ID NO: 246029 - DNA, 83 bp, Homo sapiens
aggaatctgatggaacccctgaaaacaaccctctggcaggtgagaagccctaccactgcaactgggacggctgcggctggaag

SEQ ID NO: 246030 - DNA, 90 bp, Homo sapiens
agggtctggctatggtggtgcaggacccgctgctctgcgatctgccgatccagggaagtgttcgccagttactacatgaaaagataagag

SEQ ID NO: 246031 - DNA, 123 bp, Homo sapiens
cgcccgtggccgccgtgcaggcggccgtcagcaacctcgtccggtttgaacgccatgaccctgtggatgggagaattactgagaggcagtttggtggcatgctacttgcctacagtggggtgc

SEQ ID NO: 246032 - DNA, 98 bp, Homo sapiens
gatcgtcatcacagtcaactatcgacttggagtactcggaaaacctcacagcacgggtagctctgaacggattcagctctcaggaatgtataatgtcc

SEQ ID NO: 246033 - DNA, 131 bp, Homo sapiens
ccggggcttgccctggtcttgctcggccgatgaagtgcagaggtttttttctgaatgttttcaggaaagtgaacatctcaaggaaagtcttaaatgttgcttattgcatctctttggagccattgtagccg

SEQ ID NO: 246034 - DNA, 74 bp, Homo sapiens
gaccaacagttgaatcaaagtatggacacagggacctgatgcccagaaccctggacgggcagatcaccatggag

SEQ ID NO: 246035 - DNA, 75 bp, Homo sapiens
gcttgcgtcagggacctgcccgactcagtgagatgacctgatcagagccatcaagaaactaaaggcacttggcac

SEQ ID NO: 246036 - DNA, 100 bp, Homo sapiens
gggggtgctggcttctgcatcaatcgcaaactggctttgaagatggctccgtgggccagtggcttccggaagttcctggtccacaacgtcaaggagctgg

SEQ ID NO: 246037 - DNA, 90 bp, Homo sapiens
acgacaaatccaagaaaactttacgactactgtgatgtccctcagtgtgactgtgccctgtccacggtgcctcctgcatgtcctgctgcc

SEQ ID NO: 246038 - DNA, 100 bp, Homo sapiens
aggccatcaccacgcagaacgtcaacaccaagtgcatcaccatccccaggagattacctggggcaattgatgttatcggtcagactataactatcagccg

SEQ ID NO: 246039 - DNA, 137 bp, Homo sapiens
tgttgtccaacagaacgacctagtatttgaatttgctagtaacgtcatggaggatgaacgacagaattctgcttggtcagaatcgtgatggcattgtgttcagcactgatgactattttcaccatcaagatgggtac

SEQ ID NO: 246040 - DNA, 82 bp, Homo sapiens
cgaagctggccgagcaggctgagcgatacgacgggtccaaattccaagcctgtagtgtccttcattgctggtttaactgctc

SEQ ID NO: 246041 - DNA, 100 bp, Homo sapiens
ctttaattggttgcagttgagctaatggtggagccaaaatgctattgccctgtcttcatcaacatttaatcagcggagtacgtccagcttgttactgaac

SEQ ID NO: 246042 - DNA, 75 bp, Homo sapiens
aaatgctgctgctatgaatatgggtcgaccattccaaaaaaatcgggaagctgccaaagaatgtcgacgtcgaaa

SEQ ID NO: 246043 - DNA, 51 bp, Homo sapiens
tatggatgtttatgacgcttttagcgccagcagccctgtggtggcgacgac

SEQ ID NO: 246044 - DNA, 100 bp, Homo sapiens
gtcagagcagcgcacgcatgaagctgaattgggctgtggcagctggagccgaggatccaggtacaggtttgcagattccgccagcagcacagcaagctct

SEQ ID NO: 246045 - DNA, 96 bp, Homo sapiens
tcctcatcaactggggatgattacagttcttcctaaaaaagggtcaacgtctttttgaaaagttgctccagctgacttcgcaaaatattgaaatca

SEQ ID NO: 246046 - DNA, 90 bp, Homo sapiens
tcccttgtgggcaaggatgtggtcgtggaactaaagaatgacctgaggaaattcgaaatgagtcccatgactatcctcatagagtggcca

SEQ ID NO: 246047 - DNA, 97 bp, Homo sapiens
aggcgatagacgagtatcagatattttcatgataaacctcaaacgcagaaaggacaggcgggaccggatgctgcgcacactgtatgaacaggagatt

SEQ ID NO: 246048 - DNA, 75 bp, Homo sapiens
ctggcggcttccaggcgcactaccgcggaccatgaatggcacctacaacacctgtggctccagcgacctcacctg

SEQ ID NO: 246049 - DNA, 99 bp, Homo sapiens
ctggccgagcaggctgagcgatacgacgacatgtccttccgcaaagtggtccggcagagcaaattccggcatgtgttcgggcagccggtcaagaacgac

SEQ ID NO: 246050 - DNA, 100 bp, Homo sapiens
gctgctaaaaacaagactggggctgctcccatcattgatgtggtgcgatcgtttgtcgctgatggcatcttcaaagctgaactgaatgagtttcttactc

SEQ ID NO: 246051 - DNA, 83 bp, Homo sapiens
ccaccgccgcccccaacgtccatgcctgagtattaatcaagaagagctatgaccggaccaaacgtcagcgtcgtagaaactgg

SEQ ID NO: 246052 - DNA, 90 bp, Homo sapiens
ttttgcagttacagcctgtgcaacaaggctaaagcagcagcacacccttctgtacaaggtgaatggaatcctcacgctggccaccttcct

SEQ ID NO: 246053 - DNA, 100 bp, Homo sapiens
aacagctggataatgtccaccccgagccgattcaagaaggacaaagagatcatagccgagtatgaaagtcaagtcaaagatgcaatctccctcctttgtc

SEQ ID NO: 246054 - DNA, 88 bp, Homo sapiens
cacagcccggactccatcgactcccccggctcttagactagagcagtttttgcaagaaaggatcaaagtgaacggaaaagctgggaac

SEQ ID NO: 246055 - DNA, 100 bp, Homo sapiens
acaggaggttcagccagaggaaccgacttttaagggatcacagagctcacaccaaagaccaggggaacagtcagaagaggcccccagaatgagaagtgac

SEQ ID NO: 246056 - DNA, 80 bp, Homo sapiens
ccggagcgtgccctcgccgctggcttcttccccgggagctcgcagggctgcgacgccttcctgcggcataagatgaccct

SEQ ID NO: 246057 - DNA, 87 bp, Homo sapiens
aggggaactgccctctagggagacgttccctgcctgacaagttggatggcttgaggactggtactaaaaggaaacgtgactgggagg

SEQ ID NO: 246058 - DNA, 80 bp, Homo sapiens
gtcgtctgtgttgtgactgctttggacgtgggagtcacctgaaagccaggaaatggaatgggtaccacagaccatgtcat

SEQ ID NO: 246059 - DNA, 100 bp, Homo sapiens
aaaagcctctgggagcagaagggaggctccaagacctcatcaacaattaagaccgagacatgggtgcccggcaccgcgcccgagcccactccattcagat

SEQ ID NO: 246060 - DNA, 100 bp, Homo sapiens
gccggctgcaggggacaggaggcccctcccagaatggggaagggtatccctggcagagtctcccggagcagatggcttggaaagatgtgagacatgagat

SEQ ID NO: 246061 - DNA, 74 bp, Homo sapiens
tcctggaaaaggcctgaagtggcactgaaatgaggcatagatgagacagttgatattcataaagagaaagttgc

SEQ ID NO: 246062 - DNA, 100 bp, Homo sapiens
agccacccccagctcttcagcattgtccgccaggcctgtgtccggagcctgagctgtgaggagctgaacaaccgcctggctgcagagatcacacggttgc

SEQ ID NO: 246063 - DNA, 82 bp, Homo sapiens
agacaagatccgatctactgagagctgcgagccctgggcgctgcctatggcacagccaagagcggtaccggcattgcggcca

SEQ ID NO: 246064 - DNA, 100 bp, Homo sapiens
aggctgcagatacgagtggacaagtgctggctgccagctgctgcgccccccatgtagaaggtgcacctcctgggagcaggcacgtcttttggctcttctg

SEQ ID NO: 246065 - DNA, 100 bp, Homo sapiens
atatgaatgagattgttacacaaattgatgcacaaaataagctggaaaaatctgaggtcctggcaaaactggcctgtggactaaacaagcccaaccgcca

SEQ ID NO: 246066 - DNA, 100 bp, Homo sapiens
ttggagtatcgttctatttctctagctattgccttattttttctcatggatgttcttcttcgagtatttgtagaaggggtctcactgtcaccttggctgg

SEQ ID NO: 246067 - DNA, 75 bp, Homo sapiens
cttcctgaagaaagtccacgagaccgtggagcgtggtgggaagggagctgagcacataacgacttacacgttcaa

SEQ ID NO: 246068 - DNA, 75 bp, Homo sapiens
cctatatcacatgtttatgttctatgctccctaatgaagatgctattaaggagtgcatgcaagagatgggaaatg

SEQ ID NO: 246069 - DNA, 100 bp, Homo sapiens
ccacgctgacgcagagcggaaggaggttccggagcatttgctccatgccctcgcctgcctgcagggccccggtgtggccccggtgctgcgctgcgcgccg

SEQ ID NO: 246070 - DNA, 100 bp, Homo sapiens
ggccgaaaggcccggaagcagaagggtgccgagacagaactcgtcagattcttgcctgcagcttcataaacaagcagatatgcaagaagagaaaaaccga

SEQ ID NO: 246071 - DNA, 50 bp, Homo sapiens
cttgaggcgaatggccgaatctctccgttggatgttgatggacagataga

SEQ ID NO: 246072 - DNA, 80 bp, Homo sapiens
cgagcccgacctcgggcgccccgccggtcacctccgcgcggacaccagggagtgcatccgccccaacccttttccccctc

SEQ ID NO: 246073 - DNA, 101 bp, Homo sapiens
acccgcggttcctcatcctcctgggcagggagaagataatatcttcaagctttcacaaagaaaatctccacattgaactcaagccaaataaagaaaatcca

SEQ ID NO: 246074 - DNA, 119 bp, Homo sapiens
cgggagaagctgtctctgatccgcaagcatgctcagaccttcattgctctgtgtgccaccgttacagaatgtctgaaggggacagtgtgggagaatccgtccatgggaaaccttcggtg

SEQ ID NO: 246075 - DNA, 75 bp, Homo sapiens
gacaaagcaaataaagacaaagccaaccgatacttttctccaaattttaagcactggatgtgtgtgagaagtggg

SEQ ID NO: 246076 - DNA, 74 bp, Homo sapiens
ttaacctggagttaaggaacagatccccggaggaggttagctttatacgtctacgaatatttactgcacgtagg

SEQ ID NO: 246077 - DNA, 112 bp, Homo sapiens
caagatggcgtccctggatcgggtgaaggtactggtgttgggagactcaggaaaatcctgccttgcttcgttgggcctatgcaagaacaataaatgtctatcctaatttcag

SEQ ID NO: 246078 - DNA, 143 bp, Homo sapiens
tggacctctggtcctctgtctccgctgaggcccagcaccagaagctgtccggcaccagcagcccttttcacccgggcaacgggcatgaggaggtagttgcatgcgcctgggatggacagacatatatcattgatcacaaccgc

SEQ ID NO: 246079 - DNA, 100 bp, Homo sapiens
gaaaatcagcggagctataaacagaaaaagaaaaggcgacgtattaaggttcaagaagattcatccagtgaaaacaagggcattcacccatatcattctc

SEQ ID NO: 246080 - DNA, 75 bp, Homo sapiens
tgaaggagttcacccctgaatacaaaggcgagcgacggaggcgccggtgccaggtggcattcagctacctgcccc

SEQ ID NO: 246081 - DNA, 95 bp, Homo sapiens
cgacctgctaacagaactggaccttttcgatattatcgtggagctgtaggtgccttattggtttatgacattgctaaacatctcacatatgaaaa

SEQ ID NO: 246082 - DNA, 90 bp, Homo sapiens
ggaaaggccgcgtcgtgatcgactcggacacagaggacagcggcagcgacgagaacctggatcaggaacttctgattgacaaatttcgtg

SEQ ID NO: 246083 - DNA, 75 bp, Homo sapiens
caggatccggctgccgaaggtcctcgccagactgaaactgttgaggagcccatggaggaagaagaagcagccaaa

SEQ ID NO: 246084 - DNA, 75 bp, Homo sapiens
gtgcatgttagtgctcaagagcctcattatctaccacccgagatgccccaaggttgatgacaacaagaaactagg

SEQ ID NO: 246085 - DNA, 92 bp, Homo sapiens
cggatcaatccagatggcagccagtcagtggtggagggtgtccgcaatgttgccagtgtctgtctgcagattggctacccaactgttgcatc

SEQ ID NO: 246086 - DNA, 97 bp, Homo sapiens
agcggcggctggaccacttctctgtcgacggctatgacagttctggggacggtattcagaattcgagcgcaggagctccgcttctccacctgctccc

SEQ ID NO: 246087 - DNA, 96 bp, Homo sapiens
cgtgcttggaaagacgtttcttctcttggcaagagagctctgcatcaatgcgccggccataggatgaagcggatcccaaacggcagaagacagaaa

SEQ ID NO: 246088 - DNA, 90 bp, Homo sapiens
cacgaatgaagacccttatgataattgacttccactcaataaataatgtttctattgatatgccagacctacttgatatcaaccatctcc

SEQ ID NO: 246089 - DNA, 100 bp, Homo sapiens
atctgccagcctcctgcgatcagaagaggtggaaccgtcccaaaatgtcccttgctcagaagaaggatcgggtagctcaaaagaaggcaagcttcctcag

SEQ ID NO: 246090 - DNA, 75 bp, Homo sapiens
gaaggaggtggaggggctgcggagacagagccctccggccagcggggagctgaccacagtggccgagaagtcgcg

SEQ ID NO: 246091 - DNA, 101 bp, Homo sapiens
gtcgggagagcgcgcctagccggctcgcgatgtgctcactgatccgcctccagggccaccgccatgtcgagccgcggtgggaagaagaagtccaccaagac

SEQ ID NO: 246092 - DNA, 100 bp, Homo sapiens
cgaggacgaaggggtagcgggagtgatgtctgtggggccgccggcggcccggcttcagaatttcgctaaggagtttgtgatcagtgatcggaaggagctg

SEQ ID NO: 246093 - DNA, 74 bp, Homo sapiens
aaatgtgcatactcacagagttagagagagggatggtgctgcagaaccttggcctgaaaatgctacattatatc

SEQ ID NO: 246094 - DNA, 50 bp, Homo sapiens
aggaaccacacgctgatcatgtgcgacttcatgatagcatatcagaagag

SEQ ID NO: 246095 - DNA, 87 bp, Homo sapiens
agataagtcagctgaggattacaattcttctaatgccttgggcaaactctttgattctacaatagctgatgagggaacatggacttt

SEQ ID NO: 246096 - DNA, 75 bp, Homo sapiens
gggggtgaagcctcctgcgccggccttgcctcgggaattctttgaccatgtgaaaaaactttgggacgatgaagg

SEQ ID NO: 246097 - DNA, 80 bp, Homo sapiens
catcgagtgtgacgtggtgaaaggctccataaaaatacagactcaccagttcctgctttgatgtgacatgtgactcccca

SEQ ID NO: 246098 - DNA, 98 bp, Homo sapiens
tgagtttggggccttctgcagctgaaatcaatcaagggtgagaaggactggcagaaatacgagactgctcggcggctgaaaaaatgtgtggacaagat

SEQ ID NO: 246099 - DNA, 71 bp, Homo sapiens
caggtggccccatgcttttgccgcagacatacggagcagagaagaagaaggaggttcctgctgtgccagaa

SEQ ID NO: 246100 - DNA, 82 bp, Homo sapiens
gcagggcgcggcctctccgccgggtgtaccacctgtcgcggcgcgagacctctggcttgggcactgtttaaaggaaagttcc

SEQ ID NO: 246101 - DNA, 100 bp, Homo sapiens
tttcgatctccgccctggggtcattgtcagacactattcatcttcgagttcttgaatcctccccagttggcacagccattggaagtgtcaaagcaactga

SEQ ID NO: 246102 - DNA, 75 bp, Homo sapiens
aaaaattaaacttcaacacaatgaggacagaatttggaaaatatgccatttactgccagcgttgtgtagaaagaa

SEQ ID NO: 246103 - DNA, 96 bp, Homo sapiens
ccgccatcaccacctcggaacccagggtaacgctgtcagtctttggtcaccatccttaatggctcagacattcgatccctctacaacttctcaggg

SEQ ID NO: 246104 - DNA, 96 bp, Homo sapiens
atcgacgtgtaccactacgaggtggacatcaagccggataagtgtccccgtagagtcaaccggtgctccatatgtttgagatccattttgtcctgc

SEQ ID NO: 246105 - DNA, 90 bp, Homo sapiens
ggagcataggaggaaaattcatcatctgaactacacgcagtacatccctctgtccatatatgacctgcagacgtggatgggcagcccgtc

SEQ ID NO: 246106 - DNA, 90 bp, Homo sapiens
gaatctccgcactgcaggccaggggcctggccagctacagagagagcaaatccagtttgctgatgacatgcaggagttcaccaaattccc

SEQ ID NO: 246107 - DNA, 88 bp, Homo sapiens
aatatgaatgagattgttacacaaattgatgcacaaaataagctggaaaaatctgagagacgagttgtactgctgtcacaggaaatgg

SEQ ID NO: 246108 - DNA, 82 bp, Homo sapiens
ctggcctgggcgctccggtggcggcggaggtaagtaaggaggtctctgtaccatggctcgtacaaagcagactgcccgcaaa

SEQ ID NO: 246109 - DNA, 100 bp, Homo sapiens
tggatccttacagtaaccgctcgagccaatggagatcttcgtggatgatgagacgaagttgacgctgcatgggttgcagcagtactacgtgaaactgaag

SEQ ID NO: 246110 - DNA, 75 bp, Homo sapiens
tttgagccatcggatctaagatccaaaagttggtagctggcagtgttgtgatggcttttgaagaagtatgcccgg

SEQ ID NO: 246111 - DNA, 100 bp, Homo sapiens
agaagaaatggcggagtttgggcaattctgtggtgttcttggtcacacatttatggagtttctgaagggcagtggagattactgccaggcacagcacgac

SEQ ID NO: 246112 - DNA, 75 bp, Homo sapiens
tgcctccatgaacaatctcacccaattactctgctcaggaacagattatggcctttgcaagcaaatgagtactcc

SEQ ID NO: 246113 - DNA, 101 bp, Homo sapiens
aagtctccagacatggccaaatgtcccctggggggcaaaatcacccccaattgagaactactgctctaaactaaattgcaggtgctgcagtgtctgaaatt

SEQ ID NO: 246114 - DNA, 82 bp, Homo sapiens
tgagcttggcgcacgggccgaccagatgtggacgagtgctcactagcagaaaaaacctgtgtgaggaaaaacgaaaactgct

SEQ ID NO: 246115 - DNA, 95 bp, Homo sapiens
acttcagtatctggagcatcctcagaaaatgtattggaatgacttaattcagtgcacaaatgagatgaatgtgaacatcccacagttggcagaca

SEQ ID NO: 246116 - DNA, 89 bp, Homo sapiens
tatgaaggtgtaggaagaatgttagagccacagctgaaacaactacaaacaaaatatgatgaacttaaagagagaaagtcttcccttag

SEQ ID NO: 246117 - DNA, 80 bp, Homo sapiens
cctcggcgtgctactgtgcgctcgatccagcaccatggggaagcgggacaatcgggtggaagcttgctgtcttcgatacg

SEQ ID NO: 246118 - DNA, 100 bp, Homo sapiens
agagcttgacattctcaaagactggtgctatgaagctgacctgaaggccaatgagtcacggttgaaggacattaacaaggtagctgaagacctggagtct

SEQ ID NO: 246119 - DNA, 98 bp, Homo sapiens
tgacaatgttcagcacactcaggttctttgaaggattttgcctggctggaatcattctcaccttgtatgctttactttgcctgagaatacagatcaac

SEQ ID NO: 246120 - DNA, 95 bp, Homo sapiens
ctgcggtggattgactacggcaaagtggccactcaggattatatctgtccaagatgcgagtctggttttatcgaggagcttccggaagagaccag

SEQ ID NO: 246121 - DNA, 50 bp, Homo sapiens
aggacccactggaagcctagaaatggtgtggtaacagtattgtggttaag

SEQ ID NO: 246122 - DNA, 94 bp, Homo sapiens
agagaaaaggcaacatcctgtcacaggccatgctctggcaaaaacgtttggtctgctctaaacttatccatctccctccattactggaacaact

SEQ ID NO: 246123 - DNA, 90 bp, Homo sapiens
acctggtactgagtgaaggtgcagtgctggcgatatttctccctcgagtggctgggaaacttggcaagagaccagaggacccaaatgcag

SEQ ID NO: 246124 - DNA, 75 bp, Homo sapiens
ccaaggaaggatgagaatagctactgaatcgctgaaacctctacaacttagttgaccgtaactgccagagccctg

SEQ ID NO: 246125 - DNA, 100 bp, Homo sapiens
cacacagctgcttccattggccagtatgaagtggtgaaggagtgtgtgcagcgggagaaaactaaagttgccaaagttagccaaggagtagaagatgggc

SEQ ID NO: 246126 - DNA, 51 bp, Homo sapiens
cctccccagtttatttccccccaggtgggtttggaggatttgggacaacat

SEQ ID NO: 246127 - DNA, 82 bp, Homo sapiens
cattaggctaataggacagcacttgaatggcttagggctcaatttgatgatgtatggcctatggacccccatcctagaacca

SEQ ID NO: 246128 - DNA, 97 bp, Homo sapiens
ccggactcgtggagttgtgaacgccgcggactccggagccgcacaaaccagggctcgccatgaagccagatttggagtcaaaatatggacctgagaa

SEQ ID NO: 246129 - DNA, 90 bp, Homo sapiens
gagaccctcatccagctgatgcccttcttcgtgatattatcaactcactggtaacaacagtattcatgctcatcgtatctgtgttggcac

SEQ ID NO: 246130 - DNA, 83 bp, Homo sapiens
cttggctagtgcaagccttgtttattttcctcaccactgaatctacagcgggctacattgagagacctcagctgattcgagca

SEQ ID NO: 246131 - DNA, 75 bp, Homo sapiens
aataattgggcagaagagaagcagtgaaggagtgcagaggcatcacctgaaagaaggggcttggaccattcctgc

SEQ ID NO: 246132 - DNA, 100 bp, Homo sapiens
catgccaacattccagttttttaagaagggacaaaaggttcgtgctggccgtgggcagcgccgtctttgatgccatgttcaacgggggaatggccacaac

SEQ ID NO: 246133 - DNA, 75 bp, Homo sapiens
agacacatcgaggcccatcgcatcctgctggctgcgtcctgcgattacttcagctggcgcctactatccagccca

SEQ ID NO: 246134 - DNA, 101 bp, Homo sapiens
gctgcggcggccacaccctggatgagtgccggtggtggtgtgcacattgagccccggtatagacagttcccccagctgaccagatcccaggtgttccagag

SEQ ID NO: 246135 - DNA, 96 bp, Homo sapiens
aggatgaagtgacacccccagctacatccgaggaggttctaggacctgctacgaggattgtcagtggcttcgccccgaggagagctgactgccctg

SEQ ID NO: 246136 - DNA, 50 bp, Homo sapiens
gagaaacccagccgaagcatttaaaagatacgtaggtaacctttccagag

SEQ ID NO: 246137 - DNA, 100 bp, Homo sapiens
tgcatggaagagaagaaccaggccgtgtgccatgactacgacatccacttctaccccaccttccggaccaaatacacgctgatcgatgagcaggacatcc

SEQ ID NO: 246138 - DNA, 49 bp, Homo sapiens
aagagatggaaacttacttgaagaagctaatcacatatggctctgatag

SEQ ID NO: 246139 - DNA, 74 bp, Homo sapiens
tacaaccttcgatctcctgacgagtgaagtaacatctggaactctgaggattggtgctgttagtgcaccgatct

SEQ ID NO: 246140 - DNA, 96 bp, Homo sapiens
gggagccgcacgcggcgatatggaagaggagggcaagaagggcaagaagggatttgtcttggctgttactatgacacgggaagcaattgatgaatt

SEQ ID NO: 246141 - DNA, 90 bp, Homo sapiens
gacatctacaaccttcgatctcctgacgagtattgatgaagatgaccctactgctgatgataccagtgctgctgtaactgaagaaatgcc

SEQ ID NO: 246142 - DNA, 100 bp, Homo sapiens
caaatagttacctcttttaaactcattctactggagcaaatggtgaatcagctcccggccgactttaggattcttctggattttaaattttttcttttta

SEQ ID NO: 246143 - DNA, 80 bp, Homo sapiens
ccatcgcagttggaagcccatggggcaggttggtcaaagaaaaagtgatgtatgaaaaagaggcaaaacaacaagaagaa

SEQ ID NO: 246144 - DNA, 100 bp, Homo sapiens
attaatttctggtgcacaagttcccataagcctagaggacctaaaatcctttacaaactattcagagccccgtcctgctggcctccctgggggtggggct

SEQ ID NO: 246145 - DNA, 105 bp, Homo sapiens
ctgcctccaggccgtcaagtacctcatgttcgccttcaacctgctcttctgggtattggcaagcttgccagtgtacctgctggtggggctgtagccgtctctgct

SEQ ID NO: 246146 - DNA, 75 bp, Homo sapiens
ggagtggaaaggctctcagtgaaaaagagagaagaagaaggaggttcctgctgtgccagaaacccttaagaaaaa

SEQ ID NO: 246147 - DNA, 50 bp, Homo sapiens
ccacagtcaagacgatcatagtcactgccaaactgcaggccgctgtggtg

SEQ ID NO: 246148 - DNA, 101 bp, Homo sapiens
aagaaatttatcccttcactatggagcattttacaagggaagctgagttttggagcaaactaatgttcagggtaccaacatttctttccatggatgttgat

SEQ ID NO: 246149 - DNA, 100 bp, Homo sapiens
agtgtgacgatgccatcatcaccaaggccagcatcaaggacgtcctggacagcgaaggctctcatttcactcttcagtgttcctgttatttatgaacggc

SEQ ID NO: 246150 - DNA, 100 bp, Homo sapiens
cgtgaggatggtgtgaccccatatatgattttctttaaggatggtttagaaatggaaaaatgtacctacatcggctccatcctggcctccgtgaacccct

SEQ ID NO: 246151 - DNA, 100 bp, Homo sapiens
tgggagcgctgttttcgtgatcttcagaccccaggttctttgtttccccctttctagggtgaggatggttctacacagccacccggagttccttagttga

SEQ ID NO: 246152 - DNA, 95 bp, Homo sapiens
atccacctcagataccagcaactcccccatcgtatgaatctcaggaagaagatgagccttaggtctgaacgccgaggaattcatgtggatcctgt

SEQ ID NO: 246153 - DNA, 48 bp, Homo sapiens
cctacatgatgagaggtttgagaagcactggatgtgtgtgagaagtgg

SEQ ID NO: 246154 - DNA, 142 bp, Homo sapiens
tgtggcctcgttacctgcaggtattgggagatccacagctaagacgccaggacccactggaagcctagaaatgagctgtaggtaaaacttgcctactgatcagttacacaaccaatgcatttcctggagaatatatccctac

SEQ ID NO: 246155 - DNA, 100 bp, Homo sapiens
agagaagtagaatctgtagaccttccacactgccacctgattaaaggaattgggctcgtgcaatccgcttcagacaggatggtaacgaagccgtcggagg

SEQ ID NO: 246156 - DNA, 101 bp, Homo sapiens
ctctttgggttcgtgagatttcatgaagatggcgccaggacgaaggccctactgggcaagcacgtcagctaactgttcagatgatgcaaaatcctcagatt

SEQ ID NO: 246157 - DNA, 89 bp, Homo sapiens
ggtcaatttaaatggttctggcaaactgctcaaggaattttctacttctggtcatgcttacactgatacagggaaagcatcaggcaacc

SEQ ID NO: 246158 - DNA, 100 bp, Homo sapiens
cgccgggagccgcggcccggaatcggggcgcttcgccccgggccccccagcatgaagaccccggcggacacaggcaacatgagtgagaatgaggaagagg

SEQ ID NO: 246159 - DNA, 100 bp, Homo sapiens
ggaaataccatcgtttcttgggtcgtcatttcccccgcttctatgtcctgtacacaatcttcatgaaaggtcattacacctactctgagaatcgtgtgga

SEQ ID NO: 246160 - DNA, 82 bp, Homo sapiens
ttccagataatcttctcaggacaccatccgttcaattggtacaaagctggctttgtggtgacccagctggtgacttcctgtg

SEQ ID NO: 246161 - DNA, 83 bp, Homo sapiens
gaaggattcaaatgctagcagacacggtggctactctgcctcggggacgaaagcagttggttgaatctggcgatgtggaaccc

SEQ ID NO: 246162 - DNA, 100 bp, Homo sapiens
aacagggcagacgttagcgtgagtgatcactctcaatcccggagtccctgtgaagcaggaagagtgagggcaggttcactgcagctcagcagcatgtctg

SEQ ID NO: 246163 - DNA, 98 bp, Homo sapiens
gcggcggcagcgggtcttgggtcctccgagagcagcagcggtagcagcaattgcagagacagatgaatctgcagaatcagaaggtgtaattgattctc

SEQ ID NO: 246164 - DNA, 74 bp, Homo sapiens
atacagataccatctcaaagggtaatcttccagcggttggattgcagccctgtctacactggataatcattccc

SEQ ID NO: 246165 - DNA, 103 bp, Homo sapiens
gtttgagagtgggaacatgacgcaggtgcaggtgtctcttctcgccctggcggggaagctgatgcagctgtacagtgcgcgccagcggcggcggctgaaccgg

SEQ ID NO: 246166 - DNA, 71 bp, Homo sapiens
acagtgggggtgtgcaaacccgagagaactgggtcattaaatttgacggtggagaggaagtacttatttca

SEQ ID NO: 246167 - DNA, 75 bp, Homo sapiens
ctgtgaccacccctgaagaaattgcacagattgggaaaatgaggtacgttagtgttcgcgattttaaaggcaaag

SEQ ID NO: 246168 - DNA, 76 bp, Homo sapiens
aggagagtttaaacagccaaaacagttcattcatattcagcgactgctgcagatcaatgacaaaatcgccctaaag

SEQ ID NO: 246169 - DNA, 110 bp, Homo sapiens
cgcagggggcgcattggggtccagccgtccccagaacgcagatcagaggtagtcggacctttcccgctggcgcgcagcctcagctagaccattcctcaagaattttgtat

SEQ ID NO: 246170 - DNA, 50 bp, Homo sapiens
ctggtagccaccggcactcacggagagaagtttgctgaggaatgccttca

SEQ ID NO: 246171 - DNA, 73 bp, Homo sapiens
acaaagtcaagagacagcgattggacagaatttgtgaaggactccagaagacctttccagattcgtggttgag

SEQ ID NO: 246172 - DNA, 75 bp, Homo sapiens
ttgaagcctgccacaaggtccacctgttgttgtgggtttttgggtgaccaggctgttcggctcttgaatcccagc

SEQ ID NO: 246173 - DNA, 50 bp, Homo sapiens
aaagcgaggcaaggcaggcggattctgacaatggagatattaattatgat

SEQ ID NO: 246174 - DNA, 97 bp, Homo sapiens
ggcagggcggagaggagcggccggagtcagcgatggtgcccggcgaggagaaccaactggtcccgaaagagggtgcaaatagctatgggcaacttgg

SEQ ID NO: 246175 - DNA, 75 bp, Homo sapiens
caaactcgaagaacagctgtggaaagaagttgcaaaacactggattcctggtcgggtggcttccagtggtcttca

SEQ ID NO: 246176 - DNA, 75 bp, Homo sapiens
ctgagcctgacgcgggccgcgcggctccagggttccttgaaaagaaaacaggtagttaacctatctcctgccaac

SEQ ID NO: 246177 - DNA, 83 bp, Homo sapiens
gccactagacagagccgggcctagcccagagacatggagagttgctacaacccaggaggacttggatcaggaggagaaagcca

SEQ ID NO: 246178 - DNA, 123 bp, Homo sapiens
tggatttaaaagacagtcctcgtcagcactgactttcagctatggaatcggtgtcatggagaaactccagctgggcccagagattctgcagcgggaaaatccaaggcttatttatgccaggct

SEQ ID NO: 246179 - DNA, 96 bp, Homo sapiens
cgttatcaccattaactaccgtctgggaatactaggtctgcttagtggcctatcttggcttgtttatgctttgtgtctcatatcaggttgacgaac

SEQ ID NO: 246180 - DNA, 75 bp, Homo sapiens
aagaactagcggatttgccaaaagactacctcttgagtgagagtgaagatgagtatttcctttgaaagacctccc

SEQ ID NO: 246181 - DNA, 90 bp, Homo sapiens
ccgggatcgtgaccgagaccgtgaccgagagcgtgaccgagagcgcgaatatcgtcatcgttagaaggcgagcccacaccttaaccgtgc

SEQ ID NO: 246182 - DNA, 100 bp, Homo sapiens
gaagcatatacttttgaaggtgcaagatactatataaagcagacctgttatcctaaactaggtgagtcagcttttggtacatgtgatgattttcagtgta

SEQ ID NO: 246183 - DNA, 83 bp, Homo sapiens
caaacagcccgcccgaccccgtcccgaccctggccgccccgagcggagcctggaggtatcgagaaccttccctgcgaacttca

SEQ ID NO: 246184 - DNA, 83 bp, Homo sapiens
ccgcgtgtcctcggagcgcggtccctgtattggtctcctgctcctagaggttaacacagaaatctgcctcctgggccatgccg

SEQ ID NO: 246185 - DNA, 98 bp, Homo sapiens
aatactcgaagggctctcctgatactaacagttttacgatttaaaacttcgccagaatttatatcatgtttaggtattactacaaatgaaagaatgaa

SEQ ID NO: 246186 - DNA, 75 bp, Homo sapiens
cagatgtccagtactactgggattctgtttcctaaaatgccaaaacgacagggtgattttttgcattttttaaat

SEQ ID NO: 246187 - DNA, 100 bp, Homo sapiens
tcctggagaccgggcagctccccaaagacaggagcacaggtgccgacgccaccgccgagcccatgatcctggaacagtacgtggtggtgtccaactataa

SEQ ID NO: 246188 - DNA, 97 bp, Homo sapiens
gacagcatgctgcatccctgggaggagggagctcttaaggaagttccaagagaaaatgctgctgtgaagacccaattaaagctttcacataaatgaa

SEQ ID NO: 246189 - DNA, 75 bp, Homo sapiens
agtggagcccaaagacccctggagacatgcttcgcagaatcaagaacggctatgtgcgtttaaagatccgtatca

SEQ ID NO: 246190 - DNA, 100 bp, Homo sapiens
agccgactgctgcctggtctgcaaagaagtcctttcaagtctctaggactggactcttcctaagcaagtccggtattcccagttccaagatgaatacagt

SEQ ID NO: 246191 - DNA, 100 bp, Homo sapiens
tgaaaagccatgagaaagcagtcacttgtgttctttacaattctatcttgaagcaggtcacagtaatgaaaggcagtaatagaaataaggatcattcagc

SEQ ID NO: 246192 - DNA, 83 bp, Homo sapiens
ctgctttgtggacgctggcaacgcattcaagaaagccgacccccaagaaccgggctgtgggtcggcccaaggggaagctgggc

SEQ ID NO: 246193 - DNA, 100 bp, Homo sapiens
gccgacatggcggcagcggtggcggctgcgctggcgcggcttttggcggcctttctgctcctcgcggcccagctgagctgactgctgcccactttggagg

SEQ ID NO: 246194 - DNA, 96 bp, Homo sapiens
gcatttgggtgccctccatggccaggaggacacccctggtggcctgcttgacaatgcagatcttcgtgaagactctgactggtaagaccatcaccc

SEQ ID NO: 246195 - DNA, 74 bp, Homo sapiens
caagctctttcagtccaatgatgcttccaagaacaaaacacttgttaaatgtcatcaatgaaaactttggaacc

SEQ ID NO: 246196 - DNA, 101 bp, Homo sapiens
tggttatagtccatgagcgagtgcctgacatgcagacctatccaccactcccagatatattcttagacagcaatgtgtattcctccatcatatgctgacct

SEQ ID NO: 246197 - DNA, 107 bp, Homo sapiens
cgacatcatccaccactggaacgccaaccggctggacctgttcgagatcagccagccgaccgaggaatgtatcctgtcaggtataatgtcagtgaatggcaagaaag

SEQ ID NO: 246198 - DNA, 83 bp, Homo sapiens
ctgcatttggcacaaacaaatggcctgtgattggaattgaaacagtacaactgcctccaccagaggaaaatagtatgggaatt

SEQ ID NO: 246199 - DNA, 97 bp, Homo sapiens
atggcgctgccatcccgaatcctgctttggaaacttgtgcttctgcagaggaaagtcttcagatggcagtaggcccattcctccacatcctagagag

SEQ ID NO: 246200 - DNA, 83 bp, Homo sapiens
tgcagcgggagctggacggcgagcgcgagcggcgcgagaaagaaggagctgaagagaatgcaggacctggacgaggatgccac

SEQ ID NO: 246201 - DNA, 75 bp, Homo sapiens
gtgggaatgaaggttctacagaaagtcaccagaggaaggcatctccttggaaacaatgccatctttgaatgtgag

SEQ ID NO: 246202 - DNA, 96 bp, Homo sapiens
tttctggacagaccaacctgtcagtgctgcaagtacaactccaaaaggagacattggagaagaaccaagctgggtctataaggaattgcacatgag

SEQ ID NO: 246203 - DNA, 51 bp, Homo sapiens
aaagaagtaaaagtggtggctaatctcctgagactggacagactgcaggac

SEQ ID NO: 246204 - DNA, 121 bp, Homo sapiens
cggggcgctgggccgccagcctcggcaccgtcctttcctttctccctcgcgttagcaattctgtggtgttcttggtcacacatttatggagtttctgaagggcagtggagattactgccag

SEQ ID NO: 246205 - DNA, 101 bp, Homo sapiens
cccggtacctcagccccggctggggcagcgcgagcgaggaggagccgagccgcgggcacagattaataaagaactcttcagaattcctggtgtttcatcat

SEQ ID NO: 246206 - DNA, 100 bp, Homo sapiens
atcaagttcaaaaccagcaatttcaaacctcagttggatgaacccattccactgtatgaggcaaaagtttccatggaagctgttcagaaaaatcaaggaa

SEQ ID NO: 246207 - DNA, 83 bp, Homo sapiens
cgagacttttctcagatgttggatatttgcttggaaaaacgtgtgggtacgaccttgggcagctgcaatgactctccgcacgg

SEQ ID NO: 246208 - DNA, 50 bp, Homo sapiens
ctcccagccctagaccagctcttaggaaatgggtcctgatgaatatgaag

SEQ ID NO: 246209 - DNA, 100 bp, Homo sapiens
cgcggccaggcagggaggagaccggcacccagacaggtggcgaaggcagaggagtaccagctggaggatgagtctgcgcatttggatgaaatgccactaa

SEQ ID NO: 246210 - DNA, 101 bp, Homo sapiens
acaaagctgaggtccagatgaaagagaagtttctggtcactccccaggattatgcgcgggaacgctgtgaggagctccgtgttgaattgttatctatccat

SEQ ID NO: 246211 - DNA, 98 bp, Homo sapiens
agcatcctgaaaaactcccagagtggaaatgccctcacagcatatgccttgtttaagtttttccagaaaggaggagtcaaggaagcccttagtgaacg

SEQ ID NO: 246212 - DNA, 90 bp, Homo sapiens
cgtgaacggagtgaccaagagcaggtttgagcaatcatcctcttccagtggtagcgtgtttgggtctggaaacactggaagagggggagg

SEQ ID NO: 246213 - DNA, 100 bp, Homo sapiens
ggtgggagtcgaggcacatgtggacattcacaggatgctgacagacagcaccaagaagtaattgcaatttatcggacacaccttcttagtgctgcacagg

SEQ ID NO: 246214 - DNA, 100 bp, Homo sapiens
gtggacgtcgtcttccaggctcaaaaggagccacaccccctgcagtttctcaggttcatcatgcctagtggcgtataagaagaccccgccaccggtccct

SEQ ID NO: 246215 - DNA, 100 bp, Homo sapiens
tacgaaatggtcagattgatgtaccaggtggcatattatttggtgcaaccatctccttctcatgtaacacagggatctcaaagatttcatgagacaagct

SEQ ID NO: 246216 - DNA, 75 bp, Homo sapiens
caggtctctgtcgagcagcggacgccggtctctgttccgcaggatgggttgtccttggctatcttgatgacccaa

SEQ ID NO: 246217 - DNA, 100 bp, Homo sapiens
tggcgcccccggggcggaaccccttcgtgcacgagctgcgcctcagcgccctgcagaaggcccaggtcaacaacggttccagcctcagggatgagtgcat

SEQ ID NO: 246218 - DNA, 82 bp, Homo sapiens
tacgagctgcacgtcttcaccttcggcagccggctgtacgcacacaccatcgcagcgtctgcttctgcgctttgcctgggag

SEQ ID NO: 246219 - DNA, 75 bp, Homo sapiens
gatgcccaggctgggaaggagccaggggggagcagggctcactccaggcagctgctgcagcacgagtgcccgcgg

SEQ ID NO: 246220 - DNA, 48 bp, Homo sapiens
aatgaagagctgccagatcccacaggttggacgtgataagtatgagcc

SEQ ID NO: 246221 - DNA, 124 bp, Homo sapiens
cgagccttcagcagaggcggcagcctggagagtcgaagcagcagctctcgctccagaagcttcactttgagagacaagagagacacctccaacttcgacaaagagttcaccagacagcctgtgg

SEQ ID NO: 246222 - DNA, 75 bp, Homo sapiens
ggaaacacaaagccggctacgcgctgcgaggtgatcactttactgtagaagaaatgaggttaacagaaaagagtg

SEQ ID NO: 246223 - DNA, 75 bp, Homo sapiens
aaaatattcaggagaccgtcgttgccttgtatttccagagaacagacttccttgccgtccaggaagggatttcga

SEQ ID NO: 246224 - DNA, 75 bp, Homo sapiens
aagaaacttgcaaaagtatctcatatgaccagtgcgcttctctgaagtagctttggaaagtagagaagaaaatcc

SEQ ID NO: 246225 - DNA, 88 bp, Homo sapiens
caacgcctggctcggagcagcagcctctgaggagccttcacgtaaatgggtccagtcatgcctcccagtaagaagccagaaagctcag

SEQ ID NO: 246226 - DNA, 101 bp, Homo sapiens
accaaatttgactccggttcaggtactaggttttgacaagcttgcatcatgcgtgagtataagctagtcgttcttggctcaggaggcgttggaaagtctgc

SEQ ID NO: 246227 - DNA, 98 bp, Homo sapiens
tacggccacgaccccgcgagcggcggcatcttctcctccgactacaagcgacgcaaacatgcagatctttgtgaagaccctcactggcaaaaccatca

SEQ ID NO: 246228 - DNA, 82 bp, Homo sapiens
ggggagccatggcggctgacagtcgggaggagaaagctcattgctatggacagtgctatcaccctgtggcagttccttcttc

SEQ ID NO: 246229 - DNA, 83 bp, Homo sapiens
tgagatttacctgtgagatgtttcatcccaacaatgagattgtggggaacctgggtgaaggcacctttggcaaggtggtggag

SEQ ID NO: 246230 - DNA, 76 bp, Homo sapiens
ctacaaggatggggtggtgaccatcggctgtgtgggtagaatggaagaatctcacttcaattctaacccgtacttc

SEQ ID NO: 246231 - DNA, 100 bp, Homo sapiens
tgggccggaggaaagcgggaagactcatcggagcgtgtggatttgagccgccgcattttttaaccctagatctcgaggtacttggaaggctccatcgccc

SEQ ID NO: 246232 - DNA, 83 bp, Homo sapiens
ccgcgcgctacgacgcgacctcggggcccaggatgcccccgccatcgccttcggtggaagacattgtgttggaggacacccag

SEQ ID NO: 246233 - DNA, 83 bp, Homo sapiens
cttcagaaagtgaacttggcattttagatctaattcaatcgtgagatggagaataaagaaactctcaaagggttgcacaagat

SEQ ID NO: 246234 - DNA, 99 bp, Homo sapiens
tctggctccctcctcccagggccaggcgccgctcagaacgatttctatattcagatgaagttcaaattggtccagaaacagttatgaccactctttata

SEQ ID NO: 246235 - DNA, 75 bp, Homo sapiens
caggtccggaggcggctgcaggagctggatgaggcagtggctgaagcccacctgggcaagctgaatgtgaagttg

SEQ ID NO: 246236 - DNA, 74 bp, Homo sapiens
gttgatgggcacctcccgggacgcaaactgccctatgatgtgacccctgagcaggcgctagctcatgaagaagt

SEQ ID NO: 246237 - DNA, 74 bp, Homo sapiens
tcggctgccgtggctgtgctgagggtggcggccggatagttttcggctttgtgagaaaccttaccatcaaacac

SEQ ID NO: 246238 - DNA, 100 bp, Homo sapiens
ggaagcggtagcccggacggtgctgtggtgcaagggcttgtggaaaaggatgaggagaatttctgtgccactgtgcccaaggatggacgttcctattccc

SEQ ID NO: 246239 - DNA, 82 bp, Homo sapiens
gaaaaggcaaaaatcccatctaccgcaactctcagttcgagagtaaagatgtgcactcccagcaacacccctgccacgccgc

SEQ ID NO: 246240 - DNA, 82 bp, Homo sapiens
agggagcattccaggagagaaaggttttcccatcatatgattcccggtcctcctggtccccacacaactggcatccctcatc

SEQ ID NO: 246241 - DNA, 75 bp, Homo sapiens
tataaaacgatgacattttcaggaaaatcctggaagaaatctttcctgttttctgctctgtatgctgcctttata

SEQ ID NO: 246242 - DNA, 125 bp, Homo sapiens
gagctggaagacaagtttgatttactagttgatgccaatgatgtaattctggagagagtggtcaagagcaatctgaatccaaatgcaaaggagtttgttcctggggtgaagtacggaaatatttg

SEQ ID NO: 246243 - DNA, 51 bp, Homo sapiens
gataaagaacttcttcccaaaatggaaaatgtggacacagacttgccaggc

SEQ ID NO: 246244 - DNA, 98 bp, Homo sapiens
tcagaagacagagggttttcttttgagaattcctagaggacctgtgcaacaacctcttgaggatcgaatcttcactcccgctgtctcagcagtctaca

SEQ ID NO: 246245 - DNA, 100 bp, Homo sapiens
ctttgttgtcccggtcccagaccaccctcctccaccgtcgcctcccactgcaaaaaggcctggggtcctggcggcagagaccacgtcccagcaggagcgg

SEQ ID NO: 246246 - DNA, 83 bp, Homo sapiens
aggagacatcggcctctgcaggcttgccgaagaagggaggtgcagcccatccagcccacaccaaccgtgccccagcctgctgt

SEQ ID NO: 246247 - DNA, 75 bp, Homo sapiens
caaattggcccagatctttttcaacgggacctacaagaacagtgaggagcttcggtctcgtattgtgtctggaat

SEQ ID NO: 246248 - DNA, 100 bp, Homo sapiens
ggaaggaataccagtcccgacactaactatactctctactattgattccagagtcattaaaaagtatcacatggcagagattgggaaaaggcaattcagg

SEQ ID NO: 246249 - DNA, 74 bp, Homo sapiens
ttgccactgacattgcagagctgtgggctgtgttccacaagttcaaagggattaatgaaaatcaagttccatcc

SEQ ID NO: 246250 - DNA, 100 bp, Homo sapiens
ccgcctgggacttcgcctctgctctcttcttcgccagcacgctgatcaccaccgtggaaacaccacaaccccagacccagacccagcaactggaaggaac

SEQ ID NO: 246251 - DNA, 88 bp, Homo sapiens
ttgtgaagcagctggaggaagacctgtatgacggccaggtgctgcagaagctcttgggccgagtgtactacttcaaccacatcactaa

SEQ ID NO: 246252 - DNA, 155 bp, Homo sapiens
caaggacctgggtggctttgatgaggacgcggagccgcggcggagccggaggaagctgatggtcatcttttccaatgccaggtggagctcaacaggaaagtcctagcggatctggccatctacgagccaaagactttcaaatctttggctgcctt

SEQ ID NO: 246253 - DNA, 85 bp, Homo sapiens
cctgggcaggtgtcttcctcgagaggcaggcaggggatcccggacgaagattcggaaagggccaggtattcccaccggtccagtc

SEQ ID NO: 246254 - DNA, 75 bp, Homo sapiens
tgttgcctggacttgggagttgggcccagagctgcaggaaggttctgacaacaaaggagattgtgacatattgct

SEQ ID NO: 246255 - DNA, 74 bp, Homo sapiens
atctgccatcgaacaagaaataagaatccttctaagggtggacattgaagtggacctaattcggttttcctttt

SEQ ID NO: 246256 - DNA, 100 bp, Homo sapiens
caatgttgcactacaattttttatggtgttggagaaatcagcatgttaaaacaactgttgatgatagctgttggagtaaagttgcagtggaagctatggc

SEQ ID NO: 246257 - DNA, 142 bp, Homo sapiens
gacgtcatgagcattgcaatccctctgggagtcaccacatcagatacatcctactcagatatggctgctggatcagaggtgaagtaccatgcaagcatttcttaaaggtacatccatcagtactaaacccccgctgaccaag

SEQ ID NO: 246258 - DNA, 74 bp, Homo sapiens
cattactttgctgtgaatgtgaagaatcagaaatctttactgattccaatgtcagtaacagatccaagagatgg

SEQ ID NO: 246259 - DNA, 82 bp, Homo sapiens
atcgggtggcggctcgggacggaggacgcgctagtgaaagatgaatgggagggctgattttcgagagccgaatgcagaggtt

SEQ ID NO: 246260 - DNA, 75 bp, Homo sapiens
cccgtgtctccccgaacaccctatgggatgccatatcttgggtggacaagatcgaggaacttgatcaagaaaacg

SEQ ID NO: 246261 - DNA, 96 bp, Homo sapiens
aactcttcgttcgattattagctttagtgaaatgggctaataatgctggcaaagtggaaaaatgtgcggtttcgcatcgccgaagatagattctgt

SEQ ID NO: 246262 - DNA, 126 bp, Homo sapiens
gtggggttcagcgtagactctggaccaggagaggcccgcggtgaccgaggcctgggccccgggtggccagcatcgaaatgttcagccttttagtgatgaagatgcatcaattgaaacaatgagcca

SEQ ID NO: 246263 - DNA, 96 bp, Homo sapiens
tctggatcagactgttgttggttatctggtgtggagtaagtgcacttagcaggcttggcaactcttgtgaaatttcatagatctcgtcgcttactg

SEQ ID NO: 246264 - DNA, 90 bp, Homo sapiens
gaccgtgaccgagagcgtgaccgagagcgcgaatatcgtcatcgttagaagtgtcttaaagacttttctacatgatcctcttgtggaatg

SEQ ID NO: 246265 - DNA, 113 bp, Homo sapiens
aagaccaggaagtgctgcttcaaacgggcagggctctaggaaacatatgttacgatagcctagccggatcgagctgggagatgtgacaccacacaatattaaacagttgaaaa

SEQ ID NO: 246266 - DNA, 76 bp, Homo sapiens
cgggggtggaggtggtgcctctggcagtgacgaggacgaagtgtccgaggcagacatatttgctggagccatattc

SEQ ID NO: 246267 - DNA, 100 bp, Homo sapiens
ttcaacttgatgtcaagcgagtaacacatcttctcaaccaggacactctgactgtgagagcagaggatcaggttaatgttcgtgaagaaattgaagagtt

SEQ ID NO: 246268 - DNA, 75 bp, Homo sapiens
tcggacccacggagccggcagcccagcactccggtcgcctgcgaggccgctggccaggcctgagcctctgccacc

SEQ ID NO: 246269 - DNA, 74 bp, Homo sapiens
cagcacgggatcccagcctcaggcctgcacggacggtgttggttgggcatctggaatcaagagacccatggcat

SEQ ID NO: 246270 - DNA, 73 bp, Homo sapiens
cttctgtgagaggacacccaaaacatgtgagggtggagagattcaaccagttagcgtgaaagttggagataaa

SEQ ID NO: 246271 - DNA, 74 bp, Homo sapiens
atgtctgacagccctgtgtgacaccaagataagtaacagaaattaatggacttacgaaatgaatacctgcaagc

SEQ ID NO: 246272 - DNA, 50 bp, Homo sapiens
gaagaagctgcagccgcacctggccaaggaaaactatgtgcaagctgtgg

SEQ ID NO: 246273 - DNA, 101 bp, Homo sapiens
gaaagtgcgtcatcctaaggaacatcgaccctgcgtatcagaatctgagacagcgtgttgacaactttgttgcaaatcacttggcaactcacacatggagt

SEQ ID NO: 246274 - DNA, 76 bp, Homo sapiens
actggagacgtccagcctgacattcacctgacttctgcagaacacaatcaggctatttgtatgctggaaagacgag

SEQ ID NO: 246275 - DNA, 100 bp, Homo sapiens
tggccaagggctccacacaccaagaccaagaccctggacgcatttgccgcaatggcctgcacggagatgctgacaagaaacaccctgaagcccagtcccc

SEQ ID NO: 246276 - DNA, 100 bp, Homo sapiens
cccaggacctgagcaggaacctggagttttcagggtaaagcatcaagtcgaatatttgggtctgaaagagaacattcgagtgagaagagctggctatgcc

SEQ ID NO: 246277 - DNA, 100 bp, Homo sapiens
gtgaatcccctgtttgagaaaaggcctaagaattttggcattggtacaccaggggttggaaaaaccacactaggcaaagaacttgcgtcaaaatcaggac

SEQ ID NO: 246278 - DNA, 98 bp, Homo sapiens
cgactttgaggatctggaggacggagaggacctgttcaccagcactgtctccaccctagagattgctttcacaacaaaaatttaccatccaaacataa

SEQ ID NO: 246279 - DNA, 128 bp, Homo sapiens
ctctggggctcgccttgtatctcaacaccctgagtgcggatttctgctatgatgacagacttaattcagtgcacaaatgagatgaatgtgaacatcccacagttggcagacagtttatttgaaagaac

SEQ ID NO: 246280 - DNA, 82 bp, Homo sapiens
ggaaccctggggactacgacgtccctcaaaccttgcttctaggagataaaaagggaatgcagctggaagatctcaaacagca

SEQ ID NO: 246281 - DNA, 75 bp, Homo sapiens
cgcttcagcgtcccggcgccgtcgcgccactcctccgaaatgtttctccatcccagagagatgaagtaattcaat

SEQ ID NO: 246282 - DNA, 100 bp, Homo sapiens
ccagagcctttgccaccatgggggagaccgtaatgagcgtcaaaattatccgaaaccgcctcactggaagctgaaacctatcaacactcttcaaaatgca

SEQ ID NO: 246283 - DNA, 90 bp, Homo sapiens
ggcggcgctgtgtccgtcgccatgacaggttgtttacattcagagctctatcaataagaggaatacatattacagtgaattcgacaaccg

SEQ ID NO: 246284 - DNA, 100 bp, Homo sapiens
gtcactgaaagccctgacttggggaaggctgcgggctcggagccggagacgccgagctggggccgggtgaaaggtgtagcagtcactcggcctacaccca

SEQ ID NO: 246285 - DNA, 100 bp, Homo sapiens
ggagacactggcattggaacttcctgttctgatagcgtggaaggacatgtctcaggaaggctatggaactagatctcaacctcctctggcccccggaaaa

SEQ ID NO: 246286 - DNA, 83 bp, Homo sapiens
gatggccagtcacgagaacccagatcgaaaagtatcctccttgcacacctcccgagttcagaggcagatggtggtctccgttc

SEQ ID NO: 246287 - DNA, 87 bp, Homo sapiens
tcaatttcacattgcccacttatatgaaacccagttaaaagatgttgatactcggaaaatcataaaagcaatgctttcttatgtgtg

SEQ ID NO: 246288 - DNA, 82 bp, Homo sapiens
ctgcattggacccagctattgctgcagcatttgccaaggagacatccctcttagtctctgctcctgagtgtttggctttcaa

SEQ ID NO: 246289 - DNA, 101 bp, Homo sapiens
caacttcaagaaaattacggtggtgccgtccgccaaggtgactcctgcacctgcgccggctcctgcaaatgcaaagagtgcaaatgcacctcctgcaagaa

SEQ ID NO: 246290 - DNA, 73 bp, Homo sapiens
agtgagtggagccccagcaccaagtggcacaactctctggacttattggacaaaatgttgacattcaacccac

SEQ ID NO: 246291 - DNA, 100 bp, Homo sapiens
ggacttcccagcctccagaactgagagtcgcggttgctgatcgtggtgcttgagtagagccgtggttggtgacagcatgacgagcgaggtgatagaagac

SEQ ID NO: 246292 - DNA, 75 bp, Homo sapiens
gcggcgggcatcttcttcgtgaggctgctcttcgagcggtgagtgtggtccaagattcagtaaacatatcaggac

SEQ ID NO: 246293 - DNA, 100 bp, Homo sapiens
cccccccaccccttggagccaggcgccggggtctgagtaataatttttcaccatgcatcggaaaaaggtggataaccgaatccggattctcattgagaat

SEQ ID NO: 246294 - DNA, 75 bp, Homo sapiens
gtttttgatacacagtgacattcagtctgaagaatccatcaacagcatcaagtccagactaagcaaaagtgggca

SEQ ID NO: 246295 - DNA, 100 bp, Homo sapiens
tgaaatcgagtacatgatggagctcctagacccatcgctgttacatggagaagaaagggtggattttttgtggatctctttgtaagagtatctaaccaag

SEQ ID NO: 246296 - DNA, 121 bp, Homo sapiens
agttgatatgccaagcagaggacagaatgaagacagggacagtggcattgctcgatcagctggagttcaagagctggaatcacgcgtcctggtgcctggagatttattaattttgacaggg

SEQ ID NO: 246297 - DNA, 75 bp, Homo sapiens
cgtggtgatgaagagttggattctcttatcaaggctaccatagctgggggtggccataggaaaaggatacagagt

SEQ ID NO: 246298 - DNA, 96 bp, Homo sapiens
ggcaagttatcctttggaaatgtgctcacactccgatgccaaggccctaccgccaggtgagcttcccggacgacgacgaggagatcgtgcgcatca

SEQ ID NO: 246299 - DNA, 108 bp, Homo sapiens
cgtggacaagtttgcagatcgggagcgcaaggtcgccctcaaggccatgatcaaaacacctcctgccccccgaggtctgcagtctcctgaacccagcagccatctacg

SEQ ID NO: 246300 - DNA, 88 bp, Homo sapiens
tcgcagtggtcgcttcttctccttggtgtgaagatgccttaagaaaaaataagagcttaattgggccggatcaaaaggagtatcaaag

SEQ ID NO: 246301 - DNA, 82 bp, Homo sapiens
gagagctctcactgtggtggacgttcggccaagggaccaaggtggaaatcaaacggcgagcgtttgggggtcctcagagccc

SEQ ID NO: 246302 - DNA, 115 bp, Homo sapiens
aacggaatttacactgacagaagcagtggtcgaatccagtagaaaactggtcaaggaagctcaccctggaggagaagaggttctgctggaacaagctggtgtagatgcaagtgaa

SEQ ID NO: 246303 - DNA, 73 bp, Homo sapiens
ccagccctgctcgcagaattaccgcctcttctttagtgctggagaatctggtaaaagcaccattgtgaagcag

SEQ ID NO: 246304 - DNA, 98 bp, Homo sapiens
ggacttggagctgccgccgccgggactcccgtcccagcaggtattcttcagcggaaataaggaaacagtttactctcccaccaaaccttggccagtac

SEQ ID NO: 246305 - DNA, 75 bp, Homo sapiens
cccacccctcctgtaacccagcctgtttcacttcttggatccctccccgcggcggcgatggcccgagccatgaga

SEQ ID NO: 246306 - DNA, 100 bp, Homo sapiens
gttcaaggccaagttcctgacagcctggaacaacgtcaagtacgggcgccatgttttggaagtttgacctgcacacaagctcgcacctggacacgctgct

SEQ ID NO: 246307 - DNA, 99 bp, Homo sapiens
gtgaggatgaaagcaaactggatccagttcttcaccctctagcttcttccaaatatcagtattcccacttgcatagaagtgcagaattgaagagttggg

SEQ ID NO: 246308 - DNA, 102 bp, Homo sapiens
tttttcttctctgcctgaacagaacttgggaatcagtgaaacgtacaaccaggaaagagcagactgcggatggaattccgatgctgaagatcgtgtttgcag

SEQ ID NO: 246309 - DNA, 115 bp, Homo sapiens
cgccgagcaccatgggagacgctgggagcgagcgcagcaaagcgcccagcctgccgcctcgctgtccctgcggcttctggggaacaacgactatcgtctattccacaagatgagt

SEQ ID NO: 246310 - DNA, 100 bp, Homo sapiens
cttcgcaaggaagcggggcggctgcagcgagtaggcggcggcggaggcttcgcaaacctgggtatacttcatgtgacaaagaaaaaagtatttgaaacac

SEQ ID NO: 246311 - DNA, 98 bp, Homo sapiens
tctcgctaacaactgcccagctttgaggctatttttatgattcccacaaatccaccaccaacattcagaaagccagaactttggtccgatgatttcac

SEQ ID NO: 246312 - DNA, 83 bp, Homo sapiens
cagcagcgaacggaagctcctggaggtcagaggccctttcatcatcaggtttttagaacttcagccataaaaatgggcagaat

SEQ ID NO: 246313 - DNA, 90 bp, Homo sapiens
aacaacaattatgaaacaacctggcccatgagatgatagctgtggaaggaactgaaggctatttacgagcagactcacaagagccctccc

SEQ ID NO: 246314 - DNA, 74 bp, Homo sapiens
ccttagcgcggctcagccatgagcaacaggagtagcttttcccggctcacctgccttgttgtcctcctggtgcg

SEQ ID NO: 246315 - DNA, 96 bp, Homo sapiens
cctcgcccagagcgtcttggcggaagctgttttaggttatgtgaaagagatgtttcctcatctctaaggcttaccagaagctctgatttgaagaga

SEQ ID NO: 246316 - DNA, 100 bp, Homo sapiens
attatgaagtattaattcttccactgatatctcaaaaggtgatctggacaaaggaacaggtatctcagaacagaaactgttcatacttggtgcgctgtgg

SEQ ID NO: 246317 - DNA, 51 bp, Homo sapiens
aagatatcagcaccttggaacctttgtgcagtcattggagaaatcgatgaa

SEQ ID NO: 246318 - DNA, 101 bp, Homo sapiens
caatcaacagccaggccaggatgcattattgcattagatcccattaccaaacttagatcctgaactttcaactgtttgccggaagtctggtacattaatat

SEQ ID NO: 246319 - DNA, 90 bp, Homo sapiens
cactcagccaactccattgccacagcctcccccaccaacacagctgttgccaatacacaatcagggctgaccggttccctgatgtgttac

SEQ ID NO: 246320 - DNA, 100 bp, Homo sapiens
agcaaaagtgggaagccaagcctttcctcccggtccaggtcaagacctcgtctccgttctcatagtcgtagcagtgaaaggtccagtcacagaagaacgc

SEQ ID NO: 246321 - DNA, 78 bp, Homo sapiens
aggccgtcgctatgagcgggaccaccctgggcacagcaggcatcggaggtattttggagataacggcagtggaggtgg

SEQ ID NO: 246322 - DNA, 98 bp, Homo sapiens
gcagagctcccagggcggacagcagcctcgggtgcaatcctggagccccccagtgaggggtagtggtggtgcacgaagatccgcactacttgacagcg

SEQ ID NO: 246323 - DNA, 90 bp, Homo sapiens
cggtgttgcagggttcatctttactttttaccaaaactcaaggaagtagcacaagttggtgttttagagcactttgctgcaagggaccac

SEQ ID NO: 246324 - DNA, 50 bp, Homo sapiens
atgtgattcagcctaatatctcagagccagcaccgctctttgaccttgcc

SEQ ID NO: 246325 - DNA, 100 bp, Homo sapiens
tcttgattgtgacctctgtggaaaatgagccatgaaccaaccaatgaaggatctgagtctctccctgcggagacagccctgaagaactcctgtaacgtca

SEQ ID NO: 246326 - DNA, 83 bp, Homo sapiens
cccagccttgcgcgtcgtcgctacctcctcggacagacaatgcagatcttcgtgaagactctgactggtaagaccatcaccct

SEQ ID NO: 246327 - DNA, 75 bp, Homo sapiens
gggggagctgagccacatcatcagacaactacaggcctgctctctggttccagacatgaagaccctgttaccagt

SEQ ID NO: 246328 - DNA, 75 bp, Homo sapiens
aagctcccaaaaggcagactcgtcgaagagcggctaaaaacgttagaaataacctgactgtgatggatgctgtga

SEQ ID NO: 246329 - DNA, 76 bp, Homo sapiens
gcatgcggcccatgagcaacatgagtgggaagtgagtgatgaccctgaagtgaggactcatctctagatctccaag

SEQ ID NO: 246330 - DNA, 75 bp, Homo sapiens
gctctgcagccacatactatccgtttgttcaggaaccaccagtgacagaaatggtagctgagtggaggttgtctc

SEQ ID NO: 246331 - DNA, 83 bp, Homo sapiens
tagcgctcgtctggcggagctggaaattgaaaagtttcaaggttctgatggaaaaaaggaagacgaagaaaagaagtatcttg

SEQ ID NO: 246332 - DNA, 90 bp, Homo sapiens
cttgagagcaccttgtggcgcacccagtgtaactgtgacggaggctatgatggtcacacgttcctggacagtgtggagtgttacgaccca

SEQ ID NO: 246333 - DNA, 101 bp, Homo sapiens
gaatgggcattgtcgccaattttcaggtcactcctggaagcaaggcggctctagctaatttatgtattggagatgtaatcacagccattgatggggaaaat

SEQ ID NO: 246334 - DNA, 74 bp, Homo sapiens
tggattgtagccataagtggacttgcctcattgctacgatttcagagtaccctggtaatagctgagcatgcaaa

SEQ ID NO: 246335 - DNA, 75 bp, Homo sapiens
cgcagcaacagcaagctcccgggcagggagtgcatccgccccaacccttttccccctcgtctcctgtgagaattc

SEQ ID NO: 246336 - DNA, 82 bp, Homo sapiens
cgcgcctggcctggccgggaccatggaaatctggcattttttaaagtttgcgccccacaaagaggaaatattccaaaggtac

SEQ ID NO: 246337 - DNA, 75 bp, Homo sapiens
ttgtgatggaaggagtgaagaacctggttttgaaacagcaacttctagaattcctctccagagctactctcaagt

SEQ ID NO: 246338 - DNA, 101 bp, Homo sapiens
aggaggatgactcggatgtctggtggggcggagcagacacagactatgcagatgggagctcaccagaacaagctagaagaaatgatcaatgagctagcagt

SEQ ID NO: 246339 - DNA, 75 bp, Homo sapiens
gttcaagaagtggccggagagttctgcatgttgattcgtggggaccaaggcatactgaacacattttttagcagc

SEQ ID NO: 246340 - DNA, 106 bp, Homo sapiens
cgcagatcctgagacccggacagtggcagtgaaacagggtgtgggccgaagatatgctcatgtggtgttgaggaaagcagacattgacctcaccaagagggcggga

SEQ ID NO: 246341 - DNA, 87 bp, Homo sapiens
gcatgtctgatgtagcagaggatctttgttccatgctgaggggggatttcagatttcatgatgatgagagcctgaagtacctcaccc

SEQ ID NO: 246342 - DNA, 90 bp, Homo sapiens
cccgcgggggagccccgggagccgcacggctcttgtcaggatggtgaagctgttcatcggaaacctgccccgggaggctacagagcagga

SEQ ID NO: 246343 - DNA, 82 bp, Homo sapiens
ggcgagtagtagcgaggagacgaagccacaatggtgcgcatgaatgtcctggcagatgctctcaagagtatcaacaatgccg

SEQ ID NO: 246344 - DNA, 74 bp, Homo sapiens
ttggtcgccgcgtccttggctggcgtcacccaccaaggctccggatgtgttccccatcatatcagggtgcagac

SEQ ID NO: 246345 - DNA, 75 bp, Homo sapiens
attttctctcagcctcttccagaaccagccagctaggcatccaaacaggagaagttgccccagtgcaaggcactg

SEQ ID NO: 246346 - DNA, 100 bp, Homo sapiens
ctattattgctactattgtgtgtttttctagttaagtcccaaggtgtcaacgacaatgaggaggacatgacttgggacatcaaatataagaccgtccgct

SEQ ID NO: 246347 - DNA, 100 bp, Homo sapiens
ggctgatggctatgacctggagatcctggacggtaccagaggcactgtggatgggctccgattattcaaggatgttcctgatagccggattttggtgtgt

SEQ ID NO: 246348 - DNA, 75 bp, Homo sapiens
cccggccccactgtgagagctgtcggcactgtaactctgggagtctagtggattttctcaagaccccttcaggca

SEQ ID NO: 246349 - DNA, 100 bp, Homo sapiens
gcgagagatggagatgggcagacggattcatttagagctgcggaacaggacgccctctgatctctggattaatcgaattacagctgctagccaggaacat

SEQ ID NO: 246350 - DNA, 90 bp, Homo sapiens
gaaaaccctaaggattactgcatcgcccggtcctgaatggcatggaatgctctactcccaagctgacagcaagaagaaatcaaacctcat

SEQ ID NO: 246351 - DNA, 74 bp, Homo sapiens
aaggggcaggctgtagactacgagggctccagaacccaggaagggactttgaacatgtcggggatcgccctcag

SEQ ID NO: 246352 - DNA, 74 bp, Homo sapiens
ttcaatgacacccgactggacacggttctggaggagtttaagaaggatgctgcattcctggcccgagagaaagc

SEQ ID NO: 246353 - DNA, 100 bp, Homo sapiens
tggtcagagcgagtctcggagaagatgtggtggcttccgtttgttggtggaggaggtggcaggcctcggcggttcccgatatggatgatgaagaaggaga

SEQ ID NO: 246354 - DNA, 103 bp, Homo sapiens
ctacagcttcagaagaccgaagcgttcgtatctggaagcacagacgcagtcttcagcaaggaagtgctgggaacgccctggagtgaacccaggaagatgcctg

SEQ ID NO: 246355 - DNA, 100 bp, Homo sapiens
ggagaaaacagcaggcacccaagcgggcggcaggctgcagaagatgtcaatgttactttcgaagatcaacaaaagataaacaaatttgcacggaatacaa

SEQ ID NO: 246356 - DNA, 97 bp, Homo sapiens
ttcgaggaggtgatgatggacatcggctccacccggctgtagctggaaccactataacatgcagtacgcactagcagtttccaagcagcggggcaca

SEQ ID NO: 246357 - DNA, 100 bp, Homo sapiens
ctgactacgaagtgctatccgtgcgagaacagctattccacgagaggatccgcgagtgtattgttcatctgcagaagccagcggacgcctctgttcaact

SEQ ID NO: 246358 - DNA, 74 bp, Homo sapiens
ttgccgggccgcggcgtggagccgggcaggagccgcgagccagctgcgcgaagactagacgcttgaagcaaagc

SEQ ID NO: 246359 - DNA, 98 bp, Homo sapiens
aaactccttaaaagatgcaatatcctacatgcagatatcaagccagacaatatcctggaattctcaagaaatttgaggaagaagatttggatgacatt

SEQ ID NO: 246360 - DNA, 96 bp, Homo sapiens
gcatctgtgagcccgcggagtatacaccatgagcaaagctcaccctcccgagttgaaaaacatgccaatgaagatgtggaaagaatgttactagga

SEQ ID NO: 246361 - DNA, 100 bp, Homo sapiens
aattttagggtcctttatatagaagggagagtagggggattttggcactcaaaaagaagctgcttgggccataagtaacttaacaattagtggaaggaaa

SEQ ID NO: 246362 - DNA, 101 bp, Homo sapiens
gggcagaacgcgacgggtctgcggcttaggatctaagctggaaccagaaccaaatacaaagacaagagaatccacatcttctgagaaagtttcacagagtc

SEQ ID NO: 246363 - DNA, 75 bp, Homo sapiens
gtcagcgtttccctggagaggaagaggcaagggtggcaatgaccatgagatcttcacagaccccagaaccatggg

SEQ ID NO: 246364 - DNA, 75 bp, Homo sapiens
tgagctgcagaagatgacccgggggcaggctgtgtataagatggcagacgtagcctgcaaatgccacggcgtctc

SEQ ID NO: 246365 - DNA, 100 bp, Homo sapiens
ccgagctgaccctaggcctccaccctggcaggaatcccaatttgcctccacttagtgagcggaagaatgggcttgagaccatctctacagccacagggcg

SEQ ID NO: 246366 - DNA, 82 bp, Homo sapiens
ttggcacgagccgttgctagccagctggactgcaatttcttaaagatgaccaggataaaaaggtggaaactctcatggtacc

SEQ ID NO: 246367 - DNA, 101 bp, Homo sapiens
acgccccaacgaaaagtctttcgttccctcaagtatgctgaatcctattaaactggaaattgatgaagaaaaaaacctgctgatcaagtttgacccttcct

SEQ ID NO: 246368 - DNA, 90 bp, Homo sapiens
ccaggcatgccccgctacgagctggctttaatcctgaaagccatgcagcggatttcagagacaactgtctgaaccctgccaccccttccc

SEQ ID NO: 246369 - DNA, 100 bp, Homo sapiens
ttcttgacttaaatactgaaggatacacttctgaggaagattctgaacttgttgctaaagatgacaacttggatagtggcaattcaaacaaagataaaag

SEQ ID NO: 246370 - DNA, 90 bp, Homo sapiens
aaaaccaacgcctggctcggagcagcagcctctgagatgggaaagcagtgcaggtggacccccaccacatcctcattgaagaccctgatg

SEQ ID NO: 246371 - DNA, 98 bp, Homo sapiens
ctgaagacggggtagccacgaggaattggcagcaatgaaacagattctcgttaagatgcatagtaaacattctgagaacagcttacttctcactaaaa

SEQ ID NO: 246372 - DNA, 100 bp, Homo sapiens
agtaacagcagcgccgtcccgtccgacagccaggcccgggagaagcagagatcctacaagaatccaggatgatgatcccagattgccagcgcaggttgga

SEQ ID NO: 246373 - DNA, 107 bp, Homo sapiens
atgaccgccagagggatgaggcctcttcagagccgcctccccaaaccagcttcctcagggatcatgtaccgcaagtcctgtgcatcatcagcggcctgtctcatcgc

SEQ ID NO: 246374 - DNA, 83 bp, Homo sapiens
cgcacttgctcaacaagggcctgccgcttggacgtggcccagtggaacatcgggagcctccggaccatcctggacatggtgga

SEQ ID NO: 246375 - DNA, 80 bp, Homo sapiens
ccttggagagcccaggagcaggggagacatgcttcggaaccaaaaagaagcttcccagagccggggccaggagccccaag

SEQ ID NO: 246376 - DNA, 100 bp, Homo sapiens
ctgcaagaaccgctacgacaaggacaagcccgtttctttccacaaggtccccagccccaccccagccccaaaggaggctgttcgagagggacgtcctccg

SEQ ID NO: 246377 - DNA, 75 bp, Homo sapiens
gctcgcgctactctctctttctggcctggaggctatccagcattaactgctgaagtactgatcgagttctgcatt

SEQ ID NO: 246378 - DNA, 76 bp, Homo sapiens
cacaggcatcctagatccttgtatctacagagtatccgtgaggaagttgtaatttagattcgagaagtggtttatc

SEQ ID NO: 246379 - DNA, 75 bp, Homo sapiens
atttcttgaagaagtcttatgccctcccaaaatccagcaactatcacaagaatactccttagccacttcaattgg

SEQ ID NO: 246380 - DNA, 101 bp, Homo sapiens
cgcggagtcccgcggagtctcgggccccggagacgggcgaggagcacggcagcagccaggttgctccttgagggcaggacagttcttatggctttatccgt

SEQ ID NO: 246381 - DNA, 73 bp, Homo sapiens
tgtcttagaggttggtttccctcggaggatccagaccaaaatggtgatttctttgctaacatggtagtagatg

SEQ ID NO: 246382 - DNA, 83 bp, Homo sapiens
ccgcaactctcagttcgagagtaaaggtctcttgccctgtgcagcttcctgcagactggacttgcaaagtccagcctgtatgg

SEQ ID NO: 246383 - DNA, 50 bp, Homo sapiens
aacgtcaacttcctccggccaagccagtgccaccatggcaactgcaccat

SEQ ID NO: 246384 - DNA, 83 bp, Homo sapiens
gtcaacgggaggtgtgagcccaaaggtctggacccaggatttttagactctgaggagcagttggagctaatccacattatgga

SEQ ID NO: 246385 - DNA, 82 bp, Homo sapiens
agagattcagccagcacactcctcgcgagcaagaacatggtccaagacaattcctgggaaagttcagttcttctcaagtgag

SEQ ID NO: 246386 - DNA, 100 bp, Homo sapiens
tttcggagagggcgagggccaccacctgcagcacatcagcgaccgcgagatgcccgaaggtagcaatgaagtgatgaggatactgatctctagaagcctg

SEQ ID NO: 246387 - DNA, 98 bp, Homo sapiens
gtgccaagttagatgccgattacccacttcgagtcctttattgtggagcttatgttcctgaggaagaattgaaggcagcagaaatagatgaagagcac

SEQ ID NO: 246388 - DNA, 90 bp, Homo sapiens
gagaaaggcccacctgtgtcctggttgagggtctccagggttctttggggcccgagacaccattcgcttttcacccaagatgatttgatg

SEQ ID NO: 246389 - DNA, 90 bp, Homo sapiens
gaaattgctgtaaaagtgccttctgtttttaagcttctaattaaagagcctccagggtcgtatagacctccccctcctatgggcaaacca

SEQ ID NO: 246390 - DNA, 83 bp, Homo sapiens
tgtatctcaaaatgtggaagggacccaggctgattcaggtgcagcggaactgctgcctgacgctctgcaacttcagcatcccc

SEQ ID NO: 246391 - DNA, 100 bp, Homo sapiens
aagacgttcaacgacttactggggagagaaagaaaaggaacgggagctgagaggtgctggagaatctggtaaaagcaccattgtgaagcagatgaggatc

SEQ ID NO: 246392 - DNA, 110 bp, Homo sapiens
agatgacgaatcagagggctcccaggtcagatgatgatgatgcggagagtaggagctccagggtgactcaactttgcacttactttcagcagaaatataagcacctctgc

SEQ ID NO: 246393 - DNA, 50 bp, Homo sapiens
tgtattcagtggaggaagctgtcaagttcagcagctgtgtggggaccaag

SEQ ID NO: 246394 - DNA, 82 bp, Homo sapiens
ctggtcttgctcggccgatgaagtgcagaggtttttttctggccaaacgtaccaagaaagtcgggatcgtcggtaaatacgg

SEQ ID NO: 246395 - DNA, 101 bp, Homo sapiens
cacccacgaaaggcatctgtcccaagcaggagaacattgcagggtttggaaatcccttgtctccaggttgctgggattgacttcttgctcaattgaaacac

SEQ ID NO: 246396 - DNA, 75 bp, Homo sapiens
ctgcacaggactcgtgtcttgaaatgtctaagacgcatgtcagaaatgcagtctattatcctcccagtccacaac

SEQ ID NO: 246397 - DNA, 143 bp, Homo sapiens
gcagcggctgcgagaggcggcggcacgacgacggtccctcagcccagccaccatgagcaccaagcagatcacttgcagttacagatgtagagctaaaacgactgaaggatgctttcaagaggacctgtggactctcatattac

SEQ ID NO: 246398 - DNA, 83 bp, Homo sapiens
agggcatgatcaacctcgtcatgtcctacgcggagggtgtgaagacagagaatgaccacatcaacctgaaggtggccgggcag

SEQ ID NO: 246399 - DNA, 74 bp, Homo sapiens
cagcccctccggccgcgggcggcgcgggagcctggatggacaagcataccagatactcccttcagtaaggacag

SEQ ID NO: 246400 - DNA, 100 bp, Homo sapiens
aatcagctggcctggtttgatactgacctgtaaatcatcctttaggatgaaatctttgacatggtaaaaccaaaggatcctttgaaaatctctcttcagg

SEQ ID NO: 246401 - DNA, 119 bp, Homo sapiens
ccgctggagagggagccagaacagggaagaacggattcacacaggatggcttgcagaagacgctatttacctcggaccacaatgccagcatggactttgcagaccttccagctctgttt

SEQ ID NO: 246402 - DNA, 83 bp, Homo sapiens
aagcaggtctaccgggccacgcaccgcctgctgctgctggatcaggatcctcatgaccagccaaagagaagaagaattaggaa

SEQ ID NO: 246403 - DNA, 97 bp, Homo sapiens
gcacttgtgctccgggcttcatgggttcatctgctgatcggagtcagtggagagaaccaaccagaacatcggatggcttgtgctccctttacgaggc

SEQ ID NO: 246404 - DNA, 85 bp, Homo sapiens
ccctgcctatgaccagcaagaggatggggccctggatgagggggaagggcctcaaagccagaagcgcggtgtggaggaaactgca

SEQ ID NO: 246405 - DNA, 90 bp, Homo sapiens
tctcctgtacagtagtgctacttaaaatatgctggggaccatcaccatcacagattaaagatttcttgagctacctctgtcctgtgaacg

SEQ ID NO: 246406 - DNA, 101 bp, Homo sapiens
ctcagagacccttcggtgcccacaggcggctgcaaggagagtgggtgttcctggcacgggggcccagacgtcccagagggtggaaggagccaggacgcacc

SEQ ID NO: 246407 - DNA, 73 bp, Homo sapiens
tctacacttgcttccaatccatacaggcccaaaagagttcagatcactatgaacaagaccgtagtgcacttaa

SEQ ID NO: 246408 - DNA, 50 bp, Homo sapiens
tcagcggacagcacttcgccgccgaggtgccttatgcccgctcagaggcc

SEQ ID NO: 246409 - DNA, 83 bp, Homo sapiens
gtcagagtgcaccttccttgactacatcaaaggaggctaaagcagcagcacacccttctgtacaaggtgaatggaatcctcac

SEQ ID NO: 246410 - DNA, 74 bp, Homo sapiens
caggtttttattatggcagccactaacaggccagagcccctgtagccattggagttgcagccatgtccacagct

SEQ ID NO: 246411 - DNA, 100 bp, Homo sapiens
gtcccgcctcacctggggtatggagaggaaggaagagacatatctgaagagatggattaagaatgctttggattaaggattgtggagcacatttcaatca

SEQ ID NO: 246412 - DNA, 75 bp, Homo sapiens
cgcggtggagcgggacacgaacgtggactgcctccgggcctgccaggagcagatcgaagccctgctggagtcaag

SEQ ID NO: 246413 - DNA, 75 bp, Homo sapiens
tggtgctgcatgcagagatgctgtggttcggggggtgctcgatgttcccgctgcctgtcaccaacgggaagggcc

SEQ ID NO: 246414 - DNA, 75 bp, Homo sapiens
caggcctccgggcccggcgccgccgcccgcagaaggtcctacagtgtaggggaagcaatggaagaacttctacct

SEQ ID NO: 246415 - DNA, 83 bp, Homo sapiens
ctcgctccgtggccttagctgtgctcgcgctactctctctttctggcctggaggtgctggagaatctggtaaaagcaccattg

SEQ ID NO: 246416 - DNA, 96 bp, Homo sapiens
ctcatccggaccatcatcggcgtgttccttgcctgtatctccccttggttcaatagctaccagatttttggaagaggaggaactgaggtctcatca

SEQ ID NO: 246417 - DNA, 100 bp, Homo sapiens
tcattggttgagtcagtgagttgcgtgtctgcaagagagcatcctatctgatcaacaggcggtccttcgggtcggagtggacatcggatggtggcctgga

SEQ ID NO: 246418 - DNA, 99 bp, Homo sapiens
gaactgaacgaatgaagaagactatggcatcacaagtgtccttttctccatggaatccttctgtacatgatgaagccagagaaaagatgctgactcaga

SEQ ID NO: 246419 - DNA, 75 bp, Homo sapiens
aaagaggaagcctctggaagttctgtcacagctgaggaagccaaaaaggttgccaagagggtgatcctgttgtcg

SEQ ID NO: 246420 - DNA, 80 bp, Homo sapiens
gtgaggcccaacagcggaatcatcgatgcaggggcctcaattaatgtatctgccaaatgatttctcagtatcactaaaag

SEQ ID NO: 246421 - DNA, 107 bp, Homo sapiens
gtgacggtggcgccgcccggggcgaggcagggccagcagcaggcgggaggtgtcgtgaaaactacccctaaaagccaaaatgggaaaggaaaagactcatatcaaca

SEQ ID NO: 246422 - DNA, 110 bp, Homo sapiens
atccagaaactctactgcttgatcgaaatcgtccacagtgacctcttcacacagcatggattacgggacagctaccacagtagaagagatcaaattgcccttaaaaatct

SEQ ID NO: 246423 - DNA, 100 bp, Homo sapiens
cccggatgctgcggcgcccgctggccgggctggctgcggccgccctgggccgggccccaccggacgagctggagccccaaatttcagagagaccctgccg

SEQ ID NO: 246424 - DNA, 50 bp, Homo sapiens
ctttggaaacgacgtcatgtgttagtggaaggagcctgggagaggccagg

SEQ ID NO: 246425 - DNA, 100 bp, Homo sapiens
agaaagcaagtctttctgccgtttctgagctggcttgagccttaagactaccttaaggagcatgcttgagagttcaaaccggcttgatgaagaacacagg

SEQ ID NO: 246426 - DNA, 75 bp, Homo sapiens
tcctgaaatacatccaggaaagacatggagattctcttaaaaagatctcacattcttgaaggtggcattgaagag

SEQ ID NO: 246427 - DNA, 75 bp, Homo sapiens
ccgggctgcggcgtgtgcgcgcccgccagctgctccggagatacggaatatgatgaaccaatcttgaaacacctg

SEQ ID NO: 246428 - DNA, 50 bp, Homo sapiens
gctcaaagttattttacattctgtcggaaaaggtaacagaagatggaact

SEQ ID NO: 246429 - DNA, 75 bp, Homo sapiens
aagcagttggagtgaagattggcaatccagtgccctataatgaaggtggtcgtcggttttctgagggtacttcag

SEQ ID NO: 246430 - DNA, 74 bp, Homo sapiens
ctacttagctcagcaattcttaccttgtctggtccttgcactcctgtttccaagcatggcgagcatggcggcta

SEQ ID NO: 246431 - DNA, 90 bp, Homo sapiens
agcggagctcccccaagagccggaaagctgtttttggaaggaagaaagatggaaagcggtgcagttctgctggaatccaaatcctcccca

SEQ ID NO: 246432 - DNA, 75 bp, Homo sapiens
gtccgcgggaagatggcggcgccgctcatccccctctcccagcagagcagtgtgacctttgaagacgtggctgta

SEQ ID NO: 246433 - DNA, 98 bp, Homo sapiens
gcgagtaagatggaagatgaggaggtcgctgagagctgggaagaggcggcagacagcggggattaatgcagtatcgaatggacaagtccgaggtgata

SEQ ID NO: 246434 - DNA, 100 bp, Homo sapiens
cccagccacactggccagctccatggggaatctgactcactgccacaacgacattgtcaaccttctcctggactgtggggccgacgtgaacaagtgctca

SEQ ID NO: 246435 - DNA, 100 bp, Homo sapiens
gctgatgacaaaaagcttcagagttctctaaaaaaactggctgtgaataatatagctggtattgaagagggagaagttggtcaaattggcccaagagggg

SEQ ID NO: 246436 - DNA, 118 bp, Homo sapiens
tttccgcccgcttcgatcgcctcgcgccggctgctctttccgggccaaagaactgccaactctgaaagataatgatttcattaatgagggccaaaagatttatattgatgacaacaac

SEQ ID NO: 246437 - DNA, 74 bp, Homo sapiens
gtcgctggaatgtgtgtctcacgaggaccaagacccctggacctggggcccagtcggccctcagagcccttgcc

SEQ ID NO: 246438 - DNA, 100 bp, Homo sapiens
gatgccctttctcctcaaccagtgtggatcccttctctattacctcaccttggcatcgacagagagagcaggagattcggatgggtcagatggctatggg

SEQ ID NO: 246439 - DNA, 75 bp, Homo sapiens
gctttcttaacctcatcaaattcatgaagatttagccgaggcccatgaaccatccgggtatggctgaaaagagac

SEQ ID NO: 246440 - DNA, 82 bp, Homo sapiens
agctgcgcccgctgccttcacaccccggacatccgcgccacacggcattgctcagattaacctggctgactatgacagtttg

SEQ ID NO: 246441 - DNA, 97 bp, Homo sapiens
ggaaagctgtgtggtgcgagtaactgtacagtgcatctcgtccccggtgaagaagacagagatggacaagtcaccattcaacagcccgtccccccag

SEQ ID NO: 246442 - DNA, 101 bp, Homo sapiens
ggaatgtctttcctaccatctaaaatacgaaggtttctggctgggcggcttacagggagaacacagttggcctccaccgtttctgccccacagaaaacgta

SEQ ID NO: 246443 - DNA, 71 bp, Homo sapiens
cgaagtccccgtctccagttcagggcaagaagagtccgcgactcctaacactctgctccagccaaggtggt

SEQ ID NO: 246444 - DNA, 96 bp, Homo sapiens
aacacttcctataaatctcgcccaaacaggaaagatgggcctttgggtccccgaggattagctgaagctacagagatgtgcactcaagagtgcttg

SEQ ID NO: 246445 - DNA, 90 bp, Homo sapiens
cacgcagaacgtcaacaccaagtgcatcaccatccccagggccacccgttcatcgtgcagttcaatgatggaaatgccgccgtggtgtcc

SEQ ID NO: 246446 - DNA, 83 bp, Homo sapiens
ctattgtgaaggagggttggctgcacaaacgagcagcctcccgcgacgatgcccctcaacgttagcttcaccaacaggaacta

SEQ ID NO: 246447 - DNA, 100 bp, Homo sapiens
gaagacagagggttttcttttgaggtttatcttgcagattatggactttcctacagatattgtcccaatgggaaccacaaacagtatcaggaaaatccta

SEQ ID NO: 246448 - DNA, 50 bp, Homo sapiens
ttttgatgttgaaaggaaaaagccagggacaaactctgcctgggcgagtc

SEQ ID NO: 246449 - DNA, 132 bp, Homo sapiens
aatgaaccagccgcagaggatggcgcctgtgggcacagacaaggagctcagtgacctcctggacttcagcatggtgagaagccctaccactgcaactgggacggctgcggctggaagtttgcgcgctcagac

SEQ ID NO: 246450 - DNA, 75 bp, Homo sapiens
tgccattgaattctccaacaatggaggccagtggctggtctcagttgctgattgttggaggttcttttggtcttc

SEQ ID NO: 246451 - DNA, 114 bp, Homo sapiens
tcctcaccctctgccgagtctcaatatctgtcttcggtggactccttcggcagtccacccaccgccgccgcctcccagaatccacattcatctcaatggaaggatcctgcctta

SEQ ID NO: 246452 - DNA, 100 bp, Homo sapiens
acagtgagcccaagtgtgtggaaggtgctgatattcgtggcttcagtgctcctaggacatttggccttacactgggacatgtagtagatgaaatacagag

SEQ ID NO: 246453 - DNA, 75 bp, Homo sapiens
cgtctctctgctgcggcgcggggaccgctgtgctctcgtttacaagtccttccactttctctctgaggcagaaag

SEQ ID NO: 246454 - DNA, 74 bp, Homo sapiens
cgtcggcgcacatccccgtcccagcgcagaggtgtgtgcagtggcctcagggatccggaaagtctaggactgaa

SEQ ID NO: 246455 - DNA, 99 bp, Homo sapiens
gttcaggtcacaatttctacagcagagaccttgagggatatctttcttcactcctcttcacttcttcacaaagtacccacgtttgttcgaatgctggcc

SEQ ID NO: 246456 - DNA, 100 bp, Homo sapiens
gcatgtgtggaactggggggactgattccaagacaaggcgcccaccccacagagcaagttttctgaaacgtgtgtggaaacaggaagagaactagaactg

SEQ ID NO: 246457 - DNA, 97 bp, Homo sapiens
gctgcgcacggtgcccagcgcagggagaacaaatgatcatctgtccaacgcgcccatttacagacagcatcgcacagaattattttaaaaaaaagca

SEQ ID NO: 246458 - DNA, 98 bp, Homo sapiens
tttctatgtactgcgcctggatgtggccagatagggccagatttgagtgtgtgaatttttgagtgaaacctggaacccaaatgagaagaaatctgcaa

SEQ ID NO: 246459 - DNA, 75 bp, Homo sapiens
cacgacccacgagatcatggggcccaagaaaaagcacctggactagctacagagacttctgaagtggagagtctg

SEQ ID NO: 246460 - DNA, 96 bp, Homo sapiens
ctggcaaagatctatgccatgcactgggggaccgactcaagctgtcttgtcgacggtctcactgatgcctcttctgcattcaaagttcctcgaccc

SEQ ID NO: 246461 - DNA, 88 bp, Homo sapiens
cggaggaaaaaaagagttgcgggaggctgtcggctaataacgatattctcccaggagtacatcaacctcctgctgtccatgtatttct

SEQ ID NO: 246462 - DNA, 100 bp, Homo sapiens
cttcaatccagttccaaggactccacgggactgagtcccagaagaccattgtgttgcacacacttcaagacacagtgttggaggaggacaggcgtttcac

SEQ ID NO: 246463 - DNA, 146 bp, Homo sapiens
ccagaagtgggactggagcgaagtagaggatgccgaggagaaaacagcaggcacccaagcgggcggcagctgtccaggcagccatcttgtctggagacaagtctgagaatgttcaagatttgctgctcttggatgtcactcctctt

SEQ ID NO: 246464 - DNA, 75 bp, Homo sapiens
cgcttgcctacccgccggcccgcgggtctacttcctcaaaggaagttggtgaaccatctaaagaagagaaggctg

SEQ ID NO: 246465 - DNA, 83 bp, Homo sapiens
ggggcgtgtgtcagcctgccctaggacttcatgtctatatatttccccattcactgatatttggagttcttacaacatggcag

SEQ ID NO: 246466 - DNA, 98 bp, Homo sapiens
tttgatgagccagtcaggagaaattccaggagaaggttcgtcacaaggcatcgcagaaggtttatgctatgaagcttcttagtaagtttgaaatgata

SEQ ID NO: 246467 - DNA, 100 bp, Homo sapiens
ctcagcagcatcagacacatgatccgcaagaacaagtaccgccccgacctgcgcatggccggctgcgtgcacttttcctacaaagcatcgtgtgagatcc

SEQ ID NO: 246468 - DNA, 98 bp, Homo sapiens
ctcgaatcattctttgtacagaaattgaaaggcttcaaagctagcaggtactctctgaagatggcagaagctcaccaagctgtggcctttcagttcac

SEQ ID NO: 246469 - DNA, 87 bp, Homo sapiens
atgccacccctgcctggacttgacctaaagggttctgagagtgagctctcctccagcaccgagagtattgataattcattcagttcc

SEQ ID NO: 246470 - DNA, 90 bp, Homo sapiens
cagattcgcagtggtcgcttcttctccttgtacaagatcttgctgcacggtttgtggtacgaactgtttggaggaaaccccaacaacttg

SEQ ID NO: 246471 - DNA, 51 bp, Homo sapiens
gaagcatcccagacaccgggaaggagcgcctggaccatgctgctgagcgcc

SEQ ID NO: 246472 - DNA, 83 bp, Homo sapiens
acatactatccgtttgttcaggaaccaccagtgacagagccacggcagagacaacgtgtgtaccccaagtgcacatggctgac

SEQ ID NO: 246473 - DNA, 83 bp, Homo sapiens
acatggattcagtatggagaagagatcatggaagggaagtggttgctgtgtatgttactggtgcttggaactgctattgttga

SEQ ID NO: 246474 - DNA, 51 bp, Homo sapiens
cgtatgggcatcatcgtgcggcggggatctgatgagcttctttcttctggc

SEQ ID NO: 246475 - DNA, 100 bp, Homo sapiens
gacttcccagcagcatgcgattcttattgaccttggtcatcatcagatttgaaatatttaaagtggatacaaaactatttcagcaatgcagacaattaag

SEQ ID NO: 246476 - DNA, 80 bp, Homo sapiens
acttacggcagtgggggctgacagaatcctcactatggatgggctcattgaggacattaagcatcggcggtattatgaga

SEQ ID NO: 246477 - DNA, 100 bp, Homo sapiens
cgtccccacctgcctgctccagatgaaggctattcaggcagctatcagccaggcctttaaaaccccagaggtcatcagattgtttgcaaagaaacaacca

SEQ ID NO: 246478 - DNA, 98 bp, Homo sapiens
ttatggcttccagtggaggcattttggggcagaatacagagatatggaatcagctgcccctgggtttacccgtcctccactcagtgcagaagaagctg

SEQ ID NO: 246479 - DNA, 98 bp, Homo sapiens
acaattgtctgtgacagtaacagtacttgggatcccccagttccaaagtgtcttaaagagacctacagagttgaaacagtgaaacctggaaagattgt

SEQ ID NO: 246480 - DNA, 75 bp, Homo sapiens
ctgctattgaaccaccaaaagtccattatgaaactgtgcgccaatctgcagaacgccattgcggatgccgagcag

SEQ ID NO: 246481 - DNA, 99 bp, Homo sapiens
gcgaggatgagagcgacgaagccaactgtccagggaaagtatttacaggttgctgcctcagaccacccctgagaatgtgagtaagaacttcagccagta

SEQ ID NO: 246482 - DNA, 74 bp, Homo sapiens
gatcgctgatgattacgataaaaagaaactagtgaaggcgtttaagaaagaaccaatcttaaacatccatgacc

SEQ ID NO: 246483 - DNA, 96 bp, Homo sapiens
cccaggtgcccagaggactttcttccagcttctgctgtccttctttgtggagagcaaggtgctgcccataaactcgtgtgttatttcaccaactgg

SEQ ID NO: 246484 - DNA, 51 bp, Homo sapiens
gacgacgagtacgactacctctttaaagtgaacagagtatctgtcaggcaa

SEQ ID NO: 246485 - DNA, 83 bp, Homo sapiens
gcgacttcctccccgcgccccctccccctcgccatgaagacaatgcagatcttcgtgaagactctgactggtaagaccatcac

SEQ ID NO: 246486 - DNA, 74 bp, Homo sapiens
cattgaaaaccctgctgatgtcagtgttatatcctccaggaatactggccagaattcttccatctctatgacaa

SEQ ID NO: 246487 - DNA, 96 bp, Homo sapiens
gcagcagagctgtttactgatatctcatgcaatagaagccctgattttggatccagaatcagcaagcagcaaaccctctgctttgctccaccgccc

SEQ ID NO: 246488 - DNA, 82 bp, Homo sapiens
gcccatcttgttactccctagcagtgtggtaagatacagtttatgtaacttgatggaagaaaatggaattactccaaaaaga

SEQ ID NO: 246489 - DNA, 75 bp, Homo sapiens
attgtcttcataacagatcaaggaatcgaattttaccagaggccacaagaggaagctgaatgaagaggacgccgc

SEQ ID NO: 246490 - DNA, 110 bp, Homo sapiens
aggcagttctgacccgagtttacgttacatcatgctgatgacagcttcctggtcctcaccacagatggaattaacttcatggtgaatagtcaagagatttgtgactttgt

SEQ ID NO: 246491 - DNA, 100 bp, Homo sapiens
ctcgcctatccaggcctggcaactcttcgtcaatgagggtaaaaatgcatttgcaaagggagaaaatgaaggccaaacagaagcaggctccagcttctgc

SEQ ID NO: 246492 - DNA, 100 bp, Homo sapiens
cacacgcactttctgtactgcgtacgaacctctaaaatgcagacctccagctctagatctgtgcacctgagtgaatggcagaagaattacttcgcaatta

SEQ ID NO: 246493 - DNA, 75 bp, Homo sapiens
gcacctggctatcccaaccaggagggacgataaggaaggcaacagcccccaggggagcaaccagggagtcaaaat

SEQ ID NO: 246494 - DNA, 90 bp, Homo sapiens
cctgtacagcctgcagaactgagctgctgctcttcctccagaacctgcccacagcccactgggatgatgaggacatcagcctgttgctgg

SEQ ID NO: 246495 - DNA, 100 bp, Homo sapiens
ggctgtgccttcatcaacctctgcatcttggcttcacagcatgcttgggctcagctcacattctgggaggccagccagatcctgaccaagatgaagcagc

SEQ ID NO: 246496 - DNA, 74 bp, Homo sapiens
tggagaacaagtttgtcaatccgtctgaacttcagttgccttacctgtaagacctctgtgagtgaaagccttca

SEQ ID NO: 246497 - DNA, 99 bp, Homo sapiens
gtaggacaaggcccgccgcctagcaaagactattaccagttactggtcacccggtctcaggttgaaatcacaaagattagacacctttttagataggtg

SEQ ID NO: 246498 - DNA, 76 bp, Homo sapiens
cccttccggagtccgccccgtgaggagaatggcacgtgtggttctcaaatataggcattctgatgggaacttgtgt

SEQ ID NO: 246499 - DNA, 82 bp, Homo sapiens
cgggagtgttcgttgtgccagcgactaaaaagaggactgttaaagattcactccagtcagtccagtccgcagcaggccgtcc

SEQ ID NO: 246500 - DNA, 99 bp, Homo sapiens
catctgctgaagaaacattttcacactgtaagtctgagcatcagtttaatattgacagcatggttcataaacatggagaagtttgaagtgcagcactct

SEQ ID NO: 246501 - DNA, 101 bp, Homo sapiens
tccagccaaaaatgcacaattctatctcttgggcaatcttcacggggctggctgctctgtgtctcttccaagggtcaggagggcatctttctcggctcttc

SEQ ID NO: 246502 - DNA, 100 bp, Homo sapiens
ttcacagtgctcctgcagtctctctgtgtggctgtaacttacgtgtactttaccaacgagctgaagcaggatatcctgtaccttcacaactctttagagg

SEQ ID NO: 246503 - DNA, 97 bp, Homo sapiens
cttaactagtgtaggaaaacggctcaacccaccgctgccgaaatgaagtataaggaagtggttctgaaagatggaagaattgaaagactaaagttag

SEQ ID NO: 246504 - DNA, 100 bp, Homo sapiens
ctgccgaatccagatgactattttctcctgcgttggctccgaggtctggatattgagagcagcttgaagcagttggctgagcggcgtactgacatcttcg

SEQ ID NO: 246505 - DNA, 100 bp, Homo sapiens
cagatgtggtttccttattggagcaagggaaagaaccctggctggggaaaagggaagtgaaaagagatctgttttcaggcatgtcagagcgggagcgaca

SEQ ID NO: 246506 - DNA, 90 bp, Homo sapiens
tacaactaccgctgctggaccacaaaccgctgccagaaaaataggaaccaaggctttagccttctcaactcattgactggaacaaaccat

SEQ ID NO: 246507 - DNA, 100 bp, Homo sapiens
cgggtgctctgcgagcagcgctactgcgccgtgtgccgcgaggagctgcgccaggaagcttgctgtcttcgatacgtggagctccttggcggtccacatt

SEQ ID NO: 246508 - DNA, 98 bp, Homo sapiens
gaaagcaccatgacgtccatccatttcgtggttcacccgctgccgggcaccgaggaccagctcaatgacagaaagttggagtgactggtccccctgat

SEQ ID NO: 246509 - DNA, 96 bp, Homo sapiens
cgggtgtccacatgagtgcctctcccagcagatccaggatgtacagttacccagcacgtgtacctcctcctcctcctattgctcgggctgtagtgc

SEQ ID NO: 246510 - DNA, 100 bp, Homo sapiens
gtgacagcgatgctgaggatcgaggaacgttgtctgctgcatcttcctcccgtgaggctggccgagctccacgctgatctgaagatacaggagagggacg

SEQ ID NO: 246511 - DNA, 75 bp, Homo sapiens
gttgctactaaaaagagaggtgcctttatctgatgatgatgaaagttacacaggactctggactgtcttcacact

SEQ ID NO: 246512 - DNA, 97 bp, Homo sapiens
ccggagcggaaaaccttctgaaatctgcttggctttgaggaagagtggcagtactgcctcactgcataagggatgggatcagagaacagtgctttaa

SEQ ID NO: 246513 - DNA, 74 bp, Homo sapiens
cgacgagctgagcttcaaaaggggggacatcctcaaggtcccattttcagtgcccaagatccccctggtattcc

SEQ ID NO: 246514 - DNA, 89 bp, Homo sapiens
atacaaccagtgttaccttggacagagaggctttaaactccagagaacctcatatgtgtttagtaagagatatttcaaactgctgggcc

SEQ ID NO: 246515 - DNA, 50 bp, Homo sapiens
aggccaaggagggcagatcacttcagtaggtgacctcacagtgactcaag

SEQ ID NO: 246516 - DNA, 100 bp, Homo sapiens
tcagcatctggtacagccgatgcaagagaagcctgagccagtgccgctggagagccgctcctgcgtcctcatccgccgcgacctcgtggccctacctgcc

SEQ ID NO: 246517 - DNA, 100 bp, Homo sapiens
gcccggggccgtgcgctctcgggccactcggccgcaggactcagaagctgctatcgaaaaacccaaagaatccttatgaggagtcgagcagagatgtgag

SEQ ID NO: 246518 - DNA, 80 bp, Homo sapiens
cctcccaagtggctgggattacagagactccttcagggtgagcaaaggcctggaaacctgtatgcagttaaagaaaagga

SEQ ID NO: 246519 - DNA, 100 bp, Homo sapiens
tcacctggatgcctacgtgggaagggacctcgaatgtgggaccccagcccctctccagctcgaaatcgtaaatttggaaggcaaagccagccctctgtca

SEQ ID NO: 246520 - DNA, 98 bp, Homo sapiens
ggtcatggaagtacaaccagagcatatccctgcgccggcctcgcctcgcttctcaaggcatttcatccttcatgaagccattcaggattttgaattgc

SEQ ID NO: 246521 - DNA, 75 bp, Homo sapiens
ggggaggtcctccatgcgcagtcatgagtcgcttcaagtttatcggttgtttacattcagagctctatcaataag

SEQ ID NO: 246522 - DNA, 131 bp, Homo sapiens
cgcagaccgtctggaaatgcgaatcctaaagcgtttcctcgcttgcattcagctcctctgtgtttgccgcctggggggttagcatagtggagcggcaatatatccaggaccggattccctcctggactgga

SEQ ID NO: 246523 - DNA, 100 bp, Homo sapiens
ccagcccgtggtccttctccatattcgagggcccccagatgccgacggccctctctacctcccctacaagacgctggtctccacggttgggagcatggtg

SEQ ID NO: 246524 - DNA, 80 bp, Homo sapiens
cggctggtggcaagtattgctgtgggtgctgggacttcccgtccgcggcgtggaggaaaacccgcctagtgccaagcaac

SEQ ID NO: 246525 - DNA, 100 bp, Homo sapiens
atttgccagggcctcgctcgaggtcatcatcagatttgaaatatttaaagtggatacaaaactatttcagcaatgcagacaattaagtgtgttgttgtgg

SEQ ID NO: 246526 - DNA, 82 bp, Homo sapiens
catctgtccaagttcgtggcagaaagatcaagcttcaggagtctccggaagacatgcctgcagggcagacaccacacacagt

SEQ ID NO: 246527 - DNA, 74 bp, Homo sapiens
aggagtgaagctgcagaccttcatgactggtgaattttcagctcgtttccttttgaagctgcccgtagatttca

SEQ ID NO: 246528 - DNA, 100 bp, Homo sapiens
ctcgccagcagccgtccggagccagccaacgagcggcccggattgcatttctacaaggcgaaagaaaaggtcaagagaacctgaagaaggacttagtaag

SEQ ID NO: 246529 - DNA, 83 bp, Homo sapiens
accagatcatgccacaggtccctgtttttaccgtagaggtaaagaactatgggttcagaaaagatcagtaagtctgaggaaac

SEQ ID NO: 246530 - DNA, 100 bp, Homo sapiens
atgagacagtagccaaacccccaaataacaacgaacttgatgcaagtgataggtttgccaaggtcagacctctcatcatccggatgaactgcaatttcca

SEQ ID NO: 246531 - DNA, 51 bp, Homo sapiens
tgtgggcgtcttctctccaaagaagccatggccatgcagaaaatctttgcc

SEQ ID NO: 246532 - DNA, 82 bp, Homo sapiens
ggagcggctctttgactcgcaccggatccttcatctgtacctaatgcagacaatgccttcacattattttatgtgaaatttc

SEQ ID NO: 246533 - DNA, 97 bp, Homo sapiens
attctcttgccgggggattttagtggtgtataaccttggactcacactgctgtctctgtatatgttctgtgaggtcacagccaagactgcctttcta

SEQ ID NO: 246534 - DNA, 51 bp, Homo sapiens
ggcccagagctcctgtctctcaggctcgggttatgtatgattttgctgctg

SEQ ID NO: 246535 - DNA, 82 bp, Homo sapiens
agcacaaggattctcgctgtgacagagacaacaccgagtatgagaagttgacgccctacgagtggtacagcccacacccatg

SEQ ID NO: 246536 - DNA, 75 bp, Homo sapiens
gccccgcgcagctggctggcggagcatgagcgccccaggactccagaagacctttccagattcgtggttgagctg

SEQ ID NO: 246537 - DNA, 82 bp, Homo sapiens
ccctcatcctggttctggaatcctcagttcaaggagctctttgttcaatgcctagccacctattcctacagacacggcagtg

SEQ ID NO: 246538 - DNA, 96 bp, Homo sapiens
cgtctaggacagctgcgcttcttctttcagctgttcgttcaaggctatgccctgcaactgcaccagttacagattgaaaaggaagatcaggccaac

SEQ ID NO: 246539 - DNA, 75 bp, Homo sapiens
catggactcgaaagcaaatattgtacatggggcagcttcatgacttctgggtaccagattcttaataggagttgc

SEQ ID NO: 246540 - DNA, 50 bp, Homo sapiens
ccagatcctccaaagacagatctggaaagtatgcctcagactcctccctt

SEQ ID NO: 246541 - DNA, 75 bp, Homo sapiens
ggagttgcttttggaatgaatttggaatcttcccttgaagaggtggacccaagtggagagattgtggaactggcg

SEQ ID NO: 246542 - DNA, 96 bp, Homo sapiens
acgacgcgcagcagctgcagcagctcaagcacctggagtccttgctgtgtgtttgagggtgtgcagtatcaagaaggggaggaatttcagccagaa

SEQ ID NO: 246543 - DNA, 100 bp, Homo sapiens
gtcggccccacagacggagagcgcgcgggagcgagctcaaggcggcgcggcggccactgggcgcagcacccagatcaggatcctcatgaccagccaaaga

SEQ ID NO: 246544 - DNA, 100 bp, Homo sapiens
atgatagtaaagatcaaaagaattcgaagggagttggtaaacgctgaagctaaaccagccccagaaatatttgaaaatgaagtcatggccctgctgagag

SEQ ID NO: 246545 - DNA, 74 bp, Homo sapiens
gagagaggaggaggagtgcggcgcggcggccccgggaccaaggaggtttaagaattgtttaagctgcatcaatg

SEQ ID NO: 246546 - DNA, 75 bp, Homo sapiens
ggagatctcatgcctgcaactactctgatccctccagcccgcataggtatggcccatctcctgtacgcttggagc

SEQ ID NO: 246547 - DNA, 90 bp, Homo sapiens
aagtcatcagactgcataaaatcagcgattgtaactgcctatgagaatagctctcagcatgatcccagttcaaataacgctatgcttggg

SEQ ID NO: 246548 - DNA, 83 bp, Homo sapiens
ccgccgctgagggaccgcggggttagccactgctggctgcttccagtgttcgccgagagaacaagttgaaatcatcgcagaag

SEQ ID NO: 246549 - DNA, 101 bp, Homo sapiens
gcgcccgctccggccggccctgcgcctcccgccgcgcccgggatgtattcgtccccgctctgcctcacccaggtatcacctcttctgggctcaagatggac

SEQ ID NO: 246550 - DNA, 76 bp, Homo sapiens
ttggcagatggagaacctgatcgaacttcggcagtataactccaactgtggaactgaatgggcttgctatgaaaag

SEQ ID NO: 246551 - DNA, 100 bp, Homo sapiens
cagaaggcgatcaaggccaagtatccgccagtcaataggaagtacgagtaaactaattctgaagcaagcccttatagttgtgctgcagtggtgtttcaat

SEQ ID NO: 246552 - DNA, 101 bp, Homo sapiens
cgcacccggtcctcagcgactcttctgacctccgcgcgacgtacccgccgccgccgttggctggaggtgctggagaatctggtaaaagcaccattgtgaag

SEQ ID NO: 246553 - DNA, 76 bp, Homo sapiens
ggcatctgttctatcttcccatcataaaaaatatcttacagacagcaagttgaacattgtgggatgcatgagctat

SEQ ID NO: 246554 - DNA, 100 bp, Homo sapiens
gggccatgtggaaactacataagatcacagattctgctggccatattctctactccaaagaggatgcaaccaaggggaaatttgcctttaccactgaaga

SEQ ID NO: 246555 - DNA, 82 bp, Homo sapiens
gatgctctgctcctgatttttgctaacaaacaggcatggaagaggagatggttcgtgttacgcagtggccgtttaactggag

SEQ ID NO: 246556 - DNA, 76 bp, Homo sapiens
atgcagagatacagcaaaagagtctacataggttcttgatcaatatgaacgagaaggatttaacttcctagccaag

SEQ ID NO: 246557 - DNA, 99 bp, Homo sapiens
gtagaaaaagacattagaatggccagtgattcctgtcagaatcaccatttttggtaaacaaaccaagcccagaacctgataattatggagcattctaca

SEQ ID NO: 246558 - DNA, 100 bp, Homo sapiens
tgtggagggagttcataattcatccattgctcttagcgactgttttggactcagggataggatgggatctgcactgatgattgaaacagcaagaaacccc

SEQ ID NO: 246559 - DNA, 100 bp, Homo sapiens
caggacgtgaccatggagaagctgttgtgtttcttggtcttgaccagcctctctcatgcttttggccagacagatattgatgatgttaagaagttcaaac

SEQ ID NO: 246560 - DNA, 75 bp, Homo sapiens
gaaggaagatggcggatctggaggagcagttgtctgatgaagagaaggtaaaacttccttttcctgtagatcaaa

SEQ ID NO: 246561 - DNA, 75 bp, Homo sapiens
ttctgcgttttgccagtcacctctcaactgtgtgccaaagctcttcagtgggtcatctgtgtgtcacagcctcag

SEQ ID NO: 246562 - DNA, 126 bp, Homo sapiens
ttgatttccatggaaacctcgtcatcctctgatgacagttgtgacagctttgcttctgataattttgcaaacacggaggatcaactttttgtggcattgcctcactatgtctgatgggtaaactag

SEQ ID NO: 246563 - DNA, 100 bp, Homo sapiens
gatgccaatggcaacagctttgccactcgactttccaacatttttgttattggcaagggacttaaaattggggccttatgtagatcattactatagagac

SEQ ID NO: 246564 - DNA, 82 bp, Homo sapiens
gtgatccagcaaggtcggcagagcaaggggcttacgcagaaggacctggccacgagcaccagccacatcctcaatgggcagg

SEQ ID NO: 246565 - DNA, 82 bp, Homo sapiens
cttgctacctcttgggtgaactctagcaattacaagaaaccaaggtgtatgttggtaacctgggaactggcgctggcaaagg

SEQ ID NO: 246566 - DNA, 101 bp, Homo sapiens
tatccttctcaaccttgtgggatgtgaaaactctgttactgaagatctgaacagaattaagacgaacgagctttcacaattgcagcagatgaagatccatt

SEQ ID NO: 246567 - DNA, 73 bp, Homo sapiens
caccattcgtggggacttctgcattcaggttggcaggaccagtttgacatggtgagtgatgctgaccttcaag

SEQ ID NO: 246568 - DNA, 74 bp, Homo sapiens
tcacggtcaacgagcggggcaaccactgcgagtactgcttcaccaggtctctaattaacagaagatggcaaagc

SEQ ID NO: 246569 - DNA, 90 bp, Homo sapiens
ccgcctccctgggagctccgcacggagctgtaggtaaaacttgcctactgatcagttacacaaccaatgcatttcctggagaatatatcc

SEQ ID NO: 246570 - DNA, 75 bp, Homo sapiens
cggcaagaagatcggctgcggcaacttcggggagctccgcctaggggagtacatcaagacctggcggccacgcta

SEQ ID NO: 246571 - DNA, 83 bp, Homo sapiens
aagactacctttttcagaaatgcgcagagcaaacatctttcaaagctgaaaatgtgtgtctgacatgcaagctcagtggggca

SEQ ID NO: 246572 - DNA, 95 bp, Homo sapiens
ctcggcccgctcttctccctgcttaacgagaaccatagatctagaaatggccattgcctactggaacttagtgcttaatggaagatttaaattct

SEQ ID NO: 246573 - DNA, 89 bp, Homo sapiens
gctcttgctgaggacccacaagaacttcgagatggattccaacatcctgctagacttgttaagaaagatgtagcacttaagcctcagga

SEQ ID NO: 246574 - DNA, 100 bp, Homo sapiens
ggagaacctgaacaagtcccagctgaagctgggcatctggggcgaattaaacaaccaccatgtcgagcaaaaaggcaaagaccaagaccaccaagaagcg

SEQ ID NO: 246575 - DNA, 74 bp, Homo sapiens
gattcccagccatggcagattcctccgggcagcagggctaatctagacgaaatccagatgagttcacctacatt

SEQ ID NO: 246576 - DNA, 90 bp, Homo sapiens
atatggaactactttatgaacaagcaattctgtggtgttcttggtcacacatttatggagtttctgaagggcagtggagattactgccag

SEQ ID NO: 246577 - DNA, 90 bp, Homo sapiens
ttggatgtgtaaaaagaactcttaacggcgatgcaggtcttccacagctaagggcaattaaagcatttcaagatgtcctttatgttgacc

SEQ ID NO: 246578 - DNA, 82 bp, Homo sapiens
ctatctcttcaagtacatcataatcggcgacacagttatttgaaattacagtgcctctctctcaaggccccaaaccagtaac

SEQ ID NO: 246579 - DNA, 113 bp, Homo sapiens
tgagtgtggtctacgagctgtttctcatctttatactcttccagttgtcgccgtgatcctgaaggcgctgacctacgacgagaagcggggtgcctgcagcgtgggcaccaacg

SEQ ID NO: 246580 - DNA, 100 bp, Homo sapiens
ggaatccctggggatggtgttctccaccgtcaagacctttgagccgcctgagcgactaactcctgcgcccctgaggtgtgttatccaggattttcaagct

SEQ ID NO: 246581 - DNA, 82 bp, Homo sapiens
aggcgctcaacggcgagccagagctggacctcaccagcaagggtttccaggcctgaggtgcccgccctggccccaggagaat

SEQ ID NO: 246582 - DNA, 133 bp, Homo sapiens
gagagggattcgtggtgaaggtccggggcttgccctggtcttgctcggccgatgaagtgcagaggtttttttctggttgactatagtcaatggggccaatggagccaagtgtatggaaacccacaacagtatg

SEQ ID NO: 246583 - DNA, 74 bp, Homo sapiens
cgagaaccgtcagtttgagccagatggaggagatgttaaagtaacccatcttgcaggacgacattgaagattgg

SEQ ID NO: 246584 - DNA, 75 bp, Homo sapiens
gaggctacggtggaatacaaatgaggaccttaaagaagccaacttcgacatcaatcagctatatgactgcaattg

SEQ ID NO: 246585 - DNA, 89 bp, Homo sapiens
ggctccgtcgtggaagcaggactgcgccgcgtcttcctcaaggtatggacctgtctgccaatcaggacgaggagaccgaccaggagacc

SEQ ID NO: 246586 - DNA, 100 bp, Homo sapiens
tgaagagacaggaggcagtagccaaacacccagtcctcctgcatatgcccaagaggattgggagtggaatggacaccagcagaagcaccacagttattcc

SEQ ID NO: 246587 - DNA, 89 bp, Homo sapiens
gcggcctcctcttcccttcgctccggcccggtgaaactgaacttataatcgtcactggattgcagacctgttatcctaaactaggtgag

SEQ ID NO: 246588 - DNA, 75 bp, Homo sapiens
ttttgtgctgcggccgcggagcccccgaggtgctggagaatctggtaaaagcaccattgtgaagcagatgaggat

SEQ ID NO: 246589 - DNA, 98 bp, Homo sapiens
agcagatggatgtgctggaggggctcaacctgctcatcaccatctcaggctgctggtggtctacccttggacccagaggttctttgagtcctttgggg

SEQ ID NO: 246590 - DNA, 59 bp, Homo sapiens
cctgcaaagaggaaccacgaaggtggccacagatccatctgtgtgtgctgtggaattca

SEQ ID NO: 246591 - DNA, 97 bp, Homo sapiens
attaaacctgaaccagaagatcgagagcctaactttgcaaccattggtctgcaggacatcactttagatgatgatcatgctttacgattatggaata

SEQ ID NO: 246592 - DNA, 75 bp, Homo sapiens
taatcctgaaagccatgcagcggaggttgacggatatattcagacgttacgacacggatcaggacggctggattc

SEQ ID NO: 246593 - DNA, 89 bp, Homo sapiens
ccgaatcagaactctctttatctctcctacagcatggccgaaatggatgaacgattccagcagattctgtcgtggcagcaaatggatca

SEQ ID NO: 246594 - DNA, 90 bp, Homo sapiens
atcaaaatcccaggctgtcggaagcaagaatttggtgttcacttggcagaactgactgtagatccccagggggcactggcaatccgtcag

SEQ ID NO: 246595 - DNA, 83 bp, Homo sapiens
cctcgtgcctgtgagcagagatggcacctttgatgctgctgaataccactagaaacatacctgtaaccagagacagctgatta

SEQ ID NO: 246596 - DNA, 100 bp, Homo sapiens
gaggaagacaaaggggacactctgaagattattgagcggctggaccacctggagaatgtcatcaagcagcacattcaagattcctcctgcatggaaaaac

SEQ ID NO: 246597 - DNA, 100 bp, Homo sapiens
gtggtgaatgaaggcatgcttacaggatgtacttgttaaagagttactctgccatgctagattcagacccacctccccgccaatcttggacaagttgaac

SEQ ID NO: 246598 - DNA, 79 bp, Homo sapiens
ttgtttgtggatcgctgtgatcgtcacttgcagcctcccgcgacgatgcccctcaacgttagcttcaccaacaggaact

SEQ ID NO: 246599 - DNA, 146 bp, Homo sapiens
tgcttgaaggaggaaaaaccaagtgtctgggcaaaagcaagggccggaaatatcccgagatggacttggatgaccgccgggagagcctgcccacctccccaccctggacgccgggcgcgtcccggccccccagcagcctagacggc

SEQ ID NO: 246600 - DNA, 98 bp, Homo sapiens
ggaggtggccggcttcgttctgaaccgcctgcaatatgcaatcatcagcgaggcctggcggctagtggaggtggaaaggctgcagaggatcctggaag

SEQ ID NO: 246601 - DNA, 100 bp, Homo sapiens
cgaacgccagggaccctgtgcaggcctgctcctccgtttgcaagcttctcacctggggcgggtgggttctgcaccaccctcccaccctccttcctccgtg

SEQ ID NO: 246602 - DNA, 75 bp, Homo sapiens
gtgactataagattcctacattgattactgtttacagcctgcaggtcaggagtcatcttttcccccttctggtca

SEQ ID NO: 246603 - DNA, 51 bp, Homo sapiens
aaaaccccgaaaacgcaagaagcgtggcagcaggatgggtgtggaagcagt

SEQ ID NO: 246604 - DNA, 100 bp, Homo sapiens
aaaaaaaggtcttggtgaggtgccgccatttcatctgtcctcattctctgcgcctttcgcagagcttccagcagcggtcaaggtcagcatctcctcgacg

SEQ ID NO: 246605 - DNA, 82 bp, Homo sapiens
agggcggggaccggcggcgctggaggagcgaggcagctgtactaggactgggaacggttcaaaagaatgctgaaccgggagc

SEQ ID NO: 246606 - DNA, 90 bp, Homo sapiens
cgtggccaccaactcagctcgccagcacttcagccaggaggccctactcagtgtggcccacagagatggagacccagacgcagaggcggg

SEQ ID NO: 246607 - DNA, 50 bp, Homo sapiens
cctaaagtcgcacctgcggacgcacacagatgggggctccggaggtggcg

SEQ ID NO: 246608 - DNA, 89 bp, Homo sapiens
gttgatgctcactgccatcagctgcatcctccctatggcactggcaatgataccgtctttatccaagttactctgccccatggcccaag

SEQ ID NO: 246609 - DNA, 96 bp, Homo sapiens
ctatttcattagcctcagaacgatatgataaagacgatgaagccccctctgatgctgtgattgggttattatacccctgcattgacagacatctag

SEQ ID NO: 246610 - DNA, 75 bp, Homo sapiens
aagttccgagcttgttaactgattatattctgaaagattctctttgtggccagatgggtttgtatggacaggctt

SEQ ID NO: 246611 - DNA, 75 bp, Homo sapiens
tacctgttttatacttgcttttgcttcagcgttctgtggttgtcaacagtgaaggtggtgtttttaaggctcatc

SEQ ID NO: 246612 - DNA, 90 bp, Homo sapiens
ggaggagcttgggtgacagccagacggaatcagtccccaatgcctggaaattcctcattggattactgtgttttaaacagaatttcgtga

SEQ ID NO: 246613 - DNA, 50 bp, Homo sapiens
ctacgagctgttggcatccttggaggatctgaagaggcaaaatgcagtat

SEQ ID NO: 246614 - DNA, 75 bp, Homo sapiens
gagaacggtgcttctatggcaggatatgattcatgatgttgctatcaaaagttgagaaattgtcagaagaaatca

SEQ ID NO: 246615 - DNA, 75 bp, Homo sapiens
cggaatcccgacacctgtcctcatctggaacaaggtcaaaatgcagatcttcgtgaaaacccttaccggcaagac

SEQ ID NO: 246616 - DNA, 100 bp, Homo sapiens
ttgtgttgtttggagcagaaatactaaagaagattccgggccgagtatccacagaagtagacgcaagggttccaacctcacagacatctgcactcagctc

SEQ ID NO: 246617 - DNA, 74 bp, Homo sapiens
cggccgcctgtccgtcgatgcaccgaaaagtcaagtccatcatctccagaaccagctagtcttcctgcagaaga

SEQ ID NO: 246618 - DNA, 82 bp, Homo sapiens
cggcctacctcttcctctggcccgaagccttcctttatcgctttcagacctgcctagagctggaacgttacctccagagcga

SEQ ID NO: 246619 - DNA, 98 bp, Homo sapiens
ttttatgaataagcatcagaagccagtgctaacaggccagcggttcaaaactcggaaaaggggtaataaagacatcacatgggtaatgttagaagctg

SEQ ID NO: 246620 - DNA, 76 bp, Homo sapiens
ccttgagggatatctttcttcactcctcttcacttcttcaaaaactgaatatcctgatgttgcttggccattgaga

SEQ ID NO: 246621 - DNA, 82 bp, Homo sapiens
ctggtgaaatggagaggctggtcgcccaagagctgctctcgtttgaggatgtggcgatgtacttcaccagagaggagtgggg

SEQ ID NO: 246622 - DNA, 98 bp, Homo sapiens
ccttcctgtctgccgaggctgccggcctaacagaatgagcttcctgaacctgaacaagacaatggtggcaccacagaatctgtcaaagaacaagaaat

SEQ ID NO: 246623 - DNA, 101 bp, Homo sapiens
gagaagcgcagcgacggcgtcgggagagcgcgcctagccggctcgcgagtttggtgcacctcgatttggaggaagtagggcagggcccttatctggaaaga

SEQ ID NO: 246624 - DNA, 50 bp, Homo sapiens
ccagaaactgtgccaggatcacgcaaactgaaaccgtgtcagttcagtct

SEQ ID NO: 246625 - DNA, 83 bp, Homo sapiens
tctccggacggggccctgacacggccaccctactgcctggaggccggggagccgacgcctgagtcctgtgtatggaaactcac

SEQ ID NO: 246626 - DNA, 51 bp, Homo sapiens
ctacaagatgatgcagggaggaggaagtttgtgtttttcaacatacctcag

SEQ ID NO: 246627 - DNA, 98 bp, Homo sapiens
ggccaggatcctgcaccgggtggtggctgggtttgcattgagactccttgcattccgccagatacacaaagttctaggcatggatccattaccgcaaa

SEQ ID NO: 246628 - DNA, 90 bp, Homo sapiens
atcatgatacagttgataaaattgttgactgtctgcaactttacagatggtgcattggttcagcatcaggagtgggatgggaaggaaagc

SEQ ID NO: 246629 - DNA, 83 bp, Homo sapiens
ctttctgctgtcttgggtgcattggagccttgccttgctgctctacctccaccatgccaaggagcatcagatccatgctgctg

SEQ ID NO: 246630 - DNA, 82 bp, Homo sapiens
ggatgagcatgccaatttaactgaggaaattcacagtatggccaacagcaagatgcataccagggaccacctccacaacagg

SEQ ID NO: 246631 - DNA, 153 bp, Homo sapiens
gcagctgaatgcacagctagaaggttggctttcacaagtacagtctacaaaaagacctgctagagccattattgccccgtccttaaaattctagtcagggcagtgattgatgggatgactgatcgaagtggagatgttgcaactggcctcaaa

SEQ ID NO: 246632 - DNA, 100 bp, Homo sapiens
tcggaagggagcccaagctttgcagaggcatctatcatttcccgtaaaaaagaagccaaagctgaggaacttcaggaggccaaggagaagttagccagcc

SEQ ID NO: 246633 - DNA, 75 bp, Homo sapiens
atcggatgaaggcacctcagtgcttgtgaaggcgttctcttcaccccaggaagaagaagaagctggatttactgg

SEQ ID NO: 246634 - DNA, 100 bp, Homo sapiens
tgaaacctcaggtgatattgctactgtgtgtgattcagaacccagcgggtgccgcttctccacccgaggcttccacctccaacgagccatgttccaggct

SEQ ID NO: 246635 - DNA, 101 bp, Homo sapiens
aatacaagggcctcagggccggctaccactgcggctactgcgattccaaggagggcaaagcgtcctgcggtactctctgaagatggcagaagctcaccaag

SEQ ID NO: 246636 - DNA, 74 bp, Homo sapiens
gattgtgaggcctccccagccacgtggaactgtttttcgttggaatatacgttgcacatttatggcgattctga

SEQ ID NO: 246637 - DNA, 83 bp, Homo sapiens
catgaagattcaataacagttgcatttgaaaacaagtccccagtcccaagcggaagttggaagaaccagttctggagttcagg

SEQ ID NO: 246638 - DNA, 100 bp, Homo sapiens
ctcaaattagaaaatcgtcatctttctgaaatggtgatgaaattggaattgggtttacatgaggtcgggccaaccactggtctgcgatcatcggaggatc

SEQ ID NO: 246639 - DNA, 83 bp, Homo sapiens
ctcgccttgtatctcaacaccctgagtgcggatttctgctatgatgacagtgggtgcctgatagacatcctaggactatacag

SEQ ID NO: 246640 - DNA, 74 bp, Homo sapiens
agacagtgtgccagataccattgatgaaggaaatgctaaagcgattccaaggactcagagaccagcagatgtga

SEQ ID NO: 246641 - DNA, 50 bp, Homo sapiens
gttacttccaagtcatcaccagaaagataaaagcttcgatgatgaagaat

SEQ ID NO: 246642 - DNA, 58 bp, Homo sapiens
gagctacatggccccctggtttagggaggatgttcagcctcagaacgtagccaccttg

SEQ ID NO: 246643 - DNA, 51 bp, Homo sapiens
aaaacgtgactccccacaataacaaagccttctagacaagctcagtggaat

SEQ ID NO: 246644 - DNA, 88 bp, Homo sapiens
cacattgaggcttataatgaaacgttttccaatcgggtcatcattaatgagcattgctgctacaccaaccgagctgaagctgccatgg

SEQ ID NO: 246645 - DNA, 75 bp, Homo sapiens
ggccaacaggctctttggagagaaaacttgtcagttcctctcaggtgtccgcaatgttgccagtgtctgtctgca

SEQ ID NO: 246646 - DNA, 80 bp, Homo sapiens
ctcagttggaagcagccgatccagcctgcggagcctgtggggcagaaccgggctgtgggtcggcccaaggggaagctggg

SEQ ID NO: 246647 - DNA, 96 bp, Homo sapiens
ctgggcccacgctaccgggagctggtcaagaactggtccctttctagagataggagaagagagagatcgctgtctcgggagagaaatcacaagccg

SEQ ID NO: 246648 - DNA, 78 bp, Homo sapiens
cttgatcctcctcctaattgcagatatgggaaaatagtctccacaaaggcaattttggataagacaacgaacaaatgc

SEQ ID NO: 246649 - DNA, 75 bp, Homo sapiens
gctacaggaactgaatgtggattcaggcaccatccaaatggcccagcgaggagatggtgaagatggtgctgagcc

SEQ ID NO: 246650 - DNA, 100 bp, Homo sapiens
aactcaggcgcctcttcttagttgatgatttagttgattctctgaaggatctttccaattaaagatgtacccctggagactgatgaccttaccacttggc

SEQ ID NO: 246651 - DNA, 75 bp, Homo sapiens
agagcagagtggaccaccccatgaacctcgaccagtgtgcttttcttggagaaagaagaaaagaagaaagaagga

SEQ ID NO: 246652 - DNA, 98 bp, Homo sapiens
gtgtaatggccgccatcagggactcgcaggcaatgggtactacgacaggatgtacagttacccagcacgtgtacctcctcctcctcctattgctcggg

SEQ ID NO: 246653 - DNA, 99 bp, Homo sapiens
catatctcatgaggctgtaggctccttcaacccgtggctgatagctgaaagaaagatgtagcacttaagcctcaggaacgtgtggagaaacgccagacg

SEQ ID NO: 246654 - DNA, 51 bp, Homo sapiens
ccggcgcatcgcggcgcgcacagacccagaacagctttgctgagccatcaa

SEQ ID NO: 246655 - DNA, 83 bp, Homo sapiens
tgctcaacaagggcctgccgcttggtggagctgatcagaataatgttcagcatcaaccccctggagaacctgaaggtgtacat

SEQ ID NO: 246656 - DNA, 98 bp, Homo sapiens
cttagctgtgctcgcgctactctctctttctggcctggaggctatccagcgtccggcctctttggcctacccccgttggctccgctgccccaggtcga

SEQ ID NO: 246657 - DNA, 136 bp, Homo sapiens
gagtggcctcttgaaagtgtggcaggtggacactaaggaggaggtctggtcctttgaagcgggagacctggagactcagaaccgtgctgcatactatcctcctagccaaattgctcaactaagaccaagtcctcgc

SEQ ID NO: 246658 - DNA, 100 bp, Homo sapiens
tggagtggcagaagattgcagaggagctggggaggctgacccgcggctgattgagtccctctcccagatgctgtccatgggcttctctgatgaaggcggc

SEQ ID NO: 246659 - DNA, 75 bp, Homo sapiens
ctaaaaattgtataccgcagattcagatcagccaaatggccgatgacacagtggcagaactggacaggcatctgg

SEQ ID NO: 246660 - DNA, 100 bp, Homo sapiens
caaactttacaaaggatatgctgatggagggcacggaggaagtggaaggaagtgggaaaactcttgcctttgccatcccaatgattcatgcggtgttgca

SEQ ID NO: 246661 - DNA, 50 bp, Homo sapiens
agaagatcgagatcatgccagaggaatttttcacagacaacctatgggac

SEQ ID NO: 246662 - DNA, 75 bp, Homo sapiens
gaaaatcatggaagttgattactcagtctctaaaaagctaaggttttggagccctctcttaagtcagaactctgt

SEQ ID NO: 246663 - DNA, 100 bp, Homo sapiens
aaggcctcatctccacttgccaggagccccgacaccacccttggagacacggcttgttccagatttcagacttcggcctgtccaagtggatggaacagtc

SEQ ID NO: 246664 - DNA, 83 bp, Homo sapiens
ggttaccttagatgcaagtgatgatggaatcttggccaaaatcgtggcagctgagtatgtcccagagaaggtgaagaaagcgg

SEQ ID NO: 246665 - DNA, 51 bp, Homo sapiens
ctgtggccatcaagcaactctccggctcccaatcgtcaactcatgacttac

SEQ ID NO: 246666 - DNA, 97 bp, Homo sapiens
ttcagaaagaaggacagggatcacaaacactcagagtggaaaaagtaccatcatttgaaacagcatcctgaggttagcattacacttctcccagtgg

SEQ ID NO: 246667 - DNA, 75 bp, Homo sapiens
cgtggacatgcgcacctcacacagcagataatcaccagaatgggagtgaatgacttgtggcaaattttggagcct

SEQ ID NO: 246668 - DNA, 100 bp, Homo sapiens
ccgcggcatgggcggcgctggccgaggtatcaacttgaactgaaggatgactacatcattagaactaatcgactgattgaagatgaaaggaagaataaag

SEQ ID NO: 246669 - DNA, 75 bp, Homo sapiens
ccgaggccagcaagacgctgcccgccatcgaggcccggaggctgtttgatgtcctgcacgagcccttcttgaaag

SEQ ID NO: 246670 - DNA, 50 bp, Homo sapiens
gacgttttaataagaagttaattaccgggctggagtgcagtggcgtgatc

SEQ ID NO: 246671 - DNA, 90 bp, Homo sapiens
agaggctgcaggctgagatcgacaacatcaagaaccaggaaagaccacagcaagattctttcattcgtctcctcctagcctgggggacca

SEQ ID NO: 246672 - DNA, 90 bp, Homo sapiens
gatcctttcctgcttttggtttccctggcaggggttgaactgtggagtgtgtggggttaccctggataccccgatgaacaggaaatcaat

SEQ ID NO: 246673 - DNA, 100 bp, Homo sapiens
ctggtggaaggggcgaggagctttgcagttgtgtgcgagtgtgtacaggcaggtcttgacgagccctgcccgggccgacgcatgcggaggatggaaacac

SEQ ID NO: 246674 - DNA, 80 bp, Homo sapiens
gggtgctgcaggtgttcaagtgcagggagttcccgttacaatcactagtgttgcaggatgaccagtgtcccagtgaagga

SEQ ID NO: 246675 - DNA, 100 bp, Homo sapiens
gccgcggcggagccggaggaagctgatggtcatcttttccaagaagatgttaccgagtacttcagtgaattccttagtgcaggggaacggagtcttgaat

SEQ ID NO: 246676 - DNA, 95 bp, Homo sapiens
agatcccaaactggacagcattcagcagatggaaaacaattggttccctccgtcctatgaagcaggtggtcactaactgccaagagagaatccag

SEQ ID NO: 246677 - DNA, 100 bp, Homo sapiens
agtcgtgagctggcaggacacacagcaaacggggattcagcgtccgatcctttggaacagggactcacgtgaagcttccaggaccagctcccgacaagcc

SEQ ID NO: 246678 - DNA, 85 bp, Homo sapiens
cgaggagccgccgcgcgcccgcgccctccgcgcgacgccaggtactccaaagattcaggtttactcacgtcatccagcagagaat

SEQ ID NO: 246679 - DNA, 98 bp, Homo sapiens
gtcccggccctgagcgcactctggagggattctggcatcagggaggctttcagccggagaagcgagtttcagctgtcggaggcctgcaggactttggc

SEQ ID NO: 246680 - DNA, 96 bp, Homo sapiens
aaggggcagtacaagcttacgtctctgctcttcagtacaatcctcatatgggtgattttggaagcattcatagacccggaattgttgttgactatc

SEQ ID NO: 246681 - DNA, 75 bp, Homo sapiens
ttgggagatccacagctaagacgccgggactccctggaaacctagaaatgcccgccgccgccatgcccttctcca

SEQ ID NO: 246682 - DNA, 97 bp, Homo sapiens
aattagccattgaggagagagatgaagcaattgcacgagccaagcatatggaaatgtctctaaaagtgaagatgagaatgtgcctactgctcctgat

SEQ ID NO: 246683 - DNA, 50 bp, Homo sapiens
tcttgctctcctttctgtaaacacaggtgcactttacaggtccccgatga

SEQ ID NO: 246684 - DNA, 75 bp, Homo sapiens
ctgatttgcaacccttccgggaagccatagctctgcatggagaagatggtataaactggtccatcagtgacaaag

SEQ ID NO: 246685 - DNA, 100 bp, Homo sapiens
agagaagagaagctttactggtgttccagccctaagaataactgaagtgaagtgatggactccgatttggagagtagtaagacgtgaaaggaatacactt

SEQ ID NO: 246686 - DNA, 88 bp, Homo sapiens
ctgaaatacatccaggaaagacatggagattctcttaaaaaggctgcagccacaggtccgcacggaaaaccaggagctccaagactgc

SEQ ID NO: 246687 - DNA, 51 bp, Homo sapiens
aagtggaaatgcaatgtaccttaaggtctggtgagctgtaccttctttctg

SEQ ID NO: 246688 - DNA, 74 bp, Homo sapiens
catcggtctgggcttcaagacacccaaggaggttactatgggcaaggcggcatgagtggaggtggatggcgtgg

SEQ ID NO: 246689 - DNA, 75 bp, Homo sapiens
ccgaaccaagctttagccgccgaggccgcgtgtcccaaaggccaggcctcaggaaactgggagaggggggatctt

SEQ ID NO: 246690 - DNA, 101 bp, Homo sapiens
tcccaaccttccttctgacaagtcccagggccagctcttccgaggctccagcctgcttttccgccgggtgtcatcaggatcatgctttgccctggagtaac

SEQ ID NO: 246691 - DNA, 75 bp, Homo sapiens
ggttggagatgtggattttgaaggattattgcatcgagcttttagtgtcttcttattcaacaccgaaaataagct

SEQ ID NO: 246692 - DNA, 122 bp, Homo sapiens
tccttccccacccaggaccacctcccggccacgccccgggtccggctctcattcaaaggcatctggtgtcgaaggctcagatattcctgatgatggtaaactgataggatttgcccagctca

SEQ ID NO: 246693 - DNA, 98 bp, Homo sapiens
cagccaccaaccacactaacgagattcaagattatttgcaacagctcacgggagcaagaacggccttcagctgaatttcactgcctcctggggagact

SEQ ID NO: 246694 - DNA, 100 bp, Homo sapiens
ttaccaagaaagttgggtttcttttactggcaaatagtacttcaagagcacagtcttatgtaaggactacaaagctgatgaagacccagcattattccag

SEQ ID NO: 246695 - DNA, 100 bp, Homo sapiens
gaaaatattgaactgggaatcaagatcctgcagctcctgaaaggcaagctggtggtgggtcatgacctgaagcacgacttccaggcactgaaagaggaca

SEQ ID NO: 246696 - DNA, 108 bp, Homo sapiens
ctcaatatctgtcttcggtggactccttcggcagtccacccaccgccgccgcctcccaggaaagccatcaccaagtcgggcctccagcacctggccccccctccgccc

SEQ ID NO: 246697 - DNA, 98 bp, Homo sapiens
tctccagaaaatagtgaattcattcttcaagaagaagtggtggatatgttcttggctttaaaatagatcctgtggaaaaactacaagaatcagttaag

SEQ ID NO: 246698 - DNA, 75 bp, Homo sapiens
tcatgacctccctgcgcaactggtaccgaggcctcaggcccaggcccaaggccaagtgagagagcccaggccaca

SEQ ID NO: 246699 - DNA, 50 bp, Homo sapiens
gtcgaccattccaaaaaaatcggccaagcaatggggctggacacaaggtc

SEQ ID NO: 246700 - DNA, 100 bp, Homo sapiens
agtgaagactgctctaaaaagtgctagagatgcaatcagaaacaaagaatacaaagaagctttgaaacactgtaagagttttggaggctggaaaggcaaa

SEQ ID NO: 246701 - DNA, 86 bp, Homo sapiens
ggcaggggcggaggcggaggcagaggtggaggcgctttgaaagggctttgcaatttgctgatgtaattgtgttatttggtgccaga

SEQ ID NO: 246702 - DNA, 75 bp, Homo sapiens
ccaacaaatggccaaaatgatggatcctagggttcttcatcacatggcaaccacatcccatcactagcctttgaa

SEQ ID NO: 246703 - DNA, 75 bp, Homo sapiens
tggatgccaagaccaaattagaggctcaggcatggaggagtgacggcaggaactttctgtgctctgacaaccctt

SEQ ID NO: 246704 - DNA, 82 bp, Homo sapiens
agggagggcctgttggctttcagccttaccgccgacctttaaattttccactcagggctcctggaacagctcatccttatga

SEQ ID NO: 246705 - DNA, 82 bp, Homo sapiens
ggagtgcgtgggggaccggctgttggcgggattctcaaagttggattggtggaaacaatgaaccattgacaggctttacatg

SEQ ID NO: 246706 - DNA, 100 bp, Homo sapiens
gccgcaccaatggcttccgtgctgtcctacgaaagcctggtccacgccgtggccggagccgtgggcaaaagagttggtagtggtgcacaaaaaacaagaa

SEQ ID NO: 246707 - DNA, 90 bp, Homo sapiens
agccaacctgaccgggcacgaggagaaggtattggcaagcttgccagtgtacctgctggtggggctgtagccgtctctgctgccccaggc

SEQ ID NO: 246708 - DNA, 73 bp, Homo sapiens
ataaaggacagattgaatgccagtattttgtcaactgtgctggccagatgtccagctcgccgctgtccaagaa

SEQ ID NO: 246709 - DNA, 134 bp, Homo sapiens
agcagaagatcatccctgtggtggtcaagatgttctcatccactgaccgggccatgcgcatccgcctcctgcagcagatgtctactgttgtggagctgaacgtcgggggtgagttccacaccaccaccctgggt

SEQ ID NO: 246710 - DNA, 75 bp, Homo sapiens
ccaataaccaggtgcttggcaaaatcgagcgggccattggtgccacgtgtgaggtggtgctggccccgtgtgccc

SEQ ID NO: 246711 - DNA, 101 bp, Homo sapiens
tggaccctcctcccaactgtagagtgctgcagcagctcccagtccagtgctaggaaacattcccccaggagatggcatgccagtaggtcctgtaccaccag

SEQ ID NO: 246712 - DNA, 50 bp, Homo sapiens
aggaagaggatgcggagacgcgggggaccattgcaatttagagatgtggc

SEQ ID NO: 246713 - DNA, 75 bp, Homo sapiens
tagaatgcatcagtgcccttgtggcgaatggggctcacgtcgagttttgcacactagggaccaagaagccctcgg

SEQ ID NO: 246714 - DNA, 100 bp, Homo sapiens
cggcgcagtgcgaagcgaaacagactgttggagcagaactactgagaaaaaccaggcattgtatcttcagttgtcatcaagttcgcaatcagattggaaa

SEQ ID NO: 246715 - DNA, 73 bp, Homo sapiens
ctggggacgacttttacatcatcacggaggaagcaatgaggctccccaagaacacacctgaggaaaaggacag

SEQ ID NO: 246716 - DNA, 90 bp, Homo sapiens
gagacatccgctccttgcccgagaacatccagtttgatgtttactacaaggcgcatattaaatttcctattgactacccctattcaccac

SEQ ID NO: 246717 - DNA, 76 bp, Homo sapiens
tggagaactatagcaatctggttttcttgggtcccagtagggatggcacaatcagcgaggacaccatccgagcctc

SEQ ID NO: 246718 - DNA, 97 bp, Homo sapiens
ccagcctctcgaatgggcacacctgtgtagatcttagcaaagcaatgtctcaagatggtgcttctcagttccaagaagtcattcggcaagagctaga

SEQ ID NO: 246719 - DNA, 100 bp, Homo sapiens
tcccgtcttatgggacttgaggccctcaagctgatcttgcatctttaatggataaaacatttgagagaaagttgcctgttagttctttaacaatatcacg

SEQ ID NO: 246720 - DNA, 74 bp, Homo sapiens
aatattgtttcaggcacagagtcccattcagcagatgaggaggaggaggaggagaacctagatgatcaggatga

SEQ ID NO: 246721 - DNA, 98 bp, Homo sapiens
cgctggtcgtcagcgccgaggctgggctgaggcgccgcggtaccatgaggcgccgcagacaatatgaaacaccctttgaaggcaacttaattaatcaa

SEQ ID NO: 246722 - DNA, 100 bp, Homo sapiens
gccagactcctggagatcgacccgtacttgaagccctacgccgtggacttccagcgcagattctacaagggggttgctcctctctggatgagacagatac

SEQ ID NO: 246723 - DNA, 83 bp, Homo sapiens
cctatagcctatgagagaggaagaatatattttgacaattatcggcgctgtgtcagcagtttttcagaagaagtgaagtcaag

SEQ ID NO: 246724 - DNA, 90 bp, Homo sapiens
cgaggttctgcagaaggttgtgactttagtatacaatgtgtgcaacagcaccgatcttccggaagtcgagatcattagcctgctggagga

SEQ ID NO: 246725 - DNA, 122 bp, Homo sapiens
tgaaagcgacaagtggaggcgccgctctagcggccgggactctgaactatggcggcagaagctcctcctggggtagagacagatcttattgatgttggattcacagatgatgtgaagaaagg

SEQ ID NO: 246726 - DNA, 82 bp, Homo sapiens
ggatatagcagaagcagcagcagcaactcctgatttaggggcaatcgatgcacaacagcaacgccatgaaagagacttggcc

SEQ ID NO: 246727 - DNA, 100 bp, Homo sapiens
ccttccggagcttctcagaagacagagggttttcttttgagaaaaatggctacaaacttcctagcacatgagaagatctggttcgacaagttcaaatatg

SEQ ID NO: 246728 - DNA, 100 bp, Homo sapiens
agcacagaagagggagaagtggctgctctgcgcctcacggccagatcccagggaatgactctactaatgatggggtcagcagatgctcttccagaagaac

SEQ ID NO: 246729 - DNA, 75 bp, Homo sapiens
gtcatccttggcatgggctacaaggaaaacgccccactgtgttctccttgcctcaaaagaaaactcggcacctgt

SEQ ID NO: 246730 - DNA, 80 bp, Homo sapiens
cgctgacggcgactgcgggaggccaggtgctgctggtgagtagcagccggtacccagaccagtggattgtcccaggagga

SEQ ID NO: 246731 - DNA, 98 bp, Homo sapiens
aagccgctcttccccacctgcccggtgcccgaggaggcagccaagctcgtagcctgccactccgtgcgttatgaagacagtatggagtttccagacca

SEQ ID NO: 246732 - DNA, 74 bp, Homo sapiens
tgacgccatgtcgggttattcgagtgaccgagaccgcggccgggaccgaggattctacgattaggactgaaaat

SEQ ID NO: 246733 - DNA, 100 bp, Homo sapiens
cagagtaaagcaaagagaaaggaagcaggcccgttggaagtggttgtgtgctggagaatctggtaaaagcaccattgtgaagcagatgaggatcctgcat

SEQ ID NO: 246734 - DNA, 50 bp, Homo sapiens
ggatgaatttgcttttctggaagaactgataaatttcaaacggaagagag

SEQ ID NO: 246735 - DNA, 100 bp, Homo sapiens
tctggacatacttcagaaccgttggagtccaacctatgatgtgtcttccattctaacatccatacagtttggcctgtcactgctcctcatcctcctgagc

SEQ ID NO: 246736 - DNA, 88 bp, Homo sapiens
gccgccgctcggtgcggctctcggactctgctcctcactcaccgcgtggacacgatcgcatgtgtgcctggatgattgatagcttcgg

SEQ ID NO: 246737 - DNA, 75 bp, Homo sapiens
gaaggaacgaggcaaggagctaaagcagcgtgcgttcagccctgggattgacgagatgcctgaggctgccgtgaa

SEQ ID NO: 246738 - DNA, 100 bp, Homo sapiens
cgcacattggtatgatgtggaaggtcagatgtaccaacagtaccagcaacaggccggctatggtgcacagcagccgcaggctccacctcagcagcctcaa

SEQ ID NO: 246739 - DNA, 80 bp, Homo sapiens
tgacaaggcactgctttttcatgacgttcaggacaaagaggtgtgggcaggccactgggccagctggtaacatcatggca

SEQ ID NO: 246740 - DNA, 85 bp, Homo sapiens
tcttcgttgcattgcctgagaggagcggagtctgccaggtggtgtccatcatggggttcaactagatatagcttcacaatctctg

SEQ ID NO: 246741 - DNA, 98 bp, Homo sapiens
catgctgtcctatgtcagcaaaaactggagcagaaattggaggctcagcataggctgagggtaaaaagctgggattggtaggctgggtccagaacact

SEQ ID NO: 246742 - DNA, 100 bp, Homo sapiens
ggatggtggtggatgcggccaactccaatgggcctttccagcccgtggtccttctccatattcgagtgtatttgcatgcccgagtctttgagccgtgcta

SEQ ID NO: 246743 - DNA, 75 bp, Homo sapiens
gccgagtggggacgacgtggaggctgtccatctctgccgtggtgatgtcctatctgcagaatcctcagcccatga

SEQ ID NO: 246744 - DNA, 131 bp, Homo sapiens
ctcctggcaaccactatttgagtttctgcctctacaaatttgactattctaggtacttcatgggacagccggaggctgaagggggccatccagaggagcacggagacgggcctggcagtggagatgcccag

SEQ ID NO: 246745 - DNA, 83 bp, Homo sapiens
tactctctctttctggcctggaggctatccagctggtgaagttcatggatgtctatcagcgcagctactgccatccaatcgag

SEQ ID NO: 246746 - DNA, 90 bp, Homo sapiens
ccggagctgttcctgttcggccatcttggctcctccctgccagatagctcttattttgaggcaacagtgcatcccgacagcagcaacctg

SEQ ID NO: 246747 - DNA, 75 bp, Homo sapiens
gtacattgatatatgtaaattacggaagatcatttatatacacatgagaatggatcttggagaatgtctgaaagt

SEQ ID NO: 246748 - DNA, 90 bp, Homo sapiens
agatgctgggcgtggcggccgggatgacccacagggctcaagggttcttgttgatgcacgagataagcttggcattccttggcagtattc

SEQ ID NO: 246749 - DNA, 100 bp, Homo sapiens
gcaggacatcttcatttacagagcaacttgatgaaggtacacccaatagagaggtcaaaatgcagatcttcgtgaaaacccttaccggcaagaccatcac

SEQ ID NO: 246750 - DNA, 90 bp, Homo sapiens
tggacaaagatttccttgataaacaggggcaagtgtccgagtggtgaatcagctacttacagagatggatggtctggaagcacgccagca

SEQ ID NO: 246751 - DNA, 75 bp, Homo sapiens
tgaccaaggaggagcctgttccagaactgctggaagctgaggaaacctgtaggaagtgtcagggactctggaaag

SEQ ID NO: 246752 - DNA, 75 bp, Homo sapiens
tctattatttcaaagatgaagatgaaaccaagcccttgcaaaagcacctggaaattgaaagaactaccaaatggc

SEQ ID NO: 246753 - DNA, 75 bp, Homo sapiens
gagatccaggtcaccagcatccactggagctacaagaatgcagagcaaagcggcagtccccggacagggatgggc

SEQ ID NO: 246754 - DNA, 100 bp, Homo sapiens
aaatatgacccatgaagatgacgttcctatcaactgcaccattctataggatcgggtgaaccaccaaccggcaattgaaagctgcacagcctgaaattac

SEQ ID NO: 246755 - DNA, 100 bp, Homo sapiens
tgaccacgccggtgatcatagccatccagaccttctgctaccagaaaaccttctccaccagaatccagctcacgctgcagaacagccctgtggcccccac

SEQ ID NO: 246756 - DNA, 102 bp, Homo sapiens
cccgggaggaaggaacgaggcaaggagctaaagcagcgtgcgttcagccctggggttgtggcagcactgcctgaaggtatgagaccagattctaatctttat

SEQ ID NO: 246757 - DNA, 75 bp, Homo sapiens
gttgagcagcccatcgtgcttaaagaaggcggagcgtgctttggacaccatgaattttgatgttataaagggcaa

SEQ ID NO: 246758 - DNA, 100 bp, Homo sapiens
cagtcttctatgtttccacatcggtcagaaaaagatgaataataatggttggggttatcgttggttcaaagaagactggtataaatcctgataatgttgc

SEQ ID NO: 246759 - DNA, 97 bp, Homo sapiens
ctggcgacgtgcagcggaggagggcaaggactacccctttgccaggttcaataaggacaggtttcattaatcttgacaagccctctaacccctcttc

SEQ ID NO: 246760 - DNA, 83 bp, Homo sapiens
agagaactgtctcctggtgaccgagcacccgcctccgggcatcttcaactgtgtcgtgaaaactacccctaaaagccaaaatg

SEQ ID NO: 246761 - DNA, 99 bp, Homo sapiens
gatgatggttagcagtttttggcaatcacgtattttcaaaggaacctcagaacctgttctggatccacagcaaatccaagcatttgatcagctttgccg

SEQ ID NO: 246762 - DNA, 75 bp, Homo sapiens
gccgccgccaccatgcccaagagaaagactttgagaatcactacaagaaaaactccttgtggtgaaggttctaag

SEQ ID NO: 246763 - DNA, 89 bp, Homo sapiens
aagactccctgcctcctgagtcccattcatagccctgatgaagcaagttactctgctctcctaataaatgcaagaaaatgaccttggag

SEQ ID NO: 246764 - DNA, 97 bp, Homo sapiens
agatagtctaatctcagtttttcaggtctcagcggcggtggcagccgaggtgcaggatgcaagaaggcgccccccggccgggctcccgctccaggcc

SEQ ID NO: 246765 - DNA, 50 bp, Homo sapiens
cgccgagaggaggcctatgagaatcaggttctgctccagacgagccctta

SEQ ID NO: 246766 - DNA, 134 bp, Homo sapiens
aagctgtagaaaccaaagatgaacgatttgaacaaagcgctagcaacttctaccaacaacaggttcgagaacttgtcttggacaattgcaaatcaaatgatggaaaaattgagggcttaacagctgaatttgtg

SEQ ID NO: 246767 - DNA, 97 bp, Homo sapiens
tctgttacgggttttgccttatgaacttggtcggctcttccagctacaaactctaggtttgaaagattccattggccgtgacatccccaaaatgctt

SEQ ID NO: 246768 - DNA, 83 bp, Homo sapiens
ctgggaaggagcgcagcccacccggcccctccgcatccgagcagccatgccagtgacggtaacccgcaccaccatcacaacca

SEQ ID NO: 246769 - DNA, 51 bp, Homo sapiens
tacacagtatttaaatggcccagcttaagagttggacagtggaggaccttc

SEQ ID NO: 246770 - DNA, 75 bp, Homo sapiens
tggagccgtctgcaaagtgtccccggcaagaaggcacggatgggcagaagcctttgcaggtatcagaagttcaca

SEQ ID NO: 246771 - DNA, 74 bp, Homo sapiens
cttaaaccttttaagcaaggaaattgaactaagaaatggagagagatggacagagacgtatgtgcgttggtctc

SEQ ID NO: 246772 - DNA, 86 bp, Homo sapiens
agcggcgagtttccgatttaaagctgagctgcgaggaaaatggcggcgggaggattttttatcaagcagaaatgcatcgaacaacg

SEQ ID NO: 246773 - DNA, 74 bp, Homo sapiens
caagaaactcctttccttaaaggtacaggtttgcagattccgccagcagcacagcaagctctacagatgagtgg

SEQ ID NO: 246774 - DNA, 89 bp, Homo sapiens
attactgatacagagacgatggtcggaatcagatttgaaaatgaaagtgtgctgaaagatgggcgtttggtaaacaagaatggatcatc

SEQ ID NO: 246775 - DNA, 101 bp, Homo sapiens
agttccaacaaaagagctgctgatcaagagatctgcacaggagaaaacgacgctccacacctttaacttcttccacacttccttcacaagcaacagagaaa

SEQ ID NO: 246776 - DNA, 100 bp, Homo sapiens
ggatcttcacacctggatttaggcctacacctgcaactaccccagttctaccagttctctgttgggaatcagcgagaaggaaggcttttatgccacggac

SEQ ID NO: 246777 - DNA, 80 bp, Homo sapiens
ttatactcattcaccattgacaattcaacttactctctcttcccacagattatctgcgtcaaagttatgggctgtccatg

SEQ ID NO: 246778 - DNA, 125 bp, Homo sapiens
cctgtatgcatggtgtggggttggtgtgattagcttcgcagtctggaaagctttaggagttcacagtaacaccttccaccatgaccacctcagcaagttcccacttaaataaaggcatcaagcag

SEQ ID NO: 246779 - DNA, 101 bp, Homo sapiens
ccggggttgaggcgaggagcccgcgggcggccggtcgggcggggcggcggcgctgacagatttgaacatggaattcaatccttcagatcatcctcgggcca

SEQ ID NO: 246780 - DNA, 75 bp, Homo sapiens
ctgctgcacattaggttgcagtatgtggccagttatttgcctcagtaaaagagcttctgggaacttggcagacgc

SEQ ID NO: 246781 - DNA, 75 bp, Homo sapiens
ttgagccacttatcaggaaaccccatctttgctgaaaaggccaggagacaagcttctcaagtctttacagccgag

SEQ ID NO: 246782 - DNA, 100 bp, Homo sapiens
cctcatcatcccgtcagagctgaggtacttcgtgaaggcccacccccagagattgttatctatcaggagcttcgcatggaagcttttgtcgtctaccgct

SEQ ID NO: 246783 - DNA, 50 bp, Homo sapiens
ggaacacttcagtgcattcaaggtaaaatgtcggttccaggaccttacca

SEQ ID NO: 246784 - DNA, 75 bp, Homo sapiens
atcatccaaaagaggagtccatgatggaggcagaggtaaacttggagagattgctatgcagaaccaaatcaacac

SEQ ID NO: 246785 - DNA, 100 bp, Homo sapiens
ggagatacattaaatgcaatagcccttcagtactgttgtacgttcacacaaaagatgttggacaatttctacaattttgcttcatcatttgctgtctctc

SEQ ID NO: 246786 - DNA, 90 bp, Homo sapiens
gctagtcgacatggtcaaaagggtacttgtggtattcagtatagacaagaggatggagatgaagatgaggaagctgagtcagctacgggc

SEQ ID NO: 246787 - DNA, 75 bp, Homo sapiens
ccagcagccaagatggtgaagcagatcgagagcaagggcttccgagtggacctgccaatcaagtcggcccgctac

SEQ ID NO: 246788 - DNA, 75 bp, Homo sapiens
tatcataaaattcctctaaatgcaagaccatcatgcagacatcagagactgggtcggacacaggctcgacagtga

SEQ ID NO: 246789 - DNA, 112 bp, Homo sapiens
cctcacagtttgctctgctcttccaacaccagtggaagatgatcacatcccaggtaaaataccatgaagattttgaaaaaacaaaggggagaggctttactcccgtcgtgga

SEQ ID NO: 246790 - DNA, 85 bp, Homo sapiens
cctatataacgatcttcaacaagagtgcaaacatcatgcttcctcagaaggggaagtttactcccagtcccgtggacttcacgat

SEQ ID NO: 246791 - DNA, 82 bp, Homo sapiens
gagaccgtcctggcgcgatgcgtcaagtacactgaaattcatcctgagatgagccacccctttgctgtgaagttgcttgcgc

SEQ ID NO: 246792 - DNA, 80 bp, Homo sapiens
gacagtgccctgagggccttcgagagctaccgcgccagacaggttcctcaagccaggacctacgcacctgttgtgagtgg

SEQ ID NO: 246793 - DNA, 82 bp, Homo sapiens
aggaaacacctcaggacacggcctacaacaccaagaggttttaaaatcaaagatgggaaaatcggagaaaattgcccttccc

SEQ ID NO: 246794 - DNA, 96 bp, Homo sapiens
ccgacgctccctgtctgggaccttctccctgcctggacccctactattgcaacaaggtgtaatggataggtaacagagaagacctcgtcccttcct

SEQ ID NO: 246795 - DNA, 100 bp, Homo sapiens
tcgggatctcggtgctgcagacggcgagacctcctgcacagaactaaagatgactcagagccatctggagaagaaacagtagaaaggacaaggaagccaa

SEQ ID NO: 246796 - DNA, 100 bp, Homo sapiens
cacctctcagcacgattttcccgagagttcacaggtgaggcggaaccaaccctcctggccatgggaggggccgtggtggacgagggccccacaggcgtca

SEQ ID NO: 246797 - DNA, 83 bp, Homo sapiens
actgaccacagtgctcaccacccaccaccactgggccaattcctgtccccccagcagcatggcatcgtgtgctgaaccctctg

SEQ ID NO: 246798 - DNA, 101 bp, Homo sapiens
ttatgggagggctggccaacttctgctacagacgactcagttgttgatgagcgtgaattttttgagatcatgcccaattatgccaagaacatcattgttgg

SEQ ID NO: 246799 - DNA, 90 bp, Homo sapiens
acgaatctgcccacccctcctgtaacccagcctgtttcacttcttgataagaccatcatcatgtggaaactgaccagggatgagaccaac

SEQ ID NO: 246800 - DNA, 75 bp, Homo sapiens
ctctgcagcatccttgatgataaaccagtaaatactccagcgggaggaagaagaggcctttgccagcagtcagag

SEQ ID NO: 246801 - DNA, 122 bp, Homo sapiens
ggacaccgcttactccagaaacatgggtggaagctgggccagggattgggaaaatctcttcaggatttgaaaaagggcgcatctatacgttcattggagaagtcgtcgtttctgtgaaccct

SEQ ID NO: 246802 - DNA, 100 bp, Homo sapiens
catcaagaagtttctggaatcagaagatgaccctgtcataaagaaaattgcccttcgggaaatccgaatgctcaaggaaggtgaaattgttgaagtggat

SEQ ID NO: 246803 - DNA, 102 bp, Homo sapiens
ccgcgagcacagagcctcgcctttgccgatccgccgcccgtccacacccgccgccagatgagcagcaccagcagtaagagggctccgaccacggcaacccag

SEQ ID NO: 246804 - DNA, 75 bp, Homo sapiens
cagagttagagagagggatggtgaaagcggcagcccagaatctcgtgttaatgcgatccatttcttggtacacaa

SEQ ID NO: 246805 - DNA, 85 bp, Homo sapiens
ctggtgaccagaagtttggaggcctggagaacagctggcgccagcaccgcgaggccgcggcgtatctgcatgggcgcctgcaggc

SEQ ID NO: 246806 - DNA, 75 bp, Homo sapiens
agcgcgcctagccggctcgcgagactttggagaggatgattccctgtacatcaccaaggtgaccaccatccacat

SEQ ID NO: 246807 - DNA, 90 bp, Homo sapiens
gacaccccggaagctgggaaatggtatcgagaaccttccctgcgaacttcagaggaacttccagctgatgcgagagctggaccagaggac

SEQ ID NO: 246808 - DNA, 82 bp, Homo sapiens
ggaaaacttgctgcggttgctcaaggttttgctgttactgctcagtgtagtcacaccttgaataagaaatggaaaaccttgg

SEQ ID NO: 246809 - DNA, 100 bp, Homo sapiens
tttggttatggccaaggaccgcttacaacttctaggttactataacaacagtaccaaggtggctgtgaaaaccctgaagccaggaactatgtctgtgcaa

SEQ ID NO: 246810 - DNA, 98 bp, Homo sapiens
ttctgcggttctcacagcccgccgccgccgccgcctcggggacctttgcggggaggcctcagcaagtcaagccagagatctgttatcaaaaatgttag

SEQ ID NO: 246811 - DNA, 50 bp, Homo sapiens
ctggctgatactacgtattccagatgctggtgaagacacacaacctgctg

SEQ ID NO: 246812 - DNA, 83 bp, Homo sapiens
ctgtactaggactgggaacggaaacctgtgaaggtcgaaacagctgcgtttcctgttttaatgttagcgttgttaatactacc

SEQ ID NO: 246813 - DNA, 50 bp, Homo sapiens
cggcaccggatcaccaagacggaggtgctgttggcagcagcggtctgcac

SEQ ID NO: 246814 - DNA, 75 bp, Homo sapiens
tgcttccagtgttcgccgagaggctaccggctctctgaccagttccacgacatcctcattcgaaagtttgacagg

SEQ ID NO: 246815 - DNA, 83 bp, Homo sapiens
tggacacgggaacatcattacaagacagacagtctccagggaggacggtgcctcaggaaggtctttccaccgaccctttccga

SEQ ID NO: 246816 - DNA, 75 bp, Homo sapiens
gagatctggggctgcttcacaaactaaaggtgtgagttcttgatacgaatgaaaggccaagagtttgttgatgag

SEQ ID NO: 246817 - DNA, 98 bp, Homo sapiens
ccagaagaatgtggctaccagcgaaggcagtcatcaagtgcctactatgactttaactaccatgatggaagcatgtgccaaggagaactgttcaccca

SEQ ID NO: 246818 - DNA, 100 bp, Homo sapiens
gtcacttcagcggccaccctgccctccaaaggttcattctggcacaagagactatagtccccggcagatggcagttcgcgagaaggtgtttgacgtaatc

SEQ ID NO: 246819 - DNA, 100 bp, Homo sapiens
agagaaagaagaaattgctagcaaaagtgcattgcttcggcaaattaaagagtcataccctatggtactgcagtatcgaccaagaattgatttcggttag

SEQ ID NO: 246820 - DNA, 75 bp, Homo sapiens
cacccaccgccgccgcctcccaggttctgtacagagtaatgagatgtgtgacggctgcaaaccaggtgttttttt

SEQ ID NO: 246821 - DNA, 100 bp, Homo sapiens
gcctggcacagcagcagactcgcagcagataacatcctgctggttactgatcatacctgttgatgaattccaaaagagcagttgctatctcaaaggcaag

SEQ ID NO: 246822 - DNA, 100 bp, Homo sapiens
ggaaaaggcgcagtctcggtgggattgcgtgcaggagggtcgtggtctggctgtggcggaggagcataagaagaagttgcatgctccaggcagattccga

SEQ ID NO: 246823 - DNA, 101 bp, Homo sapiens
aagctcatcgacaaacaactccaggacgaaaagatgggctacatgtgtacgcaccgcctgctgcttctagtaatctatgccagcaattatgacaatgttag

SEQ ID NO: 246824 - DNA, 98 bp, Homo sapiens
ttaagagcaaaatgatttatgccagctccaaggacgccatcaagaagaagctgacagcggagctggagtttgttcagatcatcatcatcgtggtggtg

SEQ ID NO: 246825 - DNA, 98 bp, Homo sapiens
tcttggtttggtctctaaaagtaaaggacctgtcatttactccatcctttatagtgatgctacaggacgaagaggaatggataaaaacattggcgagc

SEQ ID NO: 246826 - DNA, 80 bp, Homo sapiens
cagtgactttctcagcaacatgtcgatggacttccagaaccacctgggcagctcttcttggacacttaatgattgttggc

SEQ ID NO: 246827 - DNA, 100 bp, Homo sapiens
gctccgaggagggccacttccgctactacctgctcctcggctggggcctgcagctcccagggcctcatcctgcacggctcgggcatgctcttaccctgtg

SEQ ID NO: 246828 - DNA, 82 bp, Homo sapiens
attagaaaagtcaaatactaagctgattgaagaggctggatgcagtccctctgatattggtattattgcaccgtacaggcag

SEQ ID NO: 246829 - DNA, 90 bp, Homo sapiens
cgcctccagggaaacgcggagtgtcctggagcttgacgcgctggagcttgagaggcgactggactcaaacacacttcactgcgactgtga

SEQ ID NO: 246830 - DNA, 100 bp, Homo sapiens
gtcgaatggcgagattgagcacgtgaccaagcgggccatcagcacccccgagagcatcaagcatgatggaaccatgtgtgatacctgccgccagcaacca

SEQ ID NO: 246831 - DNA, 100 bp, Homo sapiens
ccccaacaagaggaaagacacacctaccaagaagccagtcaagcggccagcgagaactttcaaaggcttccaaatctgatgctacttctggaatcctcaa

SEQ ID NO: 246832 - DNA, 74 bp, Homo sapiens
gaatctggatgagcagctcaagcagcgttttaagggtactgaaagtataagtaaagtgtctgagcaagtaaaaa

SEQ ID NO: 246833 - DNA, 75 bp, Homo sapiens
ctggggcctggagtcaggtggcggtgcagaaggtcaacgccgcaggcacagccctactgccaataaagggaaaat

SEQ ID NO: 246834 - DNA, 100 bp, Homo sapiens
cactctgggaaatatgatctgcaagtcaaagtggacaaattcgtggagaccgcatcaattgacatccagatcattggaaggctttgtgatacctgatgaa

SEQ ID NO: 246835 - DNA, 75 bp, Homo sapiens
tctagtttgcctaagtagaatttacatgggaatgcactctattctggttcaaaccttgtactactcagctgatca

SEQ ID NO: 246836 - DNA, 83 bp, Homo sapiens
ggaggagtggattaagtgcattaagagaccagcataaacactttggggactgagaggataagccatatcattagtgaccctcg

SEQ ID NO: 246837 - DNA, 100 bp, Homo sapiens
cccccggtgcaagaggcgcaaacaagccaatcccaggaggaaaaacgagctacagtgaacctgttgacgtgaagacatctcaacctcctcagctgatcaa

SEQ ID NO: 246838 - DNA, 100 bp, Homo sapiens
ggctaccgttcggactatttgtagtcatgtacagaacatgatcaagggtgttacactggttgctccttgagggcaggacagttcttatggctttatccgt

SEQ ID NO: 246839 - DNA, 115 bp, Homo sapiens
aggagaagagccatggaaacaggaggaagaattcccaagccaaagctttccagttgattatggaagattcccacaagagtaccacgtcagagacagcacctcaacctggttcagc

SEQ ID NO: 246840 - DNA, 82 bp, Homo sapiens
catcatgaaggaggggaaaatatcagtgcttcaccattaactagtaaagcagtacaagagattcaagatggaaaaggtgatg

SEQ ID NO: 246841 - DNA, 90 bp, Homo sapiens
gagaagccttcaggcagaagtcaggtttattgttggccaaaaccaggctttgattgaaccaggatgaatgcgggtgttggaagtagaata

SEQ ID NO: 246842 - DNA, 98 bp, Homo sapiens
agaccctgattatgatgacaaaagattttgagccaatcctggagcagcagatccatcaggatgattttggtgaaacactgggtattgtacccctccaa

SEQ ID NO: 246843 - DNA, 83 bp, Homo sapiens
ctgccttgcagacaccatccgtgctcctgacagagaaagagctggacccagatgggctgaagaaggagtcagagcgggatcgg

SEQ ID NO: 246844 - DNA, 100 bp, Homo sapiens
gacctcaacctggatatcagcccccagcggcccaggcccagtaactaggatttctacctcaaccgcgagacctatgcaaggacggtgtggaccaactcgc

SEQ ID NO: 246845 - DNA, 98 bp, Homo sapiens
gcttgagagccgcgcgctagagcgacccggcgagggatggcggccaccgggaccgcggccgccgcagccacgggcagtaagaccttgcaacggaaccg

SEQ ID NO: 246846 - DNA, 80 bp, Homo sapiens
gggtttggtaccgagcggagaggagatgcacacggcactcgagtgtgagaggctgggaggcggcagaatgcagccagagg

SEQ ID NO: 246847 - DNA, 76 bp, Homo sapiens
atgaccagatcctgcagctcacaggaagtgttgatggcgtctctgaatccaagttgcaaatctgtgttgaaccaac

SEQ ID NO: 246848 - DNA, 127 bp, Homo sapiens
aaacttcccctggggaccgaagaaagatcagccctttttggaaacatacaggatatctaccacttcaatagcactattcctgatcagagaactccagttgcttcaacacacagtatcagtagtgcag

SEQ ID NO: 246849 - DNA, 85 bp, Homo sapiens
ctcggcaaatattacacttctctccttatgctggcatcaccatctacatcaggtcagctgtctcagtttggggcaagtttatacg

SEQ ID NO: 246850 - DNA, 100 bp, Homo sapiens
cagagacgcatccgcgtgaccaccatcgcccgaaatgctcaagtaaagctctttgtgacagggcttttcagcttaaatcaagatattcctgctttcaagg

SEQ ID NO: 246851 - DNA, 98 bp, Homo sapiens
ctaagagtaaaagagctgaaaaattgactgaactttcagctgatttcatgccaatattgggaaccaacctaaatccagaattcatttcagtctgcaac

SEQ ID NO: 246852 - DNA, 100 bp, Homo sapiens
gggggaggagcgttccttgtcctccctctgcacaaggactcgctcagcagcagcctgaaaacttgctacaagtatctcaatcagaccagtcgcagtttcg

SEQ ID NO: 246853 - DNA, 100 bp, Homo sapiens
gtgtcagcacctcaacaacatttttttttggcttaacaaaacatcaaacggcatacaaatggttgaaatcacaaagattagacacctttttagataggtg

SEQ ID NO: 246854 - DNA, 88 bp, Homo sapiens
ggaggacaccgtgacttcccggacgctgggaaatggttcttgggtgtctctggggagtccctgggccagaccttcctccagactccag

SEQ ID NO: 246855 - DNA, 75 bp, Homo sapiens
ctggatatatgatggggagcttgaggacacttaccacgaagttttcctttggaatatggataaatacaccatgat

SEQ ID NO: 246856 - DNA, 125 bp, Homo sapiens
gtagagaaagcaactgctacgatcctgagcgagtcaagaattttcttaagattccaaatcctttatttgatctggctggaataacgtgtggacactttctggtacctttttggaccttctttggt

SEQ ID NO: 246857 - DNA, 75 bp, Homo sapiens
actcagagcgtcctctttggagaacccagcctcagcagaagccccaggggacagtggagagcggtcagaagggga

SEQ ID NO: 246858 - DNA, 100 bp, Homo sapiens
agtgctgggattataggcgtgagccaccgtgcctggctgaaggaagccaaattggcagagaatgcttgtaccctggctgacctgacagagggtcaggttg

SEQ ID NO: 246859 - DNA, 90 bp, Homo sapiens
cccaaactgggcagtgtcctgaccaggcccacagtgtgtgaacttaaatctccctccatgagtgatttcctgtggggtctggagaactct

SEQ ID NO: 246860 - DNA, 96 bp, Homo sapiens
agcagagtaaataaagctcatggcccaccagctagaaagggcctgctttcttccccgggcgatgtgcagagatctttgccaggggtcaaagcgtcg

SEQ ID NO: 246861 - DNA, 99 bp, Homo sapiens
cccgctggcgcgcagcctcagctagctggagccgagatggtcataaactcgtgagtgcttccactgataacatagtgtcacagtgggatgttctttcag

SEQ ID NO: 246862 - DNA, 75 bp, Homo sapiens
ttcaaacagttcaacatcttctgtcatatgctggagtcagccctcactcagaggctgggaggcggcagaatgcag

SEQ ID NO: 246863 - DNA, 100 bp, Homo sapiens
ccaattcactgtcaagaaaactcagcaagtttggatccatacgttataagcaccgctacaggatgacagtgatgggattccgtggtcagaagaacgggtg

SEQ ID NO: 246864 - DNA, 100 bp, Homo sapiens
gagtgtgcttagcgatggcctggaaatccggcggcgccagccactcggagctaatccacaatctccgcagaagatgagaatgtgcctactgctcctgatc

SEQ ID NO: 246865 - DNA, 101 bp, Homo sapiens
tgctattccggcgcctccactccgtcccccgcgggtctgctctgtgtgccatggacgggggttcggtccgagcccggtgggaggctcccggagcgcagcct

SEQ ID NO: 246866 - DNA, 100 bp, Homo sapiens
tatgctatgaatttatacaaggagaagcactggatccaaagcatgtctgcaacccagccattttcagggatggccaggaaattgctgtggtttacttccg

SEQ ID NO: 246867 - DNA, 83 bp, Homo sapiens
cattatgcttatgattgtcatcgttacagccggcgaagaagaagcaggaactgtggctgcaccatctgtcttcatcttcccgc

SEQ ID NO: 246868 - DNA, 100 bp, Homo sapiens
agcctgtacccttctgctcctttcctggcagcaggggtttcaatgggagggttcctgagtcctttgagcacctgccacctctcccagaaccaccagcacc

SEQ ID NO: 246869 - DNA, 82 bp, Homo sapiens
cccgccctgcagctgcccaagcagaccaagaatcgccttcagccctgtctggtgcatccttggcagaaagtgaggaggaaaa

SEQ ID NO: 246870 - DNA, 98 bp, Homo sapiens
gggaacccggaggcccaacgtggtgctgctcctcacggacgaccaggacgaagtgctcggcggcatggaggccagatgctccagtgcctgatggcgaa

SEQ ID NO: 246871 - DNA, 83 bp, Homo sapiens
caatatctgtcttcggtggactccttcggcagtccacccaccgccgccgcctcccagaactgccattggatgtccagaatccc

SEQ ID NO: 246872 - DNA, 100 bp, Homo sapiens
agcacagcctgcggtttccggctgcaccgcggcatgaatgtgcccttcaagcgcctgtctgagagacaagagagacacctccaacttcgacaaagagttc

SEQ ID NO: 246873 - DNA, 75 bp, Homo sapiens
ctccaagaaggttatctcctcagccaacagagctgtggttgagctagagccggtgcaggccacgcagaacaagac

SEQ ID NO: 246874 - DNA, 97 bp, Homo sapiens
cttacagcactatgtaggaggaaatgcagctttaattggacagaaatttgcagccaactcagatttaaaggaaaatgtttcaacgtgcgcaagagtt

SEQ ID NO: 246875 - DNA, 75 bp, Homo sapiens
ggagcggttgtgcgatcagatcgatctaagatggcgactgtcgaaccggtgaatgaaaactttgccattgatttg

SEQ ID NO: 246876 - DNA, 101 bp, Homo sapiens
gaagaaacctcagacagatcgccggggaggcagcgcgggatcccagcctcaggcgtgcgcggacggtgtgcgggtggacgtctgatttatgaagctcccca

SEQ ID NO: 246877 - DNA, 82 bp, Homo sapiens
ccacagaccagcccagcattcagagagcctatctctggcagaagtagccaacgagctggacacggagaccctgcggaggctg

SEQ ID NO: 246878 - DNA, 101 bp, Homo sapiens
aggaaatcaacaagaacgaagagaggaggagcatcttcacacgcaagaggaggacttcatccaacccagcagccgagaagaggcccagcagctgtgggagg

SEQ ID NO: 246879 - DNA, 100 bp, Homo sapiens
ctgctactacaacgagacccacaagatcctgggcaataccttcggcatgtgtgtgctgcaggaatctatggggttggcaaagccgccctgcatcccccag

SEQ ID NO: 246880 - DNA, 89 bp, Homo sapiens
gcccaatcagccaattaccgtcaagattactgagatacggaaacgctggggccagaacactcaggaacaagactgccaatggagactgc

SEQ ID NO: 246881 - DNA, 75 bp, Homo sapiens
ttatcctgcccttggagggaacatgaagaaggttcgttagctggtttgatagacatctctgctcattggatgaca

SEQ ID NO: 246882 - DNA, 73 bp, Homo sapiens
ttcaagctcttgcattagaatctcggggaatgggagagaccactctggctcacatcatagccagcaacagcaa

SEQ ID NO: 246883 - DNA, 98 bp, Homo sapiens
gctttctgaggccacaggaaaggggccgtcggtcgccgccatgacagcgagcgaggcggaggtttcagaaaagggatccctaacatcagaagagtttg

SEQ ID NO: 246884 - DNA, 74 bp, Homo sapiens
cgctgctgggcacccacggagcctccggggctgcatcatggcagaacaggatgtggaaaacgatcttttggatt

SEQ ID NO: 246885 - DNA, 122 bp, Homo sapiens
ctgactaagaattcattatattggcttagtacacagaaattctgcagatgattgtcactgctgttccaagggcacacgcagagggatttggaattcctggagagttgcctttgtgagaagct

SEQ ID NO: 246886 - DNA, 100 bp, Homo sapiens
gagccgggctgtggtcactaatgtacaggcagaaaacgagaggctcaccgcagtcgtgcaggatctgaaggagattctggaaaccaaaatggaggaaatg

SEQ ID NO: 246887 - DNA, 100 bp, Homo sapiens
gtggccaaagtggtcagggtggcctctggctctgccgtagttttgcccctggaggatgtccggcttccagatcaacctcaacccgctcaaggagccactc

SEQ ID NO: 246888 - DNA, 50 bp, Homo sapiens
gggtgggagtgacccgattttccagcaacaacgaactgtctacagactga

SEQ ID NO: 246889 - DNA, 75 bp, Homo sapiens
cgccgcgccgcgctccaaccgcctcctcctcctcagtaacgcggaatacgagccatcatgggaagagcagccaat

SEQ ID NO: 246890 - DNA, 75 bp, Homo sapiens
acaaaggcggttaaacttgatatggtggaggacacagaaggttacagttcctctgagtcatctcatcaatgcctt

SEQ ID NO: 246891 - DNA, 82 bp, Homo sapiens
tagattttctctcaaactacgagatggaggagatgtataagaaagctcatgctgctatacgagagaatccagtctatgaaaa

SEQ ID NO: 246892 - DNA, 83 bp, Homo sapiens
ccgcgcgcagggcctgcagcgggagctggacggcgagcgcgagcggcgcgagaaagtccctgtgcgttttattgcgacctgcc

SEQ ID NO: 246893 - DNA, 100 bp, Homo sapiens
caaaaaagaggatttctctgaagcaacgctgaaattcaccaaagtggccataaaatgcagtaaaaacaaatccagttcccaagaagctgtacaaatgctt

SEQ ID NO: 246894 - DNA, 99 bp, Homo sapiens
attgggaggagtctggcaggaaggaagccaagagcagcccgacggccatggaggctgaagagacgatggaatgccttcaggagttccctgaacatcata

SEQ ID NO: 246895 - DNA, 100 bp, Homo sapiens
ctgaatgatgccagcgactccatctacacgaaaggcaccccggagattgctttctggggaagaatatgccgagtttctacattgcaaaggaaagaaattt

SEQ ID NO: 246896 - DNA, 100 bp, Homo sapiens
cccagcaccaaaggcaaggatttggacggtttctcattgatttcaggatgagagtccaatgaaagcaaacttccttcaaaacatgatagaagacagaaca

SEQ ID NO: 246897 - DNA, 100 bp, Homo sapiens
tgcatgtggacagccaagaagaagctggctgactgcgagaaggtggctgtggagttcgggaaccagctggagaatggatttgccatcatccggcccccag

SEQ ID NO: 246898 - DNA, 109 bp, Homo sapiens
atctgtcttcggtggactccttcggcagtccacccaccgccgccgcctcccagactcggtgaaatacctggagtgctcagctctcacccagagaggcctgaaaaccgtg

SEQ ID NO: 246899 - DNA, 90 bp, Homo sapiens
tgaatctgatacccttgaggctcttctactgacagcctctgaaaggtggaatttttgtgattcacttttacagagacaatctgatgaata

SEQ ID NO: 246900 - DNA, 90 bp, Homo sapiens
ctacagtaaggctgaaatcattgaagtgcttggagtgcagaactgaaagaggaacacaaagtgctgctgacgggaaccccactccagaac

SEQ ID NO: 246901 - DNA, 100 bp, Homo sapiens
ggcgctggagctgggtcagtccgccgctcaccccgcggccgcaccttcccgccttctcagttccctgtattgaacactgatatacaaggaatgaatagaa

SEQ ID NO: 246902 - DNA, 98 bp, Homo sapiens
aagactgcctggcccagctgcgcctggcgcaggaggccgcccaggatgggaagctgtactggtgcgatgcacggacagacaagattgaacggatcgac

SEQ ID NO: 246903 - DNA, 117 bp, Homo sapiens
ctaaaggaaggcgtccgttggccttcgtacccgtcttgattgagtattctaccttgtaaatactgttatttgtatatactgtaaatgatgacatcggtgggcactaaccgagcccgg

SEQ ID NO: 246904 - DNA, 80 bp, Homo sapiens
ccagcagacaccgtgtttgataaggaaacactctttgggcagtaagctcctacaggacattttaaaactacataaatgtg

SEQ ID NO: 246905 - DNA, 75 bp, Homo sapiens
ctcacctccagatgggggctgctcagacactgccaggactcagcgaatgctctctacaccaaatgcctccagcag

SEQ ID NO: 246906 - DNA, 100 bp, Homo sapiens
aaaatgatatcagaaggactagacccagatcttcttgaatggctatatgcatccagttcatcctcatgtagttagaagacttgcataccaacataatcag

SEQ ID NO: 246907 - DNA, 100 bp, Homo sapiens
gcagccatggaggacgagatgcccaagactctaacttgtttcctgtccacgcaatgtgtctgaatgcagccatgactgtgttctgacatcagaaggtccc

SEQ ID NO: 246908 - DNA, 83 bp, Homo sapiens
ctgaatttgcagagagaacggttgcaaaactggaaaagacaattgatgacctggaagggacacagccggtcaggaacggtttc

SEQ ID NO: 246909 - DNA, 50 bp, Homo sapiens
agggcttctattccagcacgtgcccagctttgtgtccctggtgatgttgg

SEQ ID NO: 246910 - DNA, 83 bp, Homo sapiens
gaagaatgagaactataagagcctggtgagacggagctatcggcgccgcggcaagagccagggcgccatgttttggaagtttg

SEQ ID NO: 246911 - DNA, 50 bp, Homo sapiens
cgcaaagcttgcgaggtggcgttagcctagaacattccatattctgcttc

SEQ ID NO: 246912 - DNA, 82 bp, Homo sapiens
gtctttaaccatggcgtccctcttcaagaagaaaaccgtggatgggaccagttactctccacaagaaaattcacacaaccac

SEQ ID NO: 246913 - DNA, 97 bp, Homo sapiens
tctcatgaaccatcctgatttagcaaaagacttaacaggtgttctgaagacgcagatcccgatattaacttaccaaggtggatcagtggaagctgct

SEQ ID NO: 246914 - DNA, 76 bp, Homo sapiens
ctgttcccggggcagatccaggttcaggaaccctaaggactctgcaatatgaataattccctagagaacaccatct

SEQ ID NO: 246915 - DNA, 82 bp, Homo sapiens
aacaaatgtttttctggtcttcacttttttgaggcaggaagaataccaagctgctattttacacttgaagagggagcacaaa

SEQ ID NO: 246916 - DNA, 100 bp, Homo sapiens
tcagccgcaagtacccgtccatcatagtcaactgcgtggaagagaagtgttctggacttggtgcctctttctgttatatgctttcctatttagttgggag

SEQ ID NO: 246917 - DNA, 90 bp, Homo sapiens
ggaaagaagacaagagagaacgcaaacagtttgaagctgaggattttttggtagctggcagtgttgtgatggcttttgaagaagtatgcc

SEQ ID NO: 246918 - DNA, 98 bp, Homo sapiens
cgacttcgatgatcgtgtgtcggatgaggagaagggtgaagttgaacaaattgctatgatgaaaccaaaaggccagactgaacacgatgagggtatgc

SEQ ID NO: 246919 - DNA, 75 bp, Homo sapiens
gactctgcacactcttcggcctgacgcccaccctcaatggcggcaataatgacgatgaggacctgacaccagagc

SEQ ID NO: 246920 - DNA, 100 bp, Homo sapiens
ctctggatgatgcagaagaggagtcctttaggaaggaaggaaaatcacctcggcagtgtttgaaggaaggatactgcaactctttgaagtacgcattttt

SEQ ID NO: 246921 - DNA, 88 bp, Homo sapiens
ctggacctcttagaaggaaggctcatctatacacttcaaggacatacgatgaagcccggggcaagaactgtggtgtcttggtacattg

SEQ ID NO: 246922 - DNA, 90 bp, Homo sapiens
tgctaatccagtatttgcggatagctccaaactgggatatcccagaagaatcagtgcggtttctgtggcagagcgagttgcatttgaaag

SEQ ID NO: 246923 - DNA, 98 bp, Homo sapiens
tggagtccggcccccgaaagaggggctgtcttcatcggtggaatacaacataatggagttggaacaagaacttgaaaatgtaaagactcttaagacaa

SEQ ID NO: 246924 - DNA, 100 bp, Homo sapiens
cgaaagcagtgacggaggagcttgtaccaccgctcctgcccctcctaaagctgaagccaaagcgaaggctttaaaggccaagaaggcagtgttgaaaggt

SEQ ID NO: 246925 - DNA, 100 bp, Homo sapiens
catggagggagttccaacaacctctgccacaccctggggcctgtgcatcctcctgacccacagatacatttcatcaatgaagccttctggacctggagtt

SEQ ID NO: 246926 - DNA, 101 bp, Homo sapiens
gcctctgggcaaactgttttggaaaaaggaccacctcagaaaatagtatcacctaaacaagaacatgaagataggaaacatgacaaagtcactgataaagg

SEQ ID NO: 246927 - DNA, 90 bp, Homo sapiens
ggaaaatctccccggtgactttcagggttacatcaattgcagacaggttgaatgtggaatttgctttgatccacaaagagaggaagaagg

SEQ ID NO: 246928 - DNA, 82 bp, Homo sapiens
caaacccctcagacaatgaattcacaacctcaaacccgttctccgaaaggcctaaagaatgtatttgacgaagcaatattgg

SEQ ID NO: 246929 - DNA, 100 bp, Homo sapiens
ggcgctgagccgcgccacactgcaacgggacatgctgcaggccgagaaggccgaggtggccgaggcgctgaccaaggaggcagcatggcgggagctggag

SEQ ID NO: 246930 - DNA, 100 bp, Homo sapiens
gagtcttgaagattcatgaaaacagaagaaggaggaggagtcggcgggcggcaccaagggcagcagcaagaaggcgtcggcggcgcagctgcggatccag

SEQ ID NO: 246931 - DNA, 87 bp, Homo sapiens
agcaaccatgagtggttccatgatgggaagtgacatgatggagtttcactcttgttgcccaggctggagtgcaatggcgtgacctcg

SEQ ID NO: 246932 - DNA, 100 bp, Homo sapiens
tcatgaatcaagcaagcaaacgtgaaaaatggattaaggctgatgccccaaaaggcactaaagagacctctggcagcagtgtggagaatagatagaggag

SEQ ID NO: 246933 - DNA, 83 bp, Homo sapiens
tggaagcagccgatccagcctgcggagcctgtggggcagcatttgacattgtgcagcaaagaaatggttatggagaagcccag

SEQ ID NO: 246934 - DNA, 95 bp, Homo sapiens
gattgttcctaaaccagaagaggaggttgcccagaagaaaaagggtggaagaccaacacacacctccccagacagcccagcacgccagaaacggc

SEQ ID NO: 246935 - DNA, 50 bp, Homo sapiens
cccggtgcagctagaagtccatatcggtttatgtgagattaagaccattt

SEQ ID NO: 246936 - DNA, 83 bp, Homo sapiens
tgaagatcctggtgtcgccatgggccgccgccccgcccgttggtgtcgtgaaaactacccctaaaagccaaaatgggaaagga

SEQ ID NO: 246937 - DNA, 100 bp, Homo sapiens
aaggaccagtacctgcccaggaaactgaagtggtccaaaggcaaagttcgggacaagctcaataacttagtcttgtttgacaaagctacctatgataaac

SEQ ID NO: 246938 - DNA, 82 bp, Homo sapiens
ggaggtggccaccaggcttctcctttccccgctgggttacacatcattttggaatgactgtatatcatctggattacgtggc

SEQ ID NO: 246939 - DNA, 99 bp, Homo sapiens
gctggcgctctggctgtgctgcgcgacccccgcgcatggctcttgcagccaatgccggaacaggatttgctgttgctgagcctcaaatcgcaatgtttt

SEQ ID NO: 246940 - DNA, 76 bp, Homo sapiens
gagccatggccgaggtgttgcggacgctggccgtctgcgctcctcagaccaccggcaggtgaacagcctgatgcag

SEQ ID NO: 246941 - DNA, 50 bp, Homo sapiens
gcggcggcggcggcaccccgggcgcggaaacatgccctgaactgtcacag

SEQ ID NO: 246942 - DNA, 82 bp, Homo sapiens
tttgtggatcgctgtgatcgtcacttggactatcctattaagtgtaatctcactgcttaatgagcccaacaccttctcccca

SEQ ID NO: 246943 - DNA, 107 bp, Homo sapiens
ggattctcgacctgctaacagaactggaccttttcgatgggcttccccaaggatttattgacattgctacttgagtgtgaacagttacctggaaatactgatgataa

SEQ ID NO: 246944 - DNA, 82 bp, Homo sapiens
aacgcctggctcggagcagcagcctctgagacacagtctggaaaattgatgatcttatggattggcatcaggaaaataaaga

SEQ ID NO: 246945 - DNA, 100 bp, Homo sapiens
atgcgaaggcgccacatcgttcggaagcgcacgctgcggaggctgctgcaggagagggagtacgctgggagcggactcttggagctattgtaagacaaaa

SEQ ID NO: 246946 - DNA, 75 bp, Homo sapiens
ctcgggcctcctctgggagctcattaggaccatggtggatcgggcagaggcgagcagccagggcttcctgcatct

SEQ ID NO: 246947 - DNA, 98 bp, Homo sapiens
gggaagaggaacccagcacaagaaggcccaacactgcagcaggacggctggaggcttcatatcctgaacgctgggatcccccaggacattccctggcc

SEQ ID NO: 246948 - DNA, 75 bp, Homo sapiens
ctcgacctgctaacagaactggaccttttcggcgccaagcccatctttgtgtgcttgcatccaactgtgatgagc

SEQ ID NO: 246949 - DNA, 100 bp, Homo sapiens
gaccatcagcctcatcatccactatgacaggttgtgcccacgtgcctcagggccttggtagaaatggcccgggtagggggtgcctcctccctggagaata

SEQ ID NO: 246950 - DNA, 127 bp, Homo sapiens
ggtcgtgcaacgacgcagctggacctggcccagccatggaccgaaaagtggcccgagaattccggcataaggatgaagcctgctgggagcgtgaatgacatggccctggatgccttcgacttggacc

SEQ ID NO: 246951 - DNA, 96 bp, Homo sapiens
gtgtggacccgtaaaataaaatgggcttactagaaagcagcacccgcctgaaacctcacgaagcccagaactacaggaagaaggcattgtgggtgt

SEQ ID NO: 246952 - DNA, 80 bp, Homo sapiens
agattcgcagtggtcgcttcttctccttggaacctggaggagaagcggctcacttggaggcttccagatgtgtccgaggc

SEQ ID NO: 246953 - DNA, 73 bp, Homo sapiens
cgccatgggccagaacgacctgatgggcacggccgaggacttcgccgaccagcccgggtttccgcttccctcc

SEQ ID NO: 246954 - DNA, 98 bp, Homo sapiens
cgagaggaagattcttacctctttgatctcgacaataagtgtgctcatgggagcttagaagatcccaaaagtataacccatcataaattaatccacgc

SEQ ID NO: 246955 - DNA, 90 bp, Homo sapiens
ctgagctatacactaggggttcatgttaaccaggccaaacacaagctatagtcagcagactggacctcaacaacctcagcagttccaggg

SEQ ID NO: 246956 - DNA, 82 bp, Homo sapiens
ggcgctcggagcccgagtccgcgggaagatggcggcgccgctcatccccctctcccagcagcttgcattcacaagagatggg

SEQ ID NO: 246957 - DNA, 96 bp, Homo sapiens
gctgaagagaagatggaggagctggtggtggaagtgcggggctccaatggcgctttctacaaggctctcactgacctatgaacgactctttggtac

SEQ ID NO: 246958 - DNA, 86 bp, Homo sapiens
cgtctctctgctgcggcgcggggaccgctgtgctctcgccgtggtccttcagcatatctctgtgctgcagacaacacaccttcctg

SEQ ID NO: 246959 - DNA, 100 bp, Homo sapiens
tgcctgcccgcgcgctcccacttcttcgagcccggcctgcactgctggattacgggctggggcgccttgcgcgagggcgagtttcgctcttgtttcccag

SEQ ID NO: 246960 - DNA, 51 bp, Homo sapiens
ctaagcagttggaggctgtgtctggtaatccacgacttcttattctccttg

SEQ ID NO: 246961 - DNA, 74 bp, Homo sapiens
gccatgaagatcaaagatgccaagaaaccctgtgtgactgcacagaaaagttacaaaacaaatttgactttttg

SEQ ID NO: 246962 - DNA, 100 bp, Homo sapiens
cctccctcagaccgccccgcaagtactcaggatcggtggtataagttgaaatccaaaccaggaaagaaggacaaggagcgaggagaaattgaggttgaca

SEQ ID NO: 246963 - DNA, 91 bp, Homo sapiens
gtgagaccaaaaacccaccaattctggacacattgggattaaagacagcacccaagaaaacctcatttggctcgctgaaggatgaagaccg

SEQ ID NO: 246964 - DNA, 116 bp, Homo sapiens
cagcaccgcagccttgggcctcgcgccggctatggccgtgccctggggctgagccctcaggtgagaagccctaccactgcaactgggacggctgcggctggaagtttgcgcgctca

SEQ ID NO: 246965 - DNA, 87 bp, Homo sapiens
ctaagggtgcggcagtgcctggtacatggacctgaaggagaagaaggagaaggtggaggagaaggcaagccggaaagagcgaaagaa

SEQ ID NO: 246966 - DNA, 82 bp, Homo sapiens
cagcaatccttggctcactgaggaggtttgtttccaacatggctagatccatcagaaactgaagccgtggagaacgctctcg

SEQ ID NO: 246967 - DNA, 75 bp, Homo sapiens
agcgtcagaaataagccgttttttgacatctgtacttcaagaaagtgaacgagataattgggagagacatgtccc

SEQ ID NO: 246968 - DNA, 75 bp, Homo sapiens
aagaattaaaaatgcttgtctacaaacatcttcccttgcggaaacccgaaccctagcggagattgccaaagtgga

SEQ ID NO: 246969 - DNA, 82 bp, Homo sapiens
gttgagcactacagacctcacagtgccaaatggagctggaagcagtccagtggattggctctaccagtgcacctggacaggg

SEQ ID NO: 246970 - DNA, 100 bp, Homo sapiens
agggagagtttctgtgtgatttacctcaactggatagagtactgctcttcccgaagagcaaagattccagactccatcatttctcgtggtgttcaggtgc

SEQ ID NO: 246971 - DNA, 75 bp, Homo sapiens
accaagtcctccacagagggcgagccagggtggagaagagccagcccagggagaactaatgccgacgtgatgacc

SEQ ID NO: 246972 - DNA, 90 bp, Homo sapiens
cacaaagagcttgctccctacgatgagaactggttctacacgcgagctgggttcatagtggcgtcatgcacgcagactcctgcaagttcc

SEQ ID NO: 246973 - DNA, 100 bp, Homo sapiens
gagctgctatgggacctggaatttctcgtatgaatgacttgaccatcatccagactacacagctaaagctgttgatggatacgtgaagccacagatcaag

SEQ ID NO: 246974 - DNA, 97 bp, Homo sapiens
ctcctcgccagcagccgtccggagccagccaacgagcggaaagaatacccacctcatgtccaaaaagttgaaattaatcctgtaaggttaagtcggc

SEQ ID NO: 246975 - DNA, 75 bp, Homo sapiens
gtgtgccccccacagtggactgggaaaacgtgccagttagcagagaaccccgcaggtcatcggggtcatgcagag

SEQ ID NO: 246976 - DNA, 75 bp, Homo sapiens
tggggaatctatagttaatcttggcgacattgacaatgatggctttgaagcaaagcatgtggattcaaagttaag

SEQ ID NO: 246977 - DNA, 74 bp, Homo sapiens
tgccattccagcactggactcatggaggctgagcatttattcagacctgatggccaaaagaaaggaagaaaatt

SEQ ID NO: 246978 - DNA, 74 bp, Homo sapiens
ttacactggctatgatatggaagatgccatggtgggctctgttgtgtctgttggctggctccggtccaagaagg

SEQ ID NO: 246979 - DNA, 100 bp, Homo sapiens
attttggcattgacatttaattttagggtcctttatatagaagggagagtagattaaaaggagcccaagccccatctcatcctagcacaccctcctccac

SEQ ID NO: 246980 - DNA, 78 bp, Homo sapiens
ctcaaatagtgatgaagctgtaatcaataaaaaacttcccaaagaactcctgttacgatggagctaacacccattatg

SEQ ID NO: 246981 - DNA, 50 bp, Homo sapiens
atccattccatgggttttattcacaggaatccatcaacagcatcaagtcc

SEQ ID NO: 246982 - DNA, 100 bp, Homo sapiens
ctgagaagtgtatatcaagccacaatttccatcaaaaagtgattaagcagagaatggagaagaaggttgattccaggactgatcctttgaaatactccag

SEQ ID NO: 246983 - DNA, 95 bp, Homo sapiens
tctgatcactactgacttgttggaaccagcacctatgacagaagatctgctagaagagcagtctgaagttttagctaaattaggtacatcggcag

SEQ ID NO: 246984 - DNA, 98 bp, Homo sapiens
cggcggccgggccctcgagacggggacgaaatgactgctgtccatgcaggcaacataaacttcaagtgggatcctaaaagtctagagatcaggactct

SEQ ID NO: 246985 - DNA, 82 bp, Homo sapiens
tacgctagtgctgagctgaagattctaggctggtcgtctgatgataaggaaattagttgcagagaaattgaatatcccttgg

SEQ ID NO: 246986 - DNA, 100 bp, Homo sapiens
tatatacttggagttggagacaggcacctggataaccttttgctaacaaaaacagtgcgtcagcatttatcccgtttgccaaccattgatccgaatacca

SEQ ID NO: 246987 - DNA, 90 bp, Homo sapiens
cgacctgcagggccagccctacgacctcctgccccccgaggtctgcagtctcctgaacccagcagccatctacgccaacaacgagatcag

SEQ ID NO: 246988 - DNA, 75 bp, Homo sapiens
aacagttaatcctcaatttaagcctgatctaacccctagaaacagcaacagtatcaaagtgctctattttgggca

SEQ ID NO: 246989 - DNA, 86 bp, Homo sapiens
ggccgctaccgctcaggtgctgcaggcacagcccgagaaaccgcagcactacacgaaagattgtgacatacttcaggccccagcca

SEQ ID NO: 246990 - DNA, 71 bp, Homo sapiens
aacatagagctgacattaactgtcagaaaagacttgatggaatctacatggatgcagcctgaaagattgag

SEQ ID NO: 246991 - DNA, 82 bp, Homo sapiens
gttcctctgcggtgtggtggaagatacgtaggtaacctttccagagatgtgacagaagtccttatacttcagttgttcagtc

SEQ ID NO: 246992 - DNA, 74 bp, Homo sapiens
cccactcctccaagaaccaacccccaaattggctgggacagacttaattcagtgcacaaatgagatgaatgtga

SEQ ID NO: 246993 - DNA, 100 bp, Homo sapiens
attggggccatttagtaacttctttgcaagcctcctgacagtgggcctccaccattgccaacatcctccctcccagaaggttattatgaggaagctgtgc

SEQ ID NO: 246994 - DNA, 82 bp, Homo sapiens
ggcctgggcgctccggtggcggcggaggcagtgaaaaagcagtctggctcccgaggtccaccccttataccccaaggtccag

SEQ ID NO: 246995 - DNA, 96 bp, Homo sapiens
cccagccccggccccagaagagtggctggacattctggctgtaagaaaagcctggagtgcacgaagttgtgcctaccccagattgagaatgttaag

SEQ ID NO: 246996 - DNA, 80 bp, Homo sapiens
ctgttgtggttcactgtggaagggctgatggagttatgagaacaatgaacacagaaaaactcctaaaaactgtaccaatt

SEQ ID NO: 246997 - DNA, 100 bp, Homo sapiens
gctccacagcccggaccctgggtggccagcatcgaaatgttcagccttttagtgatgaagatgcatcaattgaaacaatgagccattgcagtggttatag

SEQ ID NO: 246998 - DNA, 74 bp, Homo sapiens
tttggagtatgtagagaacttgctcgtcatcagagaattcatactggtcggattgtttgtgctgaacgaactgt

SEQ ID NO: 246999 - DNA, 100 bp, Homo sapiens
cgggacgccgggcctgctgtggctggaccctacaggagacaagggaaggagaattaacatcaaagctgggactcacatataaacaagcgtcagattatgg

SEQ ID NO: 247000 - DNA, 75 bp, Homo sapiens
gttccggattccctggaaacatgcagtgctcatcttcaaactctatcagcgggcaaagcatgtgtacagcgaggc

SEQ ID NO: 247001 - DNA, 98 bp, Homo sapiens
cctggtgcctcccgcctccgtgtgccctggttgtgagaagacgtctgtgtcgtgcgcatttaaatcaaacggtattgagatggattgggttatgaaac

SEQ ID NO: 247002 - DNA, 83 bp, Homo sapiens
cagatggcggatgccctgcagtacctgcagaaggtctctggagacatcttcagcaggggaaggaagatctatgaacctccacg

SEQ ID NO: 247003 - DNA, 100 bp, Homo sapiens
ccacttcgacatcgagatcaaccgggagccgggagtcagtgacctttgaggatgtggctgtttacttcacccagaatcaatgggccagcctcgaccctgc

SEQ ID NO: 247004 - DNA, 82 bp, Homo sapiens
cgtatttgtgtgacttgactcttcaaacacaaaggtggaatgaatcttacttgttgaatatcttctggttactagttggatt

SEQ ID NO: 247005 - DNA, 75 bp, Homo sapiens
gggcagttgcagtgttggagctaaagtcatcctgtacagttctacagcatgaataggcctgcctctcgccatact

SEQ ID NO: 247006 - DNA, 100 bp, Homo sapiens
gccatggctgaggcgtcacggtggcaccgaggcgttggagtgcttagtgcagttggtgagagcgggagccacactcaacgtctccaccacacggtacgcg

SEQ ID NO: 247007 - DNA, 100 bp, Homo sapiens
tggacaccaaacatttcctgccgctcgggaagcccgtcagcctgagctacagatgcccatgccgattcttcgaaagccatgttgccagagccaacgtcaa

SEQ ID NO: 247008 - DNA, 100 bp, Homo sapiens
gctagggtcgccgccactgccgcaggaggcgtgaggactttccttatcccagttgattgtgcagaatacactgcctgtcgcttgtcttctattcaccatg

SEQ ID NO: 247009 - DNA, 85 bp, Homo sapiens
gtcatcgggaggagcagcctgaacccggggctggtgggcctttctgtgtcctactccttgcagattggagctggagtgagccttc

SEQ ID NO: 247010 - DNA, 100 bp, Homo sapiens
cgtggaataggtgtatcaagtaatggtgcaaagcctgaagaacgtgttgtgggctttcacgtactgggtccaaatgctggagaagttacacaaggctttg

SEQ ID NO: 247011 - DNA, 100 bp, Homo sapiens
cagatatccaggcattcttcatgagcatagacagtctgtgtaagaagtactccagggaaacctcccagggctatgagggcctcgtggagggaggtgagaa

SEQ ID NO: 247012 - DNA, 96 bp, Homo sapiens
ttgtactaccgcagcaacatggctgacatgctttataatttgttgtggaaaatgcccttaaagtgaacccaatactaggtccacaaatgtttcaac

SEQ ID NO: 247013 - DNA, 96 bp, Homo sapiens
tggtaggaggagttggcggaagcacttggaactcctttataagtgtcagctgtgagattgacgcgtcatgccttacgtgggaaggacaacagttcc

SEQ ID NO: 247014 - DNA, 100 bp, Homo sapiens
gctcagcaagtgccatgctacagcccctgcttgacaaccagcctgattacatcaaccccagagccgtgcagctgggctcccttctcgtccgcggcctcac

SEQ ID NO: 247015 - DNA, 82 bp, Homo sapiens
aaagagccctggatggtggagagagtggtgtctggaggcctgtgtccagactgaaatcgccaagagattgaatacgatttgt

SEQ ID NO: 247016 - DNA, 82 bp, Homo sapiens
ggcgagcagcggcgggggcccgagggggctgaagaagatgcagagcagcctgaagctggtggactgtatcatcgaggtccac

SEQ ID NO: 247017 - DNA, 100 bp, Homo sapiens
gatggatattgaaatggacagtggagatgaagcctaagaatatgatcagggtgtgcgtgcgcctagtgccagctgtgcgggatccgcacatgctgacctt

SEQ ID NO: 247018 - DNA, 51 bp, Homo sapiens
gttgaatgccagccaccagccatggcgggctacattgagagacctcagctg

SEQ ID NO: 247019 - DNA, 100 bp, Homo sapiens
aacaagtgcatccctgagtgtccctccgggtacacgatgaattccagcaaaaatgcactcggtgatggaaagagagccactattctgaagaacacttggc

SEQ ID NO: 247020 - DNA, 100 bp, Homo sapiens
tatacgctacttttactcagagtttgaaggttgtgaccaaaagaggctccgagtccgatgggtggtccttttattcctgctgctcctgtcaaaactgcct

SEQ ID NO: 247021 - DNA, 100 bp, Homo sapiens
aactccaaactcctctccaccagcgccaagagagtgttttggaaatcaagagaatggaatatgaaaacatcaacatttgattcagatgaggatattctac

SEQ ID NO: 247022 - DNA, 75 bp, Homo sapiens
aagccccctgcaggaactctacaacccaatccagcctcctgacagtgggcctccaccattgccaacatcctccct

SEQ ID NO: 247023 - DNA, 117 bp, Homo sapiens
ggctgattcatctcttgggtgagaagatcctgggcagcctccagcagggacctgtgacagcaagagtgagccatggagctacgtgtggggaacaagtaccgcctgggacggaagatc

SEQ ID NO: 247024 - DNA, 82 bp, Homo sapiens
aattcatccacatactatatttcaggagccttcacgtaaatgggtccagtcatgcctcccagtaagaagccagaaagctcag

SEQ ID NO: 247025 - DNA, 82 bp, Homo sapiens
aggagagagcaagcagggaaagagagcgccaggtgcttagcagcattaaagggcagtatttaaagtcagttggcaagcagtg

SEQ ID NO: 247026 - DNA, 75 bp, Homo sapiens
ctgggccgccgtccccgggaaaacgttcgtcaacatcacgctgcttccctgaatctgtggatgtgggtggtgcat

SEQ ID NO: 247027 - DNA, 87 bp, Homo sapiens
taagtgctagtatcggacatgatcctcatcttttatacactcttagtgctgtccaggaggagatgttaaagtaacccatcttgcagg

SEQ ID NO: 247028 - DNA, 100 bp, Homo sapiens
atacaaaatcacagctgaagaaatgtatgatatatttgggaaatatggacctattcgtcaaatcagagtgcatctccttggaaacaatgccatctttgaa

SEQ ID NO: 247029 - DNA, 83 bp, Homo sapiens
gtcggcagtgtgtttttgcaacaacaacaaaggtttgtcaagggctatttaatgagttactagaaaatgggatttctgtgtgg

SEQ ID NO: 247030 - DNA, 75 bp, Homo sapiens
agagtggacctacctgataaataccctttcaaatctccatctataggttacacggtgtgggcacacaacctcatt

SEQ ID NO: 247031 - DNA, 100 bp, Homo sapiens
ctcacccaaagccccgcacccgccttttctctctctcctctggcaggatgaggcgtgcaggcctggagtttgccttctgccaggtggatgcctccatcgc

SEQ ID NO: 247032 - DNA, 100 bp, Homo sapiens
ccccagaacgcagatcagaggtagtcggacctttcccgctggcgcgcagcctcagctagtctttagaaagaaactggaagttaatccgagatgaaggcct

SEQ ID NO: 247033 - DNA, 82 bp, Homo sapiens
aagaagccaaagaactggctaggcaaataagctttaaggttttaaaatcaaagatgggaaaatcggagaaaattgcccttcc

SEQ ID NO: 247034 - DNA, 90 bp, Homo sapiens
ttactttacaacttgcgtacatgggattatacaaatattttcccaaggagttgcccaggggatcataactggaataagaggactatgcaa

SEQ ID NO: 247035 - DNA, 100 bp, Homo sapiens
cagatggcggatgccctgcagtacctgcagaaggtctctggagacatcttcagcagaaattccgggtagatatgcctggctcaggcagtgcattcatccc

SEQ ID NO: 247036 - DNA, 89 bp, Homo sapiens
agagggcacgtgggtcggcgtggagctcgacctgccctcagggatagctgggagtatggccaccctgctccacgatgcggtaatgaatc

SEQ ID NO: 247037 - DNA, 90 bp, Homo sapiens
gctgagtttgcggagaggtcagtaactaaattggagaaaagcattgatgacttagaagatcagttggccttatttcctcagtggaaatct

SEQ ID NO: 247038 - DNA, 75 bp, Homo sapiens
acagcatgcctcaccaagtcacatgacaagcagcattgaatgccccagaggagcccgaaacctcccaggcttggt

SEQ ID NO: 247039 - DNA, 98 bp, Homo sapiens
cggagacccccgccctcaactgagatgaattccctctgctgacaaccaaacgtgtgttctggaagggtgttttggaggagttgctgtggtttatcaag

SEQ ID NO: 247040 - DNA, 128 bp, Homo sapiens
cggattggttgttttttcctgtatgaagcggttggcaccactgaagtgaccgaatgagtgattcgcctttgccagtctcatctcgtgtctgctttgttaagttccatgatccagactcagcagttgtg

SEQ ID NO: 247041 - DNA, 75 bp, Homo sapiens
tgcagcagaacatcgagtgttggataacttctctgacatagtagaaggtctgactgacagtactccacaagcttg

SEQ ID NO: 247042 - DNA, 85 bp, Homo sapiens
acagggcgacgcagatgctgatggcatggatgtcaatgtgcgtggcccaggaacaggcctttgagagcagccagaagtacaaaga

SEQ ID NO: 247043 - DNA, 100 bp, Homo sapiens
tcagggctcagcctctgccaggactctgccacggcaagctcattcggacaaacgcctgtgtgggatggagtaggacctcttccagactgtgctgaaccac

SEQ ID NO: 247044 - DNA, 80 bp, Homo sapiens
gaggagagagcaagcagggaaagagagcgccaggtgcttagcagaaagaacattggagctatcatgtctggaagtgtgtt

SEQ ID NO: 247045 - DNA, 75 bp, Homo sapiens
gcccattagggggcagcagcagctgaaggagacatgggggacaaaggacagaaaggcagtgtgggtcgtcatgga

SEQ ID NO: 247046 - DNA, 100 bp, Homo sapiens
ccggtcttggggggatggttccatcatggcgtcaatgcagcgtcgagggcgaggcccccagcagtgagactggcacatccctggacagcccctcagccta

SEQ ID NO: 247047 - DNA, 75 bp, Homo sapiens
gacggggagagaccccgagacccccggggcacgaagtccagagcgagcggctcctctggtgcaagtgtggtagct

SEQ ID NO: 247048 - DNA, 100 bp, Homo sapiens
cgctgtgtggttgcaacggagataaattcccggaaccgcgattcggcgtgtcagacttggaatggaaaattatctatgtgggctctgcagaaagtgaaga

SEQ ID NO: 247049 - DNA, 100 bp, Homo sapiens
gtagggtatggtccagctgtgccgcaccgaggcgagcaggagcagggaacaggaaatccagttatcaaaattgactcaagaagagagaacctaacagaac

SEQ ID NO: 247050 - DNA, 100 bp, Homo sapiens
gtctgcgttgctcttgcttttcctcgctggggtgtacggttgtatttaaaaggtcacactgggacagcaggaaaacagagcagcctgatcttacacggtg

SEQ ID NO: 247051 - DNA, 98 bp, Homo sapiens
taccagtgtgcagaagttctcgaatcattctttgtacagaaattgaaaggcttcaaagctagcagtcgacctcttcaggatggagatattatcaacat

SEQ ID NO: 247052 - DNA, 75 bp, Homo sapiens
aaggattccaagtaactcttatttgattcatgttacatgtaaagctgtcctcatttgtgactatggacctatgga

SEQ ID NO: 247053 - DNA, 76 bp, Homo sapiens
caagggaccaaggtggaaatcaaaccactgaacctaccagatgtatttgggttggtcgtcctcccattggaactga

SEQ ID NO: 247054 - DNA, 100 bp, Homo sapiens
gacgctttacccgactctttgggccgttatctcacgaagcggggagaggtggtgagagatgacccctgttgaggatttcattggtgtctgccacaggccg

SEQ ID NO: 247055 - DNA, 82 bp, Homo sapiens
ccgcgtccgccgattcctcctccttggtcgccgcgtccttggctggcgttgttgacctaaccaatgaagaaacaactgattc

SEQ ID NO: 247056 - DNA, 75 bp, Homo sapiens
gccttctctgtcagctctttccccgtcagcatcccagccgtgctcacggcaggtaaaaatcaaggtgaccccaag

SEQ ID NO: 247057 - DNA, 75 bp, Homo sapiens
tttcccttattccagttgatccccagttggctggggaacagaccagggaattggtggatttggagaagagccggg

SEQ ID NO: 247058 - DNA, 75 bp, Homo sapiens
gttacagcacagctgcccctgcctatgagccctaatttgtttagaactgtaatatgcacagttaaaacaacttgt

SEQ ID NO: 247059 - DNA, 97 bp, Homo sapiens
gaacagctctgagagagacaagaagtggaatggagaaggtgattagatttgcttgtaaatgcatcacgaagaggcagcccagaatgaagaaagcaag

SEQ ID NO: 247060 - DNA, 100 bp, Homo sapiens
cctggtcctcgatccgcccacagacctcaaattcaaaggctattctcatggatcacaactgccctattaaaacaaaaatgtacactcagaataatatcca

SEQ ID NO: 247061 - DNA, 83 bp, Homo sapiens
cccagatccatttacactttacacgaaaccttgaaagccatttgatgtcccctgctgagattccaggccagcctgtccctaag

SEQ ID NO: 247062 - DNA, 85 bp, Homo sapiens
ggacctcaacatccgagtggaaaggtcaccatcagaaaagctaagtttgctgtatagtgaggatcaggagatctgatcctgattg

SEQ ID NO: 247063 - DNA, 75 bp, Homo sapiens
aagtaatacagaactgccccatcgatgtgcggcgcccgctgtataaggaaattgacaatggcccttcagctatgc

SEQ ID NO: 247064 - DNA, 140 bp, Homo sapiens
tgtctcgctccgtggccttagctgtgctcgcgctactctctctttctggcctggaggctatccagcgtaaaatgtcggttccaggaccttaccaggcggccactgggccttcctcagcaccatccgcacctccatcctat

SEQ ID NO: 247065 - DNA, 75 bp, Homo sapiens
gctcagagatgtggctgctgaggctggggtcagcaaatatacagatcccagctctcctgttggcttcgtgcttgg

SEQ ID NO: 247066 - DNA, 95 bp, Homo sapiens
aagaggtggtgatgcagggatgcctggaatagaagagaatgacctagcaaaagttgatgatcttccccctggctatgacttctgccaggtcctgc

SEQ ID NO: 247067 - DNA, 83 bp, Homo sapiens
gtgaacttcaaaaaattggggatgctaaggaaattcctgaagatgtagatatggaagaagaaaaagaaagtgaagattcagat

SEQ ID NO: 247068 - DNA, 74 bp, Homo sapiens
gccgcggagacctacctgcggcgtcggcagctgctgctccgagggagcgtccccggatttcgacatccaccctc

SEQ ID NO: 247069 - DNA, 80 bp, Homo sapiens
gctgcgttcacggcaggattcggttagggctgcagaccacaagactgggaaaccacttggaagaccgagtgaacaaattt

SEQ ID NO: 247070 - DNA, 90 bp, Homo sapiens
gaaggttggcctgacaaattatgctgcagcatattgtactggcctgctgctggcccgcaggtcatcttgcagctgtggcacacaaaacac

SEQ ID NO: 247071 - DNA, 100 bp, Homo sapiens
cgcgggaagatggcggaacaggctaccaagtccgtgctgtttgtgtgtctggactgaaatcgccaagagattgaatacgatttgtgcacaagtcatccca

SEQ ID NO: 247072 - DNA, 82 bp, Homo sapiens
gccttagctgtgctcgcgctactctctctttctggcctggaggctatccagcaagaacatgagctgcctgtggacatggaaa

SEQ ID NO: 247073 - DNA, 100 bp, Homo sapiens
tcagccacccgctgggaatcgtgcagggattcttcgattattaatgctgcacttgctttggctgcaagacccaaaagtcaagcggtcaaaaacaccatgg

SEQ ID NO: 247074 - DNA, 100 bp, Homo sapiens
attataaggatgtcatccccatggctgatgcagcaggcatcatccgctatgcaattggggttgaaagtaacggaagcctacagaaactgatccgcatccg

SEQ ID NO: 247075 - DNA, 75 bp, Homo sapiens
agaaagtatttatggtgaaaaatttgaagatgaaaatttccattacaaggctagacagcaacaagcagaattggc

SEQ ID NO: 247076 - DNA, 75 bp, Homo sapiens
ggcgagcagaactacggcgagcgggaagcgttgttgacgaccatggacatcatccacgatggatttggattcatg

SEQ ID NO: 247077 - DNA, 83 bp, Homo sapiens
ccttcctggctgatgcaaagtggattttgcacaactgcatcatttataatggggcccatctgctggcaaggctaagattagaa

SEQ ID NO: 247078 - DNA, 147 bp, Homo sapiens
ccaatatctcagagcacaccagtcttccctcctgggtcacttcctatcccatcccagcctcagttttctcatggaatcctgcaaaacctggcagctatgtatggaggcaggcccagctcttcaagaggagggaagccaagaaacaaa

SEQ ID NO: 247079 - DNA, 118 bp, Homo sapiens
tgggaaggaggccgagccgggatctcaggtcctcgggggcggcggccacgccaaggacggtactatactggcaattgctggagaagattttgcaattgttgcttctgatactcgattg

SEQ ID NO: 247080 - DNA, 82 bp, Homo sapiens
accaagggcctagatgacgacacgcctttgcacgacgctgccaacaacgggcactacaagggcaacaggtttgtctatgctg

SEQ ID NO: 247081 - DNA, 109 bp, Homo sapiens
ctggatattgcgtgatcacctatatacttggagttggagacaggcacctggataaccttttgctaacaaaaacagggactgctgagatgtcctctattcttgaagagcg

SEQ ID NO: 247082 - DNA, 90 bp, Homo sapiens
agccgtggaataggtgtatcaagtaatggtgcaaagcctgaagaaggagatggataaagcagatgtttattggggcattccttatcccag

SEQ ID NO: 247083 - DNA, 82 bp, Homo sapiens
tctacatcctgttcttcaccgttatcatctatgttcggctggacttctccatcaccaagcacttgcacctcctgcgccgccg

SEQ ID NO: 247084 - DNA, 98 bp, Homo sapiens
gtcgttcccacagccattctggcgttcctggtcaatcatgacttcacccctctggagttgccagtagtcatcagagtaccaaaactgatctatttctc

SEQ ID NO: 247085 - DNA, 105 bp, Homo sapiens
accaggaatggagacgccattggatgttttgtccagggcagcatctctggtgcatgctgatgacgaaaaacggcggcgactggcggcgcgatggacctgaccggg

SEQ ID NO: 247086 - DNA, 85 bp, Homo sapiens
ttcggctgcgcggcggggctgaggcggccgcggggcccgagcgcaggaagctcttcgtgggcggtcttgactggagcacgaccca

SEQ ID NO: 247087 - DNA, 90 bp, Homo sapiens
ttcggcttctgagacggcggcagcagcggcattcaggtgtggccgacgacgatgccctcgctgaggagcgcatgcggagaggccagaacg

SEQ ID NO: 247088 - DNA, 82 bp, Homo sapiens
ttaaggtcttcagcggggcgctccaggaggcactcacaggcctgggttctgaggaaaacgcaatggtggccatggacttggg

SEQ ID NO: 247089 - DNA, 96 bp, Homo sapiens
ttccacctgatgtgattgcaagcatcttttcttctgcatggtgggtacccccatgctgtggcacggcttcagaacccctgaacagtgcccaagtgt

SEQ ID NO: 247090 - DNA, 100 bp, Homo sapiens
aagatgatgtggtctacagaccaggagatgtacttctggactcacgggcctggggcccacccagcacagatctctgctgagcaatcttgtctccactctg

SEQ ID NO: 247091 - DNA, 100 bp, Homo sapiens
cggctgctccccggtggcccaggcctcggactccgcggccggcccggcgcggcccagcgccctcaggagtaccgggcgtcaaagcagaacgctttgaaga

SEQ ID NO: 247092 - DNA, 80 bp, Homo sapiens
attttttggagcttccatcctggttcttccaaagtgcccggacccaaaacaggaagagaaggaagccaacatccttttgg

SEQ ID NO: 247093 - DNA, 96 bp, Homo sapiens
gacagctggtaaaagtctgtgccccaatggttcgatattcaaagaattcattgaagagttgctgtctcccccttttgggggtttagtggcatttgt

SEQ ID NO: 247094 - DNA, 98 bp, Homo sapiens
gtgaccatcgctccaaccaaaaccgtgaatggtgtctggaggagtgagagccggcagagctcaggccccggggcctccagcggcaccagcggagacca

SEQ ID NO: 247095 - DNA, 74 bp, Homo sapiens
attgaatctctgctctggaaagttcttgtcaataccaagctctgaagagactgagggactcggccaatgccaat

SEQ ID NO: 247096 - DNA, 75 bp, Homo sapiens
gaaaatgttaaaaagaacagatacaaggacatactgccataaataagcgggttttgaaaacaaaaaaaagaagga

SEQ ID NO: 247097 - DNA, 96 bp, Homo sapiens
ggaggaatacctcgtatgcaacctcaggcttcagccagtgaggagcaaaagaagggatccacctattcagttccaaaatctaaggagaagttgatg

SEQ ID NO: 247098 - DNA, 100 bp, Homo sapiens
acctggtccactgaaaaattcttcagattggaaaataccacaggatggagactacgagtttgagcctagtaataaacgggtcaaacccctttcccgagtc

SEQ ID NO: 247099 - DNA, 75 bp, Homo sapiens
ggactgcgtcctggtcaaccccaggaactcacagagtggattccgggcagatgattctggaccagatgaagcctg

SEQ ID NO: 247100 - DNA, 90 bp, Homo sapiens
ctgttttggaactgtcaggtacctcaaagcgacttttcttggtagagatggaaatccaaataaacggaatgtgcacaatgaaacatctat

SEQ ID NO: 247101 - DNA, 83 bp, Homo sapiens
agggacagtgggcagtgctcccggaacacaagctgtgaaacactaggtgatctgcaactctttcaccatctgtaatgcggaga

SEQ ID NO: 247102 - DNA, 107 bp, Homo sapiens
aggagcagacgagtggccaggcttctggggctgactcaactgcagtagccatcctaatggatatgggttggttcctgttttctatttggaactttaaaaaaaattaa

SEQ ID NO: 247103 - DNA, 51 bp, Homo sapiens
gatcttgtgtgctccatagtttatcaaaagtgctgggctttgacaaacttc

SEQ ID NO: 247104 - DNA, 101 bp, Homo sapiens
aggaatggagacgccattggatgttttgtccagggcagcatctctggtgcatgctgatgacgaaaaacgaggcaggtggaagtcatcataaagtttctgtt

SEQ ID NO: 247105 - DNA, 90 bp, Homo sapiens
catttgtggtacatgcagggacagatacaaacggagatatctttttcatggagacaactcgagagatgatcgctcgttctgctgctaccc

SEQ ID NO: 247106 - DNA, 75 bp, Homo sapiens
cagagccatcattcaagaagtttgcttcatgcctcccacatgtcatcagcaggatgggcaagctggagcaggtgg

SEQ ID NO: 247107 - DNA, 82 bp, Homo sapiens
gctggctgagtccaagcaggcgtttggggtcgggccccggctcagtggtcccaggcagctcgggtgtcggaacccccagaca

SEQ ID NO: 247108 - DNA, 75 bp, Homo sapiens
ctcgagcgatctggacccttcacacaccctgatttcgaaccgagcactgaagtagttattactagtaaaagcgga

SEQ ID NO: 247109 - DNA, 83 bp, Homo sapiens
gcttatggttctccattgtgatgaaagcacatggtacagggtaaaagtgtcttaactggaggccttgatgcgttggaattcat

SEQ ID NO: 247110 - DNA, 82 bp, Homo sapiens
ggccggcgggcgtgcatcatccacggggtgctgcagatcctgttccagatatggatcagaaactttcgaagttggtagaaga

SEQ ID NO: 247111 - DNA, 83 bp, Homo sapiens
agctttttacagtggtgtagagtgcagtgcagctgaaaccagacctagaggatcaagacataatgggagcatttttagacaag

SEQ ID NO: 247112 - DNA, 75 bp, Homo sapiens
ggaaatggcacctatggacaagtctataaggtattgttgcagcatctggcagtgagactgaggatgaggacagca

SEQ ID NO: 247113 - DNA, 74 bp, Homo sapiens
gacggcggaagcggagagcaacagcgcgccgatttgagttctgtgaacctgcatttgttgttggtaattgcctc

SEQ ID NO: 247114 - DNA, 101 bp, Homo sapiens
gcccagggcggcagcggcggcggttgcgggggggaagtgactgggcggtgccggcgccggagacgatgccgttgagtctgctacaccatttttgatttggg

SEQ ID NO: 247115 - DNA, 75 bp, Homo sapiens
gtctcacctgaggtgaaccttcgaccttggacttctcagcctccagaatgatcaatgtccgagttaccaccatgg

SEQ ID NO: 247116 - DNA, 98 bp, Homo sapiens
tcgggacggaggacgcgctagtgaccatggccaacctggagcgcaccttcatcgccatcaagccggacggcgtgcagcgcggcctggtgggcgagatc

SEQ ID NO: 247117 - DNA, 59 bp, Homo sapiens
ccacttcgttcaagacaggtgtttaagcgtgaaattgccctcttggaaggcctgacagt

SEQ ID NO: 247118 - DNA, 83 bp, Homo sapiens
tgcgccacttgtccgcttcacactccgccgccatcatggtgaagctcgcgaaggacatggatttgattgacatactttggagg

SEQ ID NO: 247119 - DNA, 74 bp, Homo sapiens
tgcacccgggaggactatgagtgtgcgagggctggaggcctggcagaatgggtgctgatggagctacaggggga

SEQ ID NO: 247120 - DNA, 90 bp, Homo sapiens
acaccggataaaccaaagacagcatctgagcacagaaaggatttttcgggattgtcaccctacgaaaggaagagactgaagaacatatca

SEQ ID NO: 247121 - DNA, 99 bp, Homo sapiens
aatgttcaagctctcctagaaatgttgaagaagctgcacagggaaaccacccctactcctaatcccccgactacagaagaggagaaaacggaatctaat

SEQ ID NO: 247122 - DNA, 74 bp, Homo sapiens
atcatgtgtgccccaactataccaatttccagtttggtgaaaggtgtagcagtcactcggcctacacccacagc

SEQ ID NO: 247123 - DNA, 100 bp, Homo sapiens
tgatcggctccttaccagctcacctctcaccgcgcatgtttggagcctaccgtatgtgaacgggagctgtgtgtgtttgcttttcaaaccctgggagtaa

SEQ ID NO: 247124 - DNA, 98 bp, Homo sapiens
ctgtggctcccgctgtagctctggttatgaagacagtatggagtttccagaccatagtagacatttgctacagtgtctgagcgagcagagacaccagg

SEQ ID NO: 247125 - DNA, 100 bp, Homo sapiens
caaaacgccaggcggatctcagaaggccagttcaaagtgcttaagaaaagatgcagagtctcgtagaagagaacttcatattcgaacatatgcagttatt

SEQ ID NO: 247126 - DNA, 80 bp, Homo sapiens
cgagattgcctgacccaggcctgctcggccctcacaggatgaagatctccttcaacgacaaaagcctgcagaccacattt

SEQ ID NO: 247127 - DNA, 95 bp, Homo sapiens
aagtggccaacacaattcttttcttccgcttggatattcgcatgggcctactttacatcacactctgcatagtgcggaccctgcggatcatctgt

SEQ ID NO: 247128 - DNA, 74 bp, Homo sapiens
gggaagtgaaaagagatctgttttcagacttaattcagtgcacaaatgagatgaatgtgaacatcccacagttg

SEQ ID NO: 247129 - DNA, 75 bp, Homo sapiens
atcgactggaccaagatcgagcccagcgtcaacttcctcaagtcgcccaaagcactgatagccattgggcgatac

SEQ ID NO: 247130 - DNA, 75 bp, Homo sapiens
agatttgatgctcttgtgctcagtgacatcattcaggtgggaacatccagttgcaggaaaacaagcttaacacgc

SEQ ID NO: 247131 - DNA, 100 bp, Homo sapiens
ctctggccgacgagtggagaaaagagtttcattctgtcgcccaggctggagtgcaatggcgcgatctcggctcactgcaacctctgtctcccaggttcag

SEQ ID NO: 247132 - DNA, 100 bp, Homo sapiens
aaggccgccgggcccgggcatggtggtctggggcaacgcggaaggtttcacgtggcaggatgactatactcagtatgtgatggaccaggaacttgcagac

SEQ ID NO: 247133 - DNA, 110 bp, Homo sapiens
tttaggtggtggcggcagtcggatagacaataccacaacaacacattttgcagagcgaagggagcaatctgaccccagcacatcactacccagactttagatttaagaca

SEQ ID NO: 247134 - DNA, 76 bp, Homo sapiens
tttgacaccaataattttcaaggaagaaaatcttagggttgggtatctacagccattggttgctgttcaggtcagc

SEQ ID NO: 247135 - DNA, 50 bp, Homo sapiens
ccaagacattgctatttaaatggatcaaatctaaatcgctgtggtttccg

SEQ ID NO: 247136 - DNA, 97 bp, Homo sapiens
tacaaagcctgaagaccccggagcccctttagccatgtggatacctacggagcacgagaaatacggcgtggataatccaggcacatggcggcactgt

SEQ ID NO: 247137 - DNA, 98 bp, Homo sapiens
aggccgcggaggagaagccggaggaggacaacgactaccaccgcagcgacgagcagactcggtgaaatacctggagtgctcagctctcacccagagag

SEQ ID NO: 247138 - DNA, 119 bp, Homo sapiens
gggcttcctcggtggcgggcatggaggcttcgcgctgccggctcagtcccagcggcgacagggagaaaactaaagttgccaaagttagccaaggagtagaagatgggcccgacaccaag

SEQ ID NO: 247139 - DNA, 75 bp, Homo sapiens
actgctagttaccaagctgaagcacttccagctccggttttacaactgcctacagcatgctttggaaagggaaac

SEQ ID NO: 247140 - DNA, 87 bp, Homo sapiens
acaccttcgtcccctttgatccctgtgtgctgaagaggagcacgtttgccgtggacgggaaagattgcaaggtgaataaagaagtgg

SEQ ID NO: 247141 - DNA, 75 bp, Homo sapiens
attgtcagaccctaaaggatcaaccctctgcatacagtaaaggcttccgagtggacctgccaatcaagtcggccc

SEQ ID NO: 247142 - DNA, 75 bp, Homo sapiens
cggaaacgggatggggagctggaccaggttacaacaacaatattcattgcttgaccaaagccatcatccaggtgt

SEQ ID NO: 247143 - DNA, 89 bp, Homo sapiens
cggcggtgagatcgtcagcgctgactccatgcaggtaatgctggaggatggaagaagcaaagggtttggcttcgtctgcttctcatctc

SEQ ID NO: 247144 - DNA, 83 bp, Homo sapiens
gtctggagtgcgtgggggaccggctgttggcggccgagagggtgacctctctgggcaaggactggcatcggccctgcctgaag

SEQ ID NO: 247145 - DNA, 83 bp, Homo sapiens
ttctctcccaggccacaagacatttcctgctcggaaccttgtttactaatttgttcctctgaacaacagggagaatatctctg

SEQ ID NO: 247146 - DNA, 82 bp, Homo sapiens
aaattgcatttttagaacctagagaaatcacactgcctgaggccaaagataaggtatgccattgcattggccttaagggaaa

SEQ ID NO: 247147 - DNA, 100 bp, Homo sapiens
atggcaagaaaatcacagcctttgtacccaatgacggttgcttgaactttattgagttggtagctggcagtgttgtgatggcttttgaagaagtatgccc

SEQ ID NO: 247148 - DNA, 100 bp, Homo sapiens
gctccgacgagctgttcgtgggccgcgcgggttacctgtgtgccgcgctggtgctcaagcagaaactcgcccaggagggaatcatcatccagggacgtgc

SEQ ID NO: 247149 - DNA, 82 bp, Homo sapiens
ctttctcacactattgaacctgtgatgaaaacatctgtaactactagcccacagtggccctgttccagtattggttatgagt

SEQ ID NO: 247150 - DNA, 90 bp, Homo sapiens
atcagaaacctggctcctggctcctggctccctactcttctaaggatcgctgtcctgacagaagaggcttttggttactccccttcccac

SEQ ID NO: 247151 - DNA, 100 bp, Homo sapiens
ctcgtcaccgccccctcctgccccttcatgcatgcgcggaggccgcctgctagcaaggcaaggcaggctgaggtaaagcggctcttccgccccattgagg

SEQ ID NO: 247152 - DNA, 82 bp, Homo sapiens
cgcgcgcagggcctgcagcgggagctggacggcgagcgcgagcggcgcgagaaactgatgcagctgtacagtgcgcgccagc

SEQ ID NO: 247153 - DNA, 98 bp, Homo sapiens
aagaaagttagatttgttggacatgctaaacagagaatacaagaggattatcttagaattttaagatacttcaggccctagactggagctggttacag

SEQ ID NO: 247154 - DNA, 75 bp, Homo sapiens
tgggcctaactccaaaagggccaatacgcatattcgagactttctacagtctctgctggatgaaccgaatcctaa

SEQ ID NO: 247155 - DNA, 98 bp, Homo sapiens
cgggctgcggcgtgtgcgcgcccgccagctgctccggagatacggtcatggaggcggagcagaccaagaccaggagcgagctggtgcataaggagacg

SEQ ID NO: 247156 - DNA, 50 bp, Homo sapiens
agttgataaagtaacagagaggttgtcctttgcaaggcacagctgcccca

SEQ ID NO: 247157 - DNA, 82 bp, Homo sapiens
tgggacccaccgctgccctcagctccgagtccagggcgagggtaagcaggaagagaacgacgtggtggagaagctgaacctc

SEQ ID NO: 247158 - DNA, 100 bp, Homo sapiens
atttttatattttattcctcttcctatccaatccctgccttttgagtccaggtggttatgatgtgattgctcaagcccaatctgggactgggaaaacggc

SEQ ID NO: 247159 - DNA, 90 bp, Homo sapiens
caaagaggctgagaaggcgtcgtcacaggaagctcctgcccctcctaaagctgaagccaaagcgaaggctttaaaggccaagaaggcagt

SEQ ID NO: 247160 - DNA, 75 bp, Homo sapiens
gccgccggcgaaggaggaggcgttgccgggtatcattgcccagtgcctaagatcttttatgttcagctcactgta

SEQ ID NO: 247161 - DNA, 90 bp, Homo sapiens
tcaactgattaccattttcaacaaactggacagtcagaagcattgatagaagaagtcagagatgccatggaaaatgaaatgagaacccag

SEQ ID NO: 247162 - DNA, 90 bp, Homo sapiens
taaaattttacataagaagttacctttttcagacggttgatgatgaagcgccggccgtgtaaatgaagatcgggtgaggagcaggacgat

SEQ ID NO: 247163 - DNA, 75 bp, Homo sapiens
ggcaaggagagacgtcgctgaggggcttgcctgaagcgaggggtgtgggccatgtttgaggattgccccagcatt

SEQ ID NO: 247164 - DNA, 100 bp, Homo sapiens
agaaagccagaggaagccattgcccactgctgccgcccagtgttatgttggagtccggggtgacctggtctcagtgaagaaatctttaggccggaatcga

SEQ ID NO: 247165 - DNA, 82 bp, Homo sapiens
ctgtgtgctccctccggcgagagactttgtcagctcccgcacagtaacattgagaggatccagaatccagatctctggaata

SEQ ID NO: 247166 - DNA, 74 bp, Homo sapiens
gagctgacagccccagatagcaatgatgatgtgaaaacagaagctgtggctgtgcatgtgagggaaccctggct

SEQ ID NO: 247167 - DNA, 76 bp, Homo sapiens
tggacatcgatagggatgcagaggatcagaaccggtacctggatggcatgatttcaggtatgctgctgaaagtggg

SEQ ID NO: 247168 - DNA, 90 bp, Homo sapiens
acaacacggtggcaagcaagtttaatcagacctgctcacacttcagaatagagaagcaaatgaagaaacacccctgccgccagtgtgaca

SEQ ID NO: 247169 - DNA, 75 bp, Homo sapiens
cgtcagctgcgctcccctaggagtgctgagcccgcggaaccgcagccatgaagaacttctgcttgggtggctgaa

SEQ ID NO: 247170 - DNA, 82 bp, Homo sapiens
atcccagcctcaggcgtgcgcggacggtgtgcggattactttctatgaagacaaaaattttcaaggccgtcgctatgactgt

SEQ ID NO: 247171 - DNA, 100 bp, Homo sapiens
cgagctttccgagtgccaggcgccggccggctgcgaagacgcggtgggccgcccctccgcctagatgacttactcaggtgtggagtgacttttgctgcta

SEQ ID NO: 247172 - DNA, 100 bp, Homo sapiens
ccagaagcgggcggcgcgggggagatggaggagaacatttgcctgcactgggcggcgttctccggctgcgtggacatagccgagatcctgctggctgcca

SEQ ID NO: 247173 - DNA, 82 bp, Homo sapiens
gctcaacttcggtgcctctctccagcagactgcgcaatgaatgtggatcacgaggttaacctcttagtggaggaaattcatc

SEQ ID NO: 247174 - DNA, 66 bp, Homo sapiens
ctactaaccagagccggctctttctcggaatggaagttggatacactttgtgacttgtacgagaca

SEQ ID NO: 247175 - DNA, 50 bp, Homo sapiens
cgcggttgcgcgcggcttggggcaacacacgtcacatggagatgggcgtc

SEQ ID NO: 247176 - DNA, 100 bp, Homo sapiens
gctgccgagggtgttcttgacgattaatcaacaggacccagatgatgtggtaccagttggccaaagaagagcctggtgttggtgcatgtgctttggacta

SEQ ID NO: 247177 - DNA, 90 bp, Homo sapiens
tcatatgtctcaggcttccatgcagcctgccttaccgttgccagtagtcatcagagtaccaaaactgatctatttctcagtaatgagtgt

SEQ ID NO: 247178 - DNA, 100 bp, Homo sapiens
caaggagaagctatagactacttctactccaccaggaagatatgaaaaacagtagctccgtatcgaatacattgacaaatggatgtgtcatcaatggaca

SEQ ID NO: 247179 - DNA, 100 bp, Homo sapiens
ttgatatgtcccaggaaaacacaaggaaaccaaatgtgtctccagagaaggtgaagcacctggaagtgagcagtgcttccatggcagaggacctctgccg

SEQ ID NO: 247180 - DNA, 90 bp, Homo sapiens
cgcctggacctggttctgccttctggacaatctttccgttccatgccattgcagtgtcaactaggcctcagttacttttcagtttgccca

SEQ ID NO: 247181 - DNA, 74 bp, Homo sapiens
caacagttaactacctcaaagaattagaggtattgaaattgttggcggagatgagttcattttgtggtgacatg

SEQ ID NO: 247182 - DNA, 100 bp, Homo sapiens
cttggcttccctcaagtctatccgagagtttgcagcaaagatcattgaagtttaattggttggggtcagataagaagaggagtgacaatcaagccaacag

SEQ ID NO: 247183 - DNA, 98 bp, Homo sapiens
agaccatcgaaggccacaggagaagaaaaaagccaagggtttgggtcctcacaagcttgaggaaggggaagtggccatgggccgagtggtgaaggtga

SEQ ID NO: 247184 - DNA, 98 bp, Homo sapiens
gcctcaagcaacagagtgagctccagagtcaggtgtgacagcatggagaagctaaaggctcttctgccaagactggagcaggagctgaaggacacagc

SEQ ID NO: 247185 - DNA, 97 bp, Homo sapiens
actggaagatctgagatctaaagctaaaattgcctttggacagtctatggatctacattataccaataacgaggaggaacatatgcagcagaaaaaa

SEQ ID NO: 247186 - DNA, 87 bp, Homo sapiens
agcgcaaggacagcgcgaggtccgcgcagcccagcgcagccatatggtgggcagtggtggtgctggctgcgttcccctccctagggg

SEQ ID NO: 247187 - DNA, 80 bp, Homo sapiens
gaagtctgccgttactgccctgtggggcaaggtgaacgtggatgaagttggtggtgagacgagagaagagcggacattta

SEQ ID NO: 247188 - DNA, 90 bp, Homo sapiens
gcctgcccttgccagccagactctgggtcgcccttgcctgcagaggagtgcacacaggaagacgtgtcttcagaagatgaagatgaggag

SEQ ID NO: 247189 - DNA, 113 bp, Homo sapiens
taccagatattggcagtagagggtgctctttctctagaggagaaacttatggagtcttactctgtcgcccaggctggagtacaatggtgcgaactcagccacctgctacctct

SEQ ID NO: 247190 - DNA, 100 bp, Homo sapiens
ccgccccatgagagttgtgggctggtatcattcccatcctcatataactgtttggccttcacatgttggttttttgcatgtctgacacccatgactccac

SEQ ID NO: 247191 - DNA, 100 bp, Homo sapiens
cagaggaaccacacgctgatcatggtctgacagcagccgctgcagcagctgctgctgctaccaatgcagctattgctgaagcaatgaaggtgaaaaaaat

SEQ ID NO: 247192 - DNA, 97 bp, Homo sapiens
aagaaccacagaattatacagatagtagttcctcttctacagagtcctcccagagttcccaagtgacagacatcacacctccagtgcaatccctgtt

SEQ ID NO: 247193 - DNA, 101 bp, Homo sapiens
ccgcaaggaggtggactacagcgactcactgacggagaagcagtggctcaaggtggtcttcgagggatagcacgaggtggtctgacaggactaacacttac

SEQ ID NO: 247194 - DNA, 90 bp, Homo sapiens
ggagggaacagagaccactggaaggagtcagataggaaagctgccaaaagagagctgatgccttgtgacttccctggctgtggaaggatc

SEQ ID NO: 247195 - DNA, 95 bp, Homo sapiens
acggaggtagtcatgatctatgacgccgagaagcagaggccccgaggcgtccgacctccgatcatgaacgggcccctgcacccgcggcccctggt

SEQ ID NO: 247196 - DNA, 97 bp, Homo sapiens
atctgctgcagaatcttataaagtattaccatgcacagtgcaagtgtgatccctcacatccacaaatctctgattggaaagaagggacagcagaaaa

SEQ ID NO: 247197 - DNA, 98 bp, Homo sapiens
ttctcaacccctacaacttattcctgtccggagacagcctaagggactcctcacaaatcccaggccgacacaacagcagagaaaacagcagacaatgt

SEQ ID NO: 247198 - DNA, 100 bp, Homo sapiens
gaagaggctcagaagcgcctcaagatggccgaggaagaccggaaggccatgggcctcgtcctcctgcctaagacggagtgcgacgtgcgggaagtggagc

SEQ ID NO: 247199 - DNA, 83 bp, Homo sapiens
gcgtgcactccgcacctcggggacattattgcgcgtggaacggctgcttttggaagcagaaaaatatggctcaggagactaac

SEQ ID NO: 247200 - DNA, 101 bp, Homo sapiens
ggaggggggagcggcgttggaggccaccgtttccagattgtaaaccatggctgtgtggatacaagctcagcagctccaaggagaagcccttcatcagatgc

SEQ ID NO: 247201 - DNA, 100 bp, Homo sapiens
cctggaggccttctgcaagaatgtgccctactcccagtggccgcgtgcagaggacgtcgaccttggtatctgcgggatggtggccatctcctggtacgcc

SEQ ID NO: 247202 - DNA, 50 bp, Homo sapiens
gaccaacataactttagtccaagatgaatgttgagtgcagctgcatctct

SEQ ID NO: 247203 - DNA, 80 bp, Homo sapiens
attcagatgtggaggagaatatatcctctaaatctgatccctgtatgatgagattcgtcagtttcgcaaggcctgtgggg

SEQ ID NO: 247204 - DNA, 97 bp, Homo sapiens
gcttacaagaaacagttctctcaatacataaagaacagcgtaactccagacatggtttctatgcttgagtctgctcaacagcaggcagccagtgtcc

SEQ ID NO: 247205 - DNA, 75 bp, Homo sapiens
gaggacccagagcaggacagcggcccggaggacctgcctctcgtcaggtgctcgcggtgaggatcgatgacctgg

SEQ ID NO: 247206 - DNA, 82 bp, Homo sapiens
tccaaccctgctacctcgcccgggggcatcaggtttttctcccgctccagaaaaagtggtacagaagttggtcctgcccttt

SEQ ID NO: 247207 - DNA, 95 bp, Homo sapiens
ctgatatttgtcattgactcacaggataacctttttgaatggcacttcacggttagagggcccccagactccgattttgatggaggagtttatca

SEQ ID NO: 247208 - DNA, 100 bp, Homo sapiens
gatgtggcgcgcggaggggaaatggctgccgaaaacaagccggaaggtgctggagaatctggtaaaagcaccattgtgaagcagatgaggatcctgcatg

SEQ ID NO: 247209 - DNA, 101 bp, Homo sapiens
tttgccagtggaggcttccaggtgaaactctatgacattgagcaacagcagataaggaacgccctggaaaacatcaggatctagtgaaaagccatttgatg

SEQ ID NO: 247210 - DNA, 99 bp, Homo sapiens
gttccggcccgaggacaccgactaccagcagagcttggggcttccttggtcgcacccaccacctgcctgcccactggtcagccttcagggaccctgagc

SEQ ID NO: 247211 - DNA, 100 bp, Homo sapiens
agtctgtctgttcgcgatcctgccggagccccgccgccgccggcttgtgtctttctcgagaagcaggtggaaacatgagcattcagtttcttggtacagt

SEQ ID NO: 247212 - DNA, 100 bp, Homo sapiens
agaaaggtacctgggttcaactaaagcgccagaagcctctgatatgtcagaaccatgctgtcttccatgagacttcctttgtgaagagcatccatttaaa

SEQ ID NO: 247213 - DNA, 100 bp, Homo sapiens
agatctccaagctccgcaagctggaggcctcgggcaaggggccagaaccacaccttcatcaagcggtccgaggtggaagaagtggattttgccggctggt

SEQ ID NO: 247214 - DNA, 99 bp, Homo sapiens
cccgtcttatgggacttgaggccctcaagtacaagttgtgcaaagtgaggaagattactgtgggagtgaagggaatccctcacctggtgactcatgatg

SEQ ID NO: 247215 - DNA, 100 bp, Homo sapiens
ctgtgcagtggcacctgcgcgaagctggccaaagcctgcccagacggctcacctgtgcgggatggaacaaaaggtccttccatagtgacgccccccaagg

SEQ ID NO: 247216 - DNA, 75 bp, Homo sapiens
caacactgctgacatttctcagagatttcaaatcatgaaggttgataggggaagaggagcacagcagtaacgctg

SEQ ID NO: 247217 - DNA, 89 bp, Homo sapiens
agaccgtgaccgagagcgtgaccgagagcgcgaatatcgtcatcgttagaagagagctggcggtcaccatggcaatgcgggagctggtg

SEQ ID NO: 247218 - DNA, 118 bp, Homo sapiens
caaggtgctgagccggcgcggggtcggcgctgggctggaggcggcggagcgcgagagcttcgagcggactcagattactgattttgggcactccaagattttgggagagacctctctc

SEQ ID NO: 247219 - DNA, 76 bp, Homo sapiens
gcgcccgtccccggcagcgacaatgaggagtacaaaccaccaggaacccgtaaacttcataacattcttggagtgg

SEQ ID NO: 247220 - DNA, 99 bp, Homo sapiens
ggatgaccagcgcgaccttatctccaacaatgagcaactgcccatgctgggccggcgccctggggccccggagagatacagcatcatgcaggcctgctg

SEQ ID NO: 247221 - DNA, 76 bp, Homo sapiens
gacccggtgtggagagcggtgctgaggctacgcgggctggagactcaggattaatgatgttttgcagcagttttct

SEQ ID NO: 247222 - DNA, 82 bp, Homo sapiens
ctgcaagctctttgacacacagcagttcttgtcagaccccccaaagacacacgtgacccaccaccccatctctgaccatgag

SEQ ID NO: 247223 - DNA, 113 bp, Homo sapiens
atcctggagctgcccggagttccgctcctgcgggcttagcaggaaagggtgcctaagacggaatcagtccccaatgcctggaaattcctcattggattactgtgttttaaaca

SEQ ID NO: 247224 - DNA, 100 bp, Homo sapiens
tggtgacggaggacgatgaggcgcagattgactttgaagatgtgattgcagaaccagaagggacacacagttttgacggcatttggaaggccagcttcac

SEQ ID NO: 247225 - DNA, 75 bp, Homo sapiens
agatcaacctgtaaagttgcctgccgtatggagtatcacaaccctcaatggtcttgactcagatgaagaactggg

SEQ ID NO: 247226 - DNA, 50 bp, Homo sapiens
ccgcctggagagacagacacgtgatcaagtcttccataccagggaccagg

SEQ ID NO: 247227 - DNA, 50 bp, Homo sapiens
gcagacatcaccgacttgttaaaagaagccactgaggcggctcccagctg

SEQ ID NO: 247228 - DNA, 75 bp, Homo sapiens
gaaaatccaatgtttgcttgtctggaaatggattatgaggctggatgacaccaaaatcctcccaggcaacatgaa

SEQ ID NO: 247229 - DNA, 100 bp, Homo sapiens
gggtaggcctttgtaaaattgacagagaggggaaaccccgtaaagtggttggttgcagttgtgtagtagttaaggaaggggaacagtttgtgaagaaaat

SEQ ID NO: 247230 - DNA, 100 bp, Homo sapiens
acactctaagagcccaggaaaaacatggccttcaacctgctctgcttgtacattgggcagaatgccttcagaaaacgttccgccatggagtcatagttgc

SEQ ID NO: 247231 - DNA, 119 bp, Homo sapiens
gtgattctgacctctttcactcacccagtgatgacatggacagcatcatcttcccaaagtacaaggcgagtggataattccaacacaagactggcagtccaaattgaaagagatccagg

SEQ ID NO: 247232 - DNA, 74 bp, Homo sapiens
gtgaaccaggtcatttaaccgccttcagcttggatcctagcatgactatacattgtgacatggtcattacatat

SEQ ID NO: 247233 - DNA, 111 bp, Homo sapiens
ctctggacagggacagtgggcagtgctcccggaacacaagctgtgaaacactagataacgaaggaggcccaacttcattcaataaggagcctgacggatttatcccagacg

SEQ ID NO: 247234 - DNA, 82 bp, Homo sapiens
taagagatatctgcaatgatgtactgatcatccagacttgaaacatatcgacccagtggttttaaaacattgtcatgcagca

SEQ ID NO: 247235 - DNA, 100 bp, Homo sapiens
tgggcctgacctcgtgaacatctcccatttgaatctcgtggctttccaagaagaagtggccaagtttggaaattttagcattcaggtgccaggaatgcag

SEQ ID NO: 247236 - DNA, 80 bp, Homo sapiens
tgttttagtgctttttatttttccccaattcagcagagaatattttcaaggggggccggagcctcaacagaaagctcctt

SEQ ID NO: 247237 - DNA, 96 bp, Homo sapiens
agaccaggaagatctgcatggtgggaaggacctgatgatacagaggttatgatgtgattgctcaagcccaatctgggactgggaaaacggccacat

SEQ ID NO: 247238 - DNA, 100 bp, Homo sapiens
gtggaggcttatgatccccagacaaatgagtggacccagggcttccgttacaagatgaggtctgtgtatgctcacttccccatcaacgttgttatccagg

SEQ ID NO: 247239 - DNA, 100 bp, Homo sapiens
tatctgcggatttggcctttccttgatcaaatggatccttattgtcagggttgatggaaatcacaatcttctgacaaagctttctctggaagaggaaaac

SEQ ID NO: 247240 - DNA, 75 bp, Homo sapiens
ggtgaccgagcacccgcctccgggcatcttcaactattgaagagggcagtaaagccgcggcggtcgacaagttac

SEQ ID NO: 247241 - DNA, 74 bp, Homo sapiens
atactgattggatgctgctcaaaatcagcctacatgccatctttgtctgaagacctgattttgtgtcagttgac

SEQ ID NO: 247242 - DNA, 83 bp, Homo sapiens
atggtcgactacaagaagagggcggagcggagacgggagtattatgaaaagatcgttctgcggcatgaggaatttgaagaagg

SEQ ID NO: 247243 - DNA, 100 bp, Homo sapiens
ccgaggacttcggctacagtgctttaggcattttgttcccaacatcacctttggtcaccctgtggtagaaagccttcgaaagcagctaggccaggaccct

SEQ ID NO: 247244 - DNA, 78 bp, Homo sapiens
gaagatccactaaaggaggccatccttccgccttcttctgcaggagtcaggttcaaaccttgtactactcagctgatc

SEQ ID NO: 247245 - DNA, 89 bp, Homo sapiens
ctccacgagtgggaatttgctccagcacttcacggactgcaagcgaggcacttgctaactcttgggttaccccacagcctatccagcag

SEQ ID NO: 247246 - DNA, 100 bp, Homo sapiens
ggagattgacgcagagtgggcggcggtggtggctgcagagactgcaagtctggaagaacagctgcaaggatggggagaagtgatgctgatggctgataaa

SEQ ID NO: 247247 - DNA, 82 bp, Homo sapiens
ccgtgaccgagagcgtgaccgagagcgcgaatatcgtcatcgttagaaggcaacaagattgacctggctgaaaggagagagg

SEQ ID NO: 247248 - DNA, 95 bp, Homo sapiens
gctattgaaccaccaaaagtccattatgaaactgcggccctccaggcactgaagcgtaagaagaggtatgagaagcagctggcgcagatcgacgg

SEQ ID NO: 247249 - DNA, 108 bp, Homo sapiens
cagaccctggagcctcagttggaagcagccgatccagcctgcggagcctgtggggcagcaaatgcagccctgaggatttggctactgcatataacaacagggggcaaa

SEQ ID NO: 247250 - DNA, 90 bp, Homo sapiens
ttccgcgaggacatcacgtggaggcggccccaggaggagaacatttgcctgcactgggcggcgttctccggctgcgtggacatagccgag

SEQ ID NO: 247251 - DNA, 88 bp, Homo sapiens
atgatctttcggaaggagccatttttccatggacatgacaattatgatcagggatcatagacggtatttctatgtaaacgaacagtcg

SEQ ID NO: 247252 - DNA, 100 bp, Homo sapiens
ctactttatagtcctgattcaagtgttggcggatggaagggaggagactcctgaccctcagaatgatcttaagaagcatacagctgatgaaaatccagac

SEQ ID NO: 247253 - DNA, 100 bp, Homo sapiens
tagaggtaatatttcacgtgtcaacaagaatgccttctgattctgatgattctttgaccaaaaaagaacttaagagatttgagaacttcataaaatctcg

SEQ ID NO: 247254 - DNA, 83 bp, Homo sapiens
cagtttccaacaccttttggtggcactcaaggagttgcccctggtcctgtaattggacttcaggcaccatctactggtcttct

SEQ ID NO: 247255 - DNA, 89 bp, Homo sapiens
gacaaagagatcatagccgagtatgaaagtcaagtcaaagaatcactgcagcccccctcgccctgagccagagcaccccgggtcccgcc

SEQ ID NO: 247256 - DNA, 83 bp, Homo sapiens
gccggggacacccagtggtccagggcctacttggaagtgcaccagcaggagcaagagaaactccaggggcagataagggagtc

SEQ ID NO: 247257 - DNA, 92 bp, Homo sapiens
ctgctgcccgcgtccgaggctcgcgggcggcgggcccgggaagtgctctctggcgtggtggtcatatcgagtaaggattcagtccaacacca

SEQ ID NO: 247258 - DNA, 100 bp, Homo sapiens
ttttgcccacccttgggaaggattggacccatcagggcatcgctaagctgtaccataaagtgagccaattttctggcatccttaaatcttgtgtcaagga

SEQ ID NO: 247259 - DNA, 100 bp, Homo sapiens
tgagtggtggttcccaggaattataggagcaggtctgatggtgtggatgaggtcaccattgtcaacattttgaccaaccgcagcaatgcacagagacagg

SEQ ID NO: 247260 - DNA, 75 bp, Homo sapiens
aaggccagagataagaacaccaaccaaattgtcgccattaagaaagtggcgacatgtctaagaatgtgagccagt

SEQ ID NO: 247261 - DNA, 75 bp, Homo sapiens
acacatcgatggagcagtgatcatcaccactccccaggccaaacgtaccaagaaagtcgggatcgtcggtaaata

SEQ ID NO: 247262 - DNA, 105 bp, Homo sapiens
tctctatggctgtcagaggtgggcggctttgaccgagaggctgctggagctcgtgtttggacgcgcatggtctacatggctggacttgtttttgctgttggtggc

SEQ ID NO: 247263 - DNA, 75 bp, Homo sapiens
ccgggagagtagcagtgccttggaccccagctcggaggagcttctacgtgtatgcgggcatcctggcactgctca

SEQ ID NO: 247264 - DNA, 98 bp, Homo sapiens
acagaagttgctgctgacgctctgggtgaagaatggaaggtggacttaaatgaagaagaaactatattgatcatcaggcgtctacataaggtgttaag

SEQ ID NO: 247265 - DNA, 99 bp, Homo sapiens
ccgggatcgtgaccgagaccgtgaccgagagcgtgaccgagagcgcgaatatcgtcatcgttagaaggacacaactcagatgggaagttcatcgcccgg

SEQ ID NO: 247266 - DNA, 50 bp, Homo sapiens
cacaactccagtgctaactcaacagtttgctgctttgtggtgcacaagcg

SEQ ID NO: 247267 - DNA, 82 bp, Homo sapiens
ctgcaacatggctagagactgccgggactggtcagatgaacccatcaaagagtgcggtgagaagccctaccactgcaactgg

SEQ ID NO: 247268 - DNA, 111 bp, Homo sapiens
gtggcccctgcagcggaaccggacccagtccctgagccgcccctacacccacaggtcaaaatgcagatcttcgtgaaaacccttaccggcaagaccatcacccttgaggtg

SEQ ID NO: 247269 - DNA, 100 bp, Homo sapiens
taaccatacttagggaggcagacgtcaaaggcaagtacatctgtattcaactgggtaaagatacttggatgatattgatgatgagatggacccagagata

SEQ ID NO: 247270 - DNA, 99 bp, Homo sapiens
gggagatgcagcatcccagtttttggtcttctgtcaaaaacacagggatgagaattcttccatctctatgacaacaagcccattttagctttctggaga

SEQ ID NO: 247271 - DNA, 74 bp, Homo sapiens
atttagagctgcggaacaggacgccctctgatatacctactggagcaggatttcccaggcatgaggattggtcc

SEQ ID NO: 247272 - DNA, 75 bp, Homo sapiens
ctcttacgtctgcggaagtgcagctgcctcagttcttagcgcaggtataaatgaccaaggattgtacagagttgt

SEQ ID NO: 247273 - DNA, 98 bp, Homo sapiens
tccagtgcttgacctacacaccacctctagccaactacctgctctccaaggagcatgctcgcagcttccgaaggagcttacgacatcatcctcccacg

SEQ ID NO: 247274 - DNA, 75 bp, Homo sapiens
gtctgacagccctgtgtgacaccaagataagtaacgtctgagcgggaaagttccgaagaataggagtggctgagt

SEQ ID NO: 247275 - DNA, 98 bp, Homo sapiens
gccttccagctgtttgaccgaacagggtgacggagctgctccccccgttccagagactcatccagccggaggagatgtggctctaccggaacccctac

SEQ ID NO: 247276 - DNA, 129 bp, Homo sapiens
tgccggtccgctatttctacctgcaggcggtcaactcggagggccagaacctcactcgctctcccgcagatggaggagatgtataagaaagctcatgctgctatacgagagaatccagtctatgaaaag

SEQ ID NO: 247277 - DNA, 111 bp, Homo sapiens
cgcagcgccccgcagggcgatggacggccgaaccccgcgcccgcaggacgccccagccaggtagaagatgacggtgaaatgttccacacactggatgatggccacacaaga

SEQ ID NO: 247278 - DNA, 74 bp, Homo sapiens
tcttgccctcatcctggttctggaatcctcagttcaagaaatggctgcaagcaactgacctcactagagaagtg

SEQ ID NO: 247279 - DNA, 82 bp, Homo sapiens
ggtgtccattttctgatggctgatggggaacagtccctaccagcctggaaaacagaccagcctctgtcactccagagataac

SEQ ID NO: 247280 - DNA, 80 bp, Homo sapiens
aagcagcgggagaactacctgggtcagcccaaggccaaccccactgtcactctgttcccgccctcctctgaggagctcca

SEQ ID NO: 247281 - DNA, 75 bp, Homo sapiens
ccagctcggcccgcgggggagccccgggagccgcacgtaacaaatgtggcaattattttggatctatcacctgtc

SEQ ID NO: 247282 - DNA, 98 bp, Homo sapiens
tagtgttttcttatttagccggagtgagaagcaagaaggccctggacacagcaatatctctgggctttcacaggagtagctcggagaggaggaaggag

SEQ ID NO: 247283 - DNA, 75 bp, Homo sapiens
tcatcaacatcaactacgtccctctgaagcagcgtgcagggtcaaagacagccggccccccatgtcagtggtcta

SEQ ID NO: 247284 - DNA, 50 bp, Homo sapiens
gagcggagccaagatgcgaatgggaagtgagttgctgaatgagcttatgg

SEQ ID NO: 247285 - DNA, 83 bp, Homo sapiens
gaggcggcgggctggagacatggaccgcggcgagcaagctgccaaatggtgtcacttaccacactggaacatatcaagaccgg

SEQ ID NO: 247286 - DNA, 75 bp, Homo sapiens
cgacgcctcagccgcttggggcccgcacggaccctctacttcagtcatggaaaatggaagatttgcaaaatacaa

SEQ ID NO: 247287 - DNA, 75 bp, Homo sapiens
cctggaggaacttggaaatcaaactcagaagtgcacggctgtctataacgtgctgccgggtctcaggatggagga

SEQ ID NO: 247288 - DNA, 89 bp, Homo sapiens
tctacctggtgtcaatagtggttgcggttcccctatgcgtgtgggaattacagaaactggagaactccatccgccacaacctttccctg

SEQ ID NO: 247289 - DNA, 75 bp, Homo sapiens
ccccggcgaccacggatgagcccggcctcccttttcatcaggacgggaaggccgaatacatcaagcaatggtaac

SEQ ID NO: 247290 - DNA, 100 bp, Homo sapiens
aacacaaaccccaagtcctccttgccaggccttcaaccactatctcagtgcaatggtgaatggtagtgtctagaaagggtatgtcccttcaagagagagg

SEQ ID NO: 247291 - DNA, 75 bp, Homo sapiens
aaattgtttattcttctctggatctagaccaggaccgccgggagagcctgcccacctccccaccctggacgccgg

SEQ ID NO: 247292 - DNA, 100 bp, Homo sapiens
ctcgccttgtgtcaatggaggcacctgtcggcagactggtgacttcacttttgagtgcaactgccttccagaatcctcactatggatgggctcattgagg

SEQ ID NO: 247293 - DNA, 90 bp, Homo sapiens
gacgagatctagaatcaactgagagagatgcttaaaaatcaccagttactttaatgactgtgctccattgaagtgacttgtgaatcagcc

SEQ ID NO: 247294 - DNA, 112 bp, Homo sapiens
aagaggacagcacttccggtcacgccatcgttgctgccttcttcgtcaaggtgctggagaatctggtaaaagcaccattgtgaagcagatgaggatcctgcatgttaatggg

SEQ ID NO: 247295 - DNA, 74 bp, Homo sapiens
cggcggaaaatagcctttgccatcactgccattaaggagccagatgaccaagatgctccagatgaacatgagtc

SEQ ID NO: 247296 - DNA, 51 bp, Homo sapiens
aaaacatacaggccggagcttatcaaagtattatcagaaaatccacccagc

SEQ ID NO: 247297 - DNA, 100 bp, Homo sapiens
cggggagttgcggagcccgcccgccggcagcgccgctccccagggagggagtccgcagcctgagagcttggggcttccttggtcgcacccaccacctgcc

SEQ ID NO: 247298 - DNA, 98 bp, Homo sapiens
gggaatgagcctctttgatctcttccggggctttttcggctttcctggacctcggagttttaaccatgctgaccaacgaaactggctttgaaatcagt

SEQ ID NO: 247299 - DNA, 80 bp, Homo sapiens
taacaaacgagggttcccgggattggaccgacgcagccatggcagctgaaaaagttggatgaagatagtttaaccaaaca

SEQ ID NO: 247300 - DNA, 75 bp, Homo sapiens
cgcgaccgccgaatcgctcctgcagcagaggccaagtcctgtatctgccatgtctgtggcgtccacctcaacagg

SEQ ID NO: 247301 - DNA, 74 bp, Homo sapiens
ggggacttctgcattcaggttggcaggagttgtatcccgcattttgtattcacaacggaggctccgaccttgag

SEQ ID NO: 247302 - DNA, 100 bp, Homo sapiens
atgctgaagaggacccaccgtgggctccacgttcttacttggaaaaggtttcagaagctatctcctgagcagtgtgtaattctctcctggctgtttgatg

SEQ ID NO: 247303 - DNA, 76 bp, Homo sapiens
atcaggaaatatgtgtctcagtattatcctaagcttagagtggacatcaggttcttcagatagatcctgaagttac

SEQ ID NO: 247304 - DNA, 98 bp, Homo sapiens
ctgtggaaagaagttgcaaaacactgggatctgtgccagttcagaagcaggcgagcctcttccctgatgaaaaagaagataacttgctgggtaccaca

SEQ ID NO: 247305 - DNA, 96 bp, Homo sapiens
tgtcgacgactgggacaatgagaacagctctgcgcggctttttgagcggtcccgcatcaaggctctggcagaagacttctggatactgaagatgag

SEQ ID NO: 247306 - DNA, 82 bp, Homo sapiens
gctggagtccgcgcctccctggcaaaatcaccaggacagccaatacaagtggtttatgtaccatcccatctctatcacatgg

SEQ ID NO: 247307 - DNA, 50 bp, Homo sapiens
ggagctgcctgctgtgaacctgaagatgcaagtgctgctggaccaggcgg

SEQ ID NO: 247308 - DNA, 105 bp, Homo sapiens
gcgtccgccgattcctcctccttggtcgccgcgtccttggctggcgttgccctctggtggtcagaagatgctgtgctgtctcgttaggatgaatggattaaaatg

SEQ ID NO: 247309 - DNA, 95 bp, Homo sapiens
gttggagggggctgttgatcgccgcgtttaagttgcgctcggggcggtttggctgctgctctgctgctcactatagcgccaagtggtcacacgaa

SEQ ID NO: 247310 - DNA, 100 bp, Homo sapiens
tggttcccggcgagctacgtgcagttgctggaggaatctgaacctgtgatgttaagaaatcagtaaatattaaaaagaagatggatgcaagaaggatgaa

SEQ ID NO: 247311 - DNA, 88 bp, Homo sapiens
cttcggacgggaggggcaagccagccatcctgggaccccaggcgtgcaggttctctttgaggccataaccagcagaccacagcattca

SEQ ID NO: 247312 - DNA, 103 bp, Homo sapiens
cctgtgtactttccatttgccttcctggggccgttgctccagggagaactgcaaatatcttcatccacccccacatttaaaaacgcagttggagataaatgga

SEQ ID NO: 247313 - DNA, 98 bp, Homo sapiens
ttgcaacacgtggtagtgaactgtgaggagtttgaggggtctgaagactgaaagagtcgaatggtttgttggcagggaagagtgacccattttgcttg

SEQ ID NO: 247314 - DNA, 83 bp, Homo sapiens
caagaagcagcccaaagtcgaatgattcagacttgcaaggtagcctttccagtaaatatatgactcagggaaaagcctcagcg

SEQ ID NO: 247315 - DNA, 80 bp, Homo sapiens
cgccccccaggaggggcgagagggagccgcagctgatgtcaggaagatgagaatgtgcctactgctcctgatcctccaag

SEQ ID NO: 247316 - DNA, 100 bp, Homo sapiens
aaaggggaagttgctgcgctctgctcggtgtcgtggcctcgcagatgtgagaactcaacagaggcaaaagcagtagattctaacaatcagtcgaagtccc

SEQ ID NO: 247317 - DNA, 74 bp, Homo sapiens
gccgcccggaccccggcgcgctgaatgcaggcgtccgacctccgatcatgaacgggcccctgcacccgcggccc

SEQ ID NO: 247318 - DNA, 75 bp, Homo sapiens
cgaaagccaacggcgaggactgcctcaaccagagtgtgaacatggctacgcctcttcattcccgtccatgccgag

SEQ ID NO: 247319 - DNA, 90 bp, Homo sapiens
cttcatatggaatctcctacctgcttgagggattcaagaagtcctggtgtcattccacacatccacaaatctctgattgggaagaaagga

SEQ ID NO: 247320 - DNA, 100 bp, Homo sapiens
tgctgcagtctgagctggaatcctgtaaggagctgcaggagctggagcctgagaataaatgttacctgggcttgtatgtgttctatgtggtcactgtgat

SEQ ID NO: 247321 - DNA, 100 bp, Homo sapiens
cagctgggccgccttcaacatcatagaagtgatgagtgcctccaagttcaccttcaagttatacatgggaagctgttgataccaaaaataatgtacttta

SEQ ID NO: 247322 - DNA, 100 bp, Homo sapiens
ggatcagttggtagaaataatcaaggaagagctaaggagcaaatccaagatctgtgccaatgtgttttgtggagccggccgggaatgtgcagtcacagag

SEQ ID NO: 247323 - DNA, 114 bp, Homo sapiens
cgccttcgagatgaaggagttgccgcagctggtggcctcagtcatcgagagacaccattcgcttttcacccaagatgatttgatgtcttataaaactctgatgaaccatgatgg

SEQ ID NO: 247324 - DNA, 100 bp, Homo sapiens
cacatcttcccagctttggttggaagacctattatcagatcaaccaccaaagtgggaaacattgaaatcaagtttatttggcaacccaaggagttaatcc

SEQ ID NO: 247325 - DNA, 76 bp, Homo sapiens
ttccttcttggaacaatttatgatagaggttgccaagagggtgatcctgttgtcgggcacaccagccatgtcccgg

SEQ ID NO: 247326 - DNA, 82 bp, Homo sapiens
ttcaaactggtcaaatgcactgtccagacggagatccggttgcattaaaatcctcccctactgaaagaaacggaggccagga

SEQ ID NO: 247327 - DNA, 89 bp, Homo sapiens
agaatttccccagccctgtggatgctgcattccgtcaaggtcacaacagtgtctttctgatcaagatttctgcatgaatccccagacag

SEQ ID NO: 247328 - DNA, 75 bp, Homo sapiens
gagttgaatcattgttcaaataaggttggaagcgaagtggaagcactgaacctccaggtgacatctctgtttaag

SEQ ID NO: 247329 - DNA, 90 bp, Homo sapiens
gttgagttagagtctggaagacctcagaagacctcctgtcctatgaggccctccccatggctttaggtcacaatccaaggtccggctcct

SEQ ID NO: 247330 - DNA, 74 bp, Homo sapiens
gactgtccgcctggagcgttacaaggccttctacattaccggtcagcccaaggccaaccccactgtcactctgt

SEQ ID NO: 247331 - DNA, 100 bp, Homo sapiens
ctttatcatctgagtccttgtcagaatcagagtatattgaggagaaagtgactgagaccgaagatgatagtgatagtgacagcgatgatgatgaagatga

SEQ ID NO: 247332 - DNA, 56 bp, Homo sapiens
ggagaatcgtgaccaagatgtggaacaaacaccttccaccatgaccacctcagcaa

SEQ ID NO: 247333 - DNA, 119 bp, Homo sapiens
cgcggggccctgcggtagcctcaggcccctcccctggacccgccgcagagccaggtcaaaatgcagatcttcgtgaaaacccttaccggcaagaccatcacccttgaggtggagcccag

SEQ ID NO: 247334 - DNA, 104 bp, Homo sapiens
ggagctggacctggaggcgccgccgcgacagcagcagccatggaggacgagatgcccaagactctgtagatgctggctggattggattttggtccatagttgga

SEQ ID NO: 247335 - DNA, 90 bp, Homo sapiens
agcgaccccggcgtggaatccgcaacagcggatacgatgacattctgagcatgtgagacctgaggactgcaaacagctataagaggctcc

SEQ ID NO: 247336 - DNA, 100 bp, Homo sapiens
ctgaggacttaaatgaagccactgattagcaatttaaagatcctctccaagctccatggtaggagtcaatctgccacagaaggctggtgggtttttgatg

SEQ ID NO: 247337 - DNA, 90 bp, Homo sapiens
acagaactcacacgggagagagaccctatggctgtgatgagtgccatcgaagacggcaatttggaggaaatggaagaggaagtacggctt

SEQ ID NO: 247338 - DNA, 100 bp, Homo sapiens
agagagaacagcgtttcagttttggtcatcggaagtggtgccttcagcacagctgtgaacttcacagaagttaatgaagaaaacaaaaacgatctcttcc

SEQ ID NO: 247339 - DNA, 83 bp, Homo sapiens
ccctgcgctgccgccgctctgaggagttaaaggtgtccctacctgcaccggacgacgggggacacagaacgcaagtaccacct

SEQ ID NO: 247340 - DNA, 89 bp, Homo sapiens
gaacaggaagttgtggctgaggttcagattcaattagcagagcctcacagacaatggccaaatgtgtcaaagctgtcacagagggtgcc

SEQ ID NO: 247341 - DNA, 75 bp, Homo sapiens
gggactgaagattggaatgaagatatcaccggggaacccttgatccgtcgatcagatgataatgaaaaggccttg

SEQ ID NO: 247342 - DNA, 85 bp, Homo sapiens
aggaactggcccggaaacaggaggacgagtacgagagggcctccaaagtggaccagtttgtgacgcgcttcctgctgcgggagac

SEQ ID NO: 247343 - DNA, 75 bp, Homo sapiens
gttcgagaacgaccccgagacgagcccagccctgaccctgctgctggtggacgaggcctgctggctgaggacgct

SEQ ID NO: 247344 - DNA, 75 bp, Homo sapiens
gcctcatattttgtgtacacagtccctgtacagggtttctgacctgtgataagccaatggacacgtcagtgttat

SEQ ID NO: 247345 - DNA, 83 bp, Homo sapiens
cgcagccttgggcctcgcgccggctatggccgtgccctggggctgagccctcagcgggctgacgcacgaggcacacaggaagg

SEQ ID NO: 247346 - DNA, 74 bp, Homo sapiens
actgcgttgaattgctcaacagcatcttggaagtccttagctaccaggatgcgaatttgccattttcagtggaa

SEQ ID NO: 247347 - DNA, 74 bp, Homo sapiens
gcgccggcctcctcagtgcgaagaagctgcagccgcacctggccaaggatgacctcccttgccacttcacttct

SEQ ID NO: 247348 - DNA, 75 bp, Homo sapiens
tgaagagctatggtgaaacaccactgaagcattgccaaggttgtttctgttgaaaaggaaaaaaataaactgaag

SEQ ID NO: 247349 - DNA, 87 bp, Homo sapiens
aaagctggttttgctggtgatcagatccccaaatactgctttccaaactagaatttggataaagagagggcagtgctactacaacgc

SEQ ID NO: 247350 - DNA, 110 bp, Homo sapiens
tttatcaatggccagtggggaacaatctgtgatgatggatggactgataaggatgcagctgtgatctgtcgtcagcttggctacaatcagcagtcagcagaggaccttgc

SEQ ID NO: 247351 - DNA, 74 bp, Homo sapiens
gcgctactctctctttctggcctggaggctatccagcagaacggagaccaacctgggctgaagaaagaagatta

SEQ ID NO: 247352 - DNA, 100 bp, Homo sapiens
aaatgcacaacatcctgaagaaataccaccagaaaaccatgagctgttttccaagagcttcatctccatggaagtgcctgtcatggtagtaaatggcaag

SEQ ID NO: 247353 - DNA, 75 bp, Homo sapiens
atgtccaaagtggaccaagatctcattatgactcagaaaaagaatgctgcctttttatatggtcttggtttggtc

SEQ ID NO: 247354 - DNA, 100 bp, Homo sapiens
ctgtacaagaggagagtgaagaggaagaggacacagcattgttggttttgccatgtactattttacctatgacccgtggattggcaagttattgtatctt

SEQ ID NO: 247355 - DNA, 74 bp, Homo sapiens
tttgaaagcgccccggaatgacctgtcgcctgccagctctgtgcttcaccgatatagacacattttgggattgt

SEQ ID NO: 247356 - DNA, 75 bp, Homo sapiens
ggaagcgctgcaggctcccaacgtggactggttgcggacgctgcgagcaaaagatacagatattgtggatgaagc

SEQ ID NO: 247357 - DNA, 75 bp, Homo sapiens
ccgcgtggaaggctcatctatcggttggtacgggggcaacagtagccacattggctgatgcttcagaattgccaa

SEQ ID NO: 247358 - DNA, 82 bp, Homo sapiens
tgctgtgtttctgccggatcagatgagcagattggttagtgaagagtcctggaacagcacaaactcaacaaggaccagtggg

SEQ ID NO: 247359 - DNA, 90 bp, Homo sapiens
ttcacctccagagacctgtttcggagctttgcccaggtgctggaactctccgcagaggcaagcaaagaggcagccttggcaaaccaggaa

SEQ ID NO: 247360 - DNA, 98 bp, Homo sapiens
tgagccagaaacatgctgagcctttgacagatattaataaggcagcggaaagaagaaatatgaatacggctccatcaagacccagccccacacgaagg

SEQ ID NO: 247361 - DNA, 95 bp, Homo sapiens
cttgggttttttgtggcttccttcgttattggagccaggcctacaccccaggtggaaagccagatgacatcaccgtccttctttcaatagtggct

SEQ ID NO: 247362 - DNA, 136 bp, Homo sapiens
ggcaagaagaagctgtatcttatctatggaagataaagcatggagttggctaatggatgctgaataactgaagtgaagtgatggactccgatttggagagtagtaagacgtgaaaggaatacacttgtgtttaagc

SEQ ID NO: 247363 - DNA, 82 bp, Homo sapiens
ctggacgcagcaagcggggcgctgtgtccccaagctccccgtcctcgggtgacttaagagattaaaattaatttggttgctg

SEQ ID NO: 247364 - DNA, 76 bp, Homo sapiens
acgacaccggctacttctcagctttaccatccctggaggagacctggcagcagatggctcggactcaaaagaacaa

SEQ ID NO: 247365 - DNA, 83 bp, Homo sapiens
atccatctgtcttagcaaggctgtcatcacagaaatggccagcctcaaacgacaattcacggaactgttatcggatatagggt

SEQ ID NO: 247366 - DNA, 101 bp, Homo sapiens
gaaatggctcatttgggaaactacgatagtgggacagcagaaacaccagaaacagatgaatcagtgagtggaactgctcgcagaaagaagaaggtggttca

SEQ ID NO: 247367 - DNA, 82 bp, Homo sapiens
ggaggctgtggcaatggaacaggcttgagaaacaggagcagtatagcatcaagttctagaggaattgggagccattgcaaat

SEQ ID NO: 247368 - DNA, 75 bp, Homo sapiens
ttgaccaggtttccagtgaaataaggtgtacaggagagagttaatctttctgcacctctgctacctaaagaagac

SEQ ID NO: 247369 - DNA, 90 bp, Homo sapiens
gcttcatcaaaaatagtgatagctttgataaacatcgctattgcggttccgaggcagtgggaagagatgcggcccctggacatcgtcgag

SEQ ID NO: 247370 - DNA, 50 bp, Homo sapiens
gggagagcaggcgtgggcaagtcagggtgtgtttatggaagacaaactga

SEQ ID NO: 247371 - DNA, 74 bp, Homo sapiens
caaacatagagaattctgggcttccacacaactccagtgctaactcaacaggtaaacattggagaactgatggc

SEQ ID NO: 247372 - DNA, 100 bp, Homo sapiens
tgaagaccagtcccttgaaaaagacagtgacgacaaaacaccagatgatgaccctgagcaaggaaaatctgaggattctggattttggactggctcggca

SEQ ID NO: 247373 - DNA, 50 bp, Homo sapiens
cgtatgtacatagaccgcctacaggaggctgcctgctcgaggagggcctc

SEQ ID NO: 247374 - DNA, 100 bp, Homo sapiens
ctttcaatgtggggaagcactgcaggctggagacgtttaaaagaccgtttcaaaagagatttacttttttaaaggactttatctgaacagagagatataa

SEQ ID NO: 247375 - DNA, 100 bp, Homo sapiens
tctcccagaatttgaactggccctttggtgactctgacatcattagaagcatgccagaacagactggtgaaaagtaaaccttttcacctacaaaatttca

SEQ ID NO: 247376 - DNA, 100 bp, Homo sapiens
gagagactgaaaagacatctaatttcattgctcggcagaccctgaagatgtagagagggggaacgaccacgggacgccaatccccacctctgataacgat

SEQ ID NO: 247377 - DNA, 120 bp, Homo sapiens
gagcccgagccgggagagggagccgccgcagccgccggcgctgtggagttagaacctggcccattagatgaaacccagatcgctactatattaagagaaatactgaaaggactcgattat

SEQ ID NO: 247378 - DNA, 75 bp, Homo sapiens
ctggagtgtactggaagaaatggtgcagtccagacctgcctagagctggaacgttacctccagagcgagccctgc

SEQ ID NO: 247379 - DNA, 75 bp, Homo sapiens
gatttacaaactggccaagaagggccttactccttcacagatcgaccccccaagcccactggtgaaacagctgag

SEQ ID NO: 247380 - DNA, 90 bp, Homo sapiens
caggaactcagcagagaaactttgtggacagagccccagaataaccccgttgtcccagctcaggatggaccctcagaaaagctgggtcag

SEQ ID NO: 247381 - DNA, 82 bp, Homo sapiens
accagcttttgtacgagtctgggtggaactcctcataatacgcggaaaatccgccagagctactttgcctctgtgtcatatt

SEQ ID NO: 247382 - DNA, 74 bp, Homo sapiens
tcttaaccaccattatcttaactgaggcacccaaaatggtggtgaaattgcctctacctttgatcacccagaac

SEQ ID NO: 247383 - DNA, 51 bp, Homo sapiens
aaggttcaattatgtggtcaaagccatccgttgcacactggtaaactgcac

SEQ ID NO: 247384 - DNA, 83 bp, Homo sapiens
gggacagagaaggacgcaccattggcaagaagtacaagcccctggacctgcggcctaagaagacacgtgccatgcgccgccgg

SEQ ID NO: 247385 - DNA, 101 bp, Homo sapiens
aagaataaccccaggaagtaccttcgcagtgtaggagatggagagactgtggagtttgatgttgttgaaggagaaaagggccagggtgacacggaagcatg

SEQ ID NO: 247386 - DNA, 100 bp, Homo sapiens
agatgtcttttgaaaggtgtactgcaaggaacaaaatgtttgtaaattctccttttaccaaggtcctccacagcctgtgaatccccctagacctttcaag

SEQ ID NO: 247387 - DNA, 100 bp, Homo sapiens
tatgtgggaggatgttcagcagcgcggcagagtcatgggggagaaagccaaagctgaaggactttggaaccttttcctacccttagaggctgatcccgag

SEQ ID NO: 247388 - DNA, 100 bp, Homo sapiens
cagctaaagtttgctcgaagccttcagtccgttgcagagatccatccttttacaatccctgctattattcgtccattcagcgtattgaactatgatccac

SEQ ID NO: 247389 - DNA, 100 bp, Homo sapiens
gagtataaaatccagtcctttgatgcagagacccagcagctgctgaagacagcactcaaagatggttccaatccctatacattgaagctttgcttttcta

SEQ ID NO: 247390 - DNA, 75 bp, Homo sapiens
aatggttgagatgtttctggaatatcaaaatcaccccctggttgtggaatacgaggcattgctggtacaactacc

SEQ ID NO: 247391 - DNA, 75 bp, Homo sapiens
agaaggagcggacatgtgcagaacagattgttgccaaaattgaagaagtatttgtacatatgaagattgaagaaa

SEQ ID NO: 247392 - DNA, 76 bp, Homo sapiens
tggagcaggcttgcaatattaaagaggcaggtggaagtcatcataaagtttctgtttcacccgtcgtccatgttcg

SEQ ID NO: 247393 - DNA, 75 bp, Homo sapiens
tttttttattttttaaaaatatgctttctgccacatgtaaaccgatgtacgaagtaggtccaaagttgttgaccg

SEQ ID NO: 247394 - DNA, 75 bp, Homo sapiens
ttttattgaagaacaacaactagaagaagagaagctattggaaagagagagtttttccagaaaggaggagtcaag

SEQ ID NO: 247395 - DNA, 102 bp, Homo sapiens
ctccatcacccaccaacaacaccacaataatccacagccaagggtcctgacctgtggccggaagcttctgggtttgtggccagcaacacaggaaaatcccag

SEQ ID NO: 247396 - DNA, 83 bp, Homo sapiens
atgaaagagccacagagttggcagaactgtttgaaaatgctatttccatggagaatgattatctgggacctcgaagaattgag

SEQ ID NO: 247397 - DNA, 98 bp, Homo sapiens
gcttctgttacgtcaatgatatcgtcttggccatcctggaactgctaaatgacagcctcatcaagggtaagaaatgagcctagtcaccaagaactcca

SEQ ID NO: 247398 - DNA, 73 bp, Homo sapiens
ggagacagagctgagggagatgcatcagaagagctaacaattgctggaatgacctttacaacttttgatcttg

SEQ ID NO: 247399 - DNA, 79 bp, Homo sapiens
gacaaaagccaagaggaggacagttcgctacacagcaatgcatcgagattctgaaggaagatttccattaggtaatttg

SEQ ID NO: 247400 - DNA, 98 bp, Homo sapiens
ctggctcccttctgccccagctccgtctcggcggcggcgggtcctggctataagtcaccatggcacagcaagctgccgataagtatctctatgtggat

SEQ ID NO: 247401 - DNA, 82 bp, Homo sapiens
ccaaaggcaacttggagatgcatttgctgacctgagtttgaagtcactagaacttcatgtcccaacaagcatcagagtgctg

SEQ ID NO: 247402 - DNA, 88 bp, Homo sapiens
accgctctcgcttcgtcctacacttgcgcaaatgtctccgggggggccctcagcctcttggccttgaacgggctgttcatcttgattc

SEQ ID NO: 247403 - DNA, 73 bp, Homo sapiens
agcaaataaccgttttgaaattgcgtctactagaaaaatctcagagggtagaagccatcattgcatctatgca

SEQ ID NO: 247404 - DNA, 90 bp, Homo sapiens
ccggcgacatactacctctggccccgagatcagaatgccggaacatcatcttcagcgggctatttcagcacagcaggtgtatggcgagaa

SEQ ID NO: 247405 - DNA, 90 bp, Homo sapiens
ggggacatcaggctgccccgcagtaccagggagcgactgaagtgcccatgccgcttgctccggagaaggagtctctgctggtagccacta

SEQ ID NO: 247406 - DNA, 96 bp, Homo sapiens
ccttgatcaccaggataatattctctcattgattaatgtcaatgtaggttcagctgcagcccggaaagaaatcataagaaacaaaattcgagcaat

SEQ ID NO: 247407 - DNA, 100 bp, Homo sapiens
cagaggacaacgaagtgttcggcaacatcagatgctgacctgaaagaacatatggttggaatcatattcagcaggagtaagctgactaacttacaaaaac

SEQ ID NO: 247408 - DNA, 82 bp, Homo sapiens
atggggggaccccggtacggacctgtgcaggtgaaggagtacctcctggcaactatgggaactatggctatgctaatagtgg

SEQ ID NO: 247409 - DNA, 83 bp, Homo sapiens
gaaggtgatggcggccatcgagaaagtgcggaaatggactgatcctttgaaatactccagccatgactaaaagagaagcagag

SEQ ID NO: 247410 - DNA, 135 bp, Homo sapiens
acccgttacctgcctgtcaccaaggagggcccccgagacattctggatggcagaggtggcatctctggtgcaccgaaggctgctgaaggacgatggacgcggagtatcggagccactaatggagaacgggtcggg

SEQ ID NO: 247411 - DNA, 98 bp, Homo sapiens
cctcaggggaggggcgcgcggtagcgtcccgggtcccctagcagggctctagagaccacgtgaagtctcctcgctgttccatttcctccaagtcaccg

SEQ ID NO: 247412 - DNA, 99 bp, Homo sapiens
agtaattattgctgctgttggtaccagacaaaatgtgttcgactacagttatagagattacattctgtcctggtatggaaacctcagcagagatgaggg

SEQ ID NO: 247413 - DNA, 51 bp, Homo sapiens
ggcggacagtgcggaactaaaggtcaccatggctgttattggctcccttgc

SEQ ID NO: 247414 - DNA, 82 bp, Homo sapiens
gcgtgtagtgcgagtggggcggacgcgcgcagcccgcccgcccggcgaccagcaagacaatgcagatcttcgtgaagactct

SEQ ID NO: 247415 - DNA, 74 bp, Homo sapiens
ttcagccagcacactcctcgcgagcaaggtcctagcagaagatgtgactcagactgcctctgggtggggctggc

SEQ ID NO: 247416 - DNA, 83 bp, Homo sapiens
actgatatagaagggaccttattcgtatatcgaaggtgccacacctccctggatgatccaagatgaagaatacattgctggga

SEQ ID NO: 247417 - DNA, 90 bp, Homo sapiens
aaaatgaaaagatgggaacagcagaaaatcaaaacaagctctttatgagaatggcatctaaggtgtacgaagccatcgacagcagagatg

SEQ ID NO: 247418 - DNA, 83 bp, Homo sapiens
ccccagatctctaagcaggccgcgcgaccctcgagtctcagacaatgcagatcttcgtgaagactctgactggtaagaccatc

SEQ ID NO: 247419 - DNA, 75 bp, Homo sapiens
ctcgctcccccatcaacgtggagagcttgctgagtcttcctaatattctcaccgatgatcgatttaaagttatgt

SEQ ID NO: 247420 - DNA, 82 bp, Homo sapiens
gtcattttactgtcaagacatttcttcggcattctgcaacaggtgtctggaaatgaagtatggaaatgaaatcatgaataaa

SEQ ID NO: 247421 - DNA, 108 bp, Homo sapiens
ttgacaccaaccagaaatgtgtcttttcctggatcacctccaacagggccaggaaggaatactgggagaatcttcggatagcctcaggccggccatacaacccttcaa

SEQ ID NO: 247422 - DNA, 75 bp, Homo sapiens
atgggaaggacaggcagagctaaacaagctattcaggattatgaaactgctcaggaacacaatgaaaatgatcag

SEQ ID NO: 247423 - DNA, 82 bp, Homo sapiens
gcagcaagaagcttttcaggcactacaccgtgggctcctatgacagcttcgacacttccagccccagtggacaggaaagcta

SEQ ID NO: 247424 - DNA, 75 bp, Homo sapiens
aggcgaccccggccgcccgcgccagcaagaggatcgtcctgccggagcccagagccctcatcctgcaagtctctc

SEQ ID NO: 247425 - DNA, 98 bp, Homo sapiens
caataccgagataaattttccaaacacctgactctgtgtgtttttaccaaccatacagggagactcatgcatctgtatgccgtgtgcgtggactgcct

SEQ ID NO: 247426 - DNA, 75 bp, Homo sapiens
tgaccattttggacattttaaagaacatcttcgaaaacatacagccctgtatgatgagattcgtcagtttcgcaa

SEQ ID NO: 247427 - DNA, 90 bp, Homo sapiens
ttgagaacaggcgaagttttaaatgtatatggttaaacagccaatttagggaagagttcctctgtgacgagggtgcaggtatctctgggg

SEQ ID NO: 247428 - DNA, 83 bp, Homo sapiens
ctgtagtggggacctgctgtgtgttggacctttatacgtattgtaaagatgccgcatcctcgaaggtaccactcctcagagcg

SEQ ID NO: 247429 - DNA, 90 bp, Homo sapiens
tgagcttctaactcattgtattcctcctgagataataatgaaggatgtgactaaagcagttgacataactactccaaaagctgccagaag

SEQ ID NO: 247430 - DNA, 100 bp, Homo sapiens
gattcagagactgaaaaacctgaggctgatgacccaaaggtactaggttttgacaagcttgcatcatgcgtgagtataagctagtcgttcttggctcagg

SEQ ID NO: 247431 - DNA, 113 bp, Homo sapiens
agaatttatatagagatgtgatgttggagaactacagaaacctcgtctccctggttttctggatatgccgcagaaggatccgtgccagaagcaagcctgtgagatacagaaat

SEQ ID NO: 247432 - DNA, 121 bp, Homo sapiens
gattcgagaggtccgagctttccgatatcaggagaggttcaaacatatccttgtagatggagatactttaagaacttccgagaagtcaccaccaatcaagagctgattcagaagagcagag

SEQ ID NO: 247433 - DNA, 96 bp, Homo sapiens
gtcagagaagatggagttttcaacattagtgtggataatacatgttcattattcagtgcagtcattggagaaatcgatgaagaaacagattctgcg

SEQ ID NO: 247434 - DNA, 95 bp, Homo sapiens
caagagccggggcctttttgacagcttccgccgggactgcctggccgacgtggacaccaaggtatgagaagatgatcagtggtatgtacctgggt

SEQ ID NO: 247435 - DNA, 101 bp, Homo sapiens
gtttggctgttgctatgacaacgtggccactgcagccggtcctcttggggaaggctgtgtgggccagcccagccatgccaccaaggtgttccagggcgtcc

SEQ ID NO: 247436 - DNA, 90 bp, Homo sapiens
gaaagcggaagcggcctggcaggggaaggatcgagggatgctgcctgaccccaagaacgtgcacatttttgtgagctggatgattgccca

SEQ ID NO: 247437 - DNA, 100 bp, Homo sapiens
tgccttttatgttagtaatcgaaaagatggattttgccttagcggtagtatcctggctaagtctaagttttatggactcagcccaaaaccatgtttgccc

SEQ ID NO: 247438 - DNA, 98 bp, Homo sapiens
tacatttagcgcatcatgtgatccggatttgaatataacctgccgctttgcaggtgtattccacgtggagaaaaatggtcgctacagcatctctcgga

SEQ ID NO: 247439 - DNA, 74 bp, Homo sapiens
gggacgactatgacaagaaggtgaagcaggcggccaaggagaagtcaggaagcatctaaatatggtgtcctccg

SEQ ID NO: 247440 - DNA, 98 bp, Homo sapiens
tactttgcaaatgattatcgagtagttaaccaatttgccagacattatcagactggacagctacagcctccgcttggcgtcccgatgctctccaccag

SEQ ID NO: 247441 - DNA, 75 bp, Homo sapiens
agcaccattgtgaagcagatgaatcaccttcaggccattcagaggaggaaagagaggggaatatgaagtcagcca

SEQ ID NO: 247442 - DNA, 100 bp, Homo sapiens
acgagaacccccataaataatcttcgtcttgatgcagaactttattatgtgagaaatgaccttattagtcactacgctctatcctttagtctgttagtac

SEQ ID NO: 247443 - DNA, 105 bp, Homo sapiens
gatggcggacgagaaggacagggaagaacccttaggagaaatcttgagagtggacagcaattgtgaagatcgccagagagttctgtgtttcatcaccgccgaaag

SEQ ID NO: 247444 - DNA, 83 bp, Homo sapiens
aaacacctctactttgaatcggacgctgctaccgtcaatgaaattgtgctcaagatcgcaccccctccctccctggcggagcc

SEQ ID NO: 247445 - DNA, 89 bp, Homo sapiens
cccctctgttcttcgagaggacctgggtcaactggaatacaagtttcagcaaaagctggcaggctgacagaggcggcctcaggacggac

SEQ ID NO: 247446 - DNA, 82 bp, Homo sapiens
gttggcttttggagaagtacagtgctgggcctaaaggagataacatttatgaatggagatcaactatacttggtccaccggg

SEQ ID NO: 247447 - DNA, 75 bp, Homo sapiens
ctatttgtttggatatcctgaaagatcaatggaggagatgttaaagtaacccatcttgcaggacgacattgaaga

SEQ ID NO: 247448 - DNA, 97 bp, Homo sapiens
accaatgtacatgagtgacctaaagaaagaggaaggaagagtctacctgtttactatcaaagaggaaacccagcgtttgctggcagaaccagttcct

SEQ ID NO: 247449 - DNA, 100 bp, Homo sapiens
ccgcctagcaaagactattaccagttactggtcacccggtctcaggtagcacaggcggagtgcagcggaggcccctgccgctgccgtcatgccgttcccg

SEQ ID NO: 247450 - DNA, 102 bp, Homo sapiens
aataaggagaaggataagtcgaaggggaaggcgcctgaagaggacgaaggttctcccatgggcaggtggtctctctggatgagctgcgccccttccaggacc

SEQ ID NO: 247451 - DNA, 75 bp, Homo sapiens
cactgggacggcggcgcggagaaggcaggatttggagttccatggagtgatgagattttattttcaagataaagc

SEQ ID NO: 247452 - DNA, 75 bp, Homo sapiens
aactcctttataagtgtcagctgtgagctttgtgggtcacttcaagtctcgacgggagcgggaggcggagctggg

SEQ ID NO: 247453 - DNA, 100 bp, Homo sapiens
cagactgagcgcgtccaggcctgacagctctgcggctcgggccctgagaaccaccgggaggaactgggccattctaacacccgttgctaccatgctggcc

SEQ ID NO: 247454 - DNA, 101 bp, Homo sapiens
atcgagccattttgggatcagtggaaagaatgatagccattctttcagaaaactatggcggaaaatggtagaacaagtcagccagttggctgtgttcatag

SEQ ID NO: 247455 - DNA, 82 bp, Homo sapiens
ggaaacttaggggccacgtgagccacggccacggccgcataggtgcaggtgatggtcctaccagtgtgtctgttgaggtcac

SEQ ID NO: 247456 - DNA, 74 bp, Homo sapiens
atctgctggcctcggcctctcaagaatctacctgttactcgtattttggacaatcttatggagatgaagtcaaa

SEQ ID NO: 247457 - DNA, 101 bp, Homo sapiens
gattttgatgtggatgatgccaaagttttattaggactcgggcagccgcaagtagctcctccagcgccagcagccagcccagcagcaagcagcaggcccca

SEQ ID NO: 247458 - DNA, 98 bp, Homo sapiens
catgatgggaaaatgctggcgtcagcatcggaagatcattttattgacattgctgaagtggagacaggctcgtgaagaagaaatgactgcaaaagtaa

SEQ ID NO: 247459 - DNA, 89 bp, Homo sapiens
gcaccggggcggtccgttgccaaagccaggatgcagaaaatgcgattgtgcatatgggcggtcagtggttgggtggtcgtcaaatccga

SEQ ID NO: 247460 - DNA, 80 bp, Homo sapiens
gtcgacccggcctggcgccggactaggtaactactccagacccccagcgtatagtggggtgcccagtgcaagctacagcg

SEQ ID NO: 247461 - DNA, 75 bp, Homo sapiens
ctgccctttttgcaccccagggagctgctgctggattaatgcagtatcgaatggacaagtccgaggtgatagtta

SEQ ID NO: 247462 - DNA, 90 bp, Homo sapiens
atctacctaccaatcgtgaaaactatattcacaggggttgtggaaaccagaacttcgcctggagaacagagtgcaaccagtgtaaggccc

SEQ ID NO: 247463 - DNA, 100 bp, Homo sapiens
cagccgaccttgagctccaggagttcgtctcttacgtctgcggaagtgcagctgcctcagttcttagcgcaggcaagaaggtaaatcagtacttgctgtc

SEQ ID NO: 247464 - DNA, 94 bp, Homo sapiens
tgtgcagccgcgaggaggcgcgggaggtgttcgagaacgaccccgagacgttgagaagctgatgtctcctcgacttccaactggaaccttgaac

SEQ ID NO: 247465 - DNA, 100 bp, Homo sapiens
cacaatgcctccataatgaatgctgtaggctgctgtggtttacagatttctcactatgtgcaatagacactttggcagtgttgtggcacaaaccattcgg

SEQ ID NO: 247466 - DNA, 80 bp, Homo sapiens
gcatgggctctatcaaggaaaacaagtgtctgcttatgtcgacgccacaggtcatcatctggatcatcccattctggttc

SEQ ID NO: 247467 - DNA, 80 bp, Homo sapiens
gcagaaggttgtgactttagtatacagttggcaaaagcagcttttgatgatgcaattgcagaactggatacgctgagtga

SEQ ID NO: 247468 - DNA, 98 bp, Homo sapiens
gaaaacctctgcgaggaaagggaaggagcaagccgtgaggaatgtgtatgttgctgatctcacagaagaagttgtatatacatcagaaatggctttga

SEQ ID NO: 247469 - DNA, 94 bp, Homo sapiens
ttcggtggactccttcggcagtccacccaccgccgccgcctcccaggcgggagtcatggatgtagatgctgaaagagagaagataacacaggag

SEQ ID NO: 247470 - DNA, 96 bp, Homo sapiens
agctggaatcgccagctcccggcactgctacctctgacccaaagcaggtgaaaggaaagcaagccaggatggatatttacgacactcaaaccttgg

SEQ ID NO: 247471 - DNA, 73 bp, Homo sapiens
ctgggccagcctggctctgtgctgcgggtgctctgcttctccaaacaggctggtgtacagggagcaacaccgg

SEQ ID NO: 247472 - DNA, 99 bp, Homo sapiens
tcaagaatcaatgcgtggaattctcctacacttcctatttatgagatttaaggaccatagtacagctatggatactgaaccaaacccgggaacatcttc

SEQ ID NO: 247473 - DNA, 90 bp, Homo sapiens
gccagtctctttcatcatcaagcagacatactcaagggaaatcctcattgacgattcaatttgttgaaggccaatttgtggactcctacg

SEQ ID NO: 247474 - DNA, 100 bp, Homo sapiens
tcagaagcaggagaccgctaacagcctgccagcccctcctcagatgcccctgccggagatccctcagccctggctggattctgatgagatggaggatggg

SEQ ID NO: 247475 - DNA, 75 bp, Homo sapiens
aagccccagtatgggaatttaaatatggagacctcctgggacacttgataaagagttctatctgtcttctacgcg

SEQ ID NO: 247476 - DNA, 50 bp, Homo sapiens
gcgctgaccatctacgatacccacgtgaaaatgaaatccttgcaactctg

SEQ ID NO: 247477 - DNA, 82 bp, Homo sapiens
gcagatgtatgggtgaagatccaagatgttctacagggaatctcagtctttgaggagattttaatctcacatgcaaattcag

SEQ ID NO: 247478 - DNA, 100 bp, Homo sapiens
cctttatatagaagggagagtaggaaaccagctctaccactccctgctgtgtattgtgcttcagttcctcatccttcgactaatgggccgcaccatcact

SEQ ID NO: 247479 - DNA, 96 bp, Homo sapiens
tggggatgaaattgtgagcaatgccatctcctacgctctatacaaagttggtagctggcagtgttgtgatggcttttgaagaagtatgcccggaca

SEQ ID NO: 247480 - DNA, 100 bp, Homo sapiens
ctggccgagtggctcattcagacaggggcgctcggtgctggatgccaccggacagcggtgccgggtggtcaagcgcagctttgccttcccgagcttcctg

SEQ ID NO: 247481 - DNA, 78 bp, Homo sapiens
cacagcccaggtcacagtgaaagtgtggcaaaggagcagagaactttgacaagttcttcacacgaggacagcccgtct

SEQ ID NO: 247482 - DNA, 82 bp, Homo sapiens
gtgcagggctccaccccgtcgcctcgacagcttccatgaggcaggctgaacctgcagatatgcgcccagagatatggatcgc

SEQ ID NO: 247483 - DNA, 75 bp, Homo sapiens
gaaggcatggaaagttccagccggttcgagagctaggaatgggcaaagaagtggggaatctgctactggaaaact

SEQ ID NO: 247484 - DNA, 75 bp, Homo sapiens
ctcttttaaactcattctactggagcaaatgtgaaaaatgtgaggttttacaatattctgcaagggaagctcaag

SEQ ID NO: 247485 - DNA, 75 bp, Homo sapiens
aatggactctgggcctatgatggatgggaaaaagacctcgatgaagttctgcagacccactcagtgtttgtaaat

SEQ ID NO: 247486 - DNA, 99 bp, Homo sapiens
gcgcgctgctcttccccgcggagcccgcgcagtccgcgcagccctcatcgcaactgggcccgcgcgcaggccatccttcttgcctggatatgacaatgg

SEQ ID NO: 247487 - DNA, 74 bp, Homo sapiens
aggaggcagtagccaaacacccagctccagtgatccacaagctcagaaatacatcgcggaaagtaaatgtttag

SEQ ID NO: 247488 - DNA, 83 bp, Homo sapiens
gggaaagatgagcgaggagacggcgacttctgacaacgaccatgcctccgccgcagggtgacgtgaccgccttgttcctgggg

SEQ ID NO: 247489 - DNA, 100 bp, Homo sapiens
tggctgccacccacgagttcaagcaggcctgccagctctgctaccccaagacaggcatccccacgctcatcatgctggacccgcagggcgaggtgatcac

SEQ ID NO: 247490 - DNA, 100 bp, Homo sapiens
ccccggtgcaagaggcgcaaacaagccaatcccaggaggaaaaacgcttagaccatgctcagcctccaagcagccttgtcatcgacaaagaatctgaagt

SEQ ID NO: 247491 - DNA, 110 bp, Homo sapiens
cttctcggcgacaactgccctgctcttcatcccagttatagctgaggtggtaccagtttaagaagtgagaacttcttcactgactgaaatttgcatatcaatccaaatca

SEQ ID NO: 247492 - DNA, 95 bp, Homo sapiens
gaacttctgcccagctctccttgcaattctgtggtgttcttggtcacacatttatggagtttctgaagggcagtggagattactgccaggcacag

SEQ ID NO: 247493 - DNA, 80 bp, Homo sapiens
cacagatgaatgccgggcagaggagcctgcagctggtcccagattcgctgctggagtgctggatggagcctttctctgcc

SEQ ID NO: 247494 - DNA, 74 bp, Homo sapiens
aagaaggaggaaaagcaggaagctggaaaggaagcaaatgcagccctgaggatttggctactgcatataacaac

SEQ ID NO: 247495 - DNA, 88 bp, Homo sapiens
aaactcggcccttaccctgactgactctgacaacgaaaacaaatcagatgatgagaacgtgaaactggaacgccaagctgaagaagaa

SEQ ID NO: 247496 - DNA, 118 bp, Homo sapiens
ctgccgctatggatgatcgagaggatctggtgtaccaggcgaagctggccgagcaggctgagcgatacgacgaataccctctaccatctgctttggtcagggtgccgctcgaggattt

SEQ ID NO: 247497 - DNA, 75 bp, Homo sapiens
cgggggggaagtgactgggcggtgccggcgccggagacgatgccgttctgagatgagtgaactgagtgtggcaca

SEQ ID NO: 247498 - DNA, 100 bp, Homo sapiens
ttatggctgctgttgtccaacagaacgacctagtatttgaatttgctagtaacgtcatggaggatgaacgacagatcttgcttctgaaatatctacctgg

SEQ ID NO: 247499 - DNA, 99 bp, Homo sapiens
tcagcatatgtagtacttcagaggaagaattaaggggcatgttggtgcatttaactacaaaaccaggtcatatgcaaacacagagctctccttttgctc

SEQ ID NO: 247500 - DNA, 100 bp, Homo sapiens
tgaaaattctcttcattctcttggactgaacttaaatactgataggagagaacattgaaagtattctctaagctatttgaagagagtgactaaatgcacc

SEQ ID NO: 247501 - DNA, 51 bp, Homo sapiens
aaaatattcatgctggatattgagattctccgggcccaaagccgaagtgca

SEQ ID NO: 247502 - DNA, 74 bp, Homo sapiens
ggacggtgatggtggtcgccgcggcggcgtgtgcgcccctcagatccacattgtttgaagttattgtgagtgcc

SEQ ID NO: 247503 - DNA, 50 bp, Homo sapiens
gtcgtcatcgtcgcggtcctgctgccagatgctcgtcagaagttccgctc

SEQ ID NO: 247504 - DNA, 118 bp, Homo sapiens
acattccgagaatgcgagagaaagagcctccgtcaccacatagggatcaaggacttggcccagggcatgtccctgaggagtttttggtctgtctccacagactgccataggcaacaca

SEQ ID NO: 247505 - DNA, 75 bp, Homo sapiens
gcctcagttggaagcagccgatccagcctgcggagcctgtggggcagctcctgcttcaggtgcagaaatacagcg

SEQ ID NO: 247506 - DNA, 100 bp, Homo sapiens
gagaagcagctgcggcgggacaagcgcgacgcccggcgcgagctcaagctgctgctgctcggcggctgcaggcttcagcctgcgctggttggtgaaacag

SEQ ID NO: 247507 - DNA, 99 bp, Homo sapiens
cggatcccaggaccctcttcgcgggcgattcgcgtagcctcaggttcttcccaggagactctgccggccttttccccaccagccccagcttggccatcc

SEQ ID NO: 247508 - DNA, 49 bp, Homo sapiens
tgactatgccattgtgctattcaagtactaaggctcgtacgtctgcatc

SEQ ID NO: 247509 - DNA, 75 bp, Homo sapiens
ggacgttgccaagattaaccaggacccccagacgctgaccggaaaggagattgagattgacattgaacctacaga

SEQ ID NO: 247510 - DNA, 90 bp, Homo sapiens
cgcgccgctgccgctgcgtgggggtgaggggatcaggatttacttaaatccattgtttcaagaatgaaaaaggcagtagaagatgatgtt

SEQ ID NO: 247511 - DNA, 84 bp, Homo sapiens
ccagctccgaaatcaccaccaagatctctggaaacatggctacagaacatgttaatggaaatggtactgaagagcccatggata

SEQ ID NO: 247512 - DNA, 82 bp, Homo sapiens
gcacgtggtcgtcaacaaccagttccagaaagctgagtctgatctggattacattcaatacaggctggaatatgaaatcaag

SEQ ID NO: 247513 - DNA, 75 bp, Homo sapiens
ttttctactgtccctgcgcgaggttgtttgatgtgtgcacagtgtcacgaacagacagagaaaccaaactaactt

SEQ ID NO: 247514 - DNA, 100 bp, Homo sapiens
ggaggcggctttggaagccgtgcggagcgagttacgagaattcccggccgctgcaaggggtgctacgcatgatggtcggagtaaatatctcagatgagca

SEQ ID NO: 247515 - DNA, 50 bp, Homo sapiens
aaaacagaggatgaggctgtttacaagctcaactgagaagtcatttcctt

SEQ ID NO: 247516 - DNA, 89 bp, Homo sapiens
gggagcgatgttgatctcaggaagcacaaagggaccttcctagctctgactgaaccacggaggtatcttggagatggccgcttccatct

SEQ ID NO: 247517 - DNA, 73 bp, Homo sapiens
ggagcggcacctacgtcctgatcgacatggttctcaacaagatggccaaaggaagctcttcgtgggcggtctt

SEQ ID NO: 247518 - DNA, 75 bp, Homo sapiens
ggagtggaaacgcttgtagggtttcaccagggagtaactattcccagtcagaggcgctatgtgtattattatagc

SEQ ID NO: 247519 - DNA, 87 bp, Homo sapiens
aagagagcactgcagccagtgaaaccactgaggtgctggagagtcatgcctgtgagccctgggcacctcctgatgtcctgcgaggtc

SEQ ID NO: 247520 - DNA, 100 bp, Homo sapiens
cgaaacagtaacaaaggactgcctcagtctacgaagtggtccaaaggcaaagttcgggacaagctcaataacttagtcttgtttgacaaagctacctatg

SEQ ID NO: 247521 - DNA, 82 bp, Homo sapiens
gagctcgccccgaacgggggtcttcctcctccgccgttgacagcgtttgcctcagcatggagggcggggccgcggcagccac

SEQ ID NO: 247522 - DNA, 50 bp, Homo sapiens
atcttctatcttaacatcaattcaggttatttccagaaagaagagaatgg

SEQ ID NO: 247523 - DNA, 75 bp, Homo sapiens
ggcccggcccgccgagggccccagcgcaggagccgcgcccggacccaggctgtcctggataatgaaagacttact

SEQ ID NO: 247524 - DNA, 98 bp, Homo sapiens
tatggaatgatcctggaatccaggaatgctatgatagacgacgagaatatcaattatctgactctaccaaatacatcaagcattgcacagttctctcc

SEQ ID NO: 247525 - DNA, 90 bp, Homo sapiens
ctgtgatgatggctcagatgaacgtcaagattgctgtggtcataatgtcacaatctccttgcagtccaggactgggcatactcatatgcc

SEQ ID NO: 247526 - DNA, 74 bp, Homo sapiens
ccggatccaacccagttagttacttcctgtctagagttgtagcttccacctggggctggcaaggtttaattgct

SEQ ID NO: 247527 - DNA, 100 bp, Homo sapiens
tgctgcagagctcggaggggcgctgtgtgtacatcacccccatggaggccctggcagagcaggcagctgagtatgtcccagagaaggtgaagaaagcgga

SEQ ID NO: 247528 - DNA, 83 bp, Homo sapiens
ggagtggcgcccggcgaggtagcgccaggcgagcatttgacattgtgcagcaaagaaatggttatggagaagcccagtccgct

SEQ ID NO: 247529 - DNA, 75 bp, Homo sapiens
agacagagggttttcttttgagggggtgtcttccaaccttttctttgtagaacacaactttcctgaacaggaaat

SEQ ID NO: 247530 - DNA, 142 bp, Homo sapiens
gaaaacgtagggaccacatcaaagacagctttcacagtttgcgggactcagtcccatcactccaaggagagaagggtaatacctgcctggagaatggatctttcttactgaactttacaggctgtgcagtgtgcagtaagcg

SEQ ID NO: 247531 - DNA, 100 bp, Homo sapiens
ttgtggcattcaaatcctagcactctgggagagaccaagatcactccatggatgaaatgacagctgtggtgaaaattgaaaaaggagttggtggcaataa

SEQ ID NO: 247532 - DNA, 100 bp, Homo sapiens
gatgaactggcgggtgtggacgccactacagttcatcaacatcaactacgtccctctgaaggtactggtgtccctgggtgccagtgagaaactatccttg

SEQ ID NO: 247533 - DNA, 98 bp, Homo sapiens
atgggcagaggcgaagggctggtgggcgatgggcccgtggacatgcgcacctcacacaggaccgagtctcctgccattccgagcaggcctggtatggg

SEQ ID NO: 247534 - DNA, 90 bp, Homo sapiens
caggctcggtgtctggctcacctgggtaggcatatggaggcgctggagattgctgcaaacttggtatatatgagagatcgagaaattgct

SEQ ID NO: 247535 - DNA, 75 bp, Homo sapiens
gtttgacaaaacataccaattcttgaatgacatccgagcgaaagagaaagaggttcggtcagcagcccaacagtc

SEQ ID NO: 247536 - DNA, 101 bp, Homo sapiens
ggactttttgaatttcaagaacagtaaagttggaacacagcagagggtgtgtaataaaatacagtcctaaagaatattcttacatataataaagaattccc

SEQ ID NO: 247537 - DNA, 83 bp, Homo sapiens
aagaactgagagaaagagcaacaaagcggcgagtggtgtgagagggcagcacgcgctgtggttgctggatttgtgcgactcgg

SEQ ID NO: 247538 - DNA, 82 bp, Homo sapiens
ttagagctgcggaacaggacgccctctgatgctcgagtgcagtagcgagatctcagctcacctcagcctctgtctcctggac

SEQ ID NO: 247539 - DNA, 83 bp, Homo sapiens
tcctatggtggaaacattgggtacagtactacaactcaagcagaatctgaattatccagaacagaaagttgtgactgttggac

SEQ ID NO: 247540 - DNA, 75 bp, Homo sapiens
ttggagataaagttgctttttactggtgggaagaagagcgctatcctgaaggcatcaagtggaaattcctagaac

SEQ ID NO: 247541 - DNA, 51 bp, Homo sapiens
gctgggcctcaaggaccgcgaggttggtcaaagaaaaagtgatgtatgaaa

SEQ ID NO: 247542 - DNA, 50 bp, Homo sapiens
aagcatcccattacagatagaagagcttgttggggagttcctggaagtga

SEQ ID NO: 247543 - DNA, 82 bp, Homo sapiens
atatcataagtggaattttggagatattcaaagacaatgcagatcttcgtgaagactctgactggtaagaccatcaccctcg

SEQ ID NO: 247544 - DNA, 98 bp, Homo sapiens
agaaaccatgtgaaaaggcaccttgggatgagggaatacaagtgtcatgtctgtgggtacccactgatggtaatgctggcctgctggctgaaccccag

SEQ ID NO: 247545 - DNA, 75 bp, Homo sapiens
ctcgatcctgctggctgctgtctctattctctcggcctgtcagcaaagtcctcagaatggttggaatgaccctcc

SEQ ID NO: 247546 - DNA, 88 bp, Homo sapiens
aaagaagcagagccgttgtgtaaaagagctctggaaatccgagaaaaggttgggaatccacgtgttgaacttaccctctcagagctcc

SEQ ID NO: 247547 - DNA, 50 bp, Homo sapiens
aacagagtgcctgacccaggtcaggattgttaaaatgagtcttcggaagc

SEQ ID NO: 247548 - DNA, 75 bp, Homo sapiens
aagaggaggtggaccccagtgattggattggactttatcatatagaagacttgcactatctgccagatgctgctt

SEQ ID NO: 247549 - DNA, 101 bp, Homo sapiens
tgaagataaaaagctttgaaaagtcgaattcatggtcgtggaagctgagcccatattaagagatgtcaggattgtcagtggcttcgccccgaggagagctg

SEQ ID NO: 247550 - DNA, 75 bp, Homo sapiens
gcctccagggtctgcagacaaggcagggaatacaggagtttccagaaaatataaaaaattgtaaagttttgacaa

SEQ ID NO: 247551 - DNA, 96 bp, Homo sapiens
agatggtgcgtgcccagaacaagaagaagaagaagtctggaggcttccagtccatgggtacaggtttgcagattccgccagcagcacagcaagctc

SEQ ID NO: 247552 - DNA, 88 bp, Homo sapiens
gggatcgtgaccgagaccgtgaccgagagcgtgaccgagagcgcgaatatcgtcatcgttagaagctttgtttttgggaggctgagga

SEQ ID NO: 247553 - DNA, 96 bp, Homo sapiens
gaaaccattacaatagatcgagcctgcagacaagaaacattcgtttatgagatgactgggctggcttagatgaagatgaagatgcacatgtctggg

SEQ ID NO: 247554 - DNA, 75 bp, Homo sapiens
tggcagaaaaactgcttttccatggtgaaaatattgaagcactggacaaggaactgtggctgcaccatctgtctt

SEQ ID NO: 247555 - DNA, 100 bp, Homo sapiens
attttggatggtgaaccctgaagtcggtgtctgctgcgttcacggcaggattcggttaggttcatgaagatttgcccgttttcttctaaaagttctatag

SEQ ID NO: 247556 - DNA, 90 bp, Homo sapiens
gagcagatttacaaactggccaagaagggccttactccttcacagatcgacattactggttatagaattaccacaacccctacaaacggc

SEQ ID NO: 247557 - DNA, 90 bp, Homo sapiens
ctgtccaggaactgtcggaacagaaccaaaggctattggatcagctcagcagggatgctttcattggatttggaggaaatgtgatcaggc

SEQ ID NO: 247558 - DNA, 51 bp, Homo sapiens
taaagcgagtcgtcaaggagttgcaggagctgactgctgggcaggaacgtc

SEQ ID NO: 247559 - DNA, 100 bp, Homo sapiens
tgctggagctcgtgtttggacgcacatccacgacagcgatggcagttccagcagcagccaccagagcctcaagagcacagccaaatgggcggcatccctg

SEQ ID NO: 247560 - DNA, 85 bp, Homo sapiens
gtaaagcaaagagaaaggaagcaggcccgttggaagtggttgtccgttggacataccagatggtcgaagagctccacttcctgct

SEQ ID NO: 247561 - DNA, 74 bp, Homo sapiens
cagttcaaagactaaactgccaaagttcaccatcctccaaacaagtgaagcggctgagccagaggccaactgca

SEQ ID NO: 247562 - DNA, 101 bp, Homo sapiens
ctccaatcagcagagttacattgcagccatcagcgctcgttttgtgcagcttcagcacaatgacattgacaaacggtagagacggggtttcaccctgttag

SEQ ID NO: 247563 - DNA, 74 bp, Homo sapiens
ccaacgccccggagccgccggccgctagcgtcagcgccagccagaagaacttctgcttgggtggctgaactctg

SEQ ID NO: 247564 - DNA, 115 bp, Homo sapiens
tctgcccttctctctcgagtgacagcatggcgtgacatgagggctctccagccatggccttgcagccctcttgggtgtcagctgacaggggctctggccacagcttgtggggatg

SEQ ID NO: 247565 - DNA, 100 bp, Homo sapiens
ttttgcacaaaatctgttcccatgcaaaccaatgagggagaagtatcggaagaaagcagttccaaggtcaaaaaaattccagtcatttattgagagctgc

SEQ ID NO: 247566 - DNA, 100 bp, Homo sapiens
gcacaatcccgggttgtccgggtcctgtcaatgtcacctgacggcccagagggtgggtgccaattccaccagcagctgcaactgaaaagcaaggttcaga

SEQ ID NO: 247567 - DNA, 75 bp, Homo sapiens
gcggcagcacgaaagtaccatagaagctcatagccaaactgaaaagcggaggagagataaaatgaataacctgat

SEQ ID NO: 247568 - DNA, 82 bp, Homo sapiens
tgtcttcggtggactccttcggcagtccacccaccgccgccgcctcccaggaagaagaaattgtcgagacgaataacatgag

SEQ ID NO: 247569 - DNA, 100 bp, Homo sapiens
ccaagcagcagctgccggagcccgagtggatcggggacggagagaacacgagcccatcagtgatcaccagcagcttgcaaaacttatccaggagtcgcca

SEQ ID NO: 247570 - DNA, 75 bp, Homo sapiens
ttaccctgtggcctttcccatccaggcgtccagaggactgtgccctgtccacggtgcctcctgcatgtcctgctg

SEQ ID NO: 247571 - DNA, 76 bp, Homo sapiens
aatcttctgggagctgaggaaccagatatcttgaaaagctgccagaaagctccaaagacaacaggccctccctctg

SEQ ID NO: 247572 - DNA, 100 bp, Homo sapiens
cgccacctaaaaacaaagaggattttgagaaggattggccttttgatgatggtgcaccaccatccaaccagattgttgatgactggttaagtcttgtgaa

SEQ ID NO: 247573 - DNA, 101 bp, Homo sapiens
cgggcggagctgtgcgagagcctcctcacttggcagaagatggctgtgccacccacgtatgccgatcttggcaaatctgccagggatgtcttcaccaaggg

SEQ ID NO: 247574 - DNA, 82 bp, Homo sapiens
gatgatgaagaggtttcagggagcagcaagacaatcactgcagagataccagaattcaattcgtcataatctgtccctacac

SEQ ID NO: 247575 - DNA, 75 bp, Homo sapiens
cgggattcgcggcccggagctcgggaccgaatgattacggacctgaagccaaagaacaagatgcgctagtggaca

SEQ ID NO: 247576 - DNA, 82 bp, Homo sapiens
taatgacattgtggacagtgacagcgatgctgaggatcgaggaacgttgtctgggagcatcgagtacagctgtccggcctcc

SEQ ID NO: 247577 - DNA, 100 bp, Homo sapiens
cagttttttgtaagactctgtggtattgttggaggaatcttttcaacaacagagctatcagcttcccagtttgcacaattcatcaagaaattatgcgggg

SEQ ID NO: 247578 - DNA, 75 bp, Homo sapiens
caagcggtttcaaacggcttagagcaggccgcttggttctgacccagctgagtcctattttgtaacggattatga

SEQ ID NO: 247579 - DNA, 98 bp, Homo sapiens
tcaagctgcacttccttctgcactaaagactctgcaacagaaactaagactccatattattgagattatagaatcactgagcttcagctcaaacttga

SEQ ID NO: 247580 - DNA, 50 bp, Homo sapiens
ggaactcaaggccctgcgtgcacagcagcaaatacttccctggacaagaa

SEQ ID NO: 247581 - DNA, 100 bp, Homo sapiens
taaaaagcagtctaaacctgtgaccacccctgaagaaattgcacaggaggaagttaagtcttcagagcctactgaggatgtggagcccaaagaggctgaa

SEQ ID NO: 247582 - DNA, 83 bp, Homo sapiens
ctgcgccagagaccagataaaatttggaggccaatcactgccaccttttatttccctgtgggtccaggaactggatttcttta

SEQ ID NO: 247583 - DNA, 83 bp, Homo sapiens
gtactgggggattcgcagggaggatgtcgggacaccccggaagctgggaaatggtgtccctggccagtgtccttccacctgtc

SEQ ID NO: 247584 - DNA, 90 bp, Homo sapiens
gccgcctgctcctgcgcagggctgtggccgaggaacgcttccgcctggagttcttcgtgccgcccaaagctggagtgcggtggtgcgatc

SEQ ID NO: 247585 - DNA, 90 bp, Homo sapiens
cgacgcctttggcggtaaattcgggtttgcctgcaatgagatttcattctctacatttaaaggacatcctttctgagctgctgtgaataa

SEQ ID NO: 247586 - DNA, 100 bp, Homo sapiens
cctggaggaggccaacgctgacctggaggcggctatggctttggaggtggtgccggtagtggatttggtttcggcggtggagctggtggtggctttgggc

SEQ ID NO: 247587 - DNA, 105 bp, Homo sapiens
aggaagcaattctggaagcgcagcaacagcaagctcccgggcagagaaacagcacccaggactatcttccaaagagttctggatatcctaaagaaatcttctcat

SEQ ID NO: 247588 - DNA, 83 bp, Homo sapiens
ccgcttcgaaagcatcatccacgagttcgacccgtggcatatcacacctgaaaaattttatgtggaagcttgtgatgatggag

SEQ ID NO: 247589 - DNA, 100 bp, Homo sapiens
cgaggaggcagccaagctcgtagcctgccactccgtgcatgaggacggggacttggttgccttttccagtgacgaggaattgacaatggccatgtcctac

SEQ ID NO: 247590 - DNA, 97 bp, Homo sapiens
agcagctgagtgatgggcagcccccaccacccgcccaggccagccccagcagcaacagcagcacaggtgctgttggcagcagcggtctgcacaaaag

SEQ ID NO: 247591 - DNA, 82 bp, Homo sapiens
ggagcacagtccgccgagcacaagctccagcatcccgtcaggggttgcaggtgtgtgggagactcctgtttcctcaaggcca

SEQ ID NO: 247592 - DNA, 95 bp, Homo sapiens
gaagcctcttgtcccttcattgtcatctgcttttgagctgctactgtttgaacggtcttggatgaacagatggaagtctgctgttctgcatgaag

SEQ ID NO: 247593 - DNA, 75 bp, Homo sapiens
gttagagtcttcctgcccaacaaacagaggacagtgatgtattgctgtccttgaatattagcccatttgaaaacg

SEQ ID NO: 247594 - DNA, 99 bp, Homo sapiens
ctaattcacagggtgaagccagatttggacccagccgccgcctccatctctgacggagactgtgacgcccgggagggtgagtcagtagccatgaattac

SEQ ID NO: 247595 - DNA, 100 bp, Homo sapiens
cgggtcagcagccggccaaccgcagccaggagaaggagttcgtgcaggcgtacgaggatgtgctggagcggtacaaaggagtccaagattgatctccttg

SEQ ID NO: 247596 - DNA, 74 bp, Homo sapiens
cccaccttctgggcaaagaatgtagtcaatttagtctgcgggccaggcatcgacatccgcaacgactatcagca

SEQ ID NO: 247597 - DNA, 85 bp, Homo sapiens
ttgtattgtaccgcataactgaagccactaagacgagaaaagaaaccttgtttattccctgtgaaaatgagaagatttctaaaca

SEQ ID NO: 247598 - DNA, 75 bp, Homo sapiens
cccgggaactgctgacgcttgatgagaaggacccacggcgtctgttcgaaggaatctgtcttggaggacatcaga

SEQ ID NO: 247599 - DNA, 80 bp, Homo sapiens
ccagaccctggagcctcagttggaagcagccgatccagcctgcggagcctgtggggcagttggagctcagctgcatggaa

SEQ ID NO: 247600 - DNA, 140 bp, Homo sapiens
catgcagcaaccactattttcttcctgcccctcgttgatgagagcattcgaagtgacctcagcagggcatccagccgcctcggatctcgctgccaccagccttactgcacacccgtgccacccgcccttgccccgtcagc

SEQ ID NO: 247601 - DNA, 90 bp, Homo sapiens
gctgtggagaccgaaagagctgcataaattccagctttattacctgaaggagggagccccaggaacaggagtcccaccgaagaactgctc

SEQ ID NO: 247602 - DNA, 100 bp, Homo sapiens
tcataaagtgttactggaaatcttatttagttttgggaatttttacgttaattgagaggatggagagttaaggagaacactgcagtcattagcctgtggc

SEQ ID NO: 247603 - DNA, 90 bp, Homo sapiens
gttttgatggatatatcttccttgacagcaaagattctgctcagcaatcctcagatgtggtggttaaatgattccaatcctgaaaccgac

SEQ ID NO: 247604 - DNA, 83 bp, Homo sapiens
cttcgatgacaccattgcagaaggaataaccttcatcaagttttatgctccatggctttatcctgtggataaacgcagagtga

SEQ ID NO: 247605 - DNA, 76 bp, Homo sapiens
ccaccaccgccgctgccccggctgcctcctccctgagattttaggtgatgggcaagtcagaaagtcagatggatat

SEQ ID NO: 247606 - DNA, 82 bp, Homo sapiens
ccgggctccgggaaaactacactggccaggtcctgaatctgtgcctccttcccttcttaaagtagtgatgaaacccatagca

SEQ ID NO: 247607 - DNA, 89 bp, Homo sapiens
tggcaaggcttttgcttccaaatacaagctgtataggtcattcctgtcccaatcagctgctctactactgatgacattaaagatgcctt

SEQ ID NO: 247608 - DNA, 100 bp, Homo sapiens
gccttatggactggagaaaagttccctcaaacagcactgaaactgtaatagaatctgagctggactggccattatggaggaggagctgcagcattcccat

SEQ ID NO: 247609 - DNA, 90 bp, Homo sapiens
aacagagactgcgaaacgatcctctcaatcaaaataaggttaaatggaagctgatcggcgttcacatggaatcctcctcacgtagctcag

SEQ ID NO: 247610 - DNA, 74 bp, Homo sapiens
ggagagcttcatcaaaaatagtgatagctttgataagaatacaactccaaatatgttgacttgattgaggaaca

SEQ ID NO: 247611 - DNA, 75 bp, Homo sapiens
ttggtcatcggaagtggtgccttcagcacaggtatccagctcacatagaagacattgactacgaggaaggaaaag

SEQ ID NO: 247612 - DNA, 82 bp, Homo sapiens
gttttcttggatgaattgcttgctttggagggagtgcatccgccccaacccttttccccctcgtctcctgtgagaattcccc

SEQ ID NO: 247613 - DNA, 100 bp, Homo sapiens
gccattgagataactacccaagagatcactcaggttcgccaactgcgaagatgatatcacctgcggcccgacttggctcccactctcagaaaaaaggggc

SEQ ID NO: 247614 - DNA, 83 bp, Homo sapiens
gttttttgattatactactgtcttgaagccatctctcaacttcacagccactatgtgtcttgctgaatcagggctctcttatc

SEQ ID NO: 247615 - DNA, 101 bp, Homo sapiens
cagatattcaatcaaaattagatgagatgcaggtctatgttaacaatgaatgggcaaccagtgttggggaaggagggagctttggagaacttgctttgatt

SEQ ID NO: 247616 - DNA, 74 bp, Homo sapiens
ccgaggatctggaggcacagctgcagtctgacgagagggtctctgctttctatccgtcaagatgataaagtcgt

SEQ ID NO: 247617 - DNA, 100 bp, Homo sapiens
atggatgcagaacaccagacacccctttctctctctttgaaggtggacgccctgcttcatctggcccgccagaatcgggctgtggcccgcacagcccaga

SEQ ID NO: 247618 - DNA, 75 bp, Homo sapiens
tactctctctttctggcctggaggctatccagcggtcctcactgagcagcgagtcgtcccccgtgtcctctccgg

SEQ ID NO: 247619 - DNA, 98 bp, Homo sapiens
tggatgttcagcagctttcacaaatagtaccaaagtctcaaatatctatcagtgtagaagagtgggaagacaccaaagactccaaagaacaagggcac

SEQ ID NO: 247620 - DNA, 115 bp, Homo sapiens
gaaagtttccctcctctttccaaatcaaccataatattctgaggacttcctcgttctgcccatcttcctaacaaggctatggctgataacagcagtgatgagtgtgaagaggaaa

SEQ ID NO: 247621 - DNA, 100 bp, Homo sapiens
gtttttggtgccctgaagggagctgtggatggaggcttgtctatccctcacagctttaatgaagcaccagttgagattcccagtccttctgaaaccccag

SEQ ID NO: 247622 - DNA, 121 bp, Homo sapiens
tcatgggcctcgtgttcgcctctgtctacatctacagatacttcttccttgcgcagctggcagccaaggaggcgaagcttcgagacctggaggactcactggcccgtgagcgggacaccag

SEQ ID NO: 247623 - DNA, 90 bp, Homo sapiens
gagaggtggaaacagcggatgattctggaactgggagaagatggctttaaagaatacacttcaaggttaatgcctcttggaagtcaggag

SEQ ID NO: 247624 - DNA, 75 bp, Homo sapiens
gcacggaggagctctttgacttcttgcatgcgagggaccattgcatgagacgtgcaggtaccatcaggaagcagc

SEQ ID NO: 247625 - DNA, 74 bp, Homo sapiens
ctttcctgggttgcttctggcggccatggtgttgctgctgtactccttctccgcacccaccaaggctccggatg

SEQ ID NO: 247626 - DNA, 75 bp, Homo sapiens
aaacattgcggcaacaccatggctgggtagttcgaggggtttttgcggtcagcccaaggccaaccccactgtcac

SEQ ID NO: 247627 - DNA, 100 bp, Homo sapiens
gacgaggatatcgtgtctggagcagtggagcccaaagacccctggagacatggggttgtagaaggtgatttagctgccatagaagcatacaagtcatcag

SEQ ID NO: 247628 - DNA, 73 bp, Homo sapiens
cctccatgcgcagtcatgagtcgcttcaagtttatcgcccgagcgggaagaagttccgcagcaagccgcagct

SEQ ID NO: 247629 - DNA, 90 bp, Homo sapiens
acaatctcctcagggaaggggcagcacaggtggagagattcaaccagttagcgtgaaagttggagataaagttcttctcccagaatatgg

SEQ ID NO: 247630 - DNA, 146 bp, Homo sapiens
gagatggagaagaagaggaggaggcactgcctgagcagtcagaaggcaaagaacagaagatcctccttggcaatctgaaagcaaatcctgtttagatgcaggcgaaggttcctggtgacccaggctctcaccttaccgtcccttac

SEQ ID NO: 247631 - DNA, 96 bp, Homo sapiens
cctgtgctcctatacaagattaacattcagtgctatacttggtagatcagaaactcaggagtgtcttttctttaatgctaattgggaaaaagacag

SEQ ID NO: 247632 - DNA, 74 bp, Homo sapiens
gaaaagaaggggaagaagatcaaaacccaccatgccccaggttctgacaggaacagcatggattccgtggatag

SEQ ID NO: 247633 - DNA, 97 bp, Homo sapiens
cacaatcaatttcattatctcccaagtagccagtggtgacatcaacacaagtatccaagctctgacacaggccctcgggaccaaggatcacgtcatg

SEQ ID NO: 247634 - DNA, 100 bp, Homo sapiens
tgacatcatctctgtgcactgataataaccctgcagcccttagagatttgtttgattccatggataaaacttcttccagtattccacctattattctact

SEQ ID NO: 247635 - DNA, 82 bp, Homo sapiens
ccaagaacccaccaattccggacacgcctttctgagaaaagtctacagcattctttctctgcaggttctcttaactacagtg

SEQ ID NO: 247636 - DNA, 100 bp, Homo sapiens
ctgcagacttggccaaatggacgggactattaagggctgggagagggttctgccctccttcatccagacagcaggtctcatcctaggtccttagagaaaa

SEQ ID NO: 247637 - DNA, 99 bp, Homo sapiens
tgcttcgacacgcctgctgttaaatacaagtattcagctcttattgagtcgcaatgtatctgctgagcaaaaagatgaaaacaaagaagcaaagcctcg

SEQ ID NO: 247638 - DNA, 83 bp, Homo sapiens
atctttgaccccagaacaaagccgcgggcctctcaggagcatcagatccatgctgctgctgactcggagccccacagcttggc

SEQ ID NO: 247639 - DNA, 97 bp, Homo sapiens
cctggtgctgaagaaagtgcagtgctgtggcccagcccccacagctgggagtgcggagagccattggagtctcaggggccagccaagcccccacccc

SEQ ID NO: 247640 - DNA, 100 bp, Homo sapiens
ggcggtagcggcagtggcggcgcgtaggaggcggagctcgaggccatgagcagatataccagcccagtgaacccagctgtcttcccccatctgaccgtgg

SEQ ID NO: 247641 - DNA, 50 bp, Homo sapiens
ccctcactcttcatggtcactgcctatttgatggctttgcagatggacta

SEQ ID NO: 247642 - DNA, 95 bp, Homo sapiens
cctggagcctcagttggaagcagccgatccagcctgcggagcctgtggggcagggatgattaccacgaggatgggttctgccagccttaccgggg

SEQ ID NO: 247643 - DNA, 100 bp, Homo sapiens
gcgccgaaagcgaagaaggaagggaatgggtactgttcaaaaaggaatgccccacaagtgttaccatggcaaaactggaagagtctacaatgttacccag

SEQ ID NO: 247644 - DNA, 90 bp, Homo sapiens
ggtctccagggttctttggggcccgagttgtatcacggactgattcaccgagcccaaccgtactcaactcacatatttctaccccaaatg

SEQ ID NO: 247645 - DNA, 100 bp, Homo sapiens
cagaaagcatttaaccagcatggctacttcatattttggaaagcagtttttaagacaaggactttcagttaccttgatgatgtcccatttaagacaggag

SEQ ID NO: 247646 - DNA, 101 bp, Homo sapiens
cacctcgagctgcggtagcagcgactcatgagagcgcggccggaggacaggtactccaaagattcaggtttactcacgtcatccagcagagaatggaaagt

SEQ ID NO: 247647 - DNA, 75 bp, Homo sapiens
gaggcgagcgccgcgcgcaccactgctcaggtaacggaggccttggaaagagactctgcgtcaggtcacccagca

SEQ ID NO: 247648 - DNA, 100 bp, Homo sapiens
cggacaccatgatcctaacacgtcaccatcagaaaagctaagtttgctgtatagtgaggatcaggagatctgatcctgattgcagaaccttccctgatta

SEQ ID NO: 247649 - DNA, 100 bp, Homo sapiens
tcctctggcttctgtccctgctcagtcggccaagaagccctgcccaggacctctggtcctcaatcgagttcctctacgaagaacacaccagaaatttgtc

SEQ ID NO: 247650 - DNA, 76 bp, Homo sapiens
cacgcccgtaccccggcgtcacgctcagactgattcttgctattccaaatcctcttccacgttgacagcccttcag

SEQ ID NO: 247651 - DNA, 97 bp, Homo sapiens
tgaacaacaatatcggcattctgtgctacgaaggcagaagactgatttttggaaatatgtatttgggagacagtcacgtcctattgaataccttgtg

SEQ ID NO: 247652 - DNA, 75 bp, Homo sapiens
cggacatgatcctcatcttttatacactcttagtgctgtccagctccaaatgagaagatgaagcaagtgttaaag

SEQ ID NO: 247653 - DNA, 96 bp, Homo sapiens
agaaagatgacaccacctttgatgagggaaggagacttggtctgaaagatgccacattcctgcagcctctcttggtgcagtggaatacagtcttgg

SEQ ID NO: 247654 - DNA, 98 bp, Homo sapiens
cctccatctgatccccagtaccgagcccatgaattgggcatgaaattgggaactgtccaggtttattgctgccgggagactacactgcaaaatagata

SEQ ID NO: 247655 - DNA, 50 bp, Homo sapiens
gttaaggattccaagtaactcttatttggatcattttacttctccagatg

SEQ ID NO: 247656 - DNA, 98 bp, Homo sapiens
agggattaacaccttgataaatatcatgtcacgccttggccaagatgacccaactccctcgagtatctggcaccaattctgacccagtcatttgtgat

SEQ ID NO: 247657 - DNA, 74 bp, Homo sapiens
ggcgttactgatggtgctgctcacatctgtggtccagggcagggccactccagatccccctgaggtgaccgtgt

SEQ ID NO: 247658 - DNA, 75 bp, Homo sapiens
tgggcttggtggcctgcgtgtcggcggagtcgatctgccttctggagactgcgccgtcctcccgggagagccaga

SEQ ID NO: 247659 - DNA, 82 bp, Homo sapiens
aaagataaatccaaatactgcatatcagaaacaacaggccagctgcgggccgtccagcggctgtgccacttctacagcgccg

SEQ ID NO: 247660 - DNA, 50 bp, Homo sapiens
agataagggaatttcttaaaaagccaggagtaaatagtatggatgtagca

SEQ ID NO: 247661 - DNA, 96 bp, Homo sapiens
aaggccaagtcgagggccaagacgaagacaagcgcatcagcgaggaggtggggctgctgcagctccttggggaccccccgccccagcaggtcaccc

SEQ ID NO: 247662 - DNA, 130 bp, Homo sapiens
gtggtgacagcctctgggtcctcggtcggtacagtctctgcacctcgcgccccagcagttggattggatgctgctggcaagacaaccattctgtataaactgaagttaggggagatagtcaccaccattc

SEQ ID NO: 247663 - DNA, 98 bp, Homo sapiens
gctacaccaacaccgacaaccccttcggagacaacaacctgctgggcaccttcatctggaataaggcaatgtcccctgatggggaggccatcgtcact

SEQ ID NO: 247664 - DNA, 100 bp, Homo sapiens
ccacaggcgtgccacacttgagaacgactttgtggtcctcaagaaggatgtggatggtgcttatatgaccaaggtggaccttcaggccaaacttgacaac

SEQ ID NO: 247665 - DNA, 101 bp, Homo sapiens
aggacttgtgcattcaaacatagcaactgagcaataacaattggtcgtcttggttacgtttgtcctcaagaggtggcccccatgctacagcagtttataag

SEQ ID NO: 247666 - DNA, 48 bp, Homo sapiens
atgtacctgttaccactttcaaaacaatcccacagagtattgatgagg

SEQ ID NO: 247667 - DNA, 73 bp, Homo sapiens
gcgtgcttgtgggacacccgtttgacacggtcaaggaaccgtccctgcccaggccagggcagccactggcgaa

SEQ ID NO: 247668 - DNA, 131 bp, Homo sapiens
ctttgaccggttgctcattttctggtctgaccggcggaacccccacgaggtgaagccagcctatgccaccaggtcacggtctagatcacattctcgatccagaggaaggcgatactctcgctcacgcagca

SEQ ID NO: 247669 - DNA, 95 bp, Homo sapiens
ccggttgctaagacttggcgaagcgctgcgctcgcgcccggatccctcaggatgaccatgaaagctgtggttctaattctaccaaccgtagtact

SEQ ID NO: 247670 - DNA, 98 bp, Homo sapiens
agcactatagtgcaggtgttggaagtgaaagatcgaagatttatcccagcaagcacaactagcagctgctgagaaattcaaagttcaaggtgaagctg

SEQ ID NO: 247671 - DNA, 88 bp, Homo sapiens
gacaaccttcccagaaagtccaagctcgtgtgtctcaatgagatcttggagtcagcagatgcacccttagaagtcactgaaggattca

SEQ ID NO: 247672 - DNA, 100 bp, Homo sapiens
ccgagatgaaggtgaagatgctgagccggaatccggacaattatgtccgcgaaaccaagttggacttacagagagttctttaaggaaaaacagtagtgct

SEQ ID NO: 247673 - DNA, 110 bp, Homo sapiens
atttcttgacttcagcaaggagcctaatggaaaaattaacgtgcatgactttaagaagggttcgggacggtacgcaccagccaccttcgcgccgaaggcggtagggcgcc

SEQ ID NO: 247674 - DNA, 100 bp, Homo sapiens
ccttcaaagcccagtatatgttggtagtgcatatgagaagacacacgggcgagaagcctcacaaatgcactggagcttactttgcctggaaagctacagc

SEQ ID NO: 247675 - DNA, 100 bp, Homo sapiens
gggagcaggagcccgcggccggccagccgaagatggtggcggctactcctcctgcacatacccccggcctcatgagtacctgtccccagcggatctgccc

SEQ ID NO: 247676 - DNA, 74 bp, Homo sapiens
ccgacgcggggcccatggccaggaccaccagccagctggatgaaacaggcgcctatttaatcgacagagacccc

SEQ ID NO: 247677 - DNA, 75 bp, Homo sapiens
ggagacacaagaagcggatccagacacgcagcccaagaaggtccggaaggtcccgccgggtcttccatcctcggt

SEQ ID NO: 247678 - DNA, 100 bp, Homo sapiens
caggagatcgccacctacagccgcttgctagaggttgaggacgctcagatgccggctccaggagcagcagtggaggtcgggaacgcctcattgtggagcc

SEQ ID NO: 247679 - DNA, 100 bp, Homo sapiens
gaataatgccacttttgattgcaaagtgctatcaaggaaccacgctctcgtctggtttgatcacaagacgggcaaggatcagctcagctactatttaata

SEQ ID NO: 247680 - DNA, 82 bp, Homo sapiens
ccccgaccacttgcggcctgagtatggagtacgagagggcctccaaagtggaccagtttgtgacgcgcttcctgctgcggga

SEQ ID NO: 247681 - DNA, 50 bp, Homo sapiens
ataccacctcccctacctcctaaggaaaatcctgccttgcttcgttgggc

SEQ ID NO: 247682 - DNA, 77 bp, Homo sapiens
gagagagagcagctgctcatcaaagcctcttctgggaaatgccagtgcaaagtgggtgtcattggctctatatgtga

SEQ ID NO: 247683 - DNA, 99 bp, Homo sapiens
gtctttttgttcaagataaagtgattttttgcctttgttgattaactggacaaattcagccaaatttgtatcctactgtggggcttcaaacaccaggag

SEQ ID NO: 247684 - DNA, 100 bp, Homo sapiens
cgccgcggagatgtgacccggcagtacggcaaatatggcggaggtgctccatacttgcttgcagtgcctacgtggctctggctttgggtgataacctcat

SEQ ID NO: 247685 - DNA, 100 bp, Homo sapiens
acactaagaataatgtcactgcatcagtttttactagagccaatcacctgtcatgcctggaacagggatcgtactccagttccaagagcctctgagttcc

SEQ ID NO: 247686 - DNA, 80 bp, Homo sapiens
cctggagcctcagttggaagcagccgatccagcctgcggagcctgtggggcagagcggttctggtgaggttggaaggatg

SEQ ID NO: 247687 - DNA, 90 bp, Homo sapiens
atgagcgacagcggcgagcagaactacggcgagcggaatctacctgttactcgtattttggacaatcttatggagatgaagtcaaacccc

SEQ ID NO: 247688 - DNA, 100 bp, Homo sapiens
aagatggacaagatggtgcagaagaagaacgcggcctcatgcattgtgcgtcagcagcaatgtttatggtgaaaaatggcaacgggaccgcgtgcataat

SEQ ID NO: 247689 - DNA, 51 bp, Homo sapiens
gcaggaattgggatcgtgtcgctgcggatctcatagatcagaacatactgg

SEQ ID NO: 247690 - DNA, 118 bp, Homo sapiens
ctgcccgcggctgcagtcggggcggcagctgaggcggaggctgacgaggaggcggatcccccggcgtcagagctgtaggtaaaacttgcctactgatcagttacacaaccaatgcatt

SEQ ID NO: 247691 - DNA, 82 bp, Homo sapiens
ctacatctcttgtcacagcttaagctgggcatggatttaacaagagagaagatggtataaactggtccatcagtgacaaaga

SEQ ID NO: 247692 - DNA, 75 bp, Homo sapiens
tgactcataacctggggatcccggtgttggtggtgtgcacaaaggtaagaagcgcaattccacactctacataac

SEQ ID NO: 247693 - DNA, 98 bp, Homo sapiens
ctgctgcacccacgaatctgcccacccctcctgtaacccagcctgtttcacttcttgaaactgggagtgatttttccatgtttgaagctttgcgagat

SEQ ID NO: 247694 - DNA, 51 bp, Homo sapiens
cttcttcttcgctccctagcttagaagagtctcctggaggaggactccgag

SEQ ID NO: 247695 - DNA, 83 bp, Homo sapiens
ctagagaccatacagacctaccggtctgtcagtgagatggcttctaacaagtaatctcaggggcgatataatcaatgaggtgg

SEQ ID NO: 247696 - DNA, 82 bp, Homo sapiens
tgcaagatttggggaatctatagttaatcttggcgacattgacaatgatggctttgaaggttgcaataaattgacagaccag

SEQ ID NO: 247697 - DNA, 100 bp, Homo sapiens
atgttagctgttgatgctgtaattgctgaacttaaaaagcagtctaaacctgtgaccacccctgaagaaattgcacagtacaagttgtgcaaagtgagga

SEQ ID NO: 247698 - DNA, 100 bp, Homo sapiens
gtcaccgacctggccgagctgcccagcgagatcctcggggccccagaggccgcggacaccgacctggagcatgcttttcacttccactgcatctctcgct

SEQ ID NO: 247699 - DNA, 82 bp, Homo sapiens
ctggaggcttactgcaagaagtatgagcagctcaagatgaggacggggacttggttgccttttccagtgacgaggaattgac

SEQ ID NO: 247700 - DNA, 74 bp, Homo sapiens
tgttggacctttatacgtattgtaaagaatgtcaaaactggaccaatggggccaggctgaagtattgaactttc

SEQ ID NO: 247701 - DNA, 115 bp, Homo sapiens
aatggaaggaaaaggtggcctggccgcggcttaccaaggaggatatcaaggactactgttcgaagatttttggaagaatactgagaacggcataaagtgaagatcgacatttaaa

SEQ ID NO: 247702 - DNA, 75 bp, Homo sapiens
tcggcgtgggcggggaggatgacgacggggaggtgcatcgctccaaggtttacccaaggtccagcctagccccta

SEQ ID NO: 247703 - DNA, 75 bp, Homo sapiens
gttggagaatatgtgcggcattatccacgaggcaaacgtaacagagtatgcaagaggaggagacctgcacaactg

SEQ ID NO: 247704 - DNA, 80 bp, Homo sapiens
ccagacctgcagggttcgtggataataaactcaagcagcgagtcatccagaggaagctcaccagtgtgggaaggggcttc

SEQ ID NO: 247705 - DNA, 101 bp, Homo sapiens
acaatgtactggatcgaaatgtccatgagaaaaagcttggagataaagttgctttttactgaatacaactgagagctttgtccctgtgcttaaacaaatat

SEQ ID NO: 247706 - DNA, 50 bp, Homo sapiens
caggaagcgaccccgcgatggcaagatctgaagaaaacccttgctgtgtt

SEQ ID NO: 247707 - DNA, 88 bp, Homo sapiens
gacaccacggtgctcatgcccagtccacctcgtgctcctgcagaacctgctgacctgtggaggcaccaagtctttcaacatgatgtcc

SEQ ID NO: 247708 - DNA, 90 bp, Homo sapiens
aaacccagggagctcttctgacctcccagccccgggccgggcttcccacacagatctttgtggagttcacctctgtgtttgactgccaga

SEQ ID NO: 247709 - DNA, 83 bp, Homo sapiens
ggtgggatttcgttttgcctccggttggggctgctgtttctcttcgccgacgcactttgcttatagttgaccctactggagag

SEQ ID NO: 247710 - DNA, 58 bp, Homo sapiens
aagaaagcaagagaagcatggaaaatctgggcagatgacgagattgaggagctgcggg

SEQ ID NO: 247711 - DNA, 75 bp, Homo sapiens
ggcttatgagtacctttgtcatttggaagaagcgaagagaggctcatccaaaatagaggaagcatgcgaaatcta

SEQ ID NO: 247712 - DNA, 82 bp, Homo sapiens
cagatatttaatggcgaccgatactgtggaagattggctgtgggagaactaactgaaaatggtttgacattagaagaatggt

SEQ ID NO: 247713 - DNA, 100 bp, Homo sapiens
ccaacagtccctctatcacatatgacatcagtcagttgtttgatttcatcgatgatctggcagacctcagctgcctggtccagtcggatgatgattctgg

SEQ ID NO: 247714 - DNA, 132 bp, Homo sapiens
gcctgatcgcgatggggacaaaggcgcaagtcgagaggaaactgttgtgcctcttcatattggcgatcctgttgtgtggtataagttgaaatccaaaccaggaaagaaggacaaggagcgaggagaaattga

SEQ ID NO: 247715 - DNA, 100 bp, Homo sapiens
catcctgttcagcacatctactcattcaagtggaaatttatgccaactcttctctgacccataatgcctcaggtgagcgactggtgggaggagtacatct

SEQ ID NO: 247716 - DNA, 80 bp, Homo sapiens
cgaggaggtgcgcgagaagtacaaagtgtactaatggtcacttgatgtgcgctggctgttttatccacctactagcagat

SEQ ID NO: 247717 - DNA, 100 bp, Homo sapiens
gaggccgaggcaggtggatcacttgagactgcaatgattcttatgaatgtgtattgcaataagattttgaagcctgtagatgggtcctgttgtcaacctc

SEQ ID NO: 247718 - DNA, 100 bp, Homo sapiens
cggaacgatgccggccgtgagcctcccgcccaaggagaatgcgctcttcaagcggatcttgatcatggaagggaagtggttgctgtgtatgttactggtg

SEQ ID NO: 247719 - DNA, 75 bp, Homo sapiens
gcagatcctgagacccggacagtggcagtgaaacagagacaggatctcactgtgttgtgcaggctggtctcaaac

SEQ ID NO: 247720 - DNA, 100 bp, Homo sapiens
acattcaagccatggaagagaatcttcttcgaataactgaaacctggaaagcttacaacagtgactttgaggaatcagccatgaaccagagaatcagtca

SEQ ID NO: 247721 - DNA, 100 bp, Homo sapiens
agagagttatgcccagtatgttcacaacctctgcaactctctctccattaaagtcgaggaaaggcaagtgtcaattgaggagggagagaggaaagccaaa

SEQ ID NO: 247722 - DNA, 76 bp, Homo sapiens
gaacagccatgcaaaggcaggggaggaagccacctcgagggaagtttaattagcattgacagcacctgtacagaga

SEQ ID NO: 247723 - DNA, 95 bp, Homo sapiens
ctggggcaaagggaccacggtcaccgtctcctcaggtcaaaatgcagatcttcgtgaaaacccttaccggcaagaccatcacccttgaggtggag

SEQ ID NO: 247724 - DNA, 90 bp, Homo sapiens
ctggtcatgaaaaaattccctcttcagtttacatatatggcagtgatgaaggactgaaccatgaatgcaaactctgcagccagacctttg

SEQ ID NO: 247725 - DNA, 100 bp, Homo sapiens
ctgcacatgggccatgtgcgtgtctacaccatcagcgacaccatagcacggttccagaagatgagagggatgcaggaaaatatagtgctataccaaaagg

SEQ ID NO: 247726 - DNA, 100 bp, Homo sapiens
aaaaggaccaaatgggactgaaggggcatctcggacagtttgcaatagaactgacaatgcctgtggaagacaagtcagaccccccagaggggtctgagga

SEQ ID NO: 247727 - DNA, 83 bp, Homo sapiens
caatggtctcaatctctggaaaaacttcttgccaaccaaagttcacgcctacatcatcagctccctcaagaaagagatgccca

SEQ ID NO: 247728 - DNA, 75 bp, Homo sapiens
taaaaggaaaaccttgccaaggacttctgtaccctcaatatctgcgagcaatgaagtggtgtgatgcattgcaag

SEQ ID NO: 247729 - DNA, 82 bp, Homo sapiens
tggtttttcggatcatgtctggtggctccgcggattataacagctgttcatgaccgacaacgggctgcgggactggcgcgtg

SEQ ID NO: 247730 - DNA, 100 bp, Homo sapiens
cttctagcttcatgttcctggtgtttgacctctccccccacccgctgcctgcggttttgtttctgttaaaacgtcacctgatgaaatagaatgaatcctg

SEQ ID NO: 247731 - DNA, 78 bp, Homo sapiens
acttccacctgggaatctggccagagaaggcttctttgctaaagaatgatgagactaaggccctcactccagcttcct

SEQ ID NO: 247732 - DNA, 100 bp, Homo sapiens
ggctgatctgcaagacaaagaagttggagatggaactacttcagtggttaagcagctgcaggaggaaacgccacctggtggtcctttaactgaagctttg

SEQ ID NO: 247733 - DNA, 100 bp, Homo sapiens
aaggattccaagtaactcttatttggtacgtagagaatacaggaaattcttcagagccaatgctggaaagaaaatctatgagtttacgcttcagagaatt

SEQ ID NO: 247734 - DNA, 85 bp, Homo sapiens
cttaacacctacctgattctggcatacacacagtgacctgcccctaaaggttcatgcgcatccctcagacccctctttagacgcg

SEQ ID NO: 247735 - DNA, 96 bp, Homo sapiens
agcccccctcaacacggaccgcgcccgccgggcacacaagaatggtcactgccacgtggtgcttgcgcagtgccgagtgctgatggccagtgtggg

SEQ ID NO: 247736 - DNA, 75 bp, Homo sapiens
atcactacgattcagtgctactcccttagtaactatgcagttttaatgggtggagagattcaaccagttagcgtg

SEQ ID NO: 247737 - DNA, 100 bp, Homo sapiens
atggaacatctgctgtataccagacaacattgcttttaatagatattacctctgactggtctcctcatgaccatatccctgttgtccattgtgtatggag

SEQ ID NO: 247738 - DNA, 74 bp, Homo sapiens
taaagctggtctgttctaactgaggaaacctgtccagtttaagtcgtcttggtctgagatataacagactgtca

SEQ ID NO: 247739 - DNA, 83 bp, Homo sapiens
cagaattcggccatgagccgctacatactcatcatggggctcctgtacaaggtgacttaagagattaaaattaatttggttgc

SEQ ID NO: 247740 - DNA, 106 bp, Homo sapiens
atcccggacctgagcagcccgtacctctccaacggacccctgtctcccggaggagcgcgcaccacgtccttctatggccgcttcaggcacttcttggatatcatcg

SEQ ID NO: 247741 - DNA, 90 bp, Homo sapiens
cagacttatgctggaactgggttttagcaaggtcttcgatgccaagaacatgatggctgcctgtgacccccgccacggccgatacctcac

SEQ ID NO: 247742 - DNA, 75 bp, Homo sapiens
ctgagctagagggtgaagctggcggagcaggaggatgggcgggcacagtcagtggtgtgctgctagttacaccaa

SEQ ID NO: 247743 - DNA, 138 bp, Homo sapiens
cagagattgaaggagtgaattattcaggattgggtgctgacccaggaagaggacagaccatcagcaaacagtgagtttttccagattctcagtcagaatggagcacctcaggcagatgtgagcatgtacagtcttgag

SEQ ID NO: 247744 - DNA, 98 bp, Homo sapiens
ggccgacccggcccgtagtgtggaagcagcttcagttcttgcagatacagcgctaggaaaaggggagtaattcaggtctagaatggaaaaactgtttt

SEQ ID NO: 247745 - DNA, 73 bp, Homo sapiens
tcccggtgctcacttggacatgtgcagtcattggagaaatcgatgaagaaacagattctgcgcttgatttggg

SEQ ID NO: 247746 - DNA, 100 bp, Homo sapiens
ctgactggaggctggcggacaggcgacagcgacctgcggcaggatactggtatcgggatgacacaggaagagctggtgtccaacctggggacgattgcca

SEQ ID NO: 247747 - DNA, 83 bp, Homo sapiens
gaaatccgagccactgacctgcctgagaggttccagcatccgcacttccactaatagccaagtagacaagctgaccctgtcag

SEQ ID NO: 247748 - DNA, 75 bp, Homo sapiens
gctttctacggaacatcaatgagccaaacccattcctgctgccgaccatggaagtggagaccctcatccggagtg

SEQ ID NO: 247749 - DNA, 74 bp, Homo sapiens
ttgcccagctatgagagacagagccaggatttgaaaccaggtatttgaaatatctcaccaaaaaatatttgaag

SEQ ID NO: 247750 - DNA, 75 bp, Homo sapiens
tcttctctgcttggaggggatgtggtttccgttaagctggacaacagatgtatcggcaagcagtgtaaacggagg

SEQ ID NO: 247751 - DNA, 75 bp, Homo sapiens
gtaccaagtgctgctggatggactggttctccagatgtccctggtagatttgggaaagaagcttttagaagcggc

SEQ ID NO: 247752 - DNA, 89 bp, Homo sapiens
atcaaacttgccttcctgttctccaagaccaggtcaaaatgcagatcttcgtgaaaacccttaccggcaagaccatcacccttgaggtg

SEQ ID NO: 247753 - DNA, 90 bp, Homo sapiens
gcattggtgggaatatgtggatcctacagttactctagaattattagatggagtctctaccacccgtccagtttgactggagtagcagtg

SEQ ID NO: 247754 - DNA, 74 bp, Homo sapiens
atcagactcttgaaggtcatagtggaattcctcctgatcagcagagactgatctttgctggcaagcagctggaa

SEQ ID NO: 247755 - DNA, 83 bp, Homo sapiens
cattttccagacactgaaagagcagaatggctaaataaggaccatccgtgatgaccatgagctgcacatacaccctgcgtcag

SEQ ID NO: 247756 - DNA, 136 bp, Homo sapiens
cccagccgaggtaccgctgaagaggaatcaattttggtatgcagataatcactgggctcatgggtcttgctctttacaaagagagtaaaggagtttggaattagtccatcagacattcccttctcacagggtagtg

SEQ ID NO: 247757 - DNA, 100 bp, Homo sapiens
aagaaaagaaggggaagaagatcaaaacccaccatgccccaggaagagacacctctgtttcttgctgcccgggaggggagctatgaagcagccaagatcc

SEQ ID NO: 247758 - DNA, 75 bp, Homo sapiens
caaaaatcccagatccagaagctgtcaagccagatgactggttgtgggctgcacactgcagaaagatacagctga

SEQ ID NO: 247759 - DNA, 96 bp, Homo sapiens
gcgacgtgcagcggaggagggcaaggactacccctttgccaggttcaataagattcgccatgaagtcagcgtaaataatgtaacacataaactgtg

SEQ ID NO: 247760 - DNA, 75 bp, Homo sapiens
ctctcgcactctgttcttccgccgctccgccgtcgcgtttctctgccggcacaccctctggaagcgggtccaagg

SEQ ID NO: 247761 - DNA, 82 bp, Homo sapiens
agacgttttccggagggattccatcataggatgatcggctgaatgtaacagaggaactaacgtccaacgacaagacgaggat

SEQ ID NO: 247762 - DNA, 100 bp, Homo sapiens
ccgggaccattctgatcatcctcactggacgccacaggggcaaggaccttttggagagcgagacgatcaacaggtgtttatccagaaagttgttcccatc

SEQ ID NO: 247763 - DNA, 82 bp, Homo sapiens
attcactgtggtccagaagcagatatcggtgaggtgtgggcccatcgctggatggatctgtcagaacacggctttgggctgg

SEQ ID NO: 247764 - DNA, 75 bp, Homo sapiens
gccgcgatggctgcgcagggagagccccaggtccagttcaaaaacttgatggagagtttggattcattgctttgt

SEQ ID NO: 247765 - DNA, 100 bp, Homo sapiens
ctctctgctgcggcgcggggaccgctgtgctctcggagatgactgatgacatggattcatacacaaacgtatatcgtatgttctccaaagagcctcaaaa

SEQ ID NO: 247766 - DNA, 75 bp, Homo sapiens
aaaggcggctcgggagattcagccgtgaagcaagtgcagatagatggcctttttcgaaatcagtatgacaatgat

SEQ ID NO: 247767 - DNA, 100 bp, Homo sapiens
tctgaagagctatggtgaaacaccactgaagcattgccaaggataccgttaaccctggataaagagaatggaggttacctctgtccgtgtagattcctaa

SEQ ID NO: 247768 - DNA, 100 bp, Homo sapiens
gaaggaacgaggcaaggagctaaagcagcgtgcgttcagccctggggtgttggagagcacaatggctgaacaagtccttcctcaggctttgtatttgagc

SEQ ID NO: 247769 - DNA, 122 bp, Homo sapiens
ttctcttcccagcagagacagcaccaggggtcagcagggggccagctcaggacacacagacccagctggaactcgggacagagcagaatgggctgatatagatccggtgccgcagaatgatg

SEQ ID NO: 247770 - DNA, 112 bp, Homo sapiens
aatgagtggggagaacttatagcccttgaagtcaaccatctcacacctttccaaaggacgcgaccataactctaaaagtgtctccagaacgctatagctatggcacctccag

SEQ ID NO: 247771 - DNA, 97 bp, Homo sapiens
tgtagtgactcgctactacagagcacccgaggtcatccttggcatgggctacaaggaaaacgccaaaatgaagtttaatccctttgtgacttccgac

SEQ ID NO: 247772 - DNA, 75 bp, Homo sapiens
agctaaagcagcgtgcgttcagccctgggaacaagttgaaatcatcgcagaaggataaagttcgtcagtttatga

SEQ ID NO: 247773 - DNA, 110 bp, Homo sapiens
tgagccctttctcagtgggactagttcgaactatgtggaggagatgtactgtgcttggctggaaaaccccaaaagtgtacataaggagtctccccaggacagtgctatca

SEQ ID NO: 247774 - DNA, 75 bp, Homo sapiens
gaagaaggtcagtgtgcttgcttggagatcaggacgcaaaggtgtatgtgctgaagcggccacatgtggacgagt

SEQ ID NO: 247775 - DNA, 100 bp, Homo sapiens
agctcttggatgttcttggacttgacgagagacaagagagacacctccaacttcgacaaagagttcaccagacagcctgtggaactgacccccactgata

SEQ ID NO: 247776 - DNA, 86 bp, Homo sapiens
tccaagagggaggtgtccagtctgctaagctacacacaggaaattcagttcatgaagataagaagtttcttgacaaatacatgccc

SEQ ID NO: 247777 - DNA, 90 bp, Homo sapiens
cagatgcagttcacccaggctgtggagttgaacagacacggtagaagactcgcccattttggaatgtgaccgtctgtccttcaggagagg

SEQ ID NO: 247778 - DNA, 75 bp, Homo sapiens
ctcttaacccagtttgaaacgtaactggttccctgaccaggagaacatattgtgatgttcgtgcctcagagctaa

SEQ ID NO: 247779 - DNA, 136 bp, Homo sapiens
tgcaggctgccattgaggatgagatggagagtgatgagaatgaggacctcatcaacaggttcagtgtggtgcagggctgaccttactttggagccccccagatcacatgtacctgtaccagcatgtcctggccact

SEQ ID NO: 247780 - DNA, 83 bp, Homo sapiens
gcgctgttctcgctccggagccgctgcacatttcggatgtacagttacccagcacgtgtacctcctcctcctcctattgctcg

SEQ ID NO: 247781 - DNA, 100 bp, Homo sapiens
ctgactatcttctcttcaccagctcttcagatcaatatgaagttaaaatgcattttgctaatcagtcaatagaacctttgggaagaaaagtggaaaggtc

SEQ ID NO: 247782 - DNA, 90 bp, Homo sapiens
gccctgtaccgccggcttgccacagtccacatgtcccggagtggagttctacttcctttcccagtacgtgtcgccagccgactccccgtt

SEQ ID NO: 247783 - DNA, 96 bp, Homo sapiens
aaatgctcctttaatttttgaacgagcggaagttcgtttaggaatgggtcattgctttgtgaaacttaacaaactggaaaaagctcgtctggcatt

SEQ ID NO: 247784 - DNA, 88 bp, Homo sapiens
ctagagacagccaacaaaatattcatggttcttgagaaagttcgtcgctgcttcctgtgctccaggagaggacatctcctgtattcct

SEQ ID NO: 247785 - DNA, 98 bp, Homo sapiens
tcgaaggcccgcggcgccccgtgctgcagatgacagcgcttctgctgcaagtagcatggaggtgacagaccgcattgcttcactggagcagagagtcc

SEQ ID NO: 247786 - DNA, 101 bp, Homo sapiens
agggagaatccgaggaatcttctgcacaggagcatatacaacgcagctgtttggtactatcatcactgccaggacaggatgccaattgttatggtgacaga

SEQ ID NO: 247787 - DNA, 51 bp, Homo sapiens
catttagagagcatcagcaataatccagaagcagcaaggtctagcaattcc

SEQ ID NO: 247788 - DNA, 50 bp, Homo sapiens
atgatgatgatgacatcacccttacagagactttggctatgaaaggatta

SEQ ID NO: 247789 - DNA, 114 bp, Homo sapiens
aagcctttaaatgcagcatctgcgatgtgaggaaaggcacctccaccaggtaaaagtgcagttttaaagtgtctcctggatattcacaaaatttttcaggaaaatgacccagcg

SEQ ID NO: 247790 - DNA, 100 bp, Homo sapiens
ggcagctctcatcaccacttccggccactgcaaaagctgcctggtggccttggagtgtctgtaccatcgagagaagaggattgggattgatttggtccat

SEQ ID NO: 247791 - DNA, 100 bp, Homo sapiens
cttttaccactgcctggttgcagaagtgccgaaagagcactggactccggaagaagtcaaattttctactactctactgggatgactgtgggaattgtgg

SEQ ID NO: 247792 - DNA, 77 bp, Homo sapiens
gccggacacgctctgcttcgacaaggacgagttcatgaagtgggtaattccagaattgattggccataccattgtca

SEQ ID NO: 247793 - DNA, 50 bp, Homo sapiens
gtcactcataagcgcgctcaagatggtaagcatccgtggcattcaagacg

SEQ ID NO: 247794 - DNA, 88 bp, Homo sapiens
catcaagggccttcacacaccagagtcaatgaacaggggctccatgggccttaccccttcggccagtcttaaacgggtgtcagcaaga

SEQ ID NO: 247795 - DNA, 117 bp, Homo sapiens
caaaaacagtggataattttgtggccttagctacaggagagactgaacctccattgaatactccagaaaacagggaatatactgctgaaataatgtttgagtccttcaatgttccag

SEQ ID NO: 247796 - DNA, 82 bp, Homo sapiens
tgggtcctcgcttgcagttcagcgaccacgctttaggttggtctcagccttgtgatgtttggagcataggttgcattcttat

SEQ ID NO: 247797 - DNA, 98 bp, Homo sapiens
ctgctgcagaggatggcgtgcgaggtcgccgcggggctggccgccatgcacaagctgcacttcctgcacagggccatttctgagcagtggaggtttca

SEQ ID NO: 247798 - DNA, 101 bp, Homo sapiens
ttacaagtgtgaaccacagcacccagcctgaatttttcttcttctcaccactaaatccaatacgagttcatattgatattggagctgatggcagagccaca

SEQ ID NO: 247799 - DNA, 75 bp, Homo sapiens
aggaggcgcaggagactgaccgcaacggcagggtattgttgcagcatctggcagtgagactgaggatgaggacag

SEQ ID NO: 247800 - DNA, 90 bp, Homo sapiens
agctcaggagcctgaggtccgaaaggaccttttaccaatttgaggctgcgtgggacagctccatgcacaactctctcctgctgaaccggg

SEQ ID NO: 247801 - DNA, 100 bp, Homo sapiens
ggttacaacaactactatggatatggtgattatagcaaacctgcacttgttgccaagtcttccatcttactagatgtgaaaccttgggatgatgagacag

SEQ ID NO: 247802 - DNA, 90 bp, Homo sapiens
cagaatttctgcaagtaattggtgtggatgaggtcaccattgtcaacattttgaccaaccgcagcaatgcacagagacaggatattgcct

SEQ ID NO: 247803 - DNA, 98 bp, Homo sapiens
catgatccccgacctgacgagcccctacctccccaacggatcgctctcgcccaccgcccgaaccagtgatcagcagctggactgtgccttggacctaa

SEQ ID NO: 247804 - DNA, 149 bp, Homo sapiens
tcctttcccacccggcttacagacatatcgctgaccgaatgggaaccccacacctgcagaaggtccttaatcagagctacagagacttctgaagtggagagtctgcgacctcctcggttcttcaatgaagatggagttatcagaccgta

SEQ ID NO: 247805 - DNA, 100 bp, Homo sapiens
cggattcatttagagctgcggaacaggacgccctctgatagctgtgtgtgggggacccaagtcctgagctcggaggcattttctggccagggctgtttcc

SEQ ID NO: 247806 - DNA, 50 bp, Homo sapiens
ggaaaacttgctgcggttgctcaagccaaaactggacaagccaaggcatc

SEQ ID NO: 247807 - DNA, 88 bp, Homo sapiens
cgcaaacgagagctgaggctaatgaaaaacagagttggattacagaaactcctatgaaattgaatatatggagaaaattggctcctcc

SEQ ID NO: 247808 - DNA, 83 bp, Homo sapiens
atactaatcatgctttggaccagtttctggaaggtttgtccgatatgtgcctcgatgccctggggagaccccaactaccgcag

SEQ ID NO: 247809 - DNA, 98 bp, Homo sapiens
taagcagcatctctatatactcctacctcccggcatttaaagttcttcaggagacatatgaagcaaaaaggaatgaattcctgggagaactgcagaag

SEQ ID NO: 247810 - DNA, 76 bp, Homo sapiens
ccacattcaggggaaccgcctcaccgttctgcccccagaactaggtattttggcctctccccagtctgctcctgga

SEQ ID NO: 247811 - DNA, 90 bp, Homo sapiens
cttcaatttagaagagattaaggtgctgttgtaggagcaagggatacaatgatgatcaaggcagatgcagccgttaccttcaggttgtgg

SEQ ID NO: 247812 - DNA, 116 bp, Homo sapiens
ccgactactacgccaaggaggtcacccgcgtgctaatggtggaaacccacaacgctgtcctggataatgaaagacttactgcagaggagatggatgaaaggagacgtcagaacgtg

SEQ ID NO: 247813 - DNA, 100 bp, Homo sapiens
cagggttgaggcgattccagagagcggcggaaaggataagcctcgacttagaagctaccgagttaccctaagaaagcttccttcaaaatgtctactgttc

SEQ ID NO: 247814 - DNA, 100 bp, Homo sapiens
tctccatctacctaggcctctcacaaccattacagcagcagatcatcagactccaccaagagcttgggagacagaagtctctgtgggctgatgttcatgg

SEQ ID NO: 247815 - DNA, 151 bp, Homo sapiens
agggcatgggccgcttcattccgcggaaggcgttcccggagcacctgtaccagcgcgtcaaaatcaggaataaggtgctccgggaacgccttccgcggaatgaagcggcccatgcccttgttgacgttgatgtttccgtcttcaaagacga

SEQ ID NO: 247816 - DNA, 50 bp, Homo sapiens
cctccccagccatgtggaactgcatcaagcatgatggaaccatgtgtgat

SEQ ID NO: 247817 - DNA, 76 bp, Homo sapiens
cggacaaatacgacgacgaggagtttgagtatcggtggaggcctgaattttgatctatgttctacctacatccagc

SEQ ID NO: 247818 - DNA, 100 bp, Homo sapiens
cctgtttgagaaaaggcctaagaattttggcattgattacgccttcccatacattatattagtgttatctttggttactctggctgtgtacatgtctgct

SEQ ID NO: 247819 - DNA, 88 bp, Homo sapiens
gtggtatggccattgaaaaacaaaaactcttcttcttccccatcaggaccattttatcaaaacaggaacacagaggacgatcgccccc

SEQ ID NO: 247820 - DNA, 98 bp, Homo sapiens
ctgctgatacagaagagatggatattgaaatggacagtggagatgaagcctaagaatatgatcagcatgtttccccctccaaggacatccggacagcc

SEQ ID NO: 247821 - DNA, 82 bp, Homo sapiens
cagatgcagctgttttaactatccctgcctgtgactttcaaggatgtacgaagtaggtccaaagttgttgaccgtatttaca

SEQ ID NO: 247822 - DNA, 85 bp, Homo sapiens
gatggacggtcactcagcctatggaggcttcagggatgacttcttagggggcaggggaggtagtcgcccaggcgaccggcgaaca

SEQ ID NO: 247823 - DNA, 116 bp, Homo sapiens
ccgccccccaggaggggcgagagggagccgcagctgatgtcagagttcggaatccagcattaagaagaaatttctcaagaggaaaggaaagaccgacagtccctggatcaagccag

SEQ ID NO: 247824 - DNA, 100 bp, Homo sapiens
agaagctattattatctctacagaagaagacagggaggcccagagatgttaggtaacttgcccaagatcacccaactggacaagatccagaagctttatg

SEQ ID NO: 247825 - DNA, 83 bp, Homo sapiens
gttagcttcagagttctttgtggatggacttgattctgatgagagattctctaaccatggcacaggtagagaaacgtggaggt

SEQ ID NO: 247826 - DNA, 110 bp, Homo sapiens
ctgaagagcgacaagccgctggcagccgcggatctcaccgccgctcagggtgctggagaatctggtaaaagcaccattgtgaagcagatgaggatcctgcatgttaatgg

SEQ ID NO: 247827 - DNA, 74 bp, Homo sapiens
acgcttcccagactcagtctttggtaaaagctgctgaaacatgtcaagagccgaaggaattcagattgccgaaa

SEQ ID NO: 247828 - DNA, 98 bp, Homo sapiens
gccggcctagcgtcctggaattacttcaatcaagtctgtggtttaccagcagagttcaaaagaatctgccactttgcagccatttttcacgttgcagt

SEQ ID NO: 247829 - DNA, 100 bp, Homo sapiens
gctgtttcgggccagcgacccgctgctcagcgtcctcatgtggggggtaaaccactcgattcacaatgacatcctttcaagaagtcccattgcagacttc

SEQ ID NO: 247830 - DNA, 82 bp, Homo sapiens
gttggaagcagccgatccagcctgcggagcctgtggggcagggagttaaatacctgtgcatcccagcagcggattcaccatc

SEQ ID NO: 247831 - DNA, 100 bp, Homo sapiens
gtttgcatatatcaactgtggccttaatgagcatgttgacagcatcgatgctagacagacagacctcagcaatggagaatatccccatcatcacaactgt

SEQ ID NO: 247832 - DNA, 100 bp, Homo sapiens
ctccggcccctccagctgccccctgtgtggcaaacctttcttgagctcagctccccagaggcccatctcaacacagagaaccgctgcggctcctaaggct

SEQ ID NO: 247833 - DNA, 86 bp, Homo sapiens
actactggggccagggaaccctggtcaccgtctcctcagtgagacggtttaagcggaagcatcttactgccattgactgccagcat

SEQ ID NO: 247834 - DNA, 91 bp, Homo sapiens
aacgaggcaaggagctaaagcagcgtgcgttcagccctgggcgacttcctgattctcccaggattcatagacttcatagctgatgaggtgg

SEQ ID NO: 247835 - DNA, 97 bp, Homo sapiens
caagagcaagatcaccgtgacatccgaggtgcctttctccaaaaggagagctgatagtattcattccactcttttcataattggtcagaacagttag

SEQ ID NO: 247836 - DNA, 75 bp, Homo sapiens
ttttcccctccccgggccacccagcccgcccaactcccagcggagagcaaggtatgattatcgggaaatgctgca

SEQ ID NO: 247837 - DNA, 98 bp, Homo sapiens
tctgcaggacatcactttagatgatgaatgattacggacctgaagccaaagaacaagatgcgctagtggacagattgctgaccaggggcttgagagct

SEQ ID NO: 247838 - DNA, 74 bp, Homo sapiens
acaaacctgttgctaatcatcaatacaatgtctacttccccagcaggacagcatcattctcctatatcttctag

SEQ ID NO: 247839 - DNA, 96 bp, Homo sapiens
gttataatgcttctatggcagattccccaggtgtgtgagcagagctgcgcggccctgtgcttcctggccctgcgtaagcccgacaacagccgcatc

SEQ ID NO: 247840 - DNA, 82 bp, Homo sapiens
ctgctgctgcactgacacggatgaaagcagaaaacagccacaatgcaggacaagtggacacagtggtgagatcaagtcggta

SEQ ID NO: 247841 - DNA, 101 bp, Homo sapiens
tatctcttctttaacttatcgtggaaataaaacagctgttttgcagattggactacaagactgggctggcttagatgaagatgaagatgcacatgtctggg

SEQ ID NO: 247842 - DNA, 75 bp, Homo sapiens
acctttcggcttctgagacggcggcagcagcggcattcaggaccctgatgcttggtgtgacctgagtaaatttga

SEQ ID NO: 247843 - DNA, 99 bp, Homo sapiens
gacatggacaccaaacatttcctgccgctcgggcacttcaggcaaccggggcctccagggggagaaaggcgagaaggtgaggagagaaggaactcatca

SEQ ID NO: 247844 - DNA, 100 bp, Homo sapiens
tggacttacgaggagcagtttaagcaggtctcggcgcggaagatggccggcggcgtggacggccccatcgggatcccgttccccgaccacagcagcgaca

SEQ ID NO: 247845 - DNA, 97 bp, Homo sapiens
agcgagaagtgctttgcggcctgccgacgagcctacttcaagagaaataaggatctttcgaagatggtttggctgccttggagatttggagatctga

SEQ ID NO: 247846 - DNA, 100 bp, Homo sapiens
cttcttcgtgaggctgctcttcgagcgcctaaattaacaatggcgaaatgcaggcgaaatgtggaaaatttcctagaagcttgcagaaaaattggtgtac

SEQ ID NO: 247847 - DNA, 98 bp, Homo sapiens
tggcggacagtgcggaactaaagtgtctatgaaccagatagaaatgcattacggaggaaagaacgagaaagaagaaatcaagaaactcaacaggatga

SEQ ID NO: 247848 - DNA, 98 bp, Homo sapiens
aaaagaccaatggaagttgttaatacagaggcgaatctttctgcattgaatttgaagatttctgaacagaaggaaatattaataaaagaattagacac

SEQ ID NO: 247849 - DNA, 75 bp, Homo sapiens
gaaagcattgatggaatgtgctttagaagttaaaaagggagatgcacttatttacatggaaccagagaaacaagt

SEQ ID NO: 247850 - DNA, 100 bp, Homo sapiens
aagagtcccttcgttgtgcaggttggggaaggccacctggttcttagtcccccacctccgcacacgggccctgccctcatcagtgctctcaacatcctgg

SEQ ID NO: 247851 - DNA, 114 bp, Homo sapiens
ccggcgtgccccaccatgtcagacgcagccgtagacaccagctccgaaatcaccaccaagggtctcctatggacagaagtgcgggcaaggagctttgttcctccccgatgtcac

SEQ ID NO: 247852 - DNA, 90 bp, Homo sapiens
agattgagtccaagttcaaccaagccattgctgcagccacaggtccgcacggaaaaccaggagctccaagactgccgcacactcaacatc

SEQ ID NO: 247853 - DNA, 90 bp, Homo sapiens
cccaccgaggccatgggcccaggagttctgctgctcctgctggtggccacagcttggcatggtgtggcaggtgtttccagtgccatggac

SEQ ID NO: 247854 - DNA, 100 bp, Homo sapiens
gggatgaagaaggcttggaacccattggaaatgtccatccagttgggagctatgagtcctctgaaatgaacagcatagctcgcttctcatatgtgcggat

SEQ ID NO: 247855 - DNA, 50 bp, Homo sapiens
taaagcagcgtgcgttcagccctggggattatatctgtccaagatgcgag

SEQ ID NO: 247856 - DNA, 51 bp, Homo sapiens
agcctcccgagtagctggaaccacaggtaacactcccaaaccttttcagtg

SEQ ID NO: 247857 - DNA, 96 bp, Homo sapiens
ctggactctgcagagtgaagagaaaatagcaaacgatccagacggcagggagtgcatcaaaggtgtgaacacagccagaagatacctgaaattcct

SEQ ID NO: 247858 - DNA, 82 bp, Homo sapiens
tacctgcagaaggtctctggagacatcttcagcaggaacatgcttaccctgctgatgaactcatgcctttaacctgtagagg

SEQ ID NO: 247859 - DNA, 78 bp, Homo sapiens
ctgtgtgtacatcacccccatggaggccctggcagagcagtggcattggcctggccctctgcaagcggctgctggcgg

SEQ ID NO: 247860 - DNA, 96 bp, Homo sapiens
catgatcattgacagagagaaccagtgcgtcattatcaggttaccttttcgacaaaatgattcatctagtcattgccagaagagtgggtctcctat

SEQ ID NO: 247861 - DNA, 98 bp, Homo sapiens
tgagcggcggcagaggctacggggctcggtttggctgactggggagtcggcaggcggcaggtgacttgcttttggagggcttcaacaactacaccttc

SEQ ID NO: 247862 - DNA, 100 bp, Homo sapiens
gctgctgcagcgggcgcggctggccgagcaggcggagcgctacgacgacatggcctccgctatgaaggcggttttgcacactagggaccaagaagccctc

SEQ ID NO: 247863 - DNA, 98 bp, Homo sapiens
agaagcatcagctggaacagttagaaagtcagtttgtcttaatgcagcaatatgaagtgctcctttgtgtacaagatcatgatgatccagccattgat

SEQ ID NO: 247864 - DNA, 98 bp, Homo sapiens
tttgaagtgaagattgtcagcaaaggaagagatgggttcatgggcgggggtggtgagagctgcagcctcatcgcggaaggactcagcacagccttgca

SEQ ID NO: 247865 - DNA, 83 bp, Homo sapiens
ggacaatggtcaccgtctcttcaggttaactccgttgactgccaaaatagcatccccaacgtgcagccctccgcatctatcag

SEQ ID NO: 247866 - DNA, 100 bp, Homo sapiens
cctcccgagtacctgagattagcccagattcatctgaaaactacattaagatgaagacctttgaaggtttctgtgctttgcatctcgctgcaagtcaagg

SEQ ID NO: 247867 - DNA, 98 bp, Homo sapiens
aaggatattcctcatatatcatgtctcacagggcacatatgggcaggaagtttctatggaagaaatgatccctctggattctgcaaaggagtctttag

SEQ ID NO: 247868 - DNA, 75 bp, Homo sapiens
ccgctgctggcagttttgccaggtgtttgttaccttgccaagaaggatcaagaaggtggagaagaaaagaaatct

SEQ ID NO: 247869 - DNA, 83 bp, Homo sapiens
tctgctgcaccgacctcgacgtcttgcctgtgtcccacttgttcgcggcctatagccttatgccagcctggaccatcttggag

SEQ ID NO: 247870 - DNA, 75 bp, Homo sapiens
caacaacataaatttccagagaaaatctgttgtggaatggaagttggatacactttgtgacttgtacgagacact

SEQ ID NO: 247871 - DNA, 100 bp, Homo sapiens
accataacagccaaaagtcacaagtcggcgtgatgagaggctggacctacagtggagtctggagggacatcagctgggagtggtgtctgtggacatcagc

SEQ ID NO: 247872 - DNA, 90 bp, Homo sapiens
cattcacatacgtcaaggaaattgagaaccgagctgaagctgccatggaattcttacaagaattaaatagcgatgtctctggaagttttg

SEQ ID NO: 247873 - DNA, 90 bp, Homo sapiens
aaaggcctctcctttggtggtggctgcagcggcagcagcagcggtagctgcccaaggaggatgtgctgggtggcgtcctgatcaccgcac

SEQ ID NO: 247874 - DNA, 75 bp, Homo sapiens
ggggagcacagagaaagagaatgatgaagagaaaggcccggagactatatgggcacggttatgaaatattttgtg

SEQ ID NO: 247875 - DNA, 74 bp, Homo sapiens
cttaacccagaagtagctgaatgtgttactccattgctgaggagtggttacaataagctcttgtgacctcctgg

SEQ ID NO: 247876 - DNA, 74 bp, Homo sapiens
cgtcctgcaggagggcttcaatgagctggttcgatgcccagaactgaatgctgtgctccagctgtggcctcacc

SEQ ID NO: 247877 - DNA, 90 bp, Homo sapiens
attatgaagttataaggttccccatggtgtttgggaaatgggaagtaatgacagctggcacctgaactaagtacttttataggcaacacc

SEQ ID NO: 247878 - DNA, 75 bp, Homo sapiens
gaagaggcccaccctggagtaaccctcactggagaatccagagtggctgtcgctgggcgcggactccaacgggag

SEQ ID NO: 247879 - DNA, 83 bp, Homo sapiens
gtgatttcttccaaagcacaggaatctcactctgttaaagctggtctgttctaactgaggcttgggcactgtttaaaggaaag

SEQ ID NO: 247880 - DNA, 100 bp, Homo sapiens
ggaatttgacccaccttgggattttctctatgaacttatgaaaaccttcagttacagatctcccttgagtttagaaatctggctgagaaataccaaacag

SEQ ID NO: 247881 - DNA, 80 bp, Homo sapiens
ctaggaggagcactccaaggatttgaattttctcccaaactggttggcttgactggcacgagagaagaggtcgatcaagt

SEQ ID NO: 247882 - DNA, 100 bp, Homo sapiens
ggttctccattgtgatgaaagcacatggtacagagtgcttgtgatttcacgtatttttgctgaactcgtaaaagagacacttggatggtggattaaccag

SEQ ID NO: 247883 - DNA, 100 bp, Homo sapiens
cagcaacactcctgaccaagcccctgagcacatcagcaaagaaattgaacttagctcattaagggaagctttgtctttcgtgtcattaattgatggatat

SEQ ID NO: 247884 - DNA, 82 bp, Homo sapiens
atcgagccttggcggcggacgtgcaggatgatcggctgaatgtaacagaggaactaacgtccaacgacaagacgaggattct

SEQ ID NO: 247885 - DNA, 129 bp, Homo sapiens
ctgaaagctgccgctgaagctgccgccgttgcctccgccgccaagagtgagcgagcggacccgcgatgggtgactgaaaactcctgaggcatttcctggactagaatgggtagtgaagacccatgtcag

SEQ ID NO: 247886 - DNA, 82 bp, Homo sapiens
gtgtcatgttggttgggtaatggattccagagaccgtgggccaggaacatcctctgtcagatgcttgtttgctactgatggg

SEQ ID NO: 247887 - DNA, 103 bp, Homo sapiens
gcaggacgaggtgtcggcgcgggagcagcacttccacagccaagtgcgggagtccacggaacattttagtggacaaaccaaatgaccaatcttcaagatggtc

SEQ ID NO: 247888 - DNA, 83 bp, Homo sapiens
taagattcggagagagaggtgctagtggctggacttgacctggaaagccgattatgtttcgaggggaagtacgtttaaatgtg

SEQ ID NO: 247889 - DNA, 90 bp, Homo sapiens
gcctcatcacccggctgctggaggtttgtgaagtgtggatatgcaggctctaactttccagaacacatcttcccagctttggttggaaga

SEQ ID NO: 247890 - DNA, 100 bp, Homo sapiens
gtgcctttgaaggagaatacacacatcacaaagatcctggaatatataaatgtgttgtttgtggaactccattgtttaaatggagtctcgctctgtcgcc

SEQ ID NO: 247891 - DNA, 80 bp, Homo sapiens
ggagatccacagctaagacgccgggactccctggaaacctagaaatgcaaacggggattcagcgtccgatcctttggaac

SEQ ID NO: 247892 - DNA, 98 bp, Homo sapiens
cggaggcagaggtggaggcgctttgaaaggctttacaggaagtatggtgctggcatctgcttggcttctagagagtcttacaatcgtggaggaaggtg

SEQ ID NO: 247893 - DNA, 74 bp, Homo sapiens
ttcaccatcaacaaagaagaccacacactgggaaacatcattaaatcgtgccaatgggtcatgtttggttagaa

SEQ ID NO: 247894 - DNA, 75 bp, Homo sapiens
aagcggccaagctgctcaacgtcctcctgacaaggtgatccgggcgggccccgcaggaattttatcccctcaccg

SEQ ID NO: 247895 - DNA, 99 bp, Homo sapiens
ccatgtcttccttgtggccaatttcagccagattgagacgctgacctccgtgttccagaagaagttgtgcaggctcaaaatttgggcggggaactggac

SEQ ID NO: 247896 - DNA, 85 bp, Homo sapiens
ggacgcgggctctgaggatgagctggaggagggggctgaagaaatgtcaacaattgggagttttgaaggattccaggctgtgtct

SEQ ID NO: 247897 - DNA, 99 bp, Homo sapiens
gataccgtttattaaaagagctgtggctgtaaaaatccaggggcagaacaaggagatgttggcggccgcctgtcagatgttcctggggaagacggaggc

SEQ ID NO: 247898 - DNA, 83 bp, Homo sapiens
gaatctaatcaggaggttgctaacccagaacactatattaaacatcccctacagaacaggtggagtctcgctctgtcgcccag

SEQ ID NO: 247899 - DNA, 100 bp, Homo sapiens
atgggtggttgcccatctctgctatgaacaaggttcctggatgcctatgctgagcacaagttacagttctgggcagtgacagctgaaaatgagccttctg

SEQ ID NO: 247900 - DNA, 88 bp, Homo sapiens
gtttatagtcatcatatgtctccagtctccaccaagcactgtttggtagcaggcatttaaacttccctcttagaactgcttttgtggc

SEQ ID NO: 247901 - DNA, 75 bp, Homo sapiens
gtgaagctgatgcgaggtcttctccagtgcatgatgagacaggatctggtgaagaatcatctgatgtatgctgtg

SEQ ID NO: 247902 - DNA, 97 bp, Homo sapiens
gatatcatcatttgtgaaattggagatgttttcaaggccaaaaacctaattgaggcttgcttccggcgtcatggctcaaagggccttcccgaatcct

SEQ ID NO: 247903 - DNA, 87 bp, Homo sapiens
ctcagcctccgcctggtctctgtccagagctggcttccatgacaacacgctttacagatgagctgatggagcaaggattgacttata

SEQ ID NO: 247904 - DNA, 74 bp, Homo sapiens
tgagtattggagccaggagcctgccatgagctgaagaaacacttaaattctggaaatagcgactcagtatcatg

SEQ ID NO: 247905 - DNA, 50 bp, Homo sapiens
gtggaacggctgcttttggaagggccgccttcaacaacaacgtgagcgtg

SEQ ID NO: 247906 - DNA, 100 bp, Homo sapiens
aagaccattcagatgggatctttccggatcaatccagatggcagccagtcagtggtggagaagtacatccaggaagccaggactatgggcagcactatcc

SEQ ID NO: 247907 - DNA, 82 bp, Homo sapiens
ggtcatcactaagaaatcaggtgtagttctgctgaatcctattcctaagctctttcaccatgcctggatcacttcctttgaa

SEQ ID NO: 247908 - DNA, 75 bp, Homo sapiens
cttaacccagaagtagctgaatgtgttactccattgctgaggagtgatttggagcaagaggtggtggtggccttc

SEQ ID NO: 247909 - DNA, 98 bp, Homo sapiens
acaggtcctggaatggcaccagttcctacaggtgtcttcacagatatcccaatcagcaacattcgtcgggtgtccctggctgggcagtgtatgcagaa

SEQ ID NO: 247910 - DNA, 76 bp, Homo sapiens
agaacagctctttgcatccggagagtggacaagaaagaaagtgatgaagcattgggcccaacaatgatgagttgga

SEQ ID NO: 247911 - DNA, 99 bp, Homo sapiens
cgcaggcctcgtgccgttacggccatcacggcggccgcagtggcgtcctggagccctcctcagaagatctcttaggctttctgctcagaaggatttgga

SEQ ID NO: 247912 - DNA, 90 bp, Homo sapiens
ggcggggaagatgttcagcgtagagtcgctggagcgggcggagctgtgcgagagcctcctcacttggacacgatgaggcgagtggtacga

SEQ ID NO: 247913 - DNA, 82 bp, Homo sapiens
caaaggtagaacatggaggatcgtcaggctctaaacaaaattctgctgaagagtctgctgcttctggagcaaagggagatct

SEQ ID NO: 247914 - DNA, 75 bp, Homo sapiens
cactctctcgatgagtcggagaagtccctggtttggataataagtgttctgtgtaccccttgacgtttgacaaaa

SEQ ID NO: 247915 - DNA, 73 bp, Homo sapiens
gacgacccagcagccgccatggctctgctccgagtaaggatggggatgataagaagagacctgtgatcattca

SEQ ID NO: 247916 - DNA, 76 bp, Homo sapiens
cggcggtctctgctgaagagagaagatggcgcttgacggaccagagcagaatgagccggcaggtggtccgctccag

SEQ ID NO: 247917 - DNA, 98 bp, Homo sapiens
cgcaagctgcagaatttcctctacaacgtgctggagcggccgcgcggctgggcgttcatctaccacgcctacgtgaacaacaacctgaccttcctgcg

SEQ ID NO: 247918 - DNA, 75 bp, Homo sapiens
ggcctccccaaccatgtgcaattgtttttagaacttcagccataaaaatgggcagaattttccttgatcatatcg

SEQ ID NO: 247919 - DNA, 93 bp, Homo sapiens
tgtggatgagtttttactccttttagacaagggagtatatggtagttccaatttgccagcagaatgagtacagaaagagactcagaaacgaca

SEQ ID NO: 247920 - DNA, 96 bp, Homo sapiens
gcgaatacagtgaagatgtgcacctgcacacgcccccggcacctggacacttgtattagctttaatagaagagaaatggaggagccatagaatatt

SEQ ID NO: 247921 - DNA, 75 bp, Homo sapiens
gagaagcaacacgggagcaacaccttcacggtcaaggcccagcccaggctgatcaccagttcctcttaggaaccg

SEQ ID NO: 247922 - DNA, 122 bp, Homo sapiens
gaagaaattcatctggaactcagagaagaaggagtttctgggcaggaccggtggcagttggtagatctcggctcaccaaattccacaacctgaaggcagtcgtctgcaaggcctgcatgaag

SEQ ID NO: 247923 - DNA, 89 bp, Homo sapiens
caggaatgtgattcttcatcttccaagctgccactgcagagccccgccatggaagacacgccgttggtgatatcgaagcagaagacgga

SEQ ID NO: 247924 - DNA, 135 bp, Homo sapiens
tgatgatgtctgaagaccgaatttcactacaaaacaggaggcaagagatcatccgtggcttgagatctttacctggtgaaataaacagcgttgttgctcacacaaagcctgtttggtagtctcttcacatggacg

SEQ ID NO: 247925 - DNA, 98 bp, Homo sapiens
gccctgcgtgaggccgcggagcgccagctcaatgaactggactctgactcagaccgcattggagatacctgtgacaacaatcaggatattgatgaaga

SEQ ID NO: 247926 - DNA, 100 bp, Homo sapiens
cgggagccatggagcgcggccctggggcccgggggcgcgggccggggtggtgagaagccctaccactgcaactgggacggctgcggctggaagtttgcgc

SEQ ID NO: 247927 - DNA, 74 bp, Homo sapiens
tgattagcttcgcagtctggaaagctttaggagttcacagtgcccggaggctgtttgatgtcctgcacgagccc

SEQ ID NO: 247928 - DNA, 75 bp, Homo sapiens
tcgacaggaggagatagatgagagcgatgatgatctggatgacaaagcaatccagcatccagcagatgagaagtt

SEQ ID NO: 247929 - DNA, 100 bp, Homo sapiens
tcatgcctcgaaatctcctgacagtgttaatggaagtgaaccaagcattcctcaggaatctttgtctgaagtggaagaaaaatacaagaaagccatggtt

SEQ ID NO: 247930 - DNA, 100 bp, Homo sapiens
cctctgccaaaacccagggctggaagatgtggcagccggccacggagcgcctgcagaggccagtaagcttgtcatgtcctatgtggcagctgtttgtgga

SEQ ID NO: 247931 - DNA, 96 bp, Homo sapiens
ccaggcatcgaaaacaagagcagaagcaccttcagccacagccttataaaagggaaggattccatatggctctcatatcattccattccatctctg

SEQ ID NO: 247932 - DNA, 83 bp, Homo sapiens
ggcgagacgcgcgtgtgtgagcgcgccggaccaagcgggcccagaagcggatctgaagaagacacttgaatcatgggtgacgt

SEQ ID NO: 247933 - DNA, 75 bp, Homo sapiens
tcctcctttgacagggacatcagtggagccttctcagacccacaggatgacgcggcatggcaagaactgcaccgc

SEQ ID NO: 247934 - DNA, 50 bp, Homo sapiens
ccagcggatcagccaagccaggattttatattggaagacatggatcttgc

SEQ ID NO: 247935 - DNA, 100 bp, Homo sapiens
accaaacaagagagacatttctggctctgaaggcgaacgcttcgctggccatttaggagctctgctcaaagccagacgtttcaggcgacctccaagaagg

SEQ ID NO: 247936 - DNA, 100 bp, Homo sapiens
gaacctttctgctatccatattgatcgcctggactgtgcagtatttccagtctgtctcaggcatccagggcattgtggatgcctaccgccaagccctgcc

SEQ ID NO: 247937 - DNA, 98 bp, Homo sapiens
ttcacatggcttctgacagggaaggaaccaagattcaactggcagtttcccacatgggtgtactcgtgttccagtttgaaggaagaaagtactgtgaa

SEQ ID NO: 247938 - DNA, 82 bp, Homo sapiens
agcggagacctcgctgcgctcatggcgtcgcccggctacgagttccagggagctctgtcctggtgaccgtgcccgggttatg

SEQ ID NO: 247939 - DNA, 96 bp, Homo sapiens
gagaggtgcggcgaaggaggcagaggcacttatgcttgtcagacccaacatgagtgaagtttcctgcaagaaacgggacgactatttggaatggcc

SEQ ID NO: 247940 - DNA, 90 bp, Homo sapiens
ggtcggagctgaggatgctcgtctgatgagggacatctcttcagtgggtcatctgtgtgtcacagcctcagaagaccagcgagatggctg

SEQ ID NO: 247941 - DNA, 90 bp, Homo sapiens
agaatgaggtgcgaacaatggtggatccaaactcacgcagtgaccccaagcttcaagaactgatgaagcaaattcaacacccaacagctt

SEQ ID NO: 247942 - DNA, 90 bp, Homo sapiens
cgacatggagctatggaaggagcaccgggaccagcacgacctgacctatgggccgttcaccactgagaaagatcagtctaaagaaaagga

SEQ ID NO: 247943 - DNA, 75 bp, Homo sapiens
caggcctggctcgcgcctctcccaggacccgcctggctgcgagatatcaaagaatggccgagtggattctgagga

SEQ ID NO: 247944 - DNA, 82 bp, Homo sapiens
ataaactgcacttactggcatgctcaaggaatgggctattaagtgtgctggaattgatgttcgtctgtgtgatgttggtgag

SEQ ID NO: 247945 - DNA, 100 bp, Homo sapiens
acgtcggagacatgacagtgcacagctagttctgactcaagcacagagggttcggaaaccgcgttgctgcacggggccccaggggctgcttccccgatat

SEQ ID NO: 247946 - DNA, 100 bp, Homo sapiens
gcaagcgttatatggccagcattttcccattgaggtgcggcattatttatcccagtggattgaaagccaagcatgatggagtttcactcttgtcacccag

SEQ ID NO: 247947 - DNA, 95 bp, Homo sapiens
agatgtatcaaaaaatgcagtcccctcatgccaaggaacccaagacagaccaggatgaggagcattgccggaaagtcaacgagtatctgaacaac

SEQ ID NO: 247948 - DNA, 90 bp, Homo sapiens
cagagctttacgatgtcacttgggaagatgccgctcctacgaggactgctgtggctccaggtgctgtgtgcgggccctctccatacagag

SEQ ID NO: 247949 - DNA, 90 bp, Homo sapiens
acatcctgctggtcaacttgctcattgccatgttcagggacgtccagatcggtgacatcgtcacagtgggcgagtgccggcctctgagca

SEQ ID NO: 247950 - DNA, 100 bp, Homo sapiens
ctcatcaccatgatgttggagcttcggcccggctctgtggtctgtgagtctgaaactaatctggattcactccctctggttgatacccactcaaaaagga

SEQ ID NO: 247951 - DNA, 101 bp, Homo sapiens
agaggattggaggtgtcagtgttaaaggaacctctacaacgaaggtgaagccacggaagataagctgtttctgtaccaaattctacgtggtttggcatatt

SEQ ID NO: 247952 - DNA, 76 bp, Homo sapiens
ttgaaaggcttcaaagctagcagcaaactgcctagttgggctagagctgttgtccccaaaatattttatgtgacag

SEQ ID NO: 247953 - DNA, 105 bp, Homo sapiens
gtgggagtctccgcgtcccgctcgctgggagagaggtacctctccttttccctctccctttccctaagatctttgtagaatttgatggctgtaactggaagcaac

SEQ ID NO: 247954 - DNA, 100 bp, Homo sapiens
gaaaacttggtctttggagctgggtactgcaagccgacttcctcagaggaggagacagaggaggacagtgacctgtcagattatggtgatgatgtggatg

SEQ ID NO: 247955 - DNA, 100 bp, Homo sapiens
caaatgtcaaactaccaaatgggcgagacacacctgcactcttcaacttcaccactcaagacgaaatctcacaaaactgtcccttatcttcagtcacatg

SEQ ID NO: 247956 - DNA, 99 bp, Homo sapiens
gcgtgactggttgagcgggcaggccagcctccgagccgggtggacacaggtgaaaggtgtagcagtcactcggcctacacccacagcatcgaccttgtg

SEQ ID NO: 247957 - DNA, 98 bp, Homo sapiens
tgccgcgaacatctccatcgccgcaggctgtggccaggccagctgggctcggggagcgccagcctgagaggagcgcgtgagcgtcgcgggagcctcgg

SEQ ID NO: 247958 - DNA, 100 bp, Homo sapiens
tgatgagagagaaacatcctgaaaaattcaacagcagatttcagagacaactgtctgaaccctgccaccccttccctcctcagccaggagttcctggaga

SEQ ID NO: 247959 - DNA, 74 bp, Homo sapiens
agctgctatgaggtctcgtaaacagtgtcggagatgtatgcagtgtgacgccaagtttgactttctcaccagaa

SEQ ID NO: 247960 - DNA, 83 bp, Homo sapiens
cggagccctaggccggtgggtgagtgcaccgcgttctcgcacgcgtcatgacaatgcagatcttcgtgaagactctgactggt

SEQ ID NO: 247961 - DNA, 97 bp, Homo sapiens
gggccccgcggccctcgatgaggcagcctgccgcctctcattgtgtatgaccggaatggattcagaattctgctccacttctcccagacgggagccc

SEQ ID NO: 247962 - DNA, 83 bp, Homo sapiens
gggtattacagatgtagatgataaaatcatcaaaagagccaatgaggaggaagttaacatccctaataggagggttctggtta

SEQ ID NO: 247963 - DNA, 98 bp, Homo sapiens
tcttaatgaacaactggaagaatttttagctaatattggaacaagcgttcagaatgtgacaccatcgccacaacaggctcgggtctgtcctccccata

SEQ ID NO: 247964 - DNA, 90 bp, Homo sapiens
gtagccatgactggagaaattacactgagaggtcttgttcttccagccgacgcccccaacccatccctcatcccagagactgatgccgtg

SEQ ID NO: 247965 - DNA, 75 bp, Homo sapiens
tcagcgctcaccgacttctctggctgttcgctgctatgaatctctaatcttaaaagctgaaggaaaagtggagtc

SEQ ID NO: 247966 - DNA, 74 bp, Homo sapiens
ggctctctggaccttgtctcgctcgggagcggaaacagcggcagccagaggtgaataagtctgatgacacagca

SEQ ID NO: 247967 - DNA, 87 bp, Homo sapiens
gaagctggccaaagcctgcccagacggctcacctgtgcgggatggaacaaaaggggacggcaaaacagaacagaaaggcggagataa

SEQ ID NO: 247968 - DNA, 75 bp, Homo sapiens
acacctgttggtgttcagatggagcggcacactagtcatcctaacagaaaaggctgatctactggctgacctttg

SEQ ID NO: 247969 - DNA, 96 bp, Homo sapiens
agcagctcaggaggctgttaaactggctgaatcttctccatttgttgagcgacttctgaaaaagggctatgaagttatttacctcacagaacctgt

SEQ ID NO: 247970 - DNA, 76 bp, Homo sapiens
cgagcagcccagacagcggccacctcaagattttgaacacagcacgaaaacattttggagctggtggaaatcagcg

SEQ ID NO: 247971 - DNA, 99 bp, Homo sapiens
cgacagcctggactctgcaacacctgtcaactccatctgcagtgttcaagatctcttccgttccctgctggcagttcatcagctggatcagccacatgg

SEQ ID NO: 247972 - DNA, 98 bp, Homo sapiens
tctctattctgcctagttgccgtcgctatatccgcagactccgggctatccgggagctcaataggaaacttggctgtaacttcaaaagaagatttgat

SEQ ID NO: 247973 - DNA, 75 bp, Homo sapiens
gactggaaacaatggcatttacagaaagagtcaacagcagtggcaacaggaatgtctgaatctgaacaggctctt

SEQ ID NO: 247974 - DNA, 80 bp, Homo sapiens
agagaaaaggaattagcagaagacattatgtcagggcaattgaaggaacagactaaaaatcgtgtcctggaaggaaacta

SEQ ID NO: 247975 - DNA, 83 bp, Homo sapiens
ctgggatcccggccaccagcaattgtccggtggtggacataatgcgagttaacgtggacaaggttctggaaagagaccagaag

SEQ ID NO: 247976 - DNA, 100 bp, Homo sapiens
gaccacgcctgcatccccatcaagatttggagcaagaggtggtggtggccttcccccgaagaaatttggtaatcctggggagcgtttgcgtaaaaaaaag

SEQ ID NO: 247977 - DNA, 97 bp, Homo sapiens
cagtcgccgccgccgccgccgcaggccgggaggagccgcagcgccgggcgaccccgcccgggcctcggtggtctaccatcacggcaacagtgcgacg

SEQ ID NO: 247978 - DNA, 121 bp, Homo sapiens
gagcctggtggggtggcggagggggagactgtgccgtggagggcctcgccatgtcctgctgcccggccaacgcagacccgtcagtgataaactgtctgcataacctgtcccgtcgtatcgc

SEQ ID NO: 247979 - DNA, 100 bp, Homo sapiens
cgggactatgatgcactcttccccgtggccgaagacatcagcttgctgcagcaggcctcatcagtcttatgtatgtccctgggaagctgcatgatgtgga

SEQ ID NO: 247980 - DNA, 50 bp, Homo sapiens
gaaaggattcgttacagccagagattggtctctaattaacagaagatggc

SEQ ID NO: 247981 - DNA, 129 bp, Homo sapiens
cgtcgccgcagccccccaatgcggccgcgagaagcagcgggggggcaggcgatcgaagctctgaggatgaagtggatgtgcttttacatggaactcctgaccaaaaacgaaaactcatcagagaatgtc

SEQ ID NO: 247982 - DNA, 93 bp, Homo sapiens
cggctcttcccgcccgccttccgccgtctcttcgagttcttcgtgctgctcaaggtccgcgggagagctgtggggcttggtgagtgtttcgtg

SEQ ID NO: 247983 - DNA, 100 bp, Homo sapiens
tttgatccagaacttgcagcaacaataggatttagaaataccagcagtgcccatactccatagcatggtgcaaaaattcccaggcgtgtcatttgggatc

SEQ ID NO: 247984 - DNA, 75 bp, Homo sapiens
ccagggggccggagggccagggtctcccggagaataccctctaccatctgctttggtcagggtgccgctcgagga

SEQ ID NO: 247985 - DNA, 75 bp, Homo sapiens
cgaatgctctctacaccaaatgcctccagcagcttctgagggactctcacctgtggttgaagttgacatctgacg

SEQ ID NO: 247986 - DNA, 98 bp, Homo sapiens
tcagagatgtttgacacagtctggaattaatggaacttactctcgtctagatgttgatggaatatatcgagttagtggcaatctggcaacaatacaga

SEQ ID NO: 247987 - DNA, 78 bp, Homo sapiens
gacgagcagccttcagggagcgtggagacagtggacagaggactgcagaaaatcaacctatcctccttcaggaccaac

SEQ ID NO: 247988 - DNA, 100 bp, Homo sapiens
tttctttatgcctaccgctgtgtcctaggccctcatcagaattggcagagggggtcgatttgggaggaaaggtgtggctataaactttgttactgaagaa

SEQ ID NO: 247989 - DNA, 80 bp, Homo sapiens
tccaagcaataacccaagcaaaacttcagatgcagatttaagaggggtgcagatcccggaatgcctgaaccaactgtttt

SEQ ID NO: 247990 - DNA, 119 bp, Homo sapiens
ggtccgattagccttttctctgccttgcttgcttgagcttcagcggaattcgaaatgacaatgcagatcttcgtgaagactctgactggtaagaccatcaccctcgaggttgagcccag

SEQ ID NO: 247991 - DNA, 50 bp, Homo sapiens
ctccgaagtcggggacgcgggctcgggtccacttcctaacacatgctgcc

SEQ ID NO: 247992 - DNA, 88 bp, Homo sapiens
acgatcccaaccgccgagggctcatcatgctaatactggagaccgtggacagaccaataatgctgcttctgcatcagcttccaactcc

SEQ ID NO: 247993 - DNA, 100 bp, Homo sapiens
gtgcttcgagatggcagatgttctggctacacaggaaccctggattgcttgttacagcttccaattgaagacttgtgcagtttaacatcccagtcactgc

SEQ ID NO: 247994 - DNA, 100 bp, Homo sapiens
tttgtgagaaaattttgccgtggttggacaaatcagtagatttcattggactgagagtggctttcacaatggaagggatcagtaatttcaagacaccaag

SEQ ID NO: 247995 - DNA, 98 bp, Homo sapiens
aacattattgctatgggatttcctgcagaaagacttgaaggcgtatacaggaacaatattgatgatgtagtaagaagcttgagtgcccaagggtttga

SEQ ID NO: 247996 - DNA, 96 bp, Homo sapiens
ctgattccctgtgttctgcttttttcattgttccactggacgctcatcagagggaagatctttttcctcaattgatcctaatgtggctcttacttt

SEQ ID NO: 247997 - DNA, 95 bp, Homo sapiens
gatgtcatcaccgtcatcgagggaaggtgtccctggccagtgtccttccacctgtccacaagcatggggaacatcttcgccaacctcttcaaggg

SEQ ID NO: 247998 - DNA, 75 bp, Homo sapiens
cgcgctcaagttcgagaacgcggccgccggggcctgctttcttccccgggcgatgtgcagagatctttgccaggg

SEQ ID NO: 247999 - DNA, 75 bp, Homo sapiens
gatgaatcctcacagtatttaaccagaataactataggccttcatggtgaaacacctcttggagtatacccaggc

SEQ ID NO: 248000 - DNA, 74 bp, Homo sapiens
aacacggtcttgctgaaagccagggaagcaataggcgaatatgaagaccttagagcagagaaccagaaaacaaa

SEQ ID NO: 248001 - DNA, 80 bp, Homo sapiens
ttcagtatcactcgctcccttgatgatcttgagaccatggtgaatccgggcagcagctcgcagccgcccccggtgacggc

SEQ ID NO: 248002 - DNA, 98 bp, Homo sapiens
agaacagaaggatctctccttaacgcctttcaccattaagaggaaagcgatggaggagctgagcgctgatgaggtcaaaatgcagatcttcgtgaaaa

SEQ ID NO: 248003 - DNA, 95 bp, Homo sapiens
gagaaccgggaaggcgcaaacctcctctccatgctcaaggccgacgtcaacctgtcccacagcgaaagctacgagttccagggagctctgtcctg

SEQ ID NO: 248004 - DNA, 100 bp, Homo sapiens
ctgctgtgctagcaatcagcgagactccgtgggcgtaggaccctccgagccagttacgccccatggtgtccatcctgccagcagactgattcagaatggg

SEQ ID NO: 248005 - DNA, 100 bp, Homo sapiens
ttggaaatcagcccagatgtgcatgcaccagtccacgtgtggcaggaccaagggaagtgtcttcacaaagatgagagcttcctggggaccaagatttacc

SEQ ID NO: 248006 - DNA, 94 bp, Homo sapiens
agcggttctccagccatcagtggaaccaacccagccgaccccccaggagccgggtgtgggctgagccctgcctgattgatgctgccaaggagga

SEQ ID NO: 248007 - DNA, 75 bp, Homo sapiens
aacctgtgagttcaacatgatagagcagagtggaccaccccatgaacctcggattctggttgatctgaaaaatga

SEQ ID NO: 248008 - DNA, 88 bp, Homo sapiens
gacggcggcctccagctccgacccgcggtcccagtctccagctgcctctgactgctcatcctcatcctcctcggccagcctgccttcc

SEQ ID NO: 248009 - DNA, 75 bp, Homo sapiens
gatttgtgagttaagagcagaggtgaaagaaaagatgttgtcccggttaagagtagtttccaccacttgtacttt

SEQ ID NO: 248010 - DNA, 52 bp, Homo sapiens
gacgggaaaaatagtagcaccagctgctgaatcaggaataataaaagttaaa

SEQ ID NO: 248011 - DNA, 82 bp, Homo sapiens
gagtacctgaaccggcacctgcacacctggatccaggataacggaggctggatccagacatttaatgtggatgcaccatgcc

SEQ ID NO: 248012 - DNA, 90 bp, Homo sapiens
acattcagcatgacctcacatacaacctccgagaaggtcatgagagtgatacaattactacggtaccccaaagccgccagcagaaccagc

SEQ ID NO: 248013 - DNA, 100 bp, Homo sapiens
gacatccattgggatacaattgtctcttacagtacatcaatcagaggaagaagttcagaaggcgctgggtgggagctcttgcctctgtaactatccccag

SEQ ID NO: 248014 - DNA, 100 bp, Homo sapiens
aaccattacaatagatcgagcctgcagacaagaaacattcgtttatgagatggtaattgctgccatggaaacacaactgtctaatgggccaacttgcaat

SEQ ID NO: 248015 - DNA, 90 bp, Homo sapiens
gcaaggaagaggacaggtagtggagatcctgcaatctgaaaagcagactgaaaggtctcacagggatactgggtttgggcattgcggctc

SEQ ID NO: 248016 - DNA, 100 bp, Homo sapiens
tggactgctatctccgtcgcctcaaacaggagctgggatgccaaggcctgcgtagtacacggcagtgatctaaaggacatgacctccgagcagctggatg

SEQ ID NO: 248017 - DNA, 109 bp, Homo sapiens
gccggcccgcctccctggccggggcgcagttcggaggttcaggggaacgcccttttgcttgtgactggcagggctgcgacaagaagttcgcccgctccgacgagctggc

SEQ ID NO: 248018 - DNA, 100 bp, Homo sapiens
caaaaccggcagctgttagccgagcaatcttaggaaaagtcctcagtgctgtgggcagtgcccagctactgatgtcccagaaattccagcagttccgggg

SEQ ID NO: 248019 - DNA, 51 bp, Homo sapiens
ttcccgggattggaccgacgcagccatggtgatctgcaactctttcaccat

SEQ ID NO: 248020 - DNA, 100 bp, Homo sapiens
ttcagctgtctatgaaaatgccagggaaaaattttttagaaccaaagaactaattgcagagatgtttgtcccacacaaagaaaatgggcacatgctgaaa

SEQ ID NO: 248021 - DNA, 82 bp, Homo sapiens
gaccacttgcggcctgagtatgccgcggcgagtcctttgcacatgttggcaacacacgcatccgcatcggcctccctgccca

SEQ ID NO: 248022 - DNA, 100 bp, Homo sapiens
ttgggctgtgtttcgaaatgaagacagtgccctgcaggagtcattaaatcaaaacttcatgctgatcatcacccaccgagaagtccagcgggagtacaac

SEQ ID NO: 248023 - DNA, 100 bp, Homo sapiens
tagctgtagtgaaaaattatccaaagctcagttgacaagacttggatgttgtgggtgatggtatgcagtgtcctccttcacctttgctttttgatccttc

SEQ ID NO: 248024 - DNA, 90 bp, Homo sapiens
ctacctcctcgtgctcagcctggcgccggagctgaaacacgacgtgaagactatcaagaaatccaagtggtaatgggcgaagtttattca

SEQ ID NO: 248025 - DNA, 80 bp, Homo sapiens
ctgattttgaaacacctgggtctgggcttcccgggcgagcggtggggcaagaatatcacggcatgggcatgagtagcttg

SEQ ID NO: 248026 - DNA, 83 bp, Homo sapiens
tcccctgccgctcctgccggcagctccaaccatgggaggccgcgtctttctcgatgtaccggctcacgctgcgcacaagtaag

SEQ ID NO: 248027 - DNA, 50 bp, Homo sapiens
gtggccatctaccactttgaagaatgccagctgatgaagaccgagaggcc

SEQ ID NO: 248028 - DNA, 98 bp, Homo sapiens
ctgaacgtcaccgaggagaagtaccaggaggcgttggccaaggggagaaactgcctacatccgggttaaagttgatgggcccagaagtccaagttatg

SEQ ID NO: 248029 - DNA, 100 bp, Homo sapiens
caagccaggaaaggacgcgtcgaagcgcgggcggcaggtttgctgtaatggcacaagagtatttgtgcagaaagaaattcttgataaatttacagaggaa

SEQ ID NO: 248030 - DNA, 75 bp, Homo sapiens
cggcttattgaacacatcagaatccacacaggggttgtagaaggtgatttagctgccatagaagcatacaagtca

SEQ ID NO: 248031 - DNA, 76 bp, Homo sapiens
cagaatcatttaatcatccatttcatcaaaaaaggtgtttggagtagatgacaatcaggattataataggcctgtt

SEQ ID NO: 248032 - DNA, 98 bp, Homo sapiens
tcctttcaggatacagtacgggatcctttctggaatggaggtcttatgagctgctattgaacacggcaggtaaaaccagtaatccatagcaggatcaa

SEQ ID NO: 248033 - DNA, 96 bp, Homo sapiens
caaggagctaaagcagcgtgcgttcagccctgggattgttaaaggaaatgggctggcaggaagacagtgaaaatgatgaaacatgtgctcccttaa

SEQ ID NO: 248034 - DNA, 90 bp, Homo sapiens
ctcgcgtttccacttcagagatctgatatgattctataacagactcttccagaaatgatatgaagaggaaatttgccctgacaatggaat

SEQ ID NO: 248035 - DNA, 50 bp, Homo sapiens
gtctggaggagccttctcaagaacagaggaacatcatttacagcgagcaa

SEQ ID NO: 248036 - DNA, 97 bp, Homo sapiens
tggaacttgtgattgagcagtttgaagacttgctagttaggattttattactggcagcatgtatatctttttctccacaaaccggaggactaccccc

SEQ ID NO: 248037 - DNA, 100 bp, Homo sapiens
gggcgaaagggacctgctcaagttcactcactgccactgcagagccccgccatggaagacacgccgttggtgatatcgaagcagaagacggaggtggtgt

SEQ ID NO: 248038 - DNA, 115 bp, Homo sapiens
tttagtccctgcacttcttggtctcaaagggaacttggaaatgacattggcatccagattatccactgcactggagctctcaaacactgctgtcctgcaccagatgcggcgggac

SEQ ID NO: 248039 - DNA, 75 bp, Homo sapiens
ccccggggcaagagcaggagcccggcaccccccgccgacaaggagggtgcgcgcggagccatggttatcatgtcg

SEQ ID NO: 248040 - DNA, 75 bp, Homo sapiens
ccccttcgcgtcccctgcaccatgagctggggcaccgagctctgggttcgatacaagaggctgttttcctagcgt

SEQ ID NO: 248041 - DNA, 74 bp, Homo sapiens
aaatacgaaggtttctggctgggtgggtcttcaaacaactctatgataaaggccttgtttatagaggtgtgaaa

SEQ ID NO: 248042 - DNA, 82 bp, Homo sapiens
tgacaaaacttcaagccaaacatcaagcagaatgtgatttgcttgaagatatgagcggctgtggacaaattgaatgtaattg

SEQ ID NO: 248043 - DNA, 75 bp, Homo sapiens
ccctgcagtacctgcagaaggtctctggagacatcttcagcagggatgtttcagcagcccctgagaaggaagagg

SEQ ID NO: 248044 - DNA, 100 bp, Homo sapiens
ggatggatatcagcagaatttcaagcgaggctctgggcagagtggaccacggggagccccacgagaggaagaagaggtggataagatgatggaacagaag

SEQ ID NO: 248045 - DNA, 82 bp, Homo sapiens
tgggcctgggagctgcctctgaggaacacgccgcagatgcaaataatacggcactccgaacagacactaaaaacagctctca

SEQ ID NO: 248046 - DNA, 98 bp, Homo sapiens
aggttgatgccaactccttcttcccacgctgctactgcctgggggctgaggatgacaaaaaagccttcataggtagcatcacgcagattgccatctca

SEQ ID NO: 248047 - DNA, 100 bp, Homo sapiens
ctggaggcggcgctggccgcgctgcaggagcagctgttcctgggcttcccgatggactcgagtttttactatgtgagcatcccggtgcctgcacagcaag

SEQ ID NO: 248048 - DNA, 90 bp, Homo sapiens
cgggcctcatcatggccaggaaggatcccctaacaacagtgagagagcaatgcgagcagttggagaaatgtgtaaaggcccgggagcggc

SEQ ID NO: 248049 - DNA, 100 bp, Homo sapiens
cgacgcggacctgcggactagcgaacccggagggtcttcttggctttagtggaagaggtagaggaccgaggcactgtggttgcccagggaggcggcaggg

SEQ ID NO: 248050 - DNA, 100 bp, Homo sapiens
tgcggggccgtggcggccgcggcgatgactcggacccagttctctctttccagacgtagtgaactgtatgcagactgacaatctggaactaaagaagctt

SEQ ID NO: 248051 - DNA, 50 bp, Homo sapiens
ccaagacctcatcaacaattaaggtgtaaaaggaagagaatgtctcctgg

SEQ ID NO: 248052 - DNA, 51 bp, Homo sapiens
gagaaggattttgacaccctgaaggaactgcaagcacatgttgaccagata

SEQ ID NO: 248053 - DNA, 96 bp, Homo sapiens
ggccgtcttcatgtttgctttcgcttccctctacacgcaaatcccagggcgccctgcgtccggcagaggaggcgagcatcccgctcaggtgatgag

SEQ ID NO: 248054 - DNA, 90 bp, Homo sapiens
gggcgaacacgccgcggtcctcgtcgtgtgtggacaacagtgagtatatgcggaatggagacttcttacccaccaggctgcaggcccagc

SEQ ID NO: 248055 - DNA, 83 bp, Homo sapiens
ggcattccagaatatctcagatgagcaggttgggtttcagtaacacctaattttaaggacagactgcatctccgaggctatac

SEQ ID NO: 248056 - DNA, 98 bp, Homo sapiens
ccacagagaattaagtaactggtcgaggttgtatcagtaagaagggagcacggaacagattcaagctcagtacaagccagctgccatgttgtgagcac

SEQ ID NO: 248057 - DNA, 46 bp, Homo sapiens
agggaaagatagtgttcagttgctgagagcccgagcccagcacatt

SEQ ID NO: 248058 - DNA, 100 bp, Homo sapiens
tgatgatgcgagcagagaacttctttatccttcgaaggaagcctgtggagatcgccacatcacagaatcgtatctatctcacagctgacaaccttgtgct

SEQ ID NO: 248059 - DNA, 83 bp, Homo sapiens
gggagccctttggctctgtggaagacgaccacatccccttcctccgcagaggagacgaagtcgcagacgtcggtgacactcag

SEQ ID NO: 248060 - DNA, 100 bp, Homo sapiens
gtaacagaaaggaactggctaccgttcggactatttgtagtcatgtacagaacatgatcaagggtgttacactgcagagaccacgcagaggctgcctttg

SEQ ID NO: 248061 - DNA, 75 bp, Homo sapiens
ctggcagacaaaataggaatatttccaatttcatatgttgaggaacaactggaaacctccaggagggaaatgatt

SEQ ID NO: 248062 - DNA, 88 bp, Homo sapiens
gagctagcagtgagcaccttttggcccaatgaatatcaggtgtggaatatcaaacaaatgattaagttgacacaggaacatatagagg

SEQ ID NO: 248063 - DNA, 100 bp, Homo sapiens
cagtgacccagtcagtgcccttcagttaaagaccaccaggagcacacttgtccacgctgcttttatgagctgtaacactcaccgcgaagatctgcagctt

SEQ ID NO: 248064 - DNA, 100 bp, Homo sapiens
tcaggctgccctcaaactcctggactgaaacgatcctctcatctcagcctccaaaagtgctggcattacagaaaaatggctacaaacttcctagcacatg

SEQ ID NO: 248065 - DNA, 88 bp, Homo sapiens
tttttggaagtcttagttcgagatgtgtgtatttcatatctgtcttctaaggcagcaggtacaccaaagaagaaagctgttgtccagg

SEQ ID NO: 248066 - DNA, 90 bp, Homo sapiens
gcccccaaggctgtgcaacgcggagcgtgagaggaaggaccctttgaggatgccctgaagttgcatgagtgctcagtggcggcaggcgtg

SEQ ID NO: 248067 - DNA, 75 bp, Homo sapiens
ttctaaactattagctgtaattttaagggcaccagaactagcacctctgaaaagtaaaatgatctatgcaagctc

SEQ ID NO: 248068 - DNA, 100 bp, Homo sapiens
tcttcgtctgcttcttcctcttcagtcaaggagctcagggcaagtggcagtagccagaggatgttgcagtggttggccacaaagtcacccaaaaaggaag

SEQ ID NO: 248069 - DNA, 96 bp, Homo sapiens
tcatcccactctggaagctgagccggcggcgggaggagctagggctggagcctctccagcctcccgcgaagattgtttcccagagaaagctgtcca

SEQ ID NO: 248070 - DNA, 100 bp, Homo sapiens
gccgccgccgccgcgttggcctcgccgcccctgctcgggatggatgacatccagctctgcaaggacatcatggacttgaagcaggagctgcagaacttgg

SEQ ID NO: 248071 - DNA, 100 bp, Homo sapiens
agcggaagttcttgacggggcttgaacccgatgccatcaacgtgctcattgggagtggtacgggtatcactttccggagctggtgaagatcatcaacgac

SEQ ID NO: 248072 - DNA, 100 bp, Homo sapiens
agaaaagcctctgggagcagaagggaggctccaagacctcatcaacaattaaggcctagttccccgagagcgttcagacagtgggggctcaagctcagag

SEQ ID NO: 248073 - DNA, 98 bp, Homo sapiens
aaggctgtcattttataggcatgcctgaatgtgaggtggaatccatagagctccccatggacaacaagaccaataagaggcgtgggttctgctttatt

SEQ ID NO: 248074 - DNA, 83 bp, Homo sapiens
tggcggatggccccaggtgtaagcgcagaaagcaggcgaacccgcggcgcaataacggaacgaatgcaggaatttgggaactg

SEQ ID NO: 248075 - DNA, 74 bp, Homo sapiens
agactttcacaataagagcagaggatggaacacttcagtgcattcaagatcatccgggaagcccacgggaccct

SEQ ID NO: 248076 - DNA, 50 bp, Homo sapiens
ggccacctgagtggcgcggcggtgtcagctttagatccagctaaggatcc

SEQ ID NO: 248077 - DNA, 75 bp, Homo sapiens
cctgggagctgaagtgccccaaggaacaggcctttgagagcagccagaagtacaaagaggggaagtacatcattg

SEQ ID NO: 248078 - DNA, 100 bp, Homo sapiens
gtgggcactgtggaaacacattcctgtgaaagaaaggatgtcttaagagaagctgaaattttacacaaagctagatttagttacattcttccaattttgg

SEQ ID NO: 248079 - DNA, 80 bp, Homo sapiens
agaagaagagcatgatcggcatgtccaccaaggcaggtgctgggcctcgtgcgggtcccgctgtacacccagaaggaccg

SEQ ID NO: 248080 - DNA, 50 bp, Homo sapiens
ggcctgtgttgagcaaccacgtttgagaatctggtgaacagtaacaaact

SEQ ID NO: 248081 - DNA, 75 bp, Homo sapiens
gttccttgacatgttggaagagtcaccatttttaaaattgccttgttgaaggggatgctaaagaagaaatactgc

SEQ ID NO: 248082 - DNA, 75 bp, Homo sapiens
cgaatcagccaggagaaggcgggcatgctggatgtcaactttgacaaggaggaggacctggttgatagaagaatt

SEQ ID NO: 248083 - DNA, 100 bp, Homo sapiens
ccgagccccaccgtcgcctggtgcctcccgcctccgtgtgccctggttgtgagaagacgtctgtgtcgtgcgatgccgtgcgcgaaattcggaagtatga

SEQ ID NO: 248084 - DNA, 100 bp, Homo sapiens
cgcagcgcgagaagctcaagcaggagcttttcgccttcaacaaggccaaacgtaccaagaaagtcgggatcgtcggtaaatacgggacccgctatggggc

SEQ ID NO: 248085 - DNA, 92 bp, Homo sapiens
agccgatccagcctgcggagcctgtggggcagtcgtcctcttgagttctggcgccttgactactgggaagatgacttgcggcgccggcgacg

SEQ ID NO: 248086 - DNA, 74 bp, Homo sapiens
ctttcaaagtccccattccaaattatcaagctcggattctgaaggtaattttgagactcctgaagctgaaaccc

SEQ ID NO: 248087 - DNA, 71 bp, Homo sapiens
tctctcggattatgaaagtgcagaagactcggaagatgggtcatcagttaaggaagttgaaacctaccacc

SEQ ID NO: 248088 - DNA, 51 bp, Homo sapiens
ggcgatcttattgaagtggtcttgtcaggacacattcagctaacgtatttt

SEQ ID NO: 248089 - DNA, 75 bp, Homo sapiens
cttcgacagagataagaaaaagcaactttttgcaacaaactctggcctgttctattctgactgcgctattgagtg

SEQ ID NO: 248090 - DNA, 94 bp, Homo sapiens
atcaacgggcagtttgtcgaacgatgttggactcatagtcactgccagaaagacaatgcagatcttcgtgaagactctgactggtaagaccatc

SEQ ID NO: 248091 - DNA, 51 bp, Homo sapiens
taaacctctcattctccctgtgactcaggctgtggatgagatgaacggaaa

SEQ ID NO: 248092 - DNA, 74 bp, Homo sapiens
cagggatttctggattctctacgggatctcatagcagattcaaatccaatgatgaacacgtcactgctgggaag

SEQ ID NO: 248093 - DNA, 75 bp, Homo sapiens
agcccaggaagagagacaagctggagccagaagccccagagccagcggtgagcctggagcagtgtgagcagctgg

SEQ ID NO: 248094 - DNA, 78 bp, Homo sapiens
cagcacactcctcgcgagcaaggcatctgcatctgggaccgacctcctgggctggctgatcaaagaggaagcagcagc

SEQ ID NO: 248095 - DNA, 73 bp, Homo sapiens
tttgagacagagtctcactctgttgcccaggctgtgaattcaattgcaaaacgatacagcaccaatggaaaga

SEQ ID NO: 248096 - DNA, 79 bp, Homo sapiens
tgccttatacagctaaagccatggaaagcaaatgcagccctgaggatttggctactgcatataacaacagggggcaaat

SEQ ID NO: 248097 - DNA, 80 bp, Homo sapiens
gggttctgagactccctgtcccggaccgcaggtattgactgggctcccaagagcgaccgcattgtcacttgtggggcaga

SEQ ID NO: 248098 - DNA, 48 bp, Homo sapiens
gtgaccaccctccagctacccccggatttttttcccaggaagccatcc

SEQ ID NO: 248099 - DNA, 75 bp, Homo sapiens
ccaccttgggcatcatgcaccacaacaaacaggccacgctggtggtcctggccttggccatggtgcccatcctgc

SEQ ID NO: 248100 - DNA, 83 bp, Homo sapiens
ctggagcctcagttggaagcagccgatccagcctgcggagcctgtggggcaggttacttcttgctgcagattctgcgcaggat

SEQ ID NO: 248101 - DNA, 100 bp, Homo sapiens
gactagtttatatgaaatttgtggggccgttgctccagggagaactgcaaatatcttcatccacccccacatttaaaaacgcagttggagataaatggac

SEQ ID NO: 248102 - DNA, 98 bp, Homo sapiens
agacagccattcggagctacatccagtgaataaggtgaaaggaaagcaagccaggatggatatttacgacactcaaaccttgggggttgtggtctttg

SEQ ID NO: 248103 - DNA, 89 bp, Homo sapiens
tccgctgcgcgcaggctgggctgcaggctctcggctgcagcgctgggagtgtgaggaagaggctgtctgtgtcattatgtgtgcgtcgg

SEQ ID NO: 248104 - DNA, 96 bp, Homo sapiens
aggcgcgagtgaggaaaggaggtactgtaggcaattatttgggatatacctgtaagtgtgggggccttcagtcaggaagtcccttaagctcccaga

SEQ ID NO: 248105 - DNA, 100 bp, Homo sapiens
caaagcaggaaacttaataaatcaagtcctatttgtgaatggaaaggactggaagttcaccttaaaacgggagatacagatgacccaccaagaattactc

SEQ ID NO: 248106 - DNA, 88 bp, Homo sapiens
agccagaaagaggacatggctgctgggcagcgggaagcgaggccccagggacaagaatccttcaagaaacaggaaaaaactcctaaaa

SEQ ID NO: 248107 - DNA, 100 bp, Homo sapiens
gagacagaagtacaacgtgcgatccatgcccatccgaaaggatgatgaagttcagcccagctcaacattggcaatgtgctccctgtgggcaccatgcctg

SEQ ID NO: 248108 - DNA, 124 bp, Homo sapiens
acagtttgctctgctcttccaacaccagtggaagatgatcacatcccagggtccagattttggctatgtaactcgagggccccaaacagggggtatcagtggactggactcctttgggaacctg

SEQ ID NO: 248109 - DNA, 98 bp, Homo sapiens
tcaacatgggcaatgagaacagcacctcggacaaccaggatattaatgcacacgcctgtgttactggtaaacccatcagccaagggggaatccatgga

SEQ ID NO: 248110 - DNA, 131 bp, Homo sapiens
gggcccctcctcggtcatcaactctgtttccacatcccggcaaaatctggacaccatcgtgcagaagagacggaggatgcaaatgaagaagccccattgagggaccgctcccacatcgagaagaccctcat

SEQ ID NO: 248111 - DNA, 75 bp, Homo sapiens
cagtatgagctacatgtttgagtacccggagtatcaggcatatactagtgtctcaaaggcttcacttggccttgc

SEQ ID NO: 248112 - DNA, 90 bp, Homo sapiens
cgcctggaggaccagtatttcccatggagggttgatactgcctctccaagcccaatggaaacatctggatgtgcccctgcagaagaagac

SEQ ID NO: 248113 - DNA, 100 bp, Homo sapiens
gaacggcgagtccatgtcactcaggaggactttgagatggcagtagccaaggtcacgcatgaagggagcaccgtggagaagacagtggcccctacagaat

SEQ ID NO: 248114 - DNA, 101 bp, Homo sapiens
ggtcaacgagcggggcaaccactgcgagtactgcttcaccaggaacgaatgatcacacactttgaaaggtccaaaatggagtaaggaatgggaagatttgc

SEQ ID NO: 248115 - DNA, 82 bp, Homo sapiens
cagaaggatatcgacgtcgtgatccagaagtccagagctgaggactgcctgtttgcagcccagctcaacattggcaatgtgc

SEQ ID NO: 248116 - DNA, 102 bp, Homo sapiens
agctgaagaaggctctgtgcaatcctcacattcaagctgataggctgcgctaccggaatgtcatccagcgagtgattagatcccattccttctggtctgatg

SEQ ID NO: 248117 - DNA, 75 bp, Homo sapiens
tcccctgtttgagaaaaggcctaagaattttggcattgctgtcaccactgactaaagaagagaaaactgcggcag

SEQ ID NO: 248118 - DNA, 101 bp, Homo sapiens
gggacactcggtgtgcgacgtggagatccgaaggaatgaaatccggctgaaccttagccggccgatcgaggagcagggccccctggacgtcatcatccaca

SEQ ID NO: 248119 - DNA, 88 bp, Homo sapiens
caggccaagaagcatccgagcgtgccatgtttcagaacagagtaagacccctggtaaagaagaactgaagatattatacagataccag

SEQ ID NO: 248120 - DNA, 100 bp, Homo sapiens
aggtgaactggaggagcgatttgccatcgtgctgaccaagatcactccatggatgaaatgacagctgtggtgaaaattgaaaaaggagttggtggcaata

SEQ ID NO: 248121 - DNA, 100 bp, Homo sapiens
gactgatccagctggtggtcctggtctacgtcatcggagttgctggagaatgtaaccctaatccataaaccagtgtcgttgcaaccccgtgggctgatca

SEQ ID NO: 248122 - DNA, 50 bp, Homo sapiens
cggcaaactccccatccagctccaggtggagcagctcctgtacgaaagcc

SEQ ID NO: 248123 - DNA, 90 bp, Homo sapiens
agatgtctcgctccgtggccttagctgtgctcgcgctactctctctttctggcctggaggctatccagcatccctcatccacctacatca

SEQ ID NO: 248124 - DNA, 75 bp, Homo sapiens
agactgagcgccagagaggacgtttccaactcaaaatgaggtggaaagtgagaaatggtacctgtctacagactt

SEQ ID NO: 248125 - DNA, 83 bp, Homo sapiens
caaaatgtcaacaaattgatggccttcaaagaaaaacctcggtatccaccaagtcaggctcaagcagctcttcaagacagtcc

SEQ ID NO: 248126 - DNA, 113 bp, Homo sapiens
tcatcccctggatgggggaccacaagatcctcatcgacagaagtccattggaatattaagcccaggagttgctttggggatggctggaagtgcaatgtcttccaagttcttcc

SEQ ID NO: 248127 - DNA, 75 bp, Homo sapiens
atacctttgatccagaacttgcagcaacaatagtgtttgccagctctgagcctgtgccaggattccagggggata

SEQ ID NO: 248128 - DNA, 100 bp, Homo sapiens
ccccagcagtaggaacacttgtgaacatatctatgagtttccccagctttcggaggatgtcagaccttctaccgctttgaggctgtgtgggatagctctc

SEQ ID NO: 248129 - DNA, 98 bp, Homo sapiens
ttcatggttgatctccacgagcagctcctggagctatttgatagtgaggatccccgggagcgtgagtacctcaagaccatcctgcaccgggtctatgg

SEQ ID NO: 248130 - DNA, 96 bp, Homo sapiens
gaagactgtctgccgagttctcacgtgcccatcagtgacagcaagtccattcagaaacaccatcatccgagcagtattgatttttgcagaaggaat

SEQ ID NO: 248131 - DNA, 86 bp, Homo sapiens
ctcggagtccttggggacggagcagcgcgtcgtggggcgagcggcagttccagggtctccctccactgctgtagtaacccgggtcc

SEQ ID NO: 248132 - DNA, 82 bp, Homo sapiens
gacgttcgagaggaagattcttacctctttgatctcgacaataaggtgacttaagagattaaaattaatttggttgctgttg

SEQ ID NO: 248133 - DNA, 83 bp, Homo sapiens
agctctcgaggctgctaagagactaagttacttttcacatagaaccatatagcaatcgagatgatcaaaacatgtacaaaaat

SEQ ID NO: 248134 - DNA, 83 bp, Homo sapiens
gggaaccctggtcaccgtctcctcaggttaacacagaaatctgcctcctgggccatgccgcttctaaggcctgtttcttctca

SEQ ID NO: 248135 - DNA, 96 bp, Homo sapiens
cttgccaccagtgctgtgtcttaagagctgccatcccggctggagctccagcattgactttctagcaagccagggatttgattttaataaagtttt

SEQ ID NO: 248136 - DNA, 75 bp, Homo sapiens
cggcggctgagaaggcggactccagacagcgaccccagatgaaggttgattgcactgccaacactaacacctgta

SEQ ID NO: 248137 - DNA, 90 bp, Homo sapiens
gcaacaagtcccacttccgaaaccacaagtttgccgatcctcgtatcaatagccgtgcccatgcccgtacccgtgcacgttcccgagcct

SEQ ID NO: 248138 - DNA, 102 bp, Homo sapiens
tttcgtacatatgagagggttgccttttcgtgcaactgaaaatgacattgctaatgcaactcatgcagcaattccagaaccccgacttcccacccgaagtag

SEQ ID NO: 248139 - DNA, 74 bp, Homo sapiens
gcggcagctgtggctgtggctggcggaggccgagcaggctcgtggtcccaagaagcatctgaagcgggtggcag

SEQ ID NO: 248140 - DNA, 99 bp, Homo sapiens
ccccagatgtcattggagggtacagagacggtctccttctgtcacccaggctggagtgtagtggaacgatcaccgctgaactgcagcgtcggcttcctg

SEQ ID NO: 248141 - DNA, 83 bp, Homo sapiens
ggaatatggagagaatcactagtcctgtgctcatggggatttgatggtagagtggtggcaaagcttccttttacccctctttc

SEQ ID NO: 248142 - DNA, 82 bp, Homo sapiens
tctcgctctgggtctccaggcccgcgaccgtccgccagtcgtcccgagcttattgcaggagtgaccaggacactacctccta

SEQ ID NO: 248143 - DNA, 89 bp, Homo sapiens
aaattaaaagaggagcagcatggcatttcagtcactggtttgcagagtccaggaaccactcgttttgactattattttatcactctttg

SEQ ID NO: 248144 - DNA, 99 bp, Homo sapiens
ccgggaggaaggaacgaggcaaggagctaaagcagcgtgcgttcagccctgggctggtcagtgagaaggtcggaggggccgaggggaccaagctggatg

SEQ ID NO: 248145 - DNA, 105 bp, Homo sapiens
ctgaaatcagctcgagacatgtgggctgattacatcctgatcctacaagcaatggggaagtcctatcatccaggctgtttccgatgcattgtttgcaacaagtgc

SEQ ID NO: 248146 - DNA, 100 bp, Homo sapiens
agtccaagcattgtatcacttcatctgcaaatatttcaataagtacccaaaagatgtgtcttgctgaatcagggctctcttatccctgccatcgacttac

SEQ ID NO: 248147 - DNA, 82 bp, Homo sapiens
gcgccagatggtggaggaatacacttatttatgaagtactggctgtgatcgaacttctcaaccctcagagacttagatcttc

SEQ ID NO: 248148 - DNA, 75 bp, Homo sapiens
aaagcccccaaaagcagctattcagaggcatttcatccttcatgaagccattcaggattttgaattgcatatgag

SEQ ID NO: 248149 - DNA, 50 bp, Homo sapiens
ctcggacgccagcggacacgcgggcgagaaatgactgctgtccatgcagg

SEQ ID NO: 248150 - DNA, 100 bp, Homo sapiens
cgaatcttcactcccgctgtctcagcagtctacagcacgagcttaaagcagcgcctgggtaagagtaacatccaggcacggttaggccgacccatagggg

SEQ ID NO: 248151 - DNA, 82 bp, Homo sapiens
ggaacgtggatcatgcggccactcatattaccaaccgcagagaggaatactcccccagttgcaagaggcgcaggaccgtgga

SEQ ID NO: 248152 - DNA, 100 bp, Homo sapiens
cgggagcaggagcgcggagcggagcgtcccgacccgccgagaccatctagctggctgcccccgacagtgagtgtgttggctcttgtgaagcggggggcac

SEQ ID NO: 248153 - DNA, 73 bp, Homo sapiens
ccaccgccatggccgaggaaggggtacagcttactacatgcattcatcacatcatcaaacatgattatccaag

SEQ ID NO: 248154 - DNA, 100 bp, Homo sapiens
tattcctcacagcctctggatgagagttggccaagatgtgttcagagcaacattgttttgttgacacaagcatttagaagaaagtttgtgattcctgact

SEQ ID NO: 248155 - DNA, 89 bp, Homo sapiens
ggaaaatggaaagaagctcatatccggagatattccaggcccactccagggcaggagctggttgttcgtttcctcaagcgagcatcaaa

SEQ ID NO: 248156 - DNA, 83 bp, Homo sapiens
aaaaaacgggtcgcccgcgattctcagggattgatcgcctcttcaggtgcgcgcggagccatggttatcatgtcggagttcag

SEQ ID NO: 248157 - DNA, 83 bp, Homo sapiens
cctgtgtgctgcagaacccccagaccatcatgtatttaccttgctgtggattgctgactggatggtccatcacttctggagga

SEQ ID NO: 248158 - DNA, 83 bp, Homo sapiens
ctttgaccttctgccatgattgtgaggcctccccagccacgtgaaactactattgcccagaagaaaagatgtttggttttcac

SEQ ID NO: 248159 - DNA, 82 bp, Homo sapiens
acagattcgcagtggtcgcttcttctccttggctggtgcagtggtgtcatcttggctcagtgcagcctcgacttcctgggat

SEQ ID NO: 248160 - DNA, 100 bp, Homo sapiens
gaaggaacgcaaagaactggaaacggaatatacgttgtgaaggaatgaccctaggagagctgctgaaggaaaatgcagagcaatccagagcggccatcaa

SEQ ID NO: 248161 - DNA, 86 bp, Homo sapiens
agagctgggccctcaaggccatcgaggcgctttcaggtgcatgaatacctcagaagtaaactctgttcactgtatgaaaatgactg

SEQ ID NO: 248162 - DNA, 90 bp, Homo sapiens
ggtgcttgtggcctttctgaggagaaagctgtggagaagtttggggaagaaaatattgaggttcacagagatgctgagtcacagctggtt

SEQ ID NO: 248163 - DNA, 74 bp, Homo sapiens
ggaagttcccgccccggagagcggcgaggcggcagccacaggccacagttgtaagggatcttgtggctgtcagg

SEQ ID NO: 248164 - DNA, 100 bp, Homo sapiens
agcaggcggtgacccgctaccggaaggccatcgccaagattctggctacattggagattggttgctttctaaaactgaaggagaagcccatgaagagatg

SEQ ID NO: 248165 - DNA, 82 bp, Homo sapiens
acaagtaaagaaacttaataagctgattgagtcagctgaagagctcatcagagatggcagtaagagcccagtggatgtcttg

SEQ ID NO: 248166 - DNA, 74 bp, Homo sapiens
accgcagtctcgactttcctgggctcagtttgccaaggcacgagtaacaagctcacgcagttgggcacttttga

SEQ ID NO: 248167 - DNA, 75 bp, Homo sapiens
aactgctacaagacaacaccctgatctggcatggacatgctcttgcagccaatgccggaacaggatttgctgttg

SEQ ID NO: 248168 - DNA, 98 bp, Homo sapiens
agttggggaaagtaattttgtttgccgaagtgacccccacaacgatgcgtctcctggatggggaaaagcttcactctgaccatcactgtcttcacaaa

SEQ ID NO: 248169 - DNA, 75 bp, Homo sapiens
gaatcatctgtaaacctgataacactgcatgaaatgttagaggttccagcaacagatagaaatgctttaagttca

SEQ ID NO: 248170 - DNA, 75 bp, Homo sapiens
aaacatcagaagcagttggaaagggtgtttgccagcttcccagtaaaaatgatgaaaaagaatatccacacagaa

SEQ ID NO: 248171 - DNA, 88 bp, Homo sapiens
gacaatggcgtgctgacctatcatcccagtttacatgtttccaatacttatctacaggaatcgccatgaccccagctctgagggaggc

SEQ ID NO: 248172 - DNA, 100 bp, Homo sapiens
ggccgccgcttaccccggggtctatggaagtaatggaaggacccctcaacctggtgagcgagtgctgtgctttcatgggcctcttctttatgaagcaaag

SEQ ID NO: 248173 - DNA, 75 bp, Homo sapiens
ggaaaaccagttattgaatatcaagaggaggagttgttggagctgaaagatctccgaaaacaaagtgaaatcata

SEQ ID NO: 248174 - DNA, 90 bp, Homo sapiens
aggaacggcacatgacccaggcctatgccaatcagcatttcacattcctcatggttggttcaaagtctaagccagaaatccagtacgcac

SEQ ID NO: 248175 - DNA, 75 bp, Homo sapiens
cgcgtctctctgctgcggcgcggggaccgctgtgctctcggaggctgtgaagagcggcattcaccgtactgtcca

SEQ ID NO: 248176 - DNA, 74 bp, Homo sapiens
ctcggaggcgttcagctgcttcaagatgaagaatctccagccaagtcctccgtgctcgtggtgggaatcgtcat

SEQ ID NO: 248177 - DNA, 97 bp, Homo sapiens
gcttggttaaaacctgacacttttaacagtgttcacttggcaagaagagtgcttcaattagaaaaacaaaactcgctgattttaaaagatctggaac

SEQ ID NO: 248178 - DNA, 97 bp, Homo sapiens
aataatgcccagcggcccgccaggtcccgacaatgcagatcttcgtgaagactctgactggtaagaccatcaccctcgaggttgagcccagtgacac

SEQ ID NO: 248179 - DNA, 100 bp, Homo sapiens
agttagctgtagctattaaaaaaccatctggtgatgatagatacaatcagtttcacataagaaagttcaggagccctggaaaggagaaggaataagacgg

SEQ ID NO: 248180 - DNA, 100 bp, Homo sapiens
aacaaggctggcagcttcatcactggaattgatgtcacctccaagcatcaaagctaagccagaagatttatcacattttcatcatcagctacaggattag

SEQ ID NO: 248181 - DNA, 100 bp, Homo sapiens
gagacctcagcactcaagcagcaggagcagcccgcggcgaccaagatcaggaacctgccctggaatgatgagaagacagcagctgattacaagattttag

SEQ ID NO: 248182 - DNA, 100 bp, Homo sapiens
aaagagctcagatacacgctgctgtgagctctgcaagtatgacttcataatggagaccaagctcaaacccctccggaagctggagtcacatcagaagccg

SEQ ID NO: 248183 - DNA, 82 bp, Homo sapiens
gataacaccctgtaacagctgagtggcacatttagaacgaacagggcattacttaactgtgaaagataaccaggtggttcag

SEQ ID NO: 248184 - DNA, 75 bp, Homo sapiens
ctgggcaccagcaggacccgaggccaggagccaggggcccagaagctgtgagccgtgagctttgaggcggtggga

SEQ ID NO: 248185 - DNA, 96 bp, Homo sapiens
ttactacagtgacctggatgaaaccctgcctaccatccttcagatagaagagtgatggatgtcatttctcgttcacagctttacttggatgatctt

SEQ ID NO: 248186 - DNA, 100 bp, Homo sapiens
cggaaaatggtgaagaaaattgaaatcagccagcacgccaagtacacttgctctttctgtggcaaagagcttcagtttcagcgactcacccgagaactgg

SEQ ID NO: 248187 - DNA, 75 bp, Homo sapiens
aggtggccatcttcggaccccccaacaccctctacgaaggcggctacttcaagcaggtcaatggccagcaaggag

SEQ ID NO: 248188 - DNA, 75 bp, Homo sapiens
ccttatcatcctcatcatgctttggcagaagggaaacctgtttgacttcttacgcttgacggaatggcgtggccc

SEQ ID NO: 248189 - DNA, 74 bp, Homo sapiens
gtggacttgaaagaagctgcagcggaggaaggcgaggtattctctactgccgctgatggtcaaacgcaagtgga

SEQ ID NO: 248190 - DNA, 75 bp, Homo sapiens
cagctgtgtactttgccctcagcatctcccttcatgtctgggtcatggaatgatgagaagacagcagctgattac

SEQ ID NO: 248191 - DNA, 82 bp, Homo sapiens
agaccgcggccgggaccgaggaaaaatggctacaaacttcctagcacatgagaagatctggttcgacaagttcaaatatgac

SEQ ID NO: 248192 - DNA, 100 bp, Homo sapiens
tcccaggctcaagcagtcctaccatgtcagccttcccagtagctgggaccacagtcgctggagagaccatccttgttgacggagtcagtgaggaatttcg

SEQ ID NO: 248193 - DNA, 95 bp, Homo sapiens
ggggaccaagccggggactaaggcgagccggagaccgagcccgaacagcaggcacacagtccccagctgccggggggaagatgccaaggggaagg

SEQ ID NO: 248194 - DNA, 75 bp, Homo sapiens
gcgagctgcaattgcccagaaaaaggtacccattcctggcccagtgggtaacaagagaatggttcatttttcccc

SEQ ID NO: 248195 - DNA, 78 bp, Homo sapiens
tgggcctctcctcccacccccgagctctcagccactccctagcactcacaggattctcagtaagttaagtcaggaaat

SEQ ID NO: 248196 - DNA, 75 bp, Homo sapiens
caagatctcagagaaggaggaggtgaccacgcgcgagctgtgagccgtgagctttgaggcggtgggatgtgtcag

SEQ ID NO: 248197 - DNA, 100 bp, Homo sapiens
aaggtgaccaagttcatgctgtgtgctggacgctggacagggggcaaaagcacctgctcgacgatggtgacagagcaggccacccagggctccagcgctc

SEQ ID NO: 248198 - DNA, 100 bp, Homo sapiens
cagcattcaccagcaaaccggaaggctgcccagagaaaactgcgccaggccagcaccaacgtgaaacactggaatgtccagatgaaccggctgatgcatc

SEQ ID NO: 248199 - DNA, 110 bp, Homo sapiens
cgcagggcctgcagcgggagctggacggcgagcgcgagcggcgcgagaaagtggcagtagagaagagcatcacagaagttgctcaggagctgacagagctggtggaacat

SEQ ID NO: 248200 - DNA, 75 bp, Homo sapiens
tccaggagaccaaggaccagctcaccacggagaacatcatccttgggcaattgaaggaacagactaaaaatcgtg

SEQ ID NO: 248201 - DNA, 96 bp, Homo sapiens
gactccacacaattaaccttgctggcaacccactggaggatagagcactatgggactgagtaacattctctttgtgatggccttcctgctctctgg

SEQ ID NO: 248202 - DNA, 75 bp, Homo sapiens
tttactgccagcccctctcaacctcagctcctgggctataacgaaaagccaataaatctacaaatgtttattggg

SEQ ID NO: 248203 - DNA, 73 bp, Homo sapiens
gcacttcattggccacctacagaaacaaaatgtcaacaaattgatgggaaggtggtttgaagttgacatttca

SEQ ID NO: 248204 - DNA, 89 bp, Homo sapiens
cgttccatgcgcacagggacaggggtggcggccaaagccctggagatgggcgtgtttggcgcatatttcaacgtgctcatcaacctgag

SEQ ID NO: 248205 - DNA, 75 bp, Homo sapiens
acaagctgaatttggaggtgacggaactggagacccaggtcttcaaagcttcacctttctccaaaggcagatgtg

SEQ ID NO: 248206 - DNA, 128 bp, Homo sapiens
tgacacgtacacagcaggactgagtgaagaagaacagctcgagagagcattacaagccagcctctgggaccgaggaataagtttgtggagtttgacatgaagccagtctgtaagaagtgctatgagaa

SEQ ID NO: 248207 - DNA, 51 bp, Homo sapiens
agcacggaacagattcaagctcagacaccccaaagtcttgtactaagtctt

SEQ ID NO: 248208 - DNA, 100 bp, Homo sapiens
ttcaaagaagcttgtgagaaacgcgcacaagatttggagatgatggctgatgacaatatagaagattctacagcaaggttgtttacattcagagctctat

SEQ ID NO: 248209 - DNA, 96 bp, Homo sapiens
cgcagacgctgcccacagtgaaggtggccgaggttgactgtagcagcaccaagatgccttccgtgccttccatcaagatctcaattttgtgcgcaa

SEQ ID NO: 248210 - DNA, 90 bp, Homo sapiens
ggaaaagggccccagcgtcctcttgtcaccgacagggcgattgcagtgcgttccggactcattaccagagaagctggctgtgcatgagaa

SEQ ID NO: 248211 - DNA, 74 bp, Homo sapiens
gtttgctgtgttcgctggtcaaggtgtttcccatgatgaattgcttgacttagcaaagtttcatttcggtgact

SEQ ID NO: 248212 - DNA, 100 bp, Homo sapiens
ccaaaatcactcgaagatttaatttttgagtctttaccagagaatgcatcacacaagttagagggcaattcaagctgctggaacaagaccgagatataaa

SEQ ID NO: 248213 - DNA, 90 bp, Homo sapiens
caagaatgaggagcaggacatcttcatttacagagcaacttgatgaaggtacacccaatagagagaggcagggtttcaccatgttgccca

SEQ ID NO: 248214 - DNA, 90 bp, Homo sapiens
caatttaccagagataattgataacaccctgtaacagctgagcctggtccagatccctgtgagcatgtaccagactgtggtgaccagcct

SEQ ID NO: 248215 - DNA, 100 bp, Homo sapiens
cgccttctgccgtgattgtcagtttcctgaggcctccccagccacgctttctgtacagcctgcagaactctgtttgcagacaaggtcccaaagacagcag

SEQ ID NO: 248216 - DNA, 75 bp, Homo sapiens
ctcatttgtctacaccatcaaggaggaaggcctggttcttcaagagggtcctccgcggaagggcagctgaatgga

SEQ ID NO: 248217 - DNA, 100 bp, Homo sapiens
gcaatggaacctacggacaggtgtacaaggaatagccaggtctggctgggtcggcacaacctgtttgagcctgaagacacaggccagagggtccctgtca

SEQ ID NO: 248218 - DNA, 82 bp, Homo sapiens
taggagcctccgtgcggagaccactgttcaaggccacaggctgaggccaccatggagcagtgtgcgtgcgtggagagagagc

SEQ ID NO: 248219 - DNA, 50 bp, Homo sapiens
cgatagttccctttctagaaaggcttgatccagatggaagctgtgaaagt

SEQ ID NO: 248220 - DNA, 101 bp, Homo sapiens
ttcagaacgctggggaggttgggctgaactgcagtgggagaggagaagagatgctggcgtgaagggttactggggcttccggatgcagatgacgatgcgtt

SEQ ID NO: 248221 - DNA, 100 bp, Homo sapiens
accgggaccaggaccgggccccactttccagattacctgagctggaattggaagcaattgataaccaatttggacaaccaggaacaggcgatcagattcc

SEQ ID NO: 248222 - DNA, 100 bp, Homo sapiens
catttttccttggaacagcagcctgcctttaccagaaaaagcttgtggtgaaggggggcaaaaaaaagaagcaagttctgaagttcactcttgattgcac

SEQ ID NO: 248223 - DNA, 97 bp, Homo sapiens
gactctttcttctctgcaaaagaagagaatattatttattccttccttggtttggctcctcctccagactcaaagcactcctgtaggaggcctgctg

SEQ ID NO: 248224 - DNA, 101 bp, Homo sapiens
cgctcctcgcgcaaggagggtagagctcaaggtgtcgtttcagtcagatgttgcatccaatttttgaggaagcttccgatgtcattaaggaagaatttcca

SEQ ID NO: 248225 - DNA, 83 bp, Homo sapiens
gctcggaaagttgaaggggacatgtatgaatctgcaaacaatcgacccccttacccaggaatggaacaacctccacaccatcc

SEQ ID NO: 248226 - DNA, 100 bp, Homo sapiens
gataaattcccggaaccgcgattcggcgtgtcaggcatgcccaagagaatcgtaaatgcaaaaattgcttgccttgacttcagcctgcaaaaaacaaaaa

SEQ ID NO: 248227 - DNA, 90 bp, Homo sapiens
caggaagtggccgtcctgagcgccatggctcactccccggtgcagtcgggcctgcccggcatgcagtggtctcacgtgtgaaacatggct

SEQ ID NO: 248228 - DNA, 100 bp, Homo sapiens
aggagtatagatgacataggtcacctcattcatgaaggcctacagaagcatttacagccgaacaataccagcaacatcaacagcaactggcactcatgca

SEQ ID NO: 248229 - DNA, 83 bp, Homo sapiens
cacaggccctcgttgcccagatggaaatcctcattgacgattcaatttgttgaaggccaatttgtggactcctacgatccaac

SEQ ID NO: 248230 - DNA, 82 bp, Homo sapiens
tggactccttcggcagtccacccaccgccgccgcctcccagaactgtcagaccttcagcagcctcagctgcctgagcgcagg

SEQ ID NO: 248231 - DNA, 90 bp, Homo sapiens
gttccactggacgctcatcagagggaagatctttttcctcaattgagtcgccaacatccagcagcagctggcccggcttgacaatgagtc

SEQ ID NO: 248232 - DNA, 88 bp, Homo sapiens
gaggaagcatttacaggccccaccgaaaaaccttaaagggctgagagcttgagggcagaaaccaaagcccaaaccccggccatccatc

SEQ ID NO: 248233 - DNA, 85 bp, Homo sapiens
aaaccatggaggagcactgcaagcttgagcaccagcagactcatgatagtaaagagcacctggcaatgatggaacgaatattagg

SEQ ID NO: 248234 - DNA, 98 bp, Homo sapiens
accaactgcactcgttttggcattgcagctaaatatcagttggatcccactgcttccatttctgttttctgtctcaactggtctctgacaagcctctg

SEQ ID NO: 248235 - DNA, 100 bp, Homo sapiens
attgcagagccttctagatgatgcaaatctacgcaagaatgaactggagacagagaataggaaggaagcagccaccctcgccatggcctccccgcccgcc

SEQ ID NO: 248236 - DNA, 86 bp, Homo sapiens
ggctggatgggaatcgtagtcttcctaggagtttgtctgtgtttcactgatggcaagactgtggcccccatgcccccagcacagga

SEQ ID NO: 248237 - DNA, 90 bp, Homo sapiens
tccgggtgctgctctgctgggcttcgttggccgcagctttggaagtgtggcaaaggagcagagaactttgacaagttcttcacacgagga

SEQ ID NO: 248238 - DNA, 80 bp, Homo sapiens
gggactagctgtctcggggccttccatccgcttggccccacagatggaatcgccacttatatatgtttcagttttgcttt

SEQ ID NO: 248239 - DNA, 75 bp, Homo sapiens
ggcgacgcggccgcgcgaattcgcacaggtactccaaagattcaggtttactcacgtcatccagcagagaatgga

SEQ ID NO: 248240 - DNA, 97 bp, Homo sapiens
ctatgtcaagtgtcaagataaagtgagtcagctgtacatgaaaaagcttgtggtgaaggggggcaaaaaaaagaagcaagttctgaagttcactctt

SEQ ID NO: 248241 - DNA, 48 bp, Homo sapiens
tcttggattttctagcctccagaactggacggggtttcaccatgttgg

SEQ ID NO: 248242 - DNA, 100 bp, Homo sapiens
cctggtggtgttccgagtgctcccactggccccctgggaccccctggtcatggccaaaccctggcctgagacagctgcctgtgtgggactgagatgcagg

SEQ ID NO: 248243 - DNA, 50 bp, Homo sapiens
agaatgaagccacggacccttgcggttgcatgagcccgagaagaatgcca

SEQ ID NO: 248244 - DNA, 51 bp, Homo sapiens
cccatctccgcatcaggaccaagccgccgagtgcctatcagagaaggagac

SEQ ID NO: 248245 - DNA, 100 bp, Homo sapiens
caacaagtgtctttggttataaattatgatctacctaccaatcgtgaaaactatattcacaggacagtcattttgtttactcattcagccctgttgcagg

SEQ ID NO: 248246 - DNA, 83 bp, Homo sapiens
tgctgagcccgtccgtccgccgccaccacccactccggacacaggccctgtttgtgctcttcgtcctggcctacatccacatc

SEQ ID NO: 248247 - DNA, 95 bp, Homo sapiens
gcattcctttccttgaagtcttcgtttttaccttagtctcgggtgcccctgggcgctgggattgctctagcctgtaagtataatggaaaagatga

SEQ ID NO: 248248 - DNA, 50 bp, Homo sapiens
gaaactcggagtgtactccgcctgcaagcctaaaagtggtgatgccaaat

SEQ ID NO: 248249 - DNA, 90 bp, Homo sapiens
cagagcggctcttcaccaacctcaaggacacctcctccaaggtcatccagtccgtcgctaaccctgggcgctgcctatggcacagccaag

SEQ ID NO: 248250 - DNA, 101 bp, Homo sapiens
ccgagccggacaaggcgccgcggcgactcaacaagcggcgcttcccggggctgcggctcttcgggcacagccaccaccagcctatgagcctccagcccctg

SEQ ID NO: 248251 - DNA, 83 bp, Homo sapiens
acggtctaggcggggctggaggcggtggctgcggttgcgggaccgacaatgcagatcttcgtgaagactctgactggtaagac

SEQ ID NO: 248252 - DNA, 90 bp, Homo sapiens
aagatgcagaaaccaacagacaatgccaatttacgtgtcattatggaactacttatgaggtgagataaggatattgtaattatacaagag

SEQ ID NO: 248253 - DNA, 100 bp, Homo sapiens
tgaacccacgagcccacagcagtcctggcactccttgttccagccgcccactgccgtggagctgggatctagcaattgggaggcagcagacttgggtaat

SEQ ID NO: 248254 - DNA, 100 bp, Homo sapiens
ggaagaatatgaagaggaggaggaggaggactatgacgaggaggaggaagagtccagtgaagttggccagtcagtgctgaaagatgtaagcaaagtgaag

SEQ ID NO: 248255 - DNA, 90 bp, Homo sapiens
gtgaaagcactggacaataagctgtgctctgaggtctgcttacctgaaagatagaccttcctccgagggccgtctctcccagccgaacac

SEQ ID NO: 248256 - DNA, 50 bp, Homo sapiens
gcactgcagccagtgaaaccactgaggttggattagcttttcaaaacaga

SEQ ID NO: 248257 - DNA, 51 bp, Homo sapiens
gagattgagcaaagaggtctgactgagtgccatctgggattgacagctcag

SEQ ID NO: 248258 - DNA, 75 bp, Homo sapiens
gcaggcctgggcgcagcgcaaggagcgggaagtgctgcagctgcagagtgatgacagacctaatgctctattaag

SEQ ID NO: 248259 - DNA, 90 bp, Homo sapiens
gggtggaagctgggccagggattgggaaaatctcttcaggcacgaggtagaactaacattgaacttagagagaaattcatcctaccagag

SEQ ID NO: 248260 - DNA, 73 bp, Homo sapiens
agagtcttctggtccctgttgacaaacctctgtagaggagcaggatgcaaccgacaggctgtggccggacagc

SEQ ID NO: 248261 - DNA, 74 bp, Homo sapiens
ggaggttacgcagcaaaccatccagaaggtgtgagcgccactttgaagggcatccaacccgcggctatccatgt

SEQ ID NO: 248262 - DNA, 103 bp, Homo sapiens
gggacgtgaacatctctttccgagaggcgtcctgcagcttcggaaccaaaaagaagcttcccagagccggggccaggagccccaagcgccctctagcagcaaa

SEQ ID NO: 248263 - DNA, 100 bp, Homo sapiens
cgggatgtaaagggattggccatttcaagagagcgagacatctgggccctcacaggcaatcctttatcacaggatattctcaacttataccaggacccag

SEQ ID NO: 248264 - DNA, 101 bp, Homo sapiens
gccggggctctccgggcctcccgccgcttagcctgatgctggaaggacgaagagtgtgaacatggctacgcctcttcattcccgtccatgccgagcccccg

SEQ ID NO: 248265 - DNA, 100 bp, Homo sapiens
cccgtgccctcccgctcggccccgccagcagcactgtggaggccgtcctcggattatttttacccaagatacttaggtaagtctcaattacttctctact

SEQ ID NO: 248266 - DNA, 96 bp, Homo sapiens
tctggacttgctgctggctgccgccgccgccactggaaagctgaaatccttcgcccggaaattcatcaaaaaccagcctggacaccaagtctgtgt

SEQ ID NO: 248267 - DNA, 100 bp, Homo sapiens
agctacatcaagtgatgaaaaacacccacctgaaaatatcattgatgggcataagggccatgtgttctgaaattattttgaggcaagaagttttgaaaga

SEQ ID NO: 248268 - DNA, 98 bp, Homo sapiens
cataaacatacgtgtggatcccaggggcttaagagaaggattgcattatacagagataccatgtttgtgtggaagtgccccgtgtttgctatgccgat

SEQ ID NO: 248269 - DNA, 122 bp, Homo sapiens
gccagttcctgccgtctgctcttctgcctcttgatctccgccaccgtcttcaggccagaactatcgtaccatggaaagtattcagacagtgccttcatgaggtccaccagattagctctggc

SEQ ID NO: 248270 - DNA, 75 bp, Homo sapiens
gcgagaaggcacggagtcgccgcggagcgcagattgttgaacagataaatacgaaactgccatcatcatttgtag

SEQ ID NO: 248271 - DNA, 100 bp, Homo sapiens
catggtgtgcctgctgaaaaaaccaataatttctgaagatcagacagcagccctgatggcccatctctttgaaatgggattctgtgacaggcagctgaac

SEQ ID NO: 248272 - DNA, 78 bp, Homo sapiens
ccccggcggcacgctcttcagcaccaccccgggagtgaaagctggtggaatgcgaattgtgcagaaacacccacatac

SEQ ID NO: 248273 - DNA, 83 bp, Homo sapiens
gccccaccaccgccctcaccatgggagaccaaattttgaggaaggtggaccaacatcagtagggagaaagcatgaatttatac

SEQ ID NO: 248274 - DNA, 90 bp, Homo sapiens
aaggtgggcggcagcgccagcccggcgccccctcccagctcccagcgaatggtagctgagtggaggttgtctcgaggtgttgaagaacag

SEQ ID NO: 248275 - DNA, 75 bp, Homo sapiens
ggagattctggggcagtatcaacggagtctccgggatcctgataacttaagtgactctctcttttccggtgatga

SEQ ID NO: 248276 - DNA, 82 bp, Homo sapiens
gccgtctcctgtgaaggccatatttgataaacaggaacttgagtgtcagagagtgagagtacaaaaggaagtgctgattgcc

SEQ ID NO: 248277 - DNA, 75 bp, Homo sapiens
ccaacaagctcccattggatcttaagattggcccccgccgcatccacacagtccgtgtgcggggaggtaacaaga

SEQ ID NO: 248278 - DNA, 75 bp, Homo sapiens
aactagcagccttactgaaaacaaaatctcccaatcttggtggctataacagagaggaatgtcttcgaacagtcg

SEQ ID NO: 248279 - DNA, 100 bp, Homo sapiens
cgaaggggagtttccacagtgattgatgctgcctcagacagcctctggagatcctgtgttgctacttgtcatgtttcttaggatcagctatcaagaataa

SEQ ID NO: 248280 - DNA, 97 bp, Homo sapiens
ctcagcggtctgcgcctggcagcagattgagaggatccagaatccagatctctggaatagctaccaggcaaagaaaaaaactatggatgccaagaat

SEQ ID NO: 248281 - DNA, 100 bp, Homo sapiens
ctggagcctcagttggaagcagccgatccagcctgcggagcctgtggggcagctttcaggaccccaccttccttatcaccaggtcttctccactggcccc

SEQ ID NO: 248282 - DNA, 100 bp, Homo sapiens
gcccacttggcaccagtggtcagcagcactgtttcctatgatcctaggaaacccactgtgaagaaacctgctaaggccatcaaacctattgatcggaagt

SEQ ID NO: 248283 - DNA, 85 bp, Homo sapiens
tcagaaggatatcgacgtcgtgatccagaagtccagagctgaggactgcctgtttgcagctgtttgcagacaaggtcccaaagac

SEQ ID NO: 248284 - DNA, 88 bp, Homo sapiens
ccatttcttcagcctcccggtcaaagtcaactgcaagcgagttatgtggagtttagacccagccaggaaacagattattacttccaac

SEQ ID NO: 248285 - DNA, 82 bp, Homo sapiens
gccatgaaggcctcgggcacggatgatcggctgaatgtaacagaggaactaacgtccaacgacaagacgaggattctcaacg

SEQ ID NO: 248286 - DNA, 75 bp, Homo sapiens
gccatcctgcaccgccaccggcccgacctcatcaagagtgagccatggagctacgtgtggggaacaagtaccgcc

SEQ ID NO: 248287 - DNA, 82 bp, Homo sapiens
ccgcggacctcgccccgggacagcgaggagctgagggaccctgtgtgagatgcacaatgcgaaacctaggccccagctttta

SEQ ID NO: 248288 - DNA, 75 bp, Homo sapiens
tccgcttctgactgaggaccactggattttgaggaaactttggtcttatggaggagatgtataagaaagctcatg

SEQ ID NO: 248289 - DNA, 98 bp, Homo sapiens
gtcgtagggactcactggcggtgcgcgacctgggctggctccgggggtggcgggcgcagctgctgtgacagggaccagttactctccacaagaaaatt

SEQ ID NO: 248290 - DNA, 75 bp, Homo sapiens
caagactggggctgctcccatcattgatgtggtgcgatcgactggtcttctgaggacctctgccctctacacagc

SEQ ID NO: 248291 - DNA, 82 bp, Homo sapiens
gaggcaaggagctaaagcagcgtgcgttcagccctgggttgagaagctgatgtctcctcgacttccaactggaaccttgaac

SEQ ID NO: 248292 - DNA, 75 bp, Homo sapiens
attgttagtagaattttccagtgttgtgcttggaatggtggagtgttctggaaagatgtgtcatggcaatgctga

SEQ ID NO: 248293 - DNA, 76 bp, Homo sapiens
acttcgcaggcccagacgacgcgcgcgcaaaattccgggtagatatgcctggctcaggcagtgcattcatccccac

SEQ ID NO: 248294 - DNA, 98 bp, Homo sapiens
cgagatgtcgaagccgccacccaaaccagtcaaaccagacgacaggatctgctcgccacccttcatggagctcacgagcctgtgcggggatgacacca

SEQ ID NO: 248295 - DNA, 82 bp, Homo sapiens
tctccctgtcctagctctgtaactgtttacactgagatcaggaggtgctcaagtattagaaggttgcattgctgaaatacac

SEQ ID NO: 248296 - DNA, 75 bp, Homo sapiens
cgtccctggcgcttccttcttctcttccggcggagagggcccaatgtaaaggctgttgctactgctgtggaacag

SEQ ID NO: 248297 - DNA, 100 bp, Homo sapiens
gggagatcgaggctcgctacagcactggattagctggaaacctcctgggagacctacattacaccactgagggaactcaaccctatgtatgaaggatatc

SEQ ID NO: 248298 - DNA, 100 bp, Homo sapiens
gctacctgagcctgacgcccgagcagtggaagtcccacagaagctacagctgccaggaaatttctcctcttctctccatggaggctatggcatttgttac

SEQ ID NO: 248299 - DNA, 100 bp, Homo sapiens
tggtacattatatctccaccacttccctttgggtatcagctctgcagacacagtctgatctccaaggtggatcaagaacagctgaagacagatgaaagag

SEQ ID NO: 248300 - DNA, 120 bp, Homo sapiens
ctcgcggcattggagtcaagatggaggagtacgcgcgagagccttgatcgggcccagcacaggcagcgtcagtgcaaacttcccccaccccgccttccacccatgtgtgtcaaccctacc

SEQ ID NO: 248301 - DNA, 75 bp, Homo sapiens
gatggtgaacatgccaggagagcaatgcaaaaggaactgtggctgcaccatctgtcttcatcttcccgccatctg

SEQ ID NO: 248302 - DNA, 100 bp, Homo sapiens
cccgaggcagcatggagaggggccgtggcccctgcagcggaaccggacccagtccctgagccgcccctacacccacagtgcaggtcagctctgcggacgc

SEQ ID NO: 248303 - DNA, 82 bp, Homo sapiens
gcagttctcataactgggtttgataaaacagtttcttcaggattgaatgaaaacctcactgtcaatggaggaggctggaatg

SEQ ID NO: 248304 - DNA, 82 bp, Homo sapiens
aagtggaaagagagcaaggggaaggatcgggagtacacagacatcatccggcggctatgagaggttttcctccgagtaccca

SEQ ID NO: 248305 - DNA, 80 bp, Homo sapiens
ttacttctatagaaatggctgaaggaaaacctccttatgctgatatacatccaatgaggagatggggtttcatcatgttg

SEQ ID NO: 248306 - DNA, 87 bp, Homo sapiens
aggagcggcctccacggaagccaagctggccgaggtcattgacgagactctggatgttaaggaaatgattttcaatgccgagagagt

SEQ ID NO: 248307 - DNA, 90 bp, Homo sapiens
ccctcgggggccctacggcccctggctctgcctcctggtggccctcgccctggacgtcgtgagagggcagagcggcttgggtaaatccac

SEQ ID NO: 248308 - DNA, 96 bp, Homo sapiens
taaaaatttgcccattatgtcaacagcatctgtggaaatcgatgatgcattgtataggtagctacagcaagctgggtagcaggcagatccaaagga

SEQ ID NO: 248309 - DNA, 75 bp, Homo sapiens
acttgatgcttctgggccaccatttgccagggcctcgctcgagacgttgagaaagaagggccttaatggctgtga

SEQ ID NO: 248310 - DNA, 100 bp, Homo sapiens
agaaggagtatgtggaagggcaaggagtacctatagaaccccggaggagggtgaggagcagagctgggtaatcaaatgcaaagcagctgtgctatgggag

SEQ ID NO: 248311 - DNA, 95 bp, Homo sapiens
ctggacttcgcctttcccgagccctggaggtggggagaaaaggatccatgttctcacaagctatgaagaaatgggtgcaaggaaatactgatgag

SEQ ID NO: 248312 - DNA, 100 bp, Homo sapiens
gagcctcccgcccaaggagaatgcgctcttcaagcggatcttgatcactggggtgatcctgctggctgttggagtctggggcaaacttactctgggcacc

SEQ ID NO: 248313 - DNA, 74 bp, Homo sapiens
gacggggttagcggagcaatgcgcaggaataaggaagcgacctgcaaccgacgtttgtgtttaagatcactacg

SEQ ID NO: 248314 - DNA, 82 bp, Homo sapiens
ctcgggacggaggacgcgctagtattctcattcagattgtggatgcctcgtcagtcatcacttgggatttcgacgtgtgcaa

SEQ ID NO: 248315 - DNA, 100 bp, Homo sapiens
cccacgtcgcctgtcacccaatatctccagccgcgcagtcccgaagagtgtcgccgccctggagaggcaggtgtttgacttcctgggctaccagtgggcg

SEQ ID NO: 248316 - DNA, 86 bp, Homo sapiens
ccgtttgaggcctggctctgaattacatctgacccccaaagctcagcagattgtggatccgctggcccggggccgggccttccgcc

SEQ ID NO: 248317 - DNA, 82 bp, Homo sapiens
ccaccacaccagaaactagcaccagccccaaatttcagacaggatctccgtatgttgtccaggctggtctttaactcctgac

SEQ ID NO: 248318 - DNA, 105 bp, Homo sapiens
acagcgggagccggcgtgcgagcggcaggtactccaaagattcaggtttactcacgtcatccagcagagaatggaaagtcaaatttcctgaattgctatgtgtct

SEQ ID NO: 248319 - DNA, 50 bp, Homo sapiens
aactcggagatgcctggaatacagtaaggcaactcaaagttatgttgacg

SEQ ID NO: 248320 - DNA, 97 bp, Homo sapiens
tttactggagtaggtgttagtaagagctttcagcagaggccaaggcagcattgcttgaatttgaagaaagggagcgacagcataaacaaggacgcta

SEQ ID NO: 248321 - DNA, 148 bp, Homo sapiens
cgcaggatgggatccggctcctccagctaccggcccaaggccatctacctggacatcgatggacgcattcagaagcttgctcacttccgacagagaaaaacaaaaggtgacagttcgcattcggagaaaaagacggcgaagaggaagg

SEQ ID NO: 248322 - DNA, 82 bp, Homo sapiens
agggctaatctctatgagtcaccctcgaggccccgggtaatggcggcaccttcctacttctgcccagccacagccctcccct

SEQ ID NO: 248323 - DNA, 98 bp, Homo sapiens
tggaccaccgggcgctggtctgctcccagccgagcccacccacctttgggttcctgttggacatcgatggagtgcttgtgcggggccacagagtgatc

SEQ ID NO: 248324 - DNA, 102 bp, Homo sapiens
ggaaaaagagaaaagaaatgaaccagtattcttaaattgatttcaagtttgaacaaggggatgtatggcattgagaatgaagtcttcctgagccttccatgt

SEQ ID NO: 248325 - DNA, 80 bp, Homo sapiens
tgatgtagatcatcctggtgtgtccaatcaatttctgatcaatacaaattggctgatgttagaaatcagataatatttgc

SEQ ID NO: 248326 - DNA, 83 bp, Homo sapiens
tgggacccaccgctgccctcagctccgagtccagggcgagggaaagcaggcaggatgggagagtcgccgatagaaccacctct

SEQ ID NO: 248327 - DNA, 100 bp, Homo sapiens
cttgctgggagtggacttttccagtaaggaaagatcctgcggatctgcacgcggtacacgcccgagcaggacaccatgaccttctcggacgggctgaccc

SEQ ID NO: 248328 - DNA, 83 bp, Homo sapiens
taatgcaatggtctcaatctctggaaaaacttcttgccaaccaaagtctctaattaacagaagatggcaaagcccagccacag

SEQ ID NO: 248329 - DNA, 95 bp, Homo sapiens
gttcctgagctgccaacgatacctgaggggggttgttttgatgaaagtgaaaggttgctccttgagggcaggacagttcttatggctttatccgt

SEQ ID NO: 248330 - DNA, 94 bp, Homo sapiens
cgtctccttctatgtgctgtgtccggacaacggctgcggcgacaattttggggatatgagactttctactcggaatatcctgagtgttgcgtgg

SEQ ID NO: 248331 - DNA, 75 bp, Homo sapiens
ctcttagcgggccggcagcatgtgcggggcccaagattgtggtggtgccatgcagcaagaatcagagagatgcag

SEQ ID NO: 248332 - DNA, 90 bp, Homo sapiens
agcttcagccggtcctggagcgaccccacccccatgaaagccgacacttcccacgactcccgagacactggggcctctggcctcttggcc

SEQ ID NO: 248333 - DNA, 88 bp, Homo sapiens
tcttccacagcacctgaaagagctcttcctgctgctgatgctttctgtgattaccatgtgggctattggatacatattggacttcaat

SEQ ID NO: 248334 - DNA, 80 bp, Homo sapiens
agcctcacctcaccatttctagcttgttgaaacccaaaactaggccatgctgcaccttacaaaacggtctccgtccgcgc

SEQ ID NO: 248335 - DNA, 107 bp, Homo sapiens
ttccagtttaggaggaagatgcaagcggtttgggaccttgaacaaggcaaatatggttttgaatgacctggatgaccctgaaagaggaatgatttttgtctgctctg

SEQ ID NO: 248336 - DNA, 75 bp, Homo sapiens
cctctacaggacccgctttctaccattaaggcaaaaactgattattccaagtggaagttgccctgttattctgaa

SEQ ID NO: 248337 - DNA, 90 bp, Homo sapiens
cccgcctgccggcctgcctgccacagccggactccgccactccggatttctctctgatcaaacggacagttcaggactcagaatctaagg

SEQ ID NO: 248338 - DNA, 78 bp, Homo sapiens
gagaggaagcttaaatctgtcgtttgaatttaggaccacctcggtggggtaaaaccttgtgcattaaactgcttggct

SEQ ID NO: 248339 - DNA, 100 bp, Homo sapiens
ctctttcctcacctgcgggaggagatcctcagcggcgccttgcggagggaccccatgccggtggtggtgtgcacattgagccccggtatagacagttccc

SEQ ID NO: 248340 - DNA, 82 bp, Homo sapiens
tcgccttcatccacacggacctcccagagccaccgccctcgctgaccgtgcagaggtgagaagccctaccactgcaactggg

SEQ ID NO: 248341 - DNA, 82 bp, Homo sapiens
gagctgaggactgcctgtttgcaggaggctgtgcagaaggtatcctgcagaccatgaactgagcactgttcccagaccgttc

SEQ ID NO: 248342 - DNA, 100 bp, Homo sapiens
gacctttaccataggatgaagtaaccttgcattcggctgcaaggtgtactgtacgtacacagggatatgatgatacatacgcagaacaaagttacgaagg

SEQ ID NO: 248343 - DNA, 100 bp, Homo sapiens
ctgtgtggagaagagaaagaatgttcaaatccatcaaatcttctagaactttacacacaggtggctttctggtgactcagagaatgctggacatgttcaa

SEQ ID NO: 248344 - DNA, 74 bp, Homo sapiens
gagaacggtgcttctatggcaggatatgatcctgataacttaagtgactctctcttttccggtgatgaagaaaa

SEQ ID NO: 248345 - DNA, 100 bp, Homo sapiens
tccatttcaactacagatactttgaagtagaagaagctgatgagagaaaaggaacagttccgtaagctctttattggtggcttaagctttgaaaccacag

SEQ ID NO: 248346 - DNA, 74 bp, Homo sapiens
gcatcccagcagcggattcaccatctcaaaaccttgcagagcagagcgggcggaggaccccgggcgcgggcgcg

SEQ ID NO: 248347 - DNA, 100 bp, Homo sapiens
gtcaaaataaaaactggagaatggttctatgaggaacgagccaagaaatttccaactggaggcgtggtgtccctcgtggccgttcacccctccaccgtca

SEQ ID NO: 248348 - DNA, 82 bp, Homo sapiens
aaagataggatttgacccagagccggtgaagtggatcctaaagagaggatagcacgccaacgaaaattattacagaagaaac

SEQ ID NO: 248349 - DNA, 74 bp, Homo sapiens
gtccacgttggatgctgccttgtccggtaccctgtcaggacacattcagctaacgtattttagcaggtggagtg

SEQ ID NO: 248350 - DNA, 100 bp, Homo sapiens
agatccagtgcaaagtctttgactccttgctgaatctgagcaggagaagcatgacactggccaacactgcgtccagcatttgggtggccctcaggatttc

SEQ ID NO: 248351 - DNA, 100 bp, Homo sapiens
tgtccatcgtgtgcctgatgatcacgcagctggctggcttcagtggaccagaccgccgggagagcctgcccacctccccaccctggacgccgggcgcgtc

SEQ ID NO: 248352 - DNA, 75 bp, Homo sapiens
tgggatgccggcagtcagagtcaaaacagagcttttggaatctgaacaaggggtcctctcagggtgcgccatcat

SEQ ID NO: 248353 - DNA, 80 bp, Homo sapiens
cgagctgaccctgggagacatcgacgtactatactggcaattgctggagaagattttgcaattgttgcttctgatactcg

SEQ ID NO: 248354 - DNA, 100 bp, Homo sapiens
agagtaccacgtcagagacagcacctcaacctggttcagcagttcagggagctcacatttctcatattgctcaacagggattttatattggaagacatgg

SEQ ID NO: 248355 - DNA, 75 bp, Homo sapiens
gagtgttgccaaaagtcagaagacccactgctaaggagttattgaagcacaagtttatactacgcaatgcaaaga

SEQ ID NO: 248356 - DNA, 82 bp, Homo sapiens
tagacccccagagaattccttgagtctaaggcacaggagccagcaccgctctttgaccttgccatgcttgccttagatagtc

SEQ ID NO: 248357 - DNA, 90 bp, Homo sapiens
gctgacattaccttgaatatggttacctacctggcagaggagatctataaggacaggcagaaattctcagaacaggttttcaaagtggcc

SEQ ID NO: 248358 - DNA, 98 bp, Homo sapiens
ggagtataggagcaagggcgtctttgtgcaggttaatttggagtggcccctggagtcagtttcctacaccatccgaggccccacccagcacgagctac

SEQ ID NO: 248359 - DNA, 83 bp, Homo sapiens
gtcggaactagatctttctgacaacaaactcgaagactggcatgagttgctgggcatattggattttacccatcataggcgct

SEQ ID NO: 248360 - DNA, 83 bp, Homo sapiens
gtgggacgcctgcggcgcgggtgagcctggcaggtttgatctgtggatgaaatgaatcatgattttcaagctcttgcattaga

SEQ ID NO: 248361 - DNA, 75 bp, Homo sapiens
gatgccgggggagcggggccttccacaccccctccgtgggtgtgtggattgacatgtacgtggaggggacactgg

SEQ ID NO: 248362 - DNA, 100 bp, Homo sapiens
catttcgccacctactgaagacatcatttgggaccaagctgatgagcccttgaagcacagcagaaaccagcaaatatcctagtaatgggagaaggtcctg

SEQ ID NO: 248363 - DNA, 75 bp, Homo sapiens
aagattagcaaaggtgctaatccagtggaaatcaggagaggatgacgatgactattcatcatctacgagtttgct

SEQ ID NO: 248364 - DNA, 75 bp, Homo sapiens
ccattctgcctgggtgacaatgccttggtttcaacactatcggaatggaaagcatccagatggaggcctctacaa

SEQ ID NO: 248365 - DNA, 100 bp, Homo sapiens
caaaccaggacctctaaaaaaggcacctgctgctaagcggagtttaagagagctgtgaaagtagcaacaggacaagaactctcaaacaatattttggaca

SEQ ID NO: 248366 - DNA, 80 bp, Homo sapiens
ccccaacaaggacggagacgccggcgtgggcagcggccactgggagctgagggagtgcatccgccccaacccttttcccc

SEQ ID NO: 248367 - DNA, 89 bp, Homo sapiens
ctgcagccgcctgaccacggcgactggacttacgaggagcagtttaagcagctgcaccacccggcgcagggcttccgcttcggcaccgt

SEQ ID NO: 248368 - DNA, 82 bp, Homo sapiens
cacagaatagacctgaagacaaaaatccagaagtacaagcagtctgaacccagcttagactagaaagtctagaagacacaca

SEQ ID NO: 248369 - DNA, 46 bp, Homo sapiens
tgctattgaaagagagtatgcacagatttaacccttagtggcttct

SEQ ID NO: 248370 - DNA, 75 bp, Homo sapiens
gcctccctccttgacgtcttcgttttaaccaggtcagaatggcggcagtggagcatcgtcattcttcaggattgc

SEQ ID NO: 248371 - DNA, 116 bp, Homo sapiens
tgcagaactacctgtacaacgtgctggagagaccccgcggctgggcgttcatctaccacgctttcgtcaattctgtggtgttcttggtcacacatttatggagtttctgaagggca

SEQ ID NO: 248372 - DNA, 122 bp, Homo sapiens
gctagtgatcctttgcaccctgcttggagacggacttgcttccggtactccaaagattcaggtttactcacgtcatccagcagagaatggaaagtcaaatttcctgaattgctatgtgtctg

SEQ ID NO: 248373 - DNA, 98 bp, Homo sapiens
gcggccacacaccggcaacgcggtcacggcccagcgcgttcggtctcctctgagcctccggcctccataagacccaaaacagatgacacctcttccca

SEQ ID NO: 248374 - DNA, 75 bp, Homo sapiens
gtgatctcccaccttagcctcccaaggttacacatcattttggaatgactgtatatcatctggattacgtggctg

SEQ ID NO: 248375 - DNA, 90 bp, Homo sapiens
cggcaatggaacctacggacaggtgtacaagacctcctgccccccgaggtctgcagtctcctgaacccagcagccatctacgccaacaac

SEQ ID NO: 248376 - DNA, 97 bp, Homo sapiens
gccagaggtcaacaaggttctggacaagatgaagtctttctgccaggagcaggacatcgagactttacatggctctgttcacgtcacgctgtgtggg

SEQ ID NO: 248377 - DNA, 74 bp, Homo sapiens
taacttttgatcgaactggcagacggatatttactgcctatggcatgtctgcgttacctttaaatctgataaaa

SEQ ID NO: 248378 - DNA, 80 bp, Homo sapiens
tgtcgtccatctcgcagtacagcggcaagatcaagcactggaaccgcttccgagacgctgatcagctgaccgaagaacag

SEQ ID NO: 248379 - DNA, 75 bp, Homo sapiens
tattttacagatctttttgactatcttcctctcactgccttggtggatgggcagaaggtgcttcctggaggggcc

SEQ ID NO: 248380 - DNA, 75 bp, Homo sapiens
gccgccgcttgtgctgcagccatgggttatgtggtccgaatcagtggtgggaacgacaaacaaggtttccccatg

SEQ ID NO: 248381 - DNA, 74 bp, Homo sapiens
tgctggctctgcctttcctcgccgtgttgctcccgcaccgagccggatgtgtatatctcatgattgatatggag

SEQ ID NO: 248382 - DNA, 100 bp, Homo sapiens
gacggactctggccgcctcagcgtccgccctcaggcccgtggccgctgtccaggagctctgctctcccctccaggccctggccaacgtcaacattgggag

SEQ ID NO: 248383 - DNA, 82 bp, Homo sapiens
aatgatctctaccgatgggaagtccttattattggccctccagatacactttaggcttccgagtggacctgccaatcaagtc

SEQ ID NO: 248384 - DNA, 98 bp, Homo sapiens
gaataatcgcacccgtttctcaggtgcttacttcaccatgtccgatccgcagtgagttcctcctcctaactcaggcttccaggaaggatatcctctgc

SEQ ID NO: 248385 - DNA, 106 bp, Homo sapiens
gctaaaggcagttccttcccaatggcaactatgtttggatgttggatctacactttctcaagcactgtgatcttcaaatagtttccaggatggcttctgcatcaac

SEQ ID NO: 248386 - DNA, 131 bp, Homo sapiens
agagcctcagcctggccgtggacggcctcatggagatggccctggactccagcaggcagtgtttctaatgctgctatggaggatttgttaacagctgcaaccacgggcattttgaggcacattgcagctga

SEQ ID NO: 248387 - DNA, 101 bp, Homo sapiens
cagcttaaagagctccacattcaggggaaccgcctcaccgttctgcccccagaactagtgtcttctgggactctcctactcattgcttgcctgtgcattgt

SEQ ID NO: 248388 - DNA, 103 bp, Homo sapiens
gcagcctcctgaggatctgggattacaggatttcaacagatcacatggatcaaggccttagggaggtggttggggattcacgtatgccctggaccatctggag

SEQ ID NO: 248389 - DNA, 82 bp, Homo sapiens
agatgaggatcctgcatgttaatgggtttaatggagagcagtatccagtctgatagcagtgggtacatctcatggattggct

SEQ ID NO: 248390 - DNA, 82 bp, Homo sapiens
tgtggccatcttcaccgtgtacctgggctcgagcctgcacatgaagcagcccctgtcaaagggaacaggaagcagtccacgg

SEQ ID NO: 248391 - DNA, 83 bp, Homo sapiens
ctgaggtccgcggcagggtcccgcatggcggcgcacaggaagcacggctactgcagcactggggtgtcagttgttggtccgac

SEQ ID NO: 248392 - DNA, 80 bp, Homo sapiens
cttggactgagtcctgcaggacacagccccagcatgagaccagatgtaagctctcctccatccagctcctcaacagcaac

SEQ ID NO: 248393 - DNA, 75 bp, Homo sapiens
gagattcacctcgtcgtgatccaggttctccagaagctggggaaggcagatgagaccaaggatgagcagtttgag

SEQ ID NO: 248394 - DNA, 100 bp, Homo sapiens
ttggagggaaatgggaatgtacacgataattaaagagtaaagttgtgctcaacgatgcggtggtgctagaatttgttatattttccatgagacttttggg

SEQ ID NO: 248395 - DNA, 83 bp, Homo sapiens
ggcgtgcgggcagcgcttgaggccctgctgccctacactgacaatgcagatcttcgtgaagactctgactggtaagaccatca

SEQ ID NO: 248396 - DNA, 75 bp, Homo sapiens
aattcctgaaagttgaccaaggaacactttttgaactcattctgattctgtttctggcgtctgcatacgcaagtc

SEQ ID NO: 248397 - DNA, 99 bp, Homo sapiens
ctggcgcgtacgagatctccgaccagtctgggggcgctggcggcctgcgcagccacctcaagaatttaacacgtgaactggagaatggggaaaaacagc

SEQ ID NO: 248398 - DNA, 100 bp, Homo sapiens
cagtttgggcagagatcgaatgacctccaccatgcacaagatgttgtccctgcccccagccaaggaaattcctcgctgccggactgcgcccacccttgag

SEQ ID NO: 248399 - DNA, 100 bp, Homo sapiens
ggagaaggaaaggaagatgcattttctaagctgaaggagaagtttatgaatgagttgcataaaattccatgtttttgattggtcaaggagcacatgtagg

SEQ ID NO: 248400 - DNA, 75 bp, Homo sapiens
ctctatatgaacaatccgtctggatcacggatgtaggaagtgattctgaaaaagagttccacgtcctcccttatc

SEQ ID NO: 248401 - DNA, 100 bp, Homo sapiens
gtggaccaggagatcaacaggatcctcttggagcagaagaagcaggaccgcggggagctgaagctgctgcttttgggagcctcctcaacaagcccaagag

SEQ ID NO: 248402 - DNA, 83 bp, Homo sapiens
cgtggaacgacccgcgcgtgccctctgagggccccaagggttcatgtaatcaaagaagtttctttgttgtgtgtatctttaca

SEQ ID NO: 248403 - DNA, 90 bp, Homo sapiens
ttatgaactaacgagaagggaagcagaagcaaacagaagaccccttcctgagttgaaggccagaaatgctcacatcaggatccgattgag

SEQ ID NO: 248404 - DNA, 98 bp, Homo sapiens
tttgagcgtgctgactcggagtacacggacaagctgcaacactacaccagtggccacaaaaactccacggccagcgtgagcgaggcagagagaaaggc

SEQ ID NO: 248405 - DNA, 100 bp, Homo sapiens
tcggagcggagacggcaaatggcggacttcgacacctacgacgatcgggcctacagcagcttcggcggcggcagaggaacccagcgggtgccgcttctcc

SEQ ID NO: 248406 - DNA, 50 bp, Homo sapiens
aagcgactttggtgagactctggctgtatcgcatccattgaatactgtga

SEQ ID NO: 248407 - DNA, 90 bp, Homo sapiens
ctataagcatgggaccctgcgcccgggggtcaccaatgaacagaactttccatgactggatcacagggaaaaaccgaccgagctcaggaa

SEQ ID NO: 248408 - DNA, 90 bp, Homo sapiens
catagtccatcgaagaagagtccttggaacaagcaactggctattgaaaagccattcaaactcctccccacgacactctgaagcagcgac

SEQ ID NO: 248409 - DNA, 83 bp, Homo sapiens
gcccggccaagaggcaaaggggaggttacgcagcaaaccatccagaaggtggtgatgatgtccagcaactctgtgaagcagga

SEQ ID NO: 248410 - DNA, 83 bp, Homo sapiens
cgccagtccgggcaggggcagcgggagccggccggcaaattgtggctactaatttgccccctgaagatcaagatggctctggg

SEQ ID NO: 248411 - DNA, 101 bp, Homo sapiens
cagcccgggaccagcctccccgcgcagcctggcaggtcaacagcgacctcatttacattacagctaagaaagatggcactcatgtggtggaaaatgtggat

SEQ ID NO: 248412 - DNA, 74 bp, Homo sapiens
gagcttggaggcggcccgcggggcaggctgtccctgcaggatcccacgtacggctgaatcttcagactggggaa

SEQ ID NO: 248413 - DNA, 90 bp, Homo sapiens
ggctcctgcatgaccgacctggtcagccagagataaatcggagcgagcatttggggtggccttcgtgaagctgatgaacccggatggcac

SEQ ID NO: 248414 - DNA, 83 bp, Homo sapiens
tgtccccaagctccccgtcctcggaatagcctaacatggcagaccagagacagcgctcactgtctacctctggggagtcattg

SEQ ID NO: 248415 - DNA, 75 bp, Homo sapiens
tgtacaccctcaacaaacaccagcgctttggcagggcctggggcgcccgtgtggtggagcctccggagaaggacg

SEQ ID NO: 248416 - DNA, 80 bp, Homo sapiens
gaggacacgaggcggcgggctggagacatggaccgcggcgagcaaggaatcccagtcagaagttccagcctgccactgtt

SEQ ID NO: 248417 - DNA, 75 bp, Homo sapiens
catttagagctgcggaacaggacgccctctgatcactccttgctcaagacccctccccagtacctacccttccag

SEQ ID NO: 248418 - DNA, 80 bp, Homo sapiens
cgccggcctcgcctcctcgcagcagcgccatgatctctgttgaggagctggcgcggaatctggtcatcaaggtcaacagg

SEQ ID NO: 248419 - DNA, 90 bp, Homo sapiens
taaggattccaagtaactcttatttggaccctgatgctcccataagacagaaaatgccccttgatgatctggatagagaagatgaagtta

SEQ ID NO: 248420 - DNA, 82 bp, Homo sapiens
cagtgctcttcgaagtggcctgggaggtggctaacaaggaatcagcatgattcttcagaggctcttcaggttctcctctgtc

SEQ ID NO: 248421 - DNA, 100 bp, Homo sapiens
gaaggacttcggaatgcactacaacaggaaaatcatattatagatggagtaaagacttaattcagtgcacaaatgagatgaatgtgaacatcccacagtt

SEQ ID NO: 248422 - DNA, 100 bp, Homo sapiens
gcataatgacattgtggacagtgacagcgatgctgaggatcgaggaacgttgtctgaaatggaaaaggtgttctaaaattcatgtggaactgcaatgggc

SEQ ID NO: 248423 - DNA, 87 bp, Homo sapiens
ggattcaaggaccctgatgaagaccttgaacaagtctcgagagtggaaacaactctcacatgtgtgcaacagcaccgatcttccgga

SEQ ID NO: 248424 - DNA, 74 bp, Homo sapiens
aaagtcctttgaaatggtgctggatgaaattagaaaggatgaaacaggcgcctatttaatcgacagagacccca

SEQ ID NO: 248425 - DNA, 76 bp, Homo sapiens
agacacaggcacgactagaagcattgctagaagcagcaggtttattcactggatctctgaatacccaggccccctc

SEQ ID NO: 248426 - DNA, 83 bp, Homo sapiens
cagcggatgtggcagccccgagccatggctctcgccgtccgagtcgtttattgtgcccctctcagctgaggaggaaccgagag

SEQ ID NO: 248427 - DNA, 100 bp, Homo sapiens
agttggtccattcaacaaatggttattggatgcccattatgtggcaggcactgttccgggggagaggtgaggcaggcgactaatcagattgtgatgaatt

SEQ ID NO: 248428 - DNA, 75 bp, Homo sapiens
cgcgaatggcacgagctggagggagaatttcaagaactgcagggagccggcggcttgtggacgtgatggatgtga

SEQ ID NO: 248429 - DNA, 74 bp, Homo sapiens
aagaagcccaccatctccgtgaaggaagcacttttctgtagaaggtcagttggaattcagggcattgctattta

SEQ ID NO: 248430 - DNA, 74 bp, Homo sapiens
ccgaagatttattttgtcagtgaatacagacttttcctatcagcctggagatgccttcagcgtgatctgcccta

SEQ ID NO: 248431 - DNA, 96 bp, Homo sapiens
ttgattacccgttaagtcccccaaagatgagatttacctgtgagatgtttcatcccaacactctacattaatcatactcctccaccactgtccaag

SEQ ID NO: 248432 - DNA, 51 bp, Homo sapiens
aaatgtcatgcctctgaaaatgaagggtgtccgcaatgttgccagtgtctg

SEQ ID NO: 248433 - DNA, 109 bp, Homo sapiens
ccgctctccaccatccgcgaggtggcggtgctgaggcacctggagaccttcgagcaccccaacgtggtcagatatgtgtcacaaagatgtctacacggaactgccaggg

SEQ ID NO: 248434 - DNA, 83 bp, Homo sapiens
caaggacaaacccaccttcatcaaaggggtatggtgtcagtcgtggaactgaaacagagttcagtaatgcaacgattgcttac

SEQ ID NO: 248435 - DNA, 144 bp, Homo sapiens
acctcttttcccgaaaattccccttctacaagaacaaggaccagagtgagcaggaaacaagtgatgctgaccgtcatattgaacattccagatacctatcattactcgatgctgttgataacagcaagatggctttgaactcag

SEQ ID NO: 248436 - DNA, 98 bp, Homo sapiens
ctacaaggacagcagcgactttggggcccgtcaccctcagaaatttctgaataaattggcagaagaacgcagacagaagaaggaaacttaagatgtgc

SEQ ID NO: 248437 - DNA, 90 bp, Homo sapiens
acagatgtggcctccagagggctagatgaggacggggacttggttgccttttccagtgacgaggaattgacaatggccatgtcctacgtg

SEQ ID NO: 248438 - DNA, 90 bp, Homo sapiens
aagaatgtggaaataacggagcaacttgctaatggcaggcattttacaagtacaacacctcaggtattgagccccactattacatctccc

SEQ ID NO: 248439 - DNA, 75 bp, Homo sapiens
ccaaggaagccctcatctgcccaagttttaaaatcaaagatgggaaaatcggagaaaattgcccttccccatggc

SEQ ID NO: 248440 - DNA, 100 bp, Homo sapiens
cagagcgcggccatccgggcggggccgacggagcgcggcaggacttggctggacggcgcggccacggagaagggcgcgttttcggctttgtgagaaacct

SEQ ID NO: 248441 - DNA, 76 bp, Homo sapiens
cttcggtgcctctctccagcagactgcggttgatgccggcccaggatggatcagacctgtgaactacccagaagaa

SEQ ID NO: 248442 - DNA, 100 bp, Homo sapiens
ctcatcttgaagcccagaataagattaagggttgtacaggctctttgaatatgactctgcaaagtttgcagctcaccttgtgaagatgaaatatccaaga

SEQ ID NO: 248443 - DNA, 100 bp, Homo sapiens
tggagatacctaggccgggagagggagaacacagttggagaaaatcggcagctgagacggccttggccgagtagcaaagaattgctgagagcagagactc

SEQ ID NO: 248444 - DNA, 50 bp, Homo sapiens
cctgggtgctcttcatcttgggctgaagtttctctttggctcatcagcca

SEQ ID NO: 248445 - DNA, 85 bp, Homo sapiens
ttgccctcagcatctcccttcatgtctgggtcatggtacaaagggaaacctctgccagcgaaagatgccgctcagtattagcgtg

SEQ ID NO: 248446 - DNA, 100 bp, Homo sapiens
acctctccttttccctctccctttccctaagatcgcccaggaccacaccgcagcgtaactgcaggcctctcagcgaaaaagggggaaagcaaagacccgg

SEQ ID NO: 248447 - DNA, 73 bp, Homo sapiens
tgttgctgccgccatacgcgctctccctgtttaggtacaggtttgcagattccgccagcagcacagcaagctc

SEQ ID NO: 248448 - DNA, 82 bp, Homo sapiens
aaaaaaggggagacactgcgaaagcaaaccgaggagaaagctaaaagtttggccatgtcagttactacttctggattttctg

SEQ ID NO: 248449 - DNA, 83 bp, Homo sapiens
cagcaaatacactgcaggtccccagccattaaacacattttacaaagccatgccctacagacatcaaaatttacaagctcttc

SEQ ID NO: 248450 - DNA, 113 bp, Homo sapiens
aaaggaattccagagttctggtttaccatcttcagaaatgtggacatgctgagtgaattagtccagtgggtgtttcttcccgatcaagatcagagatctcagttaatcctccc

SEQ ID NO: 248451 - DNA, 50 bp, Homo sapiens
ttcaggaaccaccagtgacagagcttttaaggataccggaaaaacacccg

SEQ ID NO: 248452 - DNA, 100 bp, Homo sapiens
gtccggcccatcagcgtggcagagctggaggaaggagctaccctcatcgcccataaagtggatgagcaggcctctcttctgtggaaactctgaagccgac

SEQ ID NO: 248453 - DNA, 74 bp, Homo sapiens
agaattggcaaaggaagagcaggagcacctcaggaagctggaggatcagttccatgacaagaccccttatacga

SEQ ID NO: 248454 - DNA, 100 bp, Homo sapiens
gccggaaggggctagaggcggctccctgggtgacaaccgcgcgccccacctttccccacgtggccgcgaagaccgggcatgccagaggaacagagagaag

SEQ ID NO: 248455 - DNA, 90 bp, Homo sapiens
cgacgaagacagcggagaggagagcggtgcggaggactgaggtgctgccgaaaagaaccaacttccctgggatcagctccacagaccgcg

SEQ ID NO: 248456 - DNA, 81 bp, Homo sapiens
gtctggggcaaagggaccacggtcaccgtctcctcagcaagagtgagccatggagctacgtgtggggaacaagtaccgcct

SEQ ID NO: 248457 - DNA, 50 bp, Homo sapiens
gagaactacaggaacctggagtctgtgggccagtacgggatccctgaacc

SEQ ID NO: 248458 - DNA, 100 bp, Homo sapiens
tcctcaacccggtcgaccccatctcccatgacctgcttgtgaacctggcccgggacctgcagtgccccaagaagggtgattctgggggtccacttgtctg

SEQ ID NO: 248459 - DNA, 100 bp, Homo sapiens
gattacgatgctttggatgttgccaacaaaagcaaatttttcagaacataaaacaagaatatagtcgttatcagaggtggagacatttagaagttgttct

SEQ ID NO: 248460 - DNA, 95 bp, Homo sapiens
gaaaatgtaccactgttgcagaagctcctcacagagtatgtgtcaggtgatctttgcagagctgtttcaacttccagcaccccctcacattgatg

SEQ ID NO: 248461 - DNA, 48 bp, Homo sapiens
gcgtgcacacatactcacacagatatttggtttccaggcaggactgac

SEQ ID NO: 248462 - DNA, 111 bp, Homo sapiens
tgcctcgacactttgggacactttgctgatggtgtggttggagtttatgaatgtcacaatgctgggggaaaccaggtcatgaaacgagtgcgtaccgagcagattcagatg

SEQ ID NO: 248463 - DNA, 100 bp, Homo sapiens
atcatcaaaatcaccaaccaaaagattcacctttggatttcatcgcttaggtcggtaaataaccaatattgcaaaaaggtgattggcgggatggtgtgga

SEQ ID NO: 248464 - DNA, 100 bp, Homo sapiens
ttttggctgatccaggacctgtaaacttcatggttcggctttttgtggtgattgtgatgtttgcctggtctatagttgaatcatttgctgtttcaaatag

SEQ ID NO: 248465 - DNA, 90 bp, Homo sapiens
atcggcttcactgtcctcacagaggcagaccctgcagccagtctcgaagtgctgcagctaaaactcatacaactgccttggctgggcgaa

SEQ ID NO: 248466 - DNA, 101 bp, Homo sapiens
atgatagagaaacttaccctgatgatccatgctttccatcaacacacagcaagaaggaggccatcagcaaactgggaagaggaccctcaccaggaaccaca

SEQ ID NO: 248467 - DNA, 75 bp, Homo sapiens
agcgagtagaagccatgaaacagctgccgagaatggtggtattttgctttgaatgctaacttgtatgagatcaga

SEQ ID NO: 248468 - DNA, 75 bp, Homo sapiens
gttgtttgacaagagtggaaatggagaggtgacatttgaggaggaacccgttttcactagacaagacagcaatcg

SEQ ID NO: 248469 - DNA, 100 bp, Homo sapiens
cgggacccggttccccggcccacagtgggggtgtgcaaacccgagagaactgggtgagggttcagagtatggtgccagtggagaagatgcgctcagcagg

SEQ ID NO: 248470 - DNA, 83 bp, Homo sapiens
tcagttgtcatccagagaagtcaaaggaaatgctgcttggggatgagcatatatgcctcttcatgttcgacgcagtagtgacc

SEQ ID NO: 248471 - DNA, 80 bp, Homo sapiens
cctcggttcgccctcagccgccccggccggctgcgtgcacttttcctacaaagcatcgtgtgagatccgcgtgcttatgc

SEQ ID NO: 248472 - DNA, 74 bp, Homo sapiens
cctccaaagatttactttcccatccgtgactcctggaatgcagtcagtttacagacacgagacagaataggaac

SEQ ID NO: 248473 - DNA, 82 bp, Homo sapiens
acggccagatctgccctccacttagcaaatggagtacctttgggactctggaagttatgcctcagaatgaatcggaaacaca

SEQ ID NO: 248474 - DNA, 50 bp, Homo sapiens
atcacgatgaagaggaggcggggagaccgacatgaccgataatagcaaca

SEQ ID NO: 248475 - DNA, 75 bp, Homo sapiens
aaaagatggttgttattggtgcaggagtaataggtgtagaattggcaccacaaggccacataaggagggtgaggt

SEQ ID NO: 248476 - DNA, 90 bp, Homo sapiens
taagacatcacaatcccattattcagagcgcgtatggagtggaaacgcttgtagggcttcaccagaaagcataacccctactgtagaact

SEQ ID NO: 248477 - DNA, 90 bp, Homo sapiens
cttttgccacctttccctttatttccggagggacatgagagatggctttagaagaaaaagtttctactcttcccattatgcgagagagcg

SEQ ID NO: 248478 - DNA, 100 bp, Homo sapiens
acttggtcgtctacacaggcgcgggaatcagcacggccatcagcatcagcaaagccatcaacacccaggaggcccccgtgaaggagaagcacgcccggcg

SEQ ID NO: 248479 - DNA, 98 bp, Homo sapiens
cagttggcaaaccagatatatgacttggaaaatttctaccttgaaccgtatctgaaagaggttattcgggaaagaaaagaaagagaagaatgggcaaa

SEQ ID NO: 248480 - DNA, 75 bp, Homo sapiens
gcactgcccggaagccatgatctgcgtcattgccaatccgaacatttccccagaggagctcaaaatggagttgcc

SEQ ID NO: 248481 - DNA, 100 bp, Homo sapiens
ctttcatacgcttttctgtaggcgatgttttaaatatgactgcttcctacatcggcagttttcctgaggacagctcaaaagaaaggaatcttgtatcctg

SEQ ID NO: 248482 - DNA, 75 bp, Homo sapiens
cctgagcagagctctccgggttccccggctcgcggggcccggcgaagggcaggcagagtggctcctcacagcctg

SEQ ID NO: 248483 - DNA, 82 bp, Homo sapiens
agctaaagcagcgtgcgttcagccctgggacgcaaacatgcagatctttgtgaagaccctcactggcaaaaccatcaccctt

SEQ ID NO: 248484 - DNA, 78 bp, Homo sapiens
gcagatcttcagtgacattgatgaaaagattgaacaaaatgctgcaagatcatcacgaagtatgtatatgagctcctg

SEQ ID NO: 248485 - DNA, 88 bp, Homo sapiens
cagaggcgctggagctgggtcagtccgccgctcaccccgcggccgcaccttcccgccttctcagctctcgtggcattatccttcagtg

SEQ ID NO: 248486 - DNA, 97 bp, Homo sapiens
cgccgcggggaggaggagcgggcgagaagctgccgccgaacgacaggacgttggggcggcctggctccctcagctctgcctcaccgagggagccaaa

SEQ ID NO: 248487 - DNA, 100 bp, Homo sapiens
ctgacactatcctactggacagactgcaccactccactcaagagctgctcaacaccaccatggaccaccttaatgtggtggtggtgctgcagcaggtctt

SEQ ID NO: 248488 - DNA, 100 bp, Homo sapiens
accaaccaaattgtcgccattaagaaaagcccactcgtcaagtgaggagacatcgtcagtgctgcagccggggatcgccatggagaccagaggactggct

SEQ ID NO: 248489 - DNA, 83 bp, Homo sapiens
gctgctcggggtccgcgcggcctccgcggagccaggttcgagaacttgtcttggacaattgcaaatcaaatgatggaaaaatt

SEQ ID NO: 248490 - DNA, 99 bp, Homo sapiens
tcagcacttaccggctgccccagatcgcgcgcctggacaacgcatcaacaacagcaacttgtgattggcggtgaccggatattcagttgcacatcccca

SEQ ID NO: 248491 - DNA, 75 bp, Homo sapiens
ggggctttcgacatgacaggtcactagagaatgcagaggctgtgcattttttctgcaattacgaagagagccgag

SEQ ID NO: 248492 - DNA, 80 bp, Homo sapiens
cttcattactacatctgaaaagcttctcatctagaaggtttccaccgtgcacattatgaagaaaagaaatggaggtggga

SEQ ID NO: 248493 - DNA, 75 bp, Homo sapiens
tcttcaacactgttattgtaaacaaagcggacaaggcaaaatctcagcaagttcggacctctagtacaataaggc

SEQ ID NO: 248494 - DNA, 74 bp, Homo sapiens
ctcgacctgcagggagcagaggggacagaggcaccaaggacctccaagacagtaagactttgaccccgacgcag

SEQ ID NO: 248495 - DNA, 83 bp, Homo sapiens
gggcgccagtccgggcaggggcagcgggagccggccggttggaatcgaagcctcttaaaatggcagatgacttggacttcgag

SEQ ID NO: 248496 - DNA, 82 bp, Homo sapiens
ggagatgactttttgcattgaaacggttttacagacatttcaccagaggaattgaggcttgaataccataacttcttaacca

SEQ ID NO: 248497 - DNA, 83 bp, Homo sapiens
agaaccatggcccaatttgtccgtaaccttgtggagaagaccccggcgctggtgaacgctcttggataagcacaagaatacag

SEQ ID NO: 248498 - DNA, 50 bp, Homo sapiens
ggatggaacacttcagtgcattcaaggaaactgtgggaaccatgatgggg

SEQ ID NO: 248499 - DNA, 100 bp, Homo sapiens
aacatacctgacaatgaaaccgggaggaaagaagacaagagagaacgcaaacagtttgaagctgaggattttgtccggtttatcactaaaatatggcatc

SEQ ID NO: 248500 - DNA, 75 bp, Homo sapiens
agctggctggcttcagtggaccagaagggaaaaggccgaggcatcagcgtgtgaagaccgcaaagacgatcccga

SEQ ID NO: 248501 - DNA, 75 bp, Homo sapiens
ccagcagatggagaatagaccctctgtccaggcagcattaaaacttaagcagggacaagaatccttcaagaaaca

SEQ ID NO: 248502 - DNA, 74 bp, Homo sapiens
tggacaacagttccttcacctcagcatttttcatggatttcaaataagtgagtgcctggaagagctgggatgtc

SEQ ID NO: 248503 - DNA, 100 bp, Homo sapiens
aacgaattttctttcgatggcattaccagagtatagggtagtttggtgttcgtggttgggaaaatggatggcttactgatggttagtggtcgaagacata

SEQ ID NO: 248504 - DNA, 75 bp, Homo sapiens
cccatcagcctggattggtgaaactgaatcacaggagatatttccagttcttcgtgccatgaaggaggacagtga

SEQ ID NO: 248505 - DNA, 83 bp, Homo sapiens
ggtgtccccgtcttggtgctggccaacaagcaggatgtggagtcaccttcaggccattcagaggaggaaagagaggggaatat

SEQ ID NO: 248506 - DNA, 100 bp, Homo sapiens
ggtgaggctcacgttggagggcttcgcgtctgcttcggagaccgtaaggaaaatgtgctggaaatcatattattcaaacacagttgatgaatgacttact

SEQ ID NO: 248507 - DNA, 75 bp, Homo sapiens
gctgtggttttgatcatgttgttaccctcggacgtagcccggcttgtattgggggctaagtgatggatcttgtac

SEQ ID NO: 248508 - DNA, 97 bp, Homo sapiens
ccttgaaggaactgtggcttgtgatccatgggcgagtctacgatgtcacccgcttcctcaacgagggccaaggagatctgttgaagaatgccaagaa

SEQ ID NO: 248509 - DNA, 100 bp, Homo sapiens
gctgttggcgttgatatcagtggcaggtttatgacctcaggaaaggaggatagcaaacaagctcaatttttagccttggcagtagtatactttatctctg

SEQ ID NO: 248510 - DNA, 51 bp, Homo sapiens
caaaatgtcaacaaattgatggtggatccaaacttctacagcaaaaactta

SEQ ID NO: 248511 - DNA, 75 bp, Homo sapiens
tcacccacagcggggcggcggcggcggcggctgcggcccaatataggttcttgggtgtctctggggagtccctgg

SEQ ID NO: 248512 - DNA, 97 bp, Homo sapiens
ctgagctggttggccctgtgatccctcaagactggtccacggagtgtatgaccacaaacagccatcaaggaacagattatggcctttgcaagcaaat

SEQ ID NO: 248513 - DNA, 83 bp, Homo sapiens
caggccatgggcatgctggccttcccgcccgacacgcacatctccccgtacaagctgtggaaagtgaagaaggcattgaagat

SEQ ID NO: 248514 - DNA, 75 bp, Homo sapiens
gatttggccgcctggattgtgttgtcaacaacgctggccaccgagccaagaccaaggagaatgttgtacagagcg

SEQ ID NO: 248515 - DNA, 75 bp, Homo sapiens
cctcggccgaccagggacctgcccgcctgcggctgctccgggcagtgctcggaatgtgaccaggcagggagcagt

SEQ ID NO: 248516 - DNA, 83 bp, Homo sapiens
cgacgcggacagcgggctggagcctgacgagctggcggtcgtgagatggagaataaagaaactctcaaagggttgcacaagat

SEQ ID NO: 248517 - DNA, 90 bp, Homo sapiens
ataatattgaactgggcacagcatgcggaaaatactacagagtgtgcacactggctatcattgatccagtgttctaagaacggaagcatc

SEQ ID NO: 248518 - DNA, 83 bp, Homo sapiens
ccctggtgctgctcagtgtggtggatcatttcaaccgcaccgaacaagatttgtgatgaaatggagcctggaacaaactcttt

SEQ ID NO: 248519 - DNA, 90 bp, Homo sapiens
agagccaaaaacgggaagaccatccagatcacttcagcatcggtgaggttggtctctcaagaacccaaagctctggtcagtgaatggaag

SEQ ID NO: 248520 - DNA, 100 bp, Homo sapiens
tgaagatttaagaactgaatgtgcaacttgcaagggaactggagacaatgaaaatcttgtcagactgcaaaattcaaaatggggctcaaggtattcgttt

SEQ ID NO: 248521 - DNA, 100 bp, Homo sapiens
cgagtaatcgcctgctttgattcattgaaagtgattttcttccacccccacctccacctctagatgattccagtgcccttccatctatctctggaaactt

SEQ ID NO: 248522 - DNA, 75 bp, Homo sapiens
tccagaaactggaggagtcccgctcgaagctaggcgacgactgtaagggcaagaggcacctcgacgcgcacacag

SEQ ID NO: 248523 - DNA, 75 bp, Homo sapiens
tcttcctcaactatctcgctgacacgcagagtgcttgtgatttcacgtatttttgctgaactcgtaaaagagaca

SEQ ID NO: 248524 - DNA, 82 bp, Homo sapiens
aaagagtaccgtgagaagatagaggcagaactgcaggacatctgcaatgatgttctgaactccaggcccatgttcatcagcg

SEQ ID NO: 248525 - DNA, 74 bp, Homo sapiens
cggagcccgcagcttccctgccggtgcgcgcggagccatggttatcatgtcggagttcagcgcggaccccgcgg

SEQ ID NO: 248526 - DNA, 98 bp, Homo sapiens
ctaccccggtgcctacaatgcctttcagatccgtgctggaaactcgcagggggacttttacattaggggtcaaaagcggctggtgctttccgaaagct

SEQ ID NO: 248527 - DNA, 100 bp, Homo sapiens
caatcagacaggtcctcatccagctcacaggaaagtctcaatgagtgttgcagagagctgctggacacagtggataactacgccgtcctccagctggata

SEQ ID NO: 248528 - DNA, 98 bp, Homo sapiens
gccatggagtttgtgatgaagcaggctctaggagtctctgctttctatccgtcaagatgataaagtcgtgtgcccgagaaccaaagaagtcttccact

SEQ ID NO: 248529 - DNA, 100 bp, Homo sapiens
cccagttccaggtagacatggaggccgtcggggagacgctgtggtgtgactggggcaggaccatcagatcgaacaccagggggacaagctggagatggcg

SEQ ID NO: 248530 - DNA, 50 bp, Homo sapiens
catagctgtaggactgctggagggcttccgagtggacctgccaatcaagt

SEQ ID NO: 248531 - DNA, 75 bp, Homo sapiens
cttgctcggccgatgaagtgcagaggtttttttctgatccgaaagcccccaatgtcgttgtcacccggctcaccc

SEQ ID NO: 248532 - DNA, 75 bp, Homo sapiens
ccgagctatgggtggctgagagaggaaccacccagggctgccatccaggctgatgaggaagagatgcttgataat

SEQ ID NO: 248533 - DNA, 50 bp, Homo sapiens
gctctctgaggaggctgccacagtgcctcacagaatgaggttcctgcggc

SEQ ID NO: 248534 - DNA, 75 bp, Homo sapiens
tgaaagttcatcctgaacaggaaaaggaaagtgactattttaccccacagggagaattccgtgtagacaaagcag

SEQ ID NO: 248535 - DNA, 89 bp, Homo sapiens
ctgtgctcaagcatttcaacgtgcgtgtcacccacgcagacatcttcagccgctgccaggaatccattgaagaggccatctccacattc

SEQ ID NO: 248536 - DNA, 100 bp, Homo sapiens
tgaaggtccggggcttgccctggtcttgctcggccgatgaagtgcagaggtttttttctgattttgaagacattttggctacaatatattttttgatgca

SEQ ID NO: 248537 - DNA, 82 bp, Homo sapiens
ggagtccttggggacggagcagcgcgtcgtggggcgagcggcagataagaccatcatcatgtggaaactgaccagggatgag

SEQ ID NO: 248538 - DNA, 83 bp, Homo sapiens
agggctcggtcaacggcttcatcagcaccttggggagcgtgaggatcatccccggagaggacgggaggatcggcagcacaggg

SEQ ID NO: 248539 - DNA, 100 bp, Homo sapiens
gacccttcacccctcacctcgatgcagccagtagcttggatccttgtgggcatgatccataatcggtttcaagcaggaggatgcattagcacaacaggcc

SEQ ID NO: 248540 - DNA, 97 bp, Homo sapiens
gccttgtggagacaacgccttaacccaaggaagtgactcaaactgtgagaacttcaggaagttggaaatctgtatgacatgttccacactcgcaact

SEQ ID NO: 248541 - DNA, 100 bp, Homo sapiens
cgagggaccgccgggcggcggaaagcagggccagatattcgaagcttacaacatggcagctttgtggaaattaccttgtattttcatctgtgagaataat

SEQ ID NO: 248542 - DNA, 75 bp, Homo sapiens
gctgctgctgctgacgctgctgctgcccggcctcgggacaggggcaagtgtccgagtggtgaatcagctacttac

SEQ ID NO: 248543 - DNA, 98 bp, Homo sapiens
aagcctgatctaacccctagaaacagttgagtcactcagtcatcgctaaggactcattagctggttaatgagaagcactgtatggagagaaaactgtg

SEQ ID NO: 248544 - DNA, 73 bp, Homo sapiens
ggcaattgaaaacactgcctcagtatctgaacacaagatcggcttcaccaccgaccctcggatggcccgctcc

SEQ ID NO: 248545 - DNA, 75 bp, Homo sapiens
tcaacgcctccccggctggtcgccggaagccttgtgcaaagtgatggagtccagaactaaactgcacaatgaaag

SEQ ID NO: 248546 - DNA, 51 bp, Homo sapiens
caagcacaccaactataccatggagattatgagcctcaaacaatttgtgag

SEQ ID NO: 248547 - DNA, 90 bp, Homo sapiens
cagatgtttgcaaagaggcagcagacatgatcctagtggatgatgattttcaaaccataatatacctcggatctgcattttcaagtgagc

SEQ ID NO: 248548 - DNA, 100 bp, Homo sapiens
ccaaattgcccaggcattgctggggtcagaagagaggaaagtggaggtcacctactatcacaaaaatgctcctgcccctcctaaagctgaagccaaagcg

SEQ ID NO: 248549 - DNA, 75 bp, Homo sapiens
accgggagaggcaccaaatctggcctgggggcccgagaagcttcctctcaggttgtgggcccacctggtacaggc

SEQ ID NO: 248550 - DNA, 75 bp, Homo sapiens
aacaagttttgtgcagattgccagtctaaagatttgtcccatcagatgaaaagaagaaacaaggttgtcaacgag

SEQ ID NO: 248551 - DNA, 98 bp, Homo sapiens
ctcaatctgctgtggtcagcacccctgcagatcatcctggcgatctacttcctctggcaggcagcctggcatcctcgctacaacctcattgttgtggg

SEQ ID NO: 248552 - DNA, 75 bp, Homo sapiens
agcctccaaggaagaggaacaagtgcagctagttggaaagtgggaggtagaggaaatgaaggagtcaaagcttcc

SEQ ID NO: 248553 - DNA, 82 bp, Homo sapiens
ttctacactgataacaagaaatcaatgagctgagcaatgttcctgttcctgtcatgctaatgccagatgacttcaaagccta

SEQ ID NO: 248554 - DNA, 100 bp, Homo sapiens
caccctgtgtgtctgcccgacagggagacggcagccagtgccggtggtggtgtgcacattgagccccggtatagacagttcccccagctgaccagatccc

SEQ ID NO: 248555 - DNA, 95 bp, Homo sapiens
gttcatgactgtggcggcgggtggagcctcatctttcgctgtgtattctctttggaaaaccgatgtgataattgaccttgctgttctgctgggga

SEQ ID NO: 248556 - DNA, 100 bp, Homo sapiens
gatccaaacaagcttcattgttttcagctaacagtaaccccagtgatggaatggggagaagatattaaagcagtttcaaaagatgaagcagtgatgttgg

SEQ ID NO: 248557 - DNA, 75 bp, Homo sapiens
ctgcctggactgcattgtcgaatggtccaagcccttgatggaggggagccgacctcgcagcagcctgagcctggc

SEQ ID NO: 248558 - DNA, 97 bp, Homo sapiens
gactcgcggaccggcgtccccggcgcgaagaggctggactcggattcgttgcctgaggttatccggtgttggctcctgctgcttactatgaccaaac

SEQ ID NO: 248559 - DNA, 100 bp, Homo sapiens
tcaaatctcctttgggacacaggggtctttcgaggcccggtactacccaaacgtcagtcgaatcacaggcaggaggttgaaccctcggatacgatagaaa

SEQ ID NO: 248560 - DNA, 96 bp, Homo sapiens
ctgtctttaaaagatgaggtgacttggtgattttcctggaaaattatagttttcggctttgtgagaaaccttaccatcaaacacgatggccagcaa

SEQ ID NO: 248561 - DNA, 100 bp, Homo sapiens
gcctgagtccaaccccatccagcccaggcagtccttgtagtcctctcttggcctttcacttttggagataaacaggggtcacatgacgacagaagccaag

SEQ ID NO: 248562 - DNA, 51 bp, Homo sapiens
aggatgatgctgactttgatgaagagtgttgcggagataggaacatgggag

SEQ ID NO: 248563 - DNA, 100 bp, Homo sapiens
cttaaaagctgcttccagtgggaatccacattaagaagtacaatagcattcgcggaatactctgaagatagtaactccgagccaaatgtggatttggaaa

SEQ ID NO: 248564 - DNA, 98 bp, Homo sapiens
cccaacgaggtgtgggagatcgtgggcgagctgggcgacggcgccttcggcaaggtttacaagatcatggaagggaagtggttgctgtgtatgttact

SEQ ID NO: 248565 - DNA, 82 bp, Homo sapiens
agttaatggatcaagtagcaccacctatggctgaggctgaggtggcctccttgaaccgtaggatccagctggttgaagaaga

SEQ ID NO: 248566 - DNA, 100 bp, Homo sapiens
aatgaagattttaggcggtatcaaatggaaagtttttccaaatattcatctgtacaggttttcctttggaatatggataaatacaccatgatacggaaac

SEQ ID NO: 248567 - DNA, 90 bp, Homo sapiens
ggcgggagcatgaacgcccctccagccttcgagtcgttcttgctcttcgagggcgagaaatcatccaggccaccatcgagaagcacaaac

SEQ ID NO: 248568 - DNA, 100 bp, Homo sapiens
tttacaaactggccaagaagggccttactccttcacagatcggtgctggagaatctggtaaaagcaccattgtgaagcagatgaggatcctgcatgttaa

SEQ ID NO: 248569 - DNA, 75 bp, Homo sapiens
catcgttgctgccttcttcgtcaagttcagacttggttccttcaacctagagaaagttgaaaacccagctgaagt

SEQ ID NO: 248570 - DNA, 98 bp, Homo sapiens
aactgcaagggggaagtagagagataacaaaagctgctcagagtctcaatgaacttgcaacaacgaactgtctacagactgatgctcgtgaaagcatg

SEQ ID NO: 248571 - DNA, 98 bp, Homo sapiens
ttcgctaacgcctcccggctctcgtcagcctcccgccggccgtctccttaacaccgaacaccaatctaggtcaacctattaagatacgtttccaggaa

SEQ ID NO: 248572 - DNA, 100 bp, Homo sapiens
tagccgctactttgtaatccggatccaggatggtactgggtgtccgcaatgttgccagtgtctgtctgcagattggctacccaactgttgcatcagtacc

SEQ ID NO: 248573 - DNA, 125 bp, Homo sapiens
gcctggcgtgcactccgcacctcggggacattattgcgcgtggaacggctgcttttggaagtaagactttgaccccgacgcaggcttcagtgattgccgcggatcagaagcctgagcactttggc

SEQ ID NO: 248574 - DNA, 99 bp, Homo sapiens
aagagacccgttcagagtcctacagtggcagaaacctctgtagaggagcaggatgcaaccgacaggctgtggccggacagctgctgcccagcacatgga

SEQ ID NO: 248575 - DNA, 138 bp, Homo sapiens
gcagggcagtgtggtgtccagccggatccagcatctctccaccatcgactacgtggaggacgggagcatcgagtacagctgtccggcctccaacgagtgtgagatcaccaagcggagacgcaaggcctgccaggcctg

SEQ ID NO: 248576 - DNA, 101 bp, Homo sapiens
gctccgcgcggctgttggggccgttgcagggtgcgggcgagcgtcgacccgggccgctcctggaggaggaggtgggagatggactagaggcttttaccaga

SEQ ID NO: 248577 - DNA, 75 bp, Homo sapiens
agaatcaagaaaatggaccagtttgttcgttacgaggggctttgttatgcacctaaagccatattggaagctcca

SEQ ID NO: 248578 - DNA, 80 bp, Homo sapiens
cgccgccctgtactccgtgtaccggcagaaggcccgggtctcccaagagctcaagacttcagtgccctgaacggttagag

SEQ ID NO: 248579 - DNA, 83 bp, Homo sapiens
cccaagcccccacagctactccaacccaaacaacaaccaagccagtttaatgggcacacgtgtttcacgttgacaggtttgct

SEQ ID NO: 248580 - DNA, 100 bp, Homo sapiens
tggaaaaccagatccagaaactggaggagtcccgctcgaagctaggtgagatttcaatggaaaaagtgaaggtaaagcgttatgtgtccggaaaaaggcc

SEQ ID NO: 248581 - DNA, 75 bp, Homo sapiens
ccgggactctttcacaggctggatgaagattgggattcgggaactggagcctctcctctgtcacagtgacaatcc

SEQ ID NO: 248582 - DNA, 75 bp, Homo sapiens
gaaacgccgaggaacccggctgaggcggcaggtccgactgcagacacagccaccgagtttgcctggacaacctcc

SEQ ID NO: 248583 - DNA, 75 bp, Homo sapiens
gtctgttagagttcgaaaagctgagaatcctcagtgtttgctagattgtgccaaggacttgaatggatgatgtca

SEQ ID NO: 248584 - DNA, 75 bp, Homo sapiens
ggcgactgggggctgaagagcgcgccgccctctcgtcccactttccaggtcaaaatgcagatcttcgtgaaaacc

SEQ ID NO: 248585 - DNA, 50 bp, Homo sapiens
agcgaagacccgggccaacgtggacaagccctccagaatacccatcatat

SEQ ID NO: 248586 - DNA, 98 bp, Homo sapiens
cggcggccttcgaggaggtcatgaaggacctgagcctgacgcgggccgcgcgggtcatcatcagatttgaaatatttaaagtggatacaaaactattt

SEQ ID NO: 248587 - DNA, 101 bp, Homo sapiens
ctcagagatccaagtgcgcgccctggcgggtccggaccaaggtggcctcagccccgagtccaagaagatcctgacacccgccctcaagaagcgggcccggg

SEQ ID NO: 248588 - DNA, 100 bp, Homo sapiens
tccaaaacagttggctgcttacataaataggtgctagtattgtctcaagactatggcaaacacttacttggtgtggaagacctgttacagaagcacaccc

SEQ ID NO: 248589 - DNA, 91 bp, Homo sapiens
cccgctcacttttacctgtttggattaatatgtctctgttcagtatcccttttactattcagcgactatgtgaattgttaacagatccaag

SEQ ID NO: 248590 - DNA, 75 bp, Homo sapiens
tgtatgtggcactatcaaatctagatgcagctacttatcagcaaaggcgccagcagagggagttgatgaaagctc

SEQ ID NO: 248591 - DNA, 101 bp, Homo sapiens
cctggtcttgctcggccgatgaagtgcagaggtttttttctggtgacattccaagcctgcagtatatctgaggccagatacctttatgatcagttggctac

SEQ ID NO: 248592 - DNA, 98 bp, Homo sapiens
gcagagcagcgggatgagttggaaggcttccaggatgacgccggaacccggcagtgggcaggtgtttgtgacttcagagaaccaacttgtgtattacc

SEQ ID NO: 248593 - DNA, 100 bp, Homo sapiens
cagcccccgaaggccctatcaggacatggagtatgaaagacggtaaaatgatccattctatggtagctcacttggatgctgttacaagtctagcagtaga

SEQ ID NO: 248594 - DNA, 99 bp, Homo sapiens
tttagaggaaaaactgcttgatattagaaagaagagattgcgtgaccaagaatatggcccaggtgaccaaagccctggacaaggccctgagcaccatgg

SEQ ID NO: 248595 - DNA, 100 bp, Homo sapiens
tatttggcagctaattctagatttggatcattgcccaaagttgcactaccttctccaggcaaattccgttcccctgcagcaccatctcctttggctcttc

SEQ ID NO: 248596 - DNA, 100 bp, Homo sapiens
agtccgtccatgtcaaagatgagttatttacctcatactctaccatgccatctttgtgttctttacctggacctactggaagtctatctttacactccca

SEQ ID NO: 248597 - DNA, 100 bp, Homo sapiens
ggaaactggatgcagcaaggaaataggatttaaccgctctctgcctcccaggactcgctcagcagcagcctgaaaacttgctacaagtatctcaatcaga

SEQ ID NO: 248598 - DNA, 75 bp, Homo sapiens
cgccgcgcttgctgctggtaacagggccttgcctagtgggccttccttcccaggaagctcagcccggagccagaa

SEQ ID NO: 248599 - DNA, 98 bp, Homo sapiens
tgaatatgacatcccgcctgcgacacctggcagagacggccgaggagaaggacacagcattgttggttttgccatgtactattttacctatgacccgt

SEQ ID NO: 248600 - DNA, 88 bp, Homo sapiens
gatggcaccagggactggcagctccactgccgtcaactcctgttctcctcagagcctgggcctgcacccagagagggtgagctacgtc

SEQ ID NO: 248601 - DNA, 83 bp, Homo sapiens
catcaagggagttttccggggccctctcagcaagaacgggaacaaaactctggggagctcatattgatgtacgtaacaagaag

SEQ ID NO: 248602 - DNA, 90 bp, Homo sapiens
tggcaacagaaaatgaaaagtagtgtggcacagataaaaatgtgaagacatggtagatgtgcgaaggttaaagatgcttcagatggtgca

SEQ ID NO: 248603 - DNA, 75 bp, Homo sapiens
ctggtgaccccgagtttggatctttgctcctgcgccgcgttctagagcaagaaatgatggaagaattgcatagcc

SEQ ID NO: 248604 - DNA, 75 bp, Homo sapiens
ctggaagctttactagaagctgcagatgtggttgccctgcttggctttccttatgcctccagtggagaaaacaca

SEQ ID NO: 248605 - DNA, 100 bp, Homo sapiens
cgtgaccgagaccgtgaccgagagcgtgaccgagagcgcgaatatcgtcatcgttagaaggttctgggccggagaaggggcgacgttcgggcaccccccg

SEQ ID NO: 248606 - DNA, 96 bp, Homo sapiens
atggtagcaagaagcgcagcaggtgaaggccaacctgccatgcttaccttccgaaccagcaaagctatcagttgagggatttgcagttgataaaat

SEQ ID NO: 248607 - DNA, 100 bp, Homo sapiens
tgaggctacaccccggagccaggagggtttggtgcacctcgatttggaggaagtagggcagggcccttatctggaaagaagtttggaaaccctggggaga

SEQ ID NO: 248608 - DNA, 100 bp, Homo sapiens
aaactggagaagagcttcaactctgttcacctgcttgcagcaggaacgaatttcatatacacctccagagagcccagtgccgagttacgcttcctcgacg

SEQ ID NO: 248609 - DNA, 108 bp, Homo sapiens
cttgaatgtgttcaagaatgatcaggatacttgggactacacaaaccccaatctcagtggacaaggtaaagaatctcatttggacacattgagtcgggcacaactgac

SEQ ID NO: 248610 - DNA, 75 bp, Homo sapiens
aacaagtgctcctacattctggtaagtaaggaggtctctgtaccatggctcgtacaaagcagactgcccgcaaat

SEQ ID NO: 248611 - DNA, 50 bp, Homo sapiens
gttccagaactgctggaagctgagttgaggagctcaagcttgggaaaatg

SEQ ID NO: 248612 - DNA, 90 bp, Homo sapiens
agcactatggtcgtgagagtcgtcagtgccctattccttcacatgtaattcagaaattagggacagatgcatggtcatggaggctatgat

SEQ ID NO: 248613 - DNA, 82 bp, Homo sapiens
gggcaggtcgatgcccgattctttggacaacatgacaggcttgggcactgtttaaaggaaagttccgagaaggcatcgacaa

SEQ ID NO: 248614 - DNA, 83 bp, Homo sapiens
ctgaaagcagaatacaagatgggaagaatgagaagtcatggaatgacagcctttaaagtatctagcatagattcttcagaaca

SEQ ID NO: 248615 - DNA, 101 bp, Homo sapiens
ctgggcgctgccgctgctgctgctgctgctgcgcctgggccagtgaatacaaccgtgttcaatgcttcagccccattggcaccagacaccaacgcttctct

SEQ ID NO: 248616 - DNA, 75 bp, Homo sapiens
cgaaccttggagagaggagaacgaacatcttctggacctttgtccaggagttgtatcccgcattttgtattcaca

SEQ ID NO: 248617 - DNA, 100 bp, Homo sapiens
ataaatccaagtcaaataccaagcaaaatagtgtgcctccttcacagaatacttgtttgaagacttgtggatattcagaggatattttccatttggcagc

SEQ ID NO: 248618 - DNA, 100 bp, Homo sapiens
acgtggacttatatcagaccagtgtggatcttcaagaatcattcacttttctgtagaaggtcagttggaattcagggcattgctatttattcctcgtcgg

SEQ ID NO: 248619 - DNA, 90 bp, Homo sapiens
cctcggcttgcaatggaccccaactgctcctgcgaggctgaggagaggagacgccgtgagcgggacgaccagatgtaccgagagcggctg

SEQ ID NO: 248620 - DNA, 90 bp, Homo sapiens
gtgtcctggatttcctggttctgtgggctccgtggcaatgaattcttctgtgaaggattgtcaatgaggcagatcagattccgatttgac

SEQ ID NO: 248621 - DNA, 74 bp, Homo sapiens
gttaatcctcaatttaagcctgatctaacccctagaaacagaactgataaatttcaaacggaagagagtggcag

SEQ ID NO: 248622 - DNA, 75 bp, Homo sapiens
gaccacttttggaccaaaggcctgtgtgctgcagaacccccagaccatcatgacagagcgggatgccaccagctt

SEQ ID NO: 248623 - DNA, 82 bp, Homo sapiens
cccctgaggccccagaactatcttttcgggtgggctttgacagcgagaatcccggggacgacgggcagatgcacaaggggct

SEQ ID NO: 248624 - DNA, 100 bp, Homo sapiens
agggtttgcaggaagaataggatcttctaacatgggtccagtaggatctggaataaatcttcctctgatggcgctgcctccatgccatgccctctgccag

SEQ ID NO: 248625 - DNA, 76 bp, Homo sapiens
ctggtggggagatgaacccaacctagtgggtgtaatacatcatgaactgcaggccccagcatgagaccagatgtaa

SEQ ID NO: 248626 - DNA, 107 bp, Homo sapiens
tggagcctcagttggaagcagccgatccagcctgcggagcctgtggggcaggatcaactcactatcctgaaggtccattctcccaagaagaggggacagaaagacag

SEQ ID NO: 248627 - DNA, 83 bp, Homo sapiens
cctggaaaaagcaagctgaagacatcaagaagatcttcgagttcaaagagaccctcggaactacctggagtagaacagaaaaa

SEQ ID NO: 248628 - DNA, 100 bp, Homo sapiens
caaggagatcaacaacccagagtccgtgtattactgggcccagaaggccgccatggcatcagatgaaggcaaactttttgttggagggctgagttttgac

SEQ ID NO: 248629 - DNA, 100 bp, Homo sapiens
cggagatccgagagctctgcttctctgaaaagcgtgtggctttctggacttggaagtgagtgcttttggtgaggaaggtgaaggtgattatctggatgac

SEQ ID NO: 248630 - DNA, 100 bp, Homo sapiens
cgcggagacccagtcgctacgggagcagccagaaacgtgctggccaaagcgctctatgacaatgtggccgagtccccggatgagctctccttccgcaagg

SEQ ID NO: 248631 - DNA, 88 bp, Homo sapiens
cggtccatgactctggagatccgagaaggaaggaattacatgaatgacagtcttcgaaccaatgtgtttgttcgatttcaaccagaga

SEQ ID NO: 248632 - DNA, 99 bp, Homo sapiens
cgaggacacgaccttcctgcccttcacgctccaggagctaggtgtggacactgccagcggctgcagccgacttggaatgacctgggagacaaatacaac

SEQ ID NO: 248633 - DNA, 83 bp, Homo sapiens
gtggacggcgggggccgagcccatgagtagggaggagaaacagaagcttgggggtgcgtcttgacagagtacgtggaggtcgg

SEQ ID NO: 248634 - DNA, 51 bp, Homo sapiens
tttgagaaagtctctacagaccttgacacgatgaggcgagtggtacgacag

SEQ ID NO: 248635 - DNA, 71 bp, Homo sapiens
ttgcagctgcccacacctgcttctcaggagccctcacccatgcatgagtacagtaccagaagttatcgttg

SEQ ID NO: 248636 - DNA, 99 bp, Homo sapiens
tgaatctatggaatgtctacagcaagatggatcctatgtctctggagagtttgctttcagatactgacatcaatttgccctatcttacaatggattctt

SEQ ID NO: 248637 - DNA, 96 bp, Homo sapiens
acagaggattacctgtcctcaggtcctgatacagaaacatctggttcgtcttctatcagatggaacagattaaaagggccaataaactgtttacca

SEQ ID NO: 248638 - DNA, 90 bp, Homo sapiens
gcgaagacaagagagctcattggtgtgctgggcatcaaggtgaagatcatgctgccctgggacccaactggtaagattggccctaagaag

SEQ ID NO: 248639 - DNA, 100 bp, Homo sapiens
tgaagtttcccttttgcaaggagaaaattttggtggagaattatccaacaagaaaaagacctgtggctattaagatagctttacggacattggatgaagc

SEQ ID NO: 248640 - DNA, 51 bp, Homo sapiens
gaaccaggtcatgctccaaattcctggaagttgccgtactcagtacagaag

SEQ ID NO: 248641 - DNA, 99 bp, Homo sapiens
tcgtagcaataatattagctgttttgcaccttcatagtatgaaaaggattgaactggatgacagaacccagtgacttgattgtaaaaatttacagagcg

SEQ ID NO: 248642 - DNA, 100 bp, Homo sapiens
ggcagcctgaacggagtgtgcgacggattgggaggtaagtaaggaggtctctgtaccatggctcgtacaaagcagactgcccgcaaatcgaccggtggta

SEQ ID NO: 248643 - DNA, 90 bp, Homo sapiens
acgaaaacatggtggccaaagtggatgaggtgaagtccacaatcaagttccaaatgaagaaggttatctcctcagccaacagagctgtgg

SEQ ID NO: 248644 - DNA, 80 bp, Homo sapiens
ccatggcccggctggctgactacttcatcgtggtaggctatgaccacgagaagccagatagaaaatgctgctgaagaacc

SEQ ID NO: 248645 - DNA, 100 bp, Homo sapiens
cgaccctatctacgtgaagctggagaagctggacatcatgatccgcctggcctctcaggccaacatcgcccaggtttacatcctcagcaaggaggaaggt

SEQ ID NO: 248646 - DNA, 112 bp, Homo sapiens
ggatcttgctgtattggagctcatgcagtcttcagtggataataccaaaatggtgactctcctattccatctgtttcttcgggatcatcttcacctctttcagccacttctg

SEQ ID NO: 248647 - DNA, 51 bp, Homo sapiens
gcgtgagccaccgtgcctggctgaaggaaaccacccctactcctaatcccc

SEQ ID NO: 248648 - DNA, 101 bp, Homo sapiens
caagacatccctgctgagagagccaaggagccccgcggcctaagcgcagcgtctccgcccttggctgagactggcgctcctcgccgcttccggcggtcagt

SEQ ID NO: 248649 - DNA, 49 bp, Homo sapiens
cccccaaccaggtcaaagtggcagggatctgctggaggaaggaaaggcc

SEQ ID NO: 248650 - DNA, 74 bp, Homo sapiens
ccattgtctcatgaaccatcctgatttagcaaaagacttaacagcaaaacaagctatcgatcagggaagatctc

SEQ ID NO: 248651 - DNA, 75 bp, Homo sapiens
caaatttgtaaatattttcttgaaaggaaatgtattaaggatcagttccatgacaagaccccttatacgattatg

SEQ ID NO: 248652 - DNA, 74 bp, Homo sapiens
cacaagtcctaccggccgctctgcgtcctcaccttcaagtggaggagttactgatggccatggagaaggtaaag

SEQ ID NO: 248653 - DNA, 100 bp, Homo sapiens
actacgtttttacaggcgtctttacctttgagatggtgatcaaggttacccatgcagttgttactgtaccagcctattttaatgatgcccaacgccaagc

SEQ ID NO: 248654 - DNA, 74 bp, Homo sapiens
ttgaacaaaaaagtggtgcagtttttgatgaaattgtagagaactgttgtccttctattcaggccactcttcgt

SEQ ID NO: 248655 - DNA, 100 bp, Homo sapiens
cgaaggcctcggcctttcacattcgggaagcgtcgggattaggtgaaaactgacaaagtgaagctgacatggagagatcggttcccagcctacctcacta

SEQ ID NO: 248656 - DNA, 100 bp, Homo sapiens
ctctcacatcatgccgcattctgtccctggtctcatgtctcctgggataattccaccaacagttgcaggatgtgagtttgaatctatggaatgtctacag

SEQ ID NO: 248657 - DNA, 75 bp, Homo sapiens
attcgcatgcctggggttacacctaaacagttatagctgaggtggtaccagtttaagaagtgagaacttcttcac

SEQ ID NO: 248658 - DNA, 82 bp, Homo sapiens
ctcggcgcgactcgcttctttcggttctacctgggagaatccaccgccatccgccaccatgatcatggaagggaagtggttg

SEQ ID NO: 248659 - DNA, 75 bp, Homo sapiens
acccagggcaccaccgaggcccgagacctgcattgtctcctggtcacgcccccttacccaggaatggaacaacct

SEQ ID NO: 248660 - DNA, 75 bp, Homo sapiens
gtcggggccttggaggcgtgactttcccctcgggtccaggagaccaagacacattccaccccagtggggggtccc

SEQ ID NO: 248661 - DNA, 103 bp, Homo sapiens
gtcaaagagaaagtaacaagaatcattcttgcagcatttcgtgatgcatcatctgcagacatcagaaaagcatatcgtaagctttcactaactttacatccag

SEQ ID NO: 248662 - DNA, 87 bp, Homo sapiens
tctgcaagcaggcaacctgaatacagagtacccaaaggcaagtggaacagctctaatggggttgaagaaaaggagacttgggtggaa

SEQ ID NO: 248663 - DNA, 82 bp, Homo sapiens
cagagttctttgtggatggacttgattctgatgagaggactctccttcagcaactccagaagcttcagactttggtgatggg

SEQ ID NO: 248664 - DNA, 83 bp, Homo sapiens
tttaatttcagtgactgaattaaaaggtgtcaagaagctcagaatgggagtctgaagatacagtattgctcgtcctcaaagag

SEQ ID NO: 248665 - DNA, 82 bp, Homo sapiens
ggtggacagatctgagagatactgagggatgaataagagggaacccccacacggagacactgctggagagagtcgtactggg

SEQ ID NO: 248666 - DNA, 100 bp, Homo sapiens
gccgcggccgggcgggcagcagattgttttaagaaaatggcagacaaaccagacatgggggaaatcgccagcttcgataaggccaagctgaagaaaacgg

SEQ ID NO: 248667 - DNA, 100 bp, Homo sapiens
ccgggacctgggctgggaacccgcggtggagcgggacacgaacgtgcgtgggctctcccggcaccagcaccgccaggccctgtgcaggaccccagggtca

SEQ ID NO: 248668 - DNA, 50 bp, Homo sapiens
gttacgattatcttcatattttgaaacagatgcggttcatgctattattc

SEQ ID NO: 248669 - DNA, 74 bp, Homo sapiens
tggaatgtatccgggaggtcaacgaggtcatccaggtatggcgtgagtcccgagaacattatcctctatggtca

SEQ ID NO: 248670 - DNA, 74 bp, Homo sapiens
caaagagcaaacagattcagtggcctgcattgacattcagtcccctgaagctgaatatgtagatttgcttctta

SEQ ID NO: 248671 - DNA, 100 bp, Homo sapiens
tggagctcttattagctgcatacagttctgtcttttggtggaaacagctctactccaacaaccctgggaatcaggaaacccaggcccaacggcaggtgga

SEQ ID NO: 248672 - DNA, 76 bp, Homo sapiens
tggacgggtacctggaccttctcagggagaaccagctcctcccaggagtacgagagggcctccaaagtggaccagt

SEQ ID NO: 248673 - DNA, 83 bp, Homo sapiens
cccgcctgaaccgagtagaagacaaggtgctacctttttacccacacttaagtgacgcaaaatgcccttcaatggcgagaagc

SEQ ID NO: 248674 - DNA, 100 bp, Homo sapiens
cctggaggggcgaagaggacgagggggccaaggcttcctccgggtattccactgaactgaagaaactctactgccaaattgcaaagacatgccccatcca

SEQ ID NO: 248675 - DNA, 100 bp, Homo sapiens
gaggacgacgacgacgaggaagaggaggtttctgagggtcatgtaggtacaacagcaaccaagaagatcgatgtctacctccctctgcactcgagccagg

SEQ ID NO: 248676 - DNA, 100 bp, Homo sapiens
acacgtcttatttaatccacatcatagttaattggccttggtcctcacagctccaaaaagaaacaggatctcgataagctctatgagctgaagtccaaag

SEQ ID NO: 248677 - DNA, 100 bp, Homo sapiens
ggagaccatcaaaggattccagcagattttggcagctcgacagaacaattggccccctctaccttctttttgtccagttcagccctgctttttccaggac

SEQ ID NO: 248678 - DNA, 100 bp, Homo sapiens
gggaatcactgccatagaacttgcagagcttcagcctcctatgtttgacttacacccaatgaggcttttgaacacttgcagcaattagaattaataaagc

SEQ ID NO: 248679 - DNA, 75 bp, Homo sapiens
aagaccttcaatatcaaaaatgactttactgaagaggaggaagcccagctgactcctgagttctcacaacgcttg

SEQ ID NO: 248680 - DNA, 83 bp, Homo sapiens
agggactatgtcttaaggcgctttgcagagccaagctcatttctggcacataagaggaattgtcgtgtgaaaatgacgcaaca

SEQ ID NO: 248681 - DNA, 100 bp, Homo sapiens
caataccaggcatacatttggcagaataaatgaaccaggtacaccaggggttggaaaaaccacactaggcaaagaacttgcgtcaaaatcaggactgaaa

SEQ ID NO: 248682 - DNA, 101 bp, Homo sapiens
ggagaggcctggaggacaccaacatggtggtgataaatggaggcgccacctccagcggtgagcaggacaatgaggacactgagctcatggcgatctacact

SEQ ID NO: 248683 - DNA, 74 bp, Homo sapiens
gcgcgggaggcaggttccgcacgcctcgatgacttacgagccctcaaggggaagcattttctcctggacccctt

SEQ ID NO: 248684 - DNA, 74 bp, Homo sapiens
cggagcagtgaaccagcacggggggacactgggtccccttggagcctccccaggcttaatgattgtccagaagg

SEQ ID NO: 248685 - DNA, 100 bp, Homo sapiens
ctggattccatgtagagacccctggagtctcaaatatctatcagtgtagaagagtgggaagacaccaaagactccaaagaacaagggcaccaccgcagca

SEQ ID NO: 248686 - DNA, 100 bp, Homo sapiens
cgccagcgagctggtgattggagccctgcggagagggccaagatcagtcagggaaccaaggtcccggaagaaaagacgaccaacactgtctccaaatttg

SEQ ID NO: 248687 - DNA, 98 bp, Homo sapiens
gcttgtgccgcttccgcaagaaggtttcctggcctgttgcagccatggtgcattgcagttgcgtgttgttcagaaagatgaggtggaaagtgagaaat

SEQ ID NO: 248688 - DNA, 83 bp, Homo sapiens
ctgctcatgggactccggcgcagcggcaagtcctccatccagaaggaatctatgggccttcacagggcccagggggctcctga

SEQ ID NO: 248689 - DNA, 74 bp, Homo sapiens
cctcaacaacatttttttttggcttaacaaaacatcaaacggcatacaaatgatggtactgtctagttgcagga

SEQ ID NO: 248690 - DNA, 82 bp, Homo sapiens
ggcaggcgtgcggaggacactcctgcgaccagcacggggtcactctggtgcccattgaggagttcagcccggagttcgtgga

SEQ ID NO: 248691 - DNA, 102 bp, Homo sapiens
cgtctacactgtacatgctttttattacaagactacggagcataggaggaaaattcatcatctgagacgagttgtactgctgtcacaggaaatggacgctgg

SEQ ID NO: 248692 - DNA, 100 bp, Homo sapiens
cggagcccgggaggggccgcgccgccaccgtctgaactaggatgtcccgacatgaaggtactgagtttgagggtgcagtcatagctctgttccatttgtt

SEQ ID NO: 248693 - DNA, 100 bp, Homo sapiens
gtcagatgtctggtccttcggggtgaccctgtatgagctgctgacgcactgtgactccagccagagcccccccacggtccggcaggttcggctattccag

SEQ ID NO: 248694 - DNA, 90 bp, Homo sapiens
gaagaagatgcctttaccgaccgagagattaaacagattctagaaaatgaacttcagatacctgtgtccaaaatgctgttaaaaggctgg

SEQ ID NO: 248695 - DNA, 75 bp, Homo sapiens
gccgtatctccgtggtgccaactcagcccgggctgcttctgtcctcctctgggattgttgttataatgagaggat

SEQ ID NO: 248696 - DNA, 98 bp, Homo sapiens
ggacacggggccttcgccgtggtcttccgggggcggcaccgccagggtgaatcgaaacgcatcaccctggtcctccagcagccacagtctggaggtcc

SEQ ID NO: 248697 - DNA, 101 bp, Homo sapiens
ttaccacataagcatggatgaccgctttaaatcaatgtttgcatacactgactgtataccacagatgccagaggaacaagcattctgtgttttggtgaaaa

SEQ ID NO: 248698 - DNA, 110 bp, Homo sapiens
ctgggaccactcgttgctgacagtcagaaagtttctgctttgggacaaccatacatctaattccttaaagtagttttatatgtaaaacttgcaaagaatcagaacaatgc

SEQ ID NO: 248699 - DNA, 50 bp, Homo sapiens
acttatgaacatccaacagcaactaatgtcgggaacatgccctgtgtgcc

SEQ ID NO: 248700 - DNA, 90 bp, Homo sapiens
atgtacctgcagaacccaaattggcgtttgtcatcagaatcagagggtcggattgtttgtgctgaacgaactgtcctcttgcttcagaag

SEQ ID NO: 248701 - DNA, 76 bp, Homo sapiens
ggatttgagattgacgcggtgaactctgtccagttttcaaaccacacaggtgccgtgagcgatgtggagatgcagg

SEQ ID NO: 248702 - DNA, 83 bp, Homo sapiens
ataaaaacaagtgtgtgcatctggctgttagaagaattcatgctcatccggattctgaagcgtgttcccaatagtgtactctg

SEQ ID NO: 248703 - DNA, 98 bp, Homo sapiens
acggagcatgaagacagagcgggtgactggaggtggctccccagaatttggattgggtgcctctcaccacactgtcacactgcaagtcactgaggaca

SEQ ID NO: 248704 - DNA, 100 bp, Homo sapiens
agtcaagaaagatgttcctccttcagctgtcacaagaccaatatttggtatactgggcacaatccatctggtggcaggccaaacgtaccaagaaagtcgg

SEQ ID NO: 248705 - DNA, 51 bp, Homo sapiens
aagtaatgaagatttacacaaactttgggtaaaggagctggaagtgcgaaa

SEQ ID NO: 248706 - DNA, 75 bp, Homo sapiens
tttagtgaagttgggaaatactacagtaatctgtggagttaaagcagtctcgcatgaatttgccttgaatttcaa

SEQ ID NO: 248707 - DNA, 100 bp, Homo sapiens
gcgagcgctgcgaggtggcggcctgagggattttgcttatgtagcaagagataaagatacaagaattttgaaatgtcatgtatttcgatgtgacacacca

SEQ ID NO: 248708 - DNA, 146 bp, Homo sapiens
cttttatgttgtgagagctgagattcaccattctccaccatcctgagaagagctttgatagaagggctactcgtgagcttctcggacaaactatttagtggaaaaggcttacattttcagccatcagttttagattttggaataca

SEQ ID NO: 248709 - DNA, 98 bp, Homo sapiens
cgcgtgcccgcgaggagccgccgcgcgcccgcgccctccgcgcgacgccagggcgtgatggtgggcatgggtcagaaggattcctatgtgggcgacga

SEQ ID NO: 248710 - DNA, 100 bp, Homo sapiens
gccatttcacatccagcagaggaggcgggggcagccgctgagacggtttttcacaagataccttgactatgaataatagtttcaataaggaagacagaat

SEQ ID NO: 248711 - DNA, 75 bp, Homo sapiens
attgtcccagatatagccgttggtacaaaggttatggaaacaaaggacatgctttacatcgtcactgaatttgct

SEQ ID NO: 248712 - DNA, 80 bp, Homo sapiens
ctcagacctctcatctgccagaatcagaaagaattcatcacactgtgttttaaaatcaaagatgggaaaatcggagaaaa

SEQ ID NO: 248713 - DNA, 100 bp, Homo sapiens
taagggcaacaattttctgtacaccaatggaaagtgcgtcatcctaaggaacatcgacttatcaagtgggaatcctgtatatgaaaaatactatagacag

SEQ ID NO: 248714 - DNA, 90 bp, Homo sapiens
tgctgcaggtgctccggggcctccagtatctgcacaggaacttcattatccacaggtgaccaagaatatggcccaggtgaccaaagccct

SEQ ID NO: 248715 - DNA, 110 bp, Homo sapiens
agtggaggcgccgctctagcggccgggactctgaactatggcggtttttcgttggaatatacgttgcacatttatggcgattctgagtgtgagggcagacttctgccagg

SEQ ID NO: 248716 - DNA, 97 bp, Homo sapiens
catggccgatggggttcctggtgtgcagaacattctcaaaattggcttcctgaatgacaagcatgtgtgcctggatgattgatagcttcggaaatga

SEQ ID NO: 248717 - DNA, 90 bp, Homo sapiens
agacaaggatggctcttcctcagtcctgtgtcccttgatctgtcacaatggcggtgtgtgcgtgaagcctgaccgctgcctctgtccccc

SEQ ID NO: 248718 - DNA, 90 bp, Homo sapiens
cgccagtgctggcaaactccctgcacagttttgcacagtaataagttgactcacacagacttaaagcctgaaaacatcttatttgtgcag

SEQ ID NO: 248719 - DNA, 90 bp, Homo sapiens
gtggaaccggatatttaagtacaatggtgggcttaattttaggtgttggtaaatcatgcttattgctacagtttacagacaagaggtttc

SEQ ID NO: 248720 - DNA, 82 bp, Homo sapiens
aagatgactgtggatttcgaggagtgtctgaaggactcgccccgcttcagttctctttcaacatgttcgaccaccctattcc

SEQ ID NO: 248721 - DNA, 100 bp, Homo sapiens
agacgacatgcctggaattcttctccaacgcgacagacgtcgaggatattatcaactcactggtaacaacagtattcatgctcatcgtatctgtgttggc

SEQ ID NO: 248722 - DNA, 74 bp, Homo sapiens
caacaaacaacagcattacaggaattgtcttatatgtggtcagttgtaaagaattctgcttggtcagaatcgtg

SEQ ID NO: 248723 - DNA, 78 bp, Homo sapiens
ctccctggcgcagccacgcaggcgcaccgcagacagtggttggagaccagacctaacagacaggtgtgtcctgtttgc

SEQ ID NO: 248724 - DNA, 86 bp, Homo sapiens
cctcgcctcctcgcagcagcgccatgactgattcttgctattccaaatcctcttccacgttgacagcccttcagatatttcaacac

SEQ ID NO: 248725 - DNA, 82 bp, Homo sapiens
cgagaccgtcctggcgcgatgcgtcaagtacactgaaattcatcctgagatgagctttcttcgggaagtatcttaatgaata

SEQ ID NO: 248726 - DNA, 75 bp, Homo sapiens
ccaaggaaaaactggagagcttcatcaaaaatagtgatagctttgataacttctcagatgaccaagatggtgctg

SEQ ID NO: 248727 - DNA, 98 bp, Homo sapiens
cggcacaaggacgttctcaagtggggcgatgaggtcaaaatgcagatcttcgtgaaaacccttaccggcaagaccatcacccttgaggtggagcccag

SEQ ID NO: 248728 - DNA, 83 bp, Homo sapiens
agaagctgggattggagattccacccaaacttgctggtcactgggagccagagactgctgctactttgaaacgtacgatagag

SEQ ID NO: 248729 - DNA, 96 bp, Homo sapiens
ttctgtaattgctgacccaagaggaaacactctaggacggggaacgacaattacggcaattgaaggaacagactaaaaatcgtgtcctggaaggaa

SEQ ID NO: 248730 - DNA, 50 bp, Homo sapiens
ctcagaggaggagttccagaagcatgaagagacgggatttcgccatgttg

SEQ ID NO: 248731 - DNA, 100 bp, Homo sapiens
ctttaagaagaaactcaagggtcagagtcaacaagatgaccgcaatccccttcgggtgcctcccaggtcaaatggaataaaaaaaatgctaactgccttg

SEQ ID NO: 248732 - DNA, 131 bp, Homo sapiens
gttgggctccatctttcagcagttggcacacatggttaaggaacaggaggaaaccattcagaggaatctgtcttggaggacatcagaaggtgaattttccaagttcttggacaacctagctgttgaaaagc

SEQ ID NO: 248733 - DNA, 75 bp, Homo sapiens
aagattcagccctgtcatcttgtgcaaagactatggcaaggagtctcaggccaaggatgtcattgaagagtattt

SEQ ID NO: 248734 - DNA, 101 bp, Homo sapiens
atggctttaatggagcagatctgagaaatgtttgtactgaagcaggaacaagcacatcatgattgacttggggactggcaacaacaacaagattaactggg

SEQ ID NO: 248735 - DNA, 100 bp, Homo sapiens
gggatgaagaaggcttggaacccattggaaatgtccatccagttgggagctatgagtcctctgaaatgaacagcatagtctcagccaatttcttctccag

SEQ ID NO: 248736 - DNA, 50 bp, Homo sapiens
ccgaaactttcaccgcgagcgggtttttcgttggaatatacgttgcacat

SEQ ID NO: 248737 - DNA, 90 bp, Homo sapiens
gattcagatttgaatgtgctgatgaagacattgggacttcttagaaatctcctctccactcgtccttataaggatgcatttatgaaagca

SEQ ID NO: 248738 - DNA, 100 bp, Homo sapiens
tccggagctcgcccaagccgcgtccccagagagcgccctgagagaacagggtggccgcttggtccaggtgcaaatatatacagagcttcataatcagccc

SEQ ID NO: 248739 - DNA, 97 bp, Homo sapiens
gaaacctgtttcaacttgaagacaccgtatgaggtgaatggacagccagccaccacaatgaaagaccaagatcactccatggatgaaatgacagctg

SEQ ID NO: 248740 - DNA, 75 bp, Homo sapiens
gcgttattatctggacatcaaaactggaaggcattctgaagtacacgctttcttcgagagtcacccagctccttc

SEQ ID NO: 248741 - DNA, 50 bp, Homo sapiens
aggtggaggccgggaggacgaagcatgatgccttcttctgtagagtgggc

SEQ ID NO: 248742 - DNA, 75 bp, Homo sapiens
ctgtcggggaaccatggctgccccgagagaacaatatgatgcgtttgtgaagtttacgcatgatcaaataatgcg

SEQ ID NO: 248743 - DNA, 75 bp, Homo sapiens
ctgggttcgcctgcccagcaaatgcgaagaaggccaatgatgaggccaatcagagtgatacaagtgtctccttgt

SEQ ID NO: 248744 - DNA, 75 bp, Homo sapiens
ttggaggaattctcggctggagagcagaagaccgaaagttaccagatgtatgctactcatggtgggtcctggctt

SEQ ID NO: 248745 - DNA, 82 bp, Homo sapiens
gaattgaatctgctctaaaggagaccaagacacagctccgaattgattccttctttagattagcacaacaggagaaagaaga

SEQ ID NO: 248746 - DNA, 75 bp, Homo sapiens
tcttcattgctgcttcttatgctccatgcactgctcagcacgcaggcatgtgaggaagctgggcttaaaggagac

SEQ ID NO: 248747 - DNA, 75 bp, Homo sapiens
tgaactcaagtcaccgtggagctccgccgccccgaaactttcaccgcgagcgggccggaccagaatatggccaag

SEQ ID NO: 248748 - DNA, 75 bp, Homo sapiens
agtgtccagcgacagcttctgggaggactacaaagctgatgaagacccagcattattccagtcagtcaagaccaa

SEQ ID NO: 248749 - DNA, 75 bp, Homo sapiens
ctctgctcttccaacaccagtggaagatgatcacatcccagacattgtacccatcctgacgtcaactgtgattga

SEQ ID NO: 248750 - DNA, 100 bp, Homo sapiens
tgtgatgttggagaactatagcaatctggttttcttggcaaaagtggtggatcttgatccctgtctttccaagaagcctctagaggaaaagccttcccag

SEQ ID NO: 248751 - DNA, 90 bp, Homo sapiens
agacttccagtagctccaaggaggttaagatttgggaatggatgatgaaggagatgatgacccagttcctctaccaaatgtgaatgcagc

SEQ ID NO: 248752 - DNA, 101 bp, Homo sapiens
aaagctgtttggagaaaatcagaagtacagttttatctagccacatcttggagattgccatcacgaaagccaaagtggatttctccagtgtggtgtgcctg

SEQ ID NO: 248753 - DNA, 96 bp, Homo sapiens
gcggagctgacggtggaggttcgcggctctaacggggctttctacaaggtaaatgttaacgatgcacggtttcaggcaatgtacacttcccacttg

SEQ ID NO: 248754 - DNA, 89 bp, Homo sapiens
ctgcccacgattcgcttctgagagttgaaactgtgggacagccagacagaagagatagcataggagtgtgtgcagaaaaacaggatgga

SEQ ID NO: 248755 - DNA, 100 bp, Homo sapiens
cacagatgtccaagctgccaagccacgcccagatttcttctaccgctgcttccctgatgggctagcccattctgacttgatgtgtacaggggataaggac

SEQ ID NO: 248756 - DNA, 99 bp, Homo sapiens
gaaaaggtggaccagatgacagaggaagctgagatgatttccaagaacaagaaccctagtatttcttgaagttaatggaaacttttctttggcttttcc

SEQ ID NO: 248757 - DNA, 90 bp, Homo sapiens
gaaggcatttgaacatcttggcaatgcactgacttatgaccctaccaactacaaggctatgcccaccctaatagaattaatgaaagaccc

SEQ ID NO: 248758 - DNA, 87 bp, Homo sapiens
tttattctccgtactgatcactacatcatgtttcaccagtgatcattaaagaatgggcagcttacaaaggaaagtctcctcaaaccc

SEQ ID NO: 248759 - DNA, 75 bp, Homo sapiens
cagaaaagagaggaacactacaaactgctgtatgaagtttcccaggacccagatgatgtggtaccagttggccaa

SEQ ID NO: 248760 - DNA, 100 bp, Homo sapiens
acagctgcaaaggttgcattgatgaaattaaagatgcatgctgatggcgataagtcattaccacagaatttaagggacgctgtgaagcaatcatggatgc

SEQ ID NO: 248761 - DNA, 83 bp, Homo sapiens
caaagactggcaaaagcacaaggattctcgctgtgacagagacaacaccgagtatgagaatgttcatcatttgccacttaagc

SEQ ID NO: 248762 - DNA, 52 bp, Homo sapiens
cctggatctttgctagaaagagagcccaagctgttggccaaggagcttcttg

SEQ ID NO: 248763 - DNA, 75 bp, Homo sapiens
ccacaacccacctccagatcctcctccactgtctccagacaggaaccttgggatattgcattgcttgcaaagacc

SEQ ID NO: 248764 - DNA, 51 bp, Homo sapiens
agtggaagatgatcacatcccagggtatgttagagcccaccaaggaaccac

SEQ ID NO: 248765 - DNA, 82 bp, Homo sapiens
cgggcgctctcgcttcagtcagtcgggccgcgccgcgcctcagctctgataggggagtgtatacatcaccacaccagctgtc

SEQ ID NO: 248766 - DNA, 100 bp, Homo sapiens
agagatgtgaatcttgtagtcagaaacttgaaagagagaataaccgttgtaacatcagtcacagcatgtctgccatcatggatgttctcgcagaagcaaa

SEQ ID NO: 248767 - DNA, 75 bp, Homo sapiens
tacgcgagcttcagatggcaagcctgtggatgttaaaaagatcaagtggcatgagcagccttttggggaaaattg

SEQ ID NO: 248768 - DNA, 87 bp, Homo sapiens
aacaggaaatgaacacattgcagtttgtcccatgaggagcacccccatagccatcctctctatggacatggtgtatgcaagtggcca

SEQ ID NO: 248769 - DNA, 153 bp, Homo sapiens
aggaagctgcctccactggcccaggcatggaacccgagaccacagccaccactattctagcatccgtgaaggagcagaaactgtcaactaagtgaagaagaccactggatttaccaggctattttggatcagtaccctggagatctctttgga

SEQ ID NO: 248770 - DNA, 75 bp, Homo sapiens
ggcccacagccgggagatccgagagctcttcaggttggatggcaagcatgtggtgtttggcaaagtgaaagaagg

SEQ ID NO: 248771 - DNA, 75 bp, Homo sapiens
cagaaaagatggattcagttatttaagaagctgtacattggaatgcgtttacagtcattgtaatggaagcaaaat

SEQ ID NO: 248772 - DNA, 80 bp, Homo sapiens
gaatgctgcttcacagatttttgcaacaacataacactgcaccttccaacaggctgtttttcttcaaataaagaacatgg

SEQ ID NO: 248773 - DNA, 100 bp, Homo sapiens
ccccttcctgctagtcctggtggatctgcagtacgaaggcagagactccccctaatgggccagattgtggctatggctcctttcaccagcagtactggct

SEQ ID NO: 248774 - DNA, 83 bp, Homo sapiens
ttaatgacaataatggatagtatgaatgatcaaggaacatgaatctgaaggtggaagaacacctttgatgaaagctgcaagag

SEQ ID NO: 248775 - DNA, 103 bp, Homo sapiens
tggaagagggagtcaccactggacctccaaggaagccacgtgcagacatctacaaccttcgatctcctgacgaatatttgttcagtcgaatcaaggtgaagag

SEQ ID NO: 248776 - DNA, 82 bp, Homo sapiens
tttggaccaaaaggacaagcagtttgttgccaaggtacatggtgcagtggccgggagcacgcatccttcggcgtcaggagct

SEQ ID NO: 248777 - DNA, 100 bp, Homo sapiens
tctgaagagaagcccaaagacagtgaagaactcgagagaaacagcacccaggactatcttccaaagagttctggatatcctaaagaaatcttctcatgct

SEQ ID NO: 248778 - DNA, 75 bp, Homo sapiens
cttcctcactcagttgttctgctgctttcagacccccgtattgttgcagcatctggcagtgagactgaggatgag

SEQ ID NO: 248779 - DNA, 75 bp, Homo sapiens
attcgcagtggtcgcttcttctccttgagatcacccctgacctgctacctcggccgccccggttgcttctattgg

SEQ ID NO: 248780 - DNA, 75 bp, Homo sapiens
ctcagaggagatgcaccggctcacggaaaatgtctataagatcattcctggacccccgagggcctctgagtttga

SEQ ID NO: 248781 - DNA, 48 bp, Homo sapiens
caacagcaacctcttcatgagcttgcaaaggtgagtccactgtgtttc

SEQ ID NO: 248782 - DNA, 100 bp, Homo sapiens
gggactttgccttctcagcccaaagtcagcgtgttcagaatgccaggattccctcaccaactggtactatgagaaggatgggaagctctactgccccaag

SEQ ID NO: 248783 - DNA, 74 bp, Homo sapiens
cggcccgtagtatgtgaaaatgttgaagggctccatgccattgttgtgtcagatagagatggagtacctgttat

SEQ ID NO: 248784 - DNA, 82 bp, Homo sapiens
ccccgcgcccgcaggacgccccagccaggatgagcaattcttaggttttggctcagatgaagaagtcagagtgcgaagtccc

SEQ ID NO: 248785 - DNA, 75 bp, Homo sapiens
actggagctgtggtcgctgctgtgatgtggaggaagaagagctcagctatcatggtgaacttacttcagattgtg

SEQ ID NO: 248786 - DNA, 83 bp, Homo sapiens
cgaaactatcacagtggaaatgatgtagaggcttatgagtatcttaacaaggtttggtgcacctcgatttggaggaagtaggg

SEQ ID NO: 248787 - DNA, 98 bp, Homo sapiens
atgatagagagctctttgaggatctgttaaggcaaatgtctgaccttcggctccagaattctgcttggtcagaatcgtgatggcattgtgttcagcac

SEQ ID NO: 248788 - DNA, 75 bp, Homo sapiens
ggacttggtccgcggcatccgtaaccacaaggaggacgagttgccaccttccagagaagaggtacgagatgacaa

SEQ ID NO: 248789 - DNA, 100 bp, Homo sapiens
tcctccagggctctgtccacttgcaggagctggagtcagatggcagcactatggaggactattcacaggaggactggggaaaccacagtcaggatctcca

SEQ ID NO: 248790 - DNA, 74 bp, Homo sapiens
ccatgaggaaagaattctccgaggcctccccatggccacccatggaccagtcggcattcacttcctcccttctg

SEQ ID NO: 248791 - DNA, 98 bp, Homo sapiens
ctcctgaggatttctgtgcctggaaaatatctgttaacagactgcttttacacctacgacatgtattcctctgagaaaccttggacagcagattttgg

SEQ ID NO: 248792 - DNA, 80 bp, Homo sapiens
cctttttggcctggcttgtttgcaaagtacatccagcagtggtcattcgacaacgaaagtcataccgtagaaaagatggc

SEQ ID NO: 248793 - DNA, 82 bp, Homo sapiens
tccataatgggagaagtaaagaacaaagacttaaggaacagcttggcgctcaacgcttccagacaagctgcaggaattccag

SEQ ID NO: 248794 - DNA, 75 bp, Homo sapiens
agtattgaaatgcatttgccttatacagctaaagccatggaaaggctgatgagccctgaaaacacactcctgcag

SEQ ID NO: 248795 - DNA, 83 bp, Homo sapiens
aaacatgaaaacatcgtggccctgtacgacttccaggcggaaggtgctctaccagcgtgcacccaggaatatccaccgccatg

SEQ ID NO: 248796 - DNA, 83 bp, Homo sapiens
ctgtcttcggtggactccttcggcagtccacccaccgccgccgcctcccagagttcattgtcgaaatgctggacctgtagctg

SEQ ID NO: 248797 - DNA, 96 bp, Homo sapiens
gcgctgtcttcccgcttgcgtcagggacctgcccgactcagtggtacaggtttgcagattccgccagcagcacagcaagctctacagatgagtggc

SEQ ID NO: 248798 - DNA, 80 bp, Homo sapiens
actacccacctagaagaggtgatgatagctttggagacagagagcgacttgcagttgtggaggtacagtgtgaacggctg

SEQ ID NO: 248799 - DNA, 97 bp, Homo sapiens
gaaggcaagaagcagtataagatgatctgccatgtgttcgagtcggaggatgaaactggaggcgaccagtgcccagaatatcgagttcctacaggtg

SEQ ID NO: 248800 - DNA, 88 bp, Homo sapiens
tcaggctccggcgtctgcgcttccccatggggctggcctgcggcgcctgggcgctctgaggtgctggagaatctggtaaaagcaccat

SEQ ID NO: 248801 - DNA, 74 bp, Homo sapiens
gatcagccgtgtagagacacatgctacagcaacgccgttttctacactgccctaaccatcatggaggtggccga

SEQ ID NO: 248802 - DNA, 90 bp, Homo sapiens
gttcgagcagatcgacaagtccgggagctgggcggccatttaccagggtgaaagaggcctcccggggttacaaggtgtcattgggtttcc

SEQ ID NO: 248803 - DNA, 75 bp, Homo sapiens
tggcccttggcctcctcctgctgctactgtgtccagcgcaggccccttcacagatgtagtcactacaaatcttaa

SEQ ID NO: 248804 - DNA, 98 bp, Homo sapiens
agatgctgatgctgttttctcagcaatggatttggcatttgcaattgacctgtgtaaagaagaaggtggaggacaggctggagtgtagtggcgcaatc

SEQ ID NO: 248805 - DNA, 100 bp, Homo sapiens
ccttttccgttgccggtgccggcctagcgtcctggaattacttcaatcaaggttgtctcctcacagactatgagctccttgaaagagggaatcgtgtctt

SEQ ID NO: 248806 - DNA, 75 bp, Homo sapiens
caaagatggaatgacttaaaagcaaaatctgctagcatcagaaaatgcttggacagaagagatgagtactatttc

SEQ ID NO: 248807 - DNA, 98 bp, Homo sapiens
tttcggcaaccgctgctggcagttttgccaggtgtttgttaccttggttttcaaatggaacattttgatgcatcacttagtacctatttcaaggcatt

SEQ ID NO: 248808 - DNA, 100 bp, Homo sapiens
ctgaagcattgcttcaaagcatggggctaactccagaatcccccattgagcgacctgcgggttgggctgagtctgtccttgaggaagatgcatcggagct

SEQ ID NO: 248809 - DNA, 83 bp, Homo sapiens
taaagacaatggagggatgcttgtatggtctccatatcacagtatcccagatgccaaatgtactaggttttgacaagcttgca

SEQ ID NO: 248810 - DNA, 100 bp, Homo sapiens
gtgaagaagcaggaggctaagaaagtggtgaatcccctgtttgagaaaaggcctaagaattttggcattgttttccaagagataacttcaccaagatgtc

SEQ ID NO: 248811 - DNA, 74 bp, Homo sapiens
gcaagatgcggaggctgcctcggcggagcagaggaaccacacgctgatcatgatgccatggacaatattaccag

SEQ ID NO: 248812 - DNA, 75 bp, Homo sapiens
gtactccttgtctttgcaaacaaacagcaatctgcacatcgtgctgccacacgaggcttcattcgttatggctgg

SEQ ID NO: 248813 - DNA, 100 bp, Homo sapiens
gctggaggcacccgcccgcaccatttacctcaaccaaccgcatctcaacaaattccgcgacaaccagatcagattgtgaaccatgcctttagtgaagagg

SEQ ID NO: 248814 - DNA, 100 bp, Homo sapiens
aatggggacccgggacgacgagtacgactacctattcaaagcttcggaaccaaaaagaagcttcccagagccggggccaggagccccaagcgccctctag

SEQ ID NO: 248815 - DNA, 99 bp, Homo sapiens
gcatttgtctgtttgatatcaccaaactggaggatgcctatgtattccctggggatggcgcatcacacaccaaagggatcgtgggactttaccagatcg

SEQ ID NO: 248816 - DNA, 87 bp, Homo sapiens
agcctcccgagtagctggtattacagcaagctaccgactagaaatactataatcagttggacatctagcagggtggatcatgttatg

SEQ ID NO: 248817 - DNA, 100 bp, Homo sapiens
tgggttgccaagctcgcgccggatgcggagcgcggtgctgccggtggagcttcagcataagctgtggccatgactactgaagtaggctctgtgtctgaag

SEQ ID NO: 248818 - DNA, 50 bp, Homo sapiens
atatggattatacccttgctgctgtcaataccagcaaatatgcagaaagc

SEQ ID NO: 248819 - DNA, 83 bp, Homo sapiens
ttcgagcgctgttctcgctccggagccgctgcacatttcgctgtttttggaaggaagaaagatggaaagcggtgcagttctgc

SEQ ID NO: 248820 - DNA, 103 bp, Homo sapiens
agcagcgccagcggccgagcgggcggcttcctggcctgggcgctccggtggcggcggaggtgctggagaatctggtaaaagcaccattgtgaagcagatgagg

SEQ ID NO: 248821 - DNA, 75 bp, Homo sapiens
aaattgaagtcttctgtgagaggacacccaaaacatgtgaggtgaacctgccgctgctcaccctgagccagcccc

SEQ ID NO: 248822 - DNA, 82 bp, Homo sapiens
aggattccaagtaactcttatttggctcagctatgtgaaccatgcagaggacctggcctccaagctcctacaatgttcccca

SEQ ID NO: 248823 - DNA, 75 bp, Homo sapiens
gatcaccgacagcacagacagaatccctgctaccagtaaaatgtcggttccaggaccttaccaggcggccactgg

SEQ ID NO: 248824 - DNA, 101 bp, Homo sapiens
gtgctgtggtcctggcccagtacctttggtttcacagaagatctctgccaggcaaggccatcttagagatcaagtctcgggttctcatgactcccttagcc

SEQ ID NO: 248825 - DNA, 50 bp, Homo sapiens
agagctctttcaaggaatcagggagagaccattctaacacaggtaccgtc

SEQ ID NO: 248826 - DNA, 82 bp, Homo sapiens
gggggttctggagagcggggtgtgggggctgggttacgacccctacaaccctgagctgcccaagccccccgcgcagagggag

SEQ ID NO: 248827 - DNA, 73 bp, Homo sapiens
cccacgcccgcgagcagctgggcttctgcgtggaggacggcatcgcaaaaggcaggattgtggtaatgccagg

SEQ ID NO: 248828 - DNA, 85 bp, Homo sapiens
gcggggctggccgccatgcacaagctgcacttcctgcacagaacattactactggatggaaatccattccgagttcctcgagcag

SEQ ID NO: 248829 - DNA, 75 bp, Homo sapiens
ctcacctttaaacatggtgaaataattattgttttggatgacagggttcagcggattcctacacaagcaggccgt

SEQ ID NO: 248830 - DNA, 75 bp, Homo sapiens
gggagtttgacaggcgattctcccctcattttgatgaaaactttcggaagagaaagttgcctgtggtaagttcag

SEQ ID NO: 248831 - DNA, 100 bp, Homo sapiens
tcttgatgccaacactctggggaaggtggccagtggcatctgtgacaacttgcttctgccactcagcaactgccatacagcaaaaggagggattgcaact

SEQ ID NO: 248832 - DNA, 50 bp, Homo sapiens
tttgttcctgaagatgggtctccggtgtgagcagctgctggaagaggagg

SEQ ID NO: 248833 - DNA, 100 bp, Homo sapiens
cttgctttctgtcgtggcaatgttttgaaactggcaaaatcagataccaccaggccccgaaagagccatgagaaggaaggagtggaatatcactttgtgt

SEQ ID NO: 248834 - DNA, 73 bp, Homo sapiens
tatgctgcaagtgagaacatatttaacagcttcagcgagaacccagacctttcccaaagctcaggattcttcg

SEQ ID NO: 248835 - DNA, 75 bp, Homo sapiens
aaatggaccaacttctttggcaagtggacattttactggctcaaaaggcagacggtaacaagtactccttgctgg

SEQ ID NO: 248836 - DNA, 98 bp, Homo sapiens
gctgccctctgcctggagaacttctcctcccaggttgtggaacgacacaacaagccggaagtggaagtcagtcaccaggagactaaagtccatcaaaa

SEQ ID NO: 248837 - DNA, 108 bp, Homo sapiens
gaactggtactgattgttccccagagtttggggaccccttgtcttgacagtatcatgcacaggatcatccggacaaaagtacagcagccacccaaccaaccagtccca

SEQ ID NO: 248838 - DNA, 100 bp, Homo sapiens
caggcgtgcgcggacggtgtgcggaccatgtcgcctgaagaatggacgtatctagtggttcttcttatctccatccccatcggcttcctctttaagaaag

SEQ ID NO: 248839 - DNA, 100 bp, Homo sapiens
gctggagtgatctatcaggcaccagacttgggatcagttataaactctagagtgaacctgctggatattttcatagagatggagaagagggtcatcctgg

SEQ ID NO: 248840 - DNA, 99 bp, Homo sapiens
gaggccttcgagaagatccctagtgagactttgaaccgtatcctgggcgacccagaagccctgagaggtgaccaagaatatggcccaggtgaccaaagc

SEQ ID NO: 248841 - DNA, 119 bp, Homo sapiens
acctggaacttcatcatcatctacttcacaggaattgccattttgaggatggccaggcctctggagcaggcggtagctgccatcgtgtgcaccttccaggaatacgcagggcgctgtgg

SEQ ID NO: 248842 - DNA, 74 bp, Homo sapiens
tccgagctggggttggacgctgccagtttgcacagcagcagcagctggatccgcctcagaaggagcagctgggg

SEQ ID NO: 248843 - DNA, 100 bp, Homo sapiens
ctccgagacctccgaaaagcgtttccgcagacagaagtggggagaagcggaggtcaaaatgcagatcttcgtgaaaacccttaccggcaagaccatcacc

SEQ ID NO: 248844 - DNA, 75 bp, Homo sapiens
gcatggatatccaggtgctgagccaggagcagcagcctttcttaagactttgaccccgacgcaggcttcagtgat

SEQ ID NO: 248845 - DNA, 82 bp, Homo sapiens
caaaatgcaaaaaaggaggccaaagactttgtaaaatcccagaggaatccaaagccctctctttattggctcctgctccaac

SEQ ID NO: 248846 - DNA, 75 bp, Homo sapiens
agttggcaagcgagcaatttccacctctgtgtgtgtacgagctcatgtctgcgggccaggcatcgacatccgcaa

SEQ ID NO: 248847 - DNA, 75 bp, Homo sapiens
cagtgttgacctatgcctctccgccactcatcaccaatgtcacgacaagttcaccccaccagtggtcaatgtcac

SEQ ID NO: 248848 - DNA, 100 bp, Homo sapiens
aggcgctcaacaccgaggaggcggcggagcagcgggcggaggtggaccggatgctcagacacgatgaggcgagtggtacgacagagcaagtttcggcatg

SEQ ID NO: 248849 - DNA, 50 bp, Homo sapiens
gcgcacgctgtaggaaaactatgcatcatcccattcagatgaaacctgca

SEQ ID NO: 248850 - DNA, 75 bp, Homo sapiens
aagccctcgtgtcccagatgaggcaggagctcatcgatctccggggaccgagtcttgctgcgacacccaggctgg

SEQ ID NO: 248851 - DNA, 100 bp, Homo sapiens
ttaccatttgtggcccatcctgtctccagcctgagtcagatgattagcaggacgatctgctcagggcagttcaagcccagtgccctcaatggtacagaaa

SEQ ID NO: 248852 - DNA, 100 bp, Homo sapiens
ccaggcactgagctggagcccgcctggagagacagacacgtatatggatcagaaactttcgaagttggtagaagagctcacaacttcaggagaaccccga

SEQ ID NO: 248853 - DNA, 75 bp, Homo sapiens
atccccatccagccatggccagtgaagagtttggagcctcttccatcaagtggacctgattttggaggattagga

SEQ ID NO: 248854 - DNA, 50 bp, Homo sapiens
ggggtcctcatggatctgtccaaaagttgagacatttgggaaatgatgaa

SEQ ID NO: 248855 - DNA, 96 bp, Homo sapiens
gcctgggggcacacaggtgctggatggtacctcggggttctctcctgcccccaagctggcctcctgctcttcatggatgaagcagacgccttcctt

SEQ ID NO: 248856 - DNA, 100 bp, Homo sapiens
gtcccacttcagtcaaagacagtagattatgagggggacattgtgtcctgcgctggcacatatatccatgtgtggagcatcaatgggaaccctatcgtga

SEQ ID NO: 248857 - DNA, 80 bp, Homo sapiens
ggcggagaggaaccggtggcatcgtctcccgagcctgctcctgccgccgaggtcctgctggttggggcagacaacttcac

SEQ ID NO: 248858 - DNA, 73 bp, Homo sapiens
ctgcacgtagcccggcgctcggcatggctctcctggtgctcggttgaaaatctttctaaacgatacgaagaaa

SEQ ID NO: 248859 - DNA, 102 bp, Homo sapiens
gctgaacttaaaaagcagtctaaacctgtgaccacccctgaagaaattgcacaggtacatcaggaacgtctctatcaagaatacaatttcagcaaggctgag

SEQ ID NO: 248860 - DNA, 97 bp, Homo sapiens
tagccgcattgtcctcagtgtgtccaggccccagacaaggaaggggagccatggtggggcagctgcagctctcccacaatctgagtttggtgatcct

SEQ ID NO: 248861 - DNA, 100 bp, Homo sapiens
ggggctttcgccggggcccaggcccagggaccaggcggaggcgtcgcgggagcctttggggcaccacagagatgcggcctccggcctctcctcctctccg

SEQ ID NO: 248862 - DNA, 96 bp, Homo sapiens
catggagattaaagaccagggagcccaaatggagccgctgctgcctacggatttgaatttgttgaaatgagcagtcgtaaatcaaagagtaacagc

SEQ ID NO: 248863 - DNA, 75 bp, Homo sapiens
agtcccagcgctgtcgtgctcctctactcgtattggatgaacgaatatacctcatccattggaattggagttttt

SEQ ID NO: 248864 - DNA, 82 bp, Homo sapiens
tcgctggagatcgagtaccaacttaacaaacaacagttgcagttactgaaagaacggttccaggccttcctcaatggggaaa

SEQ ID NO: 248865 - DNA, 100 bp, Homo sapiens
actactgccccatcttccgactgggctccgtgatccgctgggccgggagcgacttccaggatatagccctggaggtgacctgaaacatatcacgaagctg

SEQ ID NO: 248866 - DNA, 101 bp, Homo sapiens
acaaaagagtctccgcggtggaggtctgcgttgctcttgcttttcctcgctggggtgtacgggcctattccctggtggattccagtcaagtgtctacattt

SEQ ID NO: 248867 - DNA, 100 bp, Homo sapiens
tcgccttctcggagatcatgagcatgatctggaagcggctcaatgaccatggcaagaactggcgtcacgtttacaagtaagactttgaccccgacgcagg

SEQ ID NO: 248868 - DNA, 51 bp, Homo sapiens
aggcaggcctgggcacttggcgctagagatgatcgctatggaaaatcctgc

SEQ ID NO: 248869 - DNA, 100 bp, Homo sapiens
gttggctgtgaatgcacattgtgttctgcaaaaaacaaaaaggatagcctccggcattccagagttttccgtctgatgaaggttggccatttgcaaagta

SEQ ID NO: 248870 - DNA, 98 bp, Homo sapiens
tgccccctgcttctgccccagaaccggtcgaaaaccgtgtatgagggattcatctcggctcagctccctcgtgaaagatgcttctgttcctctgattg

SEQ ID NO: 248871 - DNA, 88 bp, Homo sapiens
cgccacttgtccgcttcacactccgccgccatcatggtgaagctcgcgaagcactttcagaccatgctgaagtctaaattgaatgtct

SEQ ID NO: 248872 - DNA, 90 bp, Homo sapiens
tgactgcacttcttttttgagaaaggaaggaatatatcctgactgattcgcagcttatgatgccattcttgaaagaaatgttgcaatcaa

SEQ ID NO: 248873 - DNA, 100 bp, Homo sapiens
cggcttggcagcccagcgggacccagggagaaacaggggggcgagaagagaaacagctgctgaaatgggttgcggattgaacaagttagagaaacgtgat

SEQ ID NO: 248874 - DNA, 75 bp, Homo sapiens
taaagactttgtagccatcaacccgagtgcagtttcgatggaaaatgaagtactatactggcaattgctggagaa

SEQ ID NO: 248875 - DNA, 100 bp, Homo sapiens
cgcttcttaggaggaggaggaagaggaggaaggagggcgagcgaggaggatggcggagtcggggctcctgacggaacatgcttgccaactcagccagcgt

SEQ ID NO: 248876 - DNA, 100 bp, Homo sapiens
ccggaggcggcggagggcaccccgggcgggcggcggctgctgaatgtatcctgtcaggtataatgtcagtgaatggcaagaaagttcttcatatggatcg

SEQ ID NO: 248877 - DNA, 50 bp, Homo sapiens
cggccctggtcgtcgtcgccgctgcgtgtggacgaatgtggaacctcgct

SEQ ID NO: 248878 - DNA, 100 bp, Homo sapiens
cgaatatgaaattgcatgtgaacacgaacactctaattgcctcctgatagcacacagaaagagagaactcgatgccaccgcaacggtattggcgaaccgg

SEQ ID NO: 248879 - DNA, 98 bp, Homo sapiens
ctggactcagcggtagcaacctcgccccttgcaacaaaggcagactgagcgccagagaggacgtttccaactcaaatgatgcagaagaccacaagcct

SEQ ID NO: 248880 - DNA, 85 bp, Homo sapiens
gaaacatggacagatatcaacaaaagaactagcagattttgtaagggaacggaaacttggatttaactggccagaagcaggtatt

SEQ ID NO: 248881 - DNA, 75 bp, Homo sapiens
tcagcctcctgagtagctgggactgcagaatcctgtgaagcagctccagctatgtgtgaagaagaggacagcact

SEQ ID NO: 248882 - DNA, 75 bp, Homo sapiens
gtcgccatcttggatccgcgggacaagaaaattcatgcgactctaaaatagagctcaagcttgagaagagagaac

SEQ ID NO: 248883 - DNA, 75 bp, Homo sapiens
atggcatttcagtcactggtttgcagagtccagtgttctggaccatcaatggagcctacaattcaaaattcagat

SEQ ID NO: 248884 - DNA, 90 bp, Homo sapiens
gcgggccgaagcgcccggagcgggagcgagcggcgcggcccgacggaaatggagagctggatttctccacttttctgaccattatgcaca

SEQ ID NO: 248885 - DNA, 96 bp, Homo sapiens
gttgtttttgagaaggtgaaaatggacctagatgtgaaggctggtggaggctgtgtaatgaccattggagaaatgctacgatcttttctcacaaaa

SEQ ID NO: 248886 - DNA, 75 bp, Homo sapiens
tgggagaaataagtgtatccaccagactcacagttttgcgggcttccgccacctttgaagactttcagattcgtc

SEQ ID NO: 248887 - DNA, 107 bp, Homo sapiens
ctgggcgttcatctaccacgctttcgtgcggaagcccggctcgctgcaaaacgggcggcccgcgcggaggctcgcgagatccgcatgaaggagctggagcggcagca

SEQ ID NO: 248888 - DNA, 90 bp, Homo sapiens
attctacaaagaacagctggctagactggaggagagggtaagaccattgcaattggaaaagttctgaaactggttccagagaaagactaa

SEQ ID NO: 248889 - DNA, 75 bp, Homo sapiens
atccccgcggacgccacagcgctgtgaggcggaaccaaccctcctggccatgggaggggccgtggtggacgaggg

SEQ ID NO: 248890 - DNA, 76 bp, Homo sapiens
gaaaggagctcggggactcccccaaagacaagggtggctgaggtcctggaaggcaaaggagcagggaagaaaggcc

SEQ ID NO: 248891 - DNA, 146 bp, Homo sapiens
cccgagtgactcactcggccaaggaaactcccagggcccgcccaggacccccaagccgccgcggacgcagggatcgcttacacctgagacgaactacagaacagcacgtaccagaggtggaagtccaagtcaaacgcagaaggact

SEQ ID NO: 248892 - DNA, 73 bp, Homo sapiens
gcgcctgcttcccgtctgcgcgagtccacgcagctccccaggcgtttacagtccctaattaaaaatattacac

SEQ ID NO: 248893 - DNA, 82 bp, Homo sapiens
gcagcagtcagaaggggaacggatctgtgtgcccacagctcctggagccccacaggtgaaatgacaatggatgctctgttgg

SEQ ID NO: 248894 - DNA, 75 bp, Homo sapiens
tgcgagctgcagctgcgatctctgtggtaggcccagattgaagataaaactttccaagtccttggtaatctttac

SEQ ID NO: 248895 - DNA, 75 bp, Homo sapiens
ggtggcagtggggatggctataatggatttggtaatgatgttaccaccaccctgtgaatctgcctgcacagtacc

SEQ ID NO: 248896 - DNA, 100 bp, Homo sapiens
ttccttcattccacatgaatctcagggtgagaatccttttgaaattcaagaccattctcaggatcagcaaatagaaggagatgaggaggatgaagagaag

SEQ ID NO: 248897 - DNA, 90 bp, Homo sapiens
agctggaaaggaaggtactgcaccatctgaaaatggtgaaactaaagctgaagagaatggcttcagttctgtgcaggccacgcagttaca

SEQ ID NO: 248898 - DNA, 74 bp, Homo sapiens
aaacatcgagacgctgcagaacgcggagccctgaggatgatgacaggaaggtccgaaggagagaaaaaaaccga

SEQ ID NO: 248899 - DNA, 90 bp, Homo sapiens
cagcattcccatcatcggacttggtacctactcagaacctaaatcgatatggaagaaagtagcagtgttgccatgttggtgccagatatt

SEQ ID NO: 248900 - DNA, 80 bp, Homo sapiens
tctccccgacaaacaccacgagaattccgcagcccacacgcaaattgtggctactaatttgccccctgaagatcaagatg

SEQ ID NO: 248901 - DNA, 100 bp, Homo sapiens
ccaaaccacgtggtcccaggcccagcagtacctcatggataaccccagctttgctcaggaccatcagctgcagaactttgtgcccattgacctagacgag

SEQ ID NO: 248902 - DNA, 98 bp, Homo sapiens
gttgggaaagaaaattggctacccagaagtcatacctgattctgctgtgtcccctccagtccgggatgttggtatgaattcccaagctctggtcctcc

SEQ ID NO: 248903 - DNA, 100 bp, Homo sapiens
ccgctggcggggccttcctggtgtcagggttaccgtcagatgccctggatgcagctagaggatgattctctgtacatatcccaggctaatttcatcctgg

SEQ ID NO: 248904 - DNA, 75 bp, Homo sapiens
tctcggtgctgcagacggcgagacctcctgcacaggatattagaaatggctactccccagtcaattttcatcttt

SEQ ID NO: 248905 - DNA, 100 bp, Homo sapiens
tttagagtcgaaaataaatcctaacactgcataccagaaacaacaggtgtatgaaatctgaagagaagtcccttggtgtgggattacatacattttgcac

SEQ ID NO: 248906 - DNA, 75 bp, Homo sapiens
cttcgcagtctggaaagctttaggagttcacagtgagaaggtacagattcagagacaaaaaatccggtctgactt

SEQ ID NO: 248907 - DNA, 100 bp, Homo sapiens
gttcgctgcgcgtgcacattccgagcctacaaatacatttggcaagtacccaagggcccattgaggtttacttatgtccagaagagactgaaacacacag

SEQ ID NO: 248908 - DNA, 100 bp, Homo sapiens
gcagtcagttgaacaagacaacttatttgatatgcatcaaattgcaatttggaggagaggcagcacaagcagaagcctgggcctggctagcagccaatca

SEQ ID NO: 248909 - DNA, 98 bp, Homo sapiens
gggatgaccagaatccttatactgagtcagtggatattcttgaagatcttgtcatagagtttatcactgaaatggcagctaatacttgatggtcaatg

SEQ ID NO: 248910 - DNA, 75 bp, Homo sapiens
tatcttccactatagccaatcccaccgatgttctaaagctcattcttggaatcccagaacaggccttaagtcttc

SEQ ID NO: 248911 - DNA, 90 bp, Homo sapiens
atcgttcgctaaaggaaatgaaaggagaaattcaacagtcgcttggagcctgggttttgcttagtccaagacaagctgctgctatctgcg

SEQ ID NO: 248912 - DNA, 129 bp, Homo sapiens
tccagtcggtgttgagcacggcgagcagtctcaggcctttagtgatgatggtttcccaaatgtggggaaaagcagcattatcaatagcttaaaacaagaacagatgtgtaatgttggtgtatccatggg

SEQ ID NO: 248913 - DNA, 101 bp, Homo sapiens
caggagaccaggtcaagcccgaccaatacactgaggccctggcccagagggacaagtctttcatggtgctgattcagacatagaatggctacagaaagact

SEQ ID NO: 248914 - DNA, 99 bp, Homo sapiens
ggataacactgtacaagctttcaaagtcaatctggcagccggtcaagttccccaggaaaattgttgggaagtggttatggtggacttactgggggctcc

SEQ ID NO: 248915 - DNA, 109 bp, Homo sapiens
gccaaggttccgcgccgggcgtggacggtgtggggcggtcccggccccgcagtaagactttgaccccgacgcaggcttcagtgattgccgcggatcagaagcctgagca

SEQ ID NO: 248916 - DNA, 100 bp, Homo sapiens
gaatttgattttgatgatgagccagtgacaccaaaggactccctgattgaccggagacgcaccccaggtagatgatgagctggagatcaaggcctactat

SEQ ID NO: 248917 - DNA, 100 bp, Homo sapiens
cagagtgaggacgaggacagagaagccaagaggaagaaggaggaggaaggaaagcggcgttatgacaggaagcagagtggctatggtgggcaaactaagc

SEQ ID NO: 248918 - DNA, 123 bp, Homo sapiens
agagagaagagggcagagccgtgcatggggctgctccccaggacctgagcaggaacctggagttttcaggcatcaagcatgatggaaccatgtgtgatacctgccgccagcaaccaatcattg

SEQ ID NO: 248919 - DNA, 100 bp, Homo sapiens
cgagtgctccggggagacgccgacaatgacatggtcaagattgagaacctgaccaagggagaggctagtggtaacaggccgagctggatggatgggtatg

SEQ ID NO: 248920 - DNA, 101 bp, Homo sapiens
cccggtgcccgaggaggcagccaagctcgtagcctgccactccgtgcacactgccctaaccatcatggaggtggccgaggtggaaagtcctctgaacccca

SEQ ID NO: 248921 - DNA, 100 bp, Homo sapiens
caccaccaccatctccatcacccaccaacaacaccacaataatccacagccaaggttaaacccatccagagtaatggctgcggccttacccaggaccctg

SEQ ID NO: 248922 - DNA, 75 bp, Homo sapiens
cacaaaccgaatagaaactttggatccagcacttatcagaccagggcaagctgctgcgcaccatcctcttcgggg

SEQ ID NO: 248923 - DNA, 83 bp, Homo sapiens
ccccagccccacagaccagcccagcattcagggtttggaaatcccttgtctccaggttgctgggattgacttcttgctcaatt

SEQ ID NO: 248924 - DNA, 100 bp, Homo sapiens
caagaagatgagaccgggggaggcgacgctaagttgctgatcgtggcggttttggctacgggcctccacctccaccgccagatcagtttgcccctccggg

SEQ ID NO: 248925 - DNA, 82 bp, Homo sapiens
tctcgctctgggtctccaggcccgcgaccgtccgccagtcgtcccgagccgccaccggcacggccaggccagcatggtggac

SEQ ID NO: 248926 - DNA, 89 bp, Homo sapiens
cccagcaacaagacagagctggcctggagtccgcggctggccgcgtgagtaggcttacatcctgagcatggagccctgtggccactgcc

SEQ ID NO: 248927 - DNA, 100 bp, Homo sapiens
tcccaatggcaactatgtttggatgttggatctacactttctcaagcactgtgatcttcaaatgaattgtcttagaagaaagaaggcaagccaccatttt

SEQ ID NO: 248928 - DNA, 80 bp, Homo sapiens
cagttcctgcagtaccccactctacgatcagacctgcctagagctggaacgttacctccagagcgagccctgctatgttt

SEQ ID NO: 248929 - DNA, 51 bp, Homo sapiens
cgcgcacgccatgggagccgtgactgacgtaaaggcatgacttcctggcac

SEQ ID NO: 248930 - DNA, 95 bp, Homo sapiens
ccaactttaaaataaaggacttccctgaaaaagctaaggatatctttattgaagctcacctttgtctaaataaatggagtcttgctctgtcgccc

SEQ ID NO: 248931 - DNA, 73 bp, Homo sapiens
aacctgctggagtgaggcctgaagcggtgactttcaaggatgtgatagtggactttacccaggaagaatggaa

SEQ ID NO: 248932 - DNA, 75 bp, Homo sapiens
cagttcacggacatggagcacaacagggatgagccccaagagcctcaagaacccaacaaggtgcccctagaagac

SEQ ID NO: 248933 - DNA, 75 bp, Homo sapiens
cgcaacgctgcgctctgggctgacagccgaatatgtgggagtccatgtcctgcagtgtggcctgatgtaatcaaa

SEQ ID NO: 248934 - DNA, 100 bp, Homo sapiens
tccatttatacctatagatattttatccacaactggccacagctgtgcttcttgggtcaacatatttcactggcacctattcacaagcttgaagaagctc

SEQ ID NO: 248935 - DNA, 80 bp, Homo sapiens
gagagaaggcggcgcgggaggtgaagttgctgctgttggggaagatcagttttcctgccatccaggctgctccctccttc

SEQ ID NO: 248936 - DNA, 100 bp, Homo sapiens
cactggatgactctccaggtgcaggaccctgccatctatgactccaggtcttcagcacccacccaccgtggtacagaggtacagccccgtggtggaggcc

SEQ ID NO: 248937 - DNA, 90 bp, Homo sapiens
agaaaactgtatgtaccctaaatatgggagataagaagtatgaagacatggaaggtacgacaccacagaggaaaagttatttatacccat

SEQ ID NO: 248938 - DNA, 85 bp, Homo sapiens
agagagggaactgacccacttgctcctaccagcttctgaaggtgtaatggataggtaacagagaagacctcgtcccttcctagtc

SEQ ID NO: 248939 - DNA, 100 bp, Homo sapiens
ggcgggggaaagggagacggcgagacgcgcagcgccggcgcccgggagacccaggaggagcccgcagggtcatgtaggtacaacagcaaccaagaagatc

SEQ ID NO: 248940 - DNA, 90 bp, Homo sapiens
ggccgaatccatcatcaaacggcggatccgaaagggcgagctgaggatcagtgtcctgcctgcctacctgtcctatgatgccccatggcc

SEQ ID NO: 248941 - DNA, 75 bp, Homo sapiens
ctgaggcgagcgacgctatggatcccacagagcctgatccagggatgtctggatggccggatggcagaatggaga

SEQ ID NO: 248942 - DNA, 75 bp, Homo sapiens
gcagaaggcgaagacgaggtccagttcctgcggacgaccttcactgcctggtgtaactcccacctaaggaaagcc

SEQ ID NO: 248943 - DNA, 90 bp, Homo sapiens
gtcggggatcggtcgcctgagaggtcgcctgcgaggccgctggccaggcctgagcctctgccaccatggccattgtgcagactctgccag

SEQ ID NO: 248944 - DNA, 100 bp, Homo sapiens
ccggagtgcgccggcggtggcgcctgcggacctaactagctccaggttaggccgagctttgcgggaaagcagcggttttaaaatcaaagatgggaaaatc

SEQ ID NO: 248945 - DNA, 110 bp, Homo sapiens
cgggaggaaagaagacaagagagaacgcaaacagtttgaagctgaggattttgtgccgtgagcgatgtggagatgcaggaacactatgatgagttttttgaggtgagaga

SEQ ID NO: 248946 - DNA, 82 bp, Homo sapiens
aatatggagagagccctttgcaggatgcagaagaagccaaaaacattctggacaatgcagatcttcgtgaagactctgactg

SEQ ID NO: 248947 - DNA, 96 bp, Homo sapiens
ggcggtggcggtggctgagcagaggacccggcgggcggcctcgcgggtcagcaagtaactggcagaagttttggtgataaagattttcggacaggt

SEQ ID NO: 248948 - DNA, 75 bp, Homo sapiens
ctcaatttaagcctgatctaacccctagaaacaggtgttgacttcaaaatcaaaactgtagagctaagaggaaag

SEQ ID NO: 248949 - DNA, 100 bp, Homo sapiens
gaaatacgcaatggaattgaagcctgctattgcaacatgggattttcaggaaatggtgtcacaatttgtgaagcgggcctccccttcctcatcatcgaga

SEQ ID NO: 248950 - DNA, 75 bp, Homo sapiens
gagcttcgcaaggctactgaagcactgaagggacactttgtgagaaatttaggtgatgttggagagaaagagact

SEQ ID NO: 248951 - DNA, 83 bp, Homo sapiens
gtcggccccggcccgactctatcacaagaagcccccaggaccactggctgcccatgagagatgaaggatggcatccaaggggg

SEQ ID NO: 248952 - DNA, 82 bp, Homo sapiens
agtggggtcacacaccccatgcttaactcccccaacaatgagttgtaacaacaggggaggagccccagccccgcgacgagga

SEQ ID NO: 248953 - DNA, 100 bp, Homo sapiens
tttctctcagctgcaacaacttcaatgcagtctttagtcgcatttctaccagagaggtggagatgctttctgaccccgtcgaggtcatccctgtactggg

SEQ ID NO: 248954 - DNA, 100 bp, Homo sapiens
cagaccctggagcctcagttggaagcagccgatccagcctgcggagcctgtggggcaggcccatgaagcttcccatcaccaacagcaggcagcacagaac

SEQ ID NO: 248955 - DNA, 101 bp, Homo sapiens
cagccaatgatcttttcaatgctgcgaaagctgccaaaagtgacatgcaggatgaagctggaggcagattcgtcgctttctctggagaaggacagtcattg

SEQ ID NO: 248956 - DNA, 75 bp, Homo sapiens
aggcccaccctggagtaaccctcactggagaatccagaggccgcaccattattctctctacacaccacatggatg

SEQ ID NO: 248957 - DNA, 98 bp, Homo sapiens
atgcatctattttgaagctaagaaaaaacaggatctctatatgtggtgatgcagaagatggggaagaatatgatgacccttttgctgggcctccagac

SEQ ID NO: 248958 - DNA, 75 bp, Homo sapiens
cggggacctgctccgggacaacatgctgcggggcacaggcaggagtagggctgattggagccattgtacagtgtc

SEQ ID NO: 248959 - DNA, 82 bp, Homo sapiens
cggcgacgcagcccgcggcagaaggttttaaaatcaaagatgggaaaatcggagaaaattgcccttccccatggccagcttg

SEQ ID NO: 248960 - DNA, 50 bp, Homo sapiens
ttgccgccaccatgcccaaaacgtgagatggaagattttcgaggtatagc

SEQ ID NO: 248961 - DNA, 75 bp, Homo sapiens
gtgcctgttccgggccgtggcggagcagatatatcattgtggtggaacatgatctaagtgtattagactatctct

SEQ ID NO: 248962 - DNA, 100 bp, Homo sapiens
ctgagccagaacctgagcctgttaaagaagaaaaactttcgcctgagcctattttgtgggccacagttacatttcatcttcctcatcatgtgttgaagtc

SEQ ID NO: 248963 - DNA, 97 bp, Homo sapiens
cagttggggtggctggttctggggctgggattggaactgtgtttgggagcctcatcattggttatgccagccgtcatggaaatgatgagtcagaaga

SEQ ID NO: 248964 - DNA, 95 bp, Homo sapiens
cacattggcgtggccgtcaaggagctggacctctacctggcctacttcgtgcgtgagcgagttggaaatctacatttctgaaggaacccactcaa

SEQ ID NO: 248965 - DNA, 99 bp, Homo sapiens
cgcctgatgaaatcaagatcccgccagaaccccctggcagatgttcaaatcacttgcaagggacccaatcctgcagctgctggagggccggaagggtga

SEQ ID NO: 248966 - DNA, 101 bp, Homo sapiens
agccggttgcgggcagtggacgcggttctgccgagagccggaaagcatgaagggagacaccaggcatctcaatggagaggaggacgccggcgggagggaag

SEQ ID NO: 248967 - DNA, 100 bp, Homo sapiens
gggaccgcatgctccgcatggagagggtcatccccctggcccaggtgtgggcccatcgctggatggatctgtcagaacacggctttgggctggccctgct

SEQ ID NO: 248968 - DNA, 156 bp, Homo sapiens
aaaaactttgggacgatgaaggcgtgaaggcatgctttgagagatccaacgaataccagctgattgactgtgcacaatatagcatctcttcctcaaagatgagccagccgtcatttgaagaggaggaaagactggattggggaagaatctggggca

SEQ ID NO: 248969 - DNA, 101 bp, Homo sapiens
acgcgggtggctggacctacatgcttcctgctgtggctgtctcggaacccgtggtcctccgcttcataaggacagaataacgggctcccagattcacaagc

SEQ ID NO: 248970 - DNA, 100 bp, Homo sapiens
acaacatggcagacattgacaacggttaagaagattgtctaccaaatatagaacagaaaagatatatcccacagccactggagaaaaagaagaaaatgtt

SEQ ID NO: 248971 - DNA, 82 bp, Homo sapiens
ctgctgttgcttctgggccagaggaagagaatgagaacgaggtcactcggacactatggtgttcttttacctgtggattgtc

SEQ ID NO: 248972 - DNA, 82 bp, Homo sapiens
ctggctcggagcagcagcctctgagggtgcgcaggtcccaaaccagccctcatctcctggttggaacgaaacaccgatgact

SEQ ID NO: 248973 - DNA, 98 bp, Homo sapiens
ttgttctggatccctatttattaaaggtggttctgctgggcatggacatcctgtccgccctggtgacccggctgcaggatcggttcaaggcgcagatc

SEQ ID NO: 248974 - DNA, 101 bp, Homo sapiens
ctgcgagcatggggccctggggctggaaattgcgctggaccgtcgccttgctcctcgccgcggcggggactgcagggccaagaccagcttcaagtctccat

SEQ ID NO: 248975 - DNA, 82 bp, Homo sapiens
gaaagatccaaaacaagtggctgcggccgtcgcccaggagtcatcggacgccagaatctgatggactcaccctgtcacccag

SEQ ID NO: 248976 - DNA, 75 bp, Homo sapiens
gcagctaaactcaaccagaaagattggggtggttctcttcccaaagtggaagccaaattcatcaattatgtgaag

SEQ ID NO: 248977 - DNA, 101 bp, Homo sapiens
ggaacgtgtcccggggccgacccggcccgtagtgtggaagcagcttcaggtgaaaattagttctgctgtgcttaaagctgcggcccatcactatggagctc

SEQ ID NO: 248978 - DNA, 100 bp, Homo sapiens
tagtggcggcggcggcggcggcggcagcagcggcaggagggcagagatggaacccacctttccccaggtgtgatggggttggggtggacctgagcaacat

SEQ ID NO: 248979 - DNA, 80 bp, Homo sapiens
cgagtaatcgcctgctttgattcattgaaagttatcaaggctgcctataatcaagtaaaaacaatagctcaaggaaacct

SEQ ID NO: 248980 - DNA, 100 bp, Homo sapiens
ggggggctccgctgtgcgcaggatcgcccaggaagtgcagcgctttgcccaggagaagacagagcgggatgccaccagcttgtccaaagggaagttccag

SEQ ID NO: 248981 - DNA, 82 bp, Homo sapiens
gagcgcgagcggcgcgagaaagccgagtatgaagtgaccccggatgacaagcggaaggcatgtgggcggcagctaacgcaga

SEQ ID NO: 248982 - DNA, 49 bp, Homo sapiens
gggagatgtcgtgagcaaggtctccgtgacaaatggacacctaccaggg

SEQ ID NO: 248983 - DNA, 75 bp, Homo sapiens
cagatgttcattcatctggatcttcagatgcacatgttactggagttggctataatcaatttggggaagtgattg

SEQ ID NO: 248984 - DNA, 83 bp, Homo sapiens
ggccagactcctggagatcgacccgtacttgaagccctacgccgtggacttccagcgcagaccatggcaaaagttataaccac

SEQ ID NO: 248985 - DNA, 75 bp, Homo sapiens
gtgagagtcattgatcccaggaaacaagagattgttgctgtcctgggggcaccatggtttcggcggcagccccca

SEQ ID NO: 248986 - DNA, 73 bp, Homo sapiens
ctaagattgacccaacagttaccatgatgcaggtcctggtgcttgatggtcgaggccatctcctgggccgcct

SEQ ID NO: 248987 - DNA, 100 bp, Homo sapiens
tcctcacaggcctggcgcgctccaaaggcttccgcgtccttgacgcctgcaggtgcggagcgggccctggtggcgcggccctccctggagagtctgctgg

SEQ ID NO: 248988 - DNA, 100 bp, Homo sapiens
agaggctgggccaactccagcacgggctgcgggacaggatcaagacttcaaatcccaaaagaacttcatcattaacatgacttgcagattttgctggcag

SEQ ID NO: 248989 - DNA, 95 bp, Homo sapiens
cgagtagtgtctcccggacctcttcattgcctaaaggtgttgaaagcagcaggggcctagaagacattaaaccgataccacagaaatacaaagga

SEQ ID NO: 248990 - DNA, 84 bp, Homo sapiens
ctcgggtcgtggagccaggagcgacgtcaccgccatggcaggcatcaaaggtgctggagaatctggtaaaagcaccattgtgaa

SEQ ID NO: 248991 - DNA, 83 bp, Homo sapiens
cgctgaactgctccgatcccactagtgagaggtcttgggcgtctttggtactggcttttttaggggtctgcctggggattacc

SEQ ID NO: 248992 - DNA, 100 bp, Homo sapiens
aacaagcaaatgctgccttccttgttggatgctacatggccagaagcggactcctagaagaggggagcagcaaggatggaatgacagccgtgggccggag

SEQ ID NO: 248993 - DNA, 49 bp, Homo sapiens
ccagagcaacctctttaaaaagcaaggagaaaatgcagaagtctccatg

SEQ ID NO: 248994 - DNA, 80 bp, Homo sapiens
gcgggccctggccgctcacccgtggaaagtacaggtcctgacagctgagggagaaccgaagattacaggaggccagcatg

SEQ ID NO: 248995 - DNA, 83 bp, Homo sapiens
cagatccatttacactttacactggtaggtgagtgctgtcctcggctcactttcctcaagctctccggctgccacggtgtgac

SEQ ID NO: 248996 - DNA, 82 bp, Homo sapiens
gcacttaaaagtggaaagatgacggatgaaaagaatgaacactgtccttcaaaacgaaatgtgacagtgatgataacatggg

SEQ ID NO: 248997 - DNA, 100 bp, Homo sapiens
aggacgaaccgccaatcgcaaggcacctctgagaacttcaggtacatgtcccagagcaagcacacggaggcccgggagctcatgtactcgggagccctgc

SEQ ID NO: 248998 - DNA, 98 bp, Homo sapiens
aggtgattccgtgaaggcttcgaaaaactggcgatggaatatgagaggagccctctggaaagaaaaggacagaccctgtgctttcatgaaagtgaaga

SEQ ID NO: 248999 - DNA, 100 bp, Homo sapiens
tcgcccccaagactgcgactctaaacggactcatgtactttgtcaggttgcctgtggctggagaaaggaatgtgctcatcaccagtgccctcccttacgt

SEQ ID NO: 249000 - DNA, 100 bp, Homo sapiens
cgcgtggccacgtggttcaaccagccggcccgtaagatccgcagccccggccctggactcggcggccgcggaggacctgtcggacgcgctgtgcgagttt

SEQ ID NO: 249001 - DNA, 100 bp, Homo sapiens
gggcggtggaccagggcaccagttcgacgcgctttttggatggatcaaacctcactgcaagtcagagggcctatgcgcctgagcagctgcagaaacagga

SEQ ID NO: 249002 - DNA, 75 bp, Homo sapiens
ggctgcgagaccctagaggcctgcggcctgcgatacagatccacgggttttagaaaaacaagaattacagcagcc

SEQ ID NO: 249003 - DNA, 75 bp, Homo sapiens
gtaccagttggaacaggatcatgatttgcaagcagtggtggtcaccaatacaattccacatgaagtccagaagct

SEQ ID NO: 249004 - DNA, 90 bp, Homo sapiens
cttctttcctagcctgagtgttgagcagtgtcatgccttggcgtttcagctcctcgttgtctagtgctacagctagaatgaagcacatca

SEQ ID NO: 249005 - DNA, 99 bp, Homo sapiens
ttatgaggcagagcctaagagaactatggcaacatcaggtgactgtcccagaagtgaatcgcaggcagtataactccaactgtggaactgaatgggctt

SEQ ID NO: 249006 - DNA, 75 bp, Homo sapiens
agagaaatggattcctattgcaaacatgattaaagggagagataccaatgtactggtatatattaaaagaagatt

SEQ ID NO: 249007 - DNA, 83 bp, Homo sapiens
gtccgacagccaggcccgggagaagtttgaagactgcttcattctgcctctagtaccagcggtttctctgttctgtgatcaat

SEQ ID NO: 249008 - DNA, 83 bp, Homo sapiens
cagggaccaggcggaggcgtcgcgggagcctttggggcaccacagagatgcggaatccacattcatctcaatggaaggatcct

SEQ ID NO: 249009 - DNA, 100 bp, Homo sapiens
gtccagcatgggagagtacatgagacgatgaagcaaaggatcagctcagctactatttaataaaacaaaatctgtagaattcacgttttgtaatgacact

SEQ ID NO: 249010 - DNA, 82 bp, Homo sapiens
tactactataatgggaaagcgtgcatattgggtacttccagaagtatgaattcagtgatgcaaaggacaggcgggctgcagc

SEQ ID NO: 249011 - DNA, 75 bp, Homo sapiens
ggacatgcaaaacttgcagattttggggtagcaggtcaacttacaaagttgagaggattctattttgcaaagctg

SEQ ID NO: 249012 - DNA, 74 bp, Homo sapiens
ccaccccctctctgaccatgaggccaccccccaaggtgaagaactgaagttcagcgctgtcaggattgcgagag

SEQ ID NO: 249013 - DNA, 90 bp, Homo sapiens
gagcagcccgcggcgaccaagatcaggaacctgccctgggaagtgttcgccagttactacatgaaaagataagagatgcttatactcacc

SEQ ID NO: 249014 - DNA, 100 bp, Homo sapiens
caggctgtcctggccaacctgctgctggaggaggataacaagttttgtgcagattgccagtctaaaggctggcagtgatggtgaaagcataggaaactgc

SEQ ID NO: 249015 - DNA, 74 bp, Homo sapiens
ccattttgagcaatggggaacgctcacggactgtgtggtatacacgtctgggaaaggcagcagcgcagctggac

SEQ ID NO: 249016 - DNA, 82 bp, Homo sapiens
catgctgaccaccaatcagatccgtaaggttcgagaacttgtcttggacaattgcaaatcaaatgatggaaaaattgagggc

SEQ ID NO: 249017 - DNA, 90 bp, Homo sapiens
ccgagtctccgccgctgcgggcccgctccgacgcggaaggactgatcctttgaaatactccagccatgactaaaagagaagcagaggagc

SEQ ID NO: 249018 - DNA, 97 bp, Homo sapiens
tgttctactctgccagggaagaaattgtgataggaactgaggtcacgcacgttgaaccatgggagaaaggaagcaggaaaacagcgggccagacagg

SEQ ID NO: 249019 - DNA, 76 bp, Homo sapiens
gggaagatggcggcgccgctcatccccctctcccagcagggaataaccagcaagtacctgtcaagaatgaagtaga

SEQ ID NO: 249020 - DNA, 105 bp, Homo sapiens
ggagttctccaggaagcagatcaaggacatggagaagatgttcaagcagtttttcacgactgaaaacaacatagcaaaataagccaagatgtctgtggatccaat

SEQ ID NO: 249021 - DNA, 100 bp, Homo sapiens
atgagtttggccacgtgatgcaccagctctgctcccaggccctggagaagaaggggatcagccacctggaggagaaggagctgaaggagcggaacaagag

SEQ ID NO: 249022 - DNA, 100 bp, Homo sapiens
gagcatctcccagaagaaggtgaagatcgagctggataagagcatagcagaggacaccctccaaacactggttccccactgccctgtgccttccggcccc

SEQ ID NO: 249023 - DNA, 100 bp, Homo sapiens
aataaagagtggaaaaagaaatatgtcaccctgtgtgacaatggcgtgctgacctatcatcccagtttacatattgagaggatccagaatccagatctct

SEQ ID NO: 249024 - DNA, 75 bp, Homo sapiens
tcgtgtcgagttcccaaaaagctccgcaggggctgtagggagatgggagacctttaactctgaaggacatatggg

SEQ ID NO: 249025 - DNA, 90 bp, Homo sapiens
cttctggatcagctgacaaaagcgttattatctggacatcaaaactggaaggcattctgaagtacactctctgttggatgaacccaatcc

SEQ ID NO: 249026 - DNA, 74 bp, Homo sapiens
gtgaggtgctgaagaaaaaagtagggcttctcaaggaggtgttctagctgagcgtttaagagcatggactctgg

SEQ ID NO: 249027 - DNA, 101 bp, Homo sapiens
cctcttggggacctgggagccccctccgagttacacctccagagccaaaagtagtatgatctcgtgaaatcttgagagaaactgaatgacgaatgaaacta

SEQ ID NO: 249028 - DNA, 100 bp, Homo sapiens
gatgtccccctggatcttcacacagctgcttccattggccagtatgaagtggtgaaggagtgtgtgcagcgacttttggaaaagaatttgataaacattt

SEQ ID NO: 249029 - DNA, 82 bp, Homo sapiens
ccccccgccgcagcagcaccggcgacagcaaccatgtccaagggacctgcagttggtattgatcttggcaccacctactctt

SEQ ID NO: 249030 - DNA, 75 bp, Homo sapiens
tgaacttaaaaagcagtctaaacctgtgaccacccctgaagaaattgcacagcagggaaaaggggtcgaggccgg

SEQ ID NO: 249031 - DNA, 74 bp, Homo sapiens
ggggctttcttactacaaacctcccaggagacagtgtttcacaaaatgattttccttctgaagctcccatctcc

SEQ ID NO: 249032 - DNA, 78 bp, Homo sapiens
ggagagattctgggagccaaacactccattgggatcctagctgcttggatttacactgggcaacgtggttggaatgta

SEQ ID NO: 249033 - DNA, 75 bp, Homo sapiens
ggctgcagcgagcgctggacggagaggaaagcggaatccagaaccctggctgaaattgcaaaagcagagctggac

SEQ ID NO: 249034 - DNA, 100 bp, Homo sapiens
tgggagctgtagaccggagctgttcctgttcggccatcttggctcctccctgccagatagctcttattttgagatcgtgggtgaagtgcttaaacagtta

SEQ ID NO: 249035 - DNA, 75 bp, Homo sapiens
gcaagggagtgatgccggttatctctgtgaatctcagggatgataccggggactctccagagccatgactagatc

SEQ ID NO: 249036 - DNA, 100 bp, Homo sapiens
ggtccatatcccaggagctcgctgcctgtaccttagatttgatagcagatgctcttcgcaatatgactatgacaaagatgccccagtgaagttgtgtgac

SEQ ID NO: 249037 - DNA, 60 bp, Homo sapiens
cccacccacgccgactgtgatcagcccctgttccaattactggccaacaccttcccaaga

SEQ ID NO: 249038 - DNA, 75 bp, Homo sapiens
ctaaatgtcattactgaaactcagtgcactctaggtgatgacgaacagagtgattggttctatgaaggagaatgt

SEQ ID NO: 249039 - DNA, 100 bp, Homo sapiens
tcctggtcagcacttaccggctgccccagatcgcgcgcctggacaacgattcactttataggaacagcttcagcttcagtgatgaaaaactgaattctcc

SEQ ID NO: 249040 - DNA, 100 bp, Homo sapiens
catctgttatagcaaaatacccacacaaaataaagagtggagctgaagctaagaaattggagctcgagtatatttagcttgccgggatgtggaaaagggg

SEQ ID NO: 249041 - DNA, 100 bp, Homo sapiens
cgccgccgagaggaggcctatgagaatcagaatccagactccaaaatgatgcaaatcaacctgactggatttttgaatggaaaaaatgctcgagaattta

SEQ ID NO: 249042 - DNA, 100 bp, Homo sapiens
gcgtctcggaaaccggtagcgcttgcagcatggctgaactcacgggaatcaaatggcgtaggtacaattttggagggcatggggactgtggacccataat

SEQ ID NO: 249043 - DNA, 98 bp, Homo sapiens
ttctcccagatggtgcgctgcctcgacatcctagaagattacctcatccagagaaggtttctgagtcccttcaacatgatcctgggaggaatcgtggt

SEQ ID NO: 249044 - DNA, 101 bp, Homo sapiens
cagaacctcaattctgttgatcttcaaaatgctgcagaaatgctcactgcaaaagtgaaagaaagaccatcttatgccccacctcccaccccagctcctgc

SEQ ID NO: 249045 - DNA, 90 bp, Homo sapiens
gctaaaaacaagactggggctgctcccatcattgatgtggtgcgatcgaatggatcttctaaccaaagacggagatttaatccacagtat

SEQ ID NO: 249046 - DNA, 82 bp, Homo sapiens
cctcggctgcgccgcgtgtcctcggagcgcggtccctgtattggtctcctgctcctagagtaagactttgaccccgacgcag

SEQ ID NO: 249047 - DNA, 100 bp, Homo sapiens
cctgtgattgttgcctacaagaaaaatctggtagaacagcacattcaggacattgtggccaagatcaaggctcgagatcttcgcgggaagaagaaggagg

SEQ ID NO: 249048 - DNA, 101 bp, Homo sapiens
tcagttggaactggagtctgggcacgaaatcctcaatatcggtaaacactacacgtgaagagtggtgaaagggaacattgattactgaagtgccctggaga

SEQ ID NO: 249049 - DNA, 100 bp, Homo sapiens
tagcatagctgctgtggctgaactacgacaacacattgctgagcttgaaatccaggtgggatgtgtgtgggctgaaattccgagctgcggttgtgcatga

SEQ ID NO: 249050 - DNA, 97 bp, Homo sapiens
cgggccctctggaccctggagtacaccccgcagcacagccgcgacttcaaggtcttagtggtgcaatggctagtataagcgtgcgttcgagtacccc

SEQ ID NO: 249051 - DNA, 100 bp, Homo sapiens
agagaacattcacgttcaactgattaccgaggagatgtaaattaaaatagctggctgtaattttccaggctgtaggttccatgaggacaggccttgagtc

SEQ ID NO: 249052 - DNA, 88 bp, Homo sapiens
gtctcttacgtctgcggaagtgcagctgcctcagttcttagcgcaggtaactgcatcctgcccagcatgacggccccctgcccgccgc

SEQ ID NO: 249053 - DNA, 75 bp, Homo sapiens
gatgcaatgatggcaaaggccgagtacctctgccggataggtgacaaaggatatctgcattacctccacctcctc

SEQ ID NO: 249054 - DNA, 100 bp, Homo sapiens
tggaacaggagttccgatcgacccggtaccaagaaggggagtgcccgcggcagatgttgctatcggagctccacaagaagatgacttgcaaggtgctatt

SEQ ID NO: 249055 - DNA, 120 bp, Homo sapiens
gaggattcagggaataggagctggggagcccttctgcgccacagtgatgtcttggcattgcccattttcaagcaggaagattccagccttccattggatggtgaaacagagcacccaccc

SEQ ID NO: 249056 - DNA, 90 bp, Homo sapiens
ggccaccgggccacggccccacagacccaggcaaggatcaatgcccggcttcagcagtatcgtgccaaagcagaactagctcgatctacc

SEQ ID NO: 249057 - DNA, 100 bp, Homo sapiens
tgcctgctccacaagcggcgccgcgccctcggcctgcacggaaacttttcagcattacctaagaagcaaaggctcaattttggctgcttcattcttatct

SEQ ID NO: 249058 - DNA, 75 bp, Homo sapiens
gatgaagcttcgagtgatgaattcccaggagcaggctcttgtcaggatggtgaagctgttcatcggaaacctgcc

SEQ ID NO: 249059 - DNA, 83 bp, Homo sapiens
gaccacttccagatccttcgggccattgggaagggcagctttggcaaggatgaccgagtgggagacagcagcaccagcggtgg

SEQ ID NO: 249060 - DNA, 100 bp, Homo sapiens
cccaaacctgtggcgggagttggagattctgcggcgaatacgccaggtgtgactggctggaagtggcgtggctgctcttcagtaggttacctgcaacatc

SEQ ID NO: 249061 - DNA, 100 bp, Homo sapiens
aacttaaagaaatatttaacaaagctttggttgatccagtactatactggcaattgctggagaagattttgcaattgttgcttctgatactcgattgagt

SEQ ID NO: 249062 - DNA, 100 bp, Homo sapiens
ttccacatgatcattgtaataagatccttacaataaatgaggatggatcacttggtttgaaaacccctaaatctcacgtttgtgagcactgcaatgctgc

SEQ ID NO: 249063 - DNA, 75 bp, Homo sapiens
tccttgcaaagggcacgtatagcattggtaaagaacgatcgtccagtggagatggagcagcatattgtatgggac

SEQ ID NO: 249064 - DNA, 98 bp, Homo sapiens
gaagtatgatcccactttcaaaggacccatttacaataggatgttgcttcagagtgtgaagtcaaatgcatgccaacattccagttttttaagaaggg

SEQ ID NO: 249065 - DNA, 105 bp, Homo sapiens
caaaattgtactatctctattcaggattatgaagtttttcgatgcgaagaagacgtgaacgatcaagagagagggaccatagtagatcacgagaaaagagtcgac

SEQ ID NO: 249066 - DNA, 53 bp, Homo sapiens
cagggagaaagcctggatgctcaaggcctcccagacctgtaaccagcatgaac

SEQ ID NO: 249067 - DNA, 82 bp, Homo sapiens
ccaaactgtcacagaaagagctgttaacacttcctagataacgggttgaaatcacaaagattagacacctttttagataggt

SEQ ID NO: 249068 - DNA, 76 bp, Homo sapiens
tttcttcaatgataagagctgtcagttttctgtggatgaaggcctggagctgctgaagactgctattgggaaagct

SEQ ID NO: 249069 - DNA, 75 bp, Homo sapiens
aatgctgagattttggtcatcctccaggatgtgtttcacatggtagttgaagtaccacgctggtctaatgcaaaa

SEQ ID NO: 249070 - DNA, 75 bp, Homo sapiens
atgaccttgaactttccagccttctgaactgatttttagactctgaggagcagttggagctaatccacattatgg

SEQ ID NO: 249071 - DNA, 90 bp, Homo sapiens
ttgaagatgtccttaccagctttgacaatacaggaaatgtttggttacacatcattttggaatgactgtatatcatctggattacgtggc

SEQ ID NO: 249072 - DNA, 74 bp, Homo sapiens
tcagtgttgacctatgcctctccgccactcatcaccaatgtcacgtggatcaatcttcctgtcctacaactgac

SEQ ID NO: 249073 - DNA, 82 bp, Homo sapiens
aaagaaattaatgacaataatggatagtatgaatgatcaaggtgtttggagaagagggattgaccctgaatcttgaagacgt

SEQ ID NO: 249074 - DNA, 88 bp, Homo sapiens
caatgcttatggatgctggacaggattgtatggtctttgaggatgtggccatatatttctcccaagaggaatgggggatccttaatga

SEQ ID NO: 249075 - DNA, 82 bp, Homo sapiens
gaaactaggtcgatggtcggcggcgcccggatgggcagctgagtgtcaacagcatctccaccctggagcctgtgagccggtg

SEQ ID NO: 249076 - DNA, 97 bp, Homo sapiens
atgaacccttccctatgtccaaaaacgtttttcctgataactggaaagttcctcaagatggagactttgactttaggaggctgcggaggaggaggag

SEQ ID NO: 249077 - DNA, 82 bp, Homo sapiens
actaaacatcgtgggggatctcttacggaaagtagggcagcccctgtcaaagggaacaggaagcagtccacggagggtgacg

SEQ ID NO: 249078 - DNA, 100 bp, Homo sapiens
ctggacaccactgacatggagagggatcagtgtccttcagtgatgtggctgtgggcttcacccaggaggagtggcagcatctggactctgctcagaggac

SEQ ID NO: 249079 - DNA, 75 bp, Homo sapiens
ccttctgtggattggggaaaaatccagagaccccctgaagattcggtcagccaccatccgcctatctctgcgtgt

SEQ ID NO: 249080 - DNA, 82 bp, Homo sapiens
ctcatcgaggcccaaaccgccaaggctctcctagcaggcatgcggaaccgtgagaacagctcgccctgccaaggcaatggtg

SEQ ID NO: 249081 - DNA, 100 bp, Homo sapiens
gcagctggagctgcagaagctggtcctctggcttctgtccctgctcagtcggccaagaagccctgcccagaaacctctgtagaggagcaggatgcaaccg

SEQ ID NO: 249082 - DNA, 82 bp, Homo sapiens
ctgcggccaattcggtggaacgaggacgcggactgcgaaggcagggaacggcaggagcagctgatgggatatcggaagagag

SEQ ID NO: 249083 - DNA, 75 bp, Homo sapiens
cctgaatctataatgctggagatgaaagattactctcgtggctttggtggccggtacggggtggagaaggataaa

SEQ ID NO: 249084 - DNA, 100 bp, Homo sapiens
tatggcctcaatatgtgccgccagtgtttccgtcagtacgcgaaggatatcggtttcattaaggccatccggctgtccttagagcaagccctgcctcctg

SEQ ID NO: 249085 - DNA, 75 bp, Homo sapiens
ccaagctccaagtcaatatagccaacagagcagcagctacgggcagcagacctatggaccagctctcattgaaca

SEQ ID NO: 249086 - DNA, 83 bp, Homo sapiens
ggcgaagatctgttttcaccaccatttttccggtagaagaagtatgtcttcctggaccccctggctggtgctgtaacaaagac

SEQ ID NO: 249087 - DNA, 99 bp, Homo sapiens
ggaggaagtgggggttatggtgggaggagccgatactgagcttcttcctatttgccatggtcaagtcctaattcgaagcagagtcctcagggaaaatgg

SEQ ID NO: 249088 - DNA, 100 bp, Homo sapiens
ctttactctgacagtccttagtaaccacgcgaatgagaaagtggagatgctactaggagctgagacgcactggagaatgctggaggagaccttaaggatg

SEQ ID NO: 249089 - DNA, 82 bp, Homo sapiens
ccagctggtggctggagcgaccccttgttctttggtggcgctgtaagcaagctgtgtgggaagtgcagccccactgacgtgg

SEQ ID NO: 249090 - DNA, 100 bp, Homo sapiens
tctcaaaacttaaattcaagaaggagccctgtcccagatctgagtgggacatacttttgaaggatgtgcaatgttcaatcataagtgtgacaaaaactga

SEQ ID NO: 249091 - DNA, 90 bp, Homo sapiens
cggccacccccataaggcataggccaagaccatacccgccgaatgtagggaaacagtactgggagtaccagttccagcaccagcccagtc

SEQ ID NO: 249092 - DNA, 74 bp, Homo sapiens
tccaaccatgggaggccgcgtctttctcggaagaaggaccatggaaatctcagttatcttcaacaaaatctaaa

SEQ ID NO: 249093 - DNA, 74 bp, Homo sapiens
cagctggtggctggagcgaccccttgttctttggtggcgctgaacccttaggagaaatcttgagagtggacagc

SEQ ID NO: 249094 - DNA, 82 bp, Homo sapiens
aataaagcagagctctgtagaactctgtggtgtaaagattgtggtagtagatgaagaactgtggctgcaccatctgtcttca

SEQ ID NO: 249095 - DNA, 100 bp, Homo sapiens
cgaggtcaagctgctgctgctcggactcgctgattcttgagaagagtcaaaactggagctctcaaaaaatggaccatattctgatttgctgtgtttgtct

SEQ ID NO: 249096 - DNA, 82 bp, Homo sapiens
gcgctactctctctttctggcctggaggctatccagccttggacttaaagtatgatgttgaatatccttgatgaacattgat

SEQ ID NO: 249097 - DNA, 75 bp, Homo sapiens
aagaaagtttatgcaaacctttgttctggctcctgaagaaaatggcattcctatgaagaaagcacgaaatgatga

SEQ ID NO: 249098 - DNA, 83 bp, Homo sapiens
ctcagttggaagcagccgatccagcctgcggagcctgtggggcagcttttctgggagaagaggctacaaggacttagtgcatc

SEQ ID NO: 249099 - DNA, 51 bp, Homo sapiens
caccattgttcagctgggtggccaaggacttccaatagtagtcagacatta

SEQ ID NO: 249100 - DNA, 80 bp, Homo sapiens
ctctatacagggacgtgatgctggagaattataggaacctggtctccctgggccaagtcctgtatctgccatgtctgtgg

SEQ ID NO: 249101 - DNA, 101 bp, Homo sapiens
gctgccaacgccccggtggagaagctgagcaataccaagaaggagggtgacctgatagctgctcaggctcggctgaaggacctggaggctctgctgaactc

SEQ ID NO: 249102 - DNA, 83 bp, Homo sapiens
ccaagcgccgcggttaaccacgtctcgtccacgacctccctagggggatatgagactttctactcggaatatcctgagtgttg

SEQ ID NO: 249103 - DNA, 100 bp, Homo sapiens
tagaggaggctggagattccacccaaatcctcttctccaagaagcgtccgtctccaagagagtatgaagagagtgcgtctgtagggcagggaagatggcg

SEQ ID NO: 249104 - DNA, 96 bp, Homo sapiens
gagtggatttgattttaggagacagccattcggagctacatccagtgaataaggttggagtccccaacccggtctctagtgatggaggccccaaaa

SEQ ID NO: 249105 - DNA, 100 bp, Homo sapiens
ctcaccagacagatcgctgtcaaaaccctagagttcaaggaggccttctccctctttgacaaggatggagatggcactatcaccaccaaggagttgggga

SEQ ID NO: 249106 - DNA, 75 bp, Homo sapiens
tgtcaagtccgacgtctggagcctgggcatcaccatgatacaaactggactctcaggacaaaacgacaccagcca

SEQ ID NO: 249107 - DNA, 98 bp, Homo sapiens
tccagccaaaaatgcacaattctatctcttgggcaatcttcacggggctggctgctctgtgtctcttccaaggaacaatggtgcatactttggcatgg

SEQ ID NO: 249108 - DNA, 87 bp, Homo sapiens
gcctaccaccctgaaggaatgcatccaggagcccagttctgtttcacagacaaggattgctgcttaatgatgctgaaaataagtata

SEQ ID NO: 249109 - DNA, 80 bp, Homo sapiens
gcaactatttagctttagttggtggtggaaaaaagccgaaataccctcccaacaaagatcgagggcacccagaaactgct

SEQ ID NO: 249110 - DNA, 98 bp, Homo sapiens
ctttgtattattcaccttgcctgcttcccagcacttttatcatggacacacctctggagctgaccttcactcctgaagccagcgagaccacgaaccca

SEQ ID NO: 249111 - DNA, 83 bp, Homo sapiens
ccatcaggctcaacgaggaactcaaagtggatgaggaaaatgtgaagttcatttccaatccgccctccatggtggcagcgggg

SEQ ID NO: 249112 - DNA, 73 bp, Homo sapiens
attggtctatgaaacatcagttcttgatcctgatgaggttcggggtgagggcactggcgtgctgggctcatta

SEQ ID NO: 249113 - DNA, 50 bp, Homo sapiens
ggtccccgcgttcacagccccagcgcagagtttatgtggccgaggcagac

SEQ ID NO: 249114 - DNA, 98 bp, Homo sapiens
tgactactgaagaaatgaaacaagaagaaaatttgagtgtaccgtttattcccagttctcaatcttccttcctccttacaagatacaagcaaccttca

SEQ ID NO: 249115 - DNA, 83 bp, Homo sapiens
gtgaaatcagaggagatgtaactatcggaaaagaaagctgcattggaaaaggagcgagaagaacggatagctgaagctgaaat

SEQ ID NO: 249116 - DNA, 95 bp, Homo sapiens
aaatttggagtgtgcgtgcgcgccgagcgatgctcagccagcattgggcagcccccgcttcctgctcccctacccccttcacatggcagtagttc

SEQ ID NO: 249117 - DNA, 90 bp, Homo sapiens
agctgccaaagccttagacaatgagattacgtactataggtgaacttttagctcctgcagctccttttgacaagaaatgtggtcgtgaaa

SEQ ID NO: 249118 - DNA, 87 bp, Homo sapiens
gccgcccgggaactgctgacgcttgatgagaaggacccacggcgtctgttcgaaggtcctcagccagcagagccacgttccttatga

SEQ ID NO: 249119 - DNA, 110 bp, Homo sapiens
cgagagcctaactttgcaaccattggtctgcaggacatcactttagatgatggcagaaaccactaatactagcctcttgcaggtgcaactggaatgcagtttacataata

SEQ ID NO: 249120 - DNA, 100 bp, Homo sapiens
aaacttggacagctctctatggtcaatgtgacggtggactacattagaccagccagcccagccacagagacagtgcctgccttttcagagcgtacctgtg

SEQ ID NO: 249121 - DNA, 96 bp, Homo sapiens
cctactgcacagcagaagctctgaatcgtgttcctgaatgaaagaagtcaggaagggaaaaggccgaggcatcagcgtgtgaagaccgcaaagacg

SEQ ID NO: 249122 - DNA, 100 bp, Homo sapiens
caccaggccggcaggctgagaaaagcgagaccgcgtgcgaggaccgacggttgatgatgaagcgccggccgtgtaaatgaagatcgggtgaggagcagga

SEQ ID NO: 249123 - DNA, 80 bp, Homo sapiens
gctggacgtgcacgcagcccggcgggaggataaagaccaccacggccaccagcccctcgggttccaagatgcagctactg

SEQ ID NO: 249124 - DNA, 118 bp, Homo sapiens
tttttcgacgcctccgccgccgcctgaggaggcgagctagccgggagttacaccgccaccgccagcatggcggacaccgacctgttcatggaatgtgaggaggaggagttggagccat

SEQ ID NO: 249125 - DNA, 50 bp, Homo sapiens
ctgactggcacaggtgttgggtttcagaaaatgatcagagctttgaagtg

SEQ ID NO: 249126 - DNA, 100 bp, Homo sapiens
agatttggccacctccagacgctaccacactctgggacagtgggagatttggaacagctttgagaagagcaaggaagcagtcaattatagatttcttcaa

SEQ ID NO: 249127 - DNA, 100 bp, Homo sapiens
ccgacatcatcagccgctgccaggtattgttgcagcatctggcagtgagactgaggatgaggacagcatggacattcccttggacctttcttcatccgct

SEQ ID NO: 249128 - DNA, 50 bp, Homo sapiens
cagctcatcaccaagtgcaatgatatcaacatggcaggagagcccaaacc

SEQ ID NO: 249129 - DNA, 108 bp, Homo sapiens
gaacccgcaccaagctctgctccacactgccaaccggccagaggacgagtgtgtggagaaaccctacaaatgtgagttttgtggaaggagttacaagcagagaagttc

SEQ ID NO: 249130 - DNA, 98 bp, Homo sapiens
ccttatctatgtggtcattgatctccctatcaatgtatttaaggattgttaaaatgagtcttcggaagcaaacccctagtgacttcttaaagcaaatc

SEQ ID NO: 249131 - DNA, 75 bp, Homo sapiens
agctgccaagttgaaaatggacgagtaatcgcctgctttgattcattgaaaaacgctgcgatgactggggactag

SEQ ID NO: 249132 - DNA, 96 bp, Homo sapiens
ccattctcaggaagagcttgaaaaatggtggatgcttccaaaagcatcgaagctgtccatgaggacatccgcgtgctctctgaggacgccatccgc

SEQ ID NO: 249133 - DNA, 85 bp, Homo sapiens
tttgtctccttcgacttggagtctttgtccaggacggttaccactacaacgacctggtgtctccacagtacctgaacctcatcgc

SEQ ID NO: 249134 - DNA, 82 bp, Homo sapiens
cggctgaaccctccttctcaatcttggaacagcacccccttctttaagagtcaacggttgcaggaaagtttgaagaaagtga

SEQ ID NO: 249135 - DNA, 52 bp, Homo sapiens
tggagagaggccgcgtcctgggcagaggttcatcatgaatgagaaatgggac

SEQ ID NO: 249136 - DNA, 100 bp, Homo sapiens
aaaactgggttcagaaccagtggtaattaccatcaatactatggaatgcattttgaaacttaaggatgggatacagctcctcagtgggtagtgcacttcc

SEQ ID NO: 249137 - DNA, 75 bp, Homo sapiens
tatatcacaagatgaacaatgagaagcaggcagaagattgcatcacacggaacggaaaacagttcttccttcaaa

SEQ ID NO: 249138 - DNA, 50 bp, Homo sapiens
agttggatggcggtgactgcgtggtaaaaatgttgtacatcagctctcag

SEQ ID NO: 249139 - DNA, 78 bp, Homo sapiens
ccggcctctcggcctctgccggagaaacagcaggagcattggtttgaaaaggccctacgagacaagaagggcttcatc

SEQ ID NO: 249140 - DNA, 100 bp, Homo sapiens
ggctactgccgcttcagttctcccggtgtggccacgagtcggaaatgagccgtcagactgctacagcattacctaccggtacctcgaagtgtccaccatc

SEQ ID NO: 249141 - DNA, 100 bp, Homo sapiens
gcctgtggaagaagcgccgcgcacggacttcggcagagtggccttcaagtcacaggacgcagcgattccctgccctcttcggtgttattacacaggcagg

SEQ ID NO: 249142 - DNA, 50 bp, Homo sapiens
atattattacaccaaggaggagcagtggaaatgtttcaacgtgcgcaagc

SEQ ID NO: 249143 - DNA, 82 bp, Homo sapiens
ctcgctttccctctcgcgtctctggctgcagtgttctaagaacggaagcatctgggctggatggaatttagcatcaagcaga

SEQ ID NO: 249144 - DNA, 97 bp, Homo sapiens
cgaggttgaaggctcggcctgctcagtgcacgtggtgattgctacccctgggagaatcctggatcttattaagaaaggagtagcaaaggttgatcat

SEQ ID NO: 249145 - DNA, 51 bp, Homo sapiens
cgctggtgcatctgtttgccggaggagtgtgaacatggctacgcctcttca

SEQ ID NO: 249146 - DNA, 78 bp, Homo sapiens
agtgcgtcaatcagagcgtcctgtgcgatctgggacatgagcgatgatgagaccatctgagatggccccgctgtgggg

SEQ ID NO: 249147 - DNA, 100 bp, Homo sapiens
agaagcaggaatgaaagtggcgctttctccgccccaggaacatgcttgccaactcagccagcgtgaggatcctcatcaagggaggcaaggtggtgaacga

SEQ ID NO: 249148 - DNA, 100 bp, Homo sapiens
tgcaggaggagctggacttccggaagagtgtgttcgaggagattgctcatttagaaagtggatgtgtgggataacatgtccaatgtgtccgaggagagaa

SEQ ID NO: 249149 - DNA, 100 bp, Homo sapiens
cgatgagctcaatcggcactgggatgcagcagcttttttatgagaattacgagcagaacaaaaaggggtacattagagatctccataacagtaaaattca

SEQ ID NO: 249150 - DNA, 76 bp, Homo sapiens
tgaggacctactcacagataggaattgaagcagcctcccgcgacgatgcccctcaacgttagcttcaccaacagga

SEQ ID NO: 249151 - DNA, 98 bp, Homo sapiens
tgacatgtctgatcccttgctcccatccctgcagcatgaacaaggaagcgttgttgacgaccatggacatcatccacgatggatttggattcatgctg

SEQ ID NO: 249152 - DNA, 83 bp, Homo sapiens
ggacgtctggggcaaagggaccacggtcaccgtctcctcagttccagaggctgggaagtccaaggtcaaggcaccagcagatt

SEQ ID NO: 249153 - DNA, 83 bp, Homo sapiens
caccaggcccggctgctggccctcctggtcatcccgcctgccatcacccccgggttgaaggtcgaggagctggaaggcgagcg

SEQ ID NO: 249154 - DNA, 82 bp, Homo sapiens
acggggtgaaactgaccacagtgctcaccacccaccaccactgccctcccaggcccaatacttcaaagcatcctacctctgc

SEQ ID NO: 249155 - DNA, 75 bp, Homo sapiens
gcccgcggagtatacaccatgagcaaagctcaccctcccgagttgaaaaaagtaacacagcatctggtggaatga

SEQ ID NO: 249156 - DNA, 83 bp, Homo sapiens
attaagctcagcactctctaaaggagcaacagtttacagcccttccagatacagctaccaggaatggaagttggatacacttt

SEQ ID NO: 249157 - DNA, 100 bp, Homo sapiens
cgctgccttgtggaggagttgagaaaaaccaaggacacccatcatactgactccaagccccttgctctccagtatccacttctggagtactctcagtcct

SEQ ID NO: 249158 - DNA, 82 bp, Homo sapiens
cttggagaggccgagggtttgatgaaggtggaggcagcgcggctctcagagatcctgaaggagctagacgagtgctacgagc

SEQ ID NO: 249159 - DNA, 82 bp, Homo sapiens
ccgcagccccctcctggcgacccgcaagttcatcatgcctagtggcgtataagaagaccccgccaccggtccctccacgcac

SEQ ID NO: 249160 - DNA, 75 bp, Homo sapiens
aggagttcaaaacccacacataggtcatgacgccagtcagatcacactagccttgggcacagctgcctcctaccc

SEQ ID NO: 249161 - DNA, 51 bp, Homo sapiens
cagagagtccacacaccctttgaaagatatacacctgaagaaattgagaag

SEQ ID NO: 249162 - DNA, 98 bp, Homo sapiens
gtccagtgcgggccatcaagtgctgtttgtatgcacgacttgaagacacgcacttatcattcagtgggttttaatataactgcaggagttgatgaaga

SEQ ID NO: 249163 - DNA, 73 bp, Homo sapiens
acccgctttgtgaaatggccccgctatatcaggtcccagcaccccacttccagaagaccccaactggaatgtc

SEQ ID NO: 249164 - DNA, 100 bp, Homo sapiens
ccgctgtgtggcaccgtctggaggagctctacacgaagaagggaaggagttcgagacacgactgaaggagaagaagccaggagatctgtctgatgagcta

SEQ ID NO: 249165 - DNA, 88 bp, Homo sapiens
cagccccgaagtgcttcagatgtagagaacatccagtcatggataaaaatgagctggttcagaaggccaaactggccgagcaggctga

SEQ ID NO: 249166 - DNA, 101 bp, Homo sapiens
ttctactcaagccttattgaagagataggaactcttggttgggataaatgttttctggcaaaggccttcctgcatttatgaattctctctcaagaagcaag

SEQ ID NO: 249167 - DNA, 101 bp, Homo sapiens
agctgaggtgtatgcaggtcggcgggaatgccaatgcgcgcccagaggcacccacctgtgggagttcatccgggacatcctcatccacccggagctcaacg

SEQ ID NO: 249168 - DNA, 75 bp, Homo sapiens
tgagacccggaggaggttcgaagctgagtatgtgacagggaggtggggaagacagggctccagctaccacaggac

SEQ ID NO: 249169 - DNA, 100 bp, Homo sapiens
gtggggcggcgcctctactacaaactgggccggaagctctgccggagagactatctcagaatggtagctgagtggaggttgtctcgaggtgttgaagaac

SEQ ID NO: 249170 - DNA, 100 bp, Homo sapiens
cgtggtggagcccctctacatcgagggaatccctttgcccacgtccagctgaagccgacagtgaccaacgacaggtctgcccccctcctcagctgatggc

SEQ ID NO: 249171 - DNA, 95 bp, Homo sapiens
ttggagtgtgcgtgcgcgccgagcgacattcacggcatggtgtaactcccacctccggaaggcggggacacagatcgagaacatcgaagaggact

SEQ ID NO: 249172 - DNA, 100 bp, Homo sapiens
gggagagcctggggacgacttttacatcatcacggagagggctttaaggaagcagcggagaagtttcgaatggaatctggaatcgaacctagtgtggatc

SEQ ID NO: 249173 - DNA, 98 bp, Homo sapiens
ccttgagtcagtgcgccgctctccagcccgcttgaacgataacgaaggaggcccaacttcattcaataaggagcctgacggatttatcccagacggta

SEQ ID NO: 249174 - DNA, 75 bp, Homo sapiens
attttgaagatggaatccgtagcgcccagctcattgcctcagctaagaaagaccacagcaagattctttcattcg

SEQ ID NO: 249175 - DNA, 101 bp, Homo sapiens
cttcaatgtcaccaatccagaggagatcctcagaggggagacccctcgggtggaagaagtggggccatacacctacagaggccagtgctgctgaggaagca

SEQ ID NO: 249176 - DNA, 90 bp, Homo sapiens
gcttcaagtggcaggactttaagtggttgaaatacatcgtctacaaggagagagtgatgaagacttccggggcaggcgtcaggaggcacc

SEQ ID NO: 249177 - DNA, 98 bp, Homo sapiens
taaggacaagcaggagctgggagccccagaaatcaactgatgagccttctgagaaggatgctctgcaaccaggccggaacctggtggcagccggctac

SEQ ID NO: 249178 - DNA, 50 bp, Homo sapiens
gccccctgcagcctcctgcccaggctccgtcactgcttcaaccacctgtg

SEQ ID NO: 249179 - DNA, 100 bp, Homo sapiens
ctttcacaataagagcagaggatggaacacttcagtgcattcaaggctaccggctctctgaccagttccacgacatcctcattcgaaagtttgacaggca

SEQ ID NO: 249180 - DNA, 75 bp, Homo sapiens
atcacgaccacatttgtcatgatgacagtgacaagcttcgagagctgtgcccaggagtgaacaaccagccctacc

SEQ ID NO: 249181 - DNA, 83 bp, Homo sapiens
ggctgaggcggccgcggggcccgagcgcaggatgatcggctgaatgtaacagaggaactaacgtccaacgacaagacgaggat

SEQ ID NO: 249182 - DNA, 100 bp, Homo sapiens
aacattaccgtcatattccacccattactaagagtctcactgtgttgcccaggctgaagcagcctcaaactcctgggctcaagccttccttctgcctcag

SEQ ID NO: 249183 - DNA, 75 bp, Homo sapiens
tacctggcattgccttttgttgaggccatttatgccagtgttcttcctggagagttgatgagggggtacatgacc

SEQ ID NO: 249184 - DNA, 90 bp, Homo sapiens
cctgatcaagaaaatcatccatctaaagcaccagtaaaatatggtgaactcattgtcttagggaccccactgaaaatcggactgttcaac

SEQ ID NO: 249185 - DNA, 82 bp, Homo sapiens
ctgcgcggcgcggcggccgggccctcgagacggggacgcacacttccaccctgggcagcgtgtttggggacgcgtactatga

SEQ ID NO: 249186 - DNA, 74 bp, Homo sapiens
cggacggctgcatttacggggtctcccggagggccagagtcgagagaagaagaaggaggttcctgctgtgccag

SEQ ID NO: 249187 - DNA, 80 bp, Homo sapiens
ctgccacaaaaaaatataataaggctgagtgcggagccaagggaacatccttctgtatcagaaattcccatgtttccata

SEQ ID NO: 249188 - DNA, 75 bp, Homo sapiens
gataaagtgagtcagctgtacatgataacaacgaacttgatgcaagtgataggtttgccaaggtcagacctctca

SEQ ID NO: 249189 - DNA, 90 bp, Homo sapiens
aaagaatcagttatgtgacttggaaaccaaattacgtaaagaagaattatccgaggaaatcaaagagcaggaggttgtggacaaagtcat

SEQ ID NO: 249190 - DNA, 76 bp, Homo sapiens
ctgaactccaatgatgaggacatccacacagccaatgagcgccgcctgaaggctccgtatgtggatgtgatctgtt

SEQ ID NO: 249191 - DNA, 90 bp, Homo sapiens
cgggctgaagcgactgagtccgcgatggaggttgcacagagcattgaggatcaccatcaggaagtgattggtttctgcagagagaatggt

SEQ ID NO: 249192 - DNA, 82 bp, Homo sapiens
ccacgttcaagcaaggggcgcctggccagcactcggtgattcatggcaggggacgtggaaggattctgttcctccatccacg

SEQ ID NO: 249193 - DNA, 87 bp, Homo sapiens
ttcctgacgaagcaggagatcctcctctgtttcagatagagagccttgcccgggaggcctccactggagtactaaaagacctaatgc

SEQ ID NO: 249194 - DNA, 100 bp, Homo sapiens
gaactggagccgaggcgcaggtggcgctggacatttatgcagtgtgtgattctttctaaaacaactccctggaagagaggacatttaattcaacaattta

SEQ ID NO: 249195 - DNA, 100 bp, Homo sapiens
gattttttgcctttgttgattaactggacaaattcagacgttccatcctcagagcagcctgaactgttcctaaagaaacttcagcagtgctgtgtcattt

SEQ ID NO: 249196 - DNA, 100 bp, Homo sapiens
gccttgaacaaggattccttaggaccatgggagctggatgtattcttggcctgggtagcctctagaaattcaaacacagtggtgtttgtgaaatagtcct

SEQ ID NO: 249197 - DNA, 88 bp, Homo sapiens
cgactcccatgcatcggctaatagcccggagacaagcggaaatcctcattgacgattcaatttgttgaaggccaatttgtggactcct

SEQ ID NO: 249198 - DNA, 75 bp, Homo sapiens
tttctatgtactgcgcctggatgtggccagggccatcgatgcacccctcggagctaatagcggagatgagaaaca

SEQ ID NO: 249199 - DNA, 147 bp, Homo sapiens
gggttatcaccatgcaagctttgtcggaagaggaccggaggctctggatggaagccatggatggccgggaacctgttatatcttaagtgtggtgctgctaacattgcccaggcagcatctggttcagctttatctatattttttgac

SEQ ID NO: 249200 - DNA, 89 bp, Homo sapiens
gaaagatacagtgccttggtggataactgaagatgattttaaagatgatgcccaagacctgcaaaatttacagagcgccctcggcctgg

SEQ ID NO: 249201 - DNA, 82 bp, Homo sapiens
ggcgccgcccggggcgaggcagggccagcagcaggcgggagctacgtgcgccaggggctgttgtcggccgtctcctccgtcc

SEQ ID NO: 249202 - DNA, 89 bp, Homo sapiens
gcagattatataaccttcctaagcacccgaatgttgagatgccagatcaaccactacccatgggtcagataacgaaggaggcccaactt

SEQ ID NO: 249203 - DNA, 100 bp, Homo sapiens
aggaactctatcccaggaatacagctttgcattagtttacaggctgtgcatttggatcagctgctatttggcaatatgaatcactgaaatccagggtcca

SEQ ID NO: 249204 - DNA, 75 bp, Homo sapiens
acgagccgtagtagctgcagcttcgagtcacagcaggtcacgactgctgaatatgagacgatctgcagcaccaag

SEQ ID NO: 249205 - DNA, 111 bp, Homo sapiens
gaacaagtgaatctcccgtgactgctcagcggaccttgtttcttggtgcatgggctctgaatagtcattttgtaaattaaagcttaccatcggcaggatcccaaattcaga

SEQ ID NO: 249206 - DNA, 124 bp, Homo sapiens
gaggctccgggcgcggggaagtcatgctcgcttcacggaggcaatagctagccggtttttcgttggaatatacgttgcacatttatggcgattctgagtgtgagggcagacttctgccaggctc

SEQ ID NO: 249207 - DNA, 82 bp, Homo sapiens
caacgatgagaagtacaaggctgtgtccatcagcacagagccccccacctacctcaggtacttgtcttgggccttagacaca

SEQ ID NO: 249208 - DNA, 83 bp, Homo sapiens
ctgggaagtagatatagtcatgttcaagaagttcaagaacggcttaacttccttaggtggctatggaggcttttacaacagtg

SEQ ID NO: 249209 - DNA, 82 bp, Homo sapiens
cggaggcgtcgcgggagcctttggggcaccacagagatgcggacatctgaatgggactccgagtgccttacatccctgcagc

SEQ ID NO: 249210 - DNA, 50 bp, Homo sapiens
cacgcaccgcctgctgctgctggactcggtgaaatacctggagtgctcag

SEQ ID NO: 249211 - DNA, 100 bp, Homo sapiens
ggagagcggccgccgccgctgccgcttccaccacaggttggtgttcgaggaagagacattgttgttcttggtgtggagaagaagtcagtggccaaactgc

SEQ ID NO: 249212 - DNA, 134 bp, Homo sapiens
cagctctgagggtggagatgcgggcaacgacacaagaaacacaacttcagacttgcagaaaaccagtgaagggggggacttgatctcatcttcatgccaggccttgggtttgacaaacatggcaaccgactggg

SEQ ID NO: 249213 - DNA, 95 bp, Homo sapiens
tccccagagcagatgaattaaaccaaactggacaaatccttgtggagcaaatgggaaaagtatcaccttttgccatgatagcatttctttcattg

SEQ ID NO: 249214 - DNA, 75 bp, Homo sapiens
gaggagctgagcgagcgcggaagtggaggcaatgttcactgcaatgtgcgaatgccaggccttgcatccagatcc

SEQ ID NO: 249215 - DNA, 101 bp, Homo sapiens
tcgccgcctgctgccgctgttgctgctgctcggcctggcccgcggcgccgcgggagcgccgggccccgacggtactccaaagattcaggtttactcacgtc

SEQ ID NO: 249216 - DNA, 78 bp, Homo sapiens
agctctccagtgggacagcgcatcggtgtgggcagaagaaaaagctagtgatcaacagtggcaatggagctgtggagg

SEQ ID NO: 249217 - DNA, 100 bp, Homo sapiens
ccccaacggctccccgtcgtcctggtgctgcagcggtagctacagcaagctgggtagcaggcagatccaaaggatatcatgaagtttccagggcctttgg

SEQ ID NO: 249218 - DNA, 89 bp, Homo sapiens
aacagaacctgacagaatggatagaaattttaaagactgttgtgaacagggatgtacctaatgaacagattatggcctttgcaagcaaa

SEQ ID NO: 249219 - DNA, 101 bp, Homo sapiens
gtgacggcgccgctaggatgaagctcgtgaggttgacgagattagagagatggttgacaatgatttaggttttcaacaggctccactaatgtgctattcca

SEQ ID NO: 249220 - DNA, 60 bp, Homo sapiens
ctctggcctggcttggggggcccctcggattatacttactcagctgttaagagtaggcaa

SEQ ID NO: 249221 - DNA, 100 bp, Homo sapiens
gccagttgaacataggtggagtaatgggaaatttaggtccaggtgacccaacatgagtgaagtttcctgcaagaaacgggacgactatttggaatggcca

SEQ ID NO: 249222 - DNA, 100 bp, Homo sapiens
tgcggtctgggccttttgggcagcttttccggcctgacaacttcatctttgcccttctgttacagtggatgatctgaagaaccttttcatagaagctgga

SEQ ID NO: 249223 - DNA, 82 bp, Homo sapiens
ctttcggcaagatctgcagccaggagagcagcagtttgcagctgacgatagaagatggtgagatttttgcaagtattaacca

SEQ ID NO: 249224 - DNA, 100 bp, Homo sapiens
gagggggaaaaaggaagtttgtcctgtcctggatcagtttctttgtcatgtagccaagactggagaaacaatatctttccctagatcattctgacctagt

SEQ ID NO: 249225 - DNA, 75 bp, Homo sapiens
tgaagaagctcctgttttcttcggagaagtcttcttggcgggattgttcaggggcggccacactggcggaagagg

SEQ ID NO: 249226 - DNA, 98 bp, Homo sapiens
tcctcgccagcagccgtccggagccagccaacgagcgttccctgacatcgtggagttctgcgaggccatggccaacgccgggaagaccgtaattgtgg

SEQ ID NO: 249227 - DNA, 90 bp, Homo sapiens
gtagaattccttgtagataagcaactggattttttaactgaagatagtgcctttcagccctaccagtttgcctgagaatacagatcaacc

SEQ ID NO: 249228 - DNA, 50 bp, Homo sapiens
gcctacccgggatacggaggagggcagcagccgctcttctaaaacattca

SEQ ID NO: 249229 - DNA, 49 bp, Homo sapiens
taaggattgtcctctttctacaaaagttgcttggaaaagatgctaatta

SEQ ID NO: 249230 - DNA, 109 bp, Homo sapiens
atcggcaagggcaacttcgcggtggtcaagcgggccacgcacctcgtcaccaaggccaagctccgccagcggtttgagctggagatcgagcggatgaagcagatgcacc

SEQ ID NO: 249231 - DNA, 100 bp, Homo sapiens
agaacctggcttttagctgaactaaggagaaagtcctacaacagtttggcgtgcaacatggggcttgagaaaggagagaagtggagatcctgatgtttct

SEQ ID NO: 249232 - DNA, 100 bp, Homo sapiens
aacaagagatgcaagagtgtactgaaagggggctgtatacagctttgatccagtagggtcttaccagagagactccttcaaggctggaggctcagcaagt

SEQ ID NO: 249233 - DNA, 100 bp, Homo sapiens
aaccaactgctcagtattctgatatggatgtaatgaggcccttgataaatgagcagaattttgatgggacatcagatgaagaacatgagcaagagcttct

SEQ ID NO: 249234 - DNA, 75 bp, Homo sapiens
tatatatttccccattcactggtggttccttaaaaacagttattgctcaagatgaaaacctcccagaagatgttg

SEQ ID NO: 249235 - DNA, 90 bp, Homo sapiens
ctcacccagcaaaggctgccagcctcagctatcgccgctgactgtgcccctgtggaaggaggtgcacattcaggttcccgagcacaaaca

SEQ ID NO: 249236 - DNA, 75 bp, Homo sapiens
ggctactatttcaccaatctggttttgatgatgatggttcagaatttcatgaacatatatttctggagaaacacc

SEQ ID NO: 249237 - DNA, 75 bp, Homo sapiens
gagaggggaagtgatttgcctcagcttgtactgtattcctgcaacacatggtaaacccaccagttattcaataag

SEQ ID NO: 249238 - DNA, 75 bp, Homo sapiens
cctggccccagtgctgcgtccttatcagccgagccgatggagtcatcagaacccactgtgaggaagtgacttctc

SEQ ID NO: 249239 - DNA, 82 bp, Homo sapiens
cgtcgaggagccggggcagggcacgatggcggactgggctcggggtttggtgcacctcgatttggaggaagtagggcagggc

SEQ ID NO: 249240 - DNA, 50 bp, Homo sapiens
acctggggttttttgggatctacaagcttgcagttccccacaatgatgaa

SEQ ID NO: 249241 - DNA, 75 bp, Homo sapiens
tcttgaagacaaaagacgcattgcaaacttaattaaagaactggccagatacaaactggactctcaggacaaaac

SEQ ID NO: 249242 - DNA, 73 bp, Homo sapiens
aggatcggggtatactggatacactcaaggaattagaaggtgacgaggagggagaagacgaggatgatgcgga

SEQ ID NO: 249243 - DNA, 100 bp, Homo sapiens
tcactcgccttctgatggtagatctgggtcaaaatgcagatcttcgtgaaaacccttaccggcaagaccatcacccttgaggtggagcccagtgacacca

SEQ ID NO: 249244 - DNA, 75 bp, Homo sapiens
cgagtcgcgcggaggcggaggcttggggtcctcagaatggttggaatgaccctccagctttgaacagagtaccca

SEQ ID NO: 249245 - DNA, 75 bp, Homo sapiens
atgagacagcagccaaacccccagtgacatgaaaaaggttggtgtcaccgtggttgggccacagaagaagatcat

SEQ ID NO: 249246 - DNA, 100 bp, Homo sapiens
atttacctgaatcacatcgagccactgaaaattcaggactgcacatgtgaggagttctgccccgagtgctcggtggagttcaccctcgatgtgcggtgca

SEQ ID NO: 249247 - DNA, 100 bp, Homo sapiens
gatcttctgccgcaccaggctcatcctgtccatcgtgtgcctgatgatcacgcagctggctggcttcagtggaccagacatggatttgattgacatactt

SEQ ID NO: 249248 - DNA, 100 bp, Homo sapiens
tgatagctgcagagaagaaatatttttctttaaagcctgaagaaaagggtgaagatcctcatgtatgaaaatgaagtcccaggcaaccatgatttgctgc

SEQ ID NO: 249249 - DNA, 50 bp, Homo sapiens
tcaagaatgaagccgtggaccctcacggttcaagcgattctcctgcctca

SEQ ID NO: 249250 - DNA, 100 bp, Homo sapiens
ttcgggaactgactgctgtagttcagaagaggtttggctttccagagggcagtgtagaggttgaattgaccaaagcaatggtgatggagaagcctagtcc

SEQ ID NO: 249251 - DNA, 125 bp, Homo sapiens
acaccatggacaagttttggtggcacgcagcctggggactctgcctcgtgccgctgagcctggcgcagatcggctctatcaaagaaagcaagagatggaaaattgttgcctgaagaataccaagg

SEQ ID NO: 249252 - DNA, 80 bp, Homo sapiens
gaaggataagtcgaaggggaaggcgcctgaagaggacgaaggtgccatgcctctgcaactcctcctgttgctgatcctac

SEQ ID NO: 249253 - DNA, 83 bp, Homo sapiens
ggtgtctcgtgtgtgaacatcacagagttttgcggcctccaggtggtggatccaatttttcattaggttttgatgaaccaaca

SEQ ID NO: 249254 - DNA, 75 bp, Homo sapiens
caaatcattcagtgaatcccaactgttatgccaaagggtgttcatttagaagaaagcaacactaatgattcaaac

SEQ ID NO: 249255 - DNA, 89 bp, Homo sapiens
atcctcaatttaagcctgatctaacccctagaaacagattttaccaaatgttgcaagaactctggagttcttatggtagtaaaatgccg

SEQ ID NO: 249256 - DNA, 130 bp, Homo sapiens
gacaggacgaagccggagtgtaggcggcagaggattcgctcccagagcagctgcggccagatggcagttaaacagggaaaccaactgcagatgcaagtccacgaagggcaccatgtcgttgatgaagccc

SEQ ID NO: 249257 - DNA, 83 bp, Homo sapiens
ggggagcagtatgccggaagctggttttcaggccacaaatgctttcacaggtgaaaggtgtagcagtcactcggcctacaccc

SEQ ID NO: 249258 - DNA, 99 bp, Homo sapiens
gccgctgccctgcgcttctcccagctgcaggctaaagatgtgattaaagagattgaagactttgacagcttggaggctctgcgtctggaaggcaacaca

SEQ ID NO: 249259 - DNA, 90 bp, Homo sapiens
tgacagcacaggtcacagtaaggccaaaaatgtgcatactcacagagttagagagagggatggtggtgctgtcctggagccgagagctgc

SEQ ID NO: 249260 - DNA, 96 bp, Homo sapiens
ccacagcattcctgaaatacatccaggaaagacatggagattctcttaaaaaggagcatttctggagtattgaccaaacggaatttcgaatcccac

SEQ ID NO: 249261 - DNA, 100 bp, Homo sapiens
cagcgccgcgcccggggccgtgcgctctcgggccactcggccgcagtatgaagtgtaacagaacagactttaccacctgaaactgctgcttcaagttcag

SEQ ID NO: 249262 - DNA, 88 bp, Homo sapiens
ccttgagtcagtgcgccgctctccagcccgcttgaacgtgtactaatggtcacttgatgtgcgctggctgttttatccacctactagc

SEQ ID NO: 249263 - DNA, 100 bp, Homo sapiens
ccaaaaacgtcaacaacagttttacggtgtcagctgtgatgcatgtttaaaaggaaattttcgaggtcgcagatataagtgtttaatttgctacgattac

SEQ ID NO: 249264 - DNA, 100 bp, Homo sapiens
gatgctcatccataaaactgaagatgtgaatactctgattgtgcttcaagaagaccatagggaagaacgcattttcatcttgctgcaaaagttgcaatag

SEQ ID NO: 249265 - DNA, 100 bp, Homo sapiens
cctgagcggctggagagcctgttggagaaacacaaagaggtacatcaagagagtgtacacatgattgaagtcacaagtaatttgattaatgaaactctag

SEQ ID NO: 249266 - DNA, 82 bp, Homo sapiens
cgaagagagctctgttgttgcaatttgccaacattacaacaaaggagatggaccccacggctcttgtgcctttcaaaagcag

SEQ ID NO: 249267 - DNA, 90 bp, Homo sapiens
ctgacatggaggatgatttcatgtgcgatgatgaggaggactacgacctggaagatgagaatgtgcctactgctcctgatcctccaagtc

SEQ ID NO: 249268 - DNA, 82 bp, Homo sapiens
gcgtattctggtaatttcgaggagggctggtgaattaccatatctccgtcaagtgcagtaaccagttcaagttggaagtgtg

SEQ ID NO: 249269 - DNA, 98 bp, Homo sapiens
gccagtcaagcacacttgcacctaaagcatctgaagacttacagtgagaaactggacaaagagcaagcagccctcgagaagatagaatccaaagctga

SEQ ID NO: 249270 - DNA, 100 bp, Homo sapiens
accggctgccccagatcgcgcgcctggacaacgagactctgcgcagctacttttcccaatatggagaagtcgtagattgtgttatcatgaaagataaaac

SEQ ID NO: 249271 - DNA, 100 bp, Homo sapiens
aacagatggagttcctgctttaatggagcgtagagtctagaggaacagatgatgtcagttcatacagactgtattgtgtcagtgcagattttaagtacat

SEQ ID NO: 249272 - DNA, 82 bp, Homo sapiens
atgtggggagtggcagagagtatgcattaaaggtgaccctggcaaagatgagagtgcacatttcgtcctgcctgaaggtcca

SEQ ID NO: 249273 - DNA, 75 bp, Homo sapiens
aaaggtctacaaactcgtcatccacaagaagggctttgggggcagtggcacagagtaccaagacattgagactga

SEQ ID NO: 249274 - DNA, 131 bp, Homo sapiens
atcaaagataaaatcttttgtgaaagtgtataactacaatcacctaatgcccacaagccaataatttctgaagatcagacagcagccctgatggcccatctctttgaaatgggattctgtgacaggcagct

SEQ ID NO: 249275 - DNA, 75 bp, Homo sapiens
gctcctacaaggcaggcagtattgggtgcagggactgctgagatgtcctctattcttgaagagcgtattcttgga

SEQ ID NO: 249276 - DNA, 100 bp, Homo sapiens
agaacatctcgctgtcggtgaagaagctcattggcaaagacatagaagaagccattgaagaagaaacatcaggcgacttgcagaaggcctatttaactct

SEQ ID NO: 249277 - DNA, 74 bp, Homo sapiens
tttttaaacttaggtatttaagtactgaaaggtagatgatcatcctgaagtgctggatgtggcagcagtggaag

SEQ ID NO: 249278 - DNA, 100 bp, Homo sapiens
gcgtgggcaagaccagcctgatggagcgcttcaccgacgacaccttctgcgaggcctgcaagtccaccgtgggccgccagatcccacccttggaccccca

SEQ ID NO: 249279 - DNA, 82 bp, Homo sapiens
caagttggttggagatgtggattttgaaggattatggccactgcggtctgaccctaatcgtgagactgatgacactttggtg

SEQ ID NO: 249280 - DNA, 100 bp, Homo sapiens
atcagatgttccacgtaataatgctgtaatccacctaactcccagcctgcttcataccagagacgacttttagttactagatctggcaggaaaattaaag

SEQ ID NO: 249281 - DNA, 88 bp, Homo sapiens
tgaaaatggagatattgggaaagaaagatatagagacaacgactatgtccaattttcatgctcagatcattgtaatggcctgccgaga

SEQ ID NO: 249282 - DNA, 98 bp, Homo sapiens
cgggtggcccaacgatgtggatgcagcctcctgacaaggtgatccgggcgggccccgcaggaattttatcccctcaccggcctcacactagtatcgca

SEQ ID NO: 249283 - DNA, 100 bp, Homo sapiens
ggaaaccaagatagatgtgtcctatgaataccgcttcctggagttcacgactctgagtgctggttatgatgtgattgctcaagcccaatctgggactggg

SEQ ID NO: 249284 - DNA, 85 bp, Homo sapiens
atggcggatttagataaactcaacatcgacagcattatccaacggctgctggaagtgtaagaagaagcttgggaagctgccacct

SEQ ID NO: 249285 - DNA, 83 bp, Homo sapiens
ctacacttatggctgggattttgcgcttagtagttcaatggcccccaggcagactacaggaactgtggctgcaccatctgtct

SEQ ID NO: 249286 - DNA, 105 bp, Homo sapiens
ttggttccccctccctcagcttccgccccaaaaggtgtcgtgaaaactacccctaaaagccaaaatgggaaaggaaaagactcatatcaacattgtcgtcattgg

SEQ ID NO: 249287 - DNA, 100 bp, Homo sapiens
gaggagagtggactacacctgccccagggccagttctcttgggtccctctgggtttatgggaggttggatggcaagcatgtggtgtttggcaaagtgaaa

SEQ ID NO: 249288 - DNA, 103 bp, Homo sapiens
ctgaagaggagcgccagatggtggaggaatacacttatttatgaaacaatgcagatcttcgtgaagactctgactggtaagaccatcaccctcgaggttgagc

SEQ ID NO: 249289 - DNA, 76 bp, Homo sapiens
ctggtcttgctcggccgatgaagtgcagaggtttttttctgcacatgcttgactatctttggcagaggaaccttcg

SEQ ID NO: 249290 - DNA, 98 bp, Homo sapiens
gacatcctggaagctgggaaatgcacccacatgcaggatctccaggaggtgacccaggaccttcattatgaaaacttccgttctgagagactcaagag

SEQ ID NO: 249291 - DNA, 98 bp, Homo sapiens
tcgtggctgcgtcaccgccgcccccccagacaagatggacaccgcggaggaagacacgaatgcagagtttgagtccagatcccaaagcccagtacaca

SEQ ID NO: 249292 - DNA, 51 bp, Homo sapiens
gtacaagctttcaaagtcaattgcacactggtttttggctgttgtttgttt

SEQ ID NO: 249293 - DNA, 76 bp, Homo sapiens
aacggagtgtgcgacggattgggagaaaaacacaccttgactttagtcagatacatcactgtctgttaaaggaaac

SEQ ID NO: 249294 - DNA, 75 bp, Homo sapiens
ccacagctgctgaagaaaagactagcccgagtcagtacaacacctcaggtattgagccccactattacatctccc

SEQ ID NO: 249295 - DNA, 117 bp, Homo sapiens
ccacccgcccgcccaaggtctctcgcgggcgggagaacggaaaactcccaacttcctggtgctggagaatctggtaaaagcaccattgtgaagcagatgaggatcctgcatgttaat

SEQ ID NO: 249296 - DNA, 75 bp, Homo sapiens
taccaatcgtgaaaactatattcacaggtgataacgtggtgctggaccagacctacctgtggcagggtgttcgag

SEQ ID NO: 249297 - DNA, 100 bp, Homo sapiens
cagaaacacaaagcagcccaaccaaaggatggcccactgcgtgaccttggttcagctgtccatttcctgtgaccatctcattgacaaggacatcggctcc

SEQ ID NO: 249298 - DNA, 98 bp, Homo sapiens
tggatcaaggaaggagagctgtcactttgggagcggttctgtgccaacatcataaaggataagcacattgaagaagtgcggaagaacaaagaatccaa

SEQ ID NO: 249299 - DNA, 75 bp, Homo sapiens
cctgcatggagtcttgtgaaatcgcgtggactgcaacacccagcagcgcgagaattcggtcaacagtggatgaaa

SEQ ID NO: 249300 - DNA, 100 bp, Homo sapiens
aagtttcagagcttcgtggtcacctacgtggccatgctggccaagcagtctaccagggctaggggcaaggtaaagcattgtcgcatcaaccgggacggcc

SEQ ID NO: 249301 - DNA, 75 bp, Homo sapiens
tgtacatggctctccaggtcagagttgctccaagcaagagaattcggtcaacagtggatgaaaaagaacaaaaac

SEQ ID NO: 249302 - DNA, 82 bp, Homo sapiens
tggacgtggatttggggatggctataatgggtatggaggaggacctggagtccaaagcagcatatgtactcttctaccagag

SEQ ID NO: 249303 - DNA, 97 bp, Homo sapiens
aaacatgctagaattacctggaacttcatcatcatctacttcacaggaattgccatttcacgtgtggagtgagagcgaggactgcctgcctttcttg

SEQ ID NO: 249304 - DNA, 100 bp, Homo sapiens
ttgtggcatgtgcccagaatggattggaagtttcactaagtagtttgaacctggctgttcctccaccaagattttgtcttctccccgggtttggtggcct

SEQ ID NO: 249305 - DNA, 75 bp, Homo sapiens
aagcccaggatagaagagtcaataactgaagacttaagttgtggacatcggatacccaaggagacgaagctgaag

SEQ ID NO: 249306 - DNA, 76 bp, Homo sapiens
gtggatttcagcctgcacggatggtcttgaaacacaaatggtttttggtactttagattgattgccgagcggggca

SEQ ID NO: 249307 - DNA, 98 bp, Homo sapiens
ggttgctgtgcccttctttgagccagtgtttggagaaggaggaatatttggtccctggtcagtttctgctttggaggaagcagagatccaggcagagc

SEQ ID NO: 249308 - DNA, 74 bp, Homo sapiens
tgatagatatgatgactaccgagactatgacagtccagaggtagagttggctttgtgggacacagctgggcagg

SEQ ID NO: 249309 - DNA, 95 bp, Homo sapiens
atggggacaaaggcgcaagtcgagaggaaactgttgtgcctcttcatattggcgatcctgttgtatgaggacggggacttggttgccttttccag

SEQ ID NO: 249310 - DNA, 97 bp, Homo sapiens
ctccaaggcaaaagtcaaccaggtggcctcgagcaatctggaggctgttggaatatgaatagcggtaacagctggtggacatttgggagcaataaaa

SEQ ID NO: 249311 - DNA, 80 bp, Homo sapiens
ctcccagctggaagaggcggtggcggcgggtcggggcgagaataccctctaccatctgctttggtcagggtgccgctcga

SEQ ID NO: 249312 - DNA, 101 bp, Homo sapiens
tgcttcctacagagaacaatggagccagaggcaagccaaattagagctgagagttgctgtagcaaaagtggaagagttaactaatgtgactgaagatctgc

SEQ ID NO: 249313 - DNA, 100 bp, Homo sapiens
ccaccctcctccaccgtcgcctcccactgcaaaaaggcctgggctatggaagaaatgaatggcaaagacttggagggagaaaatattgaaattgtttttg

SEQ ID NO: 249314 - DNA, 82 bp, Homo sapiens
atggcatacaattagaagctgagaaaaaagcattctctgaaaaccttgatcctgagagctggagtggaccagagaaattgct

SEQ ID NO: 249315 - DNA, 100 bp, Homo sapiens
tccctttctttgaagccatatgttggtttgtagccaaaaacttgctggaaaccctgaaagccctgaatcgtgtgcacttacttgggcgagtgggtcagga

SEQ ID NO: 249316 - DNA, 100 bp, Homo sapiens
acttatgctttggggaagaatggccagatgggaaaccattggaaaggaaactcatcttggttcagagaaggccagctggttgggggaacagccccagttc

SEQ ID NO: 249317 - DNA, 90 bp, Homo sapiens
gcttaattaactcatgtctctctctcttttctttcagtctgcaactgtgtctgatggcggtttttcgttggaatatacgttgcacattta

SEQ ID NO: 249318 - DNA, 76 bp, Homo sapiens
tgctgtggaacttgcaaatcgaagcctgcagaattttcttcctgccccttgaactctgatgaagaagtgaataaat

SEQ ID NO: 249319 - DNA, 103 bp, Homo sapiens
cctatgatctgcagggagacgcacagccaggacatcctggaacctgggaaagggacctcagcagccatgtcgaagccccatagtgaagccgggactgccttca

SEQ ID NO: 249320 - DNA, 100 bp, Homo sapiens
cagaagctcgccaagcataatatgtatgccaaagcagcagccttctcgacagccttttactgtgaacaggaccgccgggagagcctgcccacctccccac

SEQ ID NO: 249321 - DNA, 83 bp, Homo sapiens
ttgggaatttatggtcgatcgtcttcctactgtcttgttttttccctgcaacaggctgaaggtgatgtggccgccctcaaccg

SEQ ID NO: 249322 - DNA, 100 bp, Homo sapiens
ttcgtcatccaccactacgctggcaaggtggtgatcgtggcagaggtggccctggtggcatgcggggaggaagaggtggcctcatggatcgtggtggtcc

SEQ ID NO: 249323 - DNA, 97 bp, Homo sapiens
ttgattacccgttaagtcccccaaagatgagatttacctgtgagatgtttcatcccaacaatgacccagcagatggctgggatgaacttctatggag

SEQ ID NO: 249324 - DNA, 101 bp, Homo sapiens
tagccattttcagagtcttcaacaaataccctacttcaaaggtcccgcggcagtgctggtggccatggttcccgtagccagaaggagttgcccacagagcc

SEQ ID NO: 249325 - DNA, 75 bp, Homo sapiens
gttaatcaaagtcgtctctccaaagattagagatggacaaccgaattgttatgtactaaagaataaagatttaga

SEQ ID NO: 249326 - DNA, 100 bp, Homo sapiens
gctcaagccgggggctcctctcaaacccaaactcaacccgaagaaagccagggcctatggcagaggtacatgtggggggcagcctggccgtccttggggg

SEQ ID NO: 249327 - DNA, 74 bp, Homo sapiens
tgacagtcacaattttgtaataagaatcatctcccctgccccacaaacatgaaagaaaagacaagagaagcacc

SEQ ID NO: 249328 - DNA, 82 bp, Homo sapiens
cattggcgtggacaccattgacatggtgatggctgctcagcctcgaaggaactgtggctgcaccatctgtcttcatcttccc

SEQ ID NO: 249329 - DNA, 100 bp, Homo sapiens
gggcatctcctacattagcgtctacgaccaccaagaaccagacgtcctgggtcctctccagcatggcagccctctactggagggtgaaaggccaaggaaa

SEQ ID NO: 249330 - DNA, 82 bp, Homo sapiens
gggaatcgcaaggctcttccctgaccattttctactgtccctgcgcgaggaaggatgccaattctgcgcttctcagtaacta

SEQ ID NO: 249331 - DNA, 100 bp, Homo sapiens
cctagaggtcaagatcagctctggctaggatgatgatgctgaagctatccttgctgcagacttcgaaattggtcactttttacgtgagcgtataatccca

SEQ ID NO: 249332 - DNA, 96 bp, Homo sapiens
cgtctcaaaacctggctgctatcagagaagaagggtgtttggggtgtgttttacaaagattgaagaattagggtctgaaggaaaagtagaagaagc

SEQ ID NO: 249333 - DNA, 100 bp, Homo sapiens
atcagctggcctggtttgatactgacctgtaaatcatcctttaggtgcagcggaactgctgcctgacgctctgcaacttcagcatccccgaggagctgga

SEQ ID NO: 249334 - DNA, 74 bp, Homo sapiens
gaaactggccaaggacattcaggtggaacggcacatgtgtgatggggacattgttatcttcaaccggcagccaa

SEQ ID NO: 249335 - DNA, 90 bp, Homo sapiens
cagtggtcgcttcttctccttgtttacaagtccttccactttctctctgaggcagaaagagcaagggtttttctctccattttatggttg

SEQ ID NO: 249336 - DNA, 100 bp, Homo sapiens
actggatcggacatgagaacttcgagttgattaaccacgacgtggtggagcccctctacatcgaggtgagagggtccaagcctggtaagaatgtccagct

SEQ ID NO: 249337 - DNA, 100 bp, Homo sapiens
ttctgcaatcacgtgcgcactgaagtagaacagcaaagagatttaacgtcacagtttttgaagaccaagggtaccgtgagggttttctctggaagcgtgg

SEQ ID NO: 249338 - DNA, 75 bp, Homo sapiens
ggaggagcagttgtctgatgaagagaagggcttcctcagccgccgcctcaagggctccatcaagcgcaccaagag

SEQ ID NO: 249339 - DNA, 100 bp, Homo sapiens
agtggtgaatcccctgtttgagaaaaggcctaagaattttggcattggtttttctatatgagtggagaagacagctgttaccagggaggtcatacaacat

SEQ ID NO: 249340 - DNA, 80 bp, Homo sapiens
gcagaacgtgctgcagcagagcgcggcgcagaagggctaaggaatatgagagtttaatggaaaccaaaaattctggctct

SEQ ID NO: 249341 - DNA, 100 bp, Homo sapiens
ctggcaaatccccttcccgggagcaagtgccttcagctgggagtgtctggagccctggccaccagcggtttcagaatggcttcggttattgcctttcctt

SEQ ID NO: 249342 - DNA, 100 bp, Homo sapiens
acaatttgtcccaaagctcccaaattagaggaaaggtacgtgcagcactacggcctgggcagtgcctgtgacaacgtagagcgcgtgctgaagagtgtgg

SEQ ID NO: 249343 - DNA, 100 bp, Homo sapiens
gagcagctgcggctcggggacccacagacacagccggggtcgggagccgcccggggcagggctcgggagagcgggactcacaccacccggcaagaactgc

SEQ ID NO: 249344 - DNA, 100 bp, Homo sapiens
ccttgcacaggcctggtttaacactcatagggagcttttggagagcaactttactttagtgggtctatgttaacaatgaatgggcaaccagtgttgggga

SEQ ID NO: 249345 - DNA, 95 bp, Homo sapiens
tgcactccagcagaacttcctggccatggcggcccagctgcccatgagcattcggatcaacagccaagttttgtttggctatgccaccacagtca

SEQ ID NO: 249346 - DNA, 100 bp, Homo sapiens
gtcatactgcatcagaaccatgaagaaggagccctggtattccttgaacatgcatacctttcccagcgtgagggacatggaccgtgccgtgcgagggacc

SEQ ID NO: 249347 - DNA, 75 bp, Homo sapiens
acccctgcaggaaaccaagaaatggtttgcatcactggttgctgtttatgttgttggggggttcctataccagcg

SEQ ID NO: 249348 - DNA, 51 bp, Homo sapiens
aagctctaagtacactcgtcttgaatagcaagatgagaagatgaagtgaat

SEQ ID NO: 249349 - DNA, 74 bp, Homo sapiens
gacgatgagacagagttgcgaccgcgcggcagcctgtacttcaataagagatttgaaggcaaaggaaaagagaa

SEQ ID NO: 249350 - DNA, 100 bp, Homo sapiens
ggatcctgagtttccaacagtgaaatacccgaatcccgaagaggggaaaggtgtcttgctggtcctggactcccagaagcgagtcttctcctggggcttt

SEQ ID NO: 249351 - DNA, 101 bp, Homo sapiens
gaaggatataccagtcactatccacaatttagaggagtatctaagaaatgagctgaaagccagtggtggcgaaatcaaaattcataaaatggagcaaaagg

SEQ ID NO: 249352 - DNA, 100 bp, Homo sapiens
atgggaaagagagttgtgagtctctttcctgtttacctccagtgtcccttcttccacatgaaaaggataaggcccctattcagagaaggaaaaagcctgc

SEQ ID NO: 249353 - DNA, 100 bp, Homo sapiens
aagcaatttaaagaaaattttaaaaggaatcttggattataatcatgagcatcaacaacagcaacttgtgattggcggtgaccggatattcagttgcaca

SEQ ID NO: 249354 - DNA, 49 bp, Homo sapiens
ccgtgcctgacctgctgctgccactgttgaggagctcaagcttgggaaa

SEQ ID NO: 249355 - DNA, 75 bp, Homo sapiens
caaacatcaagcagaatgtgatttgcttgaagatatgaggttggtcaaagaaaaagtgatgtatgaaaaagaggc

SEQ ID NO: 249356 - DNA, 82 bp, Homo sapiens
tctttgaaccagtttctcctataaaagaggctccagggacaacattcggaactgtggctgcaccatctgtcttcatcttccc

SEQ ID NO: 249357 - DNA, 75 bp, Homo sapiens
tgccatggtcgtctttgtctgccggtttctgggtgtctctggggagcccctgggccagattttcctctagactcc

SEQ ID NO: 249358 - DNA, 101 bp, Homo sapiens
cgaactagatgagaccaaaatcattctggagctacagggagctggccgactgcacctggcacatggcggagaagctgggctgcttctggcccaatgcagag

SEQ ID NO: 249359 - DNA, 99 bp, Homo sapiens
tcgaacagctgaaggcccaaatcatgctctgcggagaaatgatggagtgcccagtgatggaaactggctcactttttacctcaggaattaagagacatt

SEQ ID NO: 249360 - DNA, 100 bp, Homo sapiens
gtggtcgcgtctcggaaaccggtagcgcttgcagcatgtgttctacgcagaaatagaagagctgaaactggtgtatccttatcacggcgttctacacagc

SEQ ID NO: 249361 - DNA, 51 bp, Homo sapiens
ggagagtaatgatctggctaccactggttgtatcacggactgattcaccga

SEQ ID NO: 249362 - DNA, 73 bp, Homo sapiens
tggacagaaagtcagcctcttgtggagctgactgctgggcaggaacgtctctcaggagaaagagtggaagaga

SEQ ID NO: 249363 - DNA, 74 bp, Homo sapiens
aagataggatcaagatggccatgtggcaggcctaaaacaaccaatgttctaggagctgttaacaagccactttc

SEQ ID NO: 249364 - DNA, 100 bp, Homo sapiens
cccagaaccttcagtgaaagtaaaagaaccttcagtacaagaggctacttctactagggtgtatgtacaaagacttttgaagaggtgtgggagcacacat

SEQ ID NO: 249365 - DNA, 100 bp, Homo sapiens
aaaaacccaccaattctggacacattgggattaaaggtgaatggaagagaatccgaagaagaaaatctcaataaatctgaaataagtcaagtgtttgaga

SEQ ID NO: 249366 - DNA, 82 bp, Homo sapiens
caaaatttgtctgcaaacctggagccagaaacattaccgtcatattccacccattactaagttttcatatgagtccaacaag

SEQ ID NO: 249367 - DNA, 90 bp, Homo sapiens
actaagcggaaaacatcttcagatgtggcactaaggaaaacagatcatctctccctagacaaagccaccatcccgcccgaaatctttcag

SEQ ID NO: 249368 - DNA, 100 bp, Homo sapiens
gtcccctgtggttcactgtgcatcgcccactccagaagtagcatggaaatggagggcatcttcaaccacaaagtgcctgagattgtgagggagacccagg

SEQ ID NO: 249369 - DNA, 101 bp, Homo sapiens
agatccgcggaggccgacaggattcgttggctgccgtccccgctgctgtgcattggagcactgcagcctgtggtgttgaggctcacagcgatgccatccag

SEQ ID NO: 249370 - DNA, 85 bp, Homo sapiens
atattttaaaatgcttaaaacatcttaacccattgcactggttccaattaaagaagggaagacccactacattatctgagacaat

SEQ ID NO: 249371 - DNA, 100 bp, Homo sapiens
ctactctgaagatccctgtggtagagagaaaaatcctggatctgtatgctttgagcaagggcttccgttacaagatgaggtctgtgtatgctcacttccc

SEQ ID NO: 249372 - DNA, 76 bp, Homo sapiens
gcggttctgcgtacccctctccggccgttgctccagggagaactgcaaatatcttcatccacccccacatttaaaa

SEQ ID NO: 249373 - DNA, 100 bp, Homo sapiens
attccttttgggacgccaattaaaccagcctggacaccaagtctgtgtcagaaggccacctcaagaggaacatcgtggtgaagaccgtggagatgcggga

SEQ ID NO: 249374 - DNA, 100 bp, Homo sapiens
agtgtgcagaggccgttgcttttgaccagaatgctttggttaaacgaatcaaagagttcacagccatgaatgaaccacagtgcttctacaacgagtccat

SEQ ID NO: 249375 - DNA, 71 bp, Homo sapiens
gagctcctgggcaggctcggcagggcaggcagctccaggaggaattacctggcaaccagaggtttgacatg

SEQ ID NO: 249376 - DNA, 50 bp, Homo sapiens
cccattgcactggttccaattaaagaaggctgtgcggtcagagaagaaac

SEQ ID NO: 249377 - DNA, 112 bp, Homo sapiens
ctcaaacgttcgaagaatgacagcaagccctactgagcgtgctcccctctgagactggagtgagagggtcttctggaaatgggtcctgatgaatatgaagagatggaagaag

SEQ ID NO: 249378 - DNA, 97 bp, Homo sapiens
aatttcaaagaagagactctttgcaaagttgataacatttcaaaccctgaaggacagtgacttattatcaactttcatcctttgaaacgtgtgctga

SEQ ID NO: 249379 - DNA, 100 bp, Homo sapiens
ggctagagccggagtggggcgagccgcggaacccggccgggagccgcgcgaggcggcctgctggtgggtacccttgatgttgtgttggactccagcgccc

SEQ ID NO: 249380 - DNA, 98 bp, Homo sapiens
aagaagatgaaaatggtaactggagccgtagcgtcggtgctggaagacgaggccacagacacttctgatagtgaaggagactttgtgatcctactcaa

SEQ ID NO: 249381 - DNA, 90 bp, Homo sapiens
gacagcaacagctcggcgggctggaaggttgcccgaagctcagcagagagtcggaggctgctttttaaacctgatgccacagatgaaaac

SEQ ID NO: 249382 - DNA, 145 bp, Homo sapiens
gtctcggtctggtctgaggagacggggacccttctcacaccggccgctgccgccgccgcgctccggaacaggggttgcagatggtgtaggaggctggagagactatggagttgatccatctcaattctcagggactttaatgcgg

SEQ ID NO: 249383 - DNA, 74 bp, Homo sapiens
cacgtgcagacatctacaaccttcgatctcctgacgagccaaagtgggcagtttcagccagaatgtggaactcc

SEQ ID NO: 249384 - DNA, 90 bp, Homo sapiens
tcatcccggagctcgtcaccaacgaccatgagaaggtggagctcacggcactcaggtgacagtttcctgaggagaggggtgtatccaggc

SEQ ID NO: 249385 - DNA, 97 bp, Homo sapiens
gaactgctttcaggaatcccaagacttcattttacagcaaggaagtgcctcaaatgtgcatccctgatggaggagatgtataagaaagctcatgctg

SEQ ID NO: 249386 - DNA, 75 bp, Homo sapiens
atgtcatccctgccctggaactggtggagcccattaagatcttcttggaaacagaattgttctacaaaggtatcc

SEQ ID NO: 249387 - DNA, 83 bp, Homo sapiens
catcaccgacctcatcagtgagctgtccctgctggaggagcgcttccggggactatgcagccatcgtcttctttgctaacaac

SEQ ID NO: 249388 - DNA, 75 bp, Homo sapiens
gtgcggcgggcgcggttgcgcgcggcttggggcaaagggctctgaactcctacttcgagcctccggtggaggaga

SEQ ID NO: 249389 - DNA, 100 bp, Homo sapiens
atcgaaattagccggacccaggatgaagaggttggagatgggaccacatcagtaattattcttgctaatagatcagttaaagcccggaggaagattgata

SEQ ID NO: 249390 - DNA, 50 bp, Homo sapiens
agatgccatgatcatggatggccagagactgctgctactttgaaacgtac

SEQ ID NO: 249391 - DNA, 51 bp, Homo sapiens
gagggccacagccactcagctcctgcagcatccgcacttccactaatagcc

SEQ ID NO: 249392 - DNA, 76 bp, Homo sapiens
ccacagctaagacgccaggacccactggaagcctagaaatgataaactgccagggagaagaatgagaagacaggag

SEQ ID NO: 249393 - DNA, 100 bp, Homo sapiens
cgtctgagcggtatctgcgctcagattatccccttcctgacccaggaggacacagcattgttggttttgccatgtactattttacctatgacccgtggat

SEQ ID NO: 249394 - DNA, 50 bp, Homo sapiens
ctgcagtcgggcatacacatcaacctgaaggctgaaattgacaagttggc

SEQ ID NO: 249395 - DNA, 100 bp, Homo sapiens
ttccttcttggtcatcacaaaatgccttgatgttcctgacccttttgtgcctgaccctactgggtaaatccatttcggatggccactcgtggcatgttcc

SEQ ID NO: 249396 - DNA, 80 bp, Homo sapiens
agagcaagagggagagatgacaaggacccagatgatgtggtaccagttggccaaagaagagcctggtgttggtgcatgtg

SEQ ID NO: 249397 - DNA, 73 bp, Homo sapiens
gatgtaattctggagagagtggcggcttacagggagaacacagttggcctccaccgtttctgccccacagaaa

SEQ ID NO: 249398 - DNA, 48 bp, Homo sapiens
ctggcggcgccttggggacgggcagaaaaggatgcgcctccacttagc

SEQ ID NO: 249399 - DNA, 97 bp, Homo sapiens
agagctgtaccagtacacggcccacgttgccagatgttcctcctgctgatcaagagaagctttttatccagaagttacgtcagtgttgcgtcctctt

SEQ ID NO: 249400 - DNA, 98 bp, Homo sapiens
gccaatcacattttgcacaagggcagtcaccatgaaaggatgtacagttacccagcacgtgtacctcctcctcctcctattgctcgggctgtagtgcc

SEQ ID NO: 249401 - DNA, 92 bp, Homo sapiens
aaagcctctccagtggatgatgaacagctgtcagtctgtctttctgataacaatgaagatggtgccaaaactgctttctcctttggttaaag

SEQ ID NO: 249402 - DNA, 101 bp, Homo sapiens
cggcagcgccccgatggaacctcctggtcctgtgaggaggagacatcacagctttcccagatcgggaggaaaaatatggaatgtgttttaccgctgactga

SEQ ID NO: 249403 - DNA, 99 bp, Homo sapiens
ggtggctgcgggaacccggaggcccaacgtggtgctgctcctcacggacgaccaggacgaagtgctcggcggcatggaatgtctgatcacagatacggg

SEQ ID NO: 249404 - DNA, 82 bp, Homo sapiens
tcttactcgtgttccctgccactgtcttgttccgaggcggccccagagtggagtacgacaaggagttctcccctcgtcagcg

SEQ ID NO: 249405 - DNA, 75 bp, Homo sapiens
aggcccgcccgggagggccggggccgcgctcaggaatggacaatcagaccgttctggctgtccagtcattattgg

SEQ ID NO: 249406 - DNA, 75 bp, Homo sapiens
ccagtttgagccatcggatctaagatccaaaaggagttccatctggaatatgacaaattagaagaacggcctcac

SEQ ID NO: 249407 - DNA, 100 bp, Homo sapiens
cagtgaacagacacgggtgaatgctgctaaaaacaagactggggctgctcccatcattgatgtggtgcgatcgattatggattggatatgtctacttctg

SEQ ID NO: 249408 - DNA, 98 bp, Homo sapiens
ctcgcctcctcgcagcagcgccatgtgaagatagtgatccggggagacaggaacacgggcaagacagcgctgtggcaccgcctgcagggccggccgtt

SEQ ID NO: 249409 - DNA, 87 bp, Homo sapiens
ccgagcggaggcggagtcggcgccgagaacatggctgaccccgcactacatctacccaccagccatcgtgcagcccagcgtggtgat

SEQ ID NO: 249410 - DNA, 100 bp, Homo sapiens
gaaagtatggcagaggaggaagtgttcagtcaagaatgggattctgaccatctcacatgccacagcaatccagcatccagcagatgagaagttgcaagag

SEQ ID NO: 249411 - DNA, 90 bp, Homo sapiens
tttttgtaggtgactgtttagcttggccatttgctgctcctacctcaaatagaaggggccttggacaagttgttactgactatgttcatg

SEQ ID NO: 249412 - DNA, 74 bp, Homo sapiens
tgcagagcatcaaagacgcctgctgcacattccttcgagaacgactgcagatgtatttaattttgaggaaacag

SEQ ID NO: 249413 - DNA, 100 bp, Homo sapiens
gctcccttcgccttcgccctttccacctcgcggcagttcggattggattcagcatcaaaatacatctactcatattgagagctgtcgacagttacgtcaa

SEQ ID NO: 249414 - DNA, 98 bp, Homo sapiens
gctggttgaatacctccctctccactcccatcttcaggaaataaacggtgactggcaaagagctgatgcagtctggaataaaatccaagaagaaaatg

SEQ ID NO: 249415 - DNA, 100 bp, Homo sapiens
caggactcgggtggctctgaggtcgcctggggaccccagaagcctctgacctttttgagcctgggaaatgcttaccttgctctgaagaatatcagtgggg

SEQ ID NO: 249416 - DNA, 109 bp, Homo sapiens
ccgccaccgtcatcaacgggcagtttgtcgaacgatgttggactcatagtcactgccagaaagcctcgctcaaggagcacccccggggcaccctcctgtccgatggcag

SEQ ID NO: 249417 - DNA, 80 bp, Homo sapiens
caaataccagctcgacaaagatggggttgtcctctttaagaaggtcaagagcaatctgaatccaaatgcaaaggagtttg

SEQ ID NO: 249418 - DNA, 100 bp, Homo sapiens
tgaaggaccggatcctggagaacatctcgctgtcggtgaagaagatggatgagatcaaagggaaagaccgtgtgattctggccttggagaaggaacttgg

SEQ ID NO: 249419 - DNA, 127 bp, Homo sapiens
ggacataccactatatcagataagcttgacattacagccaagatggtgctgtcccagagacaacgagatgaactgtggccccaatgtcagtgtatgcttgtctgggcaatgatgcggctgccattcg

SEQ ID NO: 249420 - DNA, 90 bp, Homo sapiens
acatgcatacaaaggacacacagggattttgaaaatgctgcacatcccttaatagtcatctacataggtgaaaggtgtagcagtcactcg

SEQ ID NO: 249421 - DNA, 73 bp, Homo sapiens
aagcctgcaaaaaagaagccagtatccaaacatgaacttgtgtttaacactcgtgaaactgctcaggccatca

SEQ ID NO: 249422 - DNA, 75 bp, Homo sapiens
caacacaaagctgaagtctacacgaagcaggttcggactaaggatcaccgctttgaaagtgtcagtcaccttatc

SEQ ID NO: 249423 - DNA, 117 bp, Homo sapiens
gcgtgggcgacccggtgtgtggcgcgcccagagccccgcgtttcagccctagggaaggtcaaaatgcagatcttcgtgaaaacccttaccggcaagaccatcacccttgaggtggag

SEQ ID NO: 249424 - DNA, 100 bp, Homo sapiens
cttttgtgaagcggcagctgaggagactccggcgctcgccatggccgacgaaaagcccaaggtcaccgacgatgagggcgcacctgctgtcctggagctt

SEQ ID NO: 249425 - DNA, 75 bp, Homo sapiens
cctggaagatgcgcccattggctggtgtcaaggtgattctggataaatactacttcctctgcgggcagcctctcc

SEQ ID NO: 249426 - DNA, 90 bp, Homo sapiens
aaagctgccaagttgaaaatggacgagtaatcgcctgctttgattcattgaaaaaggacagaataacgggctcccagattcacaagcccc

SEQ ID NO: 249427 - DNA, 82 bp, Homo sapiens
tggctggctggatctctggtgagacatttttcttccttctgtcacatcacacccaatggtctcacagatttcaagcctggct

SEQ ID NO: 249428 - DNA, 75 bp, Homo sapiens
cttggactgaacttaaatactgatagatggatagtggctataatacgcagaattgtggaagcaatattatggata

SEQ ID NO: 249429 - DNA, 75 bp, Homo sapiens
agtctcacgagttgtcctggaagaaatcaaggattggcgtggcattgctttgacaagtacttgctgttgtcttca

SEQ ID NO: 249430 - DNA, 50 bp, Homo sapiens
tattcaccaagcgcttcgctacaagatgaggaaactgaggtccagagaag

SEQ ID NO: 249431 - DNA, 75 bp, Homo sapiens
cccagagacatggagagttgctacaacccagtgtgcctaccgcatgttgccgctgctgtttctgctgggacgtct

SEQ ID NO: 249432 - DNA, 80 bp, Homo sapiens
gcagggagtatcaaatatgagaaagctaggccatctgaataactttactaagaacactcctatgccaccttcaccagctg

SEQ ID NO: 249433 - DNA, 50 bp, Homo sapiens
cgggtttttctagaacacggagttttaacaagggaggcatgagacatcaa

SEQ ID NO: 249434 - DNA, 99 bp, Homo sapiens
cacagccttggaaagtcaggaccgcgacggcagcagagcagtgactattatatggttaaaaagattttggaggaaaacagttcaggtgacttgaacata

SEQ ID NO: 249435 - DNA, 75 bp, Homo sapiens
gcttcgaaagcatcatccacgagttcgacccgtggtatcaatataagtgatgaggattttcttttgctggagctt

SEQ ID NO: 249436 - DNA, 90 bp, Homo sapiens
acagtgccacccaatcttcgaaaactggatccagaactccattgcttgccgagggaccgagcttgatgatggcatccaggccgactcggg

SEQ ID NO: 249437 - DNA, 100 bp, Homo sapiens
ctccgccgcccgcaggctccggcttccgtcccggacagagcccgtggtcgcgcaggaagaaatgtcttctgtaaaaagaagtctgaagcaagaaatagtt

SEQ ID NO: 249438 - DNA, 75 bp, Homo sapiens
agcggaactggagaaagctgagggctgtcctgggatgtgggacaacatcacgtgttggaagcccgcccatgtggg

SEQ ID NO: 249439 - DNA, 98 bp, Homo sapiens
tctgccaggagctgcggccccgtccggcccgggctggttcagaggacagttttggagaaggagatgcgtagtcttggtgttgacatggacgataaaga

SEQ ID NO: 249440 - DNA, 75 bp, Homo sapiens
ggattgaattaaacaagacgtgcaaagcaagtggttcacgagggaaatcctcattgacgattcaatttgttgaag

SEQ ID NO: 249441 - DNA, 75 bp, Homo sapiens
ctactaatggacagttagtcacccacctacatgttgaggacttggaaaacagtgtgggtgaacttagtgaaggac

SEQ ID NO: 249442 - DNA, 75 bp, Homo sapiens
cggcagtgagctcggccggcaaccgagggacccgcgtccaggtcttaaagaaagtgcagaagagatggtcaaaaa

SEQ ID NO: 249443 - DNA, 75 bp, Homo sapiens
agatcctggaatatataaatgtgttgtttgtggaactccattgtttaagtgttggagcgggccggagagaagtag

SEQ ID NO: 249444 - DNA, 100 bp, Homo sapiens
ctgcatttccaggacctggtcactattcaggacacggttccagcgcagtgcgcgttagccatgtctcaggttcctggtgcatcgatactctgtgctgcag

SEQ ID NO: 249445 - DNA, 101 bp, Homo sapiens
ggggagggggcgccgcgccgcgggggccatggcggagccaggaagccgggagtccgagacccggcctgagaaattcacgaaagtctgtgaggccttggagc

SEQ ID NO: 249446 - DNA, 82 bp, Homo sapiens
ctcctctctgttaatggagtgatgaagtgtttagaggacatgagccaggtcaagcagcaaacagatctgtgtcagcagcgga

SEQ ID NO: 249447 - DNA, 108 bp, Homo sapiens
tggtctacgtgctgaaccacgctgaggggctgggagccgcgcacaccaccatcacgtattgtaatagagattttgatgatgagaagatccttattcagcaccaaaaag

SEQ ID NO: 249448 - DNA, 100 bp, Homo sapiens
caattctgggatttggcagctttgctgtgaaagcccaatgaatggtagtgtctagaaagggtatgtcccttcaagagagaggtgccaatgtccaaccggc

SEQ ID NO: 249449 - DNA, 85 bp, Homo sapiens
tcttcacccatttctcgtctctcatctacatcgccttcatcctgggcagctcagagcccgggcgctgtggaagagattctagacc

SEQ ID NO: 249450 - DNA, 75 bp, Homo sapiens
ggtccgcattcttctcagagaactggagaaggtatcagaacaaggtttaatagaaatccttaaaaaagtaagcca

SEQ ID NO: 249451 - DNA, 100 bp, Homo sapiens
ggcggaaagcgtagagggagtagtcaggattctcttggaacattattacaagcttctcaataggtttggcatggacaagatctatgaaggccaagtggag

SEQ ID NO: 249452 - DNA, 75 bp, Homo sapiens
gccagggtccctgaagagggaagacacgcggaaacaggcccgacaacaagctcaaatacgtcaccaaatggcaga

SEQ ID NO: 249453 - DNA, 74 bp, Homo sapiens
cggggaaggagggaaagagctcccgcggttgccccattgcaaagtgggagctatgaagacatgattggtgagga

SEQ ID NO: 249454 - DNA, 74 bp, Homo sapiens
ttgaaggcacaggaatatccatgtcggcttgtagagagattgcagtggctgcaggaatggcttacatcgagcgc

SEQ ID NO: 249455 - DNA, 75 bp, Homo sapiens
ttccacctgtctggatggacaggtcattggctctgccaagtttgtgaagtgtggatatgcaggctctaactttcc

SEQ ID NO: 249456 - DNA, 96 bp, Homo sapiens
tctctctccactcttcgagattggcacacccagatctcttacctcagctagaagctccgagttctcttactcccagcagtgaactcagcagcccag

SEQ ID NO: 249457 - DNA, 51 bp, Homo sapiens
gtgaaaacttcaacctgctgctcccgcaaggtgtccctgccttcactgtgc

SEQ ID NO: 249458 - DNA, 87 bp, Homo sapiens
tgggtcctcgacctgcagggagcagaggggacagaggcaccaaggacctccaagacagctgccattcgatttcacatggaagatgct

SEQ ID NO: 249459 - DNA, 100 bp, Homo sapiens
gcgggaccttggcggcgcccggagccggcgtggcgctcatcgagggacgcccggcccaagtgtggtcgtaacccacaaaatccttcggaaggccagagga

SEQ ID NO: 249460 - DNA, 100 bp, Homo sapiens
cctgggtgccgtggcatgtcgatttgtccttcactacagttgcacctggacttgatatgaaagtaaccatcagaaaatcaacagagatcttaaacttgcc

SEQ ID NO: 249461 - DNA, 82 bp, Homo sapiens
ccaggtgtaagcgcagaaagcaggcgaacccgcggcgcaataacgcaggagcattggtttgaaaaggccctacgagacaaga

SEQ ID NO: 249462 - DNA, 100 bp, Homo sapiens
tttaggtactggtttgggaactggactgggatttggaggatttaatacacagcagcagcagcaaactagaaacaggaagagcgagtacagcaagtacgca

SEQ ID NO: 249463 - DNA, 74 bp, Homo sapiens
tctgatcccacctcaccattgagaaccagatttgtgtaccatttgtctgacctaaaggtgtgtaagggagcaga

SEQ ID NO: 249464 - DNA, 100 bp, Homo sapiens
aaatttgaacagatgaaacaagataggatcaccagataccagggcctgaccaaggactacggcaactcacccctgcaccgcttcaagaagccgggctcca

SEQ ID NO: 249465 - DNA, 100 bp, Homo sapiens
aatactatgagaaaaggttattggaattctgttcggtgtttaagccagcaatgccaagatctgttgtgcattccccgtcggagccctttctagagaaacc

SEQ ID NO: 249466 - DNA, 100 bp, Homo sapiens
ctgtcgtctcatgggagaaagacactgtttcacttgtctcaggaatagagctgtgcccccctggaaaacggttcatgattacgatggtggcgagcttcgt

SEQ ID NO: 249467 - DNA, 98 bp, Homo sapiens
tgggtcacccgcactgagtcaacagactgagcgcgtccaggcctgacagctctgcggctcgggccctgagggttttggccaaattgggcgagggcaca

SEQ ID NO: 249468 - DNA, 100 bp, Homo sapiens
tgaacctgggaccagtgtgaatttggaagggatcgtgtggcatgaaacagaagaagttgccaaaacaaaggggatttggtgatggaggctttgttagaag

SEQ ID NO: 249469 - DNA, 100 bp, Homo sapiens
cgccgcccagctcacgccgcgcccgcgctcccaggctccgggtagtagattccatggatgcattagataaagttgtccaggaaagagaagatgccctaag

SEQ ID NO: 249470 - DNA, 100 bp, Homo sapiens
gaggacacgggctgcaacctgcagcacatcagcgaccgggagaacatagacgcattgagaactgatgtgccttcacaggaaacttggcccgtgtgtttcc

SEQ ID NO: 249471 - DNA, 100 bp, Homo sapiens
gctacaatgtactggatcgaaatgtccatgagaaaaagcttggagataaagttgctttttactgtgccctgccagaccgttttagattacttgaagatgg

SEQ ID NO: 249472 - DNA, 100 bp, Homo sapiens
ctgggagcctagaatgcatcagtgcccttgtggcgaatggggctcacgtcgaggaaggtcagcctttaaagctacctgacactaagaggacactgttgtt

SEQ ID NO: 249473 - DNA, 51 bp, Homo sapiens
cgggggctacggaggagctggaggagcttgagatcttcttagcccagagag

SEQ ID NO: 249474 - DNA, 90 bp, Homo sapiens
agcgaccccttgttctttggtggcgctggtgtgtttgtcaaagtgtctctgatgaaccacaacaagtttgtcaagtgcaagaagacttca

SEQ ID NO: 249475 - DNA, 104 bp, Homo sapiens
gctgaagactgattacaagaatcctatagaccagtgtaataccctgaatcccgttagtggttacttggatgattgtacctgtgatgttgaaaccattgatagat

SEQ ID NO: 249476 - DNA, 90 bp, Homo sapiens
ctcactttcgtccaggacagtatgtggatgtcacagccaaaacggagatgtgcattgagcaggatgggagagtccatctcactgttgttt

SEQ ID NO: 249477 - DNA, 90 bp, Homo sapiens
gatttcccaattcttcattctgtcctccaagggggacccgctcatctacaaagactatgtgtcgtggaggccgaatgtttgcaccaacca

SEQ ID NO: 249478 - DNA, 80 bp, Homo sapiens
accaggtgcttggcaaaatcgagcgggccattggatgggagtcccagcttctggagacggggttcctggggatcttcctg

SEQ ID NO: 249479 - DNA, 100 bp, Homo sapiens
ggagaacccgaagcacctcccggcgccgggacgcttcttctgatgattatgtacttgaagtgaggcactttcagtgtcctaaatggccaaatccagatag

SEQ ID NO: 249480 - DNA, 100 bp, Homo sapiens
ttaaccatgagggaaatcgtgcacatccaggctggtcagtgtggcaaccagatcggtgccaagtttagatgcaaaatccacaagtattcaagtgattgtt

SEQ ID NO: 249481 - DNA, 100 bp, Homo sapiens
aagtggcaacgacaggatctgctctttcagatctgctacggcatgtatggcttcatggatgtcgtctgcatagcggatgacggaggctttgagagtggcg

SEQ ID NO: 249482 - DNA, 90 bp, Homo sapiens
caccgaggaccagctcaatgacaggattttgcctaccattttacagtatttgtcttctattttggagcctttttattggaagcagcagcc

SEQ ID NO: 249483 - DNA, 51 bp, Homo sapiens
tgcacccggacggtgcagcaccaggactccacatggagttcctcgaggtgc

SEQ ID NO: 249484 - DNA, 96 bp, Homo sapiens
gcctagtgtaccttctactcatctgccggcagggccagaggtgctcagcacagtggactttgtcgcccctgatgatcgagttgtcttccgcacctg

SEQ ID NO: 249485 - DNA, 80 bp, Homo sapiens
ccgagcacctctccgcgcacatcactcccgagtggaggaagcaatacatccagtatgagcaaaatgatgcttcaacaccc

SEQ ID NO: 249486 - DNA, 49 bp, Homo sapiens
caggaaaaggagcttagctgctggtgctggcccagcagggggagtacag

SEQ ID NO: 249487 - DNA, 82 bp, Homo sapiens
cggccccggcgccggcaaggggacccagtgcgcccgcatcgtcgaggccacggcgtatgcctccgaggacggggtcctgacc

SEQ ID NO: 249488 - DNA, 73 bp, Homo sapiens
tcagcaggaagcagagagggccagatttgtggtggaaaaggcagtgacgaagatccgagagtttatcctccag

SEQ ID NO: 249489 - DNA, 82 bp, Homo sapiens
cgcggctactacaatcagagcgaggccgaggagaaggcagagcccccccaggctatgaatgccctgatgcggttgaaccagc

SEQ ID NO: 249490 - DNA, 51 bp, Homo sapiens
accggagcagagagctggcgagcaagagcactgcagtttcctcctgaaggc

SEQ ID NO: 249491 - DNA, 100 bp, Homo sapiens
aaagaagatggttcttttgctggagatatttgggccttagattgtaagcaaaagaaatcaaggtcaagatctggaagcaagaagaaaatgctaacattac

SEQ ID NO: 249492 - DNA, 90 bp, Homo sapiens
ttcgcagtggtcgcttcttctccttggaatttcaaatgccttggaaagaggaatcagaatttacaaagcaggataaggctgccagagtca

SEQ ID NO: 249493 - DNA, 83 bp, Homo sapiens
gtttggatgacttgtcatgcaatcaaaatgaagttgaagcatcaggccttggacaagattcgctatgagagcctgacagaccc

SEQ ID NO: 249494 - DNA, 85 bp, Homo sapiens
gtcgcgggcccagcccacagcagggtgtctgtgacctttgaggatgtggctgtgacattcacccaggaggagtggggacagttgg

SEQ ID NO: 249495 - DNA, 146 bp, Homo sapiens
cttcatgttccagtgcctcgagcgctcaggatggaggaagactcgatccgcctgcctgcgcacctgcatggtgagaacaagaccaagattggaaagccagcttcagaggagggaattacagcaaaaattgaaccattgacagaaga

SEQ ID NO: 249496 - DNA, 96 bp, Homo sapiens
ggaaaacattgcagaatcactggttgcagagggcttagccacccggagagaaggcatgagagctaataaaaaagccaggactctatttgaaaaaaa

SEQ ID NO: 249497 - DNA, 75 bp, Homo sapiens
cccggacatcttccccctgctcaccagtttccgctgtaagcactacacctcagacgcagatggactctgtacgcg

SEQ ID NO: 249498 - DNA, 100 bp, Homo sapiens
gcaaaaatctgagactctatcaagctgtagtggatgcaaggaaattattagatgaattgtcagacccagaatcttcaaatgccagaggattcaacatgag

SEQ ID NO: 249499 - DNA, 75 bp, Homo sapiens
cggagattcaacactgccaatgatgataacgttactcaggtgcggaccgtatctgcaaaggcccttggggccatg

SEQ ID NO: 249500 - DNA, 82 bp, Homo sapiens
gttgtcctgtgctggggctgacagatgactgccaggggcatgaaggggatgtgcttccagggcatttgctggcagggcgtct

SEQ ID NO: 249501 - DNA, 99 bp, Homo sapiens
aaagaactcttaacggcgatgcaggtcttccacagctaagatgcacccactgggcctatgtaataacaatgacgaagaggacttgtatgaatatggctg

SEQ ID NO: 249502 - DNA, 100 bp, Homo sapiens
ggcgtaccaacccttttggtgaaactgaggatgaatcatttccagaagcagaagcatgaatacaactttgtctgagagccccttcaagtgtgatcctgat

SEQ ID NO: 249503 - DNA, 96 bp, Homo sapiens
ctctggctgtgctgcgcggcccccgcgcatggctttgtccagggatctgaaaccactttgcagtcgacatactcggataccagcgctcagcccacc

SEQ ID NO: 249504 - DNA, 75 bp, Homo sapiens
cggtgaggacgcggcgggcgagcgagaggccgaggacagctttattaaaccgcctggagcgaattttcgaagcat

SEQ ID NO: 249505 - DNA, 86 bp, Homo sapiens
cgaagctgggaatttcaggtcatgtgcacagattaatggctggatccatggcagatttcagaagaaagtggtagcttcctttccaa

SEQ ID NO: 249506 - DNA, 98 bp, Homo sapiens
gaaagactcactgctcacagctgcccagctgaaagccaagcacctgaactcctggggggaccgtcagtcttcctcttccccccaaaacccaaggacac

SEQ ID NO: 249507 - DNA, 50 bp, Homo sapiens
agctcaggaccaggcaccttctgtggaagcttgaaatggcgattgaaaac

SEQ ID NO: 249508 - DNA, 100 bp, Homo sapiens
aatctgaaaaaaagagaaacctgggtgaactttcacggacaacctcagaggacaacgaagtgttcgctggcatactgtgtagtgcagtttttagaaaagg

SEQ ID NO: 249509 - DNA, 75 bp, Homo sapiens
gtgctgtggtgcagagctagttcctctccagctcagccgcgtagagagaggatgcaagccatggagaaacagatt

SEQ ID NO: 249510 - DNA, 83 bp, Homo sapiens
ccagttttgaaatcgacacacaaagaatagagttgagcctgtgggacacttcgggtgcgcgcggagccatggttatcatgtcg

SEQ ID NO: 249511 - DNA, 90 bp, Homo sapiens
ggtgacctggctaactggatgatacctgaaagatgaatgggagggctgattttcgagagccgaatgcagaggttccaagaccaattcccc

SEQ ID NO: 249512 - DNA, 75 bp, Homo sapiens
ttcctctcttgctggtacatgatatgtcagaggattacaagggccagaagctagctgaacagatgtttcagggaa

SEQ ID NO: 249513 - DNA, 75 bp, Homo sapiens
aaaaaactgcccatgttctccgagaacctggatgacagtgtgttttcgaagcggcatgcaaaactggagctggat

SEQ ID NO: 249514 - DNA, 74 bp, Homo sapiens
tagcatttggacctgtggccagtgttgtcatggacaaggacaagatgaaaataaacccatctggatgcatgctg

SEQ ID NO: 249515 - DNA, 96 bp, Homo sapiens
gcgctactctctctttctggcctggaggctatccagccggaaggagagttttacatggaagtggcttacagaaacttggcgctgaggtgcagggaa

SEQ ID NO: 249516 - DNA, 74 bp, Homo sapiens
atcaactgagagagatgcttaaaaatcaccagttactttaatgacacctgtggaatcctctcaagaggaacagt

SEQ ID NO: 249517 - DNA, 50 bp, Homo sapiens
tttgtgggcttatgctgcacaattggcagtggccgctggatttccagctg

SEQ ID NO: 249518 - DNA, 82 bp, Homo sapiens
gtgtctgctggaactgttggagccgcagtgcagcctaattttgacttcagcacctatttgccctggctgtggatgatgaccc

SEQ ID NO: 249519 - DNA, 100 bp, Homo sapiens
cgccactacctcctggctgccgtgaataggcagcctaaaggttagaaaatggatttctgactggaatctcaccactgaaaaaaagcacacccttttaaga

SEQ ID NO: 249520 - DNA, 83 bp, Homo sapiens
ccctcgtcctgcacttcctcctcggaatctgcaagccctgggcgctgcctatggcacagccaagagcggtaccggcattgcgg

SEQ ID NO: 249521 - DNA, 51 bp, Homo sapiens
gtaccaggaggcgttggccaagggccccttcacagatgtagtcactacaaa

SEQ ID NO: 249522 - DNA, 83 bp, Homo sapiens
gttgctacctcagaaggctccctttggggactgattcaggcttcttcaggagaaagcaagtacactggtaccttggactgtgc

SEQ ID NO: 249523 - DNA, 75 bp, Homo sapiens
gtcgtcaagaggctctgcaccctggatggaaagcagcatgaactggaaaatattgaacctactcaaggcctttca

SEQ ID NO: 249524 - DNA, 74 bp, Homo sapiens
gcgggcgagcggtggtttggacgccggcggagacgcgggcgagccaacatgcccatcactcggatgcgcatgag

SEQ ID NO: 249525 - DNA, 85 bp, Homo sapiens
ccaaactagaaaaggaggaagaggaagatgatggagatttgcctgtgaacgacaccgtaactatccgcactagaaagttcatgac

SEQ ID NO: 249526 - DNA, 98 bp, Homo sapiens
tcccgaccgggccactggaagttggagcctccgccgagtcgcagacaacgcctccgggaggtcgcaatgtatctgctgagcaaaaagatgaaaacaaa

SEQ ID NO: 249527 - DNA, 75 bp, Homo sapiens
tgtcctagactacattaatggtggagaggcgaatctttctgcattgaatttgaagatttctgaacagaaggaaat

SEQ ID NO: 249528 - DNA, 100 bp, Homo sapiens
ggaatgatgatgtctcatatgtctcaggcttccatgcagcctgccttaccgattgagaggatccagaatccagatctctggaatagctaccaggcaaaga

SEQ ID NO: 249529 - DNA, 74 bp, Homo sapiens
gaaagctctccacctccagggacaggatatggagcaacaaggtcagaatggcggcagcggagcatcgtcattct

SEQ ID NO: 249530 - DNA, 83 bp, Homo sapiens
ggacagcacctcatcccctggatgggggaccacaagatcctcatcgacaggtacaatgactcttcttgcttttcacctaagtt

SEQ ID NO: 249531 - DNA, 100 bp, Homo sapiens
ttcatcttctagaatttcctgaaggaaaaggagtggctgtcaaggcatcagcaggactcagacctctcagcagcgtgctctgacgctgacctccacagac

SEQ ID NO: 249532 - DNA, 89 bp, Homo sapiens
cgcagaggatggcgcctgtgggcacagacaaggagctcagtgacctcctggacttcagcatgctctcagatctggctcgagaccaccat

SEQ ID NO: 249533 - DNA, 100 bp, Homo sapiens
tctggatgtttcacagccaggcagtttatgatattaacagactagactccacagggataggatgggatctgcactgatgattgaaacagcaagaaacccc

SEQ ID NO: 249534 - DNA, 100 bp, Homo sapiens
gtggaggcctatgggctggccatgctgcggggcatgggctggaaacctggcgagggcatcggccgcaccttcaatcaatggaatttcactcttgttgccc

SEQ ID NO: 249535 - DNA, 82 bp, Homo sapiens
gcggtggccctggtagtgcatttggagaaagagactggaagactaagacagcagacaatgcagatcttcgtgaagactctga

SEQ ID NO: 249536 - DNA, 76 bp, Homo sapiens
gtggccgacttcgtgaagccacctcaggaatcttgcctccacaccacgagtcccatgccaaggtgatgatgtatcg

SEQ ID NO: 249537 - DNA, 83 bp, Homo sapiens
gctttggcgaggggacggagccggatcaggagccgccgccgccatatcaggtgtcaaattggtttgctaatgcaagacgtcgg

SEQ ID NO: 249538 - DNA, 83 bp, Homo sapiens
caggccacgctgtccgtccgcagtaccgacgcctgcagcccttcagatatttcaacactcctctcagcatcctccacttcccc

SEQ ID NO: 249539 - DNA, 90 bp, Homo sapiens
tcctcccaaggtgctgggattacgggtatgagccaccatgcttagcttttgttgcatattctaaggacccagacataggcttggtggccc

SEQ ID NO: 249540 - DNA, 74 bp, Homo sapiens
aggcatggatgaaaaggagtttacagttcaaatcaaagatgtggccttggataagggctgctcccaattccgcc

SEQ ID NO: 249541 - DNA, 56 bp, Homo sapiens
cgagaaggcgctgaagcacatggatggagcggatccacttagatattcgagttgga

SEQ ID NO: 249542 - DNA, 149 bp, Homo sapiens
tcaaggctgcctataatcaagtaaaaacaatagctcaaggaaacctttccaacacagatgtccaagctgccaagccttttcagatattaatggcaaagttcagaccattgttttgacatctggtacattatcaccaatgaaatcctttt

SEQ ID NO: 249543 - DNA, 98 bp, Homo sapiens
ctgcccgcagcccctgacccggccccggacggagcgccggccgcaccaccgccctctggccgttgcctcaccgggttatgaagacagtatggagtttc

SEQ ID NO: 249544 - DNA, 51 bp, Homo sapiens
aatggatttaaacctttgtcaggcaatgagccctatgagctcccagatggc

SEQ ID NO: 249545 - DNA, 82 bp, Homo sapiens
cctcagtctccagccctacccctctggttccaggtagttagaaacaaacctgtggcaaggcaggctcctggcaaacggaagt

SEQ ID NO: 249546 - DNA, 49 bp, Homo sapiens
tctcagcaagaacgggaacaaaactctgatcctaagtatatcactgcag

SEQ ID NO: 249547 - DNA, 89 bp, Homo sapiens
tttatttggcaacccaaggagttaatcctaaggaacatccagtaaaacaggaattggaagtaccaccaagaacagggaaggacaagcca

SEQ ID NO: 249548 - DNA, 75 bp, Homo sapiens
ttgtcagcaaaggaagagatggaatgattacggacctgaagccaaagaacaagatgcgctagtggacagattgct

SEQ ID NO: 249549 - DNA, 75 bp, Homo sapiens
tcagagcgcggatggccgtaaccccgaaggaaatgatactccaagcgggcctggacgtggagcgtctctccctca

SEQ ID NO: 249550 - DNA, 100 bp, Homo sapiens
gcggcggcggcggtggggactgcacgtagcccggcgctcggcatggctctcctggtgctcgcccagcgacttctccgtgtcccttaaagcgtcagggaag

SEQ ID NO: 249551 - DNA, 98 bp, Homo sapiens
ccccggcagggcggagaggagcggccggagtcagcgatggtgcccggcgaggagaaccaactggtcccgaaagaggctaggaattatctgtgaatgta

SEQ ID NO: 249552 - DNA, 74 bp, Homo sapiens
aagtaacagctcctacttgggcagcgacgagatggggtctgaaactggcgatggaatatgagaggagccctctg

SEQ ID NO: 249553 - DNA, 90 bp, Homo sapiens
gaagggaaggaaatcatgtcaagcgaagccttgaaaaagctgccctgagacggtgtcccgccgaaagggctgctgctcagagcaaattag

SEQ ID NO: 249554 - DNA, 100 bp, Homo sapiens
ccaccactgggaaggttgtgtgcaggaacgggctgctggtgatccgagatgacccagaaggtttgaagacatacctgatatcgggtcagagagccaagga

SEQ ID NO: 249555 - DNA, 90 bp, Homo sapiens
ggcatggtctacgattagtacgaaaaaggtcagaatggcggcagtggagcatcgtcattcttcaggattgccctactggccctacctcac

SEQ ID NO: 249556 - DNA, 96 bp, Homo sapiens
ctgcgggcccggcggcgtggaccacctcccggtgaagatcctgcagccaggccctgggaggagcggggacactgaggacctctctccaaattggcc

SEQ ID NO: 249557 - DNA, 100 bp, Homo sapiens
tctaagagacagcttccaacagcaaaagtactttgactcaggagactacaacatggccaaagccaagatgaagaataagcagctgccaagtgcaggacca

SEQ ID NO: 249558 - DNA, 95 bp, Homo sapiens
caactggaataaattccttatggccatcaagcgtcagcttttctttcgcaaaaagctgcttcactcatcccagatgcttcgggcggtctccctgg

SEQ ID NO: 249559 - DNA, 50 bp, Homo sapiens
gagttcaagaagaacactccagagggagaagaaatgggtgaccgttggtg

SEQ ID NO: 249560 - DNA, 73 bp, Homo sapiens
tgctcaccaacagatgaagacagatgcaccaacgaggccctccctatcctgaagacattagctgagagtctgg

SEQ ID NO: 249561 - DNA, 100 bp, Homo sapiens
aagatgagatttacctgtgagatgtttcatcccaacagatgttggttcctgcaaacaagaactgaccctatcacctctgcctcacagtgggtaaatatat

SEQ ID NO: 249562 - DNA, 75 bp, Homo sapiens
gccttgtttattttcctcaccactgaatctacaggaccaggagctgcattatctattctagacaaatttcttgaa

SEQ ID NO: 249563 - DNA, 98 bp, Homo sapiens
ggagccatggcggctgacagtcgggaggagaaagccagaacaggaatgctgctggaagagcaagaatgaaaatcatcacataaatttgggccatcctg

SEQ ID NO: 249564 - DNA, 51 bp, Homo sapiens
gcgcgagtgaggaaaggaggtactgtagagtgtggtgatggtggtcttcag

SEQ ID NO: 249565 - DNA, 100 bp, Homo sapiens
tggtggagggcagacacatcgaggcccatcgcatcctgctggctgcgtcctgcgattacttcaggttcatgcagcatcccaagaactttggcctgatcgc

SEQ ID NO: 249566 - DNA, 90 bp, Homo sapiens
gcggaaaatgatccagtcacaggtgattgaaatctctgaatatcgaacccagctctatgaatatctacaaaatcgaatgatggccattgc

SEQ ID NO: 249567 - DNA, 80 bp, Homo sapiens
caaaatggcggatcatgtgcagatcttgatgtggaagaaatggaggactcagaaccaaggatttccaagtgatttcttcc

SEQ ID NO: 249568 - DNA, 95 bp, Homo sapiens
cttcgatgcacaggagtggccgttatggaacgcaggtccttccatagtgacgccccccaaggacatctggaatgtcactggtgcccaggtgtact

SEQ ID NO: 249569 - DNA, 100 bp, Homo sapiens
ctctctcaagagaagctgcaagagcaacatctttcctcaccccaaggtgagagatcaagcccagcgctgttcacgggttctcctggatattgaggctggt

SEQ ID NO: 249570 - DNA, 89 bp, Homo sapiens
gcgccatcctgcaccgccaccggcccgacctcatgatcatccagcagctcgtcaacggcatcatcacgcccgccaccatccccagcctg

SEQ ID NO: 249571 - DNA, 75 bp, Homo sapiens
cgcctcggccgccatggtcttcagcggccaccagcttgggctccccacggagggcagcaagtgggacttggggaa

SEQ ID NO: 249572 - DNA, 83 bp, Homo sapiens
tcacctccatgggcatcaacatggccctgggaggagcggggacactgaggacctctctccaaattggcctctcaactcacagg

SEQ ID NO: 249573 - DNA, 100 bp, Homo sapiens
cagtcaactatcgacttggagtactcgggctggggagcagaataccaccgccaggatgttactagcaccccctgctggattgagatacatctgcacggcc

SEQ ID NO: 249574 - DNA, 92 bp, Homo sapiens
tcaagtattggtcttaaaacagtaattggagaacttcctccagcttccagtgtgtcgagttatagcagtgctggattgggagctgtcaacca

SEQ ID NO: 249575 - DNA, 83 bp, Homo sapiens
ggagaaagaagaaagaatacatggacagcctggagaaaaaccgcttacaaacacgcagatggcaagaagattgatggcaggag

SEQ ID NO: 249576 - DNA, 75 bp, Homo sapiens
ggagcgcggagcccggctcccgcaccatggaggaggacgacagctacgatcgacgacatcgcggatggcgccgtg

SEQ ID NO: 249577 - DNA, 82 bp, Homo sapiens
tggaaagtctacttggcagctcggggagtcctaccctatgtgggcaacctcatcaccaaggatagcagtgagattcacttca

SEQ ID NO: 249578 - DNA, 90 bp, Homo sapiens
gtacaagtcaagacggggaataaagcggagcgaggacagcaaggatgaccaactcttggatgatggcaagacactgggcgagtgtggctt

SEQ ID NO: 249579 - DNA, 134 bp, Homo sapiens
ccgctgctgccgccaccactgcgtcgggctggtgcagccccgggccaggccgcggccggggcaggagcgcagatacatccagaaagtgcccagaagaaacttcctgctggaaaaaatgaaaaagcagtatttat

SEQ ID NO: 249580 - DNA, 74 bp, Homo sapiens
ggagagcttggactttcacctgattgttaaagtagaaaccattgaaggttttcagtgttctccctatcctgaag

SEQ ID NO: 249581 - DNA, 151 bp, Homo sapiens
cactgtggtgttgtcattgcctgagcgcgtcgagccagacagactgctgagcgactatattgagaaggaggtaaagggttctatggcctggatgagtctgacctcgacaaggtcttccacttgcccaccaccactttcatcgggggacagg

SEQ ID NO: 249582 - DNA, 97 bp, Homo sapiens
tttgtcaataactatctttcaaaaggagtagctaatgcagagtcaagtaaaacctggctgaaggggaaattcactgaactcagattactacttgacg

SEQ ID NO: 249583 - DNA, 100 bp, Homo sapiens
agggctcagggagcaggagcttcaggttgtccgagcatctgggaagagccctctggcacaaatggaagaagaaagaagggagcaagtagctaaaattaag

SEQ ID NO: 249584 - DNA, 96 bp, Homo sapiens
aaacgagcgcgagagggggaaaagcgagcgatcgagcgagcgcgcgcgcgaaaactccgggcaggtgctggagaatctggtaaaagcaccattgtg

SEQ ID NO: 249585 - DNA, 75 bp, Homo sapiens
ggatattcagttgcacatccccacatcaatgcactgccaatgagctccaaacgagaatggaagccgctggaggac

SEQ ID NO: 249586 - DNA, 100 bp, Homo sapiens
ctagcacccagaagatgagaccgcaattcgagaatcaaagggccgggagcgatgaaagtgaagtggaagattctttagctacctctttgtcatcgtcagc

SEQ ID NO: 249587 - DNA, 100 bp, Homo sapiens
acctctacctggagatatgtctactggtcccatagcagaaagctggtgttacacacagggtcgagctgtgcagttttagcgggtacaagatctaccccgg

SEQ ID NO: 249588 - DNA, 88 bp, Homo sapiens
tcggtctcctggtgtacggccaacgccaagtaggggattgcgttccctccagtcgcagtgtatgctgatggtagcatatgtttagata

SEQ ID NO: 249589 - DNA, 75 bp, Homo sapiens
cagagggaaagggataggagaaggatgtggactgcagtgctgcagtgccaggctgaccaactgactgaagagcag

SEQ ID NO: 249590 - DNA, 100 bp, Homo sapiens
cgcagatgtggacttgaaagaagctgcagcggaggaaggcgagaatcctcactatggatgggctcattgaggacattaagcatcggcggtattatgagaa

SEQ ID NO: 249591 - DNA, 83 bp, Homo sapiens
gaatagattctcttgaccatgtgacatctgatgctgtggaacttgcaaatcgaagtggagtacgacaaggagttctcccctcg

SEQ ID NO: 249592 - DNA, 82 bp, Homo sapiens
atattagttcagttaccactaccaggtttgccagaacccaataaagatgccatcttccaaggcctgacgcaggaccaggggt

SEQ ID NO: 249593 - DNA, 83 bp, Homo sapiens
aagttagcttcagagttctttgtggatggacttgattctgatgagagagtgttgcggagataggaacatgggagagaaacaat

SEQ ID NO: 249594 - DNA, 87 bp, Homo sapiens
ttgtgataacttcccatattatagagaggctggcagtggttggaaggggtttaaagccaatttgtctctcttgaggaggcctggaga

SEQ ID NO: 249595 - DNA, 75 bp, Homo sapiens
gaaacaggccatggagggacaggatccggaggcgccagctcaaccgatcaccccttctgtgtcattctctgagga

SEQ ID NO: 249596 - DNA, 100 bp, Homo sapiens
ccagtggcaacatcgccaacaagaccacctactttgagatctttacggcaggagccagggagtaacgaagagatcaaagagttcgccgcgggctacaacg

SEQ ID NO: 249597 - DNA, 99 bp, Homo sapiens
aaggaaagccactggctcttgtagaagaaatcagaaacagaaaggatgtgaaggtgtttaatcggctccatactggatcacagcccctcaaaatcttgt

SEQ ID NO: 249598 - DNA, 75 bp, Homo sapiens
gtccaattaaagtaacactggcaactttgaaaatgtctgtacagccaacgatctgttgcagtctccttcaagcat

SEQ ID NO: 249599 - DNA, 100 bp, Homo sapiens
cctatggcatcttctgcctcgtcctgacacccaccaggtgttcctgatccaagcagaaccctgttatttgaagagcctgagaaatcttatcccgtttaca

SEQ ID NO: 249600 - DNA, 100 bp, Homo sapiens
tcggccggttgtgatccaaccgtgtttcgggctgagggaccgttcgaaccgaattggggtctggaggaggctgaaccgtctgagcccagaagtgctgagg

SEQ ID NO: 249601 - DNA, 74 bp, Homo sapiens
ccgcaccttgtgttccggaagttccagctgtgtcagcgtgttatgatgccgtcccgtaccaacctggctactgg

SEQ ID NO: 249602 - DNA, 51 bp, Homo sapiens
ggaaaaagcagtaaagccagaggaaggtactggactcgagtgttttgcaaa

SEQ ID NO: 249603 - DNA, 100 bp, Homo sapiens
ccacagtcttcaagagcccacggacaccacctcaacgattcagtgctcaagagtgaagaaaattctactgtctttagccacttaatgaagtacccgtgta

SEQ ID NO: 249604 - DNA, 96 bp, Homo sapiens
aagcaatcttcctgctaaggccattggacacagaatccgagtgatcaccggcgtaatcaacccagcgttggacaaatactttccgtcagactctgg

SEQ ID NO: 249605 - DNA, 99 bp, Homo sapiens
gaactcgcccggccgggagccgccgcgggcaggacgcgcgctgcagggttggccaacggtccagatgtgctggagacagacggcctccaggaagtgcct

SEQ ID NO: 249606 - DNA, 75 bp, Homo sapiens
cggttcagccctttgatgaccgcagcagggaagtgaatcgtattaaacacagcaagcctggatctgtgccacttg

SEQ ID NO: 249607 - DNA, 100 bp, Homo sapiens
tccttcgtgatcttgttcgtcaccccgctcctgctgctgccactcgtcattctgatgcccgccaagagataattgacgaccttgccaacctagtggagaa

SEQ ID NO: 249608 - DNA, 80 bp, Homo sapiens
ccaccgcctccagcttgccaccaaagacctgcgactttgctcaggattttttatcaagcagaaatgcatcgaacaacgag

SEQ ID NO: 249609 - DNA, 90 bp, Homo sapiens
gcagcgaatcaagcgggagttcaaggaggtgctgaagagcgaggaggtgcctatggttcatgcttgaagttttaatgacaaagaatgaaa

SEQ ID NO: 249610 - DNA, 49 bp, Homo sapiens
cagactctgttggatcagaaggtcaaggcgtgagccaccgcgcctggcc

SEQ ID NO: 249611 - DNA, 100 bp, Homo sapiens
atgtgcagctcctgggggaaagacactagcgttgcttcagactggctgttgcctttaattggttggggtcagataagaagaggagtgacaatcaagccaa

SEQ ID NO: 249612 - DNA, 82 bp, Homo sapiens
gtccaatctgagcgtgctgcggacggcgctgcggtacatccaggctgaccccgcactacatctacccaccagccatcgtgca

SEQ ID NO: 249613 - DNA, 51 bp, Homo sapiens
gctttggatgttgccaacaaactggttgtcttcttgcctgccctgtgtcgt

SEQ ID NO: 249614 - DNA, 100 bp, Homo sapiens
ggcagacagtggctatcagcggggggagaacgttactgtggagaaccaaccaaggatgaatctggttatagatggacaagagacgatcattctgcaagca

SEQ ID NO: 249615 - DNA, 83 bp, Homo sapiens
ccggacggcacaccctacgttaccgtgctcaagggacagaagatgagcctgtcggtcctggagggtatggggttccgtgtggg

SEQ ID NO: 249616 - DNA, 99 bp, Homo sapiens
cagacagcaaggactcacccaaagacagggaagtggcagaaggaggccttccccgggcggagagcccctctccagactgctgagaaggaagaatttgaa

SEQ ID NO: 249617 - DNA, 74 bp, Homo sapiens
gaagccatgcccctcaggctggaacttgccctgtctcctcgcagatgagggaatttgaagtactgccttgtaat

SEQ ID NO: 249618 - DNA, 96 bp, Homo sapiens
gggggattctcgacctgctaacagaactggaccttttcggtagctacagcaagctgggtagcaggcagatccaaaggatatcatgaagtttccagg

SEQ ID NO: 249619 - DNA, 82 bp, Homo sapiens
tctgctgctgaagtaatgcaatggtctcaatctctggaaaaacttcttgccaaccaaaggggagtaaaacttggattgggag

SEQ ID NO: 249620 - DNA, 90 bp, Homo sapiens
cgcgccgcacggatcatggccgcagccgctctggggcagaggcgggaaacacgagccagacccgtgcctggagccagcccctggccgccg

SEQ ID NO: 249621 - DNA, 99 bp, Homo sapiens
aagaattttaagaaacgatggttctgcttaacaagcagagagctcacctaccacaaacagccaggtatgtcttaaagacttttctacatgatcctcttg

SEQ ID NO: 249622 - DNA, 83 bp, Homo sapiens
gcccctttagccatgtggatacctacggagcacgagaaatacggcgtggctcaccatggatgatgatatcgccgcgctcgtcg

SEQ ID NO: 249623 - DNA, 101 bp, Homo sapiens
gggggacagtgctgcccaggatggacaacagcaaacagcaccaaccactgtatcaaacgttctgtggatggagttataaaggaagtgaatgtgagcccatg

SEQ ID NO: 249624 - DNA, 74 bp, Homo sapiens
cacgcaggaacggctccagcatcaagatccgtctgacaggttcctgggtggagctacccatgaacagcagcaat

SEQ ID NO: 249625 - DNA, 50 bp, Homo sapiens
atcatcagtgtgttagctttccccaatgctcctcttggccctcttaaccc

SEQ ID NO: 249626 - DNA, 75 bp, Homo sapiens
ctcattattttaacatttgggagaaacacagccagaaggtcaaagattctaaactgcctgcatataaggatctcg

SEQ ID NO: 249627 - DNA, 133 bp, Homo sapiens
agacgttgaactctcagtggtcctacctggggatattatcaaatctactactgttcatggcaggtgattaaagtatacagtgaagatgaaaccagcagggctttagatgtacccagtgacataacggctcgag

SEQ ID NO: 249628 - DNA, 88 bp, Homo sapiens
gcttctttgagactgaaatggcagcttcacggaggcaagagggtaatggagtgcctaaaaaaagctctaaaaatagcaaatcagtgca

SEQ ID NO: 249629 - DNA, 100 bp, Homo sapiens
caggaggtgatccgaggctgggaagaaggggttgcccagctgccactgcagagccccgccatggaagacacgccgttggtgatatcgaagcagaagacgg

SEQ ID NO: 249630 - DNA, 75 bp, Homo sapiens
ggttctacatgattgatcccaggagtatgggaatattaaagttgattatggaagattcccacaagagtaccacgt

SEQ ID NO: 249631 - DNA, 90 bp, Homo sapiens
ggaggtatggcagcaagtaagaatggaaattgtgtaagagggcttccgttacaagatgaggtctgtgtatgctcacttccccatcaacgt

SEQ ID NO: 249632 - DNA, 82 bp, Homo sapiens
ctgagcgtgcgcgcacgcgccgacagacagcgccgttccagccctcgcccgatgcacggatcatggaagggaagtggttgct

SEQ ID NO: 249633 - DNA, 50 bp, Homo sapiens
tcaggtttgtcggtcgaagtggaagagttactccacaggatccgctgaac

SEQ ID NO: 249634 - DNA, 100 bp, Homo sapiens
gctgcaaaccgagacaagttcaccccgaagtctgccgaaaagggagatttcattgccctggatcttggtgggtcttcctttcgaattctgcgggtgcaag

SEQ ID NO: 249635 - DNA, 101 bp, Homo sapiens
ggaccttgtttgcctggggcaatggagaaaagtgtggatgaggtcaccattgtcaacattttgaccaaccgcagcaatgcacagagacaggatattgcctt

SEQ ID NO: 249636 - DNA, 97 bp, Homo sapiens
tggaaatcaaagtccaccatgtgcttttgcacatccagcagttgcagtggtgcagaatggctgacctcagtcttgcagatgcattaacagaaccatc

SEQ ID NO: 249637 - DNA, 101 bp, Homo sapiens
gtgccttctggagaggagcagagatacacgtgccatgtgcagcatgaggggctacccgagcccgtcaccctgagatggaccagctgaggtgggtgtcctgg

SEQ ID NO: 249638 - DNA, 100 bp, Homo sapiens
tgcagaatttttgactggagactatagtagggacatatttggagaagactgtgtaagtgtaaaggatgactctattcttagcgtcacagtggacgggaaa

SEQ ID NO: 249639 - DNA, 83 bp, Homo sapiens
catcaggaagcgcggggcggcggcgaaaggacgttgatattcactgatggactccaaagaatcattaactcctggtagagaag

SEQ ID NO: 249640 - DNA, 95 bp, Homo sapiens
ctggcgggctccgagaggcccgggagcggcgcgcagagcagcctccggccgccgccgcgcaggagggtgtgaagacagagaatgaccacatcaac

SEQ ID NO: 249641 - DNA, 82 bp, Homo sapiens
ggcacctcaaccagatgaggaagtacaactttgaggttcttaaagatgtgggattgaaaaaagaagatattgcaatgtggga

SEQ ID NO: 249642 - DNA, 82 bp, Homo sapiens
cacctcacagattccagcttcggaacaagagaccctggattttttatcaagcagaaatgcatcgaacaacgagaatcaagat

SEQ ID NO: 249643 - DNA, 78 bp, Homo sapiens
ggagaccgaggagcagcagcgattctcttaccaacagttttccaagagataacttcaccaagatgtccagtgataggc

SEQ ID NO: 249644 - DNA, 100 bp, Homo sapiens
accatgacgaaaacatgtactacagccagtcttctatgtttccacatcggtcagaaaaagatcattccagttggcttttgagtggatacgtgcagtgaga

SEQ ID NO: 249645 - DNA, 100 bp, Homo sapiens
gcagattagcgacatccgagtgcagaacctgcaagtactatactggcaattgctggagaagattttgcaattgttgcttctgatactcgattgagtgaag

SEQ ID NO: 249646 - DNA, 82 bp, Homo sapiens
catcactaagaaatcaggtgtagttctgctgaatcctattcctaagcccccttttgactggacaaattttggagagaattgc

SEQ ID NO: 249647 - DNA, 100 bp, Homo sapiens
caccgccgccctgggtccatgcagccttcctcctctgcctcctcagtcttggcggagccatcgaaattcctatggatcggaggaagagatagtcgctctg

SEQ ID NO: 249648 - DNA, 74 bp, Homo sapiens
ttcctactgtcttgttttttccctgcaacaggtatatttgcgtgctctcgtgagaaatctttttaatgaaggaa

SEQ ID NO: 249649 - DNA, 100 bp, Homo sapiens
acgcggttagtgcaagcatctgggccatcttcaatgaccttctaccgctttgaggctgtgtgggatagctctctgcataactcccttcttctgaaccgag

SEQ ID NO: 249650 - DNA, 75 bp, Homo sapiens
ctgtcttgggtagaagagatgcaggtggatccctgcatcctcaacaacaatgtgcagtgagcatgtggaagaaaa

SEQ ID NO: 249651 - DNA, 96 bp, Homo sapiens
tgaccgcggatcccagcttcctgcagccagaagatggcagtgaacgtatactcaacgtcagtgaccagtgataacctaagtcgacatgacatgctg

SEQ ID NO: 249652 - DNA, 100 bp, Homo sapiens
gcacagtgggggctgcacacactcaggagctctgtcacaaagctgttcatggaagaggatgttggacttcttacttggtatgccattttgaagactgaga

SEQ ID NO: 249653 - DNA, 75 bp, Homo sapiens
gccgaggcggcgcgggtgcaggagcaggacttacggcagtgggggctgacagagatccgtgctcagctcacagag

SEQ ID NO: 249654 - DNA, 75 bp, Homo sapiens
caaaccctagtgaataaagccaagagagaccttggagtaattcgtcgacaggacttggatgttgtgggtgatggt

SEQ ID NO: 249655 - DNA, 100 bp, Homo sapiens
gaccgcatgttcgacaagaatctgcaggacttggtccgcggcatccgtaaccacaaggaggacgagatccacatgaagaccatgcccgccgccatgttca

SEQ ID NO: 249656 - DNA, 83 bp, Homo sapiens
cggacatcggcttctgcctggtgctctgcgtcctcatcgggcttatgttcgaggtctactggggttcatcccatctgagccag

SEQ ID NO: 249657 - DNA, 100 bp, Homo sapiens
aagatgttctacctgctcaagaccgccttccccagcgtccagaaggacagaataacgggctcccagattcacaagccccaccaagaggatcaccccagga

SEQ ID NO: 249658 - DNA, 100 bp, Homo sapiens
gctgaatcttcaacctgtcaaagccttcttaattatgtctgagaaaagacgtaaaattcatcctgatcagaaaaatattaatgcctatgttgtgtttaag

SEQ ID NO: 249659 - DNA, 75 bp, Homo sapiens
aaagaggaatgggcctggcctgtgggcagccaaaagaatgcaatggtgtaaagattccagttgatgccagtaaac

SEQ ID NO: 249660 - DNA, 89 bp, Homo sapiens
gcttagaggaattaaactttggccctgcgcctcgtccagcctaggttccacccttttctgggaacattggtgctgaagacatggacggc

SEQ ID NO: 249661 - DNA, 95 bp, Homo sapiens
ccttcgctccggcccggtgaaactgaacttataatcgtcactggattccctgtatgatgagattcgtcagtttcgcaaggcctgtggggaggctc

SEQ ID NO: 249662 - DNA, 97 bp, Homo sapiens
ttcattggccacctacagaaacaaaatgtcaacaaattgatggatttggagcaagaggtggtggtggccttcccccgaagaaatttggtaatcctgg

SEQ ID NO: 249663 - DNA, 75 bp, Homo sapiens
cgaagccccctgcaggaactctacaacccaatccagcagatatctggggaagatgaagtagagtgctctgacaag

SEQ ID NO: 249664 - DNA, 99 bp, Homo sapiens
aaaaggcgcagtctcggtgggattgcgtgcaggagggtcgtggtctggctgtggcggaggagcataagaagggttgctcatcacccatggtggtaaaat

SEQ ID NO: 249665 - DNA, 100 bp, Homo sapiens
ctcgtcgacatgagtgatgtggaggaaaacaacttcgagggcagaactaatagggatgccaaaggaaaaatatgatcctccagatcctcgcagaatttat

SEQ ID NO: 249666 - DNA, 83 bp, Homo sapiens
ctttactgagaattttccacctcctgacacaacaccactcatggaagaagctgagaatgtgatgaaattcatgaatgaaacca

SEQ ID NO: 249667 - DNA, 74 bp, Homo sapiens
agccttcccagttatcataaccttgaatggcgactagatgtacagagccagagcccagaggtggagcagttagg

SEQ ID NO: 249668 - DNA, 100 bp, Homo sapiens
cgcccgtcaacttctgcgacgaagaaaaaaagagcgacgagtgcaaggtgtggtttgaccgaagaaccaattatacccgttctttagcggtcatgtcaat

SEQ ID NO: 249669 - DNA, 100 bp, Homo sapiens
gctgacttgataagaggcgcaaaagaaaagaatctcaaagtgaaaggaccagttcgaatgcctaccaagacccccggcagtggacagaaacccatgttcg

SEQ ID NO: 249670 - DNA, 73 bp, Homo sapiens
tgctcgtcgggagtgatcacctaccctacagaatcatccagaaccgcatcctgctcgtcatcctagggatcat

SEQ ID NO: 249671 - DNA, 75 bp, Homo sapiens
ggtgctcttcttcttcgagaattacaccggggtccagccaataggagctctgaacccaaaaagagcagcattctt

SEQ ID NO: 249672 - DNA, 100 bp, Homo sapiens
gacgaggagcgcgtcgtgcgcctgggggtgcgcgcctgcgacctgcccgcctgggaagccgagatcccccgcgaggtgatcgagaggctggcccgcagtc

SEQ ID NO: 249673 - DNA, 75 bp, Homo sapiens
taatttctcagaacttcacaaagccagtgctggtttcgggggtacataaaaagctcaagtctgagctctggaagc

SEQ ID NO: 249674 - DNA, 100 bp, Homo sapiens
gcagaagggaggctccaagacctcatcaacaattaaggatgccggaccagatctctgtctcggagttcatcgccgagaccaccgaggactacaactcgcc

SEQ ID NO: 249675 - DNA, 90 bp, Homo sapiens
tgcagatgcccctcctccaccagaggactgggaggagcatgtcaacaggagaacaagaacctggttcatggtaatgtgtgtggccggaac

SEQ ID NO: 249676 - DNA, 100 bp, Homo sapiens
agcagatctctttgggtggtctcagcttatctacaatcatatcacaatcgtaaagctgaaaattgaaatcatgaaagtagacaggactaaactgaagaag

SEQ ID NO: 249677 - DNA, 87 bp, Homo sapiens
agaagtcactgaacttaggagaaagtatacagaattacagctggaatgtgtgctgtatttatggagtttaaagattaatcatcccaa

SEQ ID NO: 249678 - DNA, 83 bp, Homo sapiens
gtaatgcaatggtctcaatctctggaaaaacttcttgccaaccaaaaaaacctcggatcaattctcagctggtggcacaacaa

SEQ ID NO: 249679 - DNA, 71 bp, Homo sapiens
gctgtgtggaccatatgaaaaatttatatgtgagcaggaagtggcggtgcgagggctgctgcacagcgagc

SEQ ID NO: 249680 - DNA, 100 bp, Homo sapiens
gggagacgggtgaggtacaggctcagtctgcggccaagactccgtcctgcaagatacaggtggaaacccgaaaacagagtattgtatgggagtttgaaaa

SEQ ID NO: 249681 - DNA, 80 bp, Homo sapiens
aagtgttggcggatggaagggaggagactcctgaccctcagaatggagaagttgccccagtgcaaggcactgcattcgac

SEQ ID NO: 249682 - DNA, 100 bp, Homo sapiens
ttcttcacattccttcttagaagacttgactggtcttacattgctgcatcaagaaacccaagctgctgaggcctccccatggccacccatggaccagtcg

SEQ ID NO: 249683 - DNA, 83 bp, Homo sapiens
ccagcatgtcagcatgaccaagcgcctctactacctctggatgtgaatgggtaccacagaccatgtcatcgtcctggcgtcca

SEQ ID NO: 249684 - DNA, 100 bp, Homo sapiens
attacagctgctagccaggaacatggactgaagtatccagcgctcattgggaatttagttaagagtatggtgtttgcgaaaacttgcggaagctggagat

SEQ ID NO: 249685 - DNA, 85 bp, Homo sapiens
aatcaccaaagactacattatgaacccaccactgggcaaagaaagtatccctttggttctgatgactgtcttgtgaaaatatggg

SEQ ID NO: 249686 - DNA, 75 bp, Homo sapiens
tctgtacccattattggtggtttttgggagactatctttggcaacagtgaatttaggaggacttttactccaagc

SEQ ID NO: 249687 - DNA, 90 bp, Homo sapiens
atcgatgtgggaactgggtactatgtagagaagtggatccaaacttctacagcaaaaacttacttcttttaggaaagacatacttgaaac

SEQ ID NO: 249688 - DNA, 87 bp, Homo sapiens
gaatcctcggcagataaactggactgtcctctacagaaggaagcacaaaaagggacagtcggtacctgcacatgttgttctttgtca

SEQ ID NO: 249689 - DNA, 96 bp, Homo sapiens
ctcaagaagtcgagatcgaagatttagaggccgctacagaagtccttagtcaaaatgcagatcttcgtgaaaacccttaccggcaagaccatcacc

SEQ ID NO: 249690 - DNA, 100 bp, Homo sapiens
ttatcaacacaaagttggcaacattattgatacaatggtctgcctgctgggagtcctggccctggtcatcagctggggcgcgctgggcttggagctggct

SEQ ID NO: 249691 - DNA, 85 bp, Homo sapiens
ggcgaagaccagtactatctgcgggtcaccacgatccccgtcgaggtcaagatcaagatccaggtctatttcacgaccaagaagc

SEQ ID NO: 249692 - DNA, 51 bp, Homo sapiens
tctggggatcttcgcactatcccaagtttcctgttttccagcacccaacat

SEQ ID NO: 249693 - DNA, 96 bp, Homo sapiens
ctcatgagagcgcggccggaggacaggtgacttaagagattaaaattaatttggttgctgttggttctgaacaaataatgagttcttttatttgag

SEQ ID NO: 249694 - DNA, 100 bp, Homo sapiens
caggaaagccattgctttgttacccaaagggaacccaccggatgccaggccaaggtggagcaagcggtggagacagagccggagcccgagctgcgccagc

SEQ ID NO: 249695 - DNA, 101 bp, Homo sapiens
catggatctagaggcgaccccccaggaccccaactcagctgcacctgttgtgttcagaagcccaggtgatgttaaaaagtgctctgggtgatcggattaaa

SEQ ID NO: 249696 - DNA, 100 bp, Homo sapiens
cgcagcaatgggactgtctcaccttctgccttcttagaattcaaggaagccttctccctatttgataaagatggcgatggcaccatcacaacaaaggaac

SEQ ID NO: 249697 - DNA, 83 bp, Homo sapiens
agattctgcgcgtcaacgacaaatccctggcccgggtgacccacgcggaggccgtcaagaatccacattcatctcaatggaag

SEQ ID NO: 249698 - DNA, 101 bp, Homo sapiens
agaaactgtggcagaggtgactgagattgttttagcaaccaatattgcagagacgggtatcactattcctgatgttgtatttgtaattgatactggaagaa

SEQ ID NO: 249699 - DNA, 75 bp, Homo sapiens
tggtgactgaggggatgaccctgcccactgagatgaaggaggcagccagtgagctacagagacttctgaagtgga

SEQ ID NO: 249700 - DNA, 98 bp, Homo sapiens
ctcctcacgcttctgctggaccgaatccttggaatggacagaattcttccatctctatgacaacaagcccattttagctttctggagaatagcatctg

SEQ ID NO: 249701 - DNA, 82 bp, Homo sapiens
ctccagccgaaggagaaggggggttatggaaacaaaggacatgctttacatcgtcactgaatttgctaaaaatggagaaatg

SEQ ID NO: 249702 - DNA, 75 bp, Homo sapiens
gatcctggacctggagaagaatgagtgaaacctcacctgctatccagctgcccacacctgcagtccagagcccaa

SEQ ID NO: 249703 - DNA, 75 bp, Homo sapiens
gcggctttgaccgagaggctgctggagctcgtgtttggacgcgtacatgtcccagagcaagcacacggaggcccg

SEQ ID NO: 249704 - DNA, 100 bp, Homo sapiens
gtctcggcagcgcccgcggagacgtgaagaggtggctgcagtccgagaagggatgtcctggattgttcctgtgccgctgctgtccctcctcacagcaaaa

SEQ ID NO: 249705 - DNA, 98 bp, Homo sapiens
ctttatagtcctgattcaagtgttggcggatggaagggaggagactcctgaccctcagaatgctgacagcagccatggcgagcggcagtggagacagc

SEQ ID NO: 249706 - DNA, 50 bp, Homo sapiens
ctcaccgcaacctccacctcccaggctgaggcaggagaatcacttgaacc

SEQ ID NO: 249707 - DNA, 100 bp, Homo sapiens
caaccaagtcagaattgctattaaggaaatcccagagagagacagcagcatgacgacagagatgatggtgtggattattgggccaaaagaggaagaggtc

SEQ ID NO: 249708 - DNA, 100 bp, Homo sapiens
ctaaatgaggaatgtctttcctaccatctaaaatacgaaggtttctggctggttaagtgggcagaccaacatccacctcagcaaaaacttcttcctgacg

SEQ ID NO: 249709 - DNA, 100 bp, Homo sapiens
gaaagaaaacaatttctcctgctctgcagcttctgttcagtgtatgcagagaatatttccaaaatggtgggaagagaaaagcacttgagaaagatgaaaa

SEQ ID NO: 249710 - DNA, 87 bp, Homo sapiens
tagacctggacaagtatgtggaaatagcgcggctgtgcaagtacctgccagagaacgacctgaagttcgtgccctcgtgaggctggc

SEQ ID NO: 249711 - DNA, 98 bp, Homo sapiens
cccaccgcacgttcagaagtcggttggattggatgctgctggcaagacaaccattctgtataaactgaagttaggggagatagtcaccaccattccta

SEQ ID NO: 249712 - DNA, 100 bp, Homo sapiens
cgactccgtaggagcgcgggggcggctcctgctcttcctggactcctgagcagaggattaacacagattcctcagatccagaagactgaaatttcctttc

SEQ ID NO: 249713 - DNA, 80 bp, Homo sapiens
ggagcgctgttttcgtgatcttcagaccccaggttctttggtactccaaagattcaggtttactcacgtcatccagcaga

SEQ ID NO: 249714 - DNA, 76 bp, Homo sapiens
ttcaagtgcatgcagctcactgatttcatcctcaagtttccgcacagggcaactacactttccaatgcagtgtctt

SEQ ID NO: 249715 - DNA, 100 bp, Homo sapiens
ggtccacgttcgtgctacagaagaagggcatcgtgcgtgccaagcggcgagtgtctgcgagattaatctctcatggccgctgcacaagaacctggctttt

SEQ ID NO: 249716 - DNA, 50 bp, Homo sapiens
tcatattatagatggagtaaagaatttcacggtccctcatggtgtctcac

SEQ ID NO: 249717 - DNA, 99 bp, Homo sapiens
tggagctgcaggagatgatggaggagcagggaactttccatgactggatcacagggaaaaaccgaccgagctcaggaagcctaatccaggtggtaacca

SEQ ID NO: 249718 - DNA, 113 bp, Homo sapiens
tgatcgggggaggccgagaaccgcagggactggccgagttggtagctggcagtgttgtgatggcttttgaagaagtatgcccggacagaatagatctgattcataaaaattac

SEQ ID NO: 249719 - DNA, 83 bp, Homo sapiens
cgggcacagaagagatcagtgggatctgatgagtgtggacactgccagcggctgcagccgacttggaatgacctgggagacaa

SEQ ID NO: 249720 - DNA, 80 bp, Homo sapiens
gaggagcacgaggatcgtgggagctaagaacatgattatgatatgagggtggatgatttccttcgtcgcacacaagctgt

SEQ ID NO: 249721 - DNA, 50 bp, Homo sapiens
agaaaatggagcagacattcagggagcgttacctgggtggcatcaaaaag

SEQ ID NO: 249722 - DNA, 100 bp, Homo sapiens
ctccggatctcttcgtctttgcagcgtagcccgagtcggtcagcgccggaggaaagaccacagcaagattctttcattcgtctcctcctagcctggggga

SEQ ID NO: 249723 - DNA, 100 bp, Homo sapiens
ttagttccaccgggcagcgggagtcaggaccgcctgtcctcagacccctccgcagcgactgtggcggccgcagggagctcccagggaagtggtcgacccc

SEQ ID NO: 249724 - DNA, 50 bp, Homo sapiens
gaattacatagctggaaaggatcttacagatgacctgagaattaatttat

SEQ ID NO: 249725 - DNA, 74 bp, Homo sapiens
gggtccttagcactattttacagaaaggttgatgacaacaagaaactaggagaatgggtaggcctttgtaaaat

SEQ ID NO: 249726 - DNA, 76 bp, Homo sapiens
gccaagacttggttaaagtcattgaggactttccagcaaaggtctctggacctctgactgacactgtgcctgccca

SEQ ID NO: 249727 - DNA, 100 bp, Homo sapiens
cgaacaggtgctgttccagagcgtggccgccagctgggcgcacgacaccaacatcaccgcggagaatgcaaggcgccagattatgtttgagaccttcaac

SEQ ID NO: 249728 - DNA, 80 bp, Homo sapiens
cacagagctaaagtgacttttcccaaggtcgcccagagaaacttgcccaggccaaagaagagaacgtgggcttacatcag

SEQ ID NO: 249729 - DNA, 74 bp, Homo sapiens
gctatcatcccagcagtggagttcagcccactactctgaaccagacacgaatgcagagtttgagtccagatccc

SEQ ID NO: 249730 - DNA, 100 bp, Homo sapiens
tgtccttctgctattgatcctgaaggtctgaatttcctgctgctgttcacaaagatgctttttatctttaactttttgttttccccacttccgaccccgg

SEQ ID NO: 249731 - DNA, 100 bp, Homo sapiens
gaaaaggaacgggagctgagaggtgattcctcctaaggagtggaagccaagacagtgctatgatgacattgataatttgctcattccagcaccaattcag

SEQ ID NO: 249732 - DNA, 80 bp, Homo sapiens
accgtgcgcgtgcgcctgggggcaccgctgccgttccgaggtggctattatcatggaaaactaatttttcccagagaatt

SEQ ID NO: 249733 - DNA, 83 bp, Homo sapiens
caccagctccgaaatcaccaccaaggcctatgaaggggtgctgcagctggtggaggctcgcgggcgctacgaggagctctgca

SEQ ID NO: 249734 - DNA, 100 bp, Homo sapiens
ggagaggccatggaatacccgccaacaagataatcatcgctggaataatagggacctgtctgaatgtagtttggaccagaaaatccctttaggacacagc

SEQ ID NO: 249735 - DNA, 88 bp, Homo sapiens
agatgccgaagatgaactttgcgaatgtatttattggtgccaatcccctgggtataacccggaaaaatcccagaacacctctttctga

SEQ ID NO: 249736 - DNA, 101 bp, Homo sapiens
atggaaatcctaatgacagtctccaaattcgcctccatctgtaccatggaatgtgttccagaagatctagaactgaagaagaagatttttgctcagttaga

SEQ ID NO: 249737 - DNA, 49 bp, Homo sapiens
cgaccctggactccaacaacaacacaggaacttccatgtctggaatgag

SEQ ID NO: 249738 - DNA, 98 bp, Homo sapiens
tccgcggcgcggtcggtcggcgcctgttctcgggctgtttggcgggactggaaggatcaccagcacatatgcggccagtcagcagctgtcaccgtcca

SEQ ID NO: 249739 - DNA, 115 bp, Homo sapiens
tgtggaccctcgtgagcgacccggacaccgacgcgctcatctgctggagcccgattctgaggttgggaccaagaaggaactatctattttaaaccaaaaattttccgaagaagta

SEQ ID NO: 249740 - DNA, 82 bp, Homo sapiens
gaaggacggcctgacgcaggcggacaaggacgcgctggatggcctcctccagcaggaatcccttggcaccatgtcctgtgtg

SEQ ID NO: 249741 - DNA, 82 bp, Homo sapiens
ctcggagaaacaggcgccgcgggctccgcgcccggccggacccgggcccgagtggtctcggaaagagggtcgtggtcccgca

SEQ ID NO: 249742 - DNA, 100 bp, Homo sapiens
gagctcgggaaggacctcatagacttggccacttttaggcctcagccaactgccagtagtagccatggttatgtgggttccagtagtagaatatcaagaa

SEQ ID NO: 249743 - DNA, 83 bp, Homo sapiens
cttggaattttaccagatcgaatctgggccaaatagaaagtgtggacaacagtgagtatatgcggaatggagacttcttaccc

SEQ ID NO: 249744 - DNA, 75 bp, Homo sapiens
tcctggtgaccgagcacccgcctccgggcatcttcaactgcgtctgtagaggcttctggtgaaatcgcattatgc

SEQ ID NO: 249745 - DNA, 117 bp, Homo sapiens
gttttatctgtagcattgttgcagtagccttattgtatggattatgttatggggctttaaaggacctggaagaatgcccagctgggagaagccatgatcaaaagcctggaggcccag

SEQ ID NO: 249746 - DNA, 82 bp, Homo sapiens
cgcaaacccaaagatccccgttcctggagattctgattgagatggtcatcatgggccagtgctactacaacgagaccatcgg

SEQ ID NO: 249747 - DNA, 100 bp, Homo sapiens
aaaagcacaaggattctcgctgtgacagagacaacaccgagtatgagaaaactcaagacatggctgcccagtgtgtcacaaaggtggcgctgaatgtttc

SEQ ID NO: 249748 - DNA, 51 bp, Homo sapiens
cccaggagaagccgcccaaagaactgtccctggtacgtgagcccctttccc

SEQ ID NO: 249749 - DNA, 101 bp, Homo sapiens
cgggaagcactacaagggtcctgaagtcagttgttgcatcaaatacttcatatttggcttcaatgtcatattttgggtcgcccctcagtctccactagaga

SEQ ID NO: 249750 - DNA, 82 bp, Homo sapiens
agaaggttcagttggcaaaccagatatatgacttggctttatcctgtggataaacgcagagtgaacgagtttggggagtcct

SEQ ID NO: 249751 - DNA, 100 bp, Homo sapiens
tgccccagctcttcatcactgttggcatccttgtggcccagatctttggtcttcggaatctccttgcaaacgtagatggcctccagttaccaactcctgt

SEQ ID NO: 249752 - DNA, 96 bp, Homo sapiens
cgagtacagctgcaccgtgcggctgctggacgacagcgagtacacctgcaccatccaggaatggatgtatatggctacctactggcacgagaaggg

SEQ ID NO: 249753 - DNA, 80 bp, Homo sapiens
gaggtcaacctgcgcccccagatgtcccagacaggccgacggtcgcaaggtcctacggtcaagcatccgggagtttctat

SEQ ID NO: 249754 - DNA, 82 bp, Homo sapiens
tagggtgggacgatggcaggtgggggcagcgacctgagcaccaggtagttaaaccagagagcaatgacaaagaaacagaagc

SEQ ID NO: 249755 - DNA, 50 bp, Homo sapiens
gactttttcttggacgaattcaggtgtaccttgaaagacttttaacatac

SEQ ID NO: 249756 - DNA, 90 bp, Homo sapiens
tgttgccaaggccaaatatgaatttttatttggcagatctgaagggaaagctccagatactagaccacctttcactcacctgaggactcc

SEQ ID NO: 249757 - DNA, 87 bp, Homo sapiens
agcttaaagatgacaccttgcattccctatttaggtcacagcccatgagctgggaaaggaggcagtgctcttgggaggaacagcagt

SEQ ID NO: 249758 - DNA, 82 bp, Homo sapiens
acctcttcctcttcataaaaaacatgcttccatttctaaaggactacaggatcagatagtgtctctgggtgccacagtacac

SEQ ID NO: 249759 - DNA, 82 bp, Homo sapiens
gccttcccacctagctctcctctctttgcagagccatacaaagttcactgccagtgaaagatgtagaagataaacctgaaca

SEQ ID NO: 249760 - DNA, 98 bp, Homo sapiens
atgtgttatgtgcagtcctttacagcaatcacaacagaatgggccgccacaaaccccatttggccctcaaacagcttcaagcagtttatgtatggatg

SEQ ID NO: 249761 - DNA, 83 bp, Homo sapiens
tagataacagcttccgccaggcggtgatgaagaatccccccgaaaggaccccccagctctcgtggcattatccttcagtgggg

SEQ ID NO: 249762 - DNA, 75 bp, Homo sapiens
ccccaacaccctctacgaaggcggctacttcaagaaacctgtgaaggtcgaaacagctgcgtttcctgttttaat

SEQ ID NO: 249763 - DNA, 100 bp, Homo sapiens
ctggacaaaggaacaggtatctcagtttctttcaagatggcttgaaaacagctgataagttgaaacagtacattgaaaaactggctgctgatttatataa

SEQ ID NO: 249764 - DNA, 98 bp, Homo sapiens
gccatagttcacatacagctaaggccaggactccacgctgggcttgagcctgaatgaaggggtgccggcggagtgcgacagcgtagtggtgcatgtgc

SEQ ID NO: 249765 - DNA, 83 bp, Homo sapiens
tggaaatcaaagtccaccatgtgcttttgcacatccaaaattgttccaactgctggtgttctgcaagatggagccaggaggag

SEQ ID NO: 249766 - DNA, 101 bp, Homo sapiens
accttgcatactgtctcaatgatggcgagtgctttgtgatcgaaaccctgaccggatcccataaacactgtcgaatctctcttgcaggagtaacacaggca

SEQ ID NO: 249767 - DNA, 80 bp, Homo sapiens
atccgatgtggactcagccactttgctgcactgaccaatgtgaagttcatttccaatccgccctccatggtggcagcggg

SEQ ID NO: 249768 - DNA, 87 bp, Homo sapiens
cccgaccgcacacgttgccaccctgaggaaacgatttgaacagcagcaaaaactcttagaagaagaaagaaaaagacgccagtttga

SEQ ID NO: 249769 - DNA, 98 bp, Homo sapiens
caagaagtttctaggaaaggccggacaccagggagaagaaatgggtgaccgttggtgacacatccctacgaatctacaaatgggtccctgtgacggag

SEQ ID NO: 249770 - DNA, 82 bp, Homo sapiens
tttgactggaacatgctgaaattccaaattgtggctactaatttgccccctgaagatcaagatggctctggggatgactctg

SEQ ID NO: 249771 - DNA, 74 bp, Homo sapiens
agtcagtgaccaactcagtgccaaaaccaggcagtttggtggttatgccaaggaagcagactacgtagcacaag

SEQ ID NO: 249772 - DNA, 83 bp, Homo sapiens
gcggcttaaatgatgtattttgtgatcgcagcgatgaaagctcggagcccaagatcctcttctcctacaaatgccaagtggac

SEQ ID NO: 249773 - DNA, 75 bp, Homo sapiens
cgaagctggccgagcaggctgagcgatacgacgaaatcatgaccaccccaggaaaagagaactttcgcctgaaaa

SEQ ID NO: 249774 - DNA, 75 bp, Homo sapiens
tccaacatattggactccatctgctttttgctgggcatctccaacctgtctcagctacaagagccaaatactgat

SEQ ID NO: 249775 - DNA, 100 bp, Homo sapiens
gaagaaaagtagaaggaaaaacagaacgttgcaaactctggaaaaaaacttgggtccatggagggaagcccatccctgagacgcatgacagtgatgcggg

SEQ ID NO: 249776 - DNA, 83 bp, Homo sapiens
attccaacaacaattccgatggcaaagccgttgccaagacggttacctggcacgctggccacattctgcctcactcttatcag

SEQ ID NO: 249777 - DNA, 100 bp, Homo sapiens
gtttcccttgctgcggttgcttgggtgggacaacaagtccacaacctgcttctcacctacctgatagcttctatatacccacagacttcagttcctgcag

SEQ ID NO: 249778 - DNA, 100 bp, Homo sapiens
gagggacgtcttcctgtatagagcgtacctggcgcaggagccaggtgagaatttcaaggattatcgacttcatattgcacattaaagttacaaattaaag

SEQ ID NO: 249779 - DNA, 100 bp, Homo sapiens
gccacatctgctacttcctcgactacggcgcgctcagcctctacagtctgggcccccgccgtggagccgtgtggtgtatgtgtggtaacaccatgtctgt

SEQ ID NO: 249780 - DNA, 98 bp, Homo sapiens
ccccccgggactcccagggctccagggccctcctccggccccaggcctaccccagtcacggacggcagaggtggaggagacactgaagcgactgcaga

SEQ ID NO: 249781 - DNA, 74 bp, Homo sapiens
atgatcccgactgtggagatgtggtgcgactaggtttaagaattgtttaagctgcatcaatggagcacatacag

SEQ ID NO: 249782 - DNA, 50 bp, Homo sapiens
gacaagcgcttctcgggcaccgtcagattgcaggaggagatgcttcagag

SEQ ID NO: 249783 - DNA, 98 bp, Homo sapiens
actttttgaatttcaagaacagtaaagttggaacacagcagagggtgtgtaataaaatacaggacttcagggccacaggtgctgccaagatgctccag

SEQ ID NO: 249784 - DNA, 100 bp, Homo sapiens
ctctcccacgtctacacccatcacctccagcctgagggcgcaactgagaggaactgagacccaagcagctcagtaaagacacacacctcctctacgtact

SEQ ID NO: 249785 - DNA, 75 bp, Homo sapiens
tccagctccagttcgtcagactccgactcagagagctctgaggaacatgaatacagtgatgaagctcctcaggaa

SEQ ID NO: 249786 - DNA, 100 bp, Homo sapiens
gccgggtgatctttggtctcttcggaaagactgttccaaaaacagtggataattttgtggccttagctacaggagagttggacaagctcaggatgatcat

SEQ ID NO: 249787 - DNA, 111 bp, Homo sapiens
tcttactaccactcacccgcagactccttctccagcatgggctcgcctgtcaacgcgcagggtggtgagaagctgcaggatgcctactacatcttccaggagatggctgac

SEQ ID NO: 249788 - DNA, 74 bp, Homo sapiens
atcctgggcgtcccgcccggcgccagcgagaacgagctgaagaaggaagaaggtagataatgactataatgccc

SEQ ID NO: 249789 - DNA, 80 bp, Homo sapiens
cgcgcgcctctcccggaccctgcaggtgacatcctataccccaaggactcgtccagccctcacagcggcgtgcctgctga

SEQ ID NO: 249790 - DNA, 75 bp, Homo sapiens
ccagttcttcttacccagggcttagaaagtaacgattttgaaatgctaaatcgacttcaggaagaaatcaccaaa

SEQ ID NO: 249791 - DNA, 100 bp, Homo sapiens
actccaggagcccccgacagaagagagagcagaggtgtttgtcagggcagggctgaacacaggtgctcccactctttcccggcttttagaagctggtcct

SEQ ID NO: 249792 - DNA, 100 bp, Homo sapiens
gcggacgcgactcgagggtgacgctcgctccgctcgtcccgctcgtcatggcctacccgggatacggaggagggttggttgaatctggcgatgtggaacc

SEQ ID NO: 249793 - DNA, 49 bp, Homo sapiens
cgcgagtgaggaaaggaggtactgtagacccagtcatggcagcctccag

SEQ ID NO: 249794 - DNA, 100 bp, Homo sapiens
cctcagtcgggctggagagtcgagagcgggtcatggtaattctgaattgctcagctctgcagagtttattgcatttgctgagtagcccaaaggaatctat

SEQ ID NO: 249795 - DNA, 95 bp, Homo sapiens
aaattcatcaaggagctcatcaaggacgggaagtcactcataagcgcgctcaagaccctgggcgctgcctatggcacagccaagagcggtaccgg

SEQ ID NO: 249796 - DNA, 90 bp, Homo sapiens
ccacggaggcaccatgaagaagtcttactcagaatagcctaacatggcagaccagagacagcgctcactgtctacctctggggagtcatt

SEQ ID NO: 249797 - DNA, 97 bp, Homo sapiens
gaattcagtactctgtaacacccagctaccaggaagagagagaaaatccttcaaaacggagtagaattgaacgtgatatagataacaatttgatcac

SEQ ID NO: 249798 - DNA, 83 bp, Homo sapiens
cacaaaggaagcattgaagaccgtcttaaagaatttctggcgtggtctcacgtgtgaaacatggctacagattggctgggaag

SEQ ID NO: 249799 - DNA, 75 bp, Homo sapiens
cttgaatcatgaagctactaaccagagccggctctttctcggttgtacatcctggagacctgaagaattctgttg

SEQ ID NO: 249800 - DNA, 87 bp, Homo sapiens
tgtgcagaagttctcgaatcattctttgtacagaaattgaaaggcttcaaagctagcaggcgcaagcaaactgtcgagtaggagttg

SEQ ID NO: 249801 - DNA, 90 bp, Homo sapiens
aaaagagaggcaccgctggaacactaatgagtatggtttgaagtggtgaacatggatttttctcggcttcacatgtacagtcctccccag

SEQ ID NO: 249802 - DNA, 96 bp, Homo sapiens
cgagaccgtgaccgagagcgtgaccgagagcgcgaatatcgtcatcgttagaaggcaccatgactcctgtgaggatgcagcactccctggcaggtc

SEQ ID NO: 249803 - DNA, 100 bp, Homo sapiens
cgctgctggaacccgctggaagaatttggaggttttggttcagttagtggaaaaattgaaatagaaatcaagatcaaccatgaaggagaagtaaacaggg

SEQ ID NO: 249804 - DNA, 82 bp, Homo sapiens
tttgctcctccctgcaactaactccattcttaattgggtgatcagcccatgacctaaacctccagacaaaataaaacggaaa

SEQ ID NO: 249805 - DNA, 75 bp, Homo sapiens
caaaggccagccctgcaggctccaagcaaccgcttacaaacacgcagatggcaagaagattgatggcaggagggt

SEQ ID NO: 249806 - DNA, 90 bp, Homo sapiens
ggattacaatttgatcgctgggaattctccaccttaaagaagggcgatgccagtccctccactccagaggagaacgaaaccacgacaacc

SEQ ID NO: 249807 - DNA, 100 bp, Homo sapiens
aggaagagctactgttaaccaggatacaagattagacaacagagtcattgatcttaggaaactggcgatggaatatgagaggagccctctggaaagaaaa

SEQ ID NO: 249808 - DNA, 80 bp, Homo sapiens
aagtcaacatccgtggagacatttgggcttgttgttcttcggaagcctggcccaactagagaatctgtgcaaacagctgt

SEQ ID NO: 249809 - DNA, 50 bp, Homo sapiens
caagaacgcagacctttgttgatgaaatctttgacatggtaaaaccaaag

SEQ ID NO: 249810 - DNA, 100 bp, Homo sapiens
gtcaaagatgccagatgtgggagacacgccaaagctcccaaggattctcaaagttggattggtggaaacaatgaaccattgacaggctttacatggcgag

SEQ ID NO: 249811 - DNA, 100 bp, Homo sapiens
aatacttggattctatccctcctggtcagtacatggattcttcacttgttaaggaacattctggacgtgtgtttcggctccagtttgatgagtttcagat

SEQ ID NO: 249812 - DNA, 101 bp, Homo sapiens
atctgggcacttggccaaagaaacaagaaaaagtttgccaactcctgctctagattgatggttacaaagtctgacagaggatacagttacagggacatggc

SEQ ID NO: 249813 - DNA, 74 bp, Homo sapiens
ttcgttccccccgagttcgacgtgaccgggaacacctttgaggacatgtattcctctgagaaaccttggacagc

SEQ ID NO: 249814 - DNA, 98 bp, Homo sapiens
tctaaacgaccatctgaagcatctgcttacaagcgcctggcagctgcgattcagccacctcgtggggtatggtgctagatattactcttacctcatgt

SEQ ID NO: 249815 - DNA, 90 bp, Homo sapiens
ggcgctgcgccgggccccgggccccgatggccccgaccgcgtgctggagctcttcgacccacccaagtttgggatatgagattgaaaatg

SEQ ID NO: 249816 - DNA, 115 bp, Homo sapiens
gcgcggggaagtcatgctcgcttcacggaggcaatagctagccggctgacaaacgggctcatcataatgcactggaacgaaaacgtagggaccacatcaaagacagctttcacag

SEQ ID NO: 249817 - DNA, 100 bp, Homo sapiens
caggcggccttccgagagggactggagcaggccgtgcgaaaccagcctggacaccaagtctgtgtcagaaggccacctcaagaggaacatcgtggtgaag

SEQ ID NO: 249818 - DNA, 90 bp, Homo sapiens
ggagactccggcgctcgccatggccgacgaaaagcccaaggatcccaaaatggctgggcgaaaacttgctctaaaaaccattgactgggt

SEQ ID NO: 249819 - DNA, 100 bp, Homo sapiens
cttagacagtcgtggttcctgtgatctgtgtcctctttgcagaagctgcggataaccgtctggtccttgtgcacaaaatccgtgtcttacatcaaatacc

SEQ ID NO: 249820 - DNA, 100 bp, Homo sapiens
tctttggccttgttcaacatcctccggtttcccctgaacattctccccatggtcatcagcagcatcgtgcagcccaccttgggacaccttgactccaagc

SEQ ID NO: 249821 - DNA, 100 bp, Homo sapiens
ccaagaaccttctggccaaggtgattcagattgcaacgtcatcctccacagctaaggattcactccttctccagttgcacagccacacccttcagctggc

SEQ ID NO: 249822 - DNA, 91 bp, Homo sapiens
ctgacaaatcctagcgaatttttggagcatctccacccaggaacctcgccatccagaaacaatgcagatcttcgtgaagactctgactggt

SEQ ID NO: 249823 - DNA, 98 bp, Homo sapiens
ggagtttgagccccggaggcagagcggctgccatgcaccctcatcacatgtgtggattctgggattctcagagtctggcatgacaaggacaaggacac

SEQ ID NO: 249824 - DNA, 90 bp, Homo sapiens
atgaatgcaaaagaattcttcgaaaattggattcatgcccgaaaccaaaatgaaataatttttgggctgaatgatggatactatggtgct

SEQ ID NO: 249825 - DNA, 97 bp, Homo sapiens
gtggtttcagctggcgctgtgcttcggccctgcacagctcacgggcggtactttattaccaaggttgccatcggaaccaggaatgacattactcact

SEQ ID NO: 249826 - DNA, 90 bp, Homo sapiens
cgttggcctcgccgcccctgctcgggcccccgacagctgctctcgggagccgcctcccgacacccgagccccgccggcgcctcccgctcc

SEQ ID NO: 249827 - DNA, 129 bp, Homo sapiens
ctcggctcatgttctgggacttaggagggcaggaagagctgcagtctttgtgggacaagacagcacccaagaaaacctcatttggctcgctgaaggatgaagaccggattttcaccaacctgtacggcc

SEQ ID NO: 249828 - DNA, 75 bp, Homo sapiens
tccagcttcttccccatgccagcaaggctgtgtttgatgtggacaagaagaaagggttgactctgattgagctct

SEQ ID NO: 249829 - DNA, 154 bp, Homo sapiens
cctccagggtagcggctaccggagcgctgcagggggctgcgcctgcctgctccgccccagacctgtcggcgaaagggcctgtagtcgaaagctctacaattggttgagagtggcaccctaccgaccagatcagcaggtggaagaagatgacgac

SEQ ID NO: 249830 - DNA, 76 bp, Homo sapiens
tgctgatcgccccagggatcaggagagatcccaggcccacaaatcaacgcatcaataagcacgtcaacaatgatgt

SEQ ID NO: 249831 - DNA, 100 bp, Homo sapiens
aaagaagcagttcctgatgttacaaatgaacaaggatctcccagctacttccaggcctggtgtgaggttgtaagagacacgggggtgctccgggcccagc

SEQ ID NO: 249832 - DNA, 75 bp, Homo sapiens
tgggagccccctccgagttacacctccagagccaaaagtaatagcccggagaccatcggcaggcgagtggctgtg

SEQ ID NO: 249833 - DNA, 107 bp, Homo sapiens
tacatcagagaaacccaactccatggacactgcaaatacctcacccttcaaagtaccaatgccagaggaacaagcattctgtgttttggtgaaaatcatgtacgact

SEQ ID NO: 249834 - DNA, 100 bp, Homo sapiens
ccagctcccgcctccatctgaagagggctccaggcatccggtcctggtccctgctggttggtgacttaagagattaaaattaatttggttgctgttggtt

SEQ ID NO: 249835 - DNA, 75 bp, Homo sapiens
tgtccgaacgctttgggctgttaggggttatcaatactctggctgaccatcatcatcgtgggactgactttggtg

SEQ ID NO: 249836 - DNA, 100 bp, Homo sapiens
cttcagagcgtcacggcgtacgccctcatggggaaaatctccccggtgactttcaggctgaaggtgatgtggccgccctcaaccgacgcatccagctcgt

SEQ ID NO: 249837 - DNA, 100 bp, Homo sapiens
agtcccagttcctctccggaaaagcagtggctctcgcttcagagatgcgctcagctttcgcctgcatcacactgcaatttcgccgccagctttctgaacc

SEQ ID NO: 249838 - DNA, 75 bp, Homo sapiens
aaggccaacagagagaagatgactcagatgagggaatctcgctgggaagctgacaccctggacaaagagggactg

SEQ ID NO: 249839 - DNA, 75 bp, Homo sapiens
tgactttcacttccagccagctgtgaagaagaatataaaaaggcttctgcagaaccccaaagtgacagagtttga

SEQ ID NO: 249840 - DNA, 75 bp, Homo sapiens
cagccactacgccgggcaggatgccacggctcagctgtcgcaggccctggaggagctgggaggccagaaacaaag

SEQ ID NO: 249841 - DNA, 83 bp, Homo sapiens
aaatcgtgcacttgcaggccgggcagtgcggcaaccaaatcggcgccaagcttcctgcctgacacagctcacttcaagaagtg

SEQ ID NO: 249842 - DNA, 83 bp, Homo sapiens
tatcgaaggtaccacaaccccgattgctttcgtgaagacaatgcagatcttcgtgaagactctgactggtaagaccatcaccc

SEQ ID NO: 249843 - DNA, 87 bp, Homo sapiens
tgacttaaatctgcactcctattccaatttgcccatctgggtcaacaagcttgacatggaggaatggaagttggatacactttgtga

SEQ ID NO: 249844 - DNA, 100 bp, Homo sapiens
ccttccaggacggctacagcctgtgcccgggccgggagctgggcagcctggaattgtctcgccatttaaacgagtattcctaaaaggtgaaaagagtaga

SEQ ID NO: 249845 - DNA, 75 bp, Homo sapiens
cagcgacccgcagtccatctgactcctgcttcccgggtgttgctcgtgaagcaaaaggagggtaattttgatatt

SEQ ID NO: 249846 - DNA, 89 bp, Homo sapiens
caagcggtttcaaacggcttagagcaggccgcttggttctgacccagctgagtacggcaagaagaagctgaaatacctgccctacaatc

SEQ ID NO: 249847 - DNA, 78 bp, Homo sapiens
ccagcaacaaggtcaagagcgacccgcagaaggcggtggaccagccgcgccaggatgccggctccaggagcagcagtg

SEQ ID NO: 249848 - DNA, 82 bp, Homo sapiens
ataagcttgacattacagccaagatggtgctgtcccagagacaacgagatgaactgtgtattacctgactgcttaaccgatg

SEQ ID NO: 249849 - DNA, 75 bp, Homo sapiens
attccaagtaactcttatttgggaattggctcgggaaaaggtaatgcgagaagttaaagccttagccaagcttga

SEQ ID NO: 249850 - DNA, 75 bp, Homo sapiens
cataagaagttcttcgatgtatctaaacttggcaccaagtatggtaatagcctgcagctggtgttttgagaagcc

SEQ ID NO: 249851 - DNA, 101 bp, Homo sapiens
agcagatcgagaccgggcccttcctcgaggcggtgtcccacctgccgcccttcttcgaatctgaattatccagaacagaaagttgtgactgttggacagtt

SEQ ID NO: 249852 - DNA, 75 bp, Homo sapiens
gtgggagcccagttggaagcccgggaccgtttaaaaaactggctacaagaattagttgatcgagtgctggaacgt

SEQ ID NO: 249853 - DNA, 90 bp, Homo sapiens
cgtctgagagctttacgtcatcttcgattagctaataaccaactgcaattcctacctccaggagtgagctgttgccgcagaatgggctgc

SEQ ID NO: 249854 - DNA, 98 bp, Homo sapiens
tgggttcgttttattcagcggcagtggtgctttcccgaatctcagaatgccgggttgtggaaaccagaacttcgcctggagaacagagtgcaaccagt

SEQ ID NO: 249855 - DNA, 102 bp, Homo sapiens
tgcatgtgtcattacagcaagcagaagacttcatcctcccagacactacagaggttgatggaaagttattatgctggctctgtactttatcgtacaaaagag

SEQ ID NO: 249856 - DNA, 50 bp, Homo sapiens
tacatcattcagcaaggtggctggtttattaaccttgcaagaactcttca

SEQ ID NO: 249857 - DNA, 80 bp, Homo sapiens
cagacgcaagatggcggacagtgcggaactaaaggaaatttgcgagaatccccgatttatcattgatggagccaacagaa

SEQ ID NO: 249858 - DNA, 100 bp, Homo sapiens
ctccggcggcgccccagccagcctccaggcccagaacggagccgccttggcctcggggtctccctacaccaacggcaccctggaccacatggtagaccag

SEQ ID NO: 249859 - DNA, 49 bp, Homo sapiens
acggaaacaaagttattttgctcgggagaagatgtcaaccggacactag

SEQ ID NO: 249860 - DNA, 90 bp, Homo sapiens
gagatctacaaccttggagcccagagccacgtcaaaaatgtgaaaacctttgcatcttctgatagtctagccaaggtccaagaagtagca

SEQ ID NO: 249861 - DNA, 100 bp, Homo sapiens
gcgaggagcgagcgctgcgaggtggcggcctgaggaaggatcgagatcgagaccgggatcgtgaagatcggtctaaagatcgagaccgagaacgtgatag

SEQ ID NO: 249862 - DNA, 98 bp, Homo sapiens
ggggccccgggatctcggctgtccttcctcccggtcgcctgcgaggccgctggccaggcctgagcctctgccaccatggccattgtgcagactctgcc

SEQ ID NO: 249863 - DNA, 101 bp, Homo sapiens
agagaatcttcgttttgactttcttctcattcacaggttaaggctacctttccagataatccaacagctaaatcaccagtttccaagggcatttgcatcac

SEQ ID NO: 249864 - DNA, 100 bp, Homo sapiens
gaggagcagcagcagctccagcaggcgctggctcctgctcagctcataccccagacaacagctttctggggtttgtggttgagcagcacctgaactccag

SEQ ID NO: 249865 - DNA, 100 bp, Homo sapiens
tgcctccccggagctcccgggccagtaggtttcagaaggatcccacttggtcagagactggagaccgttatctgttgaaactctttagggatcatctttt

SEQ ID NO: 249866 - DNA, 101 bp, Homo sapiens
gcttgtcagagctacttccactgtgtatcctgcatcagcggtcctctagatcaacaaactccatttatgtaaacccctaattagagcaattgacagctcaa

SEQ ID NO: 249867 - DNA, 116 bp, Homo sapiens
tacggcatcatcatggcaattgtcattagcaacatggctgaggaaaaggttcgtgctgtgtttgataatctgattcaattggagcatcttaacattgttaagtttcacaaatattg

SEQ ID NO: 249868 - DNA, 109 bp, Homo sapiens
gaagacccaaaggcagcaaaaacaagagtccctctaaagcagctcaaaagatccatccttttacaatccctgctattattcgtccattcagcgtattgaactatgatcc

SEQ ID NO: 249869 - DNA, 100 bp, Homo sapiens
tgatcgtgctgggcaccggcctgacgagtcgagtgtgcccatttcttatagatccttcttcccaagctacagagtggttaaaaacacatttgaaagactc

SEQ ID NO: 249870 - DNA, 90 bp, Homo sapiens
atcatattcatcatggacgtgatgttggtgtgttcacatttgatcatggcatggaattgaatgatctggcacgggaccctccagcacagt

SEQ ID NO: 249871 - DNA, 90 bp, Homo sapiens
atgggtacatggtggtgaatgtcagtagcctctcactgaatgagcctgaagacaaggatgtgactgtggctttcctgggggaatgcctgg

SEQ ID NO: 249872 - DNA, 117 bp, Homo sapiens
ggaacccctccttgaagctgatggtgaatgtgtgcggacacactctgtgtgttccagagaacaagccttcagacatttgctatattgacgctgagctgtcaggggactcaggcttat

SEQ ID NO: 249873 - DNA, 76 bp, Homo sapiens
gcgcaggggagattacttttctggaagacatatgaagatccatgagaaggaccctaacagtgccacagccacagcc

SEQ ID NO: 249874 - DNA, 82 bp, Homo sapiens
tctccatcccttccgaggcccgacttcggtagctacagcaagctgggtagcaggcagatccaaaggatatcatgaagtttcc

SEQ ID NO: 249875 - DNA, 75 bp, Homo sapiens
gactccttgctcccaggagataaccagtggactaaagaggatggacatagaacttccacctctgctgtccctaac

SEQ ID NO: 249876 - DNA, 100 bp, Homo sapiens
ttcacttccctcggtctgggcttctctgaggcggcgagagatggtcaggtctggagctcgaccgggccagtactaaggctcgtacgtctgcatcgattat

SEQ ID NO: 249877 - DNA, 100 bp, Homo sapiens
agagtttgaaagcgtgctccacaaatatttacagtcggaggagtactcggtgaaatcctgtcctgaagactgtaagtttccaggttaactaaggtctcag

SEQ ID NO: 249878 - DNA, 75 bp, Homo sapiens
tcattgacttactgctttgtgagggaaaaaatgcatttttcaaagacctaacttcaattcagttattacctagtg

SEQ ID NO: 249879 - DNA, 75 bp, Homo sapiens
tataaaacacgattcttaccactcaggtattagaaaactactcggatgctccaatgacaccaaaacagattctgc

SEQ ID NO: 249880 - DNA, 95 bp, Homo sapiens
tttgtacctcggggacctgctggagacctgccatttccaggccttctggggtgaggaggtcctccggcagctgcagaccctggcaccaaagggcg

SEQ ID NO: 249881 - DNA, 97 bp, Homo sapiens
tcaaactgcagaaacagatgccattcggtttttggttgggacgcagtctcttaaatatgataatcagtccttcagtgaatctacagacctattttct

SEQ ID NO: 249882 - DNA, 100 bp, Homo sapiens
gcaggtattgggagatccacagctaagactccaggaccctctggaagcctagaaatgtttgaaattggcacaatggaagaagctggaatttgtgggctag

SEQ ID NO: 249883 - DNA, 75 bp, Homo sapiens
gatggggccgaatataacatagaggtggtctcatggattataaccatttggatatttggttcactaacaattttc

SEQ ID NO: 249884 - DNA, 98 bp, Homo sapiens
gagctatatttggtgtcctgtaaaatcacagattatgactatctgttatagtccctgggtcaagacaacaatttttataccttcgtcgtggttcagaa

SEQ ID NO: 249885 - DNA, 83 bp, Homo sapiens
ctttgccgtacccaccggagcctggcgcagcctccctctattaccaggtgacttaagagattaaaattaatttggttgctgtt

SEQ ID NO: 249886 - DNA, 98 bp, Homo sapiens
tcattcaatgcttggaccttttaagtttggttctaatgtcaactttgttgttggcaacaatggaagtggtctcatggattataaccatttggatattt

SEQ ID NO: 249887 - DNA, 100 bp, Homo sapiens
gagttacccctcttaccaccgtcatggcagtcccagactttgaataatgagatgagtacagatgaagacaatgaatatgcagaagaaaaggatagctaca

SEQ ID NO: 249888 - DNA, 83 bp, Homo sapiens
ctccgggtgtccggccgtgtcccgaggaagtgcaagacccgggggatatgagactttctactcggaatatcctgagtgttgcg

SEQ ID NO: 249889 - DNA, 60 bp, Homo sapiens
aataacccttaccgggagtttcactgaaggataccagaaggccctattgatcaggggcca

SEQ ID NO: 249890 - DNA, 75 bp, Homo sapiens
tggtgcttaaattctcccaagaggttctcgcttttatttgaaggaggtgagacggggtttcactatgttgaccag

SEQ ID NO: 249891 - DNA, 75 bp, Homo sapiens
ccccagtgagggtgtacaaatacccctttgaattaattatggcttgttattattacaacagttctatacctctca

SEQ ID NO: 249892 - DNA, 75 bp, Homo sapiens
tgaaaaaccaggacgaaaagatgtagctgcagaaccttggcctgaaaatgctacattatatcagcaattgaaagg

SEQ ID NO: 249893 - DNA, 100 bp, Homo sapiens
cgcgaatatcgtcatcgttagaagactttgtgtggacagtaatgacctcacgtttccgattgcctgctggcagaacctacaatgtacgagcatcagagtt

SEQ ID NO: 249894 - DNA, 100 bp, Homo sapiens
gagcttcattcagatgtggtggaatatgccaaggaaaaactggagagcttcatcaaaaatagtgatagctttgataacactgccagtgaaagatgtagaa

SEQ ID NO: 249895 - DNA, 75 bp, Homo sapiens
tccagggccgcatcgggggcgactcaggcctgtccagccggggcaagaaggtatgtgcactgcgcgtgaccagcc

SEQ ID NO: 249896 - DNA, 100 bp, Homo sapiens
agtttctgaagttggtggccgccatcaaagccgccttggctcagggctaatgcgccctgaaggcagaggccccctgacttgggcctcagtgtccccgaag

SEQ ID NO: 249897 - DNA, 101 bp, Homo sapiens
cagaggaagctggaggcgctgatccgagaccctcgctcccccatcaacgtggagagcttgctgtaacagatcaactcctagcaatcatgatcggatacagc

SEQ ID NO: 249898 - DNA, 75 bp, Homo sapiens
ctcaagcacctcttttgccttctttactaaaatgtctcaagcatttggccatccagtgtcattggtctcagaggc

SEQ ID NO: 249899 - DNA, 99 bp, Homo sapiens
ctgccgctgcacctggacagcgtggacgccgtgtacgagcgcaccagcgaccacaagatcgtcttctttaaagaagtccccacgagaagaagaagaaga

SEQ ID NO: 249900 - DNA, 100 bp, Homo sapiens
acagtgggggtgtgcaaacccgagagaactgggaacagcatctgttgcagttgcaggtctccttgcagctcttcgaataaccaagaacaaactgtctgat

SEQ ID NO: 249901 - DNA, 82 bp, Homo sapiens
ttgataaaaagagatgtggggggattctcgacctgctaacagaactggaccttttcgatggagcagctatcagatgaagaaa

SEQ ID NO: 249902 - DNA, 75 bp, Homo sapiens
tcgtcaagaggctctgcaccctggatggaaagcaggtcctccagtcgcagctggatactctgctccaggggcagg

SEQ ID NO: 249903 - DNA, 99 bp, Homo sapiens
ctctcaatcggcactctcaaaacatctggcacggtgttcactaccctaataagacctcagcttccctcgggaggggaatcagtgacgttcagggatgtg

SEQ ID NO: 249904 - DNA, 100 bp, Homo sapiens
cgcttcccgtagcctcggggaaggagcaggatttagaggaccactagttggaccccatcctcgtgctggaggaacagaccttagctggatctccaaaata

SEQ ID NO: 249905 - DNA, 100 bp, Homo sapiens
gttcatcgccgtgttatccttgagtaaaggaccccaaaatgtatgtacagacagtgcttgatgttcataaaaaatacaatgccctggtaatgtctgcatt

SEQ ID NO: 249906 - DNA, 100 bp, Homo sapiens
ctatttcagaactgttctcaggactcattattttaacatttgggagaaacacagccagaaggggattgcagtggcaaagctaggctaggtcttggaggct

SEQ ID NO: 249907 - DNA, 76 bp, Homo sapiens
ccacaccaccgcactgtcgctgcccgcctgccctgaggagtccccgctgcttgctgtggaggaagatgcagagtca

SEQ ID NO: 249908 - DNA, 100 bp, Homo sapiens
ctctatgtctgcagctcgattttgcaggctgctctttgttagaaaagaacatgattttgggactgctcttcattaaaagatcctttcccggagttcagtt

SEQ ID NO: 249909 - DNA, 100 bp, Homo sapiens
aatatgaactggctcagtttatcacttcctgaaagacctgaagcatattgagtatcagtgctgatattgaaacaattggagaaattctgaagaaaatcat

SEQ ID NO: 249910 - DNA, 82 bp, Homo sapiens
gcgagtttccgatttaaagctgagctgcgaggaaaatggcggcgggagctgcagatctgggacacggccggccaggagcggt

SEQ ID NO: 249911 - DNA, 100 bp, Homo sapiens
gagtctatatatcctggggaatttaagatgccaaagcagctcattcacatacagcaattctggggagacattgccaaggaattttactggaagactccat

SEQ ID NO: 249912 - DNA, 75 bp, Homo sapiens
actggttccatcgtatggctcatggaaatccttgcacgaggaattcttcttccattaataaatcaactcagtgat

SEQ ID NO: 249913 - DNA, 80 bp, Homo sapiens
gacaggcaagaaggcagtggctggacagcagcagggtgctggcacagatgagaagactctgaccaggatcatggtatccc

SEQ ID NO: 249914 - DNA, 75 bp, Homo sapiens
cttttcgatccgggacggccggtcaggctcgccgccgagctgacttcccaagtaagaagcggaagaggagccgct

SEQ ID NO: 249915 - DNA, 75 bp, Homo sapiens
cgagatgatggagatgaagattattataagcagcggttaaggaatgtttacccttgcggaagttgcatcacttaa

SEQ ID NO: 249916 - DNA, 100 bp, Homo sapiens
caagatgtttgacgaggacagcatcctgggcgagctcaacgggcccctgcgggaggggcagaaccccttcgagctggccttctccctagaccagcccgac

SEQ ID NO: 249917 - DNA, 96 bp, Homo sapiens
caggaggaagcgatggcttcagacagcatatttgagtcatttccttcgtacccacagtgcttcatgagaggacaagcatgactttcaggactctgt

SEQ ID NO: 249918 - DNA, 75 bp, Homo sapiens
ccgcgactccgccgcgctgcgcacgcccagggtcgataaagacaggagtggagtgatatcagacaccgagcttca

SEQ ID NO: 249919 - DNA, 50 bp, Homo sapiens
cacctatggacaagtctataagtttggaaattttagcattcaggtgccag

SEQ ID NO: 249920 - DNA, 87 bp, Homo sapiens
gaagaataaggagaaggataagtcgaaggggaaggcgcctgaagaggacgaagatgaggagcgggaaggcctcctgcaccctggaga

SEQ ID NO: 249921 - DNA, 100 bp, Homo sapiens
atgggaagttacggtttacagcgaagtccacccagcgtttccgaggtgaaggcgccgcgccaggccgggcgggcggccaggtcagagcagcccaccatgg

SEQ ID NO: 249922 - DNA, 100 bp, Homo sapiens
cgacctcaagaatcgccgcgggggaccgcccttcgccttcgttgagttcgaggacccgcgcaaaatgatgcttcaacacccaggccaggtctctgcctcg

SEQ ID NO: 249923 - DNA, 100 bp, Homo sapiens
gaagctgccctggagcaaatggacgggatcattgcagttcacacaaaagatgttggacaatttctacaattttgcttcatcatttgctgtctctcaggcc

SEQ ID NO: 249924 - DNA, 100 bp, Homo sapiens
gttcggtgcagctgccagatccgctgatctagtgcttctcgaaaaaaaccttcaggcggcccatgggtacaggatttgatggggatcagtgccttggagt

SEQ ID NO: 249925 - DNA, 100 bp, Homo sapiens
gaactgctggggaaggcgattggcatcgatctctccatcccttccgaggcccgacttcgtgtcttgggacaaggtgcgcattcctggtgtgctgcagcga

SEQ ID NO: 249926 - DNA, 82 bp, Homo sapiens
aagatgttaacatttgccttgtctctacaatgagtgtacctcacagccttctaggatctccagagtggacaggaatctcact

SEQ ID NO: 249927 - DNA, 131 bp, Homo sapiens
atcagccacaaatgtacccccagtacacttactactatcctcattatctccaaaccaagggccgttgctccagggagaactgcaaatatcttcatccacccccacatttaaaaacgcagttggagataaat

SEQ ID NO: 249928 - DNA, 74 bp, Homo sapiens
ttataggcgtgagccaccgtgcctggctgaaggatttcagatgcatgccaggtttccactgattgccagaactc

SEQ ID NO: 249929 - DNA, 100 bp, Homo sapiens
cggcgccgaggagcccatttccgtgagtcagggtgatgacaactccgtgagggtggagattatacatctctcatcatttcagcaacaaggaaataaatta

SEQ ID NO: 249930 - DNA, 102 bp, Homo sapiens
gtcgacggcagggtctgaggtcatcggggatgtggacgaaggggccgacctcctaggttttaaaatcaaagatgggaaaatcggagaaaattgcccttcccc

SEQ ID NO: 249931 - DNA, 75 bp, Homo sapiens
aggaatttttaagtaaaaattttcagaagcacatgtattataacagatgaggagactgtccttcctgtttcgcag

SEQ ID NO: 249932 - DNA, 96 bp, Homo sapiens
tctccttcacagtaaagtggctggttcagcttgttggtttagatgaggagagttcagagtttatttgcagaaacacctttgaccacccatacccca

SEQ ID NO: 249933 - DNA, 75 bp, Homo sapiens
tcccgagtagctgtgattacagaaactatgttccaacttcctgtcaacaatcttggcagtttaagaaaagcccgg

SEQ ID NO: 249934 - DNA, 75 bp, Homo sapiens
tggaagattcttccaaggaaccagtgcgaaggcctaatgggattgtttgaaaaacgtcgcttcaggaaattccta

SEQ ID NO: 249935 - DNA, 100 bp, Homo sapiens
tggccacctccccatatcctgagactgacagtgctttttttgagccttcccatctgacatctgctgctgatgaaggtatggacgacaaaggcgacccgag

SEQ ID NO: 249936 - DNA, 100 bp, Homo sapiens
cagctgtcgggacacttctgcaaccccgcagagcgcatccatcaaagctttgcgcaacgccaacctcaggcgagatgggtttactagcattgggcatcag

SEQ ID NO: 249937 - DNA, 80 bp, Homo sapiens
cacaaccgtctccagccttggtctgagtggactgtcctgcagattgctcatttagaaagtggatgtgtgggataacatgt

SEQ ID NO: 249938 - DNA, 75 bp, Homo sapiens
cactcattagataaagtgtcgcatactctttgataagagaggccaatgagacttgaaccctgagcctaagttgtc

SEQ ID NO: 249939 - DNA, 75 bp, Homo sapiens
tcattagttcagtgcagtgtctgacttgtgacaggagagatgcggtggactttgatgttcgcgttgatactcaag

SEQ ID NO: 249940 - DNA, 95 bp, Homo sapiens
ctcggatagtgggctctgtagaattcgacagtatggctacagaagaagtttccaaaaatctggttgccatgaaagaaattctgtatggcacaaat

SEQ ID NO: 249941 - DNA, 75 bp, Homo sapiens
agaccccaatccgcatgagcgtcctttcggattcagtggtcccaatttaaaggctattttattttcaaactggag

SEQ ID NO: 249942 - DNA, 82 bp, Homo sapiens
tcgcagggagcccaccgggcgggcctggccaaggtgagaagccctaccactgcaactgggacggctgcggctggaagtttgc

SEQ ID NO: 249943 - DNA, 95 bp, Homo sapiens
ggcgattcggtgaagcgattcctgcaggcgttggttcccctctttgacctggacttgtcttacaaggaccggcactggcatgaagcctgtttcca

SEQ ID NO: 249944 - DNA, 100 bp, Homo sapiens
ccggcgctttcagttgtgcaaccttgaacaaatggaggagaaaagccatactcctgtggcatttgtggcaaatccttctctgactccagtgccaaaagga

SEQ ID NO: 249945 - DNA, 75 bp, Homo sapiens
acatcagctggcaattgtaaataggtttccaggatcaaaactaacctttcagatgaagttgcggagaataatgaa

SEQ ID NO: 249946 - DNA, 100 bp, Homo sapiens
ccgaatggagtccagctgtctcctgcagaagactttgtcctggtggcagaaacaaccatggccaggatacgaaggtactccaaagattcaggtttactca

SEQ ID NO: 249947 - DNA, 75 bp, Homo sapiens
gaataaagctgttttggaactgtcaggtacctcaaagcgacctcagcagccatgtcgaagccccatagtgaagcc

SEQ ID NO: 249948 - DNA, 75 bp, Homo sapiens
tatggaaactcatcaggacggaagcacaggggccactcagagtcgcccgagaagatctagtttgaagcactaaga

SEQ ID NO: 249949 - DNA, 116 bp, Homo sapiens
gacatcagttatattccatctactgtctttttcttcaatgggcagcatatgaaagtggattatgggtttcctatcctgggagcaggagagtgtgcctatttgaatgacaaaggtgc

SEQ ID NO: 249950 - DNA, 96 bp, Homo sapiens
cagaatcatcttgtcagcaaagtgagccagcttatccaccatttacttaacagattacaggtgctcatggaaacaacctcattgctgttctagcca

SEQ ID NO: 249951 - DNA, 82 bp, Homo sapiens
cccccatcgagaaaaccatctccaaagccaaagggcaagaatatcacggcatgggcatgagtagcttgaaactgctgaagta

SEQ ID NO: 249952 - DNA, 100 bp, Homo sapiens
ctacaacaagcacattaacatcagcttccacaggaagcggtttgacagggctgaagcagagtacattgcagcaaagctagatatacagcgcaagactgag

SEQ ID NO: 249953 - DNA, 100 bp, Homo sapiens
gatgtgtctggtgaacctgaagcttcaccgagtgcagatacaactatactgtttgtaaaaggagaagatcaacctctagaatcccgtagactctgcaaca

SEQ ID NO: 249954 - DNA, 74 bp, Homo sapiens
cgacaacaacgggttcattctgatctccaagaggtcccgagagtatcctggtgtgaaccagctatcctccagta

SEQ ID NO: 249955 - DNA, 100 bp, Homo sapiens
ttggactgcagctcgcggtttcctggcttctagggatccaggtccggcacgatcaagacccaggctacatgcatcacaagtttgccatcgtggacaagag

SEQ ID NO: 249956 - DNA, 100 bp, Homo sapiens
caagctttgtctccttcgacttggagtctttgtccaggacgagtccggcagcgtcttctcttgagggagcaatttggagaagagctggaacccagactcg

SEQ ID NO: 249957 - DNA, 74 bp, Homo sapiens
agagccctggcatgctgactaagctccaggatgtacgaagtaggtccaaagttgttgaccgtatttacagtctc

SEQ ID NO: 249958 - DNA, 74 bp, Homo sapiens
aaaacatcaaacggcatacaaatggtcacagtcgaactgttattggaattgaagagaaaaaaaaccgaacatta

SEQ ID NO: 249959 - DNA, 78 bp, Homo sapiens
cagagacgcgccccctagtggaagcagagtgggaagcaggtcagtttcttctggaagaagctcgtctcatagaagcag

SEQ ID NO: 249960 - DNA, 83 bp, Homo sapiens
gagggattcgggttgactagtggtggatccaactactcgctggccagacatacttgtagttggcaaaaaaggagaaagccact

SEQ ID NO: 249961 - DNA, 100 bp, Homo sapiens
gcatttgtctgtttgatatcaccaaactggaggatgcctatgtattccctggggatggcgcatcacacaccaaagttgatcactcctcatgccatccgtg

SEQ ID NO: 249962 - DNA, 101 bp, Homo sapiens
ttccaggaagaaatagagtttcttaatgcaattttcccaagtcacagatgtgacattgatgtgtccactgaagccatgtatgctgcaaccagacgagaagg

SEQ ID NO: 249963 - DNA, 75 bp, Homo sapiens
ggagactcctgaccctcagaatgattgcccgtgaggcagaggctgccatctaccacttgcaattatttgaggaac

SEQ ID NO: 249964 - DNA, 75 bp, Homo sapiens
tggacctgctggtgttcgcccacgaccatggttgggataattcttcactattccacccttgccacagtactatgg

SEQ ID NO: 249965 - DNA, 75 bp, Homo sapiens
aagccactggagaaaaacggccaagaggcagacctaggaaatggacctgaagattatcggctataagagaataag

SEQ ID NO: 249966 - DNA, 100 bp, Homo sapiens
ctgggtgctgccccctgcccaggaccagcccctggtggaagccaaccacctgctgcacgagagcgacacggacaagcgtggcgtcaacacggacagcggc

SEQ ID NO: 249967 - DNA, 100 bp, Homo sapiens
ctcgactcagacgtggataaagataatcccgggtggccgtgagccgcacccaggacacccctgccttcgggccagctctgcctgctggcggaggcccctt

SEQ ID NO: 249968 - DNA, 97 bp, Homo sapiens
acctgcggcgccgcgttgtgcgttcgacgacgcggcaccggcttcgacgccctctgcccgctccagaagcaggtgtcatggagaaactccagctggg

SEQ ID NO: 249969 - DNA, 122 bp, Homo sapiens
ggcaagagaccgactggcggagcaccgccttccggcagaagctggtcagtcaaatgcacgggatgacatcctgaatggctctcaccctgtctccttcgagaaagcttgtgagtttggtggat

SEQ ID NO: 249970 - DNA, 89 bp, Homo sapiens
accgggacccggtgtctgctcctgtcgccttcgcctcctaatccctagccactatggggtgctcctcctaggggagccggtccgctggg

SEQ ID NO: 249971 - DNA, 100 bp, Homo sapiens
gtaaagttgggagcgcagcggcgttggcggcggcggcggcggcagcggcagcgcggcggggccgggtactggttttggattaggaattgttttctcactt

SEQ ID NO: 249972 - DNA, 74 bp, Homo sapiens
gcagaggacgacatgttgcttttcgtggagtgaaaccaatccgtaatctaaatggacattcaattgggcaatat

SEQ ID NO: 249973 - DNA, 83 bp, Homo sapiens
cggggaagggccgcgcctgacgtctggccgcagctgttaaacgtttaatgaaagaagcggcagaattgaaagatccaacagat

SEQ ID NO: 249974 - DNA, 100 bp, Homo sapiens
ggcaactcaccactgctccagaagatgatagagatgacctgatcagagccatcaagaaactaaaggcacttggcactggcttcggcatcatccctgtggg

SEQ ID NO: 249975 - DNA, 75 bp, Homo sapiens
gaacgttgagggcacgagtcgggtcctgagaccagctactctgggcagttgaaaagtagaaagtcatacatgata

SEQ ID NO: 249976 - DNA, 74 bp, Homo sapiens
ctgctttcccgccagtgcccactcaaagtttcttacggcataggctctggaatgggcactctccttatcagcaa

SEQ ID NO: 249977 - DNA, 98 bp, Homo sapiens
ccgggacctcctggaagccaaaaatgatgtacctgtgtggtctaagctggaatctggtcaccttccatccatgcaacaacttgttcaaattcttgaca

SEQ ID NO: 249978 - DNA, 80 bp, Homo sapiens
ctcccaaggtgctgggattacaggtttttgtggaaactctggataagtgtttcgaaaatgtgtgtgaattggatttgatc

SEQ ID NO: 249979 - DNA, 49 bp, Homo sapiens
ggggagcttgaggacacttaccacgaatacacattttggaactttatac

SEQ ID NO: 249980 - DNA, 83 bp, Homo sapiens
cggagcgccccttcgcgtcccctgcaccatgagctggggcaccgagctctgggttcgagaacttgtcttggacaattgcaaat

SEQ ID NO: 249981 - DNA, 75 bp, Homo sapiens
tgaagctggggatggcaacagcattggttgactatagtcaatggggccaatggagccaagtgtatggaaacccac

SEQ ID NO: 249982 - DNA, 50 bp, Homo sapiens
cagaaacaaaatgtcaacaaattgatggtgctgtgctgtggctttcattg

SEQ ID NO: 249983 - DNA, 50 bp, Homo sapiens
aggccgctgcagatgaccattccaggtgtgagttcttgatacgaatgaaa

SEQ ID NO: 249984 - DNA, 98 bp, Homo sapiens
gaaatcagcgcggagttaccccagacccctcagcgtctggcatctttttaacttctagtcatggcgaatgatcgcaggagagcacagactggaccctg

SEQ ID NO: 249985 - DNA, 80 bp, Homo sapiens
tgagcctttttggcctggcttgtttgcaaaggatgaggaagaagagtccagtaggcaggaaaccgaagagaaaatactcc

SEQ ID NO: 249986 - DNA, 96 bp, Homo sapiens
cgtcgtgatccagaagtccagagctgaggactgcctgtttgcaggctgagtcatcactagagagtgggaagggcagcagcagcagagaatccaaac

SEQ ID NO: 249987 - DNA, 75 bp, Homo sapiens
gtcagaacaatcttgaatcatgaagctactaaccagagccggctctttctcgccaatcccactaatcctgatgag

SEQ ID NO: 249988 - DNA, 90 bp, Homo sapiens
gcgtaactatcgcctgacaggacgagctcatctgcgcctttgtttagaacgcttaaaagttctgattccactaggaccagactgcacccg

SEQ ID NO: 249989 - DNA, 99 bp, Homo sapiens
cccagctctgccaggaagcaaaggagcaccgagggctgctttcaatccgctatcccatggagcatggcatcgtcaaggattggaacgacatggaacgca

SEQ ID NO: 249990 - DNA, 75 bp, Homo sapiens
ccagcagcagcatcctaaaacctctcaaaatggtggagtcaatgaagaaagtagcagggatggatgtggagctga

SEQ ID NO: 249991 - DNA, 78 bp, Homo sapiens
cgggaccccagcttttcagaactgcagggaaacagccatcatgaggattctcaaagttggattggtggaaacaatgaa

SEQ ID NO: 249992 - DNA, 83 bp, Homo sapiens
agaacatccacagaatagacctgaagacaaaaatccagaagtacaagcagtctggcaccccagcctgcggtccatgtgcaggg

SEQ ID NO: 249993 - DNA, 75 bp, Homo sapiens
tggaggatgatttcatgtgcgatgatgaggaggactacgacctgatgatggaccatttggattgtgcaacaaatg

SEQ ID NO: 249994 - DNA, 100 bp, Homo sapiens
gatttgttaaggattccaagtaactcttatttgagttcttggagtctctgcggagtccctgggccagatctcacagtgaaagctgcaggatcttccttct

SEQ ID NO: 249995 - DNA, 75 bp, Homo sapiens
tcctgtagaggaggctggagattccacccaaatcctcttctccaagaagtcggtcctgaccgccagcctgtcgta

SEQ ID NO: 249996 - DNA, 101 bp, Homo sapiens
ggcaaacgagaattaaatgccgagaaggccagtacgataaactcatcctgaaagtcgctgttgttctcctgctgagcaagaatggaggccccactggtgag

SEQ ID NO: 249997 - DNA, 75 bp, Homo sapiens
gtactcttggcccatggacctgaaggagaagcacctggtggttttttggcaaaatccccagagccaaggcagaag

SEQ ID NO: 249998 - DNA, 86 bp, Homo sapiens
agcctcggcaccgtcctttcctttctccctcgcgttaggttgtgaccgagattcccgacgagagagactgaggggaagagaggaag

SEQ ID NO: 249999 - DNA, 75 bp, Homo sapiens
caagaggatggcctgaagtttgggctggaagtgtatgtactagttgtgaagacaatgcaagtgcagttggctttt

SEQ ID NO: 250000 - DNA, 75 bp, Homo sapiens
gctgaggagaggagcgtcaacagcagcaccatggcaatgcagcaagtcttggaaaaccttacggagctgccctcg

SEQ ID NO: 250001 - DNA, 75 bp, Homo sapiens
gcctcttcggctgcggaccctgccattccggaggagaatgcgatgctggtggcagagaaggcagctttgcagggg

SEQ ID NO: 250002 - DNA, 75 bp, Homo sapiens
cgaagctgctgcggttcctgagccggaggatttttagactctgaggagcagttggagctaatccacattatggaa

SEQ ID NO: 250003 - DNA, 90 bp, Homo sapiens
acacatgaaaaatgccacgattgtaatgtctgtgaggagagagcaaggcagttcttcaggggaggatcacagtcaccttctatatagcac

SEQ ID NO: 250004 - DNA, 100 bp, Homo sapiens
ttagatgattcgaagtttcctatagaggataccccattggttccagtccctgtcccaccaattttgggtttttatcaaatgaaggaggaagaagtacaac

SEQ ID NO: 250005 - DNA, 73 bp, Homo sapiens
cgaagatccggactgctcgggaagctccatccgaatgtgtctgccccccagctatctcacgtgagagggcagt

SEQ ID NO: 250006 - DNA, 100 bp, Homo sapiens
cgatcattctgcaagcaggcaacctgaatacagatgctaatactggagaccgtggacagaccaataatgctgcttctgcatcagcttccaactccacctg

SEQ ID NO: 250007 - DNA, 97 bp, Homo sapiens
gaatcccaactgttatgccaaagttggaggaaatgtggactggaaacagatagcaagtattcaggaatccattggagaaaccagttctcagagtgtt

SEQ ID NO: 250008 - DNA, 82 bp, Homo sapiens
ccgccggtcacctccgcgcggacaccaggtgtcctgtggccaggcggaaagcagtgagaagcccaacgctgaggacatgaca

SEQ ID NO: 250009 - DNA, 75 bp, Homo sapiens
gaagaagagctgctgatgaggactgggacaggagcatattaatgaaaagtgccataaactgaaaaaccaaacatg

SEQ ID NO: 250010 - DNA, 98 bp, Homo sapiens
atgctatctgttgacatggaaaacaaggaaaatggctctgtcggtgtaaaaaagtttcccaggcagctgcagacttgaaacagttctgtctgcagaat

SEQ ID NO: 250011 - DNA, 87 bp, Homo sapiens
tgatcaggatttttggcctaccctccaaagaaaagaatggacagcaaattatggatgaacctatgggagaggaggagattaacccac

SEQ ID NO: 250012 - DNA, 98 bp, Homo sapiens
gaaacgctgacagagatgctgcagagctgattcagagactgtttttgatattcagaatgacagaaatagtatacttccaaaatctcaatctgaataca

SEQ ID NO: 250013 - DNA, 83 bp, Homo sapiens
ccgggaacccttgccgctgctgtcctgcgaccccaagcaggtgacttaagagattaaaattaatttggttgctgttggttctg

SEQ ID NO: 250014 - DNA, 83 bp, Homo sapiens
aagaaagtacattttcaactgtttagatgatatggcccaggaattgcacgtaggtgaaaaccagattgaaatgttagaggcag

SEQ ID NO: 250015 - DNA, 75 bp, Homo sapiens
ctggaccccaagatccttaagttcgtcgtcttcatcgtcgcggttctgctgccgacgcaaacatgcagatctttg

SEQ ID NO: 250016 - DNA, 96 bp, Homo sapiens
cttcttttctccgcgggcgccgaccaggcctggctcgcgcctctcccaggacccgcctggctgcgagatatgtgcaacacgcaggactacatctgg

SEQ ID NO: 250017 - DNA, 97 bp, Homo sapiens
tccttgtagactactttaatgaattcctaagccttccagctgaagtcatcgatgtgagttatggaatggcagatgatttaaaaaggattaggaaaat

SEQ ID NO: 250018 - DNA, 100 bp, Homo sapiens
taaggaaatgctgaagcttttggtcgcccggctcatggagatgggattttccagaggtgatgctttggaagccctgagagcttcaaacaatgacctcaat

SEQ ID NO: 250019 - DNA, 76 bp, Homo sapiens
gaatgaagagctgccagatcccacagaaatgtgattgataacagtaaagccacactcctcaagtgcctgaaatacc

SEQ ID NO: 250020 - DNA, 75 bp, Homo sapiens
gaaagatcctactggacatgtcagtgtcctttcacacccatgtgaaagagggaaattggattccaagatccatca

SEQ ID NO: 250021 - DNA, 90 bp, Homo sapiens
atggataccaaggaagagaagaaggaacggaaacaaagttattttgctcgctgtccagaccaaaacgaagaagacgttagccaaacccaa

SEQ ID NO: 250022 - DNA, 90 bp, Homo sapiens
agctgaagaaggtgctgagcgggcaggacacggaggaccggagcggcctgtccgagttgcatttgctggtctggcctttgcgtccttcta

SEQ ID NO: 250023 - DNA, 75 bp, Homo sapiens
gtgaccctgaacctctacgacacggccggtttccacttgagcggcacagtgacagaacctgcaatacaatcggag

SEQ ID NO: 250024 - DNA, 75 bp, Homo sapiens
ctgatattgacaaactggacgttgccacaatgacagagtacattgtggatatcaagcctgccaatatggaagagc

SEQ ID NO: 250025 - DNA, 96 bp, Homo sapiens
tcgaactgaagaaaggagggaaggatataccagtcactatccacaatttagaggagtatctaagaggcaagtgtccagagaatggctgggatgaaa

SEQ ID NO: 250026 - DNA, 71 bp, Homo sapiens
gtcatcctgctgctgaagatctggaagacgcgctcctgcgccgatatggctcgtggacagcagaaaattca

SEQ ID NO: 250027 - DNA, 87 bp, Homo sapiens
gaggtgataaggaacaagatccgagcaataggcaaaatggccagagtgttctcagtgctcaggaaaatgtttataggaggccttagc

SEQ ID NO: 250028 - DNA, 75 bp, Homo sapiens
tctccactcctcagcatgcccatggtggtactgtgaaagggaggatgccattgctccccggaccctgccctggcc

SEQ ID NO: 250029 - DNA, 75 bp, Homo sapiens
ccagtggaagatgatcacatcccagatatgattctataacagactcttccagaaatgatatgaagaggaaatttg

SEQ ID NO: 250030 - DNA, 83 bp, Homo sapiens
aaagggaaggaaattatgaccaagtacctcaccccaaagacaatgcagatcttcgtgaagactctgactggtaagaccatcac

SEQ ID NO: 250031 - DNA, 110 bp, Homo sapiens
ctctacgcagaacccgggagtaggagactcagaatcgaatctcttctccctccccttcttgccagcagccagcttcgggtgtagcctattctcatccaactacagttgct

SEQ ID NO: 250032 - DNA, 100 bp, Homo sapiens
gctgcagcagtgacatcgctgacgtggaggtggacatgtcgggagacttggggtggccggcattcacaagaaggtggcccggaccatcggcatttctgtg

SEQ ID NO: 250033 - DNA, 97 bp, Homo sapiens
acaaaattactattgataccaacaaatctccagtcagtcttcttagtctcttcccagtttaactggtacacccgccgagccatgctggctgccatct

SEQ ID NO: 250034 - DNA, 74 bp, Homo sapiens
gtttgcctggagggataaaacagctcgcagggaagatgaaagttacggcaaaccagtccagctacgggggccca

SEQ ID NO: 250035 - DNA, 115 bp, Homo sapiens
caaatggctgcctttccccacaagattatatttttcctggtatgctctactttgacacatgtggctttctcagaacactcgtgaaactgctcaggccatcaagggtatgcatata

SEQ ID NO: 250036 - DNA, 74 bp, Homo sapiens
ggggatttctgctcacctggagaagggatggaaatacttcaacaaggatgatgccaataatgacccacagtggt

SEQ ID NO: 250037 - DNA, 100 bp, Homo sapiens
tggggctgctccccaggacctgagcaggaacctggagttttcagacaggggcaagtgtccgagtggtgaatcagctacttacagagatggatggtctgga

SEQ ID NO: 250038 - DNA, 75 bp, Homo sapiens
gagttcgcctcagacgcggtggagccgccggagtctgagaaggatgctccagaccttgtatgattacttctggtg

SEQ ID NO: 250039 - DNA, 83 bp, Homo sapiens
aaatcttcaatccagatattgtaaactgtttcacgttagacctgtaacccaaggagatgtgtatagagctgaaactgaagaaa

SEQ ID NO: 250040 - DNA, 51 bp, Homo sapiens
ggccagaccccctttgctgggacacaggagccaaaaacctgtatatcatct

SEQ ID NO: 250041 - DNA, 100 bp, Homo sapiens
ggagccgcgccccaccccgccagctccagagccacgtacgtttgaaggatgacctctaggaagaaagtgttgctgaaggttatcatcctgggagattctg

SEQ ID NO: 250042 - DNA, 75 bp, Homo sapiens
aacctcatgcgggatgtggagcgggagggcctggactgggacctcatgcttttgaacacttgcagcaattagaat

SEQ ID NO: 250043 - DNA, 50 bp, Homo sapiens
tgtggtgcctcattcccataacgacccagacgttgatgtggataaaccag

SEQ ID NO: 250044 - DNA, 75 bp, Homo sapiens
gttccggagcccaatgcacgttgtctgctctctcagggtgcccatcatcctagtgggcaacaagtcagacctgcg

SEQ ID NO: 250045 - DNA, 101 bp, Homo sapiens
tgggaagaagatttgtaaagaaaactcttagattgttctctggggccggactgagaaatgcctgaaggagacgacggaggagatccggcagatgggcactg

SEQ ID NO: 250046 - DNA, 95 bp, Homo sapiens
ccacacatgtcaaagatgtggccactgtgtgccggcagctagcagagaagagaatgctggatgaagatgggtttcaagaactaaatgagaatgga

SEQ ID NO: 250047 - DNA, 51 bp, Homo sapiens
gattcgcagtggtcgcttcttctccttgggagttagggagatttcggagtg

SEQ ID NO: 250048 - DNA, 126 bp, Homo sapiens
gtctcaatatctgtcttcggtggactccttcggcagtccacccaccgccgccgcctcccagacctgcctagagctggaacgttacctccagagcgagccctgctatgtttcagcctcagaaatcaa

SEQ ID NO: 250049 - DNA, 75 bp, Homo sapiens
caagacatccctgctgagagagccaaggaacttataatcaaaactgtattaagctcggcaagagatgagccctct

SEQ ID NO: 250050 - DNA, 75 bp, Homo sapiens
atttgttaaggattccaagtaactcttatttgagttgatctctctaatgtattagatcttcatgcctttgatagt

SEQ ID NO: 250051 - DNA, 99 bp, Homo sapiens
cgaccccacacaaggaggatctaagcagcaaggcggcttcaatgatccatcctaaagaggtgccccctgaggccatcttgctggcagtctaccttgaac

SEQ ID NO: 250052 - DNA, 75 bp, Homo sapiens
cagcaccggaggcccaggtctccgtgcagcccaacttccagcaggacaaggttgaaaacgacatatctgctttca

SEQ ID NO: 250053 - DNA, 103 bp, Homo sapiens
caaacaagaagtcgtcaccccagacaacatgtgcatggggaggaccagtcgtgagctggctttatgtgctggggcagaagagatccgatagctatgttctgct

SEQ ID NO: 250054 - DNA, 100 bp, Homo sapiens
caaaccctagtgaataaagccaagagagaccttggagtaattcgtcgacaggtgatgcaggttctgaatgctgatgccattgttgtgaagctgaactcag

SEQ ID NO: 250055 - DNA, 98 bp, Homo sapiens
taatatacaagcttgggaaatgaagccatatgtggaagtggttggtcaaagaaaaagtgatgtatgaaaaagaggcaaaacaacaagaagaaaagatt

SEQ ID NO: 250056 - DNA, 75 bp, Homo sapiens
tggcaaagctgccagagatattttcaacaaaggatttggtcaatacttctgcgaaggctctgtagtctgatggga

SEQ ID NO: 250057 - DNA, 100 bp, Homo sapiens
tgattgctacagatgtggcctccagagggctagatttgagttctgtgaacctgcatttgttgttggtaattgcctccagatagcttctgacagtcatcag

SEQ ID NO: 250058 - DNA, 74 bp, Homo sapiens
cgcctcagcctcctgagtagcaattacagcaaaagcgaaagcttcggatctacatttccaatacgttcagtccc

SEQ ID NO: 250059 - DNA, 100 bp, Homo sapiens
aaagaattatcgcaaatatttccggtcagaggctgccctcaccttggcagatttcatctacaagagcatgaactctctttgctcacaagttaccaaaaaa

SEQ ID NO: 250060 - DNA, 89 bp, Homo sapiens
catgaatccagcctctaaggtgatagctctgaaagagaattttctctacatgtgcacccatttaaaggactcggcttcaagggaagcag

SEQ ID NO: 250061 - DNA, 96 bp, Homo sapiens
ggcctggactgcacggcccggcagcagagcacaactctatgtgggcgtccctgagcagccccgacgccgaggctgtggagcccgacttctccagca

SEQ ID NO: 250062 - DNA, 96 bp, Homo sapiens
gagaatcctgcaagtcactcctatgtcctcaacaaaaccagggcagctgcagttgtgggacacagcattgttggttttgccatgtactattttacc

SEQ ID NO: 250063 - DNA, 75 bp, Homo sapiens
cctcatttccggctggggcagcacgtccagcccccagtgtggccattgacttcaccgcctccaatggagacccgc

SEQ ID NO: 250064 - DNA, 90 bp, Homo sapiens
gacatatcgttggacccagaattgagcagttgcaccaccagcaccaccttccagtagtcagctctgccgttacttccctgcttgtaagaa

SEQ ID NO: 250065 - DNA, 83 bp, Homo sapiens
aaggagacctggcctacagacgacaagagtatcagattcaccagaccagagcacttgggcagcagcgccaagatcaagtgcag

SEQ ID NO: 250066 - DNA, 74 bp, Homo sapiens
ggcgcggggaccgctgtgctctcggtgtttatctcagtggatgatctggaacccccggagccccaggaccctga

SEQ ID NO: 250067 - DNA, 99 bp, Homo sapiens
cgaccgtcggtgcggaatggacagctgctggtatcaaccgggctcccagccctagaccagctcttaggaatacggggtgctttgcattcaggaatacag

SEQ ID NO: 250068 - DNA, 87 bp, Homo sapiens
agtgattctacatctcaagctcatattttgaagtgtttacggaatgttctgaaggatctggaaaagagaaaagctgatttaaatacc

SEQ ID NO: 250069 - DNA, 100 bp, Homo sapiens
gagccctcggggcggcggactggctcgcggtgcagtactatactggcaattgctggagaagattttgcaattgttgcttctgatactcgattgagtgaag

SEQ ID NO: 250070 - DNA, 101 bp, Homo sapiens
aagattaaaagagcgaataaagtttatcacgccggggtttttcgttggaatatacgttgcacatttatggcgattctgagtgtgagggcagacttctgcca

SEQ ID NO: 250071 - DNA, 50 bp, Homo sapiens
atgatgtagacactggactattagagtatttgatttctgacactggagga

SEQ ID NO: 250072 - DNA, 100 bp, Homo sapiens
tatgatgcgtctacggatgagcatttagtgaaggatttgggcagcctcaatggggtagaggaagaagaacccactggatacattcgattcgaaaaatttc

SEQ ID NO: 250073 - DNA, 96 bp, Homo sapiens
gagactccaaggacaactgcaagggggaagtagagagataacaaaagctgctcagagtctcaatgaacttggtgtcatggagaaactccagctggg

SEQ ID NO: 250074 - DNA, 50 bp, Homo sapiens
cacaacgatgcgtctcctggatgggaagctgtagagaaatatgaagaagt

SEQ ID NO: 250075 - DNA, 100 bp, Homo sapiens
ctgactcaagcggaggcgcgcggaacagtcgccgaggcgattcccgcccagctgaaaatgtgtgtctgacatgcaagctcagtggggcagagacccgtgg

SEQ ID NO: 250076 - DNA, 51 bp, Homo sapiens
atctaatgaaccgaaactttggtcatttacaggtggaggatacagattggg

SEQ ID NO: 250077 - DNA, 74 bp, Homo sapiens
aatggcacaaagttctctcgatcagggcatacatctttcttcgacaaagggtatgtctttgcaagactccactc

SEQ ID NO: 250078 - DNA, 74 bp, Homo sapiens
tattcaacgcatccccagcttaccgcccagtacgcagactctactggcaagcgtgtgggcaaggtactgcatgc

SEQ ID NO: 250079 - DNA, 144 bp, Homo sapiens
gcacgggaacgcgtcccgctgcttgggtcaggttcgccggtcgcgggagccccgccgtgcagtcggaggcgggcaaggcccccgatcacgtgataccgccccccaactccgggcggaagaggccagcgacagcgctgcacgaag

SEQ ID NO: 250080 - DNA, 98 bp, Homo sapiens
tttgcctggtgaaggggtcccataagaccctgaagctggtcgtcaaaaggattgatcggaagatgtcaagtactcacaccagctacaaactggatgag

SEQ ID NO: 250081 - DNA, 90 bp, Homo sapiens
ctgctggcgtaccctgtgcgttagtcaccagctgctcctccgtcttctcaggagaccagctggtccaaccttccttcaaaatgtctactg

SEQ ID NO: 250082 - DNA, 75 bp, Homo sapiens
tctattacagaaatggaatcctttgcagctacagctgacttcagacggtctggaaaatcccgaagcagaagcccg

SEQ ID NO: 250083 - DNA, 100 bp, Homo sapiens
ggcctccatcagcaagctccagtgctacgtgtccctggcattttaggtgtcggttgggtagaattccaaccaggagtgccatggaaaggtatccaaaaca

SEQ ID NO: 250084 - DNA, 74 bp, Homo sapiens
ttttcaggcatcctcatataattaaactgcactcccccatttgcagatgaagaaatgttcagagaagaaaaatg

SEQ ID NO: 250085 - DNA, 75 bp, Homo sapiens
tgatcctgaagcctcaaagtttcatggacaaacgtgctgtggagaggctagaagtagaaaaggcattccacccct

SEQ ID NO: 250086 - DNA, 83 bp, Homo sapiens
caagacctgagccctgtaatattaatatttggatctaaaatcaggaaaattctcagtctcccttgaagaagtgaagcctcctt

SEQ ID NO: 250087 - DNA, 136 bp, Homo sapiens
gaagatgcccgccagcattccaattccaacatggtcattatgcttattggaaataaaaggacctgggaggaaggcaaggtgctcatctttgatgactcctttgagcacgaggtatggcaggatgcctcatctttcc

SEQ ID NO: 250088 - DNA, 82 bp, Homo sapiens
cgtggaacggctgcttttggaaggagcaggacatcgagactttacatggctctgttcacgtcacgctgtgtgggactcccaa

SEQ ID NO: 250089 - DNA, 100 bp, Homo sapiens
ctggccttctgtatcttcatggtgcggctcatcttcgagaggaacgaatgcaggaatttgggaactgagctgtgcaagtgctgaagaaggagatttgttt

SEQ ID NO: 250090 - DNA, 50 bp, Homo sapiens
ttcctgcatggattgggagatactggatttagtggctaccttgagatcat

SEQ ID NO: 250091 - DNA, 109 bp, Homo sapiens
ggaggagctgtgcagccgcgaggaggcgcgggaggtgttcgagaacgaccccgagacggcgtccgagctgggccacagcctgaacgagaacgtcctcaagcctgcgcag

SEQ ID NO: 250092 - DNA, 58 bp, Homo sapiens
tgaagattggctttgtaacaaggtttcccttgggggctttgaaataacaccaccagtg

SEQ ID NO: 250093 - DNA, 97 bp, Homo sapiens
ctctgggaaaattgtaattgccagatatgggaaagttttcagaggaaataaggttgccatgaagcatccgtcagctgtgacagcttgtaatctggat

SEQ ID NO: 250094 - DNA, 129 bp, Homo sapiens
tcaacactcacaatgagccagtgcggcagttggctattttctgtccccatgtggcactccaaacaacggctcatccaaaatacttgagttgtattgcaatcagctgttttttcctagctgccaagactg

SEQ ID NO: 250095 - DNA, 100 bp, Homo sapiens
cccaggaatacagctttgcattaggacactttacttcggccgaagacttaaacctgttgattgccaaaaacacgagattagagatctatgtggtcaccgc

SEQ ID NO: 250096 - DNA, 98 bp, Homo sapiens
ccgaacgatgtgcgagaactgcgcagacctggtggaggtgttaaatgaaagtgaccccagggtttgaagaaaaggagggggagctgctggtgagggga

SEQ ID NO: 250097 - DNA, 83 bp, Homo sapiens
cgagactgtgaagtcaccaatgatggacataccattcaggttatcctgaagtcaaaatcagacaatgcagatcttcgtgaaga

SEQ ID NO: 250098 - DNA, 75 bp, Homo sapiens
tcctttgcaggatgttggtctttgatccaatgcaagtgctgctggaccaggcgggctgctgtatcgtgggtcaga

SEQ ID NO: 250099 - DNA, 90 bp, Homo sapiens
agttcaagaccagcagagaccggaaggatcacatggtcccaggaaggtggcgtcagcatctgcagccgcgtcgacgttgtcggagcctcc

SEQ ID NO: 250100 - DNA, 50 bp, Homo sapiens
gcacaggcagtgtctggaattgatatttagcttcctgtggtatactgatg

SEQ ID NO: 250101 - DNA, 98 bp, Homo sapiens
tttcatagagctggactattggaagactggtcgaattgacaaatcttaccctacagtatgtggccacacaggaccagtgctggacatagactggtgcc

SEQ ID NO: 250102 - DNA, 75 bp, Homo sapiens
cagctcaagtttaaacacacctgggagcttcagacgtggatctagtttgaagcactaagaagaataagacatcag

SEQ ID NO: 250103 - DNA, 82 bp, Homo sapiens
cggaagatggcggccggcgaaaggagctggtgcctgtgcaagttgttgagttcgtaatggacctgaaagtggcagcaagatt

SEQ ID NO: 250104 - DNA, 80 bp, Homo sapiens
aagaacccccaggagcagaagtccttcttcgccaaatacgccctgggaggagcggggacactgaggacctctctccaaat

SEQ ID NO: 250105 - DNA, 98 bp, Homo sapiens
aatacaccaaaaaaatagaaaacctatgtgctatgggctttgataggtgaggactcttgtgaagatatgagttgtggagaggagagtctcagcagctc

SEQ ID NO: 250106 - DNA, 75 bp, Homo sapiens
ccggtacatctgaaagccgggaaatgtggatgcctggactttggccttttctcctgattcccagtatctggccac

SEQ ID NO: 250107 - DNA, 74 bp, Homo sapiens
agtcctcagggctgttgactccaaagctgacaagcaggcagaaaacattgtgctgttagagctggacatgccca

SEQ ID NO: 250108 - DNA, 99 bp, Homo sapiens
tatactgggcctgagagttacgtggcagaaatgatcaagggtatttgaagtataccatacaactgttttgaaaatccagcgtggacaatggctactcaa

SEQ ID NO: 250109 - DNA, 76 bp, Homo sapiens
gattcactattattgcccagagcagatgaaactggatggaaaaatccctctgctttctctggccagtttcacacaa

SEQ ID NO: 250110 - DNA, 100 bp, Homo sapiens
cggtgcatctgcagtcacgggcgcggtacaccagcgagatgcggagtgagctactaggcacgggcgacatggagtccaatgggaaatacatcaccaaatc

SEQ ID NO: 250111 - DNA, 100 bp, Homo sapiens
gcagccgcttgtcagtgtgatgaagattggcacccagtaagactttgaccccgacgcaggcttcagtgattgccgcggatcagaagcctgagcactttgg

SEQ ID NO: 250112 - DNA, 83 bp, Homo sapiens
gtccgcgccggccccacagctctgcgtccgggtgaaatgacaatggatgctctgttggctcgattgaaacttctgaatccaga

SEQ ID NO: 250113 - DNA, 50 bp, Homo sapiens
agcagcagctcagcagccacatatagataatacatatgtgtcaagttcag

SEQ ID NO: 250114 - DNA, 156 bp, Homo sapiens
gagagaggcaccgggatcgtgaccgagaccgtgaccgagagcgtgaccgagagcgcgaatatcgtcatcgttagaagtatctggagtccatctttcaccatcttctcctgagattgtactggaccgtgaccactcttcttccattggctgcctctc

SEQ ID NO: 250115 - DNA, 90 bp, Homo sapiens
cgcgcccttgcccctcggccgggcggacgcatctactgccgaggatgttccaagccgctgtgctgctcgtgcgcgctccttgacagcagc

SEQ ID NO: 250116 - DNA, 75 bp, Homo sapiens
cccagggccaggcgccgctcagaacgggcgccaatgcttcggcattagagaaagagattggtccagaacagtttc

SEQ ID NO: 250117 - DNA, 49 bp, Homo sapiens
accgcaggcatttcaatcacattatggcctccgaccagggagaccttcc

SEQ ID NO: 250118 - DNA, 83 bp, Homo sapiens
cctcaacatcccggagcagctgccacaatgggacatgtgcaatcctcatcaccgggggcatcgtggccacagctgggcgcttc

SEQ ID NO: 250119 - DNA, 75 bp, Homo sapiens
tacacattttgtgatccagtcatcatttctagatgaggaaggaacagagcatttacgaaaacgaaatacgaagtt

SEQ ID NO: 250120 - DNA, 85 bp, Homo sapiens
ggctcggctcatgttctgggacttaggagggcaggaagagctgcagtctttgtgggacaagaaggatatggccctgaagccacat

SEQ ID NO: 250121 - DNA, 75 bp, Homo sapiens
aagaacaagaagtcttaccctcaggtcaaagcctggtccagatccctgtgagcatgtaccagactgtggtgacca

SEQ ID NO: 250122 - DNA, 86 bp, Homo sapiens
gctgcccagccccttgtcagccagggctgaacccccgcaggtagtaaacctattgatggcaattttgctgactgtggaagtgactc

SEQ ID NO: 250123 - DNA, 50 bp, Homo sapiens
gctccggctggtctgtggtgagggctatggcgtgtgctcggtggggctgg

SEQ ID NO: 250124 - DNA, 98 bp, Homo sapiens
tggggtcccctgctagaagtgggggactcggcgggaaatgaaagctcattagcatctacactgaagacgctcctgttcttcacagctttaatgatcac

SEQ ID NO: 250125 - DNA, 90 bp, Homo sapiens
gcaggaggtggagccggccgggtgctcgagggaaggagactggaagctggttccggcgtgaggaggtcaaacgatcaaggagcaaaggcg

SEQ ID NO: 250126 - DNA, 96 bp, Homo sapiens
aacattccaacacataaaaattatttatccaacagctcctcccaggtgtggaaacaggaagagaactagaactggaagtaaagcattgaagatgtg

SEQ ID NO: 250127 - DNA, 96 bp, Homo sapiens
tcagaaagtcggcagagcactgtgattgcttgcagtgtttctttataatacattccatgggaggaggacggaatgctcgccgattttctgcaggcc

SEQ ID NO: 250128 - DNA, 98 bp, Homo sapiens
ggcccggaccgtgtcgccgacgccaaaggggacagcgagtcggaggaggacgaggacttggaagatgtcaagccctccaacatcctagtcaactcccg

SEQ ID NO: 250129 - DNA, 100 bp, Homo sapiens
caatatccagttcaaccaccggggccaggtcctttttatcctggaccaggacctggggacttccccaatgcttatggataccgttaaccctggataaaga

SEQ ID NO: 250130 - DNA, 98 bp, Homo sapiens
cagatcctggaggatgtgcggggtgcgccggcagaggatccagtgttcaccatcctggccccggaagacaatgcagatcttcgtgaagactctgactg

SEQ ID NO: 250131 - DNA, 95 bp, Homo sapiens
tcctggacattgatccggaggaggattcgcagttcaacatcaagatctctggaaacatggctacagaacatgttaatggaaatggtactgaagag

SEQ ID NO: 250132 - DNA, 74 bp, Homo sapiens
ccagcctcatcctggaaaccaagggcatcccggtgcgtctaatgctagtgttggcacctgttatgtgcattctc

SEQ ID NO: 250133 - DNA, 90 bp, Homo sapiens
ccagggctgcatcgtcctgcaggtgaacacacaggatttcagaggattagtgcgggaggatgccgttctctacctgttagaaatccctaa

SEQ ID NO: 250134 - DNA, 75 bp, Homo sapiens
tccctcgcccaggtccccttggacaaatgggtaatcaaatgcaaagcagctgtgctatgggagttaaagaaaccc

SEQ ID NO: 250135 - DNA, 98 bp, Homo sapiens
acttcgcctttcccgagccctggaggtggggagaaaagcttctgcagaaagccgtcattacacctgattttgaaaaaaaccactgtgttccaccatat

SEQ ID NO: 250136 - DNA, 100 bp, Homo sapiens
gcggtttgtcgccagaaggaagatggcggatctggaggagcagttgtctgatgaagagaagaagctggctctgaagatattgacatacttcccaatggtc

SEQ ID NO: 250137 - DNA, 100 bp, Homo sapiens
tccattcccgggaggggggagcggcgttggaggccaccgtttccagattacaacagcagtgaattgaaaacagcctgcaggaagcatgagctgtatgtga

SEQ ID NO: 250138 - DNA, 74 bp, Homo sapiens
caagcagcaatccaaaagagtctcaaggatccttcaaataacttcagggtatgaaaatgaaagtcttcagaatg

SEQ ID NO: 250139 - DNA, 51 bp, Homo sapiens
aagagtctgactacttgacacactggctcgtacaagttgtgcaaagtgagg

SEQ ID NO: 250140 - DNA, 100 bp, Homo sapiens
ctgattcctatacagcatgaggggaatgcaaccttggcccggaaaaatattgagatttcagctacagaaggcaggaatcctttggacttggccctttatc

SEQ ID NO: 250141 - DNA, 75 bp, Homo sapiens
aaccatcacatccaccatgaaagctaagctgctgaaggatctcccagccatccagccccggctagtggcggtcag

SEQ ID NO: 250142 - DNA, 75 bp, Homo sapiens
aaggaagtcatcatgggccggcctggaacagaacagcagagaggggcagcaggatgaatgtgggcacagcgcaca

SEQ ID NO: 250143 - DNA, 75 bp, Homo sapiens
ctccgaggcgaccactcctgtgatcgttgcggctggggctggaggggaggaagattgagaggatccagaatccag

SEQ ID NO: 250144 - DNA, 100 bp, Homo sapiens
gtgcatcgcccactccagaagtagcatggaaatggagggcatcttcaaccacaaagatggactcaccctgtcacccaggttggactgcactggcctcaac

SEQ ID NO: 250145 - DNA, 80 bp, Homo sapiens
tcccaaacttcttaacccctagaccggtttttagtccattgactatgcagcctaatggttaaccccaaagattggctttc

SEQ ID NO: 250146 - DNA, 75 bp, Homo sapiens
ggagcttctcagccattttccacagatcagcacatacccccggcctcatgagtacctgtccccagcggatctgcc

SEQ ID NO: 250147 - DNA, 100 bp, Homo sapiens
agggaagagagaccttagaaaggatcaggactggcggattcttcacggaaaaatccagcaaagcctactccttctggatgaagttcagagtcacatcttc

SEQ ID NO: 250148 - DNA, 75 bp, Homo sapiens
atcatctctggccggaaagaaaagtgtgaggctgccaaggaagctctggagggcatggtggctttgccaatggtc

SEQ ID NO: 250149 - DNA, 100 bp, Homo sapiens
tgtgaaccctggcgaccactgcttctccgtgggcagcattggcgaccagcgcttcacgcctgagattcctgaacgcctctgcgaacaaactggaaagcct

SEQ ID NO: 250150 - DNA, 98 bp, Homo sapiens
aggatggaagggagtcaccttcttttgactcgagttgccgcgtcgggctgggcgcgccgccgggtcccatggagctggaggggcagtggtggcgagga

SEQ ID NO: 250151 - DNA, 90 bp, Homo sapiens
aagatacatgagacagcagccaaacccccagatttggagcaagaggtggtggtggccttcccccgaagaaatttggtaatcctggggagc

SEQ ID NO: 250152 - DNA, 75 bp, Homo sapiens
ctgtcaacctgccctggaaccaggaattacatgaatgacagtcttcgaaccaatgtgtttgttcgatttcaacca

SEQ ID NO: 250153 - DNA, 75 bp, Homo sapiens
ggacaagatcatgggcaaaggacagatccaggttgacatcatggacatatgtgagtccatcctggagaggaagcg

SEQ ID NO: 250154 - DNA, 100 bp, Homo sapiens
cgagctcgacttcaaactcgtctttggcgaggacggggcgccggcgccgccgcccccgggctcgcggcctgcaggataatagccacctgtggagagcttt

SEQ ID NO: 250155 - DNA, 85 bp, Homo sapiens
tcttgtccctggaggcctctgaggaagtggagcttggacttcactgaggatgtcaactgtgcttttgagttcctgctgaagctca

SEQ ID NO: 250156 - DNA, 100 bp, Homo sapiens
gcctggactctgctcagcagcgtttgtatagggatgtgatgttagagaactatggaaacctggtctccttggacgaaagtaggcggtacgaaccctaatg

SEQ ID NO: 250157 - DNA, 50 bp, Homo sapiens
gccacatgtggaccctcagcctgggctatggaactcagtcaactccccag

SEQ ID NO: 250158 - DNA, 99 bp, Homo sapiens
cagattttatacaccaccaaactttgttcttgctcttgttttgccctcaattgtaattctggtattgaatttgaccgggattgtgactattttgcgatt

SEQ ID NO: 250159 - DNA, 98 bp, Homo sapiens
agaattggacccgaaaccatgcctcactgtcctaggcaaggacatgttcccgatttgaggtgaaaccatgaagagaaaatagaatacttaataatgct

SEQ ID NO: 250160 - DNA, 75 bp, Homo sapiens
cgccaatggcaagttggagggagagatgcaaataccaggatcctggtgcacctgagccgtggaggggctgaagtc

SEQ ID NO: 250161 - DNA, 83 bp, Homo sapiens
cctctttgcaacatttcaggaaaacagagaaagaagtgataggagggctctgtaggtgacttaagagattaaaattaatttgg

SEQ ID NO: 250162 - DNA, 100 bp, Homo sapiens
tggttgctgttgcttggcctggtgggcccagtcctcggtgcggcgcggccagaaccaagatcattatgcagttcttggacttggccatgtgagatacaag

SEQ ID NO: 250163 - DNA, 50 bp, Homo sapiens
cacctgatgaatggtggagagttacgcagtgagtgttgcagagagctgct

SEQ ID NO: 250164 - DNA, 100 bp, Homo sapiens
ggcagggggcggcggaccgcggggcgctcatctggctctgctacgacgcgctggtgcacttcgcgctgataaaatttgatgctgggactctccttcttag

SEQ ID NO: 250165 - DNA, 82 bp, Homo sapiens
accgggtcgcgcgcggccgagtcgcggaggcgcctccgctgcagtcgctgcgtctccaagttggaatcgaagcctcttaaaa

SEQ ID NO: 250166 - DNA, 105 bp, Homo sapiens
tgctcggtggcaggagggccggcggagcgccatggcctgcatcctgaagaaaccgaagctgaaagactggcatcctcctgggggctttattctgggattatgggc

SEQ ID NO: 250167 - DNA, 75 bp, Homo sapiens
gcagattgttaagctgatgcgagtctgggctctgcctcaccacttgtctcagagacggagtcttgctctgtcacc

SEQ ID NO: 250168 - DNA, 107 bp, Homo sapiens
ctgagaagcagcctgcgagggcttgcgggggagattgttggggaggtccggtctctccaggtgacactggatgggatgtcttcagcctcgattatcatgttgacgga

SEQ ID NO: 250169 - DNA, 100 bp, Homo sapiens
aggacatctttatggagaccctgaaagacatcgtggagtattacaacgacagtaacggacttaaacaggcacaatcaaaaccatctcagtcagaagtcag

SEQ ID NO: 250170 - DNA, 87 bp, Homo sapiens
ccgggcggctggcctcaccgcccactggatgtgtgcaacagcaccgatcttccggaagtcgagatcattagcctgctggaggagcag

SEQ ID NO: 250171 - DNA, 83 bp, Homo sapiens
tagctgctaaaaccacctttgtcaccagaatgaatgaagtgcttcagatttaaatagaagcaagatttccagatgtagcaaat

SEQ ID NO: 250172 - DNA, 97 bp, Homo sapiens
gatggcggcagccgtgcgacaggatttggcccagctcatgaattcgagcggctctcataaagatctggctggcaaaactcttgatgtttcagtgagc

SEQ ID NO: 250173 - DNA, 98 bp, Homo sapiens
gctacatggttacaacaaccggacccagcatgtgaaccaaggccaagtcttccagatgacctttagctatctttcagatcattcagagcataaggatg

SEQ ID NO: 250174 - DNA, 100 bp, Homo sapiens
gagactgaagaggactcaggagcaaatcagtaatgtgtatgagcaccaagatggcagcaaatcactgaagctgggtgactttggactggccaccattgta

SEQ ID NO: 250175 - DNA, 100 bp, Homo sapiens
ggaacagaagaaaagtccagtcttctcatgagctgtctgctctctgatgtaaaggatggagtaaatcaagcagcacctgcatttggatttggcagcagtc

SEQ ID NO: 250176 - DNA, 100 bp, Homo sapiens
gagcgactcggttaagggaaagcgccgagatgacgggctttctgctgccgcccgcaagcagaggttgaatgacatgtggacaattggcctccaggaccga

SEQ ID NO: 250177 - DNA, 75 bp, Homo sapiens
ctcggaaaccggtagcgcttgcagcatggctctttggtgtaacgggaaactgcgctgcctgtagtaagctcatcc

SEQ ID NO: 250178 - DNA, 75 bp, Homo sapiens
caaatatccagattttaagcagcatgttcagataaatctgaatggaagagtgagctattttgaagatgaggaaga

SEQ ID NO: 250179 - DNA, 75 bp, Homo sapiens
gcacttggccaagctagatgtcaaggttcttcacacacccccattcggcgtagtacccagagagctcaagatgtg

SEQ ID NO: 250180 - DNA, 100 bp, Homo sapiens
ctgaagccctccatcaccaagcagcagcaaagtctctcgcgacaccctgtacgaggcggtgcgggaagtcctgcacgggaaccagcgcaagcgccgcaag

SEQ ID NO: 250181 - DNA, 75 bp, Homo sapiens
cacccaccgccgccgcctcccaggtggtgatgatgtccagcaactctgtgaagcaggagaagaggagtttttgga

SEQ ID NO: 250182 - DNA, 103 bp, Homo sapiens
atctacctggacatcgatggacgcattcagaaggcctgtttaaagaagaaaacccgtatgctagatttgaaaacaactaaagcgctccagcacatcagtcccg

SEQ ID NO: 250183 - DNA, 74 bp, Homo sapiens
gtcctctctcacctgatgtgcctatgctgaactgtcccaagcaataaacagtggtacattgttatcaaaaccgt

SEQ ID NO: 250184 - DNA, 98 bp, Homo sapiens
agatggcgtgcttgttggagaccccaatccgcatgagcgtcctttcgattgtaaaccatggctgtgtggatacaagctcagcagctccaaggagaagc

SEQ ID NO: 250185 - DNA, 73 bp, Homo sapiens
gggaagcagttagacggctgccgggcggcggctgccgcgcggcacacaatgtctcggcgcggaagatggccgg

SEQ ID NO: 250186 - DNA, 100 bp, Homo sapiens
ctggacgcagcaagcggggcgctgtgtccccaagctccccgtcctcgggcaccaggatcatctacgaccgaaagttcctgctggagtgcaagaactcacc

SEQ ID NO: 250187 - DNA, 82 bp, Homo sapiens
gagagaagatggcggaagcggagtcaaaatgcagatcttcgtgaaaacccttaccggcaagaccatcacccttgaggtggag

SEQ ID NO: 250188 - DNA, 100 bp, Homo sapiens
cctggtggagcccatcagctgccacgcctggaacaaggaccgcacccggacctcggaccgtcccccagacccactggagccaccgtcacttcctgctgag

SEQ ID NO: 250189 - DNA, 89 bp, Homo sapiens
gcacaccaaatgaaaagctgttgggtcatttggtaaaggaaaagctgaatcacgtagaatttgaagatcaagatgatgaagccagagtt

SEQ ID NO: 250190 - DNA, 89 bp, Homo sapiens
aaaaactggagagcttcatcaaaaatagtgatagctttgataacgggaggacgatctggtctccccggacgcgctcagcactgtcagag

SEQ ID NO: 250191 - DNA, 88 bp, Homo sapiens
gccatcttcggaccccccaacaccctctacgaaggcggctacttcaagcatctactgccgaggatgttccaagccgctgtgctgctcg

SEQ ID NO: 250192 - DNA, 75 bp, Homo sapiens
ctccctgccgaagcccagcccctgatgtcccagcaggtcttgaggaccggcccagctcaggctcctggggcagcg

SEQ ID NO: 250193 - DNA, 74 bp, Homo sapiens
ctggcttctatgtccaatgacttcaaatcggttttagaagtgaggacagagcaagccacccgaggggactgcct

SEQ ID NO: 250194 - DNA, 83 bp, Homo sapiens
cgagacacgcctgggcccaggtgtggcgtctctgtccccatctggttttaggttttgagcaaaattttggactgtgaagcaag

SEQ ID NO: 250195 - DNA, 100 bp, Homo sapiens
cttgaagaacagcttactgaaggaatactgtatgtctgagtatttgagaatgagtggcatctattggggtctgacagtaatggatctcatgggacaactt

SEQ ID NO: 250196 - DNA, 100 bp, Homo sapiens
ctgtgtctgaggagccttggaacattcacccaggcaaatacgccatgcgagacctagtccacaggcttccaggagggaacaacagcaacaacactgcaag

SEQ ID NO: 250197 - DNA, 75 bp, Homo sapiens
acgacgatgaggtgacagtcacggattgttttaagaaaatggcagacaaaccagacatgggggaaatcgccagct

SEQ ID NO: 250198 - DNA, 90 bp, Homo sapiens
ctcaagatggcggacaaaacgccaggcggatctcagaaggccagttcaaagctctccctgtgcaggccccagccaacgactcctggagga

SEQ ID NO: 250199 - DNA, 75 bp, Homo sapiens
tacttggcctctgaaacagtgctgaacttggcttttgcgcagcatcctatggctctactttgagacgggtacctg

SEQ ID NO: 250200 - DNA, 73 bp, Homo sapiens
gaatgcttactgttgcgtggttcgttattaacagtttctgtagaaaatgtttcctgactgcaatgagggaaag

SEQ ID NO: 250201 - DNA, 75 bp, Homo sapiens
cctgcacgacacatggaaattggactaaattaccagaatgcagggagcaccatgtggcggagcacactgctgaga

SEQ ID NO: 250202 - DNA, 100 bp, Homo sapiens
aggacatcttcatttacagagcaacttgatgaaggtacacccaatagagaggtaaaatctgtaaaaactgggtcagttttttggacaatgtgctgctgct

SEQ ID NO: 250203 - DNA, 123 bp, Homo sapiens
tgctcctgttctggcttgtgctttttcccatgatgggcagatgctagtctcagggagtctccccaggacagtgctatcacccgggatattaaccgaacattcccagcccatgactactttaag

SEQ ID NO: 250204 - DNA, 100 bp, Homo sapiens
taaggagaaaactgtgggccgagctctttatgcacaggccagagcaaaaggcaagacggctggcttggtgagctgcaggacaagttcgagcatcttaaaa

SEQ ID NO: 250205 - DNA, 99 bp, Homo sapiens
cgccgagtcggctgccgtggctgtgctgagggtggcggccggatagccaggcgggcaccacggcaggggctgagctaccctcatggaagggagaggacc

SEQ ID NO: 250206 - DNA, 101 bp, Homo sapiens
ctgcagcggaaccggacccagtccctgagccgcccctacacccacagacttaattcagtgcacaaatgagatgaatgtgaacatcccacagttggcagaca

SEQ ID NO: 250207 - DNA, 100 bp, Homo sapiens
gagagcccgcgcgagtttcgggagcgggccctgcgcgcctgatgggtcgaggcggacgcgcggctgcgtcagaagaacatgagctgcctgtggacatgga

SEQ ID NO: 250208 - DNA, 75 bp, Homo sapiens
ggtagttccatgctgtctgttcagacttcagcttggtgagaggattgccaagtgtcatggcacccagtgtggctt

SEQ ID NO: 250209 - DNA, 97 bp, Homo sapiens
cccgggccctcggcagggaggatgacggagctgcagtcggcactgctactgcgaagacagctggcagattgagatggccatcctgcggttcccttac

SEQ ID NO: 250210 - DNA, 75 bp, Homo sapiens
taggcatatgtatgtgtttggagacttcaaagatgtattgtaaaaatgcatttgcaaagggagaaaatgaaggcc

SEQ ID NO: 250211 - DNA, 50 bp, Homo sapiens
ctaaacttgatccaaagacaatgaagagctgattggtcagatggttgtat

SEQ ID NO: 250212 - DNA, 97 bp, Homo sapiens
tctaaaggccccatacaatgaagtagacattggtggaaacatttaaagagtcaagtaccattggccaggatcaaacgcttatggaacgtgatacaga

SEQ ID NO: 250213 - DNA, 100 bp, Homo sapiens
tgtggaggaggctgaagtctcacatcagaggtgtcaaggctgtttcattgaggacattcttcagaactggacggacaactatgacctccttgaggacaat

SEQ ID NO: 250214 - DNA, 75 bp, Homo sapiens
cgttacaaactcctaggagggcttgctgtgcggagggctcctatggtgtcgtcaagttggcctacaatgaaaatg

SEQ ID NO: 250215 - DNA, 78 bp, Homo sapiens
tttggtgccagagattttggtggcttccaagactgctttttcagagacagtgcctacaccaactaatgttacaattga

SEQ ID NO: 250216 - DNA, 129 bp, Homo sapiens
gttccttcagccaaagaaacaagccgtggaataggtgtatcaagtaatggtgcaaagcctgaagtgggaacattctccatggccagtgaggaagtcttgaagaatagagccataaagaaagcaaagcgc

SEQ ID NO: 250217 - DNA, 74 bp, Homo sapiens
aatttccaattacagacgacaaagtagcactgggagactcaggacctgccagcccgagccttctcactgacccc

SEQ ID NO: 250218 - DNA, 97 bp, Homo sapiens
gttttctttactctggggtcccggctgccctgtggcctcgctcctcggaggtcctgccattgactctaccagaggagattcttcaagcttagttgct

SEQ ID NO: 250219 - DNA, 100 bp, Homo sapiens
ttgacgcaatcagaaaatcaagtaaaggaacccaacagagatctcttctgttctccactgctaggttatcaatactctggctgaccatcatcatcgtggg

SEQ ID NO: 250220 - DNA, 82 bp, Homo sapiens
tggaagtccaagtcaaacgcagaaggactgcctcactgagcaaccaagaagtgctgctgctacagctgctaccttagcactc

SEQ ID NO: 250221 - DNA, 100 bp, Homo sapiens
agatgggatctttccggatcaatccagatggcagccagtcagtggtggagccggcagcaaaagtggaccaagaaaccttgacagaaatggtgaaacccag

SEQ ID NO: 250222 - DNA, 98 bp, Homo sapiens
cagaagccgagttcaacatcctcctggccaccgactcctacaaggagaacatattgtgatgttcgtgcctcagagctaaaactatgagtgaatttcgg

SEQ ID NO: 250223 - DNA, 80 bp, Homo sapiens
aagggccttactccttcacagatcgaaatgtgcctgtggctgccttgcctgtaactcagcaaatgacagaaatgagcatt

SEQ ID NO: 250224 - DNA, 75 bp, Homo sapiens
ctactagtggagggggtccaatgtcaccccaggatgatgaagcagaagaggcaatcccacagagtattgatgagg

SEQ ID NO: 250225 - DNA, 82 bp, Homo sapiens
ctacttcacaggaattgccatttgttggtggcactaaggctggtgtagtccggtttcttggggagaccgactttgccaaggg

SEQ ID NO: 250226 - DNA, 50 bp, Homo sapiens
ccagtcagcacaaaggaggacgtggcctatatgaacccaatagcaatggc

SEQ ID NO: 250227 - DNA, 86 bp, Homo sapiens
cgacgagcgctgcactaacgcaggatccggctgccgaaggtcctcgccaggtagctacagcaagctgggtagcaggcagatccaaa

SEQ ID NO: 250228 - DNA, 50 bp, Homo sapiens
cactgaaattcatcctgagatgagcattctcccagatggtgatcagcttc

SEQ ID NO: 250229 - DNA, 50 bp, Homo sapiens
caaagctgttgtctcagggagcacagaatcaaataaagtgcccgtggtgc

SEQ ID NO: 250230 - DNA, 96 bp, Homo sapiens
tcgaggccatcctgcagttccagatgaaccatagcgtgcttcagagtcacctgatatgaaaaaggagcaagacccccctgccaagtgccacaccaa

SEQ ID NO: 250231 - DNA, 100 bp, Homo sapiens
aaagaccatcctgctctcaactacaacatcgtttcaggttgggatgaatgggttccggagagcagagtactcaaatacgtggacaccaatttgcagaaac

SEQ ID NO: 250232 - DNA, 101 bp, Homo sapiens
aaccactgccctttgggactctgggagtacacaagatcaagcttcaggagtctccggaagacatgcctgcagggcagacaccacacacagttatcctgttt

SEQ ID NO: 250233 - DNA, 75 bp, Homo sapiens
agaagtcaccacagtgctgcaggctgactctgcagatggaggagatgtataagaaagctcatgctgctatacgag

SEQ ID NO: 250234 - DNA, 74 bp, Homo sapiens
cactccgtcccccgcgggtctgctctgtgtgccatggacggtgagcaggggtgagcgcagccactgcccaacgc

SEQ ID NO: 250235 - DNA, 90 bp, Homo sapiens
gaaagctgaggttgaagatctgtgctgtgatgaggggctccagatagcgataatcaggacacccggagcaacctggacataactgtcggc

SEQ ID NO: 250236 - DNA, 100 bp, Homo sapiens
aagctgggctttgaggaattcaagtacttgtggaacaacatcaaaaggtggcagcgaccagctacatttaccaaagcctgggtgatgtggagtggtacat

SEQ ID NO: 250237 - DNA, 100 bp, Homo sapiens
tcgacaacatgtcacccgcgctccaagacctgtcgcaacccggtggtttgtcctgattgtagtgatgagattgctgtaaaaaaggacaatattcttgttc

SEQ ID NO: 250238 - DNA, 83 bp, Homo sapiens
ccccggcggcccgagcgcgccccaagcccgggcgccaccgctgccacctccgcgaggcccccgaggtcatcatgtcccagcac

SEQ ID NO: 250239 - DNA, 100 bp, Homo sapiens
actgcacggggtcgcgccgtggcggagcaggatgtgtgcccctgtgatggtggagctggagggggagacagatcctctgctcattgccatgaaggaactc

SEQ ID NO: 250240 - DNA, 90 bp, Homo sapiens
cgacctactcgccgaccttcatccgcggccggaaggtggtggtcgtacgctgtgaaggcatcaacatttctggcaatttctacagaaaca

SEQ ID NO: 250241 - DNA, 75 bp, Homo sapiens
cgccgaggcaccgaggcactcagaggaggtggtgtttggactctagaccatgtgcctaggtagaagtttttcctt

SEQ ID NO: 250242 - DNA, 100 bp, Homo sapiens
cacgaagtcaaggctctgggggccatgtggaaactacataagactgctcactagaagctcagcccaaatatgttagaggtgggaagcgttacggacgaag

SEQ ID NO: 250243 - DNA, 90 bp, Homo sapiens
ccccgagttcgacgtgaccgggaacacctttgaggagcgggacggtatgcgggccatcctggggtcctacgacagcgagctgaccccggc

SEQ ID NO: 250244 - DNA, 100 bp, Homo sapiens
gagtaaaccacagactacgagggagtttgacagctattaaaaccagggctccacagttaggaggtgagacgtggtcttgtaacacagtggttaagaatgt

SEQ ID NO: 250245 - DNA, 90 bp, Homo sapiens
ttgcacacagattgtcaacagtggttgatgcagatgaaatcattgtcttggatcagttaatcagctgtgttcagcgaatacttatgaaca

SEQ ID NO: 250246 - DNA, 100 bp, Homo sapiens
aagaagctgcagcggaggaaggcgagctagatgctggtgtgccagaaaaaataagcctgatttccagagatgagaagagtgtacttgtggtgacctacag

SEQ ID NO: 250247 - DNA, 74 bp, Homo sapiens
tttttgggctgtgttgacatcaaggatctaccaggagttgtttaaaggctttgcccgccacctctcacacttgc

SEQ ID NO: 250248 - DNA, 50 bp, Homo sapiens
aaggaaaaagcagtaaagccagaggaagcatccgcagtgtcatgcagaag

SEQ ID NO: 250249 - DNA, 100 bp, Homo sapiens
gcgaagctgccaaagccttagacaagcaacgccctgctgcggcggctggtccgcattggggtgctggatgagggcaagatgaagctggattacatcctgg

SEQ ID NO: 250250 - DNA, 90 bp, Homo sapiens
gcaagaggcgtttctataagaattgaatacgctgccatcaactccatgctggaccagatcaactcctgtctggaccacctggaggagaag

SEQ ID NO: 250251 - DNA, 100 bp, Homo sapiens
gcggcggcgaggactggcgacggcgaggagaagaatgtcttccaagcaagccacctctccatttgcctgtgcagctgatggagaggatgcaatgacccag

SEQ ID NO: 250252 - DNA, 100 bp, Homo sapiens
aagtgccttggggaaggaattcttgaaaaagcctttcaggggtataatgcgtgtatttttgcatatggacagacaggaagtgacctcacaatgactcaag

SEQ ID NO: 250253 - DNA, 100 bp, Homo sapiens
gtcatggaacactatgctgatcaagatgatctggttgtcatgtttactgaatggtatgaaattgaaggctgtgaagtgatttgggccattaaagataaag

SEQ ID NO: 250254 - DNA, 51 bp, Homo sapiens
atgaatggatttgctgaactatacggtgaaaccagcccagagaagttacgg

SEQ ID NO: 250255 - DNA, 100 bp, Homo sapiens
ggggatggcttggcagatgtggctgtgggggctgagagccagatgatcgtgctgagatggtgtcggacggcatgacaggcagcaatcctgtgtcccctgc

SEQ ID NO: 250256 - DNA, 83 bp, Homo sapiens
tttgtggcaagacaagctcagaactgagaagctgtcaccacagaacatccatgatagcagtcttctgtaaatcgaacttttca

SEQ ID NO: 250257 - DNA, 101 bp, Homo sapiens
gactctgtggctctgtgacctgcaggtattgggagatccacagctaagactccaggaccctctggaagcctagaaatggtactccaaagattcaggtttac

SEQ ID NO: 250258 - DNA, 75 bp, Homo sapiens
tctgctgcggcgcggggaccgctgtgctctcggttcaggtgtgggacacagcaggtcaggaacgtttccgcaaaa

SEQ ID NO: 250259 - DNA, 82 bp, Homo sapiens
gtcagacggcgctatgtacgccctcttcctcctggccagcctcctgggcgcgggtgctggagaatctggtaaaagcaccatt

SEQ ID NO: 250260 - DNA, 74 bp, Homo sapiens
taatggtggggcagtgtcatttcaggcccgacaacaagctcaaatacgtcaccaaatggcagaggacagcaaag

SEQ ID NO: 250261 - DNA, 75 bp, Homo sapiens
gcgctgccgcgtgggtcagtgggcaatgtggcagagaattctccacctgggacttcagtgcacaagttttctgtg

SEQ ID NO: 250262 - DNA, 100 bp, Homo sapiens
aacaatattgaacgctatcttaagtaaactgtttcacgttagacctgtaacccaaggagatgtgtatagagctgaaactgaagaaattcctaaaatattc

SEQ ID NO: 250263 - DNA, 100 bp, Homo sapiens
gacactgagctttgtggaagcatttggcggcataccaccctgcactgtgaggtgtgatgaatgcagactctgctaccattttggctgtttggatcctcct

SEQ ID NO: 250264 - DNA, 100 bp, Homo sapiens
accagagaaagatgcaagacatgtagtaaaagtggtgccctaatgcatgagttatcaaatgatggtgctcgtagacaatttgaattttatctggaagaaa

SEQ ID NO: 250265 - DNA, 101 bp, Homo sapiens
gggaaaagcgaggcaaggcaggcggcaccatatgaaggcggagtatggaaagttagagtggacctacctgataaataccctttcaaatctccatctatagg

SEQ ID NO: 250266 - DNA, 83 bp, Homo sapiens
gttggaacttaattactgcgtccccatgggagtacagacaggcgacagatgttggatgacaataaccatcttattcagtgtat

SEQ ID NO: 250267 - DNA, 90 bp, Homo sapiens
tgagcgcggcgcggaggagtggggcgcggctgcagccaaggcacctgccaggtgaccattgtgaggtagatattttgttctaattttcca

SEQ ID NO: 250268 - DNA, 100 bp, Homo sapiens
cagggacacaactgccacaagccggacacgtggatcgcttacacctgagacgaactacagaacagcacgtaccagaggtggaagtccaagtcaaacgcag

SEQ ID NO: 250269 - DNA, 106 bp, Homo sapiens
cccggctgccgctgctgccgccgccgcctcgggtcgtggagccaggagcgacgtcaccgccatggcaggcatcaaaggaggagcaactgaagtcacatgaaagtaa

SEQ ID NO: 250270 - DNA, 103 bp, Homo sapiens
ggtcagtccgccgctcaccccgcggccgcaccttcccgccttctcagacgagccaaactcaggctgtaccttgagcagctcaagcaactggtgcccctgggcc

SEQ ID NO: 250271 - DNA, 82 bp, Homo sapiens
acctgtggggctgaggacaacgacagctgcggcatctccctgtacaagtaagactttgaccccgacgcaggcttcagtgatt

SEQ ID NO: 250272 - DNA, 127 bp, Homo sapiens
ctgcaaggagggcggcgggactgcactcgagtgtccagacctgctcgatgatccagacatttaatgtggatgcaccatgccagaccgtggaagatttaacgaatggggttgtgatggcccaggttct

SEQ ID NO: 250273 - DNA, 53 bp, Homo sapiens
ctggacggaaccacctcaatgcaaagattctacgggaaaatgtgggccccctc

SEQ ID NO: 250274 - DNA, 100 bp, Homo sapiens
gtggcgctgggagcaacgggagtgtcctggacccagctgagcgggcggtcattcgcatcgcaggttttgtagtgcatccctgagcatgagcacagaatga

SEQ ID NO: 250275 - DNA, 83 bp, Homo sapiens
aaagggtcctcctgctcacagtgtgaataacagaactgccattggatgtccagaatcccctgtagttgataatgttgggaata

SEQ ID NO: 250276 - DNA, 102 bp, Homo sapiens
ggcggtggtggcttgtggtgcggcctcaccatacaggaacagggcagacgttagcgtgagtgatcactctcaatcccggccaggcccagacatgtccgtcct

SEQ ID NO: 250277 - DNA, 80 bp, Homo sapiens
acatcagtgatgaatgcaagaggcgtttctataagaattggactacgacctctgcatcaactgctataacacgaagagcc

SEQ ID NO: 250278 - DNA, 75 bp, Homo sapiens
tcttagtctagggactgaggagtcgccgccgccccgagtcccggaggagtatttgaagacttctgagcggaggag

SEQ ID NO: 250279 - DNA, 75 bp, Homo sapiens
tccgcgaatgctccgatgtgcagcccaagctctgggcccgctacgtgccatcagacaagatcagttgatcagaac

SEQ ID NO: 250280 - DNA, 82 bp, Homo sapiens
acttggatgaagagctggtcattaagggatccatcctacagaagtagttgatgtcacttggcgatattcctgcaaacatgaa

SEQ ID NO: 250281 - DNA, 98 bp, Homo sapiens
gagataaaaaggagacccctcttccgctcctgttttatactgcttccatatttacaagtagcacagaagagggaggatgctgtttccaaagaagtgac

SEQ ID NO: 250282 - DNA, 100 bp, Homo sapiens
cctgtaggaaagcggaagcggcctggcaggggaaggatcgaggtgctggagaatctggtaaaagcaccattgtgaagcagatgaggatcctgcatgttaa

SEQ ID NO: 250283 - DNA, 90 bp, Homo sapiens
cagaagcctgcatttctgcattctgcttaattccctttccttaggctccaaccaggaatggagacgccattggatgttttgtccagggca

SEQ ID NO: 250284 - DNA, 98 bp, Homo sapiens
ggtgaatgaaggtgaaaaagtctttgaagaagaaatagtgccgccagaagatatcagctgcattgcatggaacagacaagttcagcatattttagcat

SEQ ID NO: 250285 - DNA, 100 bp, Homo sapiens
cttcagaaggtctgcttggtgacttggatacagaaatttcctgggctaaacttggcatggtggaatggattgaacctcctaaacgagaacgcaaagcaaa

SEQ ID NO: 250286 - DNA, 75 bp, Homo sapiens
aagagttgcgggaggctgtcggctaataacggtttggacatatttgactcttttccccccaggttgaattgacca

SEQ ID NO: 250287 - DNA, 100 bp, Homo sapiens
caataaaagcccaggaagaagacgaggatggattactacagcatcccatttcccacacccactactccgctgactgggagggatggtagcctggccagca

SEQ ID NO: 250288 - DNA, 50 bp, Homo sapiens
acgaggatcgtgggagctaagaaattgttgtaggagataaagttgttttg

SEQ ID NO: 250289 - DNA, 101 bp, Homo sapiens
ctgtgaggacgaccggcaacgtctacgcctatgagctgggcttcgctgacttgaacctggccgagtttgcgggctcgggctccacggtgcgctgctgcctg

SEQ ID NO: 250290 - DNA, 82 bp, Homo sapiens
tgaatcctaacagaccaaaagtgttaaatgtgatcagccttgaattttcagatacaaagcaccaccaagtctgaagatcgtg

SEQ ID NO: 250291 - DNA, 49 bp, Homo sapiens
agaaattcgagaagctgcaaatgccattaatcagctgtgttcagcgaat

SEQ ID NO: 250292 - DNA, 100 bp, Homo sapiens
gaatcagagaccaccagaaaacccagacactgataatgtttctccatcccagagagatgaagtaattcaatggctggccaaactcaagtaccaattcaac

SEQ ID NO: 250293 - DNA, 100 bp, Homo sapiens
aggctgcctataatcaagtaaaaacaatagctcaaggaaacctttccaacacagatgtccaagctgccaatgtgtaatgctgtgtcatggagctaaaatc

SEQ ID NO: 250294 - DNA, 100 bp, Homo sapiens
atcctggtattgctgtggagacggtgacagattctagccgctactttgtaatccggatccaggatggtactgctctgtggctgtgggctgctgggagtgg

SEQ ID NO: 250295 - DNA, 51 bp, Homo sapiens
gaccactttgtcaagctcatttcctggtacctgaaatgctgcacaatgatg

SEQ ID NO: 250296 - DNA, 75 bp, Homo sapiens
tgacattgccagtcaagcacacttgcacctaaagcatccaaagtctacgtgggtgtgaaacaggagatcgccgag

SEQ ID NO: 250297 - DNA, 75 bp, Homo sapiens
ggacgagtacctggagtaccggaggctcagggaagaatttatggaaaaattaaagaagaaaactttgttagtcct

SEQ ID NO: 250298 - DNA, 101 bp, Homo sapiens
aacctcagacagatcgccggggaggcagcgcgggatcccagcctcaggcgtgcgcggacggtgtgcgggttgtacatcctggagacctgaagaattctgtt

SEQ ID NO: 250299 - DNA, 97 bp, Homo sapiens
agccctgcagcgcctggtgaagaagcctgtgcccaagctcatcgagaagtgctggaccgaggacgaagtgacatagggcctgattacattccaacag

SEQ ID NO: 250300 - DNA, 50 bp, Homo sapiens
ctgctgtgcacctgggggtacaggttaccatgccagcaatgattcctttt

SEQ ID NO: 250301 - DNA, 75 bp, Homo sapiens
tggccgaatcttccttcaggatatcaagatacttgccagaactaatacagctgatgaaatacctgaccttttctg

SEQ ID NO: 250302 - DNA, 75 bp, Homo sapiens
tgatggtgatggagattttgatgtggatgatgccaaagttttattaggtgtggatgaggtcaccattgtcaacat

SEQ ID NO: 250303 - DNA, 51 bp, Homo sapiens
ctctgagatatgccgtttacggggatcatagtccacatagcacagtaactg

SEQ ID NO: 250304 - DNA, 75 bp, Homo sapiens
ccattggatttaaaagacagtcctcgtcagcactgactttcagctatggaatcgaaaactgaattccaggctttt

SEQ ID NO: 250305 - DNA, 101 bp, Homo sapiens
gggtcccgctcattggctgggtcctgcgtgcggccctggattcaggggccttccagagcacccttacccttctgaagaacagaaaaagcagttggcacaag

SEQ ID NO: 250306 - DNA, 90 bp, Homo sapiens
ttattcaatatctcctgatgggcagtttattctcttagaatacaactacgtgaaggggccacctacagatgctcctgcagtggacacagc

SEQ ID NO: 250307 - DNA, 75 bp, Homo sapiens
acagattgaccttcagagcgaggttagctttatacgtctacgaatatttactgcacgtaggagcacagaaatctg

SEQ ID NO: 250308 - DNA, 82 bp, Homo sapiens
gtgcgcgagctggtggacaaagccatttaaatcaaacggtattgagatggattgggttatgaaacataatggtccaaatgac

SEQ ID NO: 250309 - DNA, 50 bp, Homo sapiens
agagcatcaaactggtgtccatcgttaccggtattgtaagaacaagccgt

SEQ ID NO: 250310 - DNA, 58 bp, Homo sapiens
actacgccaaggaggtggcagggtctattatcctcccagtccacaacgctgaaccgtg

SEQ ID NO: 250311 - DNA, 96 bp, Homo sapiens
tacagcctactggtgactcggctgcaggtttgaagacatacctgatatcgggtcagagagccaaggagtctcgctgcagctgtgcagaggccttgc

SEQ ID NO: 250312 - DNA, 75 bp, Homo sapiens
ccaagagtgttgagcagcccatcgtgcttaaagaaggccatccgggtgacctgcataggttcctgcggggtctcc

SEQ ID NO: 250313 - DNA, 73 bp, Homo sapiens
tgatgcctgctagccaaaagggggctgtggggtcaccttctcttcctctcttctgccaccccaagtcgtctgt

SEQ ID NO: 250314 - DNA, 98 bp, Homo sapiens
ccgggggtgagcgccgggctccgtggggaggaagcgggggccaccaaggttgtggcagcactgcctgaaggtatgagaccagattctaatctttatgg

SEQ ID NO: 250315 - DNA, 88 bp, Homo sapiens
gcgccccgcagccccccaacatcctgctcctgctcatggacgacgccaccccagcagacatgtttgccaaggcctttcgggtcaagtc

SEQ ID NO: 250316 - DNA, 83 bp, Homo sapiens
acgtatttgtgtgacttgactcttcaaacacaaaggacccagatgatgtggtaccagttggccaaagaagagcctggtgttgg

SEQ ID NO: 250317 - DNA, 100 bp, Homo sapiens
cacacagcaagttcctgcttctgggacagctctactgacgctgcttcattgagagaatcagaccagcagagagagagagttatatgacaaaatatgctga

SEQ ID NO: 250318 - DNA, 87 bp, Homo sapiens
ctctatgagcttttgaaacttgttaagcaaagggttaccttccagttcaacatttaccttggaagaggggaccatctacttgaccgc

SEQ ID NO: 250319 - DNA, 82 bp, Homo sapiens
accgccccgcgtcatgcggctcctcggctggtggatcccatgacagattctgttgtcacgtctccttacagagtttgagcgg

SEQ ID NO: 250320 - DNA, 82 bp, Homo sapiens
gccccttgctgtggaggatgtatttgaactttctgtgtgtcccggcatggatatccggaacaacctcactaggttgcatgag

SEQ ID NO: 250321 - DNA, 99 bp, Homo sapiens
gcttttccggcctgacaacttcatctttgattagtgacaagagctggggttaggatccggttggactctgacatcggatgccctcaaacatacagaact

SEQ ID NO: 250322 - DNA, 76 bp, Homo sapiens
ttcttcgagtatttgtagaaggtgcttgatgaagccaccagtgccctgacagaggaagtggagagcgagctctatc

SEQ ID NO: 250323 - DNA, 95 bp, Homo sapiens
gaaaccaggaacggctgaaacgaagagaagagagagagagagaagaaagggagaagctgaggaggagccagcaccgctctttgaccttgccatgc

SEQ ID NO: 250324 - DNA, 100 bp, Homo sapiens
ggtaagatggctgcccacgggggctccgcggcgtcctcggcgctgaaggggttaattcaacagttcaccaccattaccgcatgccaatgaagatgtggaa

SEQ ID NO: 250325 - DNA, 96 bp, Homo sapiens
gagacccggtttctaatccctgctctgtcactaacaagctgcgtgatcttcgatctttgtagaatttgatggctgtaactggaagcaacactcctg

SEQ ID NO: 250326 - DNA, 92 bp, Homo sapiens
cttgtttaatgactttggtgccctcaacatctctcagagacgaaaggttgaaggggcccggccaggactcggggaagggtggcctgagagca

SEQ ID NO: 250327 - DNA, 75 bp, Homo sapiens
aactctcagagtaactgtcccctctgactaccatttctaagagatggtggccacacagcaggagatgatggacgc

SEQ ID NO: 250328 - DNA, 100 bp, Homo sapiens
cgcctgcccagtattctaccaggcctggtgctggcctcctgtgatgggccttcgcactcccagaccccaccaacaactgaacgctttggtcaggctgcta

SEQ ID NO: 250329 - DNA, 100 bp, Homo sapiens
ccccgacaaacaccacgagaattccgcagcccacacggttctgcggggagtgtctccagccctgcctgcaggtgccatccccgctgtgcccactctgccg

SEQ ID NO: 250330 - DNA, 100 bp, Homo sapiens
agaggaggacacttttattgaagaacaacaactagaagaagagaagctattggaaagagagagtcctacaatgattatgtgagggaatttcataacatgg

SEQ ID NO: 250331 - DNA, 83 bp, Homo sapiens
tggtcatttgtgcactgtgcagtttcttattagcaaaggaattcagaaattggtattagcaggaagaatgggagaagccattg

SEQ ID NO: 250332 - DNA, 100 bp, Homo sapiens
tcagcccggcctacctcttcctctggcccgaagccttcctttatcgctttcagcaaatccagtttgctgatgacatgcaggagttcaccaaattccccac

SEQ ID NO: 250333 - DNA, 96 bp, Homo sapiens
ctcgccttccttctctgcagcttccccgcagcccttcagatatttcaacactcctctcagcatcctccacttcccccatctctccaagctgaactt

SEQ ID NO: 250334 - DNA, 101 bp, Homo sapiens
aagcgaccgagggactgggagtcgttagtgagaatatactgatgataatgctctgattcctaagaattcttctgtaattgttagaagaattcctattggag

SEQ ID NO: 250335 - DNA, 75 bp, Homo sapiens
tgctttagaaaaacacgatcagctcttagacagaccctgtattcagtggatcagctggcaccacccaaatagata

SEQ ID NO: 250336 - DNA, 100 bp, Homo sapiens
gaaatcccttcctgctaaagtggaacagattctcagggtggagatgtcagcccttcagaaacagtattacaaaatgccgggtctaagttgtagattttat

SEQ ID NO: 250337 - DNA, 100 bp, Homo sapiens
ctgggctcctactgttcttagagatgtacctttctcagcttcttgccagccctggtcatgcagtggccatggagaatgtgtagaaatcatcaataattac

SEQ ID NO: 250338 - DNA, 90 bp, Homo sapiens
tcggcgctgcctacggaggtggcagccatctccttctcgaatgccagaggattcaacatgagcatacctatgcctgggcatccagtgaac

SEQ ID NO: 250339 - DNA, 88 bp, Homo sapiens
ggaaattctgtatgttcttcgccattatattcagactcagtcgactgccaaagcaatgaagcgacctctcgaagcaactgtagacctg

SEQ ID NO: 250340 - DNA, 135 bp, Homo sapiens
gcccagctgccggctacctgattggaggtgccctgctgaatatctacacggaaatgggccgacggcatgtgatgtgaatcagctgacatcatcttgacgggagccctgtgaggcggacacttaactccagtttca

SEQ ID NO: 250341 - DNA, 95 bp, Homo sapiens
agcggcctctgacaccagcacagcaaacccgccgggatcaaagtgtaccagtcggcagcatggacagcacccaagaaaacctcatttggctcgct

SEQ ID NO: 250342 - DNA, 75 bp, Homo sapiens
cggagacatgctcttattgtacaggaacttgtaatagctggcatcgttgagaatgaatggaaaagaacgtgctcc

SEQ ID NO: 250343 - DNA, 84 bp, Homo sapiens
cgggaggtgttcgagaacgaccccgagacgatgagcagcaccagcagtaagagggctccgaccacggcaacccagaggctgaag

SEQ ID NO: 250344 - DNA, 75 bp, Homo sapiens
gcctgtggactgcagcctcggcggtcagcagggctagagcaatgtatcttaggctcacttaaggaagctgtagag

SEQ ID NO: 250345 - DNA, 95 bp, Homo sapiens
gaaggacaagccccgatatctgatgggggttggctgatccagtgtctctttgggccacttcaggcggggccgagcaatgcaggaggcaagagaaa

SEQ ID NO: 250346 - DNA, 50 bp, Homo sapiens
cctcctgagtggctgggactacagacagaccatggattcttacagtgcac

SEQ ID NO: 250347 - DNA, 100 bp, Homo sapiens
gttcagcagttcagggagctcacatttctcatattgctcaacagcttctcccatggtacaagttgatgagaagggtgagaaagtgagaccaagtcataag

SEQ ID NO: 250348 - DNA, 75 bp, Homo sapiens
agaaacaggcccggacctcctcctctaccacccccaatcgaaaggtgtgaacccacatccctgcccccagggcca

SEQ ID NO: 250349 - DNA, 75 bp, Homo sapiens
aagggcacattaaaaaggaatgcccacagtttaaaggctcttcagcatcaacaaagagagcattgtggatgtaga

SEQ ID NO: 250350 - DNA, 98 bp, Homo sapiens
ccgactgctgcctggtctgcaaagaagtcctttcaagtctctaggactggactcttcctaagcaagtccgatgaagactggcccatttgcagagcact

SEQ ID NO: 250351 - DNA, 100 bp, Homo sapiens
ctgaatcttctgggagctgaggaaccagatatcttgaaaagctgccagaaagcaatgccgggtctaccgtgggggtaagtggcctcatggagcagtgggt

SEQ ID NO: 250352 - DNA, 100 bp, Homo sapiens
catgggacagtgttacagcttttttaaatgaccttcttgaaagaatggatattggtcctaaacagacacagattctggatgaaattgaagaacataacat

SEQ ID NO: 250353 - DNA, 83 bp, Homo sapiens
gcgacaagccgctggcagccgcggatctcaccgccgctcaggaggctgaggggatctggcggtggagcgctaggatcagacgc

SEQ ID NO: 250354 - DNA, 96 bp, Homo sapiens
ggcctggatgatccagaaattttagaaggaagaactgaaaaatatgtggatactccatttggcaagggggccgaaggccagagaccaggatttggc

SEQ ID NO: 250355 - DNA, 80 bp, Homo sapiens
ggctcctgctgacccgggcagagaagagctgttgcgcagccattggtacctgtattggggaaacatagcatacaagcaag

SEQ ID NO: 250356 - DNA, 82 bp, Homo sapiens
gcggcagcgaggggctcggagaggtgctcggattctcgtagctgtgccgggggctatcaacagcaggacgcccatgaattca

SEQ ID NO: 250357 - DNA, 98 bp, Homo sapiens
tatgatttctccagggccaaaatcgcctgcaatctggcctggctggtggccaaagcctttgggacagggacgcactctctgagatattttcgcctggg

SEQ ID NO: 250358 - DNA, 98 bp, Homo sapiens
tccgcgtcccgctcgctgggagagaggtacctctccttttccctctccctttccctaagaatggctattcaagtggacaagttcaactttgagagttt

SEQ ID NO: 250359 - DNA, 75 bp, Homo sapiens
aagtaatgttaacaataacccagttagagatgtttatgattacttccgagctgtcctgcagcgtgatgaaagaag

SEQ ID NO: 250360 - DNA, 90 bp, Homo sapiens
gaagcaacagcaagagaaaaagacttattccgcagcgtaaaggtgctgcaacctgtactggatgtttggggatagaaagatgaatgggac

SEQ ID NO: 250361 - DNA, 82 bp, Homo sapiens
cctgcaactaactccattcttaattgggcactccacagaaggatgttattatcaagtcagatgcaccggacactttgttatt

SEQ ID NO: 250362 - DNA, 74 bp, Homo sapiens
aaagatgccagatgtgggagacacgccaaagctcccaaggaggagagacttcagcatgcaaaccttcatctgtt

SEQ ID NO: 250363 - DNA, 75 bp, Homo sapiens
caaggagaagaggacagaggcgcggtcatcagatgaggagaatgggccgtgtactaatggtcacttgatgtgcgc

SEQ ID NO: 250364 - DNA, 82 bp, Homo sapiens
tgcgattacagacctgagccactgcgcccagccttgatcttgaggtgtaacttggacccatttctcttgcgtgaatattgaa

SEQ ID NO: 250365 - DNA, 75 bp, Homo sapiens
gtcgccatcttggatccgcgggacaagaaaattcatgcgccacataaagaagatccctaatagtcatttctcaac

SEQ ID NO: 250366 - DNA, 83 bp, Homo sapiens
gagaaaaggcaacatcctgtcacaggccatgctctggcaaaaacaaaatatttacaccagcagctccagttcataccaataaa

SEQ ID NO: 250367 - DNA, 100 bp, Homo sapiens
tttgtgtttggctgcccaggctcgcctcgactccaaatggttgaaaacagatatacagctcctctggtgcaagtgtggtagctattgacaacaaaatcga

SEQ ID NO: 250368 - DNA, 100 bp, Homo sapiens
cacagagatttgggaagggaaggaaagttcacacagaccaaattggactagctttgctgaagaatgaaatggtttaccgacaagactgtgaaactttcgg

SEQ ID NO: 250369 - DNA, 96 bp, Homo sapiens
aatggaagagggaaacaacaatgaagaggtaattcacttgaacaactttcactgccatcggggacaagggagatccaggacgaggagctgaagaag

SEQ ID NO: 250370 - DNA, 98 bp, Homo sapiens
aggagaagcccacaaccgccctcctggacaaggtggccgacaacctggccatccagcttgctataggagaaagaattcgagtcatcttggacatggaa

SEQ ID NO: 250371 - DNA, 100 bp, Homo sapiens
ctcgctgccatggatgccaccaagctgagtccggcagcgtcttctcttgagggagcaatttggagaagagctggaacccagactcgcgccctggatgcca

SEQ ID NO: 250372 - DNA, 90 bp, Homo sapiens
gaacgtggaaagcgcatacaggaccctaaacagatgaagatgtgtgtgtctttaagtgctcagtgtcccgagagacagagtgcagccgtg

SEQ ID NO: 250373 - DNA, 75 bp, Homo sapiens
cttggagtctttgtccaggacggtatggcatttcaaatatagatacaaccattgaaggaacgtcagatgacctga

SEQ ID NO: 250374 - DNA, 100 bp, Homo sapiens
actgctcacacagaggacgctgctcagtggcagtgctccttttggacttttctctaggtttggcgctaaactcttcttgtgagctcactccaccccttct

SEQ ID NO: 250375 - DNA, 140 bp, Homo sapiens
ttgaagttcgtggaaggctgtatgagcttctaactcattgtattcctcctgagataataatgaagataaatttgcgcctcattttggtaagcggaaaaacaaaagagttcctgttttctcctaacgattctgcttctgac

SEQ ID NO: 250376 - DNA, 101 bp, Homo sapiens
gcgcctctcgatgggcagctcgcacttgctcaacaagggcctgccgcttggattttttatcaagcagaaatgcatcgaacaacgagaatcaagatcactga

SEQ ID NO: 250377 - DNA, 75 bp, Homo sapiens
ccaccaaagtgggaaacattgaaatcaaggcagtggccattcaccaccgagtagcagtctcacttctccaagcca

SEQ ID NO: 250378 - DNA, 102 bp, Homo sapiens
atcagcatcatcgacacccccgggatcctgtctggagagaagcagcggatcagcagaggtacaccaggggttggaaaaaccacactaggcaaagaacttgcg

SEQ ID NO: 250379 - DNA, 75 bp, Homo sapiens
gcaccaccggggttgactccgggggcgcggcgaggagggccaattcctgtccccccagcagcatggcatcgtgtg

SEQ ID NO: 250380 - DNA, 82 bp, Homo sapiens
tccccttcgtccttttgtgattccatttctcaagagcatagcggcctgaccacaggggtggccttcgggcatcacgccaagt

SEQ ID NO: 250381 - DNA, 98 bp, Homo sapiens
tctgcatggctctgtcactcacggtctgtgtatgatgaccaaccaaatgcgcacaagaagtttatggaaaagttagatgcttgtatccgtaatcatga

SEQ ID NO: 250382 - DNA, 101 bp, Homo sapiens
gcgcggcggccccgggaccaaggagcctcgaagcggaggatccctgtgtcccagccgggcatggccgacccccaccagcttttcgatgacacaagttcagc

SEQ ID NO: 250383 - DNA, 83 bp, Homo sapiens
ccaacacgtctctgttcgtcaggaacgtggccgacgacaccagacaatgcagatcttcgtgaagactctgactggtaagacca

SEQ ID NO: 250384 - DNA, 98 bp, Homo sapiens
cggggagcgccgccgccgcctcgatgggtactatactggcaattgctggagaagattttgcaattgttgcttctgatactcgattgagtgaagggttt

SEQ ID NO: 250385 - DNA, 90 bp, Homo sapiens
cagtgcccttgtggcgaatggggctcacgtcgaaaatcatgagtggaggatctcaagtccacattttttggggtgctccaattgctccac

SEQ ID NO: 250386 - DNA, 138 bp, Homo sapiens
cgcctatctttctcctttggggaccacttggctgaggacctgtgcgtgcaggctgccaaggccagcgggtccaagacgcggaagatcccataccccaccaagaaccccttcacgtggctcttcctgctggtgtcctgc

SEQ ID NO: 250387 - DNA, 99 bp, Homo sapiens
aaagccaggacttgttaaaaagatcaatagattgcctacccccattgcaggactgaactctcttgatagagcccaagcagccaagaataaaggcaataa

SEQ ID NO: 250388 - DNA, 98 bp, Homo sapiens
ttccacggtgtgttctatgccgggggctttgccattgtgtattacctcattcaaagctgaagccgacgtagcttctctgaacagacgcatccagctgg

SEQ ID NO: 250389 - DNA, 90 bp, Homo sapiens
tcaccacgttctggggcctcgtcggcatcgccgggccctggttcgtgccgaagggacccaaccgcggcaacctttcccctggatctcaca

SEQ ID NO: 250390 - DNA, 96 bp, Homo sapiens
cgacgcccgcctcggcgcgcacatcccgcggggcccggccgggtggcagtgtgccctggcagccctccgtgacgtccggcggttccttagtgagga

SEQ ID NO: 250391 - DNA, 100 bp, Homo sapiens
tctgaagaaatacttggattctatccctcctggtcagtacatggattcttcacttgttaaggcaaaagatgtgattgaagagcatggtccttcagaaaag

SEQ ID NO: 250392 - DNA, 100 bp, Homo sapiens
ccaggtgaagagtcctggatggcagatggggggaccccggtacggacctgtgcaggtgaggacaggccagggtgtactctgtgtgaccgcgcctatccct

SEQ ID NO: 250393 - DNA, 98 bp, Homo sapiens
ggcgaccttataactcttgccatattggcttggataagtcagggcttatactcctgtcttggcctgtatccggtgtccgaggcgaactcagtaagatg

SEQ ID NO: 250394 - DNA, 83 bp, Homo sapiens
tcccctatgagagtcccatcttcagcagaggtgctggagaatctggtaaaagcaccattgtgaagcagatgaggatcctgcat

SEQ ID NO: 250395 - DNA, 101 bp, Homo sapiens
aacattaatgttgtgaacaatggtagaactgttaccattaagttgaagaatgtgaattttgaagtaaaaactcgtgcatctacagtttcatctgttgtttc

SEQ ID NO: 250396 - DNA, 100 bp, Homo sapiens
cctggaattacttcaatcaaatatgtgtcacaaagatgtctacacggaactgccagggaatggactcagtgatcaaacccctggacacaattcctgagga

SEQ ID NO: 250397 - DNA, 97 bp, Homo sapiens
aacattcgtctcggaaaccccgcctcttacagtcacgagattgggtttgtgctgttcccaccttttggaacacccgaatgggaccagaaggatgatg

SEQ ID NO: 250398 - DNA, 100 bp, Homo sapiens
gcagagctagttcctctccagctcagccgcgtagttttacatgtggcacccataaaagatgaggctgagaacacggaaagcttctcagcagtcaaatcaa

SEQ ID NO: 250399 - DNA, 105 bp, Homo sapiens
ccgggaggaaggaacgaggcaaggagctaaagcagcgtgcgttcagccctgggcacaggaagtcctggagaacctgaaggaccgctggtaccaggcggacagccc

SEQ ID NO: 250400 - DNA, 97 bp, Homo sapiens
atattagcatactgccatgttcgtgctggtgtgggtaggactggaacctttattgcattggaccgaatcctccagcagttagactccaaagactctg

SEQ ID NO: 250401 - DNA, 96 bp, Homo sapiens
ctcgagaagctccagatggcgtcttccgtgggcaacgtggccgacagcacagctgcagaagaaagatcagcaactggagcctaaaaaaagtaccag

SEQ ID NO: 250402 - DNA, 101 bp, Homo sapiens
attccagtcccttacgtcgagaagtatagacctgcctccgcctcagtatcggctctgattggaggaccagttgctcttctgtgatgactgcgatcgtggct

SEQ ID NO: 250403 - DNA, 73 bp, Homo sapiens
ctggttctgggaaaacaacattgtctcggacccagatgatgtggtaccagttggccaaagaagagcctggtgt

SEQ ID NO: 250404 - DNA, 101 bp, Homo sapiens
gcaatggagttagcaagcttcatggttgcttatacgtagttggacctgagggcactcgctttgctcctgtcagtacacactcccaaacagttaaacccagc

SEQ ID NO: 250405 - DNA, 75 bp, Homo sapiens
caggaaccaccagtgacagagtgctcatgtgactatcacggatcgaaaagtagcattagaatttcttaaatcaaa

SEQ ID NO: 250406 - DNA, 75 bp, Homo sapiens
acttggtcggctcttccagctacaaactctaggtttgaaaggagtccaaaactacttacctggaagaccttccac

SEQ ID NO: 250407 - DNA, 75 bp, Homo sapiens
gtttgggaaatgcaacaatccaaatggccatgggcacaattataaaggtcttatatccagatggccaggctcaga

SEQ ID NO: 250408 - DNA, 100 bp, Homo sapiens
ctggaggagcggctgaagcgcgtgcgcatgataaacattgacgatcttgaggatgaccctgtggtgaacggggagaggtctggctgtgcgctcacagacg

SEQ ID NO: 250409 - DNA, 100 bp, Homo sapiens
cggccagcgcgggcgcggccggagaccgtggggcccccggttgccgccccctcggatgggcactgtgccccgactgcggcctcgcctcaatgccattctc

SEQ ID NO: 250410 - DNA, 101 bp, Homo sapiens
taatagatttttccctctaccttaaggatgtgcaggatcttgatggtggcaaggaggtcaatgcaaccaacttcatggaggcaggagccccagttatgtgg

SEQ ID NO: 250411 - DNA, 122 bp, Homo sapiens
gcttcgagaagattagcaaaggtgctaatccagtggaaatcaggagagggactttaactgcacttcgaatgtgttaccaaggttatggttaccctttgatgctgttcctggaagaaggagga

SEQ ID NO: 250412 - DNA, 82 bp, Homo sapiens
gaccctgagcaggagacgcgaaccaacatgctgctggagctcgcaaggttgacatcatggacatatgtgagtccatcctgga

SEQ ID NO: 250413 - DNA, 75 bp, Homo sapiens
aggtgttcaagtgcagggagttcccgttacaatcactagtgttgcagacagtgggagtagctcaccgttacccaa

SEQ ID NO: 250414 - DNA, 100 bp, Homo sapiens
agaaagctatctagggacgagatctagaatcaactgagagagatgcttaaaaatcaccagttactttaatgagacaggaagatgtcacccaagcgcatag

SEQ ID NO: 250415 - DNA, 100 bp, Homo sapiens
agcaccttgggaagagaaagaaaatgccgaaggcactcagacaggccaactgtgatttgagacggcagattgatgaacagcaaaagatgctagagaaata

SEQ ID NO: 250416 - DNA, 100 bp, Homo sapiens
gcggcgcttcccggggctgcggctcttcgggcacagaaaagagtagttgaacagctacggaagaacctgatagtaaagcaagaacaaccggacaagttcc

SEQ ID NO: 250417 - DNA, 101 bp, Homo sapiens
cggctccctgcccttcgacgggcacaacctcaaggttagaaaatggatttctgactggaatctcaccactgaaaaaaagcacacccttttaagactacttt

SEQ ID NO: 250418 - DNA, 76 bp, Homo sapiens
ggagttcagccgcgctgccgagaagctttacctcgctgaccctatgaaggtaccgggtgtctggtccgagccgtgg

SEQ ID NO: 250419 - DNA, 75 bp, Homo sapiens
gaaccgtggggcgcggaaggcctcccggcgctcttcctcccggagtatgattgctcgctgtaagcagctcatctg

SEQ ID NO: 250420 - DNA, 75 bp, Homo sapiens
gatcctctggcggagcagaagagggccttgatgtacacacgtcggtactcaaggctggagtgcggtggtgcgatc

SEQ ID NO: 250421 - DNA, 75 bp, Homo sapiens
gtggctcccgcatctgcctccctgccccagcccatcctctctaaccaaggtgctggggagtcagggaagagcacc

SEQ ID NO: 250422 - DNA, 75 bp, Homo sapiens
ccacgcagaggctggcgggcattccggaactgctcaacaaacttcgccagctctcctatgtggacgccgagggca

SEQ ID NO: 250423 - DNA, 98 bp, Homo sapiens
tctctgctgcaccgacctcgacgtcttgcctgtgtcccacttgttcgcggcctatagtttacttctacaatttcggatggaaggattatggtgtagcg

SEQ ID NO: 250424 - DNA, 90 bp, Homo sapiens
ttcacggcgccgagccgcggtccgaaccctggaagctgtcctgaatttcaaatactctggaggcccgggccacactgaaggatattacag

SEQ ID NO: 250425 - DNA, 101 bp, Homo sapiens
ggacaacgcctccaactgtgactgccgcgcatgggactacggcatccgcgccggcctcgtccagaacgtggtcagcaagttctacatcaaacagttcgtta

SEQ ID NO: 250426 - DNA, 82 bp, Homo sapiens
cgacaagccgctggcagccgcggatctcaccgccgctcaggtaatcaagatgattaccaactggttcgaaaacttggtcggg

SEQ ID NO: 250427 - DNA, 80 bp, Homo sapiens
ggggctaaccagttagtggtgctcaacgtgtacgacatgggactttgaacatgtcggggatcgccctcagcagactcgcc

SEQ ID NO: 250428 - DNA, 83 bp, Homo sapiens
ctggagcgacgacggccgctgcctaagctggaaagactgatcctttgaaatactccagccatgactaaaagagaagcagagga

SEQ ID NO: 250429 - DNA, 83 bp, Homo sapiens
tggaacttggacttggaggcctctccacgctgtcccactgcccctggcctaggcagcaggacacctgctccacttcacctttt

SEQ ID NO: 250430 - DNA, 75 bp, Homo sapiens
gttctcccggtgtggccacgagtcggcgggaatgcatatcagtccacgtgggccaagcgggagttcagattggca

SEQ ID NO: 250431 - DNA, 100 bp, Homo sapiens
ggcggcagcggttggaggcttcgcccggctttgcagcggggacttcggcggcggcgcctcaggcacctcggcccgggcgaggcggtggccagcgccatgc

SEQ ID NO: 250432 - DNA, 100 bp, Homo sapiens
gtttattaaccacttaacctctcagaactgaacaaagacaacattgttcctggaacgccctctttttaaaaaaggtaagaatgattgatgttggctgata

SEQ ID NO: 250433 - DNA, 75 bp, Homo sapiens
ccgctgccgctgccgctgccgcacctccgtagctgactcggtgaaagaacttgtcctggacaacagtcggtcgaa

SEQ ID NO: 250434 - DNA, 100 bp, Homo sapiens
tcccagtgggacatgtttgccacccctcagtatcggggagtaagagcaggactttgaagaatatcctgaacatagaacgaactttttcttactacttcag

SEQ ID NO: 250435 - DNA, 87 bp, Homo sapiens
tagacagcgtgtgccaagcagatgagaattcaggtccttctatatgatccactctttgactggaccatgaatcctttgaaagctttg

SEQ ID NO: 250436 - DNA, 78 bp, Homo sapiens
ggctgtgcaagtacctgccagagaacgacctgaaggccaccagcccctcgggttccaagatgcagctactggagacag

SEQ ID NO: 250437 - DNA, 50 bp, Homo sapiens
ctccgaggcgcagaagtggattgagtgatcttgagcctgaatggctggac

SEQ ID NO: 250438 - DNA, 100 bp, Homo sapiens
gcggacggcgtggaccacatagacatttacgcggatgtcggcgaagagttcaaccaggaaagaccacagcaagattctttcattcgtctcctcctagcct

SEQ ID NO: 250439 - DNA, 100 bp, Homo sapiens
gtggagatggatggtgatgagatgacccgtattatctggcagttcatcaaggagaaggaagcaattgttacttctgaagagctgggccaggatctggagc

SEQ ID NO: 250440 - DNA, 51 bp, Homo sapiens
accagcactggtcatgtctaaagccatggacctggctcaggcaggcagcac

SEQ ID NO: 250441 - DNA, 80 bp, Homo sapiens
cccgactccgtaggagcgcgggggcggctcctgctcttcctggactcctgagcagagatgatcatgacgcagtcctgagg

SEQ ID NO: 250442 - DNA, 82 bp, Homo sapiens
catccatcaaagctttgcgcaacgccaacctcaggcgagatggtgccaatgggtcatgtttggttagaaggtgacaatctac

SEQ ID NO: 250443 - DNA, 75 bp, Homo sapiens
acgaagagctgccgtcgctgcagagaccccgctatggctgtttgatctgtggatgaaatgaatcatgattttcaa

SEQ ID NO: 250444 - DNA, 100 bp, Homo sapiens
tgcaagagtggttacatctctgtccagggagactctgcctactgtgaagaagcatcaagtgtacctgatttgtgaacctatcttgcttcagttggtttcc

SEQ ID NO: 250445 - DNA, 82 bp, Homo sapiens
tcggcggaaagtttggctgcgcgggttcccccgaagttcagccggtggctgctggcagcggaatcccccagatcaagtgctt

SEQ ID NO: 250446 - DNA, 82 bp, Homo sapiens
cgagagccacactttcaagtaaaccagggcctgcacccagagagggtgagctacgtccttggggccacagggcacaacttca

SEQ ID NO: 250447 - DNA, 75 bp, Homo sapiens
acggtctcacagacaacgttgagatctgactgcagccatgagcagcaatgagtgcttcaagtgtggacgatctgg

SEQ ID NO: 250448 - DNA, 90 bp, Homo sapiens
tatgtcaccaggactcctgacaaccaggaaggagcatgcagcagattggaataaatatgatgaccgattgatgaaagcagcagaaagggg

SEQ ID NO: 250449 - DNA, 100 bp, Homo sapiens
ttacatactgattctttaagaaaatcagataacttgtactggagagaaatcctacaagtgtggcaccagttagaagacaaatgaaagctaagcaactcag

SEQ ID NO: 250450 - DNA, 50 bp, Homo sapiens
ctgagcgggcggtcattcgcatcgcaggtggggcaggagaccctgtagga

SEQ ID NO: 250451 - DNA, 100 bp, Homo sapiens
cgggcgcgcaggccgcggggagcacctggatctgtaagagcaaagctaaagaatctcagcagtattatcacagcttggctgtccggcagagtctggctgt

SEQ ID NO: 250452 - DNA, 100 bp, Homo sapiens
atttaaacaagagatttccacagaagagatgtgaagcctgataacatgctgctggataaatctggacatttgaagttagcagattttggtacttgtatga

SEQ ID NO: 250453 - DNA, 51 bp, Homo sapiens
caaaggcacaggaagaagcttgcagctccctgggctctgtcagctagcaga

SEQ ID NO: 250454 - DNA, 100 bp, Homo sapiens
gggtctttaggatttgcagctccaggaagcgagatgtcgaagccgccacccaaaccagtcaaaccagggagcgcttgaagcgcagccagaagagcaccaa

SEQ ID NO: 250455 - DNA, 101 bp, Homo sapiens
acccgcgccgctgccctccggctccgcgggcggcccacggcgagcctcccaaagtgaaatgcctgaccaagatctggcaccccaacatcacagagacaggg

SEQ ID NO: 250456 - DNA, 74 bp, Homo sapiens
tttgtggacatctccaccatggcaagagggaatctggaaaaattgcaatcaaaacatcatttctctaagaaaat

SEQ ID NO: 250457 - DNA, 96 bp, Homo sapiens
cgcccggcctaggatttatcttttaaggtttccacttgagcggcacagtgacagaacctgcaatacaatcggagccagaaactgtttgcaacgtgg

SEQ ID NO: 250458 - DNA, 90 bp, Homo sapiens
caatatctatattctggcccatcaggttcctcagtggtgtgctgaatattgtctttccatccactaccagcacgggggcgtgatatgcac

SEQ ID NO: 250459 - DNA, 75 bp, Homo sapiens
tgagctacatgtttgagtacccggagtatcagggaccagttactctccacaagaaaattcacacaaccacagtgc

SEQ ID NO: 250460 - DNA, 100 bp, Homo sapiens
gggttctctctacagaagtctgttgcagagttcacagaggagaattccaggtggcgacatgtctaagaatgtgagccagtcacagatggcaaaattgaac

SEQ ID NO: 250461 - DNA, 80 bp, Homo sapiens
ggcctgtggactgcagcctcggcggtcagcaggtcaccctgctgattgccttcatctgtgtgcggagctccctgtggacc

SEQ ID NO: 250462 - DNA, 99 bp, Homo sapiens
tctgaatcgtgttcctgaatgaaagaagtcagttttcggctttgtgagaaaccttaccatcaaacacgatggccagcaacgttaccaacaagacagatc

SEQ ID NO: 250463 - DNA, 76 bp, Homo sapiens
taagatgcgactgctacagggaccatgggacactattacgcaacagtgatgcggctgactaagcctactttattca

SEQ ID NO: 250464 - DNA, 99 bp, Homo sapiens
tcccaaacaactggcagaatttgctaggactccagaagacctttccagattcgtggttgagctgcagcagagggagcttgccttgaaggacaagaacag

SEQ ID NO: 250465 - DNA, 100 bp, Homo sapiens
aaagctcagcacacactcccgcaggatcccgccattgttcagatccgagctggatccagagttgcatacagaccaatttctgcatcagtgttatctcgac

SEQ ID NO: 250466 - DNA, 82 bp, Homo sapiens
agcaccatggggaagcgggacaatcgggtgaactgccattggatgtccagaatcccctgtagttgataatgttgggaataag

SEQ ID NO: 250467 - DNA, 50 bp, Homo sapiens
cccaggcacagagaccccatcctacaaggccatccgttgcacactggtaa

SEQ ID NO: 250468 - DNA, 51 bp, Homo sapiens
aacgatttcatcagtatggatcccaaggaacttgccacatcagactcagat

SEQ ID NO: 250469 - DNA, 98 bp, Homo sapiens
gaaacgcaagacggtgccgagaagcagctgcgaggattcagtggcctttgaggatgtggctgtgaacttcaccctggaggagtgggctttgctggatc

SEQ ID NO: 250470 - DNA, 90 bp, Homo sapiens
gcagaagggaggctccaagacctcatcaacaattaaggccaccccagcagacatgtttgccaaggcctttcgggtcaagtccaacacggc

SEQ ID NO: 250471 - DNA, 98 bp, Homo sapiens
tttccctctcccaacatggcggcctcagatcaacaagttggagaaagctgttgctgcagcacacaccttcttcgtgggcaatcctgagcacatggaaa

SEQ ID NO: 250472 - DNA, 98 bp, Homo sapiens
actaccaggccaaggaccaggatgcttttactgactctgctatcagtgctaaagtgaatggcgaacacaaagagaaggacctggagccctgggatgca

SEQ ID NO: 250473 - DNA, 100 bp, Homo sapiens
tggctcactgcagcctcaacttcttgtcctcaagtgatcctcccaccttagcctcctaagtagctgggaccacagtagagaccgggtttcaccatgttgg

SEQ ID NO: 250474 - DNA, 80 bp, Homo sapiens
caacgccgagcgcaccgacatctgcctgctcaaaggacacctgctccacttcaccttttgccatgagtaaaagctccctg

SEQ ID NO: 250475 - DNA, 98 bp, Homo sapiens
aacagctgttgacaagactgaggatagtttagaaggatgcttggattgtctgcttcaagccctggctcaaaatatgaagcctggtgttcggtacagag

SEQ ID NO: 250476 - DNA, 100 bp, Homo sapiens
gacccagtccctcatcatgatccagcccattctctactcttactcctttcatgggccaccagagtgggagctggtgaggtggccaacttcgctgcgtatg

SEQ ID NO: 250477 - DNA, 100 bp, Homo sapiens
ttgttgccatgggatacctgttcatgtgttttggaggcaccgtctctccctgggaccaggttgttcaaggctacaagcccccggggagagccccaggatg

SEQ ID NO: 250478 - DNA, 75 bp, Homo sapiens
agtaattggagccaagaaatgagtataggccagctacagatgcatgcatattgtgaaaacccagatatagtgctg

SEQ ID NO: 250479 - DNA, 111 bp, Homo sapiens
ctcgagtgaaggagtatgcacgaaacaaaaacatccattactatttcatggccctgaagaatgatgagcagggcactgtggcatttgaagatgtggctgtgaacttttccc

SEQ ID NO: 250480 - DNA, 100 bp, Homo sapiens
cgggtctggagtgcgtgggggaccggctgttggcggctcttcagtgggtcatctgtgtgtcacagcctcagaagaccagcgagatggctgccaacaagag

SEQ ID NO: 250481 - DNA, 83 bp, Homo sapiens
caaaaactcaggcttcgccacctgcgtgcaaatcaggatggctaaaggtgaccccaagaaaccaaagggcaagatgtccgctt

SEQ ID NO: 250482 - DNA, 98 bp, Homo sapiens
agtccgctcatcaccctggagactcaggtgctgctggtgagtagcagccggtacccagaccagtggattgtcccaggaggaggaatggaacccgagga

SEQ ID NO: 250483 - DNA, 100 bp, Homo sapiens
cgacgactaaatacccgtgtctgaagtcttcaggcgagctcaccacatgctacagcttttctgggagaagaggctacaaggacttagtgcatcagatgta

SEQ ID NO: 250484 - DNA, 100 bp, Homo sapiens
ggcaagcctgttggagactcagctcgccctcccctacctgcggaagagtcaagggaatgtcatcaacatctccagcctggtgggggcaatcggccaggcc

SEQ ID NO: 250485 - DNA, 75 bp, Homo sapiens
gatctttgctcttccatccgcctttgatcgtcttcctcttcagccatccaggaccagacttatgaagtggccttc

SEQ ID NO: 250486 - DNA, 50 bp, Homo sapiens
catggcggaagtaatgggatctataaagatatggaatgtgcagatgtccc

SEQ ID NO: 250487 - DNA, 76 bp, Homo sapiens
gctgctggacgactcggagatctcctgccacatccagttgatattcactgatggactccaaagaatcattaactcc

SEQ ID NO: 250488 - DNA, 100 bp, Homo sapiens
actgctgtccctggcagtgcagaagtccagggaatggctggcccagcagctgagatcacagaaatgtctggagaaattgaatcctgcttgacggaggtag

SEQ ID NO: 250489 - DNA, 75 bp, Homo sapiens
gcaagctctggttgttttatggagtatcttgagaatcaagtgattaagggaacgggtatggcaatccccgaaact

SEQ ID NO: 250490 - DNA, 75 bp, Homo sapiens
cgcgaattggagaaaaagttcagtgggaagcatgtcgtctttatcgctcagagtctcgctctgtcacccaggctg

SEQ ID NO: 250491 - DNA, 83 bp, Homo sapiens
accgcgcgcagggcctgcagcgggagctggacggcgagcgcgagcggcgcgagaaaatcaatgtgggaaccactgtgaccatg

SEQ ID NO: 250492 - DNA, 82 bp, Homo sapiens
aagctgccaaaagtgacatgcagttgcagatctgatctcttctgaacacctcatcgtgtctccatccctgggaatctgaccc

SEQ ID NO: 250493 - DNA, 50 bp, Homo sapiens
gagcgcgcgcgcgaaaactccgggcagtgccggtggtggtgtgcacattg

SEQ ID NO: 250494 - DNA, 83 bp, Homo sapiens
gcgctactcggcctctgggctgctctgggcctggggctcttcggcctctcaggacccttgaacatctgtgaagaaatgactat

SEQ ID NO: 250495 - DNA, 76 bp, Homo sapiens
taacttatcgtggaaataaaacagctgttttgcagattggactacaaggagcatattaatgaaaagtgccataaac

SEQ ID NO: 250496 - DNA, 75 bp, Homo sapiens
aaggacttcctccccagcctttgggcttctatccgcagagagtgttgctgaaggaccatttattactggagaaaa

SEQ ID NO: 250497 - DNA, 75 bp, Homo sapiens
gcttgtccttgctggtgcatgcgtcgtcggcctctgggcagcagcattgatgttgatgggacaatgacagtggac

SEQ ID NO: 250498 - DNA, 98 bp, Homo sapiens
tcgggcctccacacgggcctccgaagagctgccgcgacgcccggcccgcagggcaggttcgatacaagaggctgttttcctagcgtggcttgctgcct

SEQ ID NO: 250499 - DNA, 74 bp, Homo sapiens
ctgatttgtccctggggcggcagcgcggacccgcccggagatgagatgcccagacctggaggatccccagggtc

SEQ ID NO: 250500 - DNA, 51 bp, Homo sapiens
tttagaccctccacctaattgcagggtcgactgatagatcatgtgaaaaag

SEQ ID NO: 250501 - DNA, 97 bp, Homo sapiens
ctatttatgccaacaccatcaatacttttcggattaaatctggaaatgaaaatggagagttctacctacgatgcttagatgagtacgaagatgatga

SEQ ID NO: 250502 - DNA, 82 bp, Homo sapiens
agaggatcggggacccgctgatcttccagctcccctcacccaacgtcgttccctgaagaggaaggagaaggaatatgagcat

SEQ ID NO: 250503 - DNA, 89 bp, Homo sapiens
tccgagaagcttcaggcagcataacacttacaggactataagacctacttggactttgtccttgcattagaaaacagaaaggaacctgc

SEQ ID NO: 250504 - DNA, 75 bp, Homo sapiens
tccagcagccaagatggtgaagcagatcgagagcaaggtgcagagcattgtagaccaaggagccatggataggag

SEQ ID NO: 250505 - DNA, 100 bp, Homo sapiens
cggccgggagaagcatgggaaggaggccgagccgggatctcaggtcctcgggggcggcggccacgccaaggacggtccaatatcagatggaaatgatgcg

SEQ ID NO: 250506 - DNA, 98 bp, Homo sapiens
tttgaagagaagattgtcagcagttcgactcgggaagaggctctgtcgggattggccggaagcagaagggaggtcactggtgttgtggctgctctgga

SEQ ID NO: 250507 - DNA, 100 bp, Homo sapiens
tatgaaggggtggcctgcccctccacatctgtgggatatctcatcaggtttggaacaaactctcccttcacttgttgccctgtagcactacagaaaccct

SEQ ID NO: 250508 - DNA, 75 bp, Homo sapiens
ctgccgctgccgcacctccgtagctgactcggacactcatgaggaccatgatacttccactgagaatacagacga

SEQ ID NO: 250509 - DNA, 89 bp, Homo sapiens
ggagggagccgcaggcgcagacccacccgccatgaagccccccgcagtacataccgagcatcaaatattaaggcacccggagaacagac

SEQ ID NO: 250510 - DNA, 100 bp, Homo sapiens
gtactgagaaaatacaaggagctggacatcgagcctgagggaggggaaaggcgcaggccgcggcgagtcctttgcacatgttggcaacacacgcatccgc

SEQ ID NO: 250511 - DNA, 103 bp, Homo sapiens
accaggaaggaagacctctcccaagacacctgtccaggagtctgtgaccttcgaggatgtggctgtgacatttacccaggaggagtgggggcagttggacgtg

SEQ ID NO: 250512 - DNA, 82 bp, Homo sapiens
gacgcactgattagaggacatttctgtggaagggtggagtttcactttgaaggaaggcaacagcccccaggggagcaaccag

SEQ ID NO: 250513 - DNA, 82 bp, Homo sapiens
gctgaagcaggtgtccgcggggcagacgtcggtgtatgccctggatgagaatgactctttttgatcagaacaatgctgcaaa

SEQ ID NO: 250514 - DNA, 100 bp, Homo sapiens
gaggccgtgaagaccttcaatagcgaggttggcagtggcaatgacccctggtcagcctggagtgcctccaaatctgggaactgggaaagctcagaaggct

SEQ ID NO: 250515 - DNA, 80 bp, Homo sapiens
gctcgcgctactctctctttctggcctggaggctatccagcgtggtctttgggaagaagcttcctgcctttgccaccatc

SEQ ID NO: 250516 - DNA, 75 bp, Homo sapiens
ctcagaactgagaagctgtcaccacaggtttgagcacaaaatgaacataattagggaaaataaggatctggcatg

SEQ ID NO: 250517 - DNA, 82 bp, Homo sapiens
ggcagccggcagctttgcagcgggatggaagatgctaattctgaaaagagtataaatgaagaaaatggagaagtatcagaag

SEQ ID NO: 250518 - DNA, 100 bp, Homo sapiens
attttcctacagactaccccttcaaaccacctaaggctgatgtggtcatcaagttccctgaggaagaagctccctcgactgtcttgtcccagaacctttt

SEQ ID NO: 250519 - DNA, 100 bp, Homo sapiens
ccaggacctcagggtagcactggtcctcagggaattcgaggccaaccggcctgctctcttgaacagtgccgaaaacttcactgtgctcatcaagaacaat

SEQ ID NO: 250520 - DNA, 75 bp, Homo sapiens
tgcaggcctccgcgctcagtggaaataatgaagatgtttcattttcaagaccagcagatcttgaccttattcagt

SEQ ID NO: 250521 - DNA, 100 bp, Homo sapiens
accctcaagaggagcaacctcgtcagcagcgaggaaggaaacagcgccttcatcccgcgtggagtctacccccaagcccttctcctcttcccaattcttg

SEQ ID NO: 250522 - DNA, 90 bp, Homo sapiens
ctgggatctcaacgagacaaacgatgtacaaaactttttaccaacaaaaaaaagcaagtagttatactcaggaagaacttcaagacactt

SEQ ID NO: 250523 - DNA, 80 bp, Homo sapiens
gcccactatcctcagaatatagaatggaacccttttgatcaagatgcggtgaacatgtcctacaagattatcaattttgc

SEQ ID NO: 250524 - DNA, 117 bp, Homo sapiens
cacgctgtaccagttcgctccgagccccggccgcctgtccgtcgatgcaccgaaaagagcctggagaaagttcttgtggaattcagtcacaaggagttgtttgatttctataacaag

SEQ ID NO: 250525 - DNA, 75 bp, Homo sapiens
agatttctgcagtgaagattgctgtaaaaaatttcaggattggtactacaaggcttagagtgggacctgaatgtg

SEQ ID NO: 250526 - DNA, 98 bp, Homo sapiens
ctgcctggctagccggcgacttgagtgacgataaaacgatgtttgcagaaatggaaatcattggtcagtttaacctgggatttataataaccaaactg

SEQ ID NO: 250527 - DNA, 74 bp, Homo sapiens
gtgggtccctcagcccttctgagctctgtgctgaacaaggataaaagaatcagagtgtctcaacccttgacaag

SEQ ID NO: 250528 - DNA, 97 bp, Homo sapiens
cacttccaggtgcacagcgcgggagccgtcacggtgctcaagctccttcgagaactcatagaacggaagaccagctccttggatcccaacgatcagg

SEQ ID NO: 250529 - DNA, 51 bp, Homo sapiens
agctgactgatacactccaagcggtacatgtcccagagcaagcacacggag

SEQ ID NO: 250530 - DNA, 75 bp, Homo sapiens
taaaggatgggttttaactacagacccagtctctgccaagtttccagtggtagcaatgggtgtgctgaagtgggt

SEQ ID NO: 250531 - DNA, 98 bp, Homo sapiens
cctgcgacaggctgcatgcaaacagcagagtgagatacttgtggtgtcagaaggatcatgtgccacagttgcccctccagaggacttgcgagtggctg

SEQ ID NO: 250532 - DNA, 74 bp, Homo sapiens
gaagaacatgcatatttgggtccaactgtgaagccagatgataaggtactcaccagatgagctgcggtatctgc

SEQ ID NO: 250533 - DNA, 90 bp, Homo sapiens
acagataactggcaaaggtgcttcggggacattccaggaggatttgacagctaaggatattgaagaaattattgatgagctcaaggctgg

SEQ ID NO: 250534 - DNA, 80 bp, Homo sapiens
ggatttcatccattatgctggctgttatgtacgcaggagttcacttagcagccatggaaggccaccttcactgtttcaaa

SEQ ID NO: 250535 - DNA, 90 bp, Homo sapiens
tcaagagataacaacaaatgttatgcaaaaataatctgtaatactaaagacaatttgctgatagtccaactccaccgccaccacctccac

SEQ ID NO: 250536 - DNA, 100 bp, Homo sapiens
tagggagccgtgggcgctcggtgcccgggccgggcaggacttgaaagaggagattgatattcgactctccagggttcaggatatcaagtatgagccccag

SEQ ID NO: 250537 - DNA, 99 bp, Homo sapiens
cacaccaggttattcgcctgcggtatcggcgttctcccggggaagtacttggaagagatcgccacacagatgcgcacgcacagcatcaacgcgctgctg

SEQ ID NO: 250538 - DNA, 75 bp, Homo sapiens
tgtctgactctgactctcggactgagaaacgcaaggtcagctggccgccggcacctgtgagattgtgaccttgga

SEQ ID NO: 250539 - DNA, 100 bp, Homo sapiens
gtgcaaacccgagagaactggaaggactccatgaaagatgacagaagaagttattgtgatagccaagtgggactacaccgcccagcaggaccaggagctg

SEQ ID NO: 250540 - DNA, 50 bp, Homo sapiens
cacaaagccggctacgcgctgcgagactttgagaagcccgagagcccccg

SEQ ID NO: 250541 - DNA, 98 bp, Homo sapiens
ctggagcagaagttagcgcttctctctcggtataccggacactacttcataaccactttactctactccttcttcctgggatgttttggtgtggatcg

SEQ ID NO: 250542 - DNA, 83 bp, Homo sapiens
ctgccgacgtcggggtggccgttcagcagccgagactcaagaactctgcgaccttcaagtcgtttgaggaccgagttgggacc

SEQ ID NO: 250543 - DNA, 76 bp, Homo sapiens
gaacaagaggacaggaggtgtcgttccagacacctcgtctgctactggaacacatccattgtatcttcagcctcca

SEQ ID NO: 250544 - DNA, 83 bp, Homo sapiens
cagggagcagacgcgcacagcaaggagctgaacaagtacctggtgacctttagccccctgatggacacgcaggatgaccctca

SEQ ID NO: 250545 - DNA, 100 bp, Homo sapiens
gcgcgagtggagctctgaagaagctctgagcggagttgtgttcttccccaggatgtgatcttcgtggtggaaagctaaattttaaaaccaccccaatgga

SEQ ID NO: 250546 - DNA, 100 bp, Homo sapiens
gtcatcttcagaatgctaaaagaaaaggagccgcgtgtggaggaggctgaagtctcacatcagaggtgtcaagacggagtctcgctctgtcgcccaggct

SEQ ID NO: 250547 - DNA, 131 bp, Homo sapiens
cgccttggtagcagcgggtgacatggaaggggcagtacaagcttacgtctctgctcttcagtacaatcctcctatgaaagagacaaccagcaccaagatgaagcagaaggagatccaggtaatagacatga

SEQ ID NO: 250548 - DNA, 100 bp, Homo sapiens
ccttgcccggactgctaaagatgcagctatttacagtggacagaaactgaaggggtgaaagaaaacccaagtgccagaacagataaagcccagtgtaagc

SEQ ID NO: 250549 - DNA, 100 bp, Homo sapiens
cagcgccgcggcgacgaacccagggaggccaaacgtaccaagaaagtcgggatcgtcggtaaatacgggacccgctatggggcctccctccggaaaatgg

SEQ ID NO: 250550 - DNA, 98 bp, Homo sapiens
ggccgactgagcaggagtcgtccgcttatagtggaggctgctaggagccggtcagagggtaactgtgacatttgatgatgtggccttatatttttcgg

SEQ ID NO: 250551 - DNA, 78 bp, Homo sapiens
atgcttactgttgcgtggttcgttattaacaggttgtttttcaccattcagaacattgcctgaagcaggtccaccatg

SEQ ID NO: 250552 - DNA, 100 bp, Homo sapiens
cgggaaggggctgacggccgtgcccgaggggctcagcgccttcacccaagcgctcgactgcatttgcctccagacttgtcagacacagtgagccgctcaa

SEQ ID NO: 250553 - DNA, 75 bp, Homo sapiens
cgtcgtgctgggggacggcgcctccgggaagggcaccatgccggtggaaaggatgcgcatgcgcccgtggctgga

SEQ ID NO: 250554 - DNA, 90 bp, Homo sapiens
caagcaagcatgcagcttactgcttgaaaggttcggactaaggatcaccgctttgaaagtgtcagtcaccttatcagctaccacatggac

SEQ ID NO: 250555 - DNA, 100 bp, Homo sapiens
cccgccctggggacgaagagctgcagctcctcctgtgcggggttacgctaaggacatggtgacagactttgatgagaaacatgatgagtatttaatattg

SEQ ID NO: 250556 - DNA, 83 bp, Homo sapiens
taaaaattatccctactacaggactgcggacaagggctggcaggctttatcctgtggataaacgcagagtgaacgagtttggg

SEQ ID NO: 250557 - DNA, 100 bp, Homo sapiens
ccggcatggcgctccggggcttctgcagcgccgatggctccgacccgctctggagatcgcggattcaggtgtggctctatgagcaagtgaatatgcggat

SEQ ID NO: 250558 - DNA, 82 bp, Homo sapiens
cggaggcagagaagggaacgcccggcccagcccccgttttaccaacgaggatcatttggctgtccataaacataaacatgag

SEQ ID NO: 250559 - DNA, 141 bp, Homo sapiens
gacagattgctgaccaggggcttgagagctgggttctattttccctcctcaaactgactttgcagccacggagaggtgaacctatgggtcgtggaacaaaagttatcctacacctgaaagaagaccaaactgagtacttgg

SEQ ID NO: 250560 - DNA, 100 bp, Homo sapiens
cgcttcgtgcaactctccgggcggccgcacctgccaggactgagcagggggaggaacatttaagctgatggaagtggaagtggaagttgctgtacattgg

SEQ ID NO: 250561 - DNA, 101 bp, Homo sapiens
aagaacgtcaaacactccaacgattgagagcatttaaagatagctgtaggtaaaacttgcctactgatcagttacacaaccaatgcatttcctggagaata

SEQ ID NO: 250562 - DNA, 82 bp, Homo sapiens
ttgaaacagacaaggattttaaggtcaaagatcagacctattgtgaccgcctggtgcaggacacgcctttcctgacaggcca

SEQ ID NO: 250563 - DNA, 75 bp, Homo sapiens
acaaaagcataggatctccaatggaagagagagagaaattacttaagcaggcaaaatcagttgaggtacaaggag

SEQ ID NO: 250564 - DNA, 75 bp, Homo sapiens
ggcggagccaggccagcggaagatcgtcatgcataaggagtaaacatggaagtactaacttcattccagaacaat

SEQ ID NO: 250565 - DNA, 100 bp, Homo sapiens
ggagctgcagaaggagctggcagagcagaagtctgtggagaccgcaaaaagttgtatcacggactgattcaccgagcccaaccgtactcaactcacatat

SEQ ID NO: 250566 - DNA, 100 bp, Homo sapiens
gagtcaatggcaaggctaaagaaattaatgacaataatggatagtatgaatgatcaagttggaattaacgacctctggaaagatgccttttatgttacca

SEQ ID NO: 250567 - DNA, 75 bp, Homo sapiens
ccaggactgcgcccccgggagcgggcgcccagagtgccagattggcctcactttttggactggatcaggcagctg

SEQ ID NO: 250568 - DNA, 101 bp, Homo sapiens
gctgcggaggcgttggagcgcggaaatctggaaccgggatggcgacgtctacactgagtcggaggcgaagttccagttcctagcagatttaatagacgagt

SEQ ID NO: 250569 - DNA, 100 bp, Homo sapiens
ctcccctggagctcactacttgctaacaggctcttatgatatgaaaataaaggtgacagacctacaagtatcataatgaagacctggaaaaagacaaaac

SEQ ID NO: 250570 - DNA, 83 bp, Homo sapiens
cgaggtcctgcaggtggagctccggcagccgccctggtctctaattaacagaagatggcaaagcccagccacagcagctatgt

SEQ ID NO: 250571 - DNA, 102 bp, Homo sapiens
ataggcattaatccatactgtgctctcattgaagaagcatatggcttatgatcagaagaacattaggcgaagagtttatgatgctttaaatgtgctaatggc

SEQ ID NO: 250572 - DNA, 73 bp, Homo sapiens
cattggcgtggatccgctggcctgattccatatggctctcatatcattccattccatctctgccaagatttgg

SEQ ID NO: 250573 - DNA, 90 bp, Homo sapiens
ctggggttctgagactccctgtcccggaccgcaggaccgtgcagagagagctgctcgttttgcaaagacaaaggaagaagtagaggctgc

SEQ ID NO: 250574 - DNA, 96 bp, Homo sapiens
gatcatcctggggacctggtacatgccctcttggaacagagatcatgatgacacggcatctactcgttcaggaggaaccccaggcccttccagcgg

SEQ ID NO: 250575 - DNA, 73 bp, Homo sapiens
ataccagaccctggagtgaactggattccatgtagagacccctggagaaatcatgaggtccaatggattttgt

SEQ ID NO: 250576 - DNA, 82 bp, Homo sapiens
ggaccgtccagcccagcgattctcagtcaggttgacatcatggacatatgtgagtccatcctggagaggaagcggcatgaca

SEQ ID NO: 250577 - DNA, 97 bp, Homo sapiens
ctgcactgtgccccttccctgccaggggcgactgctgccctgactgtgatgtgctacaaggtgagctgcctggaaatccctgggccctctggcccca

SEQ ID NO: 250578 - DNA, 78 bp, Homo sapiens
ccgagccggacgtgtccgcgaagatggcgggccggtctgttctctggggaggcagtaaggggccgtggagctggcctc

SEQ ID NO: 250579 - DNA, 75 bp, Homo sapiens
cgttgcatcaccatcaagtcaacgcagtggcttgcaatccagaagttacgaagcaaaatccacaaaaaagtagat

SEQ ID NO: 250580 - DNA, 95 bp, Homo sapiens
tttgtggaagatggcgcctgttgtgacaggctctactttacgaagtgtttctactggatcttcaagaccttcaaaaatatgtttggtgtgtgggg

SEQ ID NO: 250581 - DNA, 82 bp, Homo sapiens
cttggtcactatggaggagataggcatcttggtggagaaggctcaggtatgcatcttctattgatgatattttggaagatga

SEQ ID NO: 250582 - DNA, 122 bp, Homo sapiens
agccgcaccacattggcgtggccgtcaaggagctggacctctacctggcctacttcgtgcgtgagcgagagtgtgaacatggctacgcctcttcattcccgtccatgccgagcccccgactg

SEQ ID NO: 250583 - DNA, 83 bp, Homo sapiens
gcccgtcggtctgcagcgcggctgaggtgtcgtgaaaactacccctaaaagccaaaatgggaaaggaaaagactcatatcaac

SEQ ID NO: 250584 - DNA, 100 bp, Homo sapiens
ggcggcatccctggagcagcagctggagcaggcatttacagaagctgccactggatcttcagctgacttcgtaaaggatctagcaccatttatgatttta

SEQ ID NO: 250585 - DNA, 75 bp, Homo sapiens
gctgccctcagctccgagtccagggcgaggcctccggtgtggctgtctctgatggtgtcatcaaggtgttcaacg

SEQ ID NO: 250586 - DNA, 112 bp, Homo sapiens
aaagcatatttaaaaggctcttggcacgggcagcattggttgagcaggtgaccaagaatatggcccaggtgaccaaagccctggacaaggccctgagcaccatggacctgca

SEQ ID NO: 250587 - DNA, 75 bp, Homo sapiens
atcatgggattcatactatagtaaagctttaggcaagcacgaggagcggcaggacgagcatggctacatctcccg

SEQ ID NO: 250588 - DNA, 100 bp, Homo sapiens
cttcagtaaatatctagcggatcctagtaatctctttgtggtttcttctgatttctgccattggggatagcagtgagattcacttcaaagtgaaaatgac

SEQ ID NO: 250589 - DNA, 100 bp, Homo sapiens
ggatttatacacacatcactaaaaattatccctactacaggactgcggacaagggctggcaggcatcgactacaagacgaccaccatcctgctggacggg

SEQ ID NO: 250590 - DNA, 75 bp, Homo sapiens
gtcgttgttggtccttctctaaacgaccatctgaagcatctgcttacaagcgaacagcgacatctcactcatgaa

SEQ ID NO: 250591 - DNA, 50 bp, Homo sapiens
tgtgacaccaagataagtaactttacaagtccttccactttctctctgag

SEQ ID NO: 250592 - DNA, 100 bp, Homo sapiens
ggcagattcctccgggcagcagggtttacccaaggtccagcctagcccctaggcaccatgtcggacagtgatctaggtgaggacgaaggcctcctctccc

SEQ ID NO: 250593 - DNA, 125 bp, Homo sapiens
gataacattggcaagtctgcttttgcaaatagtctatggaaattatgagagtaaaaaacacaagcaaggtttcctaaaaaaagtcctccatacattttctccccaattccattccttgggcatgc

SEQ ID NO: 250594 - DNA, 90 bp, Homo sapiens
catgattcaaaccgccaggttaccatgaggaggatttctggccttcgacatttttgaaacgttggggttgttggagtggttggattttcc

SEQ ID NO: 250595 - DNA, 98 bp, Homo sapiens
aagtgccggaagaaaaacatctgccatcactgtggcgcttttaatgctgagatgattgacaaattgacattgacattcaaccgtacccgccaagctgt

SEQ ID NO: 250596 - DNA, 50 bp, Homo sapiens
ctggaagagagaaggaagttgtaccggctgatcagctgaccgaagaacag

SEQ ID NO: 250597 - DNA, 75 bp, Homo sapiens
aaacatggctgggaggaattggtatattacacagttccacttacttacatgatcatttcgagagatgtaatgttg

SEQ ID NO: 250598 - DNA, 100 bp, Homo sapiens
cagaagtcgcgtgtctaggtgagtcgcggtgggtcctcgcttgcagttcagcgaccacggtctacgaccccttccgctttgacccagagaacagcaaggg

SEQ ID NO: 250599 - DNA, 82 bp, Homo sapiens
aaagcttttctgatatgatgggaaatacaaatgaaccaagcacacgtgtccgacatcaacaacagcaacttgtgattggcgg

SEQ ID NO: 250600 - DNA, 100 bp, Homo sapiens
acttgcctcccgggagtcgctgtggcaaaaggacctgaaggagaagaaggagaaggtggaggagaaggcaagccggaaagagcgaaagaaagaagtggtg

SEQ ID NO: 250601 - DNA, 100 bp, Homo sapiens
gaaagagattccttgcagagacagctcaacacggcacttccacagtgcaccaattccagctggacatcactgtgaaaatgggacgggataaagtccgaga

SEQ ID NO: 250602 - DNA, 97 bp, Homo sapiens
ccatgcgcctggcacagctcagtgaggagaagaactcggctgtacttcgcagccgtgacctgcagctggcgactggcattgctcgggtaccacttgc

SEQ ID NO: 250603 - DNA, 50 bp, Homo sapiens
gtggcagccatctccttctcggggcgagaggtcaatgatcttaaaagaaa

SEQ ID NO: 250604 - DNA, 88 bp, Homo sapiens
ggagactgcaaatgctattgtcagtcagcaaactccacaaaggtgttgctgccatcactacctttcccttcctcccctttcctcatgg

SEQ ID NO: 250605 - DNA, 74 bp, Homo sapiens
gcgcctcgcctggatgtgagtttcagccagttgatattcactgatggactccaaagaatcattaactcctggta

SEQ ID NO: 250606 - DNA, 100 bp, Homo sapiens
agtcacataaggatgaaatattccagaccccaccaacaactgaacgctttggtcaggctgctacaatggaaggaattggggcaattggtggaactcctcc

SEQ ID NO: 250607 - DNA, 88 bp, Homo sapiens
tgacatgggtcgggaagcagcatatgacggttgatgatgaagcgccggccgtgtaaatgaagatcgggtgaggagcaggacgatgccc

SEQ ID NO: 250608 - DNA, 83 bp, Homo sapiens
acaacgtcagggaattttgcaatgttattgattgtaatcaaggtggctgaatccacagaggagcctgctggttctaatcgggg

SEQ ID NO: 250609 - DNA, 90 bp, Homo sapiens
gcctgggcgctgacgccgcggacctccctgcgaccgtcgcggaccatgggcgacaaagggacccgctcttcacccagatcttcggggtcg

SEQ ID NO: 250610 - DNA, 51 bp, Homo sapiens
gtcggggatcggtcgcctgagagaacatgccgagtttttgcactgcaagtc

SEQ ID NO: 250611 - DNA, 98 bp, Homo sapiens
gagccatccctgacacccggcatgaccaactggatgatgagaggcacagctgagtccggagcagactgagccacctaagaggggaggaaccgctgcag

SEQ ID NO: 250612 - DNA, 90 bp, Homo sapiens
gcacgtgacccgcaccgcccgtgggcaccttgaaggcggatcccgcgcgcccccgctcctgcagctatgatttaggcatagagaatcgtg

SEQ ID NO: 250613 - DNA, 98 bp, Homo sapiens
gtcagatctggttcaggcacagatggatcagattaacgtcttcaaggacccagttgctgatcccaacaaaaggtccaaaaagggccgattatctttac

SEQ ID NO: 250614 - DNA, 82 bp, Homo sapiens
cggagctggaggcccacgtgggagcagtgagcggctaaactaatctggattcactccctctggttgatacccactcaaaaag

SEQ ID NO: 250615 - DNA, 73 bp, Homo sapiens
gaacttgttaacctccggggagagctagcagatataatttctacagtagaatttaatcattctggagaattac

SEQ ID NO: 250616 - DNA, 100 bp, Homo sapiens
tggagagaggcgatttcctctcagaagagtggagggagcgaatcgccaacacgagatggacacccgctccgggagccagtgttccgtcaccccagaagcc

SEQ ID NO: 250617 - DNA, 96 bp, Homo sapiens
tcagtgagatgctgcttcattacagccaggaggactcttcggacggggacagagagctgatgaagatatccagttctggaacagccggcagtccct

SEQ ID NO: 250618 - DNA, 98 bp, Homo sapiens
cctgaaggaccagtgtctgatcagctgctgcgtgctcagccccagagcagtttttgaatcagagccgacaggcacttgaattgaaaatggaaaaccct

SEQ ID NO: 250619 - DNA, 51 bp, Homo sapiens
tctgcgtgagaatagagaccaccgagatctctggaaacatggctacagaac

SEQ ID NO: 250620 - DNA, 100 bp, Homo sapiens
ggttcagttttcttcagaagaaggacttcggaatgcactacaacaggaaaatcatattatagatggagtaaagagacactatggacagcgtgaagcagag

SEQ ID NO: 250621 - DNA, 101 bp, Homo sapiens
gttgttgggcagcattcatttcctggcaggtgaaggtgccgagctataaacctccagaatattattagtctgcatggttaaaagtagtcatggataactac

SEQ ID NO: 250622 - DNA, 87 bp, Homo sapiens
ccaagaaaaagagaaggaaaaaaaggaggaaacaaccacatatgtcacctttccaagagaactgggcaattttgaagcagccactga

SEQ ID NO: 250623 - DNA, 101 bp, Homo sapiens
atagttcaccccagagcattttagatgatgttgccatggtgccactgattaatgaacttgaatcagcaatacatcagctgtacaaacagcgagcttcccgc

SEQ ID NO: 250624 - DNA, 98 bp, Homo sapiens
aagattttccgggaagttcaaattatgaagatgctttgccacccccatatcatcaggctctaccagctcattcttggaatcccagaacaggccttaag

SEQ ID NO: 250625 - DNA, 100 bp, Homo sapiens
gaaggacgattctgcctggctcttctttgacagcatggccgatcgggatggttacttcctcagaatgttggcctcctgtatgttggaggttatgaaagac

SEQ ID NO: 250626 - DNA, 98 bp, Homo sapiens
ttttggaattgtaggcacaaacacaggaactagtatattcaccgtctatgaggccgcctcacaggaaggctgggtgttcctcatgtacagagcaattg

SEQ ID NO: 250627 - DNA, 75 bp, Homo sapiens
ggaagccttcgtctcccagattgcagctcccaaaatggcgatgacaccggcacctggcccaacaaccagtttgac

SEQ ID NO: 250628 - DNA, 107 bp, Homo sapiens
caacgtggatgacaagaagacgtccaatctgagcgtgctgcggacggcgctgcggtacatccagtcaccaccaagtaagcgaagaaaattagagaaaccgagaaaac

SEQ ID NO: 250629 - DNA, 100 bp, Homo sapiens
cttttgtcccttcccccaactccgctacagccaagcagaggctcccgtgcaggaagagaagctgtcaggtgcaatgaagggcgtgttggtagacattgtg

SEQ ID NO: 250630 - DNA, 100 bp, Homo sapiens
tctcatgcttggtgcctggtgccaggaggagcatattatttaatatctagaagtctagggccagaatttggtggtgcaattggtctaatcttcgcctttg

SEQ ID NO: 250631 - DNA, 51 bp, Homo sapiens
ggggaatggaagcggagaacgcgggcagggtgaacactttggaacaacgga

SEQ ID NO: 250632 - DNA, 82 bp, Homo sapiens
gtccggacctattcctgctagtgcaggcctccagagcactacaaacaccactggtttcccgaaaagccgtccaagggctccg

SEQ ID NO: 250633 - DNA, 80 bp, Homo sapiens
ccggccttcatcgacatcagtgaagaagatcaggcagggcaagaatcctttcgttccatcacaaggtcgtattacagagg

SEQ ID NO: 250634 - DNA, 75 bp, Homo sapiens
ccgccagcatgttgggcgccccggacgagagctccgtgcgggtggctgtcagatgttcttggcagctctgtcact

SEQ ID NO: 250635 - DNA, 99 bp, Homo sapiens
ttcctggtgaagcatctgatgcacgttccatccggcgctcagctgggcttgaggtcatctttgctttgaaccagaccctcctgcagcaggaaagcctgc

SEQ ID NO: 250636 - DNA, 75 bp, Homo sapiens
gggtgccagaaggaaagcataggtggtgaagcagtattttccaatttgaagattcatttgaaggtggctcctgcc

SEQ ID NO: 250637 - DNA, 100 bp, Homo sapiens
cgcaagggcagtttagctgatgttgttgacaccttgaagcagaggaaaatggaagagctcatcaaaaacgagccggaagacagcgtggaagatgaactgg

SEQ ID NO: 250638 - DNA, 100 bp, Homo sapiens
caccaccaccatctccatcacccaccaacaacaccacaataatccacagccaagcttcacattgcagaacatcctgcaggacatctagttctgaagtggt

SEQ ID NO: 250639 - DNA, 90 bp, Homo sapiens
cggaacttcccgccttcaaggaccgcgtgcctgagtaccctgcggtgataaaagaaaatgtggctgaagttacccgaagttcagcttgca

SEQ ID NO: 250640 - DNA, 99 bp, Homo sapiens
cttctcgaaaaaaaccttcaggcggcccatgggatttccatcaccaaggagtaagaagaccttcgggcagagactgttgggtatgctcccttcagaaaa

SEQ ID NO: 250641 - DNA, 90 bp, Homo sapiens
agatgcgggccctgctggaccagctcatgggcacggctcgggacggttggtgttcgaggaagagacattgttgttcttggtgtggagaag

SEQ ID NO: 250642 - DNA, 100 bp, Homo sapiens
aacaaagatgatgagcagcatctcctggaaagatgtaaatctcccaagtccaaaggtatcttaaatagtgaagatggagaaatattcaataatgaagagc

SEQ ID NO: 250643 - DNA, 101 bp, Homo sapiens
ggcagcaccaagtccggatgcagtggcctcatcctgcatgactcgcctgtcccggtctcgtacagcctctctgaccagtgcagcatccgttgatggcaacc

SEQ ID NO: 250644 - DNA, 97 bp, Homo sapiens
cccatctccatccccaccctgcagcagctcccccagtccctcagggggtctgctgcgagttgccttagagcgcaagggccaggccctggaggaggat

SEQ ID NO: 250645 - DNA, 96 bp, Homo sapiens
ctcacctgtatcgggaacccaacaagatgctagagcatcgagaagttcgtgatagacaccacagtcttgctccaggcgaggacacacctaggatgc

SEQ ID NO: 250646 - DNA, 100 bp, Homo sapiens
gtcatcgctgacagctgaggaagtctgcatccacattgcacataaagttgggttaaagcacgaattgggagctctcagcgacatcaccagtcagcagcca

SEQ ID NO: 250647 - DNA, 75 bp, Homo sapiens
tcctcttttgacttggactatgactttcaacgggactattatgatagtgacctagagtcccgcagggatgtgaag

SEQ ID NO: 250648 - DNA, 100 bp, Homo sapiens
gcccagagaccaagatcactgataagaaatgttctcgacagcaagtggtttggcaatctggtaacaatgaagtggtggaatgacctatggctaaatgaag

SEQ ID NO: 250649 - DNA, 83 bp, Homo sapiens
ccctgctatccccaacaagaggaaagacacacctaccaagaagccagtcaagcggccagtgatcagggccaaagcggtcagtg

SEQ ID NO: 250650 - DNA, 80 bp, Homo sapiens
ctgtagtcacaggagctgtagagaggaccccggtacatctgaaagccgggaaatgacgcaaacatgcagatctttgtgaa

SEQ ID NO: 250651 - DNA, 75 bp, Homo sapiens
tataatactgaactatggacctatgaggtctacaggtccaactgctgccactggcagtaatcgaagacttcagca

SEQ ID NO: 250652 - DNA, 48 bp, Homo sapiens
gacggcatcgtccgtgcccacatggaggtgtcattaacttgtcagtac

SEQ ID NO: 250653 - DNA, 74 bp, Homo sapiens
accttgaagacgacttcgaccctgcccagcacgaccagctcatgcaggaggctatgatggtcacacgttcctgg

SEQ ID NO: 250654 - DNA, 83 bp, Homo sapiens
gggagacacgccaaagctcccaaggttgatgataattagaagcatgctttccactgaacttcccgacaacatttgttatgcag

SEQ ID NO: 250655 - DNA, 84 bp, Homo sapiens
gcggggccaggaagtcggagtttgagccccggaggcagagcggctgccatggaagctcttcgtgggcggtcttgactggagcac

SEQ ID NO: 250656 - DNA, 83 bp, Homo sapiens
gccggctaccactgcggctactgcgattccaaggagggcaaagcgtcctgcgttcaaatctgaacatcaatgatgtactaggg

SEQ ID NO: 250657 - DNA, 100 bp, Homo sapiens
aaaggagaagtctggtgtaatacaagatgctttaaagaaggagccttttgtggcagatgaatatattgaacgtcttgtatggagaaccccaggaggaggc

SEQ ID NO: 250658 - DNA, 97 bp, Homo sapiens
atcgcggagtcccaatgaaacgggcagccatggccctccacagcccgcagcatgcatatgcgctagaacttctatttgatcagttgcatgaaggagc

SEQ ID NO: 250659 - DNA, 96 bp, Homo sapiens
agtcctgcagctcaacgactcctacgacctggaggagcacctggatatcaaccagtccagggaccttgacccagcccctctcagcagacgcttcat

SEQ ID NO: 250660 - DNA, 80 bp, Homo sapiens
cggcccggccgcagcagccgccgccgccgcgcagttaaaaagatcaagtggcatgagcagccttttggggaaaattggtg

SEQ ID NO: 250661 - DNA, 100 bp, Homo sapiens
gaccgccgagcctgcagcctgccccgcggccaacatgagcttcttgttgctgttgaagctcaaatccgaagttttggacagactccttctcaactactca

SEQ ID NO: 250662 - DNA, 80 bp, Homo sapiens
ggccaagcagcaccagcgtgcctttgggtgataagggggactggtgattgcagctggaagtgcccatgaccgagctggcg

SEQ ID NO: 250663 - DNA, 74 bp, Homo sapiens
gtacaccttgtgaaggcctctgccaggcatgtgggcagctggacagggtctacatcaactattacgacatgaac

SEQ ID NO: 250664 - DNA, 78 bp, Homo sapiens
cgacctgctaacagaactggaccttttcggttgctgcttttgctcagaggacatccatgaccctaatggtctttttgt

SEQ ID NO: 250665 - DNA, 100 bp, Homo sapiens
gcacagtggtgaaaagccttaccagtgtgaacggtgtcatcaggtggagtttgtccatatgctcaatgctaccatgtgcgccactacccgtaccatctgc

SEQ ID NO: 250666 - DNA, 100 bp, Homo sapiens
gattctgccaattcgttttcaggagcatctccagggggacttgatctcatcttcatgccaggccttgggtttgacaaacatggcaaccgactggggaggg

SEQ ID NO: 250667 - DNA, 76 bp, Homo sapiens
cccgctccgcgccgagggctggaggatgcgttccctggggtccggacagcccacctgaggatattgaccataagga

SEQ ID NO: 250668 - DNA, 98 bp, Homo sapiens
gacaaatactgtcagactgaccaccatcatcacggatgctgtgaaccagatttcctcctctgatgctcctcttcagcctttggtatcctctccttctc

SEQ ID NO: 250669 - DNA, 90 bp, Homo sapiens
agcctgcagagcgcgcagtacctccgggcgaagctgtgctcaggcccgggctggacgcagagccagagctgtccccagaggagcagaggg

SEQ ID NO: 250670 - DNA, 74 bp, Homo sapiens
tgacggtggaggttcgcggctctaacggggctttctacaagaaaccaccatcatgggttcgggtcccatagacc

SEQ ID NO: 250671 - DNA, 100 bp, Homo sapiens
agcagcggtagaggcggcggcgaggactggcgacggcgaggaggtcgccgccctggagaggcaggtgtttgacttcctgggctaccagtgggcgcccatc

SEQ ID NO: 250672 - DNA, 141 bp, Homo sapiens
ttgcctgagcgccccggcggcccgagcgcgccccaagcccgggcgccaccgctgccacctccgcgagaacgtgcgcatcgaccccagtagcctgtccttcaacatgtggaaggagatccctatccccttctatctctccgt

SEQ ID NO: 250673 - DNA, 90 bp, Homo sapiens
cgccgcccgcctccgcctgccttctgccgccggccggcgcgtcgtccccacagctgaggagtacctgtcatttgcctttgagcattgtca

SEQ ID NO: 250674 - DNA, 81 bp, Homo sapiens
aagagaagaaaaactacctgtggtaggaattggaaagcatctgtgtggtatggcaacagacggagtctccctctgtcgccc

SEQ ID NO: 250675 - DNA, 96 bp, Homo sapiens
acactattgtcgtgccgcttttggaggatgggagaggccatggcaaagagtaaaaggccaagctatgatagcaactggtggagtgataactggcct

SEQ ID NO: 250676 - DNA, 75 bp, Homo sapiens
ctggacaaaggaacaggtatctcaggtgtacaaagataatcaatgctgattcggaggacccaaaatacattatca

SEQ ID NO: 250677 - DNA, 83 bp, Homo sapiens
gagataaattcccggaaccgcgattcggcgtgtcaggtggtataagttgaaatccaaaccaggaaagaaggacaaggagcgag

SEQ ID NO: 250678 - DNA, 93 bp, Homo sapiens
cagaagagccgacagaggcagacacagaaggccgacaccctgcacctgctagatgaggaagaggagcgaaggaaaaggcgccgggagaagaac

SEQ ID NO: 250679 - DNA, 102 bp, Homo sapiens
taccatgtcactgacccctttatccggcggctgggcctggaagcagagctgcagatttttctgtgaccatgaaagagagaaataaagaatgatccatgattt

SEQ ID NO: 250680 - DNA, 74 bp, Homo sapiens
gaataaccgaaaaattgcagaagcacaagccaaactggaattggcagcaatgaaacagattctcgttaagatgc

SEQ ID NO: 250681 - DNA, 100 bp, Homo sapiens
aggattcagaaatcatggaaagcaggtgtctggagtagatttgcagaatgcctcacacagcgaagcagttgaggccattaagaatgcaggaaaccctgtg

SEQ ID NO: 250682 - DNA, 82 bp, Homo sapiens
gaccaagaacgtgagcaagcccaggcacagccgacgccgcggggtacgccatcccaccagagcacggcaagcgcctggagcg

SEQ ID NO: 250683 - DNA, 74 bp, Homo sapiens
cgtaggaaaaagcctttggacgtcacggcctcctcgtttgaaaaagtaccagaaggtcctatccctccatctac

SEQ ID NO: 250684 - DNA, 98 bp, Homo sapiens
ggggaaaatggcggacgggaaggcgggagacgagaagcctgaaaagtcgcagcgagctggagccgccggagggccacccagtgctcctgcagaagatc

SEQ ID NO: 250685 - DNA, 97 bp, Homo sapiens
tggcggcggggccgcgggagctggcgcggggtccgccgggggaggcggagctcagccatcagccctactccggaaatttcttcagagactcctggat

SEQ ID NO: 250686 - DNA, 88 bp, Homo sapiens
gaaggataagtcgaaggggaaggcgcctgaagaggacgaaggtggctatggaccgccccctgcaggaagaggagcccccccgccaccc

SEQ ID NO: 250687 - DNA, 100 bp, Homo sapiens
acattcaagaatcatctgtaaacctgataacactgcatgaaatgttagagatatgattctataacagactcttccagaaatgatatgaagaggaaatttg

SEQ ID NO: 250688 - DNA, 76 bp, Homo sapiens
gactccaaatggttgaaaacagatatacaggtttggtgcacctcgatttggaggaagtagggcagggcccttatct

SEQ ID NO: 250689 - DNA, 90 bp, Homo sapiens
ggctttggaccctggcggcccaagcggcacgtgggcctcgcagccgcagggccgtaggcagccatggcgcccagccggaatggcatggtc

SEQ ID NO: 250690 - DNA, 96 bp, Homo sapiens
ctctgtggaagggactttcttttggccctaggccccttcctgcccctgtcgtcagcaggcagtataactccaactgtggaactgaatgggcttgct

SEQ ID NO: 250691 - DNA, 83 bp, Homo sapiens
ctccttttcctccacctaccttcccgagttgtcaccactgggatggaacaactagattttgaaacaggaccaaacatatttga

SEQ ID NO: 250692 - DNA, 99 bp, Homo sapiens
ggcctgagccccagagtcagctcccctttctcgcccagcgcccccaggccgctcccggggctcacggctttcttcgagagtcacccagctccttcagct

SEQ ID NO: 250693 - DNA, 74 bp, Homo sapiens
cttggatcaacacctttaacttcaagaagacaggctaacagagaccctgatgctggaattgatgaagctcaagt

SEQ ID NO: 250694 - DNA, 102 bp, Homo sapiens
ccagatcttttcatatttctcccagtttggcactgtgacacggttcaggctgtccagaagtaaaagggaatttgctgacacaatatcttccgcctggtgctg

SEQ ID NO: 250695 - DNA, 90 bp, Homo sapiens
tggcctaccaggaggccaggggtgtcgccatgtgttcttggggaagatcccgactaagccattttccagtggcacctcttccatcatgag

SEQ ID NO: 250696 - DNA, 83 bp, Homo sapiens
ggcgacgctaagttgctgatcgtggcgccgcttacaaacacgcagatggcaagaagattgatggcaggagggtccttgtggac

SEQ ID NO: 250697 - DNA, 89 bp, Homo sapiens
ttccgccctaatggaggtctccagtttcggttttacagacatttcaccagaggaattgaggcttgaataccataacttcttaaccagca

SEQ ID NO: 250698 - DNA, 95 bp, Homo sapiens
ccgagtcctagcgcctggcctgcgcgccgctgcccgcgccacagttttatcttcaagacactaaaagtagtaatggtacttttataaatagccag

SEQ ID NO: 250699 - DNA, 75 bp, Homo sapiens
agaggtacctctccttttccctctccctttccctaaggtacaaagggaatttcttgcagagctgtgttcagctga

SEQ ID NO: 250700 - DNA, 83 bp, Homo sapiens
cgagaatacagagagaaaattgagacggagctaagagatatctgcaatgatgtactgggtcggcactcttcaccctcccgagc

SEQ ID NO: 250701 - DNA, 100 bp, Homo sapiens
caaggtgatccagcaaggtcggcagagcaaggggcttacgcagaaggacctggccacgctgacagggagttcatcgaggccaggaggagagccctgaagc

SEQ ID NO: 250702 - DNA, 82 bp, Homo sapiens
gcagaaggaggtcctgccgtccatgcggaagatcgtcgccacctggatgctggagactgtgccctgtccacggtgcctcctg

SEQ ID NO: 250703 - DNA, 100 bp, Homo sapiens
gggagatcgactgtttgagcccggaagcgcagaagctgatttctctatgaatcatcatcaagaactctgggagaacttttgaattcataaccaagccaac

SEQ ID NO: 250704 - DNA, 98 bp, Homo sapiens
aaaaatgaaacaatgctttctcctcgagaaaagattttctattacttcagcaacagtccttcaaagggcataagcaaggggttcactttgtccagcaa

SEQ ID NO: 250705 - DNA, 74 bp, Homo sapiens
caaaagcctttcatgattatgtcctgagaagtatttctcgttttcattggagatcacagcatacaaaagccaat

SEQ ID NO: 250706 - DNA, 98 bp, Homo sapiens
gtcgcggagccgcgcagccctcggagcacggtgtcatggagaaactccagctgggcccagagattctgcagcgggaaaatccaaggcttatttatgcc

SEQ ID NO: 250707 - DNA, 83 bp, Homo sapiens
aggaggaggacaaagagcccctcatcgagctcttcgtcaaggtcctgaacgaggctgtgggggccctgatgtaccacaccatc

SEQ ID NO: 250708 - DNA, 75 bp, Homo sapiens
cccgtggaaagtacaggtcctgacagctggtcctagcagaagatgtgactcagactgcctctgggtggggctggc

SEQ ID NO: 250709 - DNA, 100 bp, Homo sapiens
tgggcaaacgcctggatcagccacaaatgtacccccagtacacttactactatcctcattatctccaaaccaagctccatcacctgtcctgacgattaag

SEQ ID NO: 250710 - DNA, 75 bp, Homo sapiens
caattccttcctgggggagtttctgaggaggttctgtacagagtaatgagatgtgtgacggctgcaaaccaggtg

SEQ ID NO: 250711 - DNA, 74 bp, Homo sapiens
tacctttgatccagaacttgcagcaacaatagttttaaaggacaccttggaaaaaaagggggtattagggcatt

SEQ ID NO: 250712 - DNA, 83 bp, Homo sapiens
cgggaactcgatcctgctggctgctgtctctattctctcggcctgtcagcaaaggtgagcttgtcggccacagactgctacat

SEQ ID NO: 250713 - DNA, 75 bp, Homo sapiens
cttctgcccggtgattggtcaaatgagcaaacggggattcagcgtccgatcctttggaacagggactcacgtgaa

SEQ ID NO: 250714 - DNA, 86 bp, Homo sapiens
tctgcaaagggtacaccatcgtgtcctatgcagaactggatgaatcccttgaagaccctgaaacaattgtcagcagcctgctgcct

SEQ ID NO: 250715 - DNA, 100 bp, Homo sapiens
atgtggaggaaaacaacttcgagggcagagggacaagggcctgtccgacacgccctacgacagcagcgccagctacgagaaggagaacgaaatgatgaag

SEQ ID NO: 250716 - DNA, 100 bp, Homo sapiens
tcaatcaacccaaggtgatgcttttgctacgacctcattttctgctggaactggatcactactcttggaatcaaagataaatccaaatactgcatatcag

SEQ ID NO: 250717 - DNA, 101 bp, Homo sapiens
accttgctggccctgttgtggcagagacccgtccagagatcatgatgcagccgtccttttggatttctttttaataatgtgtgacccttcacctttgatcc

SEQ ID NO: 250718 - DNA, 100 bp, Homo sapiens
gcggtcaaagacatctttaaaccccaatgaccttggcccccttcctggtgccaaagcatgctttctgcgggacattcctttctcggccatctactttccg

SEQ ID NO: 250719 - DNA, 83 bp, Homo sapiens
ctgcagtagtgcaaaaaccattcttaagagatcatttggcatttagctgtgatgttgctaaagaacatgatgttcaaaataca

SEQ ID NO: 250720 - DNA, 82 bp, Homo sapiens
ttcccccgcgccgcctccccgcgccgctcgcgcagccatgtccgaggagaagcccaagccgccaccggcacggccaggccag

SEQ ID NO: 250721 - DNA, 74 bp, Homo sapiens
caaactcctccccacgacactctgaagcagcgacggcacagcgggaagaatgggtcctggatatgcccacccaa

SEQ ID NO: 250722 - DNA, 108 bp, Homo sapiens
caggagggcggcggcggcggctgcggtcgaagaaggggacgccgacaagacaatgcagatcttcgtgaagactctgactggtaagaccatcaccctcgaggttgagcc

SEQ ID NO: 250723 - DNA, 104 bp, Homo sapiens
gtcggccagcctgagcaagcggaggacctacgccggcctggaccatcatggagcagttcaaccctagcctccggaacttcatcgccatggggaagaattacgag

SEQ ID NO: 250724 - DNA, 103 bp, Homo sapiens
cctgtgcagggatgacatattctatatcttgaacggtaacattcgtgatagataccaggctccagtgatcattctacatatattgtacaaacactagattttc

SEQ ID NO: 250725 - DNA, 101 bp, Homo sapiens
cacaggaatcccagagtgtgttccacagcaggacacgcctgcgctgaaagagtgggcagaaaggagctgacctggatggcaccaaaagcgaaggaagctcc

SEQ ID NO: 250726 - DNA, 90 bp, Homo sapiens
attttggggcagaatacagagatatggaatcaggatggaattgtggaccctgttgacagtactttaagagatttttgtggtcggtgtatt

SEQ ID NO: 250727 - DNA, 134 bp, Homo sapiens
cgcccagataccacagaatcacttaattcttccttgtccaatggaacaagtgatgctgagtaaaggtgggattctatccaaagcttgtgattatatccaggagcttcggcagagtaaccaccgcttgtctgaag

SEQ ID NO: 250728 - DNA, 82 bp, Homo sapiens
cgcggagcggcgtcccctgcagccgcggaccgaggcagcggcggcacctgccggccgaggtctataacttgacccaggagtt

SEQ ID NO: 250729 - DNA, 100 bp, Homo sapiens
ctaggaatagtgctgccgctaagtatttgacaaacagaggtggaaattgcaacactaacaagagagaatggaaagacagtaatcagagttctcaaacaaa

SEQ ID NO: 250730 - DNA, 113 bp, Homo sapiens
catctttgccaggactgatgcagatgcccctcctccaccagaggactgggaggagcatgtcaacagtgttatccaagataaattctgtgggattataaacatttcagtagaag

SEQ ID NO: 250731 - DNA, 74 bp, Homo sapiens
accgccagacggccagaaagttccgccatgagctggggcacggagctgtgggcacgtgtggttctcaaatatag

SEQ ID NO: 250732 - DNA, 90 bp, Homo sapiens
agccgcgtccccagagagcgccctgagagaacagggtggccgcttggtccagacagcaacagaagctcctgaggagccctccacccagta

SEQ ID NO: 250733 - DNA, 100 bp, Homo sapiens
ttggcaggaagccaggttgcagggtgtccgcttcctcaggaatgctttgtgtggaaagcttcagtgtgagaatgtacaagagatacctgtatttggaatt

SEQ ID NO: 250734 - DNA, 75 bp, Homo sapiens
gatgtggggggattctcgacctgctaacagaactggaccttttcgaatttcagccaatgtttggaatccaagcta

SEQ ID NO: 250735 - DNA, 50 bp, Homo sapiens
taaatgaaatcttcctaagtataggtgtttttggactccctcgatgccca

SEQ ID NO: 250736 - DNA, 100 bp, Homo sapiens
ctgtgacaacgggctgctcacctatcaccccagcctgcatgagctggccctcagcgcactcctgaagttcgtgcagctggaaggagcgcaccccctggag

SEQ ID NO: 250737 - DNA, 98 bp, Homo sapiens
gcgagcgctccgagcggcgcgcaccaggcggatgccccagccggggcccagcgaacgccagcctggcagtgagctggacaacttggaggagattttgg

SEQ ID NO: 250738 - DNA, 51 bp, Homo sapiens
cgagaatcaaagggccgggagcgatgttccacttacttacatgatcatttc

SEQ ID NO: 250739 - DNA, 75 bp, Homo sapiens
gtgcttagaggtgtacgagaagccggtacaggtgccctgcggacacgtgtgaaaggaaagcaagccaggatggat

SEQ ID NO: 250740 - DNA, 100 bp, Homo sapiens
aggatcgtgggagctaagaagaggaatcttcgagtatgcggacggccccaacgcccaggtcatgaatgccgaggagcatgcctttcgattttctgccaac

SEQ ID NO: 250741 - DNA, 83 bp, Homo sapiens
gagtttgagcatcagagggcccctagggtctcgcagccagataagctggtggtggtatggacccgtcggaaccgacgcatctg

SEQ ID NO: 250742 - DNA, 50 bp, Homo sapiens
ggcggaggcggcgggactggtccctgatctgcgagtgaagagggacgagg

SEQ ID NO: 250743 - DNA, 100 bp, Homo sapiens
aaaatccatagatggaaaagatggtcagcttttgccaactgttttcaaatcacatgcatgggggatcttacacacactccttgagatgtttagctaccgg

SEQ ID NO: 250744 - DNA, 83 bp, Homo sapiens
cagcaattcaggatgagagtgcgatggggaatccaacagaattctggttctcccagcagagatgtgggtccttccctgggtct

SEQ ID NO: 250745 - DNA, 73 bp, Homo sapiens
cagctgactgcacttcttttttgagaaaggaaggaatatatcctgactgatttgctgccttaacaatttcagg

SEQ ID NO: 250746 - DNA, 82 bp, Homo sapiens
accatctggacggtgtgtggggtcctgtcactatttggtatccaaaccttgaaacctttgctctagatgtcaggcttgtttt

SEQ ID NO: 250747 - DNA, 88 bp, Homo sapiens
cggagctcctgtttgacggtattaagaaacatcgagtcactttgcctggacaggaggaaccctaaaatggacccaagtggggtcaaag

SEQ ID NO: 250748 - DNA, 75 bp, Homo sapiens
gaagcatgctaagaacaacagtcaggccaagccttctgcctgtgatggatggcacatttcctagaggcagaatcc

SEQ ID NO: 250749 - DNA, 96 bp, Homo sapiens
atttccagtccagcaaatggaaatctggggttaccctgaagagacttacccaatttatgacctttcagactgtatcaagcgtaggcaagaaacaat

SEQ ID NO: 250750 - DNA, 100 bp, Homo sapiens
tcaagaccgctgtcattggggctgtctatcggaagagctattctcaagctggaataactgagactgaatggacaagtggatcttcaaaaggcggacctct

SEQ ID NO: 250751 - DNA, 100 bp, Homo sapiens
tgtggcattatgcatgccccctcccagtgaccccaggctttttatggctgtgagacacgttaaaatttcaggactcctgtttcctcaaggccaatgattt

SEQ ID NO: 250752 - DNA, 90 bp, Homo sapiens
ccagccagcgcagcgacggggcgctgcctggcccaggcgcacacggaagtgatcggtcgcttggttatcggacagaatggaatcctctcc

SEQ ID NO: 250753 - DNA, 98 bp, Homo sapiens
tagtccacgatacatctttacaatgctcagatgaaggatttgggggcagagcacttggcaggtcatgaaggggtccaacttctcgggttgttgaacgt

SEQ ID NO: 250754 - DNA, 100 bp, Homo sapiens
cctggatgagacatttgctacagcatcccacattaagtcaacggtttgaagactgcttcattctgcctctagtaccagcggtttctctgttctgtgatca

SEQ ID NO: 250755 - DNA, 75 bp, Homo sapiens
gtgacttccatgacttccacatgagaatcactgaacagatttcaggtatgctgctgaaagtgggaatcctctaca

SEQ ID NO: 250756 - DNA, 87 bp, Homo sapiens
agagcctgaggagtggcggggccgccaggctgacccaccccaatgtggtggctgcccgagatgtccctgaggggatgcagaacttgg

SEQ ID NO: 250757 - DNA, 83 bp, Homo sapiens
agcttctgaaccatccacacatcataaagctttaccagatcaatgtccgagttaccaccatggatgcagagctggagtttgca

SEQ ID NO: 250758 - DNA, 51 bp, Homo sapiens
gaagtgctgctgatgtgcaacaagagtctccaagagcttttagattacccc

SEQ ID NO: 250759 - DNA, 100 bp, Homo sapiens
ggactctgtgtgagggaaagaaaacaatttctcctgctctgcagcttctgttcaggaggaagaaggcacctacgatcaaactctggagttccgtagggga

SEQ ID NO: 250760 - DNA, 101 bp, Homo sapiens
gcgtggtcagagcgagcttcggagaagcagtggtgggttccatgtgatggtggagtaggaggcaggtctccgcggccagacgggtgcagggaacaactggg

SEQ ID NO: 250761 - DNA, 75 bp, Homo sapiens
ctcggttcgagatggagcgggcgcactgggaggtggaacgggccgaactgcagaggaatgttacggcatccggag

SEQ ID NO: 250762 - DNA, 75 bp, Homo sapiens
gaactggaaaaaattaaaaaagaaagagctgaagagcaggccaggaagcttcagcgcctgctcctggtcatcact

SEQ ID NO: 250763 - DNA, 100 bp, Homo sapiens
ggggaacggatctgtgtgcccacagctcctggagccccacagcacccagtcagcttgaagagtttcaaatggaccctaccactgagaaatcaagatggca

SEQ ID NO: 250764 - DNA, 76 bp, Homo sapiens
caacaccctggaaacccccttcgatgacctccagagcctcccaaacgacgtggctgaagccgacgtagcttctctg

SEQ ID NO: 250765 - DNA, 51 bp, Homo sapiens
gtttctatcgggacgtcctggggatgaagggatatatcattcagaaaagag

SEQ ID NO: 250766 - DNA, 82 bp, Homo sapiens
tgctgagagaacagtttgaagcaaatgggtatttctttaaaagcttagaccatgctcagcctccaagcagccttgtcatcga

SEQ ID NO: 250767 - DNA, 100 bp, Homo sapiens
atcaaatccaggaagttcaggagtccaagaagttcaatattgtggagcctctgcagcttatcttctggtgtcccttataccaagcaattcattccgtcag

SEQ ID NO: 250768 - DNA, 90 bp, Homo sapiens
aaggatgacatatttttggacctgaaacagaaattctggaacacctatatggatcttacacatttgttccatggcttctcagctttaaaa

SEQ ID NO: 250769 - DNA, 50 bp, Homo sapiens
ggaaaacttgctgcggttgctcaaggtgtgggatttgatggaggcaatga

SEQ ID NO: 250770 - DNA, 75 bp, Homo sapiens
ctgaagagggaagacacgcggaaacaggtggagattctggacgcaaagacaagggagaagctgtgtttcttggac

SEQ ID NO: 250771 - DNA, 75 bp, Homo sapiens
caggccctgcagaccctgtggtccacgcgggagcggaagcagggctttgttcgcgggggtcacagctctcatggc

SEQ ID NO: 250772 - DNA, 100 bp, Homo sapiens
gttattggagaaacatgcagattatatcgcatcctatggctcaaagaaagatgattatgtatctttaggtggtgttgatcttacagtccgggtgctcacg

SEQ ID NO: 250773 - DNA, 75 bp, Homo sapiens
cttgaaagcacaccagcggacgcacacagggcgaactttctgaccaagtatacaactacccagagggcctaggag

SEQ ID NO: 250774 - DNA, 100 bp, Homo sapiens
tgatgtcagccctgagcttgttgcttttgtcttccctggggaatgttttctttggatccatttggcttttccagaacaaatttctgccagaaccaccaag

SEQ ID NO: 250775 - DNA, 97 bp, Homo sapiens
cattgctgcatcaagaaacccaagctgctgagttttctggatatgccgcagaaggatccgtgccagaagcaagcctgtgagatacagaaatgtttac

SEQ ID NO: 250776 - DNA, 83 bp, Homo sapiens
ctccgacgcaagactgtcccggcccgggtagtccaggggatcctgctcatctcagctgtgccagcaccctggggttgaggaac

SEQ ID NO: 250777 - DNA, 100 bp, Homo sapiens
acaacctcaagtttgcacgccacgtggagcccggcaatgccgccatccgggagaagctggcctgggccaaggctgatgaattcatccgagcaaatgccac

SEQ ID NO: 250778 - DNA, 90 bp, Homo sapiens
aggtgttaccggaacggcggcgacaagggtgttcccgaactagagtggaattaaacaaccaccatgtcgagcaaaaaggcaaagaccaag

SEQ ID NO: 250779 - DNA, 97 bp, Homo sapiens
gtgcaacaacctcttgaggatcgaatcttcactcccgctgtctcagcagtctacagcacgatcagacctattgtgaccgcctggtgcaggacacgcc

SEQ ID NO: 250780 - DNA, 97 bp, Homo sapiens
tccctaaactagcagtttagggtgtcagaccaagatcactccatggatgaaatgacagctgtggtgaaaattgaaaaaggagttggtggcaataatg

SEQ ID NO: 250781 - DNA, 100 bp, Homo sapiens
cggagctgcagtcggcactgctactgcgaagacagctggcaggtttctaagcatgaattgaggaacagaagaagcagagcagatgatcggagcagcattt

SEQ ID NO: 250782 - DNA, 75 bp, Homo sapiens
gtacaccaaaaactcaggcttcgccacctgcgtgcaaagtaattggtacgcctcagagaccggcagcgtcaaaca

SEQ ID NO: 250783 - DNA, 75 bp, Homo sapiens
tgctgtgtgaagcttcgagcattgacaggacagagcgggatgccaccagcttgtccaaagggaagttccaggagc

SEQ ID NO: 250784 - DNA, 100 bp, Homo sapiens
ttccaaggcatctgtgagcccgcggagtatacaccatgagcaaagctcaccctcccgagttgaaaaagattatatgcgtcaggcaggagaagtgacttat

SEQ ID NO: 250785 - DNA, 75 bp, Homo sapiens
ggttaaagccatcgccacaacctggacaggcagcaaggctaacctctgctttgtggacattgacaaccacttcat

SEQ ID NO: 250786 - DNA, 75 bp, Homo sapiens
atcaccgtgacatccgaggtgcctttctccaaaagaaatgcactcggtgatggaaagagagccactattctgaag

SEQ ID NO: 250787 - DNA, 101 bp, Homo sapiens
agcaaccgaggtttcaatctgcggtgattcgcaaggggtggctcaccatcagcaacattggcatcatgaaaggcggctcgaagggatactggttcgtcctt

SEQ ID NO: 250788 - DNA, 82 bp, Homo sapiens
gctctttccccgtcagcatcccagccgtgctcacggttagctttatacgtctacgaatatttactgcacgtaggagcacaga

SEQ ID NO: 250789 - DNA, 89 bp, Homo sapiens
ttttcgtctaaaaataacaagaatgggaggagaaggatttcagaagaaagtggtagcttcctttccaagaacagttctgagcacaggaa

SEQ ID NO: 250790 - DNA, 87 bp, Homo sapiens
cgcctcccgagaagaagttgaggcgctatgcctccccatggccacccatggaccagtcggcattcacttcctcccttctgcggccca

SEQ ID NO: 250791 - DNA, 83 bp, Homo sapiens
cagccggttgctgagccgggagcgctgactggcccggctgggcagggagaaccaggtgcatcagcgcattgcggagctgagga

SEQ ID NO: 250792 - DNA, 100 bp, Homo sapiens
agatgaagggcaagggccaaaatgatgacctcgaagtagggggaaaactgcagtggaagatgaggacagcatggatgggctggagacaacagaaacagaa

SEQ ID NO: 250793 - DNA, 83 bp, Homo sapiens
acctcgtatgcaacctcaggcttcagccatgtcccttttgatgagaagaataagcctcattctgattcaacagcagagatcaa

SEQ ID NO: 250794 - DNA, 74 bp, Homo sapiens
acacttaccataaggaaccagattgcttaggtttccctgagagacctccgtacttttaaggtggaacatgagtt

SEQ ID NO: 250795 - DNA, 83 bp, Homo sapiens
ctcgacttccacctctaagactcccacaagcctttgggtctgaagtgtctgtgagacctcacagaagagcacccctgggctcc

SEQ ID NO: 250796 - DNA, 75 bp, Homo sapiens
ggcttggcgcggcggccagaggaaccccgaggccaacaacttcactttccacactcagtgccacgaagtgcagct

SEQ ID NO: 250797 - DNA, 82 bp, Homo sapiens
taaaataaccgtccccgccagtcagaagttgagaacagtccactttggaaagtgaagaatggaatccttgggaaggagatga

SEQ ID NO: 250798 - DNA, 100 bp, Homo sapiens
gccatcatcaccaaggccagcatcaaggacgtcctggacagcgaaggattgccaggctgcggagtgaactggacgtcgttcgaggaaacacaaaagtcat

SEQ ID NO: 250799 - DNA, 90 bp, Homo sapiens
ttgtcagcgacacctagatatttccagagagcttaatgacaaggatggcaatggttatatcagtgcagcagaactacgtcacgtcatgac

SEQ ID NO: 250800 - DNA, 100 bp, Homo sapiens
cgagcggcggcggtggcggcgaaggccgaggcgatgagtcagtacaagcaagttcacctgacctctcagctgggaccgctgtcagcatcatgattggagt

SEQ ID NO: 250801 - DNA, 100 bp, Homo sapiens
tattgttcagttgattatgccagccagatgcaggagagataccagaaggagcaggacaagctgaaagaagagtgggaaaaggcccaaaaggaggtggaag

SEQ ID NO: 250802 - DNA, 96 bp, Homo sapiens
atctagacagacaggcctttctaggaatcctatgaggatggttgtgaggattatcctactctatcagaatatgttcaggattttttgaatcatctt

SEQ ID NO: 250803 - DNA, 100 bp, Homo sapiens
gacgctactcccgctggtttctcaggcatacccagagtatcttatcacttaccagatcatgaagccagaagccccttcccagaccgcaacagccgcagag

SEQ ID NO: 250804 - DNA, 82 bp, Homo sapiens
tgctgctcaaagctgctgccgccccttgggctaaaaggatttcagatgcatgccaggtttccactgattgccagaactcgag

SEQ ID NO: 250805 - DNA, 75 bp, Homo sapiens
taccacaagaagcggaagtatgagttggggcgcccagctgccaacaccaaggagggcatcctggctgtttcaccc

SEQ ID NO: 250806 - DNA, 100 bp, Homo sapiens
tcctgccgtctgctcttctgcctcttgatctccgccaccgtcttcaggccagagtgaaccagaggaaatgcctccagaagcaaagatgaggatgaagaat

SEQ ID NO: 250807 - DNA, 75 bp, Homo sapiens
ggggaagaggcccaccctggagtaaccctcactggagaatccagagattcatgttacatgtaaagctgtcctcat

SEQ ID NO: 250808 - DNA, 83 bp, Homo sapiens
cctggatccgccgtcagccgggcccggggctttcgacatgccccccaggtcaaaatgcagatcttcgtgaaaacccttaccgg

SEQ ID NO: 250809 - DNA, 73 bp, Homo sapiens
tggtgagccagaaagaggccatccaacccaagtcactcagcctctgaagaagcttcgggttcagactcaggca

SEQ ID NO: 250810 - DNA, 75 bp, Homo sapiens
cagacgcagccgtagacaccagctccgaaatcaccaccaagatggagaaggatgaaactgtgagtgactgctccc

SEQ ID NO: 250811 - DNA, 130 bp, Homo sapiens
caatgaagtaagaatgcgactattgcagttcgtcactggaacctgccgtttacctctaggaggatttgctgagctcatggaactcaagacatggctgcccagtgtgtcacaaaggtggcgctgaatgttt

SEQ ID NO: 250812 - DNA, 49 bp, Homo sapiens
cagttctgcgtttgaaaggaaacccgataaaagcttcgatgatgaagaa

SEQ ID NO: 250813 - DNA, 82 bp, Homo sapiens
ccggcgctgctctgtggggctctggccgcgcctggcctggccgggaccatgctcctgtccaaatatgacccccagaaggagg

SEQ ID NO: 250814 - DNA, 100 bp, Homo sapiens
agcgagctgagtggttgtgtggtcgcgtctcggaaaccggtagcgcttgcagcatggaaccatcactgttgctggaggcacctgacaaatcctagcgaat

SEQ ID NO: 250815 - DNA, 100 bp, Homo sapiens
ccgaagccccctgcaggaactctacaacccaatccagaatggcattgtgcccatcgtggagcctgagatcctccctgatggggaccatgacttgaagcgc

SEQ ID NO: 250816 - DNA, 75 bp, Homo sapiens
caagtgcattgcctttggaaacgaggaggtgaagctgtcatagctctaagtaaggacagcaggatgcatcaaaat

SEQ ID NO: 250817 - DNA, 106 bp, Homo sapiens
cggcagccctcgctgtcatcctcattgctactgccctctgcgctcctgcatctgcctccccatatggcccctgagttctgcagcctcgaggaaggcctgccctatc

SEQ ID NO: 250818 - DNA, 74 bp, Homo sapiens
atggaaccaaagcggatcagagagggctaccttgtgaagaaggtacaatggcttggtgaccggcacgagggcta

SEQ ID NO: 250819 - DNA, 83 bp, Homo sapiens
gcgtgggtgcctggagatgaagctggaaagggcgccctgcgtccggcagaggaggcgagcatcccgctcaggtgatgaggaac

SEQ ID NO: 250820 - DNA, 100 bp, Homo sapiens
tgtcattacagtgatcatcataggcttatgtcttgctgcaggccttggatggtatactgtaaattcagcatatggagataccattatcataccttgccga

SEQ ID NO: 250821 - DNA, 95 bp, Homo sapiens
cctattataccaattcataattcattggaaaggttggtgttagcatcaaaatgagcagtttcaacctttcacgaatagttaccctgactcccttt

SEQ ID NO: 250822 - DNA, 73 bp, Homo sapiens
ccatccaggagtcagtttattactggaaaagagaagaagaaggaggttcctgctgtgccagaaacccttaaga

SEQ ID NO: 250823 - DNA, 83 bp, Homo sapiens
cttgggacccaccgctgccctcagctccgagtccagggcgaggggatttgggagcagcttgtcttacacaaggacgaaggaaa

SEQ ID NO: 250824 - DNA, 75 bp, Homo sapiens
gcgcatgcaacaacaacttttggaaggacctcctgccccccgaggtctgcagtctcctgaacccagcagccatct

SEQ ID NO: 250825 - DNA, 50 bp, Homo sapiens
gatttctgcatttccaactgagctatttgagaaagtcaaagaagtttgtc

SEQ ID NO: 250826 - DNA, 90 bp, Homo sapiens
gataaaatccactcattgctgatgcctggaatgatgtcgtcagtaatgcctggaatgatgatgtctcatatgtctcaggcttccatgcag

SEQ ID NO: 250827 - DNA, 100 bp, Homo sapiens
aagagtgacttgtttctggatgattctaagaggggacaggggaggcctcctcaggatccacagatgcccagtctcccaagaggggcctggtccccatgga

SEQ ID NO: 250828 - DNA, 115 bp, Homo sapiens
gcaagagtaacagcagcgccgtcccgtccgacagccaggcccgggagaagttggtcaaagaaaaagtgatgtatgaaaaagaggcaaaacaacaagaagaaaagattgaaaaaat

SEQ ID NO: 250829 - DNA, 101 bp, Homo sapiens
tactcctacctgtgtaccgagccagattttgggaaccagtaggacattgacatacatccgagaacattctgtggtggatccagtggaaaagaaaatggaac

SEQ ID NO: 250830 - DNA, 82 bp, Homo sapiens
cgttatccccacctctgatgattcctcaggaagatttggtagatattgttgatactcgaattcatcaattagaggatttaga

SEQ ID NO: 250831 - DNA, 75 bp, Homo sapiens
ctgcagccatgatctccttaacggacacgcagagacaatcatatcctgattcagcccttcctccacaaaggcaag

SEQ ID NO: 250832 - DNA, 109 bp, Homo sapiens
gagatggaatcagcaagagaaaacatcgaccttcaatctgcagatctccaggggagcccaccagcctagtcaacatggcctcggaagacattgccaagctggcagagac

SEQ ID NO: 250833 - DNA, 73 bp, Homo sapiens
acagttccctgtcgctggcagacaagggaagccacagccacccatcagcagctggaggaggcacagaaggagc

SEQ ID NO: 250834 - DNA, 101 bp, Homo sapiens
tcgggctgcgggagccgggctaggacgccgagcggtgactccccgccgctcccgggggccgtgacggacagagcgggatgccaccagcttgtccaaaggga

SEQ ID NO: 250835 - DNA, 100 bp, Homo sapiens
ccttgatgttcctgacccttttgtgcctgaccctactgggaagcgggccttgtgacgagttgcggctgaccttccctgtgcgcgatggggtggtcctgga

SEQ ID NO: 250836 - DNA, 96 bp, Homo sapiens
tgcaacacattttcctatacctctgtctacaaataagaaacctcgaaaatctccaggtgagaagagcagaattgaagctggaattagaggagcagg

SEQ ID NO: 250837 - DNA, 100 bp, Homo sapiens
ggacccagaccctggagcctcagttggaagcagccgatccagcctgcggagcctgtggggcagcgacatcaccccgcccggagagcctgtgaacagccgg

SEQ ID NO: 250838 - DNA, 90 bp, Homo sapiens
cagtttctgaaatgattctccagaatttctcctcataaaaaagctccagcccacactgtgaagagccttgtgcccacagctgtgcacatc

SEQ ID NO: 250839 - DNA, 100 bp, Homo sapiens
cccgctactactccatcgcctcatcctccaaggtggagttctacttcctttcccagtacgtgtcgccagccgactccccgttccgccacatcttcatggg

SEQ ID NO: 250840 - DNA, 101 bp, Homo sapiens
ctcaatgctgctgtgtgggaagaagatttgtaaagaaaactcttaggtggattctccacagttttcctcgtgcgtactcacggtggaatccgatgtgcatt

SEQ ID NO: 250841 - DNA, 83 bp, Homo sapiens
cctctgtgtacgctgaggggggaggaacaggaaatatagtggtcattatgattagctatccaaaaggaagagaaattttggag

SEQ ID NO: 250842 - DNA, 90 bp, Homo sapiens
ccgaagtgggacgcgccgagccggaggctgcaggatggacgtggagtcggactctgccaagcagtttttgcaggcagcagaggccatcga

SEQ ID NO: 250843 - DNA, 82 bp, Homo sapiens
agtgcctgcagttcagacccttctctcccctccactttctcccggcaaacggggattcagcgtccgatcctttggaacaggg

SEQ ID NO: 250844 - DNA, 100 bp, Homo sapiens
atgattgcaggcgagaacacgatcttcttccacatctccagcaagttctcaagctcagagacgtgcaggcgacctggatggcctatgacatggtggtgat

SEQ ID NO: 250845 - DNA, 75 bp, Homo sapiens
cgcggcggggctgaggcggccgcggggcccgagcgcaggtgtggacactgccagcggctgcagccgacttggaat

SEQ ID NO: 250846 - DNA, 90 bp, Homo sapiens
ggctcaagagatcctcccaccatcacgaggtcaggagatcgagaccatcttggctaagaagagccggacaatgatgctcacctacgcagc

SEQ ID NO: 250847 - DNA, 90 bp, Homo sapiens
gtcaaacccctgcgcaaaccccgtatccccatggagaccttcagaaaggtcaaaatgcagatcttcgtgaaaacccttaccggcaagacc

SEQ ID NO: 250848 - DNA, 75 bp, Homo sapiens
gaaggagctggcggacatcactttagaccctccacctaattgcagcccagaccagaagagttccaccagcgatcc

SEQ ID NO: 250849 - DNA, 75 bp, Homo sapiens
ccgttcggcctggaggagccgcagtgggtcccggacaaggagggacccagacatggagctgcgggaagaagcctg

SEQ ID NO: 250850 - DNA, 50 bp, Homo sapiens
ataccaatgaacctctattcaaactcagattgatggacaacttttcttaa

SEQ ID NO: 250851 - DNA, 50 bp, Homo sapiens
cggacaccccccctcccttgacctacccgtactatactggcaattgctgg

SEQ ID NO: 250852 - DNA, 100 bp, Homo sapiens
caggctcaagcagtcctaccatgtcagccttcccagtagctgggaccacagtccttggatagctggggcacctctgaagatgctgacgctccttctaagc

SEQ ID NO: 250853 - DNA, 101 bp, Homo sapiens
ctccgacgagccccgtgaagcccagttcccctgccagcaagcctgatggccaatggagatcttcgtggatgatgagacgaagttgacgctgcatgggttgc

SEQ ID NO: 250854 - DNA, 100 bp, Homo sapiens
gaagcagcatggggcccagatccctggacacttgctgggggagaggccctgagaggcatgtgcacagctcttcctgctgcccacattcctgcaccccctc

SEQ ID NO: 250855 - DNA, 75 bp, Homo sapiens
actggtcctgtcctgtttgcctgtcagcaggaaactgactggacattctttccacatgggctatagcatggcgat

SEQ ID NO: 250856 - DNA, 100 bp, Homo sapiens
aggcagagagcagaagatattcacagacatgcggaatttgaggttttggaaggtgacaatgaaatgtgaagaagttacatttctcaaacttgaaagttag

SEQ ID NO: 250857 - DNA, 82 bp, Homo sapiens
ctctcaagaaatctcaagatattaaagttactgctgttaaaaagcttcacgaggctgacattgtggtcctaggctcacctaa

SEQ ID NO: 250858 - DNA, 88 bp, Homo sapiens
tgggcagcctgctggaccctgccaagaagtcgcccatcgcagcagctcgtttctctacaataattggagttggtgttggagctggagc

SEQ ID NO: 250859 - DNA, 75 bp, Homo sapiens
tgggtgtcttctccctcgccagctgggcgtgttcctgggacttggcttgagtggcgtcgtgcccaccatgcactt

SEQ ID NO: 250860 - DNA, 101 bp, Homo sapiens
acattaacatatctcagagccttgcacccaggcttgcagccaatttactggagcagggatgacgtagcccagtggctcaagtgggctgaaaatgagttttc

SEQ ID NO: 250861 - DNA, 83 bp, Homo sapiens
caagccaggctaaacagttggcaggttgactatagtcaatggggccaatggagccaagtgtatggaaacccacaacagtatgg

SEQ ID NO: 250862 - DNA, 98 bp, Homo sapiens
gcgttggtcagaggagtcttcatgaaggtggtgaagcccaagctccatcacctgtcctgacgattaagaaagatcggacctccagaaatagcatctct

SEQ ID NO: 250863 - DNA, 88 bp, Homo sapiens
ggaacgctacgcccacctggcggaaagcaccacggaaacgcatccttctgtggccactgttaggatatgggccctcacattttccaaa

SEQ ID NO: 250864 - DNA, 100 bp, Homo sapiens
accgtctggatccccgcccaggaagcccctctgaagcctcctcgccgccgtttctgagaagtagtgaccaaagatggagtctatgtccttgacttggcgg

SEQ ID NO: 250865 - DNA, 100 bp, Homo sapiens
tccatcacgtggggcaggacggtcaggaagacctggaagcgctcatagcccatttccagacactcgatgccaagaggactcagactgtggaacttccgtg

SEQ ID NO: 250866 - DNA, 90 bp, Homo sapiens
tcaaaggataaactacctacatagaggacatacctttggttaaaggagctgccgtcagtactatactggcaattgctggagaagattttg

SEQ ID NO: 250867 - DNA, 83 bp, Homo sapiens
cggggctgaagaagcagttctacaaggcgagccagattcccaacttcttctggagcctggggatcggtcacactggtgcgtgg

SEQ ID NO: 250868 - DNA, 98 bp, Homo sapiens
ctggggagcgcctcgtcgacatgagtgatgtggaggaaaacaacttcgagggcagattaccttatcccatatcacacaactggtcctcagccataaca

SEQ ID NO: 250869 - DNA, 75 bp, Homo sapiens
gaagaaaacctcatgaatagcaatcacagagactcggagagcatcactgttttcggctttgtgagaaaccttacc

SEQ ID NO: 250870 - DNA, 75 bp, Homo sapiens
gaactctttccagcttgtgtctgacccgggaagaaggtaaggccttactccggcaaatcctacagcttcggaacc

SEQ ID NO: 250871 - DNA, 82 bp, Homo sapiens
ctggagacatggaccgcggcgagcaaggtcttccccagggaggtcctgaactacacagctgagaacatctgtaagtgggcct

SEQ ID NO: 250872 - DNA, 98 bp, Homo sapiens
gcggtcctgccgaccgtgtgcgctccttatattcccccgcagaggctccttcgagagcagtggatccgggccaagtacgagcgacaggagttcatcta

SEQ ID NO: 250873 - DNA, 100 bp, Homo sapiens
cagtttggccaaggagatgtacagaatgggccaagctccactgttcagatgcaaagagccccccaagatgaacccagtggtggagccactgtcctggatg

SEQ ID NO: 250874 - DNA, 117 bp, Homo sapiens
gccatcttgagtctactctgtcgctcttgtgccctagcaccccgagaaccgtcagtttgagccagatgctgtcgcctggttgggcccggaaatgggacgtcgcgctttctcagggag

SEQ ID NO: 250875 - DNA, 75 bp, Homo sapiens
ggaggaggttcacatctcccacgtgggccagcccatgctgaacttctctataaccccgttttcacacgaatggcc

SEQ ID NO: 250876 - DNA, 83 bp, Homo sapiens
cgctctggctgtgctgcgcgacccccgcgcatggtgtcccgacccaggctaagcttgagcatggctgagcaggagcccacagc

SEQ ID NO: 250877 - DNA, 82 bp, Homo sapiens
cggacacaggacagaggggagccaggtagatttcgggcagacaacttgaacaagctgaagaacctatgcagcaagacaatcg

SEQ ID NO: 250878 - DNA, 75 bp, Homo sapiens
cggacgaggagctgctgccgcctgacggggctcccgagcacggaagacagtgacccgcccattcatgaaagtctc

SEQ ID NO: 250879 - DNA, 100 bp, Homo sapiens
tgaactattgcacagtgagagagtctgtgatatcattctgccccgactacaggctctgcgaacatcaatagatgcttatgacaactttgacaatatctcg

SEQ ID NO: 250880 - DNA, 50 bp, Homo sapiens
gagaaggtgaactgtctggataaggttgaagaagcctcagcggaggcgat

SEQ ID NO: 250881 - DNA, 82 bp, Homo sapiens
attgcacatcaatgatatcatcccagagaccctcctggatgacttccttctcacgtacactgtcttcatgacaactgatgac

SEQ ID NO: 250882 - DNA, 75 bp, Homo sapiens
gcaagcggcggaagccggtgcagaaaacctccaagaagcccaagaaacatcccaaagtggccgtgaaagccaagc

SEQ ID NO: 250883 - DNA, 98 bp, Homo sapiens
tgagccccggcggcgcccgggcccacgcggaacgacggggcgaggttcccaacaaggctacgcagaagaacccccttgactgaagcaatggagggggg

SEQ ID NO: 250884 - DNA, 82 bp, Homo sapiens
agctcttcacagatctcagagaaattggccatggaagctttggagcagtgtattttgtttggtgcacctcgatttggaggaa

SEQ ID NO: 250885 - DNA, 82 bp, Homo sapiens
atatcagataattctggcaagagatcagtttaggaaaaacccatctccgaatattgtggatatagtttgaggaactaagaag

SEQ ID NO: 250886 - DNA, 82 bp, Homo sapiens
ttctgggagccaccgtctgaagcagccatggcaatgacaggctcaacaccttgctcatccatgagtaaccacacaaaggaaa

SEQ ID NO: 250887 - DNA, 100 bp, Homo sapiens
ctcctcgccagcagccgtccggagccagccaacgagcggagtccatgaagaatatcagctgccatattacgacttagtgccctctgacccttccattgag

SEQ ID NO: 250888 - DNA, 99 bp, Homo sapiens
ccacgaggcgctggcccggaggctccagaaacgggtcctgctgctcaccaagacaatgcagatcttcgtgaagactctgactggtaagaccatcaccct

SEQ ID NO: 250889 - DNA, 80 bp, Homo sapiens
ccagtaaaactactcatgtcagctgttctgcaggatcccatgagaaggtactagcaaaggccagacgtcttactcaacaa

SEQ ID NO: 250890 - DNA, 75 bp, Homo sapiens
cggcaaggtctccaagtcccagctcaagtacctgtttgaaaatggtagaatagataacatttttactgagcccta

SEQ ID NO: 250891 - DNA, 101 bp, Homo sapiens
atactgagctccaaaaatggagggaaatcatcaaatcctcagtgatgctccttgaccagtttcagatacaccacctccaccgccacctgtggaagaaccag

SEQ ID NO: 250892 - DNA, 51 bp, Homo sapiens
atgaaggtacacccaatagagagactaaatgtgttaaatgggcttgccaac

SEQ ID NO: 250893 - DNA, 51 bp, Homo sapiens
cccgtggccgctgccgcctccgccccaggtgtgatgaatgcagactctgct

SEQ ID NO: 250894 - DNA, 100 bp, Homo sapiens
tttttaagtaaaaattttcagaagcacatgtattataacaggttctccggaagaaacggcgtttagagcaacagatcgtggatctgaaagtgacaagcat

SEQ ID NO: 250895 - DNA, 82 bp, Homo sapiens
gtccgtgctgtttgtgtgtctgggctggcctgccactcctcctgctatgatgcctgggcagatcccggacccttcggtgacc

SEQ ID NO: 250896 - DNA, 100 bp, Homo sapiens
cggggactactggtgcctgcgctgaaaaagaggactactgagcccagccaggctgtatgccattgctgccaaagaaaaagatattcaagaggagtccact

SEQ ID NO: 250897 - DNA, 100 bp, Homo sapiens
gtggttcagctcatcaacaagggcgccagggtagcggttaccaagtcacttatataagaagaaccttgatgtgaccaagatccggaagggaaagcctcag

SEQ ID NO: 250898 - DNA, 75 bp, Homo sapiens
agaatcaatttggatcggcttatcataaccagctgtcgcctggttgggcccggaaatgggacgtcgcgctttctc

SEQ ID NO: 250899 - DNA, 101 bp, Homo sapiens
gagcccggtgcccaagtcgccctcggggtggcagttcccgttaaccttagccacaaagtcaaaggtaactgtgacatttgatgatgtggccttatattttt

SEQ ID NO: 250900 - DNA, 100 bp, Homo sapiens
tactgtgactacagcggggaccgcccgaggtacgcaataggagtgtgtgcacagaaagcagcagctgccaacatagatgaagtgcagaagtcagatgtat

SEQ ID NO: 250901 - DNA, 51 bp, Homo sapiens
cttgagtgataaaggagtagaggatgaagcctgctgggagcgtgaatgaca

SEQ ID NO: 250902 - DNA, 50 bp, Homo sapiens
ggaaaatcaagatagatattatagcagctgtcctgagagcacgtctctac

SEQ ID NO: 250903 - DNA, 100 bp, Homo sapiens
gttggagaagtatccaatagggatattgtagaaactgtctttaacctggttaacagtcttccggcagaatggtgtgaagctcttcacagttttacagcag

SEQ ID NO: 250904 - DNA, 74 bp, Homo sapiens
ggctgattttcgagagccgaatgcagaggttccaagaccaattccccggcaatgtattccaagatgcagtcttc

SEQ ID NO: 250905 - DNA, 51 bp, Homo sapiens
tggctataatggatttggtaatgatgcttccaccaacactttcttccaaat

SEQ ID NO: 250906 - DNA, 98 bp, Homo sapiens
agagagcttgtgaaactgagggaatagacctgcaggctgggacaatgaaaagaaaatagctattttacatgaaaattttacaaccgtgaagccggaag

SEQ ID NO: 250907 - DNA, 82 bp, Homo sapiens
ggatgagtcatgtggcagtggaaaatgcgctcgggctggaccagcagtgggaacatcattgtggccactccaggccgcttgg

SEQ ID NO: 250908 - DNA, 131 bp, Homo sapiens
gaaaatgaagattttgacagtcgtagatacaaatttttggatgatgatggatccatttctcctattgaggagtcaacgggatgttcgtctaaccccagaagactttgctagagctcagaagtactgcaaat

SEQ ID NO: 250909 - DNA, 100 bp, Homo sapiens
tctgagctttctggacttccagctgggcctgacagagaaggctcactcaaggatcagttggctttagcaattgggggcttggagtacccataatacagtg

SEQ ID NO: 250910 - DNA, 100 bp, Homo sapiens
cggtgctgggcgcgcaccgtggccaccctgtgggcctggcgctggaggcagcggtgcacgtgcaggtaattttttctgcaggatgaattaagagaagaga

SEQ ID NO: 250911 - DNA, 135 bp, Homo sapiens
gaaaaacaccaacacaatcaataatggcactcagcagcaagcacagagtatgaccaccactattaagatgctccagaccttgtatgattacttctggtgggaacgtctgtggctgcctgtgaacttgacctgggc

SEQ ID NO: 250912 - DNA, 75 bp, Homo sapiens
gttaacatcgtgacctccagttccatccatgttgctgcaaatggcccaagtctgttttggtggtctgagaggaaa

SEQ ID NO: 250913 - DNA, 82 bp, Homo sapiens
ggctccgtgaaccttagggacaacaccgggacacccgcgaggccggaaaatgagacaagaggagcagcagcggcaccgcccc

SEQ ID NO: 250914 - DNA, 74 bp, Homo sapiens
gagaaacctggaggcatcattgtacgatggtgtaagaacatctaaatatattgctgtttgggttagcacaaaac

SEQ ID NO: 250915 - DNA, 75 bp, Homo sapiens
cggccaccgccgagacccagcacatcgccgaccaggacctgaaggagaagaaggagaaggtggaggagaaggcaa

SEQ ID NO: 250916 - DNA, 100 bp, Homo sapiens
cacaggaatatcgagagcgtcatgaacccgagctatagagaaaggagatgaggttctggcctataggaacaagacattttcagtaatggaagaaggagct

SEQ ID NO: 250917 - DNA, 101 bp, Homo sapiens
aagtcatgctcgcttcacggaggcaatagctagccgtttttacagagtcaagaggatcctatgaatttcccactgggttaaaaatatgacacaatccaagg

SEQ ID NO: 250918 - DNA, 100 bp, Homo sapiens
cgccgccgcccgctttcggctcgggcctcaggacacaagaagctctgacgaccagaaagatgatattcccgtggagaactatgtggctcagcgttacatt

SEQ ID NO: 250919 - DNA, 100 bp, Homo sapiens
atcttgttccacgaagccctcaagagttgtatgaactgacatctctgatttggcatccgtgtcattctggaccttactcccaactaccggggtgagaact

SEQ ID NO: 250920 - DNA, 100 bp, Homo sapiens
ggatgatttcatgtgcgatgatgaggaggactacgacctggaacaggaaatatagtggtcattatgattagctatccaaaaggaagagaaattttggagc

SEQ ID NO: 250921 - DNA, 100 bp, Homo sapiens
cttacatcttcagacctccgaacaccatcctttcttccagctgccacacagaagagtgaccgtctccttatcaagggaggcagaatcgtcaatgatgatc

SEQ ID NO: 250922 - DNA, 90 bp, Homo sapiens
cacgaggccacccagtcccacttcaaacattcgtctcggaaaccccgcctcttacagtcacgagctggccaaatttcgcagtctcctgtg

SEQ ID NO: 250923 - DNA, 51 bp, Homo sapiens
tctgcatccacattgcacataaagttgggtctgggggtggtggcatctccc

SEQ ID NO: 250924 - DNA, 75 bp, Homo sapiens
ttagggtcctttatatagaagggagagtaggatgtcatccaagtctccaagaagttcctgccaggcatggccatt

SEQ ID NO: 250925 - DNA, 51 bp, Homo sapiens
ggggagctggtgctgttctcaggtcaaaatgcagatcttcgtgaaaaccct

SEQ ID NO: 250926 - DNA, 74 bp, Homo sapiens
gaagaaggaagttgtggaagaggcagcagctaccaagaaaccagcccctgaaaagaagcctgcagagaagaaac

SEQ ID NO: 250927 - DNA, 74 bp, Homo sapiens
gtgtttctggccacgtgcttcaacgctctgctgcccgctgtgagggaaaagtttcagtcacgtgccagactttt

SEQ ID NO: 250928 - DNA, 100 bp, Homo sapiens
gggaatcaagagacccggtttctaatccctgctctgtcactaacaagctgcgtgatcttcgctgacaagctctctactgatgatctgaactccctcattg

SEQ ID NO: 250929 - DNA, 98 bp, Homo sapiens
gcaggatgggatccggctcctccagctaccggcccaaggccatctacctggacatcgatggacgcattcagaagagccagccccagtgcctgctgagc

SEQ ID NO: 250930 - DNA, 50 bp, Homo sapiens
gccacagaatcaggggaggcatgcttcagtgtttgatgatggtgatgagc

SEQ ID NO: 250931 - DNA, 95 bp, Homo sapiens
gtcaaggtggcctaccaggaggccaggggtgtcgccatgttattagaggaagtaacacaaggggatatgagtgcagcagacacatttctgtccga

SEQ ID NO: 250932 - DNA, 96 bp, Homo sapiens
cctgcgccccgctctgctgtgggcgctgctggcgctctggctgtgctgcgcgacccccgcgcatggttgagaatctgtagtactgagaagtttctc

SEQ ID NO: 250933 - DNA, 97 bp, Homo sapiens
atgggagatggtgctatacggtctttagggttacgtgaagtcaagtaaaatcgcacactggtccagcaagactatgaatctctgttccaaatgcttt

SEQ ID NO: 250934 - DNA, 100 bp, Homo sapiens
aagtgcctggaagagttctatgcactctgtgaccagctggagctgtgcctggaggaccatgacatcatggaagccgatctggacaaagacgaactgatcc

SEQ ID NO: 250935 - DNA, 75 bp, Homo sapiens
ctcatctgttccagggaggtgggattgatggacctggtaactttaaccacagccctggaaatcttcaatgagcat

SEQ ID NO: 250936 - DNA, 75 bp, Homo sapiens
accacagagctgggaaaattgttgtgaacctcacaggcaggctaaacaagggcaaatgtgagaaacgagtacagg

SEQ ID NO: 250937 - DNA, 98 bp, Homo sapiens
gcccactctgcggagttagcagtcacgacctccagcacaggttttcaaatggaacattttgatgcatcacttagtacctatttcaaggcattgctagg

SEQ ID NO: 250938 - DNA, 75 bp, Homo sapiens
tagtcacccacctacatgttgaggttaaagatcgaggtccggaagccactaggagattttttaattggttttatt

SEQ ID NO: 250939 - DNA, 75 bp, Homo sapiens
cagcggagagcgagagaggggagcagacaaatggacacctaccagggaacggagatgtgtatcaagaaaggctgg

SEQ ID NO: 250940 - DNA, 100 bp, Homo sapiens
cgtcctttcgctatgaagagagcgacctggagcggggatacacggctcaaagtctaactccccaggactataatctgaggtggtcaggccttttggtgac

SEQ ID NO: 250941 - DNA, 83 bp, Homo sapiens
accagcagccccaagacaaagaagcgccctgccccgcgcgcacccagcgcgtccccactgggatgccggctccaggagcagca

SEQ ID NO: 250942 - DNA, 90 bp, Homo sapiens
cgcacgttgtaatcagctgaggccatgtcaggagacggagccacggagcagatcctggtgtatagcctggaagcaggacgccgcctcttg

SEQ ID NO: 250943 - DNA, 75 bp, Homo sapiens
gaaatacctgtgatttgctttctcggagcaaaagtgccgaatacatcaagcaatggtaacatctttaaatgaaga

SEQ ID NO: 250944 - DNA, 90 bp, Homo sapiens
gtggctgcggcatcgccggcctcgctatgaactcaacagtgacaattgaggaattccactgtaagctccaagaagccacaaactttcccc

SEQ ID NO: 250945 - DNA, 100 bp, Homo sapiens
ctggaccacctggtcggggaggagaccatggctgactacctgctgtacaccctcaacaaacaccagcgctttggtttcagagtcaagtggtgagatcaaa

SEQ ID NO: 250946 - DNA, 90 bp, Homo sapiens
gccaggggcccctcgcctcccctctgaggaccgaagatgagcttcctcttctattcctctacacagccgactagttatgatcagagcagt

SEQ ID NO: 250947 - DNA, 85 bp, Homo sapiens
gtaaaagtgccttctgtttttaagcttctaattaaagagggtgtttgctttgatgtacctaccgcatcagtaacagaaatacagg

SEQ ID NO: 250948 - DNA, 75 bp, Homo sapiens
cggagtccccgccgaagaacccgaggtctatcaaaattccagtaaaaaagttcagttccttgaccgaaacacttt

SEQ ID NO: 250949 - DNA, 96 bp, Homo sapiens
gcaccgtcgcccgcagcgctcgccccacgggccgcgcgtggagggtcccggtgctggagaatctggtaaaagcaccattgtgaagcagatgaggat

SEQ ID NO: 250950 - DNA, 83 bp, Homo sapiens
tggaagccatggcggagcccagtcccgaaggtttggtgcacctcgatttggaggaagtagggcagggcccttatctggaaaga

SEQ ID NO: 250951 - DNA, 82 bp, Homo sapiens
caacaccctcttcttgaactggtgctgtctgggcttcatagcattcgcctactccgtgaagcaagctgaacagctgggaaga

SEQ ID NO: 250952 - DNA, 96 bp, Homo sapiens
tgtcaacttcaccactcaggctgaacgcaagattcgtatcattatggcagagcccctgtggtcccaatcgaggccattatattgcaatagttaaga

SEQ ID NO: 250953 - DNA, 75 bp, Homo sapiens
ttcatggcccctttatagctggtctacatgttcaagtgcgtgtggcggtgctacagattgatcaagtgcatgaac

SEQ ID NO: 250954 - DNA, 80 bp, Homo sapiens
ccggcctcgggcaccgggcttctggaggaaactactttgcttcgcactttttcatgggaggagagaaattcgacaccccc

SEQ ID NO: 250955 - DNA, 76 bp, Homo sapiens
ccgagaaggagggaggggaaacacaaagccggctacgcgctgcgagaggagattgaagtggatgttgaaagcacag

SEQ ID NO: 250956 - DNA, 80 bp, Homo sapiens
ggataaggaccagtacctgcccaggaaactggatctcaaagatttcatgagacaagctggggaagtaacgtttgcggatg

SEQ ID NO: 250957 - DNA, 74 bp, Homo sapiens
gcggcccggaaggagcgggaagaaatcaacgaccgggagcagaagttgcatgcccttaaggaggtattaaagaa

SEQ ID NO: 250958 - DNA, 100 bp, Homo sapiens
attttggaagaggaaccacaagaaaatcaaaagaaacttttgcccttatcagtaacacctgagatggaacagattaaaagggccaataaactgtttacca

SEQ ID NO: 250959 - DNA, 100 bp, Homo sapiens
taaagcagttaaacatttcacacttactagtacctctgggattagccaaaccagctcatctttatgacaaagggagtatcgtcctgaatatgaacgtctg

SEQ ID NO: 250960 - DNA, 100 bp, Homo sapiens
ggagctggctacttctcgctctgcttcatcccactattattttggcacaacaggaaggttagggcttgacccaaaactactggctaaaatcctaaatatg

SEQ ID NO: 250961 - DNA, 74 bp, Homo sapiens
atctcgccggtgcctatcaacctccgcgtctactcgccgcacggtcgccaggctctggggcatccagaagaacc

SEQ ID NO: 250962 - DNA, 83 bp, Homo sapiens
caagccgctggcagccgcggatctcaccgccgctcaggagaagcagggccctgagcggaagaggattaagaaggagcctgtca

SEQ ID NO: 250963 - DNA, 83 bp, Homo sapiens
ttttttcattgttccactggacgctcatcagagggaagatctttttcctcaattggtgcaggtggtaccattataacgaattt

SEQ ID NO: 250964 - DNA, 90 bp, Homo sapiens
ccgccttccccaccacctgcctggagaggtcaccaaaaacagtggcatcatccctgggccagattccaatgcaaaggcaacccattcaga

SEQ ID NO: 250965 - DNA, 104 bp, Homo sapiens
ccatgattgtgaggcctccccagccatatggaactcccgcctgcacccaggtgaaataaacagccttgttgctcacacaaagcctgtttggtggtctcttcaca

SEQ ID NO: 250966 - DNA, 100 bp, Homo sapiens
agaagacaccagaagaagcctacagagcactcctgtctggctcaaaccccccctatcttccattcaggcattttgttcccaacatcacctttggtcaccc

SEQ ID NO: 250967 - DNA, 96 bp, Homo sapiens
cacagccgtcaccctcaactttcccttcagctgggtcttactggggatctggccagccttgggggcccttggagccctggcccagtggaagctcgt

SEQ ID NO: 250968 - DNA, 100 bp, Homo sapiens
cgggagaggcgagctcgcgatgagtggtctcggcaggctcttcgggaaggaaaatggacccaagtggggtcaaagtgctggaaacagcagaggacatcca

SEQ ID NO: 250969 - DNA, 75 bp, Homo sapiens
cacttcgactctcaaagcaataccaggatagctgttgtttcagagaaaggctccatctactctttgaagcttctg

SEQ ID NO: 250970 - DNA, 98 bp, Homo sapiens
gcaacctctgggaacacaaccaagcaatcatcaagcacctcctcggaagtaccaccaagaacagggaaggacaagccagaggctggaggaagatacct

SEQ ID NO: 250971 - DNA, 100 bp, Homo sapiens
cccaccccttctccttggccgtctttgaggtggagtacgtcatcaagtgcgacatgtctgcgctgcagcgagtgctctaccgccacatgcaggccaaggg

SEQ ID NO: 250972 - DNA, 130 bp, Homo sapiens
catcattttcacctcgcgtcgcgcccgggaggaaggaacgaggcaaggagctaaagcagcgtgcgttcagccctgggatagcctgggctggaagctcttctacgtcacaggctgcctgtttgtggctgtg

SEQ ID NO: 250973 - DNA, 82 bp, Homo sapiens
gctgtgcggcggccgcgctgccacctcagacaatgcagatcttcgtgaagactctgactggtaagaccatcaccctcgaggt

SEQ ID NO: 250974 - DNA, 98 bp, Homo sapiens
cccagttccaaagtgtcttaaaggcaaactaggcgtggcaactgctggctgcgtgaatgaagttacagagatggagtgcggtcgctctgaaatcgacg

SEQ ID NO: 250975 - DNA, 76 bp, Homo sapiens
ctgcaggaccaacctctcctctggatgctctagggtaagaaggtggatggctctgtaaatgcctatgccataaatg

SEQ ID NO: 250976 - DNA, 80 bp, Homo sapiens
gacctgaaacagaaattctggaacacctatatgcttggaagtctttttgcatgttactgttccactgaagtcactcaggc

SEQ ID NO: 250977 - DNA, 75 bp, Homo sapiens
ccgagaggccgtgcgggacgcgggcgccaggaccggccgaacgcagagctgcatcttcctcccgtgaggctggcc

SEQ ID NO: 250978 - DNA, 74 bp, Homo sapiens
catcagcattacgctcgttgagcaatgccaccattatcaatgaagagaatctacctgttactcgtattttggac

SEQ ID NO: 250979 - DNA, 112 bp, Homo sapiens
ggaagcgccaggacaatggggacccgggacgacgagtacgactacctattcaaaggtgagaagccctaccactgcaactgggacggctgcggctggaagtttgcgcgctcag

SEQ ID NO: 250980 - DNA, 90 bp, Homo sapiens
catgatggaactgtttgacacaactgtagagcagctgtatagcatcttcactgtaaaggaggaatgtgctcagtatttcttagaagtgaa

SEQ ID NO: 250981 - DNA, 82 bp, Homo sapiens
gggtccatacggcgttgttctgggagccttcacgtaaatgggtccagtcatgcctcccagtaagaagccagaaagctcagga

SEQ ID NO: 250982 - DNA, 100 bp, Homo sapiens
tctcgccagcgtctcctctgccaaaacccagggctggaagatgtggcagccggccacggagcgcctgcaggttatatgtaaagtcagatgtgccactgaa

SEQ ID NO: 250983 - DNA, 83 bp, Homo sapiens
ctacactgtacatgctttttattacaagactacggagcataggaggaaaattcatcatctggaagctgacctggttacaactc

SEQ ID NO: 250984 - DNA, 99 bp, Homo sapiens
gttgaagagttcaactttcccagaagttgttctaacgctgcctttgctttaaaacagtattacttgcgggcaaactctttgattctacaatagctgatg

SEQ ID NO: 250985 - DNA, 100 bp, Homo sapiens
accgagaccgtgaccgagagcgtgaccgagagcgcgaatatcgtcatcgttagaagaaactggcagacctttcacttcgtatccaacaaattgaaacaac

SEQ ID NO: 250986 - DNA, 101 bp, Homo sapiens
cttcgcattttggcattgacatttaattttagggtcctttatatagaagggagaccaccaattaccctagttatgggcccatcatctcacctggactatca

SEQ ID NO: 250987 - DNA, 100 bp, Homo sapiens
gcctgacttggaccctggaaaacctggccctcttcaatttctgacaaaagcgatggcaagccggcaggtggatattgcaactcagggctggttcattggt

SEQ ID NO: 250988 - DNA, 50 bp, Homo sapiens
aggatttagagagtatggacaaagaggattgtcagtggcttcgccccgag

SEQ ID NO: 250989 - DNA, 83 bp, Homo sapiens
caaccctctacacctggacccgacctcctcgccttggaggaagaatataagtcaaaatgcagatcttcgtgaaaacccttacc

SEQ ID NO: 250990 - DNA, 100 bp, Homo sapiens
cttgagggggactggcctggcgtgcactccgcacctcggggacattattgcgcgtggaacggctgcttttggaagcagcagccgctcttctaaaacattc

SEQ ID NO: 250991 - DNA, 105 bp, Homo sapiens
gtttttggaccagtctcagaaggtcttgtacaaggaagtaatgttggagaactacatcaacctagtatcaataggtatctctcctaaatgtgtgatcaaggaatt

SEQ ID NO: 250992 - DNA, 100 bp, Homo sapiens
aggcgttctccgccccggagaatgcagtgcgcatggacgaggctcgggataacgcctgcaacgacatggatggcgtggccaatgccctggacaacgtgga

SEQ ID NO: 250993 - DNA, 96 bp, Homo sapiens
cctgcagcgagtacttcaagatgctcttcgtggaccagaaggacgtggtgcacctggacatcagtaacgcggcagaaattcagacggcgtgttcaa

SEQ ID NO: 250994 - DNA, 97 bp, Homo sapiens
agatgcagaaggcatcttggaggacttgcagtcatacagaggagctggccacgaaatacgagagaaggaacccagccagccggcggaatgcaagcag

SEQ ID NO: 250995 - DNA, 100 bp, Homo sapiens
tcttcctccactaacagaggctcagaagaataagcttcgacacctctcagttgtcaccctggctgctaaagtaaaggatgaagcggatcccaaacggcag

SEQ ID NO: 250996 - DNA, 75 bp, Homo sapiens
aagtgagacagctgaagcgtgttggggaaggagctgtaaagagaactccagatgtggacttttggattatcccca

SEQ ID NO: 250997 - DNA, 100 bp, Homo sapiens
gctctgcctggagcactcgctggccgactgcgccgagctgcacgtcctcgaacgcgaggccaacagccccggtactactgagcgagtgtgcttgatccag

SEQ ID NO: 250998 - DNA, 75 bp, Homo sapiens
cctgcagctgctgcagctgctgcacagaaattaatgcgaacagacagacttgagcagttgatgctgaaaatcaag

SEQ ID NO: 250999 - DNA, 50 bp, Homo sapiens
ttcggtggcgttcattaagaagctttctcctgtgcttctggagagtatct

SEQ ID NO: 251000 - DNA, 90 bp, Homo sapiens
caagtctccttatttcctgtgcaaagtgctgcgtacgggttcatgcaagttgacgccgctgtcaccccagaggagcgccacctgtccaag

SEQ ID NO: 251001 - DNA, 80 bp, Homo sapiens
cgccggcagcgcgacaggaacccctccgagacccagtccaaaagggtggcccagttgaaatccttcccttcctctacctt

SEQ ID NO: 251002 - DNA, 100 bp, Homo sapiens
tcgccattgacctggcctataacttgcacagaatagctgaaacctttggacttcaagaaaattatatcaaaattgtcataaataagaagcaactacaact

SEQ ID NO: 251003 - DNA, 98 bp, Homo sapiens
catgttgggcgccccggacgagagctccgtgcgggtggctgtcaggaaacctcgacctgtctcccagttggttgcacagcaggttactcagcagtttg

SEQ ID NO: 251004 - DNA, 97 bp, Homo sapiens
gggaacgtccactcccgcgcgcccctctcggggaccagggcggcctcccaggaggagcttgagtcactttgtggcatgtatgacagccatcttaaac

SEQ ID NO: 251005 - DNA, 83 bp, Homo sapiens
tacagatacatgggcagaggggaagagagtacaactacaaattacttagaactgtggctgcaccatctgtcttcatcttcccg

SEQ ID NO: 251006 - DNA, 135 bp, Homo sapiens
ttcaatgacaacagcctcagtatggaggccttccagcaccgttctgtgtcctggtcgcagttcaacaaggtggcggcgggaaggccaaggtctctggcagacccagcagccgaaaagccaagtccccggccccgg

SEQ ID NO: 251007 - DNA, 99 bp, Homo sapiens
agcagcccccggagacagcggcacagaggtgcttctgccagctgccaaatggtgtcacttaccacactggaacatatcaagaccggttaacaaagctac

SEQ ID NO: 251008 - DNA, 75 bp, Homo sapiens
tcatcatgggggactcttccgtgcaggtaatagcctgcagctggtgttttgagaagccctactgctgaaaactta

SEQ ID NO: 251009 - DNA, 90 bp, Homo sapiens
ggagaatatctaccctgaactcagggagctcaggagggggaattgcactgaagatttgtcccatcgtgaagcaagagcactggaacttac

SEQ ID NO: 251010 - DNA, 90 bp, Homo sapiens
ggccatggaagctttggagcagtgtattttagagctcagaaatatgctcagcaagtcttgcagaaggaatgtcgtcccaagtttgccaag

SEQ ID NO: 251011 - DNA, 100 bp, Homo sapiens
ggcggattacttcaagcagtggattaatctgaaaaagttgttttccaatttcaccggctccgtggatgaccgtgggacctgccagtgctctgtttccctg

SEQ ID NO: 251012 - DNA, 51 bp, Homo sapiens
gatcgaggaggtgtctgctcgccttatgtttgatcatcggccaaggtcctg

SEQ ID NO: 251013 - DNA, 76 bp, Homo sapiens
aaatgggtattatttttcatcttcaaacaggcagacctgttatcctaaactaggagcaagatcttgtgcaaaccct

SEQ ID NO: 251014 - DNA, 98 bp, Homo sapiens
gcctcccgagtagctgggcttacagtttgaaggaggagtttcctgcctggtatgagaagcttgttctggaaatggttcaccataacacagcctcctta

SEQ ID NO: 251015 - DNA, 83 bp, Homo sapiens
ctcggtgccctctccttttcgtttccggaaacatggaacttgctactaccagcaccatgccctaccaatatccagcactgacc

SEQ ID NO: 251016 - DNA, 75 bp, Homo sapiens
aagatcatcattaaggacggaggcacgggagatgcacttatttacatggaaccagagaaacaagtgatgtccagg

SEQ ID NO: 251017 - DNA, 98 bp, Homo sapiens
ccagccatggccttcctctcctgcgtgagaccagaaagctgggagccctgcgtggagaatacctcagtactggaaaatcaccactggagatctgcagt

SEQ ID NO: 251018 - DNA, 83 bp, Homo sapiens
ccagaagactttggcattgtgtctggaatgctcaatgtcaaatgggaccggattgccccgctattcaagatctctggcagtgg

SEQ ID NO: 251019 - DNA, 100 bp, Homo sapiens
tcaccttccacctcctccatttcttccacctcctccgactgtcagcactgctccacctctgattccaccaccggaatatcctccgaatcctaaatctaga

SEQ ID NO: 251020 - DNA, 90 bp, Homo sapiens
gcggacgcggcctcagtcctgcgcggatgttgatggctggaaggctgtccaacgaaatgggtctcctgcaaagctccaatggtcacagcg

SEQ ID NO: 251021 - DNA, 82 bp, Homo sapiens
tggaacatcattctcaccaccagtctcttctctggtgcagcccatccagcccacaccaaccgtgccccagcctgctgtggtc

SEQ ID NO: 251022 - DNA, 89 bp, Homo sapiens
cgggggggaagtgactgggcggtgccggcgccggagacgatgccgttattaataaagaactcttcagaattcctggtgtttcatcatat

SEQ ID NO: 251023 - DNA, 87 bp, Homo sapiens
tcgcgctgattctcacgggcccggctgccggcccccgctctgccctgttccagtgtctcgccccatcctcaccctcagggttcccag

SEQ ID NO: 251024 - DNA, 76 bp, Homo sapiens
agactaatgaccgaagcttcaagactttgacatgtgtgaaaacatgaaatggctcagatccacctacttggaaaca

SEQ ID NO: 251025 - DNA, 75 bp, Homo sapiens
agcgcctggcctgcgcgccgctgcccgcgccacagatcaggatcctcatgaccagccaaagagaagaagaattag

SEQ ID NO: 251026 - DNA, 90 bp, Homo sapiens
gtcgtctgagagctttacgtcatcttcgattagctaataaccaactgcaattcctacctccagtggccataaaatgcagtaaaaacaaat

SEQ ID NO: 251027 - DNA, 101 bp, Homo sapiens
gcgcagtgcagccagcagcgccgcatccgcctgctcagccgcgggccgtgcgggactttgaacatgtcggggatcgccctcagcagactcgcccaggagag

SEQ ID NO: 251028 - DNA, 82 bp, Homo sapiens
ctggcgcgatgcgtcaagtacactgaaattcatcctgagatgaggtattagaaaactactcggatgctccaatgacaccaaa

SEQ ID NO: 251029 - DNA, 100 bp, Homo sapiens
ccggccgcccgcgccagcaagaggatcgtcctgccggagcccaggtctaccctgaactgcagatcaccaatgtggtagaagccaaccaaccagtgaccat

SEQ ID NO: 251030 - DNA, 82 bp, Homo sapiens
gaccacgtctccaaaatgagtcgcatcttcaacccccatctggaacggcaggagcagctgatgggatatcggaagagagggc

SEQ ID NO: 251031 - DNA, 100 bp, Homo sapiens
cagcatggactacagccaggagatgcacctgaaaatgagcaagaaaatcgcccagctcaccaagaatgaggacctaatttgcttcaaagatatcaaacca

SEQ ID NO: 251032 - DNA, 100 bp, Homo sapiens
accattgttaccatgacagtaccctcccattcctcccatgctactgctgtgaccacctcaaacatcccagtcgaacactgagctgaaggttgaagtggag

SEQ ID NO: 251033 - DNA, 100 bp, Homo sapiens
cggcgggcgtgcatcatccacggggtgctgcagatcctgttccagtttggaaattttagcattcaggtgccaggaatgcagatgggacagccagtgccag

SEQ ID NO: 251034 - DNA, 100 bp, Homo sapiens
cgagaagctccagatggcgtcttccgtgggcaacgtggccgacagcacaggcttacgagaggccccagaaacattcaactctccattatgacacgggcct

SEQ ID NO: 251035 - DNA, 74 bp, Homo sapiens
gtccttaaaaggcacaggagattcagtagatgaacagattccagttcttcagacaaacaatggtccaagtctaa

SEQ ID NO: 251036 - DNA, 97 bp, Homo sapiens
tggttggacagtcagcatttgcagactttggattggcacagctgcactggccgttcaggttgtgggcagtaactggcccaagccccactacactctg

SEQ ID NO: 251037 - DNA, 95 bp, Homo sapiens
atacaaagaacattcttatagccacgggttcagaagttactccttttcctggaatcacgattccatgcaatggaaaagcagctgatcgcatccat

SEQ ID NO: 251038 - DNA, 100 bp, Homo sapiens
gcgacccccatggaaactggaatagcagagactccggaggggcgtcggaccagccggcgcaagcgggcgaaggtcctactgctctgttggctcatgaaat

SEQ ID NO: 251039 - DNA, 100 bp, Homo sapiens
caaccgtggaagatgaactgcacttaattttccgactgctagaattggcagagggggtcgatttgggaggaaaggtgtggctataaactttgttactgaa

SEQ ID NO: 251040 - DNA, 95 bp, Homo sapiens
gaattaaaactgaatgaactgataacggagaatggaactgtatgccagcagcttgttgtacaaccagcatctcagacatgtcgaaaaagatgttt

SEQ ID NO: 251041 - DNA, 91 bp, Homo sapiens
aaaacggcgagagtgggcgagaacgtccactgcgggccggcgaaagctgactcggtgaaatacctggagtgctcagctctcacccagagag

SEQ ID NO: 251042 - DNA, 100 bp, Homo sapiens
ggcggctggcgccgggggccggggagcgccagtgctgcttttgacacaaaaacggggttacgtgtggcagtgaagaagctctccagaccatttcagtcca

SEQ ID NO: 251043 - DNA, 90 bp, Homo sapiens
acctccttccgccagggccccgaggagagtggcctgggagatgggacagatgcagaggaagatgaagatgatggcgagttcagtgatgat

SEQ ID NO: 251044 - DNA, 98 bp, Homo sapiens
gttttttattgtcacacagaaaaagaaactgccttgtctcccttccgggaattctctctttaagactagagaagaagaaggaggttcctgctgtgcca

SEQ ID NO: 251045 - DNA, 75 bp, Homo sapiens
agaaccccctggcagatgttcaaatcacttgcaactagccacagtgcagcctggccagaatttccacatgttcac

SEQ ID NO: 251046 - DNA, 100 bp, Homo sapiens
gcaagaagaaacgaattagtaaacagtgcaagttgatgcgtcttccatttgcaaggaagatgttaccgagtacttcagtgaattccttagtgcaggggaa

SEQ ID NO: 251047 - DNA, 74 bp, Homo sapiens
ccgccaggccctgcaggacctgctttcggagtacatgggcaatgatggaggaaccaggggacgccgctgtgcca

SEQ ID NO: 251048 - DNA, 75 bp, Homo sapiens
agagaaccccgatctcctcgtaaatctcgacagccttcaggaggtttcacagatggcagtgttacattgaacaaa

SEQ ID NO: 251049 - DNA, 82 bp, Homo sapiens
tgagacctgtcaccccgactcaacgtgagacgcaccgcccggactcaccatgctcaccatggatgatgatatcgccgcgctc

SEQ ID NO: 251050 - DNA, 100 bp, Homo sapiens
accgcaaattcttctatgggaaaggagtgttcagcctgggtgttcctgtagatgctctcttctttattggtaaccagttggtggccacgagtcatacagg

SEQ ID NO: 251051 - DNA, 80 bp, Homo sapiens
cagcccacatgcccgctcacctgcgctgtgatgcctgcagagctgtggcttaccaggccaaatacctcaccaagaaaacc

SEQ ID NO: 251052 - DNA, 100 bp, Homo sapiens
tgaaggggagctgcttatccgcttcttcaactccttcaatgaggccaccatggttctggtctcctggatcatgtggttatgaaaactacaattactatgg

SEQ ID NO: 251053 - DNA, 74 bp, Homo sapiens
gaaggcggcgctcctactccctccccggactccgcgggctgcagatcaaattacgaagctgtataatctcttcc

SEQ ID NO: 251054 - DNA, 90 bp, Homo sapiens
gtccacttggtcaatgtaaagtatctatcatacctccaattgcactaaacagcaccgattccgatggggaggtagacatgtagcagtaaa

SEQ ID NO: 251055 - DNA, 111 bp, Homo sapiens
ctgggaactccgccatgtcatccacttcgcccaacctccaggttgaaatcacaaagattagacacctttttagataggtgttcttcagcaccactgacaacacggttctga

SEQ ID NO: 251056 - DNA, 100 bp, Homo sapiens
caactcgtacctgagcctcttctacatcggtttctacctcaaggacatggagcgcttgaaagaggtggtggcttggcgggaaggaagcccgcgcccgccg

SEQ ID NO: 251057 - DNA, 89 bp, Homo sapiens
tgccccggtgcgcagacagagctattccagcaccagcagagggattaaagcctgtggtttccacagaagcaccacctatcatatttgcc

SEQ ID NO: 251058 - DNA, 74 bp, Homo sapiens
gagggtctcggggcgggcgccgcgggacctctccgggccatggagccctatgagtttgtctctctggaatggct

SEQ ID NO: 251059 - DNA, 97 bp, Homo sapiens
caagttggagcaaggagaagagccatggatagtagaaggagaattcctacttcagagctatccaggagtggattagaacaagatgacatgagaattt

SEQ ID NO: 251060 - DNA, 100 bp, Homo sapiens
gagaagatcctggaagaaccgcaccctctgatgttccagaaactccaggaccagctgagatctgtatctgtggacctgaatgttgatccctcgcttcaga

SEQ ID NO: 251061 - DNA, 82 bp, Homo sapiens
ccgcctcttggtttgcgtcctgcactgaaaggaaatgacggattttacgaacccgccccctggagttctcccgctgccgccg

SEQ ID NO: 251062 - DNA, 100 bp, Homo sapiens
caggctgaagaggaaagacaagagccgccctgcccagaaacgtccacatgtgggtactgcattcctaccggtgtgacagtcatgatgctatggactccta

SEQ ID NO: 251063 - DNA, 98 bp, Homo sapiens
accccacctggacggctggggccacttgtggtcgccgggagtactaccaacaagaagatgtggggtgaacagcttcagaaagccatctcacgctctca

SEQ ID NO: 251064 - DNA, 98 bp, Homo sapiens
accagcagctgtcgccgccgctctcagggtcctgacttgtcctgggcaagccaagtccattgcttctgctcctgggaagtgccaagattctgcagcgc

SEQ ID NO: 251065 - DNA, 100 bp, Homo sapiens
gcgctttcccgagaccgtcctggcgcgatgcgtcaagtacactgaaattcatcctgagatgagggtgccatgactcccggaatccctatctttagtccaa

SEQ ID NO: 251066 - DNA, 125 bp, Homo sapiens
catctctgaaaaggagcaacgatggggagccaagaccatcgaggggtctggacgcacagaacacatcaaatactatatttcgaaaggtgctattgtggatcaacttggaggggacctgaattcaa

SEQ ID NO: 251067 - DNA, 111 bp, Homo sapiens
tgacgggttaagattcggagagagaggtgctagtggctggacttgacctggaaagatgttcctcctgctgatcaagagaagctttttatccagaagttacgtcagtgttgc

SEQ ID NO: 251068 - DNA, 73 bp, Homo sapiens
gtgtaggagatggagagactgtggagtttgatgttgttgaaggagaaaaggttgtcaatagggtgactggaaa

SEQ ID NO: 251069 - DNA, 76 bp, Homo sapiens
ctccttctcctggagacgcaactcaagctccttcgaatgttcttccggcagcaggatgagattcgacggttgaaag

SEQ ID NO: 251070 - DNA, 82 bp, Homo sapiens
cgagcgcgagcggcgcgagaaatttcactgttacatgccttgaagtgatgaggaggtttctgttactatatgctacacagca

SEQ ID NO: 251071 - DNA, 75 bp, Homo sapiens
tcagctgcaagcaaatcaaaatgtccagcatgcagatgatgaggagtctgatgaggaagctgtgaagaaaaccaa

SEQ ID NO: 251072 - DNA, 100 bp, Homo sapiens
gtagaacagattattcttggagctggaccagtacttgagagattggaaaggtgtatgagcattgtgacatcgatgactgctggtgtctcggagagagaag

SEQ ID NO: 251073 - DNA, 75 bp, Homo sapiens
cgcggcgcgcgtgaacgttgccgtcgccgccgcccgggacagcccggagatggaagacgtcatagcacggatgca

SEQ ID NO: 251074 - DNA, 80 bp, Homo sapiens
ccaatgttggtgctggcaaaaaggtactgcttaggatgaatatgatttggagaaattccatttcttgtctaaggctagga

SEQ ID NO: 251075 - DNA, 82 bp, Homo sapiens
aaggatcatgtctgcgagccaggattcccgacttcccaagtaagaagcggaagaggagccgctggaaccaagacacaatgga

SEQ ID NO: 251076 - DNA, 100 bp, Homo sapiens
ggcggcggcggcggcggctgctgctgctgctgcccgcgtccgaggctcgcgggcggcgggcccggagctgagctcaatgtgcagcaatggatgacgacag

SEQ ID NO: 251077 - DNA, 100 bp, Homo sapiens
aaactacagaacaacatatcgtatcagatggcagacatacatcatttaaagggaaacttttgagaagaactttgaaagagaaacccataaaataagtgag

SEQ ID NO: 251078 - DNA, 75 bp, Homo sapiens
acaatctccacagtggtgataacttccagctcttattgctgaggcagttggaagttatgacaccatggatctctt

SEQ ID NO: 251079 - DNA, 101 bp, Homo sapiens
tttggccacatatatgcgaatctataagaaaggtgatattgtagacatcaagggtgtgggccgaagatatgctcatgtggtgttgaggaaagcagacattg

SEQ ID NO: 251080 - DNA, 126 bp, Homo sapiens
tgcaaatgggatccgggtgatgagcatgacgcacacaggagagccaggattcatgctctacatccccatagagacctgcaggctgggacaatgaaaagaaaatagctattttacatgaaaatttta

SEQ ID NO: 251081 - DNA, 100 bp, Homo sapiens
tggacatgtcctagacatcacttagagtgggagattcttcacagtcaagctcccagttgctcttgatcctggggccaagatttcagtcattgtggaaaca

SEQ ID NO: 251082 - DNA, 82 bp, Homo sapiens
ttgcagttctggaagcaagaatttatcaaaggaaagatggatccagacaagatcgccaaactgaggcagcaactacaacgca

SEQ ID NO: 251083 - DNA, 100 bp, Homo sapiens
ggcggcggcgcgcggactccgcatcccgcaccccgatggtagccgaggagctgggggggccctcagcctcttggccttgaacgggctgttcatcttgatt

SEQ ID NO: 251084 - DNA, 100 bp, Homo sapiens
gccgatgttcctcttaaagacactaaatgggtctgaaatggcatctgccacattatttaagaagaatcccgtcacggggctgctgtcagccagccatgag

SEQ ID NO: 251085 - DNA, 100 bp, Homo sapiens
tggtggtgcttccaactgcgggacaggaagtggccgtagcggcttgttggataagtattctaccttgtaaatactgttatttgtatatactgtaaatgat

SEQ ID NO: 251086 - DNA, 75 bp, Homo sapiens
cggggtttgatagttgtcaggaggattcgacgttcagtgcccagggatgtggagagtctcactctgtcccccagg

SEQ ID NO: 251087 - DNA, 100 bp, Homo sapiens
gctttgaaatctgataagaaagtacggaccataataatcaggagtgaagtcccagggatattctgtgctgacttatcagatgtagacttcctagatgatt

SEQ ID NO: 251088 - DNA, 100 bp, Homo sapiens
agctgacagagatacctacagacggagtgctgtgccactgatcaacaaatacaagcgcagacgatttcagaaaaccaagaacctgctgacaggagagaca

SEQ ID NO: 251089 - DNA, 82 bp, Homo sapiens
aagaagccagtcaagcggccaggtctggcggcttctctgttgacaactcagctggttccacaccctggcaattgtgaagagt

SEQ ID NO: 251090 - DNA, 75 bp, Homo sapiens
gacaaaagatctttctcgggtgtttcattcttacagtccatatgatcacaagtttgcagttaacatgtttcgaac

SEQ ID NO: 251091 - DNA, 100 bp, Homo sapiens
gggaaactgaggccatcagccgtgcctctttcttaggccgaggaagattcagaatggacagtttagaagaacctcagaaaaaagtctttaaggctcgaaa

SEQ ID NO: 251092 - DNA, 124 bp, Homo sapiens
caggccgtgcttctgcctaagaagaccgagagtcaccacaaggccaagggcaagtgatttgacaggacagagcgggatgccaccagcttgtccaaagggaagttccaggagctcctggtgggca

SEQ ID NO: 251093 - DNA, 96 bp, Homo sapiens
ttcgctcaacgaggacctgcaggtggaagtgatgaagacctgcctagagctggaacgttacctccagagcgagccctgctatgtttcagcctcaga

SEQ ID NO: 251094 - DNA, 51 bp, Homo sapiens
agctggactgcaatttcttaaagcgacatctcgaatcagcgatgcacactt

SEQ ID NO: 251095 - DNA, 75 bp, Homo sapiens
cgtgtactgcttgagaacagaatacattgctgattatctcatgcaggttgtctgcattcaaaagagcattctatt

SEQ ID NO: 251096 - DNA, 83 bp, Homo sapiens
ttcagaagagccaaggaataaacatgcaatgaacccaaaagggttgatgctatgaaactgggagtaaaggaaatgaagaaggc

SEQ ID NO: 251097 - DNA, 100 bp, Homo sapiens
cttctccgcggcgctccgggcccgggcggctggcctcaccgcccactggccctgggcatttccagctcgagagttccttcgaaagaagctgattgggaag

SEQ ID NO: 251098 - DNA, 90 bp, Homo sapiens
accccacaggatctgccccagagaaagtcctcgctcgtcaccagcaagcttgcgggatttggagcaagaggtggtggtggccttcccccg

SEQ ID NO: 251099 - DNA, 101 bp, Homo sapiens
tgtgcgactattctccgggagccgtccgtgtcaccgccggaacctggcgcaggtactccaaagattcaggtttactcacgtcatccagcagagaatggaaa

SEQ ID NO: 251100 - DNA, 100 bp, Homo sapiens
cagaaattgtacagcttgtgggaaagatgtagtatctaccccttggactgcagaacttggaggtgatcagctgagaacgatgacctacactatagtcctt

SEQ ID NO: 251101 - DNA, 74 bp, Homo sapiens
cccggaacaaccaccggagcaacgtcacggcggtgcacaaagccaacatcatgccttagcagtaggaggactag

SEQ ID NO: 251102 - DNA, 75 bp, Homo sapiens
cctgattacttgttacccatttgtgcaggaaaaccagtccaatagcccgagtgattgatgtatctaatgggaaag

SEQ ID NO: 251103 - DNA, 82 bp, Homo sapiens
ggagagccgagacctcagttcccggcggctcttgcggggcacaggttctgggccggagaaggggcgacgttcgggcaccccc

SEQ ID NO: 251104 - DNA, 94 bp, Homo sapiens
tgggcagctcgcacttgctcaacaagggcctgccgcttggggaacgcccttttgcttgtgactggcagggctgcgacaagaagttcgcccgctc

SEQ ID NO: 251105 - DNA, 100 bp, Homo sapiens
caagagacccggtttctaatccctgctctgtcactaacaagctgcgtgatcttcgatgggcactgtgccccgactgcggcctcgcctcaatgccattctc

SEQ ID NO: 251106 - DNA, 100 bp, Homo sapiens
ctgttttgggctataaagatctcaatctcttcaaactcttcagactggtttatcatcagggtggatgtgacaattatttagcatttacgtgtggcttaat

SEQ ID NO: 251107 - DNA, 101 bp, Homo sapiens
cccttcctgctagtcctggtggatctgcagtacgaaggtgctggagaatctggtaaaagcaccattgtgaagcagatgaggatcctgcatgttaatgggtt

SEQ ID NO: 251108 - DNA, 112 bp, Homo sapiens
tgacttccaagctggccgtggctctcttggcagccttcctgatttctgcagctctgtgtgaaggagctgatggtacacacatggatggtgatcaaattgttgtggaagtaca

SEQ ID NO: 251109 - DNA, 100 bp, Homo sapiens
acgtcgcgggggagaccgtggcccggcccctcttcctggagatgaagcctgctgggagcgtgaatgacatggccctggatgccttcgacttggaccggat

SEQ ID NO: 251110 - DNA, 100 bp, Homo sapiens
gtgcttcagttccatctcagtaacctggagtacgcctgtggcagcaaccttcaccaggttccaagttccccatcaagtggacagccccagaagctgccct

SEQ ID NO: 251111 - DNA, 95 bp, Homo sapiens
gtctgcagggcctgggccgccgctgctacctgcagcgccgtgtggcacgacacaaaaatcaggggcccatcctgatggagctgcagacttaccgt

SEQ ID NO: 251112 - DNA, 88 bp, Homo sapiens
tgtggggaaccgcgctgaggagctggaaactttcccggcagacgccaaattccagcgaaacagctgatgccagccagcttgaagaccc

SEQ ID NO: 251113 - DNA, 96 bp, Homo sapiens
ccactgcgggccggcgaaagctgcctgactggctcatggagaaagcctacctaagaatgaagccgggacccggcagaatggctcctgtgaagaagg

SEQ ID NO: 251114 - DNA, 82 bp, Homo sapiens
ccaacatgctgtgatgtgtgccgagggaggaattgacattgggacctgtgcaatcactgctattccttttgagaagtccaaa

SEQ ID NO: 251115 - DNA, 100 bp, Homo sapiens
ggaactgcagggtgtcctcagacaggtgaaaatccccagcaaggaggaagaggcagatatgtcctcacccacacagcgaacctacagcagctccctcaaa

SEQ ID NO: 251116 - DNA, 99 bp, Homo sapiens
cagcctcccaagtagcagggactacagtttcttcagatggaggtactgagccctctgccttagtggatgacaacggtagtgaggaggacttcagctatg

SEQ ID NO: 251117 - DNA, 75 bp, Homo sapiens
cagagagggaagagattcagccagcacactcctcgcgagcaagttatttctcaaactctgaggctgcggagttca

SEQ ID NO: 251118 - DNA, 75 bp, Homo sapiens
ctgggggagctcatcggcactctgaacgcggccaaggtgccggccgacaccggttctggctccttggcagcaatg

SEQ ID NO: 251119 - DNA, 90 bp, Homo sapiens
gccttggctccgtgtgctgacgaagctgccatcagtaagctatactccaccatccggccctacctagagccccttcgactccaccggggc

SEQ ID NO: 251120 - DNA, 90 bp, Homo sapiens
ccggccagccgccccgtccgggaggttatcaatagtctggctgtctatcgtcatcgtgagactgactttggtgtaggagttcgagaccac

SEQ ID NO: 251121 - DNA, 83 bp, Homo sapiens
gggctacgaagaagtgcttcagcgggccaggaagcgcatccaggagccttatgccagcctggaccatcttggaggcagtgtag

SEQ ID NO: 251122 - DNA, 75 bp, Homo sapiens
cgaagacatgacacttacaagatggacagggatgataattgggcctccaagagttatgaagacagtatggagttt

SEQ ID NO: 251123 - DNA, 75 bp, Homo sapiens
gcgcgacgcccggcgcgagctcaagctgctgctgctcggtgctggagaatctggtaaaagcaccattgtgaagca

SEQ ID NO: 251124 - DNA, 76 bp, Homo sapiens
ccccaacatcctgctcctgctcatggacgacagtgctcaagctggtattactatgtaactatgccaatgccagcct

SEQ ID NO: 251125 - DNA, 100 bp, Homo sapiens
tacatggaactcagacatctgcaaatcatgccatgtttcctgagagactgggagttgcaggtgcacttcaaaatccatggacaaggaaagaagaatctgc

SEQ ID NO: 251126 - DNA, 74 bp, Homo sapiens
cggcggcgccatggcagggcttgcagatgctgagggttggaaaagcaaaagcagatgtgtggcccaaaactgct

SEQ ID NO: 251127 - DNA, 83 bp, Homo sapiens
gccgggttgcgctccgtgcacctcttgcggggtgcggcggtgatgatggagaataagcccatgaccctgaagctcatcatgac

SEQ ID NO: 251128 - DNA, 83 bp, Homo sapiens
caagaaatttcaaaacttgatcaaggctaccggctctctgaccagttccacgacatcctcattcgaaagtttgacaggcaggg

SEQ ID NO: 251129 - DNA, 100 bp, Homo sapiens
gaccgcacactggatgaatggaagcgtgtgggcccatcgctggatggatctgtcagaacacggctttgggctggccctgctcaacgactgcaagtatggc

SEQ ID NO: 251130 - DNA, 90 bp, Homo sapiens
aggactgatttttagaactccacatttgagaacccttaggagaaatcttgagagtggacagcaattgtgaagatcgccagagagttctgt

SEQ ID NO: 251131 - DNA, 50 bp, Homo sapiens
ctctcccaacatggcggcctcaggttgttcctggtcattgagtacgtcaa

SEQ ID NO: 251132 - DNA, 51 bp, Homo sapiens
tgcatatctgaccttcgggcccaagtgcgatgcttcagtacctctgtggtc

SEQ ID NO: 251133 - DNA, 43 bp, Homo sapiens
aggcatgccagaggtagagcagaagagtcaagtaccattggcc

SEQ ID NO: 251134 - DNA, 111 bp, Homo sapiens
ctcagtgccctcaaggctcggaagaatgtggagagttttctagaagcctgtcgaaaaatgggggtgcctgagtggagacctttggcgacttggcctttggcgacatcttcc

SEQ ID NO: 251135 - DNA, 96 bp, Homo sapiens
ggatcattgcctccctttacatggaaagacagagggagttacaaagcgtttggcagaaaagaatgactttgtgatcttcctgtttacattgatgac

SEQ ID NO: 251136 - DNA, 74 bp, Homo sapiens
aaaagtggaagcgaagccgaaaaaggcagcagcgaagggtggttctcttcccaaagtggaagccaaattcatca

SEQ ID NO: 251137 - DNA, 82 bp, Homo sapiens
ggaagcgcagcccgttgtggtgatacgagccggagatgccttctgcagcgcttctctgaagtagctttggaaagtagagaag

SEQ ID NO: 251138 - DNA, 75 bp, Homo sapiens
ctggccgccccgagcggagcctggagaaaaatggctacaaacttcctagcacatgagaagatctggttcgacaag

SEQ ID NO: 251139 - DNA, 75 bp, Homo sapiens
ggcaacttgattctgtgggaagggctgtagctgatccatccgttgtctagttattttaccaagaaaatggtttgc

SEQ ID NO: 251140 - DNA, 101 bp, Homo sapiens
gcagtgagaaagcaaaggctgctctgaagcgcacgacctccgactactttctccttcaagcctgccaggagtgaagaaagctttgggcaaatatggtcctg

SEQ ID NO: 251141 - DNA, 75 bp, Homo sapiens
tgaaaagtaccctctggttttctcaccgcagatggtggggagccatgtctgaccaggacgtttggaagatcatat

SEQ ID NO: 251142 - DNA, 100 bp, Homo sapiens
gaaaactttcacttatctcttctttaacttatcgtggaaataaaacagctgttttgcagattggactacaaggtatgttgagtctaaaaaggacagagtc

SEQ ID NO: 251143 - DNA, 100 bp, Homo sapiens
gatgccatgttttcggtctcctttatcgcaggagagactgtgattcagcaagcatcacaggacatggccccctcagccacctagctggggcccatctagg

SEQ ID NO: 251144 - DNA, 76 bp, Homo sapiens
ttactgttgctaaatgggcggtggagggagttgtttatggaagtcaagcaaaattgttcaggagacaacttttgat

SEQ ID NO: 251145 - DNA, 90 bp, Homo sapiens
tgccaagttatttactttcccatcaggtttcctgatgtgagcaggtggagattttcattttacctttatgtatttacctacggagtcaga

SEQ ID NO: 251146 - DNA, 98 bp, Homo sapiens
ggaccttccgcaagttcacctaccgcggcgtggacctcgaccagctgctggacatgtcctacagaaaggacccaggagcgataacagtaaatcaaata

SEQ ID NO: 251147 - DNA, 90 bp, Homo sapiens
cgagagcgagagtcacgtcccggcgctagcccagcccgacccagccaggcccacaactcctctttctgtaggcaccattgtcccacctcc

SEQ ID NO: 251148 - DNA, 87 bp, Homo sapiens
ctggccgacctgcaccccgatgttttcgccaccgcgcccagattcattggcctgcccctgagccggtggctgggtgtgagggatcag

SEQ ID NO: 251149 - DNA, 80 bp, Homo sapiens
ggtcatgtagtccctaactccagactccaccagatgtgcagggatgctttcattggatttggaggaaatgtgatcaggca

SEQ ID NO: 251150 - DNA, 100 bp, Homo sapiens
cagatggcggatgccctgcagtacctgcagaaggtctctggagacatcttcagcaggactaatttattattgtgcaactgccagtcctgcgcattccagc

SEQ ID NO: 251151 - DNA, 76 bp, Homo sapiens
ctcaagtccctgatcctgacggccctgcagagagaaacagaacgaatctagaacatgatgtctatgaaagacttac

SEQ ID NO: 251152 - DNA, 96 bp, Homo sapiens
ggcgcctctgcgcgcgggaagatggcggaacaggctaccaagtccgtgctgtttgtgtgtctggcctgattacatcaaccccagagccgtgcagct

SEQ ID NO: 251153 - DNA, 100 bp, Homo sapiens
agccctgcagcgcctggtgaagaagcctgtgcccaagctcatcgagaagtgctggaccgaggacgaagtggacctgaaggagaagaaggagaaggtggag

SEQ ID NO: 251154 - DNA, 97 bp, Homo sapiens
gagcaacctccgtgaggtggcgcagatgctcaagtccaaacatggaggcaactacctggtccaagccttgtcatcggccagtaagtttgaagcagag

SEQ ID NO: 251155 - DNA, 97 bp, Homo sapiens
cccaggagtaagagcccatagcagtctgccagacaatagagcatatggtgtttgaaagatgtatggtgatcttgaaacctccagacacaagaaaact

SEQ ID NO: 251156 - DNA, 49 bp, Homo sapiens
ttaaaaggtgtcaagaagctcagaatgataaggagggttcctgccccca

SEQ ID NO: 251157 - DNA, 82 bp, Homo sapiens
ttgtgccttttcttgttcctactgtaaaggagatgggttagatgttcaatggctgccatccggaagaaactggtgattgttg

SEQ ID NO: 251158 - DNA, 50 bp, Homo sapiens
ctgcgatccgcgcatataacggatttttagactctgaggagcagttggag

SEQ ID NO: 251159 - DNA, 50 bp, Homo sapiens
cagtgacggaatgcctccatacatgaaagaaaccttgactggttccccag

SEQ ID NO: 251160 - DNA, 75 bp, Homo sapiens
ggatgtcctgcacatgcactacacgtatcctgcagaatcaccagattattttgtggattttcctgttccattttg

SEQ ID NO: 251161 - DNA, 100 bp, Homo sapiens
gtcttcggaagcggcggcggcgcgatgaccacgctacgggcctttacctgcgacgacctgttccgcttcaacaacattggtggactgtcccgtgtgcaag

SEQ ID NO: 251162 - DNA, 100 bp, Homo sapiens
cggcggcggcggccggagcttctctcagccggcatgtgagcagcagtgacagagtgggcaagccttaccgtggcgtaaagcctgttttcagcattgggga

SEQ ID NO: 251163 - DNA, 100 bp, Homo sapiens
gattgcaagcatcttttcttctgcatggtgggtacccccatgctgtggcacggcttcaggagtgaaacctcggtccggctgggctattgatccctttgga

SEQ ID NO: 251164 - DNA, 134 bp, Homo sapiens
gctccgtggccttagctgtgctcgcgctactctctctttctggcctggaggctatccagcgcggctatgagaggttttcctccgagtacccagaattctgttctaaaaccaaggccctggcagccatcccaccc

SEQ ID NO: 251165 - DNA, 74 bp, Homo sapiens
ggaggtgaagttgctgctgttggcgcctgcttcgcggtttcctgcttgctgattgcgtacggagcaagtaaacc

SEQ ID NO: 251166 - DNA, 90 bp, Homo sapiens
gaagccttttccgttgccggtgccggcctagcgtcctggaattacttcaatcaatgagagaaccaccaccaatttgccttgatgttagac

SEQ ID NO: 251167 - DNA, 90 bp, Homo sapiens
atctgaggttatcaatgacgaggtttgcctgcaatgagatttcattctctacatttaaaggacatcctttctgagctgctgtgaataaat

SEQ ID NO: 251168 - DNA, 83 bp, Homo sapiens
caacgagctgctggaggacgagggccagctgacggagatggtgcagaagatggaggagatgtctttggtggacttgggaaaga

SEQ ID NO: 251169 - DNA, 147 bp, Homo sapiens
ccgagatgtctcgctccgtggccttagctgtgctcgcgctactctctctttctggcctggaggctatccagcgcctgtctccactaactctggaccctaaaacagctcacccaaatctggtgctctccaaaagccaaaccagcgtct

SEQ ID NO: 251170 - DNA, 100 bp, Homo sapiens
gaacaaatgtagtttttacaaccgaagataacatatttggaaccgttatttttgctggataaactacctcttcaggttacagcttgaggatctgtctctt

SEQ ID NO: 251171 - DNA, 83 bp, Homo sapiens
cgatactgagcttcttcctatttgccatgggcctggcaacctcattctttaacgagaggaacataaatattactaaggatttg

SEQ ID NO: 251172 - DNA, 83 bp, Homo sapiens
ccggaatatcaaatacaatttggacttctgggtatagtcgtctccccctccaccacggcaagtcctgcagagggaaccagctc

SEQ ID NO: 251173 - DNA, 108 bp, Homo sapiens
ggaagaccgcgcgcagggcctgcagcgggagctggacggcgagcgcgagcggcgcgagaaaatccagagacaatggccccgatgggatggagcccgaaggcgtcatcg

SEQ ID NO: 251174 - DNA, 75 bp, Homo sapiens
ggccagaagacaaagtcaattccatgaagatgagaagtttttgtctgaagtttttgcacaattaacagatgaggc

SEQ ID NO: 251175 - DNA, 74 bp, Homo sapiens
aaaactaacagtctatgatgtcaaggataagtctcatgacaccccgtgtggttttgccatgttctgttcaggag

SEQ ID NO: 251176 - DNA, 82 bp, Homo sapiens
cggagatcctgatgaagttcgagcactaatatttaagaaagaagatgttaactttcaggtgtacaagggagaagaagccaca

SEQ ID NO: 251177 - DNA, 80 bp, Homo sapiens
aaacaagctcagggctcccacggattctacattatgttggataacagggcaagattcagaggaagaaaaggatattgatg

SEQ ID NO: 251178 - DNA, 73 bp, Homo sapiens
ggcaggatatgctagcaatattgcttacagaggtgatctgtgaaaatggttcgctattcacttgacccggaga

SEQ ID NO: 251179 - DNA, 100 bp, Homo sapiens
cagctcctctatcagcatttttggtgtctcccagtgatcaaaaagagagtggttgtgctgcagaagatcataagtaaacaagatgacttgatgacagtga

SEQ ID NO: 251180 - DNA, 76 bp, Homo sapiens
ctcactccaagggccagggagagagcggtgagtgtcccagcccggggcgcggtagcgccgccaagcggaagaagaa

SEQ ID NO: 251181 - DNA, 75 bp, Homo sapiens
gtgacacagttcacatcctggagatgtacgagggccaagattgacagacacctaatattcatgacttgagaatat

SEQ ID NO: 251182 - DNA, 100 bp, Homo sapiens
gtcagtcattttactgtcaagacatttcttcggcattctgcaacagtgacagctatattgtgcgtgtcaaggctgtggttatgaccagagatgactccag

SEQ ID NO: 251183 - DNA, 100 bp, Homo sapiens
ctcagccaactccattgccacagcctcccccaccaacacagctgttgccaatacacaatcaggcccagccatctaatcagtctccgatgtctttaacatc

SEQ ID NO: 251184 - DNA, 82 bp, Homo sapiens
ggacaatggggacccgggacgacgagtacgactacctattcaaagatggtcagtaggacagaaggtaacattgatgactcgc

SEQ ID NO: 251185 - DNA, 80 bp, Homo sapiens
gcgaacatgtaacaagaatccaaagaaaacaaaatggtggtatcatgctattattcatggactatccagtctaacagctt

SEQ ID NO: 251186 - DNA, 74 bp, Homo sapiens
ggcgctggctgtggtcggtgctggcggcggcgcttgggctctacgctctgctgttgcccgtattcaggagttct

SEQ ID NO: 251187 - DNA, 90 bp, Homo sapiens
aggaactcaggcgcctcttcttagttgatgatttagttgattctctgaaggttttacacacgctggaaagattgggaatcatggtattct

SEQ ID NO: 251188 - DNA, 80 bp, Homo sapiens
caatggttcccagtttttcatgagtcagtggatcggtggggaaaatgctgcttaccctgggccctgggctgtagaaagaa

SEQ ID NO: 251189 - DNA, 100 bp, Homo sapiens
ttaggagtcagttggatgtgacacataaggaggcagttgagaattttgaaccagcaactcagagaacaacagaaaactcaaaaaccatctggtgctgtgg

SEQ ID NO: 251190 - DNA, 82 bp, Homo sapiens
caaaacaccagatgatgaccctgagcaaggaaaatctgaggattcatgatgttgctatcaaaagttgagaaattgtcagaag

SEQ ID NO: 251191 - DNA, 83 bp, Homo sapiens
cttgcctgtgtcccacttgttcgcggcctatagggcacctggacgatgacggattaccgcacgggttctgcacagtcacctac

SEQ ID NO: 251192 - DNA, 74 bp, Homo sapiens
gagcagtaccctgatggagtcccttgcagaaagaagagattttatcgacatcgaaagtaaatttgccctaagga

SEQ ID NO: 251193 - DNA, 98 bp, Homo sapiens
cagtctgagtgtctgtccccagagcctcagtttgtgcaggacaccgacatggaacagggactcactgggggctcttgtcaggatggtgaagctgttca

SEQ ID NO: 251194 - DNA, 82 bp, Homo sapiens
ttgctcctcgccgcggcggggactgcaggagcaggacatcgagactttacatggctctgttcacgtcacgctgtgtgggact

SEQ ID NO: 251195 - DNA, 75 bp, Homo sapiens
ggtcaatactggcccagcatttaccacacaatggcctgtgcgagaagatgtactaaattcattgaataacaactt

SEQ ID NO: 251196 - DNA, 83 bp, Homo sapiens
gcgctggcgcggcttttggcggcctttctgctcctcgcggcccagacacgatgaggcgagtggtacgacagagcaagtttcgg

SEQ ID NO: 251197 - DNA, 50 bp, Homo sapiens
gagatgaagcctaagaatatgatcagggagagcttatggatggagaccaa

SEQ ID NO: 251198 - DNA, 99 bp, Homo sapiens
aggatttctggcagcaattccttgacagtttaaaagccttggcagtcaagtttgacatgcaaaggataactctggaagagttgaagcacattctctatc

SEQ ID NO: 251199 - DNA, 83 bp, Homo sapiens
cagacatacaagttggagacctcatcatagtggaaaagaatgtgaaaacctttgcatcttctgatagtctagccaaggtccaa

SEQ ID NO: 251200 - DNA, 100 bp, Homo sapiens
gaaggaactggcacttggagtccagacatctaaaatttgagtggagactgctgcacggactctggaaccatgaacatatttgatcgaaagatcaactttg

SEQ ID NO: 251201 - DNA, 90 bp, Homo sapiens
aacgggactcaggagcacacgaaagtccggctgagcgtctatggagccctgggcatttcacaagcttccatgatgacgcccccaaggact

SEQ ID NO: 251202 - DNA, 100 bp, Homo sapiens
gctgtgggagaagagtgtgacttcgagctgcaggatggactttctggtcctcttcttgttctacctggcttcggtgctgatgggtcttgttcttatctgc

SEQ ID NO: 251203 - DNA, 75 bp, Homo sapiens
tctgtgggacgcctggaggagaggaacctttgcttctatggaaggcccagcttcccgatcagtggagacgttgaa

SEQ ID NO: 251204 - DNA, 83 bp, Homo sapiens
cgctcctaagcctgcacagccgcggcggcagcagcagtgagaggcaccatgactcctgtgaggatgcagcactccctggcagg

SEQ ID NO: 251205 - DNA, 100 bp, Homo sapiens
tgaagcaggacatgcctccgccggggggctatgggcccatcgactacaaacggaacttgccgcgtcgaggactgtcggttcgttcccacatgcagggcag

SEQ ID NO: 251206 - DNA, 96 bp, Homo sapiens
gtcctgtccatggctaatgctggtcctaacaccaacggctcccagttcttcatctgcaccataaagacagactgcatggatgtggataagacccca

SEQ ID NO: 251207 - DNA, 98 bp, Homo sapiens
cccaactccagtgcaaaagcatgctattcctattatcaaagagaaaagagacttgatggcttgtgcccaaacaggtgggaccatccagttgcaggaaa

SEQ ID NO: 251208 - DNA, 75 bp, Homo sapiens
gccggatggaaatcctaatgacagtctccaaattcgcctccatctgtaccatgtaagactttgaccccgacgcag

SEQ ID NO: 251209 - DNA, 100 bp, Homo sapiens
ccctgacctccctgcaccagcggatcagcgagctcgagaaaggtcctctcctggaagtcgaagctgccgctgcagaccatcatgaggctgctgcaggtgc

SEQ ID NO: 251210 - DNA, 80 bp, Homo sapiens
aagagctacagaatatgctccaaagaagagtgagaaagatcagtctaaagaaaaggagaagaaagtgaaaaaaacaattc

SEQ ID NO: 251211 - DNA, 83 bp, Homo sapiens
aggacgcagggaatccgctgctaaataatgtttctgattatttgacttccaacgggcacctgagtgagaacgaggcgcggaag

SEQ ID NO: 251212 - DNA, 75 bp, Homo sapiens
ggaagacccaatggatagatacaagaaaatatatcgctatcgtctcctatgagcaacgccagaattataaggatg

SEQ ID NO: 251213 - DNA, 82 bp, Homo sapiens
agaggctggactcggattcgttgcctgagtgtggccagactccactgatgatagctgccgaacaaggcaatctggaaatagt

SEQ ID NO: 251214 - DNA, 75 bp, Homo sapiens
ctggacaccatctgcactctgtcagccaggccgccatggcatcagatgaaggcaaactttttgttggagggctga

SEQ ID NO: 251215 - DNA, 50 bp, Homo sapiens
ccgaaaccgggctgcaggcgggatatcctaaacctgaggaaggaatactt

SEQ ID NO: 251216 - DNA, 50 bp, Homo sapiens
cggacttcctctcagaagaggaccgcggattgagacatttgggaaatgat

SEQ ID NO: 251217 - DNA, 90 bp, Homo sapiens
gggtcgaggcggacgcgcggctgcgtcagatacaagaaaggtggctacaagataaccttactttaagaaaaagaaatgaggaactaaaag

SEQ ID NO: 251218 - DNA, 94 bp, Homo sapiens
gtgccatgcacaaggctgtggtggatgcaggaatcactaccaagcttctgacccttcgtgctctgtctgatgatggagtatctgatcttgaaga

SEQ ID NO: 251219 - DNA, 75 bp, Homo sapiens
ttggcagaaagtgaggaggaaaacacccccattgttgatggacggatggctacatggatgtgatggagatggttt

SEQ ID NO: 251220 - DNA, 80 bp, Homo sapiens
agggggagcacagccagaatggggaggaggagcctgagttcactttatccaaatgcatagatgccgtgatggtgctggga

SEQ ID NO: 251221 - DNA, 100 bp, Homo sapiens
ggatgttccagtatttaaagctattcaaccagatatgtggtagtgttaaagatggctccttggcggcatgtgcattttctcctaatggaagcttctttgt

SEQ ID NO: 251222 - DNA, 51 bp, Homo sapiens
gcaagctgtgcgacgtgaccctcaagcttttcaggctgcctttcgagctca

SEQ ID NO: 251223 - DNA, 75 bp, Homo sapiens
gtgaccctgagcgaagccaagccgggcggcaggctctgcggctaccctcctttttatgatgaaaatgactccaag

SEQ ID NO: 251224 - DNA, 100 bp, Homo sapiens
tcagcatctttctttcaacgtacagaggctttgcctccactaaagaagtgctggaactactgctggacagcttagcagtgtctgcaaaaacgaatctttt

SEQ ID NO: 251225 - DNA, 88 bp, Homo sapiens
agatttggtggatttctctccagtttatcgatgtctacatatatattctgtcctggatgtatatggaatgttactcaatttagaaaaa

SEQ ID NO: 251226 - DNA, 80 bp, Homo sapiens
cgccaaacaagcaaatctggctatcttctccatccaggacaatctctatgggaagcagaaggcaaggaccccggtcattt

SEQ ID NO: 251227 - DNA, 75 bp, Homo sapiens
gccggcaggagagaaaggggctcctgcggaagaaggactcggtggagagccacccgacctgggtggacgacacgc

SEQ ID NO: 251228 - DNA, 126 bp, Homo sapiens
atggggcacccggtgtaccgcggcgagaagccccagctgcactacgcggtggttcgctttgaggtggtctgaagccaaggcctcgcggagcttctttgtgtgtcaccttgcttccacgtttcagtt

SEQ ID NO: 251229 - DNA, 80 bp, Homo sapiens
gtttgatcatgcttatggtaactatatgtgaacagagtatctgtcaggcaagagctgctgtgatggtttatgatgatgcc

SEQ ID NO: 251230 - DNA, 100 bp, Homo sapiens
aagaagtcggtcttttgattacaactatagaagatcgtatagtcctagaaagaacatcattcatggcagtgattcagtaaaaagtgctgaaaaagaaatc

SEQ ID NO: 251231 - DNA, 98 bp, Homo sapiens
gctgtggataacgggaggtgaatttccatgtcaacatagtcctgaacactatggctatgcatcctccaacgtcagccccgccctgccgctccccacgg

SEQ ID NO: 251232 - DNA, 51 bp, Homo sapiens
cggcatggctctcctggtgctcgacatgcacatgatggtgtccaagccaga

SEQ ID NO: 251233 - DNA, 125 bp, Homo sapiens
gaaaacctaaccatgaagacttgaacttaatacagcaagaaagaccatcaagtttaccagagtacgagacccaatctagtgcagaagccaaatttgtgaagcagctagaccaatgtgaaatgatt

SEQ ID NO: 251234 - DNA, 74 bp, Homo sapiens
aagcagaaagaggttacttaatgggctcaaggtcacctacctgctgcaagctttcttcctggtggcagatgaca

SEQ ID NO: 251235 - DNA, 98 bp, Homo sapiens
gctcacctctcaccgcgcatgtttggagaaagccaaacttggccctgctggcaacaaagtcatcagtccctctgaagacaggaaacaaccttccaaca

SEQ ID NO: 251236 - DNA, 100 bp, Homo sapiens
ttctggtggacagattgagcaaagattgatgttctgccagaaattgtggaggctgtggaagggaaggtggaagtcttcctggacgggggtgtgcggaaag

SEQ ID NO: 251237 - DNA, 90 bp, Homo sapiens
cgcccagccgctcgcaggcgccgcacggagttgcgtcccggggacttggggccgcagggaggttgtgaactaaaggccgacaaagattat

SEQ ID NO: 251238 - DNA, 82 bp, Homo sapiens
aaactggatgctgcagacactgaacgaggagccagtgggtccaccaaaatatactaaatctgttctgaaaaagggagataaa

SEQ ID NO: 251239 - DNA, 98 bp, Homo sapiens
ggccgacgaggctgccgaagacagtggtgaggagggcgcccctgaacctgcaccaggcagcggaggaggaaatggcaggtcctaatcaactctgcatt

SEQ ID NO: 251240 - DNA, 100 bp, Homo sapiens
caggcacactacagaactaaatatgcatgtcattaaaacaccaatgaccagccagaagacatttgaatctttggtagactttagcaaagccctaggaaag

SEQ ID NO: 251241 - DNA, 51 bp, Homo sapiens
caaaggcccttgagcaatcaggatgttggtgagaaggacgttgaagagtgg

SEQ ID NO: 251242 - DNA, 75 bp, Homo sapiens
atccgtttgttcaggaaccaccagtgacagagaggatttgacagctaaggatattgaagaaattattgatgagct

SEQ ID NO: 251243 - DNA, 74 bp, Homo sapiens
gaagtggctgtgcgctagatgctgtcaccagagatggccctgctgtggcaccagtgaccaacgggaacacaacg

SEQ ID NO: 251244 - DNA, 100 bp, Homo sapiens
tcaggatggagacagtgatgaagataccacaccatccctggcctttccgttccgaacgtccacggcgccctggcccccctggccatcccctcggcggcgg

SEQ ID NO: 251245 - DNA, 75 bp, Homo sapiens
tagacaatggttagagaagaattttccaaatgaatttgcaaaacttactgtagggttaccatcatgaaagataaa

SEQ ID NO: 251246 - DNA, 100 bp, Homo sapiens
agaacacgcacgtcctggttttcattgttccccgcctcctgcgactcgtttgtggttggtgacaaagttcctgctgatataaggttaacttccatcaaat

SEQ ID NO: 251247 - DNA, 100 bp, Homo sapiens
gggtgcccgcccttagcggcccggcgttgaattccgggaagtgggagcttcaggctcgctccgtgcgggtgtcagcttcctctggtgcaaccagcaagtc

SEQ ID NO: 251248 - DNA, 100 bp, Homo sapiens
ctgggagcagcgacccctactgcctagtgaaagtggacgacgaggtggtggccaggcagccacctggacagccaccggaggatggcgcccactcccatcc

SEQ ID NO: 251249 - DNA, 87 bp, Homo sapiens
cctgtcctggatcagtttctttgtcatgtagccaagactggagaaacaatttgaatctggtatcaagtgtcactctctccaagtccg

SEQ ID NO: 251250 - DNA, 82 bp, Homo sapiens
tgcggagctgggggcgggcgcacccccagatcgcaccccctccctccctggcggagcccctgaaggagctgttcaggcagca

SEQ ID NO: 251251 - DNA, 74 bp, Homo sapiens
taaaggtggctttggattcagaaaaggtggaccagatgacagagggtcacgatcgtggagtaaactgggctgcc

SEQ ID NO: 251252 - DNA, 75 bp, Homo sapiens
cccggtgcccgaggaggcagccaagctcgtagcctgccactccgtgcggaagactgcagtcattgagaaacgtag

SEQ ID NO: 251253 - DNA, 98 bp, Homo sapiens
tcacctcgaaattcctgaggcgctgggagccgcaccacctaacgctggccgacaacagcctggcgtccgccacgcaacagctcggcaatctggaggca

SEQ ID NO: 251254 - DNA, 74 bp, Homo sapiens
cccacactgcaccatgagctcagttggctgcaggagcagctagcacaggtgggtgcctgagtctgcacgctggc

SEQ ID NO: 251255 - DNA, 102 bp, Homo sapiens
gtcggaggaggacgaggacttggaagggtctccaactgaattccttgaagagaaaatggcctaccaggaatacccaaatagccagaactggccagaagatac

SEQ ID NO: 251256 - DNA, 74 bp, Homo sapiens
tggcagaagcctggaactctacagggagctggacctcaacagacatctttccaggaacagcgtgaggaggacag

SEQ ID NO: 251257 - DNA, 75 bp, Homo sapiens
taacatttgggagaaacacagccagaaggagtaagtccatgagtgatgtcagcgcagaagatgttcaaaacttgc

SEQ ID NO: 251258 - DNA, 75 bp, Homo sapiens
gaagctgcccgtgccaacaatatgcaagaagtcagcagggggtccactggacggggcctgagctacaacttcacc

SEQ ID NO: 251259 - DNA, 100 bp, Homo sapiens
cttcataacaataattttgaaaatgctttgtgcagaaaggaatcaaaagaatatttagaatgcaggatggagagttccagctattcttcagatgctctgg

SEQ ID NO: 251260 - DNA, 83 bp, Homo sapiens
ggaaacaatggcatttacagaaagagtcaacagcagtggcaacagtttttggctttcacccccaaccagtgaccaaagacttg

SEQ ID NO: 251261 - DNA, 83 bp, Homo sapiens
cagatgaagagggaggcctgagaggctgctgttctaactcgctcccaggaactgtggctgcaccatctgtcttcatcttcccg

SEQ ID NO: 251262 - DNA, 50 bp, Homo sapiens
cggcggaagcggagagcaacagcgcgccgatgtccaggatgttaccgttc

SEQ ID NO: 251263 - DNA, 100 bp, Homo sapiens
aagaaatttggacaatatgcaggacatgtacaaagaggatggtgaagctttgctaattttgctaccctcagaaaaagctatggtgcagcagcttcttcag

SEQ ID NO: 251264 - DNA, 98 bp, Homo sapiens
ccccacctacgttaacatgacggtcggctccttcgtgtgtacctcctgctccggcagcctgtgcgagaagatgtactaaattcattgaataacaactt

SEQ ID NO: 251265 - DNA, 100 bp, Homo sapiens
ctcagctttactgtgatggggtggtagctacagcaagctgggtagcaggcagatccaaaggatatcatgaagtttccagggcctttggaaaaccagagat

SEQ ID NO: 251266 - DNA, 51 bp, Homo sapiens
cctccaagagcacattgcctggtaagatggcacagtaaccttggtgcacga

SEQ ID NO: 251267 - DNA, 82 bp, Homo sapiens
ctgctgctgacgctgctgctgcccggcctcggggattttgacacttcatgacatgtcattatttagagcaataatgaatatt

SEQ ID NO: 251268 - DNA, 75 bp, Homo sapiens
aaatcgagcaggagctgacggccgccaagaagcacggcaccaaaaacaagcgcgctgcagacattcaatactgcc

SEQ ID NO: 251269 - DNA, 95 bp, Homo sapiens
gtttcgaaaatgtgtgtgaattggatttgatcttccatatggataagcaccagcagacgtttttgaatcaactgagagaaattacggggattaat

SEQ ID NO: 251270 - DNA, 74 bp, Homo sapiens
cgccgcttgtgctgcagccatggcctagactcccgaggcttcctctttggcccctccctggcccaggagcttgg

SEQ ID NO: 251271 - DNA, 98 bp, Homo sapiens
ttccgccgccgggctcggggcctccgcagcgacaacatggaggccgtgaagaccttcaatagcgagatgctttctgatgcagcacctgggaaactgag

SEQ ID NO: 251272 - DNA, 98 bp, Homo sapiens
cattctgcaagcaggcaacctgaatacagcctgcctagggtagttaaaagacgagtgaatgctctcaaaaacctgcaagttaaatgtgcacagataga

SEQ ID NO: 251273 - DNA, 101 bp, Homo sapiens
tcatcatgactttcttccaagtgaccctcttcgctgtgaatgagttcattctccttaacctgctaaagccaagacaatgcaaactccagtgaacattcccg

SEQ ID NO: 251274 - DNA, 100 bp, Homo sapiens
ccaggacccgcctggctgcgagatatatggagcagatggtgctttttacccagatgaaatacaaaggccacctgtcagagtcccctcttggggactggaa

SEQ ID NO: 251275 - DNA, 83 bp, Homo sapiens
aaatactcctttacaccttgctgtgatgttaggaaataaaggctctgaagggctccaagaagctggtgctgtctgtgtactca

SEQ ID NO: 251276 - DNA, 50 bp, Homo sapiens
ggcttcctggcccgaaaggagagcctggcccagaatgtgttcagtatctt

SEQ ID NO: 251277 - DNA, 100 bp, Homo sapiens
cagcctggttcatcagcatccagtcctctagtgctgccacctagtggacgcttaataataatctccgccacctccctactctcggctgtctcctcgcgac

SEQ ID NO: 251278 - DNA, 90 bp, Homo sapiens
aggagttggcgagtagtagcgaggagacgaagtgaaacttccagaaatccttggaaagatgtccttttctgagaagaatctgaaggcttt

SEQ ID NO: 251279 - DNA, 100 bp, Homo sapiens
tcaccacctgctgcttttctggagcgcttaccagtgattacagtggcgagatcttgaacaactgctgcgtcatggagtaccaccaagccacaggcaccct

SEQ ID NO: 251280 - DNA, 82 bp, Homo sapiens
ccaggagcagacagagaagctgctgcagtttcaggagaagacagactgctgctttggacctgttggtaatgatggcctgagc

SEQ ID NO: 251281 - DNA, 74 bp, Homo sapiens
tctggccgccggccacctggtccagctgcccgcaggggtgatatgtgtcacaaagatgtctacacggaactgcc

SEQ ID NO: 251282 - DNA, 100 bp, Homo sapiens
cagccatcaggtaggctgcgttgaggatctttgctcttccatccgcctttgatcgtcttcctcttcagccatccagcttttgcctgcctcctcctttccc

SEQ ID NO: 251283 - DNA, 75 bp, Homo sapiens
aacagttgttgcagcaagcgattcagctcaaatagctataactgtaccaaagacatggaagaaaccaaaagatcg

SEQ ID NO: 251284 - DNA, 96 bp, Homo sapiens
ggcggtccctgtgacctgtggagacacggccagatctgccctccagataagtcaattgagcttcacttctctaattgaaatcaccgtgctgatgga

SEQ ID NO: 251285 - DNA, 51 bp, Homo sapiens
ggtggtggtggtggaggtccaggagaaggtggccaaggtggaatacgtcag

SEQ ID NO: 251286 - DNA, 100 bp, Homo sapiens
gcaccaccacctgctcctgctgcctctgctgtcctcagcttctgggagcatcttagcagccagctccggctgggagtgtccactcgccttccaccagcat

SEQ ID NO: 251287 - DNA, 80 bp, Homo sapiens
ggacccagctgagcgggcggtcattcgcatcgcagagctgagctcaatgtgcagcaatggatgacgacagcctggatgag

SEQ ID NO: 251288 - DNA, 75 bp, Homo sapiens
ttctcgggtgctacgctgctgcagctgccgcctcttccaggcgcaccaggtcgactaatggaaaatgaaaccaac

SEQ ID NO: 251289 - DNA, 98 bp, Homo sapiens
aatggaagcacctgcgggatacagtggagctacaacttctgaaggaatgaatggaacgcctactatgaggaggtggtgtacgtcctagaggagatcga

SEQ ID NO: 251290 - DNA, 75 bp, Homo sapiens
cttggaatgcgaggagacagaagacagtagccaaacacccaggtatggtgtcagtcgtggaactgaaacagagtt

SEQ ID NO: 251291 - DNA, 100 bp, Homo sapiens
gaggccgacgatctactatgtgatgtcagggcctgcgtgaaatttctgaataaattggcagaagaacgcagacagaagaaggaaacttaagatgtgcaag

SEQ ID NO: 251292 - DNA, 100 bp, Homo sapiens
cgctcggcgtgtacgtgggcagcggcggctggcgcttcctgcgcatcgtctgcaagaccgcgaggcgagacctcttggggggccctcagcctcttggcct

SEQ ID NO: 251293 - DNA, 75 bp, Homo sapiens
gtctctcgcgggcgggagaacggaaaactcccaacttcctgatcccagccatcatgtccatagagaagatctggg

SEQ ID NO: 251294 - DNA, 50 bp, Homo sapiens
ctgtttaaagtgagcttttccctctgctaaggcgggtctttggaaattgc

SEQ ID NO: 251295 - DNA, 51 bp, Homo sapiens
cctcctgagtagctgggactgcagctatcatggtgaacttacttcagattg

SEQ ID NO: 251296 - DNA, 75 bp, Homo sapiens
cgcaacctggcagccgccgccgtggaagcaaccagcaggcctttttactggagaacgtcccttgtaataatgcaa

SEQ ID NO: 251297 - DNA, 100 bp, Homo sapiens
tggatccagggataaatcccaaacttcttaacccctagaccggtttttagtccattgactatgcagcctaatggatgtttgatgtaggtggccaaagatc

SEQ ID NO: 251298 - DNA, 101 bp, Homo sapiens
ctgccgggagggggccctgagcctcctgcaacacctgcggcctcactgggacccccaggaggtgaccctgcaggagatatctgaagagattataggatcac

SEQ ID NO: 251299 - DNA, 98 bp, Homo sapiens
gccacgataggggtggatttccgagaacgagcggtggagattgatggggagcgcatcaaggttcagcagactgtacaggatctttttggcagagcccc

SEQ ID NO: 251300 - DNA, 75 bp, Homo sapiens
ggagtttgagaccagcctgaacaacatagggccaagaaatgaagcttcaggcctgtgaagttggagagcagcaag

SEQ ID NO: 251301 - DNA, 82 bp, Homo sapiens
cctggacatcgatagggatgcagaggatcagaaccggtacctggatggcatgggcgtctctggccgagcctctttttgtgga

SEQ ID NO: 251302 - DNA, 100 bp, Homo sapiens
gtggggttggtgtgattagcttcgcagtctggaaagctttaggagttcacagtagaaaatacggtacatgtccccatggaggatatggcttgggcttgga

SEQ ID NO: 251303 - DNA, 82 bp, Homo sapiens
ccgatccagcctgcggagcctgtggggcaggtgcaaacagctgcacagcaagtggcagaggataaatttgtttttgacttac

SEQ ID NO: 251304 - DNA, 87 bp, Homo sapiens
aaaaacttcgcaatgaaaccaggcgggtaaacatggtggacagaaagtcagcctcttgtggtgacctgagcatctctgcagaccgcc

SEQ ID NO: 251305 - DNA, 82 bp, Homo sapiens
ggcggagcagacctactcgtgcttccccgggcgctgcctggacaggcctgcctgcgtgctgggacatgtctggcctccaagg

SEQ ID NO: 251306 - DNA, 75 bp, Homo sapiens
ctgtgacatccggtactgtgcccaggatgctttcttccaggtgaaggaggtggacatctataccgtcaaggtgga

SEQ ID NO: 251307 - DNA, 98 bp, Homo sapiens
caaccaagtgcgagatctgcgtgaaaactggagtcacatcagaagccgcgcagactatcaccacggctcctgatgcctcagggcctgaagcaaaagtc

SEQ ID NO: 251308 - DNA, 83 bp, Homo sapiens
gaccgccatggcgttcctcaaactccgtgaccagggtgtttctgtggcctgggactggttagcaccaacaagtcctgctcgat

SEQ ID NO: 251309 - DNA, 90 bp, Homo sapiens
tggatcggggacggagagaacacgagcccatcagtgaatctacagacctattttctcaggagctcagcctggccttacttcagtgataaa

SEQ ID NO: 251310 - DNA, 74 bp, Homo sapiens
ctgagtacctgggattataggcatgcaccaccaggtggtagccctcggagaggtaccagatgggactgtggtta

SEQ ID NO: 251311 - DNA, 100 bp, Homo sapiens
tcagacagatcgccggggaggcagcgcgggatcccagcctcaggcgtgcgcggacggtgtgcggagccaaagaaatgtctgaggaccaggaatgtttcaa

SEQ ID NO: 251312 - DNA, 75 bp, Homo sapiens
gacacaggtcaggaagcagaatattccttatatggtgctgttcctataatcagatgttcaagaggaacagcagca

SEQ ID NO: 251313 - DNA, 100 bp, Homo sapiens
gtttctggacgcggatttttggcctcatactctgttatagataaacaaggtgtacattccaagcagagtggccctcatccttcagaatgtggatctgccg

SEQ ID NO: 251314 - DNA, 90 bp, Homo sapiens
gagggctgccatcctgcagactgagaagacccttttgaggacttctttgggaatcgaaggggtccccgaggaagcagaagccgagggacg

SEQ ID NO: 251315 - DNA, 74 bp, Homo sapiens
gaagagccaaggaataaacatgcaatgaacccaaaaggatatttgttcagtcgaatcaaggtgaagaggaaaca

SEQ ID NO: 251316 - DNA, 87 bp, Homo sapiens
ggtcacagtaaggccaaaaatgtgcatactcacagagttagagagagggatggtgctgcttaacacagttgaagaaactacaaaaga

SEQ ID NO: 251317 - DNA, 75 bp, Homo sapiens
tgccggtgtggtggcggcggcggagactgcgggcccgtagctgggctctgcgagatctcacattcttgaaggtgg

SEQ ID NO: 251318 - DNA, 89 bp, Homo sapiens
gacactcggcgagccatcagtgaagccaatgaagacccagagccagagcaagactatgtgtactatgaggggctgcaggacaagctggc

SEQ ID NO: 251319 - DNA, 74 bp, Homo sapiens
ccaggtgtatggagcgccacatctcctgagattatttgacatgcgaggattcatgacagcgcatggacagccag

SEQ ID NO: 251320 - DNA, 75 bp, Homo sapiens
cagctgtgactgaggcagtgcgggccctgctgctttggacatcagacagtgcaggagaagaatgtgatgcggcag

SEQ ID NO: 251321 - DNA, 51 bp, Homo sapiens
gttcttcacccctacaccttggaaaatggtggagtcaatgaagaaagtagc

SEQ ID NO: 251322 - DNA, 75 bp, Homo sapiens
tccaggtcatgaaggagtacttgacaaaggtggagcgaatcaaggagcgtgtggaggagaaagagggaatccccc

SEQ ID NO: 251323 - DNA, 100 bp, Homo sapiens
cagcgcgggtcggagtctgggggttcgcgcccgccgacccgcgccctgctccctctcagcacctgggcggacgactggtcgaattgacaaatcttaccct

SEQ ID NO: 251324 - DNA, 75 bp, Homo sapiens
aactttgtcttcactgggttctctgtgaatggcaagtacataccgagcatcaaatattaaggcacccggagaaca

SEQ ID NO: 251325 - DNA, 83 bp, Homo sapiens
ctggccctggactacctctgcagcaaacggggattcagcgtccgatcctttggaacagggactcacgtgaagcttccaggacc

SEQ ID NO: 251326 - DNA, 100 bp, Homo sapiens
ctgctgtacttcgtctatgtggcgcccggcatagtgagttcgttgcctggctcctagaaattggtgaaatcagcaagacggaagaaggagtcaacttggg

SEQ ID NO: 251327 - DNA, 96 bp, Homo sapiens
ccggcgggaccatgttcaccagcaccggctccagtgggctctcaaagtgtgggatgctgtctcaggagatgaattgatgaccctggctcataaaca

SEQ ID NO: 251328 - DNA, 100 bp, Homo sapiens
ggagatcaacctgaggccgcagatgtcccaggtactaggttttgacaagcttgcatcatgcgtgagtataagctagtcgttcttggctcaggaggcgttg

SEQ ID NO: 251329 - DNA, 100 bp, Homo sapiens
caggcgtgcgcggacggtgtgcggctgagtcagtgctgattctctcaaatagagcttgaaggataaatcttcatttttgtttcaacaaaacttcgaaaca

SEQ ID NO: 251330 - DNA, 83 bp, Homo sapiens
ctggggccaagggacaatggtcaccgtctcttcagcgttccacaaggctgggcgacagagagaagcggtccaggtgctggagc

SEQ ID NO: 251331 - DNA, 96 bp, Homo sapiens
cagcttcccgagtagcagggattacaggactctcacagaaggaggaagaggaggacacttttattgaagaacaacaactagaagaagagaagctat

SEQ ID NO: 251332 - DNA, 100 bp, Homo sapiens
ccgccctgagttcatcaaccaggtctacaacggctccgtggacgagggctccaagccagacaggccgacggtcgcaaggtcctacggtcaagcatccggg

SEQ ID NO: 251333 - DNA, 100 bp, Homo sapiens
gggatcgtgaccgagaccgtgaccgagagcgtgaccgagagcgcgaatatcgtcatcgttagaagagcctccccacaaacagctttgtgggatgcctgaa

SEQ ID NO: 251334 - DNA, 82 bp, Homo sapiens
caaagtcgaatgattcagacttgcaagattgagaggatccagaatccagatctctggaatagctaccaggcaaagaaaaaaa

SEQ ID NO: 251335 - DNA, 83 bp, Homo sapiens
cgggcggtgagcgcccatatgggggttctggagagcggggtgtggggctcacagaacatttcctgcctgttgctcacactctg

SEQ ID NO: 251336 - DNA, 100 bp, Homo sapiens
tggagcacaaaagagtctccgcggtggaggtctgcgttgctcttgcttttcctcgctggggtgtacggttaaatggaagctgatcggcgttcacatggaa

SEQ ID NO: 251337 - DNA, 101 bp, Homo sapiens
ccaggccgtgcgcacccaggagaaggagcagatcaagaccctcaacaacaagtttgcctccttcatagacaagtgcatcctcgtcccttggtgaagcttct

SEQ ID NO: 251338 - DNA, 75 bp, Homo sapiens
gccaccgtggctacactctggaccccaatggcaaaacctgcagccgtacaggtttgcagattccgccagcagcac

SEQ ID NO: 251339 - DNA, 46 bp, Homo sapiens
aagcccaacaccttcccccactggtcccgttcaagaagttcttcca

SEQ ID NO: 251340 - DNA, 82 bp, Homo sapiens
cccaagtgatccattgccgctatgtgggagacatcaccagtgatgatcagtgaatgcttgtgaaaagacctcatttatgttt

SEQ ID NO: 251341 - DNA, 100 bp, Homo sapiens
gcaaatcatgcgctttgcaatgaaatctcgaaggggacctcatgtccctgtgggacacaatgcccccaagtcatggctgagtacgggaccctcctgcaag

SEQ ID NO: 251342 - DNA, 75 bp, Homo sapiens
ttatacagttgaaaagaagaaaaagccatcttacactactcaaaggggaactgtacctggggaatgaattgtagg

SEQ ID NO: 251343 - DNA, 100 bp, Homo sapiens
tgaagctaaagaaatttctacacctacccattggtctaaacttgatccaaagacaatgaagctgtcggaaaaggtaacagaagatggaactcgaaatccc

SEQ ID NO: 251344 - DNA, 90 bp, Homo sapiens
acgtctggactctagggaccctgctgaatagctggggctacaggcgtgtgtcactgcgcccaggattggccatttgatgatggagctcca

SEQ ID NO: 251345 - DNA, 75 bp, Homo sapiens
ctggcctcaagcaatccacctgccttggcctcccaaagtgctgcaattacaggtttcttccaaggtgaaatccag

SEQ ID NO: 251346 - DNA, 82 bp, Homo sapiens
tgagaagctgttcctcgttctcttttttgataataagagaagttggatcccatgacagattctgttgtcacgtctccttaca

SEQ ID NO: 251347 - DNA, 100 bp, Homo sapiens
caccttaaaaacaaaagattgagctgcactgtattcctggaacacgggtctggctgagagaaaatggccagcattttccaagtactgtaaattcctgtgc

SEQ ID NO: 251348 - DNA, 82 bp, Homo sapiens
gggcctccgtctggatttccaaggaagaatttcctctgaagcaccggagagagcaagccacatcagtgctcctggcagatcc

SEQ ID NO: 251349 - DNA, 96 bp, Homo sapiens
cccagaaatacctgcagactcgggccgtggccgcctacagggaggttcccctgaaggatgctaaggaatacgctgaatccataggtgccatcgtgg

SEQ ID NO: 251350 - DNA, 100 bp, Homo sapiens
acgcggacttcatcatccctgtggagattgatggggtggtccaccaggaagcgccgcggagccatcaacagcaagcagctcacctacctggagaaatacc

SEQ ID NO: 251351 - DNA, 83 bp, Homo sapiens
tgcagtacctgcagaaggtctctggagacatcttcagcagcttaaagcttttcaagccaggccaagaagctgtgaagtaccag

SEQ ID NO: 251352 - DNA, 100 bp, Homo sapiens
ctacttcatggctgggtccagcagaaaagaggttaatttcacctaccagtttttgaaaaagaagttctatatatttagccaatttatgtatgatgaacac

SEQ ID NO: 251353 - DNA, 90 bp, Homo sapiens
cagttgattatgccagccagatgcagtttggttgtaaatgtcatgcagagagactccatcccatcagaagtagactatgaaacaaggcag

SEQ ID NO: 251354 - DNA, 75 bp, Homo sapiens
ggattccaagtaactcttatttgaatgttggctaccagggtatttagcctagttggcaagcgagcaatttccacc

SEQ ID NO: 251355 - DNA, 98 bp, Homo sapiens
agaggggagcgaccctggggaccgactctggggaccctcgccgaagagcccagccctggggagcccctgtggaagtggagtccttcctggtccacccc

SEQ ID NO: 251356 - DNA, 83 bp, Homo sapiens
caagaatattaaggctctccgtacagacgaaaagtatggcgttttctgttctaacattaaaaaccatggtctccagttccatg

SEQ ID NO: 251357 - DNA, 90 bp, Homo sapiens
gagattttgatgtggatgatgccaaagttttattagacctgtcgcgaaatcgcctttcagaaattcctatagaagcatgtcactttgttt

SEQ ID NO: 251358 - DNA, 75 bp, Homo sapiens
gggagtcggggatagtgtcatcggttcggtaaagtttctgttctctgggaatctgactaagcacatgaagtcgaa

SEQ ID NO: 251359 - DNA, 82 bp, Homo sapiens
agacaacagaaacagaaacgattgtggaaacaggttattgaagcaaacctagatggagaattgaatttgaaaatagaaactg

SEQ ID NO: 251360 - DNA, 71 bp, Homo sapiens
gtaatgctggtggtctgcatcaccaccggatcaacttcgacaaatagatatgggttgcttttcctgtcatt

SEQ ID NO: 251361 - DNA, 90 bp, Homo sapiens
ggaatttgtggctggctggatctctggtgccgacttcctggtgacggaggtggaaaatggtggctccttgggcagcaagaagggtgtgaa

SEQ ID NO: 251362 - DNA, 98 bp, Homo sapiens
ccaaatcacaagcaacaagacacatgcggacaaaatggaaaaggagaaaacaattttggaagctcaaagatttgttgcttcacctctagcaaaatcat

SEQ ID NO: 251363 - DNA, 102 bp, Homo sapiens
cctccacttacgtggaggagctcaaggggatgtcgctgctggttcgggcagagtccgacgttgttgacctcctgtactggagagacattaagaagactggag

SEQ ID NO: 251364 - DNA, 108 bp, Homo sapiens
ttcaccaaataagctatatactttggttacctatgtacctgttaccactttcaaaagacacattcagctaacgtattttagcaggtggagtgaggttgaagattcctg

SEQ ID NO: 251365 - DNA, 75 bp, Homo sapiens
ccagcgcccctggtaactgacaaggaggccaggaagaaggttctcaaacaaggtccttatacctttagcatctgt

SEQ ID NO: 251366 - DNA, 82 bp, Homo sapiens
gtggatcgctgtgatcgtcacttggcgggaggcagcaccgggctcttgatggacttggcagccaatgaaaaggccgttcatg

SEQ ID NO: 251367 - DNA, 100 bp, Homo sapiens
aggggtcttcggctagcaagttcaccagcatccctgcagccttctggtataccatcgtcaccatgacaacactagggtattctttaggtgatgctagaag

SEQ ID NO: 251368 - DNA, 50 bp, Homo sapiens
gtcgaaggccgtgaggtatttttctaagattgaaaaggccaaacctatta

SEQ ID NO: 251369 - DNA, 83 bp, Homo sapiens
acgggcacgctcaccaccaatcagatgtctgtctgccggaatctgaatctgaagctgaagaaggtgactgaattttgaaacta

SEQ ID NO: 251370 - DNA, 101 bp, Homo sapiens
gcttggagcacttcctattccactggattgggaaagaccatggcaggatggtgccatgacaatggtgtgaactacaagattggagagaagtgggaccgtca

SEQ ID NO: 251371 - DNA, 75 bp, Homo sapiens
ggggaaaggggcagcatgatggtctgagatgtggggactggatatgcacattttgtagagatattggaaagccag

SEQ ID NO: 251372 - DNA, 74 bp, Homo sapiens
ttacgccgtctccaagatgtagctaatgaccgtggttcccactgaggtggtcgttctcgttaccggaccacttc

SEQ ID NO: 251373 - DNA, 76 bp, Homo sapiens
caaaattatcaacaccaaaaagctttctgctaggggaagttgccttaaagaatagacaagagctgtatgcactacc

SEQ ID NO: 251374 - DNA, 96 bp, Homo sapiens
cgaggcctctgggccctccaaaaagacggccaagctgcacgtggccgttaaggcagattattgccagagggctgcttgatatcttccgggacttcg

SEQ ID NO: 251375 - DNA, 98 bp, Homo sapiens
tgcagcagagcgcggcgcagaaggagctctgccagtgccggccgggagaaggcaattgctcctgctgtaaggagtgcatgctgtgtcttggggccctt

SEQ ID NO: 251376 - DNA, 96 bp, Homo sapiens
ccagaaggtggtgcgcttcggggacgaggtgatgtcagagtttaataacaacttccggcagcagatggagaattacccgaaaaacaaccacactgc

SEQ ID NO: 251377 - DNA, 100 bp, Homo sapiens
ccccaaactgtcacagaaagagctgttaacacttcctagataacgggagttgataccaagttgaaattcactcttgagccatctttaggtcaaaatggtt

SEQ ID NO: 251378 - DNA, 98 bp, Homo sapiens
agaacacggagattagtttccagctgggagaagagtttgatgaaaccactgcagatgatagaaactgtaaggaattacatgaacgacagccttcgcac

SEQ ID NO: 251379 - DNA, 75 bp, Homo sapiens
atgcatccgaactgtcccctacacggacccagatcatgccagaacaccttccaccatgaccacctcagcaagttc

SEQ ID NO: 251380 - DNA, 75 bp, Homo sapiens
ctgtagttcagcacttgatccatctgtgtgaggaggacaagaagacctcattctttcctatgagcctgttacaag

SEQ ID NO: 251381 - DNA, 83 bp, Homo sapiens
acgagatctccgaccagtctgggggcgctggcggcctgcgcagccacctcaaggttcatcatgcctagtggcgtataagaaga

SEQ ID NO: 251382 - DNA, 96 bp, Homo sapiens
gagatatggcgcaactgcggcgcttgtcgagatgtccacagaaggaggatttggtggtactagcagcagtgatgcccagcaaagcctacagtcgtt

SEQ ID NO: 251383 - DNA, 75 bp, Homo sapiens
ggagagcgaggcctgagcctctgcgtctaggagtgatcgacacaggaattgccctatttgtcgcctacagatgac

SEQ ID NO: 251384 - DNA, 75 bp, Homo sapiens
tgttctagagcagggatcagcaaacttgctgtaaagagccaggaaagtgatgaagcattgggcccaacaatgatg

SEQ ID NO: 251385 - DNA, 75 bp, Homo sapiens
cggctccagattgtcaacaacacgcgtccgagctgggccacagcctgaacgagaacgtcctcaagcctgcgcagg

SEQ ID NO: 251386 - DNA, 90 bp, Homo sapiens
gtggcaatgaattcttctgtgaaggtactcactttgtccagttatgctgccaaagaaatattcctctgctgttccttcaaaacattactg

SEQ ID NO: 251387 - DNA, 75 bp, Homo sapiens
gccagttgcttgatcaggtggaacagattcagaaggagcaggattaccaaaggagtgtgatgctggatcttgcca

SEQ ID NO: 251388 - DNA, 101 bp, Homo sapiens
tctgagatctatggcctaatggttgatgacaacaagaaactaggagaatgggtaggcctttgtaaaattgacagagaggggaaaccccgtaaagtggttgg

SEQ ID NO: 251389 - DNA, 50 bp, Homo sapiens
atcaagtatatgactgaagaagcttgaaactaatctgttgtactctttct

SEQ ID NO: 251390 - DNA, 75 bp, Homo sapiens
gttgtcttcaattaaaaaatttattaaaggaagcacacctaagttataggtaaacattggaaactccatagaata

SEQ ID NO: 251391 - DNA, 100 bp, Homo sapiens
ggcaatggcacaaagttctctcgatcagggcatacatctttcttcgacaaagggtatgttaagctactgcgacagatacagcgaaggcataaaacatgtc

SEQ ID NO: 251392 - DNA, 74 bp, Homo sapiens
cgggcttccttgccctgtccgggagtctctctctgtcgcccaggctggaatgcagtggtccaatttcagctcac

SEQ ID NO: 251393 - DNA, 97 bp, Homo sapiens
cccggtcggccgccgctccccgcctagtccacggagctcaatggcggcagtcgcgctgagggactcggctcaggcagttgcagtggtgcagaatggc

SEQ ID NO: 251394 - DNA, 100 bp, Homo sapiens
tcgctctggccgacgagtggagaaaaaaaagtttgccaactcctgctctagattgatggttacaaagtctgacagaggatacagttacagggacatggca

SEQ ID NO: 251395 - DNA, 83 bp, Homo sapiens
cagcattggaaactctgtttacgttattatcaacacaggaccagataagccaatggacacgtcagtgttatctgaagaaggag

SEQ ID NO: 251396 - DNA, 100 bp, Homo sapiens
gcgacggtggcggctctcggagccggcgcgaatccggcccccgcagcgggacccgggtgtgacgtatgcagccaaaggctactttgacgccctggtgaag

SEQ ID NO: 251397 - DNA, 100 bp, Homo sapiens
cagctccacgaaaggcagccgcggatcgccgcgctcagcgacaaacaacacttctccaccgacccagtggccgcctccatcatgaagatctacacgttca

SEQ ID NO: 251398 - DNA, 100 bp, Homo sapiens
attcatttcaggctccttctaaatggccaaggttggaagctgtgtactgtgggtgttacccactttgtcctaaagatttggtttatcccgaaatatttcc

SEQ ID NO: 251399 - DNA, 75 bp, Homo sapiens
gccagagtgacagttctcagaattacattgaggcacagttggtggatctgaaatctgaactgacagaaacccaag

SEQ ID NO: 251400 - DNA, 82 bp, Homo sapiens
tacctcaacgccgtgccgcccccctcccgcccccagaccgggaagcagccctgtgggagatggaagagcaccagctgcagga

SEQ ID NO: 251401 - DNA, 49 bp, Homo sapiens
gggaggtcggcggccccaaaagcttgcagccaatttactggagcaggga

SEQ ID NO: 251402 - DNA, 84 bp, Homo sapiens
actcaccgctctggccagggtgcttttggaaacatctccttaggtgatgcacagtccaactacctgctaaccaccgccgagaac

SEQ ID NO: 251403 - DNA, 100 bp, Homo sapiens
cgaccccccggcgcagcagcatcatcaaggattctgagaaacgaacccctcttcatgtggccgcatttctgggagatgcagagatcattgaactcctgat

SEQ ID NO: 251404 - DNA, 75 bp, Homo sapiens
gagaaagccatagaagaaggaataccagctttcactttgggagctggtgaggtggccaacttcgctgcgtatgcg

SEQ ID NO: 251405 - DNA, 73 bp, Homo sapiens
atactctactagcaaaagctttgcgtggcgttctaaccatcagaaactgttgaatgcatgacctgcaatgggg

SEQ ID NO: 251406 - DNA, 90 bp, Homo sapiens
cggctcctgcaaatgcaaagagtgcaaatgcacctcctgcaagaaaatctaccctgatgggagagtctgcatttccatcctccacgcgcc

SEQ ID NO: 251407 - DNA, 82 bp, Homo sapiens
aacggatgatttatctggtgacagaatatgctagtggaggggaaatatttggcagttgtgaaaaacttcaggacaaaaatgt

SEQ ID NO: 251408 - DNA, 100 bp, Homo sapiens
ggtggtggtggtgtcttcctgtctcaacgatacctattttctagtgctgagatcctgagacaatgcctgattacatcaaccccagagccgtgcagctggg

SEQ ID NO: 251409 - DNA, 100 bp, Homo sapiens
gttggaaattccatatatgactcttcaatgaaacttgtgagggaatttgagcccatgctacaagtgaaggtttgggagttgagtgatattgaccatgatg

SEQ ID NO: 251410 - DNA, 95 bp, Homo sapiens
tgcaacacattttcctatacctctggtggctgtacttttgatgatggtccaggggcctgtgattaccaccaggatctgtatgatgactttgaatg

SEQ ID NO: 251411 - DNA, 100 bp, Homo sapiens
ctcaaagaagtttgtccttctgctattgatcctgaaggtcagcttttgccaactgttttcaaatcacatgcatgggggatcttacacacactccttgaga

SEQ ID NO: 251412 - DNA, 100 bp, Homo sapiens
ctacccctaccccactgacttcctgggtcccctccctgccaaccccgtcaaggtggtgaaattgcctctacctttgatcacccagaactggtgaagcttg

SEQ ID NO: 251413 - DNA, 87 bp, Homo sapiens
ctgacagattttggtctgagtaaggagtttgtggctgatgaattccgccatggagtcatagttgcagctgactccagggctacagcg

SEQ ID NO: 251414 - DNA, 75 bp, Homo sapiens
ggggagatgaacccaacctagtgggtgtaatacatcatgaactgcaggcatgactttgttcgacgagaccggcca

SEQ ID NO: 251415 - DNA, 75 bp, Homo sapiens
cgcagtaccaccttccagagatgttcatccacataaaacttatttcacagtagctgaaaaagggagttttccaga

SEQ ID NO: 251416 - DNA, 83 bp, Homo sapiens
agaggctggactcggattcgttgcctgaggaaggatttgatgccctggatccctttattcccatcctggtttccaactataac

SEQ ID NO: 251417 - DNA, 142 bp, Homo sapiens
aaggagtgtggactttttgaatttcaagaacagtaaagttggaacacagcagagggtgtgtaataaaatacaggaaacttggatttaactggccagaagcaggtattcaaagcagagaacaatccctgggtgacccccattg

SEQ ID NO: 251418 - DNA, 100 bp, Homo sapiens
ggacccaggcctgaccaagtccccggcctcagcaggcgatcatgttggcaggcttggatcttctcggtgtcctcatgacttctcttgtggaccatgtccg

SEQ ID NO: 251419 - DNA, 51 bp, Homo sapiens
gcgctgtattggggtctctgcaggggcacgtagagacggggtttcaccgtg

SEQ ID NO: 251420 - DNA, 132 bp, Homo sapiens
agggagaaccaggagaaagaggggaagatggtctgcctggaaaaccaggccttcggagaacagcagcagcgaccagaggcaggcctgtaagaagcacgagctgtatgtcagcttccgagacctgggctggca

SEQ ID NO: 251421 - DNA, 96 bp, Homo sapiens
tttgcttcatcacaagatcttggaaacattatataccttggggaaagctgatgttccatcaatggtgagcaccagcctgaatgcagaagcgctcca

SEQ ID NO: 251422 - DNA, 100 bp, Homo sapiens
gccttcggggccccagcggcggcggcgaagagcccgccctgtcccagtaccaggttgtacgtggacactataaaggtcagcaaattggcaaagtagtcca

SEQ ID NO: 251423 - DNA, 75 bp, Homo sapiens
gcggagccgtgggacgagggcggcgctcacagccagcgcctggtcaacgtgaagtcccggctgaagcaggcgcct

SEQ ID NO: 251424 - DNA, 89 bp, Homo sapiens
acgtttagcatcagtgactcacaaatcagcaacacagaatttctgcaagtaattggtcaaaatgcagatcttcgtgaaaacccttaccg

SEQ ID NO: 251425 - DNA, 83 bp, Homo sapiens
agttgagtcactggttggctttgagatggatattactcacttggatggtcacaaggttgttcggaatcctataattgaaaaac

SEQ ID NO: 251426 - DNA, 100 bp, Homo sapiens
gcacctttcggcttctgagacggcggcagcagcggcattcaggatcacacctcgacacccaacccctgaaccccacacactctgccatgcacacaggagg

SEQ ID NO: 251427 - DNA, 100 bp, Homo sapiens
ggggctcccaggacctccactaatcaccagaacaaaatgtgcagcatttaaatcaaacggtattgagatggattgggttatgaaacataatggtccaaat

SEQ ID NO: 251428 - DNA, 100 bp, Homo sapiens
atgtgcgacaaggagttcatgtgggccctgaaaaacggagacttggatgaggtgaaagactatgtggccaagatacactctgtgcagttttagagagaga

SEQ ID NO: 251429 - DNA, 100 bp, Homo sapiens
gaagccatcgcctggccccggctctctggaccttgtctcgctcgggagcggaaacagcggcagccagagggatatgatgatacatacgcagaacaaagtt

SEQ ID NO: 251430 - DNA, 90 bp, Homo sapiens
gccacgtccccagccgtgaagctgcatgaagagacgctgacctacctcaaccaaggtacacttcatgttggtgatgaaattcgagaaatc

SEQ ID NO: 251431 - DNA, 74 bp, Homo sapiens
tagatgataaaatcatcaaaagagccaatgagaacgtgcgcatcgaccccagtagcctgtccttcaacatgtgg

SEQ ID NO: 251432 - DNA, 125 bp, Homo sapiens
aaaccgtggctgctcgataaatcagacagaacagttaatcctcaatttaagcctgatctaacccctagaaacagatttatttgaggttcctagattatcaaatggagcactcaaatgaatgcaag

SEQ ID NO: 251433 - DNA, 74 bp, Homo sapiens
attgctgtaaaaaatttcaggattggtactacaagagctccttaataagcatttatagtcagtttttggcagca

SEQ ID NO: 251434 - DNA, 82 bp, Homo sapiens
gcctctgtgtacgctgaggggggaggtgtggacactgccagcggctgcagccgacttggaatgacctgggagacaaatacaa

SEQ ID NO: 251435 - DNA, 83 bp, Homo sapiens
tggctttctgcgccatcctgcaccgccaccggcccgacctcatgctgaaactgccgccaaccggatctgtaaggtgctggctg

SEQ ID NO: 251436 - DNA, 83 bp, Homo sapiens
ggcggagatcacccccacaaagaagaggtgcagaccatgaattacgtggggcagttagccggccaggtgtttgtcaccgtgaa

SEQ ID NO: 251437 - DNA, 98 bp, Homo sapiens
ccgtacgtggccctcgatgtgctctgcgtgttgctggggcccggcctgccccgcacctgagctgccctcgcccccctctgctggctacagccctgcag

SEQ ID NO: 251438 - DNA, 82 bp, Homo sapiens
tgcgagagcctcctcacttggacacagcatctactcagcgtgggtcacctctgtgaacatcactgactgcaagcctccctca

SEQ ID NO: 251439 - DNA, 50 bp, Homo sapiens
ctgttccagaactgctggaagctgaggacctattgggcccatgaagaaag

SEQ ID NO: 251440 - DNA, 76 bp, Homo sapiens
ggacgcagcaagcggggcgctgtgtccccaagctccccgtcctcgggttgaattgaccaaagcaatggtgatggag

SEQ ID NO: 251441 - DNA, 98 bp, Homo sapiens
aaacagtacaactgcctccaccagaggaaaatagtatgggaattcctattatggtgtggacgatggtgaggacattccccgtgagatgctgatgggga

SEQ ID NO: 251442 - DNA, 74 bp, Homo sapiens
tgcggggtccggtgtccacgcagaaattttgtagccaccttggctaatgggatgagcctccagccgcctcttga

SEQ ID NO: 251443 - DNA, 90 bp, Homo sapiens
gattgataaacccagctgctacagactgggatcagatccagacaatagactccttgctcaggaaaggtggctttaaagctccaattacca

SEQ ID NO: 251444 - DNA, 82 bp, Homo sapiens
cagtgacgggtctggagtgcgtgggggaccggctgttggcggatcaggatcctcatgaccagccaaagagaagaagaattag

SEQ ID NO: 251445 - DNA, 90 bp, Homo sapiens
gtgtgccctaagcacacctggagcaacaacctggcggtgctcgagtgcctgcaggatgtgagggagatttctcatgggcataagaaagaa

SEQ ID NO: 251446 - DNA, 100 bp, Homo sapiens
gtctaattgaagccaacggagaactcaaggtcttcatagaccagaaccttagtcccgggaaaggacggctctacatttggcctgtgccaatggtcatcca

SEQ ID NO: 251447 - DNA, 75 bp, Homo sapiens
tcagcaacgatcgtggactatctgggcttccatcagctgagcttcagtcattgtctattcctggaacttaccaag

SEQ ID NO: 251448 - DNA, 100 bp, Homo sapiens
tctgaatctaacagaggaagagacaaacagaaaccatcaattattgtttcaggtggaatgaatcttacttgttgaatatcttctggttactagttggatt

SEQ ID NO: 251449 - DNA, 75 bp, Homo sapiens
tgtacctgttaccactttcaaaatcggatgtcatggatcagaatttgttaaatttcctcccagaacaagaacatt

SEQ ID NO: 251450 - DNA, 89 bp, Homo sapiens
cgtgagcgcctcgcctggatgtgagtttcagccagattccagaatgactatcttgacttacccctttaaaaatcttcccactgcatcaa

SEQ ID NO: 251451 - DNA, 75 bp, Homo sapiens
gacagaggcaccccggacagagacgtgaagcactgaatgtgccagatgcaattaaaaagtgtcagagggctggaa

SEQ ID NO: 251452 - DNA, 82 bp, Homo sapiens
tttggaggtggaaacactgcctgggaggaagagaatttgtccaaatacaaagacagacatgtagactgccaaagtgtatggg

SEQ ID NO: 251453 - DNA, 74 bp, Homo sapiens
caccgccgaggactccagcacaccgagggggaacgcccttttgcttgtgactggcagggctgcgacaagaagtt

SEQ ID NO: 251454 - DNA, 100 bp, Homo sapiens
ggaagaaaggagaaaacagagatcctatcagatgaccttacagacaaagcagagataccccatgtttccccatcactcgaggagtctgggcagagactgg

SEQ ID NO: 251455 - DNA, 98 bp, Homo sapiens
ccaggtgccagatgccctcgagtgggaacagcagaatcaaggcctgggttgaaattatccaatgacgaaatcaaacgggcaattctaacaatggacga

SEQ ID NO: 251456 - DNA, 75 bp, Homo sapiens
atgaaacatcagttcttgatcctgatgagcttctgcagaaagccgtcattacacctgattttgaaaaaaaccact

SEQ ID NO: 251457 - DNA, 100 bp, Homo sapiens
aagaggtcagatgatgacagctgtgtccttaacaaccaggccccagctacttttccaggtatgtgggagagaacaataacaataggaagtgctggaaaga

SEQ ID NO: 251458 - DNA, 100 bp, Homo sapiens
gacaatctcctcagggaaggggcagcacaatcagtgtgcgtgtgaccaccatggatgcagagctggagtttgccatccagcccaacaccaccgggaagca

SEQ ID NO: 251459 - DNA, 75 bp, Homo sapiens
ccgctggagaggggctcggcgcccggcggggactgcagggatccaggtccggcacgatcaagacccaggctacat

SEQ ID NO: 251460 - DNA, 80 bp, Homo sapiens
gctgtgggtgctgggacttcccgtccgcggcgtggagggccccgagcattcctctgattcagaatacactctctcagagc

SEQ ID NO: 251461 - DNA, 100 bp, Homo sapiens
agatgaaccaacgttagaagcagcctggcctcatctacaggtgaagaggacaataccagcgtcgtctggttttggctgcacaaaggcgaggcccagcgat

SEQ ID NO: 251462 - DNA, 82 bp, Homo sapiens
cttggtttcgggatctcggtgctgcagacggcgagacctcctgcacagggaaagcaggcaggatgggagagtcgccgataga

SEQ ID NO: 251463 - DNA, 100 bp, Homo sapiens
gccagaccgtggaagatttaacgaatggggttgtgatggcccaggttcttcaaaagatgctcctggatttggatttggaattgcaatatctggtggacga

SEQ ID NO: 251464 - DNA, 82 bp, Homo sapiens
gtgtaaaacaaaaatattatggtctttgtgcacatttacatcaagcagtgattccagcagtagttcaagtgatgattctcca

SEQ ID NO: 251465 - DNA, 50 bp, Homo sapiens
ggggtgagagactatagcaagcagccaagttctatagaaattttagagta

SEQ ID NO: 251466 - DNA, 138 bp, Homo sapiens
tacaactcagatcttaagtagtgatatttctcttttgtctgcccctattgtaagtgcagatggaacacaacagtaccaaaagaattggtggagctccatttgaagctgatgaggaaaattggcaaatctgttactgca

SEQ ID NO: 251467 - DNA, 90 bp, Homo sapiens
ggcccggcggggggacgccgctgctgaacggggctgggcctggggctgcgcgccagtgggctcgggatgagtttgaaggcctcttcaagc

SEQ ID NO: 251468 - DNA, 83 bp, Homo sapiens
tactacctctggccccgagatcagaatgccgacctgcctagagctggaacgttacctccagagcgagccctgctatgtttcag

SEQ ID NO: 251469 - DNA, 83 bp, Homo sapiens
acctcatcccctggatgggggaccacaagatcctcatcgacagtttgctggcctagacctgaactcttcagataatcagagtg

SEQ ID NO: 251470 - DNA, 87 bp, Homo sapiens
aacagaaccgacttctccccttgtggaattacaagagatttcgactgtggaagcatcaacaacagcaacttgtgattggcggtgacc

SEQ ID NO: 251471 - DNA, 80 bp, Homo sapiens
agggggacggggaccagcagctgtcgccgccgctctcaggaaactactaaagttcctggggaagcaaagtagaatttcat

SEQ ID NO: 251472 - DNA, 82 bp, Homo sapiens
caatctgcatgattcctttttttgtatctgtcccccacagtggaagcggagatccttccggactcgcaaaacatgcaagcga

SEQ ID NO: 251473 - DNA, 75 bp, Homo sapiens
gcgcggggaccgctgtgctctcggagagaagatgactgaggaggaggtggagaccgttctggcaggacacgagga

SEQ ID NO: 251474 - DNA, 100 bp, Homo sapiens
cgcaccacttttgtgtccaggcataagaaatttgacggtatgcaaccactcatgtattcggttcaggaagcattaaatgccagaccatggtggattcgta

SEQ ID NO: 251475 - DNA, 100 bp, Homo sapiens
ggtcggggaggagaccatggctgactacctgctgtacaccctcaacaaacaccagcgctttggccatcaggaaatatggccgagattttcaggcaatctc

SEQ ID NO: 251476 - DNA, 82 bp, Homo sapiens
gcagcgggagctggacggcgagcgcgagcggcgcgagaaaggtcctcactgagcagcgagtcgtcccccgtgtcctctccgg

SEQ ID NO: 251477 - DNA, 80 bp, Homo sapiens
gaagacattcagcgagaggaacaccatggagacccacaagctcatccacacagagccatgcggctccctgacctgagacc

SEQ ID NO: 251478 - DNA, 90 bp, Homo sapiens
ccaagagttgaagatgtttcaaggagaggcccagcatatacaaaggcatggaagtatgaaaatgaaaatgtatggagatctagatgtctt

SEQ ID NO: 251479 - DNA, 82 bp, Homo sapiens
actgagtatgggatctgatgatgctgcctacacacaagatggagcagcatattgtatgggacgtatgaattctgactgttgg

SEQ ID NO: 251480 - DNA, 98 bp, Homo sapiens
aaggatataaagacaagctttccatcattggtgaggtgctatctcggagacacatgaaggtggcattttttggcagggtaaaggagctggaagtgcga

SEQ ID NO: 251481 - DNA, 87 bp, Homo sapiens
ctccggcgtctgcgcttccccatggggctggcctgcggcgcctgggcgctctgagcaaagaatggccgagtggattctgaggaccgg

SEQ ID NO: 251482 - DNA, 98 bp, Homo sapiens
gccctgaaaagtaactggaaagtcacagaccgttctggcaagtggagttgatgagaaacagcttcagctttagctgcagctgcctctgttcagccact

SEQ ID NO: 251483 - DNA, 100 bp, Homo sapiens
cgggccatacccaataaccaggtgcttggcaaaatcgagcgggccattgaaagtcctacctccatctccgtgggccccagcaccagccgacggcccgcag

SEQ ID NO: 251484 - DNA, 96 bp, Homo sapiens
tggcacgctctatagccaaggaaggcttcgagaagattagcaaaggtgctaatccagtggaaatcaggagagggcgtctctggccgagcctctttt

SEQ ID NO: 251485 - DNA, 75 bp, Homo sapiens
tatcaaatgccataaaagaatttggtttttctgggaaatctgaaatagagtactatgctatgttggctaaaactg

SEQ ID NO: 251486 - DNA, 100 bp, Homo sapiens
ctagggaggcctattgtttagatggaatgtggactacaccaccattgtgtttagaaggagaatgtcatgttccaattttagaagccaatgtagatgctca

SEQ ID NO: 251487 - DNA, 100 bp, Homo sapiens
ccaagatctgtgctgaccacaggaattggatctactagtgcaggagggaaaacccctgatcctaaaatgaatgctaggacttacatggatgtaatgcgag

SEQ ID NO: 251488 - DNA, 74 bp, Homo sapiens
ctactggacatgtcagtgtcctttcacacccatgtgaaagaggtagaacctctgctagccagacaactatatta

SEQ ID NO: 251489 - DNA, 100 bp, Homo sapiens
cttggaggaggtatgcctggactgggccagtgaatggtagtgtctagaaagggtatgtcccttcaagagagaggtgccaatgtccaaccggcctaataac

SEQ ID NO: 251490 - DNA, 100 bp, Homo sapiens
gttcagttcgtcatggggctgtttggaaagacccaggagaagccgcccaaagaactgactctttttgatcagaacaatgctgcaaaaaaagaagagtcag

SEQ ID NO: 251491 - DNA, 116 bp, Homo sapiens
ccatcctgccgtccttctccactttcgccagcccgtgccgcgagcgcggcctgcaggaggaatactcccccagttgcaagaggcgcaggaccgtggaagacttcaacaaattctgc

SEQ ID NO: 251492 - DNA, 82 bp, Homo sapiens
ccagcttcggaacaagagaccctggaagatgatccctatgatcttgaagatgtttctgcacagaaatgagggaaatacaaag

SEQ ID NO: 251493 - DNA, 75 bp, Homo sapiens
ccctaactctatgattcctgcttttgaccaaaggaatgggttacggggctatctgatgggttagagtgcctttga

SEQ ID NO: 251494 - DNA, 100 bp, Homo sapiens
atgagaatgacagctgtgataaaaaaaaaattcatctgggcggtatctggaacttggagtcggtgatggaggcaacgagcttgggatgggtaaagtcaag

SEQ ID NO: 251495 - DNA, 83 bp, Homo sapiens
cgagtgaccgagaccgcggccgggaccgaggggtggctgttgcaccacgccctccctcctgcccctgaggcccggaagccagg

SEQ ID NO: 251496 - DNA, 83 bp, Homo sapiens
ccgaaatgatccgcctgcctcagcctccaaagtagctgagactacaggtacttggaaaaatggacaaggattgtgaaatgaaa

SEQ ID NO: 251497 - DNA, 100 bp, Homo sapiens
tgtgcaatgtttagccaacccaaattaccttaattgcccctcctcaagtgtctggctgaaagatgccacccagggaagggaactcgggctagctaaggag

SEQ ID NO: 251498 - DNA, 74 bp, Homo sapiens
cctcctccgtttctgtatccccacgaggcattcctgcatcgcatccggcagaacgtggccgactcagtggagaa

SEQ ID NO: 251499 - DNA, 75 bp, Homo sapiens
aaaaacatgattacagggacatctcaggctgatctttgctggaaaacagctggaagatgggcgcaccctgtctga

SEQ ID NO: 251500 - DNA, 50 bp, Homo sapiens
gaagatcaaagatgccaagaaaccctaaatgactgctgtccatgcaggca

SEQ ID NO: 251501 - DNA, 75 bp, Homo sapiens
ttcgtctctctgaagctatggctcggatgcactgctgtgatgagaaatttgaagatgctaaacttgctgctgcca

SEQ ID NO: 251502 - DNA, 74 bp, Homo sapiens
gagccccatattttgcagcaatctcagctctcaaagtggctgtggaaaatctctgttctcacaaagtctcccca

SEQ ID NO: 251503 - DNA, 97 bp, Homo sapiens
cggcgacgccggcggctgccggggcggcgaggcgcgaggagctagggcgccctgcgtccggcagaggaggcgagcatcccgctcaggtgatgaggaa

SEQ ID NO: 251504 - DNA, 80 bp, Homo sapiens
ccgggggcgcagggaaggagggcgtccgagtcaacaaccgcttcgagctggattatatctgtccaagatgcgagtctggt

SEQ ID NO: 251505 - DNA, 87 bp, Homo sapiens
ggcattcgtaatctcctggaaagctaccatgttcctgaattgattaagaaagctgccttggaagacacactggcagaaacggaggcg

SEQ ID NO: 251506 - DNA, 75 bp, Homo sapiens
ggcagaggtgatgtctgggagcccttccttgacagcccgggccgagaagttcccagtgacctgacagcagaggag

SEQ ID NO: 251507 - DNA, 75 bp, Homo sapiens
cgccgacccgccgagcaaaatggtcccttcaccgatgttgtcaccaccaacctaaagcttggcaacccgacagac

SEQ ID NO: 251508 - DNA, 75 bp, Homo sapiens
tgatgaagatgatgacgatgatgatgaagaggatgatgatgaagacatatctggggatcgtactggaaagaaggc

SEQ ID NO: 251509 - DNA, 101 bp, Homo sapiens
ggtagtggagatcctgcaatctgaaaagcagactgaaagcttcgccgacacgaggtgaccatctgcaattacgaagcatctgccaacccagcagaccatag

SEQ ID NO: 251510 - DNA, 101 bp, Homo sapiens
gccccgcgtcatgcggctcctcggctggtggcaagtattgctgtgggtgctgggacttcccgtccgcggcgtggaggatatcattctctgctggaactggg

SEQ ID NO: 251511 - DNA, 75 bp, Homo sapiens
catcttccaggaagtgcatgtacagaagggagttaagccccaagccaaggcagccaaagctcctcctaagaaggc

SEQ ID NO: 251512 - DNA, 100 bp, Homo sapiens
cttcttcagtgcactagataagcagcacaatgaggaacagagtggtgacgacatggaggatgaaaaggaagatagtaaagttatacctacagaatgtgcc

SEQ ID NO: 251513 - DNA, 98 bp, Homo sapiens
gaaagtttccccccggccgccggcgggatttggcgcggggtccggcagccgccgctggaagggggggccctcagcctcttggccttgaacgggctgtt

SEQ ID NO: 251514 - DNA, 83 bp, Homo sapiens
ggaacccttcgctggcgggagcgcggttcggggccgcagaggtttttagaacttcagccataaaaatgggcagaattttcctt

SEQ ID NO: 251515 - DNA, 75 bp, Homo sapiens
gaagctctacgctactgccatgataataacataattcacagggatgtgaagttctggagaccagaaggccaaaat

SEQ ID NO: 251516 - DNA, 110 bp, Homo sapiens
aaatcgcttggttaaaacctgacacttttaacaggtattcaaaacctttgaccacatggcccgtcaggatgatgagaagagaaggcaggaacttgaagagaaaatcagaa

SEQ ID NO: 251517 - DNA, 100 bp, Homo sapiens
tccgcttcctgcgtatcatccccagcatgaaggacgaggcacggatccagaaggtgaccaagcgtctgcacacgttagaggaagttaacaacaacgtgag

SEQ ID NO: 251518 - DNA, 75 bp, Homo sapiens
ccagctcatgggcacggctcgggacggcacgttgcccctggcctcgcaggagtcggccgtggtggaggacctgct

SEQ ID NO: 251519 - DNA, 100 bp, Homo sapiens
tgtgaacgtaatcaaaccctggttcaaactgcctggagccggtgaaacctgaagaaggcagagatatggcaaacaggattggcgcttttgggtacatgga

SEQ ID NO: 251520 - DNA, 100 bp, Homo sapiens
tttgtttttttcgtaaacatctgggtgtatatcaaacggcaagatgtccagtaatgtcccggcggatatgccgtcatttcaccaagctgataatgttcgg

SEQ ID NO: 251521 - DNA, 100 bp, Homo sapiens
cctgggaccacacgcagaacagccggcagctgagcctggtggcctccgttctcttggcccaggtacacctgccgtacccttttcgaacgccacaaactac

SEQ ID NO: 251522 - DNA, 75 bp, Homo sapiens
cgtgtttccttccatcgtcgggcgccccagacaccaggatgatcggctgaatgtaacagaggaactaacgtccaa

SEQ ID NO: 251523 - DNA, 100 bp, Homo sapiens
cgccattgctgcccagcagctaggcatcaagtacatcgggatgaggaatgagcaagcgtgctttactgtcctgtgcgaagccatggatgggaacagccgg

SEQ ID NO: 251524 - DNA, 95 bp, Homo sapiens
tctagatcaacaatcaaagacaatatcaatgacaaactgacggaaaaggagagagaaaatgcactcggtgatggaaagagagccactattctgaa

SEQ ID NO: 251525 - DNA, 89 bp, Homo sapiens
cgcgtgtcctcggagcgcggtccctgtattggtctcctgctcctagagtgtaaacaggaacatcgataagtagtgtaaaaacttgcaca

SEQ ID NO: 251526 - DNA, 97 bp, Homo sapiens
tgataactgcgcggcattctttgagggacccccattcaagttcaagttcacaattggcgtcaaaatgcagatcttcgtgaaaacccttaccggcaag

SEQ ID NO: 251527 - DNA, 100 bp, Homo sapiens
gggcagtcagagcggagccaagatgcgaatggggactctggattgatttggaaatgtcctacaatgggtcctttctgatgactctcgagaccaaaatgaa

SEQ ID NO: 251528 - DNA, 75 bp, Homo sapiens
ctgcagcatattgtactggcctgctgctggcccgcaggaggttggaaagaaccatgactgtattcaggaaggcac

SEQ ID NO: 251529 - DNA, 142 bp, Homo sapiens
aggactccggagtggggaattacataagtgcggccagcccacagccgggctcgggcttcggccacggcatagctaattcagatattcctatactcttcagtctacaacgtgtcctgctcattcttggccttttcttcactgg

SEQ ID NO: 251530 - DNA, 82 bp, Homo sapiens
ccagcggccgagcgggcggcttcctggcctgggcgctccggtggcggcggaggtagcagtagctgatgtgcagtttggcccc

SEQ ID NO: 251531 - DNA, 96 bp, Homo sapiens
atctcgtacaagatccttcttttctctcgttccacctgaggagaaatgcccacagctgtggaggcgcaggccactccatctggtgcccaacgtgga

SEQ ID NO: 251532 - DNA, 82 bp, Homo sapiens
aggagtggattaagtgcattaagagcgagcccagggcgtggtgctgaaagtgctcacaaacttcaagagcagtgagattgag

SEQ ID NO: 251533 - DNA, 96 bp, Homo sapiens
gtaaatgcaccaatcagcatgctgtgtctagctcaaggttaaagcggcaactggggaagaagtatctgctgaggatcttggaggtgctgatcttca

SEQ ID NO: 251534 - DNA, 82 bp, Homo sapiens
caaccctgagactctgctgggggagatggaggcgaagacaagagagctcattgattcttctaacagagaaaatgccattgag

SEQ ID NO: 251535 - DNA, 82 bp, Homo sapiens
aagaaaggaaaacgccgatagaacgaataccctatttaggttttaaacagaccatcactggtgcaagctatatttaacggag

SEQ ID NO: 251536 - DNA, 71 bp, Homo sapiens
tacaggagatatgtatactccaggttccagcaacagatagaaatgctttaagttcactctggggaaagctg

SEQ ID NO: 251537 - DNA, 100 bp, Homo sapiens
cggggcgatgcgtgcgacgacgacatcgacggcgaccgatgagccccaagagcctcaagaacccaacaaggtgcccctagaagacacagagacagatgaa

SEQ ID NO: 251538 - DNA, 98 bp, Homo sapiens
ggcagctgcccttagccctctggtcttgccacttgcctagtgaggcttttccgaacctggaaggagacgtctagaaatcccaactttgctgtgtaagg

SEQ ID NO: 251539 - DNA, 95 bp, Homo sapiens
gccgaattccttaacagctgccggttaaatgctgagccagaccccacctcagagttcactccccgagagcccaacctgcaacacgtcaagcagac

SEQ ID NO: 251540 - DNA, 50 bp, Homo sapiens
tgtgcattcaaacatagcaactgagagtggcagaatttagtgacatttgg

SEQ ID NO: 251541 - DNA, 102 bp, Homo sapiens
cgatgcacttacttgaacattctcctgcagacccgttcaccagaaatattggtcaagtcatgccctgcctggaggccgtggccttgatcctgcttatcctgc

SEQ ID NO: 251542 - DNA, 99 bp, Homo sapiens
caaggagcacgtggcagcgcaggaaacagaactgaagcgctgcggcatggcgcgcgcctgcctccaggccgtcaagtacctcatgttcgccttcaacct

SEQ ID NO: 251543 - DNA, 83 bp, Homo sapiens
ctcaagtggaccctgagattgagctttttgtaaagaaactgggagtgatttttccatgtttgaagctttgcgagatactattt

SEQ ID NO: 251544 - DNA, 50 bp, Homo sapiens
gtcaaatactaagctgattgaagaggtagcaatgtacagataaagagtac

SEQ ID NO: 251545 - DNA, 100 bp, Homo sapiens
cagagagggcccacacgactagaaggacgactgcctggcgcgatacaaaaatctgcaagctttcttcctggtggcagatgacatcatggattcatccctt

SEQ ID NO: 251546 - DNA, 75 bp, Homo sapiens
ttagaggaagacgacgagtttgaagagttccctgccgaaggtggatgcccggagcataccagtgttagcaaaatg

SEQ ID NO: 251547 - DNA, 100 bp, Homo sapiens
accaagaaccatgcctggtggatccagacatgatcaaagccatcaaccagggcaactatggggagaagccggagacccagggccccctggactacctgcc

SEQ ID NO: 251548 - DNA, 83 bp, Homo sapiens
gggcctgacacgcggcgggacatgcagagatcctgaaggagctagacgagtgctacgagcgcttcagtcgcgagacagacggg

SEQ ID NO: 251549 - DNA, 98 bp, Homo sapiens
gcggatgccctgatgcctcagctagtgcagctggtactctataccagccaggacacattcagctaacgtattttagcaggtggagtgaggttgaagat

SEQ ID NO: 251550 - DNA, 73 bp, Homo sapiens
agactgcatttcaacttcaagaatgatgtgttcagagcaacattgttttgttgacacaagcatttagaagaaa

SEQ ID NO: 251551 - DNA, 100 bp, Homo sapiens
ctggaacagacatctctaatgagggtttacagattggtacccgagaactggaagagatgggagcaaaattttgtgttggtcttttacgtttgaaaagact

SEQ ID NO: 251552 - DNA, 96 bp, Homo sapiens
ctgctgtcgccgctgctgggagatgggcctactcgcccgccaccctgcgctgccgccgctctgaggagttaaaggcttatataaagatctatcaag

SEQ ID NO: 251553 - DNA, 83 bp, Homo sapiens
tgaagacgtctgcgtgagaatagagaccaccgaggtctcctctgagcctccggcctccataagacccaaaacagatgacacct

SEQ ID NO: 251554 - DNA, 100 bp, Homo sapiens
ttttagatatatttcaaaatccatatgaagaaccaccaaagttaccacgaagccggaagcagagataccgtcatgaatttaagtcaaacgagttatggac

SEQ ID NO: 251555 - DNA, 83 bp, Homo sapiens
gggaaccgcctgggaactccgccatgtcatccacttcgcccaacctccaggtgtctgcttttggggcagagttttcatcggag

SEQ ID NO: 251556 - DNA, 113 bp, Homo sapiens
tggaaaggaccgtccacccctccgcgctggcggtgtggacgcggaactcagcggagaaacgcgattgaggagctggggaggagtgactgaataactataggatttggtcttga

SEQ ID NO: 251557 - DNA, 90 bp, Homo sapiens
ccatcatcattttgactgttatctccattgtcttaagtgtgtatgatttgcgacagctattgacctgaaaagtggttctggaaaagtgta

SEQ ID NO: 251558 - DNA, 83 bp, Homo sapiens
ccgcagtatcatgctggccaagaagatcatcattaaggacggaggcacgcccgaccctgcccgccctggactggcagctgccg

SEQ ID NO: 251559 - DNA, 75 bp, Homo sapiens
ggagaagcatttacaataagaagagaagatggacagtttcagtgcattacagaatcgcctaccatttggtgcaag

SEQ ID NO: 251560 - DNA, 50 bp, Homo sapiens
atctgatgatgatgaaagttacacaggtgaaagaaaagatgttgtcccgg

SEQ ID NO: 251561 - DNA, 74 bp, Homo sapiens
ctatgaatgtaggacgctgctcttcaaagcgatccacaatctgttagaaaggataatgaagagttgacaattag

SEQ ID NO: 251562 - DNA, 101 bp, Homo sapiens
agaccgcctggtagcctttcctactagagtagcagataagccagaccccccagctggcacaccttgtgcctctgacattcggagctcctcactgaccctgt

SEQ ID NO: 251563 - DNA, 78 bp, Homo sapiens
tcggagctcggcaggaagtgggaccggtgtctggcggatgcggtcgtgaagataggtcaccggattgaaactgtctca

SEQ ID NO: 251564 - DNA, 99 bp, Homo sapiens
agcacccgtaacatcttcatctaccatgaggacgggaaggccaccagcccctcgggttccaagatgcagctactggagacagagttctcacacaccgtg

SEQ ID NO: 251565 - DNA, 82 bp, Homo sapiens
cttcccagaaagtccaagctcgtggtgggtggaaaagtgttcgccgaggttcgagaacttgtcttggacaattgcaaatcaa

SEQ ID NO: 251566 - DNA, 82 bp, Homo sapiens
ccagttgcacgatcctcaccgcaacattccttatccaatcccttaccggatggcaagcttaccaaggaggagatcgttgaca

SEQ ID NO: 251567 - DNA, 101 bp, Homo sapiens
cctctctaggactgaaccaagacttacccgaagttgccgcggggccttccgatcccctatgctgagatgaatcgtcacctgtgtgtttggctttttagaca

SEQ ID NO: 251568 - DNA, 75 bp, Homo sapiens
gccgcgaggaggcgcgggaggtgttcgagaacgaccccgagacgatgacctcattccacctatggacttgcttga

SEQ ID NO: 251569 - DNA, 51 bp, Homo sapiens
agagctcagacatgttctcaccacccttggacagtcattttgtttactcat

SEQ ID NO: 251570 - DNA, 75 bp, Homo sapiens
aaaacttcttgccaaccaaaggttacacatcattttggaatgactgtatatcatctggattacgtggctgtatgt

SEQ ID NO: 251571 - DNA, 83 bp, Homo sapiens
caacaccacaataatccacagccaaggggacggcaaaacagaacagaaaggcggagataaaaagaggggtgttaaaagaccac

SEQ ID NO: 251572 - DNA, 75 bp, Homo sapiens
cctgggcttccccatctggtgcttttcccatggagaacacacaaccaattcatgatgttgctatcaaaagttgag

SEQ ID NO: 251573 - DNA, 75 bp, Homo sapiens
gtcagtgacatgcccatgcgagtacctgaggaaggaactagaggctgctatccagccagatactagcctggtgtc

SEQ ID NO: 251574 - DNA, 109 bp, Homo sapiens
aggacgaaggaaccagctcttctgtccagagagcaggttacacatcattttggaatgactgtatatcatctggattacgtggctgtatgttaattgaattagcattgag

SEQ ID NO: 251575 - DNA, 75 bp, Homo sapiens
agctttgtaaatatccctcaacagacacaggtcatgttggccccccttatttccattgctctgaaagtgtcccag

SEQ ID NO: 251576 - DNA, 110 bp, Homo sapiens
gagccagccgctgcagccaccaccgccaccatgtcctaccaaggcaagaagaacatcccgcggatcacggtgtgtggaggtcattgcaaaggaaggacaaaacctgaaag

SEQ ID NO: 251577 - DNA, 75 bp, Homo sapiens
tgtcataaaagagttgcttaaattctcacccactcttggtattttgaagcttctcggacaaactatttagtggaa

SEQ ID NO: 251578 - DNA, 90 bp, Homo sapiens
gtggaactcagcagcggaggctggacgcttgcatggcgcttgagaaccactcacgaattcttgtttggtgcccttgctgaactggttgat

SEQ ID NO: 251579 - DNA, 76 bp, Homo sapiens
gagctggcatttgttacttttatccttcccaggagcttactccacgggaacagcctctagataatctgagttgttg

SEQ ID NO: 251580 - DNA, 100 bp, Homo sapiens
gactattgtggaagaagcatccattaagtttcccgaggtacctagtgtctgagcggcacagacgagatctcgatcgaaggcgagatggcggacgtgctag

SEQ ID NO: 251581 - DNA, 119 bp, Homo sapiens
tgggataagaaagtaacgcatttttgtttttggaaggagaaggatagacttggctttgagatatgaatgccacaatacgaaggattgaccagttaaccaacatcttagcccccatggct

SEQ ID NO: 251582 - DNA, 90 bp, Homo sapiens
cacgtggacgctgactcggaagtgcagcttgctcacttccgacagagaaaaacaaaaggtgacagttcgcattcggagaaaaagacggcg

SEQ ID NO: 251583 - DNA, 75 bp, Homo sapiens
cgctcacaacatgcacagcctggcgacggctgcggtaagaatgattgatgttggctgatattggagtgctcattc

SEQ ID NO: 251584 - DNA, 98 bp, Homo sapiens
gatacaccagaaggaggttttgacgccatgcttcaggcagctgtctgtgaacaggtttggatgcatctgctcagactacttctcatgaactcaccatt

SEQ ID NO: 251585 - DNA, 75 bp, Homo sapiens
aggagcagcgccggcggctggagattggcggcagtaagcacacaatgaatgatcacctgcatgtcggcagccacg

SEQ ID NO: 251586 - DNA, 83 bp, Homo sapiens
gtctggagtgcgtgggggaccggctgttggcgggtgctgccgaaaagaaccaacttccctgggatcagctccacagaccgcgg

SEQ ID NO: 251587 - DNA, 90 bp, Homo sapiens
cgcttcagttcatgtatgacgagagtcaatacagatttgtatgtgaagctattttgaaagtttatgaagaaggctttgttaaacccttaa

SEQ ID NO: 251588 - DNA, 50 bp, Homo sapiens
caacgccccccttcacacacagtaagaaggtagaagatagcaccatgccg

SEQ ID NO: 251589 - DNA, 75 bp, Homo sapiens
gagcaggagaagctgagcctttctggacagaccaacctgtcagtgctgcaaatgtccctaagtgccagctctccc

SEQ ID NO: 251590 - DNA, 50 bp, Homo sapiens
catccgggagagccagaccaggagagagaagcttgattctttgctctcag

SEQ ID NO: 251591 - DNA, 74 bp, Homo sapiens
atgacactcttattgaaacaacagactatgctgggcttattgtgaaaggaagcatgtttacaccaatgccaaaa

SEQ ID NO: 251592 - DNA, 100 bp, Homo sapiens
ccaaacatgcaggactctagtaacccgcgaaatgatgggatagcgttgcaaatccttaaaagagtcttaacggactcacaccacccggcaagaactgctc

SEQ ID NO: 251593 - DNA, 89 bp, Homo sapiens
atcatggcggatggccccaggtgtaagcgcagaaagcaggcgaacccgcggcgcaataacgcgccatcatgaccgggtcctataacaac

SEQ ID NO: 251594 - DNA, 100 bp, Homo sapiens
ctattcttcactcgagacaagcagttccatctcccaacctctatagccagctgaatgcactacagtttactgtggatgaaagaagcattctatggttaaa

SEQ ID NO: 251595 - DNA, 82 bp, Homo sapiens
ggccaagttcatctcctccgtcaccagccacatctaccaggtgtccctggccagtgtccttccacctgtccacaagcatggg

SEQ ID NO: 251596 - DNA, 82 bp, Homo sapiens
tggatgacaagaagacgtccaatctgagcgtgctgcggacggcgctgcggtacatccaggtggtgcagagccggagccggag

SEQ ID NO: 251597 - DNA, 100 bp, Homo sapiens
ggtgaagtgccatcttcggctaggtcgtcacaggctccggctcatggcatcaagtggcatccatcataaggggcccagctggagtaagagcccaggccct

SEQ ID NO: 251598 - DNA, 104 bp, Homo sapiens
cccttggaccgagccgatcgccgcggggcagttcgggccggctgtcctggcgcgtttgcatttatgtcggatcctcagtgaaaataaaagccatgatagttcaa

SEQ ID NO: 251599 - DNA, 82 bp, Homo sapiens
attgattccatgcctgtcttggtccacagcatctggggtcttcactacgacctttaccagaagatgatagtattgaagcaga

SEQ ID NO: 251600 - DNA, 101 bp, Homo sapiens
ttgttggggagaagaggattggaggtgtcagtgttaaaggaacctctacaacgaaggtgaagccacggaagataagatacaagttatgctggctatccaga

SEQ ID NO: 251601 - DNA, 100 bp, Homo sapiens
aggaaatcctcttgaactcttacaccacaccttcaaagattgtgagacatgatctaaaagaacttcgagatttcgatctggatggagctccttatgggta

SEQ ID NO: 251602 - DNA, 75 bp, Homo sapiens
tgctgaacagttggagaagatctatgggtcagacagaattgtgtaaaaggaagagaatgtctcctggacctaatt

SEQ ID NO: 251603 - DNA, 100 bp, Homo sapiens
cggagccaggccagcggaagatcgtcatgcataaggcccagcgctggcgcagtgagaacttcgagagacccgtggacctggagggctctggggatgatga

SEQ ID NO: 251604 - DNA, 96 bp, Homo sapiens
atcggcagctgcggccacacggccaattcctgtccccccagcagcatggcatcgtgtgctgaaccctctgagccctctgccccactgcccgccggg

SEQ ID NO: 251605 - DNA, 96 bp, Homo sapiens
gtttccccgcggccttcgcgccccaggcttcgcggggctacatgacatcagggggagctgatcaccttctattactattggaagaagacccccgaa

SEQ ID NO: 251606 - DNA, 92 bp, Homo sapiens
gccaggacacggtctgggccgccgaatctccggccgaagagcggcggcggcagcggcggtgttgacttcaaaatcaaaactgtagagctaag

SEQ ID NO: 251607 - DNA, 75 bp, Homo sapiens
aattgatcaggatttttggcctaccctccaaagaaaaggggctaagccagctctaccataaccagagtcagggac

SEQ ID NO: 251608 - DNA, 90 bp, Homo sapiens
cgagtgaggaaaggaggtactgtagacttaattcagtgcacaaatgagatgaatgtgaacatcccacagttggcagacagtttatttgaa

SEQ ID NO: 251609 - DNA, 75 bp, Homo sapiens
atcaagactacaagagatcagtcattacaatagcaacttctgttgataagttggatgccggtggccgtgggtccc

SEQ ID NO: 251610 - DNA, 90 bp, Homo sapiens
cccaatgttccgaggctatgcccagcagatgcctgggaaccactcacctccttctgtgccatgaggccacctcagccctgacaccaaccc

SEQ ID NO: 251611 - DNA, 100 bp, Homo sapiens
caagaagtcagccaagagatgtgttaaaggttatggattaaaaagtcacgtcagaactcatacaggagaaaagccatatcggtgttcggaagataattgt

SEQ ID NO: 251612 - DNA, 100 bp, Homo sapiens
cccagccagcaagcccacgccggtgcaggacgtacagggcgacgggcgctggatgtccctggtgacagcgggaaggtgaccacagtcgtagccactctag

SEQ ID NO: 251613 - DNA, 100 bp, Homo sapiens
gttggacttgggagtatctccgtattctggagcagtatttcatgaagaactagaggctgctatccagccagatactagcctggtgtcagtcatgactgtg

SEQ ID NO: 251614 - DNA, 101 bp, Homo sapiens
ccgcccccagcgggatgtgaaggactccgggtgaggccggccacgccccgcacggttagctttatacgtctacgaatatttactgcacgtaggagcacaga

SEQ ID NO: 251615 - DNA, 50 bp, Homo sapiens
aaaatggttcccactgccgggcgaggtgcgagaagatgtactaaattcat

SEQ ID NO: 251616 - DNA, 101 bp, Homo sapiens
cagactgccaagtgggacaactttctggcttttgaaaggctccttcttcagatggcgtttaatgattgcttcagtttgaactaccctggcaacccctgccc

SEQ ID NO: 251617 - DNA, 100 bp, Homo sapiens
ttgtgtgctgggctctggacaggtggtaaagacacttgtggggtgagtcatccctactcccaacatctggaggggaaagcttatccaggcgtgcaccatg

SEQ ID NO: 251618 - DNA, 100 bp, Homo sapiens
cgagggtactgtatttatggagaccgctgcaggtgcagcggaactgctgcctgacgctctgcaacttcagcatccccgaggagctggaattccagtaccg

SEQ ID NO: 251619 - DNA, 101 bp, Homo sapiens
cactaaacgcccgtggttgccaaggttgtatccacgccatgcaagtgcgctcaacaaccttggaacactgacgagagacacagcagaggcaaagatgtact

SEQ ID NO: 251620 - DNA, 140 bp, Homo sapiens
cccgtggttgcgggcgcagcgggcagtgtcggaggccagcggggccggaagcggcggcgcagagttcttcgtaagtacatcttaaagctgtcaagatggttctagcagaccttggaagaaaaataacatcagcattacgc

SEQ ID NO: 251621 - DNA, 75 bp, Homo sapiens
gcgccggcctcctccgtgcggagaagaagctgcggccgcacctggccaaggtcaagaacttcactgaggtccacc

SEQ ID NO: 251622 - DNA, 100 bp, Homo sapiens
tgcatttcacggtggccttgtggagacaacgccttaacccaaggaagtgactcaaactgtgagaacttcaggtggcacaagaatggctcaactctccaaa

SEQ ID NO: 251623 - DNA, 101 bp, Homo sapiens
atttgctgcagaagcgtagtcggccagagaacattgacatcaccaatttcagcagcagctggagcgatggcctggccttctgtgctctgctccacacctac

SEQ ID NO: 251624 - DNA, 80 bp, Homo sapiens
ggaaattgcgctggaccgtcgccttgctcctcgccgcggcggggactgcagttggaatcgaagcctcttaaaatggcaga

SEQ ID NO: 251625 - DNA, 87 bp, Homo sapiens
agggaaccaacccactttctcggcgccgcggctcttttctaaaagtgctgcctgctgtttcccggggagatcatgaaacgaggtcgc

SEQ ID NO: 251626 - DNA, 98 bp, Homo sapiens
tgacctctgaaccacctacatcagagctgactgcctctcgagtgtgaacatggctacgcctcttcattcccgtccatgccgagcccccgactgcagca

SEQ ID NO: 251627 - DNA, 50 bp, Homo sapiens
cggagctcccccaagagccggaaaggtattgcgcagcgatgcacggccat

SEQ ID NO: 251628 - DNA, 101 bp, Homo sapiens
cagagcagcctccgtcgctgtcgctgagagcctcacgagtcgaggtcctgcaggtggagctccggcagccgccctgaagaagaagaggacagtgctccagt

SEQ ID NO: 251629 - DNA, 98 bp, Homo sapiens
gtgggcggcggcaacggggcactgacctgggtgccccaccagcagcagtaggtatggctcctcctgtaatgtgagtcaaggaagctctcagctaagtg

SEQ ID NO: 251630 - DNA, 96 bp, Homo sapiens
atgtattggagaaggccaatttggagatgtacatcaaggcatttatatgagtccagtctctaattaacagaagatggcaaagcccagccacagcag

SEQ ID NO: 251631 - DNA, 75 bp, Homo sapiens
tgcatctaatactttacttgtgaatgaagattcattatgagttcacttcttcaactgagatggacatgatataat

SEQ ID NO: 251632 - DNA, 49 bp, Homo sapiens
cgagtctattgccattgcccaagggctccattggcctccagaggactgg

SEQ ID NO: 251633 - DNA, 100 bp, Homo sapiens
cgcaggctgctggcagacgagtacaccttcgccttcccgccccaccacgacacggcgtccgagctgggccacagcctgaacgagaacgtcctcaagcctg

SEQ ID NO: 251634 - DNA, 128 bp, Homo sapiens
gaaaggaagcaagcagttcagaagagccaaggaataaacatgcaatgaacccaaaagggtcagccacctgacctggtttactcgtcacgaccccgtggtccagaaggaacaagcaccaccagcagctc

SEQ ID NO: 251635 - DNA, 75 bp, Homo sapiens
gtcaaagaagaaaccgtgctcagaaactagccagattgaaggcttggaaagagacaagtttgacaacaagactgt

SEQ ID NO: 251636 - DNA, 75 bp, Homo sapiens
gaatattcaagagtggcaacagagagatcactgcagagctgctaagacacatggttgcacagaaggtgaaaccaa

SEQ ID NO: 251637 - DNA, 100 bp, Homo sapiens
atttcaggagagcagtccactgaaggttctttccctttaagatatgtgcaggatcaagttgcggcaccttttcagccagcctacctcccctacgacgccc

SEQ ID NO: 251638 - DNA, 106 bp, Homo sapiens
caaattatagagctaattacaactttcggggcatgtacaatcagagctgcagtgagaagaggagtttgttactttaaacagaggctgaagaaactatagaattagc

SEQ ID NO: 251639 - DNA, 98 bp, Homo sapiens
cgagcccggggcagcggctgccgggccgggactggtgcgcgagggtctattatcctcccagtccacaacgctgaaccgtggctggacgaatgtttgag

SEQ ID NO: 251640 - DNA, 75 bp, Homo sapiens
tgctggaggcgcaggccctcaagctggtggaggggccggacgtccggaaactgaggcttcttgaagagcttgaag

SEQ ID NO: 251641 - DNA, 100 bp, Homo sapiens
ttgttttctaagggaagcgacatctggagcaagatgagaagatgaagtgaatttatggattctggtttttctgaattttcaaagcataaggaatcaaaac

SEQ ID NO: 251642 - DNA, 80 bp, Homo sapiens
atgttaaaacgggtcagttggcagccatcaaagttatggatgtcactgagactcaccccacacagaccgcgtttctctcc

SEQ ID NO: 251643 - DNA, 74 bp, Homo sapiens
ggcgctggaggcagcggtgcacgtgcaggctacagcaactggacgaggagaacagtgaactccggtcctgcacg

SEQ ID NO: 251644 - DNA, 100 bp, Homo sapiens
ggccctcgatgtgctctgcgtgttgctggtgtaaacaggaacatcgataagtagtgtaaaaacttgcacaatgaaatccgaagccaaggatggagaggag

SEQ ID NO: 251645 - DNA, 74 bp, Homo sapiens
ccgacatcatgctccagttcctggtctgggaggggctgaacgtggtgaagacaggccgagtgatgcttggggag

SEQ ID NO: 251646 - DNA, 100 bp, Homo sapiens
tcaataaaacgggatctggatgagctggacaaggatcatttacagttgagagaagcctgggatggcctcgatcaccagtgccccaccttagaacagtatg

SEQ ID NO: 251647 - DNA, 75 bp, Homo sapiens
atgaaattacatccagaggattttcctgaagaagcctgactggctcatggagaaagcctacctaagaatgaagcc

SEQ ID NO: 251648 - DNA, 100 bp, Homo sapiens
gccgtgcatggggctgctccccaggacctgagcaggaacctggagttttcaggaacctcactctggagcctgagatcatgcctgctgccactgacaaccg

SEQ ID NO: 251649 - DNA, 100 bp, Homo sapiens
tgcgtccgggcgatccagtgcttagttccgtcatatccctctccacgacctcggtcgagcatgttcaccagggcccagacctcctgccccccgaggtctg

SEQ ID NO: 251650 - DNA, 106 bp, Homo sapiens
acggtggcgccgcccggggcgaggcagggccagcagcaggcgggagctcaccatggatgatgatatcgccgcgctcgtcgtcgacaacggctccggcatgtgcaag

SEQ ID NO: 251651 - DNA, 97 bp, Homo sapiens
agaaacatccctggatatgcccgttcagtttacagttcattttttgcttggtttggaaaaatttcattagagcttcttggacacttaatgattgttg

SEQ ID NO: 251652 - DNA, 99 bp, Homo sapiens
ttatggcagattaggacaaggaaattcagatgaccttcatgtgctgacagttatttcagccttacaagaaagagctatctggtcacaaaaatattgtgg

SEQ ID NO: 251653 - DNA, 82 bp, Homo sapiens
cccgagtgagcgcgggcgccgaggccgccctggacttcgtggtggaggaggacctgaaggcccatctcacctgctggtacat

SEQ ID NO: 251654 - DNA, 100 bp, Homo sapiens
cagatatccaggcattcttcatgagcatagacagtctgtgtaagaagtactccagggaaacctcccaggaaattcgaaatgagtcccatgactatcctca

SEQ ID NO: 251655 - DNA, 100 bp, Homo sapiens
actcccagaagaggaaaaggagggcagcgacctgagaccagtggtcatcgatgggagcaacgtggccatgaggaaagaccacagcaagattctttcattc

SEQ ID NO: 251656 - DNA, 75 bp, Homo sapiens
ccaaacaagcctttgaaagatgtcataggagtaattccctcctggtcccagacagtctaagaggcacagataaac

SEQ ID NO: 251657 - DNA, 78 bp, Homo sapiens
ggagaggcgagctcgcgatgagtggtctcggcaggctcttcgggaagggtggcacatttagaacgaacagggcattac

SEQ ID NO: 251658 - DNA, 118 bp, Homo sapiens
ggattcctacacaatgcgttgcctggctccacgccctgctgggtcctacctgtcagagccccaagctttccgcttggccctcatccagcttcagatttcttccatcaaatcagataac

SEQ ID NO: 251659 - DNA, 100 bp, Homo sapiens
aatttgtacttacacatggaagttgtaagttccaagattatcccctaaaactcatagacccaggtctcccagacagaacagtattggaaatacccccagt

SEQ ID NO: 251660 - DNA, 110 bp, Homo sapiens
gcaccattaacatgatggagtacctgttgcagggggttgtgtccactgtggtccccgactctgcccacaagctgttcatcgggggcttacccaactacctgaacgatgac

SEQ ID NO: 251661 - DNA, 75 bp, Homo sapiens
atccaacatcaaccgacagttggaggtatacacaagcggaggtgtgcctaccgcatgttgccgctgctgtttctg

SEQ ID NO: 251662 - DNA, 75 bp, Homo sapiens
ctcgacctgctaacagaactggaccttttcgggtgtcaaattgagaaccaggtagatccccaccacctacagtaa

SEQ ID NO: 251663 - DNA, 100 bp, Homo sapiens
cccactggctcagaatgaacgctgcctacacatgttcctgcaagaggaggcaattgacaggaactacgtcccggggaagcccccttacccaggaatggaa

SEQ ID NO: 251664 - DNA, 75 bp, Homo sapiens
gaatggcaaaggatcagtgcttcctaactcaggttctgaaaaagacttcaagaaactgactaatcgcgatggctg

SEQ ID NO: 251665 - DNA, 87 bp, Homo sapiens
gggcagacgttagcgtgagtgatcactctcaatcccggatcctgtttgaccaaactcagagatcaattaaggcacagcttcagaact

SEQ ID NO: 251666 - DNA, 100 bp, Homo sapiens
gcaaagcttgcgaggtggcgttaggctcttctaacatataagagtgacccagccatgagaaaaatgttgaatcatctatatttctatatcatgcctgtgt

SEQ ID NO: 251667 - DNA, 100 bp, Homo sapiens
gcttctgccccagaaccggtcgaaaaccgtgtatgagggattcatctcggctcagggaaaggtggcccagacagcgtgtatgtcagcttgcaagcattta

SEQ ID NO: 251668 - DNA, 101 bp, Homo sapiens
tccctccttgtggccctgggaggaagccatggactctaccaagtctgaacccctgaagggatcaccagaggtactccaaagattcaggtttactcacgtca

SEQ ID NO: 251669 - DNA, 90 bp, Homo sapiens
ctggctgaacctggaactgctgctgcctgtcatcattgactgctggattgacaatatcaggaagaaggtagataatgactataatgccct

SEQ ID NO: 251670 - DNA, 100 bp, Homo sapiens
ccttcaaggtggcacagtacgtcgtgcgggaagaagacaagatcctgaccgccaccattgaaaacaaccgggtcatcctggagattgacaatgccaggct

SEQ ID NO: 251671 - DNA, 100 bp, Homo sapiens
cgcggctatcccaccatcaagttcttcaggaatggagacacggcttcccccaaggaatatacagaaatgagccgtcagactgctacagcattacctaccg

SEQ ID NO: 251672 - DNA, 75 bp, Homo sapiens
tatttgcctcgcaccatggcggaagccttgaggtgtgcccaagcccacgaatcattcccccctccccaacctgtg

SEQ ID NO: 251673 - DNA, 75 bp, Homo sapiens
aacgtcaacaccaagtgcatcaccatccccaggtgtccaggatgtggaggtgcacttggaggaccagatggtctt

SEQ ID NO: 251674 - DNA, 50 bp, Homo sapiens
gaagctgctaacagatggactggttttttgcatgtctgacacccatgact

SEQ ID NO: 251675 - DNA, 75 bp, Homo sapiens
caggatgggacccttgctgcttaccctcggaccagcgcaattgcttgttcagagctcttggtgatcaattggagg

SEQ ID NO: 251676 - DNA, 100 bp, Homo sapiens
agtggtgaaggagtgtgtgcagcggggatcatcgtcttgctcttcttttatctcagtttgtgggtagccagtcagtccgggagctgctcaccatgcagtt

SEQ ID NO: 251677 - DNA, 75 bp, Homo sapiens
ggagtacttacggagtgacaaagggaaaagtctgctttgaggcaaaggtcaaagatgagccagactctcctcctg

SEQ ID NO: 251678 - DNA, 90 bp, Homo sapiens
gggcccagctcccgtagggagccgtgggcgctcggtgcccgggccgggcaggttatctaccttgcctgctcctatgccacagtgtacctg

SEQ ID NO: 251679 - DNA, 97 bp, Homo sapiens
gtggaccctcgtgagcgacccggacaccgacgcgctcatctgctggagcccgaatgctgtccagtttcaacgagtggttttggcaggacaggttctg

SEQ ID NO: 251680 - DNA, 100 bp, Homo sapiens
ccacttcattatatatcctggctggttggacatgaaggcaaaggcagcattctttctttccttaggaaaaaatggatatggcagtggacgtggatttggg

SEQ ID NO: 251681 - DNA, 100 bp, Homo sapiens
gtgtgattgactttgatgagaacactgctctggatgatgcagaagaggagtcctttaggaaggtgagatcggactggaactgttcggctgcgaccagaaa

SEQ ID NO: 251682 - DNA, 82 bp, Homo sapiens
tgctgctgacgctgctgctgcccggcctcgggagacaagaggagcagcagcggcaccgcccctcaccctggagggtcctgta

SEQ ID NO: 251683 - DNA, 100 bp, Homo sapiens
agattctccggggacccttccgtatctgcctaggcattttgctgtctcctcctaatacgtgatcctggtggagggattgaaatgtctgagttcatccgag

SEQ ID NO: 251684 - DNA, 82 bp, Homo sapiens
aaaggcaacatcctgtcacaggccatgctctggcaaaaacaaactggcgatggaatatgagaggagccctctggaaagaaaa

SEQ ID NO: 251685 - DNA, 101 bp, Homo sapiens
aacaagaatgctgacaacgattggttccgactggagtccaacaaggaaggaactcgggactggatatcttagaccgaagctcagaattgattcattctggg

SEQ ID NO: 251686 - DNA, 80 bp, Homo sapiens
caggatctcagggcctgccgccccattatgatgatgtcgaggagtgagctgagtcgacagaaacttcatacccaagagct

SEQ ID NO: 251687 - DNA, 78 bp, Homo sapiens
tctcacagctgcagtctaatagtaacacagaggtgtgggaaccgctgagcagaacaccctcccccagcgggaaatccg

SEQ ID NO: 251688 - DNA, 98 bp, Homo sapiens
cggagccaggggcgggcggcggctcggaccgcgtccccgggggcggggaaagagtgctggagaatctggtaaaagcaccattgtgaagcagatgagga

SEQ ID NO: 251689 - DNA, 74 bp, Homo sapiens
ggagtcccagttcctccttttggatgtaccttctcttctggacccatggatgaaggaccagatcttgatctagg

SEQ ID NO: 251690 - DNA, 75 bp, Homo sapiens
caggaggcatttgaagttccaaaatcgcccggaaatgggagcttgcgcgaagcgctgatcggcccgctggggaag

SEQ ID NO: 251691 - DNA, 82 bp, Homo sapiens
ggcgagcgcgagcggcgcgagaaaagtttatgtggccgaggcagacaagtggaattaggccttgctgcaggggacttcattt

SEQ ID NO: 251692 - DNA, 97 bp, Homo sapiens
cacgttctgtgaagcttttggatcgtatccacaatcctgaggagatttcaagtgatgaagaggagacaaatgtaactgctcaagcaatgcagtcaaa

SEQ ID NO: 251693 - DNA, 88 bp, Homo sapiens
atgcagcgtcactatgtgatgaccttcctggagcagtcgaaaacccgatttaacaagaactacaaggggatgagtctatccaaaatca

SEQ ID NO: 251694 - DNA, 100 bp, Homo sapiens
gactgtacgtggacccgcaaggccggagggcacgcgcgcaggagctcatgtggcctgcggctcctgtcgcctgtaaaatgacctccaccttcaacccccg

SEQ ID NO: 251695 - DNA, 74 bp, Homo sapiens
agctgcaccccaccttgatccagcggacttacggagccctgaggatgatgacaggaaggtccgaaggagagaaa

SEQ ID NO: 251696 - DNA, 100 bp, Homo sapiens
caacacagaatttctgcaagtaattgataccatttgggagactatggtggtgaaatccttaatgaagtaaaaatcagtagatcagaaaaagagttatatg

SEQ ID NO: 251697 - DNA, 96 bp, Homo sapiens
aaaaggagaaggataaagggaaggacaaggaattacataacatcaaacgtgggtcccgtcaggaagcccaagtatgtggaaagccccagagtgcct

SEQ ID NO: 251698 - DNA, 83 bp, Homo sapiens
ggatatgaaaaaagccatcacctatattagaaggagtatgttggcaaacatgaattgactgggcataaagtagctgtgaagat

SEQ ID NO: 251699 - DNA, 73 bp, Homo sapiens
gaggaaagaagacaagagagaacgcaaacagtttgaagctgaggattttaagcgtaaaagatgtgttgttttc

SEQ ID NO: 251700 - DNA, 75 bp, Homo sapiens
ccaagattaaccaggacccccagacaggagacaatttatccagcatgttgctagaaaatctaactgataatgaaa

SEQ ID NO: 251701 - DNA, 82 bp, Homo sapiens
tgtcacaggccatgctctggcaaaaacgcatcacgttgggtggtttccatttagaccgaggccggttcagaacttcccaaat

SEQ ID NO: 251702 - DNA, 73 bp, Homo sapiens
tggctttcctcgcatccagcaactcttcaccagtgtgatccctcacatccacaaatctctgattggaaagaag

SEQ ID NO: 251703 - DNA, 126 bp, Homo sapiens
gtgtcttcttggttcatccttgccctgcagaagtggatcatagacctggccatggcctcgaatcctctatggcagtcccggggctccaccactgtgtcttcaggaggccgtttccgctgcccatcg

SEQ ID NO: 251704 - DNA, 100 bp, Homo sapiens
aggagacagagctactggatctcagccttgtcaaagatgccagatgtgggagacacgccaaagctcccaagatttaatccagagactgacttcactatag

SEQ ID NO: 251705 - DNA, 103 bp, Homo sapiens
cgcgggtctgtcatcatgtcgcgttacgggcggtacggaggaggtgtggacactgccagcggctgcagccgacttggaatgacctgggagacaaatacaacag

SEQ ID NO: 251706 - DNA, 101 bp, Homo sapiens
aacccttgatcctcctcctaattgcagtcgttcccagatttcctaaactttccagagaaaatggtcttctccctggctcagcaagaagatgaactttaaac

SEQ ID NO: 251707 - DNA, 90 bp, Homo sapiens
cttccccaggccggcccgagcagcacacagtgatccacatgggcaatcctgagcccttgactcacgaacacagatatgtagaactcttct

SEQ ID NO: 251708 - DNA, 100 bp, Homo sapiens
cgcttgaggacttggaggtcctgtctaggaaaatcctgccttgcttcgttgggcctatgcaagaacaataaatgtctatcctaatttcagacccactcct

SEQ ID NO: 251709 - DNA, 80 bp, Homo sapiens
ggctatgtgacgctgctggaggaaacacctcaggacacggcctacaacaccaagagagtgcctggtgaagaatgtgatgg

SEQ ID NO: 251710 - DNA, 115 bp, Homo sapiens
cagctattgctggacggccagtgggagagcgaggcctgagcctctgcgtctagcaattctgtggtgttcttggtcacacatttatggagtttctgaagggcagtggagattactg

SEQ ID NO: 251711 - DNA, 100 bp, Homo sapiens
tatgagcaggtgcttcggagtgcttatgccaagaggaacagcagtgtaaatgactcaggcattcccatcaagagcaccatggacaaccccaccaccaccc

SEQ ID NO: 251712 - DNA, 51 bp, Homo sapiens
actttgtctgactacaatattcaaaaggtgagaaaaaccagaagcttgaag

SEQ ID NO: 251713 - DNA, 74 bp, Homo sapiens
tttgaacaaactcgaagaacagctgtggaaagaagttgcaaaacactgggtgtatgcaacagcgttattgcaac

SEQ ID NO: 251714 - DNA, 74 bp, Homo sapiens
tgtgtgtgagcacccctccatgccagtatgaacggtgccttagcgtttgtggacacttcggactgcacggtcat

SEQ ID NO: 251715 - DNA, 83 bp, Homo sapiens
cttggactgagtcctgcaggacacagatcttgatgtggaagaaatggaggactcagaaccaaggatttccaagtgatttcttc

SEQ ID NO: 251716 - DNA, 82 bp, Homo sapiens
gaagacttacaagagaacctcctaagagtcacccaaacaatcggctgagaatgagaagagagagaagaagaaggaggttcct

SEQ ID NO: 251717 - DNA, 100 bp, Homo sapiens
cggtgaggatgatgtaaatgagcaacactccggatcagacactggaagtgtagaacgtcattcagaggtttgtggagaaaaacagcgctttgagaagttg

SEQ ID NO: 251718 - DNA, 90 bp, Homo sapiens
cagccacggccgggggcgtctttcagagcattacggttgaaatcacaaagattagacacctttttagataggtgttcttcagcaccactg

SEQ ID NO: 251719 - DNA, 100 bp, Homo sapiens
cccctgtggtgcctgctaccacccagcggaccctggccaggccaggcccggagcctgccccagccacagaggctgggaggcggcagaatgcagccagagg

SEQ ID NO: 251720 - DNA, 101 bp, Homo sapiens
gagcacaaaagagtctccgcggtggaggtctgcgttgctcttgcttttcctcgctggggtgtacgatctcccttgagtttagaaatctggctgagaaatac

SEQ ID NO: 251721 - DNA, 75 bp, Homo sapiens
aaggagcggccgggagcccgccgcgctggtagcgatgctgtgtgctgtggacccacctggggttcatggagtggg

SEQ ID NO: 251722 - DNA, 96 bp, Homo sapiens
tcgaaatgcggctgcttttcaagttgttgacctcctgtactggagagacattaagaagactggagtggtgtttggtgccagcctattcctgctgct

SEQ ID NO: 251723 - DNA, 100 bp, Homo sapiens
ggcgaatggggctcacgtcgacccggaagttatgagatccgacactatggaccagccaagtgggtcagcacgtccgtggagtctatggactgggattcag

SEQ ID NO: 251724 - DNA, 100 bp, Homo sapiens
gtgaactatagagtttgtggacagatttatattggtacctatggagttgtgtataagggtagacacaaaactacaggtcaagtggtagccatgaaaaaaa

SEQ ID NO: 251725 - DNA, 98 bp, Homo sapiens
aaaggatggccttgacccttcatcacgttgtccttctgcaagctgaccgctttattttaaaggcaagtgagactgcttcaaataaaacaacttcaagc

SEQ ID NO: 251726 - DNA, 73 bp, Homo sapiens
ctgtggataacgggaggtgaatttccatgtcaacatagtcctgagttatggtgaatggttgcatggatttgaa

SEQ ID NO: 251727 - DNA, 82 bp, Homo sapiens
agggaaccctggtcaccgtctcctcagacctgatggccaaaagaaaggaagaaaatttttcctctcctaaaaatgccaaaag

SEQ ID NO: 251728 - DNA, 104 bp, Homo sapiens
gtcagaaggagtggacttgattgatatatatgctgacgaggagttcaaccagaagctaaaccagccccagaaatatttgaaaatgaagtcatggccctgctgag

SEQ ID NO: 251729 - DNA, 98 bp, Homo sapiens
tctccatggaggcagcccgcccctccggctcctggaacggagccctctgccggctgctcctgctgaccctcgcggaagatgaagtcctcagtacattc

SEQ ID NO: 251730 - DNA, 71 bp, Homo sapiens
cccccggagccgcgagcacccaaggtgtggatgaggtcaccattgtcaacattttgaccaaccgcagcaat

SEQ ID NO: 251731 - DNA, 100 bp, Homo sapiens
tgctgactgcccaccgtgcaggcaagaaacatctgtccagattttattccttcaaatagtatattatcaaatgccttgtcatggggagtaaaaattcttc

SEQ ID NO: 251732 - DNA, 98 bp, Homo sapiens
gaagtgaagaaggcgcatcactcccagctgcgcaaagcttgcgaggtggcgttagtgccggtggtggtgtgcacattgagccccggtatagacagttc

SEQ ID NO: 251733 - DNA, 83 bp, Homo sapiens
gtattctggtaatttcgaggagacctaatctgggagcctgcaagtgacaacagcctttgcggtccttagacagcttggcctgg

SEQ ID NO: 251734 - DNA, 50 bp, Homo sapiens
cgcctgctttgattcattgaaacacaaacatttcactgaagatattcaaa

SEQ ID NO: 251735 - DNA, 100 bp, Homo sapiens
ccctctccttggctttcctgctgagtctccgaggagctggggccatcaagggagcagcatttctttctattactactatctatgctgagactggttcagg

SEQ ID NO: 251736 - DNA, 100 bp, Homo sapiens
cttttgcaaagaggtttctagacagcagaagaaaacccctctctcagcgctcatctcacgcagaggatgccaggcagggctggagtgcagtggtgccatc

SEQ ID NO: 251737 - DNA, 100 bp, Homo sapiens
gcttgggaaggggaaggaaacctctctgaaatctgacacctgctctcccggcaaggaaacttcgcaggctgtcctggtacctgggataaaagttgcagcg

SEQ ID NO: 251738 - DNA, 75 bp, Homo sapiens
ccgctcttcccttacagtttctttgagcagtttgtggaagcgatcagcggctgagccagaggccaactgcagagg

SEQ ID NO: 251739 - DNA, 100 bp, Homo sapiens
ttgaaagagaagctcttcctgtgagaaatacactttcgggaaatggcctctaaatcctggctgaattttttaaccttcctctgtggatcagcaataggat

SEQ ID NO: 251740 - DNA, 82 bp, Homo sapiens
ccctcctcctgctgttctcgggagccgtggccctgatccagacctgggcagatatttggagttcttacaacatggcagacat

SEQ ID NO: 251741 - DNA, 100 bp, Homo sapiens
acccagcagagatcagcaatccttggctcactgaggaggtttggttgtccttctattcaggccactcttcgttttccatgtactgcatgctgtttgtggc

SEQ ID NO: 251742 - DNA, 100 bp, Homo sapiens
cgcgttcacagccccagcgcagattttgagaagagggggaaaaaggaagtttgtcctgtcctggatcagtttctttgtcatgtagccaagactggagaaa

SEQ ID NO: 251743 - DNA, 99 bp, Homo sapiens
caaaagcaacgtgaccaagactatgaagggttttgaatatatcttggctaagctgcaagatggcagtcttgggcacgtccatctgtaaacctgctgaga

SEQ ID NO: 251744 - DNA, 99 bp, Homo sapiens
gaacaacccgttcttgcctcaggccagtcgcctccaggccaagagggatccttcacccgtgtctgggatcgcttacacctgagacgaactacagaacag

SEQ ID NO: 251745 - DNA, 97 bp, Homo sapiens
gcagagccgccgaggatgataaacacccaggacaggtttggtgcctggaatgctgacctagatctggaaactagcccagatgaaagcaagaatgatg

SEQ ID NO: 251746 - DNA, 102 bp, Homo sapiens
acttcaaacattcgtctcggaaaccccgcctcttacagtcacgagagtcattcttatagaagagcatcagaggaagataaaaaagaatcctcaatgtcaggc

SEQ ID NO: 251747 - DNA, 100 bp, Homo sapiens
tcggttctccatacccgtgacctggggatcgctacggaccttaaaatacccgcaacagccccttcgtcccaaggctggccctggccttccacgacggcag

SEQ ID NO: 251748 - DNA, 82 bp, Homo sapiens
ccccagagcgtcttgatccttttgcagatgcactgccagtgaaagatgtagaagataaacctgaacaacaaaccagaacaag

SEQ ID NO: 251749 - DNA, 90 bp, Homo sapiens
gaaactagaaaccaatgaattccaacaacttcaaagtaaaatcagtttaatttcagaaaagagtgatgacagacctaatgctctattaag

SEQ ID NO: 251750 - DNA, 100 bp, Homo sapiens
tggaattcttccctcctcgaactgctgagggagctgtcaatctcatctcaaggatattgactgggtacagacagagaagcacgtgtttgagcaggcatcc

SEQ ID NO: 251751 - DNA, 100 bp, Homo sapiens
gcctgctcttgcgcctattgcggcaactactcacgctcctacgggacgaggagagggaggtgaatccgtggcagagatatggaatgtgcagatgtcccac

SEQ ID NO: 251752 - DNA, 96 bp, Homo sapiens
ccagccgcgccggcgaggacatgggcagccgcggcgcgcccaccccccgcgccgaaatgcttcggttacccacagtctttcgccagatgagaccgg

SEQ ID NO: 251753 - DNA, 75 bp, Homo sapiens
aaaggcctaagaattttggcattggtgattgcccacagtgagtatcaaaagtccaaaagaatttccatctttctg

SEQ ID NO: 251754 - DNA, 100 bp, Homo sapiens
ccagcctgaagcgtgggtgaggtgtccagctgcccaaaggcgacagaccaagatcactccatggatgaaatgacagctgtggtgaaaattgaaaaaggag

SEQ ID NO: 251755 - DNA, 100 bp, Homo sapiens
cttcggaaagactgttccaaaaacagtggataattttgtggccttagctacaggagagtattctgaagaagccaataatctcattgaagaatgtgaacaa

SEQ ID NO: 251756 - DNA, 83 bp, Homo sapiens
cttgctcagtctctgccaggggaagattccttgagttgatctctctaatgtattagatcttcatgcctttgatagtctctctg

SEQ ID NO: 251757 - DNA, 98 bp, Homo sapiens
atgaaaaggaagaagcatacaattccctcatgaaaagctatgatcctggtggctttgagacaccttcacttcaagaacattgtccactgtgacttgaa

SEQ ID NO: 251758 - DNA, 87 bp, Homo sapiens
gctgctcttcgccatcttcatgggcctgcgggcctccaagagctattctcaagctggaataactgagactgaatggacaagtggatc

SEQ ID NO: 251759 - DNA, 75 bp, Homo sapiens
aaacacactaaagattgggcagtcactggggagaacctctgtatgaaaaagctgatatcaaggggcctgaagaca

SEQ ID NO: 251760 - DNA, 100 bp, Homo sapiens
tgcagatttatggctcctgaacagttgcactgtaaaaaacccagctgaagaccactttagaaactcaattaaaaacatgattcccgtgacagaattccgg

SEQ ID NO: 251761 - DNA, 100 bp, Homo sapiens
ctgcagcccttgccttgagtcagtgcgccgctctccagcccgcttgaacggattaacacagattcctcagatccagaagactgaaatttcctttcgtcct

SEQ ID NO: 251762 - DNA, 97 bp, Homo sapiens
gagagatggtcaggtctggagctcgaccgggccagattgccacggcagtgaagtttctacagaattcccgggtccgccagagcccacttgcaaccag

SEQ ID NO: 251763 - DNA, 98 bp, Homo sapiens
cgggttgctgtgcgactattctccgggagccgtccgtgtcaccgccggaacctggcgcagggtctctcattcatcacttttatctgctatgtggcgtc

SEQ ID NO: 251764 - DNA, 97 bp, Homo sapiens
cgaaaccacgagggtgatgaggacgacagccacgtccgggcccagcaggcctgcattgaggccaagcactctcctctggacctaaacctgaaatccc

SEQ ID NO: 251765 - DNA, 100 bp, Homo sapiens
atttccagaacaagatcatgcgatactttgtcaggaatatgacagatacctagcatctagcaaaataatggcagctgcttaccttgaccccaacttgaat

SEQ ID NO: 251766 - DNA, 100 bp, Homo sapiens
agatgaggccggagcccaccaagttctgggaaatctgtctcgtaactgtgtaatcaaggaactagcaccacaacaggaaggtaacccaggagaagtattc

SEQ ID NO: 251767 - DNA, 85 bp, Homo sapiens
tttacaaactggccaagaagggccttactccttcacagatcggagaattttggttgggcctagagaagatatactccatagtgaa

SEQ ID NO: 251768 - DNA, 100 bp, Homo sapiens
gtaaatattatctctgtggtttttgtcctgcggaattgttcacaaatacacgttctgatcttgctgtgcctttggctgcaacaagtatgttgattactca

SEQ ID NO: 251769 - DNA, 71 bp, Homo sapiens
gtttgaaagtgcgattgtggaagctgctcgggttggatggcaagcatgtggtgtttggcaaagtgaaagaa

SEQ ID NO: 251770 - DNA, 83 bp, Homo sapiens
tctgcgttttgttttcccctcggcactaggcagcggaggagcccgaccgacccgggaaatcctcattgacgattcaatttgtt

SEQ ID NO: 251771 - DNA, 80 bp, Homo sapiens
ccgttcttgcctcaggccagtcgcctccaggccaagagggatccttcacccgtgtctgtgttccattggcaagctacaat

SEQ ID NO: 251772 - DNA, 51 bp, Homo sapiens
gggaccaaggtggaaatcaaacccactgaggcggctcccagctgcgttggc

SEQ ID NO: 251773 - DNA, 75 bp, Homo sapiens
cctccttcccagccgcgcggcttcctccagacctctcggcgcgggattggttgccgtggtctttactgcttttct

SEQ ID NO: 251774 - DNA, 73 bp, Homo sapiens
aaagacgacatgcaaagacaaactctcattcttcagcactccacctgtattcttcaggacttgtggaatgtga

SEQ ID NO: 251775 - DNA, 75 bp, Homo sapiens
ctctgaagtaagcacagtagaactgctgcatctgcaacaacagcagggggtcctgatgacaacttaattgaaggt

SEQ ID NO: 251776 - DNA, 82 bp, Homo sapiens
accagcaagcgtggcggcaagatcatcgtgggcgacgccacagagaaaggtggacccccaaaagtacaagggcatatttaac

SEQ ID NO: 251777 - DNA, 75 bp, Homo sapiens
gagcgggcagccttccaggtggacaggttccatcataatgaatggatccaatatggcaaatacatcaccgagtgt

SEQ ID NO: 251778 - DNA, 74 bp, Homo sapiens
cccggttccccggcccacagtgggggtgtgcaaacccgagagaactggaacgtgcgcatcgaccccagtagcct

SEQ ID NO: 251779 - DNA, 100 bp, Homo sapiens
gacccactggaagcctagaaatgttggcaaacatgaattgactgggcataaagtagctgtgaagatactcaatcgacagaagattcggagccttgatgtg

SEQ ID NO: 251780 - DNA, 82 bp, Homo sapiens
cctggggccttgcagcttgctggagagaagagcagtgagaagacctcctgccccccgaggtctgcagtctcctgaacccagc

SEQ ID NO: 251781 - DNA, 51 bp, Homo sapiens
gtttgtggacagatttatattgtccacagacaaacgaatttaaaggagcaa

SEQ ID NO: 251782 - DNA, 83 bp, Homo sapiens
gatggtcttcctgctggggctcatgtttgaggatttttagactctgaggagcagttggagctaatccacattatggaaatgga

SEQ ID NO: 251783 - DNA, 100 bp, Homo sapiens
tgctattcaaactgccctgatgggcagtcaacagctaaaaccttcctcaccgtgtacttgctcttaaagttccgtacagataaaggaagagatcccagtt

SEQ ID NO: 251784 - DNA, 99 bp, Homo sapiens
atcgccggggaggcagcgcgggatcccagcctcaggcgtgcgcggacggtgtgcggacctactccaatgaagtccattgtgttgaagagattctgaagg

SEQ ID NO: 251785 - DNA, 75 bp, Homo sapiens
aaacaccgaagggacattctgtcttcatggacatttttgaacttgtggtttccatcttctacaggcagtcctcag

SEQ ID NO: 251786 - DNA, 75 bp, Homo sapiens
gggtcatcagccactacgccgggcaggatgccacggacgagattgaggagctgcgggccgagatgctggagatgc

SEQ ID NO: 251787 - DNA, 82 bp, Homo sapiens
cggctactacaaccagagcgaggacgcacctgaactcctggggggaccgtcagtcttcctcttccccccaaaacccaaggac

SEQ ID NO: 251788 - DNA, 90 bp, Homo sapiens
cctgaccccgcggccggacgacccaagcccgctgagcaggatgagggttgatgccggcccaggatggatcagacctgtgaactacccaga

SEQ ID NO: 251789 - DNA, 100 bp, Homo sapiens
gaagaagagaaagagaatcactcggatgggaaaagttaactggattgttcccacctgcatggatcaccgggcagaggtggaggagacactgaagcgactg

SEQ ID NO: 251790 - DNA, 50 bp, Homo sapiens
gcaagcgtttcagcgcctacaattacaggcgctggttttcaatacagaat

SEQ ID NO: 251791 - DNA, 82 bp, Homo sapiens
gggaaggatggtccagaattcacttttactaccccaaagtttggttgcaacaaggacagtgtcagagcaggctgtaaaaaat

SEQ ID NO: 251792 - DNA, 101 bp, Homo sapiens
cccccgggaaagagatctaccgcaagagcaacatctccgtgtacgaagttgatggcaaagaccataaggagaagtacagcatcggggagcccacagtgcca

SEQ ID NO: 251793 - DNA, 100 bp, Homo sapiens
tcatgtcagctgttctgcaggatcccatgagaagttggcaaacatgaattgactgggcataaagtagctgtgaagatactcaatcgacagaagattcgga

SEQ ID NO: 251794 - DNA, 75 bp, Homo sapiens
ccagcaccgcccctcctggaagaaggaagaggccagtacagatgacggctttgtatataatttggatgcacgttc

SEQ ID NO: 251795 - DNA, 82 bp, Homo sapiens
ctgaagactccagtatgcaactgactacaaggagttggaatcgaagcctcttaaaatggcagatgacttggacttcgagaca

SEQ ID NO: 251796 - DNA, 98 bp, Homo sapiens
tccactcagcgagcctgagagtgcggaagtctccggctggtggggcatggcccaggagcactcttcataaacaagcagatatgcaagaagagaaaaac

SEQ ID NO: 251797 - DNA, 74 bp, Homo sapiens
ggagccaggagcgacgtcaccgccatggcaggcatcaaagatctcccttgagtttagaaatctggctgagaaat

SEQ ID NO: 251798 - DNA, 83 bp, Homo sapiens
gtcagggtcgccagcgcctcagctctgtggaggagcagcagtagtcggagggtgcaggtgcgcgtggaattcatggacgacac

SEQ ID NO: 251799 - DNA, 74 bp, Homo sapiens
ctggctgtgctggcggaggctgcgccgatgaacctgactgaggataagccgtatctttttctgaggcctgcagc

SEQ ID NO: 251800 - DNA, 99 bp, Homo sapiens
aagaagtcattccttttttgaaggttttccaacctattggtggtatgtctgacagtggatcacaacttggttcaatgggtagcctcaccatgaaatcac

SEQ ID NO: 251801 - DNA, 82 bp, Homo sapiens
taacaggctgcggcaggaaaacatgcacttcgaggtgatcatggagctcagcttggtctccatggggctggtggtgatggaa

SEQ ID NO: 251802 - DNA, 75 bp, Homo sapiens
gcgtcctgttcttcctgggggactggcaggtatgatctcgtgaaaccttgagagaaactgaatgacgaatgaaac

SEQ ID NO: 251803 - DNA, 100 bp, Homo sapiens
agtaagaagaaaaaagcgtccgcttccagctttgcgcagaacccttaggagaaatcttgagagtggacagcaattgtgaagatcgccagagagttctgtg

SEQ ID NO: 251804 - DNA, 100 bp, Homo sapiens
aggacctgggggccgacatcatcctggacatggccaccctgaccggggctcagatcaagactggcgccccctgccgctcggagcgtctggccaaatacaa

SEQ ID NO: 251805 - DNA, 99 bp, Homo sapiens
tgagatccccaagggtgtctggcggtgcccaaagtgtgtcatggcgaaactaatggcagatcccggaaatccagacttgtatcatgtattaagtgttat

SEQ ID NO: 251806 - DNA, 50 bp, Homo sapiens
atccttcagcaaaagctgtccttacagaatgcagtaatagtggccttgtc

SEQ ID NO: 251807 - DNA, 90 bp, Homo sapiens
ctggggccttgacaatttgcacttagtgaaagactggagaactgtgaatgaagctgattgtatagcaaattataacaaccaactggataa

SEQ ID NO: 251808 - DNA, 75 bp, Homo sapiens
ctccactaatcaccagaacaaaatgtgcaggcatagaatgtcaagctaaccaggcgtccgctacttcagaagagt

SEQ ID NO: 251809 - DNA, 100 bp, Homo sapiens
ccatggccgccgccgatgccgagcaatcatcctcttccagtggtagcgtgtttgggtctggaaacactggaagagggggaggtttcttcagtggccttgg

SEQ ID NO: 251810 - DNA, 50 bp, Homo sapiens
gctgcagaaaccacagtggtagaggagaaggtaaagcttgatgctgaaag

SEQ ID NO: 251811 - DNA, 83 bp, Homo sapiens
agaagattgagcatggggctctagtgcatcacagtgcattccaagaatcaagcactacaaagtgatgagcgtaggacaaaact

SEQ ID NO: 251812 - DNA, 87 bp, Homo sapiens
cgccgccaaggcggcgcgcgagctggagcactcgcgtgaagctgtacttcacaaaaacagtagaggagccgtcaaatccagaggcta

SEQ ID NO: 251813 - DNA, 109 bp, Homo sapiens
ccacctaccccagcggccagatcggcttcatgctgtgcagcaagaacccggacagtcattttgtttactcattcagccctgttgcaggtcccaataaactcttcataag

SEQ ID NO: 251814 - DNA, 96 bp, Homo sapiens
cagatatccagattgtacaggttgcttgtggttactatcattcacttgcactttctaaaggctctgcagatggcatggggaggaggttgcactcag

SEQ ID NO: 251815 - DNA, 82 bp, Homo sapiens
cggcggctgaggaaagcaggaggaggtggcggcggcgggaagatgtgcccgtggttgacacgagctgtgtccccagctgttc

SEQ ID NO: 251816 - DNA, 121 bp, Homo sapiens
tggaagaagaggagcatgctgcgtgaggccgccatgggcatttctgtcacggccaaaggtggccatcaagtcaatccggaaggacaaaatcaaagatgagcaagatctgatgcacatacgg

SEQ ID NO: 251817 - DNA, 146 bp, Homo sapiens
cttggtgtgtcccaaaaattggtatcaccttcaaggagcacaagtagctgctcttccaagcaaggaagtcgacaggtgtgatgaatgcagactctgctaccattttggctgtttggatcctcctttgaaaaagtctcctaaacaga

SEQ ID NO: 251818 - DNA, 101 bp, Homo sapiens
agaaaaggtggcgtggctggcgattcgtgttcgtgagggccttttctgccgggtgggcttggactgggcgtgctccatggcagagatcctgcggtcactca

SEQ ID NO: 251819 - DNA, 100 bp, Homo sapiens
atccactattgatctgacctgcaatgattatatttcggtttttgaatttgacatctttacccgactctttcaggcgcatattaaatttcctattgactac

SEQ ID NO: 251820 - DNA, 98 bp, Homo sapiens
aaggactgtgggattccattaaaagctgaagaaaaggtgactggtctcatgagccctgaagaatgaactcagaggaggttgtttacatgaggttctcc

SEQ ID NO: 251821 - DNA, 100 bp, Homo sapiens
aaaacaaataagttatgctatgaggatgacaaactctggagtaattggagccaagaaatgagtataggccataggaaaaggatacagagtagagtttcat

SEQ ID NO: 251822 - DNA, 98 bp, Homo sapiens
tgaacgcctctgtgtttgaaacaaacattcgaggcttctttcatcgagacttaaagcctgagaacctcctctgcatgggaccagaacttgtgaaaatt

SEQ ID NO: 251823 - DNA, 97 bp, Homo sapiens
cgagcgcccgcgccgccgctgcctctgtcctccgcgcgctgctcagctgaaggcgcacagtttaaactcatatcccaggcatatgaagtgctttcag

SEQ ID NO: 251824 - DNA, 74 bp, Homo sapiens
tcttagcagtatattccaaagataattacaaacgggtcacaggtactaggtggagagtatagtgaagatgatgt

SEQ ID NO: 251825 - DNA, 90 bp, Homo sapiens
cgtgcagacatctacaaccttcgatctcctgacgagaggctggtggtttggcacctgcagccattccaacctcaacggccagtacttccg

SEQ ID NO: 251826 - DNA, 100 bp, Homo sapiens
ctcatcgccacggccaagcatactccggaagaaacctgccacagatgggttttgctgttactgctcagtgtagtcacaccttgaataagaaatggaaaac

SEQ ID NO: 251827 - DNA, 80 bp, Homo sapiens
taatttgggagatgaagcctcgagcctaaggcgctctcaggtccatcaaattgtggctactaatttgccccctgaagatc

SEQ ID NO: 251828 - DNA, 98 bp, Homo sapiens
tcccttttatactcaaaatatgtgcctcagagattgaaaatagagctttgtgtctacaggagtttccagatgtcttggaatgcactgtatctcatgca

SEQ ID NO: 251829 - DNA, 50 bp, Homo sapiens
tcccagagaggatggcatctagaagtaagactttgaccccgacgcaggct

SEQ ID NO: 251830 - DNA, 85 bp, Homo sapiens
aacccgtttgccgacccggatctcaacaatcccttcaagaattagacctttacgagaagcacagttttgtcttcagtttcctctc

SEQ ID NO: 251831 - DNA, 50 bp, Homo sapiens
actcctgctcagtgtagcattaaggaaagaaccggaggctgaagcaggcc

SEQ ID NO: 251832 - DNA, 90 bp, Homo sapiens
tggcttcttatgcgggaggacgtggcggagggcctgactttgggagccggggtcagtcggcctctgagagaacatgcatctttaagttcc

SEQ ID NO: 251833 - DNA, 100 bp, Homo sapiens
ccgagagtttgtaatgcaagaagctcagcagagtgatgacggttcagaatctcccatgatgattggtgagttgagaagtgaccttgatgatgttgatccc

SEQ ID NO: 251834 - DNA, 49 bp, Homo sapiens
agtacggtagtcaaacccccaggacagtcattttgtttactcattcagc

SEQ ID NO: 251835 - DNA, 100 bp, Homo sapiens
ggaatgtcgtatgagtatcctgaatactttttggatgttcctgacttggacaatggtctgtttgtatcctggctttgttgacgtgaaagaagctgactgg

SEQ ID NO: 251836 - DNA, 74 bp, Homo sapiens
gctgtcccgcagcctgggcggggacccgcgacccgtcaaacccaggccgccatggcatcagatgaaggcaaact

SEQ ID NO: 251837 - DNA, 90 bp, Homo sapiens
gtttgaacagcatcacacacctacctttaaccacagatccaaaatacggagctggcatatacttcaccaagaacctcaaaaacctggcag

SEQ ID NO: 251838 - DNA, 100 bp, Homo sapiens
gttgaatctcccgctcccttgaggctggggttgcgtctgttgacgcggccgactacaatcccgaggtggctttcctgggggaatgcctggtaattttccc

SEQ ID NO: 251839 - DNA, 101 bp, Homo sapiens
tacagatgaaggcagaagactatgatgttgtaaaagttattggaagaggtgcttttggtgaagtgcagttgggggcagctggcattttatgctatgtggga

SEQ ID NO: 251840 - DNA, 75 bp, Homo sapiens
taagaatattattagcacaagagcaccatactttgagggccgctacctgtctgaggaacccgagccctacctggc

SEQ ID NO: 251841 - DNA, 100 bp, Homo sapiens
ttagaggataccttggtcccagagtcatcatgaagtgatggaatggggagaagatattaaagcagtttcaaaagatgaagcagtgatgttggtgaatcat

SEQ ID NO: 251842 - DNA, 96 bp, Homo sapiens
ggcggtccgtgcgagaggaccaacggagcgctgaggcgggcgttttcttggatgaattgcttgctttggaggtgctccatctcgaaaagcgagaaa

SEQ ID NO: 251843 - DNA, 82 bp, Homo sapiens
cctcaccatgtttgcctcacagttcccgctgggattcgtagccagagtctttgaactgataaatttcaaacggaagagagtg

SEQ ID NO: 251844 - DNA, 101 bp, Homo sapiens
aagaagatttgtaaagaaaactcttaggatacaatgtctctttgctatatgaccttgaaaatcttccggcatccaaggattccattgtgcatcaagctggc

SEQ ID NO: 251845 - DNA, 90 bp, Homo sapiens
tctgctgcagaacctgtgctgcaggatcctgggcaggagcgaagtgtcatcctgtgaccaagagcaccagtctgccctggaggaagccaa

SEQ ID NO: 251846 - DNA, 75 bp, Homo sapiens
tgatgaccctgagcaaggaaaatctgaggggtcaaagaattgactgtagatccaactgctgctggtgatgttcgt

SEQ ID NO: 251847 - DNA, 51 bp, Homo sapiens
accaggattacatcatctgctgatgctgctgcagattgctgatgattttat

SEQ ID NO: 251848 - DNA, 50 bp, Homo sapiens
cagcacactcctcgcgagcaagctgttccatttcctccaagtcaccggct

SEQ ID NO: 251849 - DNA, 99 bp, Homo sapiens
ctgaaaattggtattgttggattgccaaatgttggagtcattcaggagagcaggaaagaaaaggccatccctgtggatgtcgcgctgccacagaagtcc

SEQ ID NO: 251850 - DNA, 100 bp, Homo sapiens
gaggagaaatgtggctgtctactacgtgtcctagatctagtgaaaagccatttgatgtatgcggtcagagaagaagtggaggtcctcaaagagcaaatca

SEQ ID NO: 251851 - DNA, 90 bp, Homo sapiens
gtgccatttccctctctgttgaagcaaaggccggggcagacctcctagtcctaggcctacttacaagcctccagtctcaaattatccagg

SEQ ID NO: 251852 - DNA, 98 bp, Homo sapiens
gcctagaagtggaacgtgtactaccgcaactgaaagtcacgattaggactgacaataagagaaggggtctcactatgttgtctggagtgctgtggtgg

SEQ ID NO: 251853 - DNA, 98 bp, Homo sapiens
gaagccttgggtttctttcttaaaggactgatttttagaactccacatttgagcatccagcacgtgtatggtgcccagcaccccccctttgatccact

SEQ ID NO: 251854 - DNA, 100 bp, Homo sapiens
taaaattttacataagaagttacctttttcagagctgtttcccattcagatggagggtgtcaagctcacagtcaacaaagggttgagtaaccattttcag

SEQ ID NO: 251855 - DNA, 101 bp, Homo sapiens
gccccatccaggttcccatggttgccggctcccctctcaggacaacccagatgtgcaacaaagtgcgatggcataatcaccagcaacacccgggacaataa

SEQ ID NO: 251856 - DNA, 74 bp, Homo sapiens
gcggacgcaggagcgatggcagcgaccgatatagctcgccaggtggctacaagaattagttgatcgagtgctgg

SEQ ID NO: 251857 - DNA, 80 bp, Homo sapiens
cgggtggaggttcgagcgctgttctcgctccggagccgctgcacatttcgacaaaacctgctacaaccccctcttcaact

SEQ ID NO: 251858 - DNA, 75 bp, Homo sapiens
ctaaatctcaaacagacagaggagccagtgcgggaaagaggagatgcttctggtggctctcctacctcctgctct

SEQ ID NO: 251859 - DNA, 89 bp, Homo sapiens
tgtctgtttccctttggcctgcactgtactggaatgcctattaaggtcaagagcaatctgaatccaaatgcaaaggagtttgttcctgg

SEQ ID NO: 251860 - DNA, 75 bp, Homo sapiens
atttggaacattatctggacactggctctgaagcaccgacaaggcaagaatcacaagatgcgcatcattgccttt

SEQ ID NO: 251861 - DNA, 75 bp, Homo sapiens
gagtgggcgagaacgtccactgcgggccggcgaaagctggtggacgacatccttggagaaggcagcgacgacagc

SEQ ID NO: 251862 - DNA, 75 bp, Homo sapiens
actcggctgccggaggccgaagtgttttacctcaatcatatatccacacaagtgcttctcttgacatttctcgaa

SEQ ID NO: 251863 - DNA, 82 bp, Homo sapiens
tgatatgcaatgtcacttacaacattaatcagatactgcatttaagcatgatgccttcttctgtagagtgggcgctttgcag

SEQ ID NO: 251864 - DNA, 128 bp, Homo sapiens
ccttgacatcaaacaggaagagtcttaccgggacaaggagacaacagcccagagaggctgtcacccaggtgacagacatcacacctccagtgcaatccctgttcctaagagacaaagctccatatttg

SEQ ID NO: 251865 - DNA, 98 bp, Homo sapiens
cggcccaaggccatctacctggacatcgatggacgcattcagaagacttaattcagtgcacaaatgagatgaatgtgaacatcccacagttggcagac

SEQ ID NO: 251866 - DNA, 100 bp, Homo sapiens
ttttggaagacctcaagtagcaaagctttatttgaaggtagacgcatcgaatttgcagaacaaataaataaaatggaggctaggcctagaagacaatcaa

SEQ ID NO: 251867 - DNA, 101 bp, Homo sapiens
gccgtgaagatgcgcgccttccagcaaagccacaacacttgagaaaacctatggacctgcatggatagcctatggacattcatttgcggtggagagtgagc

SEQ ID NO: 251868 - DNA, 100 bp, Homo sapiens
ctagcagaaaatcaaaacgctgattaaaagaagcacgcttaaaggagctgctcctttgaagatactaaatataggaaatgtcagtactccattgatgtgt

SEQ ID NO: 251869 - DNA, 98 bp, Homo sapiens
gaataccaagctcggatccctgaatttgatccagacttcagtgccctgaacggttagagaaattaatgaaggagctccaccaggtgccttcacaactc

SEQ ID NO: 251870 - DNA, 98 bp, Homo sapiens
agggcctggagtgtgtgcccactgaggagtccaacatcaccatgcaggagtctagtaaaagccctaaaacgatgaagaaatttcttcataaaaggaag

SEQ ID NO: 251871 - DNA, 83 bp, Homo sapiens
ctgcgcttccccatggggctggcctgcggcgcctgggcgctctgagatcgccggggagtggcctgtacagcaacctccagcag

SEQ ID NO: 251872 - DNA, 100 bp, Homo sapiens
ggagttatgccaaaaggacgtcctcctagtgctagcagcttagatgccatttctcctgttcagcttggatttacactgggcaacgtggttggaatgtatc

SEQ ID NO: 251873 - DNA, 104 bp, Homo sapiens
gtgcaggaccctaacgacaggcgcctccggcccatttacggtctactggggttcatcccatctgagccaggcctggcttttcttggctgcaagctgagagctgg

SEQ ID NO: 251874 - DNA, 74 bp, Homo sapiens
ttgacagctgcaaggagttactgaaggatgcctttgtggaactgtacggccccagcatgcggcctctgtttgat

SEQ ID NO: 251875 - DNA, 98 bp, Homo sapiens
gatgaagaagaagattaacctggagttaaggaacagatccccggaggagatgcgctggctccctccctccgaggctacttctcagggctggaagtccc

SEQ ID NO: 251876 - DNA, 100 bp, Homo sapiens
gccctcagtaccagagacagaagcagatggattcgtccttttaggttgggataattcttcactattccacccttgccacagtactatgggtaggagtgac

SEQ ID NO: 251877 - DNA, 50 bp, Homo sapiens
gggagaaggcagcgcgttgtacccgaggttcctttggtatcatccacaag

SEQ ID NO: 251878 - DNA, 100 bp, Homo sapiens
agttacaagcgtcttgccaccggcttccctttgtaaattgagctctgcacgctggggagtttgttggggggcttgcttctgacatgtctgatgagcgcat

SEQ ID NO: 251879 - DNA, 82 bp, Homo sapiens
ctgaagagcgacaagccgctggcagccgcggatctcaccgccgctcagggaaacccagcgtttgctggcagaaccagttcct

SEQ ID NO: 251880 - DNA, 98 bp, Homo sapiens
tgggaaggattttcaagccttggaaatggaggaagaagaaaagcgaaaagttcaaacacacgtcagcagatggagcagcatattgtatgggacgtatg

SEQ ID NO: 251881 - DNA, 82 bp, Homo sapiens
gggcatgatccataatcggtttcaaggttgaaggggcccggccaggactcggggaagggtggcctgagagcagcgatgacct

SEQ ID NO: 251882 - DNA, 100 bp, Homo sapiens
gctccgttctccctcgaagcactccccccagctccatgaatggaaatcggctccgcagatgcacccactgggcctatgtaataacaatgacgaagaggac

SEQ ID NO: 251883 - DNA, 101 bp, Homo sapiens
caacgatgttaatggggaggccaaagagacacagcccatttttttagcactgtgctgtggcctctctgcatcccaaacgtaaacaagtgacagaattgtta

SEQ ID NO: 251884 - DNA, 101 bp, Homo sapiens
gcgacctcagccgcgaccgcccgctcgtactgctgctgcacctgctgcaacttgggccccttttcaggccacatccacgtcctccgagcctacatcaagac

SEQ ID NO: 251885 - DNA, 83 bp, Homo sapiens
gagcacagagcctcgcctttgccgatccgccgcccgtccacacccgccgccagctcattgctatggacagtgctatcaccctg

SEQ ID NO: 251886 - DNA, 100 bp, Homo sapiens
tgcttcgttatttcgggcactccacagattctgttgcgaaggcagccatctttagttcgtctttcctagagagattccaggagggcttcgtgtatggacc

SEQ ID NO: 251887 - DNA, 101 bp, Homo sapiens
tgtgctgtctgagttgtcctatgcccctatgactccagaccacttcccaagcctcttttgcaagcccagcctgactcctggagattgtgaatagctccatc

SEQ ID NO: 251888 - DNA, 90 bp, Homo sapiens
cgtgagctccggcccgggcgagcgggtgcgtctgccgcagagtcggcacctgaaggacatggagacttggagctgatgtctgtgctgtcc

SEQ ID NO: 251889 - DNA, 100 bp, Homo sapiens
tcgcggcttctctggcgttggccagtcagccacagagctcttcagtatccccatcagccagtttccgaggtgctgagaagcacagaaactccgcagacta

SEQ ID NO: 251890 - DNA, 50 bp, Homo sapiens
cgtcaatgacttacgccaagaagaaattttcctgcatggagtgctacatc

SEQ ID NO: 251891 - DNA, 98 bp, Homo sapiens
taactgtgggtttgttggaatcaggatatagtcatcatcagatttgaaatatttaaagtggatacaaaactatttcagcaatgcagacaattaagtgt

SEQ ID NO: 251892 - DNA, 50 bp, Homo sapiens
tctttgggaaagccactcgaaaagtctctagtgatccctgaaaagttcca

SEQ ID NO: 251893 - DNA, 83 bp, Homo sapiens
cgcgaagctggccaaagcctgcccagacggctcacctgtgcgggatggaacaaaagtcaggatggctaaaggtgaccccaaga

SEQ ID NO: 251894 - DNA, 83 bp, Homo sapiens
cccggggagaagcgggcgcccgccgccgagccgtctcctgcagcggcccccgccggtgtccccaactcctgcccagccagtcc

SEQ ID NO: 251895 - DNA, 74 bp, Homo sapiens
tgctgcccagtgactccgtgctgcacggaagaatatcagctccagagccatccaaaactctgtttgtcaaaggc

SEQ ID NO: 251896 - DNA, 76 bp, Homo sapiens
cttcgtttgccattttcttatggagaactgtccttgttgacacagcattgttggttttgccatgtactattttacc

SEQ ID NO: 251897 - DNA, 74 bp, Homo sapiens
tccccacttcatatgtcgaagtctgtttggacaaaaatgccaaaggttgctacgatttctgcaaacggagacaa

SEQ ID NO: 251898 - DNA, 83 bp, Homo sapiens
gaagaaggtccgcgttaaatattgtcatagatgatgcaactatcttaatcctcggagggtgtggcggtcccaatgctgtgagt

SEQ ID NO: 251899 - DNA, 100 bp, Homo sapiens
gagatttaccgcaagggcaccatctccttctttgagattgatggacgtaagaacaaggtatgggcactaggaaaagacttcttccatcaagcttaattgt

SEQ ID NO: 251900 - DNA, 80 bp, Homo sapiens
ctagcagacacggtggctactctgcctcggggacgaaagcaggtcttgccccagaagctgcgggcacatccacgcctgaa

SEQ ID NO: 251901 - DNA, 100 bp, Homo sapiens
cccttcatcccagtcacccaggcctccgcttctccggcctccctgctcttaccgggaggtgttgacagctcttctaccacaagcagtgcttctccaatgc

SEQ ID NO: 251902 - DNA, 75 bp, Homo sapiens
gctgctcacatatggatactttcacagttcaggccccttcacagatgtagtcactacaaatcttaaattgcgaaa

SEQ ID NO: 251903 - DNA, 50 bp, Homo sapiens
caagaagctggtgtgcggagatgaagacagggtcttgctctgttgcccag

SEQ ID NO: 251904 - DNA, 98 bp, Homo sapiens
gggacacacctccattggatttaaaagacagtcctcgtcagcactgactttcagctatggaatcgagtggctacacacttataaggaaagatagtgag

SEQ ID NO: 251905 - DNA, 83 bp, Homo sapiens
cttcgctggccatttaggagctctgctcaaagccagacgcactattcctgatcagagaactccagttgcttcaacacacagta

SEQ ID NO: 251906 - DNA, 97 bp, Homo sapiens
ctggtctcaggcaaggtggggactgggcacatcatcaatacggaggagacatcacagctttcccagatcgggaggaaaaatatggaatgtgttttac

SEQ ID NO: 251907 - DNA, 90 bp, Homo sapiens
cgccaagatggcgacgagtcagtatttcgacttcgcgcagggcggcggcccgcagtacaggcctccgaccagggagaccttccatcctcc

SEQ ID NO: 251908 - DNA, 98 bp, Homo sapiens
tgggccgaccccagagcggcgctggacagttacagaatgtctgaaggggacagtgtgggagaatccgtccatgggaaaccttcggtggtgtacagatt

SEQ ID NO: 251909 - DNA, 100 bp, Homo sapiens
cctcaagctgctgcaccgcggcgccgacatcaattacgccaatgtggacggactcactgccctgcaccagtgggtaattccagaattgattggccatacc

SEQ ID NO: 251910 - DNA, 97 bp, Homo sapiens
gtggattttgtcgctggacgtctagagatgtgggcatggcagacaaatctgtaggtggcggctttgaaatacatcccatctgtcctgcatgatgtag

SEQ ID NO: 251911 - DNA, 82 bp, Homo sapiens
tgaaggactccgggtgaggccggccacgccccgcacggtgtggacactgccagcggctgcagccgacttggaatgacctggg

SEQ ID NO: 251912 - DNA, 137 bp, Homo sapiens
ctcaagatggcggccaatgtgggatcgatgtttcaatattggaagcgctttgatttacagcagctgcagcggccttgcaggccactcgagccctaatggtggtctccctggtgctgggcttcctggccatgtttgtg

SEQ ID NO: 251913 - DNA, 100 bp, Homo sapiens
tgaagagtgacttgtttctggatgattctaagagtgtttgacaagtacatgactatatcaggatttcaaattgaggaaaccattgaccgcgagacttctg

SEQ ID NO: 251914 - DNA, 74 bp, Homo sapiens
cgggctggagacatggaccgcggcgagcaaggttacgagaagtttctgagaagctgaacaaatataatttaaac

SEQ ID NO: 251915 - DNA, 75 bp, Homo sapiens
gcaatcctagaccacccctatcgagaaattatgaagtgtgaaaaaacaactgatgtgaagaaaagtaaattctgt

SEQ ID NO: 251916 - DNA, 74 bp, Homo sapiens
cccgtgggcatcttccagaaacgcaagaagtacaacgtgccggtccagtttgaaaatctgaacacagttgctga

SEQ ID NO: 251917 - DNA, 98 bp, Homo sapiens
gcagccactccccgctggacagcgccgacgtccgggtgcacgtgccacgcacggagccccagtggcaccagtgacgggcagaggggacttgccattgc

SEQ ID NO: 251918 - DNA, 100 bp, Homo sapiens
ttcttgcgctgcatcgaagcctcaggtgcgttcttcacaaaggtggtggatgtgggtgccacctctctgaagcttgagatctgggacacagctggccagg

SEQ ID NO: 251919 - DNA, 100 bp, Homo sapiens
gtcttgaatgactggaaactgattggaaactctttgggaaagccactcgaaaaggatgaactcaactttggttggtcagatgggaaacgtcttcatttta

SEQ ID NO: 251920 - DNA, 88 bp, Homo sapiens
ccagtggaggcattttggggcagaatacagagatatggaatcaggctccagcccccttttggacatcgttggcggccggaaggcgagg

SEQ ID NO: 251921 - DNA, 50 bp, Homo sapiens
ggttgaaatcctgagagcaagcaaggaaattgagaggctgactgagcgac

SEQ ID NO: 251922 - DNA, 100 bp, Homo sapiens
cctgcaggcagaaagtcttcctacgaccgtcttttcccttagaggcaccagtgacagctatattgtgcgtgtcaaggctgtggttatgaccagagatgac

SEQ ID NO: 251923 - DNA, 100 bp, Homo sapiens
gggagcaggccgacatcctgccggccaactacgtggtcaaggatcgctggaaggtgcagtgcctgatttgagatggggtcccaggtctcggtggaatcgg

SEQ ID NO: 251924 - DNA, 100 bp, Homo sapiens
gtcctagaattgatactcagcagctggaccggcaaattaaagcaattatgaaagaagtcattccttttttgaagaatcccgcccattgtcagttcctgtt

SEQ ID NO: 251925 - DNA, 83 bp, Homo sapiens
ctcagggaaggggcagcacatgagttctctggtgatgttgatagcctggaactgggggacatggtcgagtatagcttgtccaa

SEQ ID NO: 251926 - DNA, 100 bp, Homo sapiens
atgcactgcaagaaacaagagccaacaagcatctgttatataaggagcatttctaccagaggcagcaccggctgcccgagccctcctgcccacagctggc

SEQ ID NO: 251927 - DNA, 74 bp, Homo sapiens
tcaggacgtaaatggaaccctggagtcttttagtcctgctatacagctgcaccttgtacatcaagctccatgta

SEQ ID NO: 251928 - DNA, 75 bp, Homo sapiens
ttgacagctgcattcaatcttttggtacttgaagaagcagaagctcaacatttatatcagtccatcttgcctgat

SEQ ID NO: 251929 - DNA, 87 bp, Homo sapiens
gggaccggagccgcagccggcggaggaggcagtagcgggggactcgatggaccgcggctggcaagagcttactccacgggaacagcc

SEQ ID NO: 251930 - DNA, 109 bp, Homo sapiens
ccgggaggtaagaggtttgggactgccccggcaactccagggtgtctggtccacgacctatcctaggcgccatgggattaggagcagacagcaagaacctgtacccttt

SEQ ID NO: 251931 - DNA, 74 bp, Homo sapiens
ggtggaataacctaagtgatggccagcggactgtgacagatttctgagagagcagacaccatcttatttctgtt

SEQ ID NO: 251932 - DNA, 100 bp, Homo sapiens
ctctcggcagtcatgaccgcggttctcaaggacgtgaatctgaggccggaacagctgggggacatctgtgtcgacatcttcatttgattgtacaccatct

SEQ ID NO: 251933 - DNA, 75 bp, Homo sapiens
ggcggatctggaggagcagttgtctgatgaagagaagacagaccccgtgcggctgacacagctgtatgagcaggc

SEQ ID NO: 251934 - DNA, 75 bp, Homo sapiens
tagaaaagacggcatctgctacctttgagagtgccagcattttgaaagcgaagcagaagccgtagaatcagcggc

SEQ ID NO: 251935 - DNA, 50 bp, Homo sapiens
accagaagtacatctttgcatcattggttctccaaggacataaaactttc

SEQ ID NO: 251936 - DNA, 83 bp, Homo sapiens
atgtgctatgcctgtaacaagagcatcacagccaaggaagccctcatctgcccaagactcattaccagagaagctggctgtgc

SEQ ID NO: 251937 - DNA, 100 bp, Homo sapiens
aacgttatagcaacagcctctgattacgacatggctgagatcaccaatatccgacctagctttggcatgtcagagcgggagcgacaggtgatgaagaagc

SEQ ID NO: 251938 - DNA, 50 bp, Homo sapiens
ggtgaatggagatgcagctcagcaggtccttggtcaaggagaagaatgga

SEQ ID NO: 251939 - DNA, 75 bp, Homo sapiens
tcattaatgagcattgctgctacaccagatctgagtagaaacctgatacatgaaattcacagtagagcttttgcc

SEQ ID NO: 251940 - DNA, 90 bp, Homo sapiens
gcagtttctttatccctttatctgtgcatgaacaggagtcagcattggtaatagtgctgtgctgcggaagagtggagtctaaactttttc

SEQ ID NO: 251941 - DNA, 51 bp, Homo sapiens
gtgactgctctgagggctgcatagacatgttccaaaagcatttgctgcaag

SEQ ID NO: 251942 - DNA, 80 bp, Homo sapiens
ggcctctgaaacagtgctgaacttggcttttgcgcagcacctgtgattacagaggaaaccacccttcaactggaagatat

SEQ ID NO: 251943 - DNA, 90 bp, Homo sapiens
gtgctcagaagcttacaaagctgcctcgagaatatggctcaagcctggaagatgacgtggtgggggacacttcagggtactaccagcgga

SEQ ID NO: 251944 - DNA, 51 bp, Homo sapiens
ccccacatcaatgcactgccaatggtggtcttcaagctgacagagaagctg

SEQ ID NO: 251945 - DNA, 100 bp, Homo sapiens
ggcgggctggagacatggaccgcggcgagcaaggaaaaggggaagatagtgatgtactcagtataaatgcagatgcttatgacagcgacatagaaggccc

SEQ ID NO: 251946 - DNA, 100 bp, Homo sapiens
aggactggaggggtgcctctgatcaaagcccccaagagagagttgtctgctggttctcagcttgaagaagattctgcagtccttattgatcctttttctt

SEQ ID NO: 251947 - DNA, 100 bp, Homo sapiens
gcaaggcagagagctgcgcctgaataaagcctgtggaaccgttgccgactgcacatttgaagagctgtgtgagagagctgtgtaaaaagtccagctatag

SEQ ID NO: 251948 - DNA, 90 bp, Homo sapiens
agaatcctgggtttagccattgaggcaactgaggagatagaggaccgggaaacgctggctctcctggcagcaaggagtgaaaacgaaggc

SEQ ID NO: 251949 - DNA, 75 bp, Homo sapiens
cctggggctgtgctccatggcgagctgggctgtggaaaatctctgttctcacaaagtctccccaatgctctacaa

SEQ ID NO: 251950 - DNA, 74 bp, Homo sapiens
ccggacagagcccgtggtcgcgcagcactgcctcctaaaccaccaaaacctactactgtagccaacaacggtat

SEQ ID NO: 251951 - DNA, 75 bp, Homo sapiens
gcagaaccccaggactgcgcccccgggagcgggcgcccagagatatgagatcctgactccaaactccattcccaa

SEQ ID NO: 251952 - DNA, 82 bp, Homo sapiens
ggcagcagcccgacgcaaaccaaggatctggggatcttcgcactatcccaaggcactatgtcgtccgaggcccagagatgac

SEQ ID NO: 251953 - DNA, 83 bp, Homo sapiens
atcggagcaaagcctaccagtgtgcagctggcaaaggagtgcagattcactttataggaacagcttcagcttcagtgatgaaa

SEQ ID NO: 251954 - DNA, 100 bp, Homo sapiens
cccaggatgagttacgaagcctgttcagcagcattggtgaagttgaatctgcaaaacttattcgggataaagtagcagagggtgatgagacaggagtgat

SEQ ID NO: 251955 - DNA, 83 bp, Homo sapiens
cggcagccgacggcaaaggtgtcgtggtggtcattaagcggagatccggaagtggccatgcgcaagctggtgcgctcagtgac

SEQ ID NO: 251956 - DNA, 95 bp, Homo sapiens
atgggttcacgtcgtaatatcatctgattctttagctgataaaaattatacagaagatctttcaaaattacaggcattagacagaaagctggaag

SEQ ID NO: 251957 - DNA, 90 bp, Homo sapiens
tgcgggcggcttgggcagcccgcgggcgcctcagtcacgccgatgatggagctgaagcccaacgcaggtagcgaccgtgcctgggtctgg

SEQ ID NO: 251958 - DNA, 100 bp, Homo sapiens
cacattgcagcactaatgcatgatcagggcaaacttgaagataaatcttttgactccagctctttagaggatctaaagtgaccttgatggacagtggaag

SEQ ID NO: 251959 - DNA, 90 bp, Homo sapiens
actggagtttacttggtccagaacatccactagcctcactaaagctctttccaacaactgatcctgtgggtactttgctccaagttccag

SEQ ID NO: 251960 - DNA, 51 bp, Homo sapiens
cagacagaatccctgctaccagtgtcctctccctccccgcatacttcagcc

SEQ ID NO: 251961 - DNA, 73 bp, Homo sapiens
tccagtggaaaaggcattttggaggcagacggtgagcgtgatcgtgcaggacgagggagtggacgccatcccg

SEQ ID NO: 251962 - DNA, 90 bp, Homo sapiens
cagacctacggagggagctggaaattcctgacgttcattgatctgaatttaagaagaggattacctcaggttccttacttcagtctctat

SEQ ID NO: 251963 - DNA, 75 bp, Homo sapiens
ctacttagctcagcaattcttaccttgaagcgcaacaggaaaggagagaagaatggcaagggcctacggcatttc

SEQ ID NO: 251964 - DNA, 97 bp, Homo sapiens
cacgaatctgcccacccctcctgtaacccagcctgtttcacttcttggtcgatggccaggtggtcttcataaactatactgccttgtgatgcctccc

SEQ ID NO: 251965 - DNA, 74 bp, Homo sapiens
tgctgatgaaaactactacaagagtaacacagcatctggtggaatgacacgacgaaatacttatgtttgcagtg

SEQ ID NO: 251966 - DNA, 76 bp, Homo sapiens
ttttggcctcatactctgttatagataaacaaggtactgtgagaatagagatgtttcgaaatatgcagaatgcaga

SEQ ID NO: 251967 - DNA, 74 bp, Homo sapiens
ccagaaggaagatggcggatctggaggagcagttgtctgatgaagagaaggaactcctgcagacccaggacttc

SEQ ID NO: 251968 - DNA, 82 bp, Homo sapiens
gaactcaagtcaccgtggagctccgccgccccgaaactttcaccgcgagcggaccatggtgaatccgggcagcagctcgcag

SEQ ID NO: 251969 - DNA, 90 bp, Homo sapiens
ctttgggaagtggagcaccgatgatgtgcagatcaatgacatttccctgcaggttagctttgtacatagcatctcactttgcacaacaac

SEQ ID NO: 251970 - DNA, 98 bp, Homo sapiens
gaggagaaggcaagccggaaagagcgaaagaaagaagtggtggaggagtcgaggatggccagaccgtgaggatgcctgtgggaaaaagggaaattttc

SEQ ID NO: 251971 - DNA, 82 bp, Homo sapiens
tcctgcaccacaaggtgtacgatttgaccaaatttctggaagaggagcctgcaggcctgaaccagggtgatgctgaagatga

SEQ ID NO: 251972 - DNA, 148 bp, Homo sapiens
cttctacaacgtggacatgagctacttgaagaggctatgtggtaccttcctgggtgggcccaagccaccccagaggtcggcggagttggctttctctctccctgcattgcctctggccgagctgcaaccgcctccgcctattacagag

SEQ ID NO: 251973 - DNA, 100 bp, Homo sapiens
atgtggaggggaatagactccatctatccatatgaggtgtcatggagaaactccagctgggcccagagattctgcagcgggaaaatccaaggcttattta

SEQ ID NO: 251974 - DNA, 98 bp, Homo sapiens
ttatgagtatttcctgccctacatggattttgaacttgaattcccagcctcgcttgcatctagacacagaaactggcaagatgtttacctggggccga

SEQ ID NO: 251975 - DNA, 104 bp, Homo sapiens
ctgctttatgctgtacatggaaatcatgtgaaatgtgtaaagatgctcttagtctctgctggatgaaccgaatcctaacagtccagccaatagccaggcagcac

SEQ ID NO: 251976 - DNA, 75 bp, Homo sapiens
ctggagcggcgcagccggagtggggccgtgaggcctcaggagtgcaagtagctgatgaagtatgtcgcatttttt

SEQ ID NO: 251977 - DNA, 75 bp, Homo sapiens
gctggacagaatattcaatgtaatgggatttcctgcaggggactcagagtcagagacttggtccgagaggagcag

SEQ ID NO: 251978 - DNA, 90 bp, Homo sapiens
gtctttccaaaaggtcaaggttcacaagggtgtccgcaatgttgccagtgtctgtctgcagattggctacccaactgttgcatcagtacc

SEQ ID NO: 251979 - DNA, 85 bp, Homo sapiens
gagctcgccttggagagcccaggagcaggggagacatgcaccttgcagagtgaagtcaagcccatcctagagaagctgacccagg

SEQ ID NO: 251980 - DNA, 100 bp, Homo sapiens
ggcggcctaggtgcggtgggcgctcgtccccggctgtcccccgactcccggcagtcctgacatccataaaaattcatcagagagcattttactactgagc

SEQ ID NO: 251981 - DNA, 142 bp, Homo sapiens
ctgcagaatcgagagagatctgctatttctttgtggagacatcaatgtatttcttaccaaaagacactttcaggcgaccgactggaccccacggccgtgaacatcctgcagcagatcattgagctgggcgccgagacccatg

SEQ ID NO: 251982 - DNA, 100 bp, Homo sapiens
acctagagaatgaattttcaccattgaatatattagaaccattctgccttggtgcctggaatacttattaagaaacgatgcaaatccagggatccgtgat

SEQ ID NO: 251983 - DNA, 82 bp, Homo sapiens
ggctgctaatgctctgggtctctgggggatatgagactttctactcggaatatcctgagtgttgcgtggatgtaaaacccat

SEQ ID NO: 251984 - DNA, 82 bp, Homo sapiens
tcagggtttccaccgttcgttcaagagtgcctggtgaagaatgtgatgggatcactagcatgtctgcggagagcggccctgg

SEQ ID NO: 251985 - DNA, 95 bp, Homo sapiens
aaaggctgctctgaagcgcacgacctccgactactttctccttcaagcttcccatcgacggtcagtgcgcacgttgtaatcagctgaggccatgt

SEQ ID NO: 251986 - DNA, 98 bp, Homo sapiens
gcatcagccgtttgtaaagcacctgtcgtgagccagcaggaggagcaatctcagaactgttatgaagaccttcgaagttcttcattctttctcacttt

SEQ ID NO: 251987 - DNA, 100 bp, Homo sapiens
tcacttctttacttggtgcaggaaggcagtctttgctacgtacagcaaaagccaaaactggacaagccaaggcatctgtagccaaagtaaacaaatctac

SEQ ID NO: 251988 - DNA, 50 bp, Homo sapiens
ctccagagtggctgggattacaggctggagggcagtggcatgatctcggc

SEQ ID NO: 251989 - DNA, 51 bp, Homo sapiens
caaatccgggggcaaggccaaaaagaaggcaattaagttggaatatgcaag

SEQ ID NO: 251990 - DNA, 74 bp, Homo sapiens
tgactggaaacaatggcatttacagaaagagtcaacagcagtggcaacagttcaagcaagtttgctgctgttgg

SEQ ID NO: 251991 - DNA, 50 bp, Homo sapiens
aatactaaatgtgttaccataccaaggccgggctcggtggctcatgtctg

SEQ ID NO: 251992 - DNA, 96 bp, Homo sapiens
ccacagtccttctgcagtccctcgtccagccacccccagaccccaccaacaactgaacgctttggtcaggctgctacaatggaaggaattggggca

SEQ ID NO: 251993 - DNA, 103 bp, Homo sapiens
atgagaccaacacagacacgaaggttggaaataataccatccatgtgcaccgagaaattcacaagcaaatgccagatgttaatgtaagctgggatggagaggg

SEQ ID NO: 251994 - DNA, 82 bp, Homo sapiens
attacatgagaccttgtgtattaacactgccagtgaaagatgtagaagataaacctgaacaacaaaccagaacaagagagac

SEQ ID NO: 251995 - DNA, 95 bp, Homo sapiens
agcgcagacgatttcagaaaaccaagaacctgctgacaggagagacagaagcggacccagaaatgatcaaggattatatctgtccaagatgcgag

SEQ ID NO: 251996 - DNA, 89 bp, Homo sapiens
ctgtgataaaaaaaaaattcatctgggcggtatctggaacttggaagtgagctcacaatgactcaagctgccacatagtgttgattgtg

SEQ ID NO: 251997 - DNA, 78 bp, Homo sapiens
gagaaggagggaggggaaacacaaagccggctacgcgctgcgagacccatcctcatgccaacaaactacccttgaagg

SEQ ID NO: 251998 - DNA, 82 bp, Homo sapiens
cggctgtgtggatgtcggcgaagccgcgggcgagagctgtaggtaaaacttgcctactgatcagttacacaaccaatgcatt

SEQ ID NO: 251999 - DNA, 78 bp, Homo sapiens
aaagggttgtagacatggcggccatcaggaagaagctactatggaggaaactgggccagttttagcttttcaggacta

SEQ ID NO: 252000 - DNA, 43 bp, Homo sapiens
gctgggcgagtatctggaggagatgtggacgagtgctcactag

SEQ ID NO: 252001 - DNA, 82 bp, Homo sapiens
gaaggaacgaggcaaggagctaaagcagcgtgcgttcagccctgggaggcctgtgggagcaaatctgtgtatgacggcccgg

SEQ ID NO: 252002 - DNA, 82 bp, Homo sapiens
cttaaggtcttcagcggggcgctccaggaggcactcacagatgaaggatttgggggcagagcacttggcaggtcatgaaggg

SEQ ID NO: 252003 - DNA, 76 bp, Homo sapiens
gagccaagtgccaatggatggcaggaatgttttgtttggctatgccaccacagtcatccccagggtctatacatac

SEQ ID NO: 252004 - DNA, 100 bp, Homo sapiens
atgtaatgcagccttattacaaagacattctcccctgcctggatggatacctgaagacttcagccttgtcaggctgaccggttccctgatgtgttacctg

SEQ ID NO: 252005 - DNA, 80 bp, Homo sapiens
atcttctgcaaagccatgaactcatgcagctctccaatcctgaagtcaaaatggaatgcatctctgctcttcctctgggc

SEQ ID NO: 252006 - DNA, 83 bp, Homo sapiens
ccagcagcaccctccaatggcatcaccatgtacggggccacgcagtcacagagtgacatggtcaaaatgcagatcttcgtgaa

SEQ ID NO: 252007 - DNA, 101 bp, Homo sapiens
gatccgacttgccggcagaacttacgctgcgggaccccgggcactgttgctgctgcgggaggtcatagacatgacaggccgggagcagaaggtctactaca

SEQ ID NO: 252008 - DNA, 95 bp, Homo sapiens
ctgccacgtccaagcaaaccgggaaaggagaggatcccggagccgtaagactttgaccccgacgcaggcttcagtgattgccgcggatcagaagc

SEQ ID NO: 252009 - DNA, 98 bp, Homo sapiens
gaagccttcctggctgatgcaaagtggattttgcacaactgcatcatttataatgggggtgtcatggagaaactccagctgggcccagagattctgca

SEQ ID NO: 252010 - DNA, 90 bp, Homo sapiens
ctattttccctcctcaaactgactttgcagccacggagaggaattgaatgatctggcacgggaccctccagcacagtgttcagcaggtcc

SEQ ID NO: 252011 - DNA, 96 bp, Homo sapiens
aaaagcccagccgctgtctgattttaagctggcaaagtgggaaaaataaagtgttgagtaaacagaccaagttggacctctgtgagtgaaagcctt

SEQ ID NO: 252012 - DNA, 86 bp, Homo sapiens
cgccattttataggccttatgcaaatgatagagggaatgagacacgaagaggtgtggtggcttaagagaattttcccaacgaattt

SEQ ID NO: 252013 - DNA, 87 bp, Homo sapiens
gtacttctgattttgaaacacctgggtctgggcttcccgggcgagcggtgggcctccccatggccacccatggaccagtcggcattc

SEQ ID NO: 252014 - DNA, 90 bp, Homo sapiens
gattgtgatgaattgtgctgatattgatattattacagcttcatatgcaccagaaggagatgaagtaccacttccgctgtcacggtaaag

SEQ ID NO: 252015 - DNA, 100 bp, Homo sapiens
tttggaagaaggaagagcaacctggaaactgacaggaaaggatgacaagttgggagtcacagggacatttgcatgaccgctacggacagctggtgaatgt

SEQ ID NO: 252016 - DNA, 51 bp, Homo sapiens
cacgtacagaatacattcagccgtcagaaaatgggaagcttcccttcatgg

SEQ ID NO: 252017 - DNA, 78 bp, Homo sapiens
ttttggcattgacatttaattttagggtcctttatatagaagggagagtagagctaaaaaagtccctgtacgccatct

SEQ ID NO: 252018 - DNA, 101 bp, Homo sapiens
atcctttggaagagttcgtgaaagctttctgcccagagctcctggaccaatgcatcttcccaccaccttaaaccactggctggtgagattggagagatgaa

SEQ ID NO: 252019 - DNA, 100 bp, Homo sapiens
cggcaatggcggcgctgacgagaggtctttctaccctggactccatctgtgactccctgagtgttgctttccggggcattagtcactgtcctcctagtgg

SEQ ID NO: 252020 - DNA, 100 bp, Homo sapiens
gacggaggagcttgtaccaccgatgtgttcagagcaacattgttttgttgacacaagcatttagaagaaagtttgtgattcctgactttatgtcttttac

SEQ ID NO: 252021 - DNA, 74 bp, Homo sapiens
cttcgccaaggctggcgcagtcgtggtcccaggctgcacccatggcagaaggaggagggcagaatcatcacgaa

SEQ ID NO: 252022 - DNA, 75 bp, Homo sapiens
gcaaagtgtccccggcaagaaggtggtattaaagataatcaaacattatcaagaagaaggacaaggaactgaagt

SEQ ID NO: 252023 - DNA, 50 bp, Homo sapiens
aacccgtcctctcccgagtttttcatgcctcaggcccaggcccaaggcca

SEQ ID NO: 252024 - DNA, 73 bp, Homo sapiens
gctgctcctgtacgtagtcacggtcttgtgctctaaggtctgagcagagggcggggtgcaggcggaatggccc

SEQ ID NO: 252025 - DNA, 75 bp, Homo sapiens
tgtggtgcacacgccctgcatcgagcagctggagaaggtgtgtgtgtgcaggccacagcagcatgcccttggtgt

SEQ ID NO: 252026 - DNA, 80 bp, Homo sapiens
gggccagctgacggagatggtgcagaagatggaggagatattatgcctggtgatcctgatctgcttcagtgcctccacac

SEQ ID NO: 252027 - DNA, 100 bp, Homo sapiens
cgcaacggcaacttccaccccaagcaggccatcgtggcccgagccaacagtctgaagaattccggagtccccgatgacatcttcaagctagatgatctct

SEQ ID NO: 252028 - DNA, 50 bp, Homo sapiens
gcctccgccaccgtgcacatccgaatggttaccggtttactaaaatagtg

SEQ ID NO: 252029 - DNA, 100 bp, Homo sapiens
tgggcaccttgcgcttcttgcagtcggtgaaaggtgtagcagtcactcggcctacacccacagcatcgaccttgtgaacccagcgacctgactgccttgg

SEQ ID NO: 252030 - DNA, 74 bp, Homo sapiens
gctggtgcagaacattgcgcggcagggatgtgcccttctcgtaaagttgttcaatggctgccccctccggatcc

SEQ ID NO: 252031 - DNA, 96 bp, Homo sapiens
cagagtgcagagccgcctttccagcatgcaggggctgctcagacccaacatgagtgaagtttcctgcaagaaacgggacgactatttggaatggcc

SEQ ID NO: 252032 - DNA, 100 bp, Homo sapiens
agagtgaacagaaaaagaggatacctctgcgatcccgggtcatctccagatgctagggttatggaggtaccaatcttgggaaaaagaagcaacacatttg

SEQ ID NO: 252033 - DNA, 90 bp, Homo sapiens
caagttcgacgtgcctggagatgagaatgcagaaatggatgctcgaaccatcttactgaatgctgtggccttgctggtgggagagaaggt

SEQ ID NO: 252034 - DNA, 96 bp, Homo sapiens
ctttcatcaaccaatatacagatgacaagatctggtcaagctacactgaatatgtcttctacctttggtgccctggttgtcagatgttggaaagca

SEQ ID NO: 252035 - DNA, 149 bp, Homo sapiens
tcaacagtgtggaggaggtggctaaggcatttcctgaacgcgtgtacgtcatggaggatatcacattcaacgtgaaggtgtatgcaacagcgttattgcaacaggctaacgaaaacagacaaaattcaactggaaaagcatgttttggc

SEQ ID NO: 252036 - DNA, 98 bp, Homo sapiens
tttgctcttccatccgcctttgatcgtcttcctcttcagccatccagggaagctgccaaagaatgtcgacgtcgaaagaaagaatatgtaaaatgtct

SEQ ID NO: 252037 - DNA, 100 bp, Homo sapiens
tctcgacagcttcggggaactgattccgcagccttccaatgaagtcaatgatacacttgatgacatctttgacggttctgatgacgaagaagaaagccag

SEQ ID NO: 252038 - DNA, 96 bp, Homo sapiens
aagttgcatttcctcgtcgagcgcaacccaagcatttaaatcaaacggtattgagatggattgggttatgaaacataatggtccaaatgacgctag

SEQ ID NO: 252039 - DNA, 98 bp, Homo sapiens
gtaccgtgatgtgacgctggagaacctggcacttatgtcctccctgggatagtgacaacctctggtgggacgcctttgccactgaattttttgaagat

SEQ ID NO: 252040 - DNA, 100 bp, Homo sapiens
tggctggacgctactccggacgcaaagctgtcatcgtgaagcaattgggcagatgtgtgaggcacctgtggtgacccgagagtgggtgttggacagtgta

SEQ ID NO: 252041 - DNA, 98 bp, Homo sapiens
cgagattgtcgtcatcctagaaggcattgtggaaacaactggtaaggtactcaactgtgtggggtactacataaatcctgaaagactacaataaagtg

SEQ ID NO: 252042 - DNA, 76 bp, Homo sapiens
aaacatgctgaccgctcaagagattctacatcagtttggtttcactcagaccggacactgcccatctctaagataa

SEQ ID NO: 252043 - DNA, 100 bp, Homo sapiens
cccaaagggagccttcaggcacatgacacatcatcactgcccacggtcattatgagaaacaagcgtgaaccatctgaaaagaccagtcagtggagtgggg

SEQ ID NO: 252044 - DNA, 82 bp, Homo sapiens
gtctggggcaaagggaccacggtcaccgtctcctcagacctgtgttgcgtggtgggtctgctgccgccacttctaatcctca

SEQ ID NO: 252045 - DNA, 97 bp, Homo sapiens
ggaattgcttcgtttgccattttcttatggagaactgtccttgttgagccagatgaccaggatgccccagatgagcatgagccctctccatcagaag

SEQ ID NO: 252046 - DNA, 74 bp, Homo sapiens
accgcatcaagagcttcaagaacaagggccgcgatgtggaagtagcagaaggtcaagaaatttgtgtgattgaa

SEQ ID NO: 252047 - DNA, 73 bp, Homo sapiens
agaattcaccatgacctgtcgagtggagcgtttcattgagattgagctcgtccgcatggtgctgaatggctga

SEQ ID NO: 252048 - DNA, 100 bp, Homo sapiens
cgtttgttcaggaaccaccagtgacagaaacccttaggagaaatcttgagagtggacagcaattgtgaagatcgccagagagttctgtgtttcatcaccg

SEQ ID NO: 252049 - DNA, 88 bp, Homo sapiens
ggttcctgaacctgttgccagatggtgcaatgttcaaagtactcaagatgaatttgaggtgcgaaattgaggcaactcttgagaggct

SEQ ID NO: 252050 - DNA, 97 bp, Homo sapiens
ggcagaaaaacgagccatttctccgtcgattaaagagccatctgtggtgccaattgaagaactggtcatgctgctggagtggtggtcctgcacggag

SEQ ID NO: 252051 - DNA, 100 bp, Homo sapiens
tccaagactgtgttcgggagtccttggaactgtggtccatggtaaagttttacagagtgggctccacctcaaccagaatatttctatcagcctaaaggaa

SEQ ID NO: 252052 - DNA, 100 bp, Homo sapiens
aattgtaatggaaagcatatggacaggtctacgccacatcacttagggtgagttctgcatcctggtacttcctcaatgtatttgggcttcggagcattta

SEQ ID NO: 252053 - DNA, 100 bp, Homo sapiens
agaaccaactcggatattgttgagtcccagaaatcctggatagaaagcactttgaccaagagggaatgtgtatatattataccaagttccaaggaccctc

SEQ ID NO: 252054 - DNA, 101 bp, Homo sapiens
atcaaatggcacttcattggccacctacagaaacaaaatgtcaacaaattgatggcgggctgatcaacgtccacccaggccagcaagtcatccacaggctt

SEQ ID NO: 252055 - DNA, 50 bp, Homo sapiens
tttcgatctggacctggcctggcggttttcggctttgtgagaaaccttac

SEQ ID NO: 252056 - DNA, 100 bp, Homo sapiens
ggcggcaagagctgcggagcccctggaagactgctgcctcatatccgggggaatgtgggctttgtgttcaccaaggaggacctcactgagatcagggaca

SEQ ID NO: 252057 - DNA, 100 bp, Homo sapiens
ccctcctcccccctcccctcagcggtggctcccaagaagtccgagacacgcggtgaggcggcgacgggctccggactgggccagtgccattcgcgtcgca

SEQ ID NO: 252058 - DNA, 100 bp, Homo sapiens
atgaacatcgacatcgccagcatcgacatggtttccgaagtcaacatggtgctgctgtcgggactcataggtgtcgtctcctggaagaggcctctctccc

SEQ ID NO: 252059 - DNA, 75 bp, Homo sapiens
aatggctcctcagccacggaaatgagaggaaagaccacagcaagattctttcattcgtctcctcctagcctgggg

SEQ ID NO: 252060 - DNA, 75 bp, Homo sapiens
ccagctaggagcgctctgtggtgcctggggctgaacgcggctttctgggaaaaagacctcgatgaagttctgcag

SEQ ID NO: 252061 - DNA, 75 bp, Homo sapiens
gacgggcgcgccgccaacccgtggaccgtatcgtgggtctggatcaagtcactggtatgactgagacagcttttg

SEQ ID NO: 252062 - DNA, 78 bp, Homo sapiens
gctgggattggctgcttttcaataatcatgggccagactgggaagaaatctgagaagggaccagtttgttggcggaag

SEQ ID NO: 252063 - DNA, 73 bp, Homo sapiens
cagtggtcgcttcttctccttggatgttttagaagaatgtatgtctcttcccaagctatcttcttattctgga

SEQ ID NO: 252064 - DNA, 82 bp, Homo sapiens
gcagcggacgccggtctctgttccgcaggatggatgatcggctgaatgtaacagaggaactaacgtccaacgacaagacgag

SEQ ID NO: 252065 - DNA, 75 bp, Homo sapiens
cagtgttcaccatcctggccccggaagagaaagatgctggtttcgagttttggagatccttgttttttatggaac

SEQ ID NO: 252066 - DNA, 75 bp, Homo sapiens
ccgcgggccagcgcaccggtcccccagcggcagccgagcccgcccgcgcgccgtctccaacctgtcccagtattt

SEQ ID NO: 252067 - DNA, 98 bp, Homo sapiens
aaagactctctttgtccatataaggtgaccgtggtccggaacttggaggcctatggtctggacccatactcagtggctgccatccttcagcagcgatg

SEQ ID NO: 252068 - DNA, 90 bp, Homo sapiens
cagggctgtattctgacgtttacaaaactacagagtatcgagaaccttccctgcgaacttcagaggaacttccagctgatgcgagagctg

SEQ ID NO: 252069 - DNA, 101 bp, Homo sapiens
tttggagcccattttagaggcatctgttctatcttcccatcataaaaaaatatggtgtaagatacttcttcaagattggacagctggggaccttcttctga

SEQ ID NO: 252070 - DNA, 97 bp, Homo sapiens
gagccagggctccaaagaactcgtgcctacaccaactaatgttacaattgaatcctataacatgaaccctatcgtatattgggagtaccagatcatg

SEQ ID NO: 252071 - DNA, 82 bp, Homo sapiens
atgaaggctacttagaaaaggacggctccttatttcactccactggtctggaactgaaagtgatgcgtatttctgagttatg

SEQ ID NO: 252072 - DNA, 100 bp, Homo sapiens
acaccttattgagaaatgggagttacagagagacccagatgatgtggtaccagttggccaaagaagagcctggtgttggtgcatgtgctttggactagca

SEQ ID NO: 252073 - DNA, 100 bp, Homo sapiens
cggcgttggaggccaccgtttccagtttgaaagtctctcaagcatattgaaacttcctggaaaaaagacttttaataatatggatagagattttttagaa

SEQ ID NO: 252074 - DNA, 83 bp, Homo sapiens
cacagatgtgtctcagctccctccaccttctcaagatcagtctcagtatggtggtgatattacccgaaaaatgaagcttttga

SEQ ID NO: 252075 - DNA, 74 bp, Homo sapiens
gtggaattatgccctgttggttccaatgctgggattggctgcttttcttccagggtctccctccactgctgtag

SEQ ID NO: 252076 - DNA, 100 bp, Homo sapiens
atccatatagtattttactaggtcatgaagggaagatggctgtggaaggtgttttaaaggtgctggatgtgtctggggcagacatgttggccaagtcaat

SEQ ID NO: 252077 - DNA, 98 bp, Homo sapiens
tggaagacttatcgtgtgttatgacacaggctgttcggctcttgaatcccagcgatgaaaccaggaactcactttcccgggatgccgagtctccattc

SEQ ID NO: 252078 - DNA, 90 bp, Homo sapiens
cacagcgccaacagcaacgcggaccacatctttaatctcatgaagtacgacagctacagccgcttcttaaagtctgacttgtttttaaaa

SEQ ID NO: 252079 - DNA, 76 bp, Homo sapiens
agcctgagcaagcggaggacctacgccggcctgggcaggtcttgacgagccctgcccgggccgacgcatgcggagg

SEQ ID NO: 252080 - DNA, 98 bp, Homo sapiens
attacctttgccttggaatacaggaggaatgtgttccagaagatctagaactgaagaagaagatttttgctcagttagattccatcattgatgatcga

SEQ ID NO: 252081 - DNA, 75 bp, Homo sapiens
gcccactgagagtttacctctggagttcagtgattttggtcagatgaagactgggtggagaagtttgctgggaag

SEQ ID NO: 252082 - DNA, 73 bp, Homo sapiens
aaaatgtcgtctcggcttggaatctttttgccataaattctaagaaccacgtgaatgttgagggggcgacaca

SEQ ID NO: 252083 - DNA, 75 bp, Homo sapiens
gggctgaaggaggaggacaaagagcccctcatcgagctcttcgtcaaggttgaaatcacaaagattagacacctt

SEQ ID NO: 252084 - DNA, 82 bp, Homo sapiens
gttctcatcgtccctgccaactttccaagtctggggatggccagacctgcctagagctggaacgttacctccagagcgagcc

SEQ ID NO: 252085 - DNA, 100 bp, Homo sapiens
ggatgactccgctgaggtggacgtgtacaacccgacgaggaacgaatgggacaagatcccgtccatgaatcaggcttgcagccaatttactggagcaggg

SEQ ID NO: 252086 - DNA, 98 bp, Homo sapiens
gaccccggcccggaggaggctcatgcgggatttcaagcgttgcaggcagaggcaccaaggctggcagaatatcaagcatatatcgattttgagatgaa

SEQ ID NO: 252087 - DNA, 100 bp, Homo sapiens
actgtaaaatttgtgatctttccaacagatttggagatatataaggtttctccatgtctgaatgtgctttcctggttgctgtttgtcagtgacactgatg

SEQ ID NO: 252088 - DNA, 75 bp, Homo sapiens
gctgaccacataagcaaggaggccccagagccaggcatccgtgtcattctggaccttactcccaactaccggggt

SEQ ID NO: 252089 - DNA, 98 bp, Homo sapiens
gtcctgagcgccatggctcactccccggtgcagtcgggcctgcccggcatgcaggatcttagtaagagccctaagaccatgaaaaagctgctgcccaa

SEQ ID NO: 252090 - DNA, 74 bp, Homo sapiens
cctggtctccattatttgagatgagttacatcttggagatttggaggccaatcactgccaccttttatttccct

SEQ ID NO: 252091 - DNA, 85 bp, Homo sapiens
cagctccctgtgttcgcctgctcaacgccactcatcagattggctgccagtattaccagttgaccagtgcagagctctcctcctt

SEQ ID NO: 252092 - DNA, 74 bp, Homo sapiens
agagcgactggcaggggctggtgagcgaggttttaaaatcaaagatgggaaaatcggagaaaattgcccttccc

SEQ ID NO: 252093 - DNA, 73 bp, Homo sapiens
agaaaaggatttagtacttatagaccttgcacaaaatggggcagccattctacaaaagtggaagctgtggtca

SEQ ID NO: 252094 - DNA, 75 bp, Homo sapiens
ccgaaaccggtcatcgtggacaagcaccgccccgtggaaccggaacgcagtatagctctcatatggcccagtgag

SEQ ID NO: 252095 - DNA, 90 bp, Homo sapiens
cagctattctggcaacaaacaagatactggtggatatggccaaaatgaggcctgtgtcacttgtgaaaatgaagattcagctgatggtgc

SEQ ID NO: 252096 - DNA, 100 bp, Homo sapiens
gaagctgtagtctgaatcaacctaagttttaaacagaaggtgaacctctgagcccaccaagaaaacacattgtggagcgctatacagagttttatcatgt

SEQ ID NO: 252097 - DNA, 75 bp, Homo sapiens
ttctacattaaagcggttaacttcttttcacaaaccattaaaaatctcaagtgacgactttgggaaactctggtt

SEQ ID NO: 252098 - DNA, 74 bp, Homo sapiens
aggaatgagtgggatccaatcatcgaatgggctgagaaaaggcaaataagggcgagactgaaaaatcaagtcac

SEQ ID NO: 252099 - DNA, 115 bp, Homo sapiens
gctgctgttgtccaacagaacgacctagtatttgaatttgctagtaacgtcatggaggatgaacgacagggtgctgataagactgtgaaaggcccagatggactgaccgcctttg

SEQ ID NO: 252100 - DNA, 75 bp, Homo sapiens
cctgcagaggctcttcctcatcatctcagccacgaagtacagccggaggtatggacctgtctgccaatcaggacg

SEQ ID NO: 252101 - DNA, 100 bp, Homo sapiens
cagattaactaaactccaaatattagagcttagagaaaaccagttaaaaatgttgcctaagattctgagaaacgaacccctcttcatgtggccgcatttc

SEQ ID NO: 252102 - DNA, 95 bp, Homo sapiens
tccatggccccagatgacacttcagggtgccattattatccatgaagtttatgaagaaggagcagcatgtaaagatggaagactctgggctggag

SEQ ID NO: 252103 - DNA, 100 bp, Homo sapiens
tcagaggccgccatcaaccgccagatcaacctggagctctacgcctcctacgtttacctgtccatgttcccttgccccaccctcagaccctgcagaagct

SEQ ID NO: 252104 - DNA, 75 bp, Homo sapiens
gacccgcctgctgagtggacccgggtattgtcagaagcttcagttctggtaaaagagaaggtggggactttgttt

SEQ ID NO: 252105 - DNA, 74 bp, Homo sapiens
gccaatcacagtccactttggacagaagaagctcattcacacagaagacccatttaatgatgaacatcaggaga

SEQ ID NO: 252106 - DNA, 75 bp, Homo sapiens
gaaattacagagacaattatgacaactgaaatgagacatgcacataatataggaatttactttgcaaaagatgcc

SEQ ID NO: 252107 - DNA, 75 bp, Homo sapiens
tcgagccagcacctgtttctggacctgcctaaggagctcatatccttattttccatgacagatcttaacgacaat

SEQ ID NO: 252108 - DNA, 100 bp, Homo sapiens
gctcgaagggatactggttcgtccttactgcggaaagcttgtcctggtataaagatgatgaggttggactccatgaaagaattgcacaaaacaaatcgac

SEQ ID NO: 252109 - DNA, 75 bp, Homo sapiens
cgggaaggagcatcccaggacctaccagaatctggtagtgggcagcagtcagtgacaggtgtaacctctgtggat

SEQ ID NO: 252110 - DNA, 128 bp, Homo sapiens
gccaggccccaggcctcctgtgggacgccagtcaccagcaggagcagccaaccagcagcagccatcatggagacttcccaagtaagaagcggaagaggagccgctggaaccaagacacaatggaacag

SEQ ID NO: 252111 - DNA, 80 bp, Homo sapiens
gagaattaccttatcagtgcaggagaggattgtgtctgcttggtgtggagccatgaagatcttcgtgaagactctgactg

SEQ ID NO: 252112 - DNA, 90 bp, Homo sapiens
gcacttaaaataattgggcagaagagaagcagtgaaggagtgcagaggcatcacctgaaaggaggcaaaaccttcaactgaggacttggg

SEQ ID NO: 252113 - DNA, 50 bp, Homo sapiens
cttcttcgagtatttgtagaaggtttctccttggaccaagatgactgatg

SEQ ID NO: 252114 - DNA, 127 bp, Homo sapiens
attgacctcacctcaagcacacccaatggacagcatgcctcaccaagtcacatgacaagcatgtgtgcaggaacggagaataaactgagctctctctctgacctggaacagcagtaccgagccttgc

SEQ ID NO: 252115 - DNA, 95 bp, Homo sapiens
aggttggaaataataccatccatgtgcaccgagaaattcacaaggattcgctaaatattgtaatggatcaaggagatacacctacactagaggaa

SEQ ID NO: 252116 - DNA, 100 bp, Homo sapiens
cggcatcccaagccgcctcccgccgccccggcccggcgcgcagacagatgcaccatcaggaatggaattacagtcatggtatcctgttataaagcaggaa

SEQ ID NO: 252117 - DNA, 90 bp, Homo sapiens
gtgaaagctctaaactaaaattgtatcgaaatggctgcagaaatcgactttctgagagagcaaactgagatgagtgaactgagtgtggca

SEQ ID NO: 252118 - DNA, 75 bp, Homo sapiens
gggaaaaatccagagaccccctgaagattcggttaaaaatgtgtctgcaggcacacaggacgtgccttcaccccc

SEQ ID NO: 252119 - DNA, 102 bp, Homo sapiens
tcttttgaaaggtgtactgcaaggaacaaaatgtttgtaaattctccttttaccaagaacattaaccaggtggtatttgttggaaatttcttgagaattaat

SEQ ID NO: 252120 - DNA, 75 bp, Homo sapiens
agtagccaagacatgaagtacccatctcccttctttgtatttggtgaaaagattcatcccaccggaaaaatgttt

SEQ ID NO: 252121 - DNA, 100 bp, Homo sapiens
gagggctgtgagaaaaatgattctttgttaacatccgtagattttcatgaatataagaatgaagctgatcatggtcagggttttggccaaattgggcgag

SEQ ID NO: 252122 - DNA, 100 bp, Homo sapiens
atcactgctcagccttttggatgaaatcgagtgaacgtcatacttacctggttgcttgcgcatctagtaatgttggatcatattctggatgttttgaata

SEQ ID NO: 252123 - DNA, 100 bp, Homo sapiens
agttactattatgaagatggaggttcttgggtgtctctggggagtccctgggccagaccttcctccagactccagcccacctcttcggagcagctctgct

SEQ ID NO: 252124 - DNA, 84 bp, Homo sapiens
gcctccactccgtcccccgcgggtctgctctgtgtgccatggacgggtcgcgtggggcaggcagtggcgctgcgggccaaggcc

SEQ ID NO: 252125 - DNA, 50 bp, Homo sapiens
cgggcctcatcatggccaggaaggctcccagccccattgccaataccttc

SEQ ID NO: 252126 - DNA, 75 bp, Homo sapiens
gccttcgctatctcatggacacagttgagtggtgattttatgcaatggcttcaagccacagttcttcaccagtgc

SEQ ID NO: 252127 - DNA, 74 bp, Homo sapiens
gctcagcgggagtttgacaggcgattctcccctcattttatgatgaaactgaggcacaaactgcttaatgaact

SEQ ID NO: 252128 - DNA, 93 bp, Homo sapiens
atgatcatgctgattatggctttccaagttgtgagggtaaattcaattggcgcacaataaggactctaaatggtgtcaggaacatttcctgaa

SEQ ID NO: 252129 - DNA, 80 bp, Homo sapiens
tgctggtggcgttcgggccgcacccgcgcggttgattcttcaccacactgaaaccattaggaaaaatccttgtggttaac

SEQ ID NO: 252130 - DNA, 75 bp, Homo sapiens
ctggttccggggcctgaaccgtatccagactcagctgccctgtcaaaccctgttcctgaccgatgaggagaagcg

SEQ ID NO: 252131 - DNA, 75 bp, Homo sapiens
tgccgcggggacatggtcctctgcgttcaggggaggatacgaagcgttttcggcttcctgcccggagctgtgcag

SEQ ID NO: 252132 - DNA, 90 bp, Homo sapiens
cacagtttgaggcacaggctcggaaacgtgagtgtgtccgagtcccaagagggggcatccgtgtcattctggaccttactcccaactacc

SEQ ID NO: 252133 - DNA, 75 bp, Homo sapiens
accagctatggcattagcccacaggccaagagttgtccagacctcccaaagcttcttcagctatccgttgggaat

SEQ ID NO: 252134 - DNA, 74 bp, Homo sapiens
agtgcgggttggggcgggggctgcggagagggtgcaagaaagcctttgaggtgaaggtgtatgaaagtcatcat

SEQ ID NO: 252135 - DNA, 51 bp, Homo sapiens
gcttcatagcattcgcctactccgtgaagattggcacttctctgtttgatg

SEQ ID NO: 252136 - DNA, 100 bp, Homo sapiens
ctggcatcgaagatggtgtgttctttctggaaactgtatatcttattggacttatccagatgatgagaaacgcaaggcagtagaagttgctggaaattat

SEQ ID NO: 252137 - DNA, 101 bp, Homo sapiens
cgccgcaccatgcccgccgtggacaagctcctgctagaggaggcgttgcaggacagcccccagctctagccggcccggtccttggactgaaagaatgcacc

SEQ ID NO: 252138 - DNA, 98 bp, Homo sapiens
cgaatctgcccacccctcctgtaacccagcctgtttcacttcttgggagaagagcctgctgagtgcagtgaggccggtctcctgcaggagggagtaca

SEQ ID NO: 252139 - DNA, 74 bp, Homo sapiens
actccttctacaggtgtgtatgcttataccattgctaagtatggtatgtctatgtatgtgcttggaatggcaga

SEQ ID NO: 252140 - DNA, 99 bp, Homo sapiens
tcggacatcgcgagcctcgtggtgtggtgtatggccgtgggcatctcctacattagcgtctacgaccaccaaggctgaagaaaatcttggtatggtgat

SEQ ID NO: 252141 - DNA, 96 bp, Homo sapiens
gtggagacggattacaccttcccacttgctgaaaaggccaaggccaaggatcaaaccaaggcccaggctgcagccccagcttcagttccagctcag

SEQ ID NO: 252142 - DNA, 100 bp, Homo sapiens
ctcctcctgtcgctgcccgtgtgattactgagactcagcccagatgacttactcaatgccttgaatgagggtatcagtcgtgctgatgtcatcatcacat

SEQ ID NO: 252143 - DNA, 100 bp, Homo sapiens
agcacatcgaggtgaatgggagcaagattggcccagacaacctgccttatgtccagatcttgaaggactccctggaggaaaagcggaagcggcagcggtc

SEQ ID NO: 252144 - DNA, 99 bp, Homo sapiens
ggtgcggaagctggtgggcactcagcaccctctgcttaccacagccaggcggagtacgtccagcttgttactgaacttcgaatgacaagagccattcag

SEQ ID NO: 252145 - DNA, 83 bp, Homo sapiens
ctcaatatctgtcttcggtggactccttcggcagtccacccaccgccgccgcctcccagaaacaccaagggacccacgacagg

SEQ ID NO: 252146 - DNA, 76 bp, Homo sapiens
gcaacttgcaagggaactggagacaatgaaaatcttgtcagcaatgcagcaagtcttggaaaaccttacggagctg

SEQ ID NO: 252147 - DNA, 100 bp, Homo sapiens
ggcagccgaggagaccccgcgcagtgctgccaacgccccggtggagaagctgagctagccacagtgcagcctggccagaatttccacatgttcacaaagg

SEQ ID NO: 252148 - DNA, 100 bp, Homo sapiens
gtggaggctgcagaagaagcacacctgaaacatgaatttgatgcagacttacagaagaagctcattcacacagaagacccatttaatgatgaacatcagg

SEQ ID NO: 252149 - DNA, 71 bp, Homo sapiens
gaaatatccttacttgcttctacatgaacgtgttagctggagtgtaatggcatgatctcggctcactgcaa

SEQ ID NO: 252150 - DNA, 100 bp, Homo sapiens
ctggaagcggatcgcgtggagtgacggtcacaccgcggcgagggagacgtggtgggcggtccttcctgtgacacgacccttgagtgacagttctatttga

SEQ ID NO: 252151 - DNA, 100 bp, Homo sapiens
agctgcctaaatttgagaagaatttttatcaagagcaccctgatttggctaggcgcacagcaactgcaaaattcaaaatggggctcaaggtattcgtttc

SEQ ID NO: 252152 - DNA, 100 bp, Homo sapiens
tgaagataaagcagaagttgacatggacacagatgctccacaagttagtcacaagcctggtggagagccaaagatcaaattggataacagggcaagattc

SEQ ID NO: 252153 - DNA, 82 bp, Homo sapiens
cttcgaggccatcctgcagttccagatgaaccatagcgtgcttcagtttgcagtgttgatgtgggtatttacctatgttggt

SEQ ID NO: 252154 - DNA, 100 bp, Homo sapiens
aaagtggctttctcccttcaggggctcctgcccagcagactgagtatcgtaataagtgtgagtttctggttggcgtcggggtggatggggaggataacac

SEQ ID NO: 252155 - DNA, 100 bp, Homo sapiens
aaaacttctcaaatcccaggccagcaaacaggtcattgtgagagaattctcacaggcttatcactggcgaggaaacgagacctctttcgttccttctaga

SEQ ID NO: 252156 - DNA, 75 bp, Homo sapiens
gaatcatccacgcacctgcagctctgctgagagagtgcaagccgtgggatattctctaagccgctttcatcatgg

SEQ ID NO: 252157 - DNA, 82 bp, Homo sapiens
gcggcgaacgcggagagcacgccatgaaggcctcgggcacgagacacctatggctgccgatgaaggctcagcagagaaacag

SEQ ID NO: 252158 - DNA, 75 bp, Homo sapiens
acagacagcagcgcagtaccaccttccagagatgtatgttgagtctaaaaaggacagagtcacagtagtcttcag

SEQ ID NO: 252159 - DNA, 82 bp, Homo sapiens
tgagctgcgaggaaaatggcggcgggaggattctccttttacaaatgcaggaatgggatctaatctaaatctgttaggtgaa

SEQ ID NO: 252160 - DNA, 75 bp, Homo sapiens
tttctgcaacccatagtcaacgattacatgagaaatcttacaggagatccagagacttcggctagagcatgaaca

SEQ ID NO: 252161 - DNA, 100 bp, Homo sapiens
gacatccagaagttccccaagctccgggtgccgctttatgaaggcaaagaacagatggagtttgaagaatccatgagacggctctttgaatccatcaaca

SEQ ID NO: 252162 - DNA, 89 bp, Homo sapiens
gcaacagcttcgaaggcgaccttccttgctttcagaatttcacccaggttctgacagggatatttgcttgaagccaggatctctgaact

SEQ ID NO: 252163 - DNA, 83 bp, Homo sapiens
tatctgtcttcggtggactccttcggcagtccacccaccgccgccgcctcccagatgccgacaaaaggatcaaggtggcgaag

SEQ ID NO: 252164 - DNA, 75 bp, Homo sapiens
ctcgtcagcctcccgccggccgtctccttaacaccgaacaccatggagttttaacattgaatgcggagaacacta

SEQ ID NO: 252165 - DNA, 100 bp, Homo sapiens
ccacttttcagccatggccacaaggttgaaaatgaatatggcagctactttgcctgtgattttgactacctgcgcttcctgcagaagcgctttcgccacc

SEQ ID NO: 252166 - DNA, 100 bp, Homo sapiens
ggcttttactcctacctgtgtaccgagccagggtcgagctgtgcagttttagcgggtacaagatctaccccggacacgggaggcgctacgccaggaccga

SEQ ID NO: 252167 - DNA, 82 bp, Homo sapiens
catgctgaccaccaatcagatccgtaagatgctgtgggccctgagggaaaggatcacagaggcgctgagccgggatggctac

SEQ ID NO: 252168 - DNA, 51 bp, Homo sapiens
tttccagtgctaaaggatctctgatctggttggggactcgcttcattatag

SEQ ID NO: 252169 - DNA, 82 bp, Homo sapiens
cccatcctgccgtccttctccactttcgccagcccgtgccgcgagcgcggcctgcaggaggcgaacctcttcccggccgctc

SEQ ID NO: 252170 - DNA, 74 bp, Homo sapiens
aggacgcctatgccatgaagcgggacctcactcagatggccgacgagtgcctacaccaactaatgttacaattg

SEQ ID NO: 252171 - DNA, 82 bp, Homo sapiens
cccagagactgctgagcccgtccgtccgccgccaccacccactccggacacagcggttcaagctctacgttcgtgacatcaa

SEQ ID NO: 252172 - DNA, 96 bp, Homo sapiens
cagccttaacctatgcttgtgaaaatggacatacggatgttgcagatgttttacttcaagcaggggctgatttacgagaatataaaaagctctttg

SEQ ID NO: 252173 - DNA, 111 bp, Homo sapiens
gttcgctttcccacccgagagccgcgagcgcccggccgaacccgcgatggaataatgcccagcggcccgccaggtcccgctggaagaagaaagatctgtgctcaataatca

SEQ ID NO: 252174 - DNA, 80 bp, Homo sapiens
caaagggtggtgaagaactaaggtgtatgtaatgcatactttagcagcttcactttctgcttgtatttatcagtgccttt

SEQ ID NO: 252175 - DNA, 100 bp, Homo sapiens
taaagctggagtattttgagattggagaattaagctttgtgctgatgaacatggtcaccttgaaaggtgtgttgaatatggcagagccagaaaatgcaag

SEQ ID NO: 252176 - DNA, 100 bp, Homo sapiens
gagagacaagcatcttcagttaccgtgaagatcccattgtctatgaaattcatccaaccaaatcttttattagtgcttttatgggaccaacgctgggtgg

SEQ ID NO: 252177 - DNA, 74 bp, Homo sapiens
cgtgagaaggcgctgcgcaggcaggcggaggaggatgaaacaggcgcctatttaatcgacagagaccccaccta

SEQ ID NO: 252178 - DNA, 73 bp, Homo sapiens
accagatcaggatttgagcggaagaacgaatgtaactttaaggcaactttggctttggggattcacgtggtgg

SEQ ID NO: 252179 - DNA, 100 bp, Homo sapiens
ccagtactacgtgtacttcggcaccgtccgcgactgctatgagggccctacatcattcgaggaatggcgcccccgacgacgccctgcagcaccgacgtgt

SEQ ID NO: 252180 - DNA, 98 bp, Homo sapiens
ctgctgctctacattttcaccaagatctcgctgcaagctttcttcctggtggcagatgacatcatggattcatcccttacccgccggggacagatctg

SEQ ID NO: 252181 - DNA, 103 bp, Homo sapiens
tgcgcgtggctggggaggcgaggccggacgcacctctgtttgggggtcctcaggtaagaatgattgatgttggctgatattggagtgctcattcacatgaagt

SEQ ID NO: 252182 - DNA, 90 bp, Homo sapiens
ggaagacccaaaggcagcaaaaacaagagtccctctaaagcagctcaaaagatgttccatttaagcagacctcttccatagctgtagctg

SEQ ID NO: 252183 - DNA, 75 bp, Homo sapiens
gtcgcggaggcttgtcattctgacccggggattcctcacagcgtctggcaggtctcagatgatgataaagaaaag

SEQ ID NO: 252184 - DNA, 89 bp, Homo sapiens
ggggcgcccctgcttgtggaggagaatggcgccatccctaaggtggcttcctgtttgaagggctctcagatgatgaggatgactttcac

SEQ ID NO: 252185 - DNA, 75 bp, Homo sapiens
gatggtgcagaagaagaacgcgaggcgtggagctatttcctatgacagttctgatcagactgcattatacattcg

SEQ ID NO: 252186 - DNA, 100 bp, Homo sapiens
gaagaactcgtcatgctctttgtagcgtggtgcttctgttgctcacaggtttgtgctactggtgtccggcctgggcctgggtggcggtggaggcgagagc

SEQ ID NO: 252187 - DNA, 100 bp, Homo sapiens
tataagctttgcaacagaattacagagtatgatattcttcaaagtgacgcctcccccaggaagcgggccccagaaccagtacgggaacgtgctgtctctc

SEQ ID NO: 252188 - DNA, 50 bp, Homo sapiens
cgacaagatcgagggggccattgcagatctgatctcttctgaacacctca

SEQ ID NO: 252189 - DNA, 75 bp, Homo sapiens
ggaagcacgttctctacgtggagcacaggaggttgaaacggaacagtattacagtttttttctggtagagctgaa

SEQ ID NO: 252190 - DNA, 100 bp, Homo sapiens
gaagtttcggaaaacatggaggaggaggctgaaaaatcatcagtactaaagtcaaaagaggaaagccatgaacagtcagcagaacagggcaagagttcta

SEQ ID NO: 252191 - DNA, 82 bp, Homo sapiens
ggggccgcggaggcgacgccggggacgcccgcgcgacgagcaggtggcggcggctgcaggaactaagcgtcttgtagaagga

SEQ ID NO: 252192 - DNA, 100 bp, Homo sapiens
ggccatgctccatttgggcattgacacccctacccagaacaacatctttaagaaaagtcccatttacgtcatcctggtgggaggctggtctttttctctg

SEQ ID NO: 252193 - DNA, 100 bp, Homo sapiens
cgggagcttccgggagggcggctcgcagaaatgaagctgttgtcatttctggaaggaaactggcccagcagatcaagcaggaagtgcggcaggaggtaga

SEQ ID NO: 252194 - DNA, 89 bp, Homo sapiens
gccgtggcgggggtcgcggaggtggcagggggcctggctccgggcagtgcgggatcttagaaatgaagttgaaaaattacgcaatgaag

SEQ ID NO: 252195 - DNA, 83 bp, Homo sapiens
gataaattcccggaaccgcgattcggcgtgtcaggaatcttgacgaagcctgatctggtggacaaaggaactgaagacaaggt

SEQ ID NO: 252196 - DNA, 75 bp, Homo sapiens
gaccaaggtcaattgaagtagaaaatgactttctgccggtagaaaagattcgccttttacaagtccacctctcag

SEQ ID NO: 252197 - DNA, 100 bp, Homo sapiens
cagctgtggctctctgaccagctcggccaggcagtgggccagcagcctggtgcctcccaggggggggccctcagcctcttggccttgaacgggctgttca

SEQ ID NO: 252198 - DNA, 100 bp, Homo sapiens
gtcacccaggtggatgttagaagtcgagtggcagcctggtctgcatgggcagccgaccaaggggactggtctagtggacagagaagactcttggccaggc

SEQ ID NO: 252199 - DNA, 83 bp, Homo sapiens
tacctacatcctgagctacatggccccctggtttagggagggtgtaatgtctttgctgagaactcttcttctggacgtggtcc

SEQ ID NO: 252200 - DNA, 87 bp, Homo sapiens
cagcaagaacagagagagaggtggacagatctgagagatactgaggtccggcctctttggcctacccccgttggctccgctgcccca

SEQ ID NO: 252201 - DNA, 100 bp, Homo sapiens
cgcggggcgcgggccccgaaggctctccatcgaaggcaacattggtcagggaagtcaaagatgcatccctgagttcttcctagcaggcaagcagccgtgc

SEQ ID NO: 252202 - DNA, 90 bp, Homo sapiens
tgcacgtgtggcttttaacagaactcaggtttcctgaaatgcagtttttccagcaagaaaatgtgagaaaaattcttacagatgttcttt

SEQ ID NO: 252203 - DNA, 74 bp, Homo sapiens
aattattaatgagccaactgctgctgctattgcttacggcttagacaaaaaggcagcagctaccaagaaaccag

SEQ ID NO: 252204 - DNA, 75 bp, Homo sapiens
agacagggagagaaggctgaagtccctggaggaggagctggagaggaaggcgagttacagaatgtctgaagggga

SEQ ID NO: 252205 - DNA, 76 bp, Homo sapiens
ggggaggaagaggaggaggaagaagaaggtgatggtgagggaaaggggtgcgttggaggtgcaaagtcagcaacga

SEQ ID NO: 252206 - DNA, 100 bp, Homo sapiens
aagctctaggggagaatgcagacgggcaggctgtggggctctaaccccacagcaacctctagggaattaaacaaccaccatgtcgagcaaaaaggcaaag

SEQ ID NO: 252207 - DNA, 110 bp, Homo sapiens
aggacgagggccagctgacggagatggtgcagaagatggaggaggtttggtgcacctcgatttggaggaagtagggcagggcccttatctggaaagaagtttggaaaccc

SEQ ID NO: 252208 - DNA, 100 bp, Homo sapiens
aaacagcccacccctccctctgaagcagctgcctcgaagaagaaaccagggcagaagaagtctaaaaatggaagcgggaatggatttgtaaactcaagag

SEQ ID NO: 252209 - DNA, 100 bp, Homo sapiens
gatcttgggacccaccgctgccctcagctccgagtccagggcgagtgccaccatggcaactgcaccatacaactactcttacatctttaaatatattatt

SEQ ID NO: 252210 - DNA, 100 bp, Homo sapiens
accatgccacagctacccacttgttgccaccaggctgtcattatttgtatcaaaaacaaagaatttgaaaaggcttcaaaaattttgaaaaaacatatgt

SEQ ID NO: 252211 - DNA, 83 bp, Homo sapiens
ggcaagagtaacagcagcgccgtcccgtccgacagccaggcccgggagaaatttggagcaagaggtggtggtggccttccccc

SEQ ID NO: 252212 - DNA, 100 bp, Homo sapiens
cttactgaaggacatgattcagactgtcccggacccagcagctcatatcaagccccaaggaggcccgcctgacgactgaccagttgccatggcatcctac

SEQ ID NO: 252213 - DNA, 90 bp, Homo sapiens
tcacacgacgtgcgctatgggtcaggcttgaccactatgctatcatcaagtttccgctgaccactgagtctgccatgaagaagatagaag

SEQ ID NO: 252214 - DNA, 100 bp, Homo sapiens
ccgttcactgttacacatgtggaatttacatctaaagtcaattcctgtctcattagcactgggaatttgctcctaacagtgttcattatttattaactct

SEQ ID NO: 252215 - DNA, 75 bp, Homo sapiens
gcgacccccggcaacccggagaaggtctacagagcggcctgcgccagcgaggagtgcatccgccccaaccctttt

SEQ ID NO: 252216 - DNA, 100 bp, Homo sapiens
gtgaatcattcctgcagatgaaaaagtgtgacttggcagctggggatcctttcagatgatcatgggctggccgctgccctctggagaaccttcttcaacc

SEQ ID NO: 252217 - DNA, 107 bp, Homo sapiens
tggacaagaagattatgacagattacgccccctatcctatccgcaaacagaaacctgtaggaagtgtcagggactctggaaagaacataatggcctcacctgtgaag

SEQ ID NO: 252218 - DNA, 83 bp, Homo sapiens
ctgactctcggactgagaaacgcaagaccaggtgataggtttgatcgagacagaccgttgagaggacgtggaggcccgagagg

SEQ ID NO: 252219 - DNA, 73 bp, Homo sapiens
ggaggacaagatgaagcattgctccaaaatacaggcaggttggtctcctcttcatattgcggcttctgctggc

SEQ ID NO: 252220 - DNA, 89 bp, Homo sapiens
ccgacgccgaggccttcaccgcctacctggattttttatcaagcagaaatgcatcgaacaacgagaatcaagatcactgagctaaatcc

SEQ ID NO: 252221 - DNA, 83 bp, Homo sapiens
gtctgcttcgggcctctggaatttagcgctcgcccagctagccgcaggtccgcgggagagctgtggggcttggtgagtgtttc

SEQ ID NO: 252222 - DNA, 90 bp, Homo sapiens
gaaaggtattcttgtggatattgggcttgacagctgcaaggagttactgaaggaccttttttctatcagtgcttatgtttatgctcagaa

SEQ ID NO: 252223 - DNA, 74 bp, Homo sapiens
atctttcaccaccgttgccgccttctcgagggaagatcccagtgtctgagtgaactaacagtcctgctttcagc

SEQ ID NO: 252224 - DNA, 100 bp, Homo sapiens
gtgccaactctaatttcttttatgccatcacactgaccttcaacgttgggcaggactgatcctttgaaatactccagccatgactaaaagagaagcagag

SEQ ID NO: 252225 - DNA, 90 bp, Homo sapiens
cgaactacgaacccctggacgggagagtctgccggcggagaatataagggcccagggatcatcctgatattgttgattcatttatgcaac

SEQ ID NO: 252226 - DNA, 75 bp, Homo sapiens
aggaaattgacacctggcgtggaatgccaagaagaattggcaacgcattcaggagcatttcttttttgcaacatt

SEQ ID NO: 252227 - DNA, 100 bp, Homo sapiens
cttggggagctgatctatcttgtagccacccaggtggtcgtaatggttatggtgcaaaactttgtaatattttcagtacaaagtttacagtagaaacagc

SEQ ID NO: 252228 - DNA, 100 bp, Homo sapiens
atgagaagtatgacaacagcctcaagatcatcagcattcctcctcttcctcctcctcttccagcagtgattctgactgaatacaggccctggacccttcc

SEQ ID NO: 252229 - DNA, 75 bp, Homo sapiens
agcctcttgaatagctaggattacagggacactgcaggtccgcctcctgggctgtgaacagttgctgacagccgt

SEQ ID NO: 252230 - DNA, 82 bp, Homo sapiens
cattgctctttgaattccagtcccgtccatgtacatcttcatgtgatcagccaggattttgattctccttgccttaaaaaca

SEQ ID NO: 252231 - DNA, 98 bp, Homo sapiens
gcagaggagtcgtttccagcccggctggagatcctgctgggccgtggcttcaccttttggcagtggtttgatggtgtcctggacctcaccaaacgctg

SEQ ID NO: 252232 - DNA, 75 bp, Homo sapiens
gcagcggctgccggtcctgggactaggccccgccattttggatccgctgacagggttggggtgctggaggactgc

SEQ ID NO: 252233 - DNA, 50 bp, Homo sapiens
ctggaaggttgctcacctgaagctgggaggctgtggcgtgctgggtgtcg

SEQ ID NO: 252234 - DNA, 50 bp, Homo sapiens
cagacattcaacatgattgcatttgaagcgggtcgttaaccaagctggcc

SEQ ID NO: 252235 - DNA, 97 bp, Homo sapiens
cagctctcgccgcgcagccagaggtcaccggagcatcttcggagctggctaagaaatggcatttcaaaaggcagtgaaagggacgattcttgttgga

SEQ ID NO: 252236 - DNA, 100 bp, Homo sapiens
gtcgcctccaggccaagagggatccttcacccgtgtctgcagtcagtggaagagcatctgcaatgtcaaacactcctacccacagtattgctgcatccat

SEQ ID NO: 252237 - DNA, 74 bp, Homo sapiens
tcccggctctcgtcagcctcccgccggccgtctccttaacaccgaacaccggcccctagaagcctgtttctccg

SEQ ID NO: 252238 - DNA, 83 bp, Homo sapiens
ggacacgctggtgcatctgtttgccggaggggacggatgagcaggccatcattgactgcctggggagtcgctccaacaagcag

SEQ ID NO: 252239 - DNA, 83 bp, Homo sapiens
ttctgcctcagaacggcgtgactcggagggttctccaaaaaatgtggaatcctttgcatctatgctgagacattctcctctta

SEQ ID NO: 252240 - DNA, 132 bp, Homo sapiens
taagccctttgcacagcagtgccaagacttggttaaagtcattgaggactttccagcaaaggctttatcctgtggataaacgcagagtgaacgagtttggggagtcctacgaggagaaggccacgcgggcgc

SEQ ID NO: 252241 - DNA, 100 bp, Homo sapiens
gggcatgtgtcgtctggctacgtggagcggctgaagggcatgtccctgcttgtcagggctgagagcgacgatgaagatgtgtgtgtctttaagtgctcag

SEQ ID NO: 252242 - DNA, 90 bp, Homo sapiens
atggagaagaacattcttacatgctggctttgataaaattcaagagttatttgtattttgaggaaaaagactttgtggataaagcagaga

SEQ ID NO: 252243 - DNA, 82 bp, Homo sapiens
cgacgcctcagccgcttggggcccgcacggaccctctacttcaatgaaggatttgggggcagagcacttggcaggtcatgaa

SEQ ID NO: 252244 - DNA, 75 bp, Homo sapiens
gtgatgaggaaagctgtgaaagttctcaagaggagaattctgcctaagccaactcgaaaaagccgtacaaaaaat

SEQ ID NO: 252245 - DNA, 111 bp, Homo sapiens
caaacaggttttccagaggaccagctttcgctttctgaccagcaggaggcagcacccagggtcattcctggagcataaacgatccctgcagaacatgggctagaagacccc

SEQ ID NO: 252246 - DNA, 75 bp, Homo sapiens
gggagcggttcgagttgggagacggccggaagccagttttggaagctagaagttcaaaacgaggtgttggcagca

SEQ ID NO: 252247 - DNA, 96 bp, Homo sapiens
tagcgagtattttcgagatctttttattgagaaaggagctgtttccagtcatgaggctgtggtggatctttctgatatttcacagttcttgccgag

SEQ ID NO: 252248 - DNA, 76 bp, Homo sapiens
ggtcccagaagatggcggaggcggggatggaacaccatttacctggtggattgggcggtccaatgaaaggcaccct

SEQ ID NO: 252249 - DNA, 100 bp, Homo sapiens
caagatgaagtggaaggcgcttttcaccgcggccatcctgcaggcacagttgccgattacaggcagaaggagaagacagcctgaagaagatgcagctgat

SEQ ID NO: 252250 - DNA, 75 bp, Homo sapiens
ttgggagatccacagctaagacgccaggacccactggaagcctagaaatgacaaatttacatgtattggagacca

SEQ ID NO: 252251 - DNA, 83 bp, Homo sapiens
gaaatcgacacacaaagaatagagttgagcctgtgggacacttcgggatgatcggctgaatgtaacagaggaactaacgtcca

SEQ ID NO: 252252 - DNA, 100 bp, Homo sapiens
caacaaccggacccagcatgtgaaccaaggccaagtcttccagatgacctttaggttcccagtagctgcagcagtgaaagacagtgattggctccagtgc

SEQ ID NO: 252253 - DNA, 85 bp, Homo sapiens
gtgtttcccctgccgcggggaaatggctgctgttgcttctgggccagaggaagagaatgaggtgaatgaaaactttgccattgat

SEQ ID NO: 252254 - DNA, 98 bp, Homo sapiens
cctcccgctcggccccgccagcagcactgtggaggccgtcctcggtcccccgaatccactgggacctgtccacggagcgggtcctcctgatggagttt

SEQ ID NO: 252255 - DNA, 101 bp, Homo sapiens
gcgcagccagaggtcaccggagcatcttcggagctgcaacatggccaacgccctggccagcgccacttgcgagcgctgcaagggcggctttgcgcccgctg

SEQ ID NO: 252256 - DNA, 99 bp, Homo sapiens
gcaccatcgtgggctcagcggtattcaacatcctgtgcatcattggtgtctgtgggctctttgctgggcagacatgaagccattattatatcaggaacc

SEQ ID NO: 252257 - DNA, 90 bp, Homo sapiens
ccgtcagccgggcccggggctttcgacatgccccccagaagcctggaatggtcccccctccgccgggagaagaaagccagacggtcatcc

SEQ ID NO: 252258 - DNA, 100 bp, Homo sapiens
cggaatgcctgaaccaactgttttgaggtgtgatgaatgcagactctgctaccattttggctgtttggatcctcctttgaaaaagtctcctaaacagaca

SEQ ID NO: 252259 - DNA, 100 bp, Homo sapiens
gtcagcaagagggccccgctgaccaggtggctgcaggtatcgagaaccttccctgcgaacttcagaggaacttccagctgatgcgagagctggaccagag

SEQ ID NO: 252260 - DNA, 100 bp, Homo sapiens
ccccgtcggacccatggtttccagtgcagcgcggagtgggcgatgccagcgtgccaggtcctggacccaagccagaagcctctgcaaagcttccttccag

SEQ ID NO: 252261 - DNA, 82 bp, Homo sapiens
acacgtggaagtctgataccgcttgcagaagggaattgaatagatgtctccctattgataacgaaggaggcccaacttcatt

SEQ ID NO: 252262 - DNA, 51 bp, Homo sapiens
agtctcatgggcagtggtttgagtgtccaagacaaagattttggccacagg

SEQ ID NO: 252263 - DNA, 71 bp, Homo sapiens
gaagagctgcagtctttgtgggacaaggtacttcgactccgtggacatctgtaaggtgcactcggactggc

SEQ ID NO: 252264 - DNA, 100 bp, Homo sapiens
ccctcaaaagagtccagattcaacaggctgccaataaaggagcaagatggctaggggtgaagtgaaactgctgctgtcctccgagacacccattgagggg

SEQ ID NO: 252265 - DNA, 100 bp, Homo sapiens
tctggaggtcttccaacaaatgagacaacttttgcaaaaatactgaaagagaaaggctatgccactggactcattggaaacaaaccatcaggcctcccag

SEQ ID NO: 252266 - DNA, 100 bp, Homo sapiens
gctggaaccccagacctgggtccccagaagagccccttgtgggagaagaatggctctgagaactcacatctgaggatttagaaataccagcagtgcccat

SEQ ID NO: 252267 - DNA, 86 bp, Homo sapiens
cgcacgggatccagagcgccgcgcacttcgtcatgttcttcgcgccctgttcaaatctgaacatcaatgatgtactagggaactac

SEQ ID NO: 252268 - DNA, 83 bp, Homo sapiens
cacagatccagagtgttactggcttacaaattggattgagggggaaatttgcagtggtgagaaaatgtataaagaaagattct

SEQ ID NO: 252269 - DNA, 83 bp, Homo sapiens
ctagggctcacgttgttattctgcattgcacttgcagccaggactttgtgttttatgccccacgtctgagaatcaacaagcgg

SEQ ID NO: 252270 - DNA, 74 bp, Homo sapiens
ttcatcttcctccctgtgtactttccatttgccttcctggacaggcaaatgtacactggggaccaccatgttca

SEQ ID NO: 252271 - DNA, 80 bp, Homo sapiens
ctgggcgctccggtggcggcggagtgacaacgcgcctgcaaaagggaacaagagcccttcgcctccagatggctcccctg

SEQ ID NO: 252272 - DNA, 75 bp, Homo sapiens
aatgtggcaaaacgaaaaagctcaatgcctcagaaattcattgggattaatgaaaatcaagttccatcctcagac

SEQ ID NO: 252273 - DNA, 90 bp, Homo sapiens
cggcagacccggcacgcaggtgggggccggcggggtccgtggccagagacacctatggctgccgatgaaggctcagcagagaaacaggca

SEQ ID NO: 252274 - DNA, 78 bp, Homo sapiens
ttcgcttcatccagaagttttctcaagcatcttcaaagtgatcaagttgttcctgcagcacagtcttcacctataaac

SEQ ID NO: 252275 - DNA, 90 bp, Homo sapiens
cccttgcaacaacatgaaacagcatctcagacttctttcccagatgtttataatgagggcacacaggaagttggtgaaccatctaaagaa

SEQ ID NO: 252276 - DNA, 75 bp, Homo sapiens
gggaacaatgaggcctacgcagagctcatcgtccttgctagaaggctgcatccgaggcgagaggcagagtgtccc

SEQ ID NO: 252277 - DNA, 87 bp, Homo sapiens
gggttcgaggccaatgatgggagaccaccgggatgggcaggtcgcagcagttgtggtagaaatttctgggttagtggactctcttct

SEQ ID NO: 252278 - DNA, 96 bp, Homo sapiens
ccggaatgctgcccgatggccctgggtcctcgctgtggggcaatccgggcttgcagacgaggtactccaaagattcaggtttactcacgtcatcca

SEQ ID NO: 252279 - DNA, 83 bp, Homo sapiens
aaggacatcaacttccggccgcagatgtcccagagaggtccaccgggagagcggggccccccgggtcccccgggaccgccggg

SEQ ID NO: 252280 - DNA, 100 bp, Homo sapiens
cctgaaaatggctcggccaagttcaagcggccttcctcatgcatctcctgggaggtggtggaggccacatgcgcctgcctgcttgctcagggagaagagg

SEQ ID NO: 252281 - DNA, 75 bp, Homo sapiens
tgctgttgaggaaatggactggagtgtggatactgaacggctgtattcagtggtgtttcaagaaatatgtaatcg

SEQ ID NO: 252282 - DNA, 74 bp, Homo sapiens
catggccacttggggcttaggcagaaatagagccatggctcgtggtcccaagaagcatctgaagcgggtggcag

SEQ ID NO: 252283 - DNA, 75 bp, Homo sapiens
cttccctggcaagattcttctgaattgtgctgccttggccaaaagagggggcagtacccaaaggaaacgctacga

SEQ ID NO: 252284 - DNA, 76 bp, Homo sapiens
ccatctaccgcaactctcagttcgagagtaaaggattttttatcaagcagaaatgcatcgaacaacgagaatcaag

SEQ ID NO: 252285 - DNA, 100 bp, Homo sapiens
ctagagactgccggtgccttcatgggcaggactaggccgaaaactccccagagcttacaagaccctatgaaaaaattagttgagaaagaagagaagaaga

SEQ ID NO: 252286 - DNA, 76 bp, Homo sapiens
attccaagtaactcttatttggttgaaaacgttagcggaagaacttatgcaaacacagcagatgcttttaaacaag

SEQ ID NO: 252287 - DNA, 100 bp, Homo sapiens
aacagtctaagttaaagcagtcaaacatgctgaccgctcaagagattctacatcagtttggtttcactcagaccggtcgagtctatgctgtcttgtcaaa

SEQ ID NO: 252288 - DNA, 100 bp, Homo sapiens
ggccggtgggtgagtgcaccgcgttctcgcacgcgtcatgtgtctccaagcagccagccatcatgcctggtcagtcatacgggttggaagacgggtcttg

SEQ ID NO: 252289 - DNA, 82 bp, Homo sapiens
actccaggacagcatccaggcctcattggacagcattcgaggcgacgttgtggacgtttaccagcgggagttcctggcgctg

SEQ ID NO: 252290 - DNA, 100 bp, Homo sapiens
gctggcagaacggcgcgactgcaaagattacgtgagcatcttcgtctgcagtgattggcagctcctgcgggtacttctggaaaaatacaaatatgtggag

SEQ ID NO: 252291 - DNA, 82 bp, Homo sapiens
cgaccatgtttggatttcttacaagaagtcacaagattggattcagcatcaaaatacatctactcatattgagagctgtcga

SEQ ID NO: 252292 - DNA, 96 bp, Homo sapiens
tgaaagacaccaggttgacagcactggaaactgaagtaccagttgtcgctagaacaggtgaccattgtgaggtagatattttgttctaattttcca

SEQ ID NO: 252293 - DNA, 101 bp, Homo sapiens
ggagaagatggatggagagatagaaaccgagggagggagagagacagcgatcgagagagaccggagaggtggagaggagaaaatgcagaagtctccatgga

SEQ ID NO: 252294 - DNA, 100 bp, Homo sapiens
tctgccgcaccaggctcatcctgtccatcgtgtgcctgatgatcacgcagctggctggcttcagtggaccagcagcctggcatcctcgctacaacctcat

SEQ ID NO: 252295 - DNA, 100 bp, Homo sapiens
caagacaaatggcaaacctgaagaaaaaaaccatgaagctggaacatcagatgcctgtgaggagccaccaacatttgaagctatggagctcattggtaaa

SEQ ID NO: 252296 - DNA, 83 bp, Homo sapiens
cgacatcgcccacctggcctcgctcaagtgcaagaagaaacacacgctgctgtgccccgactttgcccgcaggggggcgtgtc

SEQ ID NO: 252297 - DNA, 90 bp, Homo sapiens
ggccggaggacatgcgggagagagaatgagccagagggacacgctggtgcatctgtttgccggaggggatcgcttacacctgagacgaac

SEQ ID NO: 252298 - DNA, 89 bp, Homo sapiens
ggaaatgggaagaggcccagtccagagagattacacagacagaggtccagcaaggacagcagcagttcagccagttcacagatggacag

SEQ ID NO: 252299 - DNA, 98 bp, Homo sapiens
gaacttctcctcccaggttgtggaacgacacaacaagccggaagtggaagtcagagatgtggtcttgctatgttgcccaagctgatcttcaactcctg

SEQ ID NO: 252300 - DNA, 90 bp, Homo sapiens
ggaaaagatgcttctgggaacaagttgtttggcccaggaattcagccccatcactgtgaccttaccaacatggatggagtggtcactgtg

SEQ ID NO: 252301 - DNA, 132 bp, Homo sapiens
atgttctctgtgttctcagaagacgttctgtatttcagcttcctgctatgtgccctctttgttcctaaagaaactgccaagttttggaccttatctggaacagcgcaagaaaatcatagcagaaaacaagat

SEQ ID NO: 252302 - DNA, 75 bp, Homo sapiens
cgacatccacctttaaggccccagcgtccaagcccgagaccgcggctcctacctcccagtgccaagtgtataagc

SEQ ID NO: 252303 - DNA, 75 bp, Homo sapiens
gcttgtcaggaactcgactcagacgtggataaagataatcccgaacacagatatgtagaactcttcttgaattct

SEQ ID NO: 252304 - DNA, 100 bp, Homo sapiens
actgatgggaaatcagccctggacctggcagatccttcagcaaaagctgtccttacagtgctcaaagatccagacagcaatccatacagcttacttgata

SEQ ID NO: 252305 - DNA, 73 bp, Homo sapiens
cgagaaccgtcagtttgagccagatggatgtacagttacccagcacgtgtacctcctcctcctcctattgctc

SEQ ID NO: 252306 - DNA, 100 bp, Homo sapiens
tgatgtcagtgttatatcctccaggaatactggccaggtgaccttggagaaggtgctgggaattacagtgtctggaggcagaggacttgcctgtgacccc

SEQ ID NO: 252307 - DNA, 76 bp, Homo sapiens
gccattctcccatgtctactcgcaggcgtcatgttgggaatcggctatcagttgagggatttgcagttgataaaat

SEQ ID NO: 252308 - DNA, 100 bp, Homo sapiens
gttgatgccaactccttcttcccacgctgctactgcctgggggctgaggatgacaaaaaagccttcatagattaaaaggagcccaagccccatctcatcc

SEQ ID NO: 252309 - DNA, 100 bp, Homo sapiens
gttgacttttgctcaaggtggaacgacagagctgtgtaggcaagatgagaaattgcgaacttgttcggccaaaggccacagaaacactattcagaatggg

SEQ ID NO: 252310 - DNA, 100 bp, Homo sapiens
tgaaccagttctgcagtgtgcacacgcttcaagaggtctacattgagctgtttggttgaaatcacaaagattagacacctttttagataggtgttcttca

SEQ ID NO: 252311 - DNA, 100 bp, Homo sapiens
cctcctgagtagctgggatcacaggacagacaatgctgtgaagaatcactggaactctaccatcaaaaggaaggtggacacaggaggcttcttgagcgag

SEQ ID NO: 252312 - DNA, 82 bp, Homo sapiens
ggtgacggcggagaggcgccccccgcagcaggccgagacgcatccagagctttcgtgaccggggactgttctgaagcaggcc

SEQ ID NO: 252313 - DNA, 83 bp, Homo sapiens
gcaaccgcaacatcgaccagaccatgctctccatcctgctcttcttccacaggggtttaaagccaatttgtctctcttgagga

SEQ ID NO: 252314 - DNA, 75 bp, Homo sapiens
tttttcgacaaagcttatgtatgaaggggcataaggaaatggtggcaggcacttcctcctaacaagaaggaagta

SEQ ID NO: 252315 - DNA, 49 bp, Homo sapiens
accttttccacagggaattgagttgagtaattccctcctggtcccagac

SEQ ID NO: 252316 - DNA, 100 bp, Homo sapiens
gttgtggcagtcaatggtcttctgtatgtttctggaggtcgatcttccagccatgattttttggctccagatcgaccttcagaagatgcccttggggaag

SEQ ID NO: 252317 - DNA, 74 bp, Homo sapiens
actgaaacggattgccagagaattggcagaagatgatgaaaaactctcagaggtagaagaagctcaggaagcaa

SEQ ID NO: 252318 - DNA, 107 bp, Homo sapiens
acatctgctattcttatagaaaatatggatctttacatgttgaatccttgcagcactaaaatttgctggagaagcgactggaggagtggttggggaggacattgcct

SEQ ID NO: 252319 - DNA, 88 bp, Homo sapiens
tgaatataagaatgaagctgatcatggtcagttgattatggaagattcccacaagagtaccacgtcagagacagcacctcaacctggt

SEQ ID NO: 252320 - DNA, 82 bp, Homo sapiens
cgccgaccggggccctaggcccgacgacggcagtctctgctttctatccgtcaagatgataaagtcgtgtgcccgagaacca

SEQ ID NO: 252321 - DNA, 101 bp, Homo sapiens
aaccatctcctgagaaagcatccttttcgtacaatgttagctgttctaaaaaatttgcacttagtcgttggaatcgtaagcctgataatcaaagtcttggg

SEQ ID NO: 252322 - DNA, 90 bp, Homo sapiens
cgacgactcgctgtaccccatcgcggtgctcatagacgaactccgcaatgaggacgttcaggatgagagggccttaccaaaaggagattt

SEQ ID NO: 252323 - DNA, 100 bp, Homo sapiens
tggagaagatcctagccgacaaggaggtgaagcggccccagcactcccagctgcgcagggcctgccaggtggcgctcggagaaaatatggagaagtcttg

SEQ ID NO: 252324 - DNA, 100 bp, Homo sapiens
gctgcgctgtaagatcctgatgaaggcatcttggccatcctcatcccccgcctggacctggtcatctccctggtgggctccgtgagcagcagcgccctgg

SEQ ID NO: 252325 - DNA, 98 bp, Homo sapiens
tgaggcggcgagagatggtcaggtctggagctcgaccgggccaggaaatttctcctcttctctccatggaggctatggcatttgttactgaagagagg

SEQ ID NO: 252326 - DNA, 100 bp, Homo sapiens
caagattgaaagcaaattattagctaagaaagcagaggttaatacaatccctggctttgatggagtagtcaagcaagaatttcgactgggagtgcgactc

SEQ ID NO: 252327 - DNA, 114 bp, Homo sapiens
cttcaggacaacaaatttcgcctgcttactcagatgtctgcaggaaaacagtatttagaacatgcatctaagcaaaagcggcgccaggaaattgaacaaaaacttgaagttcag

SEQ ID NO: 252328 - DNA, 82 bp, Homo sapiens
accgagctcccgtctgccttgcagggagtcgtcgcatggtggatgtcatggacgtgaacacacagaaaggcattgaaatgac

SEQ ID NO: 252329 - DNA, 139 bp, Homo sapiens
aggactctgcgtgcattctccactgccgtctactcggccactccggtcccgacacctagcctgcagacgagttgtactgctgtcacaggaaatggacgctggattacaagcatggcagctcaggcagcagaagttgcag

SEQ ID NO: 252330 - DNA, 101 bp, Homo sapiens
tggaataaaaacagagtccgatgaaaggaatgggtctgggaccttaacagggagccatggctgaactagaagcttttgaaaacagactgaagggtcgtcgg

SEQ ID NO: 252331 - DNA, 100 bp, Homo sapiens
aaaaaaggctctcagaatatatcatgagcagcagggagtggacatccgccataacaaggaccgaaaggttcggcgcaaggagcccaagagccaggatatc

SEQ ID NO: 252332 - DNA, 75 bp, Homo sapiens
ctcgctcggctgcgggaaatcgggctgaagcgactgagtccgcgatggaggttgaaggggcccggccaggactcg

SEQ ID NO: 252333 - DNA, 86 bp, Homo sapiens
ctgctgttcccagaagcgaagtggagagcgccagagtaatggcgaccgtggcagccatgtattacagctactacatgctaccggac

SEQ ID NO: 252334 - DNA, 100 bp, Homo sapiens
cggcggcggaggctgccatggacgacgaggaggagacgtaccggctctggaaaatccgcaagaccatcatgcagcattgtcccagatatagccgttggta

SEQ ID NO: 252335 - DNA, 100 bp, Homo sapiens
gttctttcgcttttttacctgccaatcaaactgctacaagacaacaccctgatctggcatggacatatgtggccctttgatagatctctgccggggtcct

SEQ ID NO: 252336 - DNA, 75 bp, Homo sapiens
gaacctgacagacgaccagatcgccgctggcctctatggtgatgatgaacagtctacacagatggctgcaagttg

SEQ ID NO: 252337 - DNA, 80 bp, Homo sapiens
cctcccagcaccacagtccttctgcagtccctcgtccagccacccccagggtgtgggccgaagatatgctcatgtggtgt

SEQ ID NO: 252338 - DNA, 87 bp, Homo sapiens
aggatggctactatttcaccaatctggttggatacactccagattggatatttctgctgagaaatgtaatgcgaatcagtccagatc

SEQ ID NO: 252339 - DNA, 100 bp, Homo sapiens
ggacaccgacatggaacagggactcactggggatcttcaacttgctgctgagcttgggaagacattactggatcggaacacagagttggaggactctgtt

SEQ ID NO: 252340 - DNA, 101 bp, Homo sapiens
gttcgagaacgaccccgagacgaacccttaggagaaatcttgagagtggacagcaattgtgaagatcgccagagagttctgtgtttcatcaccgccgaaag

SEQ ID NO: 252341 - DNA, 90 bp, Homo sapiens
cgtgactgtggatctcaagtactaccggccaactgaagtgcctcttagcaaatatccggctgtgatcaatgatatttcattctggttgcc

SEQ ID NO: 252342 - DNA, 90 bp, Homo sapiens
atgcagaatgccaccaagtatggcaacatgacagaggaccatgtgatgcacctgctccagatggagtttcactatgttgcccaggctgat

SEQ ID NO: 252343 - DNA, 83 bp, Homo sapiens
agattttctctcaaactacgaggtggcgaaattcacatactcactgtctgtggcaaatggcattgggccagagaagaaacccg

SEQ ID NO: 252344 - DNA, 96 bp, Homo sapiens
gcggcttcctagtgagtcggcggctgatttagaaggaggttcaggctacggtgagccgaagagctgaggcttcgaagacctcagaggacttctctc

SEQ ID NO: 252345 - DNA, 100 bp, Homo sapiens
ttgtttgtcatccttgtacagcaatctcctcctccactgccactacagggaagtgcatcacatgtcaggactttctgcagggcgactgcaccaaagcgaa

SEQ ID NO: 252346 - DNA, 82 bp, Homo sapiens
ctgcaaggagaagctgcacgacgtggacttctacaaggcccgcatggagcgtgaatgcatctcagtccacgtggggcaggca

SEQ ID NO: 252347 - DNA, 100 bp, Homo sapiens
gagagtcacaattcccttctacaagtgtcatggagaaactccagctgggcccagagattctgcagcgggaaaatccaaggcttatttatgccaggctgag

SEQ ID NO: 252348 - DNA, 99 bp, Homo sapiens
cttccgtaacccctgcacagagcagattctgaaacttcttgacaatttgcttgcgcttataagggtttcagaagctgccagaggaggagccagaaacag

SEQ ID NO: 252349 - DNA, 75 bp, Homo sapiens
acccaccgccgccgcctcccagagtaatcaagtcagaggattatatgacttttatctgcctagagaagaactatg

SEQ ID NO: 252350 - DNA, 100 bp, Homo sapiens
aagaggagcagcatggcatttcagtcactggtttgcagagtccaggctgacgttcctcagggagtgattcgagtgcaagctccccatctttcgaaagttt

SEQ ID NO: 252351 - DNA, 100 bp, Homo sapiens
caagaaggggagtgcccgcggcaggagtctcgctctcagtcaaaatctccaacgggaactcctgctcgtgtaaaatcggagagcaggtcaggatctcgta

SEQ ID NO: 252352 - DNA, 75 bp, Homo sapiens
aaaatacccgcaacagccccttcgtcccaagttcttcccaggagactctgccggccttttccccaccagccccag

SEQ ID NO: 252353 - DNA, 74 bp, Homo sapiens
cttgaagacgacttcgaccctgcccagcacgaccagctcatgcaggttgctgtgagtctaggtactccaattat

SEQ ID NO: 252354 - DNA, 90 bp, Homo sapiens
gtgaagcgccagcaggagagggctgaaccgttcacaggagaactccctgcccagcagacactgcccatcctcggagagaaactgcaccag

SEQ ID NO: 252355 - DNA, 100 bp, Homo sapiens
ggacagtacctcttctgcaggtactggaaacccacaggcacacccaagcaaggggagagccagttgcgcagagccctgcaaccagcagtccagggagaag

SEQ ID NO: 252356 - DNA, 83 bp, Homo sapiens
gagaagtgtccggggtagccccgttacagagaaagcatgggattatggcaaccacagaatctcagtagtacaagttccattca

SEQ ID NO: 252357 - DNA, 101 bp, Homo sapiens
ccttagtggccgtcttttgcctctttctctcaggctttcctacaactcatgcccagcagcagcaagcaggaaaatatatgcagatgatgaacattcttaag

SEQ ID NO: 252358 - DNA, 75 bp, Homo sapiens
agggaggctccaagacctcatcaacaattaagttgcaggaagaggcagaggaagaggaagaggaagaggacgtgg

SEQ ID NO: 252359 - DNA, 74 bp, Homo sapiens
cagcccccttataagccaaaagcttttggaaattttagcattcaggtgccaggaatgcagatgggacagccagt

SEQ ID NO: 252360 - DNA, 100 bp, Homo sapiens
ccgttgacaaggcactgctttttcatgacgaggcggggtttcaccatgttgcccagactggtcttgaactcctgagcttaagcaatccacctgcctcggc

SEQ ID NO: 252361 - DNA, 101 bp, Homo sapiens
cggagccattcccctgaatggtgactctgaggtcagacatatttccaacatttgggtcaaaaccttgtccaacaagactttcttctgcaaagaaaaaaatt

SEQ ID NO: 252362 - DNA, 75 bp, Homo sapiens
cacctaccaagaagccagtcaagcggccaggtttttctattgggaaagctactgatcggatggatgctttcagga

SEQ ID NO: 252363 - DNA, 50 bp, Homo sapiens
gagctgagcctgccacgccgaggacgtggacaatgcagatcttcgtgaag

SEQ ID NO: 252364 - DNA, 83 bp, Homo sapiens
gagacagaagcagatggattcgtccttttaggtcatgcagaaggcttttgtatgatgtgtacaatgcaagcacatattaccca

SEQ ID NO: 252365 - DNA, 100 bp, Homo sapiens
gggtgatttgttctgtatcagaagacaatatcatgcaagtgtggcaaatggtttttcgttggaatatacgttgcacatttatggcgattctgagtgtgag

SEQ ID NO: 252366 - DNA, 98 bp, Homo sapiens
gagaaattatgggtacccctgaatatgtgggaaatctactttcttcaatgtgttaaccaatagtcaggcttcagcagaaaacttcccgttctgcacta

SEQ ID NO: 252367 - DNA, 90 bp, Homo sapiens
agatgctcaaactaacgaaggaattgtgacccttattaaggttttggggccttgtcacagatgccagatgatttgcatcgaccagcaaac

SEQ ID NO: 252368 - DNA, 74 bp, Homo sapiens
cagcatcgaatgactacttacaagccacccacacagaatatgcctatgggtcctggagggatgaatcagagcgg

SEQ ID NO: 252369 - DNA, 82 bp, Homo sapiens
aaatggttcccagtttttcatctgcactgccaagactgagtgttaattatcttcacccccaaatccctgttgcgccaccccg

SEQ ID NO: 252370 - DNA, 73 bp, Homo sapiens
gagagtcaccatgctcaaagtgaatatattaaggtagaagatgacagattattgaggttgtcccaaaagaagt

SEQ ID NO: 252371 - DNA, 51 bp, Homo sapiens
ccagaagcgggcggcgcgggggagatggctctgtgtgctccgggatggagc

SEQ ID NO: 252372 - DNA, 99 bp, Homo sapiens
ctcgggagctcatcttcgtggggcgtgaggagtgtgagctcatgctacaggtgagaagccctaccactgcaactgggacggctgcggctggaagtttgc

SEQ ID NO: 252373 - DNA, 97 bp, Homo sapiens
ctgaagatggtgtcaaagagaaattctggtgtcatggagaaactccagctgggcccagagattctgcagcgggaaaatccaaggcttatttatgcca

SEQ ID NO: 252374 - DNA, 98 bp, Homo sapiens
gcggttagcccgtcagtccctgctctgtgcgcgcctccatctgggccatggatggatgcagaatcctgatacactatcagcaatgtcaaaccctagag

SEQ ID NO: 252375 - DNA, 100 bp, Homo sapiens
gcccgcgaggagccgccgcgcgcccgcgccctccgcgcgacgccagactgtgccctgtccacggtgcctcctgcatgtcctgctgccctgagctgtcccg

SEQ ID NO: 252376 - DNA, 100 bp, Homo sapiens
ttgacctcttcctttatcagccacatagccggatcgagctgggagatgtgacaccacacaatattaaacagttgaaaagattgaatcaggtcatctttcc

SEQ ID NO: 252377 - DNA, 95 bp, Homo sapiens
taagcttcgggcgctgtagtacctgccagctttcgccacaggagtgaagcagccgacacgagtcgttgttcataaaacagcttttgaaagttgag

SEQ ID NO: 252378 - DNA, 101 bp, Homo sapiens
gccaaacgttcatacccaagccttaagcccctgggaagttacatcacagatttcctagcccggttgaactttttacagctgtgctgcgtgactgctatgac

SEQ ID NO: 252379 - DNA, 100 bp, Homo sapiens
tgacctcctggacttcagcatggagtgtacctcacagccttctaggatctccagagtggacaggaatctcacttggagggaccatggagcagtatacagc

SEQ ID NO: 252380 - DNA, 100 bp, Homo sapiens
atgtggcacggagcaaccccaagtcaccacaaaaacctatcgttagagtcttcctgcccaacaaacagaggacagtgtgggacaaatctgctcagtgtgg

SEQ ID NO: 252381 - DNA, 75 bp, Homo sapiens
cagactggtgacttcacttttgagtgcaactgccttccagatcgatctctttgggctgcctgacctccttgggtg

SEQ ID NO: 252382 - DNA, 83 bp, Homo sapiens
ggcagtggaaaatgcgctcgggctggaccagcaggagcatcagatccatgctgctgctgactcggagccccacagcttggcac

SEQ ID NO: 252383 - DNA, 51 bp, Homo sapiens
cccagttttccagccaccagtgggatgatgatacttagtcacctgttcctc

SEQ ID NO: 252384 - DNA, 101 bp, Homo sapiens
ggaggcggtggcggcggctgcccggggccaacatgaccagatggagaattatactctggaactgcagctgattttatggggcgagactttgctatcttccg

SEQ ID NO: 252385 - DNA, 75 bp, Homo sapiens
ccgtgcagagctgggccgacccgaaagtgtccctggccagtgtccttccacctgtccacaagcatggggaacatc

SEQ ID NO: 252386 - DNA, 50 bp, Homo sapiens
agatcaactcctctctgttaatggagtgatgctgggctcttgcactgttt

SEQ ID NO: 252387 - DNA, 141 bp, Homo sapiens
gagtctgcgaaggccgggacccggttccccggcccacagtgggggtgtgcaaacccgagagaactggatattgatgatgttaagaagttcaaaccgggttacctggaagctactcttaattggtttagattatataaggta

SEQ ID NO: 252388 - DNA, 75 bp, Homo sapiens
aagttaagataagaagtaatctggaatcagaaagcactacgctaagatctactccaagtgaccaacagcaaaaca

SEQ ID NO: 252389 - DNA, 74 bp, Homo sapiens
gacagctgtgtttgagaagctgcagacttacatagctcttcttgccttgccaatctattatcctcccagtccac

SEQ ID NO: 252390 - DNA, 100 bp, Homo sapiens
ggcattacctgtacccattcaccggcggctaccggcggcggcgcgcagcgtgtcaggcggagagacccgccgccagattacgtgtgaaaatgaacttgtg

SEQ ID NO: 252391 - DNA, 101 bp, Homo sapiens
gcagttgtccaaaagtgaaattttacgaactcagaataacaagcctttgtattcatttgaagataatgcagactatgtttatgatgttatgtggtcaccta

SEQ ID NO: 252392 - DNA, 75 bp, Homo sapiens
tcatcacatgctcttggattaggaacagtgattctttcttaaaaatggtttctgctgatgtactccacggttctg

SEQ ID NO: 252393 - DNA, 51 bp, Homo sapiens
gaaccaccaaaagtccattatgaaactgggcttcctgaagaatgagaagga

SEQ ID NO: 252394 - DNA, 100 bp, Homo sapiens
agaggaccaacatgggcattttgtttatgagcaaggaggatctccttcaaaggcgcactctcggaggagcagatgcgggagaccagcctggggctgctga

SEQ ID NO: 252395 - DNA, 100 bp, Homo sapiens
gaggaaaacaacttcgagggcagagtgaaagcccagcctccgtggttcttaatgcctcaggaggactattttcactaaagatggaaacactggagtctga

SEQ ID NO: 252396 - DNA, 100 bp, Homo sapiens
cggcggccctcgtcctggcggcaggagaagatcacccggaccaaggaggaggccctggagctgatcaacgggcgagagccgatcagcggatcaccgagtc

SEQ ID NO: 252397 - DNA, 99 bp, Homo sapiens
ggaccatttcagaggttcaccgccatcattggacccaatggctctggtgagaagccctaccactgcaactgggacggctgcggctggaagtttgcgcgc

SEQ ID NO: 252398 - DNA, 90 bp, Homo sapiens
ggagtcatgagcgacagcggcgagcagaactacggcgagcggaggctgggaggcggcagaatgcagccagaggagggcacaggctggctg

SEQ ID NO: 252399 - DNA, 82 bp, Homo sapiens
aaacaaattcatcccagaaatctaagagcaattctgtggtgttcttggtcacacatttatggagtttctgaagggcagtgga

SEQ ID NO: 252400 - DNA, 90 bp, Homo sapiens
caggattggctgcagcagctacattagcagtaaacctattgatggcaattttgctgactgtggaagtgactcatccaaactccatgccag

SEQ ID NO: 252401 - DNA, 75 bp, Homo sapiens
aaggcaccttggccaggtccccgtccattgatagcattcagaaagatcccagatcctgcccggcctgtacatcgg

SEQ ID NO: 252402 - DNA, 80 bp, Homo sapiens
gaaagagcaacatggaatgaccgtttctcatatgcagtgtaattgcatgatgggtgtgttccctcctatcagcagagctt

SEQ ID NO: 252403 - DNA, 75 bp, Homo sapiens
ggggaaaccgctgcttcagagacacaggttcctcatggatgaagaaggaccagcccacatttaccctccgacaag

SEQ ID NO: 252404 - DNA, 156 bp, Homo sapiens
gcgcgtggggggcaaggaagggggggcggaaccagcctgcacgcgctggctccgggtgacagccgcgcgcctcggccagtgactgcagcagcagcggcagcgcctcggttcctgagcccaccgcaggctgaaggcattgcgcgtagtccatgcccg

SEQ ID NO: 252405 - DNA, 95 bp, Homo sapiens
ggaaacaatccatatgcgaccacagaaggaaattcaacagaacttagcataaatgctgaagagatggagtttcactgtgtcagccaggatggtct

SEQ ID NO: 252406 - DNA, 90 bp, Homo sapiens
cttagatttgacctgtgcaaggacctcagcagcttggacacagcccactgcagagggtgctgttcaaggccctgaagaatttgcagaggg

SEQ ID NO: 252407 - DNA, 101 bp, Homo sapiens
ctctgtggtcatcttcagtaggtccacatgcacacgctgtactgaggtatcatgatattagctggtttgacatcaagtcatttgtgagtcatcagatcttc

SEQ ID NO: 252408 - DNA, 87 bp, Homo sapiens
agagacgaactgtgaggagagtaaaccaagaagaaatccacagatttagttctgtatggcatttcaaatatagatacaaccattgaa

SEQ ID NO: 252409 - DNA, 82 bp, Homo sapiens
ggcaagacatatccttacaggcagagaggagatgtcccaaacaggaaggaagaggaaccggaggaagtcccaagagccaaag

SEQ ID NO: 252410 - DNA, 50 bp, Homo sapiens
gtgttgtgtaaaggctacccttcccgcatcgccacatccctggatggctt

SEQ ID NO: 252411 - DNA, 100 bp, Homo sapiens
tctctgcacagcatccctgtgacagtggatatgctgctgatgaaatcactcactgcatacggcctcaggacatcaaggagcgccgagcagtcatcatcct

SEQ ID NO: 252412 - DNA, 96 bp, Homo sapiens
gtataatgttaatcaacttggtgatgcccatgactggaaccagaacagagtggagaacatgcagctgaccctgaacctgcagacggagaacaaagg

SEQ ID NO: 252413 - DNA, 98 bp, Homo sapiens
atgggtatggaggaggacctggagattgtcactgctgttccaagggcacacgcagagggatttggaattcctggagagttgcctttgtgagaagctgg

SEQ ID NO: 252414 - DNA, 83 bp, Homo sapiens
gatgctaccatcaaagtgcgcccacagcagcaaccttggagcaggcagtgcctacaccaactaatgttacaattgaatcctat

SEQ ID NO: 252415 - DNA, 100 bp, Homo sapiens
tcgcttgaaaagactgggcttgtccttgctggtgcatgcgtcgtcggcctctgggcagcagggctgcccctgatggggcctggcaatgactgagcaggcc

SEQ ID NO: 252416 - DNA, 82 bp, Homo sapiens
ctgtttctcatctttatactcttccaggctttgattctgataactcttctggggaattttcagaggcaaatcagaaagtcac

SEQ ID NO: 252417 - DNA, 100 bp, Homo sapiens
ccaaggtgcagacagctgtgactatgaaggggaccactctgcttcatttttgggagaaaacttctcacactatggcagccatccatgagagtttcaaagg

SEQ ID NO: 252418 - DNA, 100 bp, Homo sapiens
ctgcctacaattgtagtgtcaccagctttagccatgacagccccagtgtccctacgttcatagccgtctcaacaatgggcgcatattaaatttcctattg

SEQ ID NO: 252419 - DNA, 106 bp, Homo sapiens
ttccacattctcatgcatttattgatctgactgaagattttacagcaggtggatcatccatgccatggagtatgaacttcagatccgtggcggagacaagccagcc

SEQ ID NO: 252420 - DNA, 100 bp, Homo sapiens
cgagcagtcagctgggggagatgtccctggaagaacacagccagtgtgaatgcagagaacggagaccaacctgggctgaagaaagaagattaaatgctga

SEQ ID NO: 252421 - DNA, 88 bp, Homo sapiens
atttaatgaaggttcttaatgagctttatacggaggccatgatggatttcttcaacgcccagatgcgcctgggggggctgacccaggc

SEQ ID NO: 252422 - DNA, 127 bp, Homo sapiens
gaagcccccaccgaggccccccggcaccgcgcctgctgccgggttgcgctccgtgcacctcttgcgggcaattgttctcttaactgaattaattagggaaaacttcaggaacagcaaattaaaacag

SEQ ID NO: 252423 - DNA, 96 bp, Homo sapiens
gcggagctggcggggagtcgcgggcgcctccgcctcagttcattcggctcctaaagaagtagcagtgtccaaggaacaagaagagaaatctgatag

SEQ ID NO: 252424 - DNA, 74 bp, Homo sapiens
aggaatgaaactgaaacatacagtcagatctcaggaatggaagttatcaggaactgttgccgttattacatcag

SEQ ID NO: 252425 - DNA, 82 bp, Homo sapiens
gaacattctgccgaagagaacaagacgtgtgaagactcagtttacaagtccttccactttctctctgaggcagaaagagcaa

SEQ ID NO: 252426 - DNA, 75 bp, Homo sapiens
gcaggagcagcccgcggcgaccaagatcaggaacctgccctgttctgttccacatgtacgactcggacagcgacg

SEQ ID NO: 252427 - DNA, 100 bp, Homo sapiens
gatggcatcaacctgaatgacatcgagaaggtccttccagcctggcagccaaaccaaacaggaagcttacttttctctacctagccaatgatgtcataca

SEQ ID NO: 252428 - DNA, 90 bp, Homo sapiens
tgacggatgaaaagaatgaacactgtccttcaaaacgaataaacaatcagattctgtatggaagaagtcaccaaaatgcatctgccatta

SEQ ID NO: 252429 - DNA, 75 bp, Homo sapiens
aggagacgctcctggcactgcagggacaagaatccttcaagaaacaggaaaaaactcctaaaacaccaaaaggac

SEQ ID NO: 252430 - DNA, 75 bp, Homo sapiens
cgccgccctcaggaagctcaatgacctgatcaagcgggcacggctggccaaggaactgtggctgcaccatctgtc

SEQ ID NO: 252431 - DNA, 101 bp, Homo sapiens
gcctaccatcgtttcttcctgcctttgggccgtcaggcagttggttgggacccgctccaaccctcgattttaggtgatgggcaagtcagaaagtcagatgg

SEQ ID NO: 252432 - DNA, 82 bp, Homo sapiens
tcgggaccaaggatcacgtcatgactccggctgcagaagatcctggcagagtctcccccacccgcccgtctggacatccagc

SEQ ID NO: 252433 - DNA, 82 bp, Homo sapiens
ccgaggacgccttcaactccacttttatctccaccataggtcagcccaaggccaaccccactgtcactctgttcccgccctc

SEQ ID NO: 252434 - DNA, 50 bp, Homo sapiens
agaaaggcctggtccagttccgagactctctgccacctttgagccagcct

SEQ ID NO: 252435 - DNA, 82 bp, Homo sapiens
atctttccggatcaatccagatggcagccagtcagtggtggagtgactcgggccagtgtagaggtcctcaggccgccggcag

SEQ ID NO: 252436 - DNA, 90 bp, Homo sapiens
gggcagggacgtgttggacacgctgactttgtaggctccgccaagaggcgccgcaggagtgttgttacagatcttataacagtcggttta

SEQ ID NO: 252437 - DNA, 100 bp, Homo sapiens
ccccatcttcacagaatacacctctggctcaagtgtttgtccctttggagtctgttaagcccagacgactgggtttggattcagaagaggattattatac

SEQ ID NO: 252438 - DNA, 98 bp, Homo sapiens
ataggcaagtggtgtgtggcacaaaatgcaacacggtcaaaatgcagatcttcgtgaaaacccttaccggcaagaccatcacccttgaggtggagccc

SEQ ID NO: 252439 - DNA, 100 bp, Homo sapiens
actgcctatgcccactacctcctcgtgctcagcctggcgccggagctgaaacacgacgtgaagttactccacaggatccgctgaacataggatgttgcca

SEQ ID NO: 252440 - DNA, 100 bp, Homo sapiens
gctgtccgtgcgcgttgctgcggccgtggtccgcgcccttcctcggcgggccggactggttggtgcagcatgatagagctcaatttcaaggatgcatttg

SEQ ID NO: 252441 - DNA, 100 bp, Homo sapiens
agcggacgggccatacccaataaccaggtgcttggcaaaatcgagcgggccattgatgtgtctgggaagctgaggatctgggataccacgcagaaggagc

SEQ ID NO: 252442 - DNA, 82 bp, Homo sapiens
cggcccacgccctccgactgccagtgagaagccctaccactgcaactgggacggctgcggctggaagtttgcgcgctcagac

SEQ ID NO: 252443 - DNA, 75 bp, Homo sapiens
gaaactggcgagccacgagggacatgtgtaggtatcggcacaactatccgctggtaggtgagtgctgtcctcggc

SEQ ID NO: 252444 - DNA, 89 bp, Homo sapiens
ggcgggctgtggggcctccgcgccgcggccgttagtcatgtcgggtcagtaacagatccaagagatggaaagagagtagcgctcaaaaa

SEQ ID NO: 252445 - DNA, 86 bp, Homo sapiens
ttaataatgtgtgacccttcacctttgatcccctgacctgcattaccttggaatgtcgttgtctgctgggtcttcccctcttcatt

SEQ ID NO: 252446 - DNA, 50 bp, Homo sapiens
ttctaaaacaccagaactcaacctggaatcagagatcattgatttcttcc

SEQ ID NO: 252447 - DNA, 74 bp, Homo sapiens
gaggagtctctgtccgggggcctggctaaggaaaccctattacctccagattcttcgctgctgctgccttaccg

SEQ ID NO: 252448 - DNA, 74 bp, Homo sapiens
tggcagctggaattgggggcctcgagcaaagttggcccgagatgaccaaattcacattctcaagcaacaccgac

SEQ ID NO: 252449 - DNA, 75 bp, Homo sapiens
aaaatgcaagaagactgatggagcaggcttgcaatattaaacaagatgagaagatgaagtgaatttatggattct

SEQ ID NO: 252450 - DNA, 50 bp, Homo sapiens
tttatcttttctccactcatataaaatgaagcctgtctagcagtccagag

SEQ ID NO: 252451 - DNA, 98 bp, Homo sapiens
ccatgaactccggagccatgaggatccacagtaaaggacatttccaggtgatttgctgtcctctgaatacatagagagacacattgaacatggaggca

SEQ ID NO: 252452 - DNA, 85 bp, Homo sapiens
ctcctccttggtcgccgcgtccttggctggcgtgtgaccatggaggaagaagatgagtctcgagggaagacagaggagtcggggg

SEQ ID NO: 252453 - DNA, 75 bp, Homo sapiens
gtgctggggccgcgccacttccgcaaacaggtgcagaagaacatgagctgcctgtggacatggaaaccatcaacc

SEQ ID NO: 252454 - DNA, 100 bp, Homo sapiens
gagcactatgtctgcggaagtccccgaggcagcctccgcggaggagcagaagccacctgtctttaccagtttccaagactatgttactgggcttcagact

SEQ ID NO: 252455 - DNA, 98 bp, Homo sapiens
gtctacggatgaggaaactgaggcctggagaggttaaagagacccgttcagagtcctacagtggcagaaaggagaacctgactgctgtgcactctctc

SEQ ID NO: 252456 - DNA, 100 bp, Homo sapiens
gacacagggagccacctccgggcgcagaggcctacatcccacagagatacccagacaacaggatcgtctcgtccaagcaagagtgagccatggagctacg

SEQ ID NO: 252457 - DNA, 101 bp, Homo sapiens
gctaactgtgtgccttagaaaccaggcatgttatgttacccagagaactttccaaacaagtacctaaaactcatctgatgtctgaagaggagtggaggaga

SEQ ID NO: 252458 - DNA, 50 bp, Homo sapiens
tagatctgtaccgtgccaacccgcatgggagcatcgagtacagctgtccg

SEQ ID NO: 252459 - DNA, 74 bp, Homo sapiens
cagtggtcgcttcttctccttggcatcacgttgggtggtttccatttagaccgaggccggttcagaacttccca

SEQ ID NO: 252460 - DNA, 99 bp, Homo sapiens
agtggcacctgcgcgaagctggccaaagcctgcccagacggctcacctgtgcgggatggaacaaaaggagttgcgggagcttcaggacgagaaggcaga

SEQ ID NO: 252461 - DNA, 100 bp, Homo sapiens
ctgtatctgggaattgccaaggagaagagtaccaaggctgctagtgaacagcgacgtgggaactgctcgcagaaagaagaaggtggttcatagaacagcc

SEQ ID NO: 252462 - DNA, 96 bp, Homo sapiens
aaggattccaagtaactcttatttggtgtgggaaccgctgagcagaacaccctcccccagcgggaaatccgggacacgcaggagcctcagtgaatc

SEQ ID NO: 252463 - DNA, 80 bp, Homo sapiens
gaatttaaaatggtccacagcagtcgaattttgtaaaagtttacaggtacatacattacacccctatttctacaaagctt

SEQ ID NO: 252464 - DNA, 50 bp, Homo sapiens
aagcaaccgaaaaggagagtttcctggtttatcttgcagattatggactt

SEQ ID NO: 252465 - DNA, 98 bp, Homo sapiens
acccattcatctttgctctgtgcaccattattcccatggagcccgacgagatgcaaccttaaaatcagtgacaagaaacattccaaacaagcaacagt

SEQ ID NO: 252466 - DNA, 100 bp, Homo sapiens
cagtaatgaaatactaatattttcagttcaaccaaaatctcttgtacgttttcggctttgtgagaaaccttaccatcaaacacgatggccagcaacgtta

SEQ ID NO: 252467 - DNA, 50 bp, Homo sapiens
aaagcggccaaggccacggtgtttagttgtcaggggagtgtccattggca

SEQ ID NO: 252468 - DNA, 125 bp, Homo sapiens
gaagatgcaagcggtttgggaccttgaacaaggcaaatatggttttggagatatgtcagtattgaattctcccagacatcagagctgtataatgcatgttgatatggattgcttctttgtatcag

SEQ ID NO: 252469 - DNA, 90 bp, Homo sapiens
caaagcatgggagtgcagctgcctgacaacaccgatcacagaccaacaagtcaaaatgcagatcttcgtgaaaacccttaccggcaagac

SEQ ID NO: 252470 - DNA, 100 bp, Homo sapiens
gaccacaggaattggatctactagtgcaggagacccggtgagcctccattgataaaaggttggcttccttatcttggagtggtcctgaacttacgaaaag

SEQ ID NO: 252471 - DNA, 72 bp, Homo sapiens
cacctttgtcttcctggcaagcctccttgttctcattgaggagccagcaccgctctttgaccttgccatgct

SEQ ID NO: 252472 - DNA, 88 bp, Homo sapiens
aagatccattggtaaattgatcaggatttttggcctaccctccaaagaaaaggaaggatgataaagactatgctttaaaacaaataga

SEQ ID NO: 252473 - DNA, 98 bp, Homo sapiens
cgctcgcccgggctgcgctgggcgctgccgctgctgctgctgctgctgcgcctgggccagaacagctttgctgagccatcaaggtctaatggaagcat

SEQ ID NO: 252474 - DNA, 90 bp, Homo sapiens
tatggatgatcgagaggatctggtgtaccaggcgaagctggccgagcaggctgagcgatacgacgaaatcttcccaaggctgcagacacc

SEQ ID NO: 252475 - DNA, 100 bp, Homo sapiens
gaaggagtacagggaagtctataagctttgcaacagaattacagagtatgatggcagcccaatggatccaatggtgatgaagagacctcagttgtatggc

SEQ ID NO: 252476 - DNA, 100 bp, Homo sapiens
ttcagatcgtggcaagcgagcccggggtagagctggtggtatggattggaacacacattcataattcaagaacttttacactaataaaacttagaaatcc

SEQ ID NO: 252477 - DNA, 88 bp, Homo sapiens
ccctgaagagggaagacacgcggaaacagattacctaaaaccagatccatggatgatcttctttctgcctgtgacacaagcagccccc

SEQ ID NO: 252478 - DNA, 75 bp, Homo sapiens
gcattgaatgatttatagctaagactccaggacacccctgaagccgagaaatggccaaacgtaccaagaaagtcg

SEQ ID NO: 252479 - DNA, 89 bp, Homo sapiens
cgggtgcgctgctcaaggacacggtctacaccgacttcgacgcggggatctgacgagcttttctctacttgtgtcactaacggaccgtt

SEQ ID NO: 252480 - DNA, 50 bp, Homo sapiens
cacagaatcaggggaggcatgcttcaggtgacagagctgaatgaacctct

SEQ ID NO: 252481 - DNA, 85 bp, Homo sapiens
ccactacagttcatcaacatcaactacgtccctctgaagctggtgaaactgcgtgctgtaagctgggaccagctttgtccataac

SEQ ID NO: 252482 - DNA, 75 bp, Homo sapiens
gctggaagacgaggccacagacacttctgatagtgaagggaaatcctcattgacgattcaatttgttgaaggcca

SEQ ID NO: 252483 - DNA, 74 bp, Homo sapiens
cgccttcgccctttccacctcgcggcagttcgacggccgaagccctgcagcccacgctacagccggagatgcag

SEQ ID NO: 252484 - DNA, 74 bp, Homo sapiens
tcatcgcagtcctggacacgggggtcgacccgggggctccgggcatgcaggtggaagttgatgggtcgaaacta

SEQ ID NO: 252485 - DNA, 75 bp, Homo sapiens
aagttccacaatatattgactactgccacaattccggtgaaagaagaacgtccagaaaaaataccagatttaaaa

SEQ ID NO: 252486 - DNA, 100 bp, Homo sapiens
ttggcggcataccaccctgcactgtgaggaatctatcttctggatttaatctacattgattctgcatatcctgcctcaggcagtatcatggaaaatgaac

SEQ ID NO: 252487 - DNA, 100 bp, Homo sapiens
aaagcgggagcaaagtgacgtcaagaaagttcctaaaggtgttcccctgcagtttgacataaacagtgtcggaaaacagagattcttcaagtttgcgaac

SEQ ID NO: 252488 - DNA, 110 bp, Homo sapiens
taacatcttgcgaatttataacctgcccccagagctgtaccatgagggggagcaggtggaatatgcagaaatgaagcccctcttcctttcccgagctgcgctgacaggac

SEQ ID NO: 252489 - DNA, 75 bp, Homo sapiens
taacagcatataccatcttcctatgcatggaaactcattatgagaagatcttggcatatacagaagggctgcatg

SEQ ID NO: 252490 - DNA, 75 bp, Homo sapiens
cctggctgcgctgctggcctttgtgagcctcagcctgcagttctggacagatatggcttttctaaagactgcttt

SEQ ID NO: 252491 - DNA, 74 bp, Homo sapiens
aaaagataaagaatcagataaagaagatggacgggaatctccttcttatgtaggagagaagtttgctgaggaat

SEQ ID NO: 252492 - DNA, 99 bp, Homo sapiens
gaagaatcctatggtggaaacattgggtacagtactacaactcaagcagggtgtacaactatgagcctttgacacagctcaagaatgtcagagcaaatt

SEQ ID NO: 252493 - DNA, 100 bp, Homo sapiens
gaaatcatctgtggatctcaatcaagttagcatgctttctccagctgccctatcacctgccagctcatcacaaagtcccagtagggatggcacaatcagc

SEQ ID NO: 252494 - DNA, 100 bp, Homo sapiens
gtggtttttatcaccacacgactgggtatatttcctctctggcagtggagctactgctgtggttcaggcagccctatgcaaacccaggcaagaacgtgta

SEQ ID NO: 252495 - DNA, 100 bp, Homo sapiens
gaaagtgcgattgtggaagctgctcgggttgttgatcattatgaaaatcctagaaacgtggggtcccttgacaagacatctaaaaatgttggaactggac

SEQ ID NO: 252496 - DNA, 88 bp, Homo sapiens
aatgcaccaatcagcatgctgtgtctagctcaaggtcatcatcagatttgaaatatttaaagtggatacaaaactatttcagcaatgc

SEQ ID NO: 252497 - DNA, 90 bp, Homo sapiens
tgtgatatggaggaagaagagctcagggagtgcatccgccccaacccttttccccctcgtctcctgtgagaattccccgtcggatacgag

SEQ ID NO: 252498 - DNA, 88 bp, Homo sapiens
acgaccatggacgacgactatgaagcgtaccacagtctgttcttgtcgctgctcggtaatagcctgcagctggtgttttgagaagccc

SEQ ID NO: 252499 - DNA, 75 bp, Homo sapiens
tctgctgcggcgcggggaccgctgtgctctcgagcctggagacacaggccccatccttcccaatggggacacttc

SEQ ID NO: 252500 - DNA, 100 bp, Homo sapiens
ccacgagcgcccggacgcggtcccaagcagctcctacccgctacgcacgacccccgctgcatcccgagatgtggacgagtgccaccgcgtgccgccgccg

SEQ ID NO: 252501 - DNA, 75 bp, Homo sapiens
gctggaggtggacgccatcgtcaacgccgtgtggacgaatgtggaacctcgctctgtggctgtgttcccttggca

SEQ ID NO: 252502 - DNA, 101 bp, Homo sapiens
cagtggccttctgatgaatactttaaaaatgggacgtcggtcatcagatactgaagaagaaagcagaagcaagagaaaaaagaaacaccgtagacggtcct

SEQ ID NO: 252503 - DNA, 114 bp, Homo sapiens
ctgtgacctggccgatgaggaagtactgagcctgttggaggaactggcccggaaacaggaggacatgaggagcgggaaggcctcctgcaccctggagaccgtgtgggaagacaa

SEQ ID NO: 252504 - DNA, 100 bp, Homo sapiens
gccaatgtgggatcgatgtttcaatattggaagcgctttgatttacagcagctgcaggggatcctcttggtgtatgacatcaccaaccgctggtcctttg

SEQ ID NO: 252505 - DNA, 51 bp, Homo sapiens
ttggctgtgtcttaaatgtggccatcaggttaaatgtgcacagtactggcc

SEQ ID NO: 252506 - DNA, 83 bp, Homo sapiens
ggcgcttcgccccgggccccccagcatgaagaccccggcggacacagacgagccaaactcaggctgtaccttgagcagctcaa

SEQ ID NO: 252507 - DNA, 90 bp, Homo sapiens
caagtgtgtggtggtgggagacggcttttacaaagttgatcacagtaaatggacaagaatatcatcttcaacttgtagacacagccgggc

SEQ ID NO: 252508 - DNA, 100 bp, Homo sapiens
ggcggcggccgcgctgaggcccccggctcagattccacaccaaatcatccatcacaaacaacgcctgcccaaaagaaaactcccagttcttcatctcgac

SEQ ID NO: 252509 - DNA, 100 bp, Homo sapiens
cttccagttgaagtgtcattctacagtgtttcagatgacaatgctccctctccttatatgtttccaaccggaggccctatcggcagtactacgtggaggc

SEQ ID NO: 252510 - DNA, 100 bp, Homo sapiens
tctgcgagcatgtcgagaatctgaacttaggacagtattgagcttcctacaagctgttctggccagaatcagaagtaaaaatgatcctcctgatcatccc

SEQ ID NO: 252511 - DNA, 50 bp, Homo sapiens
gccataggaacgcactcaggcagctggaatgaaacctctgaagaatcgag

SEQ ID NO: 252512 - DNA, 100 bp, Homo sapiens
ttatgctttctaagaggtgtcccttcaaagatgtgagagagaaaagtgagtttattctgaagagcatccaggcactgtttagtacagctgttgaaatgaa

SEQ ID NO: 252513 - DNA, 75 bp, Homo sapiens
atcaagaaggctgaagagattgctaatgagatgattgaggcagccaaggagaagatggtataaactggtccatca

SEQ ID NO: 252514 - DNA, 50 bp, Homo sapiens
ggccaggacagaaacgccgagagtagagacggggtttcgccatgttggcc

SEQ ID NO: 252515 - DNA, 100 bp, Homo sapiens
cagcaccttcggcatctgcccctgccatgaccactgtggagaacaaatccaagattagcacagttatgcagaaggggttaaaagataactttgctgatgt

SEQ ID NO: 252516 - DNA, 101 bp, Homo sapiens
agccccgtgatcctcacagtagccccaggagttggaccagcctggacccttaccccattttacaggtgctggagaatctggtaaaagcaccattgtgaagc

SEQ ID NO: 252517 - DNA, 73 bp, Homo sapiens
ccgggatcgtgaccgtggaggcaacggcagcctttaacagttgagcacatgtatgaagacatcagtcaggatc

SEQ ID NO: 252518 - DNA, 75 bp, Homo sapiens
tgatatacttcctagtgggctggcttttatctccagtgtggctttaaccaagagagcagatccagctgagcttag

SEQ ID NO: 252519 - DNA, 98 bp, Homo sapiens
cagttctctgtagtgtttgccaatgttggagccgtctgcaaagtgtccccggcaagaaggaaactactaaagttcctggggaagcaaagtagaatttc

SEQ ID NO: 252520 - DNA, 76 bp, Homo sapiens
gaggcgaggaggccgccctggcgctggccgaggagcgcgcgctctggctgccgtgcggaggagctggatctgggag

SEQ ID NO: 252521 - DNA, 82 bp, Homo sapiens
attcgcatctcccgctggctggtggaatatggccgcaaccaagacatatctgaagagatggattaagaatgctttggattaa

SEQ ID NO: 252522 - DNA, 98 bp, Homo sapiens
gtgagctcagaggctgagcggcatgatcctggagagctcccagactttgctcagcgttctcaagagggaagctgggaacctgaccaaggctacagccc

SEQ ID NO: 252523 - DNA, 83 bp, Homo sapiens
ggcagctttagtacaggtctttatcttccaactagacaatgcagatcttcgtgaagactctgactggtaagaccatcaccctc

SEQ ID NO: 252524 - DNA, 75 bp, Homo sapiens
tggagaaccaccgcatcaagagcttcaagaacaagggccgcgatgtggaatggctgcttcaacccccaactccac

SEQ ID NO: 252525 - DNA, 90 bp, Homo sapiens
cgaggacgagatggacctggagcccaacggtatggcatttcaaatatagatacaaccattgaaggaacgtcagatgacctgactgttgta

SEQ ID NO: 252526 - DNA, 74 bp, Homo sapiens
ggggagccggccttggacacggagtttcctttaacagtgtttacactcagatttggagagtcctgctgcacctg

SEQ ID NO: 252527 - DNA, 80 bp, Homo sapiens
agcctccccagtagctggaattacagggaaaggaacacaggtctggaagaagaaaggagccatctatgagggggactgga

SEQ ID NO: 252528 - DNA, 101 bp, Homo sapiens
ggccgtccagcagatggcggatgccctgcagtacctgcagaaggtctctggagacatcttcagcaggtgcttcagcgaagagtcctgcgtctccatccctg

SEQ ID NO: 252529 - DNA, 80 bp, Homo sapiens
ccctgctggcaagtcaagtggcaactccgtcagctcgttagaaaggttattctcgttcaagttaatccaggtgagacttt

SEQ ID NO: 252530 - DNA, 100 bp, Homo sapiens
cttggcaccagcatgaactccccatcctcagcaatcccatcaggtgttttgggcggttttggtgaataacatcaccacaggtgagaggctcatccgagtg

SEQ ID NO: 252531 - DNA, 100 bp, Homo sapiens
attttgaggacacttgtggagagctcgaattccagaatgatgaaattgtgcaagagggcacattgggagattcagcttgcaagagtcctgaatctgatct

SEQ ID NO: 252532 - DNA, 100 bp, Homo sapiens
gtggccgagaagtgccagaaactgttcctggacttcttggaggaaggctgggaggcggcagaatgcagccagaggagggcacaggctggctgctggagct

SEQ ID NO: 252533 - DNA, 73 bp, Homo sapiens
gtggaccgattgtcgctcggcggcgggagtcggtttgatctgtggatgaaatgaatcatgattttcaagctct

SEQ ID NO: 252534 - DNA, 75 bp, Homo sapiens
cccaaaattcttcaagacattgcttcgggaagccatccatttagccagggtgacattacttccattcctgaactt

SEQ ID NO: 252535 - DNA, 100 bp, Homo sapiens
ctgcacccagcaatccctctgcagacagctcccacaggagtcatgcccagtgtgtgaagaattcaattcgtcataatctgtccctacacagcaagttcat

SEQ ID NO: 252536 - DNA, 75 bp, Homo sapiens
caacgacaaccacacacatcaccaaggttgatgacaacaagaaactaggagaatgggtaggcctttgtaaaattg

SEQ ID NO: 252537 - DNA, 91 bp, Homo sapiens
tgtgactgcctgcttgcaggctgtgtcacagaagagaagtccaatgatgcatcagcagcctccttctcagcaatacaatatgccacaggga

SEQ ID NO: 252538 - DNA, 83 bp, Homo sapiens
aaaaaggaggccaaagactttagtccctgtgaagcaggaagagtgagggcaggttcactgcagctcagcagcatgtctgcagg

SEQ ID NO: 252539 - DNA, 73 bp, Homo sapiens
cttgagcaccctctgctgcttgagccaggtcatcgcaagtttgacatccggaaaatgtttcaacgtgcgcaag

SEQ ID NO: 252540 - DNA, 82 bp, Homo sapiens
ctgggatccccgccgctctgtctacaacccgagcctggtggagttgacagaagagatcctgaagctgctgatggaactggtc

SEQ ID NO: 252541 - DNA, 83 bp, Homo sapiens
cccgagccgcacggaacggcggtggtggcccgcggagccggacgtctacatggggaggacagagaagcgcaaagaacaagaga

SEQ ID NO: 252542 - DNA, 78 bp, Homo sapiens
ccagaaagtttactcatatttcagctctgttacagctttgtgtccctggtgatgttggaacattaatgatggaacatg

SEQ ID NO: 252543 - DNA, 82 bp, Homo sapiens
ggccgacttcgatgatcgtgtgtcggatgaggagaagaaaatttttactactggagatgtcaacaaagatgggaagctggat

SEQ ID NO: 252544 - DNA, 88 bp, Homo sapiens
agtggatactccatgtgacatggtttctccctatgttacgtggatgtttgtaacctctggttgaagaagtgtattttgcgcagaagga

SEQ ID NO: 252545 - DNA, 80 bp, Homo sapiens
tcaagatgatatttattcaccaaacaaggtgcttgaagtttctgggaagtcggcatccaaccctggtgcttcccttggtg

SEQ ID NO: 252546 - DNA, 87 bp, Homo sapiens
cctactgggtgccagtgtgcgcttctgcagcttccgcagggccagtgagcaggctgtggaagaatgtgacccttactctggcctctt

SEQ ID NO: 252547 - DNA, 50 bp, Homo sapiens
gtctttgtggtgaagggactgtcaaggctgatcattggcttcatcagcaa

SEQ ID NO: 252548 - DNA, 100 bp, Homo sapiens
aatgtggtctgagggacgatatgaatatgaaagaattccgagagaacgagcacctcctcgaagtcatcccagtgaccctgatgctcccataagacagaaa

SEQ ID NO: 252549 - DNA, 100 bp, Homo sapiens
ctgtttgagaaaaggcctaagaattttggcattgatgcagacagacatgctgaactatctggaagtccactgaaaagcaaaagcactaggaagcctttgg

SEQ ID NO: 252550 - DNA, 100 bp, Homo sapiens
cgcgtgttccaagaactgcctgtgcgccctcaacctgctttacaccggctgggaagaaacggtggatgccgccatttcccacctgttgaagacttgcctg

SEQ ID NO: 252551 - DNA, 122 bp, Homo sapiens
cggcggccctcgtcctggcggcaggagaagatcacccggaccaaggaggaggccctggagctgatcaacgaacctagaagtcggaatccggaagaagatcgaacatgacgtggtgatgaaag

SEQ ID NO: 252552 - DNA, 83 bp, Homo sapiens
caacagggatgggctgctggggacagctgctggtgtggttcggagccgcgggagcatcagatccatgctgctgctgactcgga

SEQ ID NO: 252553 - DNA, 73 bp, Homo sapiens
ccgaacgggcgaggttgggctgccgtgctgctcggcggcgctgaggtgcaccgaaggctgctgaaggacgatg

SEQ ID NO: 252554 - DNA, 88 bp, Homo sapiens
aggaggccttccagctgtttgaccgaacagtgtactaatggtcacttgatgtgcgctggctgttttatccacctactagcagatgccc

SEQ ID NO: 252555 - DNA, 100 bp, Homo sapiens
ccagcggctgctcttccgaatcggccaagacaatgcaaactccagtgaacattcccgtgcctgtgctccggctgccccggggccctgatggcttcagccg

SEQ ID NO: 252556 - DNA, 80 bp, Homo sapiens
aaagctgggtttcccgggagatcccaggcggtgacagagtggagccatggctagagatgaagcccggggcaagaactgtg

SEQ ID NO: 252557 - DNA, 74 bp, Homo sapiens
caagctatggctatcagttcccagagttgatataagtgaagatggaatgaaagcactagtcactctttccagtg

SEQ ID NO: 252558 - DNA, 100 bp, Homo sapiens
gcccaaaggcccatgaggggatgcagttatgggctctgtcgccgtggttgagcctgttgatgcccgccctgctgccgaccgaggactgaccactcgacca

SEQ ID NO: 252559 - DNA, 51 bp, Homo sapiens
cgcgcgtgaggctgcggctctgacgtgtgacacccagcccctgccagtccc

SEQ ID NO: 252560 - DNA, 101 bp, Homo sapiens
ctggacggggcgctgcccttgggcgcgcagatacccgcggtgcaccgcctgctgggagcgccgctcaagttaatggagaatcatcctcatttgcaccaact

SEQ ID NO: 252561 - DNA, 101 bp, Homo sapiens
tgaaaaattcttcagattggaaaataccacaggatggagactacgagtttaaagtatgctgaggccttggattaccaccgtcaggcactggtgttgattcc

SEQ ID NO: 252562 - DNA, 83 bp, Homo sapiens
catggaaccaaagcggatcagagagggctaccttgtgaagaagacaatgcagatcttcgtgaagactctgactggtaagacca

SEQ ID NO: 252563 - DNA, 100 bp, Homo sapiens
tgccgacccctggcacctggcgcccagcgcgcccgtggccgctgccgcctccgccccagtttggaaattttagcattcaggtgccaggaatgcagatggg

SEQ ID NO: 252564 - DNA, 74 bp, Homo sapiens
gagatcgttttgatggatatatcttccttgacagcaaagctgctgtgacttactcgaagcctcgattggccaca

SEQ ID NO: 252565 - DNA, 100 bp, Homo sapiens
tggaaacaccatggctgcggcggcccagctctctctgacacaggaatttagataatgggctgtgtgcaatgtaaggataaagaagcaacaaaactgacgg

SEQ ID NO: 252566 - DNA, 90 bp, Homo sapiens
caccaccggatcaacttcgacaaatagcctccagaggaagaagtccaagttccgcttgtccaagatctggtcaccaaaaagcaaaagcag

SEQ ID NO: 252567 - DNA, 74 bp, Homo sapiens
gcgctcgcgagcggctgcgggacgcgaggtttccggagtttatgtggccgaggcagacaagtggaattaggcct

SEQ ID NO: 252568 - DNA, 74 bp, Homo sapiens
ggattaaacgatgatgattttgaaccttacttgagtccacaggcaaggcccatacaggcactatagaagcaaat

SEQ ID NO: 252569 - DNA, 102 bp, Homo sapiens
gcgagagatgtattcagtggaggaagctgaaaatttctttacgggtggaagccaatttacatggattaaccctctatgacactgcaccttgccctattaaca

SEQ ID NO: 252570 - DNA, 82 bp, Homo sapiens
ggctcctgtcgtccgttctctcaggctcccgttcagaggttgacggatatattcagacgttacgacacggatcaggacggct

SEQ ID NO: 252571 - DNA, 51 bp, Homo sapiens
tcacgtctgacggactctgctgacaggtgaaaggtgtagcagtcactcggc

SEQ ID NO: 252572 - DNA, 83 bp, Homo sapiens
gcctgcagcgggagctggacggcgagcgcgagcggcgcgagaaagttgctccgactgtgtgttccaggagtggtggctctgag

SEQ ID NO: 252573 - DNA, 90 bp, Homo sapiens
gcagagtttgatacagcatgtgttaccaagctgtttcctaccaggtcacacactgttgcagcgcaggaatgtctgatcacagatacgggg

SEQ ID NO: 252574 - DNA, 100 bp, Homo sapiens
aggagcgggtttttgggtgcgacttgcaggagcacctgcagcactcaggccaggaggaattcagattttggccgtttttggtgatcatcgtgattctaag

SEQ ID NO: 252575 - DNA, 83 bp, Homo sapiens
aggacgacatcaagaaggtgatggcggccatcgagaaagtgcggaaatgatctgaaaaccatgagtgaacgcctcaagaatag

SEQ ID NO: 252576 - DNA, 100 bp, Homo sapiens
gctgcgggctgcactggccatccagcaactggctgagggactcacagctgatgacctgctgctcgtgctgatctcaggaaagaccacagcaagattcttt

SEQ ID NO: 252577 - DNA, 100 bp, Homo sapiens
gttttaagaaagtggacaaagagaggagtcagacacgatgaggcgagtggtacgacagagcaagtttcggcatgtatttgggcaagcggtgaaaaatgac

SEQ ID NO: 252578 - DNA, 74 bp, Homo sapiens
gacttcagggattacataaacctgtgtaccatgcactgaataacaacgaacttgatgcaagtgataggtttgcc

SEQ ID NO: 252579 - DNA, 99 bp, Homo sapiens
ggttgtgaaatcaacaggaattttaggtggacaagctggttatattctgggcactaaatgaaggcgtttctaggcaatttgattcgttcagagatggat

SEQ ID NO: 252580 - DNA, 100 bp, Homo sapiens
ataattcagatggagaatatatggctggacagctagctgcttatggctataaaattacaggcctctgatgattgtcactcagaagatcacaaccttggca

SEQ ID NO: 252581 - DNA, 87 bp, Homo sapiens
gtgtcgagttcccaaaaagctccgcaggggctgtagggaggagtcttttagtcctgctatacagctgcaccttgtacatcaagctcc

SEQ ID NO: 252582 - DNA, 75 bp, Homo sapiens
tgcgggagaccgggttgggctgtgacgctgctgctggggtcaggtgagtggtgtcattgagcaaacacgaagtcg

SEQ ID NO: 252583 - DNA, 101 bp, Homo sapiens
gatctggtcagcagtgatgatgaagagcctagcacctcttatactgatgacccagatgatgtggtaccagttggccaaagaagagcctggtgttggtgcat

SEQ ID NO: 252584 - DNA, 100 bp, Homo sapiens
tcaagtcaaagcagcaggaagataccacaatcagaccctccgatgaaacgactacaaagtgccatgacagaaggtggtgtggttctacgggaacctcaga

SEQ ID NO: 252585 - DNA, 100 bp, Homo sapiens
ggatcgtgaccgagaccgtgaccgagagcgtgaccgagagcgcgaatatcgtcatcgttagaagatctgcaaagcccctgagcccaaaacagtctcctac

SEQ ID NO: 252586 - DNA, 96 bp, Homo sapiens
ctccaagaaaaaaaccacaaatgtttttctgttttgcctgaatacatgatttaaacaagagatttccacagaaggagttcatgatcaagtgttgcc

SEQ ID NO: 252587 - DNA, 136 bp, Homo sapiens
gccggagatcagctgatgccagtcagagaagtttggcatataatcgaatagttgatgccctaaatgaattcaggttttagctgacgctgtctcacgcctggtcctgggtaagtttggtgacctgaccgacaacttc

SEQ ID NO: 252588 - DNA, 75 bp, Homo sapiens
caacaggttaacgtgtatggcgtgtgcgtgccagacaccattcgcttttcacccaagatgatttgatgtcttata

SEQ ID NO: 252589 - DNA, 82 bp, Homo sapiens
ttcaaagatgtgagagagaaaagtgagtttattctgaagagcatccagtggtgtcaatatcaaaatgccagtcaactccagt

SEQ ID NO: 252590 - DNA, 76 bp, Homo sapiens
gtttccgtcagtacgcgaaggatatcggtttcattaaggtgttggggatgtcctttgcactgaccctgaactgcca

SEQ ID NO: 252591 - DNA, 50 bp, Homo sapiens
aagtaatggtgcaaagcctgaacgtctgcttctgcgctttgcctgggaga

SEQ ID NO: 252592 - DNA, 104 bp, Homo sapiens
tcgacatgagtgatgtggaggaaaacaacttcgagggcagagtactaggttttgacaagcttgcatcatgcgtgagtataagctagtcgttcttggctcaggag

SEQ ID NO: 252593 - DNA, 75 bp, Homo sapiens
tgcgtcaaggactccccgcgcttcagcttgccttgcgccatggactggcagccagacgagcagggcctgcagcag

SEQ ID NO: 252594 - DNA, 83 bp, Homo sapiens
ccccgctcccggggtccccggccggccaagcagtgcgaccaagaccagtgcattcagagcaccaaattcgttttgcaggctgc

SEQ ID NO: 252595 - DNA, 88 bp, Homo sapiens
acacgccttgcaagcgacggcgccatgagtctgacttccagttccagcgtacgagttatcagggaataccaagagcagagagagcatc

SEQ ID NO: 252596 - DNA, 80 bp, Homo sapiens
catctccatcacccaccaacaacaccacaataatccacagccaagaatcatgtcaaccctgccatggacttcacgcagac

SEQ ID NO: 252597 - DNA, 100 bp, Homo sapiens
cggcggggaaaatggcggacgggaaggcgggagacgagaagcctgaaaagtcgcagcgagctggagccgccggagctcttgcaagcttaggatatgaaaa

SEQ ID NO: 252598 - DNA, 50 bp, Homo sapiens
ttgggattcagcattttggattaccagtatgtccgtggttcagaccctgt

SEQ ID NO: 252599 - DNA, 75 bp, Homo sapiens
aatactacgttcagctaaattaagaaactatgttccaacttcctgtcaacaatcttggcagtttaagaaaagccc

SEQ ID NO: 252600 - DNA, 83 bp, Homo sapiens
cacgaggagggtcgggactcggaggaggggccaaggtgtggctcctctgaagacctgcacgaccctgggcgctgcctatggca

SEQ ID NO: 252601 - DNA, 98 bp, Homo sapiens
gggaactgctgatggctcagggactgtcagcctctgctctggaaggcccagccccagcccaggggaccccagacgtctccagtgccttggataagctg

SEQ ID NO: 252602 - DNA, 100 bp, Homo sapiens
ccgccccgcgggggagggcggagctggcgcggcccctagctttctccttctggtgtggggcccgagtgaaaatgcctcgtgtaaaagcagctcaagctgg

SEQ ID NO: 252603 - DNA, 98 bp, Homo sapiens
gcgccatcaccgagcgcttgatgtgcgcggagagcaatcgccgggacagctgcaaggccatggtaggggaggagtgtgtaggtgccatcgtttgcaag

SEQ ID NO: 252604 - DNA, 74 bp, Homo sapiens
tacacagccacccggagttccttagttgaaaggtgcgccctgctgtgacagtatccatatattcctgcacatat

SEQ ID NO: 252605 - DNA, 100 bp, Homo sapiens
gtgaagattttacagcgtgtgtgccgtagtcgttatatagtgcacgcaggattgtcaccagacctgcaatctatggagcagattcggagaattatgagac

SEQ ID NO: 252606 - DNA, 104 bp, Homo sapiens
gctgctgcccgcgtccgaggctcgcgggcggcgggcccgggctcttgtcaggatggtgaagctgttcatcggaaacctgccccgggaggctacagagcaggaga

SEQ ID NO: 252607 - DNA, 100 bp, Homo sapiens
cgactccggagacagcccaaatatcctcggaagagcgctcccaggagaaacaagcatcgttggcttcacagtatgactgatgatcctccaacaacaaaac

SEQ ID NO: 252608 - DNA, 98 bp, Homo sapiens
gcagacgatctcggagacgagtggtgggagaaccagccgactggagcaggcagcagcccaggcagtcatcaagtgcctactatgactttaactaccat

SEQ ID NO: 252609 - DNA, 82 bp, Homo sapiens
aggagaggcggggtcggcgggagccagcgagccacgggagcgagccaggaacttccgcaaacacctgcgcatggtcggcagc

SEQ ID NO: 252610 - DNA, 90 bp, Homo sapiens
ttcaggagctggatggcgtgggacatgtgcaaccaggactctgagtctgtatggagtgacatcgagggacgatgatgacattaatgatgt

SEQ ID NO: 252611 - DNA, 90 bp, Homo sapiens
cctttaggtgcttttatattcatctcaaaaacaaaattctgaactcaggacttggcaaaagcggcaccatgtactacagacggctcatcc

SEQ ID NO: 252612 - DNA, 100 bp, Homo sapiens
tggaacttcaaaaagttctgaaaacatgttgacagggtctcactttgttgtccaggctggagtgcagtggtactattttagctcaatgcagccttagatt

SEQ ID NO: 252613 - DNA, 100 bp, Homo sapiens
aagtgctcgcccagcctgcacgtcgacgacaggatcccatgacagattctgttgtcacgtctccttacagagtttgagcggtgctgaactgtcagcacca

SEQ ID NO: 252614 - DNA, 90 bp, Homo sapiens
ctgcagtacctgcagaaggtctctggagacatcttcagcagagcatcctggccagaacaagccaaggagccaagacgagagggacacacg

SEQ ID NO: 252615 - DNA, 75 bp, Homo sapiens
gagtaaccctcactggagaatccagagcattccatggactttttgctatttcagtttggcctttgcacttttaag

SEQ ID NO: 252616 - DNA, 83 bp, Homo sapiens
ggacggcgagcgcgagcggcgcgagaaatttttggtgttgagccagacttgaccagggaaggcggcagtattcccgtgacctt

SEQ ID NO: 252617 - DNA, 90 bp, Homo sapiens
cggctgcccagattcctttttgcaccatccgtactaccagcaatgcagcaagtcttggaaaaccttacggagctgccctcgtctactgga

SEQ ID NO: 252618 - DNA, 100 bp, Homo sapiens
cacgtggaggaggacacagaccccaactctgtccattctatccccagaagtagccctgaaggtgctggagaatctggtaaaagcaccattgtgaagcaga

SEQ ID NO: 252619 - DNA, 101 bp, Homo sapiens
acggttaatttcaaagcttttcccatggagattgggaaaatgaggtacgttagtgttcgcgattttaaaggcaaagtgctaattgatattagagaatattg

SEQ ID NO: 252620 - DNA, 82 bp, Homo sapiens
gtcggttgagcggcggcgaacatgcgcttttgacacattggagggggggccctcagcctcttggccttgaacgggctgttca

SEQ ID NO: 252621 - DNA, 83 bp, Homo sapiens
ttgaaaggaaactggaagaaaaaagaaaagaaactgacaaaaacatttctgagcggaccgagaaagtcgttacgaggaagaag

SEQ ID NO: 252622 - DNA, 100 bp, Homo sapiens
ctattcactgcccttctgccagcccagcaagataacctacaaggcagagaatctgggccctggccaacgtcaacattgggagcctcatctgcaatgtagg

SEQ ID NO: 252623 - DNA, 101 bp, Homo sapiens
acctagcaagaaattggagtgtgttccagatcttcaaatagcagcagcagttgcaagctcagcatctttctcatggccacggacccccagttccccttacg

SEQ ID NO: 252624 - DNA, 89 bp, Homo sapiens
aagtcccagcttctgaagtttgtggagaagtgttctcccattggggcagaagaagagttcaacatagagaaaggtcggcttgtgcaaac

SEQ ID NO: 252625 - DNA, 82 bp, Homo sapiens
cagcacctacgtcccgctgccgtcgccgccgccaccatgcccaagagaaaggtgacttaagagattaaaattaatttggttg

SEQ ID NO: 252626 - DNA, 100 bp, Homo sapiens
gcatcagcatcatcgacacccccgggatcctgtctggagagaagcagcggatcagcagagtaagactttgaccccgacgcaggcttcagtgattgccgcg

SEQ ID NO: 252627 - DNA, 76 bp, Homo sapiens
gccctcctggggctctccgtggagtcccctctcagtgtcagatggatatggcagtggacgtggatttggggatggc

SEQ ID NO: 252628 - DNA, 78 bp, Homo sapiens
ggacattctgaagggaggcaaggaggcggactgagcgctcccaattgggtcgagtaatcctgcctgtgtctgtagatg

SEQ ID NO: 252629 - DNA, 74 bp, Homo sapiens
tccacctggagctgaggaaccggaccccggcagcttgtggacgaatgtggaacctcgctctgtggctgtgttcc

SEQ ID NO: 252630 - DNA, 75 bp, Homo sapiens
gcctagtaaaagtaaccctggagacttcacactttccgttagtggtgggggaaaagtagctccagctcaaccatc

SEQ ID NO: 252631 - DNA, 90 bp, Homo sapiens
acatggacgagccctcaccagtccccaatgtagaagaggtgacacttcccaaaacaggtacaggtttgcagattccgccagcagcacagc

SEQ ID NO: 252632 - DNA, 100 bp, Homo sapiens
caccaacggcgaccggatccggttcattctggacgtgcttctgcccgagacctccgcgctctggcagctcctcttccgtgtgctctcgccactccctgcg

SEQ ID NO: 252633 - DNA, 98 bp, Homo sapiens
ctgagtcactgcctgcgcagctccggccgcctggctccccatactagtcgccggagttggcatcctttggaagagttcgtgaaagctttctgcccaga

SEQ ID NO: 252634 - DNA, 100 bp, Homo sapiens
cttgcagaagtaccacaacagggacacctggttccagctgcagcacgtggacgctgactcggaagtgcaggtagaacacctgaaggagaagctcattagc

SEQ ID NO: 252635 - DNA, 98 bp, Homo sapiens
ggtaagcccacctcccctacctggagccggaacacagcatcatcccagtaagctccaaccaggaaggttgtgcaggaccagcgttccctgtgcaggcg

SEQ ID NO: 252636 - DNA, 75 bp, Homo sapiens
ttcaacagtttcctgcgtcgggcacaacaggaatttgctgacacaatatcttccgcctggtgctgggcatatcct

SEQ ID NO: 252637 - DNA, 85 bp, Homo sapiens
tcatgctctggaattttggcatcaaggacaaacccaccttcatcaaaggggtgtcctgtcagaagaacagatccgcctgaagaaa

SEQ ID NO: 252638 - DNA, 99 bp, Homo sapiens
tatggggagagagaagctgaaagctgccgactgcgacctgcagatcaccaatgcgcagacgaaagaagttgcaaatgaagctggagacaagaatgccag

SEQ ID NO: 252639 - DNA, 120 bp, Homo sapiens
cgggacgcgcccgccgctcctggcgctgctggccgcgctgctgctggccgcacgcggggctgctgcccaaggtttgccagaacccaataaagatgccatcttccaaggcctgacgcagga

SEQ ID NO: 252640 - DNA, 100 bp, Homo sapiens
gtccgccgggtgatgaaaccacttctctacatcccatctcaatcagaattactagattttctctcaaactacgaggaagctgagattgacagcattcacc

SEQ ID NO: 252641 - DNA, 74 bp, Homo sapiens
cagccttcccagtagctggaactacaggtgtgatccctcacatccacaaatctctgattggaaagaagggacag

SEQ ID NO: 252642 - DNA, 99 bp, Homo sapiens
agcgtggctggatgtggaatcagttcttcttattggaagagtacacaggtactgacacacaatatgtaggcaaggaggactcagagagagtaatgataa

SEQ ID NO: 252643 - DNA, 100 bp, Homo sapiens
ctgcacccaagaggtggaagaggacgggctttaggctggaagcgccttagaggagccatttttccagagccagccccagtgcctgctgagccgtttgaca

SEQ ID NO: 252644 - DNA, 83 bp, Homo sapiens
caccacctccgccagttaagaggaaaaaggtgtctgtttcatgtggaatacctgacttcaggtcaagggatggtatttatgct

SEQ ID NO: 252645 - DNA, 83 bp, Homo sapiens
gcgacaagccgctggcagccgcggatctcaccgccgctcagggtgtgagatgcacaatgcgaaacctaggccccagcttttac

SEQ ID NO: 252646 - DNA, 98 bp, Homo sapiens
gaaactgctgcccgccgcgggcccggcaggaggacaggcgacactaacaggtgaagatctcgggagaccatgactaagaaaagaattgctgtgattgg

SEQ ID NO: 252647 - DNA, 82 bp, Homo sapiens
cttaattactgcgtccccatgggagtacagacaggcgacaggtgtcgtgaaaactacccctaaaagccaaaatgggaaagga

SEQ ID NO: 252648 - DNA, 100 bp, Homo sapiens
ctggaccgctgtgtaggcacctgagttaacggacgctaagcggggtaggggaaggttgcacagagcattgaggatcaccatcaggaagtgattggtttct

SEQ ID NO: 252649 - DNA, 100 bp, Homo sapiens
ctttaccaaaggaaagctattttgcgaactatcttctccagcggagatggccaataaatcaatgtggactgaacataaatcacctgatggaaggacttac

SEQ ID NO: 252650 - DNA, 98 bp, Homo sapiens
ggggacttgctcgggcttttgttcccagaaagccctccctatcctgaagacattagctgagagtctggcaccttttaaaggtctgatcatcaattgtc

SEQ ID NO: 252651 - DNA, 74 bp, Homo sapiens
ggggataccattctggaagacttgcccatccaatctgagatccgtgctcagctcacagagcagatgaaatgcct

SEQ ID NO: 252652 - DNA, 51 bp, Homo sapiens
aggccccgtactgcttccatcaggctttatcctgtggataaacgcagagtg

SEQ ID NO: 252653 - DNA, 83 bp, Homo sapiens
ctggtgaagtggaaaggatggcccccaaaagtacaaggccagctatgtccgcagtcgctccatccgctcagtggccatcgagg

SEQ ID NO: 252654 - DNA, 100 bp, Homo sapiens
tttatctggtgacagaatatgctagtggaggggaaatatttggatggtgccatgacaatggtgtgaactacaagattggagagaagtgggaccgtcaggg

SEQ ID NO: 252655 - DNA, 100 bp, Homo sapiens
ttctagtgcaaatcccctgctcagggtcttcatccagaaacgagattttctccaaaggaacatccggtgcttgccctgccaggagccccagcccagttcc

SEQ ID NO: 252656 - DNA, 98 bp, Homo sapiens
gacatgatgagcagcatgtcagaccagaccgtccgggtgaagggtttcatcaccttaaatggttttgaaccaatgaaggtgtattcccttaaaaagac

SEQ ID NO: 252657 - DNA, 82 bp, Homo sapiens
gaaagatgttcgtgaactggtggtagcatatgcaggaagcggcaggaataaggaaaagcagcctcctgactttcctcgcttg

SEQ ID NO: 252658 - DNA, 124 bp, Homo sapiens
gatcgtgaccgagaccgtgaccgagagcgtgaccgagagcgcgaatatcgtcatcgttagaaggagagatgaatggagagtatagaggcagaggatttggacgaggaagatttcaaagctggaa

SEQ ID NO: 252659 - DNA, 100 bp, Homo sapiens
cgccggtgacgtccctcccgctggtcaccactccggcaccagtctgttctctggggaggcagtaaggggccgtggagctggcctcggcctcggcatcggg

SEQ ID NO: 252660 - DNA, 82 bp, Homo sapiens
tccggccggggacccggcccgggaccggcggcgcgcggcggccgaggccagataacgaaggaggcccaacttcattcaataa

SEQ ID NO: 252661 - DNA, 140 bp, Homo sapiens
ggcgccactactccccttcctaaggccgccgcttaccccggggtctatggaagtaatggaaggacccctcaacctgggagaagcagaatttgcccgcatcatgagcattgtggaccccaaccgcctgggggtagtgacat

SEQ ID NO: 252662 - DNA, 96 bp, Homo sapiens
ctgcagaaggtctctggagacatcttcagcaggccaagtggcaacgcctggccatggagggcagcacctgtctggatgtgtttgagcacatcagcc

SEQ ID NO: 252663 - DNA, 50 bp, Homo sapiens
ggattccaagtaactcttatttgctgtctcctatatataatctggttcca

SEQ ID NO: 252664 - DNA, 96 bp, Homo sapiens
gtgctggtggagcgctccacgctcaaagttttcggctttgtgagaaaccttaccatcaaacacgatggccagcaacgttaccaacaagacagatcc

SEQ ID NO: 252665 - DNA, 90 bp, Homo sapiens
caagtgctggagaacatcatggaaaacaacactcagtggctaatgaagagctggaagtcgagtgtgctactcaactcaggagatttggag

SEQ ID NO: 252666 - DNA, 75 bp, Homo sapiens
tacacttttggccaggggaccaagctggagatcaaaccaggggaaatgctgtctgtagctgagcacttcctggag

SEQ ID NO: 252667 - DNA, 100 bp, Homo sapiens
catttctattgtaatgaattcagtggaaccatcacacaaaagcacacaaagacctcctcctccacaggggagacagagaaatcatagcccactaatgagt

SEQ ID NO: 252668 - DNA, 90 bp, Homo sapiens
cggatgccctgcagtacctgcagaaggtctctggagacatcttcagcagaacctcaagaaggcatgaagccagcccctgcagtgccgtcc

SEQ ID NO: 252669 - DNA, 90 bp, Homo sapiens
atcctcaccgcaacattccttatccaatcccttaccgagggtatattacctctctctggaattttacatgggccgaacattacagaacac

SEQ ID NO: 252670 - DNA, 51 bp, Homo sapiens
cctcccaaagagctgggattacagtgctggacccaaaggagacaacattta

SEQ ID NO: 252671 - DNA, 50 bp, Homo sapiens
ggaaaacagactggttctagaaaagcctcccttctgtctgccccaccatg

SEQ ID NO: 252672 - DNA, 82 bp, Homo sapiens
tatatcctgacactatgaatgctacttggatgcctcttaagcttgccagcaaagcacggacagagaaggaggagaagctgag

SEQ ID NO: 252673 - DNA, 113 bp, Homo sapiens
gcgttatgacaggaagcagagtggctatggtgggcaaactaagccgattttccggaaaaagcctcttagcaaatatccggctgtgatcaatgatatttcattctggttgccct

SEQ ID NO: 252674 - DNA, 82 bp, Homo sapiens
aaaggaagaggagaaggaaattgtcccgaatccctgcaggtggcttcagtaagttccaagccgagttctccctgcattgcga

SEQ ID NO: 252675 - DNA, 101 bp, Homo sapiens
agccaagaggaggacagttcgctacacagcaatgcatcgagtgctgactggtcacttgaagctttactctacaaatgggatatgaaatgtgtccacattcc

SEQ ID NO: 252676 - DNA, 80 bp, Homo sapiens
cgagcacccaggcgactgcctcatcttcaagtgtactaatggtcacttgatgtgcgctggctgttttatccacctactag

SEQ ID NO: 252677 - DNA, 100 bp, Homo sapiens
gcagaaaaagctggacccccttgagggcctggatgagcccaccagaatatgtttcttgggtggctgtgccagtgtcattgtgtcattaactactcagtgt

SEQ ID NO: 252678 - DNA, 89 bp, Homo sapiens
aagctcaaaatgaggaaattctgtatgttcttcgccattatattcaggatgtaatccctgttcattactacttaatacctccaccaaca

SEQ ID NO: 252679 - DNA, 100 bp, Homo sapiens
cacagccacccccggaagaaccagggtttcatcaccttaaatggttttgaaccaatgaaggtgtattcccttaaaaagacggacagcccatcgtgtgaac

SEQ ID NO: 252680 - DNA, 83 bp, Homo sapiens
gggaagcgtctccgttgggtccggccgctctgcgggactctgaggaaaagctcgcaccaggcttttgtggccacaggaaccaa

SEQ ID NO: 252681 - DNA, 82 bp, Homo sapiens
gcgtctctctgctgcggcgcggggaccgctgtgctctcgggacacggccaacacggtgaaggaaaagttcgggaggaagctt

SEQ ID NO: 252682 - DNA, 116 bp, Homo sapiens
ggcactaatctgcaaactgtgcaactgttcatgaagaagaaccagggggtgctcaaaggatttaaaggagaactaattcatgtatttaacaaacatgatggtgccttgaggaatac

SEQ ID NO: 252683 - DNA, 100 bp, Homo sapiens
cccgggggcgccatggcgaccggagcgaacgccacgccgttggagaccatggcgagcccagggaaagacaattatcgaatgaagagctataagaacaatg

SEQ ID NO: 252684 - DNA, 73 bp, Homo sapiens
ttgaagttgggttcaggagtgtagaattggcaaagttattgccagcttcctgccaaaagaatgcaatggtgta

SEQ ID NO: 252685 - DNA, 74 bp, Homo sapiens
gcatcaagtacatcgggatgaggaatgagcaagcgatccggggatttctttcacggtttgataatgtccttccc

SEQ ID NO: 252686 - DNA, 100 bp, Homo sapiens
cttggatatgctgacgactgtgcaggaagaaaacgagccagtgatttacaatagagcaaggcaagtgtcaattgaggagggagagaggaaagccaaagag

SEQ ID NO: 252687 - DNA, 50 bp, Homo sapiens
gcggccagcaggaggctgatgaaggcttaatgccagaccgggagttggag

SEQ ID NO: 252688 - DNA, 110 bp, Homo sapiens
atgtgtgtttaatgaatacaaagccgcggtctgggtgccgcctcggccgcggccgctctcccgcgctcctttgccagaagaaatctccgagaagcaagggataatgctgt

SEQ ID NO: 252689 - DNA, 98 bp, Homo sapiens
cagaacaatcttgaatcatgaagctactaaccagagccggctctttctcggatttcaaatatgcgtgcattagagaatgattttttcaattctccccc

SEQ ID NO: 252690 - DNA, 100 bp, Homo sapiens
cagagggagaaatccaacgacctttctatccaggaaaattgcctaagaattatgacccaaaagttaccccagatccagaaagatggctgccaatgcgaga

SEQ ID NO: 252691 - DNA, 82 bp, Homo sapiens
tcggagttggcaggaagccaggttgcagggtgtccgcttcctcagggtcctggtcctggacaaaggagtagtagctgaattt

SEQ ID NO: 252692 - DNA, 96 bp, Homo sapiens
gaggcaaggagctaaagcagcgtgcgttcagccctgggaacacgacttaaaagtggcttcagaggaaaagcaagaaacgcttgaaagaagtgaaaa

SEQ ID NO: 252693 - DNA, 75 bp, Homo sapiens
cagatgcgggccctgctggaccagctcatgggcacggctcgggacgcaatggctgccatccggaagaaactggtg

SEQ ID NO: 252694 - DNA, 117 bp, Homo sapiens
ccgagagcgtgaccgagagcgcgaatatcgtcatcgttagaaggtttccaatacttatctacaggaatcgccatgaccccagctctgagggaggcaacagcaaagggtatcagcttt

SEQ ID NO: 252695 - DNA, 59 bp, Homo sapiens
gacactgtattatacggttactatagcttctccagggaaagtgaccgaggcagtgaaag

SEQ ID NO: 252696 - DNA, 90 bp, Homo sapiens
ctctctcatgctgaatcacatccatggttcctgctccagcgtggctcctggactggcgccagatgctggccctgggggtttcaatccaag

SEQ ID NO: 252697 - DNA, 90 bp, Homo sapiens
agaggatttgcttttgtaacttttgatgatcatgatacagttgataaaattgttgaccccccacccaacctgccttactttgtacgacgc

SEQ ID NO: 252698 - DNA, 98 bp, Homo sapiens
cgaaatatggctacagagagccctgctacgcgtcgggtccaggtggcagaacatcctagaaatgggacgtcggtcatcagatactgaagaagaaagca

SEQ ID NO: 252699 - DNA, 80 bp, Homo sapiens
ccctggagcctcagttggaagcagccgatccagcctgcggagcctgtggggcagaggcgtggagctatttcctatgacag

SEQ ID NO: 252700 - DNA, 87 bp, Homo sapiens
gctggggagcccttctgcgccacagaatcctgctgcatcacagaagctggaagttctgatgttccactgaaatcacaatggaaagtc

SEQ ID NO: 252701 - DNA, 100 bp, Homo sapiens
cctcctttgcaggctgaccgaagacagatgtgtaggcttgggcagcacaagcccatctgcaaagtgctacgtgacgggatcatgcgcgtgggaaaaactg

SEQ ID NO: 252702 - DNA, 98 bp, Homo sapiens
acaccaccaaactttgttcttgctcttgttttgccctcaattgtaattctgggtgtctgatgatttgtgagcctcaagtgactactctgtggaatcat

SEQ ID NO: 252703 - DNA, 96 bp, Homo sapiens
atccctgcgaaccaatcagaaacgctccctctacgtcagtttggcgggggctgtgagcttgccatgatgtgtgatatcatctatgccggtgagaag

SEQ ID NO: 252704 - DNA, 96 bp, Homo sapiens
ggagctggtgcctactggctctgagccaggcctctgggaagtggccgttttacagagacaaggacgtgctgaggggatcgcctcacccatctccca

SEQ ID NO: 252705 - DNA, 51 bp, Homo sapiens
tggcattttaggtgtcggttgggtaggaggagcaaatggacagtgacattg

SEQ ID NO: 252706 - DNA, 100 bp, Homo sapiens
tgagccgggtggtggcgtgcacggaggatcgcgggaggctgccgcctcgggacaccccactcacacagtttaatggatcgagaagtggcgttgcttgctg

SEQ ID NO: 252707 - DNA, 82 bp, Homo sapiens
acctcatcccctggatgggggaccacaagatcctcatcgacagaacatccagtcatggataaaaatgagctggttcagaagg

SEQ ID NO: 252708 - DNA, 74 bp, Homo sapiens
aagcagcacctggagattactggtgggcagtttcagcacccatttggactttcacaatcagagatggcagcggt

SEQ ID NO: 252709 - DNA, 82 bp, Homo sapiens
cagccaagcagcagcccctgacaggtacctgtctgaggaggaggtgctggacactgagaacccatttgtgcagctgctgagt

SEQ ID NO: 252710 - DNA, 100 bp, Homo sapiens
cattcctcacgtctaccccgtggctgctaagacacagcttggccggtgcttccaggaaaccattgggtcacagttctggacatggcaagacatgtgccac

SEQ ID NO: 252711 - DNA, 102 bp, Homo sapiens
agtgcacagagccggaggatcgcgtgggcaaacgcagaggcgggaacaaactagccctcaagacgggaatagtagccaagaagcagaagacggaggatgagg

SEQ ID NO: 252712 - DNA, 98 bp, Homo sapiens
gaaattcttcttgaaggctgtgctgagaaaagtaaacagctgaaggatgaaggagccagtttggctgaaaataaaagttggagtcattcgttgcccag

SEQ ID NO: 252713 - DNA, 98 bp, Homo sapiens
cgcgacggccgctccgaggacttccgcaggacccgcaacagcgcagagggtgaaggtaggcaatgaagttgctacaggaacaggacctaataaaaaga

SEQ ID NO: 252714 - DNA, 74 bp, Homo sapiens
ccagaaggacttctttgcagggccagtggtttctgtcagattttcgccggtggtattaaagataatcaaacatt

SEQ ID NO: 252715 - DNA, 90 bp, Homo sapiens
cacttatcttgcccaagagctggcctcgatgacttacgagccctcaaggggaagcattttctcctggaccccttgatgccggagctgctg

SEQ ID NO: 252716 - DNA, 100 bp, Homo sapiens
tggcggcttattatgaggagcagcacccagtgctgcggatcggcctgctgggctgcaatgccacccgcgagaatgtggaccgcgtgacggaggccctgag

SEQ ID NO: 252717 - DNA, 75 bp, Homo sapiens
cttcatcaacgatatatgtcagatctaaagcctcacgattttgatgaatgtcgatttgatattagtgtaaatgat

SEQ ID NO: 252718 - DNA, 75 bp, Homo sapiens
gccagaggtcaacaaggttctggacaagatgaagtctttctgccaggcaaaacaacgagtggatgagaaacccag

SEQ ID NO: 252719 - DNA, 101 bp, Homo sapiens
tgctacagacagctttgatgactacccacctagaagaggtgatgatagctttggagacagtgaaattgccctcttggaaggcctgacagtggtatacaaaa

SEQ ID NO: 252720 - DNA, 100 bp, Homo sapiens
agatgcctgtaccgtgatgtgacgctggagaacctggcacttatgtcctccctggtgcaaagagccgtctcactcttctctctgaacgacccggccctga

SEQ ID NO: 252721 - DNA, 100 bp, Homo sapiens
aatgtagaagttgaagctgctgtttttgctgctgcaaacttctctgcacagtcaaatgaagagacgcttcgggggaaccctgttctacagctgaacccag

SEQ ID NO: 252722 - DNA, 75 bp, Homo sapiens
ccgcccctgagccagatccctctacgatgactccacaggattgccaaggatccaagatttgaacgattaccatgt

SEQ ID NO: 252723 - DNA, 74 bp, Homo sapiens
ctaaagcagtacttggagatgatgaaattacaagagtcaagaaacttttcttttgagctattgacagcttttaa

SEQ ID NO: 252724 - DNA, 100 bp, Homo sapiens
cccgcttgccgcagccgcctcagaacccgaccaacatccagaacttccagctgcccccaggcctctgatgattgtcactcagaagatcacaaccttggca

SEQ ID NO: 252725 - DNA, 75 bp, Homo sapiens
caagaaagaaaattagagtgaatgtagttgcaccaggactgccattttcattaagaactgccacttagaggtacc

SEQ ID NO: 252726 - DNA, 88 bp, Homo sapiens
cctgagcccgcccttgatcttcgctgtggcatggcggacgaggggaagtcgtacagcgactggccaatcacaggcaggaagatgaagg

SEQ ID NO: 252727 - DNA, 73 bp, Homo sapiens
cgaggggatcctcatgagttaagaaacatatttctacagatttatcagcaagactgttgaacgcataactgcc

SEQ ID NO: 252728 - DNA, 100 bp, Homo sapiens
aatcttcaaaatccttccctgaatcatcaagggattgataaaatatatgactgccaagaacactgatatttgcatttaatggggaacaaaagatgaagaa

SEQ ID NO: 252729 - DNA, 80 bp, Homo sapiens
tgaaaaagctcaaaatgaggaaattctgtatgttcttcgccattatattcaggtattgcaggcaatgggatatccaacag

SEQ ID NO: 252730 - DNA, 82 bp, Homo sapiens
tcccaagtagctgggactgcagtttgctaggtctaccataaccaaataccgcagattgagtggttcaaacgccagagattga

SEQ ID NO: 252731 - DNA, 98 bp, Homo sapiens
acagaatcagaccatgactaccttcacctggaacatcaaccacgcccggctgatgtctcatataatggcagcaaaggctgtagcaaatacaatgagaa

SEQ ID NO: 252732 - DNA, 100 bp, Homo sapiens
ggacattggcgctgcctcaaggctgctgagcagacctgccatgaagaaaattatgagcaccagatactgctacaccatctcatcggcatggacctatatg

SEQ ID NO: 252733 - DNA, 75 bp, Homo sapiens
gcggctgcggtcgaagaaggggacgccgacaagaaagaagcttccggttctgaggtcctggaggtgccatttccc

SEQ ID NO: 252734 - DNA, 80 bp, Homo sapiens
acgccttggtgggctggatgctggagcacacggaggccgtgatgaaggatagaactggaggaacctccacttgttttggc

SEQ ID NO: 252735 - DNA, 50 bp, Homo sapiens
agacgatgaagccccctctgatgggggtcctgatgacaacttaattgaag

SEQ ID NO: 252736 - DNA, 98 bp, Homo sapiens
cgcgcccggcggcggcgggagcccaggagcctgccccgccctggggacgaagagctgcagctcctcctgtgcggactgtgccctgtccacggtgcctc

SEQ ID NO: 252737 - DNA, 100 bp, Homo sapiens
caagaaaacatactggtagaaccagacacagatgagcagagctttggcagcatgtaagcagctgtttgccaagaacccaggtcactgctaagaaagggtg

SEQ ID NO: 252738 - DNA, 75 bp, Homo sapiens
gcagccgtccggagccagccaacgagcggtgatttggatattgaagatgacatgaaagcacagatgaattgcttt

SEQ ID NO: 252739 - DNA, 100 bp, Homo sapiens
cgggccccgcgagtgccatggcggccgccctgggagcgagcggaggagcaggcgccggagaaccatccgggtatggctgaaaagagacagtggtcaatac

SEQ ID NO: 252740 - DNA, 98 bp, Homo sapiens
accaccgctgtgtatctgctgtccagcgctgtgatggggttgatgcctgtggcgatggctctgatgaagcagattacaaggcttcctcggagatggca

SEQ ID NO: 252741 - DNA, 100 bp, Homo sapiens
accagccagcgccagctgcagccctggccgcgcactcgcctcagctgagcctgggttcctatatgatagtggactcttcagatcacgaccctggagaaaa

SEQ ID NO: 252742 - DNA, 124 bp, Homo sapiens
ggactcgccctctgggaggcttaccgagagtttgaaagtgcgattgtggaagctgctcggggtgtccgcaatgttgccagtgtctgtctgcagattggctacccaactgttgcatcagtacccc

SEQ ID NO: 252743 - DNA, 75 bp, Homo sapiens
gaacaatgccgcagaagaggttgaagagtgatcgaactgtgagaatttggaaggctcgcaatttgcaagatggtc

SEQ ID NO: 252744 - DNA, 111 bp, Homo sapiens
ggaaacacctctacctcctgcgaggcctcccgggctccgggaaaactacactggccaggtgagaagccctaccactgcaactgggacggctgcggctggaagtttgcgcgc

SEQ ID NO: 252745 - DNA, 90 bp, Homo sapiens
tcggtggcggcgccggtacgcctggtccccgcgtggagtctttactcaaaacagatggacggggagtccgaggaggagcaggagtccgtg

SEQ ID NO: 252746 - DNA, 98 bp, Homo sapiens
gcagaatcttataaagtattaccatgcacagtgcaagactatgatgatggatatggcactgcttatgatgaacagagttatgattcctatgataacag

SEQ ID NO: 252747 - DNA, 75 bp, Homo sapiens
cggaggaaactaacctcaacctctgccatcacaagggtggcagtgctccttttggacttttctctaggtttggcg

SEQ ID NO: 252748 - DNA, 88 bp, Homo sapiens
catccgagcccacaaggctggccgagccgtggatgtcgctgaattgcccgtgcccccaggactcagaattcatgattgaagaaatgca

SEQ ID NO: 252749 - DNA, 100 bp, Homo sapiens
gcatctacaaccctgaagtgcttgatatcacagaggaaactctgcattctcgcttcctggaggatgaagctggaggcagattcgtcgctttctctggaga

SEQ ID NO: 252750 - DNA, 75 bp, Homo sapiens
gactgtgttgggaagttcttcacttgaagctctctatcaatatcagctcacatcattgaaaagataattttgaag

SEQ ID NO: 252751 - DNA, 75 bp, Homo sapiens
gacaaaagaaccattgaaaaatttgagaaggaggctgctgaggtctttgatttgcgtcagtgtcatcgacagatg

SEQ ID NO: 252752 - DNA, 82 bp, Homo sapiens
atcccggagagctgacaatgatgaatctcagacaatgaaaagcgaaccccattgcacgccgcagcttaccttggagatgcag

SEQ ID NO: 252753 - DNA, 82 bp, Homo sapiens
caacgaagagaccacctgtccttcgagcaggagttccaggaccacatgtcggagcctcagcaccagcagcggctaggggaga

SEQ ID NO: 252754 - DNA, 100 bp, Homo sapiens
atctacttcctggaggagcgcatgcaacagaagtatgaggccagccgggaggacatctacaagcggctaaaccatttacttctaaagtgaaacaaatgcg

SEQ ID NO: 252755 - DNA, 100 bp, Homo sapiens
cggtgctgggcgcgcaccgtggccaccctgtgggcctggcgctggaggcagcggtgcacgtgcagcttctgcagaaagccgtcattacacctgattttga

SEQ ID NO: 252756 - DNA, 51 bp, Homo sapiens
ctcggggttctctcctgcccccaagctggaggcaccaagtctgaaggaggc

SEQ ID NO: 252757 - DNA, 80 bp, Homo sapiens
aaatagctcagttaatgaaggatcaacgtatcataaaaggggcgtgaatactttttctcccgaaggaagattatttcaag

SEQ ID NO: 252758 - DNA, 96 bp, Homo sapiens
gcctcctccgcgggcgtgaaggcggcgctcctactccctccccggactccgcgggaggaatgccagctcctgagcaggcctcattggtggaggagg

SEQ ID NO: 252759 - DNA, 51 bp, Homo sapiens
ctcctgaggtacggcgtcggggttttaaaatcaaagatgggaaaatcggag

SEQ ID NO: 252760 - DNA, 100 bp, Homo sapiens
aatcaccatcttggaagaagagatgaatgtatcagtgtgtggcctgtacacatttaatgaggatgagggggagcttccggagtggtttgtgcaagaggaa

SEQ ID NO: 252761 - DNA, 80 bp, Homo sapiens
ctccaaaaaaggataagcagggcttcacagaagaggtgacagggctttaggatcagatacaggaggatcgaccagaaatc

SEQ ID NO: 252762 - DNA, 75 bp, Homo sapiens
gagacttcacgactttttgtaaagaaaacaatagtagtgggcaatgtgtccaagctgctttgctggctctgcaag

SEQ ID NO: 252763 - DNA, 84 bp, Homo sapiens
atttaagtacaatggtgggcttaattttagatttgcttgtaaatgcatcacgaagaggcagcccagaatgaagaaagcaagcag

SEQ ID NO: 252764 - DNA, 90 bp, Homo sapiens
tccctcattaccgtcgccagcggagcgaacccgagagcgtggagcgggctgggccagcttccacttcaccatcggatgtttgccactcag

SEQ ID NO: 252765 - DNA, 49 bp, Homo sapiens
agtacgcaggccacgtgggctcaggtgtgtgtctggggaagagacttac

SEQ ID NO: 252766 - DNA, 100 bp, Homo sapiens
agccgcagacaaaagacctcggggccggcctcgcaaggcgcttcccctttccagagagccagaaagaagtgagcgagtgctgtgctttcatgggcctctt

SEQ ID NO: 252767 - DNA, 100 bp, Homo sapiens
ccccacccctctccgtccatggccccagatgacacttcaggtggactataatgcgagtgcctggctgaccaagaatatggacccgctgaatgacaacgtg

SEQ ID NO: 252768 - DNA, 75 bp, Homo sapiens
aaaacatgcattggtatagcccaccagaaaggacaggtgtactagccctctcttggtacccacctgatgtaaatg

SEQ ID NO: 252769 - DNA, 75 bp, Homo sapiens
agaggaggtcctttttggccccaggtgactcttaactcccaggacagaggctgtgctgcacatggagcagcggaa

SEQ ID NO: 252770 - DNA, 122 bp, Homo sapiens
gcggtgatggcggaaagcgcctttagtttcaaaaagttgctggatcagtgcgagaaccaggagctcgaggtttcacagatggcagtgttacattgaacaaaggagacatcacccgggaccgg

SEQ ID NO: 252771 - DNA, 76 bp, Homo sapiens
ggactttattaccgctttaccaggatctgaaggtttgaatgggccaatgagtatcctcatcattgaagcattctat

SEQ ID NO: 252772 - DNA, 100 bp, Homo sapiens
catccttgtacagcaatctcctcctccactgccactacagggaagtgcatcacatgtcagtattctaccttgtaaatactgttatttgtatatactgtaa

SEQ ID NO: 252773 - DNA, 50 bp, Homo sapiens
ggctgggcggctgccggtgacaggtgctggagaatctggtaaaagcacca

SEQ ID NO: 252774 - DNA, 75 bp, Homo sapiens
attaaaacatttttcagggacgtagccatccagagaaaaagcttgtggtgaaggggggcaaaaaaaagaagcaag

SEQ ID NO: 252775 - DNA, 125 bp, Homo sapiens
cagacaccaaatacaatgacactgaccggtgctgggggcccctgcgccgagtggacgcctaccgcatctacttggatgccggctccaggagcagcagtggaggtcgggaacgcctcattgtggag

SEQ ID NO: 252776 - DNA, 100 bp, Homo sapiens
ggtggatacgtcgccatcttggatccgcgggacaagaaaattcatgcgcagccgctcttctaaaacattcaaaccaaagaagaatatccctgaaggatct

SEQ ID NO: 252777 - DNA, 89 bp, Homo sapiens
tcccgagtggctgggactacaggattatgttgacaaagagaaggcaattgccaaagccttggaagacctcagagccaacttttattgtg

SEQ ID NO: 252778 - DNA, 101 bp, Homo sapiens
aggggacgtcacatgtcattataccttcacccagcatttcatccctcgtcgaaaggattggattggcatctttagaagccggagcctccgacggaagggaa

SEQ ID NO: 252779 - DNA, 82 bp, Homo sapiens
gagttcgctgccagccccaagaaggagaccctcatccagctgatgcccttcttcgtcctgcctagggtagttaaaagacgag

SEQ ID NO: 252780 - DNA, 134 bp, Homo sapiens
ggacactttgttattggagaaacatgcagattatatcgcatcctatggctcaaagaaagatgattatgatccagtgctgcctccttgtaccctgtgctcaactttctactctacgtgcctgagcttgcacactc

SEQ ID NO: 252781 - DNA, 80 bp, Homo sapiens
gccagcacactcctcgcgagcaagaatattgaaggatgtttgttccaagatctctaaaaatcaagaggaatgctaatgat

SEQ ID NO: 252782 - DNA, 82 bp, Homo sapiens
cctgtacagcctgcagaactatagcctgggctggaagctcttctacgtcacaggctgcctgtttgtggctgtgcagaacttg

SEQ ID NO: 252783 - DNA, 100 bp, Homo sapiens
ccgactgctgcctggtctgcaaagaagtcctttcaagtctctaggactggactcttcctaagcaagtccggtggcttgctttggtgaaggtattcataca

SEQ ID NO: 252784 - DNA, 100 bp, Homo sapiens
gataaatcaggaatagattctcttgaccatgtgacatctgatgctgtggaacttgcaaatcgaaggagttattcctgatgaagctaaagctttgtctctg

SEQ ID NO: 252785 - DNA, 100 bp, Homo sapiens
ggaaggaagaggtcatctcgctcggagcttcgctcggaagggtctttgttccctgcagccctcccacgtatctggagtccatctttcaccatcttctcct

SEQ ID NO: 252786 - DNA, 51 bp, Homo sapiens
actgctgatgctgctttcgctgggggcctgtccccggacctgcagtctatg

SEQ ID NO: 252787 - DNA, 83 bp, Homo sapiens
gaaaatacagccaagatcttggcaaagcttctccctcagtatttagaccagtccttcagtgaatctacagacctattttctca

SEQ ID NO: 252788 - DNA, 90 bp, Homo sapiens
ctggagaagtccccttatgaccagaatatggttgagccccttatacccacgaattgctgatggaacccacaaatctggagagtcgccaac

SEQ ID NO: 252789 - DNA, 99 bp, Homo sapiens
accgccttcaacctgtctgtggagtctagctgaaagcagagaacccagcagaggattctgggaaggtcctgggggatggcagagccagcagagagaggg

SEQ ID NO: 252790 - DNA, 100 bp, Homo sapiens
gcgaaaaaacaggggcagaagaacaaggaagcggagaggcaagagatgatgaataaggtatttggaggtactgtgcacaaaaaaagtgtcagagaagatg

SEQ ID NO: 252791 - DNA, 75 bp, Homo sapiens
ttagctaagcatagccacgcatctgaccgatttcttaagcagaggaggaacccgttttcactagacaagacagca

SEQ ID NO: 252792 - DNA, 98 bp, Homo sapiens
gctggatatccaagcctctcagcttcggagaatggagtcttccatcaatcatatctcacagggtgtccggtggagagctgtttgaccggatagtggag

SEQ ID NO: 252793 - DNA, 90 bp, Homo sapiens
aacatcctggaggtgctggacaggaaggatgtgccggttgctgaaccaatccccatctgtagtttctgtcttggtacaaaagaacaaaac

SEQ ID NO: 252794 - DNA, 100 bp, Homo sapiens
gcaactgcaccaggcagccatactggaggccgtgggcacccgcagtgccaacttccccaggctgaggggatctggcggtggagcgctaggatcagacgcc

SEQ ID NO: 252795 - DNA, 100 bp, Homo sapiens
aatccgagcttggctcaccaaccctcacttcagctcagaaactggacgtggatgcatactgccctgggccacgactgcttcccggtgctgttcacctatg

SEQ ID NO: 252796 - DNA, 98 bp, Homo sapiens
gcggcgcgaagcgctggtggcgggcccgggctgcggcgtgtgcgcgcccgccagctgctccggagatacgaaggatatggccctgaagccacatgagc

SEQ ID NO: 252797 - DNA, 95 bp, Homo sapiens
cccgtctccaggaacatcgatgtcccaaagaggttactcaaatgagtcgtccagacttgattctctttctgatgaaatacctgatggctctcata

SEQ ID NO: 252798 - DNA, 75 bp, Homo sapiens
gtccgtgcgcccagcgtcccagggcccaggccgagcagaggctgaggggatctggcggtggagcgctaggatcag

SEQ ID NO: 252799 - DNA, 98 bp, Homo sapiens
ggctgaagcgactgagtccgcgatggaggagtgtttctcaggagctatcagaaactatcctcaccatggtagccaattgcagtaatgttatgaataag

SEQ ID NO: 252800 - DNA, 96 bp, Homo sapiens
gctgatctctgctacccctttcatggcccgggtgttggtgggaagaagggatcggtggagaagtgcccgctgtgcaaggggcgggggatgcagatc

SEQ ID NO: 252801 - DNA, 100 bp, Homo sapiens
cacaaagctatcatcctgccaaactccaggctcagatgtcacagtttggtaactctcattcgacatccatctgaactaatgaatgttcctcttcagcaac

SEQ ID NO: 252802 - DNA, 100 bp, Homo sapiens
gcttccaggagacggacagtgtacgcttcgaggacttcacggagctctggagaaacatgaagttcgggactatcttctgagggagacgtggtgggcggtc

SEQ ID NO: 252803 - DNA, 75 bp, Homo sapiens
ccaaggctgggctgggcactgccatgctgtatgaactcattgagtataccaacaagctacggcaggagttgcaga

SEQ ID NO: 252804 - DNA, 110 bp, Homo sapiens
cgagcgccgggaccatgtcccagctgcagctgtggctgcagtttgaggctctgaacaagacaatgcagatcttcgtgaagactctgactggtaagaccatcaccctcgag

SEQ ID NO: 252805 - DNA, 75 bp, Homo sapiens
cataactgatgatgtgcgggttcaggaggtacccaaactgaaggaccttgtgctcatcaagaatacagacgtgca

SEQ ID NO: 252806 - DNA, 73 bp, Homo sapiens
aaatgtcatactacagatttggagaaatgcagcatgctcatgcacattcatctggatacttcatcactcaaga

SEQ ID NO: 252807 - DNA, 100 bp, Homo sapiens
ggaaactcggagtacctgcagctggcctctgtcactgactccacacaggacctgaaggagaagaaggagaaggtggaggagaaggcaagccggaaagagc

SEQ ID NO: 252808 - DNA, 75 bp, Homo sapiens
tcctgatttaggggcaatcgatatatcaaaccttccaatattcttctggacagaagtggaaatattaagctctgt

SEQ ID NO: 252809 - DNA, 75 bp, Homo sapiens
ccagggacgtgcactcagaaagaaaaagcttgagtctccacccccatctaccaatcccttcctggaagatgagcc

SEQ ID NO: 252810 - DNA, 135 bp, Homo sapiens
tttactgcgaagttttgctcctggatgaatccaagttaacccttaccacccagcagcagggcatcaaggtggtatcacggaaaacttgacagaacgatagcagaagaacgcctcaggcaggcagggaagtctggc

SEQ ID NO: 252811 - DNA, 100 bp, Homo sapiens
attcaacatggaggcggaggtcgataagctggaactgatgctcctcaagagttactgatctatgaaatggcagagaatggaaaaaattgtgaccagagac

SEQ ID NO: 252812 - DNA, 82 bp, Homo sapiens
cccaccgggatggagaaggaggaggaatcggctctcgaacagtgtggcctgatgaaactatgggaccctttggacctcaaga

SEQ ID NO: 252813 - DNA, 88 bp, Homo sapiens
cacaattatgacactactagtaatagtgaccagctggaacattaaaggagtttgcagaaaaaacttcagcatgtgccaggaacacaac

SEQ ID NO: 252814 - DNA, 100 bp, Homo sapiens
ttaagggttgtacaggctctttgaatatgactctgcaaagcttcagcgcctgctcctggtcatcactaaccagatttacttggagtacatgtgaaagaaa

SEQ ID NO: 252815 - DNA, 75 bp, Homo sapiens
aaacccctacagacaagccattatgtccttcaagaacacacaagatgatcacagtcgtgttaaactgcaaaatgc

SEQ ID NO: 252816 - DNA, 75 bp, Homo sapiens
ggcaagcctctctagcagactgtcttaaccatgctgttggatttgcaagagctccctctttgcccactagcaggg

SEQ ID NO: 252817 - DNA, 81 bp, Homo sapiens
tgacctccaggatacatccaacagagtaacagtcaagcgagagctgttttggcaaaagttggctatccagagtttataatg

SEQ ID NO: 252818 - DNA, 98 bp, Homo sapiens
tgaaactcataggagttcccgctgacgctgaggccttaagtgaaagaagtggaaacacccctaactctcccagagaggacatgtactcccaggattcc

SEQ ID NO: 252819 - DNA, 87 bp, Homo sapiens
ccatgtctacaaggtcctagagctgtatgaggaggccgtggacctggccctgcagagcattctgctaagtgatgaatccagcgaggc

SEQ ID NO: 252820 - DNA, 87 bp, Homo sapiens
gatactcagttgtggagagctgattcccaaatctaaagtaccttgcagaagccggctggacagctgaaggaagagtggtaggagtga

SEQ ID NO: 252821 - DNA, 51 bp, Homo sapiens
cgagcccagaagcaggcacctctctgtcaacagggtcttactctgtcaccc

SEQ ID NO: 252822 - DNA, 90 bp, Homo sapiens
aggaggaggcgctgcgtcagtaccagcagtgctcctcgtcttcctttgcctgggggtcttccttctatggaagaactggcggcttaagaa

SEQ ID NO: 252823 - DNA, 80 bp, Homo sapiens
ttctcttcctgcttcatctctaaaggtccttctaggagagaggtgaaaggcattatatgaacttctcaagtgtaaccaca

SEQ ID NO: 252824 - DNA, 82 bp, Homo sapiens
aattctcagtccaagtttaaagttaagctaagaaacctttccagcttggacctacgtcatatcactgaactggataatgaaa

SEQ ID NO: 252825 - DNA, 75 bp, Homo sapiens
tcttggcatttggctttgcctttctggacacagaagtatttgtgacagacaaagaaacagccttggtataatagc

SEQ ID NO: 252826 - DNA, 76 bp, Homo sapiens
ttggagttggaatttgtgcaatgtttagccaacccaaattaccttaattgacctgctgaagttcccatgatgtcac

SEQ ID NO: 252827 - DNA, 74 bp, Homo sapiens
ccgatttcagcatcggggcagacaccgccctgaacactatcaccgacgtcacaatccaaggtccggctcctccg

SEQ ID NO: 252828 - DNA, 124 bp, Homo sapiens
gaacgagaagattctgagagattttttattcgttactatgtggatgttccacaggaagaagtgccattcagctcagcccagggagctcatgtatccattttggcagaatgacaccaaaacccct

SEQ ID NO: 252829 - DNA, 100 bp, Homo sapiens
tgtgagattcccttgcaaatttacatacgagaatggcttgtgaaatcatgcctctgcaaagacaatgcagatcttcgtgaagactctgactggtaagacc

SEQ ID NO: 252830 - DNA, 50 bp, Homo sapiens
cagtggcagaagattttaattagcctgtcctgggagctggagaggatgtc

SEQ ID NO: 252831 - DNA, 75 bp, Homo sapiens
cagctgattcctgggagcacatccatttcattggcaaggctaaagaattacctccaaagccattgtcaagaccac

SEQ ID NO: 252832 - DNA, 75 bp, Homo sapiens
gatggaacctctgaataacctccagttgcagttgtattcagaggccagtgtagcgcttctaaaactgaataaccc

SEQ ID NO: 252833 - DNA, 75 bp, Homo sapiens
tgggcaagttgccgtgcctggagatctcacagggccggatcgtggcacccagaggctgccaggactttggctggg

SEQ ID NO: 252834 - DNA, 78 bp, Homo sapiens
agagacacaagtgcagcagtttgaagcgaatgtctgtgacggagggtggcatcaaatacccagagacgactgagggag

SEQ ID NO: 252835 - DNA, 100 bp, Homo sapiens
tgaagggctagatgacttggagaatgccgaagaggtgggaaatacaccaagagtgatttcaaggagtatgaaaaagaacaggataaaccacctaatttgg

SEQ ID NO: 252836 - DNA, 75 bp, Homo sapiens
tgaaggcctgctatccctccagtatttcttggtgctaacagtggtttgcacatcatcatctttgatgaaattgat

SEQ ID NO: 252837 - DNA, 82 bp, Homo sapiens
atggcccaggctcctgctgacccgggcagagaagctgcggttggatttctcacgatgtccagtgttatctccatgtctgccc

SEQ ID NO: 252838 - DNA, 74 bp, Homo sapiens
tcttactcttcttgctctcctttctgtaaacacaggacttctccagacaggttatgttacctgcagaggctgcc

SEQ ID NO: 252839 - DNA, 82 bp, Homo sapiens
agcggcgcgcatcagggacactcggtgtgcgacgtggagatccgaaggaatgaaatccgggttttaaaatcaaagatgggaa

SEQ ID NO: 252840 - DNA, 75 bp, Homo sapiens
cgcgaatggcacgagctggagggagaatttcaagaactgcaggtgtgatcagcactggaaaagatgcctgcccct

SEQ ID NO: 252841 - DNA, 82 bp, Homo sapiens
ttgcaactgacgcagtcactgcagcactggtggaacttgaggttcttcagaagaggatgaggtcattcaaccaggtttcatc

SEQ ID NO: 252842 - DNA, 50 bp, Homo sapiens
cgaacgggttgcttcccccgctgcgagactgattcttgctattccaaatc

SEQ ID NO: 252843 - DNA, 75 bp, Homo sapiens
ttccaagaaaccaacattcccaacagccaccaccaccaccagatggtttacccaaggtccagcctagcccctagg

SEQ ID NO: 252844 - DNA, 75 bp, Homo sapiens
cctagccctgtctattcatttgggtggtggtatcatggatacagaaatgtctgaagatatagaccacaacttaac

SEQ ID NO: 252845 - DNA, 80 bp, Homo sapiens
cgaaataaagctcctgggcaaggggacgtctgcagctgagttatggaggttttgatgactatggtggctataataattac

SEQ ID NO: 252846 - DNA, 74 bp, Homo sapiens
ctgcaagcaggcaacctgaatacagtcctcccaaaccgaaggaccctgtatctgcagctgtgccagcaccaggg

SEQ ID NO: 252847 - DNA, 100 bp, Homo sapiens
gaccatccaaaagcggaaccttcgcctcagaaaaagggtgcgggacccctcctcaccgtgcggtcacgttttctggatatgccgcagaaggatccgtgcc

SEQ ID NO: 252848 - DNA, 95 bp, Homo sapiens
ccagcctcctgactactccttctccaagaggtatttcagtgtctgtagacaagatggaatcatctccatttaatagacggcaatggacctcacta

SEQ ID NO: 252849 - DNA, 100 bp, Homo sapiens
aggaacccagcaacaattcttctgccaggcaccctgaagataaagacacacccacctgcaaggataaaagaagcatggcggcggggtggggctggtatcc

SEQ ID NO: 252850 - DNA, 83 bp, Homo sapiens
ctaagaacaactctaaacagaatacaagaaagccttattgatctagaacgggattttccaacagaaaccattaaatttggtcc

SEQ ID NO: 252851 - DNA, 90 bp, Homo sapiens
tggtgtcactgaatccaggaggagacccttctacgcctggttacccaagtgtcgctatatgttctcctttcagccaagacctttcaccag

SEQ ID NO: 252852 - DNA, 75 bp, Homo sapiens
gtggaggaaaacaacttcgagggcagagtggtggagattgtgaagaagctggagtctcgccagcggggctgggag

SEQ ID NO: 252853 - DNA, 50 bp, Homo sapiens
cgccgccactgccgcaggaggcgtgagggttcatgtaatcaaagaagttt

SEQ ID NO: 252854 - DNA, 98 bp, Homo sapiens
aggaaacaaaattcgatttgcaaatcattcagtgaatcccaactgttatgccaaaggcaatctgaaagcaaatcctgtttagatgcaggcgaaggttc

SEQ ID NO: 252855 - DNA, 82 bp, Homo sapiens
caggaagctcagcggtgggcagtcctagtccgaggtgccaccgtggaaggacagaatgatggaatttcactcttgttgccca

SEQ ID NO: 252856 - DNA, 98 bp, Homo sapiens
ttgcagggccagtggtttctgtcagattttcgccgctacaagagactgtgaaaaggaagttggaaggagctcgatcaccacttaatggagaccagcag

SEQ ID NO: 252857 - DNA, 90 bp, Homo sapiens
cggaggaatctcagtagggacaacaggcaggagaattatgggagcgcatttccccaggatgttccccatcattgcccagtatggagatgt

SEQ ID NO: 252858 - DNA, 97 bp, Homo sapiens
cgcctgttctcgggctgtttggcgggtttgaaaaataacaggtcagcctcttcccagatttcttgacatccttggaaaccatgcatttatgccattg

SEQ ID NO: 252859 - DNA, 88 bp, Homo sapiens
acctttgaggaacattggggaccgaaaggcgacctcggagaatgtggcctccagggggagcccagggctccagtttgtgttttcagct

SEQ ID NO: 252860 - DNA, 100 bp, Homo sapiens
gaagttttagcctagctgttctcaaggcggattaattagcccaagaaacattatattcatgtgtatgtggaatttgatgatcttgaatgggataaacgag

SEQ ID NO: 252861 - DNA, 75 bp, Homo sapiens
cgcgatgttccgccggagcttgaatcgttttgctggttggaaggaaaatcatgcaacattcatgagcgaactaaa

SEQ ID NO: 252862 - DNA, 75 bp, Homo sapiens
gctggaggagcgaggcagctgtactaggactgggaacgggatgctgtatgattatgttgaaaggaaacgaaaaga

SEQ ID NO: 252863 - DNA, 82 bp, Homo sapiens
cgtgaggtgagagagtccgggagcccgagcttgagacctgcctagagctggaacgttacctccagagcgagccctgctatgt

SEQ ID NO: 252864 - DNA, 75 bp, Homo sapiens
agatttgtcaaaacctccgaggggacgtgttccagaaattcattgagaggcagcagcagcggaaccgcttaggca

SEQ ID NO: 252865 - DNA, 51 bp, Homo sapiens
gttagctggtgctttgtgtgctcagaagggcatgagccagaaggagagctc

SEQ ID NO: 252866 - DNA, 73 bp, Homo sapiens
cagattttaatttcagtgactgaattaaaaggtgtcaagaagctcagaatgtgttgctgtggatgtatggtcg

SEQ ID NO: 252867 - DNA, 100 bp, Homo sapiens
ggaggcgttgataccctcatgagaaattctgttacttccataaaagtcctgaagagtggtgaaaccagaacaatatctcactttcattatactacctggc

SEQ ID NO: 252868 - DNA, 83 bp, Homo sapiens
taatctcctcagaaatcactaaatactactctgaggggcttagaaattaacagggtttttcagaaacgcatggcagagtcagg

SEQ ID NO: 252869 - DNA, 50 bp, Homo sapiens
cgaacatcttctggacctttgtccagccagacccggtccgtttggaatgc

SEQ ID NO: 252870 - DNA, 75 bp, Homo sapiens
ttgcacaacacctgatgaatggtggagagttacgcagatgcaaataatacggcactccgaacagacactaaaaac

SEQ ID NO: 252871 - DNA, 75 bp, Homo sapiens
tggaggaggtggagttctgtgtggaagcttcggaaccaaaaagaagcttcccagagccggggccaggagccccaa

SEQ ID NO: 252872 - DNA, 82 bp, Homo sapiens
cagccaaccatgctcaacttcggtgcctctctccagcagactgcggctactgcagcactggggtgtcagttgttggtccgac

SEQ ID NO: 252873 - DNA, 101 bp, Homo sapiens
tcacgatattgcagaaagacacagctttcctcttcctctccaaaccacctcgaagcagggtctccgaattcaatcctttgacgttcaccagcgtgatcgaa

SEQ ID NO: 252874 - DNA, 82 bp, Homo sapiens
gaaggacctggactggagtcacgccagtacaaggaggatactggcaaagatgaggcagagaatgactctaccctgcatgtac

SEQ ID NO: 252875 - DNA, 75 bp, Homo sapiens
gggagaaagtggagtccgagctgagatccatctgcaccacggtgctgaatgaagctcgactgagaattgtaaaaa

SEQ ID NO: 252876 - DNA, 100 bp, Homo sapiens
gctgaccaccgcctgggtgctgtccgtggccgagaggcttccccatctttctggtgacgctggtggccctggtggatgtggacaactatggccccatcat

SEQ ID NO: 252877 - DNA, 100 bp, Homo sapiens
ctacgctatgtggcgaatatcttcccttacaagggttatatatggaattatggtaccctccctcaggttcgatacaagaggctgttttcctagcgtggct

SEQ ID NO: 252878 - DNA, 78 bp, Homo sapiens
agtctgataagccagtggtgattggttccatcagacatgtggttcaggtgcaaattgagcatgacccagaattagaaa

SEQ ID NO: 252879 - DNA, 100 bp, Homo sapiens
gggagctgcaggaaccagactgggggcgagctgagcacctgtagtcaatcacacgcaggccgaagaacagttgagaattgttgaagaacaaagaaagatt

SEQ ID NO: 252880 - DNA, 82 bp, Homo sapiens
ggaagatcgcgatcctgggctaccggtctgtgggcaagtgaaccggagcaaacgacttccgatccagtctgcgctgttgcgg

SEQ ID NO: 252881 - DNA, 75 bp, Homo sapiens
aggaaacttgccttatcaccttcttgcttgcagatggcttgttcaatcagtatatcagtcaacaggaatataagc

SEQ ID NO: 252882 - DNA, 100 bp, Homo sapiens
cttctggaaagggtggagtcggaaaatctactacagcaggtcctgtggatgtcaatattctagctaagtgtaacccctgcctatcaaatccgtgtaaaaa

SEQ ID NO: 252883 - DNA, 100 bp, Homo sapiens
cctgggccggcccgtcttccccacggcagagcagttccggcgcatgcgcgcggctgagagggaagtgatgagctttcctttgatccggacgacgtaatca

SEQ ID NO: 252884 - DNA, 101 bp, Homo sapiens
ctgcgctggccgggggcgcgggcggcggcgccggcaggaaggactcacaccacccggcaagaactgctcactacggctccctgccccagaagtcacacggc

SEQ ID NO: 252885 - DNA, 100 bp, Homo sapiens
tatgatatgctaagaaagaatcttgtcactttagccactgctactacagacagagtctcactcccatcgcccagacttgagtgtagtgatgtgatcactg

SEQ ID NO: 252886 - DNA, 100 bp, Homo sapiens
ctccaacagcatctccaagcaatgttcattttactccgcccagaagacaacatcaggctgggtaataaagccagaggcctgcaggaacactccatcagtg

SEQ ID NO: 252887 - DNA, 100 bp, Homo sapiens
tctgaagttcacgactactagaaggggaggggagtggaaaggctctcagtgaaaaagaaaatgtcttctgaggctgatctggtgtctcacatctgtaatc

SEQ ID NO: 252888 - DNA, 75 bp, Homo sapiens
gaaagacctccaggagaagatcagtgggaagatgttttgaacagagataaggatgaggagccaactgtaaaacaa

SEQ ID NO: 252889 - DNA, 101 bp, Homo sapiens
caggacagggctgaggaaccatgtctccatccccgaccgccctcttctgtcttggtttcctgggagaaggtggcttaaggctgagacacttatgccctggg

SEQ ID NO: 252890 - DNA, 51 bp, Homo sapiens
aggagtaggacaaggagtaggagtcgtggaatattggtgaacgatactaag

SEQ ID NO: 252891 - DNA, 117 bp, Homo sapiens
tacaatgtcacgctcccaccagcagcgcctatgagtttgtcacctggctcgatggcattaaggggcgacgatggccttctgaggggctgggacaccagggtacccggcaaatttctc

SEQ ID NO: 252892 - DNA, 90 bp, Homo sapiens
cgttctcagccggctctggagtgcgggcgggggcgacagggccgattccggagtgggtgttctttgcagaagatgtgggttcaaacaaag

SEQ ID NO: 252893 - DNA, 101 bp, Homo sapiens
atgaacctggcgcaaggttggctttaggaaaaattctggagccagagggagagtcaaggcaattctttggttgctaaggttgcaaaagcttctcatttcag

SEQ ID NO: 252894 - DNA, 100 bp, Homo sapiens
tgaaccatcctgatttagcaaaagacttaacagaaccttcaacaactagtactgcttcaaattatccagatgtgttaacaaggccttctcttcatcggag

SEQ ID NO: 252895 - DNA, 101 bp, Homo sapiens
gacagaggatgccgaaccactccacaacatggccaacgccctggccagcgccacttgcgagcgctgcaagggcggctttgcgcccgctgagaagatcgtga

SEQ ID NO: 252896 - DNA, 101 bp, Homo sapiens
ggaaaatgacggttataagaccatttatttctttggagacaaaactatgccagctgtagcaaggtgctgctgaggccacggacgtcggaggaggtgtccca

SEQ ID NO: 252897 - DNA, 100 bp, Homo sapiens
cggagcttctcagaagacagagggttttcttttgagagtgcctggaagagctgggatgtctggttgagtcctatggcatgaatgtttgccaaccaacccc

SEQ ID NO: 252898 - DNA, 50 bp, Homo sapiens
cttgcagcatgtgcacagtcagagtgtggcaaaggagcagagaactttga

SEQ ID NO: 252899 - DNA, 100 bp, Homo sapiens
cagcacccacctccccttgtgaccaggatattgatgaccatgagatccctgctcagaacccccttcctgtgtggcctgctctgggccttttgtgccccag

SEQ ID NO: 252900 - DNA, 82 bp, Homo sapiens
ggaccacaagatcctcatcgacaggtgtttgagaagtcccccctgcgggtgaagaacttcgggatctggctgcgctatgact

SEQ ID NO: 252901 - DNA, 74 bp, Homo sapiens
aaaaacatcagagattggaacacaaaggctgctctttggcgtaaattgcaatcgattagggatcgtttctcaga

SEQ ID NO: 252902 - DNA, 75 bp, Homo sapiens
ctgcaaggtccggctgctggatggaggggattttgtcagcttgtcgtcaagaattctatgaggagatcttctctt

SEQ ID NO: 252903 - DNA, 83 bp, Homo sapiens
ccaaggcacaccgcaggaacaagaaggacgtcaacctcagcaagactgagaagatggactgcctccgggcctgccaggagcag

SEQ ID NO: 252904 - DNA, 75 bp, Homo sapiens
tttcttgtccgggtgcggataagggacccgacactgataagtcacctgcaccggtgcccgtgacgtacgagctgc

SEQ ID NO: 252905 - DNA, 100 bp, Homo sapiens
tggcctcactcaaacagtaaacgagatgtagatgaatgctcagaaaacagatgtcaccctgcagctacctgctacaatactcctggttccttctcctgcc

SEQ ID NO: 252906 - DNA, 74 bp, Homo sapiens
aacgagctaagccttatcatctgtcaacatcatcagtttttcgattagccaggtctaaactgcagtaatccatt

SEQ ID NO: 252907 - DNA, 98 bp, Homo sapiens
cccatcccagtggcggctgccaaggagacggaaacttttgagaagaactttgaaagagaaacccataaaataagtgagcaaaatgatgctgataatgc

SEQ ID NO: 252908 - DNA, 75 bp, Homo sapiens
gaagaaggataaggaccaggattctattactggtgattgtagtaccaccactgcctgggaaagccttgaagcggc

SEQ ID NO: 252909 - DNA, 80 bp, Homo sapiens
aaaatggtatcagagaaaaagatctatgatgtggaacaaacacgttataaggatttcgaactcaacaatgaactaaagat

SEQ ID NO: 252910 - DNA, 101 bp, Homo sapiens
cgccgcccccggagctgctggtttcattcgaggtttcgggccgacaagttggatggcttgaggactggtactaaaaggaaacgtgactgggaggccattgc

SEQ ID NO: 252911 - DNA, 51 bp, Homo sapiens
gaacggatagctccctcctggaaaaggttacattgattacccacctagtac

SEQ ID NO: 252912 - DNA, 98 bp, Homo sapiens
cggcactacacagtgtcggaccccaggactcaccccaagggctacaccgagtacaaagtaaccgcgcagcaccctcatcacatgtgtggattctggga

SEQ ID NO: 252913 - DNA, 83 bp, Homo sapiens
ggattcagttctgagtgcctcagttttcccttccacaaaatgaggtagtgggcagcagtcagtgacaggtgtaacctctgtgg

SEQ ID NO: 252914 - DNA, 75 bp, Homo sapiens
gacagagctggcctggagtccgcggctggccgcgtgagtaggctcatccacctgcagacatggggcgcagaaagt

SEQ ID NO: 252915 - DNA, 99 bp, Homo sapiens
attgctctgcctctaagacaactctgcctgtgttgaccttattcacaaagtggctgagaaaccctggcccccagcatgagaagcggactctgtttggcg

SEQ ID NO: 252916 - DNA, 87 bp, Homo sapiens
ataaaacagtgtggtggtatccttacaatcatcctgcttcttgtacatcactgtatatttaaagttggagttcgttgctaaagatgg

SEQ ID NO: 252917 - DNA, 100 bp, Homo sapiens
cgactatgaatcggagccggaccagacaatgcagatcttcgtgaagactctgactggtaagaccatcaccctcgaggttgagcccagtgacaccatcgag

SEQ ID NO: 252918 - DNA, 75 bp, Homo sapiens
agccttctggtataccatcgtcaccatgacaacactagggagctgtaaaattgacaagcttggcatgtggaaatc

SEQ ID NO: 252919 - DNA, 128 bp, Homo sapiens
ctggcgtgagttatcttctggaaatgagtcttcaagctctgtaagacatataattgtatggaagagatacagtgattttaagaaactacacaaagaactatggcaaattcacaaaaacttattccgac

SEQ ID NO: 252920 - DNA, 83 bp, Homo sapiens
ggagacgatgcgccccgcgcagccgcctgcgcctgcgggagccctgatgactatcagccagttcgtctgctcagtaaacctgg

SEQ ID NO: 252921 - DNA, 83 bp, Homo sapiens
cgcaggtcctcgcggtgcgcaccgtttgcgacttgcacgttcacgtccatgttcttcccaggaaggctggagactttcacagg

SEQ ID NO: 252922 - DNA, 87 bp, Homo sapiens
ggcccccagccgccgcccacgcagcagggacagcagcagtcatccgtccttggctcaggatttggagagcttgcaccaccaaaaatg

SEQ ID NO: 252923 - DNA, 97 bp, Homo sapiens
tggggggagtcctcatcatcatcgcctcctgcgtcatcaacttaggcgactactccaaaggattcggcgggaagtatggggtgcagaaggatcggat

SEQ ID NO: 252924 - DNA, 100 bp, Homo sapiens
ttttccctcctcaaactgactttgcagccacggagaggaaacttttcttctggctaaagaagaaagacagcttggtgaagtgactgagcagacagaaggg

SEQ ID NO: 252925 - DNA, 83 bp, Homo sapiens
acaggaccaagagtccaggacccagacacttgatggatccacacatattcacttccaactttaacaatggcattggaaggcat

SEQ ID NO: 252926 - DNA, 100 bp, Homo sapiens
gggtggaagctgggccagggattgggaaaatctcttcaggtgaagcgtgacattcaggaaaacgatgaagaggcagtgcaagtcaaagagcagagcatcc

SEQ ID NO: 252927 - DNA, 100 bp, Homo sapiens
gtgaaactcctggaccagctgcataactccctgcggattgacctctccatgtaccggcgtttgcctcagcatggagggcggggccgcggcagccaccccc

SEQ ID NO: 252928 - DNA, 100 bp, Homo sapiens
ctggactggatgtgacgagcccagaaccactgcctacaaaccaccctctcctgaccctgaagaactgtgatgaacgacaatctccttgagagctggagcg

SEQ ID NO: 252929 - DNA, 75 bp, Homo sapiens
agcaggccgaggccatatccgagcgtgggctcgggatgagtttgaaggcctcttcaagcagccagcagaaaatgt

SEQ ID NO: 252930 - DNA, 100 bp, Homo sapiens
cagctctgctgccacctctgacaggttattaatgctgcactggctttagcagcaaaaccacagagtaaactggcccaagagaacatggatctttttaaag

SEQ ID NO: 252931 - DNA, 80 bp, Homo sapiens
gcccgcttcctggaatggcaagcgcagcaacaacagagagcacgtgaaaactttagaaactgttcctttggagaggaaaa

SEQ ID NO: 252932 - DNA, 50 bp, Homo sapiens
gtccaagtcagttcctgggtacaagcttgaccacatattatcccctccac

SEQ ID NO: 252933 - DNA, 76 bp, Homo sapiens
gacaatggctttggtccccagcgcagtgaagtggtgagcctttttgtcactgatgtggaaacaacttctgtgcatc

SEQ ID NO: 252934 - DNA, 82 bp, Homo sapiens
ccgagtactgggacactgccatcctcttcaccaggcagataacgaaggaggcccaacttcattcaataaggagcctgacgga

SEQ ID NO: 252935 - DNA, 75 bp, Homo sapiens
gctgattatttcaaccgaaactgttatcaggatgatattaacagtactgccaaatctgtcgaaagggagataatg

SEQ ID NO: 252936 - DNA, 98 bp, Homo sapiens
cccaccaggcaagcctgggccttctggtcaacctggccgtccggggcccccaggccccccacctgcagatcctgataacttaagtgactctctctttt

SEQ ID NO: 252937 - DNA, 85 bp, Homo sapiens
gctgtatgggcccaagaagaggggacccaaacccaaaactttcctcctgaagtcattcctgtattccatcaaccagacaatctgc

SEQ ID NO: 252938 - DNA, 82 bp, Homo sapiens
ttcgacttggagtctttgtccaggacgacatgaagacatcttatccatcctcactgctgtcaacgatgatgtgagtcgaaga

SEQ ID NO: 252939 - DNA, 75 bp, Homo sapiens
gtcgtgcacattcacaccccagcaggggctgcgggccaagaccagcttcaagtctccatggtaccagaaaacaac

SEQ ID NO: 252940 - DNA, 100 bp, Homo sapiens
ctgtcccagagtttgcagatagtgatcctgccaacattgttcatgactttaacaaggaggagttggagcacctgaaccaggccagcgaggagatcaacca

SEQ ID NO: 252941 - DNA, 76 bp, Homo sapiens
ctcagatgcccctgccggagatccctcagccctggctgtgtgtgttttaatagaaaagttgtcactttccaaaatg

SEQ ID NO: 252942 - DNA, 100 bp, Homo sapiens
gaggaaaacaacttcgagggcagactgaagtgagtagtgaatatagtatggacaaggcaatggttgaatttgctacattggatcggcaactaaaccatta

SEQ ID NO: 252943 - DNA, 100 bp, Homo sapiens
cagtgaagtcctggcggtcatggacactctcgtctctgttgctgctcgagagtatgtccgtggttcagaccctgtattaaagcttttggacgacaatggg

SEQ ID NO: 252944 - DNA, 99 bp, Homo sapiens
tcggcagatgctctgtgctgcggcccggagaacaccccacacagtgcccacttttgttctgccagtttggagaccctgacacacccaccttctcacctg

SEQ ID NO: 252945 - DNA, 75 bp, Homo sapiens
ggaggagaccctttgaaggtcccttgtggggactggaaagaggacggtttccaaggtgctattgggagctcatgc

SEQ ID NO: 252946 - DNA, 100 bp, Homo sapiens
aactgcttggcacctcttcaataggtgacattcaatgagtaagatcctgaggaggcaggagagggacagggaaggagtatgggtaggggcaggaggagcc

SEQ ID NO: 252947 - DNA, 100 bp, Homo sapiens
cctcacaccctggatccttgacctactatcctattttgtaacggattatgatccaaccattgaagattcttacacaaagcagtgtgtgatagatgacaga

SEQ ID NO: 252948 - DNA, 96 bp, Homo sapiens
caattccaaaatgtgtaagacgggatattctcttctgtgctgtcaagggtaaataggatttgtggccgccctgtaagaacacccacacaaagcccc

SEQ ID NO: 252949 - DNA, 60 bp, Homo sapiens
tggcctcccgcgtgctggccatgaagaaatgcgcccatgctggttccagctggatcagat

SEQ ID NO: 252950 - DNA, 50 bp, Homo sapiens
aggagaggctgcttcttgtagaggatgtggagagcatcttgtgcgcacca

SEQ ID NO: 252951 - DNA, 90 bp, Homo sapiens
accagccgggcggcgcggcggctccgcaggaatagccaggccagaagaaggaaggcctgtggtgagtgggacaggaaatgacatcaccac

SEQ ID NO: 252952 - DNA, 100 bp, Homo sapiens
gactacctgcagggttgtcgagctgctctgcaggctctatctaatgttcctcctctccggaactactttctggaagaagacaattataagaacatcaaac

SEQ ID NO: 252953 - DNA, 100 bp, Homo sapiens
tgttgatgctgtaattgctgaacttaaaaagcagtctaaacctgtgaccacccctgaagaaattgcacagattcgggaactggagcctctcctctgtcac

SEQ ID NO: 252954 - DNA, 137 bp, Homo sapiens
gacaggtccagttgcagatacaaacttggattttttccagtctgatccttttgttggcaatgatgttgaatttgaagtatcatcggaccgacggactgggaaacccattgctgttaaactggtgaagataaaacaag

SEQ ID NO: 252955 - DNA, 98 bp, Homo sapiens
gagacacagtatagcttctgacagtggagacactggcattggaacttcctgttctgatagcgtggaaggaacgaatgatcacacactttgaaaggtcc

SEQ ID NO: 252956 - DNA, 100 bp, Homo sapiens
tatcgtggttgtgaatccccaaatctcaatggcctgtatatctttggagacttcatgagtggaaaacatcggttgtgaagagaaagccaaaaagaatgcc

SEQ ID NO: 252957 - DNA, 90 bp, Homo sapiens
gggacgtgccgcccctttgcggggtcagccagcagccggcccggggtgtcagccaccccacccaagtccccggtctacctggacctggcc

SEQ ID NO: 252958 - DNA, 74 bp, Homo sapiens
tgccccagcaggccgggatggcctccatccttgccaccgcagtgatcaacaagacccttccaggcctgcaagcg

SEQ ID NO: 252959 - DNA, 75 bp, Homo sapiens
agagcctcgcctttgccgatccgccgcccgtccacacccgccgccagggtggcccggtggaaatcctgccctttc

SEQ ID NO: 252960 - DNA, 74 bp, Homo sapiens
ggaggaggaggagatcgtcaggctggcccaggaccgggaggagatgaagatggagtctcgctctgttgcccagg

SEQ ID NO: 252961 - DNA, 71 bp, Homo sapiens
acacatcgtagcagtgttgcccgagattgacccgttttgtgaggagtttaaagaaaagtgtcctatctgtg

SEQ ID NO: 252962 - DNA, 110 bp, Homo sapiens
ccagaccctggagcctcagttggaagcagccgatccagcctgcggagcctgtggggcagtgttatagttttgccgctggactcttccctcccttcccccaccccatcagg

SEQ ID NO: 252963 - DNA, 102 bp, Homo sapiens
ctcatgagaccagtgcccatgaaggtcagactgaggaggaagaaggcacctacgatcaaactctggagttccgtaggggaggtgatggccagccaagacgat

SEQ ID NO: 252964 - DNA, 90 bp, Homo sapiens
gctgcagtacctgctggagaagggagactacaaggacagcagcgactttggggcccgtcaccctcaggaatgcttctagtcacaacagac

SEQ ID NO: 252965 - DNA, 100 bp, Homo sapiens
ggggcccccagcccgcctctgtgccactttgcatcccacgccggaggaggcattaacgagaccgggtggcaggttcaagaaagagattgtcgttgatgga

SEQ ID NO: 252966 - DNA, 75 bp, Homo sapiens
tgtgacttcagagacactgccaagcagccttagccctagtgtagaggctgatcagctgaccgaagaacagattgc

SEQ ID NO: 252967 - DNA, 96 bp, Homo sapiens
gaaaacacgagatttttctcctatttcagcagttggccacaacttcattgctgggaaaaggacacatgttcaaagagcataattaactttttaaaa

SEQ ID NO: 252968 - DNA, 104 bp, Homo sapiens
ggagctggtgagcctcatcacacaggatccgcccctggacatggaggagaaggtccgcttcaacagggcactgtgacctttgaagatgtggctgtgaacttttc

SEQ ID NO: 252969 - DNA, 50 bp, Homo sapiens
aggagattgctataagctgctttcatagacaggagactctctccatcatg

SEQ ID NO: 252970 - DNA, 82 bp, Homo sapiens
tcctggctcttgccctcatcctggttctggaatcctcagttcaaggaagtattgatgaagatgttgtggtgatagaagcttc

SEQ ID NO: 252971 - DNA, 100 bp, Homo sapiens
tcggagggtatggttggcatggaattgaatttcatctgtctgtgggaattgtaagcaaggtccttctgtacctcccttagtgaatccacctctgcctaca

SEQ ID NO: 252972 - DNA, 100 bp, Homo sapiens
gcggccgaagacgcggaggtccatgccgagctttaagagcaggaagtgtggggatgcctttgcagaagccctctccaggagcttgccgacaatggggagg

SEQ ID NO: 252973 - DNA, 100 bp, Homo sapiens
ggaccctgtgctgctgcgcctcttctaccaagtggctgagtacaccttccgccaggtttcatctgatggaaatcttccccagcaagccgcgtcagcccca

SEQ ID NO: 252974 - DNA, 100 bp, Homo sapiens
tggccccgactgcaaggacaaatctgacgaggaaaactgcgaacatgccgagtttttgcactgcaagtccaaaaagtttacagactttgatgaagtccgg

SEQ ID NO: 252975 - DNA, 74 bp, Homo sapiens
cttctggtggttgccactcacctgaggatgacctgaaggagaagaaggagaaggtggaggagaaggcaagccgg

SEQ ID NO: 252976 - DNA, 75 bp, Homo sapiens
ggggcccatgccttctgatgtctacaggcgctgacggccacccctccagaaattccatcttctaaaccaaaactc

SEQ ID NO: 252977 - DNA, 74 bp, Homo sapiens
atattcctctcctgatctggcctcatctgttccagggaggtgggattgaattggtatacgatagagagacagga

SEQ ID NO: 252978 - DNA, 100 bp, Homo sapiens
caaagaattccaaagaattgatgtgaatgtgtattttgcatcacttcaagccctttctaaggcacaaaatgatgtgatggaaatgaagatgcagtcagag

SEQ ID NO: 252979 - DNA, 83 bp, Homo sapiens
ttttctctcgggcttcatctcttgtgtggggagtttcatcctagcggatgatgaaacatgcttggaataattataaaggttat

SEQ ID NO: 252980 - DNA, 100 bp, Homo sapiens
gtctcgaagaaagtgcgcagcctgcaagattgtggtgcacacgccctgcatcgagcagctggagaaggttcaagaacatgaagactcgggtgactcagaa

SEQ ID NO: 252981 - DNA, 82 bp, Homo sapiens
gggacaggcatcgtggggatcttggcagcgctgcagggctgaaggtgatgtggccgccctcaaccgacgcatccagctcgtt

SEQ ID NO: 252982 - DNA, 100 bp, Homo sapiens
gttccatccggcgctcagctgggcttgaggtcttgatgcagaactttattatgtgagaaatgaccttattagtcactacgctctatcctttagtctgtta

SEQ ID NO: 252983 - DNA, 100 bp, Homo sapiens
gtcccgcgccccgagaccgccgtcgctcggacgctcctgctcggctgggtcttcgcccaggtggccggcgcttcagggctcagatgagaccatccgtgtc

SEQ ID NO: 252984 - DNA, 102 bp, Homo sapiens
actccattagggcctcccaggccctacagcagaaacacgaagagattgagagccagcacagtaaagaactctgcaacatgatacttgattgctgtgcccaac

SEQ ID NO: 252985 - DNA, 75 bp, Homo sapiens
accagtttccggacagcttcgtgctggtcaggtcaattcagtgaagatatgatacccacagtgggcttcaacatg

SEQ ID NO: 252986 - DNA, 50 bp, Homo sapiens
tgcaccatccaggagaaggacctatgtggtggtaatgcctaaaaagagac

SEQ ID NO: 252987 - DNA, 51 bp, Homo sapiens
tggcaatggaacaggcttgagaaacaggccatcgaagacggcaatttggag

SEQ ID NO: 252988 - DNA, 75 bp, Homo sapiens
caggccggcaggctgagaaaagcgagaccgcgtgcgaggaccgagctcccagctcctccagcagccgacaggagg

SEQ ID NO: 252989 - DNA, 100 bp, Homo sapiens
gcgagagcgagaggacccagtcccacatctcccagaaaaatatgtcgtaactgcaagtgtggccaagaagagcatgatgtcctcttgagcaatgaagagg

SEQ ID NO: 252990 - DNA, 75 bp, Homo sapiens
atctgattcatcatcatctgaaccagggatcacagtctaaggtccaggtgccactgattaatgaacttgaatcag

SEQ ID NO: 252991 - DNA, 74 bp, Homo sapiens
ggacgtggaagcagcaagaggcgcttggtcaagacacactgacgttttcggctttgtgagaaaccttaccatca

SEQ ID NO: 252992 - DNA, 100 bp, Homo sapiens
cagaaattacaactgaagatataaaagctgcttttgcaccatttggaagaatatcggtttagatgtagattctctggtcattgagcatatccaagtgaac

SEQ ID NO: 252993 - DNA, 83 bp, Homo sapiens
cacgacgtgggtcccctgccagatttgtgagtattgggaaagggtcgttgtggtgcatagacccagagtatagacaaaatcta

SEQ ID NO: 252994 - DNA, 98 bp, Homo sapiens
taccctgcttgccactggaggaacagatggctacgtccgtgtctggaaggataccggaaaaacacccgtggagccggaggtggcaattcaccgaattc

SEQ ID NO: 252995 - DNA, 80 bp, Homo sapiens
cccaggaccctcttcgcgggcgattcgcgtagcctcaggaccaagaatcgccttcagccctgtctggtgcatccttggca

SEQ ID NO: 252996 - DNA, 74 bp, Homo sapiens
agagatgtggggggattctcgacctgctaacagaactggaccttttcgcggatgtgatgctggtacaacccaga

SEQ ID NO: 252997 - DNA, 82 bp, Homo sapiens
tagattactatgagaccagcagcctctgctcccagccagctgtggtcttcctaaccaagcgaagccggcaggtctgtgctga

SEQ ID NO: 252998 - DNA, 75 bp, Homo sapiens
tcaagtacttggcagatcactctcttagcagtctgcgctcctcagaccaccggcaggtgaacagcctgatgcaga

SEQ ID NO: 252999 - DNA, 75 bp, Homo sapiens
tggagcagttgtatgtgtagaaagtgaaatcagaggagatgtaactatcggtgcagctcagtggaagatgatgac

SEQ ID NO: 253000 - DNA, 74 bp, Homo sapiens
cagtgtgaccgatgtcatatgctaggccactatacagatatatctcccggggccaattcagcatctctacctgg

SEQ ID NO: 253001 - DNA, 87 bp, Homo sapiens
ccaagatcgacccctcgttaggaataattgcaaaaatcaatcggactctggaaacggcagaaacagcacccaggactatcttccaaa

SEQ ID NO: 253002 - DNA, 50 bp, Homo sapiens
gaggagattctgaagataaggagacaaatgctgtgcttcatgaagttaaa

SEQ ID NO: 253003 - DNA, 100 bp, Homo sapiens
gtagaaaactggtcaaggaagctgtgactctgacatcattagaagcatgccagaacagactggtgaaaagtaaaccttttcacctacaaaatttcacctg

SEQ ID NO: 253004 - DNA, 100 bp, Homo sapiens
atcccttgctcccatccctgcagcatgaacaaggcccagcttcgggcatttatcccagagatgctcaagtactctacaggtcggggaaaaccaggctggg

SEQ ID NO: 253005 - DNA, 82 bp, Homo sapiens
ctggcctccatcttcggcaccgagaaagacaagtgcgcgcggagccatggttatcatgtcggagttcagcgcggaccccgcg

SEQ ID NO: 253006 - DNA, 75 bp, Homo sapiens
tcaaaaacaaggttctggaaacaactgggcatatggaatggtgcagatgtgaatgccaaggacatgctgaagatg

SEQ ID NO: 253007 - DNA, 75 bp, Homo sapiens
ccggatcgggggcaagcggaaggtgatgcccaagatggaccagggcgatgccagtccctccactccagaggagaa

SEQ ID NO: 253008 - DNA, 99 bp, Homo sapiens
tgggccgctctggagggactctccttctcaccgttccgggaacaaatgctagatacgcggagaaggacattctggagcagagcctggacgaggcgcggg

SEQ ID NO: 253009 - DNA, 105 bp, Homo sapiens
gtgctggagagccctgagaatgcctttgggctgcctgaggatgagttcctggtggtgctgcgctgtgtgggcagatgtttggagcatgggcatactgttatatgt

SEQ ID NO: 253010 - DNA, 90 bp, Homo sapiens
caagagcagcggaaaatgatccagtcacagattgggtgagatacaattccatggaattttaccactgaaccagtggagggctaattttgt

SEQ ID NO: 253011 - DNA, 82 bp, Homo sapiens
atctccggccgaagagcggcggcggcagcggcggtgtgggcaagagcagtttactgttgcgttttgcagacaacactttctc

SEQ ID NO: 253012 - DNA, 100 bp, Homo sapiens
ccctgcaggagcagccaaagatgtacaaagcttatgcctggccactgagtaagctgggacccttcacggtgctgttacctacagacaagggactgaaagg

SEQ ID NO: 253013 - DNA, 100 bp, Homo sapiens
gcccctgctcaagcactccttaaccgtcctgctaagcccctctgtgcggcgattttctgagctgccgagcgggacatttatgcagtgtgtgattctttct

SEQ ID NO: 253014 - DNA, 98 bp, Homo sapiens
agcaaactttttaatgaggaaggcgaactttctgaccaagtatacaactacccagagggcctaggagaagtgctgtatagagagcagttcgacttcaa

SEQ ID NO: 253015 - DNA, 96 bp, Homo sapiens
gttgctcccgcctgagcccagcccccagaaaggattgtgacatatcgttggacccagaattgagacggaatcagtccccaatgcctggaaattcct

SEQ ID NO: 253016 - DNA, 72 bp, Homo sapiens
gcgctacagcaagttttttgacctccaggcaatgatagtaagaaatgctaaagatacagctcatacaaaagc

SEQ ID NO: 253017 - DNA, 99 bp, Homo sapiens
ttggtttcagcatgtccttctctgaatgatgaatacttttactactgtgacaacattaacggatgatgaagtggttctgcagtgcaccgcaaccatcca

SEQ ID NO: 253018 - DNA, 51 bp, Homo sapiens
gtccaagttcaaccaagccattctactacccacagatggcatgatccgaaa

SEQ ID NO: 253019 - DNA, 75 bp, Homo sapiens
gctctccttgcagctgcttagacgctggatttttttcgggtagtggaaaaccagagatgtggtctcactgtgttg

SEQ ID NO: 253020 - DNA, 74 bp, Homo sapiens
ggacttctgcgcgcgggagttcgaggccctgcggagctgcttcgccgctgcggatccctggccgcctgaacgac

SEQ ID NO: 253021 - DNA, 75 bp, Homo sapiens
cgggaccggagtcagaaccctccgcagagtaaagatggaccacacatccccgacctacatgcttgctaacttaac

SEQ ID NO: 253022 - DNA, 82 bp, Homo sapiens
ccgccgctcctccgggcttgccctggagccctcagtctgagtaccactatgagtacacggcgtgtgacagcacgggttccag

SEQ ID NO: 253023 - DNA, 98 bp, Homo sapiens
ctgacttcttcctgctgctgcttttcagggggaagcagtttaagtgcacggtgtgtgactacacagcggcccagaagccacagctgctgcggcacatg

SEQ ID NO: 253024 - DNA, 82 bp, Homo sapiens
ccatgtcccagaaacaagaagaagagaaccctgcggaggagaccggcgaggagaagcaggcaagtgaaccggagcaaacgac

SEQ ID NO: 253025 - DNA, 100 bp, Homo sapiens
attgactggcctgcttggcaaggcaagtagcggcggcgcttcaagagtgcgcccccacccctgtgtccaagtggccgcactccagacctgaaggctctac

SEQ ID NO: 253026 - DNA, 48 bp, Homo sapiens
gggagatcgaggtcatgattgcaggcctggagctgctgaagactgcta

SEQ ID NO: 253027 - DNA, 100 bp, Homo sapiens
cttcaaggacccgggactagtggaccagctggtgaaggcagacagcgagtggcgacgatttaaagccttccatctgaagtatgatgaagttcgtctggat

SEQ ID NO: 253028 - DNA, 51 bp, Homo sapiens
cgagccccgccctgccgccagccagataacgaaggaggcccaacttcattc

SEQ ID NO: 253029 - DNA, 100 bp, Homo sapiens
ccggcgtgggacagccacctggagcgcagctgccaggcctcattgctacgatttcagagtaccctggtaatagctgagcatgcaaatgattccctagcac

SEQ ID NO: 253030 - DNA, 74 bp, Homo sapiens
tacgacactgaacgcatcggagggctactacaaagttctgggaaagggaaagctcccaaagcagcctgtcatcg

SEQ ID NO: 253031 - DNA, 118 bp, Homo sapiens
acgatcaggacggcgagcctattcagacgtttcactttcaggtctctaattaacagaagatggcaaagcccagccacagcagctatgtccttcagcagctaaacaaccaaagagaatg

SEQ ID NO: 253032 - DNA, 82 bp, Homo sapiens
aggatctcgggctcggaacgagactgcacggcacctgaatggacagaagaggacctcagccaactgacaagaagtatggtta

SEQ ID NO: 253033 - DNA, 100 bp, Homo sapiens
gagagtctgagtgcagccaccacctttgagcctcttgagcctgtgaaggacactgacattcagaaactgaggcttcttgaagagcttgaagacacttggc

SEQ ID NO: 253034 - DNA, 75 bp, Homo sapiens
cctgaagaaaaaaaccatgaagctggaacatcagctgacacagccagtgtaagcagcctgagtctgtctacagga

SEQ ID NO: 253035 - DNA, 49 bp, Homo sapiens
tcagcctcttcagcgacctgcccgaggaaagaccacagcaagattcttt

SEQ ID NO: 253036 - DNA, 87 bp, Homo sapiens
aattggaggaacagtgtgtccagcatgggagagtacatgagacgatgaagcaaagcaagaagatccatcgcagagtcctaaagaaga

SEQ ID NO: 253037 - DNA, 74 bp, Homo sapiens
gatgaaagccgtgctggctcagagaagtatgaatgacccatattaaatcgcccttggtgaaagaaaattcttgg

SEQ ID NO: 253038 - DNA, 83 bp, Homo sapiens
gctgggacttcccgtccgcggcgtggaggatgaagatgtgtgtgtctttaagtgctcagtgtcccgagagacagagtgcagcc

SEQ ID NO: 253039 - DNA, 90 bp, Homo sapiens
taacgacaagaaaaacaatcgcttcaatgatgggaaggtggatcccgccgggaggtactttgctgttgcaagtcaccaatgttctgtctc

SEQ ID NO: 253040 - DNA, 90 bp, Homo sapiens
gagatccgggaggcacccctcgctgctgctgcttctagtgctgctgctgtggctgctgcagcactctacacccccaagtgcatatgggtc

SEQ ID NO: 253041 - DNA, 83 bp, Homo sapiens
gtgataagaagcacctggatgagacatttgctacagcatcccacattaagtcaacgcctttctgagaaaagtctacagcattc

SEQ ID NO: 253042 - DNA, 121 bp, Homo sapiens
gcaaaggttgcattgatgaaattaaagatgcatgctgatggcgataagtcattaccacagcatcagaagagctaacaattgctggaatgacctttacaacttttgatcttggtgggcacga

SEQ ID NO: 253043 - DNA, 96 bp, Homo sapiens
gacactttgttattggagaaacatgcagattatatcgcatcctatggctcaaagaaagatgattatgcccccattgccgtgcggctgggcaaagta

SEQ ID NO: 253044 - DNA, 98 bp, Homo sapiens
ttaaagagacatgaaatgacaagattttaaaaaaatcccatgaggagaaggcattctaatttaggcaaatgttctgaaaaagactctgcatgggaatg

SEQ ID NO: 253045 - DNA, 100 bp, Homo sapiens
tttaatcaacatcttggcaagagtcttctggtccctgttgacgaattacatgaacgacagccttcgcaccgacgtcttcgtgcggttccagccagagagc

SEQ ID NO: 253046 - DNA, 83 bp, Homo sapiens
caggaagaatctatacacagccatgccccttccgattgggagggacaagacagtcttgcactgtttcctaggctggagtgcag

SEQ ID NO: 253047 - DNA, 51 bp, Homo sapiens
tgagaggcggatctacagacatagacttgcctcctcatgcggcagcagcac

SEQ ID NO: 253048 - DNA, 75 bp, Homo sapiens
tgccgcgccaccgagtccggaccggagactttggggcctaactaggtacatatggaaactacagtgtccagaccg

SEQ ID NO: 253049 - DNA, 83 bp, Homo sapiens
atcgactgtttgagcccggaagcgcagaagctggctggtcgtctgatgataaggaaattagttgcagagaaattgaatatccc

SEQ ID NO: 253050 - DNA, 98 bp, Homo sapiens
tactggaacttcaaaaagttctgaaaacatgttgacggagcccgtggctggtgaggccgcagagcagggccaggccgggccctgcccgcaaggacgac

SEQ ID NO: 253051 - DNA, 75 bp, Homo sapiens
ctctaagcaagttcttgatcagtatctcactctgctggcagatgatccatgtgatcttgtggctgggggacctca

SEQ ID NO: 253052 - DNA, 100 bp, Homo sapiens
accgtggtgacattgtatcattggtgacttggatgttgtgggtgatggtatgcagtgtcctccttcacctttgctttttgatccttcactaacccttgaa

SEQ ID NO: 253053 - DNA, 50 bp, Homo sapiens
cggcgatcgagaaagtgcgcaaatggtgagaagccctaccactgcaactg

SEQ ID NO: 253054 - DNA, 87 bp, Homo sapiens
gagctgaagatcaagcgcctgagaaagaagtttgcccaaaagatggagaactcctggaagccccgtcttcctcctcatgcccattgc

SEQ ID NO: 253055 - DNA, 80 bp, Homo sapiens
aacctggagaacgccaagcgcttcgccatcgacataggcttcaacggaccacaccaaaatgccatctcaaatggaacacg

SEQ ID NO: 253056 - DNA, 82 bp, Homo sapiens
gaaatttggagtgtgcgtgcgcgccgagcgcggagcgtgctttggacaccatgaattttgatgttataaagggcaagccagt

SEQ ID NO: 253057 - DNA, 50 bp, Homo sapiens
cagttcaaagatgccttttgggtatggcgtgagtcccgagaacattatcc

SEQ ID NO: 253058 - DNA, 100 bp, Homo sapiens
gggaatggtattggagacaaatatgaatgagattgttacacaaattgatgcacaaaataagctggaaaaatctgaggtgggaccatccagttgcaggaaa

SEQ ID NO: 253059 - DNA, 100 bp, Homo sapiens
ctcactgcagcctcaacttcttgtcctcaagtgatcctcccaccttagcctcctaagtagctgggaccacagtctacaggtgtatccagcagctccaaag

SEQ ID NO: 253060 - DNA, 75 bp, Homo sapiens
cgggggcgagaaggcgaaggctgcaggcgtgaggctaccggctctctgaccagttccacgacatcctcattcgaa

SEQ ID NO: 253061 - DNA, 50 bp, Homo sapiens
tgaatggagaaggttacctctacccatcaagaccatcatgcagacatcag

SEQ ID NO: 253062 - DNA, 89 bp, Homo sapiens
gctgtcgcctgcagctgctcgcctgtctccgtcggaagggagcccaagctttgcagagacaatattgactcacgcctactccagagtgg

SEQ ID NO: 253063 - DNA, 100 bp, Homo sapiens
cttgaggttcacagatgatacgtttgatccagaacttgcagcaacaatagatacttgccagaactaatacagctgatgaaatacctgaccttttctgctc

SEQ ID NO: 253064 - DNA, 100 bp, Homo sapiens
gacgcgccgcggccaggcagggaggagaccggcacccagacaggtggcgaaggcagaggatctcgcccaagaacttcaaggtgaaaatgatcatgaagac

SEQ ID NO: 253065 - DNA, 75 bp, Homo sapiens
cgcgctctggatcctcgtggccagcttggccaagatcggtactccaaagattcaggtttactcacgtcatccagc

SEQ ID NO: 253066 - DNA, 75 bp, Homo sapiens
ctgccgctcctgccggcagctccaaccatgggaggccgcgtctttctcggaggctactcacagtcgaactacaac

SEQ ID NO: 253067 - DNA, 100 bp, Homo sapiens
agccaattattgacttatatgaagaaatggggaaagtcaagaaaatagatgcttctaaatctgttgatgaaaaactggcagacctttcacttcgtatcca

SEQ ID NO: 253068 - DNA, 73 bp, Homo sapiens
tggacgagatggagttcaccgagggcgaggaggcttccgaggaggcagaggaggaggaggtgaccacaagcca

SEQ ID NO: 253069 - DNA, 110 bp, Homo sapiens
ccagaccctggagcctcagttggaagcagccgatccagcctgcggagcctgtggggcaggttgaagatgacagcgatgcagagacctatggagaagagaatgatgaacag

SEQ ID NO: 253070 - DNA, 51 bp, Homo sapiens
cgagaacccagcagccttcactaacaggactgtcctagagcttggcagtgg

SEQ ID NO: 253071 - DNA, 75 bp, Homo sapiens
gagtccagcccaggaaaatggagaggtatcgaaggatgatcgcagtgatgtggagagcagctcagaggaagaaga

SEQ ID NO: 253072 - DNA, 100 bp, Homo sapiens
tgggcgacctgcaggcagcaccggaggcccaggtctccgtgcagcccaacttccagcaggacaaggatgacaaggagtatgtgggctttgcaaccctccc

SEQ ID NO: 253073 - DNA, 90 bp, Homo sapiens
gaaaattttgagctcctgaaggtcctaggaactggaggctcaggatatcaaaaaactccccaggaatgggccccacaaactgcaagaata

SEQ ID NO: 253074 - DNA, 75 bp, Homo sapiens
cagcagtggtcttgctcttactccttttggttgaacaagcagggaagaaggagaaagggccaacccctgaagaag

SEQ ID NO: 253075 - DNA, 89 bp, Homo sapiens
tgaatctagtgtgaaagttttaatcacatcacaaggctatgaacaaatatgcaagctcagtagatgaaggcgtttctgagggcttgcct

SEQ ID NO: 253076 - DNA, 97 bp, Homo sapiens
ggggacccgcttcgcgttatcatcctggtcgcagggtttgctggttggctcccgagcagacagcaggaaagaagaagcccttcgtgtacacccaggg

SEQ ID NO: 253077 - DNA, 98 bp, Homo sapiens
gccggacatctactgggtcagcttcatcctcggcggcggtggccgctagctccaaggaagagacgagttgtactgctgtcacaggaaatggacgctgg

SEQ ID NO: 253078 - DNA, 75 bp, Homo sapiens
cgcgctcatctgctggagcccggctcaggccacagggtcaccacatacatcgcccacccatggaggcggccggcc

SEQ ID NO: 253079 - DNA, 100 bp, Homo sapiens
ctttgccttcttcaccacggccgagacgctcacggatatagtgctctcctgggcagcaggatgggtgtggaagcagtgatggcacttttggaggggaccc

SEQ ID NO: 253080 - DNA, 98 bp, Homo sapiens
aaaaatcttaaccttcaaccatctggggaaaaggcaaaaatcccatctaccgcaactctcagttcgagagtaaagggaggagattggacaggctggac

SEQ ID NO: 253081 - DNA, 98 bp, Homo sapiens
cgaagaagaaaggattcgttacagccagagattgatggctctgagagattcctctgcgaatctgtttttagctatcaagtggcatccacgcttaaaca

SEQ ID NO: 253082 - DNA, 100 bp, Homo sapiens
catcgagcctgagggaggggaaaggcgcagggttgggcccgaaggcatcctgcagaacggggctgtggacgacagtgtagccaagaccagccagttgttg

SEQ ID NO: 253083 - DNA, 50 bp, Homo sapiens
ctcagggcggctgccccgggacccgcagagaacaaatccgtcaaggccta

SEQ ID NO: 253084 - DNA, 96 bp, Homo sapiens
tttacaaccaatgtttcagccagacatcccagttaccagtgtccttgaattgatagtggcttctgtttgtcagtctcatataagaactacagctca

SEQ ID NO: 253085 - DNA, 96 bp, Homo sapiens
gtcttctcgcccgacggccacctcttccaagtggagtacgcgcaggaggccgtcaagaagggctcgaccgcgagcacgaacttccaggagccggtg

SEQ ID NO: 253086 - DNA, 100 bp, Homo sapiens
ctgcgcaaagcttgcgaggtggcgttagatgccagatatacgaaacccagaaggaactcagtacagttcccatcctcagatggcagccatgagaccaagg

SEQ ID NO: 253087 - DNA, 80 bp, Homo sapiens
ctctggagtagctgggactacagtggctgtcgctgggcgcggactccaacgggagcggcgtctctgtgctgctggagctg

SEQ ID NO: 253088 - DNA, 82 bp, Homo sapiens
agttcctcctggggaacccgttcagcacaccagtggggcagtgcctcgcgggctgacgcacgaggcacacaggaaggaggtg

SEQ ID NO: 253089 - DNA, 75 bp, Homo sapiens
gatggcgagggcgccttccatggagacgcagtccagaacacatattacataatggagccgggagacagactaggg

SEQ ID NO: 253090 - DNA, 98 bp, Homo sapiens
cgtgctggccggcgtggagagccgccagggctctatcaaggggctggtgtactccagcaacttccaggtgggaatgatggttagatgctgccgaacat

SEQ ID NO: 253091 - DNA, 100 bp, Homo sapiens
tttcttgtcaactgctcacgacagaaggcgtctcatggcgttggaataccggctctcagcggctggggaacttgctccactttccaagttctcaaggaga

SEQ ID NO: 253092 - DNA, 100 bp, Homo sapiens
aaattggaggctgaaagcatgggattttttaccaaggaagaatggttaaagggaatgacttcattacagtttcagcaagcagatggtggaaattcttcac

SEQ ID NO: 253093 - DNA, 90 bp, Homo sapiens
aagaagttgagaaaatgggagcagttttcatggatgcccctgtttctggtgctaaggtggatgttagtcatcattcaacagtggactctt

SEQ ID NO: 253094 - DNA, 127 bp, Homo sapiens
agtgaccgtgtgtcagaacaatcttgaatcatgaagctactaaccagagccggctctttctcggaatgttacgttcataacttactaaggattagtgtatattttccaaccttgaggcatgaaattc

SEQ ID NO: 253095 - DNA, 102 bp, Homo sapiens
atgtccgagcccaaggcaattgatcccaagttgtcgacgaccgacagggtggtgaaagaaacgggtatgcaggagattagaagccagtgggcatgagcgtgg

SEQ ID NO: 253096 - DNA, 100 bp, Homo sapiens
ctctccaagatgcagttttttgatgctgaggagctcctggtcgatgaagaggatgatgtttttggtgaaggttcgaaccagtgtcctaccagaacataag

SEQ ID NO: 253097 - DNA, 74 bp, Homo sapiens
aggaagcggatcgcgtggactggaagtcacactgcggcgagctgacctccgggccaaggccgtggagctggaac

SEQ ID NO: 253098 - DNA, 75 bp, Homo sapiens
tcacaatccaagttccacaatatattgactactgccacaattccgggaggcttgtggatcagaatctgaacaaaa

SEQ ID NO: 253099 - DNA, 100 bp, Homo sapiens
cacagtcaccgctgtcattgtggaatctggaggtgaactggatattgtagtgacctcaaataaagaagtaaaagttgctgctgtccgagatgccttccag

SEQ ID NO: 253100 - DNA, 98 bp, Homo sapiens
catcttctcaattggacagtacatctgtggacaaagcagtacctgaaacagaagatgtgcaggttgttgacctcctgtactggagagacattaagaag

SEQ ID NO: 253101 - DNA, 100 bp, Homo sapiens
ctgccccggtgcgcagacagagctattccagcaccagcagaggtcccgtggctgtcatcagtggtgaggaggactcagccagcccactgcaccacatcaa

SEQ ID NO: 253102 - DNA, 75 bp, Homo sapiens
ctgaggaaccagatatcttgaaaagctgccagaaaggcataatcaccagcaacacccgggacaataatacggggg

SEQ ID NO: 253103 - DNA, 73 bp, Homo sapiens
ccaaacccaagttggttggagatgtggattttgaagacccctttgctgatgcaagtaagggtgatgacctgct

SEQ ID NO: 253104 - DNA, 88 bp, Homo sapiens
ggcgtcccccgccggccacctgccgggtacgtgaacacactcctgaaactcatcccgctggtgctgggtctgcaggaacaactgcggc

SEQ ID NO: 253105 - DNA, 75 bp, Homo sapiens
gaaacttcatggggaactgcaagacaggaagagaggccgtgcccctcaggtcactcctggaagcaaggcggctct

SEQ ID NO: 253106 - DNA, 101 bp, Homo sapiens
tcatgatgaggtggccaacaagcagaccatggaggagctgaaggacctgctgaagcggccaccatgctgccactgggctcagagcccgccctgaatgagct

SEQ ID NO: 253107 - DNA, 99 bp, Homo sapiens
ccctcccgctcggccccgccagcagcactgtggaggccgtcctcgatgaaatcatgcaccaggacatcgtcccgctctgtgctgccgacatccaggacc

SEQ ID NO: 253108 - DNA, 101 bp, Homo sapiens
ggagcgtcaacagcagcaccatggtcaagctgcagtttcagctcaggccacatcaaatgtcaacccaacccagcctactacttcacagcctctaaatttgg

SEQ ID NO: 253109 - DNA, 101 bp, Homo sapiens
tgccttcttggacgcctttcagaaagtggctgacatggccaccaacacacgtggttgcactgctgtgatccatcctcatctcctaaagatgcatcctgact

SEQ ID NO: 253110 - DNA, 100 bp, Homo sapiens
ccggttcgtcgcctccttgcccgtgaccgtcgctagaactcagttgtgcgttgcggccagtcgccactgctggatcgcttacacctgagacgaactacag

SEQ ID NO: 253111 - DNA, 90 bp, Homo sapiens
catggatgatccattcagcccctgcagtatgacgccgtgcccatccagtccagcgtggtgttatgttcctgcccatccccatcaatggtg

SEQ ID NO: 253112 - DNA, 74 bp, Homo sapiens
tgcaatttgccatttatttgtaataagccaaaacctattgatgtacaagtcattacacaccacatgcagcgata

SEQ ID NO: 253113 - DNA, 100 bp, Homo sapiens
cagattcgcagtggtcgcttcttctccttggtgatggcccgctccctctccccacccccggagctggaagaaagggatgtggccgcatactcggcctcct

SEQ ID NO: 253114 - DNA, 100 bp, Homo sapiens
tttgttttcaatgacaccaagttggacgctatgctggaagaatttaagaaagatgttgttattcatgaggaccaatggattggcgagacagtactacaat

SEQ ID NO: 253115 - DNA, 101 bp, Homo sapiens
tgaaggctgtcaagtatgtggagtgttctgcacttacacaggaggaggtgcgccagtctgtaactcctgccgagccagtccagtactatttcacgctggct

SEQ ID NO: 253116 - DNA, 75 bp, Homo sapiens
ccggaggcgccgccagcacagccagactcggtgaaatacctggagtgctcagctctcacccagagaggcctgaaa

SEQ ID NO: 253117 - DNA, 90 bp, Homo sapiens
catccagccctctgaggcagactatgccgtagacatccggagtcctgctatttcaaagcggcaccatgtactacagacggctcatccctc

SEQ ID NO: 253118 - DNA, 100 bp, Homo sapiens
tataaaagtctagggcaggcatatagattttaccaaatgttgcaagaactctggagttcttatggtagtaaaatgccggaaagaaaattctgcattgaaa

SEQ ID NO: 253119 - DNA, 103 bp, Homo sapiens
gttcttgaatacattgatctggtcagcagtgatgatgaagagcctagcacctcttatactgatatttgagagggaagatctgatctcctagaattagagttgg

SEQ ID NO: 253120 - DNA, 88 bp, Homo sapiens
gcaagaactggctcaagaaatttgcctcgaaaaccaaggtccccttctgcttgttatagccccagtagtcctgtccaggttctagaag

SEQ ID NO: 253121 - DNA, 98 bp, Homo sapiens
aaggaggtctggggcatggagaataactcatcagaatcatcttttgcagattcttctgtagtttcaggagttctttggaatttatcctcatgtgatgc

SEQ ID NO: 253122 - DNA, 75 bp, Homo sapiens
cgcagtggtcgcttcttctccttgatacacatggtctacagtaagcggtcaggaaagccccgtggctatgccttc

SEQ ID NO: 253123 - DNA, 82 bp, Homo sapiens
cgccaacctgccctcctacaacatggaccgggccgcggtccagaccaacatgagagacggcactccacagaaggatgttatt

SEQ ID NO: 253124 - DNA, 98 bp, Homo sapiens
cttgactccaaaaccacgtcggatgttttaaggtcaaaatgcagatcttcgtgaaaacccttaccggcaagaccatcacccttgaggtggagcccagt

SEQ ID NO: 253125 - DNA, 82 bp, Homo sapiens
gcgccccgatgagccccgagtgcgaggagccgccgccccccctcgcaggatgatcggctgaatgtaacagaggaactaacgt

SEQ ID NO: 253126 - DNA, 83 bp, Homo sapiens
gtcgcagatcctgagacccggacagtggcagtgaaacaggctggccctgcataactcccgtttcctgagtctctgctctgagc

SEQ ID NO: 253127 - DNA, 75 bp, Homo sapiens
ccgtgctcagaaactagccagattgaagtttagctacggcaatcctgaacttcctgaagatgtccttgatgtgca

SEQ ID NO: 253128 - DNA, 75 bp, Homo sapiens
aggaggaaacagctggctaagctcatcattgttactggaactgtggctgcaccatctgtcttcatcttcccgcca

SEQ ID NO: 253129 - DNA, 96 bp, Homo sapiens
agaactcaatgtttgactatgaatgtttcgttataactgcctggaaggttagcgtcaaagaagttgagatgttagtaggcaggaagaggcggaggg

SEQ ID NO: 253130 - DNA, 75 bp, Homo sapiens
tagcgctattgaccttagctgatgaggatgaccgggaaatttatgatattgaaggatgataaagactatgcttta

SEQ ID NO: 253131 - DNA, 98 bp, Homo sapiens
tccaggaagtgaacaagtccaagaggaccttctgattagtccacagtcttcctctatagactggaatcagccattttaccaagaaagttgggtttctt

SEQ ID NO: 253132 - DNA, 75 bp, Homo sapiens
gtcgagaggaccatcctgggtgctggccctgtgctggaggttgggcccgaaggcatcctgcagaacggggctgtg

SEQ ID NO: 253133 - DNA, 97 bp, Homo sapiens
cagacgcgggatggtcgcgcgtcccctgcacagcacagaggggcagccggagagcctgggaaagacctcctgccccccgaggtctgcagtctcctga

SEQ ID NO: 253134 - DNA, 96 bp, Homo sapiens
ctggcctcacgggaacaagcaaggagtcatatatccttcatatgatccatcttagtgaagaattaggatacagtcttctcattcacaggttaaggc

SEQ ID NO: 253135 - DNA, 50 bp, Homo sapiens
ctctgaaacatggcaggctcggatgctggcatttgatgaagcaattgctg

SEQ ID NO: 253136 - DNA, 85 bp, Homo sapiens
gctgctgtcctgcgaccccaagcagggccaattcctgtccccccagcagcatggcatcgtgtgctgaaccctctgagccctctgc

SEQ ID NO: 253137 - DNA, 100 bp, Homo sapiens
agtgagggggagctggtggtgaagtttggtgagactcttccaaagggcttccttcctcggctccaccctgtggatgtaatggcggcccctgctctgtcct

SEQ ID NO: 253138 - DNA, 90 bp, Homo sapiens
gggcactgcagggtgagaggccacgtcagagctgcccaggatcaggtcatccagctgatgaacgcgatcttcagcaagaagaactttgag

SEQ ID NO: 253139 - DNA, 100 bp, Homo sapiens
ggcggggaccggcggcgctggaggagcgaggcagctgtactaggactgggaacggggtgtctgatgccatcaagtgttgcaggagaaacttcagtcttgg

SEQ ID NO: 253140 - DNA, 101 bp, Homo sapiens
cccggcgcgagaggcccgggagccgccggccaggacgcccccgagggtgtagaccgcgcccctggagctgccttgaggtgcagtgttggggatccagagcc

SEQ ID NO: 253141 - DNA, 50 bp, Homo sapiens
aaattatattttccagcccgtgtctgcagagcctggcccaactagagaat

SEQ ID NO: 253142 - DNA, 90 bp, Homo sapiens
ctaccatgggacctggcaaagtacttcagaacttttattccttccagaagcagttgtcggacaagtaaccgcaagagcttgattgtgacc

SEQ ID NO: 253143 - DNA, 82 bp, Homo sapiens
tgtggctcccgcatctgcctccctgccccagcccatcctctctaaccaagaggttgacggatatattcagacgttacgacac

SEQ ID NO: 253144 - DNA, 51 bp, Homo sapiens
aagtgtcagcgctactgccgcagttctggagagtcttggcttctgggagga

SEQ ID NO: 253145 - DNA, 75 bp, Homo sapiens
ggaactggtgccgtaggcatggcttgtgctattagtatcttactgaagtctctatgaagaagctgcagaaaattt

SEQ ID NO: 253146 - DNA, 98 bp, Homo sapiens
tgcgagcgagccgcgaaccgagcgggcggcgggcgcgcgcaccatgggggagaaacccgggaccaggtctcagcttgactatgaagttcccagggaaa

SEQ ID NO: 253147 - DNA, 75 bp, Homo sapiens
accagctctcatccactgaccttctcaaaacagaagcagatggaacccaggtgttttagctcacttggaaaggct

SEQ ID NO: 253148 - DNA, 88 bp, Homo sapiens
ggcactgagcggccgcggccatggcgtacgcctatctcttcaagtacatcataatcggcgacacagaaccatgtgtgctcagtattgc

SEQ ID NO: 253149 - DNA, 100 bp, Homo sapiens
gagagcgagctgagtggttgtgtggtcgcgtctcggaaaccggtagcgcttgcagcatggtgttttcctctgctggcacgccagaatccctggttcagcc

SEQ ID NO: 253150 - DNA, 100 bp, Homo sapiens
cggagataaattcccggaaccgcgattcggcgtgtcagacacagaatgttcagcttaacaaagaaatgacacttgccagcaaccggagcctggcagaagg

SEQ ID NO: 253151 - DNA, 75 bp, Homo sapiens
gcgacttcctggccatcgttttcttcgcctccatagctgatgtagcccagcagttccagtatgctgtgcgggtga

SEQ ID NO: 253152 - DNA, 100 bp, Homo sapiens
ttcctgctggccgtgctgctgcagatcatacatctgtcggtggcctgggagacagtttttatgaatacttactgaaagcatggttgatgtcagataaaac

SEQ ID NO: 253153 - DNA, 100 bp, Homo sapiens
ctttcccaagcctggaagaactcgtcatgctctttgtagcgtggtgcttctgttgctcacagtttgaaggatgacctctaggaagaaagtgttgctgaag

SEQ ID NO: 253154 - DNA, 101 bp, Homo sapiens
gtcggagcttggcgttgaaaaggcatgcatgtagggaataccggattcataaagagctggatcatcccagaatagttaagctgtatgattacttttcactg

SEQ ID NO: 253155 - DNA, 113 bp, Homo sapiens
tgggggccacaaatgctccttctcctggagacgcaactcaaggctcttgtcaggatggtgaagctgttcatcggaaacctgccccgggaggctacagagcaggagattcgctc

SEQ ID NO: 253156 - DNA, 74 bp, Homo sapiens
gctggccaagaagatcatcattaaggacggaggcacggttagctttatacgtctacgaatatttactgcacgta

SEQ ID NO: 253157 - DNA, 82 bp, Homo sapiens
gctcccggcgtctgcaccccggcagcgcgaggaaatgcccaaaggcgggcgctaatattgacacctgctcagaagaccagag

SEQ ID NO: 253158 - DNA, 100 bp, Homo sapiens
accgggacctgttggttgtcgcccatgatctgatccggaagatgtcacctttgatattcactgatggactccaaagaatcattaactcctggtagagaag

SEQ ID NO: 253159 - DNA, 50 bp, Homo sapiens
gtgaatcagaacaccaagctgctggtcaaggccttcttggctgatccatc

SEQ ID NO: 253160 - DNA, 100 bp, Homo sapiens
gcaggaggccacctggcagttgttgagcttctcttggctcatggggctgaccctactcatcgactcaagttggctggatctattattggcaaaggtggtc

SEQ ID NO: 253161 - DNA, 51 bp, Homo sapiens
cagggggacccgtcagtggacatgaagcatgcatatgcgctagaacttcta

SEQ ID NO: 253162 - DNA, 83 bp, Homo sapiens
ttcacagcacagttcctgggaaggtggagccaccagcctctccttgcatcaaagctaagccagaagatttatcacattttcat

SEQ ID NO: 253163 - DNA, 73 bp, Homo sapiens
acagagagaaaattgagacggagctaagagatatctgcaatgatgtactgataacggaggagatgatggatca

SEQ ID NO: 253164 - DNA, 124 bp, Homo sapiens
ccgcagcactggagctgtcctgaaggtactctcgcaggaaatgggaattctacttgtgtgggtactaggttttgacaagcttgcatcatgcgtgagtataagctagtcgttcttggctcaggag

SEQ ID NO: 253165 - DNA, 123 bp, Homo sapiens
ctggagcctcagttggaagcagccgatccagcctgcggagcctgtggggcagtgtactaatggtcacttgatgtgcgctggctgttttatccacctactagcagatgcccggctgaaggagga

SEQ ID NO: 253166 - DNA, 97 bp, Homo sapiens
gcgccgccagctgccccgccgccaaagccgggggaagcggtggcgccggcgtcactctggatgaggccagggacatggatttgattgacatactttg

SEQ ID NO: 253167 - DNA, 75 bp, Homo sapiens
atctgtgaggtctacctccctgggtactacgggccccacatggattatgaagaagctgtgctcttgctgttagaa

SEQ ID NO: 253168 - DNA, 80 bp, Homo sapiens
ggagattattgaagtagatcctgacactaaggaaatgctgaagcttttggtttgggtacccagaccccacctacctgacc

SEQ ID NO: 253169 - DNA, 101 bp, Homo sapiens
ctcctctccatggggttccccagagcccgcgcatgccatggacaatattaccaggcagaaccaattctacgatacccaagtcatcaaacaagaaaacgagt

SEQ ID NO: 253170 - DNA, 100 bp, Homo sapiens
gtgacctggcattagcactaatgatcacttacaaggacgaccaggccaagcttaagaagatcttcgaccccccggaggagctggagcggaaggtgtggga

SEQ ID NO: 253171 - DNA, 90 bp, Homo sapiens
agtgtcagagactgaggacttaaatgaagccactgattagcaatttaaagatcctctccaaggaacgccacagaagtatgatcccacttt

SEQ ID NO: 253172 - DNA, 128 bp, Homo sapiens
gggaagaacttcttcagaattagaaaggagctgcttcccaataaggaaacactgtgtcagcgtgttatgatgccgtcccgtaccaacctggctactggaatccccagtagtaaagtgaaatattcaag

SEQ ID NO: 253173 - DNA, 75 bp, Homo sapiens
gcccgttgtagccgttggggaaccgttgagaatccggtgttggatcctgaacaaaaccataacttcacagatcat

SEQ ID NO: 253174 - DNA, 75 bp, Homo sapiens
gggctgttacatgcctacccggattacggggcgctgaaagacatcgtgatcaacgcaaacccggcctcccctccc

SEQ ID NO: 253175 - DNA, 82 bp, Homo sapiens
tgcacctcggccgtcccggcgcccctggggacgccgccctcccggacaatgcagatcttcgtgaagactctgactggtaaga

SEQ ID NO: 253176 - DNA, 75 bp, Homo sapiens
cagcctcccgagtagctgtgattacagactgagggagctggccgtgcgactgggcttcgggccctgtgcagagga

SEQ ID NO: 253177 - DNA, 80 bp, Homo sapiens
gcgggagctgcggcagctgcggcctctggaaggacgcatgctgtttcttagggacacggctgacttccagatatgaccat

SEQ ID NO: 253178 - DNA, 90 bp, Homo sapiens
ggacaaggacggcctccagagtgcccagcccacggaaggccagcactttttacctcgatggaaatgtgagcagctgatcagacaaggagt

SEQ ID NO: 253179 - DNA, 98 bp, Homo sapiens
tacgactctactgcaaaggagctgatcgtttagaaagaggcaacaagaaaagactgtgaactttataaaagacacttgcaatatactgtgtcaaaatg

SEQ ID NO: 253180 - DNA, 50 bp, Homo sapiens
gtgtactgcctatgtgtgctattttgctaaacatgttgactttctagaag

SEQ ID NO: 253181 - DNA, 88 bp, Homo sapiens
cctgtttttgccaccacactccagcttggattgctcgctgtaagcagctcatctgtgaccccagctacgtaaaagatcgggtagaaaa

SEQ ID NO: 253182 - DNA, 100 bp, Homo sapiens
ccagcccctctccagctcgaaatcacaatgcctgtggaagacaagtcagaccccccagaggggtctgaggaagccgcagagccccggatggacacaccag

SEQ ID NO: 253183 - DNA, 72 bp, Homo sapiens
ttccagagcaaagagaagctttgtttgtggttgacagaggttttataggatcacattgacaaaagtaccatg

SEQ ID NO: 253184 - DNA, 100 bp, Homo sapiens
tgcaatgctgtttgccctgaacatcatgaattcccaagaaggaggacagtcattttgtttactcattcagccctgttgcaggtcccaataaactcttcat

SEQ ID NO: 253185 - DNA, 83 bp, Homo sapiens
tgctgcagaatcttataaagtattaccatgcacagtgcaaatgtgtcagaagaattggatacaaaactccctcttgatggtgg

SEQ ID NO: 253186 - DNA, 75 bp, Homo sapiens
tcttcgagacactcatataaaggacaatattcctagtattactgttttctcaatacgccagaaatgttaaatttc

SEQ ID NO: 253187 - DNA, 75 bp, Homo sapiens
aggtaatgctgctgtatcctcagttgactcattcactcaggaattgaatgatctggcacgggaccctccagcaca

SEQ ID NO: 253188 - DNA, 100 bp, Homo sapiens
ggaaaaggaggataagcaagtcgaatttttgtcttacggatggagagcaatacatcatcatctttggagaatttagcgacggcgcctgtgaaccagatcc

SEQ ID NO: 253189 - DNA, 90 bp, Homo sapiens
gcagccttagataaatacgccaagaagtcagttaagactttggatggaggcctgaatgtcattcaattagaaactgcagtaggggctgcc

SEQ ID NO: 253190 - DNA, 104 bp, Homo sapiens
cagatcttcatgtgtctcttctaagctgaataaagctgttttggaactgtcaggtacctcaaagcgtgtggatgaggtcaccattgtcaacattttgaccaacc

SEQ ID NO: 253191 - DNA, 74 bp, Homo sapiens
cccagagcacgagtagtagtcttaagacatgttcaaaagaaagctgcagaatggaaaatcaagatagatattat

SEQ ID NO: 253192 - DNA, 98 bp, Homo sapiens
aaaaattacctctttatcttgcatgaacatcttaattttcagggctacagaactggctacccttatcgataccctgctctgagagagaagtctaaaaa

SEQ ID NO: 253193 - DNA, 50 bp, Homo sapiens
cttgaaaccataatgctacaaactctagaatcttgtggaagaagaatgaa

SEQ ID NO: 253194 - DNA, 100 bp, Homo sapiens
aaggcacagcggctgtatccgacgccgcgagttcgcggattttttatcaagcagaaatgcatcgaacaacgagaatcaagatcactgagctaaatcccca

SEQ ID NO: 253195 - DNA, 100 bp, Homo sapiens
cggccagtgcgggtggctggctttgccattagcgggggcctttcctgaggacggcgtacggagtgtgggtcatcatcagatttgaaatatttaaagtgga

SEQ ID NO: 253196 - DNA, 75 bp, Homo sapiens
gtggcgcccctccaaccgtcctaacgccgggccggcagcaaggaatatgagggaaggcaccattggagatatggc

SEQ ID NO: 253197 - DNA, 83 bp, Homo sapiens
cctgaggcttggataagtggggcagaggtgtccaggacctgcctgctcacggttcgtgtcctgcaggcccatcgcctaccctc

SEQ ID NO: 253198 - DNA, 90 bp, Homo sapiens
aggatgcaaactcgtgggaaagatggtggttgctatttcaggcccagacataatcaaatccatgtgaagaaaagagatttcttcctgcgt

SEQ ID NO: 253199 - DNA, 83 bp, Homo sapiens
gcgcaagggagctggcgactgcataggaggacccagctggcgggaccgcgagggtctgggaagatccgaggtatctcctggag

SEQ ID NO: 253200 - DNA, 100 bp, Homo sapiens
gatctacactttctcaagcactgtgatcttcaaatcttatgttcctgaggaagaattgaaggcagcagaaatagatgaagagcacgtggaggatgacggg

SEQ ID NO: 253201 - DNA, 49 bp, Homo sapiens
gaaacatatgttacgatagcccggagctccctgggtcctcagcagtgag

SEQ ID NO: 253202 - DNA, 100 bp, Homo sapiens
gaactgttgctggcctgaatacacctgcatgaggtggctgaagactccagttgcattactctactgactggcagagacaggagaggtagatgtccacgcc

SEQ ID NO: 253203 - DNA, 98 bp, Homo sapiens
ggcacccggacctcgtcaggccgctgcagatgaccattccagagtgtgaacatggctacgcctcttcattcccgtccatgccgagcccccgactgcag

SEQ ID NO: 253204 - DNA, 97 bp, Homo sapiens
gagagagggaaggacggggcctggcccccgggactccctgtgccttgcttggagctgacgccgacggatggcaaggctgggacttggaatgtggagt

SEQ ID NO: 253205 - DNA, 75 bp, Homo sapiens
gtaactaacagtacatctttttctaagccactacttccttcattggactgcaaggtatttctgtttggaaaagta

SEQ ID NO: 253206 - DNA, 75 bp, Homo sapiens
tcgaggtcaacacccgccgagcacaggctgacctggcctatcagcttcaggtcaagtcagaagaagtctttgatg

SEQ ID NO: 253207 - DNA, 95 bp, Homo sapiens
cggccagtctcttccgctggcggcatcagaacattgatgatggcacctcagatcgcccctacagccatgctctggtggctggaattgaccgctac

SEQ ID NO: 253208 - DNA, 75 bp, Homo sapiens
cctgtacagtggatggaatctgctttgttgggagtgatggatggacaggacatggatttgattgacatactttgg

SEQ ID NO: 253209 - DNA, 83 bp, Homo sapiens
caagagtccacaaagggacctgatgaagcgaagatcaaggttggtgttcgaggaagagacattgttgttcttggtgtggagaa

SEQ ID NO: 253210 - DNA, 75 bp, Homo sapiens
tctccactttcgccagcccgtgccgcgagcgcggcctgcaggaggctgctctttggcgtaaattgcaatcgatta

SEQ ID NO: 253211 - DNA, 48 bp, Homo sapiens
ggcccccaaggggcgggcgctgtgcattagtgccagcagtagttccca

SEQ ID NO: 253212 - DNA, 100 bp, Homo sapiens
atggactgaagtatccagcgctcattgggaatttagttaaggaaaacatttaaagttgatgatatgttatcaaaagtagagaaaatgaaaggagagcaag

SEQ ID NO: 253213 - DNA, 99 bp, Homo sapiens
gggtaacaagatggcgaccgagacggtggagctccataagctaaagatctgactgcagccatgagcagcaatgagtgcttcaagtgtggacgatctggc

SEQ ID NO: 253214 - DNA, 73 bp, Homo sapiens
aacttcaaaggggaaagcaaggccaaagacagggagaaggctcccagccaacctctgataaaccctcccagcg

SEQ ID NO: 253215 - DNA, 75 bp, Homo sapiens
gtggcctcttggacattacatctttcttggctctttttgacccagttggccacggacagagcgaaggggagagga

SEQ ID NO: 253216 - DNA, 82 bp, Homo sapiens
gagcacccgtataaacctgcctgtgtgatgcattacaagtctaaagaaggtgcatttattgtcagagattcaagacatttag

SEQ ID NO: 253217 - DNA, 73 bp, Homo sapiens
tcgtcggctggcggagcggcttgttgcccccaagtttcctggcagtgtgtgatactgaggaggtgagcttgtt

SEQ ID NO: 253218 - DNA, 50 bp, Homo sapiens
gatccgcgaccaggacaggaacacgaggtcagcccaaggctgccccctcg

SEQ ID NO: 253219 - DNA, 100 bp, Homo sapiens
aggctgggagcatccccttagcagcagcctctgcaggttcaggagaagtggcacctggtggaggacctgtcgcgactgctgccggagccaggcccgagcg

SEQ ID NO: 253220 - DNA, 90 bp, Homo sapiens
aagagctatcaggggaagatatgcatcagttccatcgagccattactacaggatcccctaacaacagtgagagagcaatgcgagcagttg

SEQ ID NO: 253221 - DNA, 75 bp, Homo sapiens
agctggaatgcatccaagagaatccctcaacatgctggcagacttctgcgttatgacccggctgctgggctacgt

SEQ ID NO: 253222 - DNA, 82 bp, Homo sapiens
atttccccagagcgtcttgatccttttgcagatggggatggactatttgggttctcggcaatacgttcaccgggacttggca

SEQ ID NO: 253223 - DNA, 100 bp, Homo sapiens
gggaactccaagacagaatggcccgaggcctggacactctctgaggacatctctgcaaaggccccagcggcccagctatttccttcgtgctaccatcagc

SEQ ID NO: 253224 - DNA, 100 bp, Homo sapiens
cattggtctaaagtctttccaaaaggtcaaggttcacaagcacccgccgaggcccgagtaccagtctccgtttctgcagagcgcccagttcctcttcggc

SEQ ID NO: 253225 - DNA, 75 bp, Homo sapiens
gacaagccccgatatctgatgggggttgggaagaacctctctatccagggcctccgctggtggctacagtggctg

SEQ ID NO: 253226 - DNA, 80 bp, Homo sapiens
agtaccggctgacctcgctgtacgccgagcacccaggcgactgcctcatcttcaaggaggaagaacgtgcaaaacgtgag

SEQ ID NO: 253227 - DNA, 98 bp, Homo sapiens
agaagcacttaaatactcatctactaggcaagcatggagttggcaccccaaaagaaaggttgaaatcacaaagattagacacctttttagataggtgt

SEQ ID NO: 253228 - DNA, 74 bp, Homo sapiens
caccagacctgggccagatactttgtgaagttcaaggatggcccagtccctgcccatgaaccatcccaccgcta

SEQ ID NO: 253229 - DNA, 97 bp, Homo sapiens
cctgcgctaccttgatgtcagctggattttctgccgtctcttggcaaaaatggcaaataatgatgctgttctgaagagactggagcagaagggtgca

SEQ ID NO: 253230 - DNA, 123 bp, Homo sapiens
cgaggcggaagaccgcgcgcagggcctgcagcgggagctggacggcgagcgcgagcggcgcgagaaaggtgaggtggctttgaccccgggttgcccggccagcacgaccgaggaggtggctgg

SEQ ID NO: 253231 - DNA, 75 bp, Homo sapiens
cgacgctgctgggtccgctgagcggggcgacccgagaaaacctacagagatttccgattgcaaggggtcctggac

SEQ ID NO: 253232 - DNA, 100 bp, Homo sapiens
aggtgatagacttcgggccttgaaaagcagaagacaatccaaaacaaacgctattcctctcactgccaccatggcaactgcaccatacaactactcttac

SEQ ID NO: 253233 - DNA, 83 bp, Homo sapiens
cagaagatggtgcagaagaaaccagccgaacttcagggtttccaccgttcgttcaaggtcgcaatggaagaagagatcgccgc

SEQ ID NO: 253234 - DNA, 99 bp, Homo sapiens
tgagagagagctattagagattgtgaagaagaatttcgatctccgccctggggtcattgtcagggtaatgatggtggcaaagaaattcctggatgctgg

SEQ ID NO: 253235 - DNA, 75 bp, Homo sapiens
tggcattgacatttaattttagggtcctttatatagaagggagagtagaaaatgtatggagatctagatgtctta

SEQ ID NO: 253236 - DNA, 118 bp, Homo sapiens
tgggaaacagcatcggccgtcgacatgatggagttgtacaacaggttacctcgagctgaagtgagcagatagccatgtgtgagcctgaatttggcaatgacaaggccagggagccgag

SEQ ID NO: 253237 - DNA, 100 bp, Homo sapiens
acccacctgctctttagcctgggagctgtgtgtctggacaggcaatctgaaagcaaatcctgtttagatgcaggcgaaggttcctggtgacccaggctct

SEQ ID NO: 253238 - DNA, 74 bp, Homo sapiens
agtccctagggctcagggagcaggagcttcaggttgtccgagcatctgggaatgctcttacagatggaaggtgg

SEQ ID NO: 253239 - DNA, 100 bp, Homo sapiens
cgagagatgtattcagtggaggaagctgtctcttgcatggcaccaagaatgttaccaattcaagcagtttaagattgccaagacaaaatagtgatggtgg

SEQ ID NO: 253240 - DNA, 107 bp, Homo sapiens
cctgtgtctcctacccaaggacagggggacagggctctgtctcgcacttcccagaggaggataatttgagtgagtcctcttctgagagctttctctggagtgatgat

SEQ ID NO: 253241 - DNA, 109 bp, Homo sapiens
tgaaacaaagacacaggcaattgtatgtcagcagcttggcatttataagacgctgtttggcatatcgaaaagaagatcgatttgatgtgcaccagctggcaaatgaccc

SEQ ID NO: 253242 - DNA, 95 bp, Homo sapiens
cttgtttctggatgattctaagagattttgtggaagtataatactttgtcattatgagatgtcgtctctcggtgcctcctttgtgcaaattaaat

SEQ ID NO: 253243 - DNA, 90 bp, Homo sapiens
ctcagttggaagcagccgatccagcctgcggagcctgtggggcaggctacagagtgcggtggcgccagcacagaactctgctcaatgtcc

SEQ ID NO: 253244 - DNA, 75 bp, Homo sapiens
cctgaagaaggtcagtgtgcttgcttggagatcaggacgcaaagcattttgaaagcgaagcagaagccgtagaat

SEQ ID NO: 253245 - DNA, 73 bp, Homo sapiens
gataaaaggcttcattgcgtgttttgctataggaattctctgctcactgctgaaatcatgagtggaggatctc

SEQ ID NO: 253246 - DNA, 100 bp, Homo sapiens
cttaaatacttgctttactggaaagacccagaatatgccaagtatctaaatctgcgctcctcagaccaccggcaggtgaacagcctgatgcagaccgagg

SEQ ID NO: 253247 - DNA, 80 bp, Homo sapiens
aaagaacacatccatattggggagatgaagcaggctggagcacagtggcatgatctcggctaactgcaacctctgcctgc

SEQ ID NO: 253248 - DNA, 90 bp, Homo sapiens
tgcagcccgaccagtccaagagccggcggcatgacgattaacaagcacaagccctggctggagcccacctaccacggcatagtcacagag

SEQ ID NO: 253249 - DNA, 82 bp, Homo sapiens
cgggggccgctctgggatcccggccaccagcaattgtccgatccagtccttctgtggaacttctgaacatcttttattagtg

SEQ ID NO: 253250 - DNA, 100 bp, Homo sapiens
cgcagtcccgaagagtgtaagatgttcgcctgcgccaagctcgcctgcaccccctctctgatccgagagcagaatttacaggacattaagacggctggcc

SEQ ID NO: 253251 - DNA, 112 bp, Homo sapiens
cacgttgacgtcaactggcaggacagcgaggggaacacagccctaatcacagctgcacaggcagtgaaagctggtggaatgcgaattgtgcagaaacacccacatacaggag

SEQ ID NO: 253252 - DNA, 98 bp, Homo sapiens
ggctgaagaggaaataaaaacagaacaggaggtggtagagggcatggatatctctactcgctccaaagccccttcatgaataagttttttccagccag

SEQ ID NO: 253253 - DNA, 51 bp, Homo sapiens
acagaccaacctgtcagtgctgcaagagatctattgggaaactgattataa

SEQ ID NO: 253254 - DNA, 75 bp, Homo sapiens
ttagtcctctctcacctgatgtgcctatgcctttgaagaagatggtggagagaattcgcaagttccagattctca

SEQ ID NO: 253255 - DNA, 83 bp, Homo sapiens
gacagtggcggcggcgccatggcagggcttgcagagatgccctgtatccaagcccaatatgggacaccagcaccgagtccggg

SEQ ID NO: 253256 - DNA, 110 bp, Homo sapiens
ctcgaggtgctggctgtggggatggtgctactggtggaagaacgtcaagtctgagttggagatggcccaggaagacctgtccatgacccagaaggataaatttatgctcc

SEQ ID NO: 253257 - DNA, 75 bp, Homo sapiens
gcctgggactgtcctgggccggcatgcttctggactatttccagatcaggatcctcatgaccagccaaagagaag

SEQ ID NO: 253258 - DNA, 98 bp, Homo sapiens
ccagtggcagtttgattttggtctccgcgtcacgggataagactcttcgcatctgggacctgaataaacacggtaaagtcagtgataaatcttttgtt

SEQ ID NO: 253259 - DNA, 131 bp, Homo sapiens
gcggtctgacatcgcgacgctgctcaaaacctcgctccggaaaggggacacctggacaacataacgatgcacggatgaaccttgccattgctctgactgctgccaggtatggggctgccacagccaattac

SEQ ID NO: 253260 - DNA, 100 bp, Homo sapiens
gatcactgaactcacggcaaatgaagaattgaccgggactgacggtgccttggtaaatgatgaaggatgctccagaccttgtatgattacttctggtggg

SEQ ID NO: 253261 - DNA, 95 bp, Homo sapiens
catcctggactatggagtggaggaggacctgagccccgaggaggcagagcacaaggagatggaggtgccgacccccacatcctggcaaaagagcg

SEQ ID NO: 253262 - DNA, 100 bp, Homo sapiens
tgctgacgcttgatgagaaggacccacggcgtctgttcgaaggtggtgttcccactgatgaagagcaggcgactgggttggagagggagatcatgctggc

SEQ ID NO: 253263 - DNA, 48 bp, Homo sapiens
ttccagacagcagagagtgagaacagggagagaaatacatcgatctga

SEQ ID NO: 253264 - DNA, 100 bp, Homo sapiens
gacagtgtgtactctggcgtgcaacctggaattggaacggaggaggcaagtgaggcctatctggttggcctttttgaagacaccaacctgtgtgctatcc

SEQ ID NO: 253265 - DNA, 75 bp, Homo sapiens
catgcgcgggagggcgccgcggggcagccgccgctcctccgggcaatcccacagagtattgatgaggaaactgaa

SEQ ID NO: 253266 - DNA, 74 bp, Homo sapiens
cccttctgcctgatggcacattcagctcctgtaagaagagagattctgaggataagaactgggcccttaaagaa

SEQ ID NO: 253267 - DNA, 155 bp, Homo sapiens
agcctgtgcaggaggagctctcggtcctggccgcgattttctgcaggccccacgagtgggaggtgctgagccgctcagcttagaccatgctcagcctccaagcagccttgtcatcgacaaagaatctgaagtttacaagatgcttcaggagaaac

SEQ ID NO: 253268 - DNA, 75 bp, Homo sapiens
ttggaatattggtgggccagcaatcctcagacgcctcacttaggacaaaatctacctgttactcgtattttggac

SEQ ID NO: 253269 - DNA, 115 bp, Homo sapiens
cttgtggtgcggcctcaccatacaggaacagggcagacgttagcgtgagtgatcactctcaatcccggagtccgatgggtggtccttttattcctgctgctcctgtcaaaactgc

SEQ ID NO: 253270 - DNA, 100 bp, Homo sapiens
ttttttccttcttccttcccctcctcgccgccaccgcccaggaccgccggccgggggacgagctcggagcagcagccagaccaggtgataggtttgatcg

SEQ ID NO: 253271 - DNA, 75 bp, Homo sapiens
gcgaggaggcgcgggaggtgttcgagaacgaccccgagacgaacccagtgacttgattgtaaaaatttacagagc

SEQ ID NO: 253272 - DNA, 75 bp, Homo sapiens
caaagtacaggaggccaacatccatcagaaatctctgcccctgttagaaaatcaaatcaaggagactcaccagag

SEQ ID NO: 253273 - DNA, 98 bp, Homo sapiens
gcgcctgatgggtcgaggcggacgcgcggctgcgtcaggtacggaaaaaggaccagatcaatattgaaacaaagaataaaactgttcgttttatagga

SEQ ID NO: 253274 - DNA, 75 bp, Homo sapiens
ctaccgggtgtgtctccatcccctggcagaatgaggatggacaaccggaaattttctacacattttggaattcag

SEQ ID NO: 253275 - DNA, 75 bp, Homo sapiens
cagctgcagtctaatagtaacacagagcggagctccctgggtcctcagcagtgaggctggcctccctgcgtgacc

SEQ ID NO: 253276 - DNA, 74 bp, Homo sapiens
gcgcctgcagcagatccgagagattatgtttgagaccttcaacaccccggccatgtacgtggccatccaggccg

SEQ ID NO: 253277 - DNA, 83 bp, Homo sapiens
cagctgggccgccttcaacatcatagaagtgatgagtgcctccaagttcaccttcaaggtaactaggatttctacctcaaccg

SEQ ID NO: 253278 - DNA, 100 bp, Homo sapiens
agtaattcttgaacctcccaactatggcattgtcacagacaggtgatttggcttctgcacagttaggaggagcaccaaaccgatgggaggttttgtcagc

SEQ ID NO: 253279 - DNA, 75 bp, Homo sapiens
ctcgactcttggcgccaccgcctcatgcactgtgtagcttctaatcctacgaggacaccatcagccaattactgc

SEQ ID NO: 253280 - DNA, 75 bp, Homo sapiens
cacagctgtggacgcaggagctgagaggtcctcatgctgataccgccagtggatgccagaatttgcagtgtggtt

SEQ ID NO: 253281 - DNA, 75 bp, Homo sapiens
ctaaagtctgagagagggaagtcgcctctgtgctcatttgaaagaagccaacactaaaccacaaatatacaacaa

SEQ ID NO: 253282 - DNA, 100 bp, Homo sapiens
cctgtatgcatggtgtggggttggtgtgattagcttcgcagtctggaaagctttaggagttcacagtcttgctgatgaccgtatggcactggtgtcaggc

SEQ ID NO: 253283 - DNA, 98 bp, Homo sapiens
gaagctgaaaggacctttcactccctacttttggccagggccttctgtgccacctgccaagaccagcagggggggccctcagcctcttggccttgaac

SEQ ID NO: 253284 - DNA, 75 bp, Homo sapiens
acggtgacacgcttccctggattggtatatttgccttccctccatgatctccaacactatccgataaagtagaag

SEQ ID NO: 253285 - DNA, 80 bp, Homo sapiens
ctgaaagctgaaattgagaagctttgtgagaagggcagaaggatgaagcctgctgggagcgtgaatgacatggccctgga

SEQ ID NO: 253286 - DNA, 100 bp, Homo sapiens
taagaaacagcctctgcatcagtttgtacaaagaccacttttcccactacctgcagccttttatcacccagcctggagtactcgggtactttgagttcag

SEQ ID NO: 253287 - DNA, 75 bp, Homo sapiens
agattctggaaactgtacattgaagcagagggggtccactggacggggcctgagctacaacttcacccacctgga

SEQ ID NO: 253288 - DNA, 75 bp, Homo sapiens
aagagggaaggacggttagtcagagccctaatttgtttagaactgtaatatgcacagttaaaacaacttgtcctc

SEQ ID NO: 253289 - DNA, 100 bp, Homo sapiens
gccaagtgaaaggcactatcgagattggaaccacagaaggtctgttaatggagtataccggattggactctatgctcttaaagacatgccagctgggact

SEQ ID NO: 253290 - DNA, 74 bp, Homo sapiens
tgcaacatctgcaaggtccgcttcaccaggtggtcaatcacacctctcatgtacccagcctcctttgtgttcaa

SEQ ID NO: 253291 - DNA, 60 bp, Homo sapiens
cctcattctgcacgacgatgaggtgacagtcacgatctactggaagagacccaaagaaaa

SEQ ID NO: 253292 - DNA, 95 bp, Homo sapiens
ggggaagtacgacatgatgatggatgtgtggggaggagagaacctagatatccttggaacagaagatcttattgtggaagtgacttccaatgatg

SEQ ID NO: 253293 - DNA, 50 bp, Homo sapiens
ccatccagatgaacgtggccgaggatctcgaggacctggaagaagcagag

SEQ ID NO: 253294 - DNA, 75 bp, Homo sapiens
ctcaaacccctcagacaatgaattcacaacctcaaacccgttctccggtccccagtctatgtgaggatctcctgt

SEQ ID NO: 253295 - DNA, 96 bp, Homo sapiens
gcctgtttccctgtagcagctccttattgctggagaaggagaaaagtgcccaagatcctttcagtgaaaccttctaagcccctttgtagcgttcaa

SEQ ID NO: 253296 - DNA, 83 bp, Homo sapiens
cgcccagcgtggggccctagccggcgtcccctgcctccagaacgcggaccaagaatcgccttcagccctgtctggtgcatcct

SEQ ID NO: 253297 - DNA, 100 bp, Homo sapiens
aggaaggatgagaatagctactgaagcatccagggcattgtggatgcctaccgccaagccctgccccaagttcgcctctatggccctaccaactttgcac

SEQ ID NO: 253298 - DNA, 50 bp, Homo sapiens
gaaagacatggagattctcttaaaaagtgaaaaatgccatggccttgttt

SEQ ID NO: 253299 - DNA, 83 bp, Homo sapiens
ctgcttcccaatcccactgatgaggatcagcccatggttttgctgttactgctcagtgtagtcacaccttgaataagaaatgg

SEQ ID NO: 253300 - DNA, 96 bp, Homo sapiens
tccgccatgctccaaacaacttggcctcagggctgcagagagtacagcaacttgcgaaaaacacaagatacttcagacaaagactgcaggaaatgg

SEQ ID NO: 253301 - DNA, 73 bp, Homo sapiens
ctcaatggaagccttagtgtcaaggcaacacaaaaagtacctggaccccagaagccaattcccgggcctctag

SEQ ID NO: 253302 - DNA, 75 bp, Homo sapiens
cagaagtggggaagacttttttcaaaaggtcagggaagtcaaagatgcatccctgagttcttcctagcaggcaag

SEQ ID NO: 253303 - DNA, 100 bp, Homo sapiens
tcctttttggaaccaacaatagcagctccatttctggagtctgggtcttccgaggccaggagcttgcctttccgtcttactactttgaccgcgatgatgt

SEQ ID NO: 253304 - DNA, 100 bp, Homo sapiens
aatgaggaccagggagggaaatatgtcatgtatcccatagctgtgagtggcgatcacgagaacaataaggcttacatcaaaatctatcaaggagaagaac

SEQ ID NO: 253305 - DNA, 74 bp, Homo sapiens
aaaaagttcaaaaactgaaggactctgaagctgagcttttatcaaaatacaactcaaacctagctactccaata

SEQ ID NO: 253306 - DNA, 74 bp, Homo sapiens
ttgaaaaacagtattccaaagaactcggagatgcctggaatacagtaaggctaggcagctggaagagaaagacc

SEQ ID NO: 253307 - DNA, 87 bp, Homo sapiens
gccacttcaaaatcagacctctgtggcagcattttttccagaacacaaaagatactagagtaaaaggatggtttcttctggacaatt

SEQ ID NO: 253308 - DNA, 100 bp, Homo sapiens
ctggccgtgtcccccgccaactctgacctggccaattctgacgccctcaaggtcgccaaggaggtggacccccaggatcctgcagctccaccaaagaaac

SEQ ID NO: 253309 - DNA, 75 bp, Homo sapiens
ggggacaccacctcccaggacgactgtgtcagcaaagagcgcagctcctccagtactatactggcaattgctgga

SEQ ID NO: 253310 - DNA, 100 bp, Homo sapiens
ccgacttagtggggctgcagtatcaactcgagggaggttcatgacaactgaggaaaaagccaaagtgggaccaggatgcggcattccaaaagaactcact

SEQ ID NO: 253311 - DNA, 80 bp, Homo sapiens
tccccgcgcggcccgggcctggcgccctgaggggaagagcggcccggcccgagtgtctgtgtttcactgatggcaagact

SEQ ID NO: 253312 - DNA, 101 bp, Homo sapiens
cggggtgatggaacaacaactggtcaattcaggatcacgcagatttgcgaagccatttcttcacagttgggatgaagcttgagacagtgaatatgtgcgag

SEQ ID NO: 253313 - DNA, 74 bp, Homo sapiens
tcagatgctgccagggtccctgaagagggaagacacgcggaaacaggacacacacctcctctacgtactggcag

SEQ ID NO: 253314 - DNA, 100 bp, Homo sapiens
ctctcataagccaggtcttagaggctcccggagtgtatgtctttggagaacttctggagctggccaacgtgcaggagccccatgcaatcattcgtcatac

SEQ ID NO: 253315 - DNA, 120 bp, Homo sapiens
cagcactgccaaatagcagaagaataccatgaggtcaaaaaggaaatcaccctgcttgagcaaaggaaatctgagtgggacatacttttgaaggatgtgcaatgttcaatcataagtgtg

SEQ ID NO: 253316 - DNA, 90 bp, Homo sapiens
atttaccaggtgtcctacttctcatttaagctactcaagaaagagtgcccaattccaaatgtacagtattctgacaagtccctgtacacc

SEQ ID NO: 253317 - DNA, 75 bp, Homo sapiens
ggcagacggcgacagtggcggcggcgccatggcagggcttgcaggtgtcgtgaaaactacccctaaaagccaaaa

SEQ ID NO: 253318 - DNA, 90 bp, Homo sapiens
ggtgtaatagatgtaatcacaaagacatggaggtgaaaggtgtagcagtcactcggcctacacccacagcatcgaccttgtgaacccagc

SEQ ID NO: 253319 - DNA, 82 bp, Homo sapiens
gcagcacttggagcgcagaaccggccgcgcccggttgaagaagcctcagcggaggcgatacggcctcctcgccaacactgag

SEQ ID NO: 253320 - DNA, 110 bp, Homo sapiens
cgctagtgatcctttgcaccctgcttggagacggacttgcttccgcaaagaacagtctgaacttgatcaagatttggatgatgttgaagaagtagaagaagaggaaactg

SEQ ID NO: 253321 - DNA, 97 bp, Homo sapiens
agagtctggcaaagagaatctgcaaagacctcgagattgagaatttatcacaagttgatggtcctcaagtggaagagcaacttctttcaaccacagt

SEQ ID NO: 253322 - DNA, 100 bp, Homo sapiens
cagttggaattgaagaatattcccaagtccttcacccgggttgactatagtcaatggggccaatggagccaagtgtatggaaacccacaacagtatggac

SEQ ID NO: 253323 - DNA, 80 bp, Homo sapiens
aggcccaaaggggaagcctagcggagctcagtgtggcagctgctggcctctgggccgagaatagtgacagtggtacagga

SEQ ID NO: 253324 - DNA, 90 bp, Homo sapiens
ctgctgggggccctcgctctgaccaccgtgatgagcccctgtggaggtgaagacattgtgggagctcttgtccctggcaaagcgaaagcg

SEQ ID NO: 253325 - DNA, 98 bp, Homo sapiens
gcgtggctggaagacatggccactccagtcggtgttgagcacggcgagcagtctcaggcctttagtgatgatgggaagacactgatcaaggtggcaga

SEQ ID NO: 253326 - DNA, 82 bp, Homo sapiens
tcagggcagccctggaggcttactgcaagaagtatgagcagctcaagacctgcctagagctggaacgttacctccagagcga

SEQ ID NO: 253327 - DNA, 100 bp, Homo sapiens
tgatgatgtggaggttaacagctatctttctgcagagatcctacaagaatccaggatgatgatcccagattgccagcgcaggttggaagccgcatatttg

SEQ ID NO: 253328 - DNA, 48 bp, Homo sapiens
gccaggctctctggaggccaggagatgctctcgtgctcattcccccat

SEQ ID NO: 253329 - DNA, 82 bp, Homo sapiens
aaggaatctgcttttcaagtatgccaccaacagtgaagaggagtacttgattcttcagaaaacctccaaagtagatgtggac

SEQ ID NO: 253330 - DNA, 90 bp, Homo sapiens
caggttcaaatgagcgagaggaacatttggctaaaatatttggagcatggggaagtgattgactgtgtgcaggagctgagccactccgtg

SEQ ID NO: 253331 - DNA, 100 bp, Homo sapiens
agttgtggtcacaggagctaatacaggtatcgggaaggagacagccaaagagctggctcagagagctgctcctgctaaggccaagccggctgaagctcct

SEQ ID NO: 253332 - DNA, 96 bp, Homo sapiens
gagatggggaccgccctggacatcaagattaaaagagcgaataaagtttatcacgccgggtttggtcagatgaagactgggtggagaagtttgctg

SEQ ID NO: 253333 - DNA, 96 bp, Homo sapiens
caattactggatggaatgatattccaggttattaacacggggatcaaagtctggtgtagaaataacagcggtgaagagtttgactgtgctttccgg

SEQ ID NO: 253334 - DNA, 74 bp, Homo sapiens
aacgaagagaccacctgtccttcgagcagtgagggtcgctgtctgcccattgatagaggccagattgtcttgga

SEQ ID NO: 253335 - DNA, 100 bp, Homo sapiens
cagatgtggtttccttattggagcaagggaaagaaccctggctggggaaaagggaagtgaaaagagatctgttttcagtcatcttgcagctgtggcacac

SEQ ID NO: 253336 - DNA, 75 bp, Homo sapiens
ggcggcggagcagcgggcggaggtggaccggatgctcaggaaatgggtcctgatgaatatgaagagatggaagaa

SEQ ID NO: 253337 - DNA, 75 bp, Homo sapiens
tgctttctctcgatgaggataacatccctccagaagatgagaagatgcaaccagttttgccattttccaagtcac

SEQ ID NO: 253338 - DNA, 100 bp, Homo sapiens
gtgaagattgctcctggagcagttgtatgtgtagaaagtgaaatcagaggagatgtaactatcgctgcagaaccttggcctgaaaatgctacattatatc

SEQ ID NO: 253339 - DNA, 51 bp, Homo sapiens
gagacaacaccgagtatgagaaggggaaggacgcaccctgttatgaatctg

SEQ ID NO: 253340 - DNA, 100 bp, Homo sapiens
ggtggtggcataggttatgaagctaatcctggcgttccaccagcaaccatgagtggttccatgatgggaagtgacatgctcagcgatgagttgaaccagc

SEQ ID NO: 253341 - DNA, 82 bp, Homo sapiens
cccaccactgcagccatgatctccttaacggacacgcagaacaatgcagatcttcgtgaagactctgactggtaagaccatc

SEQ ID NO: 253342 - DNA, 90 bp, Homo sapiens
ccgaagtaccgacccgagttatgcccaccctccaactttgcgacggaaatgtgtcatcgaaagccagggtcaagcgattcccctgcctca

SEQ ID NO: 253343 - DNA, 117 bp, Homo sapiens
cggacgcgcagcatggcggtggaggacgaggggctccgggtcttccagagcgtgaagatcaagatcggtttggtgcacctcgatttggaggaagtagggcagggcccttatctggaa

SEQ ID NO: 253344 - DNA, 118 bp, Homo sapiens
cattggagaaaagcgaaggattgtggtcccgcctcacctggggtatggagaggaaggaagagaaatgcactcggtgatggaaagagagccactattctgaagaacacttggccaaagg

SEQ ID NO: 253345 - DNA, 98 bp, Homo sapiens
ggtgaccgcgcgactcggcgcccgcccgcgcatttaaatcaaacggtattgagatggattgggttatgaaacataatggtccaaatgacgctagtgat

SEQ ID NO: 253346 - DNA, 83 bp, Homo sapiens
ggaggaggagctcagggctgagcttaccaagcggagctggagtttgttcagatcatcatcatcgtggtggtgatgatggtgat

SEQ ID NO: 253347 - DNA, 96 bp, Homo sapiens
catcaaaaatggaaggttggcgaaattgagtttgaagggcttatgaggactctggacaacttggtgaccaagtcagccatcggggtgctctaactg

SEQ ID NO: 253348 - DNA, 97 bp, Homo sapiens
gagaagttgttactactatacctaatgtacaggtggatcatctgaatctcctgaaacagtttgaacacctggaccctcagaaccagcatacattcga

SEQ ID NO: 253349 - DNA, 110 bp, Homo sapiens
ctttctgctgctgaagtaatgcaatggtctcaatctctggaaaaacttcttgccaaccaaaccatcactggtgcaagctatatttaacggagatcctgatgaagttcgag

SEQ ID NO: 253350 - DNA, 96 bp, Homo sapiens
gctcgtgctacctgccctggccctgctcagcgccagcggcactggctccgccgcccaagtgtaaacaggaacatcgataagtagtgtaaaaacttg

SEQ ID NO: 253351 - DNA, 90 bp, Homo sapiens
agaattatgatcaacttcaaccctcacttcgatttggaggacagagactgcaagttgtgggctgcacactgcagaaagatacagctgaaa

SEQ ID NO: 253352 - DNA, 90 bp, Homo sapiens
tgctcaccatgtggtttggggagtctgaggccaatgtcagagaaatctttgacaagccaggtgactttatacacactttgggagatgcac

SEQ ID NO: 253353 - DNA, 90 bp, Homo sapiens
ctctgtgggtcccgcgaggagactctcgggctttgaggaagatgatccctatgatcttgaagatgtttctgcacagaaatgagggaaata

SEQ ID NO: 253354 - DNA, 83 bp, Homo sapiens
actgagaccgtcttcattgtggagatctccctgacatgcaagaacagggtccagacaatgcagatcttcgtgaagactctgac

SEQ ID NO: 253355 - DNA, 82 bp, Homo sapiens
gtggttttgacaacatcgacatcaagtcggccggggatttaggaagctcttcgtgggcggtcttgactggagcacgacccaa

SEQ ID NO: 253356 - DNA, 100 bp, Homo sapiens
aagaaacctagcaacaaaaagaaagctgcgttaatgtttgcaaatgcagaggaagaatttttctatgagatggcccactgcgtgaccttggttcagctgt

SEQ ID NO: 253357 - DNA, 100 bp, Homo sapiens
ccgacttcgatgatcgtgtgtcggatgaggagaaggttggtgatgaaaaagacatcctgccaccgaagcttcaggatgacatcttagactctcttggtca

SEQ ID NO: 253358 - DNA, 109 bp, Homo sapiens
cgcgagtgcttctgaaacgtcagctgcgctcccctaggagtgctgagcccgcggaaccgcagccatggatcatgcggccagatgatgccaacgtggccggcaatgtcca

SEQ ID NO: 253359 - DNA, 83 bp, Homo sapiens
gggcggcggcggcggcggctgcggcccaatataggattacttccttaggatagattgccagaagtggagttactgggtcagag

SEQ ID NO: 253360 - DNA, 100 bp, Homo sapiens
ggccacgctgcgggcccgggccatggccgccgccgatgccgaggtgaaatgacaatggatgctctgttggctcgattgaaacttctgaatccagatgacc

SEQ ID NO: 253361 - DNA, 101 bp, Homo sapiens
ccctgaagaggcagtgaaatggggtgaatcatttgacaaactgctttcccatagagaatgtgacagtgatgataacatgggtgccaaaaatacttcaatag

SEQ ID NO: 253362 - DNA, 98 bp, Homo sapiens
tgcatttccaacagaccctgaggacaattgggaagaatgtgcctgtcctgagacccatggacctgatggtggaggccaccccacgaagagtatttgcc

SEQ ID NO: 253363 - DNA, 82 bp, Homo sapiens
cctgcagcgggagctggacggcgagcgcgagcggcgcgagaaagaagcggggagaggtggtgagagatgacccctgttgagg

SEQ ID NO: 253364 - DNA, 75 bp, Homo sapiens
caccgacctcgacgtcttgcctgtgtcccacttgttcgcggcctataggtatctacgagaccccagcaggcacca

SEQ ID NO: 253365 - DNA, 90 bp, Homo sapiens
ggcgatgcagaggggtgcgcagtccagcgtgaactacagtcagggcagcctgaaggatgcatttcctgctctacgaaacgcactcttttg

SEQ ID NO: 253366 - DNA, 82 bp, Homo sapiens
cactccgtcccccgcgggtctgctctgtgtgccatggacgggtcctggggaccaaggtggacgcggagcgtgacggcgtgaa

SEQ ID NO: 253367 - DNA, 127 bp, Homo sapiens
tgcatgtgaagctcaccgagacggcgatccgggcgctcgagacttaccagagccacaagtcgcagatatggccagtacactatgaaccaggaaagcaccaccatcaaagttatggagaagcctccat

SEQ ID NO: 253368 - DNA, 100 bp, Homo sapiens
cgttgaagcacaatgatccttttgctcctggtggaacagttgttgcagcaagcgattcagtgattcgcctttgccagtctcatctcgtgtctgctttgtt

SEQ ID NO: 253369 - DNA, 100 bp, Homo sapiens
ctccgccatcagctcggcagtcgcgaagcagcaaccatggtcctgtgcctcatcactgctcctgtcaccatgattctgtccagccagcaggatgcagcct

SEQ ID NO: 253370 - DNA, 88 bp, Homo sapiens
gttccagcagcagcagtagctatggcagtggcagaagattttaattaggaaaactaggtgtctgtgttcactccaggctgaagttaca

SEQ ID NO: 253371 - DNA, 100 bp, Homo sapiens
gtttcctccaggacagcacctagtcgtggccggaggagtctcagagctgtcagaaaggttgctgcttttgctcagaggacatccatgaccctaatggtct

SEQ ID NO: 253372 - DNA, 88 bp, Homo sapiens
ctcaaagctgctgccgccccttgggctaaaaggtaattggtacgcctcagagaccggcagcgtcaaacaccctggtggtaggaagccc

SEQ ID NO: 253373 - DNA, 100 bp, Homo sapiens
tgggagtctcacctatgatcacatggactggttaaataagaggctggtgggaatggaagtggccccacatctcaaagaaaccctaaataagaactttttt

SEQ ID NO: 253374 - DNA, 82 bp, Homo sapiens
catcgctgccagggcagaaattgagcaagcagcaagtcggctttcagatcagtgtgtcccggcatggatatccggaacaacc

SEQ ID NO: 253375 - DNA, 75 bp, Homo sapiens
tgggtctccgtacaccaaaaactcaggcttcgccacctgcgtgcaaacgctaagctgcaacgaaaacgacgcaga

SEQ ID NO: 253376 - DNA, 118 bp, Homo sapiens
ggatggcgtcccccgggggcccgtactgcacatcgtggtggtcggatttcaccacaagaagggctgccaggtgaacctgagcaaggtgggcgagtattggtggaacgccatcctggag

SEQ ID NO: 253377 - DNA, 100 bp, Homo sapiens
gaaagtggagtccgagctgagatccatctgcaccacggtgctggaactgtggctgcaccatctgtcttcatcttcccgccatctgatgagcagttgaaat

SEQ ID NO: 253378 - DNA, 74 bp, Homo sapiens
gacatttgctacagcatcccacattaagtcaacgaaccgtgggtaccgatggatgtggccgagagccctgaacg

SEQ ID NO: 253379 - DNA, 98 bp, Homo sapiens
gaacgtgcgcggggtgatcaccatgaacgaggagtacgagacgaggttcctgtgcaactcttcacagatttccatgaggacaacttacaaggacctgt

SEQ ID NO: 253380 - DNA, 73 bp, Homo sapiens
gcaaccattgcctgcggaaagatcgtgtcgcacacgcacctcggagtgaccctgatgctcccataagacagaa

SEQ ID NO: 253381 - DNA, 75 bp, Homo sapiens
cttcaagctgctcatcatcggcgacagcgaacccagcgggtgccgcttctccacccgaggcttccacctccaacg

SEQ ID NO: 253382 - DNA, 100 bp, Homo sapiens
cctgagcgatacatgatgaacagcgtcctggaaaacttcaccatcctccaggcctcattgctacgatttcagagtaccctggtaatagctgagcatgcaa

SEQ ID NO: 253383 - DNA, 82 bp, Homo sapiens
gcaaatgcattccacgtgtatcagacaatgcagatcttcgtgaagactctgactggtaagaccatcaccctcgaggttgagc

SEQ ID NO: 253384 - DNA, 87 bp, Homo sapiens
gaatacgaggatgaaaccatgacagtttaccagatccccatacacaagctgtaggtaaaacttgcctactgatcagttacacaacca

SEQ ID NO: 253385 - DNA, 83 bp, Homo sapiens
ggaggaagacgaatcgttaaacatctgaaagggtcaggatttgaacttctcgaagagctaccaacacccaagttcagctttgg

SEQ ID NO: 253386 - DNA, 100 bp, Homo sapiens
ctggaccccccgagaatgaccttgaacaatgaacggctttgtgccttgggcaaagggcagcttactcctggaagaggactgactcaaggaccccagaacc

SEQ ID NO: 253387 - DNA, 85 bp, Homo sapiens
tactgaacttcatgcttgacaatctcgcagattgttaaaggaaatgggctggcaggaagacagtgaaaatgatgaaacatgtgct

SEQ ID NO: 253388 - DNA, 100 bp, Homo sapiens
attccggccacccattgatttgatgcataaaggcagctttgaaacagcgacattgactacagcaccgtgctcctcggcatgctggtgacgcaggacgtgc

SEQ ID NO: 253389 - DNA, 105 bp, Homo sapiens
gaatgccttctgattctgatgattctttgaccaaaaaacttgacctcagagatgatgtggtgaaaattacaatcgattggaacaagctccagagcctctcggcat

SEQ ID NO: 253390 - DNA, 100 bp, Homo sapiens
tccgctcctgcgggcttagcaggaaagggtgcctaagacggagtctcactgtgttgcccaggctggagtgcagtggcgccatcttggctcactgcagtgc

SEQ ID NO: 253391 - DNA, 100 bp, Homo sapiens
cccagccccttgtcagccagggctgaacccccgcaggttttctgtctcaactggtctctgacaagcctctgactgaatgtatccgtgctggccactatgc

SEQ ID NO: 253392 - DNA, 142 bp, Homo sapiens
gcagaaagataaaaatttcagtgaagaagaaagtaaagttggaagttaagggagacaaagttgaaaacaaagtgctgtccagaacatacatgtgcagctggcaaggagagatgctgtgtttcacggtggatttcgcgttggg

SEQ ID NO: 253393 - DNA, 95 bp, Homo sapiens
agggcttcgagttcaacatcatggtggtcgagcgaggaggagggccgcctgtacttcagcatggatgatggccagacccgcttcactgacctgct

SEQ ID NO: 253394 - DNA, 100 bp, Homo sapiens
gttttgacccaagagagttttgctgaacaccgaagtgggctggttccgcaacaaatcaaaggaaagtggagaatgaggacatgaataaagaccagatctt

SEQ ID NO: 253395 - DNA, 100 bp, Homo sapiens
gcagccacatactatccgtttgttcaggaaccaccagtgacagagcgcattctacattctaaaggggagctcagtgaagatagacataaacagtatgagg

SEQ ID NO: 253396 - DNA, 76 bp, Homo sapiens
gtggtcttcatttgtgaatacataggactgatcctttgaaatactccagccatgactaaaagagaagcagaggagc

SEQ ID NO: 253397 - DNA, 83 bp, Homo sapiens
gtggacattgctagcaatgagctcccaaagccatccagcatctacaaatctgaaggacaaaacatggttcaagcatctgggca

SEQ ID NO: 253398 - DNA, 75 bp, Homo sapiens
cagggattttgaaaatgctgcacatcccttaatagtcatctacataggttttgaaaacattgaattgactcctct

SEQ ID NO: 253399 - DNA, 88 bp, Homo sapiens
cacctgtgacgatgagccagagacctacgtggcagctgtgaaaaaagccatttccgaagtttccctgaaacctgggctcttgaagacg

SEQ ID NO: 253400 - DNA, 100 bp, Homo sapiens
cactctgggaaaaaattagagacaatgaaaacagagttcctacatgtgaagaggtaatttctcactatcagtgtaaagagcagcgtgatgcccatagatt

SEQ ID NO: 253401 - DNA, 75 bp, Homo sapiens
actgaggccgcatcatgagtatccagattcaagaaatccatggtgaaaggtttggattcctatgaagaaaaggag

SEQ ID NO: 253402 - DNA, 87 bp, Homo sapiens
tatgaaacagagcatcataatggcatagcagagttactggaaatattgggaaggaaaccactgattgcttgtgtggagaaacagcta

SEQ ID NO: 253403 - DNA, 82 bp, Homo sapiens
aaaggaaaacaggaagaagagaaacctggggaggagaagacaatcttacatggtaatctgtaagtcagatgctccaacaggg

SEQ ID NO: 253404 - DNA, 90 bp, Homo sapiens
ggggctttgaatcttttgcattgtacgtgggaaggcactcctgggctataacgaaaagccaataaatctacaaatgtttattgggacagc

SEQ ID NO: 253405 - DNA, 100 bp, Homo sapiens
gctgacggagctacagctccgcgcccgccagttgcttgatcaggtggaacagattcagaaggagcaggattaccaaaggagagcccgagcccagcacatt

SEQ ID NO: 253406 - DNA, 96 bp, Homo sapiens
ggcgggagcgcctggcggccgagtcaagccgccgcctcgacccagggcccgcgggccaggagagcgctcggcgggagatggtaacctgcacctcaa

SEQ ID NO: 253407 - DNA, 100 bp, Homo sapiens
tgaacctgacttcaaaaggagctgtgctgtaggtttctcaggcgaggattaaatccaccacacagggtgaaatctatctccatgacaacattcacacaac

SEQ ID NO: 253408 - DNA, 75 bp, Homo sapiens
tgccagtgaaacctcaggtgatattgctactgtgtgtgattcaggtcacgagaagagaatgccttctagatgcaa

SEQ ID NO: 253409 - DNA, 128 bp, Homo sapiens
ctggtccctgctcttccacttcaaggagacaacggccacacactgtgggctttgtgtccctggtgatgttggaacattaatgatggaacatggccaaacttcagtcatgatcctgaagccatggtttc

SEQ ID NO: 253410 - DNA, 101 bp, Homo sapiens
gtttttgtggatgttgtcgacacttatcgtaatgttcctgcaaaattattgaacttctatagatggcttttatcttgagaacatggtgtctggagttaaag

SEQ ID NO: 253411 - DNA, 141 bp, Homo sapiens
ctctaaagcagctgggcccagcagcgtgaacacttcatgtcagaactatgacatggtcagtgggatctactcatgtgttggagaaatcagcatgttaaaacaactgttgatgatagctgttggagtaaagttgcagtggaa

SEQ ID NO: 253412 - DNA, 89 bp, Homo sapiens
tgcgcttccgacggggcggccgggggctcagagatccaagtgcgcgccctggcgggtccggaccaagtttcccacagtcaaatcactcg

SEQ ID NO: 253413 - DNA, 82 bp, Homo sapiens
cgaggagccgccgcgcgcccgcgccctccgcgcgacgccaggatgggagtcccagcttctggagacggggttcctggggatc

SEQ ID NO: 253414 - DNA, 75 bp, Homo sapiens
gtgatgagggccgtgttgacgtggagagataaagccgagcactgttttaagacaattatctcctatattgatgag

SEQ ID NO: 253415 - DNA, 100 bp, Homo sapiens
cgacggcgtcgtggactgcgcgcggggccagagcgcgcacagacacagcattgttggttttgccatgtactattttacctatgacccgtggattggcaag

SEQ ID NO: 253416 - DNA, 75 bp, Homo sapiens
gatatgctggaaatacagaaccacagtttatcatcccttcctgtcagatgtaccaacagtaccagcaacaggccg

SEQ ID NO: 253417 - DNA, 75 bp, Homo sapiens
gaagcagataccccaggaattcagattgggagaaagacaggcaatctatacctgcgggggcccctgaagaagtcc

SEQ ID NO: 253418 - DNA, 98 bp, Homo sapiens
gaagagcccgggcggcgctcgtacttctggccactgggcgagcgtctggcagcccgtgatgctgatgagcgagagaagtggatccatgccttagaaga

SEQ ID NO: 253419 - DNA, 100 bp, Homo sapiens
ggctgtgtacacacacacgggctacaacgaccactacatgtacttgaaccatggacagcagacgatcccgaacggactgtacagatggggtttcaccatg

SEQ ID NO: 253420 - DNA, 98 bp, Homo sapiens
ggacagaaaagacagtgttctgctttcatggagttcacagaagagtcgaggagttcattccttggaagaagctgtaccatcgatacctgatgaatgaa

SEQ ID NO: 253421 - DNA, 100 bp, Homo sapiens
aagaccatggatcacaaccggaaccgcaggaaactaattctgaagcaagcccttatagttgtgctgcagtggtgtttcaatcacaattttagtgttcgac

SEQ ID NO: 253422 - DNA, 51 bp, Homo sapiens
gttggcgagtagtagcgaggagacgaaggtgtacgcatgatcagcctctcc

SEQ ID NO: 253423 - DNA, 75 bp, Homo sapiens
aggaagcttatggtacctgcacaccgacaggctggagcgcgagagtccgcgggagagctgtggggcttggtgagt

SEQ ID NO: 253424 - DNA, 82 bp, Homo sapiens
ccaggagatacttgactttgccagccagccgtcagacagcccagacctaatctgggagcctgcaagtgacaacagcctttgc

SEQ ID NO: 253425 - DNA, 75 bp, Homo sapiens
ctttgccaccggcttatggagcatggcatcatccagcatggcatcagaacacaccatgatggctgtgacctaaga

SEQ ID NO: 253426 - DNA, 104 bp, Homo sapiens
ccctgggattcagcttcttcttcaacatgctcttcgttgtggcgggcgtgtttgtgtgcctgctggagtacccccgggggaagaggaagaagggctccaccatg

SEQ ID NO: 253427 - DNA, 100 bp, Homo sapiens
agaagaatgtggctaccagcgaagcctgaaagaatagacccaagcgcatcacgacaaggatatgatgtccgctctgatgtctggagtttggggatcacat

SEQ ID NO: 253428 - DNA, 105 bp, Homo sapiens
agccaaggccaagctctccaagttcagcatccccaagcagggggagatggactttctggccgagaccagccagtggagctgctgaatcctgcccgcgtgaaccac

SEQ ID NO: 253429 - DNA, 74 bp, Homo sapiens
tcagcactgctccacctctgattccaccaccgggttagtggttacttggatgattgtacctgtgatgttgaaac

SEQ ID NO: 253430 - DNA, 51 bp, Homo sapiens
gaatgccagcatctgccaagcattgcctttccccatcttcctggttctgct

SEQ ID NO: 253431 - DNA, 90 bp, Homo sapiens
aaaggaccacatagtccatcgaagaagagtccttggaacaagcaactggctattgaaaagaaaattccttgacatactccaagaataagg

SEQ ID NO: 253432 - DNA, 100 bp, Homo sapiens
gaacaccaagaatcaatggacatgaacaaccctcaggactttattgattgcttcctgatgaaaatggagaaggcaagtatatcgcgtcaacacagcgacc

SEQ ID NO: 253433 - DNA, 75 bp, Homo sapiens
atacatttgtacacgatcccaaggtgggatgtgtgtgggctgaaattccgagctgcggttgtgcatgagaataca

SEQ ID NO: 253434 - DNA, 82 bp, Homo sapiens
cttacttcaggaacaaagctacgtttttccagactcagaaccgtgctgcatactatcctcctagccaaattgctcaactaag

SEQ ID NO: 253435 - DNA, 97 bp, Homo sapiens
ccggcgccgggcactgagcaccgccaccatggggaaggggttcccagtgacctgacagcagaggagcgtcaagaactggagaacatccgacggagaa

SEQ ID NO: 253436 - DNA, 98 bp, Homo sapiens
cgcgatgaagcccagacctgcagggttcgtggataataaactcaagcagcgagtcatccaggttaaacactttaagatgagaaaaattgatctctgtc

SEQ ID NO: 253437 - DNA, 75 bp, Homo sapiens
ctccccaagaagatgaaagattcagtggagtcggatggtcagggctgccctttctgtcgttgtgaaataaaagga

SEQ ID NO: 253438 - DNA, 100 bp, Homo sapiens
gttgactgaaaatggggcggaagaaaatacaaatcacacgcataatggatgaaaggaaccgacagccagctgaggtgggtgtcctggttggcaaagaccg

SEQ ID NO: 253439 - DNA, 123 bp, Homo sapiens
atacagtttactaaaacacatcatgaaggcctgttttgaagagaaggggaataagactgcatctgttcatatgagattctactgaagaaaggtagccatggaagagaatatggaagagggaca

SEQ ID NO: 253440 - DNA, 98 bp, Homo sapiens
gagcggctgtgtggatgtcggcgaagccgcgggcgagtctgcgggccaggcatcgacatccgcaacgactatcagcagctgaagcgcctggagaactg

SEQ ID NO: 253441 - DNA, 75 bp, Homo sapiens
tgcagcatctgcctcccgggttccagtgattctcctgcctcagcctctcagctgcaagctttcttcctggtggca

SEQ ID NO: 253442 - DNA, 75 bp, Homo sapiens
gactgcagctcgcggtttcctggcttctagacatatctgaagagatggattaagaatgctttggattaaggattg

SEQ ID NO: 253443 - DNA, 100 bp, Homo sapiens
aaagactcctgctgaaagaagacagcactctgaaagcagctggaatcggtctctaattaacagaagatggcaaagcccagccacagcagctatgtccttc

SEQ ID NO: 253444 - DNA, 101 bp, Homo sapiens
agctgtctgatcactgcagggacgcctgcctggatccttcaccttagtgcagagtgacaaagacctcgatgatgccttggataaactctctgacagtctag

SEQ ID NO: 253445 - DNA, 101 bp, Homo sapiens
ctacctccgggtcaagatccctctccgagttctaaagttcctgttgcttcagacaatggatgagcaatcacaaggaatgcaagggccacctgttcctcagt

SEQ ID NO: 253446 - DNA, 98 bp, Homo sapiens
atgagagtccactctggggagaagcccaacaagtgtacgttcttgcccaaagaggttacttcaaagacaaagcttttgttaattatcttaaatacttg

SEQ ID NO: 253447 - DNA, 74 bp, Homo sapiens
ggcgggctgtggggcctccgcgccgcggccgttagtcatgtcggggcggcaaggagtacctgatgcgggcccac

SEQ ID NO: 253448 - DNA, 98 bp, Homo sapiens
agacggcggccttcgaggaggtcatgaaggacctgagcctgacgcgggccgcgcgggtcatattgaacattccagatacctatcattactcgatgctg

SEQ ID NO: 253449 - DNA, 90 bp, Homo sapiens
caatgtcagagaaatctttgacaaggcaatttcttgcaaccaccaccgaggccccgaaaagcactggtcgtcagggagctcctccccttg

SEQ ID NO: 253450 - DNA, 100 bp, Homo sapiens
ctgcctgacccgaagtaccgacccgagttatgcccaccctccaactttgcgacggaaatgtgtcatcgaaagccaggtttatggctacaaatgatttgat

SEQ ID NO: 253451 - DNA, 82 bp, Homo sapiens
gttctccataagtttacccctttacattgggcagcacattctggaagtttggagatacagtttatgtaacttgatggaagaa

SEQ ID NO: 253452 - DNA, 121 bp, Homo sapiens
tctcacttgaggaacaggagaaaatggatttaaaaacaagtagagaattatgtagccgtttagtcttcccagccggcattctgcagccccccttctttagtgcccagcagtccaactcatt

SEQ ID NO: 253453 - DNA, 75 bp, Homo sapiens
cggcggctgccgcgcggcacacaataaacacctggattcttatctagctgactgctacgatgccattgctgtttt

SEQ ID NO: 253454 - DNA, 98 bp, Homo sapiens
tgggctcctgtagaggaggctggagattccacccaaatcctcttctccaagaaggtaaatgacctccgaaaagaattagaaagtcgagctcttagttc

SEQ ID NO: 253455 - DNA, 75 bp, Homo sapiens
ccagcacttcatccagcagtgcacagaatctccgccacctccctactctcggctgtctcctcgcgacgagtacaa

SEQ ID NO: 253456 - DNA, 90 bp, Homo sapiens
agaacctggagcaggaatgcggggaagctgagaagagcaagttagtaccttgtaccaaaacatcaaccttgtggagccaagattaattca

SEQ ID NO: 253457 - DNA, 108 bp, Homo sapiens
ctgcacttcgcattttggcattgacatttaattttagggtcctttatatagaagggagagtagggtggctacggaccacaacatggataacacgtcaactgtgctgcg

SEQ ID NO: 253458 - DNA, 88 bp, Homo sapiens
agaagcacaattgtggactgtcttaaagatttggatgtctcaataaaacggagccatgtgttcacatgtcatgtggaccagtatttaa

SEQ ID NO: 253459 - DNA, 78 bp, Homo sapiens
ctgggattataggcgtgagccaccgtgcctggctgaaggacactgggtccccttggagcctccccaggcttaatgatt

SEQ ID NO: 253460 - DNA, 100 bp, Homo sapiens
tgagggaagacgagaaagagagtgggagagagagaggcagagagggagagagggagagtgacagcagcgctcggtctgagttcactgacaccatcctgtc

SEQ ID NO: 253461 - DNA, 100 bp, Homo sapiens
ttcgtactgagttcgctccagctcggggagggggtggagttcgatgtgctgcctgcctttgatgccctggcaaaaaagaaattcctgtgtttaactttac

SEQ ID NO: 253462 - DNA, 100 bp, Homo sapiens
ggcggccgacggcgacgactcgctgtaccccatcgcggtgctcatagacgaactccgcaatgaggacgttcagttggaatcgaagcctcttaaaatggca

SEQ ID NO: 253463 - DNA, 100 bp, Homo sapiens
tgatcatcgatctctcagggtcgtcgggtgaaggtaactcagcagttgaaggcgcgattcttaccaagtccagttgttattaagaaacgtattgaaggac

SEQ ID NO: 253464 - DNA, 99 bp, Homo sapiens
aaaaattaagcgtggcttttgaggaagatgtgacaactaccggaggctatagaaagcgcaattggtggtaacgcttatcaacacagcaaagtgaaccag

SEQ ID NO: 253465 - DNA, 75 bp, Homo sapiens
acagaaattgaaaggcttcaaagctagcagcaagctgcgaatattgtgcgtgctctggaactttttgtgaaagca

SEQ ID NO: 253466 - DNA, 98 bp, Homo sapiens
gtctggctgtgctacgaagtgaaaacaaagggtccctcaaggccccctttggacgcaaagatctttcgaggccaggcctgcccgccctgatggtcatc

SEQ ID NO: 253467 - DNA, 74 bp, Homo sapiens
cctcaaacaggagctggagcagctcaaagaggctttcagtccagtgtaaagctgttggagcgcgggagcaaagg

SEQ ID NO: 253468 - DNA, 100 bp, Homo sapiens
acccctgaggtgcatgcaggcactggagtggtgggcaacaagcccaggccccgcggccgaggcctggaggatgttggccagttctacttcttaatccgga

SEQ ID NO: 253469 - DNA, 50 bp, Homo sapiens
ccccgctctctgacctgctgaaaggacacagcattgttggttttgccatg

SEQ ID NO: 253470 - DNA, 49 bp, Homo sapiens
tatcaagcctgatgattacttggctcctgaaggcgaatctcagccaatg

SEQ ID NO: 253471 - DNA, 90 bp, Homo sapiens
ccagccgcggcaacgaccgcaaccgcatcgtgctgcctttcagtttcgcctggccgcacaacagctccagctggcagcatcacttcccgc

SEQ ID NO: 253472 - DNA, 102 bp, Homo sapiens
ccccggcccgcgctgcccgcactcctggtcctgctcggggctctgttcccaggaactgtggctgcaccatctgtcttcatcttcccgccatctgatgagcag

SEQ ID NO: 253473 - DNA, 82 bp, Homo sapiens
gcagctgcctcagttcttagcgcagatgccactgccgccaggagccctgtaacatcagccatcgtcaaccccaccgtgttct

SEQ ID NO: 253474 - DNA, 90 bp, Homo sapiens
gagattctgatgaagaagttattcaagatggcaagagggcacattgggagattcagcttgcaagagtcctgaatctgatctagaagactt

SEQ ID NO: 253475 - DNA, 99 bp, Homo sapiens
gaggactaattttggcagttctaaatttgaatttgaggatttccaaagactcatgttacgtgaggaagccaccaagaagagcaaagaaaaggagccagg

SEQ ID NO: 253476 - DNA, 99 bp, Homo sapiens
agccgcagagcggggaggaggcggtggccctgctggaggagctctgggattttttatcaagcagaaatgcatcgaacaacgagaatcaagatcactgag

SEQ ID NO: 253477 - DNA, 74 bp, Homo sapiens
cttcaaagtaaaatcagtttaatttcagaaaaggtcagtttcttctggaagaagctcgtctcatagaagcagct

SEQ ID NO: 253478 - DNA, 87 bp, Homo sapiens
agagaggctgcctcctgcagcccccatagcagaatatcctccgaatcctaaatctagagctccaaggatgctggtcattaagaaagg

SEQ ID NO: 253479 - DNA, 98 bp, Homo sapiens
aatgaatccttctagagacgtccacggcctccggtgtggctgtctctgatggtgtcatcaaggtgttcaacgacatgaaggtgcgtaagtcttcaacg

SEQ ID NO: 253480 - DNA, 100 bp, Homo sapiens
aaggagatgaagctgtccgatggctcctacttcgggggctcttgccatcagcgaccactttccagtggaggtgaccctcaagttccaccgatgactcgag

SEQ ID NO: 253481 - DNA, 96 bp, Homo sapiens
aagagggcagccgcctgaaggaacgcgacggcggcgcccgcaggtgaaatgacaatggatgctctgttggctcgattgaaacttctgaatccagat

SEQ ID NO: 253482 - DNA, 75 bp, Homo sapiens
agagctccccagagatgcccacgaccaagaacaggttctgctccagacgagcccttaccacgttgactcactcct

SEQ ID NO: 253483 - DNA, 100 bp, Homo sapiens
tggagattttgatgtggatgatgccaaagttttattagtgaggagaaggaggaagtgaccatggacacaagtgaaaacagacctgaaaatgatgttccag

SEQ ID NO: 253484 - DNA, 90 bp, Homo sapiens
catgaatggagcaaaatggcggatcatgtgcagctagagatgatcgctatggaaaatcctgcagacttgaagaagcagttgtatgtggaa

SEQ ID NO: 253485 - DNA, 75 bp, Homo sapiens
aggcccagagacatgctgaaacatcgaagactgtggatattcataaggagaaagtggcacgaagagagattggta

SEQ ID NO: 253486 - DNA, 100 bp, Homo sapiens
cagcagccttgtgtcctgggatccccagcccctgcagaatgacccaccaggatctgagagatctcggctcaccaaattccacaacctgaaggcagtcgtc

SEQ ID NO: 253487 - DNA, 101 bp, Homo sapiens
gctgctgctgccgctgccgccctgagtcactgcctgcgcagctccggccgcctggctccccatactagtcgccgacatccacgacagcgatggcagttcca

SEQ ID NO: 253488 - DNA, 95 bp, Homo sapiens
cagcctcctgagtagctggaaccatcatatgcaccagcacgcctggctaaatgaaaataaacccatctggatgcatgctgaagaaagagaagaat

SEQ ID NO: 253489 - DNA, 75 bp, Homo sapiens
cgacgatctccatatttcattgcaagcagcccactcacccagtgtacaacattggaccagacaaggtgatccagg

SEQ ID NO: 253490 - DNA, 100 bp, Homo sapiens
tggatgagtcgggcaatgtggttcccagtgacaccaacattctggacacgtgggcgctccatttatcttaaagaaattggacagcatatgaagacaggac

SEQ ID NO: 253491 - DNA, 75 bp, Homo sapiens
accccctgagcccccatctgctgaaccctgactgtcactgattgtccctgggaagagccccacgaggaagaagtc

SEQ ID NO: 253492 - DNA, 51 bp, Homo sapiens
ctacacggtctcctgggtcaagttgaaaatgcaactgcaagctccccggtg

SEQ ID NO: 253493 - DNA, 99 bp, Homo sapiens
ggttggtacagataaaactttaagggttctgtgctacaaattgatgtttagataaacttcagtgaaatgactcttcaggaattggtgcataaggctgcc

SEQ ID NO: 253494 - DNA, 90 bp, Homo sapiens
tatgccaatatgtttgagaggctggctgaggaggagaacaaggtccttatgtcgtcagaagatcgagaagctcaggaggatgaattgctg

SEQ ID NO: 253495 - DNA, 100 bp, Homo sapiens
caacattatcagatgttcttgacagagtgtcagatgacctcttggtacttcatctctctgacctcattcgcatggcattcatggctgcaactgatcatag

SEQ ID NO: 253496 - DNA, 75 bp, Homo sapiens
ggggccggcgatgtgccaccgaggctgaggatgatggtagattgccagccaaaacagagtggagtacgagaaaag

SEQ ID NO: 253497 - DNA, 100 bp, Homo sapiens
gtcaacaatcaccattttggaagcccctgtttgccaggcgtgaaaaaatacctcactgtgacctacgcatgtgatgctaaagaaaacccttatggcgagg

SEQ ID NO: 253498 - DNA, 117 bp, Homo sapiens
ccctggttatcctcatatcccacaggcactcagcactccaggaacaacgatggcaggatggaaatttctccttttctctggagtcagtgaagaagctcaaagacctccaggagcccc

SEQ ID NO: 253499 - DNA, 118 bp, Homo sapiens
cctagcgccgctgggcctgcaggtctctgtcgagcagcggacgccggtctctgttccgcaggatggccaaagaggtgctgaaaaaatatttggagtccaaggaggatgtggctgatgc

SEQ ID NO: 253500 - DNA, 75 bp, Homo sapiens
cttgtaatttcctctgtacagagcccaacaggctcatcagcagcagaagcgggtcacagaaagtcgagagagcca

SEQ ID NO: 253501 - DNA, 96 bp, Homo sapiens
ctgtgctcagattccctgaagctctgctgccccgcaggcaccttcgggccctcctgccttcccgcttacaaacacgcagatggcaagaagattgat

SEQ ID NO: 253502 - DNA, 74 bp, Homo sapiens
ctcagcaagctcgagttaaagttggatgtgctggaacagtccaatatcagatggaaatgatgcggagccttcgc

SEQ ID NO: 253503 - DNA, 90 bp, Homo sapiens
aggcactagcagatgtggttggaatccttgctgtgctgaatcctggctgtgtgaccccaaatttggagcaagaggtggtggtggccttcc

SEQ ID NO: 253504 - DNA, 88 bp, Homo sapiens
aaatccatcaagctcatcaaaaggtcgccttttaaaaaaatccctgcggtgggtgggaaggagctggatcttcacggtctctacacca

SEQ ID NO: 253505 - DNA, 100 bp, Homo sapiens
cggtgccagcacctttcggcttctgagacggcggcagcagcggcattcagatgtcatggcacccccagtaccggagctccaagttccgtcatgtctttgg

SEQ ID NO: 253506 - DNA, 80 bp, Homo sapiens
tttcggatcatgtctggtggctccgcggattataacagcatgtagagcgcatgaagtacaggacaataaagcttcctaca

SEQ ID NO: 253507 - DNA, 108 bp, Homo sapiens
ggtttgtatggacaggcttgtccatctgtaacttcattaagggcccttctagcccaatccagagctgtaccatggcagagacaagagaagaggagacagtgtcagcag

SEQ ID NO: 253508 - DNA, 90 bp, Homo sapiens
gcattggagactgagcaaaaggaaatgtgaaacgaataacatgatggaatatgttgcaaaagcttctcatttcagagagatgccaggatc

SEQ ID NO: 253509 - DNA, 127 bp, Homo sapiens
ctcgggtgctgcttctacgaaggcgtctgctacaagaaagcggttcccagttcacgcaaagaatctgctccacaagttttgcttccagaagaagagaaaattatagtggaagaaactaaaagtaatg

SEQ ID NO: 253510 - DNA, 99 bp, Homo sapiens
cagttaacaaccaaatctttcttcaggaatatgtggctaatctccttaagtcggccttccctcacctacaagagtgtttggagaagagggattgaccct

SEQ ID NO: 253511 - DNA, 75 bp, Homo sapiens
gggagatcccaggcggtgacagagtggagccatggctagagctatacacagaatgggattttacatatgctggac

SEQ ID NO: 253512 - DNA, 131 bp, Homo sapiens
gccgacagactgaaggacagcggcaccgccagacggccagaaagttccgccatgagctggggcacggagctgtggcactagaaagtttgggatttggctcttacatcagtgaagtaaaagaagtcttgcaa

SEQ ID NO: 253513 - DNA, 74 bp, Homo sapiens
ccattccaaatctgggaccagtctcggcaaatattacacttctctccttacctggtgatgactggaaaaagact

SEQ ID NO: 253514 - DNA, 100 bp, Homo sapiens
cagacggcgacagtggcggcggcgccatggcagggcttgcagtgtcctcagcctgcgggggctgcgtggaggtggactcggagaccgaggccgtgtatgg

SEQ ID NO: 253515 - DNA, 75 bp, Homo sapiens
ctcggctgagttgcaggggaagtaccagaagctggctcaggagtactcgaagagaaacagcacccaggactatct

SEQ ID NO: 253516 - DNA, 100 bp, Homo sapiens
aggaaaaggtcgcctctttgctgcaccaggtgtcctggagacagattggtgctgaagacatggacggcttccaggcagacacggaggaggaggaagagga

SEQ ID NO: 253517 - DNA, 50 bp, Homo sapiens
cgacgaccgacagggtggtgaaagtgtgctggaattgatgttcgtctgtg

SEQ ID NO: 253518 - DNA, 100 bp, Homo sapiens
cagagtccgatgaaaggaatgggtctgggaccttaacagggagccatgcgacttggactgggcggtgtttgagcctgacctcctggttaccagctctgtg

SEQ ID NO: 253519 - DNA, 112 bp, Homo sapiens
gaagaatagagccataaagaaagcaaagcgcagaaatgttggatttgaagtagttgatgtcacttggcgatattcctgcaaacatgaagaggtgattgccagaagaactaag

SEQ ID NO: 253520 - DNA, 83 bp, Homo sapiens
agccactacagtatcgtgggacagaagctggaacacctttgtcctagaatattgtggagaggtactcgatcataaagagttta

SEQ ID NO: 253521 - DNA, 82 bp, Homo sapiens
gagaggagcactttgaggacatggcctccgacgaggacatatctgactgcagccatgagcagcaatgagtgcttcaagtgtg

SEQ ID NO: 253522 - DNA, 75 bp, Homo sapiens
caccttgatccagcggacttacggaaaaatggctacaaacttcctagcacatgagaagatctggttcgacaagtt

SEQ ID NO: 253523 - DNA, 100 bp, Homo sapiens
cagacaccaaataaaatagccatctcacctttgaaatcgccaaataagcctctccccaccggtcactgttagcctcgagtttgaccctcaacatccccag

SEQ ID NO: 253524 - DNA, 51 bp, Homo sapiens
gtggagacacggccagatctgccctccagcaaagtgtttcatggatttcaa

SEQ ID NO: 253525 - DNA, 101 bp, Homo sapiens
atggcagcccaggccgcgatgggctcgatggattccccggcctcccaggccctcccgtctggagtgggactgactggctccagacagaccatgttctacac

SEQ ID NO: 253526 - DNA, 97 bp, Homo sapiens
tggaacccactttactcagagtgacagagctccacagaaaagagtccgatcaagaggaatgtctgatcacagatacggggatggtggctctactttc

SEQ ID NO: 253527 - DNA, 101 bp, Homo sapiens
agcctttttctcattgttctcgtcatatcagacattatggctttgtctaccctgatgggagagtctgcatttccatcctccacgcgccaggcgatgacccc

SEQ ID NO: 253528 - DNA, 82 bp, Homo sapiens
acggagatcctgatgaagttcgagcactaatatttaagaaagaagatgttaactttcaggatgaaattgattctgcagtaaa

SEQ ID NO: 253529 - DNA, 80 bp, Homo sapiens
ccaggggctcctattggaaataccttccagaatgtggtaggttggtacaaattccgtcgtcattcagatcagatcatgac

SEQ ID NO: 253530 - DNA, 74 bp, Homo sapiens
tggaagaattcctgaacaaattttaggaaaagttagcattgcttctccttatatacatttgacaaagccaaaca

SEQ ID NO: 253531 - DNA, 82 bp, Homo sapiens
caccaccaccaccacccccagctactacacaaaactaccaggtcaaacaggatttatgcatcatccatcattttttacgtct

SEQ ID NO: 253532 - DNA, 97 bp, Homo sapiens
ctggctctgtagtgggcagagtaacatgcagatgactgtgttacaggacacctgctccacttcaccttttgccatgagtaaaagctccctgaggcct

SEQ ID NO: 253533 - DNA, 51 bp, Homo sapiens
ggagcaccaggagacgcaactcatcgggtgctgcccataaactcgtgtgtt

SEQ ID NO: 253534 - DNA, 90 bp, Homo sapiens
atgatgtcacccaatggatccattcctcccattcatgtgcctccaggttatatctcacagactcagggtgacaagaagtggattctaaag

SEQ ID NO: 253535 - DNA, 75 bp, Homo sapiens
cagatattatcatagttgctgcagggatttgtcttggctgttactatgacacgggaagcaattgatgaatttcgg

SEQ ID NO: 253536 - DNA, 80 bp, Homo sapiens
aaactcgaagaacagctgtggaaagaagttgcaaaacactgggccaaaaagcaaatggatttccacctgacaaatcttcg

SEQ ID NO: 253537 - DNA, 75 bp, Homo sapiens
ttcaccttagtcaccagatcgcagcaggagacagcactattcatggccgaattgatcaagtcaaccaactccttg

SEQ ID NO: 253538 - DNA, 90 bp, Homo sapiens
gcaccctgcttggagacggacttgcttccgatgtgcactgggaactacacctttgttccttacatgataactccacataacaaagtctac

SEQ ID NO: 253539 - DNA, 95 bp, Homo sapiens
tgctggccacttgcttgggatcctttatcctggtcatcttctatttccaaagtgacttaagagattaaaattaatttggttgctgttggttctga

SEQ ID NO: 253540 - DNA, 50 bp, Homo sapiens
ctggaagtctcactgtctcgagtgtggatgtggaagcagccaagcgggca

SEQ ID NO: 253541 - DNA, 80 bp, Homo sapiens
cgggtggcggcgaacgcggagagcacgccatgaaggcctcgggcacgtttggtgccctggttgtcagatgttggaaagca

SEQ ID NO: 253542 - DNA, 96 bp, Homo sapiens
tcctcttcctgctgctggccatgctggtgcaagtggtgcgggaggagaccctcgagctgggcctggagcctggatggtgccatgacaatggtgtga

SEQ ID NO: 253543 - DNA, 95 bp, Homo sapiens
gaacaggagttccgatcgacccggtaccaagaaggggagtgcccgcggcagtgactgagttttcaaagaaaacaggagactaccccagcctctct

SEQ ID NO: 253544 - DNA, 74 bp, Homo sapiens
gccagggttgaaccacctttaaaagcagtaatggaacaagctaaagactgggacatgttggatgttgatgaaga

SEQ ID NO: 253545 - DNA, 82 bp, Homo sapiens
tctcctctgggagaactttttgatcatggctgtgattcactatcaacagtggccacagatgtctttaattccaaaaacctgg

SEQ ID NO: 253546 - DNA, 50 bp, Homo sapiens
ttcgttgtgccagcgactaaaaagaggtgttgacagctcttctaccacaa

SEQ ID NO: 253547 - DNA, 83 bp, Homo sapiens
ccgcccaagaaagggctgctccagagactcttcaagcggcagggaaccctactctggaaactgtcagtcccagggcactgggg

SEQ ID NO: 253548 - DNA, 99 bp, Homo sapiens
gttagatgtctggtacatgaaacggcacattgactacagtagacaacagatttctcttttctggaagttaccaaagacgttggaagaggtggctatgga

SEQ ID NO: 253549 - DNA, 100 bp, Homo sapiens
cgatgttaccattgtgaaagaaggttgggttcagaagagggttctgcacggagctaaaccagccgaccctgcccaacatccgcaagtggaaggggccccg

SEQ ID NO: 253550 - DNA, 74 bp, Homo sapiens
gagttgtaccgagactataaccacggtgtgctgaagataaccatctgtagccaggccaagtctattgcagaaca

SEQ ID NO: 253551 - DNA, 100 bp, Homo sapiens
aggagttgagaaaaaccaaggagctgacctgtcctggacgcagcataactaacgaagctgctgcaggatgagaagatggcagcgcggctgcttgcaccac

SEQ ID NO: 253552 - DNA, 98 bp, Homo sapiens
cagtatccaaaatagccaggacatgaggcagatcagtgacggaggaaacaccaattggaagcctccgctcaactgtaagatttataactacctgaaca

SEQ ID NO: 253553 - DNA, 51 bp, Homo sapiens
cctcaaagtctacctgagcgcccagcacaagcccaccgtactgttgtgtgg

SEQ ID NO: 253554 - DNA, 100 bp, Homo sapiens
ccacggaggaagagaagcacgaattccgccggcgttgtgagaaagatcagtctaaagaaaaggagaagaaagtgaaaaaaacaattccttcctgggctac

SEQ ID NO: 253555 - DNA, 82 bp, Homo sapiens
gaagtattgagtgatcctaaaaagagagaaatatatgatcagtttggggaggaaggctgatcttcagacaagttctcagcgt

SEQ ID NO: 253556 - DNA, 75 bp, Homo sapiens
aaagtgagccagaaacatgctgagcctttgacaggttgggggccgtcccgctcctaaggcaggaagatggtggcc

SEQ ID NO: 253557 - DNA, 83 bp, Homo sapiens
gagctaaagcagcgtgcgttcagccctgggaaggatatggccctgaagccacatgagcggaaggagaagtgggagcgtcgtct

SEQ ID NO: 253558 - DNA, 96 bp, Homo sapiens
gaaaaacctgaggctgatgacccaaagcttttgcctaccaaaaagttttgggaacctgatgattcaacaaaagatggacaaaaaggcatatttctt

SEQ ID NO: 253559 - DNA, 83 bp, Homo sapiens
tctctggggactctgaacttccctggtcgaacagttttttctaatggctattcaagaacctcttcgacagcatcaagagtgag

SEQ ID NO: 253560 - DNA, 82 bp, Homo sapiens
agacttggccaaatggacgggactattaagtgtggacgaatgtggaacctcgctctgtggctgtgttcccttggcactcctt

SEQ ID NO: 253561 - DNA, 101 bp, Homo sapiens
tgcgcccacccgccccggacgtggggcccaagcccccgtgaagatggtgtcctggatgatctccagagccgtggtgatgaccgttcattaataaatttgca

SEQ ID NO: 253562 - DNA, 100 bp, Homo sapiens
tgcagccagttactatggcagttgcaaaatattcaggagaccgtcgttgccttgtatttccagagaacagggagactcatgcatctgtatgccgtgtgcg

SEQ ID NO: 253563 - DNA, 100 bp, Homo sapiens
gcgcctgcaactgaaatttcagcagcgggagaagatggacaagagaaagctcgggcgacggccatcttcatccgtggccacagatgtctttaattccaaa

SEQ ID NO: 253564 - DNA, 46 bp, Homo sapiens
cttcggcccccaccagagactcggtcaactttgtagtgtgccaact

SEQ ID NO: 253565 - DNA, 75 bp, Homo sapiens
agaaggggcgcatcgcggcacagctgcagggcattgaggtaaatgccatctgctatggggccaagattatgcttc

SEQ ID NO: 253566 - DNA, 74 bp, Homo sapiens
ggagtcccaatgaaacgggcagccatggccctccacagcccgcagttcagaatgaccgaagaagcatgccgaac

SEQ ID NO: 253567 - DNA, 105 bp, Homo sapiens
atgggcccgcctgaccctgggcgccgcgccgcacgagcaccagcctagagccaggtggagtaaccttactgagagctgcagccaaaaaccacgctcgagtgacag

SEQ ID NO: 253568 - DNA, 96 bp, Homo sapiens
aaaggaaatgcatctttatgtcagaaacacaaagcagcccaaccaaagggtcagaagccaatgacctggccctgaggctggctcgccactacacgg

SEQ ID NO: 253569 - DNA, 75 bp, Homo sapiens
aggccatggagggacaggatccggaggcgccagctcaaccgtccagcaagactatgaatctctgttccaaatgct

SEQ ID NO: 253570 - DNA, 83 bp, Homo sapiens
tctgcggaggcagatccgcacgatctgtgctgttctggctgctgtcactgaggtgattcgctcccagggagggaaggagacgg

SEQ ID NO: 253571 - DNA, 100 bp, Homo sapiens
aacaagatgtgaactgtttctcttctgcagaaaaagaggctcttcctcctcctcccgcgacgacacgctttcaccagcttcgagcccctcctcggtgact

SEQ ID NO: 253572 - DNA, 83 bp, Homo sapiens
gtatgacacataaccagcacccaagaaatgtctaccgaggaattaatgaatgagttgttgacctcctgtactggagagacatt

SEQ ID NO: 253573 - DNA, 48 bp, Homo sapiens
gcctgtgggatgcaagtgggaggagcttgaaattgtaattggagatga

SEQ ID NO: 253574 - DNA, 75 bp, Homo sapiens
caggcgcctccggcccatttacgacacgatgaggcgagtggtacgacagagcaagtttcggcatgtatttgggca

SEQ ID NO: 253575 - DNA, 100 bp, Homo sapiens
tcagtatcactcgctcccttgatgatcttgaggttattcagcttctcaaggctggaaaagcgaaggaagtttcctacaatgcactagcctcacacataat

SEQ ID NO: 253576 - DNA, 90 bp, Homo sapiens
caacaggcggctctccgtcaagaactctttctgccgaaagaacggcctgtacaccagccttatgatctcctcattgcgtccccctctgcc

SEQ ID NO: 253577 - DNA, 75 bp, Homo sapiens
cttcccggagcgtgccctcgccgctgccgaccgctgtaaggaggtacagcagatccgcgaccagcaccccagcaa

SEQ ID NO: 253578 - DNA, 96 bp, Homo sapiens
cacaacgtgcctttgaagctgccgatgccagagccaggtgaactggaggagcgatttgccatcgtgctgttgttgacctcctgtactggagagaca

SEQ ID NO: 253579 - DNA, 95 bp, Homo sapiens
aaaaataaagctccaggattagggaaagtcaatgtggccataaaatgcagtaaaaacaaatccagttcccaagaagctgtacaaatgctttcttc

SEQ ID NO: 253580 - DNA, 90 bp, Homo sapiens
attgatgagccagctccagaatcctaaagggtccacatatagcctcagttacattagctgcttatgaatgcaattcagttaattttcccg

SEQ ID NO: 253581 - DNA, 100 bp, Homo sapiens
tctttacagtaatttcaacagaagagtgagagatggaacccgaagaagaaaggattcgttacagccagagattggatgaccagtgtcccagtgaaggaac

SEQ ID NO: 253582 - DNA, 51 bp, Homo sapiens
tacaagatgatgcagggaggagatttatcacacgtcctgatgtcaagcaaa

SEQ ID NO: 253583 - DNA, 100 bp, Homo sapiens
gcagaaagcaagtgaatacgagtcagaaggccaagattgacagacacctaatattcatgacttgagaatattctgcagctataaattttgaaccattgat

SEQ ID NO: 253584 - DNA, 50 bp, Homo sapiens
cccaggagtcctgaccagagagcaggccctgtctcagcgggaccctcctc

SEQ ID NO: 253585 - DNA, 74 bp, Homo sapiens
ctgtgcttgccaggcctggctccaaccaagatcactccatggatgaaatgacagctgtggtgaaaattgaaaaa

SEQ ID NO: 253586 - DNA, 100 bp, Homo sapiens
caccaactagtcccgttgcaggtgaaatgcaaagactgtgaggagagcctgatgtgtgaaaaaagaatttttgaaactgtgaatagtgtaaggcatccct

SEQ ID NO: 253587 - DNA, 75 bp, Homo sapiens
gatggctgccgcggctacgctgaggctctccgctcagctctatgaagcctttaccttccttaagggcctgggagc

SEQ ID NO: 253588 - DNA, 87 bp, Homo sapiens
ttcgaaacatagtggaggccgcagcagtcagggacatttctgaagcgagcgtcttcgatgggctttttggtggtgctggagttggca

SEQ ID NO: 253589 - DNA, 101 bp, Homo sapiens
tgttctcgatgccaatctctgcttgaaaggagaagacttggattctcaggacatggatttgattgacatactttggaggcaagatatagatcttggagtaa

SEQ ID NO: 253590 - DNA, 101 bp, Homo sapiens
catccggagagtggacaagaaaatattccgagtggtgtgcatctgtttgggtaatccaccagagacattcacctgggaatatcgagacaaagataaaaatt

SEQ ID NO: 253591 - DNA, 98 bp, Homo sapiens
tgttcacaggcttaactccaagactgtgttcgggagtccttggaactgtggtccatggtaaagttttacaggattgttcaagtttagaagaatacaac

SEQ ID NO: 253592 - DNA, 75 bp, Homo sapiens
agaagatggaagccaaagttcatcagagtccaaaatggtgatcaggaattgtacacagaagaaagcccatatgag

SEQ ID NO: 253593 - DNA, 75 bp, Homo sapiens
gcttcaccagcacacagagcagcttgtacagggcttccgttacaagatgaggtctgtgtatgctcacttccccat

SEQ ID NO: 253594 - DNA, 74 bp, Homo sapiens
ggagggcgcggcgcgagaacataccacttgaaagatgtcattgtagggaagatatacttcctgctggtgagaat

SEQ ID NO: 253595 - DNA, 90 bp, Homo sapiens
cagagttcaaggaggccttccagctgtttgaccgaacaggtgcggtggatgatgtactggattgtttttgcactcttcatggcagcagag

SEQ ID NO: 253596 - DNA, 50 bp, Homo sapiens
agactagatgccgatccaaaaggtaactaggatttctacctcaaccgcga

SEQ ID NO: 253597 - DNA, 75 bp, Homo sapiens
atgctcttcatactgtagaaaaatattcctttgaagaggtgagaataatgtttgaggtacaggacttgaaatacg

SEQ ID NO: 253598 - DNA, 82 bp, Homo sapiens
tccagatggcgtcttccgtgggcaacgtggccgacagcacagatgccatggacaatattaccaggcagaaccaattctacga

SEQ ID NO: 253599 - DNA, 108 bp, Homo sapiens
ccttcaagaagattgaactttattgtgaacaggtagagtacctgttgttgcagagttattttctgagtcagtttcagagaaagtttcattgtgcaaatctaacttcat

SEQ ID NO: 253600 - DNA, 100 bp, Homo sapiens
ggtgcagacaactaagcgaggggatcctcatgagttaagaaacatatttctacaggttaatacaatctgttggaatgacactggagaatatattttatct

SEQ ID NO: 253601 - DNA, 100 bp, Homo sapiens
ttttaatgttagcgttgttaatactacctgcttttggatagaatgtaaagaacacgacctcgagatgatatcctcagtagacgtgaaagatcaaaagatg

SEQ ID NO: 253602 - DNA, 90 bp, Homo sapiens
atttatgaaattattttttgggaaaacacttcaaatgctgagtatttgtgtggaagtaatcgaaaagacaacatatttattgatcctgga

SEQ ID NO: 253603 - DNA, 51 bp, Homo sapiens
tgaagagggaagacacgcggaaacaggctgcaggccaacttcaccatccgg

SEQ ID NO: 253604 - DNA, 83 bp, Homo sapiens
ctctgctgcgtcctgctgaccttcgattcctcagttccttttagatgattgctttaaaaatggtatcccctgccgtatatttt

SEQ ID NO: 253605 - DNA, 91 bp, Homo sapiens
cgtaggacctggcttgggtagagatgatgcgcttctcagaaatgtccaggtactccaaagattcaggtttactcacgtcatccagcagaga

SEQ ID NO: 253606 - DNA, 96 bp, Homo sapiens
ttggagtgaaatcaggaacatctctttcaatgacaaaaagtttgtcattaaacccatcgacaagaaggcacctcactccagttctcgcctgaatta

SEQ ID NO: 253607 - DNA, 100 bp, Homo sapiens
aagagagcaacgccagagcccaggtgcccagaggactttcttccagcttctgctgtccttctttgtggagagcaagatgttggagtccggggtgacctgg

SEQ ID NO: 253608 - DNA, 82 bp, Homo sapiens
cttggactgagtcctgcaggacacagatctggacgttggtggttggctatgtgttgactgtttcattcaagtggaatgcaag

SEQ ID NO: 253609 - DNA, 82 bp, Homo sapiens
aagtcagcagcatgggaagtcgttctagttcatcagttttctctgtctggtaccggatgacgcaaaatcctcctaccatgtt

SEQ ID NO: 253610 - DNA, 96 bp, Homo sapiens
aatgaccaagacggcttgatttcaggaatattacgtgttttagaaaaggtcccgcagcccccggaagccaatagactccctcagggactctcggtc

SEQ ID NO: 253611 - DNA, 75 bp, Homo sapiens
gtattttgtgatcgcagcgatgaaagctctgagaaagtggccgaaagaaaagaaactgaattttttagctcttta

SEQ ID NO: 253612 - DNA, 95 bp, Homo sapiens
taggctccaagacgccgtcgcttgagttgcaggaagaggcagaggaagaggaagaggaagaggacgtggccgtggcagaggaagagggggtccta

SEQ ID NO: 253613 - DNA, 80 bp, Homo sapiens
gcgcgtcgtgcgcctgggggtgcgcgcctgcgacctgcccgcctgggtcaaaatgcagatcttcgtgaaaacccttaccg

SEQ ID NO: 253614 - DNA, 71 bp, Homo sapiens
caagatccaggataaggaaggcattccccccgaccagcagaggcttggcgggggctccgaggacgccaagg

SEQ ID NO: 253615 - DNA, 97 bp, Homo sapiens
aggatgcccgtgagcctgttgtcggggccaggtgcttctaaagtaaagaaataccgtaaattaattttagagcaggcaaaaacgacaagcctggaac

SEQ ID NO: 253616 - DNA, 111 bp, Homo sapiens
caatatctgtcttcggtggactccttcggcagtccacccaccgccgccgcctcccagctctggattaatcgaattacagctgctagccaggaacatggactgaagtatcca

SEQ ID NO: 253617 - DNA, 75 bp, Homo sapiens
ggcccaccatcaaaaagtgggaagagagggctttaatccagtgtgaccagttgaggaaggagctggagaggcagg

SEQ ID NO: 253618 - DNA, 97 bp, Homo sapiens
acctgctcactgcctggaacagctctcaaagtttcctgattaaagagtctattgttggggaaatcagacgggaaattgtaagtggacttttggcagc

SEQ ID NO: 253619 - DNA, 101 bp, Homo sapiens
taagggctcttacctccgcaatggctggaatgtcatggacttcatcgtggtcctcagtggacctgtcatttactccatcctttatagtgatgctacaggac

SEQ ID NO: 253620 - DNA, 90 bp, Homo sapiens
cgccagcatcgccaacccggactggatcaacaccggggagtctgcggggccaattcctgtccccccagcagcatggcatcgtgtgctgaa

SEQ ID NO: 253621 - DNA, 101 bp, Homo sapiens
gacaggctcttacagtgcactcggcaggcagtacccctcttctctggtcttactgaagtaacacaaagcttaaaaatggaaaatgaagagtttaagaagag

SEQ ID NO: 253622 - DNA, 50 bp, Homo sapiens
tgggtgctggccctgtgctggagccgtcaagggattctgggccacccgcc

SEQ ID NO: 253623 - DNA, 83 bp, Homo sapiens
tcagtgtcttttctgcctgctcagttccagttgtcacatccaaggattaatgtcgtgcttgctggtggccacgttgtgccccg

SEQ ID NO: 253624 - DNA, 51 bp, Homo sapiens
tccctatgttacgtggatgtttgtaacgcaaaggcagctcgagcatctcat

SEQ ID NO: 253625 - DNA, 101 bp, Homo sapiens
ccctttcacctatgaaagcaaacgtatgggcatcatcgtgcgggttcagattcagaacaagaaagtggacatctctaaggtctcctccaagtgtgggtcta

SEQ ID NO: 253626 - DNA, 50 bp, Homo sapiens
aagacttgtaacctggagaagagatggtcagtaggacagaaggtaacatt

SEQ ID NO: 253627 - DNA, 98 bp, Homo sapiens
agaaaagaatttgcatgctgtagtacaaactccagcaacagttgggcaagaatatcaagtttgggcagcggtcacccaatgccattcccatgaataag

SEQ ID NO: 253628 - DNA, 100 bp, Homo sapiens
gagtggagtctttggctggctatgcagacatctttctgttacatgaacatgcagcctacttggtggacagtttatgggagagctctcaagaactgttgaa

SEQ ID NO: 253629 - DNA, 100 bp, Homo sapiens
aaggaccggtacctgccggacacgcttctcttggagctcctcaacccctgctggtgcccgaccgagctggtggtgaagggggagcataaggagttcccgc

SEQ ID NO: 253630 - DNA, 75 bp, Homo sapiens
ttggagctggactctcagacattctgctgtattccttaatctcacagaaagttctccgctcccagacatgggtcc

SEQ ID NO: 253631 - DNA, 75 bp, Homo sapiens
aaacaaagccgtctgtagaggatcctttccccattgacagtcattttgtttactcattcagccctgttgcaggtc

SEQ ID NO: 253632 - DNA, 75 bp, Homo sapiens
gagggaaaaggacgccgcggtcttcccaggcgtcgcggagagcaggatgatcggctgaatgtaacagaggaacta

SEQ ID NO: 253633 - DNA, 96 bp, Homo sapiens
gagaggagagcggtgcggaggactgagatcactccaagaactgaggcccctgtcagcagtgtcagtaatagtttggagaatgccctgcacacatca

SEQ ID NO: 253634 - DNA, 82 bp, Homo sapiens
tctgcgatacctgcctgcaggagttcctcaggtaactaggatttctacctcaaccgcgagacctatgcaaggacggtgtgga

SEQ ID NO: 253635 - DNA, 82 bp, Homo sapiens
cggtcactgtggagtacatcacccgctacatcgccagtctgaagcaggtggataatattaatgcagctgtgatggatttgaa

SEQ ID NO: 253636 - DNA, 75 bp, Homo sapiens
aatccccccgaaaggaccccccagaatctgatgttccagcagaaatccaggtgttaaaagaacccctacaacagc

SEQ ID NO: 253637 - DNA, 100 bp, Homo sapiens
gaaaaggagtcaggaatgcctcttaggccatttcataattctgaatcatgtctgataacggagaactggaagataagcctccagcacctcctgtgcgaat

SEQ ID NO: 253638 - DNA, 101 bp, Homo sapiens
gctctcctgtctgccaccatcctgggttgacaattctacacaaggaggaagggatgagaccatgcagcctgcgaaaccatcctttcttgaatattttgaac

SEQ ID NO: 253639 - DNA, 100 bp, Homo sapiens
ctggcaggcgagggagcccgcgtcggctgagagcccacaggcccccacagatctaccttctgagatatcatccttcttcagggagataaggaaaaaaagc

SEQ ID NO: 253640 - DNA, 74 bp, Homo sapiens
ttttttgaaagaacaagttgatgcttcaaattgtcttggtgaatctggattgggaaagtcgacattaatcaact

SEQ ID NO: 253641 - DNA, 75 bp, Homo sapiens
tcaccaaaggacccagtcctcccaatgaaattttttacacaacctgaaaagcttctcaataggtttggcatggac

SEQ ID NO: 253642 - DNA, 75 bp, Homo sapiens
cttctactgacgaagcttggaagttgcagaaggcaaagtgtttcatggatttcaaagctggaggcgccttatgtc

SEQ ID NO: 253643 - DNA, 82 bp, Homo sapiens
ccggcgcccggccatggcggtctccagttgctgctgacacgccgaccgcctgctgcttcagctacacctcccggcagattcc

SEQ ID NO: 253644 - DNA, 100 bp, Homo sapiens
gaaccagatgccctgtccgtcggcgctggtgacttttcttggtagagatggaaatccaaataaacggaatgtgcacaatgaaacatctatgcatttgttg

SEQ ID NO: 253645 - DNA, 97 bp, Homo sapiens
tgctcttcgtgtccatgctggaaaccttcggctccaaagacgatgacaagatggtctttaagacagcaatggctgccatccggaagaaactggtgat

SEQ ID NO: 253646 - DNA, 75 bp, Homo sapiens
tctactaatggacagttagtcacccacctacatgttgagatggagtcttgctctgtcaccaggctggagtgcagt

SEQ ID NO: 253647 - DNA, 98 bp, Homo sapiens
ctaaagagagcagtaccctgatggagtcccttgcagagacctgtcggccatggagcctaatgatagtaccagtaccgctgtggaggagcctgacagct

SEQ ID NO: 253648 - DNA, 140 bp, Homo sapiens
ggatcaccggcgtgccccaccatgtcagacgcagccgtagacaccagctccgaaatcaccaccaaggaatgaatctgaagtctgctgcagtaaaacacagaaggctttaaaatgttttcttgcataaaattcaaaacttt

SEQ ID NO: 253649 - DNA, 100 bp, Homo sapiens
agccctcgcccggcgctccagtagcaggacccggtctcgggaccagccggttccatcttagcccacatccagaagcaaaagcacttcaatgagcgagaag

SEQ ID NO: 253650 - DNA, 100 bp, Homo sapiens
atgatgatggaaatgaagtataataccaagaaagccccacttgcatggcctcacaccactgttacttggtgtacatgagcaaaaacagcaagtggtgaaa

SEQ ID NO: 253651 - DNA, 74 bp, Homo sapiens
ggcgaaatgtggaaaatttcctagaagcttgcagaaaaattggtgtacctcagtgttctggacttggtgcctct

SEQ ID NO: 253652 - DNA, 75 bp, Homo sapiens
ggaacagaatcaacccagaacggagagctccctcctagaaaagagtcaatgcatgtgttgatgtggtgctctcag

SEQ ID NO: 253653 - DNA, 75 bp, Homo sapiens
catgaggagtataggagcaagggcgtctttgtgcaggcccggtggttctgggaagcgtacttccagtcaattaaa

SEQ ID NO: 253654 - DNA, 100 bp, Homo sapiens
ttcaaaccccggattgtcccctactacagggaccccaacaagccctacaagaaggtgctcaggttcaagggcagcaggaaagacgagatcctgggcatcg

SEQ ID NO: 253655 - DNA, 129 bp, Homo sapiens
acaaattgtcgtagaccgagtggatgcagaagatggacagtatgatgttatgtttatcggaacagaggtctctttggaagcaataatgatgactataacaagaacttatcttgctttgcaagattcttc

SEQ ID NO: 253656 - DNA, 83 bp, Homo sapiens
cagaaggagcaggattaccaaaggtgggagattcttcacagtcaagctcccagttgctcttgatcctggggccaagatttcag

SEQ ID NO: 253657 - DNA, 75 bp, Homo sapiens
ggccacatatatgcgaatctataagaaaggtgatattgtagacatcaagggaggagatatcaccaaacatgatgg

SEQ ID NO: 253658 - DNA, 100 bp, Homo sapiens
ctccttttccctctccctttccctaaggttctagtaaataccgcttgctgtgttttgatgttggtggctaagctcatccagtgtattgtgtttggccctc

SEQ ID NO: 253659 - DNA, 122 bp, Homo sapiens
caactctgcagtggaccacagcattcctgaaatacatccaggaaagacatggagattctcttaaaaagtctcacaccattttgctggtacagcctaccaagaggccagaaggcagaacttat

SEQ ID NO: 253660 - DNA, 90 bp, Homo sapiens
aaggatatcgacgtcgtgatccagaagtccagagctgaggactgcctgtttgcagcctcaaggaataggttctcctagtgtctatcatgc

SEQ ID NO: 253661 - DNA, 100 bp, Homo sapiens
gagactgggcggccggccgacccttcctgtcgctgacggcgactgcgggaggccagctgccccagagcacatcagctatgtgccccagctctcaaacgac

SEQ ID NO: 253662 - DNA, 100 bp, Homo sapiens
caggacctactccttcctgaacctcctgttcctctgctatccaataccctctaccatctgctttggtcagggtgccgctcgaggatttaaaagcaacaag

SEQ ID NO: 253663 - DNA, 90 bp, Homo sapiens
gccaagtatgggagaagccatgctggaatgaacatgtgggaccattttgtgcagtttctcaggagcaggacatcgagactttacatggct

SEQ ID NO: 253664 - DNA, 100 bp, Homo sapiens
tggctgagaggtctgaggctagtctgaaggtgtcagagttcaatgtcagttctgaagtggataagtggttccatcaccagaaaaactaatgagatttctc

SEQ ID NO: 253665 - DNA, 75 bp, Homo sapiens
agcccaacttccagcaggacaagggcgccctgcgtccggcagaggaggcgagcatcccgctcaggtgatgaggaa

SEQ ID NO: 253666 - DNA, 100 bp, Homo sapiens
cgaagttcgaatggatcgcctgcttcctcacatgcataatatagttgagagtgccaaggagtaccgacagcgaagcctactggaaaaagaactgcttttc

SEQ ID NO: 253667 - DNA, 75 bp, Homo sapiens
cacggcgactggacttacgaggagcagtttaagcagggcgaccattgacgaggtggagacggacgtggtggagat

SEQ ID NO: 253668 - DNA, 90 bp, Homo sapiens
ctctgaggaccctgaccagcagtacttgaaatgagccgtcagactgctacagcattacctaccggtacctcgaagtgtccaccatcccag

SEQ ID NO: 253669 - DNA, 90 bp, Homo sapiens
gacgcccgcaggtcctcgcggtgcgcaccgtttgcgacttgttggaagctgaaggtgttcctgaagtatctgaaaaatatgaaattagct

SEQ ID NO: 253670 - DNA, 50 bp, Homo sapiens
gggacagcgaggagctgagggaccctaaatggtggagtcaatgaagaaag

SEQ ID NO: 253671 - DNA, 75 bp, Homo sapiens
cgcgaagaggctggactcggattcgttgcctgagcccgcggcgccatggctcacgtcggctcccgcaagcgctcg

SEQ ID NO: 253672 - DNA, 50 bp, Homo sapiens
agaaggggagtgcccgcggcaggtagttttggatgttgggtgtggaactg

SEQ ID NO: 253673 - DNA, 134 bp, Homo sapiens
tcctgtatacattaacaactgcttttactctggcccacatccattatggagtacgagtgggaagcacttggagaatatttagatgggaagaaggagagtgaggaggatcaaagcaagagctacaaacagaaaga

SEQ ID NO: 253674 - DNA, 75 bp, Homo sapiens
gtgcctcttcaccatgttcggaatgctgctgttcgctggtgggaagttctccaaggagaagtacatcctggactc

SEQ ID NO: 253675 - DNA, 90 bp, Homo sapiens
ccggctccggcttctgctgttgctcttctccgccgcggcactgatccccacagatgcctgtgaggagccaccaacatttgaagctatgga

SEQ ID NO: 253676 - DNA, 75 bp, Homo sapiens
cacgcagctggctggcttcagtggaccagtgtttggagaagagggattgaccctgaatcttgaagacgttcagcc

SEQ ID NO: 253677 - DNA, 80 bp, Homo sapiens
catatttttggacctgaaacagaaattctggaacacctatatggatgataatgaagataattcaaatgatgggacccagc

SEQ ID NO: 253678 - DNA, 75 bp, Homo sapiens
gattgccaacagtgtatgctcgaaatcctggatactgcagggacacaggaggagcaatctcagaactgttatgaa

SEQ ID NO: 253679 - DNA, 74 bp, Homo sapiens
acacctggaagccgggaaatgaagtgacagctttgagaaccccgtgctgcagcagcacttcaggaacctggagg

SEQ ID NO: 253680 - DNA, 50 bp, Homo sapiens
ctgcagcctctctgacaagtggccaatggccatgtgtctcaggatcaaga

SEQ ID NO: 253681 - DNA, 50 bp, Homo sapiens
cgcctaccacacacgtgaagtccagatgggggctccggaggtggcgccca

SEQ ID NO: 253682 - DNA, 100 bp, Homo sapiens
tggaggcattttggggcagaatacagagatatggaatcagtggatccaaacttctacagcaaaaacttacttcttttaggaaagacatacttgaaactac

SEQ ID NO: 253683 - DNA, 90 bp, Homo sapiens
gagatggtcccagaggcctggaggagcggactgaatcctattccattgcgggcagtgaggggagtatatcggcttctgctgcctccggtc

SEQ ID NO: 253684 - DNA, 100 bp, Homo sapiens
cagcttcgcagtcactaatgcttttcacctgtggcagatgatatcatccagcccgctgcccccgcagacctggaaagcccaaccttagctgcctcttcct

SEQ ID NO: 253685 - DNA, 98 bp, Homo sapiens
agcggggctttggacgccggtggagacgcaggcgagacctgcgaccgcatcaagcagtccgccagcggaaccaagcggcgcgtgttcatcatcgagac

SEQ ID NO: 253686 - DNA, 79 bp, Homo sapiens
cgagcccggacggcgcctctcgaacgagtgtgggcgcgaggcagccaaaacagagtggagtacgagaaaagggtccgag

SEQ ID NO: 253687 - DNA, 90 bp, Homo sapiens
ggttgacaaggctccactcagacagctctcggatacagccgacaccatgggtttcggagacctgaaaagccctgccggcctccaggtgct

SEQ ID NO: 253688 - DNA, 98 bp, Homo sapiens
cgcggctgccggctggatgggaagttaatgtttacggcgaagtctactcaacgtttccaaggctcgcttctcatatgtgcggatgaaatatcttttct

SEQ ID NO: 253689 - DNA, 80 bp, Homo sapiens
attcgagtgaccgagaccgcggccgggaccgaggattgtcactgctgttccaagggcacacgcagagggatttggaattc

SEQ ID NO: 253690 - DNA, 96 bp, Homo sapiens
acgggacagagcggtcggtgacagcctcaagggcttcagcaccgcgcccatggcagagccagaccagacttttcttggtctcctggtggtaacata

SEQ ID NO: 253691 - DNA, 100 bp, Homo sapiens
agacgagtacaacagcggcgtcatctgtgagaacacctgcaagtccacccagatcaagacctactcatgggacaatgcccaggtgctgctggtaggaaac

SEQ ID NO: 253692 - DNA, 75 bp, Homo sapiens
agcgcctggaggctcgagcggaggtgtgtgctgtatttatggagtttaaagattaatcatcccaaaacattgttt

SEQ ID NO: 253693 - DNA, 75 bp, Homo sapiens
gcagccaatgatagaccacctggttaccatgaagatcagccactgggatgggcgatcagtgggtgaccgcggctg

SEQ ID NO: 253694 - DNA, 90 bp, Homo sapiens
ctggacaagatgaagtctttctgccagctggaagctctttgacatcctttggaacagaaacatcaaacagtggtaccttaccccaaagta

SEQ ID NO: 253695 - DNA, 100 bp, Homo sapiens
gtgcttgatatcacagaggaaactctgcattctcgcttcctggaggaccctgatgcttggtgtgacctgagtaaatttgacctccctgaggaaccatctg

SEQ ID NO: 253696 - DNA, 100 bp, Homo sapiens
ttttagtacattgcaaccaggaaaagcctctttagcttatttttgtcaagctgggacttaagtcacaacagattatctttcatcaaggcaagttccatga

SEQ ID NO: 253697 - DNA, 87 bp, Homo sapiens
aggagcggggtcgacggtccccactttcccctgagcctcagcacctgcttgtttggaagcttcctgcctgacacagctcacttcaag

SEQ ID NO: 253698 - DNA, 76 bp, Homo sapiens
tgcaccggggcggtccgttgccaaagccaggtccttgaatgggcaagagggcacatgaagtacggcgtcctccaca

SEQ ID NO: 253699 - DNA, 82 bp, Homo sapiens
acctggaagcgggagagtggtctggtatctcaaatctgtgaagtattgtagaggagacacaaaaggaattgggggtcacaaa

SEQ ID NO: 253700 - DNA, 96 bp, Homo sapiens
ggagcttccgggagggcggctcgcaggctcccacatcaggacgagaaggagccctcgagttaccgtgggagctgtgggagctgccctgtgactctt

SEQ ID NO: 253701 - DNA, 100 bp, Homo sapiens
ctcctgcttctccttgcctcgaaatggaccccaactgctcctgctcgcctgggcttccttcctcggctccaccctgtggatgtaatggcggcccctgctc

SEQ ID NO: 253702 - DNA, 100 bp, Homo sapiens
accggacactttgttattggagaaacatgcagattatatcgcatcctatggctcaaagaaagatgattatccttcagcttatgtattagagatttttaaa

SEQ ID NO: 253703 - DNA, 82 bp, Homo sapiens
gattaacggcatggatgaacaaattatgtcttgggcaacttccagacctgaggtgctatgcttacatttgaaaagatttcat

SEQ ID NO: 253704 - DNA, 90 bp, Homo sapiens
acaacaacaactgcgaggaaaatgagcagtctctgcccccgccggccggcctcaacactagaaggtcttcagtttccagaagaaccaaag

SEQ ID NO: 253705 - DNA, 75 bp, Homo sapiens
acagtctgcaccttctcttactgctggcctgatcctggccatgaggttggatgcctcaccttactgaaaggagac

SEQ ID NO: 253706 - DNA, 82 bp, Homo sapiens
gcgcggattcgccgaggcaccgaggcactcagaggagaatagcctaacatggcagaccagagacagcgctcactgtctacct

SEQ ID NO: 253707 - DNA, 103 bp, Homo sapiens
tggttttccactccattgttgttagaagccagtgccaaacccaagtctgaaatccacgtgtctatggccactccggtcactgtgtccatggagactgtatcca

SEQ ID NO: 253708 - DNA, 100 bp, Homo sapiens
ctggaggctggtcctgctggctctgtgggtgtggcccagcacgcaagggaagaaggagaaagggccaacccctgaagaagcaatacagaaactgaaggag

SEQ ID NO: 253709 - DNA, 82 bp, Homo sapiens
agatgcaattggaccaagagaacaatgggaaccagtctttcaaaatcactggaagatcaattcttttatcatccatacttta

SEQ ID NO: 253710 - DNA, 83 bp, Homo sapiens
agagaaaattgagagtcagagagcttgtgttttactcaagaaaaatctggtccttcatcagaactaggaaagcactgatttaa

SEQ ID NO: 253711 - DNA, 90 bp, Homo sapiens
atcacggacgagaactggagagaactgctggaaggagactggatgatagaattgaacttcacagacagcgatccccaggtgtttcatttg

SEQ ID NO: 253712 - DNA, 100 bp, Homo sapiens
atttaccagagataattgataacaccctgtaacagctgaagttacactgttagaccttatgatagccaagataacgagtgatgagccactcaccaaggat

SEQ ID NO: 253713 - DNA, 100 bp, Homo sapiens
cagaacaaagtgggaaagggaagcttagcccgccgctgccgcctccgagcagcccgccaggtattgacctgatggacatggcttcggacatcctgcagcc

SEQ ID NO: 253714 - DNA, 75 bp, Homo sapiens
aacctggaccaggaggaggttttcaggaccaaaattgtggaaaagtcactctggattttttatcaagcagaaatg

SEQ ID NO: 253715 - DNA, 100 bp, Homo sapiens
ctgcgacagatcgcggacttcatggccagcacctcccacgcagtcttcccgacatcttccatgacatggcttctcgctgtttctgggatgctgacactga

SEQ ID NO: 253716 - DNA, 75 bp, Homo sapiens
tttggatttaggacatcatgaaaggagcctgcagacagggggatttgcctgggaaggagaagtagaaaacaacgt

SEQ ID NO: 253717 - DNA, 90 bp, Homo sapiens
agcctgggaggccggccggtgccagcacctttcggcttctgagacggcggcagcagcggcattcagggatacccacccaccatcccaggg

SEQ ID NO: 253718 - DNA, 50 bp, Homo sapiens
tttgcaccacgagatgtcactccagaggatatcaatgcttacaattgtga

SEQ ID NO: 253719 - DNA, 100 bp, Homo sapiens
cgccagggccggactgcgagtctctttgcggcgctacactagagcagagtacgagtctgaggcggagggagtaatgagcttacaagaccctatgaaaaaa

SEQ ID NO: 253720 - DNA, 74 bp, Homo sapiens
aaaaaaccttcgactatgcagagacatgagatggtagccaacccctcagaaggtggtcttctgccctgttaaag

SEQ ID NO: 253721 - DNA, 82 bp, Homo sapiens
gaagcgccaggaggaggaggaggtggtgcgcaaggagtccttcaataatgttaaacagtggctgcaggaaatagatcgttat

SEQ ID NO: 253722 - DNA, 88 bp, Homo sapiens
ggaatgaagacaccgtgagcaggctagaggatgttgcttcagagtgtgaagtcaaatgcatgccaacattccagttttttaagaaggg

SEQ ID NO: 253723 - DNA, 75 bp, Homo sapiens
aagaagatgatcttcaacatttgcaagtctgtctgacacttactgccaaacgcatggcaaggaaaaactgcttag

SEQ ID NO: 253724 - DNA, 101 bp, Homo sapiens
gcgtggacaagtgcaaccttctggagggggtatctgtgcagatcaagtgaaagttttcagctatcatcgctaccaaagagtagaaatgaatgaaaatgcac

SEQ ID NO: 253725 - DNA, 90 bp, Homo sapiens
ggagaagaagccaaggaaaaaagttcccaaacaactggggtcaccagtgaaaagttgtgcagagcccaacatgagcttcatttccaagct

SEQ ID NO: 253726 - DNA, 83 bp, Homo sapiens
ccggtgccagcacctttcggcttctgagacggcggcagcagcggcattcagtgcctccggagccagcgtggtggccatagaca

SEQ ID NO: 253727 - DNA, 75 bp, Homo sapiens
catgcaggcaggccctgagcacgctgctgtgtgagcagcaggctgaaggtgatgtggccgccctcaaccgacgca

SEQ ID NO: 253728 - DNA, 83 bp, Homo sapiens
acaaatccctggcccgggtgacccacgcggaggccgtcaaggttcttgatagtccacaatgggtgaaccacagcaagtgagtg

SEQ ID NO: 253729 - DNA, 75 bp, Homo sapiens
agagcatcttcgagatgatggaggtatttgaaatatctcaccaaaaaatatttgaagaagaataatctacgtgac

SEQ ID NO: 253730 - DNA, 87 bp, Homo sapiens
aggggcttcttccagagccaaggaggaagggttgtccggtacagtgctgtggataccaatccactttctctgtatgtcatgcatcca

SEQ ID NO: 253731 - DNA, 75 bp, Homo sapiens
gcctgttggaggaactggcccggaaacaggaggacgttgggcccgaaggcatcctgcagaacggggctgtggacg

SEQ ID NO: 253732 - DNA, 74 bp, Homo sapiens
ttcaacaggtgaagatttacaacttgataaatcagcttcatgaggccaaatttgagtttcatcatggtgactat

SEQ ID NO: 253733 - DNA, 82 bp, Homo sapiens
ctggcctgggcgctccggtggcggcggaggcttctcacggcattcagcagcagcgttgctgtaaccgacaaagacaccttcg

SEQ ID NO: 253734 - DNA, 74 bp, Homo sapiens
aaggagcagcaccaaatccaagatggcggccagcaggaggctgatgaaggtatccaagcccaccaatgggatct

SEQ ID NO: 253735 - DNA, 51 bp, Homo sapiens
atcaaaggcactgattaccagctcagcaagaaacatgatgaaagtattgag

SEQ ID NO: 253736 - DNA, 50 bp, Homo sapiens
caccagatcgcagcaggagacagggagatacttcaggggattaccggaag

SEQ ID NO: 253737 - DNA, 82 bp, Homo sapiens
cgtcgtgatccagaagtccagagctgaggactgcctgtttgcaggtggctatggaccgccccctgcaggaagaggagccccc

SEQ ID NO: 253738 - DNA, 83 bp, Homo sapiens
gtcttcggtggactccttcggcagtccacccaccgccgccgcctcccaggaacgaatgcaggaatttgggaactgagctgtgc

SEQ ID NO: 253739 - DNA, 99 bp, Homo sapiens
cctccccctcccggccaagatgtctgacatggaggatgatttcatgtgcgatgatgaggaggactacgacctggaggaataaacatggtgtgtctcgaa

SEQ ID NO: 253740 - DNA, 98 bp, Homo sapiens
ctgaatcaatgtgctgagctgctggagaaattggaaaagctatttctcaacgaaacatgccaaaggccaggatttgtttgatcagattgtgtaccact

SEQ ID NO: 253741 - DNA, 100 bp, Homo sapiens
gccgaggaggagctggatgccgaagtcctggaggtgttccacccgacgcatgagtggcaggcccttcagccaggagatacaactcgtcaacgaatcaaat

SEQ ID NO: 253742 - DNA, 80 bp, Homo sapiens
gtgtcctggttgagggtctccagggttctttggggcccgaggcaataccaagattttcttgaagatcttgaagaagatga

SEQ ID NO: 253743 - DNA, 98 bp, Homo sapiens
gaaaagcaaggcatgcggacacacgccgtctctgtgtcagaacatgtttgggttgtggaagcctatggtattcttggctattgcagctgtggctctgt

SEQ ID NO: 253744 - DNA, 96 bp, Homo sapiens
tcttgcctcaggccagtcgcctccaggccaagagggatccttcacccgtgtctggtgtagtattgagtcctgtttgagctattgttctctttttcc

SEQ ID NO: 253745 - DNA, 88 bp, Homo sapiens
gaaatgcaactcgaagtggacaaaatgggaaccaaacttggagagcttgaaaatgcctcgtgtaaaagcagctcaagctggaagacag

SEQ ID NO: 253746 - DNA, 74 bp, Homo sapiens
tcccaaagtgctgtgattacaggtggatattccatctattataaccaagaaactattaaaagcagcaatgaagc

SEQ ID NO: 253747 - DNA, 75 bp, Homo sapiens
gctgtcgctgcatctttctcatgaagcacggggaacgggtcggatggatagaatcacttgaattcctggatgaaa

SEQ ID NO: 253748 - DNA, 73 bp, Homo sapiens
ttaaatagtgcaaccacttcactgaactcaaaggtggcattggtgaggctgtgtccagtgcagtagtgggcga

SEQ ID NO: 253749 - DNA, 90 bp, Homo sapiens
atcggcggagaccctcgaagtgcgcaaacttgacactcaccctgaccggagggtgcatctgcccggaagactcagactcctgcagcccag

SEQ ID NO: 253750 - DNA, 96 bp, Homo sapiens
cgcaacctggagtcccactggggtatcccatcaaggcccccaagctgcctggctatgattcccggataggcagtggcagaagagcatttggcagtg

SEQ ID NO: 253751 - DNA, 75 bp, Homo sapiens
gatttgcacagtcggctgggcggtgcaatggcgaatttgccattttcagtggaaaacaagtggtcgttactagct

SEQ ID NO: 253752 - DNA, 50 bp, Homo sapiens
caggcctgtccagccggggcaagaaggagctgcgggaacgggtactgagg

SEQ ID NO: 253753 - DNA, 83 bp, Homo sapiens
gtccgcaacagctcggcacccattacactgatgctcgctacgagttccagggagctctgtcctggtgaccgtgcccgggttat

SEQ ID NO: 253754 - DNA, 100 bp, Homo sapiens
ctcaaacatcgccagtatccggatcagccacggggccaggctcactgtgtcaggtctgctgctaccatcttccgttgatgcaagtggagctgcccatcag

SEQ ID NO: 253755 - DNA, 100 bp, Homo sapiens
cgcccgtccacacccgccgccagatcaaagaccaagctcaccaattcgacatcagggaaggaatgacgagcttgagcgtgatgaaagaagagaggaacga

SEQ ID NO: 253756 - DNA, 96 bp, Homo sapiens
aaattgagaaaagttctttagttattttatttattcacttaacattaccaaggagaagcatttgagatgattcctgaacttgaagagctaaatttg

SEQ ID NO: 253757 - DNA, 50 bp, Homo sapiens
tacaggcgcctgccaccacgcccagggcagaaatttagcatctggagagg

SEQ ID NO: 253758 - DNA, 100 bp, Homo sapiens
gacaacaaaaacaactgcattgtgtacagcaaagccacagacccctttgcttctgtttttgggaatgaatcatttggaggtggatttgctgacttcagca

SEQ ID NO: 253759 - DNA, 100 bp, Homo sapiens
cgggagcagagcgaaccgcaccggcccgagcggagcgccgcacgttcccaaccgcgaggccagggagtggttttcagagacatttcagaaagtgaaggag

SEQ ID NO: 253760 - DNA, 96 bp, Homo sapiens
ctgcgacgttcacagaggaacactgccggggcccaaccacaagacgactcaataggaggaaggatttacttacaagacataaattgctcagtgcag

SEQ ID NO: 253761 - DNA, 100 bp, Homo sapiens
cggggaatggccgcggtgtggcagcaagtcttagcagtggacgcgagcagtaagccgaaaggatgaagagttagaccccatggaccctagctcatactca

SEQ ID NO: 253762 - DNA, 123 bp, Homo sapiens
aaatctacaaggttccttccactgaagcagaagccctggcatctagaaatgtgaatttcactgtgagcgcagaggcactagagtctcaagagctgtgtgggactgaggtgccttcagttcctg

SEQ ID NO: 253763 - DNA, 100 bp, Homo sapiens
cgagatgacaatctagaaacttattggcaatcagatggttcccagcctcatttagtgaacatccaattcagggaggtcacaatcacattgagccaaaacg

SEQ ID NO: 253764 - DNA, 100 bp, Homo sapiens
ccggcccacagtgggggtgtgcaaacccgagagaactggatcctttgcacatggcctgctatcaacaatcctctacaatgattctcagcatcacctaggg

SEQ ID NO: 253765 - DNA, 74 bp, Homo sapiens
gttgggacttgggaatcccagcttttcagatccatttacagctgagatctgtatctgtggacctgaatgttgat

SEQ ID NO: 253766 - DNA, 100 bp, Homo sapiens
atctgctacaatgtactggatcgaaatgtccatgagaaaaagcttggagataaagttgctttttactggtggacccaagtggagagattgtggaactggc

SEQ ID NO: 253767 - DNA, 96 bp, Homo sapiens
gtgaaactgaacttataatcgtcactggattccgagaaggtgagctccctggggaaggactggcacaagttctgcctcaagtgcgagcgctgcagc

SEQ ID NO: 253768 - DNA, 50 bp, Homo sapiens
cgaagaagctgatcataattcattggattctggactctacttataatatc

SEQ ID NO: 253769 - DNA, 50 bp, Homo sapiens
ttcgcagtggtcgcttcttctccttgtttcccgtcaccaattttccttgg

SEQ ID NO: 253770 - DNA, 100 bp, Homo sapiens
agaccttcaagcagcgccgcaccttcgttcctggactattgtaggggttgctgccctcatcctgttcctggtagcactgctggctcgtgtcctcgtcaaa

SEQ ID NO: 253771 - DNA, 75 bp, Homo sapiens
aggctctacactgggatgcatacggtcctggtatgggctacgtgagttcgtggtgattgcccctgctgcacacag

SEQ ID NO: 253772 - DNA, 50 bp, Homo sapiens
aggtgacagtctgcatgtgcagttttcagtctgcgctcctcagaccaccg

SEQ ID NO: 253773 - DNA, 75 bp, Homo sapiens
gctgttagaaggttctggtcttgcactaaggatgtacagttacccagcacgtgtacctcctcctcctcctattgc

SEQ ID NO: 253774 - DNA, 114 bp, Homo sapiens
cccgactctagccgcctcttcagctcgccatggatcccaactgctcctgcgccgccgaatataaaaaggcttctgcagaaccccaaagtgacagagtttgatgctgcccgcctg

SEQ ID NO: 253775 - DNA, 75 bp, Homo sapiens
acctccgagcgcaaggacagcgcgaggtccgcgcagcccagcgcagccattaagaagacatgttggataacaaga

SEQ ID NO: 253776 - DNA, 75 bp, Homo sapiens
cgggtcccgcgggccaggccgtggaggcacctctgtgggcatatattgcttgtgcctgtggccttttcatttacc

SEQ ID NO: 253777 - DNA, 78 bp, Homo sapiens
atgaaatttttgggaaggtgcaaggggtgtttttccgtaagcatactcagttacatggacacagaacagtatgaagaa

SEQ ID NO: 253778 - DNA, 101 bp, Homo sapiens
gtcgagggaatgcagaaagagttaaggaaggcagctataaagcgttaacagccagtgagatagaagatcttaagctggagaactcatcattacaggaaaaa

SEQ ID NO: 253779 - DNA, 75 bp, Homo sapiens
ggccgaggcgggcggatcacgagactgcattggagagaaaggcgccgggacagaaaagcctgagataaaccacct

SEQ ID NO: 253780 - DNA, 97 bp, Homo sapiens
ccagatgtggaaccatatccgtggacctccatatgctcataagaacccacacaatggacaagtgcaaattgccttcaagaacctggtgcagagaaac

SEQ ID NO: 253781 - DNA, 50 bp, Homo sapiens
acggatacctcggagtggcggaccacaagctaaggcaggaacggatccaa

SEQ ID NO: 253782 - DNA, 90 bp, Homo sapiens
cgcgcggctgggcgttcatctaccacgcctacgtcaaacggggattcagcgtccgatcctttggaacagggactcacgtgaagcttccag

SEQ ID NO: 253783 - DNA, 51 bp, Homo sapiens
gaaggctgcgagggactaagagcagagcaaccccattccagctgccattga

SEQ ID NO: 253784 - DNA, 98 bp, Homo sapiens
cttccctggctgtgctggcggaggctgcgccgatgaacctgactgaggtcctggaccggatcaaaggctcactgctgccccggcctggccacaacttt

SEQ ID NO: 253785 - DNA, 100 bp, Homo sapiens
caacagcatgcgccatgagattgagggcacggggctgccgcaggcccagctgctctggcgcaagggtggcttctccttcagtacgctggactgcggctgg

SEQ ID NO: 253786 - DNA, 101 bp, Homo sapiens
aagaggaggacatcccatgcggctactcctgcccagcgtggtggggcagcagaagctccagagcccagacttgcaggatttccagactgtattaccatcat

SEQ ID NO: 253787 - DNA, 88 bp, Homo sapiens
taaaaaggcaaaaaaacctgtaggtggtaatgctcctttatattatgaggtggaaccgtcccaaaatgtcccttgctcagaagaagga

SEQ ID NO: 253788 - DNA, 80 bp, Homo sapiens
gcgtaaagccgcttccctcaagagtaactacaaaggtcatgacgccagtcagatcacactagccttgggcacagctgcct

SEQ ID NO: 253789 - DNA, 74 bp, Homo sapiens
gacagtggagatgaagcctaagaatatgatcagatgcacaagtctggcgttctgaggaaggccattgattacat

SEQ ID NO: 253790 - DNA, 74 bp, Homo sapiens
cgtaaagtggttggttgcagttgtgtagtagttaagagtgctgatggcagagattggtgaggatttggataaat

SEQ ID NO: 253791 - DNA, 75 bp, Homo sapiens
tggatgacagtcaccgacagaaggatgaagttgcggagaataatgaacatgatgtcacttctactgaattagatc

SEQ ID NO: 253792 - DNA, 82 bp, Homo sapiens
ctggtggcgtcggcaggttcgaggcgattcgagagcatccaggatgtgaggagtgatgacgaggattatgaagaggaagagg

SEQ ID NO: 253793 - DNA, 100 bp, Homo sapiens
ccctcggtcgcgagtatctccgtttcctggatgtgaacagtccggcagcgtcttctcttgagggagcaatttggagaagagctggaacccagactcgcgc

SEQ ID NO: 253794 - DNA, 100 bp, Homo sapiens
tggcctatggcgagaaaggctatgaaaccagcctggacaccaagtctgtgtcagaaggccacctcaagaggaacatcgtggtgaagaccgtggagatgcg

SEQ ID NO: 253795 - DNA, 75 bp, Homo sapiens
tggattctagaggggtgacagcgaaacgcagcctggcatcctcgctacaacctcattgttgtgggccgataccca

SEQ ID NO: 253796 - DNA, 75 bp, Homo sapiens
aatcgctgaagatgttgatggagaagctctaagtacactcgtcttgaataggtatgttgagtctaaaaaggacag

SEQ ID NO: 253797 - DNA, 75 bp, Homo sapiens
tggatccatttctcctattgaggagtcaacggcctcagacctaaggcaggagcaccccctatgccagacctcctg

SEQ ID NO: 253798 - DNA, 100 bp, Homo sapiens
gcgccagattcgtagcaggttccagctgaatcttgacaagaccatagagagttgcaaagcacaattagcctgtggacatctctacagcaatgagtgaacg

SEQ ID NO: 253799 - DNA, 75 bp, Homo sapiens
ctctgggaaaagcaatctgtggataaggtcacttcccccactaaggcatctgggaacaaagtcagtcgccagtca

SEQ ID NO: 253800 - DNA, 80 bp, Homo sapiens
gaactggcttcgggaattttaccagagctggaagtcgagtgtgctactcaactcaggagatttggagacaaactgaactt

SEQ ID NO: 253801 - DNA, 82 bp, Homo sapiens
cattaagaagcagatcctgaaacacctgtcccggtcaaaatgcagatcttcgtgaaaacccttaccggcaagaccatcaccc

SEQ ID NO: 253802 - DNA, 100 bp, Homo sapiens
aaaaagcagtgggatttggatgtgggatccggttccttggtgtcatccagccttagcaaaccagaggtcaaaatgcagatcttcgtgaaaacccttaccg

SEQ ID NO: 253803 - DNA, 82 bp, Homo sapiens
agaaataccagtccccagtgagggtgtacaaatacccctttgaattaattatggctaaggtagaagatagcaccatgccgat

SEQ ID NO: 253804 - DNA, 98 bp, Homo sapiens
tacactttctcaagcactgtgatcttcaaatgtaagaacaagagagttggaaagcagttagcctcacagaagatccttcagctgctgcacccacatgt

SEQ ID NO: 253805 - DNA, 76 bp, Homo sapiens
gcctgagattgcacaagctgtggaagagatggattggctaataactgaagtgaagtgatggactccgatttggaga

SEQ ID NO: 253806 - DNA, 75 bp, Homo sapiens
tgtatgtctttggagaacttctggagctggccaacgtgcaggagattggtgctgaagacatggacggcttccagg

SEQ ID NO: 253807 - DNA, 100 bp, Homo sapiens
tttgacgctgcctacttcgggcagaaggactctgtgtgtggttgacatcatggacatatgtgagtccatcctggagaggaagcggcatgacagcgaaagg

SEQ ID NO: 253808 - DNA, 124 bp, Homo sapiens
agaacgtgcgcggggtgatcaccatgaacgaggagtacgagacgaggttcctgtgcaactcttcacaggtagacgttacatccaagaggaaataatccaggcaaggaagcacaagctgatcaag

SEQ ID NO: 253809 - DNA, 75 bp, Homo sapiens
cctggagcctcagttggaagcagccgatccagcctgcggagcctgtggggcagtttttggtgttgagccagactt

SEQ ID NO: 253810 - DNA, 90 bp, Homo sapiens
gaagctggccgagcaggctgagcgatacgacgcctccacaaatgggaagtgttcctgtaatgacgcaaccaaccttaatatacagccagc

SEQ ID NO: 253811 - DNA, 100 bp, Homo sapiens
tcccagggagtgcaagcttagagcgtctggccaagaatcagaggaagtgggttaaagctgaagctcaacaaagatatagtgatctctgtgggcatttata

SEQ ID NO: 253812 - DNA, 96 bp, Homo sapiens
ggaagtgatttgtcggatgaagataagacactttctcagttacagagagggtttcatcaccttaaatggttttgaaccaatgaaggtgtattccct

SEQ ID NO: 253813 - DNA, 101 bp, Homo sapiens
gataatggaaaacctgtgcctttagatgaagagaggcatgttggagacttgggcaatgtgactgctgacaaagatggtgtggccgatgtgtctattgaaga

SEQ ID NO: 253814 - DNA, 74 bp, Homo sapiens
aggaagcggagggcgcgcgagggttaattatagaaaatgccaagtaggaaatttgccgatggtgaagtggtaag

SEQ ID NO: 253815 - DNA, 75 bp, Homo sapiens
gcaagttgttggaacagtgacttgcaagatgtgttcagagcaacattgttttgttgacacaagcatttagaagaa

SEQ ID NO: 253816 - DNA, 100 bp, Homo sapiens
tgcatctccaagcccgaacgccccatgaagttcctccgggagcacttcgagaagctggagaaggaaggatgccaattctgcgcttctcagtaactacgag

SEQ ID NO: 253817 - DNA, 75 bp, Homo sapiens
gtggaaaggatggcccccaaacaccccccggggaaagacattttctgctcccaccgagttggcagggcctgcttc

SEQ ID NO: 253818 - DNA, 98 bp, Homo sapiens
ttacaaattcagtgccttctgcagtttccccagagctcctcaagaataacggaagggagatcagcaaagacccgatttttgtaccaggcgtctggggg

SEQ ID NO: 253819 - DNA, 100 bp, Homo sapiens
cctgatggacttccccatttcatggagactcctcttcagcccccacctccagtgcagcgagttatggacccagcaaaccagtccagctacgggggcccag

SEQ ID NO: 253820 - DNA, 100 bp, Homo sapiens
tgggaggtggacgtggcggcccagctgggcgagtatctggaggagactattgcccagaagaaaagatgtttggttttcacaagccaaagatgtaccgaag

SEQ ID NO: 253821 - DNA, 82 bp, Homo sapiens
cccttccccacgcaaccccagatccatttacactttacaaaagcgtggatacccatcaacgaagttttgatattggaattca

SEQ ID NO: 253822 - DNA, 82 bp, Homo sapiens
agaagaccaagtacctgcagatcctgacctctctgatgagatggatcggaatactcccccagttgcaagaggcgcaggaccg

SEQ ID NO: 253823 - DNA, 100 bp, Homo sapiens
ggaggatttgcatgcgtttattgcgcaggccttgtgcctccaaggaaaatccacctcgcagcttgtaaatctacaggatgacagtgatgggattccgtgg

SEQ ID NO: 253824 - DNA, 75 bp, Homo sapiens
ggaataaaaaccaacatcaagtcggcttccatgcatccctaccagcgtactatggactacaaattttggaaaatg

SEQ ID NO: 253825 - DNA, 71 bp, Homo sapiens
ctggtacccctgaaggagaccatcaaaggattccagcagattttggcagaatctcatgaccaccctcccaa

SEQ ID NO: 253826 - DNA, 80 bp, Homo sapiens
ttggcacccctttgaagagaagattgtcagcagttcggacctagatgtgaaggctggtggaggctgtgtaatgaccattg

SEQ ID NO: 253827 - DNA, 100 bp, Homo sapiens
cttttgtggcggatctagcttctcctcgccttcaggatgaaagctcagggggaaaccgagggctggagtgcagtaacaccactgaagctcactgtaactt

SEQ ID NO: 253828 - DNA, 82 bp, Homo sapiens
gcgcgaccgccgaatcgctcctgcagcagaggttgtggcagcactgcctgaaggtatgagaccagattctaatctttatggt

SEQ ID NO: 253829 - DNA, 82 bp, Homo sapiens
atggcggctgctgtaggacggttgctccgagcgtcgcaaacggggattcagcgtccgatcctttggaacagggactcacgtg

SEQ ID NO: 253830 - DNA, 90 bp, Homo sapiens
ctttcattgtcttttccgcccgcttcgatcgcctcgcgccggctgctctttccggaacttggagcgtgatgcccagaagtgtgtgaactg

SEQ ID NO: 253831 - DNA, 51 bp, Homo sapiens
tgaactactgccggagcttctgccaggactgcctccaagtggaagttggca

SEQ ID NO: 253832 - DNA, 83 bp, Homo sapiens
agctccaggagttcgtctcttacgtctgcggaagtgcagctgcctcagttcttagcgcaggaggatacgaagcgttttcggct

SEQ ID NO: 253833 - DNA, 75 bp, Homo sapiens
gaataggagctggggagcccttctgcgccacagatttcagagacaactgtctgaaccctgccaccccttccctcc

SEQ ID NO: 253834 - DNA, 50 bp, Homo sapiens
ccagaatttctcctcataaaaaaggtgaaaggtgtagcagtcactcggcc

SEQ ID NO: 253835 - DNA, 75 bp, Homo sapiens
gtttctggtatcagtgacccctttttgcagaagtgctttggggacgagtactacggggccgtggaggaggagaag

SEQ ID NO: 253836 - DNA, 75 bp, Homo sapiens
gtggatcggggacggagagaacacgagcccatcagctgggagtgtccactcgccttccaccagcatggcaacgtc

SEQ ID NO: 253837 - DNA, 83 bp, Homo sapiens
tgtcccttcgagaaaaacgtggaatcgacgagtatgaagtgtaacagaacagactttaccacctgaaactgctgcttcaagtt

SEQ ID NO: 253838 - DNA, 100 bp, Homo sapiens
tacaaggaaatgatggaggaggcaaatggacaaattgccccagaaaacgggacacagacccccagcccgcccagctggagtgcagtggcgtgatctcggc

SEQ ID NO: 253839 - DNA, 100 bp, Homo sapiens
gcagcgaatcgtgatcttcacccaagggagagatgacactataatggctacagctcttgtaaatgtaaaactctgggccattgatcgacaatgttttcaa

SEQ ID NO: 253840 - DNA, 100 bp, Homo sapiens
ctgaataaagctccggaatatttacacaggcaccttgctgtgacaagctttatacttgccgcttgtgtcatgataacaatgaagatcatcaactagatcg

SEQ ID NO: 253841 - DNA, 51 bp, Homo sapiens
ctgccaccgctgcccgagcccggcactttgtttatacaaagacggagatat

SEQ ID NO: 253842 - DNA, 83 bp, Homo sapiens
agaacctgcccttcgccaaggagatcgtctctctcatcgaggcccaaaccgccaaggttgacatcatggacatatgtgagtcc

SEQ ID NO: 253843 - DNA, 82 bp, Homo sapiens
ggagacaccttccatcggggcagcgacaagatggcaatagccctctggaacaagacaattcatgtgagataagaaagaagag

SEQ ID NO: 253844 - DNA, 100 bp, Homo sapiens
gcctgttccctaattcttgccgggggatatgagactttctactcggaatatcctgagtgttgcgtggatgtaaaacccatttcacaagagaagattgaga

SEQ ID NO: 253845 - DNA, 99 bp, Homo sapiens
catctacaaccttcgatctcctgacgagaatttgagagcgtattttgcggtaaaactggccgaaggctaaagctgaccagaccggactccttggtgacc

SEQ ID NO: 253846 - DNA, 90 bp, Homo sapiens
cgaggctgaggcgagaaacgaggtgacgcggcgcacggcgcggatggtggccgagtggcagtgtgtgggcttctgccacggcgtgctcaa

SEQ ID NO: 253847 - DNA, 50 bp, Homo sapiens
aggacacctactcatgaaatgtttgttgcagtccagagcgtgagtccatt

SEQ ID NO: 253848 - DNA, 100 bp, Homo sapiens
taaaagtccactactattaaatgacagctgttcccttccagattgacatatttgaggatagaatccgaggcattgatatcattaaatggatggagcgcta

SEQ ID NO: 253849 - DNA, 82 bp, Homo sapiens
agttggaagcagccgatccagcctgcggagcctgtggggcagtgagacggtttaagcggaagcatcttactgccattgactg

SEQ ID NO: 253850 - DNA, 100 bp, Homo sapiens
gagcaccctgatcttccacttcaccttcatcagaactgagcccaggcttgtgtgctcgtgttctctaccacagatagggaatcttttgaagcagtttcca

SEQ ID NO: 253851 - DNA, 100 bp, Homo sapiens
ttccactaaagagttggacctgtcaggtgactctgacatcattagaagcatgccagaacagactggtgaaaagtaaaccttttcacctacaaaatttcac

SEQ ID NO: 253852 - DNA, 92 bp, Homo sapiens
ggacctggatcatggctgccgcgccgccgctacgggaccgcctgagctttctacaccgggcagctggctgccagcctctgggaggacgttgg

SEQ ID NO: 253853 - DNA, 90 bp, Homo sapiens
gcccgagtccacgctgatggactgccgtagacattgttgtactggctaaagtcattagagatatggaccatattactttgtctgcaagag

SEQ ID NO: 253854 - DNA, 74 bp, Homo sapiens
ctccctgccgaagcccagcccctgatgtcccagcagctgctacaggagctgagagaccctaccctcactttccg

SEQ ID NO: 253855 - DNA, 74 bp, Homo sapiens
tgatgatctacttccacttaatgaatagtcaccagtgaaaagttgtgcagagcccaacatgagcttcatttcca

SEQ ID NO: 253856 - DNA, 100 bp, Homo sapiens
tgacactgcagaaacagagcgccttcctgcaggagcacaacaccacactgcagacccagaccgccaagctgcaggtgttggggatgtcctttgcactgac

SEQ ID NO: 253857 - DNA, 97 bp, Homo sapiens
agcctcgtctccgacctactcagtgagctcaacatctctgagatccagaagctgaagcagcagctgatgcagacacaagatggtgaaggagacccag

SEQ ID NO: 253858 - DNA, 51 bp, Homo sapiens
ccgggccacgcaccgcctgctgctgctgggatcaaaatacttgctggatgg

SEQ ID NO: 253859 - DNA, 80 bp, Homo sapiens
tttggccagaatgagtacctacgctatcaggaggccctgagtgagctggccactgcgtatgacttgctcttcatgccacc

SEQ ID NO: 253860 - DNA, 88 bp, Homo sapiens
ttgctggtgttctatactggaagaggcatgccagaggtagagcagggatcatagacggtatttctatgtaaacgaacagtcgggcgag

SEQ ID NO: 253861 - DNA, 100 bp, Homo sapiens
accctgggggatggtgaggctgtgggtgccgacagcggcaccagcagcgctgtctccctgaagaaccgagcggccagactgcaggcaccacctgtgtgaa

SEQ ID NO: 253862 - DNA, 83 bp, Homo sapiens
agacaagacactgaagaaagcatcgtcctaggaatggatttctcctctaatgacagaaatgattctggggaccattctgacca

SEQ ID NO: 253863 - DNA, 100 bp, Homo sapiens
ctagaggatataccagaccctggagtgaactggattccatgtagagacccctggaggaattgaatgatctggcacgggaccctccagcacagtgttcagc

SEQ ID NO: 253864 - DNA, 118 bp, Homo sapiens
agagaatgtaagacaggaaaataattaaatattcttaccgagataatgagtgtgtatatggcaactaccctgaaatacctttggaagaaatgccagatgcagatggagtagccagcac

SEQ ID NO: 253865 - DNA, 100 bp, Homo sapiens
ggtggtccctgaggcccgtggaaggagtcaaacttgcgggaattttgcagatgggaagatccggctggcgacgctggagctgagctgcctgcttctgaag

SEQ ID NO: 253866 - DNA, 73 bp, Homo sapiens
ttgttcagtggtgtgcagacagaaatttcaccaagccgcaggtctatcatttggcaagtgtacgcttacgtga

SEQ ID NO: 253867 - DNA, 75 bp, Homo sapiens
tggctgctgcctcgtgtcacatctgaaactcatctgtacctcacttagaaaggaaagaccacagcaagattcttt

SEQ ID NO: 253868 - DNA, 75 bp, Homo sapiens
gctccttcaaataaagccacagctgctgattcattgtttgaccgacaggacaaatcttcctattttcaagctgaa

SEQ ID NO: 253869 - DNA, 101 bp, Homo sapiens
ttcgtgtgttacaactcacctcttgggatgaagatgcctgggccagcaaggcgattgaccgaggcctggcttttgaacttgtctatagccctgctatcaaa

SEQ ID NO: 253870 - DNA, 128 bp, Homo sapiens
caacagcattggaaatcagattcaaggagtggtcatcccctatacttcagtgccaacatatcagcttccaccaacactttcttccaaatatcctgaagatgacccagactactgtgtgtgggtcccac

SEQ ID NO: 253871 - DNA, 99 bp, Homo sapiens
aggagcaagagcaagatcaccgtgacatccgaggtgcctttctccaaaaggattcttacagaagcagagattgatgctcaccttgttgctctagcagag

SEQ ID NO: 253872 - DNA, 100 bp, Homo sapiens
catgagcatcgtcatgcagctgcagcattagctgctatgaatggacggaagataatgggtaaggaagatgatccctatgatcttgaagatgtttctgcac

SEQ ID NO: 253873 - DNA, 100 bp, Homo sapiens
ccagggccacctaaggagcggaccccgcatcttcgccgtctggaaagatacacaatcatcatcttactagttctctgtgttgctcgctaaccagtccccc

SEQ ID NO: 253874 - DNA, 74 bp, Homo sapiens
caccccctgaaaatgttcgcctgctccaagtttgtctccactccctccttgagtttcgctcttcttgcccaggc

SEQ ID NO: 253875 - DNA, 82 bp, Homo sapiens
tccctcaccgcggcatcaagcaggtccggacccactggctgctggagcttgtcaccaccagctgcctgtggaggaaccgatt

SEQ ID NO: 253876 - DNA, 82 bp, Homo sapiens
gcctcgcgccggctgctctttccgggttcatctctaacaagtatttagtgaaacgacagagcagagactatgatgtggaatg

SEQ ID NO: 253877 - DNA, 74 bp, Homo sapiens
ggcggcgagcccttccttataggcgtcagcgggggaacagctagcggcaaggaaagaccggcagagaccaatgc

SEQ ID NO: 253878 - DNA, 120 bp, Homo sapiens
ggcagacagcggcatacagaatgcctatgaccggcgtcgagaatttcaactggcactggtgaggtggattgatgatgaatcttctggcacacctggagcaactccagaacacagtcgtga

SEQ ID NO: 253879 - DNA, 50 bp, Homo sapiens
ctatcaaccagattcttggcagaagggctaaagaatccctgaaacaggcg

SEQ ID NO: 253880 - DNA, 83 bp, Homo sapiens
tgtaaagtcatcacctcctgggatcagatgtgcattgaggactttgtgttttatgccccacgtctgagaatcaacaagcggat

SEQ ID NO: 253881 - DNA, 100 bp, Homo sapiens
aaattcgatttgcaaatcattcagtgaatcccaactgttatgccaaagggaacctcgagtggttggataagagcaagtccagcttcctgatcatgtggcg

SEQ ID NO: 253882 - DNA, 96 bp, Homo sapiens
cagactcaagatgaggctgtgggacctgcagcagctgagaaaggagctcggggactcccccaaagacaagctggaggagctgatagacatggctgt

SEQ ID NO: 253883 - DNA, 100 bp, Homo sapiens
acccggttccccggcccacagtgggggtgtgcaaacccgagagaactgggtacccactgatggtaatgctggcctgctggctgaaccccagattgccatg

SEQ ID NO: 253884 - DNA, 100 bp, Homo sapiens
gatttgaaagaagccaacactaaaccacaaatatacaacaaggccattttctcaaacgagagtcagcctttaacgcaactttcatcctttgaaacgtgtg

SEQ ID NO: 253885 - DNA, 82 bp, Homo sapiens
gtgttgccatcgcgtctccgcctgcaggcgtcgaccagaagattatgatattcataacagcagaaagaaaccaaggattgac

SEQ ID NO: 253886 - DNA, 88 bp, Homo sapiens
caagacaaatgtgcccttggctgggatcaccaggagaaattgcagctgcatgaatcccaaaaagatgtgaagttcatttccaatccgc

SEQ ID NO: 253887 - DNA, 98 bp, Homo sapiens
ccagatcaacctggagctctacgcctcctacgtttacctgtccatgcctggagatgcccaaagatgagctgcccaaccataactgcattaagcacctg

SEQ ID NO: 253888 - DNA, 97 bp, Homo sapiens
ctggtctggaataggggttgtcagctggaggaacagcagaccttagaggaggccatcaatgtggccactgcggccatgcagcaaggggctgtgaccc

SEQ ID NO: 253889 - DNA, 80 bp, Homo sapiens
tcttgtttgtggatcgctgtgatcgtcacttgcgccaaatcttaaaggcagaccacgcaaaaagaaaccatgcccacaaa

SEQ ID NO: 253890 - DNA, 100 bp, Homo sapiens
tactaacccacctccccctggctctggggagtcccatccacatgaaatgaagatcacctctgcctatctacaggacattgagaatgcctataagaaaacc

SEQ ID NO: 253891 - DNA, 101 bp, Homo sapiens
cagccaccgcccggcgcccgagaggccacctgcgtgctagaggcaaacttttgtctctctcgttgttgacctcctgtactggagagacattaagaagactg

SEQ ID NO: 253892 - DNA, 100 bp, Homo sapiens
accccagggctctaattgaaaagagaatccaattacaccttccaaagcactggccccctcaccttttcctttccagctgtttggggctcagctaagtgac

SEQ ID NO: 253893 - DNA, 50 bp, Homo sapiens
gacagagtggagccatggctagagaggctgaggggatctggcggtggagc

SEQ ID NO: 253894 - DNA, 100 bp, Homo sapiens
gcaaccattgacgccatgtcgggttattcgagtgaccgagaccgcggccgggaccgagggtgatctttgacgagactctacagaagtgcctggactccta

SEQ ID NO: 253895 - DNA, 50 bp, Homo sapiens
caccatacaatgaaagttccaccccctgcctgacttctcacgagtccctg

SEQ ID NO: 253896 - DNA, 119 bp, Homo sapiens
ccgcaccacattggcgtggccgtcaaggagctggacctctacctggcctacttcgtgcgtgagcgaggtgttggagcgggccggagagaagtagagtgggctgcgaggagaaggaaaca

SEQ ID NO: 253897 - DNA, 75 bp, Homo sapiens
catcgaaaggagcaagagcaagatcaccgtgacatccgaggtcctgcatctccagtatggaatgtatgtttggcc

SEQ ID NO: 253898 - DNA, 75 bp, Homo sapiens
cacaatgtcaagtgctccaaccctcaaatcaccgaggttggaaaagagactgttcaaaccactgaggatcagatt

SEQ ID NO: 253899 - DNA, 74 bp, Homo sapiens
gattcgcagtggtcgcttcttctccttggtgacagaccatgccaccactgccctgctccactatcagctgcccc

SEQ ID NO: 253900 - DNA, 100 bp, Homo sapiens
tcgattttaccttggataccctgctttgggttgtttacattcagagctctatcaataagaggaatacatattacagtgaattcgacaaccgcacaagttg

SEQ ID NO: 253901 - DNA, 98 bp, Homo sapiens
ggatattgatgcgccagtcactgttccaaagaactactggttcagattttagctcttcccaagttgtgaaaatagtgaaggatgcttagactacttaa

SEQ ID NO: 253902 - DNA, 102 bp, Homo sapiens
aggccctattggacaaatttggtggggagcataatccaccatcaatatatctggaggaagctgaatatggtgggcatgatcagatagatttgtatgacgatg

SEQ ID NO: 253903 - DNA, 96 bp, Homo sapiens
cttggctgaagaggaaataaaaacagaacaggaggtggtagagggcatggatatctctactcgctccaaagcctcagactatggcatgaaactgcc

SEQ ID NO: 253904 - DNA, 88 bp, Homo sapiens
gtggtgaaccggcgaggacacacgcagagtgccgactggtggtccttcggcgtgctcatggaatttgcagcaccatcaacagatgccc

SEQ ID NO: 253905 - DNA, 80 bp, Homo sapiens
tattgacagctttaggcatatgtatgtgtttggagacttcaaagatgtattgtagttggcaaaaaaggagaaagccacta

SEQ ID NO: 253906 - DNA, 101 bp, Homo sapiens
ggaaggaaatcatgtcaagcgaagccttgaaaaagctgccctgagacggtgtcccgccgaaagccctgtgtgtccaaatgctgggagaacatcaccccttg

SEQ ID NO: 253907 - DNA, 100 bp, Homo sapiens
cctcctgtgggacgccagtcaccagcaggagcagccaaccagcagcagccatcatggagcagttctcagccctgacagaggtgcttttccacttcctaac

SEQ ID NO: 253908 - DNA, 97 bp, Homo sapiens
tgagttgtgacaaatcaacacaaaccccaagtcctccttgccaggccttcaaccactatctcagtgcaatgggccataaaattttgagtagaaaaat

SEQ ID NO: 253909 - DNA, 75 bp, Homo sapiens
tccggggcgccacgggggccatgtaagcaggtactccaaagattcaggtttactcacgtcatccagcagagaatg

SEQ ID NO: 253910 - DNA, 96 bp, Homo sapiens
aacccaagcagtggcgaagggaatcgcaaggctcttccctgaccattttctactgtccctgcgcgagaatgagaacgtccacaggtctgtgaagcc

SEQ ID NO: 253911 - DNA, 100 bp, Homo sapiens
agctgttcctgttcggccatcttggctcctccctgccagatagctcttattttgagcttaaacagcaggacgagaataacgctagcaggaatcaggcgat

SEQ ID NO: 253912 - DNA, 83 bp, Homo sapiens
gtgtgttcttgactccgctgctcgccatggaaggaatcgtgtctcctagtgacctggaccttgtcatgtcagaagggttgggc

SEQ ID NO: 253913 - DNA, 100 bp, Homo sapiens
ccgaaaacgctacgtgagctgggccctgggccagaggcagaaaacggacggaagaaaaggtctggccgctgcggttggatttctcacgatgtccagtgtt

SEQ ID NO: 253914 - DNA, 51 bp, Homo sapiens
cgggaccccagggcagcgaagcagatcccagaaattatccatttctgctgt

SEQ ID NO: 253915 - DNA, 88 bp, Homo sapiens
gcgggagagagaatgagccagagggacacgctggtgcatctgtttgccggaggggccgttgctccagggagaactgcaaatatcttca

SEQ ID NO: 253916 - DNA, 110 bp, Homo sapiens
ccatggcatggatcttacccgtgacaaaatgtgttccatggtcaaaaaatggcagcagagtgacaaagacctcgatgatgccttggataaactctctgacagtctaggac

SEQ ID NO: 253917 - DNA, 98 bp, Homo sapiens
ccggagtgagtgcgcgcgggcgaaaatggcgtacatccagtcaatgcagaccctgcaggacttgctcactgatcttcatgcactccaggtcaccatca

SEQ ID NO: 253918 - DNA, 75 bp, Homo sapiens
cgcgctgcccacgattcgcttctgaggtccatggctaatgaaacacagaaggttggtgccatccattttcctttt

SEQ ID NO: 253919 - DNA, 75 bp, Homo sapiens
gcacaaatgcagaaactccctctggtgatgatttcaggattaaaagtaagttggatcaaggaggagtgattcaag

SEQ ID NO: 253920 - DNA, 100 bp, Homo sapiens
gaggacctgttcaccagcactgtctccaccctagaggtgcctcatctccagacatggagcccagctatgggggaggtctctttgacatggtaaaaggagg

SEQ ID NO: 253921 - DNA, 100 bp, Homo sapiens
caaaccaaggatctggggatcttcgcactatcccaaggtcagtcagatgaattcccttgaacaagaattagaaacaattcatttggaaaatgaaggcctg

SEQ ID NO: 253922 - DNA, 75 bp, Homo sapiens
gtgagaaaactgcttgatcttcaggccaaaatgtttaattggttggggtcagataagaagaggagtgacaatcaa

SEQ ID NO: 253923 - DNA, 51 bp, Homo sapiens
cagcctcccgaatagctgggattacaggtgctgccatggccacgactgatg

SEQ ID NO: 253924 - DNA, 80 bp, Homo sapiens
ctgaagaagccaaagataaaaatttcaggatcaccattaacacttaagggttattgcaattcatgagaaattatctaatc

SEQ ID NO: 253925 - DNA, 85 bp, Homo sapiens
gagagaaaggctggaagacgaggtcagacacattctatgtgaaaaacatggcaaaatcatggaagccatggaaaagttaaagtct

SEQ ID NO: 253926 - DNA, 82 bp, Homo sapiens
gtgaatcacaagcccagcaacaccaaggtggacaagaaagttggaactgtggctgcaccatctgtcttcatcttcccgccat

SEQ ID NO: 253927 - DNA, 95 bp, Homo sapiens
tatatctccattgaatcagaaggaagactatgaccgtctgaggcctttatcttacccaatgaccgatgtcttccttatatgcttctcggtggtaa

SEQ ID NO: 253928 - DNA, 98 bp, Homo sapiens
gccgcagccatggaggccaactggaccgcgttcctgttccaggccttctggcggccgcccctggtttctcctggggggtgatgagcgggagcggctct

SEQ ID NO: 253929 - DNA, 133 bp, Homo sapiens
ctttcttatcgccagcaggcggccaatctgcttcaggacatggggcagcgtcttaacgtcacggatgataccatcggggaccttaagaagctgattgcagcccaaactggtacccgttggaacaagattgtcc

SEQ ID NO: 253930 - DNA, 75 bp, Homo sapiens
ctctgagatatgccgtttacgggaaatctaccactgtcgaagacaaataaaatatagcaaagacaagatgtggta

SEQ ID NO: 253931 - DNA, 87 bp, Homo sapiens
ccaagaaacatctcaccaatttcaaatccgacgtggacgaatgtcgcgagcgaggcccagccctgtgcgggtcgcagcgctgtgaga

SEQ ID NO: 253932 - DNA, 98 bp, Homo sapiens
tgaagaagaaatcatagacgatgatgatgatgacatcacccttacagaattacctccgagttgcatttcaggaggtcaacagtggttgcacaggaaag

SEQ ID NO: 253933 - DNA, 101 bp, Homo sapiens
tgaaactatggctaaattacatattccagtaatggtggatgaagttgttcattgtttgtcaccacaaaaaggacagtttggtgaggattcatcaacctcca

SEQ ID NO: 253934 - DNA, 75 bp, Homo sapiens
aaaacatgcatgggcaagaactattcacacttttcaggcaggaagagtgaggaagagaacctttttgagatcatc

SEQ ID NO: 253935 - DNA, 100 bp, Homo sapiens
agcgccacatctactcccgtctccttgggcagttcccctccctgccggcaccacgtcccctctgacactgaggagagacagcgtctggagaccatcctca

SEQ ID NO: 253936 - DNA, 100 bp, Homo sapiens
cctgggtccagagaagcaggatggatcttgcgaggtgaatgaaaactttgccattgatttgatagcagagcagcccgtgagcgaggtggagactcgggtg

SEQ ID NO: 253937 - DNA, 100 bp, Homo sapiens
agttattttcagaccttggaagattcagatagctacaaaaggcaggctgcacctgagttttgagtatccgaggagcccaggaggaggaacccacagaccc

SEQ ID NO: 253938 - DNA, 75 bp, Homo sapiens
cgagtgttgcagagcctgcggggcaagatctgtgagcgagtgctgtgctttcatgggcctcttctttatgaagca

SEQ ID NO: 253939 - DNA, 82 bp, Homo sapiens
ttgacatttaattttagggtcctttatatagaagggagagtaggtgcaggtgatggtcctaccagtgtgtctgttgaggtca

SEQ ID NO: 253940 - DNA, 100 bp, Homo sapiens
acgggacagagccagggcactcaccaggctgcaagaacagtgctgggctcatgatggagcagtccaagaagtcctccctcatggtggcccgcagtattct

SEQ ID NO: 253941 - DNA, 82 bp, Homo sapiens
aagaacctgaagacgacccaaaagggtacctaggttatcaatactctggctgaccatcatcatcgtgggactgactttggtg

SEQ ID NO: 253942 - DNA, 100 bp, Homo sapiens
tggcgcacttcatgaacgccctgcgctacgatgccatgttctgccggaggcctctccagattgtgatgcactgggagcaagccaccatgaacatatcctc

SEQ ID NO: 253943 - DNA, 95 bp, Homo sapiens
ggcaatccagtgccctataatgaaggaaaaatgccagctgtgggacaaggagtgcaggccgcacaacctcggcaggcaccggggggatgtggcga

SEQ ID NO: 253944 - DNA, 89 bp, Homo sapiens
gccgtataccgccgggttttctcccaacgtcaggcccgatggctcggcttccccaggtgctggagaatctggtaaaagcaccattgtga

SEQ ID NO: 253945 - DNA, 83 bp, Homo sapiens
agcatgtatcagccgaggtggagctgcggggccctggcatgaaaggatgagacctgcacgcagtggctcacagcagcacgatt

SEQ ID NO: 253946 - DNA, 100 bp, Homo sapiens
taccgttgaccgctcctccaactaaccaatttcctccttcttcacccctgaaaccatatccaaagaagcccccaaaccaaaaggatgttattaaatttcc

SEQ ID NO: 253947 - DNA, 90 bp, Homo sapiens
ggaactggagccgaggcgcaggtggcgctgggtgagaagccctaccactgcaactgggacggctgcggctggaagtttgcgcgctcagac

SEQ ID NO: 253948 - DNA, 95 bp, Homo sapiens
gaggggctccggctggtctgtggtgaggggccggccaggacgtgggccgaagctgcatcctggtctccattgcgggcaagaatgtcatgctggac

SEQ ID NO: 253949 - DNA, 133 bp, Homo sapiens
caagaagaagatcaatggcatttttgagcagctgggggcctacatccaggagagcgccaccttccttgaagaaaagctcacagatcaggtgatgcagaatcctcgagttctggcagctttacaggagcgactt

SEQ ID NO: 253950 - DNA, 50 bp, Homo sapiens
atgcagctgctgtccttgtgtccaggtcctgtatggtggaagagtcgggg

SEQ ID NO: 253951 - DNA, 115 bp, Homo sapiens
aaaggacttgaatgacgcccgggacctgcatggccaggcagagtcagcagctgcagtgtggaagacaatattgactcacgcctactccagagtggtcctgagagtcctggaagca

SEQ ID NO: 253952 - DNA, 100 bp, Homo sapiens
gctgaagctgcctccaactgatgcttattacaagctgcgccacattgtggatgaggtcaatggattaataagttattctacctatggaaatccaggcagc

SEQ ID NO: 253953 - DNA, 51 bp, Homo sapiens
caggcgaacccgcggcgcaataacgtggtatgtgtgcaacagagagaaatt

SEQ ID NO: 253954 - DNA, 75 bp, Homo sapiens
aagaagaagctgccgtttttcctgaagttgctttaattggttggggtcagataagaagaggagtgacaatcaagc

SEQ ID NO: 253955 - DNA, 98 bp, Homo sapiens
agaactcagttgtgcgttgcggccagtcgccactgctgtggtcttcaagctgacagagaagctgacggaacagaaggagtggatgaagatataattgt

SEQ ID NO: 253956 - DNA, 100 bp, Homo sapiens
attcaccaaataagctatatactttggttacctatgtacctgttaccactttcaaaaatcaaagaaatcggctggacagatgtcgggggctggaccggcc

SEQ ID NO: 253957 - DNA, 100 bp, Homo sapiens
aaaaagtgctcctgggactccaggataccaggtctgtccagggttttggtggctggcgaagctgagggcgtgtcagcaggcctttcgatccctgggacca

SEQ ID NO: 253958 - DNA, 83 bp, Homo sapiens
gcaccatgagctggggcaccgagctctgggtgtccctacctgcaccggacgacgggggacacagaacgcaagtaccacctgcg

SEQ ID NO: 253959 - DNA, 100 bp, Homo sapiens
aggtgcggactcttgttcttgcactggtggtaatagcctgcagctggtgttttgagaagccctactgctgaaaacttaacaattttgtgtaataaaaatg

SEQ ID NO: 253960 - DNA, 82 bp, Homo sapiens
aagcgtctccgttgggtccggccgctctgcgggactctgaggaaaagctcgcaccaggatttttagactctgaggagcagtt

SEQ ID NO: 253961 - DNA, 114 bp, Homo sapiens
caagatcttttatttcgttttatgaactttctgaaacaagaaggcgcagtgcacgtgttgcagttttgtttgactgtgggcagaggagatatggaacagaatgactctgacaac

SEQ ID NO: 253962 - DNA, 75 bp, Homo sapiens
cccctcaccccccgagagccgtctcggaagggtgctgacctggaccgggagaagaaggctgccgagtgcaaggtg

SEQ ID NO: 253963 - DNA, 75 bp, Homo sapiens
gagcctcagttggaagcagccgatccagcctgcggagcctgtggggcaggtgacgcagctggaccagaggctggc

SEQ ID NO: 253964 - DNA, 100 bp, Homo sapiens
aggagcagaatgagctgattataactcagagacagcaggaggaaacattcatgaacagagttgaagttaaagtaaagattcctgaagagctaaaaccgtg

SEQ ID NO: 253965 - DNA, 74 bp, Homo sapiens
tcttcaatgctggtaccaaccgcccacaactttctaggctatcaaaaggagatgtgagagagggtattgagtct

SEQ ID NO: 253966 - DNA, 75 bp, Homo sapiens
gcttactccagggatgatgtcagaaaatgaggtgaaaaaccatttcgctgtgatgaatgtggtatgagattcata

SEQ ID NO: 253967 - DNA, 82 bp, Homo sapiens
gtgccacatttgcttggggaagggcactgtgacctttgaagatgtggctgtgaacttttcccaggaggagtggtgtcttctt

SEQ ID NO: 253968 - DNA, 82 bp, Homo sapiens
gagattatagctctgtatgagaaggacaacacctacttaggcagcaagctcattatgatgctatggataatgatatcgttca

SEQ ID NO: 253969 - DNA, 90 bp, Homo sapiens
aaaggatgttggcggtccctgtgacctgtggagacacggccagatctgccctccaaaggtgacctgctgagaaaagtggtacaaatactg

SEQ ID NO: 253970 - DNA, 101 bp, Homo sapiens
tagaaatgcaacttgagaaacccaaacctgtaaaaccagtgacgttttccacaggcatcaaaatgcctgaggaagaacttgatcctgaagagagggacaac

SEQ ID NO: 253971 - DNA, 75 bp, Homo sapiens
cacctgaccagcaggacaaagtccagttgtgagcgccttgtgagtcttctcctgaacccagcggtgctgtccacg

SEQ ID NO: 253972 - DNA, 75 bp, Homo sapiens
aaggaacatctcttcccagcggctcagatgcatcaatctcaaataattctacaagtaaaaggaaatctgagtctg

SEQ ID NO: 253973 - DNA, 51 bp, Homo sapiens
gctcgcagagagccggcttgcaggttacagaaattatctcagagattcggg

SEQ ID NO: 253974 - DNA, 100 bp, Homo sapiens
ctggggaccctgagatcgtcaagtctcccagcgaccccaagcaataccgggttgaaaggaggagcaggaggtactgatggacaaggaggtaccttccggt

SEQ ID NO: 253975 - DNA, 74 bp, Homo sapiens
tgtccaagtcagttcctgggtacaagggctgtgaggctgtctacagcagtgtatctggccttaaagctcacctg

SEQ ID NO: 253976 - DNA, 50 bp, Homo sapiens
gatgtgggcatggcagacaaatctgtagcttttcctaaaaggattgtaca

SEQ ID NO: 253977 - DNA, 83 bp, Homo sapiens
cccaacatccaggctgtactgctccccaagaagactgagagtcaccacaaggccaagggtaatagcctgcagctggtgttttg

SEQ ID NO: 253978 - DNA, 82 bp, Homo sapiens
cgccgccgctgccgccgccgcgcgcgggagccttcacgtaaatgggtccagtcatgcctcccagtaagaagccagaaagctc

SEQ ID NO: 253979 - DNA, 90 bp, Homo sapiens
cgctgttggagttggatttggggctatagaaaagacggcatctgctacctttgagagtgccagttgccttgttgaaggggatgctaaaga

SEQ ID NO: 253980 - DNA, 75 bp, Homo sapiens
gcgactcaaagctgcacggcagtctgtttatgagatgaggcctgcctgtgttaatacacctagtgaggagtggag

SEQ ID NO: 253981 - DNA, 82 bp, Homo sapiens
ggcgcgaaccctgctgggcctccagtcaccctcgtcttgcattttcccgcgtgcgtgtgtttccacttgagcggcacagtga

SEQ ID NO: 253982 - DNA, 97 bp, Homo sapiens
tgagatggacctgggaactccaacatatgatgaaaaccccatgaagtgaacagcagagaatttcaaaggaccttgctaatatctgtaagacggcagc

SEQ ID NO: 253983 - DNA, 83 bp, Homo sapiens
tcaaagggtactttttagaaccaaaggctcaagttggcttaccagaagttacactgggacttctccctggtgcaagaggaacc

SEQ ID NO: 253984 - DNA, 100 bp, Homo sapiens
agaaatcatccatgaaacgtaaacttccttttactattagcccatcaagaaatgaagaacgagattcagacacagctcttttaaggaagaaaaagatata

SEQ ID NO: 253985 - DNA, 88 bp, Homo sapiens
gggtgaccgacatcccaactaggtgaagggctggagaagggagggagcagatgggaatggcacttagtctgacagagatcctgaggag

SEQ ID NO: 253986 - DNA, 75 bp, Homo sapiens
gaacaaatgaccttggaatgaaaaactttaaggtgcatcatttctggcatggcttcaggaagcattgtgctattt

SEQ ID NO: 253987 - DNA, 100 bp, Homo sapiens
gttggagattctccggggacccttccgtatctgcctaggcattttgctgtctcctcctaatacgctatgctgggactcatgtatgtctactggactcagc

SEQ ID NO: 253988 - DNA, 99 bp, Homo sapiens
caacagaagagtgagagatggaacccgaagaagaaaggattcgttacagccagagattgatcatgcatgccccgcggtccagggacaggttcacagcgc

SEQ ID NO: 253989 - DNA, 105 bp, Homo sapiens
ctcggagcgcggtccctgtattggtctcctgctcctagaggacagagcgggatgccaccagcttgtccaaagggaagttccaggagctcctggtgggcatcgttg

SEQ ID NO: 253990 - DNA, 83 bp, Homo sapiens
cctggagatgagaatgcagaaatggatgctcgaaccatcttactgaaatttccatggtgtcagtgattcatattcctgatagg

SEQ ID NO: 253991 - DNA, 75 bp, Homo sapiens
cagaacttgtgaacaaggatctggatatttattataagactcttgaccaggtggttctcttcccaaagtggaagc

SEQ ID NO: 253992 - DNA, 100 bp, Homo sapiens
cctcattgaactgtgcaaacttcaacctggctctctaccccaagttggcttggcaactcttgtgaaatttcatagatctcgtcgcttactgggagtctgc

SEQ ID NO: 253993 - DNA, 75 bp, Homo sapiens
gcccgcccaccgcctcctctcaccaagaaaacttgttcaagttgctcaaagaaggtgggagtcaatcattttgac

SEQ ID NO: 253994 - DNA, 90 bp, Homo sapiens
gcccaggggtctgagtctcacagcttgtaaagcaagacactaagggcgactaccagaaagcgctgctgtacctgtgtggtggagatgact

SEQ ID NO: 253995 - DNA, 96 bp, Homo sapiens
cagtctcttggtttggtctctaaaagtaaaggctccattcagcagccctggcatcactaaagggagatatagtggaacttaataaacgtctccagc

SEQ ID NO: 253996 - DNA, 100 bp, Homo sapiens
cggaggccgaggacgcggaggacgcggctctgccagggcttcgtgggacacatatgcaacatgcctatgatttttacaagcctgatatgctatctgaata

SEQ ID NO: 253997 - DNA, 99 bp, Homo sapiens
aaactcttgccctttgagggaccaggtgactagcatgcagatacccatgctctgactttctgcccctccactgacatggcccaccggggtggggagagg

SEQ ID NO: 253998 - DNA, 50 bp, Homo sapiens
tgcagcctcaacctcctggactcagggtgatctggaccctctggcatctc

SEQ ID NO: 253999 - DNA, 88 bp, Homo sapiens
gattctcccttgtcagcacaacctgtgtaggaaatgtgccagtgatattttccagaatcaaagaattccatcggacatggtgtttctt

SEQ ID NO: 254000 - DNA, 50 bp, Homo sapiens
cgagctgagctggcagagtcgttgctacaactatctgtataggatgaaag

SEQ ID NO: 254001 - DNA, 100 bp, Homo sapiens
gtgaagcgtgaggccggcatcgtctttccgtcctctgaggcgacggccgcggctgcacaggactgatcctttgaaatactccagccatgactaaaagaga

SEQ ID NO: 254002 - DNA, 101 bp, Homo sapiens
tccgggtggttcgcgctccttctgaattggcagcgaggtcgcggcaggttcgagtttgactttgaaggatcactttcccctgtcattgcgcccaaaaaagc

SEQ ID NO: 254003 - DNA, 74 bp, Homo sapiens
cttgtgctgaccaagctgctcacctcggaattgaatgatctggcacgggaccctccagcacagtgttcagcagg

SEQ ID NO: 254004 - DNA, 82 bp, Homo sapiens
atggacgttggaaacatgggccagtctgtggacattagtgggcttcagttagccttggccgctcttcacgggcaataagaag

SEQ ID NO: 254005 - DNA, 83 bp, Homo sapiens
cgcacaggccgtcgctatgagcgggaccaccctgggcacagcaggcatcggagggtggatgtgaacactgaccggaagatcag

SEQ ID NO: 254006 - DNA, 82 bp, Homo sapiens
gcagggcctgcagcgggagctggacggcgagcgcgagcggcgcgagaaagctcctctcgaagatcctgagcgagtgtgagga

SEQ ID NO: 254007 - DNA, 96 bp, Homo sapiens
aagcggcagatggagaagctggaagccctggagcagctgcagtcccacatcgaaggctgggaggaacagcttgagaactatgacttcaccaaattc

SEQ ID NO: 254008 - DNA, 83 bp, Homo sapiens
ccttacccaggagatgctagagaatgatcttctgcaaagccatgaactcatgcagatccagctccaggtcccacaggggctct

SEQ ID NO: 254009 - DNA, 82 bp, Homo sapiens
ctggcgccgggtcccgcggggaaagtgtcgtgaaaactacccctaaaagccaaaatgggaaaggaaaagactcatatcaaca

SEQ ID NO: 254010 - DNA, 98 bp, Homo sapiens
ctgactccaatgaattttctgtaattgctgacccaagaggaaacactctaggacggggaacgacaattacacctctgactatgtgaagatacggtggg

SEQ ID NO: 254011 - DNA, 101 bp, Homo sapiens
tgtggagacggcttctataacccagtcacgagggtagtcaaggactataggaaccgctttctaagaaacgcagtggatgtttccaaggattgtcttcagtc

SEQ ID NO: 254012 - DNA, 51 bp, Homo sapiens
ttgaaaatcaacgacaacttgagcacagtttgcctgagaatacagatcaac

SEQ ID NO: 254013 - DNA, 90 bp, Homo sapiens
ctcactgtatgaaaagagaggcagatgagtcttactactttgaccgcgatgatgtggctttgaagaactttgccaaatactttcttcacc

SEQ ID NO: 254014 - DNA, 83 bp, Homo sapiens
tgaagcttctgaaccatccacacatcataaagctttaccaggcaccagttggagatgccaggacattactctcatctggctgc

SEQ ID NO: 254015 - DNA, 75 bp, Homo sapiens
agaactgcctgtgcgccctcaacctgctttacaccatcctgggaaaagtctattccgttctcagtgacagagaac

SEQ ID NO: 254016 - DNA, 96 bp, Homo sapiens
agacctgctctcccctcggaaagggggacatcctcctgcaggacaatcatctatctctccttggtgtatgtgcttggccatgtgatcaagtccttg

SEQ ID NO: 254017 - DNA, 90 bp, Homo sapiens
ggctgaaacacagtcgaaaagaatactgtgaattatgcaagcacagatttgcttttacaccaagtatggacctgtctgccaatcaggacg

SEQ ID NO: 254018 - DNA, 100 bp, Homo sapiens
gatcgacttggtggaagcacacagacccttgaacatctgtgaagaaatgactattctgcatggaggcttcttgctggccgagcagctgttccaccctaag

SEQ ID NO: 254019 - DNA, 75 bp, Homo sapiens
gggctcgcgggtgaccgaaaggatcatgaactagtgacctggaaaggcttctggaggatctgttgctgattgcac

SEQ ID NO: 254020 - DNA, 100 bp, Homo sapiens
ctgagctagagggtgaagctggcggagcaggaggatgggcggttggatggcaagcatgtggtgtttggcaaagtgaaagaaggcatgaatattgtggagg

SEQ ID NO: 254021 - DNA, 100 bp, Homo sapiens
aaggccaagttcatctcctccgtcaccagccacatctaccaggtctcggcgcggaagatggccggcggcgtggacggccccatcgggatcccgttccccg

SEQ ID NO: 254022 - DNA, 99 bp, Homo sapiens
ccccggcgcccccaccccatccccgggaggtgctggagaatctggtaaaagcaccattgtgaagcagatgaggatcctgcatgttaatgggtttaatgg

SEQ ID NO: 254023 - DNA, 83 bp, Homo sapiens
ctggaaccgtctgagcggcctaacccgcgcccgggtagagatatcattgaaatggattccaagcgtgtgcctcgagacaagct

SEQ ID NO: 254024 - DNA, 88 bp, Homo sapiens
gttagatcatgaatacacaacaaaggaggttttccggaagaacttcttcaatgactggcgaaagatttatcgaggtgtgagagtcgga

SEQ ID NO: 254025 - DNA, 83 bp, Homo sapiens
tcggcggcgccaccatgtactcgggagccggccccggtccctggtgctgaaccgcctgcgtccagttgccagcgggggtggga

SEQ ID NO: 254026 - DNA, 89 bp, Homo sapiens
gaagagtatggagcctacgtagattcataaggctcttgaactagacccatcaaataccaaagcattgtaccgcagagctcaaggatggc

SEQ ID NO: 254027 - DNA, 82 bp, Homo sapiens
aatcttgaatcatgaagctactaaccagagccggctctttctcgttttcggctttgtgagaaaccttaccatcaaacacgat

SEQ ID NO: 254028 - DNA, 89 bp, Homo sapiens
gtgtggaatattggggggctcggctgcagacttggccaaatggacgggactattaagtgccggtggtggtgtgcacattgagccccggt

SEQ ID NO: 254029 - DNA, 104 bp, Homo sapiens
gacacaattgtctgtgacagtaacagtacttgggatcccccagttccaaagtgtcttaaaggaggagatgttaaagtaacccatcttgcaggacgacattgaag

SEQ ID NO: 254030 - DNA, 83 bp, Homo sapiens
catcattgcaacacagcgccatttccgctggcacccaggtgcccatgatattagaaatggctactccccagtcaattttcatc

SEQ ID NO: 254031 - DNA, 51 bp, Homo sapiens
cagtgacgagcggccgaagcagctttgcgaatctccgccacctccctactc

SEQ ID NO: 254032 - DNA, 51 bp, Homo sapiens
cggccatcgccgccgacctgtgcaagttttcggctttgtgagaaaccttac

SEQ ID NO: 254033 - DNA, 78 bp, Homo sapiens
gcaggtgccttacaactacaaccagctggaaggcagattcaagcagctgcaagatgagcgggaagccgtgcagaagaa

SEQ ID NO: 254034 - DNA, 95 bp, Homo sapiens
gtgagtcggcggctgatttagaaggaggttcaggctacggtgagccgaagccccacagagcaggtgttgccaatgctgcggttcgtgcagaagcg

SEQ ID NO: 254035 - DNA, 99 bp, Homo sapiens
cgcggaacagcaggcccgagcccaccgcgccgggccccggacgccgcgcggaaaaggatatggaatattatcttgtaaaatggaaaggatggccagatt

SEQ ID NO: 254036 - DNA, 74 bp, Homo sapiens
tacaggcatgcaccaccacacccagcttgtagacaaaagacgtcactctcattccttaatcgaccagaccttcc

SEQ ID NO: 254037 - DNA, 75 bp, Homo sapiens
aagcctgcacagccgcggcggcagcagcagtgagaggatgcagcagtctcggccctggctgctctatgcagtgaa

SEQ ID NO: 254038 - DNA, 113 bp, Homo sapiens
gcagaacccgggagtaggagactcagaatcgaatctcttctccctccccttcttggtgaaaggtgtagcagtcactcggcctacacccacagcatcgaccttgtgaacccagc

SEQ ID NO: 254039 - DNA, 74 bp, Homo sapiens
gacccaatggcctctggatgaaacgtcaggaatttactacacagctggttatattctgggcactaaatgaaggc

SEQ ID NO: 254040 - DNA, 73 bp, Homo sapiens
cacggacgacagaagcgactttggtgagactctggccatctggctgctgtgcacaggcgctcgtgaggctgcc

SEQ ID NO: 254041 - DNA, 75 bp, Homo sapiens
cgccacccttctggtcgccacagctatcctgagcctgttcaggacgacttcaaagagggctacctggagacagtg

SEQ ID NO: 254042 - DNA, 75 bp, Homo sapiens
atttagagctgcggaacaggacgccctctgatgacggggaggtttactgcatcgacgcgcggttctacgggaacg

SEQ ID NO: 254043 - DNA, 100 bp, Homo sapiens
cagccgactggagcaggcagcagcccaggtcttgtgataatggtcactgtatgctgaatggaacacatggtccatcttcagagaagaaatcaaacatccc

SEQ ID NO: 254044 - DNA, 99 bp, Homo sapiens
taagaagaccgagagtcaccacaaggccaagggcaagtgatttgacagcatcctgaggttagcattacacttctcccagtggagcccatgacttctgat

SEQ ID NO: 254045 - DNA, 75 bp, Homo sapiens
tttgctgactacctcgcccacgagagtcggaggtacatgtcccagagcaagcacacggaggcccgggagctcatg

SEQ ID NO: 254046 - DNA, 109 bp, Homo sapiens
cagaccctggagcctcagttggaagcagccgatccagcctgcggagcctgtggggcaggtcaatgtgacggtggactacattagaccagccagcccagccacagagaca

SEQ ID NO: 254047 - DNA, 75 bp, Homo sapiens
ggctctggaattgctactgctgcctctgtcactcctggtgaccagcattcaagacctaccaagagcagctgtcag

SEQ ID NO: 254048 - DNA, 89 bp, Homo sapiens
gacgttcgagaggaagattcttacctctttgatctcgacaataaggtggccaaggtggaatacgtcaggaagaagccaaaattaaaaga

SEQ ID NO: 254049 - DNA, 50 bp, Homo sapiens
gcaccttgcgcttcttgcagtcgggtggtgattccactgaagcaactgcc

SEQ ID NO: 254050 - DNA, 82 bp, Homo sapiens
cccagccattccctgtggcaaaagggagactcagattgatggacaacttttcttaattaagcaccttttgatacttcgtgaa

SEQ ID NO: 254051 - DNA, 51 bp, Homo sapiens
caaggagcctgggggaggttcgtttcggaattactctcacttccaccaccc

SEQ ID NO: 254052 - DNA, 75 bp, Homo sapiens
aatagatgtaggcagaatacctttacagaggttaaaattgcaagatgagaagatgaagtgaatttatggattctg

SEQ ID NO: 254053 - DNA, 100 bp, Homo sapiens
ccgcgcgcgctcttccttctgctcctgatcctcgcctgccccgagccgcgggcttcccagagaagatggcgaattagaagatggtgaaatagacgatgca

SEQ ID NO: 254054 - DNA, 73 bp, Homo sapiens
gccgctttccacctagaagaagaaaaagcttgtggtgaaggggggcaaaaaaaagaagcaagttctgaagttc

SEQ ID NO: 254055 - DNA, 82 bp, Homo sapiens
tggatgttctcatcgtccctgccaactttccaagtctggggatggccagtttgtcctgaagaattatggagagaacccagaa

SEQ ID NO: 254056 - DNA, 89 bp, Homo sapiens
gcttgtattggcatttcatggctagagttctaaggttgcagatgaatacatgttttccctagaagagaataagaagtccaagggacgcc

SEQ ID NO: 254057 - DNA, 50 bp, Homo sapiens
accggtagcgcttgcagcatggacaatggcgtctcttggccacatcttgg

SEQ ID NO: 254058 - DNA, 89 bp, Homo sapiens
cctatgcagtcaactcctggaccactagtagatggacagagacgtatgtgcgttggtctcctaagggcacctacctggctacctttcat

SEQ ID NO: 254059 - DNA, 87 bp, Homo sapiens
ccactgtatttggagaagaatggaaagagaagactgatagagacttcgttaaggaaacttttgagaagaactttgaaagagaaaccc

SEQ ID NO: 254060 - DNA, 100 bp, Homo sapiens
tgagcaagctctccaagatgccagtgcagcttgtcagaatgaacctctcttgattaagggcttccgttacaagatgaggtctgtgtatgctcacttcccc

SEQ ID NO: 254061 - DNA, 100 bp, Homo sapiens
tccatcaggaaaacaagcctggttcagttaaacctactcaaactattgatgaccgtcgtgatgtgagtaggtatggagaagataatagaggatatggcgg

SEQ ID NO: 254062 - DNA, 75 bp, Homo sapiens
tgaagcagtgggaagtcactagcagcagcagtgttgtactgctacttctataaacggacagccgtaagactaggc

SEQ ID NO: 254063 - DNA, 75 bp, Homo sapiens
ggaaaatactcagtttcctgcttactgcttcattatggattatacaggagatacaactcgtcaacgaatcaaatt

SEQ ID NO: 254064 - DNA, 75 bp, Homo sapiens
tcataaagagttctgattctaagaggagatgactgatgacatggattcatacacaaacgtatatcgtatgttctc

SEQ ID NO: 254065 - DNA, 75 bp, Homo sapiens
ctgaacattatggcagccaaaagacaacagaatttgccattttcagtggaaaacaagtggtcgttactagctaag

SEQ ID NO: 254066 - DNA, 102 bp, Homo sapiens
tctcgctccgtggccttagctgtgctcgcgctactctctctttctggcctggaggctatccagcggccatgaagcccccaggaggagaatcgagcaatcttt

SEQ ID NO: 254067 - DNA, 75 bp, Homo sapiens
ggtcagcagggggccagctcaggacacacagacccagctggaactcggaacaagcacatcatgattgacttgggg

SEQ ID NO: 254068 - DNA, 82 bp, Homo sapiens
ggggaaactaggtcgatggtcggcggcgcccggatgggcagctgaggacatggatttgattgacatactttggaggcaagat

SEQ ID NO: 254069 - DNA, 100 bp, Homo sapiens
ggcagcagcagcagcaggcgaggaggaagatggcgggacggctgccggcctgtgtggtggactgtggcacggggtgtcagcagttgagtctttggagggc

SEQ ID NO: 254070 - DNA, 82 bp, Homo sapiens
ctgcagcgggagctggacggcgagcgcgagcggcgcgagaaactggagcccagatttcaagttttgagtaaaataccttcaa

SEQ ID NO: 254071 - DNA, 97 bp, Homo sapiens
gttggaccctgggaagatgcatgccaaaatctggttaatgaaggtttgctggttggctcccgagcagacagcaggaaagaagaagcccttcgtgtac

SEQ ID NO: 254072 - DNA, 99 bp, Homo sapiens
ctggagcagggtctcctgattcttttcctgctagagttcccggtgttggctgaactcaacgccatgcttggggcaaccagtacagcaggaggcagtaaa

SEQ ID NO: 254073 - DNA, 75 bp, Homo sapiens
cttagacgctggatttttttcgggtagtggaaaaccagcaccgaacaagatttgtgatgaaatggagcctggaac

SEQ ID NO: 254074 - DNA, 100 bp, Homo sapiens
ggaagcgcggctgctgtcgcccagcgccgccccgtcgtcgtctgccttcgcttcacggcgccgagccgcggtccgagtttccgccagctgtggatgcctt

SEQ ID NO: 254075 - DNA, 74 bp, Homo sapiens
gtccatattcctgaacgtggctgctgtgaacacgcaccgggacaggcctcaggccggcgaccaccaggggcctg

SEQ ID NO: 254076 - DNA, 98 bp, Homo sapiens
cgagttctcacgtgcccatcagtgacagcaagtccattcagaatctaccctgatgggagagtctgcatttccatcctccacgcgccaggcgatgaccc

SEQ ID NO: 254077 - DNA, 100 bp, Homo sapiens
gaggacccgtgaaggcaatgatttataccatgaaatgattgaatctggtgttatcaacttaaaagatgccacctctaagatctgtgatgccatctccaag

SEQ ID NO: 254078 - DNA, 75 bp, Homo sapiens
ccctgttctccgaggatgtggtcctcaagctcttcctgtccttcagcggctcggccaccagcccctcgggttcca

SEQ ID NO: 254079 - DNA, 82 bp, Homo sapiens
cagcagcgccgtcccgtccgacagccaggcccgggagaagttacacggtgtgggcacacaacctcattgccattgctcgtct

SEQ ID NO: 254080 - DNA, 83 bp, Homo sapiens
ctgggccggaccagctggtgctgcgcggcgcaggctcttgtcaggatggtgaagctgttcatcggaaacctgccccgggaggc

SEQ ID NO: 254081 - DNA, 75 bp, Homo sapiens
atctgctaaagaggatcctgccaacattttacaggcataatcaccagcaacacccgggacaataatacgggggcc

SEQ ID NO: 254082 - DNA, 75 bp, Homo sapiens
gtagaggccagaaccaggtctcagggggcactaaaggcggtcggagcttgtccagcggatccagacactgtccca

SEQ ID NO: 254083 - DNA, 88 bp, Homo sapiens
cctggcgggcgtgggaacccaggccccgccgaggcggccagccctccagaatacccatcatatagcccctgaggtggcatggtgatgt

SEQ ID NO: 254084 - DNA, 101 bp, Homo sapiens
atgagcaggtgcttcggagtgcttatgccaagaggaacagcagtgtaaatgactcaggttcaatgtatctatgcctgcctacctcaatctgcaagggagtg

SEQ ID NO: 254085 - DNA, 101 bp, Homo sapiens
tctgtgcctcctatctatgtgcctcctggatatgccccacagggaaagaatatggcaaagctgatgcaagatgggtttattttgatccaaccattgtgtct

SEQ ID NO: 254086 - DNA, 98 bp, Homo sapiens
ggatctcaagctcgctatggagaattacgttttaattgactatgacaccaaaagatcaatgagctgagcaatgttcctgttcctgtcatgctaatgcc

SEQ ID NO: 254087 - DNA, 74 bp, Homo sapiens
gcaagccagccacggggagacctttcatgtgctttacctaactacaggttgctacaagatcaccacggttttca

SEQ ID NO: 254088 - DNA, 50 bp, Homo sapiens
tagataacagccatcctattgaagctcacttatctaaagaatatgaggag

SEQ ID NO: 254089 - DNA, 100 bp, Homo sapiens
acctagccccggacgagaagcgcagcaacgtgcggtgggaccacgagagcgaggaggaagccaagaatctggtgagcgaagccatcgcagctggcatctt

SEQ ID NO: 254090 - DNA, 98 bp, Homo sapiens
taccagtgattatgtcagccaaagctactcctactcatctattttgaataaatcagaaactggaggagatgttaaagtaacccatcttgcaggacgac

SEQ ID NO: 254091 - DNA, 100 bp, Homo sapiens
gagcccacgagaggcagcgccatggcggagcagacctactcgtgccagtgctgccccacaccgccgtgtgccttgtgtgtggcgaggcggggaaggaaga

SEQ ID NO: 254092 - DNA, 102 bp, Homo sapiens
gccgctgcggggcccaagtccttggctgctgagtggtgacagtagcccagcccgccggccaggtacaatccttggatttaccctccgaccatacagaatgag

SEQ ID NO: 254093 - DNA, 73 bp, Homo sapiens
ccagaagcagtatttgtcctgagctgcagctttggaacagttcaagtctcttggtgctgagcccttggaggtg

SEQ ID NO: 254094 - DNA, 75 bp, Homo sapiens
gagaaatttcaggatacagcagaagcattagcaggccccttcacagatgtagtcactacaaatcttaaattgcga

SEQ ID NO: 254095 - DNA, 100 bp, Homo sapiens
acaactcgggcgccgacgagatcggcaggggaacaggaacctgataaagaatcaggagcctcagtggatgaagtagcaagacagttggaaagatcagcat

SEQ ID NO: 254096 - DNA, 83 bp, Homo sapiens
ggcgcaactgagaggaactgagacccaagcagctcagtaaaggcgtgatggtgggcatgggtcagaaggattcctatgtgggc

SEQ ID NO: 254097 - DNA, 100 bp, Homo sapiens
agacatcggagtcggagacctgagagatgttaaccaaattcgagaccaagagcgcgcgggtcaaaggatttatgaccagaggaaaattgatgagaatgag

SEQ ID NO: 254098 - DNA, 83 bp, Homo sapiens
ctactgatggtgctgtaaccacctcacagattccagcttcggaacaagagaccctggttatggccattgcaccaacccattat

SEQ ID NO: 254099 - DNA, 78 bp, Homo sapiens
ccccttgtcatcgagttcaccgagcaggtgcatctgcagacgcagcaggaggtgaagctgcgcatgacgggcatggcg

SEQ ID NO: 254100 - DNA, 98 bp, Homo sapiens
gacgtcattgccgggaacgagcgagtcgccgctgcagccctagtgactgcggcctgcatcccgtgagggagataaatctgcaggacatcaaggaagat

SEQ ID NO: 254101 - DNA, 96 bp, Homo sapiens
cacttcttttttgagaaaggaaggaatatatcctgactgattacacgtgaagggaatcgtgttagtagccctggctgacggcacccttgcaatctt

SEQ ID NO: 254102 - DNA, 101 bp, Homo sapiens
ctgctgcacaacctctcccccggctccatcgacctcaaggacatcaacttccggccgcagatgtcccagaccctcagtgcagacgcaagcgtgaacaccct

SEQ ID NO: 254103 - DNA, 75 bp, Homo sapiens
cgcagcccgggcccaggccccggcagcgcctgggacaaggttcatcatgcctagtggcgtataagaagaccccgc

SEQ ID NO: 254104 - DNA, 50 bp, Homo sapiens
ctgcgaggaaaatggcggcgggagcctcctgacaaggtgatccgggcggg

SEQ ID NO: 254105 - DNA, 100 bp, Homo sapiens
aggaaattgtcccgaatccctgcagcactgggttctgatcttcacgttgatgtgaagggttacaaggatggagggatccatctggagtgcaggtccactg

SEQ ID NO: 254106 - DNA, 83 bp, Homo sapiens
agtacaactatgcctacccctacagctactactatcccatgattctacacagtacagggctggagtttcaacatcaagtcgag

SEQ ID NO: 254107 - DNA, 82 bp, Homo sapiens
catgacccccatgtgctcctggccgtggccaagacagagcgggatgccaccagcttgtccaaagggaagttccaggagctcc

SEQ ID NO: 254108 - DNA, 99 bp, Homo sapiens
gaaaactatgggaagattttggtagagaagaatgaacattgtattgagaacaatatagatttgcaggacatggatttgattgacatactttggaggcaa

SEQ ID NO: 254109 - DNA, 100 bp, Homo sapiens
atcagcctgcagaagcaagtgtctgtgctcagacagaaccagggggagcacctggggaccacggaagcgaccgaggccttctttgccatgaccaagctct

SEQ ID NO: 254110 - DNA, 104 bp, Homo sapiens
ggacaaatgggaaaagccagaagccagaggggcacaaggatgtcacgggatatttcacctgcctgggatggtggaggagccaagatggccgaataggaacagct

SEQ ID NO: 254111 - DNA, 100 bp, Homo sapiens
ctctgcattttgtccacatgagaggattacctttccaagccaatgcccaagacattataaacgtggtgatctttgtgaagtctgtgcagcggtgcattgc

SEQ ID NO: 254112 - DNA, 75 bp, Homo sapiens
ggcatgggcggcaactctttgatgtactactataatgggaaagcggccgttaattaaggaaaagttgagccaggg

SEQ ID NO: 254113 - DNA, 100 bp, Homo sapiens
agcactgcagcgattgcgagaatgaggaggacaacagctacaaccgggggtggacgacccaccggagcccgtgtacgcgaacatagagaggcagccccgg

SEQ ID NO: 254114 - DNA, 99 bp, Homo sapiens
tgggttcttggtctcactgacttcaagaatgaagccgtggaccctcacggtgttggagcgggccggagagaagtagagtgggctgcgaggagaaggaaa

SEQ ID NO: 254115 - DNA, 75 bp, Homo sapiens
ccagcacagtccccactgacgggagcagcagaaatgaggagaccccgaaagaaagcctcacagaggctgaagtgg

SEQ ID NO: 254116 - DNA, 98 bp, Homo sapiens
tctttctcgctgatcgcctaacttctactgacgaagcttggaagttgcagaagccggaaatcactgtggaaaatcttcccagttatttcagacttcag

SEQ ID NO: 254117 - DNA, 51 bp, Homo sapiens
ccatggcgttcctcaaactccgtgaccagaaagaatcttcaagagggagac

SEQ ID NO: 254118 - DNA, 75 bp, Homo sapiens
ctgatttgagccagacgtccaaagtgaaacctccgggtggacattcccctcagggcaagtgtccagagaatggct

SEQ ID NO: 254119 - DNA, 90 bp, Homo sapiens
ctctacaggacccgctttctaccattaagtactatactggcaattgctggagaagattttgcaattgttgcttctgatactcgattgagt

SEQ ID NO: 254120 - DNA, 75 bp, Homo sapiens
cctgtaatcccagctctttgggaggccaagttgattggctgcataatcgggcgtcaaggcgccaaaatcaatgag

SEQ ID NO: 254121 - DNA, 74 bp, Homo sapiens
accatcaaatccgtgtcggagtccttacagtgctttctcctgctcaagacagccacacgaacacggatctcccc

SEQ ID NO: 254122 - DNA, 74 bp, Homo sapiens
ccagggaggaggaatcggcggacgcgggacacctgaggaaaggacctctgtgagtgaaagccttcagagggaag

SEQ ID NO: 254123 - DNA, 75 bp, Homo sapiens
gcgtcttctctgagatggaagccaacttcaagattggcccccgccgcatccacacagtccgtgtgcggggaggta

SEQ ID NO: 254124 - DNA, 50 bp, Homo sapiens
gttccactgtgtttcgagcgattctggccctttctggttactgtggcttt

SEQ ID NO: 254125 - DNA, 75 bp, Homo sapiens
tggtgctatacttgaattttctaaggtgtcattaggcctgactccccttcactgtgcagtcatagcccacaatgc

SEQ ID NO: 254126 - DNA, 75 bp, Homo sapiens
attcagggcctgctgtggaagaccagccccaaaggtttctatgcttgagtctgctcaacagcaggcagccagtgt

SEQ ID NO: 254127 - DNA, 90 bp, Homo sapiens
actacttccacatggcctacaacgtcatcacgccctttctcttgctcaaggagctgtaaaattgacaagcttggcatgtggaaatcagca

SEQ ID NO: 254128 - DNA, 96 bp, Homo sapiens
acacatcttcccagctttggttggaagacctattatcagatcaaccaccaaagtgggaaacattgaaatcaagggtatgttagagcccaccaagga

SEQ ID NO: 254129 - DNA, 100 bp, Homo sapiens
tgttggatccaaaagtcagttagtgacagctaatcccagcataattcggcaaaggtcagcttccccttaccatggttttaccattgtgaatcgactaaat

SEQ ID NO: 254130 - DNA, 98 bp, Homo sapiens
atctggtctcttggctgtctactatatgaggtttggagctgttcgggatgtttctgtatatttcacatgccctgtatccagaagtgggctaaagacag

SEQ ID NO: 254131 - DNA, 75 bp, Homo sapiens
acaattgcaggatgcacagattctggtttcccaggcagctgcagacttgaaacagttctgtctgcagaatgctca

SEQ ID NO: 254132 - DNA, 128 bp, Homo sapiens
gccgccgcctcttccgccgccgggctcggggcctccgcagcgacaacatggaggccgtgaagaccttcaatagcgagaaatgggacgtcggtcatcagatactgaagaagaaagcagaagcaagagaa

SEQ ID NO: 254133 - DNA, 80 bp, Homo sapiens
tctggaggagccttctcaagaacagagggatagctgggagtatggccaccctgctccacgatgcggtaatgaatccagca

SEQ ID NO: 254134 - DNA, 98 bp, Homo sapiens
ttaagacgaattaaagggagattacacagaagcaaaagccttgatagcatggatttctgtgagctcactacgcaagatggctgtcctctctaaggaat

SEQ ID NO: 254135 - DNA, 97 bp, Homo sapiens
atggccgcgctgcgtcgaatgctccacttgccgagcctgatgatggggacgtgccgcccctttgcggcctggcatcctcgctacaacctcattgttg

SEQ ID NO: 254136 - DNA, 100 bp, Homo sapiens
ctcaagccgctcttccccacctgcccggtgcccgaggaggcagccaagctcgtagcctgccactccgtgcctgctgatgcaaggaatcccctgggctccc

SEQ ID NO: 254137 - DNA, 99 bp, Homo sapiens
gctgcccttccggagtccgccccgtgaggagaatggtctaggctgtatagaagacaatgaaatatttgacaatgcaatggctggagtctggattaagac

SEQ ID NO: 254138 - DNA, 88 bp, Homo sapiens
agcccatcagaatggcagatggcttatgaaccacagaattccttcgacaatcctgagtggttttatcggcatgtggaagcacacagtc

SEQ ID NO: 254139 - DNA, 83 bp, Homo sapiens
accctttcagaaatttcttcaaataaacagaaccattcttatcctgtgaatggtagtgtctagaaagggtatgtcccttcaag

SEQ ID NO: 254140 - DNA, 75 bp, Homo sapiens
tcaccccgactcaacgtgagacgcaccgcccggactcaccatgggatttagagatgaaccatattttaaagaaga

SEQ ID NO: 254141 - DNA, 100 bp, Homo sapiens
caggagaagcccatggagatcgttccagggtctccctccactgctgtagtaacccgggtccggggcctcggtggtgctcctgatgcccctcacccacccc

SEQ ID NO: 254142 - DNA, 74 bp, Homo sapiens
atttatatagagatgtgatgttggagaactacagaaacctcgtctccctggaactggtcatgctgctggagtgg

SEQ ID NO: 254143 - DNA, 50 bp, Homo sapiens
gtggtggtcattaagcggagatccggttaacacagaaatctgcctcctgg

SEQ ID NO: 254144 - DNA, 113 bp, Homo sapiens
tgccagcattggtgacatggaaaaggagccaggaattcccagtttgacaccacaggctgagctccctgaaccaggaagaagaagtctctccacagttgtttactttccacgaa

SEQ ID NO: 254145 - DNA, 75 bp, Homo sapiens
ccaggagaggagggaactgcggagcggctctgggtgaaccaggaggatgaggtggaggaggggcccagcgatgtg

SEQ ID NO: 254146 - DNA, 75 bp, Homo sapiens
tcgagaagcaggtggaaacatgagcattcagtttcttggtacagtggttatatacaggcatgtagaggacttatg

SEQ ID NO: 254147 - DNA, 82 bp, Homo sapiens
tctttgtcattttcaacagtctgcaggtctctaattaacagaagatggcaaagcccagccacagcagctatgtccttcagca

SEQ ID NO: 254148 - DNA, 75 bp, Homo sapiens
tggatgatgagcgccttaaggatctctttggcaagtttgaatctgaattatccagaacagaaagttgtgactgtt

SEQ ID NO: 254149 - DNA, 100 bp, Homo sapiens
aaagaccctcttcagacttgaacaagctgctactgtttgaacggtcttggatgaacagatggaagtctgctgttctgcatgaaggggaagggaacataag

SEQ ID NO: 254150 - DNA, 95 bp, Homo sapiens
cggcgagcagtctcaggcctttagtgatgatggctgtgggtgagcgtggaggatgctcagatgcacaccgtcaccatctggctcacagtgcgccc

SEQ ID NO: 254151 - DNA, 80 bp, Homo sapiens
agcctcttcgagcgccgcggacgcgtcatcgagtgtgacgtggtgaaaggaagatgttaccgagtacttcagtgaattcc

SEQ ID NO: 254152 - DNA, 75 bp, Homo sapiens
tgcagacatattttcgagaagatcactctttttgatcagaacaatgctgcaaaaaaagaagagtcagaaactgcc

SEQ ID NO: 254153 - DNA, 51 bp, Homo sapiens
ccggcctcgtgcgccgcgctttgagttgtttttggactacaccataaaatg

SEQ ID NO: 254154 - DNA, 88 bp, Homo sapiens
gcgggcgagaagctgccgccgaacgacaggacgttggggcggcctggctccctcagatgccttcaattaagttgcagagttctgatgg

SEQ ID NO: 254155 - DNA, 90 bp, Homo sapiens
ggtgttccagaagatgataaagaaatgatagcagctccagaaataccaactgattttaatctactacaaaaatgttaatctatgatccag

SEQ ID NO: 254156 - DNA, 100 bp, Homo sapiens
acgcaaccccagatccatttacactttacagttatcttatgatgaggcttttgctatggctaatgatcccttggaaggcttccatgaagtaaaccttgct

SEQ ID NO: 254157 - DNA, 51 bp, Homo sapiens
ggatggcggagtcggggctcctgacgattttaccaaatgttgcaagaactc

SEQ ID NO: 254158 - DNA, 51 bp, Homo sapiens
ctgaggaagctgaagcagaggtttcccaggactgcaatgtgccgatcttag

SEQ ID NO: 254159 - DNA, 73 bp, Homo sapiens
aacaatttacgcgccgtgtaactgtgaatctttcaaagacgttggaacttgccaggaatccagcaatgatgca

SEQ ID NO: 254160 - DNA, 100 bp, Homo sapiens
gaaaacatcaagaagaaagaatgcgtgtattttgtggaaagttccaaactgtctgatgctgggagggtgtgaagacagagaatgaccacatcaacctgaa

SEQ ID NO: 254161 - DNA, 83 bp, Homo sapiens
atgatgggcagtcatggtcccagaaacgtcactatcaagaagaattgcagaatttacctcaagaactctttgctgttgaccca

SEQ ID NO: 254162 - DNA, 100 bp, Homo sapiens
gtcacatgtcattataccttcacccagcatttcatccctcgtcgaaaggattggattggcatctttagagactgtgggccctctcttggattagcggcgg

SEQ ID NO: 254163 - DNA, 100 bp, Homo sapiens
ctaaagcgcttctgccagaggtaaactgaggaaggtcccaggtagccgcggagcgcacccccgtgcccttttcaggtcaaggaggttaaaaagactttgt

SEQ ID NO: 254164 - DNA, 74 bp, Homo sapiens
aggatgtgagcaacacgggaccgacaagttggatggcttgaggactggtactaaaaggaaacgtgactgggagg

SEQ ID NO: 254165 - DNA, 75 bp, Homo sapiens
cctgagaaacatattgtgatgaagtggaggtttaaatcttggccagagggcctgggcggatgatgtggagcggtt

SEQ ID NO: 254166 - DNA, 82 bp, Homo sapiens
gtaaagtcgagtatctggtgaagtggaaaggatggcccccaaaggtcggcactcttcaccctcccgagccctgcccgtctcg

SEQ ID NO: 254167 - DNA, 88 bp, Homo sapiens
aaaggatgctctctgctcgtgcctcaaacgcttggattctacagcaacatattgccactgaagatcctggtgtcgccatgggccgccg

SEQ ID NO: 254168 - DNA, 50 bp, Homo sapiens
gcgtgcacttctgaaggacttcagctgtcgcctggttgggcccggaaatg

SEQ ID NO: 254169 - DNA, 98 bp, Homo sapiens
accgagtatcaggccagtgcgtttgggaatgtcaagctggtggtccacgactgtcccgtctggctgtgagtaccagagtgcccactggttccaacagt

SEQ ID NO: 254170 - DNA, 75 bp, Homo sapiens
gcggcggggctgaggcggccgcggggcccgagcgcaggcagtgctggagacctggggcttcaacaccaaccagga

SEQ ID NO: 254171 - DNA, 75 bp, Homo sapiens
cagctcctctgtgtttgccgcctggatttctccgtggacgatggcagccacgattcaggccatggagaggaagat

SEQ ID NO: 254172 - DNA, 82 bp, Homo sapiens
gacgactgtgacgaggacgaggaggcagccacggggcccctgggtgtggacactgccagcggctgcagccgacttggaatga

SEQ ID NO: 254173 - DNA, 100 bp, Homo sapiens
caccagagcacaatgacgcccacgcagccagaatcctttagcagtgggtcccaggacgtgcaccagaaaagaggacctcccagagttgcccaaacttctg

SEQ ID NO: 254174 - DNA, 75 bp, Homo sapiens
gcagatccaccagatcggagaagacggacaggtgcaagtacagaaagatgaaggtcttagaatcattgattggaa

SEQ ID NO: 254175 - DNA, 90 bp, Homo sapiens
ggaggaaggtggcaagatggtgttggaaagcactatggtgtgctgtgtcagcgtgttatgatgccgtcccgtaccaacctggctactgga

SEQ ID NO: 254176 - DNA, 49 bp, Homo sapiens
cagaaggatggtaatatggtagaaggttcaatacttcttcaagatcttg

SEQ ID NO: 254177 - DNA, 95 bp, Homo sapiens
cgggtgttcttttggggtagtgtctgggatccagtacgagttgaatcattgttcaaataaggccaagtcatcaaggcatgggacattggggtggc

SEQ ID NO: 254178 - DNA, 98 bp, Homo sapiens
cggcgtggctgctgctggcaatctgggaaactagcagagttgttcacatcatggattttcaacgagggaaaaacttgagataccagctattacagctg

SEQ ID NO: 254179 - DNA, 82 bp, Homo sapiens
ctccctagccatgtggaactggtaaagcatgaatcatcctccagtgatgaggagcgcgcagctgccaagccatcaaacgcag

SEQ ID NO: 254180 - DNA, 73 bp, Homo sapiens
tggaggtggaggtggaggtggaggcaactttggctttggggattcacgtggtggcggtggaaatttcggacca

SEQ ID NO: 254181 - DNA, 83 bp, Homo sapiens
cgcgaggcgggcagccggggcgtccaggtgcactttacaggtccccgatgaaccaagagaaccctccaccatatccaggccct

SEQ ID NO: 254182 - DNA, 100 bp, Homo sapiens
tgttgatgggtacccttcaaaaatttaaacaagaatccactgttgctactgaaaggccaggtctaaactgcagtaatccatttactcagctggagaggag

SEQ ID NO: 254183 - DNA, 74 bp, Homo sapiens
tgtttggctctgtgcgaaacagaggatgacccctccggcgaaggtgtcctgccctcggcccgcggcccagccac

SEQ ID NO: 254184 - DNA, 100 bp, Homo sapiens
aaaagataaacgaagttatgaagctctttaccctgtacctcagcatgaactgcagcaaggacaaaaacctgatttgttgcacagtgaattaaaagatgct

SEQ ID NO: 254185 - DNA, 75 bp, Homo sapiens
gaaggacgcgcagtccatctctctcagcttggcttgtggagatgttgaaggaaagtttgatattttattcaatag

SEQ ID NO: 254186 - DNA, 99 bp, Homo sapiens
gatggttcttctaaatgaagcagcaacttcgaaaggcgatgttggaaaaagacggaatattgatgatgttaagaagttcaaaccgggttacctggaagc

SEQ ID NO: 254187 - DNA, 75 bp, Homo sapiens
cggagtcccaatgaaacgggcagccatggccctccacagcccgcagattcccaacctgctgagcatccgcacacc

SEQ ID NO: 254188 - DNA, 128 bp, Homo sapiens
gccaacttctgcctcgggccctgcccctacatttggagcctggacacgcagtacagcaagatgccatggacaatattaccaggcagaaccaattctacgatacccaagtcatcaaacaagaaaacgag

SEQ ID NO: 254189 - DNA, 82 bp, Homo sapiens
atggatttcaatccctccgtatgcacatgtgggtagaggacgtgttagacaagttcatgagatttatggacaagaagttatc

SEQ ID NO: 254190 - DNA, 75 bp, Homo sapiens
gatttgcctccagaactgtatggaagtaaagggggtccactggacggggcctgagctacaacttcacccacctgg

SEQ ID NO: 254191 - DNA, 98 bp, Homo sapiens
tcttttgcattatgatccagttgggacccctcattcagagctcttggaagaagtcgaatgtactccgtcacctcgattagctctcactttgaaagtaa

SEQ ID NO: 254192 - DNA, 75 bp, Homo sapiens
catactcacagagttagagagagggatggtgcttctgcagaaagccgtcattacacctgattttgaaaaaaacca

SEQ ID NO: 254193 - DNA, 75 bp, Homo sapiens
ggaaggtggagccaccagcctctccctgaatccttgcagcctttcctggaagcctgtagcaactctttatttttt

SEQ ID NO: 254194 - DNA, 82 bp, Homo sapiens
gcaggacctctgtcagagaatgaaacactcatcgcatggaaacccctgaacttccagaacctgccagaacatttggaccagt

SEQ ID NO: 254195 - DNA, 90 bp, Homo sapiens
attcgttttcaggagcatctccaggtcagcccaaggccaaccccactgtcactctgttcccgccctcctctgaggagctccaagccaaca

SEQ ID NO: 254196 - DNA, 50 bp, Homo sapiens
gtccagtgggtctgagcaaaaggaagggaaaaggccgaggcatcagcgtg

SEQ ID NO: 254197 - DNA, 100 bp, Homo sapiens
cgaccagcccaagaaacatctcaccaatttcaaatccgcttccaaggagaggactgcccctcacaaaagtaataccggattccccaagctgctttgtgcc

SEQ ID NO: 254198 - DNA, 100 bp, Homo sapiens
tgaggggtctgaagactgaaagagtcgaatggtttgttggcaggataagttctgaacgtcgaaaagaaaagtctcgagatgcagccagatctcggcgaag

SEQ ID NO: 254199 - DNA, 100 bp, Homo sapiens
ccgcgagcccgccttgtctgcggcgtgactggaggcccagaaagcatgctctgaattgccatcggatgaagcctgctctgttcagcgtgctctgtgagat

SEQ ID NO: 254200 - DNA, 100 bp, Homo sapiens
gaagaactttgaaagagctctctacttttatgaacaggtggggaacgccaagcacaacgtgcatgtcatgaacatctccacaggcaagaaagtgaagggg

SEQ ID NO: 254201 - DNA, 82 bp, Homo sapiens
agagaagcaatgggaatttacatcagcaccctcaaaacagactataatgtaactgcaaactccaagctggtcattatcacgg

SEQ ID NO: 254202 - DNA, 100 bp, Homo sapiens
gtgaccgagagcgtgaccgagagcgcgaatatcgtcatcgttagaaggacactttgccaccatcaccttgaccttcatcgacaagaacggagagactgag

SEQ ID NO: 254203 - DNA, 74 bp, Homo sapiens
atttgtatagagatgtgatgttggagaactacagaaacctggtctccctaggagggtttgcatttgtgtatgaa

SEQ ID NO: 254204 - DNA, 89 bp, Homo sapiens
caacttcgggcgcgctgtacagcaagtcaatgccatgctctcagatctggctcgagaccaccatggctaaggtggaaggggctgccgcc

SEQ ID NO: 254205 - DNA, 98 bp, Homo sapiens
ctagtgtgtcaactcagcgtttctcctctcgtccctggcttgggtggcaaattttgaaagacctcgaatgaatgcgaattctctgcttgcaagcccta

SEQ ID NO: 254206 - DNA, 80 bp, Homo sapiens
ggggtgaaactgaccacagtgctcaccacccaccaccactggtttggtgcacctcgatttggaggaagtagggcagggcc

SEQ ID NO: 254207 - DNA, 82 bp, Homo sapiens
gaaccacaaggaaacagacattgatagcctgggctggaagctcttctacgtcacaggctgcctgtttgtggctgtgcagaac

SEQ ID NO: 254208 - DNA, 100 bp, Homo sapiens
tggtgcacgacttcgacgccagcctctcgggcatcgggcaggaactgggcgccggcgcttacagcatgagtgccggtggtggtgtgcacattgagccccg

SEQ ID NO: 254209 - DNA, 102 bp, Homo sapiens
cggaggacttggggaaaaaggaccacatagtccatcgaagaagagtccttggaacaagcaactggctattgaaaaggtgacagaccatgccaccactgccct

SEQ ID NO: 254210 - DNA, 50 bp, Homo sapiens
gaagatcatcgagcatttcaaacgactcggagaagccgcggctgtccccg

SEQ ID NO: 254211 - DNA, 95 bp, Homo sapiens
gggggattctcgacctgctaacagaactggaccttttcggctctctaggaaacaccagaattatcagtgaagaatatattaaatggctcacgggc

SEQ ID NO: 254212 - DNA, 101 bp, Homo sapiens
ctcagagtgtgcacccgccccaggggcaccagcccatgctgagggcatgcaaccatcgagaaagagatgcggaagctattcaacatccctgcggagcgtga

SEQ ID NO: 254213 - DNA, 96 bp, Homo sapiens
cggcacctgcaccaggtgctgaaggacaagcaggaggtgctggaccaggcgctgcagcagaacagccagctcccctagtccaggccgagcttgcac

SEQ ID NO: 254214 - DNA, 82 bp, Homo sapiens
ccgccaccacccactccggacacagttaaacgagaagattcatcaccgctttgatggctgcctcacaaacttcacaaactgt

SEQ ID NO: 254215 - DNA, 51 bp, Homo sapiens
gccagtttatatccaagacttagatgaggaccatggccaacctggagcgca

SEQ ID NO: 254216 - DNA, 100 bp, Homo sapiens
tgccagtgtccgggaggccctgggggtggagtctcactactcaagacctacaacggccagagcgagaacaacgaagactatgagatccccccgataacac

SEQ ID NO: 254217 - DNA, 75 bp, Homo sapiens
cccgaggaggggaccatgacacagtttggtgcacctcgatttggaggaagtagggcagggcccttatctggaaag

SEQ ID NO: 254218 - DNA, 50 bp, Homo sapiens
cagacacagatgatcaccgggtaaaagaagaagctgtttgttttgattct

SEQ ID NO: 254219 - DNA, 82 bp, Homo sapiens
gcaaagcaagcgagaagtcgcgggcccagcccacagcagggtgccagaaccctgtggagcatcatgaactgggaagagtagc

SEQ ID NO: 254220 - DNA, 100 bp, Homo sapiens
tgaaaggcactttattatgcaggtggtctgtgaagccacacagtgtccagatacgaggcttatcacacagactttcagccaccacaatcagctggcacag

SEQ ID NO: 254221 - DNA, 98 bp, Homo sapiens
atattattagcacaagagcaccatactttgaggccccactgtgttctccttgcctcaaaagaaaactcggcacctgttaaacttggaggctttggggt

SEQ ID NO: 254222 - DNA, 90 bp, Homo sapiens
cctcagtttatcgttggtggagccacgcgcacagacatttgtcagggtggtctagatttctgagagagcagacaccatcttatttctgtt

SEQ ID NO: 254223 - DNA, 75 bp, Homo sapiens
aggaactctttcttgacctttgtaaaacttcgcaaaggctgaaaaatttgcctcgcacttccctcaaagccaaac

SEQ ID NO: 254224 - DNA, 98 bp, Homo sapiens
agtgaagctttggccactgtcacaggaattgtggatggttcggggagcattggagctgcagtgggccagccccattgacaaaccttcagattctctca

SEQ ID NO: 254225 - DNA, 51 bp, Homo sapiens
gcaacagctctgccggctggaagccacaatatgagaacacttcactccaga

SEQ ID NO: 254226 - DNA, 101 bp, Homo sapiens
agatgcgattttagtggaggactacagagccggtgatatgatctgtcctgaatgtggcttggttgtaggtactttggaagttcgtcttatgggctgccaag

SEQ ID NO: 254227 - DNA, 101 bp, Homo sapiens
gcaagaaaagcctctgggagcagaagggaggctccaagacctcatcaacaattaaggccctgtgcaccaaggtgccggaactgatcagaaccatcatgggc

SEQ ID NO: 254228 - DNA, 73 bp, Homo sapiens
gaagaaggccttgactacggaggggttgccagggtcttcaccggtttgtggcccgggaaaagataatgtctgt

SEQ ID NO: 254229 - DNA, 75 bp, Homo sapiens
cccgcagagagttaacttctgtttacatggaactcagacatctgcaaatcatgaagctgcagttcatcatctgct

SEQ ID NO: 254230 - DNA, 58 bp, Homo sapiens
gtctgggaatgccaacacagaaaccttgccatcaggaactcaagacatggctgcccag

SEQ ID NO: 254231 - DNA, 100 bp, Homo sapiens
cagcgccttcccacggagcagcactcttcaccctgcacagccttgttaggatcttagaaatgaagttgaaaaattacgcaatgaagtgaatgaaagagag

SEQ ID NO: 254232 - DNA, 101 bp, Homo sapiens
tgagcggcgagtttccgatttaaagctgagctgcgaggaaaatggcggcgggaggtggtggtctgtcacgtggtgggccaggctattcagttcttggtcag

SEQ ID NO: 254233 - DNA, 82 bp, Homo sapiens
caccggcaccatcctgctcggcgtctggtatctggatgccggctccaggagcagcagtggaggtcgggaacgcctcattgtg

SEQ ID NO: 254234 - DNA, 90 bp, Homo sapiens
ggaacatcggggacaaccgctacattgtccaagtgtcaccactgggcatccgcctgctggaaggaggtgtggccgacgacgatgccctcg

SEQ ID NO: 254235 - DNA, 125 bp, Homo sapiens
gtgcctgtcttcagatcttcacagcacagttcctgggaaggtggagccaccagcctctccctgcatcaacaaagagagcattgtggatgtagaaggtgttgtgagaaaagtgaatcagaaaattg

SEQ ID NO: 254236 - DNA, 100 bp, Homo sapiens
caatgattgcggagcccgctcacttttacctgtttggattaatatgtctctgttcaggtgtggatgtggaagcagccaagcgggcagaagaggaattgct

SEQ ID NO: 254237 - DNA, 100 bp, Homo sapiens
cttcataagaagttgcatcaggtggtggagacatcccatgaggatctgcccgcttcccaggaaaggtccgagggtgatacaattctggagactggagaag

SEQ ID NO: 254238 - DNA, 100 bp, Homo sapiens
cgaagggaactttagcttttcaaatgcttggacttatttggttataataaacaacatgtcacagttggtgtattacccaaatttgggatggatgtgcatt

SEQ ID NO: 254239 - DNA, 100 bp, Homo sapiens
ctgagagggagatgattattagttgcgttgagtcatcaggcaaaaccaagatcactccatggatgaaatgacagctgtggtgaaaattgaaaaaggagtt

SEQ ID NO: 254240 - DNA, 75 bp, Homo sapiens
gaaaacatcgtggccctgtacgacttccagcgagggcggcactgctcacaggacggctacccatccgcaatggct

SEQ ID NO: 254241 - DNA, 50 bp, Homo sapiens
cttcttcgagtatttgtagaaggattgttgatccatttcagatacttgtg

SEQ ID NO: 254242 - DNA, 83 bp, Homo sapiens
ttctgcatcaaaaatatcaacgatgaaagagtatttgattatgagcctcaaacaatttgtgagcatctccagtacttgtttgc

SEQ ID NO: 254243 - DNA, 100 bp, Homo sapiens
tgaacatgcaagaaaacagcatgcaggtgtctgcaaagggccgttgttcgagagagaactgcaagtatcttcaccctccgacacacttaaaaactcaact

SEQ ID NO: 254244 - DNA, 96 bp, Homo sapiens
tgatgaactatagcaatgagaatggttggtgcagcatgatagagctcaatttcaaggatgcatttgattcctttgagaggctaaaaaatgagtcca

SEQ ID NO: 254245 - DNA, 83 bp, Homo sapiens
gccctatggcgtccgcctcgacccaaccggcggccttgagcgctgagcaagcaaaggccgctgccatggcccagacactgcag

SEQ ID NO: 254246 - DNA, 80 bp, Homo sapiens
aacggtttccccagcagtagcctctgcgaccaggtgcggcttcagggttttggccaaattgggcgagggcacaaaataac

SEQ ID NO: 254247 - DNA, 89 bp, Homo sapiens
ggatccacgtcttctacaagagttgctgaccatagagagttacattgtccagcttttcctccacgaaatggagcagcaacaaaaggcca

SEQ ID NO: 254248 - DNA, 75 bp, Homo sapiens
taattttagggtcctttatatagaagggagagtagatatccatttggggatgaagtctactttgacagctagcaa

SEQ ID NO: 254249 - DNA, 100 bp, Homo sapiens
ttcaatgtagtcaatgtgacatgcgtttcatacagaagtacctgcttcagagacatgagaagattcatactggaatgaagccaagagtgatgaaagaagc

SEQ ID NO: 254250 - DNA, 101 bp, Homo sapiens
gttatcccgggcccgccggccctgagctcccggcggcgcagatcagaccttccagctgcctctcatgtacttgtctgttgggggcttgtgttgatcaggag

SEQ ID NO: 254251 - DNA, 83 bp, Homo sapiens
ccttagctgtgctcgcgctactctctctttctggcctggaggctatccagcgtcttgggcgtctttggtactggcttttttag

SEQ ID NO: 254252 - DNA, 100 bp, Homo sapiens
aggaatcgtacctcatcatgggccagacgtcagacctgtggagaatcaaatctgaccaagacaatgcaaactccagtgaacattcccgtgcctgtgctcc

SEQ ID NO: 254253 - DNA, 75 bp, Homo sapiens
tcaacacctggacaccttgttagatggaacctacaagcagctactacccacagatggcatgatccgaaaacactc

SEQ ID NO: 254254 - DNA, 90 bp, Homo sapiens
ggcccttggcatctgcggttatattcaacaggagcaccaacggtggccaagaagtcactattgatcatggccttgccaggttggtgacag

SEQ ID NO: 254255 - DNA, 98 bp, Homo sapiens
gaggccttccagctgtttgaccgaacagcccatagatgagagcagccagatgagtgacctccctgtcaaagtgactcacacagaaaccggcaaggttc

SEQ ID NO: 254256 - DNA, 100 bp, Homo sapiens
acggagtgtctcataaacggctccttcctttgagactgcttttcaggaagccttggacgctgcaggtgataaacttgtagtagttgacttctcagccacg

SEQ ID NO: 254257 - DNA, 88 bp, Homo sapiens
gcacacagactgacacatctcacagtgggttttcggctttgtgagaaaccttaccatcaaacacgatggccagcaacgttaccaacaa

SEQ ID NO: 254258 - DNA, 75 bp, Homo sapiens
actgcagaggtgctggagctggcaggggcaatttgaaattcgatatgcaccgtggttccagtggacaagttttcc

SEQ ID NO: 254259 - DNA, 122 bp, Homo sapiens
aaatcgtgcacatccaggctggtcagtgtggcaaccagatcggtgccaagctatcatggtgaacttacttcagattgtgcgggaccactgggttcatgttcttgtccctatgggatttgtca

SEQ ID NO: 254260 - DNA, 75 bp, Homo sapiens
tccagcgccaccttaactccgccctcccccagctttgtgtccctggtgatgttggaacattaatgatggaacatg

SEQ ID NO: 254261 - DNA, 100 bp, Homo sapiens
gctcatgctcagcaaagtgtttactgctcggactggcagcagtatttgtgggagtctcaatacaagtgtgatggcaccttgtccaccctgtcgtgattat

SEQ ID NO: 254262 - DNA, 101 bp, Homo sapiens
aagagtctccgcggtggaggtctgcgttgctcttgcttttcctcgctggggtgtacggagccagtctacttgatgacttatacaagtatttcttcttccat

SEQ ID NO: 254263 - DNA, 90 bp, Homo sapiens
ctttgaaatgacgattccacagtttcaggaaaaatgccagctgtgggacaaggagtgcaggccgcacaacctcggcaggcaccgggggga

SEQ ID NO: 254264 - DNA, 75 bp, Homo sapiens
ggaggccgtcaagaagggctcgaccgcggaatcaagagagacccggccaaggcttttgtgcccaggactgttatg

SEQ ID NO: 254265 - DNA, 88 bp, Homo sapiens
tctcctgcctcagcctcctaagtagctgggactacagggtttccaggcctgaggtgcccgccctggccccaggagaatgaaccagccg

SEQ ID NO: 254266 - DNA, 75 bp, Homo sapiens
ttcgctacgcggggctaccggatcggtcggaaatgattatggcatcgtcaaagcattgtggtgtcttttttactg

SEQ ID NO: 254267 - DNA, 76 bp, Homo sapiens
gaaaggagcaagagcaagatcaccgtgacatccgaggtgcctttctccaaaagttgcagcatttgcaagaagaagc

SEQ ID NO: 254268 - DNA, 75 bp, Homo sapiens
gttaacacctctgccgctgctaaaaggatgaaaactttcggaagagaaagttgcctgtggtaagttcagttgtta

SEQ ID NO: 254269 - DNA, 100 bp, Homo sapiens
accgccatccccatttctatggtcctcctcacctatggccgctggcagctgaactaccagcagaaagtaggcatcatgtactgcaaagctggacagagca

SEQ ID NO: 254270 - DNA, 100 bp, Homo sapiens
atgatctccaccctgacctggaggagccatcctctctaggggtgtaaggtgaaatcttgtgctgagtgggtgtctctctcaaaggccaggattgtagaat

SEQ ID NO: 254271 - DNA, 85 bp, Homo sapiens
tatccagcttctgcagaaaaatgttagagctcagttggttgatatgaaacgactggaggagctgaaaatcctggtggactacgac

SEQ ID NO: 254272 - DNA, 90 bp, Homo sapiens
gggaccttgaacaaggcaaatatggttttgattttcagctgaactctcatctctcaacactggcaaatattcataagatctaccacaccc

SEQ ID NO: 254273 - DNA, 98 bp, Homo sapiens
aatggccatttgaattcacttcagagcaatccactactgccagaccagaaggccttagaaaatttacgtgtatacctgtgtgagaaaatcatagctga

SEQ ID NO: 254274 - DNA, 90 bp, Homo sapiens
acttcgagagccctgtcatcttctaaacagagcagcagcagcagagatgataacatgtttcagccaaatggtgcaaaatgcattccagta

SEQ ID NO: 254275 - DNA, 50 bp, Homo sapiens
tctagaccttgccaagatggcacaggatgaagtcattgctgtttccgaaa

SEQ ID NO: 254276 - DNA, 138 bp, Homo sapiens
ggaaagccgctggttgtgatggtggctatgacaaaccttcagcctgaagacccgggagggaaaaataaccaaggactttcaaagcaaaggagctatgggaaaaaaatggagctgtgattatggccgtgcggaggccag

SEQ ID NO: 254277 - DNA, 100 bp, Homo sapiens
gcggcaaaaccacctctagaaaagcatggaatgaagaccattgggagcagactctgccaggatcgtctgggaccccagagctaagcacagctgagcggaa

SEQ ID NO: 254278 - DNA, 97 bp, Homo sapiens
caggaggatctcaggagactcatttcctatctagcctgtattcccaggtgaaatgacaatggatgctctgttggctcgattgaaacttctgaatcca

SEQ ID NO: 254279 - DNA, 83 bp, Homo sapiens
gagaacgtccactgcgggccggcgaaagctggagcatcagatccatgctgctgctgactcggagccccacagcttggcacagg

SEQ ID NO: 254280 - DNA, 83 bp, Homo sapiens
aaaggatatgggcagttgtgaaatataccctcagactattcagcacaatcctaatgggcgaaacacaactggttttgagaatc

SEQ ID NO: 254281 - DNA, 100 bp, Homo sapiens
gccaaccgcaaccattgacgccatgtcgggttattcgagtgaccgagaccgcggccgggaccgagggcggatgttcccattcctgtcatttactgtggcc

SEQ ID NO: 254282 - DNA, 75 bp, Homo sapiens
cggaatgtgatcacagagcctatttacccagaagtagtccatatgacatcaactagtcaggcagtcttccgtctc

SEQ ID NO: 254283 - DNA, 100 bp, Homo sapiens
gggtactcagcagcctcagcctgaaggaaagacttcagtatggactttctgtcagattttgagatgatgttgcagcgaaaaaagagcatgagtggcaagc

SEQ ID NO: 254284 - DNA, 50 bp, Homo sapiens
ctgctggacccaaggacatggtggtcgggctgcaaagttggctttcacag

SEQ ID NO: 254285 - DNA, 82 bp, Homo sapiens
ctgttgatgactcccaaacccatgatccgggcttttgaccatgtcctgcagtgtttcccattaaacactaccaggacaaaat

SEQ ID NO: 254286 - DNA, 73 bp, Homo sapiens
ttacttgttgggaactggactccgagggaaagagatacagaaggtggtcatggcactaggagactacatgggc

SEQ ID NO: 254287 - DNA, 82 bp, Homo sapiens
cggacctgtctgggtctcagccgccaaagaccccgtccggtaggtgtccttaagtttgctcgcttggtcaagtcctacgaag

SEQ ID NO: 254288 - DNA, 75 bp, Homo sapiens
ctggagacttgacctaaacagcaaagagtggatccgacctttggcttcaggtatgcaaccactcatgtattcggt

SEQ ID NO: 254289 - DNA, 75 bp, Homo sapiens
gggagcgagagctgcagcatgctgccctggggggcacagctattcctgagactggcccagacgctgcggcactat

SEQ ID NO: 254290 - DNA, 116 bp, Homo sapiens
ggacggctctgtaggaaggaacttggttccccctccctcagcttccgccccaaaagtatgtctggatttggaatgaacaggaatcaggcatttggaatgaataactccttatcaag

SEQ ID NO: 254291 - DNA, 100 bp, Homo sapiens
ggcaggttaccatcactggatctgctgccagcattagcctggctcaatatctaatcaatgtcagcgtgagtgcatctccatccacgttggccaggctggt

SEQ ID NO: 254292 - DNA, 75 bp, Homo sapiens
ctggacagcggagcacgatgattgataggaaacagcatcctccattcagctgctgacagcgtgaccagcgcagtg

SEQ ID NO: 254293 - DNA, 83 bp, Homo sapiens
tggccaccatgtctgggagatggaagcgaaaactgaccgggacctgtgcaagccgttctgggaggtgatcagtgatgaacatg

SEQ ID NO: 254294 - DNA, 75 bp, Homo sapiens
gcgaggcagctgtactaggactgggaacgggtgatgggcagaatctgtttacgaaagacgtgacagtgatcgagg

SEQ ID NO: 254295 - DNA, 95 bp, Homo sapiens
cggtgtagaggcggcggacgggccggagggaggatgttaaagccccgcggagcatattaatgaaaagtgccataaactgaaaaaccaaacatgag

SEQ ID NO: 254296 - DNA, 100 bp, Homo sapiens
tcttcagctcgccatggatcccaactgctcctgcgccgccggttcattggcatggaaaaatgttcagtgggaggattagagttgactgaacagactcctg

SEQ ID NO: 254297 - DNA, 90 bp, Homo sapiens
actggacttagtgcagtcaatgatggactgtctgtatgccaagtatgctgtgagaaaaccatggaagtgatgagaaactctcaggaaact

SEQ ID NO: 254298 - DNA, 100 bp, Homo sapiens
taaagagctgggcttgaacttcgtgagtttcgctctaaactgcccttgaaatgaagctggacttggagtccgggaccatgtctggagaactaccaccaaa

SEQ ID NO: 254299 - DNA, 133 bp, Homo sapiens
ccggtccattcaagctgaacgcacccgctggttgtggaccgtctgccaggcaccacaacctacaacaagaaaggggcctcccgaaggaaagaccacctgaaggaccaccagaatgggtccatggctgctgtga

SEQ ID NO: 254300 - DNA, 75 bp, Homo sapiens
agctgcctcagttcttagcgcagttctgaaacacagacaacatcaagggggaaagaaagtgaagattcatcttat

SEQ ID NO: 254301 - DNA, 106 bp, Homo sapiens
cttgttcccccaaatgtctgactctgactctcggactgagaaacgcaagtcgagcaaaagatgtgataataccagcaaagccacctgtcagctttttctccttgag

SEQ ID NO: 254302 - DNA, 100 bp, Homo sapiens
tcagatcttgaaaaaaaaaggagagaagctgaagcattgcttcaaagcatggggctaactccagaatcccccattgaagagtcaagtaccattggccagg

SEQ ID NO: 254303 - DNA, 100 bp, Homo sapiens
cggaagcctgcgtaactttctcccttgatccgggagtctttccactgggtgtggacactgccagcggctgcagccgacttggaatgacctgggagacaaa

SEQ ID NO: 254304 - DNA, 83 bp, Homo sapiens
gggtagcgggagtgatgtctgtggggccgccggcggcccggcttcagactggtcttctgaggacctctgccctctacacagcg

SEQ ID NO: 254305 - DNA, 75 bp, Homo sapiens
gtcggtgctccggggaggtcacctgacgaggagaaccctgccatcagcatcactgaaaacgtgctgcatttcaaa

SEQ ID NO: 254306 - DNA, 100 bp, Homo sapiens
tttagttctggggagcgcctcgtcgacatgagtgatgtggaggaaaacaacttcgagggcagaattcatgacagatgctgcccgccgagagcaggagtcc

SEQ ID NO: 254307 - DNA, 100 bp, Homo sapiens
ttgtgctgggccacttcattttgctcttcaacgcctggtgcccaggttatggaggttttgatgactatggtggctataataattacggctatgggaatga

SEQ ID NO: 254308 - DNA, 90 bp, Homo sapiens
gcaagagtcaccgggatccctacgcgacctccgtgggccacctcataggtttaccttatgggtgggaggaagcttacacagcagatggaa

SEQ ID NO: 254309 - DNA, 75 bp, Homo sapiens
aggtcactttccagcagtccagcacggccaagtcagccacctggacggcatggaaagctcacctgatgggcccag

SEQ ID NO: 254310 - DNA, 83 bp, Homo sapiens
gccatgtcatccacttcgcccaacctccaggaatagccaggccagaagaaggaaggcctgtggtgagtgggacaggaaatgac

SEQ ID NO: 254311 - DNA, 97 bp, Homo sapiens
tttgttagaaaggagacccgactgcaactgctggattgctgcaaggctgagggacgagaacgagtctgaagatgatgagaaactgaaaaagaggaag

SEQ ID NO: 254312 - DNA, 74 bp, Homo sapiens
gctggtataattataggcaccagattgcagcaaaaattggaggtgatgcagggacatcactgaattcaaatgac

SEQ ID NO: 254313 - DNA, 97 bp, Homo sapiens
cagcgctccacgccagccatcaccctcgagagcccggacatcaagtacccgctgcggctcatcgaccgggaggtctcggcgcggaagatggccggcg

SEQ ID NO: 254314 - DNA, 51 bp, Homo sapiens
ggagacatctggaacaaactgggaagacatgtaaggaatttgcataagaca

SEQ ID NO: 254315 - DNA, 98 bp, Homo sapiens
aaacaccatggctgcggcggcccagctctctctgacacagtcgcagatatggccagtacactatgaaccaggaaagcaccaccatcaaagttatggag

SEQ ID NO: 254316 - DNA, 76 bp, Homo sapiens
gccttttccacagagaaatgagagcaccctcattttcggctttgtgagaaaccttaccatcaaacacgatggccag

SEQ ID NO: 254317 - DNA, 101 bp, Homo sapiens
gccccagatgcccaccgggatggagaaggaggaggaatcggactcacaccacccggcaagaactgctcactacggctccctgccccagaagtcacacggcc

SEQ ID NO: 254318 - DNA, 98 bp, Homo sapiens
cgacgtgctgttcgaggatgtgtacgagctgtgcgaggtgatcggaaagcattgtatctgatagccactaatggaactccagagctccagaatcctga

SEQ ID NO: 254319 - DNA, 100 bp, Homo sapiens
tccaggataataacgggaccatcattcctttccggaagcacacagtgcgcggggagcgttcctacaggaacgaatgcaggaatttgggaactgagctgtg

SEQ ID NO: 254320 - DNA, 76 bp, Homo sapiens
agtaatcgcctgctttgattcattgaaaggtcagtatagaccttctgatttgctgtgccctgagacatatgtttgg

SEQ ID NO: 254321 - DNA, 100 bp, Homo sapiens
atcgaagccatgatttaaatatcggcgttaagaatcatcctgatgttgcaagcaaattggctacttgtcccttcaatgctcgccaccaggttcctcgagc

SEQ ID NO: 254322 - DNA, 73 bp, Homo sapiens
agactctccaaccccagttgctttgccagcctggctgggctcaggaggactctgaagacctactgggtgagca

SEQ ID NO: 254323 - DNA, 100 bp, Homo sapiens
ggattcggaaacttcagatacgaaatatcccgcctcatttacagtgggagataatctggagctttcaaaatgtttgccaaagcaaccaggaattttctta

SEQ ID NO: 254324 - DNA, 100 bp, Homo sapiens
ggaaagactctcggagctggtgcaggctgtgtcggatcccagctctcctcaatacgaggagaaggcagagcccccccaggctatgaatgccctgatgcgg

SEQ ID NO: 254325 - DNA, 90 bp, Homo sapiens
ggcgtccccggcgcgaagaggctggactcggattcgttgcctgaggacacattggcgtgagacctgggagtacgttgtgccaaatcattg

SEQ ID NO: 254326 - DNA, 90 bp, Homo sapiens
gggaatggagctcggaggcggcgaggagcgcctgcctgaggagagcagacctgtcgcgaaatcgcctttcagaaattcctatagaagcat

SEQ ID NO: 254327 - DNA, 97 bp, Homo sapiens
gaagtgtcaatatcctttttaacctgactcatcgagaaatgtgtgctatactggccggaaaagagagggatatatggaaaagttgaggttctggtta

SEQ ID NO: 254328 - DNA, 75 bp, Homo sapiens
ccgcagtctggccacccgcttccatgcggttcgggtccaagatgatgccgcctcaaggaataggttctcctagtg

SEQ ID NO: 254329 - DNA, 82 bp, Homo sapiens
cgcgccggcggcaccatgaagtcagcggaggaaggtggacgacatccttggagaaggcagcgacgacagcgacagcgagaag

SEQ ID NO: 254330 - DNA, 75 bp, Homo sapiens
gtctctctgctgcggcgcggggaccgctgtgctctcggcgaacctcttcccggccgctctggtgcacttgggagc

SEQ ID NO: 254331 - DNA, 92 bp, Homo sapiens
gaggattgatgtcccttcagcatcatgcagccgccgccgaggaagaaactcaagccagtggattatgagtaccgagaagaagtccactgggc

SEQ ID NO: 254332 - DNA, 82 bp, Homo sapiens
aagagttggatactcagcgtcgctggcagccgctgtacttggtgatggctggaccggcggaggaggcgggagcccattgtcc

SEQ ID NO: 254333 - DNA, 50 bp, Homo sapiens
gcggaaggtgatgcccaagatggaccagatggtcatcatgggccagtgct

SEQ ID NO: 254334 - DNA, 82 bp, Homo sapiens
gccaggttcagctgcgaggctgctggtggctgtggagggtctcctatggacagaagtgcgggcaaggagctttgttcctccc

SEQ ID NO: 254335 - DNA, 96 bp, Homo sapiens
tggactgggcgctgccgctttctgagtctgcgctcctcagaccaccggcaggtgaacagcctgatgcagaccgaggagtgcccacctatgctagac

SEQ ID NO: 254336 - DNA, 100 bp, Homo sapiens
tggacatcctctactaccgcaaggatggttggagctgaaggagtgcccaggctgcggatggaggaaggacgtgctcgggagaaggtgaagatgggagaga

SEQ ID NO: 254337 - DNA, 123 bp, Homo sapiens
tccgggcaagagaccgactggcggagcaccgccttccggcagaagctggtcagtcaaatgtatcgagaaccttccctgcgaacttcagaggaacttccagctgatgcgagagctggaccagag

SEQ ID NO: 254338 - DNA, 101 bp, Homo sapiens
ttggaagctaaagctaccaaagacgtagaaagaaatcttagcaggtaattgatcaccctagacccagggacacccaattcatcgtaatcatcatgaataat

SEQ ID NO: 254339 - DNA, 51 bp, Homo sapiens
ggtgtctggcggatgcggtcgtgaagatagtgaaagagtttctagccaaag

SEQ ID NO: 254340 - DNA, 80 bp, Homo sapiens
gtgctacagagccaactcctgacaggagcagatgtctcaagtattagatgccatgtttgaaaaattggtcaaagatgggg

SEQ ID NO: 254341 - DNA, 100 bp, Homo sapiens
cagagctcagcgggcctggcccatatcgccaggccgaccgctatggattcattgggggcagctcagcagagccaggttcctgtcagacggctatgtggcc

SEQ ID NO: 254342 - DNA, 75 bp, Homo sapiens
gccgggatggaggacgttaactctaacgtgaacgcggaccaggaggtttattcttcagtccaaggaagcaattca

SEQ ID NO: 254343 - DNA, 50 bp, Homo sapiens
gcgcggacatggcctcaaacggctgatcagctgaccgaagaacagattgc

SEQ ID NO: 254344 - DNA, 146 bp, Homo sapiens
caagcatctttcagctggtcagcctcattctcaaggaccctgtgcgctggccctcaaccatcagtccctgctttaagcttgttgcagatccttgtgccagcaacccttgtcaccatggcaactgcagcagcagcagcagcagcagc

SEQ ID NO: 254345 - DNA, 100 bp, Homo sapiens
aagaaggatggatacacacagtctgcataaatggaagatgggatccagaagtgaactgctcaagggatcttcaatattcatgttattttctcctttggtc

SEQ ID NO: 254346 - DNA, 82 bp, Homo sapiens
atcaccatcaccaacaacattggctcaatagcaagaatgtgtgcccttaatgaaatggagcagatggtgctttttacccaga

SEQ ID NO: 254347 - DNA, 50 bp, Homo sapiens
gtttcacctaccttcccgccaacggttatcaatactctggctgaccatca

SEQ ID NO: 254348 - DNA, 51 bp, Homo sapiens
cccccgcaacgctgagcgcctgtatatgtctcgagtccacggtatgcaccc

SEQ ID NO: 254349 - DNA, 82 bp, Homo sapiens
agtgtggcgaggatggctcctttacccagacaatgcagatcttcgtgaagactctgactggtaagaccatcaccctcgaggt

SEQ ID NO: 254350 - DNA, 100 bp, Homo sapiens
ctcaaatggaatattgtcgcaccccatgcactgtcagttgcaatattcctgtggtgtctggcaaagaactacaaatgcccttctggctgcaggatgaaag

SEQ ID NO: 254351 - DNA, 100 bp, Homo sapiens
tcgtttttccttgagctgaacgtcttgcaacagtggccgcacgcatagaggcggggtttcaccatgttgcccagactggtcttgaactcctgagcttaag

SEQ ID NO: 254352 - DNA, 87 bp, Homo sapiens
gcgagcgaggaggatggcggagtcggggctcctgacgatcaatgtaaccactgtgcgggaatatctgccagaaggagacttttcaat

SEQ ID NO: 254353 - DNA, 100 bp, Homo sapiens
aacagtacgcagtgaatgtttataaccccgttttcacacgaatggccccttcacatatttgaagactaccgtcgtgtccgtgctgaccctttctccctgc

SEQ ID NO: 254354 - DNA, 78 bp, Homo sapiens
tcaagactatgatgccagcaagctctccagtgaagaagccaagtcttctaaaggcccaccaattcgagggagactctt

SEQ ID NO: 254355 - DNA, 82 bp, Homo sapiens
gaataaagagctgtatttgatcaggccaaatttgagtttcatcatggtgactatgaaaaacagtttctgcatgtactgagcc

SEQ ID NO: 254356 - DNA, 76 bp, Homo sapiens
cagtcccgggagaacctgcggcggccggagcgaagtcaatgaaaggattctattttgcaaagctgtattatgaagc

SEQ ID NO: 254357 - DNA, 50 bp, Homo sapiens
tgcccgggtcttctacctgctcctgggccgggctcggtggctcatgtctg

SEQ ID NO: 254358 - DNA, 75 bp, Homo sapiens
taacagattgtgttatttcacctcattgatgctactcacagagacgtggatgtgctgttactgctttctaactct

SEQ ID NO: 254359 - DNA, 75 bp, Homo sapiens
ccgccgacgcctcagccgcttggggcccgcacggaccctctacttcacacccaccaaggctccggatgtgttccc

SEQ ID NO: 254360 - DNA, 82 bp, Homo sapiens
tccagcacctacgtcccgctgccgtcgccgccgccaccatgcccaagagaaaggtagtgaagcgcgcagtggcgagccagcc

SEQ ID NO: 254361 - DNA, 100 bp, Homo sapiens
gtggaacacccctggcacaacaacgagattctacaagcctctgtagatggtccaggtctagatgttgatggaatatatcgagttagtggcaatctggcaa

SEQ ID NO: 254362 - DNA, 90 bp, Homo sapiens
caagaacaacctaccagagaccttacctgtcaccttggctctcccacccaatggagatggctctaatgtactgtaagattgatgttaaag

SEQ ID NO: 254363 - DNA, 80 bp, Homo sapiens
tccatcaaccaggccccactggaaatcgtctcgaaactgctctcagagggtctggtcgccagcaacctgaatctcaaacc

SEQ ID NO: 254364 - DNA, 75 bp, Homo sapiens
aggaaacggcttcttcctcacttcgccgcctgctctgcttatgataatgtcaacaaagttcgagtagctatcaag

SEQ ID NO: 254365 - DNA, 78 bp, Homo sapiens
ccaaccttccagccccttttgaaagatgtacttgaaggatataatggaacaatatttgcatatggacaaacatcctct

SEQ ID NO: 254366 - DNA, 100 bp, Homo sapiens
cttctaaaagactttcttcgaaacctcaaagaacctcttctgacctttcgccttaacagagcctttatggaagcagcagctgatgcttttttcaaagccg

SEQ ID NO: 254367 - DNA, 90 bp, Homo sapiens
aggaggcagaagtcattaaccagaaggtatatgaagacctgaggtataagctctcgctagagttccccagtggctacccttacaatgcgc

SEQ ID NO: 254368 - DNA, 101 bp, Homo sapiens
gggatgatgaatggagagagactgcatggggagcttctcatgacactctcaccagtgccatgacagttgataatcaccatgacaacaactggaagaagtca

SEQ ID NO: 254369 - DNA, 97 bp, Homo sapiens
aggtccgacacctgccgcagaacagggagctctttctgacagctggaggcgccggcggccttcacctctggaagtaaactctaagaaggagctgatg

SEQ ID NO: 254370 - DNA, 83 bp, Homo sapiens
gtcgagcacataacggggttcgggtgtctcgtgtgtgaacatcacagcaactggaacagatccagaaggagctaagtgttttg

SEQ ID NO: 254371 - DNA, 75 bp, Homo sapiens
gggatggcggaggcgcctcctgtctcaggtaagccgtaactttgagctggttggacgggttaacttggatcagct

SEQ ID NO: 254372 - DNA, 83 bp, Homo sapiens
gcggccggcttggagaggccgagggtttgatgaaggtggaggcagcgcggctctcaggtgaaagaaaatggcccgaaccaagc

SEQ ID NO: 254373 - DNA, 75 bp, Homo sapiens
gcgctgctccatgtcttcgccaaggactgcttccccgaggaaataatgcaaaaggtgtcccaaggctcctgacca

SEQ ID NO: 254374 - DNA, 100 bp, Homo sapiens
gttgtactggaaaaatcagaggagctggtggatcacttcctgcccatgacggaggaagagctcggccctgactgcagagatcgtgaagaccatccgggac

SEQ ID NO: 254375 - DNA, 90 bp, Homo sapiens
gaaattttccccttggaaacaccagcatttgctataaaggaacaaggattccgacaacacaggcagttctacataccggccaccccctcg

SEQ ID NO: 254376 - DNA, 82 bp, Homo sapiens
gggccgccacagccgccggccgggagaggcgcgcgccatggcttctggagccgagtcaaaatgcagatcttcgtgaaaaccc

SEQ ID NO: 254377 - DNA, 98 bp, Homo sapiens
agggccctgtgggtgctgggcctctgctgcgtcctgctgaccttcggttatgaagacagtatggagtttccagaccatagtagacatttgctacagtg

SEQ ID NO: 254378 - DNA, 100 bp, Homo sapiens
cgatgggctcgatggattccccggcctcccaggccctcccttcactctggctacagaatgctttcagctgggctactcaacagacggccactgcaagggg

SEQ ID NO: 254379 - DNA, 83 bp, Homo sapiens
caggctgaaagatggcggcggcgtctgtctctgcggcttctggttctcacttgtcggaacttagtgatttggcccgtgaccct

SEQ ID NO: 254380 - DNA, 100 bp, Homo sapiens
tgtagcctcgaaattctgggccgaaatgatccgcctgcctcagcctccaaagtagctgagactacaggctggttggaaggaaaatcatgcaacattcatg

SEQ ID NO: 254381 - DNA, 75 bp, Homo sapiens
gaagtggtatcaccccaaaaggattaggaatgtctgaatctgaacaggctcttaaaggtacttctcagattaaat

SEQ ID NO: 254382 - DNA, 59 bp, Homo sapiens
cagctggctggcttcagtggaccagccaagcagctggtcagcagggtggtgacccagaa

SEQ ID NO: 254383 - DNA, 100 bp, Homo sapiens
agaaagatggcgtcctcggagcaggcagagcagccgagccaggtgaccattgtgaggtagatattttgttctaattttccagatgaggaagctgagaccc

SEQ ID NO: 254384 - DNA, 105 bp, Homo sapiens
gtttttgggaataacatttcttggaattggactgtgggcatggaatgaaaaacaatgaatgaaggttcctgttgctccacattctcaccagcacttggtttcatc

SEQ ID NO: 254385 - DNA, 122 bp, Homo sapiens
tgggcagcacatgacgtatttgagttgaagcagttttctcagctgcctgctaacatagctgtttgcagttctaaggtgacagatcagtcagtgaaagcatttgctgaacactgtcctgagct

SEQ ID NO: 254386 - DNA, 50 bp, Homo sapiens
taaacaaaagctattacaatgtgcctcaaggaataggttctcctagtgtc

SEQ ID NO: 254387 - DNA, 95 bp, Homo sapiens
tgactgttcagcaaattgaagaattgtgggaacgtattctgctccagttgttgtaaccagaaggttccagttcccagccagcagctctttgaacc

SEQ ID NO: 254388 - DNA, 100 bp, Homo sapiens
gctggatgctgtgatcgccagcgccggcctcctccgtgcggagaagaagctgcggccgcacctggccaagggcctgcttccgcgaggccaacatcccaac

SEQ ID NO: 254389 - DNA, 100 bp, Homo sapiens
tccccggtggcgagcgcggccagaactgcggtcacttaagttttccgtgtgcgggttgcaaggagcgtgcgtgcgtctgagatatgaatcaggttcttga

SEQ ID NO: 254390 - DNA, 75 bp, Homo sapiens
catctgcagatacttgtactcatgcttattggatacttatccgctttttccccttggagtcctggcagattggca

SEQ ID NO: 254391 - DNA, 75 bp, Homo sapiens
aatttctacacctacccattggtctaaacttgatccaaagacaatgaagacgccacaggtcatcatctggatcat

SEQ ID NO: 254392 - DNA, 100 bp, Homo sapiens
gtttcgctggccgcgagcctcaggagaacaaggggtctgtggaaatcatgagaaaggacttgaatgacgcccgggacctgcatggccaggcagagtcagc

SEQ ID NO: 254393 - DNA, 50 bp, Homo sapiens
gcacttggagtccggacatctgaaacttgacagtgtttcactctgttgcc

SEQ ID NO: 254394 - DNA, 75 bp, Homo sapiens
gggcacaccaaactccatctggtcatcaagagagagggcacaggtacagagatgcccatgattggggaccgagtc

SEQ ID NO: 254395 - DNA, 96 bp, Homo sapiens
aacattaaaaagcggatccaaagacccaggaatgacagctggcataaccttgacaacagattgccttgaagatagcctccttacatgctactgggg

SEQ ID NO: 254396 - DNA, 75 bp, Homo sapiens
caccacaggcggcagggctcggatgcagcagtcccctcaaccggtgaccaggcttccacctctacctcggatggg

SEQ ID NO: 254397 - DNA, 100 bp, Homo sapiens
tgacttcagagacactgccaagcagccttagccctagtgtagagagatcaatggcttttcaaaagcagcacaccaaactgtcaaagtggtgatccctctt

SEQ ID NO: 254398 - DNA, 82 bp, Homo sapiens
gaccctaccctgctccattacagctttgcattctgtgcctctcatgtgcacggcaacagttggcaaacatgaattgactggg

SEQ ID NO: 254399 - DNA, 83 bp, Homo sapiens
tggaaggtttcaatgacagcttaagtgaaagagtttctagccaaagccaaagaagactttttgaaaaaatgggagaatccaac

SEQ ID NO: 254400 - DNA, 96 bp, Homo sapiens
gccaatgctctcaaagagaagggcagtgaaacccgaaccctagcggagattgccaaagtggagctggacaatatgccactccgtggaaagcagctg

SEQ ID NO: 254401 - DNA, 96 bp, Homo sapiens
ccggcccaaggccatctacctggacatcgatggacgcattcagaagtatgtttgaacatagattgctaaaaatctcggtctccacagaggattggt

SEQ ID NO: 254402 - DNA, 100 bp, Homo sapiens
gtgcaattcaagatatccgaaggttcaattatgtggtcaaagaactgtggaaggtgcatcagtgaagaaatggaccaatgtgtataatcatggaatctcc

SEQ ID NO: 254403 - DNA, 101 bp, Homo sapiens
gcccccttgagcctgtcccaagccctggtgccaggtgtccatccccgtgctgaggtcctttgtcatccagcaaatcccaagcagcaacctgttcatggtgg

SEQ ID NO: 254404 - DNA, 100 bp, Homo sapiens
actggaaccatctcagaagccatgcccctcaggctggaacttgccctgtctcctcgcagatgaggtgtgactgaagaaatatcaaatgtttcctagtaag

SEQ ID NO: 254405 - DNA, 88 bp, Homo sapiens
gaggaacgcgctaaggcaaagcacctggctgcccccaagtgtaactccagcactgtgaggtttcagggattggcagaggggaccaagg

SEQ ID NO: 254406 - DNA, 98 bp, Homo sapiens
ctgggtgctggcgaagcggaggccggaggctcccagccaacctctgataaaccctcccagcggccatcagagagcacaaattgtagccctacccggaa

SEQ ID NO: 254407 - DNA, 98 bp, Homo sapiens
cgggatttgggtcgcagttcttgtttgtggatcgctgtgatcgtcacttgcccgccgccgccatgcccttctccaacagccacaacgcactgaagctg

SEQ ID NO: 254408 - DNA, 82 bp, Homo sapiens
ggcgagaacgtccactgcgggccggcgaaagctgacatgcaagaaagcacttcagccaagcagaagggagccagctggacga

SEQ ID NO: 254409 - DNA, 50 bp, Homo sapiens
gtggctctttggaaagaagccaaagggggattcccgaagtcttccgtttt

SEQ ID NO: 254410 - DNA, 99 bp, Homo sapiens
atatcctacacaacaaacaaatttccatcggaatatgtaccgactgtaatggcacaattgacttccctgaatttctgacaatgatggcaagaaaaatga

SEQ ID NO: 254411 - DNA, 78 bp, Homo sapiens
catgagcaggaaggaaccgctggaaacactgaagagggatatggagaaggtggagcggcaggctgtcccccaggccaa

SEQ ID NO: 254412 - DNA, 74 bp, Homo sapiens
ggagaatgtcatcaagcagcacattcaaggccgtgacttggcgagcacgaccctccccgggtaccctccacacg

SEQ ID NO: 254413 - DNA, 100 bp, Homo sapiens
ccgccctggctccgctgcacgagctccacgcccgtaccccggcgtcacgctcagtgcctggctctctggctatgaaaatcctgtggtgtctcgaattaat

SEQ ID NO: 254414 - DNA, 100 bp, Homo sapiens
gtattaaaataaaatacctggatgaggaagatgaagagcactctacacccccaagtgcatatgggtctgtcaaagcctatactaactttgatgctgagcg

SEQ ID NO: 254415 - DNA, 90 bp, Homo sapiens
cttagaaccgcagcagggacgtcggtttgctatcgggactcggcgaggacgtgttttagagcactttgctgcaagggaccaccacctgca

SEQ ID NO: 254416 - DNA, 100 bp, Homo sapiens
actccccggcggcagcacgaaagtaccatcgagttcctggggaaaaccccagggcaaaacgctcagaaatggattcctgcacgaagcactagacgagatg

SEQ ID NO: 254417 - DNA, 75 bp, Homo sapiens
agctatgacgtcttccagctggagttcaacgatggcgcctacaacatcaaaggtgtgcatcaccttcgaccaggc

SEQ ID NO: 254418 - DNA, 98 bp, Homo sapiens
agaggaagctggagagggatgtgtggctgcgatcctcggggaaaccgagccaatggagatcttcgtggatgatgagacgaagttgacgctgcatgggt

SEQ ID NO: 254419 - DNA, 75 bp, Homo sapiens
actacccacctagaagaggtgatgatagctttggagacagtcgcatatctgtgcctattgatttgcagaaagtgg

SEQ ID NO: 254420 - DNA, 98 bp, Homo sapiens
aagaagttactaatgctgatcgagatgtccctacaggtgacttaagagattaaaattaatttggttgctgttggttctgaacaaataatgagttcttt

SEQ ID NO: 254421 - DNA, 100 bp, Homo sapiens
ggacgcgcccgggacgcgcggcggcaccgggaggccgggccgagcggtactccaaagattcaggtttactcacgtcatccagcagagaatggaaagtcaa

SEQ ID NO: 254422 - DNA, 75 bp, Homo sapiens
gcctctgagaagtatgtctgatccagaccaggactttgacaaagaggtgcaaacggcctcctcattgagtatgaa

SEQ ID NO: 254423 - DNA, 76 bp, Homo sapiens
cagacatcaaccagctgccgccgtccatcctgctcaagttgatgattttctgcagaaaaacaactgcgaaaaagaa

SEQ ID NO: 254424 - DNA, 80 bp, Homo sapiens
caagtctaatggaggcgcaggcagaaggaccccttacagcggtactccaaagattcaggtttactcacgtcatccagcag

SEQ ID NO: 254425 - DNA, 100 bp, Homo sapiens
ggagctccctgtacgcgcggccctagtcggctcctcaacgtggagcgatgggaggccttgagaagaagaagggctacaagaagcaggcagcactgaagct

SEQ ID NO: 254426 - DNA, 76 bp, Homo sapiens
aacatgaacaactacaaaggctatgaaaagaagccctattgtaatgccgaacacttgccaagtatttcaatccttg

SEQ ID NO: 254427 - DNA, 100 bp, Homo sapiens
aaaaaatggacggggcagcttcacaaggcagaggataaaggaggaagagaaaagggcagcagaggagaggcagaggataaaagaggaagagaaaagggca

SEQ ID NO: 254428 - DNA, 82 bp, Homo sapiens
cttcgcctattccacggttccaggcaaacaatttacattttcttatgaaaatgaagtctgcaaacaagattactttattaaa

SEQ ID NO: 254429 - DNA, 74 bp, Homo sapiens
gctgctttaaaggaagctgcccaaacccgaggctagattttatgcccctaccacgatcttcattgatgagatag

SEQ ID NO: 254430 - DNA, 98 bp, Homo sapiens
ccaaagtagcacttcgagcacgccagtgtccggtttttctacagaccctggcttatggagatatgaatcatgagtggattggaaatgaatggcttccc

SEQ ID NO: 254431 - DNA, 83 bp, Homo sapiens
atttgccttaaactccctaaaatctccgcagctctggttcctgttgcggccgggtaacaagatgctcaactatagtgctccca

SEQ ID NO: 254432 - DNA, 80 bp, Homo sapiens
ctactacgtggtgcttggaaaggcccagctgagagccagcctggaggttacccagcagcaggccacccaggccgaaggcc

SEQ ID NO: 254433 - DNA, 74 bp, Homo sapiens
ggacattgctagcaatgagctcccaaagccatccagactatttggagttttcctcgtcttactggatgtcactc

SEQ ID NO: 254434 - DNA, 90 bp, Homo sapiens
cgccgccgaagaagcatcgttaaagtctctcttcaccctgccgtcatgtctaagtcagaggctctgaaccaagttgtcctatgggacaag

SEQ ID NO: 254435 - DNA, 100 bp, Homo sapiens
gctgaactaaggagaaagtcctacaacagtttggcgtgcaacatggggcttgagaaagggcgctgaacaacctgcagtccaccttctcaggatttggctt

SEQ ID NO: 254436 - DNA, 75 bp, Homo sapiens
gaccggagtcagaaccctccgcagagtaaagattgtcctgggtcacataatgccagctgagcgtaaaaagccagc

SEQ ID NO: 254437 - DNA, 71 bp, Homo sapiens
cggccgggccgtcctcggcggcagtgtcaggattcgcaggctgaggatcgagatagagaagctccagtggc

SEQ ID NO: 254438 - DNA, 101 bp, Homo sapiens
agagaagagaagctttactggtgttccagccctaaggttacaacctgccatattcattcatccagtgatgatgaaattgactttaaagaaacgggtttctc

SEQ ID NO: 254439 - DNA, 99 bp, Homo sapiens
ctacaatgcaggactgctctcctactacacggaaagaccacagcaagattctttcattcgtctcctcctagcctgggggaccaggctcgaactgaccct

SEQ ID NO: 254440 - DNA, 89 bp, Homo sapiens
cagatgttttacttcaagcaggggctgatttagtaagaaataagacttgcatttgtgatatcaaaaatcacctgagaaatgaaaagcaa

SEQ ID NO: 254441 - DNA, 75 bp, Homo sapiens
tggacatccccatcccagaccctccacccaaggatgatgagatggacaaaccgtgtgggtgccctccaggtgtgt

SEQ ID NO: 254442 - DNA, 76 bp, Homo sapiens
cccgttctggaatcagcttctctcattttctttccctgcaccaactagcagtccaagtggtaagaagttcagaagc

SEQ ID NO: 254443 - DNA, 82 bp, Homo sapiens
tgctgctccgggcccagagaccaggcctggccctcaattattataagggtcccctcctaaccgcaagcgtcctgctaacgag

SEQ ID NO: 254444 - DNA, 90 bp, Homo sapiens
cagcattcctgaaatacatccaggaaagacatggagattctcttaaaaagcaaatgcagccctgaggatttggctactgcatataacaac

SEQ ID NO: 254445 - DNA, 99 bp, Homo sapiens
ggaaacagaggattcattgttttcaacaatgatgactgggaagaggaagaacgtctgagaaataaaattcgagctgatcatgagaaggccttggaagaa

SEQ ID NO: 254446 - DNA, 100 bp, Homo sapiens
ggagccggtgctgcagaaccagatccgggagcacgtcatcgccatcgaaggagacaaggacggcagcaaggtgacaacagtggtggcaactcctgggcag

SEQ ID NO: 254447 - DNA, 75 bp, Homo sapiens
caaaatcagaggcatactttatagattttcaacccatgaaagtgcagcccatgccattgtttcggtgaacggtac

SEQ ID NO: 254448 - DNA, 90 bp, Homo sapiens
cttaaccatgggaggctctcgtttgtgaagtgtggatatgcaggctctaactttccagaacacatcttcccagctttggttggaagacct

SEQ ID NO: 254449 - DNA, 75 bp, Homo sapiens
ccaaagttgcatttcctcgtcgagcgcaacccaagaactgccattggatgtccagaatcccctgtagttgataat

SEQ ID NO: 254450 - DNA, 90 bp, Homo sapiens
ggctgaagaggaacgatatttccgacctatgaggaccagcacagcagtgaggaggaggaggaagaggaagaggaagaggaaagcgaggac

SEQ ID NO: 254451 - DNA, 80 bp, Homo sapiens
acggcgccggttcgctgcccggtccgcccgcggtgagaggttgtatcagagtaagatggacggtagctttgattgtgatt

SEQ ID NO: 254452 - DNA, 114 bp, Homo sapiens
agcagcaacagcagcagcaagttagtggattaaaatctcccaagaggaatgacaaacaaccagctcttcaggattcagtggtcccaatttaaaggctattttattttcaaactg

SEQ ID NO: 254453 - DNA, 100 bp, Homo sapiens
ccctgtgttcgcctgctcaacgccactcatcagattggctgccagtgccttcccttcttcttggtggtgttcttgagtaagataatctggactggccccc

SEQ ID NO: 254454 - DNA, 100 bp, Homo sapiens
tggaaacataccttaaagctgtgaaattgtttcgaaatgaccagaattcttcaggagaacctgaatactcccagctaaagctccatggaatagagattcc

SEQ ID NO: 254455 - DNA, 96 bp, Homo sapiens
agtgcaggaatatgttagcgttgtatcttgggagaaagacacagtctccatcatcccagggtgccaaggactcacccgtacgtcgggctgtgaaag

SEQ ID NO: 254456 - DNA, 74 bp, Homo sapiens
gggggacggtaggagcctccgtgcggagaccactgttcaaggccacagtaagactttgaccccgacgcaggctt

SEQ ID NO: 254457 - DNA, 75 bp, Homo sapiens
atcaccatgggccgggatcacattctgattgagtctcgctctcagtcaaaatctccaacgggaactcctgctcgt

SEQ ID NO: 254458 - DNA, 75 bp, Homo sapiens
gcctgacaacaccgatcacagaccaacaactccttcagctagattttgactttgaaaaaattcctttggaaaaac

SEQ ID NO: 254459 - DNA, 100 bp, Homo sapiens
gcaatcttaaaagaaactgtgaagcaaattcgtcagatcaaagaacaaggtttatgtgagattaagaccatttttcagggaattcctggaacgaatgtct

SEQ ID NO: 254460 - DNA, 75 bp, Homo sapiens
gaagaggcagctgttcatagaaatgcctgtattcttcaggacttgtggaatgtgaggatcaggatccacttaatc

SEQ ID NO: 254461 - DNA, 96 bp, Homo sapiens
ggcatcccccggattaacagctacggctacggagaccactacatccacatcaagatacgagttccaaagaccagaggagcgagagcagcaagaacc

SEQ ID NO: 254462 - DNA, 98 bp, Homo sapiens
cttgaaatcctcattaaagatactctcgagatcacttagatgatccactggatgatactgccactgtgtttcagcagttggagcagttgtgcacggtc

SEQ ID NO: 254463 - DNA, 98 bp, Homo sapiens
acagctgtgataaaaaaaaaattcatctgggcggtatctggaacttggagtctgatgacttttcacagtaccaactcaaaggcttgcttaaaaagaac

SEQ ID NO: 254464 - DNA, 75 bp, Homo sapiens
cagatggcatgtcaccgatgtctggtgtatctgggggatttgtgaattactctgcttaatgtaagcaagctgaac

SEQ ID NO: 254465 - DNA, 90 bp, Homo sapiens
ctttatttcacatgtacagcatttggcgcctcaaggtgggaacatccagttgcaggaaaacaagcttaacacgcccactgattctacatt

SEQ ID NO: 254466 - DNA, 115 bp, Homo sapiens
ggtgatatttgggccacatttgaagtcattgaaaatgaagagctagtcattgaaattatgagactatcattcaaatggaagcattatagttcttcggaaccattatgatctcaaa

SEQ ID NO: 254467 - DNA, 80 bp, Homo sapiens
agccagacagctgggccggagcagccgcgggcgcccgaggggccgagcgaggtggtataagttgaaatccaaaccaggaa

SEQ ID NO: 254468 - DNA, 100 bp, Homo sapiens
aggatcagattttgaagagagatatgccaccagcatttattaaggtgctgataagactgtgaaaggcccagatggactgaccgcctttgaagccactgac

SEQ ID NO: 254469 - DNA, 86 bp, Homo sapiens
gatgccctgcagtacctgcagaaggtctctggagacatcttcagcaggtcagcccaaggccaaccccactgtcactctgttcccgc

SEQ ID NO: 254470 - DNA, 73 bp, Homo sapiens
ccttctcaaggcagtggcccaggccacaggttggcagagtcagcatatatgattccaaaaggcaatccgggaa

SEQ ID NO: 254471 - DNA, 96 bp, Homo sapiens
cccgccttccgccgtctcttcgagttcttcgtgctgctcaaggccgccatggcatcagatgaaggcaaactttttgttggagggctgagttttgac

SEQ ID NO: 254472 - DNA, 100 bp, Homo sapiens
atgaacccaacctagtgggtgtaatacatcatgaactgcagggttttcaaatggaacattttgatgcatcacttagtacctatttcaaggcattgctagg

SEQ ID NO: 254473 - DNA, 83 bp, Homo sapiens
ccgagcagtgtcatgcccatcacaaataaccctatcgcagccgggaggacagagcgggatgccaccagcttgtccaaagggaa

SEQ ID NO: 254474 - DNA, 151 bp, Homo sapiens
gggtgcgatgcgtcagtagggtgagcacataaaaaatccatgtcttgcacctgtattttagcgtactatgcagatagttttgaggcagctgtgccatcaaatagccacattgtttcggaacctggaaagaatgtcacactcacttgtcagc

SEQ ID NO: 254475 - DNA, 73 bp, Homo sapiens
gccgcgccgccaccgtctgaactaggatgtcccgacatgaagagagaagaagaaggaggttcctgctgtgcca

SEQ ID NO: 254476 - DNA, 74 bp, Homo sapiens
atgcagaggaagaatttttctatgaggtctgccatcatggatgttctcgcagaagcaaatggcacctttgcctt

SEQ ID NO: 254477 - DNA, 75 bp, Homo sapiens
acaaaacccaccaagatccagattgaagctattcctttggccttacaaggttgtagatgagcatgagagtgtgga

SEQ ID NO: 254478 - DNA, 100 bp, Homo sapiens
agtcctcctggaggggatctctggccaaggagtgtacgatatttacagaatatttgcctcgagatgaaagcaaattcagatattaagatgctacagaaag

SEQ ID NO: 254479 - DNA, 100 bp, Homo sapiens
atgcttagacggtggcttgttgcagatcctgattgtaggtggtgtccagctccagactgtgggatgactacgacaaccatactggaattgatttggttgg

SEQ ID NO: 254480 - DNA, 75 bp, Homo sapiens
ggggcctggatcatccacccgtacagcgacttcagggtgagaactctgtctcagtcgacgggaagtgcagtgact

SEQ ID NO: 254481 - DNA, 100 bp, Homo sapiens
tttatatctccctgggtgaggtcagatttcgggagaaggcgttcagctcagtagagtttaattctccggtgggtcctacgtgtatgaactcagcgcagtc

SEQ ID NO: 254482 - DNA, 100 bp, Homo sapiens
aattttgatgtgacttacaattggattcaagataaatgtgttcctcttgtccgagaaataacatttgaaaatggagagtggccctgttccagtattggtt

SEQ ID NO: 254483 - DNA, 83 bp, Homo sapiens
cctcctggcctgctgggagaactggaggtgatgtttgaggcaccatcagagttaacacaaagaccccaagtagggtgctatat

SEQ ID NO: 254484 - DNA, 75 bp, Homo sapiens
tcacagcacagttcctgggaaggtggagccaccagcctctccttggtcttcaaagcttcacctttctccaaaggc

SEQ ID NO: 254485 - DNA, 100 bp, Homo sapiens
tctcgacaaagaccgaaaagaagatgatacaaatgaatttgttagtgctgtgtgctggagggcactaccagatgggagacgaggtctcactatgttgccc

SEQ ID NO: 254486 - DNA, 105 bp, Homo sapiens
cccactgcagagtgctgaagacggggtagccacgaggctgagtcatcactagagagtgggaagggcagcagcagcagagaatccaaaccctaaagctgatatcac

SEQ ID NO: 254487 - DNA, 82 bp, Homo sapiens
cagttttgaaatcgacacacaaagaatagagttgagcctgtgggacacttcggcagcccctgtcaaagggaacaggaagcag

SEQ ID NO: 254488 - DNA, 97 bp, Homo sapiens
gccctggtccacctctccagtcccctgcccctcacagctatcatggtgaacttacttcagattgtgcgggaccactgggttcatgttcttgtcccta

SEQ ID NO: 254489 - DNA, 75 bp, Homo sapiens
ctggtagatcaactttggaaacttatgaattctgtgagtgatggattggaactgagaccgaaatataatggaatt

SEQ ID NO: 254490 - DNA, 75 bp, Homo sapiens
ccaagttgcttcagttggtcgaagacagaggttcagcagcagctgtcgattcggcagaccgaagtcctcggccca

SEQ ID NO: 254491 - DNA, 76 bp, Homo sapiens
aaatagtacttcaagagcacagtcttatgtaaggtaagaatgattgatgttggctgatattggagtgctcattcac

SEQ ID NO: 254492 - DNA, 75 bp, Homo sapiens
acacaaagagggtcatctcttctattgtacctgcagaagatgattgaagaatcactgaagattaaaataaaaaag

SEQ ID NO: 254493 - DNA, 100 bp, Homo sapiens
acgcagagctttggcgagagctacggcaacagcaagaactgccggcggctcttgtgctgcagggtggagccgccaccaaaatgcagattttcgtgaaaac

SEQ ID NO: 254494 - DNA, 98 bp, Homo sapiens
catcgacatcgaggacgccacgcagcacctgcgggacatcctcaagctggaccggcccgcgggcgacagagcctgcagccaatgccccaggagccctc

SEQ ID NO: 254495 - DNA, 97 bp, Homo sapiens
tggagatcaccctgttctagtgtgtggaggcttccaccaggagatgggcaccaacaagtttgccagccagcagggcatgacggcctatggcacccgg

SEQ ID NO: 254496 - DNA, 74 bp, Homo sapiens
gcgcgggaactctacgccaacgtggtgctggggcccaaccgcttgcttatcctccacggcttcctggacgaaaa

SEQ ID NO: 254497 - DNA, 98 bp, Homo sapiens
ggcggatgccctgcagtacctgcagaaggtctctggagacatcttcagcagatgtgaagttcatttccaatccgccctccatggtggcagcggggagc

SEQ ID NO: 254498 - DNA, 74 bp, Homo sapiens
attttccaaatgaatttgcaaaacttactgtagaaatcagagcctcattcccttagtagtgaagcattgatgag

SEQ ID NO: 254499 - DNA, 98 bp, Homo sapiens
ggcggcgccgccaataaccacggagccggcagcggcgcgggaggccgtgcggctgtcggaaaaggtaacagaagatggaactcgaaatcccaatgaaa

SEQ ID NO: 254500 - DNA, 100 bp, Homo sapiens
ttcaccaggacgtgatggctcaccaggccagaggttgccaccttccagagaagaggtacgagatgacaagacaaccataaagtgtgaaacctccccgcct

SEQ ID NO: 254501 - DNA, 100 bp, Homo sapiens
atgcacatgtctgggaggataattgggatgatgacaatgtagaggatgacttctctaatcagttacggaagctgtgctgaatggtttggtggccactgag

SEQ ID NO: 254502 - DNA, 75 bp, Homo sapiens
gagcacagagcctcgcctttgccgatccgccgcccgtccacacccgccgccagactacagtggtagtggaggccg

SEQ ID NO: 254503 - DNA, 82 bp, Homo sapiens
gtcctggcaggagaactgtgaccatgtgcccttcactgggcctgcggtcagcccaaggccaaccccactgtcactctgttcc

SEQ ID NO: 254504 - DNA, 48 bp, Homo sapiens
agctatggcattagcccacaggccaagacgttatcaggactaccagac

SEQ ID NO: 254505 - DNA, 50 bp, Homo sapiens
aagcctgatctaacccctagaaacagttctaaggacatatggaattggct

SEQ ID NO: 254506 - DNA, 101 bp, Homo sapiens
gtcagatactgctgcttgtcaaccacaccgactaccgctggtgggcagaagtgcagcagaccccgaaaaaagaggcacagttagatgaagaaggacagttt

SEQ ID NO: 254507 - DNA, 100 bp, Homo sapiens
cccagtcctgtcacagtgaccgtgtctaccagcaagccacccgaggggactgcctggccttccagatgcgagctgggttgcttccctgagggcccccgct

SEQ ID NO: 254508 - DNA, 90 bp, Homo sapiens
gttccaggggctctgggagtggctgccaggtattagaaaactactcggatgctccaatgacaccaaaacagattctgcaggtcatagagg

SEQ ID NO: 254509 - DNA, 88 bp, Homo sapiens
tcatagagtccgactataccacatacaggggctcacacagtcgacaaaagaaaacgtttttcttgggagatgggcagaagctgaagga

SEQ ID NO: 254510 - DNA, 100 bp, Homo sapiens
tgcagtggctccgaatagatcccaaagacttttactgaaaattccttatggatctctgagaaggcgcagcgttgaaaggtggtgccaccgaacatcgcag

SEQ ID NO: 254511 - DNA, 97 bp, Homo sapiens
ctcgacactggctgtggacatctacaaagggatgccagaccctagaagactgttgcttcttcttctaccagtgggttctcattttcctcctaatcta

SEQ ID NO: 254512 - DNA, 98 bp, Homo sapiens
atctaaaatacgaaggtttctggctggctcgagatgctgctgtgcagaagattgagactattatcaaagaacagtttgctcttgaaatgaagaataag

SEQ ID NO: 254513 - DNA, 100 bp, Homo sapiens
caagcagctgggccatgaggaagtctctggcatctctatcccctatgaggcaccacgtaagacctcctgcccttagctctcttgctcaccacccaagaac

SEQ ID NO: 254514 - DNA, 90 bp, Homo sapiens
gggtgtaggagaagggaaatcaattggagaatggtttggaccaaatacagttgcacaggtgttaaagcaagaagctctcttcctgactca

SEQ ID NO: 254515 - DNA, 82 bp, Homo sapiens
aaaaaaggagatgcctggcagccccgctctctgcaccgtacccgtgcgcagaggacgaggagtgcggcactgatgagtactg

SEQ ID NO: 254516 - DNA, 101 bp, Homo sapiens
ctcttaccaccgtcatggcagtcccagagaatttggatggagagacccggaactgccggaagtgattcagatgttgcagcaccagtttccctcggtccagt

SEQ ID NO: 254517 - DNA, 90 bp, Homo sapiens
ctctttacccaaatcacccattgtgtgagatgggagagctcacacagacaggtgctatgggcataaacaacagaggtgccatgccccctg

SEQ ID NO: 254518 - DNA, 75 bp, Homo sapiens
caggggtctgggaggacagctcatgagacaagcaggacctcacagggggcgcctttgaggacaacctgaggtcac

SEQ ID NO: 254519 - DNA, 83 bp, Homo sapiens
gccaattcggtggaacgaggacgcggactgcgaaggcaggaatgctgtctctgcaatttgagaggaggtgctcttaagcaaac

SEQ ID NO: 254520 - DNA, 100 bp, Homo sapiens
gaatgggtgacagcgtcatcacggcattttattgggtcgccatgtagaagtttttgagctcctcaaacctccatctggaggccttgggtttagtgttgtg

SEQ ID NO: 254521 - DNA, 75 bp, Homo sapiens
atgggctcagcgggactcagaggttagctgctgaatcaaagcttcaaacagaagttaaagaaggaaaagaaactt

SEQ ID NO: 254522 - DNA, 98 bp, Homo sapiens
cagccgctcgcccctcttttccatgtatccgtccagggccgagatggacgaaaaaatgtggttccttgtgttctctctgtaaatggggacctagaccg

SEQ ID NO: 254523 - DNA, 100 bp, Homo sapiens
acatctgacgacgtgaaggagcagatttacaaactggccaagaagggccttactccttcacagatcgggctttgttcgcgggggtcacagctctcatggc

SEQ ID NO: 254524 - DNA, 100 bp, Homo sapiens
cctgcgcccgtgcgtccgtctgcgacccgaggcctccgctgcgcgagtgaagacatttccacctggacacctgaccatgtgcctgccctgagcagcgagg

SEQ ID NO: 254525 - DNA, 83 bp, Homo sapiens
ggcatcagcacagacaccgctttgccgataggtgaaatgacaatggatgctctgttggctcgattgaaacttctgaatccaga

SEQ ID NO: 254526 - DNA, 90 bp, Homo sapiens
gagccagtgagcggcggctcggcgcaagcctgacgagcaggagccgagctcagcaggtccgggtcctactgctctgttggctcatgaaat

SEQ ID NO: 254527 - DNA, 98 bp, Homo sapiens
ttcgccaaggagatcgtctctctcatcgaggcccaaaccgccaaggacctgaaggagaagaaggagaaggtggaggagaaggcaagccggaaagagcg

SEQ ID NO: 254528 - DNA, 75 bp, Homo sapiens
gttaaacacaaaccaccctttaaattttcaagggaaggacaggaattcctcctgatcagcagagactgatctttg

SEQ ID NO: 254529 - DNA, 83 bp, Homo sapiens
gaagaacgataccatttcttagaggagcgcttagccagagacccttccaggcctgcaagcgatttgacagccatccctcagtg

SEQ ID NO: 254530 - DNA, 114 bp, Homo sapiens
cgaaccgcagtatcatgctggccaagaagatcatcattaaggacggaggcacggtgagaagccctaccactgcaactgggacggctgcggctggaagtttgcgcgctcagacga

SEQ ID NO: 254531 - DNA, 101 bp, Homo sapiens
ggcggcgagacagcggcggcgacggcgcggaggccccgggcgcggcgcagagctagagccggtgcaggccacgcagaacaagacagggaagtatgtgccgc

SEQ ID NO: 254532 - DNA, 76 bp, Homo sapiens
gacctctacctggagcatttgctgcagaagcgtagtcggccagaggcagcctggcatcctcgctacaacctcattg

SEQ ID NO: 254533 - DNA, 90 bp, Homo sapiens
ccggcagctgccggcggcgcggcgagagagcggctgacagaggggatgcgaggccatcaactccaccctcctgaagcatgaacagacgct

SEQ ID NO: 254534 - DNA, 100 bp, Homo sapiens
cctgaggctgcaccaagtggcgaaggagccggctccaaggtatgttatgcataaaagtggataatttacatgataaatgaaaatggccaattctttaaga

SEQ ID NO: 254535 - DNA, 100 bp, Homo sapiens
cgccaccggccgccgccgccgccgcccaggcgcaggtgaagagcgattatatgttagagatagctgatcaagtggaccaggaaattgctttgaagttggg

SEQ ID NO: 254536 - DNA, 100 bp, Homo sapiens
agcaagtatacctactcacagactgtttgttcatgtacgccgcctggtggcaaaaggatataaggttgagggaaggtgccaaccgtgagatcctggggat

SEQ ID NO: 254537 - DNA, 80 bp, Homo sapiens
cctcgtggtctaaagcttcggcacaagggcccaactggaattccacttacggtgtttctgttcactgtaaaaagaaacac

SEQ ID NO: 254538 - DNA, 100 bp, Homo sapiens
aaaagaagcaaatacaggttttggtgggccagttattagttctctatatcatgaagaaaccatcaggtcgaattgacataaaacagttgatagcaaagaa

SEQ ID NO: 254539 - DNA, 97 bp, Homo sapiens
cagccccaaagcctgaacaggcagggccagacccaggtgctggagaatctggtaaaagcaccattgtgaagcagatgaggatcctgcatgttaatgg

SEQ ID NO: 254540 - DNA, 90 bp, Homo sapiens
tcaggaattttactgggataattatccaaataaattgcaagcattctatccaaatgggtgagaaggactggcagaaatacgagactgctc

SEQ ID NO: 254541 - DNA, 73 bp, Homo sapiens
cccaacccagaatggtcagaagtatcagaggaagtttgtcgctgatggcatcttcaaagctgaactgaatgag

SEQ ID NO: 254542 - DNA, 100 bp, Homo sapiens
ccgccagctctgtccgctgcccacagcctagcagtcgggaccgtactgaggacactgcccatctctaagataagaacctggaaaggggactctgttggcc

SEQ ID NO: 254543 - DNA, 73 bp, Homo sapiens
gaacttaaaaagcagtctaaacctgtgaccacccctgaagaaattgcacagggtgactgtgaagatcacgcta

SEQ ID NO: 254544 - DNA, 75 bp, Homo sapiens
tcggctcttgcgtatgtggatggcaaatgctgtaaggaatgcaaatgccagctacagatgcatgcatattgtgaa

SEQ ID NO: 254545 - DNA, 98 bp, Homo sapiens
aattcatccagagggtccaggccatgaagagtcctgaccacaatggggaggacaacttcgcccgggacttcatgaacctaaaggcagacccagaagag

SEQ ID NO: 254546 - DNA, 100 bp, Homo sapiens
acagcggggtggtgaacctcagcaccgagaacatctactctttcaactacaccagccagcccgaccagtagccggatcgagctgggagatgtgacaccac

SEQ ID NO: 254547 - DNA, 100 bp, Homo sapiens
ggtgttacacaagggttttatacaattcattcatgttttggaggccataatgaagacttcatcgctagtggcagtgaagctggagccgagatggtcataa

SEQ ID NO: 254548 - DNA, 92 bp, Homo sapiens
ggcgggcggcagcatgtcggtggcggggctgaagaagcagttctacaaggcgagccaggtgtgatggtcggctcccacgcggacatggcgcc

SEQ ID NO: 254549 - DNA, 100 bp, Homo sapiens
aagcacaggtacatcagctgctaacgcctgcaagtgccatctcaaacaaagaggcaagcagtggctctgatgagctcacagtgcctgcactttaccccag

SEQ ID NO: 254550 - DNA, 83 bp, Homo sapiens
aagaccgcgcgcagggcctgcagcgggagctggacggcgagcgcgagcggcgcgagaaagggttgtgtccactgtggtccccg

SEQ ID NO: 254551 - DNA, 82 bp, Homo sapiens
tgatgaacttggacttccatgagaagtataatgatttatataagttccagcagatactgggtcgtcaggatggagttttgca

SEQ ID NO: 254552 - DNA, 96 bp, Homo sapiens
caaagtggactataaacagcgctattacaccattgaaaatctgggcctcttcctgctccccgtaaccctgtcgctggaggtgtctgtgggaaaggc

SEQ ID NO: 254553 - DNA, 83 bp, Homo sapiens
ctctcagtgagaagcgcacgctggagggcgagctgcatgatctgcggggccaggtggccaagtgcctacaatgctcccagctt

SEQ ID NO: 254554 - DNA, 75 bp, Homo sapiens
cgagatggcttgctccattgtcgaccagaaggaagatgagaatgtgcctactgctcctgatcctccaagtcaaca

SEQ ID NO: 254555 - DNA, 100 bp, Homo sapiens
tgcagatcttgcccctcacccagaagagaaaaagaagaaacgttctggattcagagacagaaaagaggttcagcaacatcagatgaccatgaatttgatc

SEQ ID NO: 254556 - DNA, 115 bp, Homo sapiens
ggggacccagaccctggagcctcagttggaagcagccgatccagcctgcggagcctgtggggcaggatgtacagttacccagcacgtgtacctcctcctcctcctattgctcggg

SEQ ID NO: 254557 - DNA, 50 bp, Homo sapiens
gagctggggcaccgagctctggtttatgcaaataccgtatacgtgataaa

SEQ ID NO: 254558 - DNA, 85 bp, Homo sapiens
agataaagtgattttttgcctttgttgattaactggacaaattcagggttacattccgaaaagcaaatgggagatggacacatct

SEQ ID NO: 254559 - DNA, 95 bp, Homo sapiens
ttctatgctgtggaaaagaaagcatactgcgagccctgctacattgcagaagctcctcctggggtagagacagatcttattgatgttggattcac

SEQ ID NO: 254560 - DNA, 75 bp, Homo sapiens
tgtaggacgctgctcttcaaagcgatccacaatctgttagaaaggtacctactgtcaacaacgggaagtggaggc

SEQ ID NO: 254561 - DNA, 85 bp, Homo sapiens
aaggttgtagaaggaacgcctcttattgatggaagaagactcaagtatagattaaatggaaattcgtacaagtttcaagctggca

SEQ ID NO: 254562 - DNA, 75 bp, Homo sapiens
agacgggccggcccagagctcccgggtcgtctttcgtgtggccgcgagagaggagctctaaattgggaagtaatg

SEQ ID NO: 254563 - DNA, 83 bp, Homo sapiens
attttgggctggcagcccggttggagcctccggagcagaggaagaagacttctgcacggacctggccgtctccagtgccaact

SEQ ID NO: 254564 - DNA, 99 bp, Homo sapiens
aaattgctggaatctttacaggagaaccacttccaagaagatgagcagtttctgggagccgttatgccaaggcttgcttattgcaggagtgaccaggac

SEQ ID NO: 254565 - DNA, 50 bp, Homo sapiens
gctgtgttcagtcggagccagtaaagcaatttaaggcaagaactagcagt

SEQ ID NO: 254566 - DNA, 119 bp, Homo sapiens
gtccttggcccgcggaggggtctgcgcagtgcaggcagataccgtttgacaccaccagtgctggagaatctggtaaaagcaccattgtgaagcagatgaggatcctgcatgttaatggg

SEQ ID NO: 254567 - DNA, 75 bp, Homo sapiens
atttgaaccatgtttggattgaagccgcctctgtattacttaccaggttgtccaataactgcatcacctacctag

SEQ ID NO: 254568 - DNA, 100 bp, Homo sapiens
ccggagctgttcctattgggccatcttggctccaccaccctggatgttgacaatgcgtctctggcacgtcttgaccttgaacgcaaagtggaatctttgc

SEQ ID NO: 254569 - DNA, 98 bp, Homo sapiens
gagccagtggatttgccagcagtctggttgatggaaagttattatgctggctctgtactttatcgtacaaaagagttttacagaagacgaaagaacaa

SEQ ID NO: 254570 - DNA, 75 bp, Homo sapiens
ctagtaatggagaagttgatgactctcgtgaacatagctttaatagggctggtgcagtggtgtcatcttggctca

SEQ ID NO: 254571 - DNA, 75 bp, Homo sapiens
agaagttcttccttgaagaaatacagcttggtgaagagttactagctcaagaggaggctgcggaggaggaggagg

SEQ ID NO: 254572 - DNA, 75 bp, Homo sapiens
gtacctgttgttgcagagttattttctgagtcagtttcaggtgaaagatatgatcctgagcccaaatcaaaatgg

SEQ ID NO: 254573 - DNA, 88 bp, Homo sapiens
cgcagtggtcgcttcttctccttgacccatggacttaactagcctgaagagaaatctctctaagggtcggattcgcaccatggcccaa

SEQ ID NO: 254574 - DNA, 51 bp, Homo sapiens
tctccactggaaaaaaagatcttgatatttggagttcttacaacatggcag

SEQ ID NO: 254575 - DNA, 90 bp, Homo sapiens
cgcggggcgccgacctggcagggactatggtgcagccctgcggggcctgtgcgaagacgccctggaaggcctgctcttcctgctactctt

SEQ ID NO: 254576 - DNA, 82 bp, Homo sapiens
ccaaactccaggctcagatgtcacagggcgccctgcgtccggcagaggaggcgagcatcccgctcaggtgatgaggaacccc

SEQ ID NO: 254577 - DNA, 100 bp, Homo sapiens
cgtctcttacgtctgcggaagtgcagctgcctcagttcttagcgcaggtctctgtggcacattttgtttcccgtgccttgggtgtcaagttgcagctgat

SEQ ID NO: 254578 - DNA, 98 bp, Homo sapiens
gcttgctgctttttctaactatttcaagatgatatttattcaccaaacaagtggatgctgtggggcaccacctccttgaggaccaaggcactccagct

SEQ ID NO: 254579 - DNA, 75 bp, Homo sapiens
cagcagccttcagcttttggcagcatgaaagttagcagtggtgtttggactctagaccatgtgcctaggtagaag

SEQ ID NO: 254580 - DNA, 75 bp, Homo sapiens
accaccttcatctccaccatcgtgctgcttttgacacaaaaacggggttacgtgtggcagtgaagaagctctcca

SEQ ID NO: 254581 - DNA, 75 bp, Homo sapiens
tgagtttcttcatctacaacccgcgcttctggccgcgggaaggagagatgaagggcgccctaatggagatcatcc

SEQ ID NO: 254582 - DNA, 100 bp, Homo sapiens
tcgagcacataacggggttcgggtgtctcgtgtgtgaacatcacagggatacctttcgtccctgcatttaaaggctttcacttatattaatctggataaa

SEQ ID NO: 254583 - DNA, 75 bp, Homo sapiens
gagagctttgacatctttgaagatgaaggattaattacacaaggtggaagcggctgagatatttggcaaagttct

SEQ ID NO: 254584 - DNA, 96 bp, Homo sapiens
gcacaggaaaaacagccaccttcagtatctcagtcctccagtgtttggatattcaggaattgaatgatctggcacgggaccctccagcacagtgtt

SEQ ID NO: 254585 - DNA, 90 bp, Homo sapiens
ccttgttcctatggcctaatgaacaacttccagctaccaagtggcccatccaacaggacttctcaggtgaaagttgtggaggtcaagccc

SEQ ID NO: 254586 - DNA, 50 bp, Homo sapiens
cagagcctggccagcctgctgagtgagggatgagtatttccgcatgaagc

SEQ ID NO: 254587 - DNA, 100 bp, Homo sapiens
gcaggactctagtaacccgcgaaatgatgggatagcgttgcaaatccttaaaagagtcttaacggagtccaaaactacttacctggaagaccttccacca

SEQ ID NO: 254588 - DNA, 100 bp, Homo sapiens
cctgtccatcgtgtgcctgatgatcacgcagctggctggcttcagtggaccaagctcgcggcattccaagctggagaaggcggacattctggaaatgaca

SEQ ID NO: 254589 - DNA, 75 bp, Homo sapiens
ccccaggatgccgtgggccgcagccactcaggactgtcaaaggcctttgcccagtttgatgctgagggtgatggg

SEQ ID NO: 254590 - DNA, 75 bp, Homo sapiens
gaaagtgaggctggtgttggtttgcaaaggtcagcagcacagtggccatggaaaaagaaaaactctacagcatat

SEQ ID NO: 254591 - DNA, 97 bp, Homo sapiens
ccgaagctatggcctgaagacgggattctttagtcatctggggacctggagaatgatgagcaggcagccagtgccatctctgagctggtcagcacag

SEQ ID NO: 254592 - DNA, 100 bp, Homo sapiens
aaagagtcacctaaagttaggcggcactccagccccagctcggttcttcacacacccccattcggcgtagtacccagagagctcaagatgtgtggcagtt

SEQ ID NO: 254593 - DNA, 88 bp, Homo sapiens
gcaaaaagaagaacaaagaaggatctggagatggaggtcgagctgagggttacacatcattttggaatgactgtatatcatctggatt

SEQ ID NO: 254594 - DNA, 100 bp, Homo sapiens
agcgagactgcgggggtgctgcggccgtcctgggggccttcagagccgcaatcaagcaggacagtcattttgtttactcattcagccctgttgcaggtcc

SEQ ID NO: 254595 - DNA, 50 bp, Homo sapiens
caagttctcgtggagtcagacaatgagaaactaattctgaagcaagccct

SEQ ID NO: 254596 - DNA, 100 bp, Homo sapiens
gccaggatccccagcaggagcaggagcaggagcgggagcgggatccccagcaggagcaggagcgggagcgggctcttgtcaggatggtgaagctgttcat

SEQ ID NO: 254597 - DNA, 80 bp, Homo sapiens
tatcggggcctttatttctcgtcggcggcgccctgcaccgcgcctcgcaaagcaacgcggtaaaaatattgcttcggtgg

SEQ ID NO: 254598 - DNA, 89 bp, Homo sapiens
gaagaccacacactgggaaacatcattaaatcgctcccccgaagatgggcctcgagtggtcttcatcgtggacctctggcaccccaacg

SEQ ID NO: 254599 - DNA, 96 bp, Homo sapiens
ttgactgtgtatactctacaatctaagaaggatttcagcaaatttggagcaggagaagagcaagttagtaccttgtaccaaaacatcaaccttgtg

SEQ ID NO: 254600 - DNA, 50 bp, Homo sapiens
tcctgagcagctgggattacaggagcagcatggacctgtcagcaactaag

SEQ ID NO: 254601 - DNA, 110 bp, Homo sapiens
tggctgcttcctccatcctggtattttttggagcttccatcctggttcttccaaagtgcccggacccaaaacaggaagtaaagtcagtgataaatcttttgtttgctgca

SEQ ID NO: 254602 - DNA, 88 bp, Homo sapiens
aatccaaatgcatcattcagatgcaaggcaactcgaccacaaatgaagctcgtgaccgagaacctgaaggaggaaccaatggaaagcg

SEQ ID NO: 254603 - DNA, 111 bp, Homo sapiens
cccgaaccctgagagctttggacactagtgaacaggagcgcatgaaaagtgagctgaagagacgcctgaaagctgagaagaaagtagcagagaaggaggccaaacagaaag

SEQ ID NO: 254604 - DNA, 90 bp, Homo sapiens
aaggacttgccttcactaagatgaaactttggactatggaattttgggagctgatgaggatgtagagagtccagagctgacaacatctcg

SEQ ID NO: 254605 - DNA, 100 bp, Homo sapiens
gccgggttgatttttaaagcttcaaaatcctaagactcagcactgttgcgggttttatctccatctcgaagtgcaagagtccagtttcatcttatggagt

SEQ ID NO: 254606 - DNA, 116 bp, Homo sapiens
gtcgctggtggtgcaggcgctgcgccgcaacgccgagcgcaccgacatctgcctgctcaaagacagaatgttgctgcgggatgtaaaagctcttaccctccactatgaccgctata

SEQ ID NO: 254607 - DNA, 100 bp, Homo sapiens
ggaggaccctggaacatcccggaagccgggaaatggtcagcgccaacggcaatgtcctgcgcagcgagatcgtgggctccatcaagatgcgagtcttcct

SEQ ID NO: 254608 - DNA, 83 bp, Homo sapiens
gctgaagagcgacaagccgctggcagccgcggatctcaccgccgctcaggaactcgccgtgtgtgtgtcagagaatgttgctc

SEQ ID NO: 254609 - DNA, 75 bp, Homo sapiens
acaggacctgtttaagttcctccaagtgaatggcatcatagtttccaggttattcaagaagcccaagcgaaagac

SEQ ID NO: 254610 - DNA, 82 bp, Homo sapiens
cgctgagcctcctgaagcgggccaaggtgcacatcaagagcctggagacacaggccccatccttcccaatggggacacttca

SEQ ID NO: 254611 - DNA, 98 bp, Homo sapiens
cggcggctgcgggctgagcggcgagtttccgatttaaagctgagctgcgaggaaaatggcggcgggaggccgccgactcgaagcgtgagcagttccgg

SEQ ID NO: 254612 - DNA, 96 bp, Homo sapiens
atatgatacagatgtattcaaatggatcttcaaagctgaaggaagaggatcaccttccaagacaaaacagtcttcatgggggaaaaatgacgcttg

SEQ ID NO: 254613 - DNA, 98 bp, Homo sapiens
aatgtcctatgccaaaaatttcgccattgtgggagccatgttttcttgtactgagtgtttgatagaatctgccaatggccatgtgtctcaggatcaag

SEQ ID NO: 254614 - DNA, 100 bp, Homo sapiens
acctgccgccggttgccggaggccatcgaggaagtgaagaaaattacggatccagatcaggagatttgaggagctgctgccccaagtgtgttggctggtg

SEQ ID NO: 254615 - DNA, 100 bp, Homo sapiens
tctaggcatcccgtactcccacgaccagctcgggttcatgacgctctcgatattcctgtgcagaaacctggaccacgtctacaaccggctcgctcgatac

SEQ ID NO: 254616 - DNA, 74 bp, Homo sapiens
tcattcaacgggaattgaatagatgctgtacccctcaaggatttaaactaacgaaaaatcaataaataaatgtg

SEQ ID NO: 254617 - DNA, 90 bp, Homo sapiens
atgtcatcagcaacaaaaacataaagctctcagaaagagtactgattcctgtcaagcagtatccaaaggaagcaagatttccagatgtag

SEQ ID NO: 254618 - DNA, 99 bp, Homo sapiens
cttattgaaacattaaatgacagttcacataagaagttcttcgatgtatctaaacttggcaccaagtatggatgcgtattggatagcaatgaatagttc

SEQ ID NO: 254619 - DNA, 101 bp, Homo sapiens
tcctctgtttctctgctgcaccgacctcgacgtcttgcctgtgtcccacttgttcgcggcctataggagcagctgcattggcatggaagaatcctatttca

SEQ ID NO: 254620 - DNA, 75 bp, Homo sapiens
tcatgaactagtgacctggaaaggtcctcgggcgggaagtgtacacctccaataaccagctggggggcatccaga

SEQ ID NO: 254621 - DNA, 50 bp, Homo sapiens
ctcccgggaagcccctcagctgttcctggtagagttacacagttgtgccg

SEQ ID NO: 254622 - DNA, 80 bp, Homo sapiens
taacaaaacaccaagattttatcctgttgttaaagaaccaaaagccattgatgtaaagaacaccaatcagggtcttcagg

SEQ ID NO: 254623 - DNA, 96 bp, Homo sapiens
gaaccgccggcgccggcccagcagctgcagccgcagcctgtggctgtgcagggccccgagccggcccgggtcgagacacgaagatcgattgagaag

SEQ ID NO: 254624 - DNA, 101 bp, Homo sapiens
tacggaccctcttcacagacctctttgaaaagaaaggctacacctttgactatgcctatgattgggttgggagacctattacaagcttaccattgttcaga

SEQ ID NO: 254625 - DNA, 50 bp, Homo sapiens
ttcaactctgggatcacctgatcatttcatttccaaaatttgggtattcg

SEQ ID NO: 254626 - DNA, 98 bp, Homo sapiens
gctgtgtgccggcgcctctggcagactgacttccttttggtagtactgcgtgatgttgttcaggcttatcctgaagttcgcattgttcttatgtctgc

SEQ ID NO: 254627 - DNA, 96 bp, Homo sapiens
tctgtgtgttcgagtggacaaaatggcgaagatcgccaagactcacgaaggcagtcgatgatgtgaagaaaggttacatcaaagcagaagaaaagt

SEQ ID NO: 254628 - DNA, 100 bp, Homo sapiens
tctcctacctattaaaaggaccatacgagtcctagatgtcaataaccagtccttcagagaacaagaggtggaatgaatcttacttgttgaatatcttctg

SEQ ID NO: 254629 - DNA, 83 bp, Homo sapiens
tgaaggaagaatatggagagagccctttgcaggatgcagaagaagccaaaaacattctggttttcggctttgtgagaaacctt

SEQ ID NO: 254630 - DNA, 96 bp, Homo sapiens
gtccgagcgacttctaggagcctggggttcggcgctatggaggagctcgatggcgagccaacagtcactggcagagcggcttgggtaaatccacct

SEQ ID NO: 254631 - DNA, 78 bp, Homo sapiens
ggcggatggcccccggtgcaagaggcgcaaacaagccaatcccaggaggaaaaacggggacggcaaaacagaacagaa

SEQ ID NO: 254632 - DNA, 104 bp, Homo sapiens
aaaaacagagtccgatgaaaggaatgggtctgggaccttaacagggagccatgaggcggggtttcaccatgttgcccagactggtcttgaactcctgagcttaa

SEQ ID NO: 254633 - DNA, 83 bp, Homo sapiens
cgcggcgcggggccaccatgggggcccagctcagcacgataacgaaggaggcccaacttcattcaataaggagcctgacggat

SEQ ID NO: 254634 - DNA, 106 bp, Homo sapiens
aagaaaagttttgggtgatggggacaacaagccaaagagaagggaatttgggtccatctggttggtattgacatctttactgggaagaaatatgaagatatctgcc

SEQ ID NO: 254635 - DNA, 80 bp, Homo sapiens
aggatgatgctgactttgatgaaggtacaaacccgtagtgctgatgaaccaatgacaacatttgttgtctgtaatgaatg

SEQ ID NO: 254636 - DNA, 83 bp, Homo sapiens
gctgcctctgtgtacgctgaggggggagttgtgacttctcaccaggagatttggtttgggccaagatggagggttacccctgg

SEQ ID NO: 254637 - DNA, 83 bp, Homo sapiens
cgcggatttttggcctcatactctgttatagataaacaagctgaaaatactccttgatcaagttgaagaagcagtggcagatt

SEQ ID NO: 254638 - DNA, 112 bp, Homo sapiens
aaagagaggatttgcttttgtaacttttgatgatcatgatacagttgataaaattgttggatgtctcagtggtacgaacttcagcagcttgactcaaaattcctggagcagg

SEQ ID NO: 254639 - DNA, 95 bp, Homo sapiens
acctgtgaacagtacgcagtgaatgttagtctaacgtgaagacattttgctccaagaatatcctagccatccttggcttctcctctatcatagct

SEQ ID NO: 254640 - DNA, 100 bp, Homo sapiens
cagggaggactggtgctagcagcctcctgaataaaagtcattttcatttaatggacctattgctatatatcagatgggagactgtgagtcagcctggatc

SEQ ID NO: 254641 - DNA, 90 bp, Homo sapiens
aattatgaattcttaaagtcaaagagggaagagttccaagaatatctacaggaacaggatctggacttggcacatttcttttaaaggtgc

SEQ ID NO: 254642 - DNA, 83 bp, Homo sapiens
tacagacgctgccagcatcgccgccgccagatgatatcatcaagttgaatcgaaaggaagggaagaagcagaattttccaaga

SEQ ID NO: 254643 - DNA, 129 bp, Homo sapiens
gacgactccgtcgcagactacggacctgtctgggtctcagccgccaaagaccccgtccggtagggcagtaaacaagagctctgaaaggggaaggaagccaggagaaagccagctccattagtcacgcag

SEQ ID NO: 254644 - DNA, 83 bp, Homo sapiens
atgaactaatgactgaaggtgaagaccagtttgatggttcgagactataagaggcttacccccatttctgtgctggaccatgc

SEQ ID NO: 254645 - DNA, 90 bp, Homo sapiens
cgcggccctgcgcagctgccccatgtgccagaaggagttcgcccccaggtgacgatgcctggggagcctgtggacgtggcatgtggcgtg

SEQ ID NO: 254646 - DNA, 100 bp, Homo sapiens
gcacggcgagcagtctcaggcctttagtgatgatggctgttcacggaagaccaggatgtagatgagggacttgtctatgacactgtattcaagcacttca

SEQ ID NO: 254647 - DNA, 100 bp, Homo sapiens
gacaaagcagcgcccgtctgcttcgggcctctggaatttagcgctcgcccagctagccgcagatcactattatcttcaaagcccaccatgagtgtacaga

SEQ ID NO: 254648 - DNA, 88 bp, Homo sapiens
cagttgccatccacagtgatgttgatgctagttctggtatgagtattatagaacaattagaccctgtatcttttagcaattacttgaa

SEQ ID NO: 254649 - DNA, 95 bp, Homo sapiens
cggaggcgttggagcgcggaaatctggaaccgggatggcgacgtctacactgagtcggaggcgaagatatcagttttagagaatgtggcgtggag

SEQ ID NO: 254650 - DNA, 100 bp, Homo sapiens
tcccggctggacaatgtgatgaagaaacttgcaaaagtatctcatatgaccagtggcagagacatttgtttgggtgaacaatgcatctgcacattcccag

SEQ ID NO: 254651 - DNA, 88 bp, Homo sapiens
ggaggaaatgaagaagccgacagaggatatgtgtctgactgaccaccagggtgtccgcaatgttgccagtgtctgtctgcagattggc

SEQ ID NO: 254652 - DNA, 90 bp, Homo sapiens
gccgcaacaataagaaactcctgggccgcgtgaaggccttcgatagccaggtcagcaatcctctgctcattggccatggggctctgtcta

SEQ ID NO: 254653 - DNA, 90 bp, Homo sapiens
gctgcccgcccgctgcctgcctgcctggcatctctctctcccgacttaattcagtgcacaaatgagatgaatgtgaacatcccacagttg

SEQ ID NO: 254654 - DNA, 82 bp, Homo sapiens
ccgagagcgcgaatatcgtcatcgttagaaggaagccaaattggcagagaatgcttgtaccctggctgacctgacagagggt

SEQ ID NO: 254655 - DNA, 100 bp, Homo sapiens
tgggagtcatcctgtacaccctcgtcagcggctccctgcccttcgacgggcacaacctcaagcgagacggtcatctgttccagccgggccactgtgatgc

SEQ ID NO: 254656 - DNA, 90 bp, Homo sapiens
cagagatgctggagaaagcgtcccgggagctgtggatgcgcgtctggtcaaggagctctgcgtgcctcttgctgtgccctacctggacaa

SEQ ID NO: 254657 - DNA, 82 bp, Homo sapiens
ggatatcagggcagccctggaggcttactgcaagaagtatgagcagctcaagggcgtgatggtgggcatgggtcagaaggat

SEQ ID NO: 254658 - DNA, 80 bp, Homo sapiens
taatgaatgtggaaatcgatggaagactttgagaatcactacaagaaaaactccttgtggtgaaggttctaagacgtggg

SEQ ID NO: 254659 - DNA, 100 bp, Homo sapiens
ctggctatattatttgcacccagtcctgcagcgccagcagctggactatggcatctatgttatcaaccagattgtctacatgggctggtgtgaagcccgg

SEQ ID NO: 254660 - DNA, 98 bp, Homo sapiens
tgcttttgtaatgaagaagcacttaaatactcatctactaggcaagcatggagttggcaccccaaaagaaaggtaaagaggatgaatatccaaagaag

SEQ ID NO: 254661 - DNA, 75 bp, Homo sapiens
ggaaggcactgcagctcgagtgaaggatttgtacacacagatatgacgaaagacttgaaagaagaacatttaaag

SEQ ID NO: 254662 - DNA, 100 bp, Homo sapiens
ctgatgctgttgtgatttacaatgctccagagactggcaatcagacgatacagatggcaaattttggtgaaatgacaatggatgctctgttggctcgatt

SEQ ID NO: 254663 - DNA, 50 bp, Homo sapiens
catcaagcgagctctggttaaattccttcctcagagatcacctatgggat

SEQ ID NO: 254664 - DNA, 100 bp, Homo sapiens
gtgcctctgtcactggagatgcggcttcgccaacggctttgttttccggaaagttcgaagcttgctagggggaaatattcgtctcctgttgtgtggtggc

SEQ ID NO: 254665 - DNA, 100 bp, Homo sapiens
tgccacctatctctgcctcctgcgtagcatccggaaacatgtggccctacatcaggaatttcatggcaagggacctctggacttcgaggcatacagtgcg

SEQ ID NO: 254666 - DNA, 90 bp, Homo sapiens
ccactggacctccaaggaagccacgtgcagacatctacaaccttcgatctcctgacgagagcagcatggacctgtcagcaactaaggaac

SEQ ID NO: 254667 - DNA, 74 bp, Homo sapiens
gggcacccagcatgggggtactgctcacacagaggacgctgctcagttatcaatactctggctgaccatcatca

SEQ ID NO: 254668 - DNA, 87 bp, Homo sapiens
aaagacagctttcacagtttgcgggactcagtcccatcactccaaggagagaagtcctattttgtaacggattatgatccaaccatt

SEQ ID NO: 254669 - DNA, 50 bp, Homo sapiens
tttcaggttgactaaaacatgggcggaacagcgacatctcactcatgaaa

SEQ ID NO: 254670 - DNA, 75 bp, Homo sapiens
agcctctccagcagctgggattacagacatagggcctgattacattccaacagaggaagaaaggagagtcttcgc

SEQ ID NO: 254671 - DNA, 119 bp, Homo sapiens
ctgctgctgccgctgccgccctgagtcactgcctgcgcagctccggccgcctggctccccatactagtcgccggcatcattcttaacaaagaagttaaatattggtgggaaaagagtaa

SEQ ID NO: 254672 - DNA, 100 bp, Homo sapiens
cgtcctggactcctctgagaaacagagtttattaaccacttaacctctcagaactgaacaaagacaacattgttcctggaacgccctctttttaaaaaag

SEQ ID NO: 254673 - DNA, 75 bp, Homo sapiens
ggagccttgacgttaggaacgaagtctaacctggatctggagccgggtgctgactgggttacttttttaaacact

SEQ ID NO: 254674 - DNA, 75 bp, Homo sapiens
ttccttcaagctaaccaggatacagaacttggtggtttttgtataaggagggttcctgcccccaggtgaacatta

SEQ ID NO: 254675 - DNA, 83 bp, Homo sapiens
gaagcgaccgagggactgggagtcgttagtgaggtctcggcgcggaagatggccggcggcgtggacggccccatcgggatccc

SEQ ID NO: 254676 - DNA, 100 bp, Homo sapiens
gcggtacgggggtggtgccgcgctcctggccccgcgcgggcggacggcggaggcgcctcccagaacatccagtcatggataaaaatgagctggttcagaa

SEQ ID NO: 254677 - DNA, 100 bp, Homo sapiens
tgcaatgacaacatcatcttctcagaaggtcagataccaggcccaggttccatgatgcccgggcagcacatgccaggccgcatgattcccactgttgcag

SEQ ID NO: 254678 - DNA, 101 bp, Homo sapiens
agctggccaagcacaaagagcttgctccctacgatgagaactggttctacacgcgagctggggttgctttgacagcagatactaagatccagagaatgcca

SEQ ID NO: 254679 - DNA, 90 bp, Homo sapiens
gctttgaccagacctttcagtcctatcggaaggatgatttcgttatgagcagcccgacggccatggaggctgaagagacgatggaatgcc

SEQ ID NO: 254680 - DNA, 73 bp, Homo sapiens
catcagacaaccagtttaatgaagctgcagaaccttggcctgaaaatgctacattatatcagcaattgaaagg

SEQ ID NO: 254681 - DNA, 96 bp, Homo sapiens
tcaccagctaccccagacctcaagtgacttggtttagagaagggcacaagattattccaagcaacagaatcaagtctggaaaagtttgaaattcca

SEQ ID NO: 254682 - DNA, 80 bp, Homo sapiens
ctgtcagccatgaacggatggatgtgatgcctgctagccaaaaggcggaatggccaaagactatgacgggtcttcctagc

SEQ ID NO: 254683 - DNA, 100 bp, Homo sapiens
ctgagccacatgaaggcagcactcagggccaggggagagagaagaggatcagcagtgcagccccaggatgcctcgcagacacccatcatactgactccaa

SEQ ID NO: 254684 - DNA, 100 bp, Homo sapiens
tggtgagcagcggcttccgagaaaacggctcgagcagcgacaacccgtcctctcccgagtttttcatctgtcaataccagcaaatatgcagaaagctatc

SEQ ID NO: 254685 - DNA, 83 bp, Homo sapiens
gtcagaagtgtggctgccatccaccccagcctggagatccccagtgagcgagtgctgtgctttcatgggcctcttctttatga

SEQ ID NO: 254686 - DNA, 101 bp, Homo sapiens
catgtagccaagactggagaaacaatatgccagaattccagaaaagttcagttcgaatcaagaaccctacaagagtagaagaaattatctgtggtcttatc

SEQ ID NO: 254687 - DNA, 100 bp, Homo sapiens
ggaatctatgatgctgatggtgatggagattttgatgtggatgatgccaaagttttattagattctgaaaaagagttccacgtcctcccttatcgagtct

SEQ ID NO: 254688 - DNA, 82 bp, Homo sapiens
cgcgtgtctaggtgagtcgcggtgggtcctcgcttgcagttcagcgaccacggagaactacgatgacccgcacaaaacccct

SEQ ID NO: 254689 - DNA, 100 bp, Homo sapiens
gaccaggccatcgccgaggcccttgctgcccctagccggtttgtgctaaagccccagagagagggtggagcggccagcgaggaaatcttcaaaattgcct

SEQ ID NO: 254690 - DNA, 100 bp, Homo sapiens
aaatcaagtacttcagtaagagatggggtattttggcctctccccagtctgctcctggaaacttggacaatagtaaaagtggagaaattaaaggtaatgg

SEQ ID NO: 254691 - DNA, 96 bp, Homo sapiens
aggtcgcccggcggacagcgtggcatgagccaggagcccgggccgagaggtggggctggtgtccgagcacttctcgcaggccccgcagaggctgtc

SEQ ID NO: 254692 - DNA, 100 bp, Homo sapiens
tttgcagtactttgctgtgaccaacaacaatttctgcacggagctaaaccagccgaccctgcccaacatccgcaagtggaaggggccccggggatgctgg

SEQ ID NO: 254693 - DNA, 50 bp, Homo sapiens
gaaactctttgggaaagccactcgaaaagatgggatataagaccatcatg

SEQ ID NO: 254694 - DNA, 73 bp, Homo sapiens
gctttcggagtacatgggcaatggcggcgactggcggcgcgatggacctgaccgggctcctgctggacgaaga

SEQ ID NO: 254695 - DNA, 95 bp, Homo sapiens
gtggacttaattcagaacaaatccttctagcagaagtacatggttccaacataaaggaactgaaacatttgatcttggaggcagcagatggcttt

SEQ ID NO: 254696 - DNA, 111 bp, Homo sapiens
caaggtgatccagcaaggtcggcagagcaaggggcttacgcagaaggacctggccacggattatatctgtccaagatgcgagtctggttttatcgaggagcttccggaaga

SEQ ID NO: 254697 - DNA, 90 bp, Homo sapiens
gccaagatggggaatggaactgaggaagattataactttgtcttcaaggactattgcagatatcatccgaacatgtttgggacccaagtc

SEQ ID NO: 254698 - DNA, 100 bp, Homo sapiens
ttgagaacttgtgccccagttgctgtgctccaaggacacacaggatcaattacatctttacagactattgggaagaagttacctgcaactacagcaactc

SEQ ID NO: 254699 - DNA, 100 bp, Homo sapiens
gctgccgccacggccgcccggaggatttggagttccatggagtgatgagattttattttcaagataaagctgctggaaactttgcaacaaaatgtattcg

SEQ ID NO: 254700 - DNA, 80 bp, Homo sapiens
ccgagctggggttggacgctgccagtttgcacagcagcagggaacggcaggagcagctgatgggatatcggaagagaggg

SEQ ID NO: 254701 - DNA, 75 bp, Homo sapiens
cagagggtgcccagcagggtcttctacagtggctgttgaagaggctgaaggaatacaaacagaagcttgcacgag

SEQ ID NO: 254702 - DNA, 100 bp, Homo sapiens
cccattattggtggtttttgggagactatctttggcaacaggaaggatgataaagactatgctttaaaacaaatagaaggaactgggatctctatgtcgg

SEQ ID NO: 254703 - DNA, 100 bp, Homo sapiens
tctggaggcttccagtccatggggtgtccgcaatgttgccagtgtctgtctgcagattggctacccaactgttgcatcagtaccccattctatcatcaac

SEQ ID NO: 254704 - DNA, 100 bp, Homo sapiens
gaattttcacctggaacatgagagggatttcttccagaaagcatgtatgaacgtattctcactggtcccgttgtgagagaggaagtaagcaggcggggga

SEQ ID NO: 254705 - DNA, 75 bp, Homo sapiens
gtaatgagagcccggaaccactctttgtgccgcagcttcgcagacataaatgagcatattctgatgtactctttg

SEQ ID NO: 254706 - DNA, 98 bp, Homo sapiens
atgtctcaagatggcggccaatgtgggatcgatgtttcaatattggaagcgctttgatttacagcagctgcagggtgtacagcaagctgtgattcctg

SEQ ID NO: 254707 - DNA, 83 bp, Homo sapiens
gcgagctgagtggttgtgtggtcgcgtctcggaaaccggtagcgcttgcagcatgggaaccagcggggaaactgaggctcggg

SEQ ID NO: 254708 - DNA, 100 bp, Homo sapiens
aggggtttcttgcaaaacgcttctccggctgcaccctgaccgatgggaccctgggcatgccgccgatgactcaggcgccccgcattatgcaccacatgcc

SEQ ID NO: 254709 - DNA, 54 bp, Homo sapiens
gtccagaaggcgcagactaaagagcaggtgtcagcggtgcccactgtgctggcc

SEQ ID NO: 254710 - DNA, 82 bp, Homo sapiens
agcggctggagcaccagggcatcaagatcgagttcatcgggcagatcgggcgaactttctgaccaagtatacaactacccag

SEQ ID NO: 254711 - DNA, 60 bp, Homo sapiens
tgctggccttcctcctgctgcccagggcagatgcagggggactccggggggcccctcgtg

SEQ ID NO: 254712 - DNA, 74 bp, Homo sapiens
taccagatcatcatgaccatgatcgtccataagaactgggtggcagaagaaatccttagacaagagctggagaa

SEQ ID NO: 254713 - DNA, 75 bp, Homo sapiens
tcgatgtgcctcctggtgaagacaaggggggatatgtgatcaaagcatcagaagagaagatggcgaattagaaga

SEQ ID NO: 254714 - DNA, 59 bp, Homo sapiens
attgtgaccccaggaattgtagaaacttattggagaagtgtttaatattgtgagccaac

SEQ ID NO: 254715 - DNA, 75 bp, Homo sapiens
tcttgcctgctccacagtttgctagtcgagcattattcttataaagcagatggtttgttaagagttcttactgtc

SEQ ID NO: 254716 - DNA, 100 bp, Homo sapiens
cctgaatctggcacagatgcaggagcagacgctgcagttggagcaacagtccaagctcaaacagaagaagatctttacaatccaaggctgctacccggtg

SEQ ID NO: 254717 - DNA, 82 bp, Homo sapiens
gaatcatccacgcacctgcagctctgctgagagagtgcaagccgtggggaactgtggctgcaccatctgtcttcatcttccc

SEQ ID NO: 254718 - DNA, 96 bp, Homo sapiens
ctagtatgcaggctaggcaaactgaactgttgacattcagggatgtgaccatagaattctctctggaggagtgggagtttctgaaccctgctcagc

SEQ ID NO: 254719 - DNA, 90 bp, Homo sapiens
gtagatacaaatttttggatgatgatggatccatttctcctattgaggagtcaacgaatgactgtgataaatatgtttttcgtatgcaaa

SEQ ID NO: 254720 - DNA, 75 bp, Homo sapiens
cttctgcaggagtagttgaagatatgggagctccttaataagcatttatagtcagtttttggcagcaatagaatc

SEQ ID NO: 254721 - DNA, 100 bp, Homo sapiens
ctcgacgtcttgcctgtgtcccacttgttcgcggcctataggatgctttggagtctgcaatgaagaatggcctgtggggtcacgctctgctacttgcaag

SEQ ID NO: 254722 - DNA, 98 bp, Homo sapiens
ccggagcgagagcgagtgcctgagcaacatccgcgagttcctgcgcggctgcggggcttccctgcggctggaggcgcattggagtgactgtctggcat

SEQ ID NO: 254723 - DNA, 75 bp, Homo sapiens
cggccgcgcccaagcgcaggggctcctcgggctcagtggttggttgaatctggcgatgtggaacccatggatatg

SEQ ID NO: 254724 - DNA, 83 bp, Homo sapiens
cttatggcggcgctggagagggggcgctgagctgttggggccgccatggcatcagatgaaggcaaactttttgttggagggct

SEQ ID NO: 254725 - DNA, 100 bp, Homo sapiens
cgggaggggggagcggcgttggaggccaccgtttccaggtctccacaccctggcaacctcctactgtgctcctgggtcattctcaagaggtcacgtctgt

SEQ ID NO: 254726 - DNA, 75 bp, Homo sapiens
gcctctcgatgggcagctcgcacttgctcaacaagggcctgccgcttgtccacaggtcctggctaccctgggaag

SEQ ID NO: 254727 - DNA, 74 bp, Homo sapiens
gtgatcgaactcgatgactgcgtgcagactgatgaggatgctatacgtattggtcacgttggaatgcaaattga

SEQ ID NO: 254728 - DNA, 97 bp, Homo sapiens
cccgtcagattctggagggtgtccattatttgcacagtaatatgattgtccatagagatatcaaaggactctccagtcctcagtcaccttggacaaa

SEQ ID NO: 254729 - DNA, 98 bp, Homo sapiens
ccggggccgaggaccctcgccaacctggcggagttcttctgcagggacggcttcagccgcatccacgagatccaggtgaaaggtgtagcagtcactcg

SEQ ID NO: 254730 - DNA, 100 bp, Homo sapiens
caaagtgaatgcctggacctctggccacaatgaccagtcacaatggttacaggttgctgtagtaaaactaaaaaatgcagataaagtgtttgccatgaaa

SEQ ID NO: 254731 - DNA, 74 bp, Homo sapiens
ctcctgagaagctgggattacagtaccacctgtactctgagcctcagtttaatgtccctgaaaagccggagttg

SEQ ID NO: 254732 - DNA, 100 bp, Homo sapiens
ggaacaggtaccggctgggccggaagatcggcagcggctccttcggagacatctatctcgagctgacatcgcgctgatcggattggccgtcatgggccag

SEQ ID NO: 254733 - DNA, 98 bp, Homo sapiens
gtgaggaccttccacgtctgacgtgtgatctcgagagacctgcgtacattcggggtgccagaaggaaagcatagatggcttgttcaatcagtatatca

SEQ ID NO: 254734 - DNA, 100 bp, Homo sapiens
gcacgtaaataacgtttcctgcacgctctcctcttcagctggaaagcgctccctaatgaagaaggagccccacaggaaggaattctggaagatatgcctg

SEQ ID NO: 254735 - DNA, 100 bp, Homo sapiens
ggcatgtcatctttgccaggactgatgcagatgcccctcctccaccagaggactgggaggagcatgtcaacaggttacactcctggcacaccttacaaag

SEQ ID NO: 254736 - DNA, 109 bp, Homo sapiens
tgcatttggctccactcatgctgaagcattgctgaaagctgcaatagaatatggaacattctggacgtgtgtttcggctccagtttgatgagtttcagatcatcagcag

SEQ ID NO: 254737 - DNA, 83 bp, Homo sapiens
agccctgattgcctgagcaagtgccagctactcctcgaaagaggaagtgaactgtggctgcaccatctgtcttcatcttcccg

SEQ ID NO: 254738 - DNA, 50 bp, Homo sapiens
caggaatgggacctcgagtcactgtgcatgtttgcaagactacacagatg

SEQ ID NO: 254739 - DNA, 100 bp, Homo sapiens
atgatcgagacgcaggaggacatctacgtgggctccattgagacagaccggggggtgcgagagcaggtgtcgtgaaaactacccctaaaagccaaaatgg

SEQ ID NO: 254740 - DNA, 100 bp, Homo sapiens
agctgctgagttctcggtgaaggaagtactagccggacatcatgagtggctgtcgggtattcatcgggagactaaatccagcggccagggagaaggacgt

SEQ ID NO: 254741 - DNA, 96 bp, Homo sapiens
ggaaagttgactgaaaatggggcggaagaaaatacaaatcacacgcataatggatgaaaggaaccgacagtttgtgaagtgtggatatgcaggctc

SEQ ID NO: 254742 - DNA, 100 bp, Homo sapiens
ggctcagtctgcggccaagactccatcctgcaaggttatcaatactctggctgaccatcatcatcgtgggactgactttggtggaagtccttggttacat

SEQ ID NO: 254743 - DNA, 100 bp, Homo sapiens
gggagattataggagaactgggcgacggagcctttgggaaagtgtacaagtcctcacacaggtattcaggaataccaggatggcgtgcccaagattccaa

SEQ ID NO: 254744 - DNA, 100 bp, Homo sapiens
aagaggcattcgtaccagttattaaactctgttttgatgggatagaggcatatttaagccgagtagcattctatggtttaaaaggcaggtattccaaagc

SEQ ID NO: 254745 - DNA, 100 bp, Homo sapiens
gggtgagtgcaccgcgttctcgcacgcgtcatgctcaggagcatctatcggctgcacgccaacatcaacacaggcgaagatggtctccaagcgcattgcc

SEQ ID NO: 254746 - DNA, 86 bp, Homo sapiens
ctacggaggtggcagccatctccttctcgacaatgcagatcttcgtgaagactctgactggtaagaccatcaccctcgaggttgag

SEQ ID NO: 254747 - DNA, 46 bp, Homo sapiens
agcacttaagaattcacagtgaaacgggtatgcaggagattagaag

SEQ ID NO: 254748 - DNA, 90 bp, Homo sapiens
cctcccagtctgcggccatgaacgcgagcagcgagggcgagagcttcgcgggctcggtgcaaagtggaattctactaagtatcagtcggc

SEQ ID NO: 254749 - DNA, 90 bp, Homo sapiens
acagaacagttaatcctcaatttaagcctgatctaacccctagaaacagcaagcagacagatctgggaatcactgaggatgctctgggga

SEQ ID NO: 254750 - DNA, 100 bp, Homo sapiens
tgactcagaagcctctgttccccgggaagtcagaaatcgatcagatcaacaaggtgttcaaggatctgatgcgccagtttctaagaggcctagatttcct

SEQ ID NO: 254751 - DNA, 97 bp, Homo sapiens
cgtggatgaaggtggggtggcgtggcaagccggactaaggaccggggacttcttgattgagaatcccacgtggcgaagtctcgattttggaattatg

SEQ ID NO: 254752 - DNA, 83 bp, Homo sapiens
cagggatattgtgtcaggcctgaaatacgttcagcacacctacaggactggggtgaaagcaacaaggcgtgcaggtattttga

SEQ ID NO: 254753 - DNA, 82 bp, Homo sapiens
cctcattatgggcactatggggatccgtcgcacacagcatctccaacaggtcctcagaatggttggaatgaccctccagctt

SEQ ID NO: 254754 - DNA, 75 bp, Homo sapiens
gctgagcagaggacgacatgttgcttttcgtggaggaatgttttaaaggaagttgggctactcacaagttactac

SEQ ID NO: 254755 - DNA, 90 bp, Homo sapiens
ctacctggaggtctccactctggtcagcaagtatccagacatcagaggccaagaagatgaccacctttgagtatctcattaataaccgca

SEQ ID NO: 254756 - DNA, 73 bp, Homo sapiens
cgtccgactgccagggatccctcacgccgcgagggcccttgctgtgtgtgagctagggggtggcatgacatgc

SEQ ID NO: 254757 - DNA, 48 bp, Homo sapiens
aaatgctgaaagggagaaagtccagacacaaatgccagaccctaagac

SEQ ID NO: 254758 - DNA, 82 bp, Homo sapiens
tgctgccagtggtagcgctcgtctggcggagctggccttatgccagcctggaccatcttggaggcagtgtaggatcatggaa

SEQ ID NO: 254759 - DNA, 75 bp, Homo sapiens
gggtacaggtacatttggaccagtgggtagatgacattaatgctgataagaatatctcttctgcacagattgttg

SEQ ID NO: 254760 - DNA, 83 bp, Homo sapiens
tcatcaagttgcaagagattccaaccttccagccccttttgaaaggaaacatttactagggacaacttttgagtgtcagaccc

SEQ ID NO: 254761 - DNA, 75 bp, Homo sapiens
gccccagcccatcctctctaaccaaggtgcagtcagcctcagtttccaaagccggaaaaggatcctctagtagcc

SEQ ID NO: 254762 - DNA, 74 bp, Homo sapiens
tccgggaggtcaacgaggtcatccaggctcctcacacatcctcaccccgacccgcttcctggatgacctgaagg

SEQ ID NO: 254763 - DNA, 95 bp, Homo sapiens
cgagaaaccaagggtaaactaccaagttacaactacctggcctatcgaaactttatgattgacacttaccgactgaacccccaagagtatcttac

SEQ ID NO: 254764 - DNA, 74 bp, Homo sapiens
tctcctaggcgacgagacccagtggctagattttctggcatccttaaatcttgtgtcaaggattggttataata

SEQ ID NO: 254765 - DNA, 50 bp, Homo sapiens
ttatttgcagctatcatgtgaggttttgattcccaccatggccatcaccc

SEQ ID NO: 254766 - DNA, 75 bp, Homo sapiens
aagaggaccctgcggactactgcaaaggatcgaatcatcaatttagttgttggcagcttaacatccttattgatt

SEQ ID NO: 254767 - DNA, 113 bp, Homo sapiens
cagcaccccagatgggtgagagatgtgatcactggtttcgtggcctgaccaaggacctccaagaaatgagccgtcagactgctacagcattacctaccggtacctcgaagtgt

SEQ ID NO: 254768 - DNA, 75 bp, Homo sapiens
ctcgaaggaaaattccccagtgttcgcagttgcagaatgtcaggtgatgtgtcaccccaagtgctccacgtgctt

SEQ ID NO: 254769 - DNA, 100 bp, Homo sapiens
cttctttgcctttatcagcttgtgaaaaattatgagtgaaaaaactacagctgatgctaaggcaagctaatgaccagttagagaagacaatgaaagataa

SEQ ID NO: 254770 - DNA, 98 bp, Homo sapiens
ccggaggagaccctttgaaggtcccttgtggggactggaaagaggacgatgagatcgtggggctcaccagcgtcccccatggcttctgagtagcgtgg

SEQ ID NO: 254771 - DNA, 83 bp, Homo sapiens
cggagaaggatgacaccggagtttgacgaagaggtggtttttgaggcagtttctcttagtgttcagcaggaaacatccaattt

SEQ ID NO: 254772 - DNA, 141 bp, Homo sapiens
tgaatactccttccttcctccccacccattcctttaaatccggagggggaaaaaatcccaaggtctgcaaaggccctgccctgggagaagccctgccacacgtcgtgcccacgctgagggcctgtctgcagccctcccaag

SEQ ID NO: 254773 - DNA, 82 bp, Homo sapiens
ccctggagcctcagttggaagcagccgatccagcctgcggagcctgtggggcagattgttttcagagggaggcaacttttct

SEQ ID NO: 254774 - DNA, 98 bp, Homo sapiens
cactgatatctcaaaaggtgatctggacaaaggaacaggtatctcagatagaagcagatttgggatatcctggaggtaaagcaagaattattcataag

SEQ ID NO: 254775 - DNA, 82 bp, Homo sapiens
gcagctattctcaggatatgacaggggtaacacccttccagatgatttttgagcatgacgtatcccagactttactcaaggc

SEQ ID NO: 254776 - DNA, 74 bp, Homo sapiens
ccaatttctggttggaatggtgacaacatgctggagccaagtgctaacaggaatatgtcacttgtcacacatgc

SEQ ID NO: 254777 - DNA, 112 bp, Homo sapiens
agatggcggactgtgggggactgccccaggtagttcagggaccaaagcggatgttggatgctcaagtgcaaacagacccagtatccatcggaccagttggcaaatccaagta

SEQ ID NO: 254778 - DNA, 83 bp, Homo sapiens
gacggcgcggggtccgcgcccggagcgccccgccgcgcacaggggatatgagactttctactcggaatatcctgagtgttgcg

SEQ ID NO: 254779 - DNA, 100 bp, Homo sapiens
gaccccatccagggcccagatggaaaaatgcatggcaacacctgctccatgtgtgaggccttcttaattggcagagggggtcgatttgggaggaaaggtg

SEQ ID NO: 254780 - DNA, 50 bp, Homo sapiens
gggggaactgccttgtgcactgtagtcgtgaaaggtgccaaattggcaga

SEQ ID NO: 254781 - DNA, 100 bp, Homo sapiens
tgaccttctggatgtccttgagttcaaccaggagccctctggcacaaatggaagaagaaagaagggagcaagtagctaaaattaagaagatggagatgga

SEQ ID NO: 254782 - DNA, 51 bp, Homo sapiens
gttgcctccagcaccacttctaatgataacgaaggaggcccaacttcattc

SEQ ID NO: 254783 - DNA, 82 bp, Homo sapiens
ccaaattgtagctgacgaagcattttgcaacgcagttcggagttattatgaggtgaccaagaatatggcccaggtgaccaaa

SEQ ID NO: 254784 - DNA, 75 bp, Homo sapiens
acacttgcgcaaatgtctccggtatgtgacgcattcccagactcttcagccaactgagcatcagcttcttcacag

SEQ ID NO: 254785 - DNA, 100 bp, Homo sapiens
ccggcgtccgcccgcctggcgggagcggggctgctgctggcctttctccgcgcgctcggctgcgctgggcgggccccagtaatctatgccagcaattatg

SEQ ID NO: 254786 - DNA, 109 bp, Homo sapiens
ggcactgctttccactcggctcctgtcgtccgttctctcaggctcccgttcagatgatatcatcaagttgaatcgaaaggaagggaagaagcagaattttccaagacta

SEQ ID NO: 254787 - DNA, 74 bp, Homo sapiens
tactacaggggtgctgacaaactgtgtcgcaaagcttctttagtgaatttgcagaaaaaacttcagcatgtgcc

SEQ ID NO: 254788 - DNA, 50 bp, Homo sapiens
ccagggagaggaggatgaactgtgatcttccattgtttgaagcactggac

SEQ ID NO: 254789 - DNA, 96 bp, Homo sapiens
cacctctacctcctgcgaggcctcccgggctccgggaaaactacactggccagggcgaccattgacgaggtggagacggacgtggtggagattgag

SEQ ID NO: 254790 - DNA, 74 bp, Homo sapiens
ggaacgagccaagaaatttccaactggaggtcctcgatgggcttcctggaatattggtgtgtttatttgcatca

SEQ ID NO: 254791 - DNA, 82 bp, Homo sapiens
ctcactctgactgctgcagaaagttgttatcatcggtatcctttgaaagaaattgtggttatccatcaagatccagaagctc

SEQ ID NO: 254792 - DNA, 73 bp, Homo sapiens
agcgacccagctataagttcttcttcaagtctatggacgacgatttcggcgttttgctgctgacatcatctcc

SEQ ID NO: 254793 - DNA, 50 bp, Homo sapiens
aacaaaatgaatatggaccaccaggttttcgaaaggccttacactctgac

SEQ ID NO: 254794 - DNA, 75 bp, Homo sapiens
aagatacctctcgcatgtccacctcacaggtatttctggaaaactcaaactgtttttcctctactctgataccac

SEQ ID NO: 254795 - DNA, 89 bp, Homo sapiens
catttccatttctaccttgtatgcctcaatttgctggatttaagcactgctgcactttatgaggaagtgcacggctgtctataacgtgc

SEQ ID NO: 254796 - DNA, 100 bp, Homo sapiens
atagtctccagcgggcctggactgtgggctggtgtgtggaactgcagcagccgctcttctaaaacattcaaaccaaagaagaatatccctgaaggatctc

SEQ ID NO: 254797 - DNA, 100 bp, Homo sapiens
ctcagcctggaggcacttttccagagacaggcaggtgccccaggtggtagcagtggcagtggtgggtctccagagctcagcgccctgcgactgtcagaac

SEQ ID NO: 254798 - DNA, 100 bp, Homo sapiens
ggcttgcgggcgccgctggacgctggtggggactcgctctcggcttgaccgcattcttcctcccaggtgatgggcagaatctgtttacgaaagacgtgac

SEQ ID NO: 254799 - DNA, 80 bp, Homo sapiens
cgcgtacccccgtagcggaaaaaccttcgagagctgtgcccaggagtgaacaaccagccctacctctgtgagagtggtca

SEQ ID NO: 254800 - DNA, 75 bp, Homo sapiens
gtacagtctatgaatgagatagtccagagcaacctctttaaaaagcaagggatcagtgtccttcagggatgtggc

SEQ ID NO: 254801 - DNA, 101 bp, Homo sapiens
cctgagtcccggggtaggggtctcccgcgaggcccgatgagagaaagggaaagttaaggatgctggagcagaacaatggatttctctttctctttcatgca

SEQ ID NO: 254802 - DNA, 100 bp, Homo sapiens
gtttccagcagtgaaagtgctgacagtggggacagtgtcaatccatccacttctagtcattttacccacgtgctatgggaagagggcaaggcagccttgg

SEQ ID NO: 254803 - DNA, 96 bp, Homo sapiens
agtcccggcgttcttccgctggctcagccgcaagtacccgtccatcatagtcaactgcgtggaagagaaggtgggaagaagagcgctatcctgaag

SEQ ID NO: 254804 - DNA, 74 bp, Homo sapiens
cctgcctccttcccgccgccccctgggggaagttaagatatgccaacaacagcaattacaagaatgatgtcatg

SEQ ID NO: 254805 - DNA, 50 bp, Homo sapiens
ctgagcgctcagactcagaccaagtggctggactgaaatccgccgggaag

SEQ ID NO: 254806 - DNA, 51 bp, Homo sapiens
tgaagaataccaaggaggatcttttagatttggagcaagaggtggtggtgg

SEQ ID NO: 254807 - DNA, 74 bp, Homo sapiens
tcatgagcgacagcggcgagcagaactacggcgagcggtttgcaggtcgaagtaagaaggaaaccaaatattct

SEQ ID NO: 254808 - DNA, 75 bp, Homo sapiens
ccgagacatccgctccttgcccgagaacatccagtttgatgtttactacaaggttctgtggacaatcacaatggg

SEQ ID NO: 254809 - DNA, 82 bp, Homo sapiens
catcgagccttggcggcggacgtgcaggaggccccgtgtgggccgcggcccggccctcaccatggagtccatgttcgaggac

SEQ ID NO: 254810 - DNA, 100 bp, Homo sapiens
ccacgcaccgttcctcctgatgttatctcattgtgtgatgaatgcagactctgctaccattttggctgtttggatcctcctttgaaaaagtctcctaaac

SEQ ID NO: 254811 - DNA, 136 bp, Homo sapiens
gaacactgaagagccctcccaaaggatttgatacgactgccataaacaaaagctattacaatgtggctggtaaattgtcacctctcacccattgattgtgaagtccttgctggccttctaaccaacaacaagaagc

SEQ ID NO: 254812 - DNA, 87 bp, Homo sapiens
ctgggtccaccaccttcaccaagtcggagcccctgcagagtgtggtggaccacatggccacccaccttggggtgtccccaagcagga

SEQ ID NO: 254813 - DNA, 99 bp, Homo sapiens
attctcccatctgtctcactcaggacctctttgtttttagacatgaattggccataatgagactagcagcctttatgggcattactatgttagttggaa

SEQ ID NO: 254814 - DNA, 75 bp, Homo sapiens
ggagacaggaggctggcaatttcaactaggaggcagtaaattcaggtacgctggggaggaggaggaggaagggag

SEQ ID NO: 254815 - DNA, 100 bp, Homo sapiens
gcttcccgacgctgagggcagccccgtccaggggcttcctgaggctgcggtggtcacgcttcgcccgtgtcctcctcacccgctcctgcgccatcctgcc

SEQ ID NO: 254816 - DNA, 98 bp, Homo sapiens
gagatcacagaaacgtgaggatcaagaagccggactacaaggtcgcctacgtgcagctggcccactgctcagtggagcgtggaggacgaggaggaggc

SEQ ID NO: 254817 - DNA, 100 bp, Homo sapiens
ccgggactccctgtgccttgcttggagctgacgccgacggcaaagactcttggaactgtaacgcccagaaaacctgtcttatctgtcagtgcaagaaaaa

SEQ ID NO: 254818 - DNA, 98 bp, Homo sapiens
gaagaaaccaagtgtccgggattcagacctctctgcggccccaagtgttcgtgcaatcccacagagtattgatgaggaaactgaagtttggagcgatc

SEQ ID NO: 254819 - DNA, 74 bp, Homo sapiens
gccgtccggagccagccaacgagcgtgtaaggagaggatgaggcccgtgaaaaaggcactgaaacagctcgaca

SEQ ID NO: 254820 - DNA, 75 bp, Homo sapiens
agtatgtgcagaaacatatttccgcggaaaacacgaaaggtgggctgggggccctgactggacctggcctggcca

SEQ ID NO: 254821 - DNA, 75 bp, Homo sapiens
ggcgggttgattttctcactttggactggtttttacttcccgacttctggcctatgaaagagacaaccagcacca

SEQ ID NO: 254822 - DNA, 100 bp, Homo sapiens
ggttatatcagttgtctaaaggagaattggtaactaactgcttcaaaaacagatatactttgcaggaagaggatcacctagcccgggtagaagaggcaat

SEQ ID NO: 254823 - DNA, 100 bp, Homo sapiens
aagggtcttcgcatggggagctggttctgaagggcagctggggattggagaattcaaggaaataagtttcacacctaagcgcaagcaaactgtcgagtag

SEQ ID NO: 254824 - DNA, 100 bp, Homo sapiens
agaggcccctgcccaacccggagggaaggagctgactgccgatgcacgggagctgaaaggggagctatactgcctcccatgccatgataaaatgggggtc

SEQ ID NO: 254825 - DNA, 75 bp, Homo sapiens
ccgggaactctgaacctcaataacgagaaatggactcagaactcaaggaagaaattcctgtgcatgaggaattca

SEQ ID NO: 254826 - DNA, 100 bp, Homo sapiens
ctggaacctgacacttggcatgacagtggcaggatggggaagcagaatagcaaactggcccctgaagtgatggaggacctggtgaagagcacagagttta

SEQ ID NO: 254827 - DNA, 100 bp, Homo sapiens
cctcatgaccatgtatattccagagggggatctaaagagccccagaaattcacaaaggtgaccagtatgcactgaagatgaggtttgtggaccatgtgtt

SEQ ID NO: 254828 - DNA, 75 bp, Homo sapiens
actgtgcaggggactctgtcacatttccgttactatggcaatgacggcagggactacaacaacctttcctatgag

SEQ ID NO: 254829 - DNA, 83 bp, Homo sapiens
aggacagttcgctacacagcaatgcatcgagacctgcctagagctggaacgttacctccagagcgagccctgctatgtttcag

SEQ ID NO: 254830 - DNA, 100 bp, Homo sapiens
cagcaaaaatacttcccccacaacacaacctacagcctcagggctttaccgatttgttacaactcaagcaagggccagcagaaattctcttttgacagat

SEQ ID NO: 254831 - DNA, 75 bp, Homo sapiens
tgaaaagttttcttattttccggagatggaagtcacacagcaggagaatttgcgctttggcttgatggagatctc

SEQ ID NO: 254832 - DNA, 82 bp, Homo sapiens
cccaagagcgctacaaggatggggtggtgaccatcggctgtgtgggacagagcgggatgccaccagcttgtccaaagggaag

SEQ ID NO: 254833 - DNA, 75 bp, Homo sapiens
cgcagacgccaaggcccctccggccagggccgggagccgggccggcctagccagagaagcctgtgtctcccaaat

SEQ ID NO: 254834 - DNA, 100 bp, Homo sapiens
gagcttcgcgggctcggtgcaaaaggatgtactgagtaaagatgctggggaatgtgcaatatgccttgaagaattgcagcagggagatactatagcacga

SEQ ID NO: 254835 - DNA, 100 bp, Homo sapiens
aaataagagcagtgattaacgatattgtatcaaatcatgggtggataagatgcaagaagaccttgtcacactggcaaaaacagcaagtggagtcaatcag

SEQ ID NO: 254836 - DNA, 51 bp, Homo sapiens
gctagtggagaagttgaagaaccgaacccagcccttgctgacatctacaca

SEQ ID NO: 254837 - DNA, 74 bp, Homo sapiens
cagcgacagagccaaaatcagagctggaacctgaggagagagatgatgataattccgaagaaggcttccacact

SEQ ID NO: 254838 - DNA, 113 bp, Homo sapiens
ctcgcgctggccggccgggggaagggacccgcacgccgggctttgttgtggaaatcccggttacctggttatacattggctcttcaaagacgttcacctcatcagagaaatcc

SEQ ID NO: 254839 - DNA, 98 bp, Homo sapiens
acgcctttggtccctcggtgtctgcactggctgctggtcaaggcttcagtgtggagtaattgacactttcgaggcaacatcagatgctgacctgaaag

SEQ ID NO: 254840 - DNA, 83 bp, Homo sapiens
ggcacagagagggcctgggagcttgctgcagcttcaggttctgcggggagtgtctccagccctgcctgcaggtgccatccccg

SEQ ID NO: 254841 - DNA, 75 bp, Homo sapiens
tggtaactcccatgtgcattctactgacggaactctccatagagaagaagaaaaccctggaaatgctggaggaga

SEQ ID NO: 254842 - DNA, 75 bp, Homo sapiens
catttggatgatgcatgtaaaagcaacaggcctcagacttttggaaaagaatttgataaacattttgggaaagga

SEQ ID NO: 254843 - DNA, 83 bp, Homo sapiens
tgctgaccgcgggccctgccctgggctggaacgaccctggtgaaatgacaatggatgctctgttggctcgattgaaacttctg

SEQ ID NO: 254844 - DNA, 96 bp, Homo sapiens
taatgcttttcggactcctgatggcatgcctgtaaagaacttgcagttgaaggagtataacacaggaagaggatcacctagcccgggtagaagagg

SEQ ID NO: 254845 - DNA, 100 bp, Homo sapiens
ctgtggctgtgcgacctgcagggactggcagacccgtagctaagacgccaggatttcctggaagcagagaaatggttattatcgcactgagagagataag

SEQ ID NO: 254846 - DNA, 75 bp, Homo sapiens
ggggcaaccactgcgagtactgcttcaccagtgagaaagatcagtctaaagaaaaggagaagaaagtgaaaaaaa

SEQ ID NO: 254847 - DNA, 90 bp, Homo sapiens
aactagcaccagccccaaatttcggagcatgacttcggcaacttcacctatcattctgaaatgggaccccaaaagtttggaaatccggac

SEQ ID NO: 254848 - DNA, 90 bp, Homo sapiens
tggcgaggcagatcctgccccgtggccgcggccgtctcaacctaaaggcagacccagaagagctttttacaaaactagagaaaattggga

SEQ ID NO: 254849 - DNA, 96 bp, Homo sapiens
ccgggccgggcgggacagcgcagggccatggccgaggcggtcgcggctccgacctgcctgaccagtgcacgcccaacccctgcgataggaagggga

SEQ ID NO: 254850 - DNA, 78 bp, Homo sapiens
ggcgccgcccaccgcgcctcgctcgtgctgctcacggccgtgaactgctacagcgtgaaggccgccacccgggtccag

SEQ ID NO: 254851 - DNA, 100 bp, Homo sapiens
aggatcagaaacctggctcctggctcctggctccctactcttctaaggatcgctgtcctgacagaagagcccatgaaacccctgaaggccaccgccacca

SEQ ID NO: 254852 - DNA, 100 bp, Homo sapiens
ttcaaaccactgaggatcagattttgaagagagatatgccaccagcatttattaaggacatctctacaccgttcccatccgggaacagggcaacatctac

SEQ ID NO: 254853 - DNA, 83 bp, Homo sapiens
gccggcgcctcctcggagtccttggggacggagcagcgcgtcgtggggcgagcggcaggtgctgccttcacctgcctggagac

SEQ ID NO: 254854 - DNA, 75 bp, Homo sapiens
gcttagagcgtctggccaagaatcagaggaagtgggtgctggagaatctggtaaaagcaccattgtgaagcagat

SEQ ID NO: 254855 - DNA, 74 bp, Homo sapiens
gtatcgttattccatctctgggcctcatgtccttccaattgagaatgatggaccagatgataaagatgaagagc

SEQ ID NO: 254856 - DNA, 101 bp, Homo sapiens
catcaccgctctgcaggctgttcctcctcgggtgctgttggcagcagcggtctgcacaaaagcaggaaaggctattgtttctcgacagtttgtggaaatga

SEQ ID NO: 254857 - DNA, 75 bp, Homo sapiens
ctccaggacagcatccaggcctcattggacagcattcgagtattctaccttgtaaatactgttatttgtatatac

SEQ ID NO: 254858 - DNA, 75 bp, Homo sapiens
aaagctatcatcctgccaaactccaggctcagatgtcacaggagttgtaagacgttcatcgccgtgttatccttg

SEQ ID NO: 254859 - DNA, 88 bp, Homo sapiens
aaaaacagccaccttcagtatctcagtcctccagtgtttggatattcaggctgctaccatgaggttgaatcagaacaccttgctgctg

SEQ ID NO: 254860 - DNA, 74 bp, Homo sapiens
gcagtttgtcgaacgatgttggactcatagtcactgccagaaagatgccatggacaatattaccaggcagaacc

SEQ ID NO: 254861 - DNA, 101 bp, Homo sapiens
tgtctccacagcaggacagccgaactggaatctggatgagcagctcaagcaggttaaatggaagctgatcggcgttcacatggaatcctcctcacgtagct

SEQ ID NO: 254862 - DNA, 83 bp, Homo sapiens
aactgaagtatctgcccctgtcaaatcattccaggctactgcagcactggggtgtcagttgttggtccgacccagaacgcttc

SEQ ID NO: 254863 - DNA, 138 bp, Homo sapiens
cagatgaggtgatggcaacggccaacttcggcaagatccagatcgggatttacgtggagatcaagcgcagcgatggtgaatccgccatactacatcccgctggttgagctggtcccccacccggagacggcccctacg

SEQ ID NO: 254864 - DNA, 75 bp, Homo sapiens
agagcttgtgtagcgtcagatccttgagtgataaaggagtagaggtcacgcaatatttaaactcacgtatctaag

SEQ ID NO: 254865 - DNA, 100 bp, Homo sapiens
taaaggccaaatacccaagcctaggacaaaagcctggaggctccgacttcctcatgaagagactccagaaagggggctaccagggcatggtggacggagg

SEQ ID NO: 254866 - DNA, 80 bp, Homo sapiens
ctatcaggggaagatatgcatcagttccatcgagccattactacaggcatccgtgtcattctggaccttactcccaacta

SEQ ID NO: 254867 - DNA, 75 bp, Homo sapiens
gacgcacggccaagaggaaggccaagtcgagggccaagacgaagacaggtctcgctctcacccaggctggagtgc

SEQ ID NO: 254868 - DNA, 50 bp, Homo sapiens
gcgcgaatatcgtcatcgttagaaggtgtgttaccgagtggaatgggcca

SEQ ID NO: 254869 - DNA, 75 bp, Homo sapiens
caacagtgcccctttgatcaatggacttgggaccctgctgggatctttgagcttgtggaggtggtcggcaatgga

SEQ ID NO: 254870 - DNA, 98 bp, Homo sapiens
tgcagaagtccagggaatggctggcccagcagctgagatcacagcatggaggagcaggacttggagcgaaggttcgagctgctgagccgcgagctgcg

SEQ ID NO: 254871 - DNA, 83 bp, Homo sapiens
ctcagtctctgtcagaggaagatcccttgcatcagaggctccttgaaatgctagatacagagaaggaactgttaaaagaaaaa

SEQ ID NO: 254872 - DNA, 82 bp, Homo sapiens
gccgagtgggaggatggcggaacttcctgggtctgcaggtccagccggctggcaccctccatgtacccaggggagattccag

SEQ ID NO: 254873 - DNA, 74 bp, Homo sapiens
agcaaatttaagaaggttgtgcagatagtctgaaggaggaaccctaaggactctgcaatatgaataattcccta

SEQ ID NO: 254874 - DNA, 98 bp, Homo sapiens
aagtgtctggagcccgacggtctctacaataatggaggggaaagttccagtcgcagcgctgagaagcgatcagctgaagaagaagctgccgacctccc

SEQ ID NO: 254875 - DNA, 82 bp, Homo sapiens
tcagcaagcaactttgagctgcacgttgcacaagctccataatgggagaagtaaagaacaaagacttaaggaacagcttggc

SEQ ID NO: 254876 - DNA, 51 bp, Homo sapiens
aaatccttaaaagagtcttaacggtcttaaagaaagtgcagaagagatggt

SEQ ID NO: 254877 - DNA, 98 bp, Homo sapiens
gtatatgcagaggaggtcccacaggctcctgccctggactaccgagacagaatgttgctgcgggatgtaaaagctcttaccctccactatgaccgcta

SEQ ID NO: 254878 - DNA, 75 bp, Homo sapiens
tgccgctgccgctgccgcacctccgtagctgactcgcgccgtgccgtccctgcagtgacaccgaggtgctcctag

SEQ ID NO: 254879 - DNA, 83 bp, Homo sapiens
catttggaattctgcaaacagaactagtaacaaagggccgagtgccatatccagattggtccagaaaagggcgtggtgcacct

SEQ ID NO: 254880 - DNA, 89 bp, Homo sapiens
cgcccatctcacagccggttggcgctcgcggagggaccgacgtcatggttcggtgcctcaagctgctgaaggaatttaaacggaatgac

SEQ ID NO: 254881 - DNA, 100 bp, Homo sapiens
actcgggaacggtgatcggggaagcatggggatccgggagaagcacccacaaaactagcatcctcctggaggagctcggattcactttataggaacagct

SEQ ID NO: 254882 - DNA, 100 bp, Homo sapiens
agatgtggcagaagaacaagaagttgagaccgagaatgtggaaacagtgattacagtggcgagatcttgaacaactgctgcgtcatggagtaccaccaag

SEQ ID NO: 254883 - DNA, 74 bp, Homo sapiens
aaattaatgacaataatggatagtatgaatgatcaaggttacgccaaggaggccctgaatctggcgcagatgca

SEQ ID NO: 254884 - DNA, 98 bp, Homo sapiens
ggcggtgactggctgcggcgggcccgccccccgggttctccgcccccgccgccgccattacggagctcccagtgattcgacggaggcgccttgcacga

SEQ ID NO: 254885 - DNA, 50 bp, Homo sapiens
ctcaggaccaggcaccttctgtggaagatggaatcttgctctgtcaccca

SEQ ID NO: 254886 - DNA, 82 bp, Homo sapiens
tctagttctgaatctgatctccaggtatctctcctctttgtcacaacctctttgccctgtatgacgagaacaccaagctctg

SEQ ID NO: 254887 - DNA, 75 bp, Homo sapiens
aagcaagctgaatggaggccagatagtaccatgatagctgtatcaatcaatgtccgagttaccaccatggatgca

SEQ ID NO: 254888 - DNA, 50 bp, Homo sapiens
tacagggaagtgcatcacatgtcagaaaatatttacaccagcagctccag

SEQ ID NO: 254889 - DNA, 100 bp, Homo sapiens
catgagagtcgaggtctacggatgttcctataaaaatatttacaccagcagctccagttcataccaataaagaagatcctgctacccaaactaatttggg

SEQ ID NO: 254890 - DNA, 82 bp, Homo sapiens
tgtttatgataagaatgttttacaaagagatctccgtatagaatatgatgctttggcaaaagtgattcagcaccatccagac

SEQ ID NO: 254891 - DNA, 90 bp, Homo sapiens
atccagagtttttggagctgtacagggtgatttgtggctcccgagtgagggttgaactatcgacaggcatgcctcggagatcacgttttg

SEQ ID NO: 254892 - DNA, 100 bp, Homo sapiens
ctacttccagccacgctgcaactcattgacacctatgcatcgttcaccagaatatcctccgaatcctaaatctagagctccaaggatgctggtcattaag

SEQ ID NO: 254893 - DNA, 100 bp, Homo sapiens
aaaggaggattgaggaggatcagatcaataatggaggcaatgatcgagaagatagagtgggacacatggacctgtgtcctggggcccacctgtgagggaa

SEQ ID NO: 254894 - DNA, 83 bp, Homo sapiens
cggacgggttgtgcctggaggtggaggggaagacaatgcagatcttcgtgaagactctgactggtaagaccatcaccctcgag

SEQ ID NO: 254895 - DNA, 100 bp, Homo sapiens
catgctgggttctgctgagttagctgaggaggtcaatttaaatggttctggcaaactgctcaaggcaactcatgcagcaattccagaaccccgacttccc

SEQ ID NO: 254896 - DNA, 98 bp, Homo sapiens
tatttgctaatgacagggaatcagttgaaaatttggccaaggaaagcgctctagcgagtgctgatttagaagaagaaattcaccagaaacaagggcag

SEQ ID NO: 254897 - DNA, 96 bp, Homo sapiens
cacttctggatgttggttctctttgtcattttcaacagtctgcagacgcccactattgcttggttctacttcctttatcccgattggccgtcggac

SEQ ID NO: 254898 - DNA, 100 bp, Homo sapiens
gtctagaagatgacgaagacatgacacttacaagatggacagggatgataattgggcctccaagaattttgcctgcctgagctcctctagtagtggccac

SEQ ID NO: 254899 - DNA, 74 bp, Homo sapiens
tgccgccgcgagtctgccatcgtccaaggaggtggcagggtaagcaggaagagaacgacgtggtggagaagctg

SEQ ID NO: 254900 - DNA, 100 bp, Homo sapiens
aagtacagttctttacagaaaacacctgtttggaaaggcaggaatacaagctctgctgtggaaatgatataattgaccctgcaatcctgcgcccgggccg

SEQ ID NO: 254901 - DNA, 50 bp, Homo sapiens
atcctgctggtcagcactgcggctgctccctgatggctcggagatcccgc

SEQ ID NO: 254902 - DNA, 90 bp, Homo sapiens
caggaaggagggtggaagtatggtttccaggcgtgaacctgtctgggggccagaagcagcgcgtgagcctggcccgggccgtgtactcca

SEQ ID NO: 254903 - DNA, 80 bp, Homo sapiens
tctgctcctgtcgccttcgcctcctaatccctagccactatgcccttcagatatttcaacactcctctcagcatcctcca

SEQ ID NO: 254904 - DNA, 90 bp, Homo sapiens
acaaactgccctacaaagtcgataaagactatttcctgattgtgattcagaatccaaccgaataagccactctcttggctccctgtgtca

SEQ ID NO: 254905 - DNA, 74 bp, Homo sapiens
cgataatgcagttcttattactaggagctggtcaggctcaccatcgagaagcagggacgtccgtctccgacgag

SEQ ID NO: 254906 - DNA, 50 bp, Homo sapiens
ttgaaatgaagctggacttggaggcgctcagggaagcaacttcctctcca

SEQ ID NO: 254907 - DNA, 83 bp, Homo sapiens
ccgccgccgccgccgccaccatggtgttggagagcacaatggctgaacaagtccttcctcaggctttgtatttgagcaatatg

SEQ ID NO: 254908 - DNA, 90 bp, Homo sapiens
cacaataccaactaaacagacaggatgcaccacatctagtaaagacatctttccaggaacagcgtgaggaggacagaagcacccaacagg

SEQ ID NO: 254909 - DNA, 100 bp, Homo sapiens
aggcaggagctcatcgatctccggggaccggtatattcgaattgttgggactcacaacacagtgaacaagatttttcacattgtggcttttgaatgtatg

SEQ ID NO: 254910 - DNA, 75 bp, Homo sapiens
cggcgtccccggcgcgaagaggctggactcggattcgttgcctgaggttctgggccggagaaggggcgacgttcg

SEQ ID NO: 254911 - DNA, 75 bp, Homo sapiens
agaggatccggcgccgaatcactgactggcacaggtgttggggtggattctccacagttttcctcgtgcgtactc

SEQ ID NO: 254912 - DNA, 75 bp, Homo sapiens
ggaaatgcttcgaaataatgaatccaaaatccttcatttacaggacagagcgggatgccaccagcttgtccaaag

SEQ ID NO: 254913 - DNA, 50 bp, Homo sapiens
gattgcccccgggtctcagcaggtatgccattgcattggccttaagggaa

SEQ ID NO: 254914 - DNA, 98 bp, Homo sapiens
aatgaagcctgtgagtggacacccttttctcaaaaagagcttacgatgtgaagaacttcatcttcatgcagaaaatctgtctaggcgggtctgggagc

SEQ ID NO: 254915 - DNA, 75 bp, Homo sapiens
cgtgaacatagctttaataggtgatttagccctgcggaattgttttctcacctccgacttaaatgtgaaagtggg

SEQ ID NO: 254916 - DNA, 95 bp, Homo sapiens
ggccacttgtggtcgccgggagttgatcatggccttgccaggttggtgacagtatattgtgagcatggtcataaagctgccaaaatcaaccccct

SEQ ID NO: 254917 - DNA, 129 bp, Homo sapiens
gtcatacattcagctgatgcatttgcacctgtggcttatctacgctttttagaattgcacttggaggacaagaaaactgcccttcaattctaatctcacctcaaaaacagaatgaggaaactatttctg

SEQ ID NO: 254918 - DNA, 90 bp, Homo sapiens
ctcaatgtacttaaatcagaacaggcaaacaatttacattttcttatgaaaatgaagtctgcaaacaagattactttattaaatcaccac

SEQ ID NO: 254919 - DNA, 100 bp, Homo sapiens
agaggatctggtgtaccaggcgaagctggccgagcaggctgagcgatacgacgtcatacacgtggacctaactgcaccagtagcttttctgagaatactt

SEQ ID NO: 254920 - DNA, 100 bp, Homo sapiens
gaaaaaaagatggagccctgcatatgattggctctttagctgaaatacttctgaagttcatcaatggtgctaaggaaatttgctatgctcttcgagctga

SEQ ID NO: 254921 - DNA, 51 bp, Homo sapiens
tacggagcacgagaaatacggcgtgggtctcctaaaaacccagaacagaag

SEQ ID NO: 254922 - DNA, 75 bp, Homo sapiens
atcccagctctttgtggagggcctggtacaagggaatgtcacaagcacaaacatatgcagtaatgtcacctcaaa

SEQ ID NO: 254923 - DNA, 100 bp, Homo sapiens
agaaataaaaatgacttcccattatgtgattgccatctttgccctgatgagctcctgtttagccactgcagctccataatgggagaagtaaagaacaaag

SEQ ID NO: 254924 - DNA, 76 bp, Homo sapiens
gtttgggctacggttgttgttggcgactgtgcttcaagcgatttctcactatgtgcaatagacactttggcagtgt

SEQ ID NO: 254925 - DNA, 50 bp, Homo sapiens
gccgaccaccatcccggtcaccacgagacaggcgagggcgtgaacgatgt

SEQ ID NO: 254926 - DNA, 100 bp, Homo sapiens
gggtgaagtggcaggaggaggaggaggggctccggctggtctgtggtgagaattatatccagatcgagagacagaagattctgaaagggttcaatgaaat

SEQ ID NO: 254927 - DNA, 100 bp, Homo sapiens
cagggatgacaggtgtcgtctctttgagtatggccaggggttactggacctggaggacgatggggacttgatcaccgtggagtttgacgacggagacacg

SEQ ID NO: 254928 - DNA, 100 bp, Homo sapiens
aataacaacctgttacgagttctaccttttgagctgggaaaactgtttcagttgcagactttaggcctgaaaggaggaaatgagtctcaaccagacagcc

SEQ ID NO: 254929 - DNA, 87 bp, Homo sapiens
ttatgaggatggctgcaagactgtcgacctaaagcctgactggggcaaggcatccgtgtcattctggaccttactcccaactaccgg

SEQ ID NO: 254930 - DNA, 74 bp, Homo sapiens
ttctaccaggcctggtgctggcctcctgtgatgggccttcgcactcccagaaaactacccctgagtgtggtccc

SEQ ID NO: 254931 - DNA, 86 bp, Homo sapiens
tgcctgaatacatgatttaaacaagagatttccacagaaggtgcagcggaactgctgcctgacgctctgcaacttcagcatccccg

SEQ ID NO: 254932 - DNA, 90 bp, Homo sapiens
aaaaggctcagaaagatggatttttgcatgagacgcttctggacagcacttttccagccattaactccaggctctcgagaatttgaagat

SEQ ID NO: 254933 - DNA, 82 bp, Homo sapiens
gagcgggtgctgcaggcgccgccgccggacgtcggcaacggagaagaggctgaggggatctggcggtggagcgctaggatca

SEQ ID NO: 254934 - DNA, 100 bp, Homo sapiens
cgggtgttcgcggtcggccgccaccaggtcaccctggaagagtcgctggccgaaggtcctcagaatggttggaatgaccctccagctttgaacagagtac

SEQ ID NO: 254935 - DNA, 100 bp, Homo sapiens
aggtggcccccaccacccggaggagcagctcctgcccctgtccgggggatgactgattctcctccgccagcttcggaaccaaaaagaagcttcccagagc

SEQ ID NO: 254936 - DNA, 75 bp, Homo sapiens
acaaagactatggtttaatgaaaatagatgaaccaagcactccttaccatagaactaaagatgactcagagccat

SEQ ID NO: 254937 - DNA, 103 bp, Homo sapiens
gccctgccgaggagctgaaggccttcagagtccttggggtgattgacaaggtgtctgcttttggggcagagttttcatcggaggcatgcagagagttaggctt

SEQ ID NO: 254938 - DNA, 100 bp, Homo sapiens
ttttggcccaggcacccggctgacagtgctcggtgctggagaatctggtaaaagcaccattgtgaagcagatgaggatcctgcatgttaatgggtttaat

SEQ ID NO: 254939 - DNA, 75 bp, Homo sapiens
gtggaatccagggtacagataggagataccatgtttgtgtggaagtgccccgtgtttgctatgccgatgctgtcc

SEQ ID NO: 254940 - DNA, 96 bp, Homo sapiens
ggatatacagcagcgaggaggggaagagagtgccggtggtggtgtgcacattgagccccggtatagacagttcccccagctgaccagatcccaggt

SEQ ID NO: 254941 - DNA, 82 bp, Homo sapiens
ggcggctgaggaaagcaggaggaggtggcggcggcgggaagatgaggctactcacagtcgaactacaactccccggggtccg

SEQ ID NO: 254942 - DNA, 98 bp, Homo sapiens
gccaggacgctggttcatacactccaagaatcggcaaggttggaaaccagaagcgtgttgttggtgtgcttttggggtcatggcaaaagaaagtactt

SEQ ID NO: 254943 - DNA, 80 bp, Homo sapiens
gaacagtttgaggacctcctggtgcgcatcctgctgctggctgcccttgtctcctttataaagccaccaatccttccaac

SEQ ID NO: 254944 - DNA, 99 bp, Homo sapiens
gccagatgtgggagacacgccaaagctcccaagtgggggcttatttggcctccccaggatggactggagcatcagtagtgcccgggtttatcacaggac

SEQ ID NO: 254945 - DNA, 75 bp, Homo sapiens
aaacactgatctcaaacagcaacggaacctgtgtacttgaggattaaagcaaggagagccaatcatgactggcaa

SEQ ID NO: 254946 - DNA, 83 bp, Homo sapiens
ccctacagactttcctgcgtggaagcgtttgctgccaccttctgcatcgtagcaaattgtggctactaatttgccccctgaag

SEQ ID NO: 254947 - DNA, 74 bp, Homo sapiens
gacgcgctcatctgctggagcccgaacccccagtcggatcttcaggcccaggatagatgtcatagaattggtca

SEQ ID NO: 254948 - DNA, 88 bp, Homo sapiens
gagctgacgctcgtggggctgcagtactcgggcaagaccaccttcgtcaatgtcatcgcggttgtttcccagggggagtgcattgggt

SEQ ID NO: 254949 - DNA, 75 bp, Homo sapiens
gaacgattcaacccgggggagctcagagctaaagttgcagacaagatccagctcatcaataatatgctggacaaa

SEQ ID NO: 254950 - DNA, 87 bp, Homo sapiens
caggacaatcgcactttataccacctgcgattactgtgattttacaacgagatgctgctctccatagggatgctcatgctgtcagcc

SEQ ID NO: 254951 - DNA, 96 bp, Homo sapiens
ctactttctggatctgtgcttgtgaaaggctccatggtcttgcctccttgcaggtgatctgcaactctttcaccatctgtaatgcggagatgcagg

SEQ ID NO: 254952 - DNA, 82 bp, Homo sapiens
cccgcgtccgaggctcgcgggcggcgggcccgggtcgcgtggggcaggcagtggcgctgcgggccaaggccttcggcttcaa

SEQ ID NO: 254953 - DNA, 50 bp, Homo sapiens
taccatcttattaattcactctggagtgaacatggaaaggtttgcagaag

SEQ ID NO: 254954 - DNA, 82 bp, Homo sapiens
gttgttggcgtgtccctgcagcgaaggatcctggacatggatttgattgacatactttggaggcaagatatagatcttggag

SEQ ID NO: 254955 - DNA, 101 bp, Homo sapiens
ccccccaggtggctgccaggggcgtgccagtggctgaatttaacacggagaccaccccagctacgaacagattcaggttttcctatcagtgccagacctgc

SEQ ID NO: 254956 - DNA, 82 bp, Homo sapiens
tcggcctctgccggagaaacaggtcactatcatatgacaaaggctttgccgcagttcatcttcctccctgtgtactttccat

SEQ ID NO: 254957 - DNA, 75 bp, Homo sapiens
ttgagctggtggaagtggttggaaatggcacctatggacaagtctataaggaatacaggagtttccagaaaatat

SEQ ID NO: 254958 - DNA, 100 bp, Homo sapiens
gcccttctggaaggaggcaacaccaccatccagtgatgtcttggcattgcccattttcaagcaggaagattccagccttccattggatggtgaaacagag

SEQ ID NO: 254959 - DNA, 100 bp, Homo sapiens
acctacatggtccccaagccagaagaaatcaacctgctcaccggggagtctgatacacagcatgaacttgctgtgcataaaaagaaaattgaagaagtcg

SEQ ID NO: 254960 - DNA, 141 bp, Homo sapiens
cagaggagttggagttgctactaaaaagagaggtgcctttatctgatgatgatgaaagttacacaggatgacagtgccgatttgaggtgccagctccagtttgccaaagaggaagccttcctgatgcgcaaaaagatggcc

SEQ ID NO: 254961 - DNA, 88 bp, Homo sapiens
tttggttgaagttggagaagtatccaatagggatattgtagaaactgtctttaacctgttaatcagctgtgttcagcgaatacttatg

SEQ ID NO: 254962 - DNA, 100 bp, Homo sapiens
tactcggataccttagagagcacgcccatgctggagaaggagaagtttccgcaggactacttccccgagacctgcgaccgcatcaagcagtccgccagcg

SEQ ID NO: 254963 - DNA, 73 bp, Homo sapiens
ctgaatccagaaaccagcacagactgtgacgaataccctgaagatgtagctcctactgttggattttcaaaaa

SEQ ID NO: 254964 - DNA, 76 bp, Homo sapiens
gagaagaattcagaagaaacaaaagtgccaccgaagaggattgccccctgtgggtcactttctcagtcattttgag

SEQ ID NO: 254965 - DNA, 74 bp, Homo sapiens
ggattccaagtaactcttatttgtttgttgcatattctaaggacccagacataggcttggtggcccgtctcttg

SEQ ID NO: 254966 - DNA, 75 bp, Homo sapiens
gtttaaacagccaaaacagttcattcatattcagcgtaacatttgtcgatcacccattgcagaagcagttttcag

SEQ ID NO: 254967 - DNA, 49 bp, Homo sapiens
cttgatggtgtggtctactataactccgcccagttggaagcaaggcgag

SEQ ID NO: 254968 - DNA, 100 bp, Homo sapiens
gtttaatttcttatatagagacctattcactgcaatgattattgtgagttccttcggggttactcctgcagtaggtggactatcatctgggacagttggg

SEQ ID NO: 254969 - DNA, 100 bp, Homo sapiens
gcgtggagatatggcgcaactgcggcgcctggcacacccataccgagcagcggtcctgagggccatggagagggtcctgagcagtcgcgccagtgagctg

SEQ ID NO: 254970 - DNA, 100 bp, Homo sapiens
gatgcgaaggagctgcagcatccagagccaaggtgaagaagggggtgaacatcctgagtgctcagacccgtgagccccggcagtggggcgtcaagcagga

SEQ ID NO: 254971 - DNA, 83 bp, Homo sapiens
acagcctttcctacccagtgcagatcgcccggacgcacacgtaagactttgaccccgacgcaggcttcagtgattgccgcgga

SEQ ID NO: 254972 - DNA, 75 bp, Homo sapiens
ggatatggagcctttggtgttgtctgattgcaacacctgctcggtataccgtgactttgggaggaacatctgtca

SEQ ID NO: 254973 - DNA, 100 bp, Homo sapiens
cggcaaatggcggacttcgacacctacgacgatcgggcctacagcagcttcggcggcggcagagggttgtctttgaagcttggtgatgctggaaacccca

SEQ ID NO: 254974 - DNA, 50 bp, Homo sapiens
agcgccttcatcctggggctgcgatgaaccagacgtcctgggtcctctcc

SEQ ID NO: 254975 - DNA, 74 bp, Homo sapiens
tgggaaaccacgcaggcaaacgagaattaaatgccgagaaggccagtacgggaactgctcgcagaaagaagaag

SEQ ID NO: 254976 - DNA, 100 bp, Homo sapiens
cggagccgaaacaccggtaggagcggggaggttgaaatcacaaagattagacacctttttagataggtgttcttcagcaccactgacaacacggttctga

SEQ ID NO: 254977 - DNA, 90 bp, Homo sapiens
ggagatgaagggcaagggccaaaatgatgggatgcttgaagatggaaagaaatttgattcctcccgggacagaaacaagccctttaagtt

SEQ ID NO: 254978 - DNA, 95 bp, Homo sapiens
gagcactgtgagttagtggtggacctgtttgtgcgcacagtgctggtctgcctgacatgtgcagattcactttataggaacagcttcagcttcag

SEQ ID NO: 254979 - DNA, 75 bp, Homo sapiens
gtgacccagaccctctcctttccctttgagaccgtgaagagaaagatgcagatggcccactgcgtgaccttggtt

SEQ ID NO: 254980 - DNA, 51 bp, Homo sapiens
ttccgggagactggagtcgaaggccgtgagtcctcttttatccaaacataa

SEQ ID NO: 254981 - DNA, 75 bp, Homo sapiens
cttacatctgccagagctgtgggaaaggcttctccagagcaccgcaagaactggaaaacacacccctctctgtct

SEQ ID NO: 254982 - DNA, 100 bp, Homo sapiens
tcgcgggagagcgtcgtgcacgcgggccagaggcgatgtgtatatctcatgattgatatggagaaactagtcatgggccaaaggtcaagatacttctctg

SEQ ID NO: 254983 - DNA, 100 bp, Homo sapiens
caaaggcagactgagcgccagagaggacgtttccaactcaaagtgctggagaatctggtaaaagcaccattgtgaagcagatgaggatcctgcatgttaa

SEQ ID NO: 254984 - DNA, 50 bp, Homo sapiens
ggattccaagtaactcttatttgctccctccttgggcctgtggattcata

SEQ ID NO: 254985 - DNA, 75 bp, Homo sapiens
ctacatttggagcctggacacgcagtacagcaagcacccccccaggcagcagcagcagttttcatctctggatga

SEQ ID NO: 254986 - DNA, 75 bp, Homo sapiens
ggatcattgcctccctttacatggaaaggtggtgaaaactattggcttgagggaagtttggttctttggtctgca

SEQ ID NO: 254987 - DNA, 53 bp, Homo sapiens
ccctgattgaccggagacgcaccccagtgaattttgaagattgcaccggtcga

SEQ ID NO: 254988 - DNA, 139 bp, Homo sapiens
tcagtgggaacaagactacctcctcctttaccccagaacctcctttacacagtatcagaacggttaccatccattgacccatcaggcagctccccatcttcctcttctgctcctctggcaagtttttccggcataccag

SEQ ID NO: 254989 - DNA, 80 bp, Homo sapiens
gcaagaccagtccatttggggaaatccttcggatggtgaactcattagaaattgactttgaagatgtgattgcagaacca

SEQ ID NO: 254990 - DNA, 100 bp, Homo sapiens
accatgttagataaacttgtggatggacttgctacctcttgggtgaactctagcaattacaaggtgttggctgaactcaacgccatgcttggggcaacca

SEQ ID NO: 254991 - DNA, 109 bp, Homo sapiens
ctacatcaacaaccttaggcggcagctggagactctgggccaggagaagctgaagctggaggctgaaaggttccctgagtcgaggtgactggtacaagacaaaggagat

SEQ ID NO: 254992 - DNA, 100 bp, Homo sapiens
cgactatttggcaagaagcagatgcgcattttgatggggtgtgtttatggaagacaaactgagatgtgctgtcccagccttaggccctggcagtacgcct

SEQ ID NO: 254993 - DNA, 75 bp, Homo sapiens
cgaggatgcaccttcccctgccttggaaaggagaatggtgttgaacgcgtgtgtcctgagagcctgctgcagtcc

SEQ ID NO: 254994 - DNA, 51 bp, Homo sapiens
tgaaaggagtgcttatagaatggtgcctccgaagaagccctaagtgccgtg

SEQ ID NO: 254995 - DNA, 83 bp, Homo sapiens
atccaccagctgcaggctgagcgcgcgcagggcttccgccgactggaggagtagatcatgccactaatcgtacccagtttggg

SEQ ID NO: 254996 - DNA, 96 bp, Homo sapiens
cgatgaaaagagcaccttgaagcaggaggccactgtctgcagctcccgtgaagatgtccactccagacccacccctgggcggaactcctcggccag

SEQ ID NO: 254997 - DNA, 98 bp, Homo sapiens
ccggcgggagcgcgaacgagcgacggcggaacccgtgggcctgtggactgcagcctcggcggtcagcaggaaattgacaatggcccttcagctatgct

SEQ ID NO: 254998 - DNA, 75 bp, Homo sapiens
gggagaaggactattggacctgctttgaggtcaacgagagggaggaggcaggttggttcctgtataccttgggcc

SEQ ID NO: 254999 - DNA, 75 bp, Homo sapiens
cattggtaaattgatcaggatttttggcctaccctccaaagaaaagttttatgtgctgaaagagttggccagatg

SEQ ID NO: 255000 - DNA, 75 bp, Homo sapiens
gagggaagacacgcggaaacaggctgaagtggagagatcgcctgagcccaggaggtcaaggctacagtgagccgt

SEQ ID NO: 255001 - DNA, 75 bp, Homo sapiens
accagaagctgtgggaggtgtattccggaaaagctttgacctggaaatactacgcaaaaaaaattctttactacc

SEQ ID NO: 255002 - DNA, 80 bp, Homo sapiens
ccatctcctccgacttcgctgtcaaaatccgtgagctggacgagtacttggctgacctgtaccactttgttaccaaggag

SEQ ID NO: 255003 - DNA, 75 bp, Homo sapiens
tctttacagaggaatagtctacaaaggaagacttgtaacctggagaagaggataccatggccaagcggaatacag

SEQ ID NO: 255004 - DNA, 90 bp, Homo sapiens
acccccggaccgaccatgggcagatcccagtaatctataaaaccagcctcctgcatctccagccgcggcagatgaccatttatctcccag

SEQ ID NO: 255005 - DNA, 100 bp, Homo sapiens
ccagaacaccccgagatgagaggagaagagcccagcacaacgaagttcccagtgacctgacagcagaggagcgtcaagaactggagaacatccgacggag

SEQ ID NO: 255006 - DNA, 99 bp, Homo sapiens
ggcgcctaaagtctgcgaggaggaagtcgcctctgtgctcgtgagtccagggatctaaggacagaactgtaccgctctctttttggccagctccaccct

SEQ ID NO: 255007 - DNA, 100 bp, Homo sapiens
tgagacaataaagcttctcctttgggttgtactcatagattgtgtaggcgttggtcttctgatagcaactttaatgtggactcagcccaaaaccatgttt

SEQ ID NO: 255008 - DNA, 100 bp, Homo sapiens
gcgaagccttgggtttctttcttaaaggactgatttttagaactccacatttgaggttgcagtattttacagagctagcccaaggcacaagatgaaaatt

SEQ ID NO: 255009 - DNA, 101 bp, Homo sapiens
tgcgtcccgccaccggccgcttctgtcctcgagtttgtgaagatgatgtctcgctgaggaggtcctggaagctccagaccctctccacctggtcaacatgg

SEQ ID NO: 255010 - DNA, 100 bp, Homo sapiens
aaatggattcagtttgcatctctccctcctttaaacagcttctccgggtctcagcatggattgggccgagcctatgccctggcttttgcagaaagaggag

SEQ ID NO: 255011 - DNA, 51 bp, Homo sapiens
gcgaggagctgagggaccctgttctagcacagacggcaacagcgccggaca

SEQ ID NO: 255012 - DNA, 100 bp, Homo sapiens
tcaagatgaatatgaccctatggaagcagaagaagctgaggatgaagaagatggtgttggagcgggccggagagaagtagagtgggctgcgaggagaagg

SEQ ID NO: 255013 - DNA, 75 bp, Homo sapiens
ctgaactacaaagatttgaacgtcctgcattcagctcttttcacatttgatttgattgaaagtgttctagctcga

SEQ ID NO: 255014 - DNA, 100 bp, Homo sapiens
acctgtttttccagctcacccactgccagcagagtacctccctgcacttggctattcaaaacgggtccatctgatgaatcctatggttccaggattaaca

SEQ ID NO: 255015 - DNA, 101 bp, Homo sapiens
aagctaaagacgggccattttccagacctcatccagggacctcaggatggaaaccagcagcctgcaccgcccgagaaggtcggctgggtccggaaattctg

SEQ ID NO: 255016 - DNA, 75 bp, Homo sapiens
tcatcgtggagaacccggacgggactctcaagtgaccattgtgaggtagatattttgttctaattttccagatga

SEQ ID NO: 255017 - DNA, 100 bp, Homo sapiens
gccaaacttgtccctcgggcccatcgactccagcgtgctctctcggaataagacagaggtcaaaatgcagatcttcgtgaaaacccttaccggcaagacc

SEQ ID NO: 255018 - DNA, 75 bp, Homo sapiens
aagggggtggttgtcccaggaggcagctgctgacaggtttgcagacaagccaggatgcacgcttttatgctctgt

SEQ ID NO: 255019 - DNA, 100 bp, Homo sapiens
ctcgagcggctgctggacgaagctaccaggtgcagggtactaaaacatttaaaggtagaaaatgcaccaattgtaaaccgatttgactatgcacagtgca

SEQ ID NO: 255020 - DNA, 75 bp, Homo sapiens
tggccaaggctggcttggtggatgactttgagaagaaggtttcctatcctgggagcaggagagtgtgcctatttg

SEQ ID NO: 255021 - DNA, 98 bp, Homo sapiens
ggtgtcccagctggattcggtgcgggtctggctgggcaagcactacaagaaggcggcttacagggagaacacagttggcctccaccgtttctgcccca

SEQ ID NO: 255022 - DNA, 75 bp, Homo sapiens
ccttctcaaccttgtgggatgtgaaaactctgttactgaaggaattgaatgatctggcacgggaccctccagcac

SEQ ID NO: 255023 - DNA, 101 bp, Homo sapiens
ccgtgaactcagtactgatgcccagtggggcattcgtcttggtaaacttggtgtattatacctgaagaaccttagccctcgggtgactgaaagagatcttg

SEQ ID NO: 255024 - DNA, 82 bp, Homo sapiens
agcgagtaaagtcttggacagacttaaaccagttataggggtaaacactgatccagaacggaaagttcacatccttggctcc

SEQ ID NO: 255025 - DNA, 83 bp, Homo sapiens
agacgcccctgctaacgggaatgctgttgtgaactaaaggccgacaaagattatcactttaaggtggataatgatgaaaatga

SEQ ID NO: 255026 - DNA, 75 bp, Homo sapiens
ccgcggcgggaggagcctgttcccctgagcatcacaggacatggccccctcagccacctagctggggcccatcta

SEQ ID NO: 255027 - DNA, 100 bp, Homo sapiens
aaaaatgtaaagacagagaaaggcatagacgggaggatagcaaacaagctcaatttttagccttggcagtagtatactttatctctgttcttatggtctc

SEQ ID NO: 255028 - DNA, 98 bp, Homo sapiens
actattaaatctatgaaagaagaaggaattacttttcctccagcaggttctcagggtaagggactgttctgaagaacctttccatttagtgatcaaga

SEQ ID NO: 255029 - DNA, 100 bp, Homo sapiens
ccaagagtatgaggagctggtgtctgtgtcagatttgtagctgcgggtcccatctgatgccgaggctgaaggagtctcgctcccacgagtccctgctcag

SEQ ID NO: 255030 - DNA, 50 bp, Homo sapiens
ggaggaagtgtcagcgctactgccgcagatgcagacagacatgctgaact

SEQ ID NO: 255031 - DNA, 100 bp, Homo sapiens
ctgaaacagaaattctggaacacctatatgttgttctggagaatcatgtagcgacagatgaagacgaacctgctttgaaatgccagcgactagaaatcaa

SEQ ID NO: 255032 - DNA, 74 bp, Homo sapiens
aagtgtataactacaatcacctaatgcccacaaggaagctcttcgtgggcggtcttgactggagcacgacccaa

SEQ ID NO: 255033 - DNA, 100 bp, Homo sapiens
ggaccccaacgaggtgtgggagatcgtgggcgagctgggcgacggcgccttcggcaaggtttacaaggttttgcacactagggaccaagaagccctcggg

SEQ ID NO: 255034 - DNA, 100 bp, Homo sapiens
ccttctttgaagccagagaaaataatgcagtgtatgccttcttaggcttgacagccccacctggttcaaagtcaggatttgcatgaagatgtcgaagaag

SEQ ID NO: 255035 - DNA, 100 bp, Homo sapiens
tgcaactcgagccaagaaagtgaagatggccaccaaatcatgccccgagtgcgaccaacagtgaagaaacaactggtgacatcagtgattccatggattt

SEQ ID NO: 255036 - DNA, 100 bp, Homo sapiens
cggggccgagcgccgcgcgtcccgagcatggcaggctccctgcctccctgcgtggtggactgtggcaccgggtttttcgttggaatatacgttgcacatt

SEQ ID NO: 255037 - DNA, 112 bp, Homo sapiens
acatatcaggcatttcgggaatgtacactggagaccacagttcatgccagcggctggaataaggtttattaacaaaactaggatacccaagactgaagaaacaagaagaaac

SEQ ID NO: 255038 - DNA, 75 bp, Homo sapiens
ggaaattaaggaatgcaattctgccaccatgatggaaggagctataccaccagtcctatgactgcgtctgcgtca

SEQ ID NO: 255039 - DNA, 82 bp, Homo sapiens
tggtgaaccctgaagtcggtgtctgctgcgttcacggcaggattcggttagcaccctggaggagaagaggttctgctggaac

SEQ ID NO: 255040 - DNA, 80 bp, Homo sapiens
aatgctgtggctcttcttccagagaatgacacaggtgaaagatgatcttccaaaacccaagactactgaagtaattagga

SEQ ID NO: 255041 - DNA, 95 bp, Homo sapiens
gtaatgggtgcaactaataggccacaagagcttgatgaggctgttctcaggttgacctgacagttcaagaaaaggagaaatatcttaatgtgtct

SEQ ID NO: 255042 - DNA, 75 bp, Homo sapiens
cagcgaacagctggctaatatctccgtggaggagctcgatgcgaagttttccgctcctgcagaaagcaaagttac

SEQ ID NO: 255043 - DNA, 106 bp, Homo sapiens
ttcggccttgcccgcatctatagtttccagatggctctaacctcagtgttactggggcttccggatgcagatgacgatgcgtttgaagagtacagtgctgacgtgg

SEQ ID NO: 255044 - DNA, 50 bp, Homo sapiens
cagagcctttccttaggacaaacaagaacgctttaccctgtacagctcta

SEQ ID NO: 255045 - DNA, 75 bp, Homo sapiens
gaaggtctctggagacatcttcagcagattacgccttcccatacattatattagtgttatctttggttactctgg

SEQ ID NO: 255046 - DNA, 82 bp, Homo sapiens
gtctgggctgtggaggattcctctaaacaggcacagccaccctctggaggtggcgagaggcgtgctgaccagtctgccagga

SEQ ID NO: 255047 - DNA, 82 bp, Homo sapiens
cgctggcagccgctgtacttgtccaagtggtaagaagttcagaagcaagcctcagttggcaaggtacctgggaaatactgtt

SEQ ID NO: 255048 - DNA, 98 bp, Homo sapiens
ctggagaccaacgtctcgggagacctctgctaccttggagaggagaactgccaagtcagatttgcaatcttggagaaattcattcaaggcttttggat

SEQ ID NO: 255049 - DNA, 50 bp, Homo sapiens
atgaccctgaactggaccagcaggttaatgttgaagaaggaaaatgcgga

SEQ ID NO: 255050 - DNA, 83 bp, Homo sapiens
agagcggagggagccccagacacgaaacgtgaagagggctggtgggtggtgattggagatgccaagtccaatagcctcatctc

SEQ ID NO: 255051 - DNA, 75 bp, Homo sapiens
gccgcttccccggcggtagcagcctgcagccacggagccttttgtggcagatgaatatattgaacgtcttgtatg

SEQ ID NO: 255052 - DNA, 96 bp, Homo sapiens
ctggcaggagagacgcccaaccaggccctgaaacccggggcaaaatccaacagcatcattgtgagccctcggcagctctttcgacgtgtagcagca

SEQ ID NO: 255053 - DNA, 96 bp, Homo sapiens
tctgctggagcagctgtaactgcaagacctggacaagccaacaaatggaattttcttgagcatgtttctaatcgttttgccattggaatccatggc

SEQ ID NO: 255054 - DNA, 100 bp, Homo sapiens
gttgttttacagaccttaaggtgtttgttgacctcttacctgctacacagtgtacaaaagaatggaacattactaaactttcaattgagtatgattctga

SEQ ID NO: 255055 - DNA, 74 bp, Homo sapiens
cgggatcggttgccttgagcctggtatttctgggaaaagccagcttctgtttgcactggtcttcacaactcgtt

SEQ ID NO: 255056 - DNA, 98 bp, Homo sapiens
ggcgttaccggtgaagaagtcgaaaatggagcacgtccaggctgaccacgagcttttcctccaggcctttgagaaggcatttcatccttcatgaagcc

SEQ ID NO: 255057 - DNA, 90 bp, Homo sapiens
gtaaaagtagagaaggatcaaggacggatgatgaagtagtacagaggtactcaccagatgagctgcggtatctgccattaaacacagccc

SEQ ID NO: 255058 - DNA, 101 bp, Homo sapiens
ccctcccggactccagaggaggagccattgaatttagaagggctggtggcccacagggtagcagaactctaagaaggagctgatgtggaggagcagctgag

SEQ ID NO: 255059 - DNA, 75 bp, Homo sapiens
aaaagaaatacctgtgatttgctttctcggagcaaaagtgttgatggacggatggctacatggatgtgatggaga

SEQ ID NO: 255060 - DNA, 50 bp, Homo sapiens
gcaacagctcggcgggctggaaggctcaaactgctttttctgcaaaccct

SEQ ID NO: 255061 - DNA, 75 bp, Homo sapiens
ttcgggatctcggtgctgcagacggcgagacctcctgcacaggggaccctcacaatgatcccaatgctcaggggg

SEQ ID NO: 255062 - DNA, 100 bp, Homo sapiens
gaacccagcattttcggcaaccgctgctggcagttttgccaggtgtttgttaccttggccccagggagtggctcaaacctgtagaccagagaaggaagca

SEQ ID NO: 255063 - DNA, 100 bp, Homo sapiens
aggagaatctggaggggacactgaggagacgttccctaagggtgtccgcaatgttgccagtgtctgtctgcagattggctacccaactgttgcatcagta

SEQ ID NO: 255064 - DNA, 83 bp, Homo sapiens
gtcgcagactacggacctgtctgggtctcagccgccaaagaccccgtccgaaatcttcccaaggctgcagacaccgacggatt

SEQ ID NO: 255065 - DNA, 75 bp, Homo sapiens
ctgggggccacaaatgctccttctcctggagacgcaactcaaggtgtgtttccattgtagaaaacctggtcatgg

SEQ ID NO: 255066 - DNA, 98 bp, Homo sapiens
caatacctcttgggactgggctcgatttgagaatatggtgcacctgaagattgggaactcaaaacacagcaaccacttatgctgaaaaaccagctact

SEQ ID NO: 255067 - DNA, 75 bp, Homo sapiens
tagtacggcatgatgagttctgagctacggaggaaccctcatttcctcaaaagtgagctgcgttctctacgggag

SEQ ID NO: 255068 - DNA, 75 bp, Homo sapiens
tcctggactcctctgagaaacagggcgagatgtgtgacagaggtggcatcaagctcttacagtcccaaccctcca

SEQ ID NO: 255069 - DNA, 87 bp, Homo sapiens
ggagtccagcctgaaataccagactcgctgcatacgagcgtttccaaacaagcaggtgaaaaacctcatcgatgtcatctttgtcca

SEQ ID NO: 255070 - DNA, 80 bp, Homo sapiens
aataaaaatacatctactgtagtatcacccagtctacttgaaaaatttcagccttccaagttctgatgtaacaaacaact

SEQ ID NO: 255071 - DNA, 51 bp, Homo sapiens
tgtggagacacggccagatctgccctccaggtttgggatgctctgacagac

SEQ ID NO: 255072 - DNA, 75 bp, Homo sapiens
tcatgaaggatcctgtggcttccaccagcaacctggacatggacttccggatttcgctccctccattgtctgctc

SEQ ID NO: 255073 - DNA, 82 bp, Homo sapiens
acaattgatttgctcttacgtatttgtgtgacttgactcttcaaacacaaaggctactgcagcactggggtgtcagttgttg

SEQ ID NO: 255074 - DNA, 82 bp, Homo sapiens
cagagatctcttctgttctccactgctaggagcgctatagttatgtctgcccagatttagtaaaagaatttaacaagtatga

SEQ ID NO: 255075 - DNA, 75 bp, Homo sapiens
cgcttccggtcttagctggacccgtctgggagacctcagtttaaaaatcctccgagaagataaaaaatgtcccgg

SEQ ID NO: 255076 - DNA, 100 bp, Homo sapiens
atgggaaccagtctttcaaaatatgtgctcatcttttgctacgggacccagacaatacgatggaatattctatgaatttcgttcttattaccttaagccc

SEQ ID NO: 255077 - DNA, 90 bp, Homo sapiens
aacactgaaaataaagatatttattggaaaaatgtgagagagaagttgtcagcaggagaggtttttcttcacatacctcctgcctcacag

SEQ ID NO: 255078 - DNA, 87 bp, Homo sapiens
ccgcaaccattgacgccatgtcgggttattcgagtgaccgagaccgcggccgggaccgagggcagttgcagtggtgcagaatggctg

SEQ ID NO: 255079 - DNA, 113 bp, Homo sapiens
cgccaaggggggcaagggttcggccgtgccctccgacagccaggcccgcgagaagtgagaagccctaccactgcaactgggacggctgcggctggaagtttgcgcgctcagac

SEQ ID NO: 255080 - DNA, 101 bp, Homo sapiens
actgatgtgatggcccggggaattgatattcctgaagtcaactgggttttgcagtatgaccctcccagcaatgcaagtgccatctgggattgacagctcag

SEQ ID NO: 255081 - DNA, 83 bp, Homo sapiens
ggcactttcgggaattcacagtctgcagcattggtgatcaactgggagaacacgctccacattccagcccaggtgaagctgag

SEQ ID NO: 255082 - DNA, 50 bp, Homo sapiens
gagcgcgaatatcgtcatcgttagaaggctcaagtggtcctgtcgaagta

SEQ ID NO: 255083 - DNA, 50 bp, Homo sapiens
tgttggagaattggagcaacagtttggttgtaaatgtcatgcagagagac

SEQ ID NO: 255084 - DNA, 50 bp, Homo sapiens
ccggaatgtcatccagcgagtgattagagtcggtatttcttcaatagata

SEQ ID NO: 255085 - DNA, 51 bp, Homo sapiens
tacaaagctgctttcattggaatagattcactggatgaaagaaagataaaa

SEQ ID NO: 255086 - DNA, 50 bp, Homo sapiens
cgtggagatcgtcccgcgcctgccggctgaccccgcactacatctaccca

SEQ ID NO: 255087 - DNA, 74 bp, Homo sapiens
cggagacatgggagacccggggtcggaaatctcctgggaggcccccgtggagaagaagactgagtgtatccaga

SEQ ID NO: 255088 - DNA, 90 bp, Homo sapiens
ccagcacgctggactgcgagacggcccggctgcagcgagcgctggacggagaggaaagcggatttgacgggatctgaactatacacccag

SEQ ID NO: 255089 - DNA, 51 bp, Homo sapiens
actgtgaggagctaatccctgaatatctgaaactggacggggctggaggag

SEQ ID NO: 255090 - DNA, 74 bp, Homo sapiens
tatacagcatgaggggaatgcaaccttggcccggaaaaatattgagtgctaggaaaagaatgtcagtgattgtt

SEQ ID NO: 255091 - DNA, 75 bp, Homo sapiens
ggcattggaaccgtgtttggcagcttgatcattggctatgccagtttctctacaataattggagttggtgttgga

SEQ ID NO: 255092 - DNA, 87 bp, Homo sapiens
gggcatgcgaagccgtccctccccggctggagtcacatcagaagccgcgcagactatcaccacggctcctgatgcctcagggcctga

SEQ ID NO: 255093 - DNA, 80 bp, Homo sapiens
gtcggactcccgcggcgggaggagcctgttcccctgagacacagaatgttcagcttaacaaagaaatgacacttgccagc

SEQ ID NO: 255094 - DNA, 74 bp, Homo sapiens
aaactgagacagagtcagctacagaaagagaatgtggtccagaaggtaaatgggcttgatactgtgagagtgcc

SEQ ID NO: 255095 - DNA, 75 bp, Homo sapiens
aagatcatgggcaaaggacagatccagaaaaagcttgagtctccacccccatctaccaatcccttcctggaagat

SEQ ID NO: 255096 - DNA, 83 bp, Homo sapiens
ctgagacctgtcaccccgactcaacgtgagacgcaccgcccggactcaccatgttcagagaagccgaactgggattaccatgc

SEQ ID NO: 255097 - DNA, 75 bp, Homo sapiens
acaccaagaatcagccacagacggaacaagcatgcaggtggggagaagaattttcattgtccaagcaccctcagg

SEQ ID NO: 255098 - DNA, 105 bp, Homo sapiens
attacacggccagttttgaaatcgacacacaaagaatagagttgagcctgtgggacacttcgggttcaagaagacgtggaagctgcgggctctgaaggaaggcaa

SEQ ID NO: 255099 - DNA, 74 bp, Homo sapiens
ctgctgccgctcggtcacgcttgaatcttatggcaagggccttatatgacaatgtcccagagtgtgccgaggaa

SEQ ID NO: 255100 - DNA, 108 bp, Homo sapiens
gagggggactggcctggcgtgcactccgcacctcggggacattattgcgcgtggaacggctgcttttggaagaaacatgagttctgctggcgctgatgggagaaaagc

SEQ ID NO: 255101 - DNA, 100 bp, Homo sapiens
ctgcccctgctggcagccctggtcctggcccaggctcctgcagctttagcagatgttctggaaggagacagctcagaatgatcctcagtgtgctcacggg

SEQ ID NO: 255102 - DNA, 83 bp, Homo sapiens
cgtcagccgccaccggcagcagcagcaccaccggacgcacttgcacctcctgcgccgccgccccccatccaaggatatgcctt

SEQ ID NO: 255103 - DNA, 75 bp, Homo sapiens
cagcgtctggcagaggatgaggatgaagaggaggaccaggtgccccctgataagtgccgatgtgccgtgggcagc

SEQ ID NO: 255104 - DNA, 73 bp, Homo sapiens
gacgatgaggtgacagtcacggccaagttgatagaatttagtcctctgagggcaaccgatgtaaaactcccaa

SEQ ID NO: 255105 - DNA, 85 bp, Homo sapiens
tgatcgtaaagaagttgccaaatttgaagcagaacgatcaaaagccaagtggcaaacgaaacctgatgtgagactctctcgaggc

SEQ ID NO: 255106 - DNA, 85 bp, Homo sapiens
atagaactgaggcactgaagagaatggcagatgcactggataactatgttattcgaggtgcacttacagagtgctacgatgaact

SEQ ID NO: 255107 - DNA, 90 bp, Homo sapiens
gagccttgaggcagaggcagctggaccgagctgcggctgctgtggaggcatgccaggtggaagtgaggctgctgctggcctacaactcca

SEQ ID NO: 255108 - DNA, 100 bp, Homo sapiens
tttatcatcaatcttattccactgcatgtatttgtgttgttactgatgcagagatacagcaaaagagtctacataggtgtgttgaggctcctggaacacg

SEQ ID NO: 255109 - DNA, 75 bp, Homo sapiens
tgcgcaccaaagagttggatcccagccagacgttcacatcggatgcggcgacaccaccaccaccaccaacaccac

SEQ ID NO: 255110 - DNA, 101 bp, Homo sapiens
ctttgccacttcttcacggaccagtttcagttcgccgatgggaaacccggagaccaaatccttggcatgaacgctgctgtccgggctgtgacgcgcatggg

SEQ ID NO: 255111 - DNA, 50 bp, Homo sapiens
tttaaacaagagatttccacagaagtgttcctggaaaacaatggaaagga

SEQ ID NO: 255112 - DNA, 80 bp, Homo sapiens
ttgggttacaaaaatccagaccaggtgattttacaacgagatgctgctctccatagggatgctcatgctgtcagccacac

SEQ ID NO: 255113 - DNA, 74 bp, Homo sapiens
cttcccccacccccgactcgggcttggcgcggcggccagaggaaccccgaggttacaggaggttccagtggcat

SEQ ID NO: 255114 - DNA, 100 bp, Homo sapiens
agccagaagcagtatttgtcctggtcatcatcagatttgaaatatttaaagtggatacaaaactatttcagcaatgcagacaattaagtgtgttgttgtg

SEQ ID NO: 255115 - DNA, 52 bp, Homo sapiens
gagttccaccaggccgggaagcccatcggagatcctgaaggagctagacgag

SEQ ID NO: 255116 - DNA, 90 bp, Homo sapiens
gagggccgcaaaagcttccccagcatccattcctcctgggagtcctcagcactgcctcttctatttccctgtggaaacctcaaaagagaa

SEQ ID NO: 255117 - DNA, 100 bp, Homo sapiens
agcagggcttggagatgggcaccaccatggcgaccacacagggactttgaacatgtcggggatcgccctcagcagactcgcccaggagaggaaagcatgg

SEQ ID NO: 255118 - DNA, 100 bp, Homo sapiens
attttgcactactggcatcgatggagccatgacaatttgggatttcaaggtcgaatcaaatattcggaacaggtgtatgatgcctgtatggagacatttg

SEQ ID NO: 255119 - DNA, 83 bp, Homo sapiens
actcctggcccgggattatgccaagaaaccagaacatccatgatagcagtcttctgtaaatcgaacttttcaagaattctctg

SEQ ID NO: 255120 - DNA, 100 bp, Homo sapiens
caaagctatcatcctgccaaactccaggctcagatgtcacagtttcctgcaaatgcatcagaaatatgttgtattattagaacatcaccaggaactagac

SEQ ID NO: 255121 - DNA, 90 bp, Homo sapiens
tgaagagggacgggtcccgcggcgagcgagctcctgagatggagaacttaatgttctggatgatattttaactgaagtaccagaacaaga

SEQ ID NO: 255122 - DNA, 73 bp, Homo sapiens
cggctcgtcgccgttcgccacccaagatgaaacctggattggcatctatacagtcaaggattgctatcctgtc

SEQ ID NO: 255123 - DNA, 100 bp, Homo sapiens
tccaatcctctgcttccaggacaagtcctgcgcttggggatcctctgtacgcccgttcactgggatggtgctccgtactgtgaaaaggactaccagggac

SEQ ID NO: 255124 - DNA, 100 bp, Homo sapiens
gtgggcatagtggctgccctgctggggaagcagctcgagagtgtcgtagaaagaagaaagaatatgtgaaatgtttagaaaacagagtggcagtgcttga

SEQ ID NO: 255125 - DNA, 83 bp, Homo sapiens
cgggcggcgggatccactgtccggcagaggtatcttcaaagaacagtaaaacatccaactttactacaggatcctgatttaag

SEQ ID NO: 255126 - DNA, 100 bp, Homo sapiens
agtctacactttctgaattttccagcttcaggatgagttagagaaaggtgaacgggacaatgcagaactgcaggagtttgccaacgccattcttcagcag

SEQ ID NO: 255127 - DNA, 100 bp, Homo sapiens
ctggagtttatctggagtgaggtggccggttcttggtgggatctgagcagcggggatctgatgagcttctttcttctggcatcattaacggaccttttac

SEQ ID NO: 255128 - DNA, 98 bp, Homo sapiens
tggaggacacagagaccaagaacgctgtgctggagcacatggaggaactgcaggagcaagtggcgctggcgaccgtgctgtgtgacatcatagtcctc

SEQ ID NO: 255129 - DNA, 51 bp, Homo sapiens
cttaatgatataccacagtcaacagaacagacagcaccagttgcccttgaa

SEQ ID NO: 255130 - DNA, 71 bp, Homo sapiens
cccagacaccggagactgggaaatggtcgtcaaagtcctacattttagctttcagtgctgaacttccttct

SEQ ID NO: 255131 - DNA, 75 bp, Homo sapiens
ttccttcacagggaccctagccaggtggtgataaatggaggcgccacctccagcggtgagcaggacaatgaggac

SEQ ID NO: 255132 - DNA, 75 bp, Homo sapiens
ctttgatatgttttttggaggaggaggaaggatgcagagagaaaggagagatccatgcatacaaccttgaaacga

SEQ ID NO: 255133 - DNA, 98 bp, Homo sapiens
aacagtgcaaggggaagtctggaaaacaacgccttaccaagtggctgctgaaattaggtactgcataagccgaccacagtataagacttcttgtggca

SEQ ID NO: 255134 - DNA, 51 bp, Homo sapiens
aaaatgcgcgtcccgggcgcgggtaggagaaagttctgccactaatgaacc

SEQ ID NO: 255135 - DNA, 100 bp, Homo sapiens
atggatgttcttcttcgagtatttgtagaaggttcccacaatcgatggattgcgccatgtggtggtgcctgggcggctgtgcccacagtttctccagtta

SEQ ID NO: 255136 - DNA, 100 bp, Homo sapiens
ctgtccaggcacgcgaggcccctcagctggaatgaatggctgaaactaccagtaaaataccctgacctgcccaggaatgcccaagtggccctcaccatat

SEQ ID NO: 255137 - DNA, 130 bp, Homo sapiens
aggaagccgactgctgcctggtctgcaaagaagtcctttcaagtctctaggactggactcttcctaagcaagtccggccgacggtcgcaaggtcctacggtcaagcatccgggagtttctatgcagcgaa

SEQ ID NO: 255138 - DNA, 100 bp, Homo sapiens
ccgccggcgctgacggactgggggcgccgcccgcgcccgggaccgacccctctgctcgcggccgcgcctttgagcatcaattcctgaagattgccaagcc

SEQ ID NO: 255139 - DNA, 100 bp, Homo sapiens
ttgggatagctggccttggtggaggatttgaaataggaattgaggattgtgctcatggacgatgccatggactgcttgatgtctttttcagatttcctct

SEQ ID NO: 255140 - DNA, 100 bp, Homo sapiens
aagtgaacttggcattttagatctaattcaaagagtgataatgaactctcaagtggaacaggtgatgtgtctaaggattgtcctgagaagatcctgtatt

SEQ ID NO: 255141 - DNA, 100 bp, Homo sapiens
caaagtacaattaccatttggactccagtggtagctatgttcgcccattgagccgagagatcacaatgagccaagcatatcagaacatgtgtgctggaat

SEQ ID NO: 255142 - DNA, 100 bp, Homo sapiens
ccccagtgctgcagcagacattacttcaggacaacctcttgggcaggagttatggtgaatggttgcatggatttgaaaaaaaggcaaaagaatgtatggc

SEQ ID NO: 255143 - DNA, 78 bp, Homo sapiens
gattacttccatcagtattgagccaggagttgaggtggaaccgtcccaaaatgtcccttgctcagaagaaggatcggg

SEQ ID NO: 255144 - DNA, 75 bp, Homo sapiens
gggagttgcttttggaatgaatttggaatcttcccttgaagagaatgactttctcaccggtgtgtttcctgccag

SEQ ID NO: 255145 - DNA, 98 bp, Homo sapiens
ggcagtgctcaaactcaccgaccaggttaaacccatccagagtaatggctgcggccttacccaggaccctgggggagttgcagctgtatagaatatta

SEQ ID NO: 255146 - DNA, 83 bp, Homo sapiens
gtgatgcttttcagcagacattgattatctgtcccccagctattcaagacgcccaaatggatgagcaagacctaaatgagcct

SEQ ID NO: 255147 - DNA, 75 bp, Homo sapiens
ccggagcagactgtgccctacctctggagtgaagaaacacctgcaagacttcctcgttctgcccatcttcctaac

SEQ ID NO: 255148 - DNA, 90 bp, Homo sapiens
atcatgctgtctggagaaacagccaaaggggactatcctctggaggctgtgcgcatgcagcacctgtcttactactttgaccgcgatgat

SEQ ID NO: 255149 - DNA, 98 bp, Homo sapiens
cccctcggcctcggagcaacgagcgcagcgccggctcatgctgaagattcggttatggaccatcatttccggaagccagcaaatgatataacgtctca

SEQ ID NO: 255150 - DNA, 90 bp, Homo sapiens
agaaaaggccaaagagaggtgttctgaacaagttcaaggcatggaggagtgacggcaggaactttctgtgctctgacaacccttatgcac

SEQ ID NO: 255151 - DNA, 100 bp, Homo sapiens
ctcatcgcagagaccatctgccattcagctgctgcagagtgaacttttccaaaattctggaaatgatcatccagcagctcgtcaacggcatcatcacgcc

SEQ ID NO: 255152 - DNA, 114 bp, Homo sapiens
ggactacgggcagcggctcaaggccaatctgaaaggcaccctgcaggtgcatcacttcatggagttatgttgggataaatgtgtggagaagccagggaatcgcctagactctcg

SEQ ID NO: 255153 - DNA, 74 bp, Homo sapiens
tccggcggcgccagccactcggagctaatccacaatctccgcaatgtttgagacggaggcagatgagaagaggg

SEQ ID NO: 255154 - DNA, 147 bp, Homo sapiens
cggcggatctggacacccagcggtctgacatcgcgacgctgctcaaaacctcgctccggaaaggggacacctgatgctgtctttgcaggtgccatgcctacaatggcaagcatcaagctgtctacacttcatcccattgtgaatcat

SEQ ID NO: 255155 - DNA, 75 bp, Homo sapiens
cgggccgtaccgagctaccaggctggtttggaattcacccagttgcaggccgaatgcctggtcagcttaatgtgc

SEQ ID NO: 255156 - DNA, 50 bp, Homo sapiens
gccatcggcagctgcggccacacaggtggggctggtgtccgagcacttct

SEQ ID NO: 255157 - DNA, 100 bp, Homo sapiens
aggaagcattaaatgccagaccatggtggattcgtatggggactgacatttgttactataagctcagcttgtcaatcggaaacagaaattagagtctgtg

SEQ ID NO: 255158 - DNA, 101 bp, Homo sapiens
caaagaatgatatttccaaagtttgcagaaaagaatatgagggaaatcgtgatgagaaccagagtataaaccaccaaatggctcaggaagatgctcagcgt

SEQ ID NO: 255159 - DNA, 75 bp, Homo sapiens
cagacagatcgctgtcaaaaccctaggtgactgtaggacgaggatttggtgtcacataccaactggtatcaaaaa

SEQ ID NO: 255160 - DNA, 83 bp, Homo sapiens
agaagggacacctttcacagctatcagggaagacttaattcagtgcacaaatgagatgaatgtgaacatcccacagttggcag

SEQ ID NO: 255161 - DNA, 100 bp, Homo sapiens
cggcatgggtcgtatcccagactggaccccccaggcctacgacccactggacgtgctggcccttagccgacagcgagaaactgcctattcagaaacacag

SEQ ID NO: 255162 - DNA, 75 bp, Homo sapiens
cagcagcctgtggatgccgtcaagctgaacctccctggcttcgtgctgtgtcactccatcgctgggggtacgggt

SEQ ID NO: 255163 - DNA, 83 bp, Homo sapiens
gacaaacagcccgcccgaccccgtcccgaccctggccgccccgagcggagcctggagccctgggcgctgcctatggcacagcc

SEQ ID NO: 255164 - DNA, 50 bp, Homo sapiens
cagtctcaggcctttagtgatgatggagaactacgatgacccgcacaaaa

SEQ ID NO: 255165 - DNA, 100 bp, Homo sapiens
caagcccgagaagacggaggaggactcagaggaggaggttcgggaactccaggagcagctggcccgacagcaggtccatgtggagcttgacgtggccaag

SEQ ID NO: 255166 - DNA, 100 bp, Homo sapiens
aagtacattctcaggtggagacctcctgagttctaccaagtatgccacaccaaaaaggattatgaagaaattggacctagcatttgtcgtcacaatccag

SEQ ID NO: 255167 - DNA, 82 bp, Homo sapiens
gtggactccttcggcagtccacccaccgccgccgcctcccagatttgccagatattaccgagacgcagccggggtggagttc

SEQ ID NO: 255168 - DNA, 75 bp, Homo sapiens
cgacttcgaccctgcccagcacgaccagctcatgcaggctgagctggagattcagaaagacgccctggagccagg

SEQ ID NO: 255169 - DNA, 99 bp, Homo sapiens
aaagaagagtcccacttcagtcaaagacagtagattatgagaaatgcacagcggtattgatgagtagatccttggattcagaggttggctgaaacgcac

SEQ ID NO: 255170 - DNA, 89 bp, Homo sapiens
atcgaggagacgctggaggacagcccgcagggactttgaacatgtcggggatcgccctcagcagactcgcccaggagaggaaagcatgg

SEQ ID NO: 255171 - DNA, 100 bp, Homo sapiens
tccacggtggtgcgcgacgtgttctatgatgggaaagcaggcaggatgggagagtcgccgatagaaccacctcttccctgcctcctgggcttgggggaag

SEQ ID NO: 255172 - DNA, 98 bp, Homo sapiens
gccagaggtgatccctgggcctccatcagagagccctggcatgctgactaagctccaggaatgtggggtttccatgatcgggacttgatgctgcggaa

SEQ ID NO: 255173 - DNA, 80 bp, Homo sapiens
gttgttggaggaacactttccagcctcaaaataaattcgctgctctggacaatgaagaggaggataaagaagaagaaatt

SEQ ID NO: 255174 - DNA, 96 bp, Homo sapiens
gaataatgtggggaggccagccagtcggtctaatttgaaagttatgattttggatgacaacatgcaaaaactgaaggctcggtgtttaggaaatat

SEQ ID NO: 255175 - DNA, 99 bp, Homo sapiens
ggcaacctccaccttgacggttccaggacatggatttgattgacatactttggaggcaagatatagatcttggagtaagtcgagaagtatttgacttca

SEQ ID NO: 255176 - DNA, 90 bp, Homo sapiens
gttagaaggttctggtcttgcactaaggactccatccccgtgtctacctccctccttggagacacttccgacacgacctctactggcctt

SEQ ID NO: 255177 - DNA, 100 bp, Homo sapiens
agaggagatcctcagaggggagacccctcgggtggaagaagtggggccatacacctacagatacatcgagatatttccaagcagaaggaatgaagttcga

SEQ ID NO: 255178 - DNA, 75 bp, Homo sapiens
cctcgctgtacgccgagcacccaggcgactgcctcatcttcaaggttgtgaccgagattcccgacgagagagact

SEQ ID NO: 255179 - DNA, 51 bp, Homo sapiens
caaagagccccctatcaagcttccaaagatgctactatcattcacgatggc

SEQ ID NO: 255180 - DNA, 75 bp, Homo sapiens
gcagaccagacttcgctcgtactcgtgcgcctcgcttcggctgcagcgtgtgttgcaagtcttcttggaatcagc

SEQ ID NO: 255181 - DNA, 76 bp, Homo sapiens
gatttgcaagtattttctccctattgccactgaggcggctcccagctgcgttggcgacatggccgacacccccaga

SEQ ID NO: 255182 - DNA, 100 bp, Homo sapiens
agaaaatttatagactctgatttttcagaaagatgaagttggagcccttgtttttgacattggatcctatactgtgagagctggttatgctggtgaggac

SEQ ID NO: 255183 - DNA, 100 bp, Homo sapiens
ggcgtacatcaggggctgttcttttgctgcaaatgaagttgatggaattacactgtgatacgactgactggagtcgacgagttgaagatgaagcccagag

SEQ ID NO: 255184 - DNA, 82 bp, Homo sapiens
tctcatcattttctccccttcggtagaaggtctataagaaggagaaagctcgagtcatcactgaggaagagaagaatttcaa

SEQ ID NO: 255185 - DNA, 83 bp, Homo sapiens
cctgtgggtgctgggcctctgctgcgtcctgctgaccttcggtgccgtgagcgatgtggagatgcaggaacactatgatgagt

SEQ ID NO: 255186 - DNA, 100 bp, Homo sapiens
cattgtcaagaagttcccgaggtttcggaaccgagagctggaggccactcgacgccagaggatggattacccagtgtttaaagttctagctaaccaatac

SEQ ID NO: 255187 - DNA, 100 bp, Homo sapiens
aaggaagtgaagaaggcgcatcactcccagctgcgcaaagcttgcgaggtggcgttaggagaggagaggcagcagcatggcgagtgtcctgtcccgacgc

SEQ ID NO: 255188 - DNA, 75 bp, Homo sapiens
gaacaagatgcagctggaacatcatcaggtgattaaaaattctggccatctcccaagagacagaatagctgagga

SEQ ID NO: 255189 - DNA, 75 bp, Homo sapiens
tcttgggcgggggatgtgagcgctgagcccttggcagagtgatattcccacagcccagaggaaacggtttactag

SEQ ID NO: 255190 - DNA, 82 bp, Homo sapiens
ctgcggcgcccgctggccgggctggctgcggccgccctgggccgggccccaccggacgggacctcaggatggaaaccagcag

SEQ ID NO: 255191 - DNA, 90 bp, Homo sapiens
gggcatcgggcaggaactgggcgccggcgcttacagcatgagagttttgcggcctccaggtggtggatccaatttttcattaggttttga

SEQ ID NO: 255192 - DNA, 98 bp, Homo sapiens
ggaagcggatcgggtggagtgtaggtcatatcgccgcgttaatatgatcctctgttgaagcaagaagacaaactgtatggtggagaaagaagtgggaa

SEQ ID NO: 255193 - DNA, 82 bp, Homo sapiens
gggccgctctgggatcccggccaccagcaattgtccgtaggagctgtggcgcggggccttccaggagtctgagctatgagtg

SEQ ID NO: 255194 - DNA, 100 bp, Homo sapiens
gcgacaacatggaggccgtgaagaccttcaatagcgagattgttgtaggagataaagttgttttgatgcctgtgaatgcagggcagccactacatgccag

SEQ ID NO: 255195 - DNA, 82 bp, Homo sapiens
ccgaggcccccctgaaccccaaggccaaccgcgagaagatgacccagttgtcaggaggaagaagacctagctttagcacaag

SEQ ID NO: 255196 - DNA, 98 bp, Homo sapiens
ccacctcgacggggtcttcatgcacaaacgagctcagaggctcaagttcctgtgtgagcggaatgacaaggcgaaagctgcgctggcgacaagagccc

SEQ ID NO: 255197 - DNA, 100 bp, Homo sapiens
cgcctggagcgttacaaggccttctacattaccgatttccttgatagctgccgtgccagtactctattggctgagctcgatgatgatgaggacttacctg

SEQ ID NO: 255198 - DNA, 97 bp, Homo sapiens
gaggactgcaaagtgcccccaaggcccttagaggctgaaggtgcccagctgcagggcggcagtaatgagagtttgggaccaaggagaagagaatgga

SEQ ID NO: 255199 - DNA, 75 bp, Homo sapiens
cttagcagcagctccactgaacagataaggaaacttattggagaagtgtttaatattgtgagccaacagtctact

SEQ ID NO: 255200 - DNA, 100 bp, Homo sapiens
agcaaaagccttgatagcatggatttctgtgagctcactatattgatgatgttaagaagttcaaaccgggttacctggaagctactcttaattggtttag

SEQ ID NO: 255201 - DNA, 74 bp, Homo sapiens
aactgtttagatgatatggcccagctgccactgcagagccccgccatggaagacacgccgttggtgatatcgaa

SEQ ID NO: 255202 - DNA, 75 bp, Homo sapiens
gtggactccttcggcagtccacccaccgccgccgcctcccagggccaccagatgcctccacccagaaaggtcaga

SEQ ID NO: 255203 - DNA, 74 bp, Homo sapiens
agcgagtaaaggagaaagaagccatattgaaagaagctgagagagaggaaacaaaccatcaggcctcccagaaa

SEQ ID NO: 255204 - DNA, 96 bp, Homo sapiens
agagcaaacagattcagtggcctgcattgatgctgagctgctggcgcactgcagcacaactagagatgtacggatgcccccatcttgatcttacag

SEQ ID NO: 255205 - DNA, 98 bp, Homo sapiens
cccagccctgccagctgcgccgggacgggtacagccaaagaccggagctttggagagatgaagtttaaacagtgtcctacagagaacatggctcgtga

SEQ ID NO: 255206 - DNA, 82 bp, Homo sapiens
aacaggacgaaggcgtgctgaaggtttggtgcacctcgatttggaggaagtagggcagggcccttatctggaaagaagtttg

SEQ ID NO: 255207 - DNA, 75 bp, Homo sapiens
caaaaaggaacaagctctccagcttgttggggagttcctggaagtgacttgcatcaatcctacattcatctgtga

SEQ ID NO: 255208 - DNA, 83 bp, Homo sapiens
tacctcttgggtgaactctagcaattacaagaatgaggaaaatggggagcaggaggctgacaatgaggtagacgaagaagagg

SEQ ID NO: 255209 - DNA, 82 bp, Homo sapiens
cagcgcagtgcagatccgcaggcgcaaggcttcaggcgacccgtactgggcctactctgcacgttcacgtccatgttcttcc

SEQ ID NO: 255210 - DNA, 100 bp, Homo sapiens
ggcagaccctgaaagcaaccaggaggcagtaaattcttcagctgctcggacagatgaagctccccaaggagctgcaggttagagatgacaacaagagaca

SEQ ID NO: 255211 - DNA, 90 bp, Homo sapiens
accatggcagtgcagctggtgcccgactcagctctcggcctgctgatggatatggctttagttgcccctgaagctccttcagaacaagcc

SEQ ID NO: 255212 - DNA, 98 bp, Homo sapiens
aacagtcaagagctttctctccaaaatccccagtgtcgtcacagtgattgccttcatgttgtggagcccatgcctgtgcgggggcctgatgtagaagc

SEQ ID NO: 255213 - DNA, 98 bp, Homo sapiens
acttcctggaggaggtgcaccataagcaggagagcatcatggatgcagggccggtcgtggtgcactgcagtgctgactctaccctttgacgtggtaaa

SEQ ID NO: 255214 - DNA, 100 bp, Homo sapiens
tggaaggatgactatgagtatgagctattatagaaaccatgaggtcaaccagaatcaagatgtctgggactgaggaagcaattcttggaggacgtgacag

SEQ ID NO: 255215 - DNA, 97 bp, Homo sapiens
gcaagaccacctcactcatcgagagccagcatcatcacctgctgcactgcctggaaaaaaccactgtggagcgaatcaaggagcgtgtggaggagaa

SEQ ID NO: 255216 - DNA, 100 bp, Homo sapiens
cactccacgtggcagtactacgagcgaacggtcaccgtgcccatgtacagggtccttttgtacaagtggatgaactgatggaaattttccgaagatgcaa

SEQ ID NO: 255217 - DNA, 100 bp, Homo sapiens
cgccccaccatctacagcaacgtgatcaaagcctggcctacttggcaactttcctggcccttttgaagaggaaatgaagggtattgccgctgttactgat

SEQ ID NO: 255218 - DNA, 48 bp, Homo sapiens
aagagcgctcccaggagaaacaaaatgccgggtctaagttgtagattt

SEQ ID NO: 255219 - DNA, 101 bp, Homo sapiens
atgttctgagattgcatcaggatattaatgattataaccggagattctcagggcaacccagatctatatttggagttcttacaacatggcagacattgaca

SEQ ID NO: 255220 - DNA, 83 bp, Homo sapiens
cagaccctggagcctcagttggaagcagccgatccagcctgcggagcctgtggggcagttcaaggagcagggacaagttacag

SEQ ID NO: 255221 - DNA, 99 bp, Homo sapiens
ttagaaaccatcacaatgcataaaatcctggagaccaccaccttcttccaaagagcggtgtacttggaaacatgccctgaactgtcacagaatgaaacc

SEQ ID NO: 255222 - DNA, 100 bp, Homo sapiens
gtaagatgatcgaccgcaacctccgtgaggacggcgagaaggcggcgcgcgaggtcaagctgctgctgctcggcaccacaaggccacataaggagggtga

SEQ ID NO: 255223 - DNA, 100 bp, Homo sapiens
cgtcttacctgaagtcacaaagcaaactgagtgatgaaggaagacttgaacctagaaaatttcactgcaaaggttacttcctcagaatgttggcctcctg

SEQ ID NO: 255224 - DNA, 100 bp, Homo sapiens
tcactggctgcaggaagctgagaattatccttggacttacataaagcattttggactttatattgtgaataagtggaatacagctctcattggccttatg

SEQ ID NO: 255225 - DNA, 100 bp, Homo sapiens
gttgggggacaccctttccctgttcctgttaagtagagagcgaaatgtcatcagtgcagtcacaacaggagcagttgtcccagtcagatccatctccgtc

SEQ ID NO: 255226 - DNA, 83 bp, Homo sapiens
tttccctctccctttccctaaggctctgacgcccgctctgcggcttcggtgtttgaacaggccacagtccaggagcgcttaca

SEQ ID NO: 255227 - DNA, 75 bp, Homo sapiens
gcggagagcaacagcgcgccggtgatggaactgtactggaacaatgggagaagctggtagcttataggaagccaa

SEQ ID NO: 255228 - DNA, 75 bp, Homo sapiens
tgcacctgtcccaactgtaaagaaggtggtggaagggaggtggggaagacagggctccagctaccacaggacggg

SEQ ID NO: 255229 - DNA, 75 bp, Homo sapiens
gtttggatgaaatgtccaatcttgaaaaacagtttaccgatctcaaagatcacacaacattctgaaattttttgg

SEQ ID NO: 255230 - DNA, 110 bp, Homo sapiens
ctgaagaagaggcggctcagatccccagatccagtgtgtgggagcaggaccagcaggaaatcaaagagcaggaggttgtggacaaagtcatggaaacactggacaatgat

SEQ ID NO: 255231 - DNA, 87 bp, Homo sapiens
aattgatataatgaagactagttttccaggtgctgctgttttttcaaacgaaggaaaaggaaaaccatacagcgccacaaatgactc

SEQ ID NO: 255232 - DNA, 101 bp, Homo sapiens
aagcacaagttcacgaaagcctacaaaagtgtggagaggttccttcaggaggatcagtgccggtggtggtgtgcacattgagccccggtatagacagttcc

SEQ ID NO: 255233 - DNA, 82 bp, Homo sapiens
gccgccaccgtctgaactaggatgtcccgacatgaagtgagacggtttaagcggaagcatcttactgccattgactgccagc

SEQ ID NO: 255234 - DNA, 98 bp, Homo sapiens
cgctagcatgaccgacgcgctgttgcccgcggccccccagccgctggagaaggagaacgacggctactttcggaaggggtcaccaccagctattggac

SEQ ID NO: 255235 - DNA, 50 bp, Homo sapiens
aactcaagcagtagttcagtccagtcaagctgaactagcagaaattccag

SEQ ID NO: 255236 - DNA, 100 bp, Homo sapiens
cagtccaggctgtcctgcacgacctcactagtgaacctgtcactgttcgggaagtcacctcttgataatggaactatacagcgaagagacaatctctggc

SEQ ID NO: 255237 - DNA, 98 bp, Homo sapiens
gtgcccgccccacccgcatgctctttgtcactccccggcggcagcacgaaagtaccatgtatctcgggggagctttgtgccttgatggatcaagttca

SEQ ID NO: 255238 - DNA, 100 bp, Homo sapiens
ccagccgggttattaccctgaagaatatgcttttaaggctattaaccagggtggccttacatcagtagctgtcagagggaaagactgtgcagtaattgtc

SEQ ID NO: 255239 - DNA, 98 bp, Homo sapiens
agctttaccgcaattatggcatcctggccgatgccacggagcaagtgggccagtactgtaagattgatgttaaaggcatggtgttcaccccacttcat

SEQ ID NO: 255240 - DNA, 100 bp, Homo sapiens
ttggatgggactagtacacattccaacaaatggatcttggcagtgggaagatggctccattctctcacccaacctttttcacacatttacaaaacaattt

SEQ ID NO: 255241 - DNA, 75 bp, Homo sapiens
cgtgccctggggctgagccctcaggtgaccctggcaaagatgagagtgcacatttcgtcctgcctgaaggtccag

SEQ ID NO: 255242 - DNA, 98 bp, Homo sapiens
ggagctgttcctattcggccatctttgctcctccctgcaactaactccattcttaattggccataggaaaaggatacagagtagagtttcatgaacct

SEQ ID NO: 255243 - DNA, 99 bp, Homo sapiens
gctgccgttctgtacttgcttttcatgattggagaacttgtaggtatttacctcctgagtgttttgtagttggaaaagagccaccaaagatttccaaca

SEQ ID NO: 255244 - DNA, 100 bp, Homo sapiens
agcaaacacccccattgtttcctgcaattttgacaaattctgcttggtcagaatcgtgatggcattgtgttcagcactgatgactattttcaccatcaag

SEQ ID NO: 255245 - DNA, 83 bp, Homo sapiens
gacgagtcgagcctcctgcggcgccgcgggctccaggttgctgcttttgctcagaggacatccatgaccctaatggtcttttt

SEQ ID NO: 255246 - DNA, 115 bp, Homo sapiens
tctctcttggctcctgtcccgctggccctctgtctgcctgtgtccctgaccatggctccctgcagtaccctttaacggagcttgatcctggatagtgtttgtatgatgtgcacac

SEQ ID NO: 255247 - DNA, 75 bp, Homo sapiens
gctggcctgcggcgcctgggcgctctgagtggagccacatgttcctcctgatcgaggaccaaggtgcccagggct

SEQ ID NO: 255248 - DNA, 51 bp, Homo sapiens
aggctccaagacgccgtcgcttgaggctcagaagcggaatcagaaagccac

SEQ ID NO: 255249 - DNA, 82 bp, Homo sapiens
tctccaccctgaaggacaagcgcgggacccgctatgagctgtgagccgtgagctttgaggcggtgggatgtgtcagcagaat

SEQ ID NO: 255250 - DNA, 73 bp, Homo sapiens
tcctgatacagcaggcgctcaccatgttccctggagccatcccgacatgcatgctgtgggatcgtggctcttc

SEQ ID NO: 255251 - DNA, 135 bp, Homo sapiens
aaagagtgtgttgtgaacgaagtcagaatttcctgtgttccctttgccgctcctggagttcactggcatgaccaacggctttggaaaacacaccgaaagcgggtctgactctgaatgtagtttgggtctcagtgg

SEQ ID NO: 255252 - DNA, 75 bp, Homo sapiens
cggtgacagagtggagccatggctagaggtatctcaggagattacatttcagcttgaaaaagggtcggtggaatt

SEQ ID NO: 255253 - DNA, 95 bp, Homo sapiens
gaggtggagcacctgaagagatgccagcagtgtactaatggtcacttgatgtgcgctggctgttttatccacctactagcagatgcccggctgaa

SEQ ID NO: 255254 - DNA, 100 bp, Homo sapiens
cgttgctggtgacagcaaaaatgacccaccaatggaagcagctggcttcactgctcaggtgatgtttttaggagaaattgaagaaatcttagatgtcatt

SEQ ID NO: 255255 - DNA, 74 bp, Homo sapiens
gtggctccgcagatacctggagaacgggaaggagacgctgcagcgcgcgggtatctgcggagccactccacgca

SEQ ID NO: 255256 - DNA, 82 bp, Homo sapiens
cggacttcgacacctacgacgatcgggcctacagcagcttcggcggcggcagaggggatacccacccaccatcccagggtct

SEQ ID NO: 255257 - DNA, 82 bp, Homo sapiens
gtcagaggggaggaggactctggagctgacagcgcgcacttcacccgcagttgctcggtgctgattatcacaactgtttggt

SEQ ID NO: 255258 - DNA, 51 bp, Homo sapiens
gtggtgatcaatgtgaacaatattctcaagtgtgaacacagcaggtgtgag

SEQ ID NO: 255259 - DNA, 83 bp, Homo sapiens
cctcgctccctctgctcttcctcccttcgctcgcaccatgatgtgaagttcatttccaatccgccctccatggtggcagcggg

SEQ ID NO: 255260 - DNA, 98 bp, Homo sapiens
accgcacaggcaggaggcatggccaagggggacttgatctcatcttcatgccaggccttgggtttgacaaacatggcaaccgactggggaggggcaag

SEQ ID NO: 255261 - DNA, 75 bp, Homo sapiens
cagccaagtgcgggagtccacgaaaagtcctccatacattttctccccaattccattccttgggcatgccatagc

SEQ ID NO: 255262 - DNA, 100 bp, Homo sapiens
gccgggccatgggcgcccgcgctgcctatatctacatccgaggggaattctacaatgaggcctccaatctgcagatcttgattccacccaaaggtttatt

SEQ ID NO: 255263 - DNA, 100 bp, Homo sapiens
ggaaattctggcattctgttagacagtgaatgtggaaaggagattgacagtcacaattttgtaataagggggaaaaaaatagtggctttgatgtcctcta

SEQ ID NO: 255264 - DNA, 100 bp, Homo sapiens
ttccccaatgactacaccctgtccttctggtgttggggatgtcctttgcactgaccctgaactgccagattgacaaaaccagccagaccatagggctatg

SEQ ID NO: 255265 - DNA, 101 bp, Homo sapiens
ctgggcggcaaccaactgcagagcatcccggctgagatcgagaacttgcagaggaactttccgctgtactttttgccatacagaggtagaagaggatgaat

SEQ ID NO: 255266 - DNA, 87 bp, Homo sapiens
ggactggatcaacaccggggagtctgcggtcaagttcatccgagaagtaacaccatatatcaagaagccatcattagtatcagatct

SEQ ID NO: 255267 - DNA, 116 bp, Homo sapiens
tggacttttggcgccagctctggagagtcattgagagaaggtgattggagttgtgcttcaaaaatttcagaaattcagcagtattttatctgccaacaataagctctttacttgat

SEQ ID NO: 255268 - DNA, 82 bp, Homo sapiens
tctactgcgtggcttgtcaggaactcgactcagacgtggataaagataatcccggatgataatgaagataattcaaatgatg

SEQ ID NO: 255269 - DNA, 99 bp, Homo sapiens
tcctgccgtccatgcggaagatcgtcgccacctggatgctggagttggaatcgaagcctcttaaaatggcagatgacttggacttcgagacaggagatg

SEQ ID NO: 255270 - DNA, 100 bp, Homo sapiens
ggaaagcagcgggacgaggatgacgaggcctacggtgtcgtgaaaactacccctaaaagccaaaatgggaaaggaaaagactcatatcaacattgtcgtc

SEQ ID NO: 255271 - DNA, 98 bp, Homo sapiens
tttttccaggagaagaaggtttagattatggaggtgtagcaagtatgcgttccattttgaggaatcacagatatcgaagagatgccagaacactagaa

SEQ ID NO: 255272 - DNA, 82 bp, Homo sapiens
agtgaccgagaccgcggccgggaccgagggtgaagatcatgacggagaaggaactcctggccgtggcttgtgagcagtttct

SEQ ID NO: 255273 - DNA, 82 bp, Homo sapiens
cgccgggctttgttgtggaaatcccggttacctggttttaaaatcaaagatgggaaaatcggagaaaattgcccttccccat

SEQ ID NO: 255274 - DNA, 100 bp, Homo sapiens
acaacctaaacattaagcagtacagctgcctcaaacctttggggtatatgagctccctgaaagcacaaagcagttatttccatcttcagatcattcagag

SEQ ID NO: 255275 - DNA, 87 bp, Homo sapiens
cgctccccgccgggacgccccgcgccgagccggaggccgcgtggacccgaaagccgctgggaaaagaggagaacatttgcctgcact

SEQ ID NO: 255276 - DNA, 80 bp, Homo sapiens
aaatcggcagctgagacggccttggccggatggacactccacagctgaccttgactgaactccgggtccttcttgagcag

SEQ ID NO: 255277 - DNA, 50 bp, Homo sapiens
cggaggtcgataagctggaactgatggcataatcaccagcaacacccggg

SEQ ID NO: 255278 - DNA, 75 bp, Homo sapiens
cgcgagctgcgctggttcaccccgtggtcgaggagtcgcccccgcctctcctggactcttttcaagaccagtctc

SEQ ID NO: 255279 - DNA, 75 bp, Homo sapiens
agcatgaagtcacagggctactgttttccaatcctcagttggttgaatctggcgatgtggaacccatggatatgg

SEQ ID NO: 255280 - DNA, 90 bp, Homo sapiens
attacgagaaatgttagagaagaaagacagctttgtggaagagcggagcgtgctttggacaccatgaattttgatgttataaagggcaag

SEQ ID NO: 255281 - DNA, 75 bp, Homo sapiens
ctgggatccgcaggttccctacacggtctcctgggtcaagccatgggaacaaggaggtcttctcctgccggggca

SEQ ID NO: 255282 - DNA, 90 bp, Homo sapiens
agaagcagcgggggggcaggcgatcgaagacaagttggatggcttgaggactggtactaaaaggaaacgtgactgggaggccattgccag

SEQ ID NO: 255283 - DNA, 80 bp, Homo sapiens
gctgttctgaagagtgttactgtgaacattcatgcacaaatttttatgtggaggagacaggcagttccagtcacccctgc

SEQ ID NO: 255284 - DNA, 78 bp, Homo sapiens
agagccattggagggcgcggggactgcaaccctaatcaggactacaaatccctccaggatatcattgccatcctgggt

SEQ ID NO: 255285 - DNA, 76 bp, Homo sapiens
aacaggtagaagatctagaaaggagagttgcatcagcaagtttgcaagtgaaggacccagatgatgtggtaccagt

SEQ ID NO: 255286 - DNA, 83 bp, Homo sapiens
tgagattttccaagagttggagaaagaagtagaatattttacaggatcccttattctgagagcataaaagaaatgctaacgac

SEQ ID NO: 255287 - DNA, 98 bp, Homo sapiens
gccttcaggaccatctggatgacttggtggtggagtgtagagatatagttggcaacctcactgagttagaatcagagtgagaaggacgttgaagagtg

SEQ ID NO: 255288 - DNA, 132 bp, Homo sapiens
tcctttcagccgtctggggagcacagaggctgacctgtgtcagggagaggaggcggcgagagagacacgaatcgtcctggactgtggggaagatgacgtatgtgtgccccagcttcagctcactgccagcgt

SEQ ID NO: 255289 - DNA, 73 bp, Homo sapiens
aggagctcactgcggtcctaaccccgccgcagctcctcggacgcagagccgaagagattcctctgaaaatctt

SEQ ID NO: 255290 - DNA, 82 bp, Homo sapiens
cctgccgtccatgcggaagatcgtcgccacctggatgctggagccctgccaggagcccggaagtgggtccgcacgagacaga

SEQ ID NO: 255291 - DNA, 80 bp, Homo sapiens
gtcttcctgcaatatgagttcacccacttgggcctggacctgtacttggaggatgttgacaatgcgtctctggcacgtct

SEQ ID NO: 255292 - DNA, 75 bp, Homo sapiens
aggatatcgtgtctggagcagtggagcccaaagacccctggagacatggctgaaggtgatgtggccgccctcaac

SEQ ID NO: 255293 - DNA, 75 bp, Homo sapiens
cgtggccggaatcattcccttggctgttaatttctcagagactaaacttcagtggctctgtgaggaactgaaaga

SEQ ID NO: 255294 - DNA, 90 bp, Homo sapiens
agccttcctcaaatccctactcccactttacctccacccccatcagagttacagctcttttgaggaagcttaagcagcaatccagggaaa

SEQ ID NO: 255295 - DNA, 100 bp, Homo sapiens
tttgagtcctcgagtgaatgggcggatctcatatcttcacttggcaaactcaacaaggtgctggagaatctggtaaaagcaccattgtgaagcagatgag

SEQ ID NO: 255296 - DNA, 76 bp, Homo sapiens
gagacggcttccgttgcgtgcccggaggtagctttgcagtttggggagggctgttttccatgattgactgtagtat

SEQ ID NO: 255297 - DNA, 75 bp, Homo sapiens
aaaaaatattggagatattaatcaagatggctacccagcggaagatccatccaaaagctatgtgaaattacgaga

SEQ ID NO: 255298 - DNA, 80 bp, Homo sapiens
tgcattgactggaaacaatggcatttacagaaagagtcaacagcagtggcaacagggactggtgattgcagctggaagtg

SEQ ID NO: 255299 - DNA, 82 bp, Homo sapiens
ttccatcagtcaggtcattgagcagttacctcagccaaacaggacaagcaggtgaaatgacaatggatgctctgttggctcg

SEQ ID NO: 255300 - DNA, 100 bp, Homo sapiens
ccgtcatcgacaatttctacatctgcccgaccaacaagaggaagtaagactttgaccccgacgcaggcttcagtgattgccgcggatcagaagcctgagc

SEQ ID NO: 255301 - DNA, 98 bp, Homo sapiens
gcaacatctttcctcaccccaaggtagcccacctgggaggaattttccagagatcactgtctgatgaccctgtcttggaattggagccatgcaagtta

SEQ ID NO: 255302 - DNA, 50 bp, Homo sapiens
gtgagtgatcactctcaatcccggatgccaattctcggaagcaagaagca

SEQ ID NO: 255303 - DNA, 83 bp, Homo sapiens
gtaaagttccagggaggccgcgaaggcacctacaaaggcagcacctaagcaaaagattgtgaagcctgtgaaagtttcagctc

SEQ ID NO: 255304 - DNA, 90 bp, Homo sapiens
ctggagcctgacgagctggcggcagcccctgtcaaagggaacaggaagcagtccacggagggtgacgccctagacccacctgcatccccc

SEQ ID NO: 255305 - DNA, 100 bp, Homo sapiens
gatttgttctgtatcagaagacaatatcatgcaagtgtggcaaatgaatgaactctggaagcccagccagggacaatgcaccttcacagagattctgcac

SEQ ID NO: 255306 - DNA, 74 bp, Homo sapiens
tcccttaacgccagtctttgaagggcttgccttcaacccgaacgagaactggaattgcagaaatcaaacggcag

SEQ ID NO: 255307 - DNA, 100 bp, Homo sapiens
gaagacaccgcggtgggattccagctgtctgattaatgagaaacataatgtattttgggctatggaacacacctgatgaatcatttgaaagaatatcaca

SEQ ID NO: 255308 - DNA, 100 bp, Homo sapiens
acccacacccctgtattctcctccgaaccccttcatgcccaaatcccggaaactccagcgtgtctccagccgtgtgtttgtggagaaggtgctgcagaga

SEQ ID NO: 255309 - DNA, 82 bp, Homo sapiens
caggagaggagcactttgaggacatggcctccgacgaggacataaaccaaggtgtatgttggtaacctgggaactggcgctg

SEQ ID NO: 255310 - DNA, 90 bp, Homo sapiens
aaaacaaaaatattatggtctttgtgcacatttacatcaagttttccagataacagaaagtaacgtgaaggaattcaggtgactcagaca

SEQ ID NO: 255311 - DNA, 100 bp, Homo sapiens
gacctggctagaagcagagacaccaggacagaaaagacagtgttctgctttcatggagttcacagaagagtcgaggagggttctccaaaaaatgtggaat

SEQ ID NO: 255312 - DNA, 76 bp, Homo sapiens
agagttccttcctggtggactgcagcaaagctgaaagatcaactgaaatcggcaaacttctgagttcctacttgca

SEQ ID NO: 255313 - DNA, 85 bp, Homo sapiens
cgcgccgccgacgacccagcagccgccatggctctgctccgagaggatcttcaaatgcttccttgaaagaagaagaatgtaaaga

SEQ ID NO: 255314 - DNA, 74 bp, Homo sapiens
gaagagaatggactgaacaggagacccttctactcctggagcaattttccagattattcaaagtatcaggatgg

SEQ ID NO: 255315 - DNA, 74 bp, Homo sapiens
tgtgcagtaattgtcacacagaagaaagtacctttccgccatggagtcatagttgcagctgactccagggctac

SEQ ID NO: 255316 - DNA, 75 bp, Homo sapiens
tataccatcgtcaccatgacaacactagggcctccggaatgccccccgctgctgggcagtgatccagcccctgct

SEQ ID NO: 255317 - DNA, 90 bp, Homo sapiens
ttgtattttggtgaccatatatacagtgacctggcgaacaaaatccagtctcatagcagaggagaatataatgtttacagcaccttccag

SEQ ID NO: 255318 - DNA, 103 bp, Homo sapiens
gtcgtggccggagcggcccgcgcctgggctgccggcacttcgcggcaggtttttagaacttcagccataaaaatgggcagaattttccttgatcatatcggtg

SEQ ID NO: 255319 - DNA, 100 bp, Homo sapiens
agacccacggaggcttcgcgggaagacgcggcggcggcggcggaggatgagcctgcagagcgcgcagtacctccggcaggtgacagcagggacatgtctc

SEQ ID NO: 255320 - DNA, 74 bp, Homo sapiens
ggggcggcaccggatcaccaagacggaggttatgaagacagtatggagtttccagaccatagtagacatttgct

SEQ ID NO: 255321 - DNA, 100 bp, Homo sapiens
attcaggccaaactggtaaatgacgaaggggcttcttccagagccaaggaggaagggttgtccgggacataagcagctctatgaccaatagcacagctgc

SEQ ID NO: 255322 - DNA, 100 bp, Homo sapiens
gctgcccgtgtgcccggcaggtggagccgcccgcatcagcggcctcggggaatggaagcggagaacgcgggcagaggaagaaatcctacttagcgacatg

SEQ ID NO: 255323 - DNA, 121 bp, Homo sapiens
agggaggagaacggccgaaaattagcctgccggtgtctctttatcttctgtcacaggtaagaattgtgacaaaggccagtcttttttcattgacgccccagattccccagccacgttagcc

SEQ ID NO: 255324 - DNA, 99 bp, Homo sapiens
gtgccccttagcgggtgggggaagctggtaggcacgggcggctccgcagtgaccggactcgggggagctgcaattagaagtggatcggttggaagaact

SEQ ID NO: 255325 - DNA, 100 bp, Homo sapiens
tcttcgaaataaggccatcatggagagtttgagtaaaggtggaaacataatggaacagaattttgagggatggactcaaactggtgggtgcttaagtctg

SEQ ID NO: 255326 - DNA, 74 bp, Homo sapiens
ctcggattcttcaaaaacttcacctgaaggtttattcttcagtccaaggaagcaattcacagtcagctgttaga

SEQ ID NO: 255327 - DNA, 100 bp, Homo sapiens
cggggacctgctccgggacaacatgctgcggggcacagggtcgagcacgcacgcatgcatgccaagcaccgtggccatgaagctatgcatgctgaaatgg

SEQ ID NO: 255328 - DNA, 74 bp, Homo sapiens
cctgatcatgcagacatctccaactgtgggaactctttccagcttgtgtctggggctgaaagaagtgacacttc

SEQ ID NO: 255329 - DNA, 75 bp, Homo sapiens
ctgggaatcctggccctgtcccacaccatcagtttagatgcaaaatccacaagtattcaagtgattgttaaagag

SEQ ID NO: 255330 - DNA, 50 bp, Homo sapiens
cttctctagaccttgccaagatggcacagacatttatgcagtgtgtgatt

SEQ ID NO: 255331 - DNA, 100 bp, Homo sapiens
cccggacaggctgcagctcgtgtgcaacgcgctactggcccaggtaaattggcaggatgaggagcagcaaatcaaaagaggtgcctttaccaaatccaag

SEQ ID NO: 255332 - DNA, 90 bp, Homo sapiens
cccggagcggcccaggagcacgccgcggggagcgcgggcgtccggggctggagtcgcgcaggggctgcggcaggaccacccaggccagat

SEQ ID NO: 255333 - DNA, 100 bp, Homo sapiens
ctttggaacgtcattcattctcgatgtcgtgctaaatcagtgtatgcaacagcgttattgcaacaggctaacgaaaacagacaaaattcaactggaaaag

SEQ ID NO: 255334 - DNA, 75 bp, Homo sapiens
cctggaacttcatcatcatctacttcacaggaattgccatttgatcgtgggggtcctccctgcaagcccccagca

SEQ ID NO: 255335 - DNA, 90 bp, Homo sapiens
atttaaaagacagtcctcgtcagcactgactttcagctatggaatcgtgctgaagagacctgtcacctctgaggaactccttactcccgg

SEQ ID NO: 255336 - DNA, 89 bp, Homo sapiens
ccgactcgtggaccactttcatagaaaactctctgcagaggaattagagcgaaaacggcaagagatgatggaaaacgccaaatggaggg

SEQ ID NO: 255337 - DNA, 100 bp, Homo sapiens
gggtgttgatgaagaaattgtttatgccaaatcaactgccttacaggttggatggcaagcatgtggtgtttggcaaagtgaaagaaggcatgaatattgt

SEQ ID NO: 255338 - DNA, 75 bp, Homo sapiens
cggatgaggagaccctggaagacaatctaagtcaccgagacttggagccagaatctgagcctcagctggagtcag

SEQ ID NO: 255339 - DNA, 75 bp, Homo sapiens
ccccggcccacagtgggggtgtgcaaacccgagagaactggctgaggacgatgacatgaatgaggacacagtaga

SEQ ID NO: 255340 - DNA, 97 bp, Homo sapiens
ccacctcctggaatgaccttaaatgagaagagtgttcaaaattcaattacacagaaactactaaagttcctggggaagcaaagtagaatttcataag

SEQ ID NO: 255341 - DNA, 75 bp, Homo sapiens
aaaaccttaatagtgttgacaaatgtaactaaaaatatagtggcatttaaggtgatcgcgggtctgtaccagaga

SEQ ID NO: 255342 - DNA, 74 bp, Homo sapiens
tattgcgcgtggaacggctgcttttggaagacctgcctagagctggaacgttacctccagagcgagccctgcta

SEQ ID NO: 255343 - DNA, 98 bp, Homo sapiens
tgagcttggcctcggcgtcctcggggttacacatcattttggaatgactgtatatcatctggattacgtggctgtatgttaattgaattagcattgag

SEQ ID NO: 255344 - DNA, 90 bp, Homo sapiens
atcccgttctctgatttgcagcaggtgtccaagtcacacagagccacggaatctcacaggagcctgagaactcctcctcctgggactctc

SEQ ID NO: 255345 - DNA, 97 bp, Homo sapiens
gtgctgcagaggacacgaggcggcgggctggagacatggaccgcggcgagcaagacccaacatgagtgaagtttcctgcaagaaacgggacgactat

SEQ ID NO: 255346 - DNA, 75 bp, Homo sapiens
gcgcaaggtcgccctcaaggccatgatcaaaacccttatacaggatgctgtgttctttgctcctttgtgaatgtc

SEQ ID NO: 255347 - DNA, 75 bp, Homo sapiens
tggagcgcggccctggggcccgggggcgcgggccggggtgattgacgagatgcctgaggctgccgtgaaatcaac

SEQ ID NO: 255348 - DNA, 89 bp, Homo sapiens
cttcccttctttcctgtccagagccacccctagctgtccccctgagatgaagaaagaggtgtgcaactgaggaacatggctcaagaaac

SEQ ID NO: 255349 - DNA, 100 bp, Homo sapiens
acagtatagcttctgacagtggagacactggcattggaacttcctgttctgatagcgtggaaggtggaacggccgccttctccattctccatggccccac

SEQ ID NO: 255350 - DNA, 74 bp, Homo sapiens
taagcagctgaacgagaaccaagtgcggacgctgtgcgagaaggactcgctcagcagcagcctgaaaacttgct

SEQ ID NO: 255351 - DNA, 100 bp, Homo sapiens
ccttcagaaacagtgctgaagcctttaaatgcagcatctgcgatgtgaggaaaggcacctccaccaggcccctccagccagcgtcaggtgcagaatggcc

SEQ ID NO: 255352 - DNA, 75 bp, Homo sapiens
actctgtttcgggagcggagcaaaggccgcatccagcgccagctggagataacgaccgtggcagccatgtattac

SEQ ID NO: 255353 - DNA, 83 bp, Homo sapiens
ccccggctcgcccgtgtgcagagcttgcccagtttcgacaaagaaaagctcagtcggatgggcagagtccttccaagaagcag

SEQ ID NO: 255354 - DNA, 75 bp, Homo sapiens
cagcacagtgttcagcaggtcctgttggagatgatatgttgaacttgaccctcatcgacctcccgggtatcacca

SEQ ID NO: 255355 - DNA, 105 bp, Homo sapiens
gaaggccatcaccacgcagaacgtcaacaccaagtgcatcaccatccccaggtgtggatgaggtcaccattgtcaacattttgaccaaccgcagcaatgcacaga

SEQ ID NO: 255356 - DNA, 100 bp, Homo sapiens
cacctctatcatgtttctagtagcgcttagtgaatatgatcaagttctcgtggagtcagacaatgaggagccttttgtggcagatgaatatattgaacgt

SEQ ID NO: 255357 - DNA, 80 bp, Homo sapiens
gtccatcaaatttttggagggtatctcagatcacgcggtagtaagcattaataatgtctttcatctttgagtggatctac

SEQ ID NO: 255358 - DNA, 75 bp, Homo sapiens
cctggacttcgcgcagtgcctggggtactacggctacagcaaggcatttgttgctatcggggactacaatggcca

SEQ ID NO: 255359 - DNA, 95 bp, Homo sapiens
aagggttcagggttgaaaatgagctcagttacatcatgctgatgacagcttcctggtcctcaccacagatggaattaacttcatggtgaatagtc

SEQ ID NO: 255360 - DNA, 98 bp, Homo sapiens
gaggactggcttgtcttattgtaatgtttcttccagaaaagaaagagaagcacctgaggcaggagccagggacccagccctacaacatcagagaagac

SEQ ID NO: 255361 - DNA, 75 bp, Homo sapiens
cagacagtggggaggaagaatgccggtcacagcccaggaggtagtgggcagcagtcagtgacaggtgtaacctct

SEQ ID NO: 255362 - DNA, 90 bp, Homo sapiens
cctgttccaccttcagagcgtcacggcgtacgccctcatggggaaaatctccccggtgactttcaggtgccctttaaggaggcagaatta

SEQ ID NO: 255363 - DNA, 83 bp, Homo sapiens
acgacagcaacccgaagacagggaaatttagtgatgtggcatgggcgtctctggacctgccatccctcgtggctgagcacctc

SEQ ID NO: 255364 - DNA, 83 bp, Homo sapiens
cgtggccatcggcagctgcggccacacgctttccatctgatggtcccctggtgtgtgccctggaacaggagcgaaggctccgc

SEQ ID NO: 255365 - DNA, 100 bp, Homo sapiens
gaggtagtcatgatctatgacgccgagaagcagaggccccgagaggcctcgtggacagagagattcaagctattattgggaaatagaagccagtgaagtg

SEQ ID NO: 255366 - DNA, 48 bp, Homo sapiens
tcacttcttacagactgtaatcctgacggcaaacttgatgtcaattct

SEQ ID NO: 255367 - DNA, 100 bp, Homo sapiens
atgggacatcttttggagagtatggcggctggtacaaagcctgcaaagttgatagttcacacaaaagatgttggacaatttctacaattttgcttcatca

SEQ ID NO: 255368 - DNA, 99 bp, Homo sapiens
gtcgccgcatcccggacggtacttctgccactgctgctccgtggagatcgtcccgcgcctgccggccatgacgctgatggagtacctcatcaagaccgg

SEQ ID NO: 255369 - DNA, 98 bp, Homo sapiens
ttgaaatgctaagattcttggataccacagtatcataaaattcctctaaatgcagatattaatgcacacgcctgtgttactggtaaacccatcagcca

SEQ ID NO: 255370 - DNA, 83 bp, Homo sapiens
cggccaagggaccaaggtggaaatcaaactttcaccagtgatcattaaagaatgggcagcttacaaaggaaagtctcctcaaa

SEQ ID NO: 255371 - DNA, 100 bp, Homo sapiens
cgctgctgcccctgctgtcgctcctggtcggcgcgtggctcaagctagagaatggatcttggagaatgtctgaaagtccatgacctggctttaagagcgg

SEQ ID NO: 255372 - DNA, 98 bp, Homo sapiens
gacctccagcgggcgcgtttcatctgccccgttgtgggcctggagatgaacggccgacacaggaggaccactctctgtggcaccctggactacctgcc

SEQ ID NO: 255373 - DNA, 101 bp, Homo sapiens
ctcagagagggaagagattcagccagcacactcctcgcgagcaaggttttaaaatcaaagatgggaaaatcggagaaaattgcccttccccatggccagct

SEQ ID NO: 255374 - DNA, 83 bp, Homo sapiens
ctttatgatgatccactgccatttaatgaatatgtatactctgaaagagcgatgcctccaggttgtccggagcctagtcaagc

SEQ ID NO: 255375 - DNA, 100 bp, Homo sapiens
cagctctgtgctgatccccaccgacaattcgaccccacacaaggaggatctaagcagcaaggcttgaccactatgctatcatcaagtttccgctgaccac

SEQ ID NO: 255376 - DNA, 75 bp, Homo sapiens
aaactttatttgcgatctatagcaattggaaatcatgaccagatctgaaatggctgaaaaaatgttctcttcaga

SEQ ID NO: 255377 - DNA, 100 bp, Homo sapiens
ctccaacctttcagaggctggctcaatcaagaaaggagaaagagagctcaaaatcggagacagagtattgagacccactgctaaggagttattgaagcac

SEQ ID NO: 255378 - DNA, 97 bp, Homo sapiens
acagattgctgaccaggggcttgagagctgggttctattttccctcctcaaactgactttgcagccacggagagccaccaaagtccttggcactgtc

SEQ ID NO: 255379 - DNA, 76 bp, Homo sapiens
atgatccgcctgcctcagcctccaaagtagctgagactacagttttagttactatccagcagaaaacttgatagag

SEQ ID NO: 255380 - DNA, 100 bp, Homo sapiens
aaagaagtgctatctggaaagagagttcctgaatgttccaatgtttcgaaatgtctctctgaagtgcctcactgagattgctggtgtgagtgtaagccaa

SEQ ID NO: 255381 - DNA, 98 bp, Homo sapiens
ccggtgccggcctagcgtcctggaattacttcaatcaaaaactgccaagttttggaccttatctggaacagcgcaagaaaatcatagcagaaaacaag

SEQ ID NO: 255382 - DNA, 74 bp, Homo sapiens
cgtcccatttgagcctgtcaatgtcaccactgaccgagaggattctggcagccaggaggtgctgtctgaattga

SEQ ID NO: 255383 - DNA, 51 bp, Homo sapiens
gcgggacgtggtataccgcgacatcaaggcttggccttcgtgcctctgcag

SEQ ID NO: 255384 - DNA, 97 bp, Homo sapiens
tctcaaggaaaagtattgcaagcaacagtagtcgctgttggatcgggttctaaaggaaaggttcgagatgtgaggatgatttctgacagaaattcaa

SEQ ID NO: 255385 - DNA, 89 bp, Homo sapiens
tgcagatctgaagacctattttactgataagaaaacacatctttacacactaaaccccagatataaaatcgatggaagtcttgaggtcc

SEQ ID NO: 255386 - DNA, 88 bp, Homo sapiens
aaggatgtgatccagtaaaccgactctggtactgtgacctacagcaggaatccagtggcatcgcggcttcagtatcagacacagcaca

SEQ ID NO: 255387 - DNA, 100 bp, Homo sapiens
ccgcaccacctgctgcaaggctcgggaaggaaggcgaagatagcaccggggcatccccgggagtccgcaaggccaagactaaggggctgcagagcggggt

SEQ ID NO: 255388 - DNA, 86 bp, Homo sapiens
gcggacacctccacatcgccttttgccacctttccctttatttccggagcagccattgtttgatgtcctgtgactgagaaaccagg

SEQ ID NO: 255389 - DNA, 96 bp, Homo sapiens
agctctatgagggatgtgtggacactgcactgaagacagtccatgaaggctctggagaaactagtcaaaaggagacatccacctgtgatatttgcc

SEQ ID NO: 255390 - DNA, 87 bp, Homo sapiens
ggaagtctgtgtggctgtatgctcttgcaagcttaggatatgaaaagagctgtgtgttgttcaattgtgcagccttagctagccaaa

SEQ ID NO: 255391 - DNA, 50 bp, Homo sapiens
gtggtgaaggagtgtgtgcagcgatcatgagcgtcttgttgttcatcgag

SEQ ID NO: 255392 - DNA, 51 bp, Homo sapiens
agcaagggcatgatgcctccactagatttagaagaattctgctttaagttt

SEQ ID NO: 255393 - DNA, 99 bp, Homo sapiens
tcctccttcaggggagacaccaatttctatggcaaacagggccatgctatgatagtggaagcttatccaaaataatagatccagaagaagtgacctgaa

SEQ ID NO: 255394 - DNA, 98 bp, Homo sapiens
ctggttcttctgtcgccggcttcagcagcccgcgcccgggcagctatatgttctcctttcagccaagacctttcaccagtgcaggggatagaagattc

SEQ ID NO: 255395 - DNA, 100 bp, Homo sapiens
cttcactcctcttcacttcttcaatgtctttggtggacttgggaaagaggttgctagaagcagcaagaaaaggccaagatgatgaagtgagaacgttgat

SEQ ID NO: 255396 - DNA, 75 bp, Homo sapiens
gcttctctcagcctcccacagcagcccaactcctgagaggaaacttccattttagaagaatacagtatcaattgg

SEQ ID NO: 255397 - DNA, 75 bp, Homo sapiens
agcaagcgatggcatagtaaatgaaaacttggaagaagccatggatttaataaatagagaaacaatgtctgaatg

SEQ ID NO: 255398 - DNA, 90 bp, Homo sapiens
tgcaaatcttccaagtctaatagacctaaagccacagtcttcaagagcccacggacaccacctcaacgggatttatcaaagatgttcatg

SEQ ID NO: 255399 - DNA, 99 bp, Homo sapiens
tcagagcggctggagctctcggtcctatacaaggagtatgctgaagatgacaacatctatcaacagaagatcaaggaatcctacgccaacgtgaagcag

SEQ ID NO: 255400 - DNA, 74 bp, Homo sapiens
agttaggattttattactggcagcatgtatatcttttgatcatgtatatgaacttctcaacaccattgatgcct

SEQ ID NO: 255401 - DNA, 101 bp, Homo sapiens
cccgcaccaggccggtactcagctgaatcgatcaccgttgcttggtccaggtaggaaaggtgtttgcacttgtgacagcagtatgctgtcttgccgacggg

SEQ ID NO: 255402 - DNA, 83 bp, Homo sapiens
ctccgggttccccggctcgcggggcccggcgaagggcaggaaccacgtgaatgttgagggggcgacacacaagcaggtggtgg

SEQ ID NO: 255403 - DNA, 98 bp, Homo sapiens
gagagctgtgtcaccatgtgggtcccggttgtcttcctcaccctgtccgtgacgtggattggtaccagctgaagctctttgcccgcatgtgcttggac

SEQ ID NO: 255404 - DNA, 50 bp, Homo sapiens
tgatgatttagttgattctctgaaggtgaaatgacaatggatgctctgtt

SEQ ID NO: 255405 - DNA, 100 bp, Homo sapiens
aggagataaatcaaaggaaaataccagaaagatttttagtggccccaaacgggagtgaacatggaaaggtttgcagaagaagcagatgttgtaatagttg

SEQ ID NO: 255406 - DNA, 82 bp, Homo sapiens
cgggaagccacatgcagccactgcaagagtcaggttccgatgatcgcgctgcagggggatatgagactttctactcggaata

SEQ ID NO: 255407 - DNA, 83 bp, Homo sapiens
ccgccgcccagagactgctgagcccgtccgtccgccgccaccacccactccggacacagcatctgtccgatctttcctgtttc

SEQ ID NO: 255408 - DNA, 100 bp, Homo sapiens
ccaacattcccaacagccaccaccaccaccagatgattgacgagatgcctgaggctgccgtgaaatcaacagccaacaaataccaagtcttttttttcgg

SEQ ID NO: 255409 - DNA, 90 bp, Homo sapiens
gcctcagctatacatttacatcagattattgggagcctatttgttcatcatttctcgtgttcaagttccagtgtctcgccccatcctcac

SEQ ID NO: 255410 - DNA, 101 bp, Homo sapiens
caggtattgggagatccacagctaagacgccaggacccactggaagcctagaaatggaaacctcgacctgtctcccagttggttgcacagcaggttactca

SEQ ID NO: 255411 - DNA, 96 bp, Homo sapiens
ggacatcctgccggactatgagctcaagctcatccaccacgacagcaagaggccaaactgagcagtttctggcagttgattgtggatgagaaaaag

SEQ ID NO: 255412 - DNA, 76 bp, Homo sapiens
gcgcgggttacctgtgtgccgcgctggtgctcaagcagaaactcgcccaggagactattgggaagaagttacctgc

SEQ ID NO: 255413 - DNA, 100 bp, Homo sapiens
agatttggtggcaatctgaaaatgacatatctgaagagatggattaagaatgctttggattaaggattgtggagcacatttcaatcattttaggattgtc

SEQ ID NO: 255414 - DNA, 88 bp, Homo sapiens
aagacagtgcctggataccttcgaataggctctgcttatgataatgtcaacaaagttcgagtagctatcaagaaaatcagcccctttg

SEQ ID NO: 255415 - DNA, 74 bp, Homo sapiens
ttaaggattccaagtaactcttatttgtcccagctatctgacttcatgtgaaagatggctaatgcagaagtgag

SEQ ID NO: 255416 - DNA, 100 bp, Homo sapiens
aaatgaatgatcctgaattgctgaaggaaacaactgaagcaaggaatgccttaattgaacaagaaaatatgcccaggttaccaacaatcctgaaaatgat

SEQ ID NO: 255417 - DNA, 100 bp, Homo sapiens
ctctcccaaagcacctgcgcaggcattttgttcccaacatcacctttggtcaccctgtggtagaaagccttcgaaagcagctaggccaggaccctttctt

SEQ ID NO: 255418 - DNA, 82 bp, Homo sapiens
aaggggccttcgctgagctaccgcgctgataaagcagtttgtgtccgacgtggcctggggggagctggactacctggtggtg

SEQ ID NO: 255419 - DNA, 100 bp, Homo sapiens
cctcaacaacctgtgtgctcggtacgatgaaaacctgatcacagatctctatagtccaggcacagatgtcactacagagctggatagctggattgataag

SEQ ID NO: 255420 - DNA, 100 bp, Homo sapiens
acatgacggtcgcacccagcgacaggccgctgcaattgccagagtggagtcaacatatcaatggagcaagtcacagtcgtcgatgccagcttcttcttga

SEQ ID NO: 255421 - DNA, 49 bp, Homo sapiens
ctcggaccgcagcaatgacattggtgattgatatgcccgagcacaaccc

SEQ ID NO: 255422 - DNA, 131 bp, Homo sapiens
gcggcggatctggacacccagcggtctgacatcgcgacgctgctcaaaacctcgctccggaaaggggacacctgactcgttcaaaacaagccatgactcctcagcaaaacagctccatcaagcgtctcgcc

SEQ ID NO: 255423 - DNA, 106 bp, Homo sapiens
atggattttgccatgccctatttcatccaggtcatgaaggagtacttgacaaagattccaaatcctttatttgatctggctggaataacgtgtggacactttctgg

SEQ ID NO: 255424 - DNA, 98 bp, Homo sapiens
cgggatcggtggaggaagatgctttgctctgtggacccgtgagcaagcataagctgccaaaccaaggcaacgcggtaaaaatattgcttcggtgggtg

SEQ ID NO: 255425 - DNA, 100 bp, Homo sapiens
gcaccgggatcgtgaccgagaccgtgaccgagagcgtgaccgagagcgcgaatatcgtcatcgttagaaggtcccgagcgcgagcggagacgatgcagcg

SEQ ID NO: 255426 - DNA, 100 bp, Homo sapiens
aaagcgcttctgtcaatatgtggtaaaacaatcagaactaaagggcactttcattatattccctgctcagagaggatacacgtagctgttacagaaatgg

SEQ ID NO: 255427 - DNA, 101 bp, Homo sapiens
aacatcaagatcttcctggtgtccgagtgcgccctgatgctggcgcagggcacggtgggcgcctacctggctgaagccgacgtagcttctctgaacagacg

SEQ ID NO: 255428 - DNA, 74 bp, Homo sapiens
tggaaagtggaaccaagctcttgtcccagtgtgtttccattgtagaaaacctggtcatggaattgcagattgcc

SEQ ID NO: 255429 - DNA, 100 bp, Homo sapiens
cttgctgtaaattatgagaaagaagaagaattcctcactaatgagctctccagaaaattgatgcaggttgtttacattcagagctctatcaataagagga

SEQ ID NO: 255430 - DNA, 100 bp, Homo sapiens
ctcagagatactatttgtgaagagagcttgagggagccctggtacctgacagtgtaaagaaggagctcctacaaagaataagaacattccttgctcagca

SEQ ID NO: 255431 - DNA, 95 bp, Homo sapiens
gaaaatggccttgtctccggtcgttcccgttcaggagcagacaggccgacggtcgcaaggtcctacggtcaagcatccgggagtttctatgcagc

SEQ ID NO: 255432 - DNA, 82 bp, Homo sapiens
gttcgactgctagagccgagcgaagcgcatgttggagacttgggcaatgtgactgctgacaaagatggtgtggccgatgtgt

SEQ ID NO: 255433 - DNA, 83 bp, Homo sapiens
gtggaaaatgcgctcgggctggaccagcaggggaacgcccttttgcttgtgactggcagggctgcgacaagaagttcgcccgc

SEQ ID NO: 255434 - DNA, 75 bp, Homo sapiens
ggaggaggaggaggggctccggctggtctgtggtgagatgccaacgtccggcggtacctccagctgacacagtca

SEQ ID NO: 255435 - DNA, 98 bp, Homo sapiens
cggaagcggcggagtagagcggagcctggcgggcgtgggaacccaggccccgccgaggcggccagtctgcgggccaggcatcgacatccgcaacgact

SEQ ID NO: 255436 - DNA, 101 bp, Homo sapiens
gtttttctgttttgcctgaatacatgatttaaacaagagatttccacagaaggcacaggaagaaattacccgacttcgacgagaaatgatgaaaagctgta

SEQ ID NO: 255437 - DNA, 98 bp, Homo sapiens
ctgctttcctttccctcagcacacagaggatgatgctgactttgatgaaggagcagcatttctttctattactactatctatgctgagactggttcag

SEQ ID NO: 255438 - DNA, 100 bp, Homo sapiens
cagccgggagctgggcagcagcggccgaggaggaagaagcagctgcggcggccacaccctggatgagggaagaaggagaaagggccaacccctgaagaag

SEQ ID NO: 255439 - DNA, 100 bp, Homo sapiens
cccggatttccagccagagctgagcggcgcgggctccagactcgccgtggtcaagttcaccatgagaggtccttcagctgtggaagaggatgaagatgaa

SEQ ID NO: 255440 - DNA, 120 bp, Homo sapiens
cgcatcgtcgtcctccccgaccgcgtcctgcagcagctgccagtggagccgcctgtttaactgaactgaatgacagtccagttcccctagaacttgagcgctgcaagtctcctacctcag

SEQ ID NO: 255441 - DNA, 83 bp, Homo sapiens
gtgatccagaagtccagagctgaggactgcctgtttgcagcactgccagtgaaagatgtagaagataaacctgaacaacaaac

SEQ ID NO: 255442 - DNA, 75 bp, Homo sapiens
gagtgtgagcggaaaggggcccggcgtctgcctcgagactgaagaccgacaccattcgcttttcacccaagatga

SEQ ID NO: 255443 - DNA, 100 bp, Homo sapiens
gggtcctcctccgccttccgcttgagcttctgggaggaggggctcaccggcgcgtcccccagcagtttggaaattttagcattcaggtgccaggaatgca

SEQ ID NO: 255444 - DNA, 100 bp, Homo sapiens
actttcggcgtccgactagatgactgcccaccagctcatactaatcggactcagaaccgtgctgcatactatcctcctagccaaattgctcaactaagac

SEQ ID NO: 255445 - DNA, 90 bp, Homo sapiens
gcgccgatctatgcacgcagatgctggagaagtccccttatgaccagcattagtgccagcagtagttcccaagggctgtctcagccatcc

SEQ ID NO: 255446 - DNA, 100 bp, Homo sapiens
taggttatgaagctaatcctggcgttccaccagcaaccatgagtggttccatgatgggaagtgacatggataaaagaatcagagtgtctcaacccttgac

SEQ ID NO: 255447 - DNA, 100 bp, Homo sapiens
atgttagtaaactctctgctgaaaaagatcatgacaagatgtttaagatgagtgaaaagatattactcctgtgtgttggagaggctggagacactgtaca

SEQ ID NO: 255448 - DNA, 97 bp, Homo sapiens
catccaaaagactgctgagatagtttatgcagccaccaccagtttgcggcaagcaaatcagggttggcatggatcctattagctgtgtaatactgga

SEQ ID NO: 255449 - DNA, 100 bp, Homo sapiens
cggaggcagagcggctgccatggggtggccgtgactggggagagcacaaccagcggctagaggagcaccaggcacgcgcctggcagggtgccatggacgc

SEQ ID NO: 255450 - DNA, 75 bp, Homo sapiens
atacattaaaaactactcatgtggttccagcaacagatagaaatgctttaagttcactctggggaaagctggcct

SEQ ID NO: 255451 - DNA, 100 bp, Homo sapiens
aaagagttctgattcccagagtgaaactcccaactttaagtatgcccagctggatgtctcttattctgggctggtaaatgacaactggaagcgagggaag

SEQ ID NO: 255452 - DNA, 74 bp, Homo sapiens
cagagactgaaaaacctgaggctgatgacccaaaggtcctggagtacaatgccattggaggcaagtataaccgg

SEQ ID NO: 255453 - DNA, 76 bp, Homo sapiens
caagcccttgcgcctgcctctccaggatgtctacaaaattggtggtggcctttttgaagatgtaactattagagct

SEQ ID NO: 255454 - DNA, 98 bp, Homo sapiens
aacagtggttctgctggattgataaacccagctgctacaggctatggacagaccccctaagccgaaagtctcccagaggaggatgccaaagctccgtg

SEQ ID NO: 255455 - DNA, 80 bp, Homo sapiens
cagggcttccactgattctacattatgaattactttcctagtaagcaagatatcctgctggctaggaaagccaccaaggg

SEQ ID NO: 255456 - DNA, 74 bp, Homo sapiens
gctacagtctgtcgctggatcccaaagatttcagcagagcacttgcacctcctgcgccgccgccccccatccaa

SEQ ID NO: 255457 - DNA, 100 bp, Homo sapiens
tttatgggaaaattaagcagatgctccagtttgagaaacctggatctgcgatctgtttgtgtttctaataagtgaccgtgacccacagtgcaacctccac

SEQ ID NO: 255458 - DNA, 100 bp, Homo sapiens
cgagaagattagcaaaggtgctaatccagtggaaatcaggagaggtcaaaggttccgttacagttactatgatgaatcccagggggagatttatagatcc

SEQ ID NO: 255459 - DNA, 76 bp, Homo sapiens
ggattaaaatctcccaagaggaatgacaaacaaccagctcttcaggattatttatgaggatggcctgtgcaaaaag

SEQ ID NO: 255460 - DNA, 75 bp, Homo sapiens
tttgctggtgttgtccctcccgtggcaggacctatctggaagaggagctagtgaaggcacgggaacgtccccgtc

SEQ ID NO: 255461 - DNA, 98 bp, Homo sapiens
ctcgacgtcttgcctgtgtcccacttgttcgcggcctatagatgcagaatcctgatacactatcagcaatgtcaaaccctagagcaatgcaggccttg

SEQ ID NO: 255462 - DNA, 80 bp, Homo sapiens
atcgaatctcttctccctccccttcttggcgaacatcaaagacctatcccagatcctgaaaaagatgccgcagtaccaga

SEQ ID NO: 255463 - DNA, 83 bp, Homo sapiens
gaaattgaattgaagaaaattgcacgtaatcacccaaatgccaagtgcagaaaagccctgtgttccggagggacggcgcagac

SEQ ID NO: 255464 - DNA, 75 bp, Homo sapiens
atggaatgcaggtctggagcatccctcggaatggccaaagactatgacgggtcttcctagcacatcagggacaac

SEQ ID NO: 255465 - DNA, 100 bp, Homo sapiens
aggaaccctaagaagaggcgccagaggagccgccttctgcctcagaacggcgtgactcggagattctgacaatggagatattaattatgattatgttcat

SEQ ID NO: 255466 - DNA, 100 bp, Homo sapiens
ggccaagctggatgacctcgtcaactgggcccgccggcagaaaggacccaggagcgataacagtaaatcaaataagatatttgtcggtggaattcctcac

SEQ ID NO: 255467 - DNA, 82 bp, Homo sapiens
gatgatgacaaaggcaactgtgaggactaccttatgatttcctgtattggatcaggagtcaattttcagttgaacaaccaac

SEQ ID NO: 255468 - DNA, 100 bp, Homo sapiens
ataagagcagtgattaacgatattgtcataccctaatgatcccagcaagataatgtcctgtcttctaagatgtgcatcaagcctggtacatactgaaaac

SEQ ID NO: 255469 - DNA, 98 bp, Homo sapiens
tagttggcaacctcactgagttagaatcagaggacacagcattgttggttttgccatgtactattttacctatgacccgtggattggcaagttattgt

SEQ ID NO: 255470 - DNA, 76 bp, Homo sapiens
aagccagtgggctggggactcacggccgggacactcagggcagactgtggcacgtttcaggcaggattcctccttc

SEQ ID NO: 255471 - DNA, 100 bp, Homo sapiens
atttgttactttttcttgtccgggtgcggataagggacccgacactgataatggacaggacaatccaatcggattcctggcatatatcatgttctggctg

SEQ ID NO: 255472 - DNA, 100 bp, Homo sapiens
aatagatgacaatgatctctaccgatgggaagtccttattattggccctccagatacactttaagaagacttactattatcaaggtgattttcatatttc

SEQ ID NO: 255473 - DNA, 82 bp, Homo sapiens
aaagtgccgaaacaagaagaaggagaagacggagtgcctgcagaaaagcactacaaacaccactggtttcccgaaaagccgt

SEQ ID NO: 255474 - DNA, 96 bp, Homo sapiens
aaggacaaggacagaatcaccagcactggctgaaggttcgatctggggctaatgttctaatttgtggtccaaatggctgcggaaagagttcacttt

SEQ ID NO: 255475 - DNA, 80 bp, Homo sapiens
ccagcctgcggagcctgtggggcagattactacagcccggccatgctgggcctgaagaccgaccaggaggtcctcgggga

SEQ ID NO: 255476 - DNA, 75 bp, Homo sapiens
cgaaaaagaaaatgaagaaaaagaaatacgtgaattctggcacagtgtggacactgccagcggctgcagccgact

SEQ ID NO: 255477 - DNA, 51 bp, Homo sapiens
gaaggggggacccagctttctaggttttaaaccatctggctggatctcgtg

SEQ ID NO: 255478 - DNA, 75 bp, Homo sapiens
ctcaacctcagatgctaatagtttcagatattgaagcatttcaaaaggtttgaactacctaaccattatggcacc

SEQ ID NO: 255479 - DNA, 49 bp, Homo sapiens
gtggatccaagatggcgacggcgatgagttttgcggcctccaggtggtg

SEQ ID NO: 255480 - DNA, 85 bp, Homo sapiens
ccgctcgcggagggagaggctgcagagcgagggcaggaggtgtacgaagccatcgacagcagagatggagcatcttgtgcagagt

SEQ ID NO: 255481 - DNA, 82 bp, Homo sapiens
ccggagcgtcccagctgcgaggagaggacaagaattttgggcagatttgaatgccatgaacgtgtatgaaacaactgaattt

SEQ ID NO: 255482 - DNA, 75 bp, Homo sapiens
cggttccttggtgtcatccagccttagcaaaccagagctgtgatgcagatccatccgccctagcaaaatatgttc

SEQ ID NO: 255483 - DNA, 77 bp, Homo sapiens
gcctcgtcgacatgagtgatgtggaggaaaacaacttcgagggcagagtggaatgaggtaccatctactgtctccag

SEQ ID NO: 255484 - DNA, 100 bp, Homo sapiens
ctcgcccggttcctctccacttcgtttagttgcgctccatggacagatcaacgaacctggacattgaggagctcaaggcatcaagcatgatggaaccatg

SEQ ID NO: 255485 - DNA, 82 bp, Homo sapiens
cccggcgggacagcggggcggctggcgccgggggccggggagcgccagaaaaactgattgcttatcaacgagaattccttgc

SEQ ID NO: 255486 - DNA, 110 bp, Homo sapiens
ggggattgcggtcatggacaaggaaggcaatgtcctgggtcattccagaattgctgggacaaaggactctcgttggggagatagagattcagaaggcacctggagaaaag

SEQ ID NO: 255487 - DNA, 82 bp, Homo sapiens
cggggacggcgaggccctcatgtaccacacggtatcatgatattagctggtttgacatcaagtcatttgtgagtcatcagat

SEQ ID NO: 255488 - DNA, 100 bp, Homo sapiens
tctgtgaggcaaagattaagactgtgaaaaggctggtgaaagttaaggtgaggcaggcgactaatcagattgtgatgaattgtgctgatattgatattat

SEQ ID NO: 255489 - DNA, 100 bp, Homo sapiens
actttgccttcctgaatctttttccctgcactacgaggaagagatttccagactgtattaccatcatttgagctcttctcaaagtatggaaaattatatt

SEQ ID NO: 255490 - DNA, 75 bp, Homo sapiens
cggctgcagacttggccaaatggacgggactattaagggatctatttgtgatgactatatggcaactctttgctg

SEQ ID NO: 255491 - DNA, 100 bp, Homo sapiens
aaatccttgaggaccttcagataggctgcaaacaactccggatccttaagatgcaatactgcacaaatatttccaaaatgatctcaaacccagagtatgg

SEQ ID NO: 255492 - DNA, 75 bp, Homo sapiens
ggcggcctgcgcagccacctcaagtatctccagatgaaatggccactgcttgatgtccaggcagggagcctccag

SEQ ID NO: 255493 - DNA, 98 bp, Homo sapiens
ggagccacaaagaagaaaacatttcttttaatttttaaacttggtttgaaagattggcaagttatgtgcccattctcaacaacgccaatatagatctg

SEQ ID NO: 255494 - DNA, 121 bp, Homo sapiens
cggaagaccgcgcgcagggcctgcagcgggagctggacggcgagcgcgagcggcgcgagaaaaccctctttcccagctgcccgctcctcagcacccgaagattcgcctgtacaacgcagag

SEQ ID NO: 255495 - DNA, 97 bp, Homo sapiens
gcgcttcttccccactcccgagacaggatggcttaaattccttggtccttgatttagattttcctgctttgaggaaaaacaagaacatagataattt

SEQ ID NO: 255496 - DNA, 75 bp, Homo sapiens
gttgagcacctgtttgcctgaagttaatttccagaagcaggtattttgaaggtggcgtctcatctgtctacctct

SEQ ID NO: 255497 - DNA, 90 bp, Homo sapiens
cgctgaggaaacgcaagatgtacgaggagttcctcagcaaggtctccatcctaggtggccaaggtggaatacgtcaggaagaagccaaaa

SEQ ID NO: 255498 - DNA, 88 bp, Homo sapiens
gggagcctattgtccagcccctcagtaaatgaagcatttggaagacgagagaggcttgttcttgggagtgcaagaaattcatctatta

SEQ ID NO: 255499 - DNA, 114 bp, Homo sapiens
ctttgctgacgatgacaacacctacagccgggagctgtttgaggaggcgcatattaaatttcctattgactacccctattcaccacctaccttcagattcttgaccaaaatgtg

SEQ ID NO: 255500 - DNA, 75 bp, Homo sapiens
aggagtttgaattacaaggatttttggcattgagaccttctttcaggcacttgctgctggaggagtagggtccat

SEQ ID NO: 255501 - DNA, 82 bp, Homo sapiens
gacgagtttgaagagttccctgccgaagggaaatcctcattgacgattcaatttgttgaaggccaatttgtggactcctacg

SEQ ID NO: 255502 - DNA, 82 bp, Homo sapiens
agcgacaagccgctggcagccgcggatctcaccgccgctcaggatacactggcagtgatgtctgtggacctgggcagtgagt

SEQ ID NO: 255503 - DNA, 100 bp, Homo sapiens
ccccagaaggctgccgagggagactttaggacaagaggcgttgtttttgcatgagccatgagcccaagtccccttcgctagggatgctttccaccgcgac

SEQ ID NO: 255504 - DNA, 75 bp, Homo sapiens
tcaaccagagggaagaaaatgcaaactgaaacctgggaaacagtgcagaggtcctgctgtactagccaccaaagc

SEQ ID NO: 255505 - DNA, 74 bp, Homo sapiens
aatggcctaattggaaagaatttcaggatcaccggtttctcctgcttcatattggatttgtcctgtatcccccc

SEQ ID NO: 255506 - DNA, 83 bp, Homo sapiens
agcgacaagccgctggcagccgcggatctcaccgccgctcagggtactctctgaagatggcagaagctcaccaagctgtggcc

SEQ ID NO: 255507 - DNA, 75 bp, Homo sapiens
gaacatttcatgtagatactccagaggaaaggacatccaggcagaaattgatgcccacaatgacatatttaaaag

SEQ ID NO: 255508 - DNA, 100 bp, Homo sapiens
atgcctcttgggaacaaaatacaaatcatggagccgctggggtcccttttgcctcagatactattttgaaggctgaccaactgactgaagagcagattgc

SEQ ID NO: 255509 - DNA, 75 bp, Homo sapiens
aacaagggcatcgactcagacgcttcctatccctacaaagccatggttcaggtggaaggttataattacactggc

SEQ ID NO: 255510 - DNA, 50 bp, Homo sapiens
ccgagaaccgtcagtttgagccagatgcactttcatttggacccgtggat

SEQ ID NO: 255511 - DNA, 100 bp, Homo sapiens
ctcctgagtagctgggatttcagggcttctttcgccgcacaatccagaagaacctccatcccacctattcctgcaaatatgacagctgctgtgtcattga

SEQ ID NO: 255512 - DNA, 106 bp, Homo sapiens
tggggctcatgaaccgcgccgtgcaactgctcatcctggcctacgtcatcgggttttaaaatcaaagatgggaaaatcggagaaaattgcccttccccatggccag

SEQ ID NO: 255513 - DNA, 106 bp, Homo sapiens
ctaccccatcaccagaacccagcagcttgccagcatcgttgcaggccaatggtggcagagtctacatagaactatgcttcgtggtgttctggggaaaacctttcga

SEQ ID NO: 255514 - DNA, 95 bp, Homo sapiens
catctgtgagcccgcggagtatacaccatgagcaaagctcaccctcccgagttgaaaaagtgtcgtgaaaactacccctaaaagccaaaatggga

SEQ ID NO: 255515 - DNA, 100 bp, Homo sapiens
gtactcgccggacccggtggtcgtccgcggctccggtcacgtcaccgtggaatagtgcctaccgatcagctgcatctaaaacaatgaatatttatttccc

SEQ ID NO: 255516 - DNA, 75 bp, Homo sapiens
ctcaggctggaacttgccctgtctcctcgcagatgaggtcctctcagggtgcgccatcattgtccgaggtcagcc

SEQ ID NO: 255517 - DNA, 71 bp, Homo sapiens
cggctcggccgcccagcgtggactccttgtccagggtccccttctgcttgttatagccccagtagtcctgt

SEQ ID NO: 255518 - DNA, 100 bp, Homo sapiens
gtaccatgagaatgacacgatagccaagtacgagatcatggacggggcaccagtgcgagaccgggacgtgcgtgtccagaaggtcttcaatggctacatg

SEQ ID NO: 255519 - DNA, 100 bp, Homo sapiens
cccgccccacccgcatgctctttgtcactccccggcggcagcacgaaagtaccatggtgttccctcaggtcaatgtcacgaagatgggcagttggggcca

SEQ ID NO: 255520 - DNA, 82 bp, Homo sapiens
ggcaccgcggtgcgcaagcgcaaccgtcggtgggtcggggatcggtcgcctgagagggaaagcaggcaggatgggagagtcg

SEQ ID NO: 255521 - DNA, 74 bp, Homo sapiens
tggaatggtgagaccaacatccgtgacacctggactctttcaggttctgaatgataatatgcagcatgcatact

SEQ ID NO: 255522 - DNA, 98 bp, Homo sapiens
aagacgttccttgaggaggtttgaaaaactatttgtcgtagatgtccagacaagccagatcaccaagatccccattctgaaagaccgggagcctggag

SEQ ID NO: 255523 - DNA, 100 bp, Homo sapiens
aagcagttttggaagaggagcgctaagctgccggggagagaagaagaagttggatgggataccgagattaaggatgatgtgattgaagaatgtaataaac

SEQ ID NO: 255524 - DNA, 51 bp, Homo sapiens
ggacaggaggctgcggggcctcaggagtccacagaaaaccttccctcctgg

SEQ ID NO: 255525 - DNA, 82 bp, Homo sapiens
ctagtacctcctaccattgtcaactggtttttagaacttcagccataaaaatgggcagaattttccttgatcatatcggtgg

SEQ ID NO: 255526 - DNA, 85 bp, Homo sapiens
aatgaactggttgtgcaggaaccaggatccgaacccgcctccccagatgccatggacaatattaccaggcagaaccaattctacg

SEQ ID NO: 255527 - DNA, 90 bp, Homo sapiens
cgcagtggtcgcttcttctccttgaaagtggggctgatccaacaattgaaactgactctggatataattctatggatctagctgtagccc

SEQ ID NO: 255528 - DNA, 100 bp, Homo sapiens
aatactactatggatataaaagatctggttaaacaatttcatcagattaaaggaagaagtaagtctaacttgggctggacacctctacatctggcatgct

SEQ ID NO: 255529 - DNA, 75 bp, Homo sapiens
attggcaagctacaataatggggccaagccatgtccattggagcccgttcccaatcagctcgtacttacttggag

SEQ ID NO: 255530 - DNA, 74 bp, Homo sapiens
ggagagcctgcaggacggcgcggcagagtccccgtacgcctacagtaacggcttgggcactgtttaaaggaaag

SEQ ID NO: 255531 - DNA, 74 bp, Homo sapiens
gagagcctaactttgcaaccattggtctgcaggacatcactttagatgatggttccagtacaatggtcagatat

SEQ ID NO: 255532 - DNA, 100 bp, Homo sapiens
tgggtcgtcttctcggcgacaactgccctgctcttcatcccaggatgagggagtggtgggtccaggtggggctgctggccgtgcccctgcttgctgcgta

SEQ ID NO: 255533 - DNA, 140 bp, Homo sapiens
ccaaaacttgcgtcgttggtcattggaagctctcaacagggatttggtgccaactggagtcttggtgacaaatggcttagatggaaaccatttgagattccaaaagcatctcagaagaaagtagactttgtgagtgtaag

SEQ ID NO: 255534 - DNA, 83 bp, Homo sapiens
tgtcaaccgattctattcagtaccaccttcagatggaggataagaatggacgtaatgaagaagttagtactattattatctcc

SEQ ID NO: 255535 - DNA, 87 bp, Homo sapiens
gatgacccttaccaactggtacagtactatactggcaattgctggagaagattttgcaattgttgcttctgatactcgattgagtga

SEQ ID NO: 255536 - DNA, 90 bp, Homo sapiens
gatgggaagacatgtaccaggggagacaaatatcccaatgacactggtgccacacctccctggatgatccaagatgaagaatacattgct

SEQ ID NO: 255537 - DNA, 76 bp, Homo sapiens
ctgctgcaatcgcttgggagagctcctgggccacccctcctttcaggtcaaggtctctaattaacagaagatggca

SEQ ID NO: 255538 - DNA, 75 bp, Homo sapiens
actaccggacggccgacaaaggctggcagcctgtctctcttgctgatcgagaggtgatatcccggcttcggaact

SEQ ID NO: 255539 - DNA, 80 bp, Homo sapiens
gccacaaggaggcctacgagtgcagcagccggtgttccctcgccctgccccacgtatatgaatggcacctgcccagaagg

SEQ ID NO: 255540 - DNA, 97 bp, Homo sapiens
gtaagtaaaataaaagcaaaacaaaaaagaggcgaagatcgagtaggaactgcaggggaaatggaaagtaagaatgattgatgttggctgatattgg

SEQ ID NO: 255541 - DNA, 101 bp, Homo sapiens
tcaaaattatccgaaaccgcctcactggtttttacagagtcaagaggatcctatgaatttcccactgggttaaaaatatgacacaatccaaggagacagca

SEQ ID NO: 255542 - DNA, 74 bp, Homo sapiens
gcggaggcgtcgcgggagcctttggggcaccacagagatgcggggggtcctgatgacaacttaattgaaggtgg

SEQ ID NO: 255543 - DNA, 101 bp, Homo sapiens
cgattatgtccattgttctcttggagcagctggtcatcatgagagacaagagagacacctccaacttcgacaaagagttcaccagacagcctgtggaactg

SEQ ID NO: 255544 - DNA, 75 bp, Homo sapiens
tggtgctgagctccccactggctttgtctggggacacccgacgtactccaaagattcaggtttactcacgtcatc

SEQ ID NO: 255545 - DNA, 98 bp, Homo sapiens
aaatatgtcatgtatcccatagctgtgagtggcgatcacgagaacaataagagcatgcctggtcatggcccagcttttagaagacagcttattttgtg

SEQ ID NO: 255546 - DNA, 75 bp, Homo sapiens
aagatgccaggacatcctggaagctgggaaaagagtgctgatggcagagattggtgaggatttggataaatctga

SEQ ID NO: 255547 - DNA, 100 bp, Homo sapiens
ctggaggagcagttgtctgatgaagagaagtactatactggcaattgctggagaagattttgcaattgttgcttctgatactcgattgagtgaagggttt

SEQ ID NO: 255548 - DNA, 82 bp, Homo sapiens
gccgccgccgctgccgctgccgctgccgcacctccgtagctgactcgaccatggtgaatccgggcagcagctcgcagccgcc

SEQ ID NO: 255549 - DNA, 50 bp, Homo sapiens
tttggatgcattctagaacacagcattgatatgaaccatggacaagtata

SEQ ID NO: 255550 - DNA, 75 bp, Homo sapiens
cgcggagcccgggacgcgcgtacgccctgctgcttctcctgcttactactttgtatgagaacttaagtatacaca

SEQ ID NO: 255551 - DNA, 75 bp, Homo sapiens
cgagccgggatctcaggtcctcgggggcggcggccacgccaaggacgggtgtggatgaggtcaccattgtcaaca

SEQ ID NO: 255552 - DNA, 75 bp, Homo sapiens
tggaacagcagcctgcctttaccaggtacagagtgaagacagtgtcctcctgtttgttattgcatggacgatcac

SEQ ID NO: 255553 - DNA, 88 bp, Homo sapiens
tcgagttgttgccattttggcagcagcttgtttgctgcagttgaatctgtccttcttcctgactccaccatgtgcacgatgggctcag

SEQ ID NO: 255554 - DNA, 100 bp, Homo sapiens
ggctcgttcaagatggcggagctcgaccagttgcctgacgagaatcgaccttcagaagatgcccttggggaagctgagcaaaaggcagatccaggccgca

SEQ ID NO: 255555 - DNA, 97 bp, Homo sapiens
gacgcaggagaaaatcgagacctcaagtaatcattcccaaaaagccttgagccgggccatgcttctcacatcttacctgcctcctcccttgttgaga

SEQ ID NO: 255556 - DNA, 101 bp, Homo sapiens
aacagtgcccaggctgatctgactgtaaaggataaggacttgaatacacccttacatttggcttgtagtaaatgtctgtgtttcactgatggcaagactgt

SEQ ID NO: 255557 - DNA, 74 bp, Homo sapiens
accaatgctgaagtcaagctgcaggtgtccccagttgtcctcatccagggtgctattcgagtccagcctgaagg

SEQ ID NO: 255558 - DNA, 100 bp, Homo sapiens
gtacaacttaaccttgcagagagccactggcatcagctttgccattcatggaaacttttctggtattgatgaagatgaccctactgctgatgataccagt

SEQ ID NO: 255559 - DNA, 96 bp, Homo sapiens
acaacttggagaatggaaaagaaccattgaagcttgagagaaaagcccccaaaagcagctattcaggggcatttgacattcaaggatgtagccata

SEQ ID NO: 255560 - DNA, 100 bp, Homo sapiens
taattacttgagaatttataatggaattggagtcagcagaactgaaataggtcagatgtaccaacagtaccagcaacaggccggctatggtgcacagcag

SEQ ID NO: 255561 - DNA, 100 bp, Homo sapiens
aaaataaccacttaccccttctcaccgaggaagagcgggagaaaggtgttattattacaacagttctatacctctcagatgcacttcgtaagaacttctt

SEQ ID NO: 255562 - DNA, 100 bp, Homo sapiens
gggcgatgctggaagccatggcggagcccagtcccgaagactcggtgaaatacctggagtgctcagctctcacccagagaggcctgaaaaccgtgttcga

SEQ ID NO: 255563 - DNA, 85 bp, Homo sapiens
gtcctctgggcagggacccccatggtgactatgccaggtcacgcatgaagggagcaccgtggagaagacagtggcccctacagaa

SEQ ID NO: 255564 - DNA, 90 bp, Homo sapiens
cgcgtctctctgctgcggcgcggggaccgctgtgctctcgctcacggatgattgatatccagaccaggatggctgggcgagcattggagc

SEQ ID NO: 255565 - DNA, 100 bp, Homo sapiens
ccctacgggaacccacgaccattatatgctggaatggttccttattcggaggaacctgagtgcctcagtcatcgccgtcaccatccaggggggagcgcac

SEQ ID NO: 255566 - DNA, 100 bp, Homo sapiens
gctgggtcctacctgtcagagccccaagggtcctaacctgattataaaacaaccagatgagttgctggacagcatgtcagattggtgtaaggagcatcac

SEQ ID NO: 255567 - DNA, 90 bp, Homo sapiens
aggtagaaaaaacacaaatgaattctataagaccattccccggttttattatagggcgcagtgagcctgcaggccgacctcactcgtggc

SEQ ID NO: 255568 - DNA, 100 bp, Homo sapiens
cgacatgagtgatgtggaggaaaacaacttcgagggcagacaccccgagcagaaggcagaccggtattttgtgttatacaaaccgccccctaaagacaac

SEQ ID NO: 255569 - DNA, 82 bp, Homo sapiens
tgctattccggcgcctccactccgtcccccgcgggtctgctctgtgtgccatggacggaattcagaaggagctggcggacat

SEQ ID NO: 255570 - DNA, 83 bp, Homo sapiens
gggcctcgcgccggctatggccgtgccctggggctgagccctcagtgctgctcacggccgtgaactgctacagcgtgaaggcc

SEQ ID NO: 255571 - DNA, 87 bp, Homo sapiens
cgcggggccaccatgggggcccagctcagcacggttttgggatttgagattgacgcggtgaactctgtccagttttcaaaccacaca

SEQ ID NO: 255572 - DNA, 97 bp, Homo sapiens
tcgaagccattcagtcctcaatctccttttccttggctacccgttgaagccatccttgtcaatatatttggtggtatcgtcaactgtgccatcattg

SEQ ID NO: 255573 - DNA, 90 bp, Homo sapiens
ctcaagcaggacaatcgcactttataccacctgcgattactatttggaagtcaaaccagaaacttcaggctctactacgatggcaagcac

SEQ ID NO: 255574 - DNA, 49 bp, Homo sapiens
cttcagggacagggatgttttcagagttcttcaccaaaggacatggatg

SEQ ID NO: 255575 - DNA, 100 bp, Homo sapiens
atgcaggaaaatttcgatattgaagtgtcaaaatccatagatggaaaagatggtcaaggtgaagatgttcttaaagggtcccagattacgtatgttacag

SEQ ID NO: 255576 - DNA, 95 bp, Homo sapiens
tcagccactgtgggccctgcctctgcctgttcttctggaatgtcttgggggttttgatcctgtcactgtgaacatcatcaagaaggtgatcgggc

SEQ ID NO: 255577 - DNA, 51 bp, Homo sapiens
ggcctcttgcgctacgccctggatgagatgagtatgcagagaacatcgggg

SEQ ID NO: 255578 - DNA, 101 bp, Homo sapiens
ccaccacagccgcccacttctggaaggttccatcccctgcagtgagaaggacgttgaagagtgggctcggagatgacctggtgcaggcactgggactaagc

SEQ ID NO: 255579 - DNA, 73 bp, Homo sapiens
ggcgacggcgcggaggccccgggcgcggcgcagaccagaccagctttctccatgcagctctggccatgcgtat

SEQ ID NO: 255580 - DNA, 98 bp, Homo sapiens
cgctaccgcaccttcgtgccagcctcctcccccatgtaccacacctgtgtggccttcgcctgggtggttatcactaggctaaaactggacaaagaccg

SEQ ID NO: 255581 - DNA, 98 bp, Homo sapiens
aagcggccccggtgctgtggtgcgacctccaaaggcaccagaagacttttctcaaaactggaaggcgctgcaagagagacgagttgtactgctgtcac

SEQ ID NO: 255582 - DNA, 75 bp, Homo sapiens
cccagggcggacagcagcctcgggtgcaatcctggagccccccagtgagggcagagactccccctaatgggccag

SEQ ID NO: 255583 - DNA, 74 bp, Homo sapiens
cctcatctttcacaaaggccttcacaacgtggcctcactccaggaaaaagtgacatcccagagccaggagcagg

SEQ ID NO: 255584 - DNA, 100 bp, Homo sapiens
tttttgtttttgtttttttgtttcagagaattggaagctaaagctaccaaagacgtagaaagaaatcttagcagatatgaggccccaggattcctggcga

SEQ ID NO: 255585 - DNA, 100 bp, Homo sapiens
ggaaagaaacggacaaagggaaaaactgttccaatcgatgattcctctgaaactttagggtgtacaactatgagcctttgacacagctcaagaatgtcag

SEQ ID NO: 255586 - DNA, 100 bp, Homo sapiens
ttcacaggaatgacagcatctatgaggagacaggtgatttggcttctgcacagttaggaggagcaccaaaccgatgggaggttttgtcagccacacctac

SEQ ID NO: 255587 - DNA, 100 bp, Homo sapiens
agctgcactgcatggttgctgctggatgtgttgtgttcctggcttccctctggatgctgacagaaacaagggtaatcaaatgcaaagcagctgtgctatg

SEQ ID NO: 255588 - DNA, 82 bp, Homo sapiens
gttaaggattccaagtaactcttatttgacaagcagaatgatgtggagatcccatctcctacccagaaagacagggagaaaa

SEQ ID NO: 255589 - DNA, 75 bp, Homo sapiens
cggcaccaactattcgcggagctggaatgactggcaacccaggcaatgccaccgtagataagttggaggacttca

SEQ ID NO: 255590 - DNA, 95 bp, Homo sapiens
ctatctggagcaaagaaaagagccttggaatgcgaggagacagaagacagtagccaaacacccagcaacatctgaatgaattgatgacgaagaag

SEQ ID NO: 255591 - DNA, 82 bp, Homo sapiens
cgagaggacgcggctgtgatatacgaagcattcgttcagtcagagagcataatagaagtactgcgttttgatgatggagggc

SEQ ID NO: 255592 - DNA, 98 bp, Homo sapiens
cgagataaattttccaaacacctgactctgtgtgtttttaccaaccatacagagcctgtgtggtgcccctatctccttgttccaagggcctctcttgc

SEQ ID NO: 255593 - DNA, 75 bp, Homo sapiens
ttatatcatgtatacaactgtagatgcaaatgggtatctgaaaaatggatcagggaatccctgtgctgatcgtgg

SEQ ID NO: 255594 - DNA, 86 bp, Homo sapiens
ttgtaagaaccgccggggacgaaacaataaagaccggaagctgagtttttatccgtgtcttctctttagggatggtgaggttggaa

SEQ ID NO: 255595 - DNA, 73 bp, Homo sapiens
attcacgtgtacggctattccatgccaccggcatgttctttggttcagcacccagtcccatgggtggaatctc

SEQ ID NO: 255596 - DNA, 100 bp, Homo sapiens
aaagccgcaccaccgacctgctgactgactgggagaagaccaagcctgtcacgatcccaccaaatattttggttgtgagctgggagcacagacccagttt

SEQ ID NO: 255597 - DNA, 98 bp, Homo sapiens
caacaacctctcctcttcgtctccgccatcagctcggcagtcgcgaagcagcaaccatggtggttattaacttggtgatgcttttggctgaaatgaaa

SEQ ID NO: 255598 - DNA, 100 bp, Homo sapiens
ccaagttcaagtgatcctctcgcctcagcctcccgagtagctgggactacaggcacacaccaccatgtccggatcctgacatgcatcctgacggaacagc

SEQ ID NO: 255599 - DNA, 100 bp, Homo sapiens
agcaagcccagcttcccaagaagatagaaggttggaggcaagctgctgtccaggccataaagaatgctgatgggagaaccattttcctaattttcaaatt

SEQ ID NO: 255600 - DNA, 75 bp, Homo sapiens
tctggttattgttggccttcatcaactcctagaatctagaaagggtattcctagttcttctcatgtaagtaataa

SEQ ID NO: 255601 - DNA, 95 bp, Homo sapiens
cctttccaagaggaatcctcggcagataaactggactgtcctctacagaaggaagcacaaaaagggacagtcgcaagctatagtcagcagactgg

SEQ ID NO: 255602 - DNA, 101 bp, Homo sapiens
acggctctaaggaattcagaaaagggatttaatggtgaagattttgaacggcttacgaaaatttgtgcaacacatcaagaaatggctattcaagtggacaa

SEQ ID NO: 255603 - DNA, 50 bp, Homo sapiens
cctgcaggaagagctcgatcaggttcagttacatggacacagaacagtat

SEQ ID NO: 255604 - DNA, 98 bp, Homo sapiens
tggccgcagccgctctggggcaggtactccaaagattcaggtttactcacgtcatccagcagagaatggaaagtcaaatttcctgaattgctatgtgt

SEQ ID NO: 255605 - DNA, 100 bp, Homo sapiens
agcccgtctcgtgggcgccgcagcctcccggggccctacggccgcccgccaccaggcaagagtccaaactttcccgcggcgacctaactgcacctccagt

SEQ ID NO: 255606 - DNA, 100 bp, Homo sapiens
gaagagttgtcccagctcggcccgcgggggagccccgggagccgcacgcggcacccgacctgacagcgttcagcgacccgcgccagttccccgcgctgcc

SEQ ID NO: 255607 - DNA, 80 bp, Homo sapiens
tcgacacctacgacgatcgggcctacagcagcttcggcggcggcagagggttgattcttcaccacactgaaaccattagg

SEQ ID NO: 255608 - DNA, 100 bp, Homo sapiens
aggaagatgggaagagtccaaggtcccagaaagaaccatcgcagatgctgataggtcttgctggctacctgagtggatatgatggtacctttttgttcca

SEQ ID NO: 255609 - DNA, 75 bp, Homo sapiens
cttggatgccccctggaaaatcatctgcccggcctgtgggatgcaagtgggagcttgatatatggtccaaatcca

SEQ ID NO: 255610 - DNA, 90 bp, Homo sapiens
ctcaccggctggctgggcacacagacactgtcactggagtggccttcaacccatcagcgccccagaaaatgcatccgatgcagatttatg

SEQ ID NO: 255611 - DNA, 82 bp, Homo sapiens
caactttgagctgcacgttgcacaagttgtacggaagttgcaagagtttgagctgccttatgtgtctgtcaccagccttcgg

SEQ ID NO: 255612 - DNA, 75 bp, Homo sapiens
ggagggaatcgtgagcgggcgggaggaggccggggaccacacagccctgggcgctgcctatggcacagccaagag

SEQ ID NO: 255613 - DNA, 100 bp, Homo sapiens
ccgagcactatcttccatccagggagtggcccctgatggcgccaacgttcacctcatcgtccgagaggtggccggcattcacaagaaggtggcccggacc

SEQ ID NO: 255614 - DNA, 99 bp, Homo sapiens
ggcttgtggtgcggcctcaccatacaggaacagggcagacgttagcgtgagtgatcactctcaatcccggaacaccgaaaatctctcccagcactttag

SEQ ID NO: 255615 - DNA, 100 bp, Homo sapiens
catggagccgctggggtcccttttgcctcagatactattttgaagggtcagaaaacctccatgtttctcatatcttgcaaaaagcaaaaattgaagtcag

SEQ ID NO: 255616 - DNA, 75 bp, Homo sapiens
gaagctttacctcgctgaccctatgaaggttttaaaatcaaagatgggaaaatcggagaaaattgcccttcccca

SEQ ID NO: 255617 - DNA, 90 bp, Homo sapiens
ggctggtcgtctccagactccacactcctagcaactttggaaacatgatgagcaaggagaagcgagaggctgtcagtaaagaggacctgg

SEQ ID NO: 255618 - DNA, 100 bp, Homo sapiens
tttccaaatgaatttgcaaaacttactgtagcagctgcagctactggaggttctgttctcaatgttgctgccctgttggcatcaggaacacaagtaacac

SEQ ID NO: 255619 - DNA, 101 bp, Homo sapiens
ttgtgctgcgtggggatcagcttttctactacaaggacaaagatgagatcaagccccagctgtgccccataaaatcggacgcatcattgatgggagtcctg

SEQ ID NO: 255620 - DNA, 100 bp, Homo sapiens
ccgacagccaggcccgggagaagactcgctcagcagcagcctgaaaacttgctacaagtatctcaatcagaccagtcgcagtttcgcagctgttatccag

SEQ ID NO: 255621 - DNA, 75 bp, Homo sapiens
ctttcagtctaattaaaggttggactccaggttatgtggtccgaatcagtggtgggaacgacaaacaaggtttcc

SEQ ID NO: 255622 - DNA, 87 bp, Homo sapiens
gcaatgtgtcaaccgcattattactgaaaaggttagcactctacgtatatgaatatctgctccatgtaggagctcagaaatcagctc

SEQ ID NO: 255623 - DNA, 97 bp, Homo sapiens
caacatcttctccacccaggaccatgcggcggctgccattgccaaggctggcattccggggccgatggggaagtgaagcactgtgtgatctacagca

SEQ ID NO: 255624 - DNA, 75 bp, Homo sapiens
tcataagcaggatgttggcatttctgctgcatttctggagacggtggctcagggagtaaaggaaggccagttgag

SEQ ID NO: 255625 - DNA, 98 bp, Homo sapiens
cccggacagagcccgtggtcgcgcagttaacccagtatccactccagttgcacttcccacaccagctctttctccaagtttgatggctgatcttgaag

SEQ ID NO: 255626 - DNA, 100 bp, Homo sapiens
cccatatattgtgaaacttccctattgacgataaagagggctggggaaggctacaaggctgcgctggcctcggcacaccagtgccacccgctgccccgga

SEQ ID NO: 255627 - DNA, 108 bp, Homo sapiens
cacggcacagcacgctcgacttcatgctcggcgccaaaggtgctggagaatctggtaaaagcaccattgtgaagcagatgaggatcctgcatgttaatgggtttaatg

SEQ ID NO: 255628 - DNA, 83 bp, Homo sapiens
ctctcctctgatggcaggacctgccaagggagtgcatccgccccaacccttttccccctcgtctcctgtgagaattccccgtc

SEQ ID NO: 255629 - DNA, 99 bp, Homo sapiens
ggagaggccagaggtcccgatgcacaccttgcacccgtgccagcgagatttcagattcctgtaaacctctaaagaaaaggagtcgcgcctcaactgatg

SEQ ID NO: 255630 - DNA, 82 bp, Homo sapiens
cccaccaaaactttctactataaatcccggttttggctgcttaaactgctgatcttgtagaaaatttcagctgtagcccttg

SEQ ID NO: 255631 - DNA, 96 bp, Homo sapiens
aggaacccaccagaaggaaccaattccggacacataacaagcagcagtgaggacaccaaagagttgcatgctgagaatttgaaaaatgaagatgat

SEQ ID NO: 255632 - DNA, 130 bp, Homo sapiens
ccagaatgttgagattgcccgagaagtgaccccagcaaaagaaaaatattgctgtacctaaattcaaagacttgaggtttaacagaataagagaaattccagggagcgccttcaagaaactcaagaattt

SEQ ID NO: 255633 - DNA, 98 bp, Homo sapiens
agatgctggaacatgcagagtctgcacaaatgcctgaaaacttcatgcctcctgttcccatcacatcaccaatcatgaacccgttgggtgacccccag

SEQ ID NO: 255634 - DNA, 75 bp, Homo sapiens
gacaagccattttgtgcgcaccacttttgtgtccaggcataagaaatttgacggctggagcattggatttgctaa

SEQ ID NO: 255635 - DNA, 100 bp, Homo sapiens
gagtggacttgattgatatatatgctgacgaggagttcaaccagattttgcctgcctgagctcctctagtagtggccacaattgccagagaagatagagc

SEQ ID NO: 255636 - DNA, 100 bp, Homo sapiens
tgcgttgctcttgcttttcctcgctggggtgtacggatgtacagttacccagcacgtgtacctcctcctcctcctattgctcgggctgtagtgccctcga

SEQ ID NO: 255637 - DNA, 100 bp, Homo sapiens
taaagtgaaacattcagcatccctgtctggtatgccttctcgatcttggccctgattgcattcatctgcatagagaccatcatggcatgctccccgtgtg

SEQ ID NO: 255638 - DNA, 100 bp, Homo sapiens
cgcgaaggcggtgctcgggccagcccttctctgccgtccctgggagctctggcaggctgccctgagcacgctcaaccccaaccccacggacagctgtccc

SEQ ID NO: 255639 - DNA, 82 bp, Homo sapiens
ggagactcagaatcgaatctcttctccctccccttcttgaagccccatgtgccactcccctgatctgcagcttcggtaggcc

SEQ ID NO: 255640 - DNA, 101 bp, Homo sapiens
gaggcggcggaccgtcccgcgcggggcacgatgttgaacatgtggaaggtgcgcgagctggtggacaaagcgtgaatctggattgggaaagtcgacattaa

SEQ ID NO: 255641 - DNA, 131 bp, Homo sapiens
gaaacttcctggaactgaccgaattaaaatttatacttcgcaaaactcagcaattttttgatgagattgatcagggaccatgaaaagaaacttgtgcttcaccgaagaaaaatatctaaacatcgaaaaac

SEQ ID NO: 255642 - DNA, 90 bp, Homo sapiens
tgatacagttgataaaattgttgggaaaacaaagtgcatgatgaagtcttcagactgtgtcataaagcatgctggtgtatacagtactgg

SEQ ID NO: 255643 - DNA, 51 bp, Homo sapiens
acctttgatcccctgacctgcattaccttgccgagaccgacccgcccgccc

SEQ ID NO: 255644 - DNA, 100 bp, Homo sapiens
acccgcgctccctccgccgccgccgccttgctgctgctcaaagctgctgccgccccttgggctaaaaggtaagaatgattgatgttggctgatattggag

SEQ ID NO: 255645 - DNA, 100 bp, Homo sapiens
aagctgcatccctttgatgccggaaaatggggcaaagtgatcaatttcctaaaaggcttgcagccctgagtgatcgagagactcggctgcaggaggtgcg

SEQ ID NO: 255646 - DNA, 121 bp, Homo sapiens
cgaattcagaaggatatcgacgtcgtgatccagaagtccagagctgaggactgcctgtttgcagctgtacatggtgcggaccatgcttgaatcactcattgcagacaaaagcggctccaag

SEQ ID NO: 255647 - DNA, 99 bp, Homo sapiens
gccctcaggtaaaggtggaagtaaatggccacgctgtattgacagaggtgcagtcgctttcaatctgaaatcaaacgcttgaaaatctcatccccggtg

SEQ ID NO: 255648 - DNA, 75 bp, Homo sapiens
gatttggaacagctttgagaagagcaaggttgactatagtcaatggggccaatggagccaagtgtatggaaaccc

SEQ ID NO: 255649 - DNA, 50 bp, Homo sapiens
acctggcacggctcttgcttccgatttggagcaagaggtggtggtggcct

SEQ ID NO: 255650 - DNA, 75 bp, Homo sapiens
cagctgagaggagaggcgcccccggggacgaacattgatgatggcacctcagatcgcccctacagccatgctctg

SEQ ID NO: 255651 - DNA, 82 bp, Homo sapiens
ccatgctggaggagttcaagaaggatataccatggggtatacagttagcagccgtgtatgctctttgtgacttgagtcccag

SEQ ID NO: 255652 - DNA, 101 bp, Homo sapiens
tgctctcggcacaagcatgtacggcaaaggcaagagtaacagcagcgccgtcccgtccgacagccaggcccgggagaaatcaatgaactgagccatgttca

SEQ ID NO: 255653 - DNA, 100 bp, Homo sapiens
accttatgagctcggttttcttatgcttataagagtggaacagttaccggtattgtaagaacaagccgtacccaaagtctcgcttctgccgaggtgtccc

SEQ ID NO: 255654 - DNA, 73 bp, Homo sapiens
ggtattcctgttggatcaacttggagatttagagttcagaagtccaaggcttgcgagaaggtcatttccgtgg

SEQ ID NO: 255655 - DNA, 75 bp, Homo sapiens
ggaaaggcacccatccttattgctacagatgtagcctcccgtgggctaggatttttggcaggtatatcaatgatg

SEQ ID NO: 255656 - DNA, 100 bp, Homo sapiens
cgggacaccgcacagccgggaaatggcctccaggcccaaggtcagcatcccactgtcagccatcattgaggtccgcaccaccatgcccctggaaatgcca

SEQ ID NO: 255657 - DNA, 75 bp, Homo sapiens
ctcaggacaacccagatgtgcaacaaagtgcgatgattacatgaagcagatgacatttgaagcccaagccttttt

SEQ ID NO: 255658 - DNA, 74 bp, Homo sapiens
gtttgtggatcgctgtgatcgtcacttgggcatgacgtccttgatgaaggccgcgctggacctcacctacccca

SEQ ID NO: 255659 - DNA, 73 bp, Homo sapiens
aggactgtctgacagctacagcttcgactacccctcgagctatgccaagaccaagacgagagccgaggtgcgg

SEQ ID NO: 255660 - DNA, 100 bp, Homo sapiens
agcactaaaccctgtccgctggaaacaatggctgccatccggaagaaactggtgattgttggtgatggagcctgtggaaagacatgcttgctcatagtct

SEQ ID NO: 255661 - DNA, 75 bp, Homo sapiens
acacatgaactcagtgctcatggggatgaagaaccagctcgttgatgcggatgaaattaaaaggctaggaaagag

SEQ ID NO: 255662 - DNA, 98 bp, Homo sapiens
gaagggtacttttcatggtgcatggaaggaaagccaatgcgcaggtaagcagaattttgtacagtttctgtacagcattcaaacgttcttccagacaa

SEQ ID NO: 255663 - DNA, 75 bp, Homo sapiens
tgaccttccagaattacgggcaagcgctgttcaaacccatgaaggactggtgattgcagctggaagtgcccatga

SEQ ID NO: 255664 - DNA, 83 bp, Homo sapiens
gctcgagcagcgacaacccgtcctctcccgagtttttcatcgctggccgcgcgccgaacccgagtccggcggcaccgacgacg

SEQ ID NO: 255665 - DNA, 100 bp, Homo sapiens
cgtgattgcgttacaagctttgtctccttcgacttggagtctttgtccaggacgatcaatgtccgagttaccaccatggatgcagagctggagtttgcaa

SEQ ID NO: 255666 - DNA, 101 bp, Homo sapiens
gccttccacaccccctccgtgggtgtgtgggactttgaacatgtcggggatcgccctcagcagactcgcccaggagaggaaagcatggaggaaagaccacc

SEQ ID NO: 255667 - DNA, 100 bp, Homo sapiens
ccggcctcccgggggctctggtcccctcctcggtcaaaatgcagatcttcgtgaaaacccttaccggcaagaccatcacccttgaggtggagcccagtga

SEQ ID NO: 255668 - DNA, 100 bp, Homo sapiens
aggaggtggatgcgtctgagatccaggtgcaggtgtgtttgtacgccttcgacctcatctacctcaatggagagaacccagcttagactagaaagtctag

SEQ ID NO: 255669 - DNA, 98 bp, Homo sapiens
gagaggagctgtggataacgggaggtgaatttccatgtcaacatagtcctgagccaccatattttactgctgagcccgagagtcggatttcagctgaa

SEQ ID NO: 255670 - DNA, 75 bp, Homo sapiens
ttcgcagtggtcgcttcttctccttgcttctgaaagaccatgcctcatccatgcctaacgcagagtcctggcctg

SEQ ID NO: 255671 - DNA, 101 bp, Homo sapiens
ctttcctcgtggaatttgaagattctacagataaatcagcacgttcacgtccatgttcttcccaggaaggctggagactttcacaggaatgacagcatcta

SEQ ID NO: 255672 - DNA, 98 bp, Homo sapiens
gattgaagacgatggcctccacgcagccttcactgtggctcacgaaatcggcacttcctggacctcactactacacatggggagaccacggcggaatc

SEQ ID NO: 255673 - DNA, 100 bp, Homo sapiens
aagagatccgggagagaaatcacttggaaggactttgtcaataactatctttcaaaaggagtatacaagttgtgcaaagtgaggaagattactgtgggag

SEQ ID NO: 255674 - DNA, 50 bp, Homo sapiens
gcgggactccggacctccaggagagaatgtgatcaatgggcaggactacg

SEQ ID NO: 255675 - DNA, 89 bp, Homo sapiens
ccctcatcgcaactgggcccgcgcgcagatattttagggttgccgttcttccttcctcaactgatgtcagctgtctgtttcgcacaaaa

SEQ ID NO: 255676 - DNA, 75 bp, Homo sapiens
gcatgcggcccaacgccaagaacaacggacgtccagatcggtgacatcgtcacagtgggcgagtgccggcctctg

SEQ ID NO: 255677 - DNA, 75 bp, Homo sapiens
gacgagtcttggattcgtgaacagaccacagtggaccacttctgggtaccctatgatgagaggacctgatcctgc

SEQ ID NO: 255678 - DNA, 74 bp, Homo sapiens
ggaaaaagaagaccagcgacaaatttagagaaacctcggcaggtccatggttttttggtgaaatcattgatggc

SEQ ID NO: 255679 - DNA, 98 bp, Homo sapiens
gcagcaactatgagaatggagaaataggggaaagtcaagtgaaaggtggtgaagagccaattgaggaaactgttaaggcagcaataatagaagagcag

SEQ ID NO: 255680 - DNA, 82 bp, Homo sapiens
ggacagtggagtctggcatcttattggtaaagtcagtgataaatcttttgtttgctgcatatactggagatgtgtctgcact

SEQ ID NO: 255681 - DNA, 75 bp, Homo sapiens
ggaggaagtgtcagcgctactgccgcagtttcactgttacatgccttgaagtgatgaggaggtttctgttactat

SEQ ID NO: 255682 - DNA, 100 bp, Homo sapiens
ctgtggaacttttaagtggagtggtggatcagaccaaagatggtgccggtggtggtgtgcacattgagccccggtatagacagttcccccagctgaccag

SEQ ID NO: 255683 - DNA, 100 bp, Homo sapiens
accgcaagactgtgggcgtggagccggcagccgacggcaaaggtgtcgtggtggtcattaagcggagatccggatacaggtgtaggtaaatcgagtattg

SEQ ID NO: 255684 - DNA, 96 bp, Homo sapiens
agagactttatcaaaaacatgattacagggacatctcagtgggaaagctcatggagcttcatggtgaaggcagtagttctggaaaagccactgggg

SEQ ID NO: 255685 - DNA, 99 bp, Homo sapiens
aggcggaaggactcctggaatgccacaaatgcaaatacttgtgcactgggagaggccgagaaatccgtctgcccctccgaatcaaaggggaaggcatgg

SEQ ID NO: 255686 - DNA, 100 bp, Homo sapiens
ccgcggctgatttgccttaaactccctaaaatctccgcagctctggttcctgttgcggccggtgctggagaatctggtaaaagcaccattgtgaagcaga

SEQ ID NO: 255687 - DNA, 127 bp, Homo sapiens
caagaagcctcaggaagctgtgtttgtcccagagtgtggcgaggatggctcctttacccaggaaatgggtcctgatgaatatgaagagatggaagaagaggaggaggaggaagaggaggaagacgag

SEQ ID NO: 255688 - DNA, 100 bp, Homo sapiens
gtatgcgctcatgtgggagaaactcaaagttttcggctttgtgagaaaccttaccatcaaacacgatggccagcaacgttaccaacaagacagatcctcg

SEQ ID NO: 255689 - DNA, 136 bp, Homo sapiens
gagcagtaggcacccgagcagcgccagcggccgagcgggcggcttcctggcctgggcgctccggtggcggcggaggcttgggcactgtttaaaggaaagttccgagaaggcatcgacaagccggaccctcccacct

SEQ ID NO: 255690 - DNA, 80 bp, Homo sapiens
aggactggatttctttttgagaaggataacattgccagatgtggttgccctgcttggctttccttatgcctccagtggag

SEQ ID NO: 255691 - DNA, 100 bp, Homo sapiens
ggtacagcaacaacggctcggactggaagatgatcatggatgacagcaaacgcaaggcgaaggcgttcgtggcattcagggatgtggctgtgtacttcac

SEQ ID NO: 255692 - DNA, 75 bp, Homo sapiens
atgcagtggaatgcagttatatttgggacacattcagctaacgtattttagcaggtggagtgaggttgaagattc

SEQ ID NO: 255693 - DNA, 98 bp, Homo sapiens
cgcgcagcccccggccgcagcgcaggcagcccagcagatgtgaagttcatttccaatccgccctccatggtggcagcggggagcgtggtggccgcagt

SEQ ID NO: 255694 - DNA, 97 bp, Homo sapiens
tgcagtttggctacaacactggagtcatcaatgccccccagaagaccccatatcatgtgaacctcctcctggctggctatgatgagcatgaagggcc

SEQ ID NO: 255695 - DNA, 74 bp, Homo sapiens
tgaggagccattttgagcaatggggaacgctcacggactgtgtgggaggagatgaagtggcggcagtgggcgga

SEQ ID NO: 255696 - DNA, 50 bp, Homo sapiens
tgaggggcatggtggcaattctcatcggactatggcaaggagtctcaggc

SEQ ID NO: 255697 - DNA, 100 bp, Homo sapiens
gtgaagatcatggactatgaaggctaagaatcttctctgtggcttttacggccgccatgcggagctgcgcttcttggacctggttccttctttgcagttg

SEQ ID NO: 255698 - DNA, 75 bp, Homo sapiens
gggaggggagccgggccaggagctcatccacctgcagacatggggcgcagaaagtcaaaacgaaagccgcctccc

SEQ ID NO: 255699 - DNA, 100 bp, Homo sapiens
cacagaatgagctacctctagcagaacgtcgaggactactccagaaagtttttgtacaggagtctaccatggctcaagaatctcccaaaaattcagcagc

SEQ ID NO: 255700 - DNA, 128 bp, Homo sapiens
aatggggagctgctgggggtgtggccgtgcccactctcaatgccttggagaggggcttcctgagtgccatggatgttcgtgacctgctggcagggccaagctgggctaaggcgctggaggaggctggt

SEQ ID NO: 255701 - DNA, 100 bp, Homo sapiens
tgcaatttgaagaaccagaaatggccaaccaagccctgttgaaacacagggaagaaattggtaatcgttcgaacaactgccacagcagcaagcaacttga

SEQ ID NO: 255702 - DNA, 75 bp, Homo sapiens
gctgtggataacgggaggtgaatttccatgtcaacatagtcctggcacttctggatccagctgtgtgatagccgc

SEQ ID NO: 255703 - DNA, 75 bp, Homo sapiens
gtggtgtgctttggacctgtgtacccacccaaggctaaaggcagagccaggtttccttaggaaataaagaaagaa

SEQ ID NO: 255704 - DNA, 75 bp, Homo sapiens
gaagatgacaatttattagatggtgacactgcagttggttatatgtcaccacacccatctccattaggagcccca

SEQ ID NO: 255705 - DNA, 100 bp, Homo sapiens
aaaaatgggaggcgcgacaagtagaggagaaaattcctatggtctagatattacttgtaaaagccatgggaccacaccaccaccaccacaaccaataggc

SEQ ID NO: 255706 - DNA, 83 bp, Homo sapiens
gagaaagttaactgaattggtgacacttcgggtctctcacagaggaagccgtgagcagaagtgtgtgaagtgcaaggaagcgc

SEQ ID NO: 255707 - DNA, 97 bp, Homo sapiens
tgggcgacttgcgaggatgagagcgacgaagccaactgtccaggacctcacagggggcgcctttgaggacaacctgaggtcactgcacttgcaggag

SEQ ID NO: 255708 - DNA, 75 bp, Homo sapiens
cggctcccacgtgagaaatgaggactttccttatcccagttgattgtgcagaatacactgcctgtcgcttgtctt

SEQ ID NO: 255709 - DNA, 121 bp, Homo sapiens
atcagtatgagcgcctatctgcgagaacagagaagggagctctatagtcggagtggagaactgcaaggctaggcagctggaagagaaagaccgagtgctaaagaagcaggatgcattctac

SEQ ID NO: 255710 - DNA, 74 bp, Homo sapiens
ggccctggtgttgctgctgtcctccttctccggtcatcatcagatttgaaatatttaaagtggatacaaaacta

SEQ ID NO: 255711 - DNA, 83 bp, Homo sapiens
ctggactgatctccatgtcctgttgtggggcttttacagcctttggtgagaaagatcagtctaaagaaaaggagaagaaagtg

SEQ ID NO: 255712 - DNA, 80 bp, Homo sapiens
tgcttcaaggatgcagagtatattcaactttagttggcttaccaagagtgaagcgtgacaagtactcagtcttcaacttt

SEQ ID NO: 255713 - DNA, 58 bp, Homo sapiens
tgaggtcctatctattactgctatgttgtcagagccagccccagtgcctgctgagccg

SEQ ID NO: 255714 - DNA, 74 bp, Homo sapiens
taagaacaaacaaagaaacactggagatattcagaatgccatggtgtgcagccaaaggaatgcctccctctccc

SEQ ID NO: 255715 - DNA, 75 bp, Homo sapiens
gcccacgagaggatccctcacccgaaggtagaagatagcaccatgccgattcgtcgaactgtgaattctacccgg

SEQ ID NO: 255716 - DNA, 100 bp, Homo sapiens
cccggtgtggccacgagtcggatattgatgatgttaagaagttcaaaccgggttacctggaagctactcttaattggtttagattatataaggtaccaga

SEQ ID NO: 255717 - DNA, 100 bp, Homo sapiens
ttgtgttgggaggctatgatgagctgcgcataaaatccagctttgtggcacctctggaaaagtcatatgggaccaggcccagagtcctgacgggcaaccc

SEQ ID NO: 255718 - DNA, 100 bp, Homo sapiens
tacaactactaagtctgaagatgggcattatgcaagaacagattatgcagcaagatgagaagatgaagtgaatttatggattctggtttttctgaatttt

SEQ ID NO: 255719 - DNA, 87 bp, Homo sapiens
cgcagagaagaaacagcagtgcagcttcaagggcaaggacccacagtgagaaagatcagtctaaagaaaaggagaagaaagtgaaaa

SEQ ID NO: 255720 - DNA, 50 bp, Homo sapiens
aggacaaacccaccttcatcaaaggggaggtgaggagcgcctctttccgg

SEQ ID NO: 255721 - DNA, 80 bp, Homo sapiens
gaggacttggttcctattccagtgctcctccggtagcagggaggcgacagaaggatggatagaatgacagaagatgctct

SEQ ID NO: 255722 - DNA, 98 bp, Homo sapiens
acattaacagacaagacacttttcagaaagacaggtgtcccgacccaggctaagcttgagcatggctgagcaggagcccacagccgagcagctggccc

SEQ ID NO: 255723 - DNA, 100 bp, Homo sapiens
gaaactgcaccttatcacccggaacctgcagtgcgccgcgtggctcctcgtttctccatccctcccagcagccaggaggtgatgccaggcggcagcgtga

SEQ ID NO: 255724 - DNA, 75 bp, Homo sapiens
acaggagcgacttgacaatgtccctcacaccccttccagctacatcgaaacaggaagaatacaagcgattgagtg

SEQ ID NO: 255725 - DNA, 82 bp, Homo sapiens
tgcgtgagagaagaccagtctttcctctagactaatagggatgccaaaggaaaaatatgatcctccagatcctcgcagaatt

SEQ ID NO: 255726 - DNA, 98 bp, Homo sapiens
cttgccaaaaacctttggacagtccaatgtcaacattgcccagcaagtggaggggctccgaactttgtgtgttgcttataaaaggctgatccaagaag

SEQ ID NO: 255727 - DNA, 100 bp, Homo sapiens
cagctgtcaaatcaacaccaagggtttctattgcctgggctggagtgtagtggcatgatcatggctcactatagccttgacttcctgggctcaagcgatc

SEQ ID NO: 255728 - DNA, 90 bp, Homo sapiens
ctctggataaattctcaaggaggcagaaaggtgaaagctggagatactgtgtcatatgtcatctgtcagactgcagccagcggagcccgc

SEQ ID NO: 255729 - DNA, 100 bp, Homo sapiens
cacggtcaagtacacagagagacggcagccgctgtacagattcatcaccacgataagattgaagatgagctggagatgaccatggtttgccatcggcccg

SEQ ID NO: 255730 - DNA, 100 bp, Homo sapiens
cgttcgattattagctttagtgaaatgggctaataatgctggcaaagtggaaaaatgtgcggctgtggaaaatctctgttctcacaaagtctccccaatg

SEQ ID NO: 255731 - DNA, 100 bp, Homo sapiens
tgcgttgcggccagtcgccactgctaggaggcctaccagaaactggccagcgagaccctggaggagctggactggtgtctggaccagctagagaccctac

SEQ ID NO: 255732 - DNA, 98 bp, Homo sapiens
gataccagcaactggtctattatatcatttaaaccacatggctatctaaagagatgaaggttattctttcagcagtgtcctgtattatggaaatgaag

SEQ ID NO: 255733 - DNA, 98 bp, Homo sapiens
tcgtcttcggaaatgttatgaagcagggatgactctgggaggtgaaagcccagcctccgtggttcttaatgcctcaggaggactattttcactaaaga

SEQ ID NO: 255734 - DNA, 101 bp, Homo sapiens
cccgccagctgctccggagatacggtcagtatgggaatcctttaaataaatatatcagacattatgaaggattatcttacaatgtggattcattacaccaa

SEQ ID NO: 255735 - DNA, 97 bp, Homo sapiens
ccatgtcacctgggccaggccggctaccccgtgagcgccggtgaccagaggccagcggggatctgacgagcttttctctacttgtgtcactaacgga

SEQ ID NO: 255736 - DNA, 74 bp, Homo sapiens
ataatcttcacttccgggggcactgaggttggtgttcgaggaagagacattgttgttcttggtgtggagaagaa

SEQ ID NO: 255737 - DNA, 83 bp, Homo sapiens
atttgatttccggagtcagtcattttactgtcaagacatttcttcggcattctgcaacagctgtgattgggttattatacccc

SEQ ID NO: 255738 - DNA, 100 bp, Homo sapiens
atcggcggagaccctcgaagtgcgcaaacttgacactcaccctgaccggaatttagtggttatgttcaacaagtaaaatatgcaatgacaagaataaaag

SEQ ID NO: 255739 - DNA, 100 bp, Homo sapiens
gacatctttatgcgtgaggagctggcactgcgtatcgggctgaccgagtcccgagtgcagaaatctcctttacagacaataggtgaagaacaaacccaga

SEQ ID NO: 255740 - DNA, 100 bp, Homo sapiens
tgtcaacgacctggcggtggggctgcggcgcctgggactgcaccgcaccgagggcgagctccaggaggcaggtggaagtcatcataaagtttctgtttca

SEQ ID NO: 255741 - DNA, 90 bp, Homo sapiens
atccagcagcacttttacagctggagagtacaacatcctaacggaaagaccacagcaagattctttcattcgtctcctcctagcctgggg

SEQ ID NO: 255742 - DNA, 75 bp, Homo sapiens
ccggctgtaaagtcatcacctcctgggatcagatgtgcattgagattttccacagaatgagcctcagatcaagaa

SEQ ID NO: 255743 - DNA, 75 bp, Homo sapiens
gccgagttcaacatcctcctggccaccgactcctacaagaaagtttcctacactactgaggtttaggggcactgt

SEQ ID NO: 255744 - DNA, 75 bp, Homo sapiens
cacaattccagctttgcttctgcccagctcagtgacctcaggtagatggcacaaaccttcagggttttactaatc

SEQ ID NO: 255745 - DNA, 100 bp, Homo sapiens
aatagactatggtgaatacatggataaaaataatgtgaggcgacaagcaacaacaatcatagctggaggattccctgggagcacccaccagctgagatct

SEQ ID NO: 255746 - DNA, 100 bp, Homo sapiens
aaaacctaacccgttagccaatagtaacactatttcatgttagggtcttacagtgtgaatgacggtgcgcaactctacatgattgacccatcaggtgttt

SEQ ID NO: 255747 - DNA, 113 bp, Homo sapiens
gcagggagaggagctgtggataacgggaggtgaatttccatgtcaacatagtcctgatgccatggacaatattaccaggcagaaccaattctacgatacccaagtcatcaaac

SEQ ID NO: 255748 - DNA, 87 bp, Homo sapiens
gcggccccctggagggggcagtcccgggagaacctgcggcggccggagcgtttggcaatgaggagcagcagctggcgtgggccaagc

SEQ ID NO: 255749 - DNA, 82 bp, Homo sapiens
cgacaagccgctggcagccgcggatctcaccgccgctcagggaatactcccccagttgcaagaggcgcaggaccgtggaaga

SEQ ID NO: 255750 - DNA, 95 bp, Homo sapiens
gcaagcgggaaccaggtggccacccggtgtcgtgaaatcaaatacattgcccatctcgctgcagtctataagaagtagcctactgctaggcttca

SEQ ID NO: 255751 - DNA, 80 bp, Homo sapiens
caacatcctcctggccaccgactcctacaaggactctggactgtcttcacactaggtggtgtgggcagcaaagcggctgc

SEQ ID NO: 255752 - DNA, 97 bp, Homo sapiens
tcctggaaagagtgaatatgtgtcgcatccagagagctgatggggattgtgacttggctgctgtcatagatcgagatggtgatcatggagcgtagca

SEQ ID NO: 255753 - DNA, 99 bp, Homo sapiens
gcggagcggcgcctgggccgcgccgacctggtcatgagcttcgttaacatggctgcctgtggaggaaccgattgtgtccacagatgaggtcatcttccc

SEQ ID NO: 255754 - DNA, 75 bp, Homo sapiens
gctttccaggacaagtactttatgatagaaatgggacgtcggtcatcagatactgaagaagaaagcagaagcaag

SEQ ID NO: 255755 - DNA, 75 bp, Homo sapiens
cagaaattttggaaaaagttacatgtgaaagaagatatattccagcaaaccagtccagctacgggggcccagcca

SEQ ID NO: 255756 - DNA, 78 bp, Homo sapiens
ctacttcaagctttggccatcaatagctctgaggttactataacaacagtaccaaggtggctgtgaaaaccctgaagc

SEQ ID NO: 255757 - DNA, 74 bp, Homo sapiens
gctgctgagtgaggcccagaggatcacggggctgcgagcactggcagggctggtgacctcactgtcagagagct

SEQ ID NO: 255758 - DNA, 75 bp, Homo sapiens
gctccacagaaacccggactgagaggcagcgagagggctagtgatacagagcgagatggactagccccagaaaag

SEQ ID NO: 255759 - DNA, 75 bp, Homo sapiens
cagacatggacaccaaacatttcctgccgctcgggggggccctcagcctcttggccttgaacgggctgttcatct

SEQ ID NO: 255760 - DNA, 100 bp, Homo sapiens
cctgatacagcaggcgctcaccatgttccctggagctttgtgactctgccccctgaagcttctggaagatctcgggtggcagaaaaggagagagctttcc

SEQ ID NO: 255761 - DNA, 75 bp, Homo sapiens
ctgaggcccatcaggatgtggtgggaagatttaatgaaagagtgtgaacatggctacgcctcttcattcccgtcc

SEQ ID NO: 255762 - DNA, 100 bp, Homo sapiens
gcgtgaccgagagcgcgaatatcgtcatcgttagaaggctcccacatcaggacgagaaggagccctcgagttaccgtgggagctgtgggagctgccctgt

SEQ ID NO: 255763 - DNA, 75 bp, Homo sapiens
ctggcccagcaactttcccagaacgcaccgcaagctccctcctcggtgactctgacatcattagaagcatgccag

SEQ ID NO: 255764 - DNA, 101 bp, Homo sapiens
gtggaaggcatggaagtcatcagaaggggccattaagtttaatgatggcctgagcttacaggaaagttgccgccttattgaagctctgtcctcatgccagc

SEQ ID NO: 255765 - DNA, 97 bp, Homo sapiens
ttttgagccatacttaagtagccagacaaatcaggtcacgcaatatttaaactcacgtatctaagcaatcacgactataaacacctctactttgaat

SEQ ID NO: 255766 - DNA, 98 bp, Homo sapiens
ctgagtggcaaaatatcaccaagggcttcagtgaagacagggtttcaggagagataccagaagacgtgatgctggtggatggcaatgggcacctcaag

SEQ ID NO: 255767 - DNA, 98 bp, Homo sapiens
cacaacctccggggatgcgaaaacacccggccttactgaggaacaaaggatggacttcagcagaaatctttatgatattggggaacaactggacagtg

SEQ ID NO: 255768 - DNA, 99 bp, Homo sapiens
gggacacacggaggtctgttttgatgattctgggagatacatccagaaagtgcccagaagaaacttcctgctggaaaaaatgaaaaagcagtatttata

SEQ ID NO: 255769 - DNA, 100 bp, Homo sapiens
ggtgataatgaaaagatggctgccctggaggccaaaatctgtcatcaaattgagaattgtgatctgtctgggtgtgatcttcaagaagccaacctgagag

SEQ ID NO: 255770 - DNA, 75 bp, Homo sapiens
caaccccggccgctggccctctgattcctggtgtttctgcggtaccagtgttactatgggtatccgccgctgacc

SEQ ID NO: 255771 - DNA, 90 bp, Homo sapiens
caaaaacactagcagaactatttcaggtgcagttaataaccaaagcaggccacaaagccacagcagtggagaatttagcctgcttcatga

SEQ ID NO: 255772 - DNA, 125 bp, Homo sapiens
ccagctccgggtgcagggaaaggagaaacaccagacactggaagtctcactgtctcgaaattactaccccatggttcagtcggccttcatggaggatggcaaaagcaggcttgtgttgctgtcgg

SEQ ID NO: 255773 - DNA, 98 bp, Homo sapiens
cccaaggtagacctgggccagaatggtgaggagacggatgtttccagtcctaaagattagtgtcacagggttggaccccaatgccatgtactccctcc

SEQ ID NO: 255774 - DNA, 100 bp, Homo sapiens
gaagtaactttagaggaggatctgttgaacctggtcatgaatgaacagaaggagaaaattacagaaaaagtcattctttcaatgacggcaaaggaacacc

SEQ ID NO: 255775 - DNA, 83 bp, Homo sapiens
ggctcaccgaagatggaagggacaggcaagaaggcagtggctggacagcagcagggtgccaagtaccggggctccatccatga

SEQ ID NO: 255776 - DNA, 82 bp, Homo sapiens
caagtacaactcccggcacgagatgatgataattccgaagaaggcttccacactattcattcaggaaggcatgaatatgcat

SEQ ID NO: 255777 - DNA, 100 bp, Homo sapiens
cctgggtgctctaaaacaatgatagcaaaggctttggccaatgagagtggactgaattttctagctataaagtcaagctacaacttcaagcagaagagag

SEQ ID NO: 255778 - DNA, 75 bp, Homo sapiens
ccacggccggaatggcagcaagctcaggttaatgttgaagaaggaaaatgcggaagtcgtcatttgacaagtttt

SEQ ID NO: 255779 - DNA, 50 bp, Homo sapiens
attatgaccaagtacctcaccccaaagatggatgagatcaaagggaaaga

SEQ ID NO: 255780 - DNA, 75 bp, Homo sapiens
cggattcctcagctacgaggaggcgctgaggagaggaacttgaacatcagagaggagcccttatgaatgaaatcc

SEQ ID NO: 255781 - DNA, 75 bp, Homo sapiens
cccctctgagactggagtgagagggtcttctggtgctggagaatctggtaaaagcaccattgtgaagcagatgag

SEQ ID NO: 255782 - DNA, 90 bp, Homo sapiens
gcctggtgctatctcagagcaaggtggatgaaccgcatcaaagacttccagaagccactccagtgaccataagataaatgtcagaatcgc

SEQ ID NO: 255783 - DNA, 101 bp, Homo sapiens
cacactgtgagttcctggacatcaagggctggtggagtggctgaaacttctcagcaggcgcatctacactagtgacctgaggagagaaaccctaaccccac

SEQ ID NO: 255784 - DNA, 90 bp, Homo sapiens
gcggtccaggctgctgccgcgacggggccggcggcggggcagctgccaggaacgagggtagcaggtgcaagtgaaagtgtaggaaaacat

SEQ ID NO: 255785 - DNA, 98 bp, Homo sapiens
catgtcagggactgtgttcagacctacatccgtgagtggctaatcgtgaaccggaactgatgtagaaggccaatccttaagacaccgagacaagcggc

SEQ ID NO: 255786 - DNA, 76 bp, Homo sapiens
cagaaactgatccgcaaagtgtctacctcggggcagatccggaccaagccaattgcatgatttctggcgtttggat

SEQ ID NO: 255787 - DNA, 75 bp, Homo sapiens
gggaaatggcggagtatctggcctccatcttcggcaccgagaaagacaaacctgcctagagctggaacgttacct

SEQ ID NO: 255788 - DNA, 100 bp, Homo sapiens
caaggatgcccaggataccgggcatttgccactgcaagatacctgcctagagctggaacgttacctccagagcgagccctgctatgtttcagcctcagaa

SEQ ID NO: 255789 - DNA, 75 bp, Homo sapiens
agtggtatttcaagggggagctcttggcaaaacaccagatggggagaaccttcaaaaacttccccagttggctgc

SEQ ID NO: 255790 - DNA, 83 bp, Homo sapiens
gagaaaaagagaagatgaagaaacccagcttgatatgttggaatatatgcagaacatgtcctgcggcccaagaatcttggact

SEQ ID NO: 255791 - DNA, 90 bp, Homo sapiens
cccgagcggcgctgtcttttgcctttgccttcctgcgcagggcctggcgatcaggtgtattccgaacttaagtaccacccagagatgaga

SEQ ID NO: 255792 - DNA, 50 bp, Homo sapiens
ccatccagcagtttcttcaccaagaatcaggaaacccaggcccaacggca

SEQ ID NO: 255793 - DNA, 74 bp, Homo sapiens
catgtggcagtggaaaatgcgctcgggctggaccagcagcaaaatgatgcttcaacacccaggccaggtctctg

SEQ ID NO: 255794 - DNA, 100 bp, Homo sapiens
atcaaaggcagccttttccccatggcagcccctgttctggcatattctcaagatgcctacctgaaaggcaacgaagcttatagcggcaatgcccgcaata

SEQ ID NO: 255795 - DNA, 100 bp, Homo sapiens
taccacttgtgcccatatgatctgtaacatggaggagctggaaaaggtctatgttaacaatgaatgggcaaccagtgttggggaaggagggagctttgga

SEQ ID NO: 255796 - DNA, 80 bp, Homo sapiens
ccaacatgtggttcaagaaccttgacaagctcatccggctggtaaatgcgcagatccggcactccacccagagcctcttt

SEQ ID NO: 255797 - DNA, 100 bp, Homo sapiens
cgctgctgctgccgctgccgccctgagtcactgcctgcgcagctccggccgcctggctccccatactagtcgccggtcccgcagcccccggaagccaata

SEQ ID NO: 255798 - DNA, 100 bp, Homo sapiens
gcctcctgcgccggccttgcctcggatgaggacggggacttggttgccttttccagtgacgaggaattgacaatggccatgtcctacgtgaaggatgaca

SEQ ID NO: 255799 - DNA, 82 bp, Homo sapiens
gtgagtgtggtctacgagctgtttctcatctttatactcttccaggccagaagcggactcctagaagaggggagcagcaagg

SEQ ID NO: 255800 - DNA, 75 bp, Homo sapiens
aacagcatctgtggaaatcgatgatgcattgtatagtctatcaggtgtttgaaagtgtggctaagaagtatgatg

SEQ ID NO: 255801 - DNA, 99 bp, Homo sapiens
cttttttggtcatctaccagggcatctaaaccaaggaacatttatttggggctttcaagaagatgcctctaatggaggagtttctgagcagcacccctg

SEQ ID NO: 255802 - DNA, 113 bp, Homo sapiens
tttggatgtgggatccggttccttggtgtcatccagccttagcaaaccagaggaactgtggctgcaccatctgtcttcatcttcccgccatctgatgagcagttgaaatctgg

SEQ ID NO: 255803 - DNA, 75 bp, Homo sapiens
ccaagcattcatgttccctcaccagctgtagcatctccttggaaacaatgccatctttgaatgtgagagataaac

SEQ ID NO: 255804 - DNA, 75 bp, Homo sapiens
cagcgcagcgacggggcgctgcctggcccaggcgcacacggaagtggcacccaggcatgtggaatatgctcatag

SEQ ID NO: 255805 - DNA, 83 bp, Homo sapiens
cgggcggcttcctggcctgggcgctccggtggcggcggagctccttccgcttccagccgttcgagtcctatgactccaggccc

SEQ ID NO: 255806 - DNA, 75 bp, Homo sapiens
tgccccggtgcgcagacagagctattccagcaccagcagagatttaggtcgatctcgagaactacagtatgtata

SEQ ID NO: 255807 - DNA, 75 bp, Homo sapiens
ccagccccccgcgggacgcctgcgtctacagcagctgctactggatgggtcatcagttaaggaagttgaaaccta

SEQ ID NO: 255808 - DNA, 96 bp, Homo sapiens
aatgccgtgaaagtgacgccttcgctcaacgaggacctgcaggtggaagtgatgaagcctttgaagaagatggtggagagaattcgcaagttccag

SEQ ID NO: 255809 - DNA, 98 bp, Homo sapiens
tcttctgatggacataatgggcttggaaaggggtggagagattcaaccagttagcgtgaaagttggagataaagttcttctcccagaatatggaggca

SEQ ID NO: 255810 - DNA, 83 bp, Homo sapiens
gaccctggagcctcagttggaagcagccgatccagcctgcggagcctgtggggcagacatccagctctgtcacccaagctgca

SEQ ID NO: 255811 - DNA, 74 bp, Homo sapiens
accttcaccaacatcggctctggtgccagctgctgcccgtgctggtgccattgccccatgtgaagtcactgtgc

SEQ ID NO: 255812 - DNA, 90 bp, Homo sapiens
gcggtcccagtggccctcggcgcggcagcgctccagctcgctctccaccttcaggactttccttatcccagttgattgtgcagaatacac

SEQ ID NO: 255813 - DNA, 100 bp, Homo sapiens
cggagcgcggtgctgccggtggagcttcaggcatcacccagccaatgcctgtctgattcccatctgttctctgtatggtgctgccgtcaccacagtagaa

SEQ ID NO: 255814 - DNA, 75 bp, Homo sapiens
ctggcatgacgtgcaggtctctagcgcaaatggtggagtcaatgaagaaagtagcagggatggatgtggagctga

SEQ ID NO: 255815 - DNA, 75 bp, Homo sapiens
cggaaaccggtagcgcttgcagcatgattgctcatttagaaagtggatgtgtgggataacatgtccaatgtgtcc

SEQ ID NO: 255816 - DNA, 90 bp, Homo sapiens
attgtgaagttcttccatttgagaagtggtctggaagtagatatcagtttgtataacacattgcctgtctctcttgctgatcgagaggtg

SEQ ID NO: 255817 - DNA, 100 bp, Homo sapiens
cgcatctgagcctgccgatgacactgacttcacagagaatgcagttgtcttgacttcaggtctgtctgttctgttggcaagtaaatgcagtactgttctg

SEQ ID NO: 255818 - DNA, 73 bp, Homo sapiens
tttttagtccattgactatgcagcctaatggtatccacaaattacccattatcaaaaacaaatagttcatcaa

SEQ ID NO: 255819 - DNA, 75 bp, Homo sapiens
cagtctttgctacgtacagcaaaaggcactcaaggagttgcccctggtcctgtaattggacttcaggcaccatct

SEQ ID NO: 255820 - DNA, 73 bp, Homo sapiens
ggggctacggaggagaccgaggtggctatggaggcaaaatgggaggaaggagccaaggcaaagagggaccact

SEQ ID NO: 255821 - DNA, 50 bp, Homo sapiens
gatgatttcggaacctggagaaaattgaggatgaggatgatgaccttcag

SEQ ID NO: 255822 - DNA, 82 bp, Homo sapiens
ttcatcatccctgtggagattgatggggtggtccaccaggtggtccagctgctcacctgtgacctgctactgtcgctacgga

SEQ ID NO: 255823 - DNA, 75 bp, Homo sapiens
cgaaggaaaaggaggaattcgccgtgcccgagaatagctccgtccagcagtttctaataagtgaccgtgacccac

SEQ ID NO: 255824 - DNA, 90 bp, Homo sapiens
gggataaatttatgtggatcttcgctttggtgccataaagacttaattcagtgcacaaatgagatgaatgtgaacatcccacagttggca

SEQ ID NO: 255825 - DNA, 100 bp, Homo sapiens
ggctcacgttgaccaactctttgatgatgcatccagctaccagagattcactgactgctataagtgcttctaccagttgcagcctgcgatgacacagcaa

SEQ ID NO: 255826 - DNA, 100 bp, Homo sapiens
ccgggagcatctcctgcatggaggaaaagggaaggtgccctcctatttgggatgccttggatacttggactaactcgtgcattccagaaattatcaccac

SEQ ID NO: 255827 - DNA, 100 bp, Homo sapiens
cacagcagttgcaccctgttttgcaaaaaccatcagtgtttgggaatgattctgatgatgatgatgagcagcgtccgtctccaagagagtatgaagagag

SEQ ID NO: 255828 - DNA, 96 bp, Homo sapiens
ctgaaatgattctccagaatttctcctcataaaaaaggtttattacccagaactctttgtctgggtcagtcaagaaccatttccaaacaaggacat

SEQ ID NO: 255829 - DNA, 89 bp, Homo sapiens
accgagacctatgctgatggaggtttgcaatagcaaccataactgccactgtgctccaggctgggctccacccttctgtgacaagccag

SEQ ID NO: 255830 - DNA, 83 bp, Homo sapiens
aaaatgcaaaaaaggaggccaaagactttgttgatgaagctgtagctgtactacaagcccaccaagctaaagaggctgcccag

SEQ ID NO: 255831 - DNA, 50 bp, Homo sapiens
ctcaccatggagaggacagaaggattggatgtggtcttgatcgtctgcaa

SEQ ID NO: 255832 - DNA, 101 bp, Homo sapiens
cctcccccgcatgacccccttggactcgggacctggttcgggccggggtgctgaaggagaagcccctgtggtttgacgtatatgacgcctttcccccgctg

SEQ ID NO: 255833 - DNA, 101 bp, Homo sapiens
ttccaccaggccgggaagcccatcgggagtgttggaggaagcagaattttacaatatcacctcattaataaaacttgtaaaggacaaaattagagaacgag

SEQ ID NO: 255834 - DNA, 100 bp, Homo sapiens
ggcggagcagacctactcgtgatcctggtgtatagcctggaagcaggacgccgcctcttgaagctgggtaacgttctccgtgacttcacgtgtgtcaacc

SEQ ID NO: 255835 - DNA, 80 bp, Homo sapiens
ctctgtgggtgtggcccagcacgcaagaagttaaagtctgacacggctgctgcagctgtgcgccaaatgaatccacatat

SEQ ID NO: 255836 - DNA, 100 bp, Homo sapiens
gtttgtatggggcaagaacatccgagggtgcctgggaatcggtcgcctggaggaccagtatttcccatggaggttgctgcccattgaaagagctgctcgg

SEQ ID NO: 255837 - DNA, 75 bp, Homo sapiens
gtccgagccagccgctgttttgccggaggagcccctcaggccattgacaagtatctctatgccatgcggctctcc

SEQ ID NO: 255838 - DNA, 98 bp, Homo sapiens
gttaactgattatattctgaaaggaatttcagggaagagccaggtcctgtttgctgtggtgttcactgcccgatatctggacctcttcaccaactaca

SEQ ID NO: 255839 - DNA, 93 bp, Homo sapiens
tcacgcggccttaaactgcacctccagcgtccataagaacgtagcccgtgtggacgaatgtggaacctcgctctgtggctgtgttcccttggc

SEQ ID NO: 255840 - DNA, 90 bp, Homo sapiens
tcgggcgccggcgagatgcctttgttcaccgccaaccccttcgagcaagacgtggaatagcctaacatggcagaccagagacagcgctca

SEQ ID NO: 255841 - DNA, 75 bp, Homo sapiens
agtgtgcgtgcgcgccgagcggcgagaaccactgtctctgatcaacgtgcggaagaggaacgtggaatctgggga

SEQ ID NO: 255842 - DNA, 75 bp, Homo sapiens
gcggcggcgaacatgcgcttttgacacattggagaaaaggcgacggcggattgacagaagtatgattggagagcc

SEQ ID NO: 255843 - DNA, 101 bp, Homo sapiens
gttaccgctgctgcccctgctgtcgctcctggtcggcgcgtggctcaagctaggagtcagaaataccatcagaggaggggtactgtgactttaatagtagg

SEQ ID NO: 255844 - DNA, 58 bp, Homo sapiens
gaatgggacaagatcccgtccatgaatcaggatgatccagattccagtaccagtacat

SEQ ID NO: 255845 - DNA, 97 bp, Homo sapiens
cggtgctggcatccgaacaccgggtggctggtgcagccgaggtcttcgggaattccagcgagggagaagatggtataaactggtccatcagtgacaa

SEQ ID NO: 255846 - DNA, 73 bp, Homo sapiens
ctgaggcagcgcggccgcagcagccctgaacaggaaatatagtggtcattatgattagctatccaaaaggaag

SEQ ID NO: 255847 - DNA, 75 bp, Homo sapiens
ctctcggcgccctggcgctgctcctgctgtccagcctctcccgctgctcaggtaatgcatgccaggactgtgcaa

SEQ ID NO: 255848 - DNA, 50 bp, Homo sapiens
cacggttccagaagatgagagggatgcagagcagtcattatggcgaacct

SEQ ID NO: 255849 - DNA, 83 bp, Homo sapiens
aatggcaagcgcagcaacaacagagagcacgtggacggaagctcctgttttcttgtcagccgccagctgagggccattcgcag

SEQ ID NO: 255850 - DNA, 100 bp, Homo sapiens
caaggatgctgttggcctgggtacaagcattcctcgtcagcaacatgctcctagcagaagcctatggatctggagattagaagcccaggacccaggaagg

SEQ ID NO: 255851 - DNA, 101 bp, Homo sapiens
ataaaaatggagaggtacagaatttagctgtcaaatggagaagatgtatggtcttatgcaaagggacttcctcacatgtttcagcagggtggtgtattcta

SEQ ID NO: 255852 - DNA, 101 bp, Homo sapiens
aacctgaagaggacctggcagcaataagtttttggtgaaataacaaagagctgcatatctatgtgagactgaattttcctcttagacttcagctaaaactg

SEQ ID NO: 255853 - DNA, 74 bp, Homo sapiens
gcgtgccgttcagggtccagaagaaacaggccgaagaacagttgagaattgttgaagaacaaagaaagattcat

SEQ ID NO: 255854 - DNA, 75 bp, Homo sapiens
cgacaagctgctgatgactgtgccctcgatttgaactgcccatgggaaccaccgagcagcccccactgccgcagc

SEQ ID NO: 255855 - DNA, 101 bp, Homo sapiens
gcctcctgaggagctgggattacagattcgctcaattgaaggccagtatggcacactacaagcatatgtgactccaagaattcaacccaaaacctgtcagg

SEQ ID NO: 255856 - DNA, 74 bp, Homo sapiens
caccaccaccaccacagagtctgtggaagaggtggttcgaggtttttggaagaagctgaccgcctgaaaagaaa

SEQ ID NO: 255857 - DNA, 100 bp, Homo sapiens
agaaagcaacaaccaggagctccgcacgcaggttggtcaaagaaaaagtgatgtatgaaaaagaggcaaaacaacaagaagaaaagattgaaaaaatgag

SEQ ID NO: 255858 - DNA, 92 bp, Homo sapiens
cggggacggagagaacacgagcccatcaggtgctggagaatctggtaaaagcaccattgtgaagcagatgaggatcctgcatgttaatgggt

SEQ ID NO: 255859 - DNA, 100 bp, Homo sapiens
aatttgttaaagagaggatagaaattgaacagaactatgcgaaacaattgagatgccttcaattaagttgcagagttctgatggagagatatttgaagtt

SEQ ID NO: 255860 - DNA, 50 bp, Homo sapiens
caaagtccggccaagtcttcccaggaaacagcgggagccacggaagggcc

SEQ ID NO: 255861 - DNA, 83 bp, Homo sapiens
gggcgctgctggcgctctggctgtgctgcgcgacccccgcgcatgtccagttacaacacagggatcacaacaaacacaaccgc

SEQ ID NO: 255862 - DNA, 78 bp, Homo sapiens
gacgcccggcgcgagctcaagctgctgctgctcggggaacgcccttttgcttgtgactggcagggctgcgacaagaag

SEQ ID NO: 255863 - DNA, 82 bp, Homo sapiens
cgagctggacccggaccggttttgggctgaccccgcactacatctacccaccagccatcgtgcagcccagcgtggtgatccc

SEQ ID NO: 255864 - DNA, 133 bp, Homo sapiens
ttatcagcactatttgaaacttttatctcatctggcttggcgcctgaggttctcccattagcgcctttggacgggagatgctgaagcggaacatcggtgtcgttgtggttggatttcctgccaccccaattat

SEQ ID NO: 255865 - DNA, 100 bp, Homo sapiens
tgggagcagaggaagccttgaggacctactcacagataggaattgaaggtcttcgccttgatcgtgttctcctgcatctatggtgagggctacagcaatg

SEQ ID NO: 255866 - DNA, 75 bp, Homo sapiens
tggaaactcatcaggaaggaagcacaggggccactcggagtcgcccgagaagctggagtacagtggcacgatctc

SEQ ID NO: 255867 - DNA, 75 bp, Homo sapiens
cacgcagctgggaaaaaggctttggcaaaacttgatcttttccctgaattaattggaactgaagaaataatcaag

SEQ ID NO: 255868 - DNA, 100 bp, Homo sapiens
cagcagcaggctgacggctcgttccaggacctctctccagtgatacataggagcatgcagggaggagtagaagatgaagtgaccctctccgcctatatca

SEQ ID NO: 255869 - DNA, 100 bp, Homo sapiens
gcagagtccaccgctgtcccgcggcctggagtacaacgaggtcaacgtcaccctggacctgggccaggaagcgagtcacgtcccagcgctgctccctgga

SEQ ID NO: 255870 - DNA, 120 bp, Homo sapiens
cgccgcggccgccgcagccatgaccgtggagttcgaggagtgcgtcaaggactccccgcgcttcaggaacttgctactaccagcaccatgccctaccaatatccagcactgaccccggag

SEQ ID NO: 255871 - DNA, 75 bp, Homo sapiens
tgacacgcttccctggattgggttcgagaacttgtcttggacaattgcaaatcaaatgatggaaaaattgagggc

SEQ ID NO: 255872 - DNA, 75 bp, Homo sapiens
cgcttgcccaggaggcttgtcccctggcaaacctggtggacctgcagaagaagctggaggagctggaacttgacg

SEQ ID NO: 255873 - DNA, 100 bp, Homo sapiens
agacaatgaaaacagagttcctacatgtgaagaggtggagatgtacaagcatgtcttccagcggcccccggaccgacactcagacttctcccgcctggcg

SEQ ID NO: 255874 - DNA, 75 bp, Homo sapiens
gagaccgtgaccgagagcgtgaccgagagcgcgaatatcgtcatcgttagaaggaccccaaaatgtatgtacaga

SEQ ID NO: 255875 - DNA, 83 bp, Homo sapiens
aatcgttaaacatcttaggtcaggtggacccccaaaagtacaagggcatatttaacggattctcagttacacttaaagaggat

SEQ ID NO: 255876 - DNA, 74 bp, Homo sapiens
catgcaaacgtttgtccttgctcctgaggtgatctgtgaaaatggttcgctattcacttgacccggagaacccc

SEQ ID NO: 255877 - DNA, 100 bp, Homo sapiens
gatctgatcacctgtctggagcaaggaaaagatccctggaatatgaagagacacagtatggtagccacacccccagacgttcttgcatcctcagcctgtg

SEQ ID NO: 255878 - DNA, 118 bp, Homo sapiens
atgaagctaccggccagggttttctttactctggggtcccggctgccctgtggcctcgctcctcggagggttccagcaacagatagaaatgctttaagttcactctggggaaagctgg

SEQ ID NO: 255879 - DNA, 100 bp, Homo sapiens
tactaccttgcagtcttttatgagactggattaaatgttcctcgggatcagctgcaggatggggaatttagcatggatcttcgtaccaagagcaccggtg

SEQ ID NO: 255880 - DNA, 98 bp, Homo sapiens
cgggccacccagcccgcccaactcccagcggagagcaagggaaacagtgcttcttagtcctacgtcagcagcagtttaatgtccaggctcttgtggcg

SEQ ID NO: 255881 - DNA, 143 bp, Homo sapiens
cagcgcgtggtgggggaactgctggggaaggcgattggcatcgatctctccatcccttccgaggcccgacttcggagatacaactcgtcaacgaatcaaattcagtgatgacagagtatgcaagagtcaccttctcaactgtt

SEQ ID NO: 255882 - DNA, 74 bp, Homo sapiens
caagctcgtagcctgccactccgtgcttaacaagcacaagccctggctggagcccacctaccacggcatagtca

SEQ ID NO: 255883 - DNA, 75 bp, Homo sapiens
tgtttcttcccaggtcctaaagagcaagcctaactcaagccattggcacacagtttgcattgagactccttgcat

SEQ ID NO: 255884 - DNA, 100 bp, Homo sapiens
aagagaaaacttgactgtatacagaatcttgaatcagaaattgagaagctgcctttctgagaaaagtctacagcattctttctctgcaggttctcttaac

SEQ ID NO: 255885 - DNA, 82 bp, Homo sapiens
gccgacatcgcggccttcttccgatccgcaattctgtggtgttcttggtcacacatttatggagtttctgaagggcagtgga

SEQ ID NO: 255886 - DNA, 100 bp, Homo sapiens
gtgaccgagaccgtgaccgagagcgtgaccgagagcgcgaatatcgtcatcgttagaaggttcgtgagccacacatctccccacaccaagctcctccata

SEQ ID NO: 255887 - DNA, 100 bp, Homo sapiens
ccatcagcagagttctctcctgctgctcctcctgaagttgcttgatagatttgactatgatgatgagccagaagctgtggaagaatcaaagaaagaggat

SEQ ID NO: 255888 - DNA, 96 bp, Homo sapiens
gaaactggagagcagactacagggaccccattgaggcggccttagcaacatgctgttccagtgctccctacctgacaccacagccacccttggtga

SEQ ID NO: 255889 - DNA, 97 bp, Homo sapiens
ggaacttgttggaaatggaacatacgggcaagtttataagattttaggtgatgggcaagtcagaaagtcagatggatataactgatatcaacactcc

SEQ ID NO: 255890 - DNA, 97 bp, Homo sapiens
cggatcctgcttttgcagaatgacccctgtcttttaccagagtggcacactgtgcatcttctcgacaaatcatttcacactggaagaattgtacaag

SEQ ID NO: 255891 - DNA, 100 bp, Homo sapiens
tggggttcttttgacctgagggctgctattgtatatcacactaaaggtgatgatgaacagtctacacagatggctgcaagttgggaagatgataaagtta

SEQ ID NO: 255892 - DNA, 50 bp, Homo sapiens
gtggggcgtcttccgcaacgaggaccagctgaccccgcactacatctacc

SEQ ID NO: 255893 - DNA, 82 bp, Homo sapiens
ggcattttagatctaattcaagattgtgcagactggtgcttaaaatggaagtcgatattaatggagagtctagaagtaccct

SEQ ID NO: 255894 - DNA, 89 bp, Homo sapiens
aataaagaagtggagcgtgtcctgaaggagttccaccaggccgggaagcccatcgggtgagaagccctaccactgcaactgggacggct

SEQ ID NO: 255895 - DNA, 102 bp, Homo sapiens
gcgtaactttctcccttgatccgggagtctttccactggcaattctgtggtgttcttggtcacacatttatggagtttctgaagggcagtggagattactgc

SEQ ID NO: 255896 - DNA, 97 bp, Homo sapiens
caagataatagccagctccccagaaatgaacctgcccacggtgtccgcgctcagggtgcaaatatatacagagcttcataatcagcccaagaccaca

SEQ ID NO: 255897 - DNA, 75 bp, Homo sapiens
gccacctgcaagagcctgcagcagtcgcttctccgcagtacctggagtagaacagaaaaattattatgtctgtgt

SEQ ID NO: 255898 - DNA, 100 bp, Homo sapiens
aagggagtttgctaaatttgaaaaggagaaaatgaatgccaaatgggacacgaggcgacaggaagaagggtattacagccgcctggaagccgagaggcgc

SEQ ID NO: 255899 - DNA, 95 bp, Homo sapiens
ctagagatgcagattaattccaaccaaatcccggggctcatctggattaataaaatgtctttggtggacttgggaaagaggttgctagaagcagc

SEQ ID NO: 255900 - DNA, 100 bp, Homo sapiens
ctgacgctcgtggggctgcagtactcgggcaagaccaccttcgtcaatgtcatcgcgatcctggaggagaacatgaagctggaatgtaagtgccacggcg

SEQ ID NO: 255901 - DNA, 75 bp, Homo sapiens
cacaaagtttcagaaagaagtgcttcaaaggcttcactgtataaataggagaggatgagagcccagaggtaacag

SEQ ID NO: 255902 - DNA, 108 bp, Homo sapiens
cctacactagtcgcgggagccacgcagaggacgccggaacaccctggaagccgagaaatggttggtgttcgaggaagagacattgttgttcttggtgtggagaagaag

SEQ ID NO: 255903 - DNA, 75 bp, Homo sapiens
gtgcgtcaaagccaggagcaccatcccaccagttctttctaccacactcccgaggaagctcccatggacaaagcc

SEQ ID NO: 255904 - DNA, 78 bp, Homo sapiens
gcagatttactatgctgggcctgtcaataatcctgaatttactattcctcagcgtgtataccaatgcatggccctctt

SEQ ID NO: 255905 - DNA, 100 bp, Homo sapiens
tctttaagggctacgggaagatcctggaggtggatctgaagaacggtaaacggagttccctctcgaagtccaagattagttgcttctggggatgactctg

SEQ ID NO: 255906 - DNA, 75 bp, Homo sapiens
cggcctttctgctcctcgcggcccaggtcttgaggaccggcccagctcaggctcctggggcagcggcgaccagag

SEQ ID NO: 255907 - DNA, 90 bp, Homo sapiens
cctacagctgcattcactgcagagctcacttggccaatcatgatgaactaatttccaaggtgccatcgcctgcaggattctttattcagc

SEQ ID NO: 255908 - DNA, 50 bp, Homo sapiens
ggaaggccgaccgactgccgcgatgtaggtgcaaaaaactacagacatct

SEQ ID NO: 255909 - DNA, 101 bp, Homo sapiens
cttcagcgagctggactgctccctggagcacgagttcaggaaggctcaggaagaggagagcagcaagcggaccaagccaccctggtagaacaagtaaaaag

SEQ ID NO: 255910 - DNA, 51 bp, Homo sapiens
gaaggaatccaccttcttacgctatggcagtggattaatccctcacctcct

SEQ ID NO: 255911 - DNA, 110 bp, Homo sapiens
gaccgagtcgcgagtgtgcgccgtccgccgcccgccggatcccccggaccccccgaccggggggccctcagcctcttggccttgaacgggctgttcatcttgattcacaa

SEQ ID NO: 255912 - DNA, 50 bp, Homo sapiens
gcgtcctcatgtggggggtaaaccactcggatcctaagcacttcaagtca

SEQ ID NO: 255913 - DNA, 95 bp, Homo sapiens
gcagcttcaacggagacttcgtgtgcggacagtgtgtgtgcagcgagggctggagtcgatagcagcagttggtgacgagatggcactcagaaacg

SEQ ID NO: 255914 - DNA, 76 bp, Homo sapiens
actaatgggagttgcttttggaatgaatttggaatcttcccttgaagaggtgcagatcccaagtctgtagtatgtg

SEQ ID NO: 255915 - DNA, 100 bp, Homo sapiens
atgtcttatagtggaaagcagtctactgagaccttgccaccatggaagaaagagtacaaagacgatattatgaaaagctgacggaatttgtggcagatat

SEQ ID NO: 255916 - DNA, 101 bp, Homo sapiens
gcattcagatggatgataaaatcctcaagacaaccacacggggtgctggagaatctggtaaaagcaccattgtgaagcagatgaggatcctgcatgttaat

SEQ ID NO: 255917 - DNA, 98 bp, Homo sapiens
agcagatttcccaagagcagcggaaaatgatccagtcacagggaccatgcctggccggatgctgccgcctggcttcagtgccatctgcatgtcctcag

SEQ ID NO: 255918 - DNA, 90 bp, Homo sapiens
ggagtctccaccaggactgaccgctgccgcccagcacgtccaggacagagcgggatgccaccagcttgtccaaagggaagttccaggagc

SEQ ID NO: 255919 - DNA, 82 bp, Homo sapiens
tgcagccaaggtcttagcagaagatgatcttgtagaaaatttcagctgtagcccttggactagaagctgaaataacagaagc

SEQ ID NO: 255920 - DNA, 86 bp, Homo sapiens
ctgtgctcgcgctactctctctttctggcctggaggctatccagcgcagttgtgaaaaacttcaggacaaaaatgtttcatttaag

SEQ ID NO: 255921 - DNA, 74 bp, Homo sapiens
actcaagtgggacttacggtccacagatgagccagtatggaccacaagggaagaaggagaaagggccaacccct

SEQ ID NO: 255922 - DNA, 90 bp, Homo sapiens
ggaagaagcgctggtttgtcttcgaccggctcaagcgcaccctttcctattatgtgggctggctgtcaccaacaccaccatgacagggac

SEQ ID NO: 255923 - DNA, 75 bp, Homo sapiens
gcgcggagtgggcgatgccagcgtgccagaccgagacatgggtgcccggcaccgcgcccgagcccactccattca

SEQ ID NO: 255924 - DNA, 82 bp, Homo sapiens
aactgtctttatctgctgtcaaggatcttgtgtgctccatagtttatcaaaagaagctttgaggaagagccataactacctg

SEQ ID NO: 255925 - DNA, 90 bp, Homo sapiens
ctttctagcaaaacacagctgttacagggtgagagtatggacaatttcaactggggagtgcgcagacgttctctggacagcctggataag

SEQ ID NO: 255926 - DNA, 75 bp, Homo sapiens
tttgggcggggcggagccgagagccacactttcaagtaaaccaggtggaagaggaggaagtggaggaaccagggg

SEQ ID NO: 255927 - DNA, 100 bp, Homo sapiens
gtcaaggataagtctcatgacaccgcagacgttgccttcatggtggtaagagggattccagagtctcttatgtcctcaaagcttcaagctcagccaaaag

SEQ ID NO: 255928 - DNA, 74 bp, Homo sapiens
cagtggtcgcttcttctccttgtggttatggccagtgagaatgtgcggtgttgcattgcagaagaagctaggaa

SEQ ID NO: 255929 - DNA, 74 bp, Homo sapiens
aagaggtcccaatcccccactctttccgccctaatggaggtctccagtttcggaatcatcggaatccttcacca

SEQ ID NO: 255930 - DNA, 100 bp, Homo sapiens
gatacatcgtggaacacgtagatctgggtgcatactattatagaaaatttttctaccagaagggttataatcaccaacagatgagtgaaggacacaggca

SEQ ID NO: 255931 - DNA, 100 bp, Homo sapiens
aatacattactgcagagaaacacggaaactaggaagaggaaattaactatctgtacttataaggacagtcattttgtttactcattcagccctgttgcag

SEQ ID NO: 255932 - DNA, 90 bp, Homo sapiens
ccgctgccgaaatgaagtataaggacaagatgacctcatccagcatcaagatatgaggatcttggagctaacgccagaaccagaccggcc

SEQ ID NO: 255933 - DNA, 100 bp, Homo sapiens
cttatgaaatgtttggggatgaagaagtgatgtgtttaaatggaaactggacggaaccacctcaatgcaaagttaagggaagaaagtcggaggctggctt

SEQ ID NO: 255934 - DNA, 75 bp, Homo sapiens
aaagtgaaatgagaacatcacatgaagccagagatctgcttggctttgaggaagagtggcagtactgcctcactg

SEQ ID NO: 255935 - DNA, 114 bp, Homo sapiens
ctaacggggacgacagggaccccgagatcgagctctttgtgaagcaacgtgaaatcctgcatgagattcagagaaggaaagaagagataaaagaagagaaaaaaaggaaagaaa

SEQ ID NO: 255936 - DNA, 82 bp, Homo sapiens
gggcagccgagacccaccgaggcagcccaggttagagcagccagcgggtacagaatggattttggaagagggagtcaccact

SEQ ID NO: 255937 - DNA, 75 bp, Homo sapiens
aaggaagtgcggagccagcctgagttgggagaagagctccagagagacagtcattttgtttactcattcagccct

SEQ ID NO: 255938 - DNA, 74 bp, Homo sapiens
tgacaaactaaagaaagacttgtgttaccctgcctagggtagttaaaagacgagtgaatgctctcaaaaacctg

SEQ ID NO: 255939 - DNA, 100 bp, Homo sapiens
tgagcctcaagtgcttctgcattacaaacattgacatcaccaatttcagcagcagctggagcgatggcctggccttctgtgctctgctccacacctacct

SEQ ID NO: 255940 - DNA, 75 bp, Homo sapiens
gctttgccattgtgtattacctcattcaaaggggaaatttgcagtggtgagaaaatgtataaagaaagattctgg

SEQ ID NO: 255941 - DNA, 75 bp, Homo sapiens
tggcccaggaccgggaggagatgaagacaagttggatggcttgaggactggtactaaaaggaaacgtgactggga

SEQ ID NO: 255942 - DNA, 75 bp, Homo sapiens
tgggcgaatggcagcccatcgaggggtggcactgaatcaacaagacaagcaactcaattgattaatgctttgatc

SEQ ID NO: 255943 - DNA, 50 bp, Homo sapiens
gacagaagcgactttggtgagactctgtgacaaccatgagtggaaaaaac

SEQ ID NO: 255944 - DNA, 90 bp, Homo sapiens
attctcgctgtgacagagacaacaccgagtatgagaagattgtgcagactggtgcttaaaatggaagtcgatattaatggagagtctaga

SEQ ID NO: 255945 - DNA, 75 bp, Homo sapiens
gaccgtgaccgagagcgtgaccgagagcgcgaatatcgtcatcgttagaaggtgacagaccatgccaccactgcc

SEQ ID NO: 255946 - DNA, 100 bp, Homo sapiens
cacgccatgaacctggaggccgtgaacacctacgaagtcaaggagaagctgcgccttgatcctgacagcgagatcgccaccaccggtgtgcgggtgtccc

SEQ ID NO: 255947 - DNA, 99 bp, Homo sapiens
acatcgccaagtttcagggagaagacacggtcgtgatcgcgactcgagaacaggaagaactggaagaagctttagaagtggaacgacaggaaaatgaac

SEQ ID NO: 255948 - DNA, 100 bp, Homo sapiens
atcagagggcattatgaacgaattctcaacccctacaacttattcctgtccggagacagcctaagggctttcggacagtcctttctccagcccgacatcc

SEQ ID NO: 255949 - DNA, 101 bp, Homo sapiens
gaccctgtgccttcatgtggaaaagtgtgcggcaagcctctgccttgtggttccttaggaaattatcagttcattgcctagcatagtaaatgacaaatatg

SEQ ID NO: 255950 - DNA, 130 bp, Homo sapiens
gtggaaacagcagatgtaccctcagtacgccacctactattacccccagtatctgcaagccaagatacctttatcaatgaatgtgtcaacctttctggcatacgaccagcccacaataagttactgtggg

SEQ ID NO: 255951 - DNA, 98 bp, Homo sapiens
agccattgaagactctgatatgttacaggaggttcaaaccttgtactactcagctgatcacaagctgcttgatgggaacctactagatggacaggctg

SEQ ID NO: 255952 - DNA, 74 bp, Homo sapiens
atggaactcctggcaaagtcatcagttgccaattgttacatacgaaactatacagtttatgtaacttgatggaa

SEQ ID NO: 255953 - DNA, 75 bp, Homo sapiens
gtgatggggcccagtatgttaagagatacaagggccacagaaataatgccacagaagcgtgtagatctgctggag

SEQ ID NO: 255954 - DNA, 97 bp, Homo sapiens
cggaagtattgacggaaagcttgaattacctacatggattggtagcttatgtcgatcttgatgaaagagcaattgatgctctcagggaatttaatga

SEQ ID NO: 255955 - DNA, 100 bp, Homo sapiens
ctggttgcaggtggtgctgggaggatggagctgaacatccatgtgggaaacatttccctggtggaccagtttgagtgggacatgtcagagaaggagaact

SEQ ID NO: 255956 - DNA, 100 bp, Homo sapiens
ggcccgacaagaacttcacgcgggagcagggctccaaacgaatcctgcggtcccatgagattgtgctgccccccagtggacaagtggagacagacctggc

SEQ ID NO: 255957 - DNA, 100 bp, Homo sapiens
ggggaacagaccctctttgctgtgacggctgatgggaaggtgaaatgacaatggatgctctgttggctcgattgaaacttctgaatccagatgaccttag

SEQ ID NO: 255958 - DNA, 101 bp, Homo sapiens
gagctggaaaagcacatggcggccgccagcgccgagtgccagaactacgccaaggaggtggcaggggcctcaggagtgcaagtagctgatgaagtatgtcg

SEQ ID NO: 255959 - DNA, 90 bp, Homo sapiens
ccgccccaccatctacagcaacgtgatcaaaggccagaacacaaagcgtgaatccggaagaaaagttcaatctggaaacatcaatgctgc

SEQ ID NO: 255960 - DNA, 75 bp, Homo sapiens
gctactgccgcttcagttctcccggtgtggccacgagtcggtgacctaaaacttgacaacgtgatgctcgattct

SEQ ID NO: 255961 - DNA, 100 bp, Homo sapiens
aggaggttgctaacccagaacactatattaaacatcccctacagaacagaattataaggctgtctgcagagatttgaaaaatggcaacaaatgaaagtgt

SEQ ID NO: 255962 - DNA, 102 bp, Homo sapiens
cacccccaatcattggaagatttggaacctcactgaaaattggtattgttggattgccaaatgttggatgcctggaatgatgtcgtcagtaatgcctggaat

SEQ ID NO: 255963 - DNA, 74 bp, Homo sapiens
gtttcctcggcatcagaagtccttcaaccctgcagaggagaaggcagagcccccccaggctatgaatgccctga

SEQ ID NO: 255964 - DNA, 75 bp, Homo sapiens
gccaccagcagcgcgcgcgggagcccggggaacagcgcgtttagtgggctacagatggcatggcatctaaaacct

SEQ ID NO: 255965 - DNA, 100 bp, Homo sapiens
agaccccaatcctaagccctcaggaggttgtgtcttgtagccagtatgctcaagacttaattcagtgcacaaatgagatgaatgtgaacatcccacagtt

SEQ ID NO: 255966 - DNA, 50 bp, Homo sapiens
gaagaagccaaaaacattctggactttgagaatcactacaagaaaaactc

SEQ ID NO: 255967 - DNA, 95 bp, Homo sapiens
catagacctcaggagatagcaatgtggcagcccaatgtggaggaactgatgaggagtttcaacagagacaggcggattttttgtgccattctctc

SEQ ID NO: 255968 - DNA, 73 bp, Homo sapiens
gcgggagagtgagagaaaggctggaagacgaggtgtatgtggaatttgatgatcttgaatgggataaacgaga

SEQ ID NO: 255969 - DNA, 100 bp, Homo sapiens
caggcttgtggaaacatctagatgtaacagccatgatccgtgattctaactgcaactatgaggcctttatgaacattattaaattgagtgacaatattgg

SEQ ID NO: 255970 - DNA, 100 bp, Homo sapiens
ctacccttgcagatctattccggccacccattgatttgatgcataaaggcagctttgaaacaaattccttgtgtggatatcagatccggatggaatctcg

SEQ ID NO: 255971 - DNA, 100 bp, Homo sapiens
gagaccaggaaggcaccaggtggccccatgcttttgccgcagacatacggagcgaagccttatcagttgtgagtgaggaccagtcgttgtttgagtgtgc

SEQ ID NO: 255972 - DNA, 51 bp, Homo sapiens
tcctccacggcctaaaccgcccagcggtactccaaagattcaggtttactc

SEQ ID NO: 255973 - DNA, 90 bp, Homo sapiens
ctgtccatccactcaggacatctgcaggatgtgtgaccggaatggtggtcggcggcttcgacagtggctgatcgagcagattgacagtag

SEQ ID NO: 255974 - DNA, 54 bp, Homo sapiens
agatgaacttctatcacagtttaagatcttatctagtaagctgcctcagagggg

SEQ ID NO: 255975 - DNA, 107 bp, Homo sapiens
ggaacctctacaacgaaggtgaagccacggaagataagaaaagaggcacagttagatgaagaaggacagtttcttgtcagaataatatatgatgactccaaaactta

SEQ ID NO: 255976 - DNA, 104 bp, Homo sapiens
cttcactccagtgcctccgacgcctcctgatgatgaggacggggacttggttgccttttccagtgacgaggaattgacaatggccatgtcctacgtgaaggatg

SEQ ID NO: 255977 - DNA, 50 bp, Homo sapiens
ccacccctcctttcaggtcaagtgtgacagcgagagcggcccggacgaca

SEQ ID NO: 255978 - DNA, 82 bp, Homo sapiens
tgaagagtctggagtttatctggagtgaggtggccggttcttggtgggatctgagcaggagcaggccgggctctcgccatgg

SEQ ID NO: 255979 - DNA, 78 bp, Homo sapiens
gactgcggaggccgggcgaggccggtgaggacgcggcgggcgagcgagaggccgaggatggcctactgccagcatatt

SEQ ID NO: 255980 - DNA, 100 bp, Homo sapiens
cgtggcccccagcacgtccaccaacctgaccatgacctttaacaaccagctgaccactgtccacaaccagtcttcctccagacaggcacgccatacaacc

SEQ ID NO: 255981 - DNA, 83 bp, Homo sapiens
ctcccagccacagcctcccgcgcctcgctcagctccaacatgatgacagacaaccttctgtgccttcatcaagctggttgtgt

SEQ ID NO: 255982 - DNA, 76 bp, Homo sapiens
cggcagcatgtcggtggcggggctgaagaagcagttctacaaggcgagccagtgatcggcatgttggtaaaattta

SEQ ID NO: 255983 - DNA, 100 bp, Homo sapiens
ggccatccagcaactggctgagggactcacagctgatgacctgctgctcgtgctgatctcaggcactactcctgtgtgtgaggacatcggacgcagcctc

SEQ ID NO: 255984 - DNA, 140 bp, Homo sapiens
gagccgcccagcactgcaggagaagcagcctgagaaggaggaggaggaggaggcgggagagagtgtggagcctagatattatcctactgaagatgtgcctcgaaagctgttgagccacggcaaaaaacccttcagtcagc

SEQ ID NO: 255985 - DNA, 83 bp, Homo sapiens
taagagaagaattagctatcaaatccggccaggtgcccgtggttgacacgagctgtgtccccagctgttcccgtctacaatgg

SEQ ID NO: 255986 - DNA, 75 bp, Homo sapiens
tggccacgctgcagagcctcgatgacatcatggattcatcccttacccgccggggacagatctgctggtatcaga

SEQ ID NO: 255987 - DNA, 75 bp, Homo sapiens
tgccaatgcagctgtgaacgatcagagtacataccgagcatcaaatattaaggcacccggagaacagacagtacc

SEQ ID NO: 255988 - DNA, 83 bp, Homo sapiens
ggcgatgtgaagatgtcagtgggctgtgcctgtcctggattttttatcaagcagaaatgcatcgaacaacgagaatcaagatc

SEQ ID NO: 255989 - DNA, 100 bp, Homo sapiens
gctgtaaattatgagaaagaagaagaattcctcactaatgagctctccagaaaattgatgcagcagctgctcagccaggaactgagatctttaatctgcc

SEQ ID NO: 255990 - DNA, 96 bp, Homo sapiens
gggcgtctttcagagcattacggggccaccttatcttagttccagaatttagtcttcctttggaatactacctaattcccttccttatcatagtgg

SEQ ID NO: 255991 - DNA, 75 bp, Homo sapiens
gcccaaggcaattgatcccaagttgtcgacgaccgacagggtggtgaaagattcctagaggggagtgcctgcgag

SEQ ID NO: 255992 - DNA, 50 bp, Homo sapiens
cttttcctccacctaccttcccgaacaatgcagatcttcgtgaagactct

SEQ ID NO: 255993 - DNA, 50 bp, Homo sapiens
cttcctgttcgcagctgcggcaatgaggtttatataactttccaagacaa

SEQ ID NO: 255994 - DNA, 82 bp, Homo sapiens
tcgtggcctgcctctgcgtgcaaaccaaggtgtatgttggtaacctgggaactggcgctggcaaaggagagttagaaagggc

SEQ ID NO: 255995 - DNA, 100 bp, Homo sapiens
cttgtagcatagcaacttcggatttcactctacccggagagtttcccgcttggttgaacacattggcctcaggaagacggttgatgatgaagcgccggcc

SEQ ID NO: 255996 - DNA, 75 bp, Homo sapiens
atcccctgtgtggccaagaagctggtgtgcggagatgaagtgatcagggccaaagcggtcagtgagaaggaagtg

SEQ ID NO: 255997 - DNA, 96 bp, Homo sapiens
cccccaaactgcaataagccgccttccaagcaggtagatgaaactcaagagaaaaggtgtggataaatgaaactagcccatgatgaacctgttttc

SEQ ID NO: 255998 - DNA, 90 bp, Homo sapiens
ccgagccgggccgcggcgccgagtcgaacggggagccgagctggagctgccgcggcgcagccagacagcccacctgaggatattgaccat

SEQ ID NO: 255999 - DNA, 100 bp, Homo sapiens
gcagatttgtttgtcatccttgtacagcaatctcctcctccactgccactacagggaagtgcatcacatgtcaggaagggaaaaggccgaggcatcagcg

SEQ ID NO: 256000 - DNA, 102 bp, Homo sapiens
atttggagacgtattttggaaggaggtctatcatttggcaagtgtacgcttacgtgatctatgtctaaaactggatgtttcaaatgagttacgaaggaagat

SEQ ID NO: 256001 - DNA, 90 bp, Homo sapiens
tggtgctcgtgacctctttatgaaagcctcgatatccttaattcaccaaggatccttggcgtggagtcttcctcccttctcccaagtctt

SEQ ID NO: 256002 - DNA, 96 bp, Homo sapiens
gaggacttggaggtcctgtctaggtactggctattctggtcaacatttttggaggaatcatgcgctgtgatgttattgcacagggtatagtcatgg

SEQ ID NO: 256003 - DNA, 75 bp, Homo sapiens
actggggatactacacctggccaaaggtcacggagactcaccagttggcagaattaaatgagaagaagaatgaaa

SEQ ID NO: 256004 - DNA, 96 bp, Homo sapiens
gcccgcgccggaagagccacgccgacacctagctcccctgtttgacaaccctaagttggataaggagctgcgggcaatgctgagagagaagtttcc

SEQ ID NO: 256005 - DNA, 100 bp, Homo sapiens
agaaggaatgtaccacatgaagatatctgtgaagactctgatatagatggtgattatagagtggtatacatccccagatttcctctatattcgttcttgg

SEQ ID NO: 256006 - DNA, 100 bp, Homo sapiens
gagacaacagtggccttctgatgaatactttaaggtcctatccttcccccaaagctggagcaactctggtcgtgtacaaggacttgctagtgctgtttgg

SEQ ID NO: 256007 - DNA, 96 bp, Homo sapiens
ttcaggaaaagcatcccggaggaggaagaagaagtgttatatgtcctaaagtaaggtttcaggaactgtggaaggtgcatcagtgaagaaatggac

SEQ ID NO: 256008 - DNA, 100 bp, Homo sapiens
tcaggactggatctcggcggcccgagtgctggtagacggagaagagcacgtcggtttccttaattcaaacacactccaccaggtggcatcatacctctgc

SEQ ID NO: 256009 - DNA, 82 bp, Homo sapiens
ctttggcgaggccttgcttccttccactcgacatttaaatcaaacggtattgagatggattgggttatgaaacataatggtc

SEQ ID NO: 256010 - DNA, 73 bp, Homo sapiens
ggggcttgccctggtcttgctcggccgatgaagtgcagaggtttttttctgattgatatgctgctgaaagaat

SEQ ID NO: 256011 - DNA, 96 bp, Homo sapiens
ccggaaaaaagcatccttttccaacaatctcagacggtcctaaaatctctacacttgccaaaaaacaacagtctttatgtccttacaccagatttg

SEQ ID NO: 256012 - DNA, 88 bp, Homo sapiens
aacccgcaaacggtgggggtcggccggggccgcttcaccacttacgaaatcagggtcaaggaacatgtttgacaagctgaaccgtgat

SEQ ID NO: 256013 - DNA, 87 bp, Homo sapiens
gaaccagcacttctgggacgcacagagaccgtgaagattccaagttcaggagaactcgaccggttcaaaccttgtactactcagctg

SEQ ID NO: 256014 - DNA, 100 bp, Homo sapiens
acagcctatcctgaaaccaatgtgtgttgtgctctccgaccccttgaaggactcttctcgaactcaggaatcctggaatgccttcctgaccaaactcagg

SEQ ID NO: 256015 - DNA, 74 bp, Homo sapiens
gtgtgccggagaacacgggctacacgtatgcgctcagctgcaagctttcttcctggtggcagatgacatcatgg

SEQ ID NO: 256016 - DNA, 75 bp, Homo sapiens
caacttaaaaaacagttttgcctcagcccttcgtgatctcaaagatttcatgagacaagctggggaagtaacgtt

SEQ ID NO: 256017 - DNA, 82 bp, Homo sapiens
agacaggaaggagtttgagacactctgctcagagctgaccaggacaatgcagatcttcgtgaagactctgactggtaagacc

SEQ ID NO: 256018 - DNA, 100 bp, Homo sapiens
gcaaatttttggatttggctctcgcattgccctctgaaaaccttcctcagtttcagatagctggaagtcgagtgtgctactcaactcaggagatttggag

SEQ ID NO: 256019 - DNA, 50 bp, Homo sapiens
gctcttcctcccttcgctcgcaccatggggacggcaaaacagaacagaaa

SEQ ID NO: 256020 - DNA, 50 bp, Homo sapiens
gcaactcagaaacatcaggtccaaggttaacacagaaatctgcctcctgg

SEQ ID NO: 256021 - DNA, 75 bp, Homo sapiens
gggggttccgggaagatggtgctgatcaaggaatttatccggagtgtgatgcagaagtaccttgcagagagaaat

SEQ ID NO: 256022 - DNA, 97 bp, Homo sapiens
aaagacttgaaggcgtatacaggaacaatattgatgatgtagtaagaccattcctcaagaattttgtatccaaggcccaaaagtttgttacccaaga

SEQ ID NO: 256023 - DNA, 90 bp, Homo sapiens
ggcaggggccgcgctctgctgcttcctcgtcctagtgatccacgcgcagttcctcaaagaagacccaacatgagtgaagtttcctgcaag

SEQ ID NO: 256024 - DNA, 74 bp, Homo sapiens
ggaccgccacgagcgcatcaccaagctggcagggatcacacggctgcagcgctggtgtcgggccaagcagatgg

SEQ ID NO: 256025 - DNA, 82 bp, Homo sapiens
ttggactgagtcctgcaggacacagggctctttgtgatggatgaggacgccaccctccaggaccttccccccttctgtgagt

SEQ ID NO: 256026 - DNA, 74 bp, Homo sapiens
gaaagagttttctccatttggtacaatcactagtgcaaaggtgatgaaggattcggctccggaactgaatgtga

SEQ ID NO: 256027 - DNA, 88 bp, Homo sapiens
agattcgcagtggtcgcttcttctccttggtcatacagcatatttgacaataatcgccaggatcccacagggctgacagctgctcttc

SEQ ID NO: 256028 - DNA, 100 bp, Homo sapiens
gatcggactggccactcgctattgcacaccttatatggaagggcccaggaagtacacgagaagctccgaggatggctgaagtccaacgtctctgatgcgg

SEQ ID NO: 256029 - DNA, 90 bp, Homo sapiens
gcagaaccagatccgggagcacgtcatctccatcgaggggaggacaagctctttggggctaccaaacagaagcagcaatgcctgttgtgt

SEQ ID NO: 256030 - DNA, 109 bp, Homo sapiens
tgtcaatggagctggaaaacatcgtggccaacacggtcttgctgaaagccagggaaggtgctggagaatctggtaaaagcaccattgtgaagcagatgaggatcctgca

SEQ ID NO: 256031 - DNA, 75 bp, Homo sapiens
accagttagtggtgctcaacgtgtacgacatggtgccatttggattgtactttagtggcacgatgtactctgagt

SEQ ID NO: 256032 - DNA, 50 bp, Homo sapiens
agaaaaatccactgccttccaaagaaactggggccacaactttggtgaag

SEQ ID NO: 256033 - DNA, 50 bp, Homo sapiens
ttacgtctagatttccatgcccatggaagtttccaacatggctagatcca

SEQ ID NO: 256034 - DNA, 98 bp, Homo sapiens
ccacttctggtggttgccactcacctgaggatggtctcactctgtcacctgagctagagtgcagtggtgcgatcacagcttactgcagcattgaactc

SEQ ID NO: 256035 - DNA, 96 bp, Homo sapiens
aaggacggcagatggcatccctgagaggtggtgactgagactagatgcgggtgcaggccagcgcaggacatctcattgccattgtcagccaggaac

SEQ ID NO: 256036 - DNA, 75 bp, Homo sapiens
gaagcagttgcccatttcaatggatggaagcacagtatatgcagagagtgtgattctgactactgggacatttct

SEQ ID NO: 256037 - DNA, 83 bp, Homo sapiens
tggatagcctgaaggcagccattcagaatggcctgtccagaagacagccaaatacatccttcaaacagacttcactgcaggag

SEQ ID NO: 256038 - DNA, 100 bp, Homo sapiens
gcggccggaagcgcggagggagccgcgggatggaccgcagcagaacagccctgtggcccccacagcccagcccaaagccccaccctcaagaactccccag

SEQ ID NO: 256039 - DNA, 82 bp, Homo sapiens
cagtggcgtcctggagccctcctcagaatcttgtggaagaagaatgaagttgctgattatgaagctacaacattttccatct

SEQ ID NO: 256040 - DNA, 98 bp, Homo sapiens
ttcgtggaccacaacagccgcaccactacgtggaacgacccgcgcgtgccctctgagggccccaagatggtctctagcgaccggcccgtgtcactgga

SEQ ID NO: 256041 - DNA, 101 bp, Homo sapiens
tgtcatcaaggtagcacatacttgtctccatcctcaggaatcccttcctgatactagaagtgagctcggtgccaatgtgctgctgttcctctgcaccaacg

SEQ ID NO: 256042 - DNA, 100 bp, Homo sapiens
cggcgagggacctcgcagggagccatccgatgctgtccccttttctgggactattcaaggaggtctccaggacggacttcagatcactgtcaatgggacc

SEQ ID NO: 256043 - DNA, 98 bp, Homo sapiens
gggaaccttccccagccatggcttccctggggcagatcctcttctggagaagccccagggccatcaaaagttaagacagggaagcctgaagaagccag

SEQ ID NO: 256044 - DNA, 74 bp, Homo sapiens
tcggagcagctcctgcatctcatcaaactcggtgattcgttggaaaaattcattgtctctagagattgtcagct

SEQ ID NO: 256045 - DNA, 83 bp, Homo sapiens
cgcaagttcattgcctaccagttcacagacacgcttgatcagttactggcagtcgcagactttggaccccgggatgaaagaga

SEQ ID NO: 256046 - DNA, 75 bp, Homo sapiens
aaggtgaacaggtgaccataactctgccaaatatagaagtccaagcatctcattttgaaggcctaatcacaacca

SEQ ID NO: 256047 - DNA, 97 bp, Homo sapiens
tattatggacagaatggacagcagattctaagtgcaagctctcaactacaatctgagcaaagaagggcatttagaaaaagaaccttggaatgcattc

SEQ ID NO: 256048 - DNA, 100 bp, Homo sapiens
gaccaacacagcctggaccaccacagccaccccagcagaggccttatggatatgaccagagcctccattatggcatgctgaatttaccaaagaagaattg

SEQ ID NO: 256049 - DNA, 100 bp, Homo sapiens
gatttcagcagcacaatcaacgcaaccacagaaacaagtggtacaggaaaagaagcccatctgtgtccagagatcagaatagaagatacgaccaaaggga

SEQ ID NO: 256050 - DNA, 100 bp, Homo sapiens
agcagtcctaccatgtcagccttcccagtagctgggaccacaggtattgagaaggggcaaatcctgtcttcagcagcagacattgctgccacagtacagc

SEQ ID NO: 256051 - DNA, 90 bp, Homo sapiens
ttggaagctaaagctaccaaagacgtagaaagaaatcttagcagttgattatggaagattcccacaagagtaccacgtcagagacagcac

SEQ ID NO: 256052 - DNA, 50 bp, Homo sapiens
ggggaggtcacctgacgaggagctcccaacacagagacagagcccttgct

SEQ ID NO: 256053 - DNA, 95 bp, Homo sapiens
gcaaagaagaggcctgcaaagctgtacaagagatcatgcagtcagccataatggcaggtgaagaaattaatgaagactatccagtagaaattcac

SEQ ID NO: 256054 - DNA, 94 bp, Homo sapiens
gacgttcgagaggaagattcttacctctttgatctcgacaataaggccaagactaaggggctgcagagcggggtggacattggcgtcaagtact

SEQ ID NO: 256055 - DNA, 83 bp, Homo sapiens
cgccggccgagggtggccctaggggcagcgagcaagacagcaagcaggacggggaggtttactgcatcgacgcgcggttctac

SEQ ID NO: 256056 - DNA, 73 bp, Homo sapiens
aaggcgacatcaaacagcaggcgtggattcaggagaatgacatcttcctgggctgggaaaaaggagcttataa

SEQ ID NO: 256057 - DNA, 97 bp, Homo sapiens
gaaactaaagtacatttattctgccaggttatttcacagttgaggattttgggcagatccataacagctggttccaaatttgatagagaaatctggt

SEQ ID NO: 256058 - DNA, 100 bp, Homo sapiens
gagggtagaagacatacttcaggcattggtggtgtgtccaaatctgctgagcagaaggtgatttactacctctgcatcttattgaaagatccagtggaac

SEQ ID NO: 256059 - DNA, 88 bp, Homo sapiens
atttttggacctgaaacagaaattctggaacacctatatggaatatattattcgagtgcaaagaggaatttctgtggaaaacagctgg

SEQ ID NO: 256060 - DNA, 101 bp, Homo sapiens
catcaaccagccccagctgacaaaattctgcaataaccatgtcaggtcctcatgctgataccgccagtggatgccagaatttgcagtgtggttttcgagcc

SEQ ID NO: 256061 - DNA, 95 bp, Homo sapiens
gcttcccatggtttggaggatagcaacatcagatgagagtccggagtgttgtcatgtgaagcctgccatccaggaacctccaatagttattagtg

SEQ ID NO: 256062 - DNA, 75 bp, Homo sapiens
ataagaactcgacaacagagtgggaactttctgtcttgtgatccattgcctggaagatgataagatcagatgggc

SEQ ID NO: 256063 - DNA, 83 bp, Homo sapiens
aaagaaaacacttcttcatggtatgaggttgactcatttacaccatttcgcaaagtggtcatggtgaatggagaccatcggat

SEQ ID NO: 256064 - DNA, 75 bp, Homo sapiens
gacaggacaactggatcagtttcattaaaaagctggcgcctactatccagcccaaggggtgcagcagtttcccac

SEQ ID NO: 256065 - DNA, 90 bp, Homo sapiens
tacagactcattaaatgatatcaagagtacaatagacgcttctaatatcagattcagctgctgggctcctgattcgcagcattcatctcg

SEQ ID NO: 256066 - DNA, 89 bp, Homo sapiens
tgagaatgctaatggagcccctgccatcacactgctaatacgagaaaaggatttttgtgagcatggaacaaagtctgggttaaaccagg

SEQ ID NO: 256067 - DNA, 75 bp, Homo sapiens
ctgtgtttgggagcctcatcattggttatgccagctaccaccatctgtgacctggacacccagtttcgttgccag

SEQ ID NO: 256068 - DNA, 100 bp, Homo sapiens
cgtggctgcaccccggaggggggcgccggccgagacctgagacgtggcgctccctctctgccggcctcggcttcaggtctcggtgattcagaatacacct

SEQ ID NO: 256069 - DNA, 90 bp, Homo sapiens
cctctaaaatgcaagatacaatggaggagaacagtgagaggcctccctattccctgagacacaacagtattgaaattgggccaattaata

SEQ ID NO: 256070 - DNA, 124 bp, Homo sapiens
caccggtcggctggcgtccctcttcagttctctggagccccagattcaacccgtgtacgtgcctgtgcctaaaataattcagcattggcgtatttgcttgtcccaatacaagaatgccaaagga

SEQ ID NO: 256071 - DNA, 86 bp, Homo sapiens
ggatgagtatgcggaggacagctctgatgaggagacaatgcagatcttcgtgaagactctgactggtaagaccatcaccctcgagg

SEQ ID NO: 256072 - DNA, 100 bp, Homo sapiens
atcaatctgcagacttgcttggcagccaaaaagtgggaagttggactaaatgctcttccttcagaggattatccggggcatctactcaatgaaaaaccat

SEQ ID NO: 256073 - DNA, 74 bp, Homo sapiens
aggctgagcagctgcaaacccccgaaaaagggtgccaagtaccggggctccatccatgacttcccaggctttga

SEQ ID NO: 256074 - DNA, 100 bp, Homo sapiens
cgggggactggccagctcaaccgcttcgtgcaactctccgggcggccgcacctgccagcatatcgcacggatgactgccatccctgggttttgccagtag

SEQ ID NO: 256075 - DNA, 101 bp, Homo sapiens
cgacccttcctgtcgctgacggcgactgcgggaggccaggtgtggacactgcaagagacttgcacctgagtatgaagctgcagctaccagattaaaaggaa

SEQ ID NO: 256076 - DNA, 100 bp, Homo sapiens
aggaagatggcggatctggaggagcagttgtctgatgaagagaagtgacctgaccaacggtgcagatgggatgctggccacaagctccaatgggtctcag

SEQ ID NO: 256077 - DNA, 98 bp, Homo sapiens
ggaggaggattcgcagttcaacatcaagcccgagcgggaagaagttccgcagcaagccgcagctggcgcgctacctgggcggctccatggacctgagc

SEQ ID NO: 256078 - DNA, 90 bp, Homo sapiens
acatcgtcccaggggacattgtagaagtggcagtcccccagtcaaccagagaggagaaaagagaaaatgggcttgaagctagatctcctg

SEQ ID NO: 256079 - DNA, 95 bp, Homo sapiens
cgccgctctagcggccgggactctgaactatggcggctgtttataccttaacttctctttaccgacaatatacaagtttacttgggaaaatgaat

SEQ ID NO: 256080 - DNA, 90 bp, Homo sapiens
ggagaactacagaaacctcgtctccctgggtgagagatcaagcccagcgctgttcacgggttctcctggatattgaggctggtgctcccg

SEQ ID NO: 256081 - DNA, 100 bp, Homo sapiens
taaaggttgccataaaggacaaacaagtgaaatacttcatacattacagtggttggaataaaaatggaaattgcaacactaacaagagagaatggaaaga

SEQ ID NO: 256082 - DNA, 75 bp, Homo sapiens
agccgatccagcctgcggagcctgtggggcaggtatgacccacggcacaaccgctggttccagatccagtccctg

SEQ ID NO: 256083 - DNA, 98 bp, Homo sapiens
cgacgacgtccgccaggcggcccggctgctgctgcccggcgtggactgcgagccgcgccagctcaggtatggtgacatggtgccaaaaaccatagcag

SEQ ID NO: 256084 - DNA, 75 bp, Homo sapiens
gggtgacactcaacaggattcccgatcctcctggccaacttcttggcccagacagaggccctgatgaggggaaaa

SEQ ID NO: 256085 - DNA, 100 bp, Homo sapiens
gtcctggcctggaaagcttgaatatgaaaagtcagcatgttggcagataaattgaacatgactccagaagaagctgaaaggtggattgtaaatttgatta

SEQ ID NO: 256086 - DNA, 75 bp, Homo sapiens
aacctccaaagcagcaaccaatgatatatatctgtggaggtttttggattcaaagcataaaaaccattacaagat

SEQ ID NO: 256087 - DNA, 87 bp, Homo sapiens
accctcgggcctcatcatggccaggaaggcattggaatggatacttgtgtcattcctttgaggcacggtgggctttccttggttcaa

SEQ ID NO: 256088 - DNA, 98 bp, Homo sapiens
gaaaattaagcagatgctccagtttgagaaacctggatctgcgatctgtttgtgacaagttggatggcttgaggactggtactaaaaggaaacgtgac

SEQ ID NO: 256089 - DNA, 75 bp, Homo sapiens
cgagggtctcctccagtagacggtacagcgaaggcagagagttcagatcgccggggagtggcctgtacagcaacc

SEQ ID NO: 256090 - DNA, 75 bp, Homo sapiens
ggaccctggaaaacctggccctcttcaatttctgacaaaaggaatactcccccagttgcaagaggcgcaggaccg

SEQ ID NO: 256091 - DNA, 50 bp, Homo sapiens
agattatggccaacagttagaaatcgtctgagaaagaaccccagtttaag

SEQ ID NO: 256092 - DNA, 74 bp, Homo sapiens
cgccgcctgtgcgcctctgctgagtcgtgaccagcgccatgtccagccaggtggtgggcattgagcctctctac

SEQ ID NO: 256093 - DNA, 100 bp, Homo sapiens
ttttttcctgtatgaagcggttggcaccactgaagtgaccgaatgaggagccttgcaaacaacaatctccagacactcccaaaagatattttcaaaggcc

SEQ ID NO: 256094 - DNA, 111 bp, Homo sapiens
gagagagtgaggagccagacgacaagcacacactatggcgctgaaacggattaataaggtacatgtactgggcagattggggtgagacgccctggatcgagcaggtgggga

SEQ ID NO: 256095 - DNA, 49 bp, Homo sapiens
acagatcggaacggaggcctgtgtcttcaggcagtgacagtggtgggag

SEQ ID NO: 256096 - DNA, 75 bp, Homo sapiens
aagcggaaaccagtggccacagcatctttgtctagccccagtgcagccttgcagtctcatcctactcaagtgtgg

SEQ ID NO: 256097 - DNA, 73 bp, Homo sapiens
tgctcctctcctgggcggcggggatgggaggctggagtgcagtggcgagatctcgactcactgcaggctccga

SEQ ID NO: 256098 - DNA, 90 bp, Homo sapiens
ggctgtgtgtgctgcaaaccgagacaagttcaccccgaagtctgccgggttatgggacccacctgatgaaccacctgaaggagtatcaca

SEQ ID NO: 256099 - DNA, 90 bp, Homo sapiens
aaaagagggaggagatgcgactcgaagcagaaaggtggtaagttttcttcatacagttcttttgtgtgacaaactggatttcagcacggc

SEQ ID NO: 256100 - DNA, 96 bp, Homo sapiens
gggagcagttgggaatcaggtctggaatactcctaaccaagaagttgcccagtttccaggagactgacaaggcgtggcatgggggatgtctggcgc

SEQ ID NO: 256101 - DNA, 100 bp, Homo sapiens
agagagcagttgaagaagtgaagaaattattggtacctgcaggatctataaagggcactgcttccggatcaatcacttcccagaggacaatgactacgac

SEQ ID NO: 256102 - DNA, 100 bp, Homo sapiens
cgagttcaggcgtctgagacttggtgggaacggaccttcctcttagagtacaggggctcaggtccaggtggcaggggatatgctacccaactcaactgag

SEQ ID NO: 256103 - DNA, 101 bp, Homo sapiens
gcaagcgggagtcggggatagtgtcatcggttcggtaaagtttctgttctctggaactttatattgctgttggaatatctggagccatccaacatttagct

SEQ ID NO: 256104 - DNA, 93 bp, Homo sapiens
ggcaccgtggtccgactcaacaaggcagcattgagctacgaggtccagagcgccatggatgagagtcatatcctggagaagatggcagccgag

SEQ ID NO: 256105 - DNA, 76 bp, Homo sapiens
accaaccaggacagaaatcattatcttagccaccaggagccagatgaccaagatgctccagatgaacatgagtcgc

SEQ ID NO: 256106 - DNA, 101 bp, Homo sapiens
gcgaatgttaaatcagctggagaaggagaagtggagaagaaatcagtcagccgcagaacaccagagactgggtaattaataaaaagaagaaattgatctgg

SEQ ID NO: 256107 - DNA, 118 bp, Homo sapiens
cgctgcgcattcctacaaccccagcaccaacgagtggctccaggtggcctccatgaaccagaagagttccagtctcatcagattttccatgtcctggtggtggcagcagcctttgtcc

SEQ ID NO: 256108 - DNA, 97 bp, Homo sapiens
cagccttgtttttcagcagctttgaggaaaagtatagaacatctgctcaaattaatgaccatgggggatatgaagaccccagactttgatgacctcc

SEQ ID NO: 256109 - DNA, 100 bp, Homo sapiens
taaagtagactcgccgtcaaagaagaaaggatggtgccatgacaatggtgtgaactacaagattggagagaagtgggaccgtcagggagaaaatggccag

SEQ ID NO: 256110 - DNA, 100 bp, Homo sapiens
tcccattgttcaaggacaaaggtggcccagaattttccagtgccctgaaaaataatgcctataagaaaatcttagaaaccacaatgactccaactggaat

SEQ ID NO: 256111 - DNA, 76 bp, Homo sapiens
ctcaatgacagatgaactaaattttctcttggagtaatcaagtcagaggattatatgacttttatctgcctagaga

SEQ ID NO: 256112 - DNA, 83 bp, Homo sapiens
ttaaggtggtggatgaagaggccatggagaagatgaaaggttgtatcaaagttcttaaggaccaacctcctaatagtgtggaa

SEQ ID NO: 256113 - DNA, 87 bp, Homo sapiens
aagctgaggatgaagaagatgctacacgtgtgatgatactgacagctgtgaaagaaatgaatggaaaaaaaggagtgtccatccttt

SEQ ID NO: 256114 - DNA, 82 bp, Homo sapiens
gaatggagtcttccatcaatcatatctcacagattatggcttgttaacaacaccccagctgcactacatggtgtattgtcga

SEQ ID NO: 256115 - DNA, 50 bp, Homo sapiens
accttgctgaagagaaaagccccagatcgaatcatcaatttagttgttgg

SEQ ID NO: 256116 - DNA, 99 bp, Homo sapiens
cgacgcgcacaccaaggagatcgacctggtcaaccgcgaccctaaacacctcaacgatgacgtggtcaagaccagaatccgtagaagctagccctgtgg

SEQ ID NO: 256117 - DNA, 75 bp, Homo sapiens
cgcgattgtagatgttattgatcagaacagggcgcagcccagcctcgaaatgcagaacgacgccggcgagttcgt

SEQ ID NO: 256118 - DNA, 101 bp, Homo sapiens
gcccagctcgcgcttcagcgtcccggcgccgtcgcgccactcctccgagttctcggggtataaggcaggggtctgcaagcaagcagaggaggtggtggtca

SEQ ID NO: 256119 - DNA, 98 bp, Homo sapiens
gcacatggacattgaacaggcgaacctgcaccagctggccactgagctccacgtcagcactgagaccagactcgagcacccctgtcctgtaagcgaga

SEQ ID NO: 256120 - DNA, 100 bp, Homo sapiens
tacagttgacagtcctgttcagcagatatgattctataacagactcttccagaaatgatatgaagaggaaatttgccctgacaatggaatttgttgaaga

SEQ ID NO: 256121 - DNA, 101 bp, Homo sapiens
ccagtccgaaagaaaccaccttctccagcaatctttaatctcatgaagtacgacagctacagccgcttcttaaagtctgacttgtttttaaaacacaagcg

SEQ ID NO: 256122 - DNA, 50 bp, Homo sapiens
gacggaatgcctccatacatgtatcagcagatgttgcacacaaacttggt

SEQ ID NO: 256123 - DNA, 100 bp, Homo sapiens
tgcggttctcacagcccgccgccgccgccgcctcggggacctttgcggggaggcctcaggctcaccagctggattccctcctgggggcttcattcccaaa

SEQ ID NO: 256124 - DNA, 75 bp, Homo sapiens
ggcgcgactgccgctgtgtacagcgcagccatcctggagtacctcaccgcagagcttggagttatgacctacagt

SEQ ID NO: 256125 - DNA, 101 bp, Homo sapiens
ctccaagaaaaaaaccacaaatgtttttctgttttgcctgaatacatgatttaaacaagagatttccacagaagatttaacggagctccctataggagtac

SEQ ID NO: 256126 - DNA, 96 bp, Homo sapiens
gttggagtggtgcacagggatctgaaacctgaggtgttctgaagacgcagatcccgatattaacttaccaaggtggatcagtggaagctgctcagg

SEQ ID NO: 256127 - DNA, 80 bp, Homo sapiens
tcacctgcagaagcgtgtcgttctgcaccagcgccttgatcgagtacttgaggatttttagactctgaggagcagttgga

SEQ ID NO: 256128 - DNA, 127 bp, Homo sapiens
ttcctccttctcaaattgcagcaggagctttttgcttagcactgaaaattctggataatggtgaatgggtgccttatgcctctggcatgcccatcaagaaaataggccatagaagtgttgattcctc

SEQ ID NO: 256129 - DNA, 100 bp, Homo sapiens
agaagaaaaaggtgtggagagaggagaaaggtgtcatggagaaactccagctgggcccagagattctgcagcgggaaaatccaaggcttatttatgccag

SEQ ID NO: 256130 - DNA, 100 bp, Homo sapiens
gcacaatattcctcagtaaatctcagacggacgtacaaaactttttaccaacaaaaaaaagcaagtagttatactcaggaagaacttcaagacacttacg

SEQ ID NO: 256131 - DNA, 90 bp, Homo sapiens
aagaggaaagagaggcttttgcagagtcactcaggacaagcttgaaggtggtgatctttgtgaagtctgtgcagcggtgcattgccttgg

SEQ ID NO: 256132 - DNA, 80 bp, Homo sapiens
cttcgcctatgcctgccaggctgctgggacaggctggcctgacatggaaggtgaaacaaggcagcagcccctgcctccag

SEQ ID NO: 256133 - DNA, 100 bp, Homo sapiens
agagacaccaggacagaaaagacagtgttctgctttcatggagttcacagaagagtcgaggaggcatctcccctcagatggaagtcacatgtgtgcccac

SEQ ID NO: 256134 - DNA, 100 bp, Homo sapiens
ttgaaaccagaaaacgtgttgctggcatcagcagacccatttcctcagtttcagctgtgagttcaacatggaggcaaatcagtgccccctggttgtggaa

SEQ ID NO: 256135 - DNA, 82 bp, Homo sapiens
tggtgtgcggaggagctccaggcccgtcggcgcggaggaggaagcagcagtgtaccattgactccctgcagtctagtctgga

SEQ ID NO: 256136 - DNA, 100 bp, Homo sapiens
gaaaagttcatgcttacacccctggtccaaaagaaacggttaatgttcgtgaagaaattgaagagttttttccaagaatgtggaagataaatcaagataa

SEQ ID NO: 256137 - DNA, 75 bp, Homo sapiens
cgatgtttcaatattggaagcgctttgatttacagcagctgcagcatgcttttcacttccactgcatctctcgct

SEQ ID NO: 256138 - DNA, 102 bp, Homo sapiens
gtccacctctcagagaagaaataatggcaaataacttttccttggagagtcataacatatcactgactgcctaccgtatgtgaacgggagctgtgtgtgttt

SEQ ID NO: 256139 - DNA, 96 bp, Homo sapiens
aggcgtgagcccccaagatttcacggacagagcgggatgccaccagcttgtccaaagggaagttccaggagctcctggtgggcatcgttgtggaga

SEQ ID NO: 256140 - DNA, 75 bp, Homo sapiens
agatcatcgagcatttcaaacgtgagaaggcaaccaaagtgcaggacatcaaaaacaacctgaaagaggcgattg

SEQ ID NO: 256141 - DNA, 83 bp, Homo sapiens
cgcagggcctgcagcgggagctggacggcgagcgcgagcggcgcgagaaaattattttcgaaataccagtatttcgactccag

SEQ ID NO: 256142 - DNA, 90 bp, Homo sapiens
gaaatatggtcaacatgcatgcttctgtcaaaaacaaggttctggaaacaactgggcatatgggtttggcccttactacactgagccagt

SEQ ID NO: 256143 - DNA, 50 bp, Homo sapiens
caaagagccatacgaccttcggatattgatcagtggaataaagttattga

SEQ ID NO: 256144 - DNA, 82 bp, Homo sapiens
agagctcggactgcgagtccctggacagcagcaacagtggcttcgggccggaggaagagacagaacctcgcctgtttcctca

SEQ ID NO: 256145 - DNA, 103 bp, Homo sapiens
gatcatcgaaggggaggtggtggagatccagattgatcgaccagcaacagggacggccctgtgcaccaaggtgccggaactgatcagaaccatcatgggctgg

SEQ ID NO: 256146 - DNA, 73 bp, Homo sapiens
cgaggacgaggcggcgccgccgggctgtggagcaaacggggattcagcgtccgatcctttggaacagggactc

SEQ ID NO: 256147 - DNA, 100 bp, Homo sapiens
tcttcttcaacacacccaaaaagatgacagactacgccaagaaggaatcagagatcattgatttcttcctgggggcctctctcaaggatgaggttttgaa

SEQ ID NO: 256148 - DNA, 100 bp, Homo sapiens
cggaccttcaagactgtctttgctgagcacatcagtgatgaatgcaagaggcgtttctataagaattgacattcactactttcactgcctaagaatcctg

SEQ ID NO: 256149 - DNA, 73 bp, Homo sapiens
aggagacaggctgaatttgaacactttcagaggagctggaaggatggtcttgccttcaatgccctgatccacc

SEQ ID NO: 256150 - DNA, 75 bp, Homo sapiens
tggggtcggagctgggcgcggagcccctcacagtgcagttgctgattgttggaggttcttttggtcttcgtgagt

SEQ ID NO: 256151 - DNA, 75 bp, Homo sapiens
gtggctcttcttcgggatcactggattgctgacggcagccctctcagactcaaggcacaggagggaagaaagtca

SEQ ID NO: 256152 - DNA, 74 bp, Homo sapiens
atgaaatgcaaggaatggattctgagggtttggattcaggatttgttcctagtgtccaagattttgataagaaa

SEQ ID NO: 256153 - DNA, 50 bp, Homo sapiens
tttccaaagtggatgcctccggggaggtacatgtcccagagcaagcacac

SEQ ID NO: 256154 - DNA, 82 bp, Homo sapiens
cctggcatctgccggctgctccgcaccccggggtcccaggaagggcggcccaggtgaccatggaggaagaagatgagtctcg

SEQ ID NO: 256155 - DNA, 116 bp, Homo sapiens
aaaaggaccacatagtccatcgaagaagagtccttggaacaagcaactggctattgaaaagggaactctaatgatccaggacaaagaagttaccctggagtatgtatcaagcctgg

SEQ ID NO: 256156 - DNA, 50 bp, Homo sapiens
ggcttcatcaaggtcctcgagtggcttcagtatcagacacagcacagcag

SEQ ID NO: 256157 - DNA, 100 bp, Homo sapiens
aagaagatagaacagtgtgactacccacctcttccttcagatcactattcagaagaaatcctgtggtattgtggaaattcccagaggactttggagacca

SEQ ID NO: 256158 - DNA, 97 bp, Homo sapiens
tcatggaggctgagcatttattcagaatctccctggaaaaggagacatgaatgtctgcaatgatacttcctgacaagaagttgatacaagaaaagga

SEQ ID NO: 256159 - DNA, 100 bp, Homo sapiens
cccgatgcccaaaccactttctcctttacatagcctgacaccctatcaggatctgtgccagttcagaagcaggcgagcctcttccctgatgaaaaagaag

SEQ ID NO: 256160 - DNA, 76 bp, Homo sapiens
ggcactgcctgctctgaaaagatttcaaataccggcacggagtgtgaatgtgaagacacaagctctttctggatac

SEQ ID NO: 256161 - DNA, 80 bp, Homo sapiens
gtacgccctcatggggaaaatctccccggtgactttcagagatttaccgcattgtttctcagaagcaaatgtcagacaga

SEQ ID NO: 256162 - DNA, 97 bp, Homo sapiens
gtggaagaacaggtgccatttgtgccatagattatacgtggaatttactaaaagctggggaactatactcaactctggaatgtttggaaaatatctt

SEQ ID NO: 256163 - DNA, 100 bp, Homo sapiens
aagtacatgtcagaaaataagggagttcctctgcatgggggtgatgaagacagaccctttccaggtagagtacagagagatggatgaaagcttggccaac

SEQ ID NO: 256164 - DNA, 90 bp, Homo sapiens
gctctgctacttcaagtaccaggtcctggcgatcagcaccaagaacccactgcagatagttttgtgccagaataatatccataatcaggc

SEQ ID NO: 256165 - DNA, 97 bp, Homo sapiens
gaaggattgtggtcccgcctcacctggggtatggagaggaaggaagagatgatcgatttccagagtatggcaaagtggagtttgtattttcttatgg

SEQ ID NO: 256166 - DNA, 83 bp, Homo sapiens
cagacatccctgaatcttggtgtttggacataggaggtctctagcatcaattcacgctttgccaaagtacacatcctgtatgt

SEQ ID NO: 256167 - DNA, 95 bp, Homo sapiens
agctgcctgtacagaaaagaaaatccccgttgtttttcgattgcaagaggtccaagaaactggagacattgtcatttcaaatgcatatgtggatc

SEQ ID NO: 256168 - DNA, 101 bp, Homo sapiens
cgaggaacccaaggtccgcctatgtcctcttggagtagacatatcaaaagaagttggagaagcttccataaaagtaccacaattaaaaatggagatatgat

SEQ ID NO: 256169 - DNA, 100 bp, Homo sapiens
agaaaatacagaacttgtacaaaaattgtcaaattatgaacagaaggaaagtgggggctcagcaagaactgattaccgagccattcaactagccaaggaa

SEQ ID NO: 256170 - DNA, 75 bp, Homo sapiens
tcaccctggaagagtcgctggccgaagactctcagcgttctcatctctcttccttcaccatgaagctgatggaca

SEQ ID NO: 256171 - DNA, 83 bp, Homo sapiens
caggaggtgccggtggccgcgctcggacccgacctgcctagagctggaacgttacctccagagcgagccctgctatgtttcag

SEQ ID NO: 256172 - DNA, 83 bp, Homo sapiens
gtagaagaagatgaacccacagatttgatcctgttgcaccacgcagcaaactctgtgaaaagggtctctatggagctgggcgg

SEQ ID NO: 256173 - DNA, 83 bp, Homo sapiens
caagaactggagaggtgaggtggcggcgtgggcagcgattgcgtggtcagtgattgcgaggaggctgaaccgtctgagcccag

SEQ ID NO: 256174 - DNA, 96 bp, Homo sapiens
cggagagagaggtggagtccggcccccgaaagaggacaaagggtggaggatatgaaagtgaaagtgcttacccaaatgcagaacttgtgttcttgg

SEQ ID NO: 256175 - DNA, 90 bp, Homo sapiens
cgctgcgcaagcacgctgaggaggtcgctcaagccctcagttagaccctttgagaaaaagcccaaccatggaacaagcagtgcagaccgc

SEQ ID NO: 256176 - DNA, 89 bp, Homo sapiens
cagcgaggaagaagaggacgacgacgacgaggaagaggaggtttctgagacggtctggaaaatcccgaagcagaagcccgtattcatct

SEQ ID NO: 256177 - DNA, 100 bp, Homo sapiens
gccaggccccttctcagattgcaaacagtggttctgctggattgataaacccagctgctacaggagtaacagtgcaagccctttccacagttcctgtcat

SEQ ID NO: 256178 - DNA, 75 bp, Homo sapiens
actgcttttggaataaaaagattcccaggatgtgagcaacacgggaccggtgattgaaatctctgaatatcgaac

SEQ ID NO: 256179 - DNA, 75 bp, Homo sapiens
tataacttgtcagacacacaccttttccccaatgcgagctccaaagtgcacagccagagaacaacacatcacaca

SEQ ID NO: 256180 - DNA, 75 bp, Homo sapiens
tgcggcgcggggaccgctgtgctctcgatgcggattatatcagtgccgatgagctggcccaagtggaacagatgc

SEQ ID NO: 256181 - DNA, 51 bp, Homo sapiens
gtgtgcaaacccgagagaactggtggctacagcaaaccaaacagcccagca

SEQ ID NO: 256182 - DNA, 101 bp, Homo sapiens
gaggggacggccgccggagccgcgaggccaagtgtcgtgaaaactacccctaaaagccaaaatgggaaaggaaaagactcatatcaacattgtcgtcattg

SEQ ID NO: 256183 - DNA, 50 bp, Homo sapiens
gagagtccggccgcgacaggacggtactccaaagattcaggtttactcac

SEQ ID NO: 256184 - DNA, 131 bp, Homo sapiens
acaaggaatggaaagtccacttcctgctgaagatgataatgctatccgagaacatttgtgcatcagagcttatttggttgataacactgatgctgaggggaggctcatactggctgatgcgctctgttacg

SEQ ID NO: 256185 - DNA, 75 bp, Homo sapiens
gagatgtttgtgtcgcctcagggccacggcggaggcctcagcaacctgctcttccgctgctcgctcccggaccac

SEQ ID NO: 256186 - DNA, 100 bp, Homo sapiens
ggagatcatcaccctgcagctgggccagtgcggcaaccagaataagtatgctgtgcgcttcatccctcgggagaatggcgtttacctgattgacgtcaag

SEQ ID NO: 256187 - DNA, 50 bp, Homo sapiens
ttttggcctaccctccaaagaaaagagtgcctggaagagctgggatgtct

SEQ ID NO: 256188 - DNA, 100 bp, Homo sapiens
agttccaggaagatgcctttgggaagcatgtcaccaacccggccttcaccaaactccctgttatacattggctcttcaaagacgttcacctcatcagaga

SEQ ID NO: 256189 - DNA, 75 bp, Homo sapiens
atgtctttcctaccatctaaaatacgaaggtttctggctggacaatctgatcaaagccatcttgtcagtcaccaa

SEQ ID NO: 256190 - DNA, 75 bp, Homo sapiens
acatgaagaagctgaaggcccgaatggaggcccacttggccacggaatatgttcagcacatccaacaggccctgg

SEQ ID NO: 256191 - DNA, 97 bp, Homo sapiens
cgtggcggccgcggcgatgactcggacccagattcaattagcagagcctcacagacaatggccaaatgtgtcaaagctgtcacagagggtgcccagg

SEQ ID NO: 256192 - DNA, 82 bp, Homo sapiens
catttcaaagaacagaatgctaaggaagctgtggcaatctggccttaccaaggcagtgaaggagagtacaattacattgcag

SEQ ID NO: 256193 - DNA, 89 bp, Homo sapiens
cggaactggagccgaggcgcaggtggcgctgggggggcaacaacgccggccacacggtggtggtggatgggaaagagtacgacttccac

SEQ ID NO: 256194 - DNA, 82 bp, Homo sapiens
agaggccctgtgatgatcgtgtcagacaatgcagatcttcgtgaagactctgactggtaagaccatcaccctcgaggttgag

SEQ ID NO: 256195 - DNA, 100 bp, Homo sapiens
tatgcttcctggacagcttgcagaaccatggcccactgcgtgaccttggttcagctgtccatttcctgtgaccatctcattgacaaggacatcggctcca

SEQ ID NO: 256196 - DNA, 50 bp, Homo sapiens
cgccgcggtaccatgaggcgccggaagattgttgatcgaatcgacaatga

SEQ ID NO: 256197 - DNA, 100 bp, Homo sapiens
atgaaggagcaccacctgaagacaagggacctaaccaagggagactagttccacgattaagtgttggtgctgttagtagcaaacctactactcctactat

SEQ ID NO: 256198 - DNA, 75 bp, Homo sapiens
taaaattgccaaggaactgggatttcaacctgaaagtggaggctgcgaaaatagttgcctgctaataaagatgcc

SEQ ID NO: 256199 - DNA, 75 bp, Homo sapiens
caacattcccaacagccaccaccaccaccagatggtccagcaccatgtgctaggtcactcccagcgcgaggccac

SEQ ID NO: 256200 - DNA, 97 bp, Homo sapiens
aaaaaagccaagatgcaggaatcaggagagcaaactataaggtatttgtaggcaaaataccaagggatttatatgaggatgagttggtgcccctttt

SEQ ID NO: 256201 - DNA, 96 bp, Homo sapiens
ccgctgcccgcctgccgccgcccgcctccgcctgccttctgccgccggccggcgcgtcgtccccacaggccaggtcagagcagcccaccatgggat

SEQ ID NO: 256202 - DNA, 75 bp, Homo sapiens
ggacataaccctctcctaggacatacataaagccattcccactcagaccaaagttctaagacttctctaatgagt

SEQ ID NO: 256203 - DNA, 97 bp, Homo sapiens
aaggcagggcaaggaaactggccacaagctacgtgcaggcctgccgcgccctgatgattgctgcctcggtcctgggtctgccggccattttactgct

SEQ ID NO: 256204 - DNA, 115 bp, Homo sapiens
aggaatttcttcctttcctctctgattcttgctgtactttgcaccaactgtatcttcagatacacagctccggaccaaaatttaacagtgccatccgaggaaagattgggttgcc

SEQ ID NO: 256205 - DNA, 82 bp, Homo sapiens
ttagctttagtgaaatgggctaataatgctggcaaagtggaaaaatgtgcgattcgggaactggagcctctcctctgtcaca

SEQ ID NO: 256206 - DNA, 90 bp, Homo sapiens
gaggagcggcctccacggaagccaagctggccgaggcttctcgtcagtgcctcgcaggatggtaaacttatcatctgggacagctacacc

SEQ ID NO: 256207 - DNA, 97 bp, Homo sapiens
ttttggaccttggtcatctaaagccaatggagatcttcgtggatgatgagacgaagttgacgctgcatgggttgcagcagtactacgtgaaactgaa

SEQ ID NO: 256208 - DNA, 51 bp, Homo sapiens
gtatgagaaggacaacacctacttagacgcaaacatgcagatctttgtgaa

SEQ ID NO: 256209 - DNA, 82 bp, Homo sapiens
caagaggccatggaccctgtctcagtgggcgaacctttcctacacacccatacttctctgcccagcttggagcaggacagct

SEQ ID NO: 256210 - DNA, 98 bp, Homo sapiens
cctgccacgccaataactcagtcactggctgcaacaggaccacagtcaagacgatcatagtcactggtgatggcttggacaacagtgtagcttccccc

SEQ ID NO: 256211 - DNA, 101 bp, Homo sapiens
gggcaaagctcaagatggcggacaaaacgccaggcggatctcagaaggccagttcaaagttggttaccacagagaagcgcttcctcaaagacagtttgtac

SEQ ID NO: 256212 - DNA, 83 bp, Homo sapiens
gccagttttgaaatcgacacacaaagaatagagttgagcctgtgggacacttcggcgtccagcctgcatgccgtgcggactgc

SEQ ID NO: 256213 - DNA, 75 bp, Homo sapiens
gcgctctccgcaccgcggcttaaatgatgtattttgtgatcgcagcgatgaaagtgtactaatggtcacttgatg

SEQ ID NO: 256214 - DNA, 100 bp, Homo sapiens
cttctcctgataatgtaaattgccgcgatacccaaggcagacattcaacacctttacatttagcagagcctgtgtggtgcccctatctccttgttccaag

SEQ ID NO: 256215 - DNA, 83 bp, Homo sapiens
ccgcagacttacttccccggctcagcagggaaagattctggatgaaattgaagaacataacatcaaaatctatcacttacctg

SEQ ID NO: 256216 - DNA, 100 bp, Homo sapiens
cggacgtgcggggcctgggcctcccggtccgcaagcagctacaggcctcgggcctccccggcagcgcggagctgacggtgggcgcggcggtcgcctgctt

SEQ ID NO: 256217 - DNA, 114 bp, Homo sapiens
gcagaatctctttaaaatggacatagaagactgcaatggccgctcctatgtgtctggcctaccctctgaagaggtccaagcaacggaagtactactacgaagctgcctttctgg

SEQ ID NO: 256218 - DNA, 100 bp, Homo sapiens
atttacttgttggggccctcttgataaaaagagatgtggggggattctcgacctgctaacagaactggaccttttcgggagcaatggaccacagaaattc

SEQ ID NO: 256219 - DNA, 100 bp, Homo sapiens
agaaaacacttgatcctgatcctgccatccgacgtccagagtttattaaccacttaacctctcagaactgaacaaagacaacattgttcctggaacgccc

SEQ ID NO: 256220 - DNA, 100 bp, Homo sapiens
ttttccgttgccggtgccggcctagcgtcctggaattacttcaatcaaaggtcctgctgtactagccaccaaagcagctgctggtactaagaaatatgat

SEQ ID NO: 256221 - DNA, 50 bp, Homo sapiens
atgatgaaatttctgtaaatgggatacccacccaccatcccagggtctac

SEQ ID NO: 256222 - DNA, 100 bp, Homo sapiens
tcacctgtctggagcaaggaagaaaacctttgaccatgaagagaaatgagatgatagccaaaccctcaggttctaagctggtctatgtccatcaccttct

SEQ ID NO: 256223 - DNA, 83 bp, Homo sapiens
ccgccggccgccgccgcccgaggcatccgtgggctctgagaagctctttgcgccgggaaccgataaaggtaagtgggtcccct

SEQ ID NO: 256224 - DNA, 75 bp, Homo sapiens
cgcaggcagccccaaagcctgaacaggcagggccagacccagttacagaatgtctgaaggggacagtgtgggaga

SEQ ID NO: 256225 - DNA, 100 bp, Homo sapiens
atttctttctgagaacttgctgcagcctagcttggagtcctggcctggaaagcttgaatatgaaaagtcaggtcccaggaaggtggcgtcagcatctgca

SEQ ID NO: 256226 - DNA, 75 bp, Homo sapiens
attctccactgccgtctactcggccactccggtcccgacacctagcctgcgaggctctgtcggtggtgagcgacg

SEQ ID NO: 256227 - DNA, 75 bp, Homo sapiens
cgagcgcttgatgtgcgcggagagcaatcgccgggacagctgcaaggtgtccttaagtttgctcgcttggtcaag

SEQ ID NO: 256228 - DNA, 82 bp, Homo sapiens
tcagcgagagtgccaaccaggccttcctggtcttaaccatgaacttctctggaggagggaggcaggaagcagcagggtccag

SEQ ID NO: 256229 - DNA, 100 bp, Homo sapiens
cggggaaagcagagggccccttggacagctggctggaggcgtgatcctgggtgtggccctgtggctccgccatgacccgcagaccaccaacctcctgtat

SEQ ID NO: 256230 - DNA, 50 bp, Homo sapiens
gtggatatagcacaccatccccagccatgccccaggtgctaaagagctgt

SEQ ID NO: 256231 - DNA, 100 bp, Homo sapiens
gctgccatcttccagagtcactgtggatagatccaccattgcaagacatttgctcagcatccaggatattgcagtcctcttcaacatcatcatcattttc

SEQ ID NO: 256232 - DNA, 100 bp, Homo sapiens
gctgtcagagcctcatggagtacggtcgtttatacgcaatgcagactggaatgaagatcgatagtaaaactcctgaatgtcgcaaatttttatcaaagtt

SEQ ID NO: 256233 - DNA, 82 bp, Homo sapiens
cgcagtggaaggccggaggacgtctgtgccgagccctgagcaacctgcctagagctggaacgttacctccagagcgagccct

SEQ ID NO: 256234 - DNA, 97 bp, Homo sapiens
tgcacaaaagcatattttcacatgggaaaagccaacctggccctgaagaactacagtgtggaaatgggtcctgatgaatatgaagagatggaagaag

SEQ ID NO: 256235 - DNA, 100 bp, Homo sapiens
tgcctccgccggctacagcgggaagagcggatgggagtcccagcttctggagacggggttcctggggatcttcctgtgccctctgtggacgctgtcaagg

SEQ ID NO: 256236 - DNA, 100 bp, Homo sapiens
gagaggcgtccgagccccgggccctggggcaggagcacgacatcaccctcttcgtcaaggttgtaaaggcatatgatcgtgtggagcaagaatgggttgc

SEQ ID NO: 256237 - DNA, 74 bp, Homo sapiens
cagttcgctacacagcaatgcatcgagtgctacagctagaatgaagcacatcaacctatcatttgcagcgtgtg

SEQ ID NO: 256238 - DNA, 90 bp, Homo sapiens
gctgaaggacatgaaagtgctgtacaccaaccgagcccagggatcatagacggtatttctatgtaaacgaacagtcgggcgagtctcagt

SEQ ID NO: 256239 - DNA, 75 bp, Homo sapiens
cgctgactggaggctggcggacaggcgacagcgacctgcggcaggcctacagattcctggaggagatgcggcggc

SEQ ID NO: 256240 - DNA, 75 bp, Homo sapiens
aagcgaagccttgaaaaagctgccctgagacggtgtcccgccgaaaggagtgacagttcatttagattctttgta

SEQ ID NO: 256241 - DNA, 98 bp, Homo sapiens
ggatgaacatgggcaggataaatggtgttgctctcttgccattcgtggatgagcgaaggctacgagctgccctagaagaggtatacccagacctcact

SEQ ID NO: 256242 - DNA, 75 bp, Homo sapiens
caagacagagctggcctggagtccgcggctggccgcgtgagtaggataccgttaaccctggataaagagaatgga

SEQ ID NO: 256243 - DNA, 75 bp, Homo sapiens
ggcggctgctgctgctgctgacgctgctgctgcccggcctcgggtgtactaatggtcacttgatgtgcgctggct

SEQ ID NO: 256244 - DNA, 85 bp, Homo sapiens
tgccggcaagagggagttaaggacattccaggcagaggcaaggacctgacaatgtccctgtattgtggaatagcttgcaggagaa

SEQ ID NO: 256245 - DNA, 100 bp, Homo sapiens
aaaggcttggaaagagccacattagaaaaactacccctgagtgtggtcccacaggatatgtagagaaaatcacatgcagctcatctaagagaaatgagtt

SEQ ID NO: 256246 - DNA, 75 bp, Homo sapiens
ggcagagccgccgagacgccgaagagcccgccgcccgcgcgaggacaacgtctgacatgagccgagtgttctgct

SEQ ID NO: 256247 - DNA, 88 bp, Homo sapiens
cttgggtgacatctgcctgagagatctccaagaattacagatgttccatttaagcagacctcttccatagctgtagctggagcggtaa

SEQ ID NO: 256248 - DNA, 98 bp, Homo sapiens
cagcttctagaagacccattacagagggtcacgagaagagaatgccttctagatgcaaaatcacctccaaaccagaccacttttcttgacttgcctgt

SEQ ID NO: 256249 - DNA, 75 bp, Homo sapiens
gggctcgctgtatttactgggaactagtcttgcaggaagagaaactccagaaaatcttgccaaacttctgaccag

SEQ ID NO: 256250 - DNA, 88 bp, Homo sapiens
tcaagctcgccttctaccctaatcaagatggggacatacttcgcgaccagacacatgacggaagtgtgtatttttgggccactccacg

SEQ ID NO: 256251 - DNA, 87 bp, Homo sapiens
cgccatcttggatccgcgggacaagaaaattcatgcgaaatgtgtgctatactggccggaaaagagagggatatatggaaaagttga

SEQ ID NO: 256252 - DNA, 87 bp, Homo sapiens
ctttaacaattcaacctcaaatttctaatttcaccaacaactatttattgagggctaggaaatctggcattttttaaagtttgcgcc

SEQ ID NO: 256253 - DNA, 82 bp, Homo sapiens
ggttaattgttgatgaagccatcaatgaggacaacagtgtggtgtccttgtcccagcttcttggacacttaatgattgttgg

SEQ ID NO: 256254 - DNA, 75 bp, Homo sapiens
gctgttttgccggaggagcccctcaggccgtgctgaccttaaggaaagagccaaaatgagttccagtgaagttgg

SEQ ID NO: 256255 - DNA, 90 bp, Homo sapiens
tatgacattgagcaacagcagataaggaacgccctggaaaacatcaggttataaacaacttgtgaaatgagtgatttggaagatgatgag

SEQ ID NO: 256256 - DNA, 97 bp, Homo sapiens
caaaaggcgtctatccagacctactggcaacaagcggtgactatctccgtgtgtggagggttggggaccagattctagaagtgaatgggcggagctt

SEQ ID NO: 256257 - DNA, 82 bp, Homo sapiens
catggcggaacgcaggagacacaagaagcggatccaggcataatcaccagcaacacccgggacaataatacgggggccacct

SEQ ID NO: 256258 - DNA, 50 bp, Homo sapiens
aatagtaatacactcttacccttacagacttcacagagaatgcagttgtc

SEQ ID NO: 256259 - DNA, 75 bp, Homo sapiens
accacttgcggcctgagtatgatgacgacaacccccccgtgtcttttgtgaagttctccccgaacggcaaataca

SEQ ID NO: 256260 - DNA, 74 bp, Homo sapiens
cgagcgcttgatgtgcgcggagagcaatcgccgggacagctgcaagcaggttacgggcaggacttgagtggctt

SEQ ID NO: 256261 - DNA, 98 bp, Homo sapiens
cctgaaaaagtttttaaataccaaagacgaggatggcattccctgtggatatgctggaaaattgcagccatgaggaattggaaaattctgctgaagat

SEQ ID NO: 256262 - DNA, 51 bp, Homo sapiens
ggaaggtggagccaccagcctctccctggtatacaaaactaggatatgctg

SEQ ID NO: 256263 - DNA, 74 bp, Homo sapiens
aggtgctcattcttcaaagaaataaactcagtgacactcccaaggggaaaagagtgcaaattcggaaagcacct

SEQ ID NO: 256264 - DNA, 75 bp, Homo sapiens
cttgtacagagatgtgatgttggagaactatagcaatctggttttcttgggatttgcctcaaagggcactgcaaa

SEQ ID NO: 256265 - DNA, 59 bp, Homo sapiens
gtatttgccacaggagcctggtggagctccaggagaaatctcctgcaaagaagctgagc

SEQ ID NO: 256266 - DNA, 112 bp, Homo sapiens
cccacctgcccggtgcccgaggaggcagccaagctcgtggcctgcctctgcgtgcaaagcgtggatacccatcaacgaagttttgatattggaattcagattggctatcagc

SEQ ID NO: 256267 - DNA, 106 bp, Homo sapiens
ggatggtggactcagagaccaataaaaataaactgcttgaacatcctttgactggttagccagaaactggcgatggaatatgagaggagccctctggaaagaaaag

SEQ ID NO: 256268 - DNA, 75 bp, Homo sapiens
gagacggcgacttctgacaacgagtattgttgcagcatctggcagtgagactgaggatgaggacagcatggacat

SEQ ID NO: 256269 - DNA, 75 bp, Homo sapiens
cttagctgtgctcgcgctactctctctttctggcctggaggctatccagcgcgcatttcacccagaacgtgtagg

SEQ ID NO: 256270 - DNA, 82 bp, Homo sapiens
caggacaccgacatggaacagggactcactggggagtcctgtgtatggaaactcacatgagtcagctcagtctagaagggta

SEQ ID NO: 256271 - DNA, 80 bp, Homo sapiens
tgacgggcgtgggggcctcaagctgtcccaggacatggacacctgtgaggaattttggagagtaaaaggctgaaccttgt

SEQ ID NO: 256272 - DNA, 83 bp, Homo sapiens
ccgccggtcctgaccaccgtgaacggacagtcccccccagctgtcaataccagcaaatatgcagaaagctatcggatccaaac

SEQ ID NO: 256273 - DNA, 75 bp, Homo sapiens
accatggaggaggacgacagctacgaaactctataaaacaggtcgggagatgcaggagaggatcatggacctgct

SEQ ID NO: 256274 - DNA, 83 bp, Homo sapiens
tggaggacgaggggctccgggtcttccagagcgtgaagatcaagatcgcgctgataaagcagtttgtgtccgacgtggcctgg

SEQ ID NO: 256275 - DNA, 98 bp, Homo sapiens
agcccttccatttgaattaccacgtagatcacttggattcctccaatagtttttccgtgacaaatgcttgaatctttctgaacctgtcatgacctata

SEQ ID NO: 256276 - DNA, 100 bp, Homo sapiens
aagaagacctcatccaactactcagtataatggaaggggagttgcagatttatcagcaagactgttgaacgcataactgcccaagatgcctgtccctccc

SEQ ID NO: 256277 - DNA, 75 bp, Homo sapiens
gcggacggtctaggcggggctggaggcggtggctgcggttgcgggaccgagggaacaccctgaagaacatagaga

SEQ ID NO: 256278 - DNA, 98 bp, Homo sapiens
tgaaaacctttgtgatgatccacttccacttaatgaatggaaaagctgttactagaaccaatgtttgaagtccctaattctgatatcgtatgtgtgga

SEQ ID NO: 256279 - DNA, 100 bp, Homo sapiens
aagaggtgaagttgggaaactgcggattgccaagtgtccctggccagtgtccttccacctgtccacaagcatggggaacatcttcgccaacctcttcaag

SEQ ID NO: 256280 - DNA, 100 bp, Homo sapiens
ccagtacctgcccaggaaactggcattgaacctggccacatcccaggtaccgtgaacatccccttcacagacttcctgagccaggaggggctggagaaga

SEQ ID NO: 256281 - DNA, 100 bp, Homo sapiens
gggagcagaagggaggctccaagacctcatcaacaattaagggaaggggaagactggcagcgggtccggagtgcctttcaaaagaaactaatgaaaccag

SEQ ID NO: 256282 - DNA, 83 bp, Homo sapiens
aaggattccaagtaactcttatttgagcttcttcgagacaccttcacttccctgggctatgaagtccagaaattcttgcatct

SEQ ID NO: 256283 - DNA, 74 bp, Homo sapiens
caaacaatccaggtggcagggagtgcatcaaaggtgtgaacgcaggctcctgggtagaactgcacttcagcaat

SEQ ID NO: 256284 - DNA, 100 bp, Homo sapiens
gcaattgttgataccaatggaatcacggtttttggaacaaggattttggatgaagaagtttttgaggaagctgccctctgtcgacagctccccatggaag

SEQ ID NO: 256285 - DNA, 100 bp, Homo sapiens
gcagctgggctccgttctctatcaccacaccaagaacagcgagcaggcgcgcagccacctggagaaggcgtggcttgttgtcagaggccccaaatgaaaa

SEQ ID NO: 256286 - DNA, 87 bp, Homo sapiens
gcatgtcgtctttatcgctcagtctttggaggattgtcctctggatgaagatgaagatgcatttcagggactgggagaagaagatga

SEQ ID NO: 256287 - DNA, 100 bp, Homo sapiens
acgccatcaggctcaacgaggaactcaaagtggatgaggaaagcttctggagttacagtgaatgatgaagtcatcaaagtttttaatgatatgaaagtaa

SEQ ID NO: 256288 - DNA, 104 bp, Homo sapiens
gagaaggtggacgtgctggtgtctgagtggatggggacctgcctgctgatggcccactgcgtgaccttggttcagctgtccatttcctgtgaccatctcattga

SEQ ID NO: 256289 - DNA, 82 bp, Homo sapiens
ggcgaagggagccgaccgggccctgggctggaggtaaaaccccacgggagtgcatccgccccaacccttttccccctcgtct

SEQ ID NO: 256290 - DNA, 75 bp, Homo sapiens
aaaccaccgcttacagatattggttgtggaagctgatcgaggaagcctaagcaggctctgtgaagtgggaatagt

SEQ ID NO: 256291 - DNA, 98 bp, Homo sapiens
gccatcactgctgcccacggggcttccactgcagtgcagacgggcgatcctgcttccaaagatcagcacaaacggcggcgtattgctctgaagaagca

SEQ ID NO: 256292 - DNA, 100 bp, Homo sapiens
caacattggaacttagtgttatgccaaaagatgaagacattctccaagtgatgggtgagtcaagtgaagacatagaccaaatgttcagcactttgctggg

SEQ ID NO: 256293 - DNA, 83 bp, Homo sapiens
tcggcaggcgagattgcctgacccaggcctgctcggccctcacagggattttttatcaagcagaaatgcatcgaacaacgaga

SEQ ID NO: 256294 - DNA, 82 bp, Homo sapiens
gagccccggaggcagagcggctgccatggtcttgggcgtctttggtactggcttttttaggggtctgcctggggattaccct

SEQ ID NO: 256295 - DNA, 100 bp, Homo sapiens
ggagattgttcaccacggagcatgaagacagagcgggtgactggaggtggctccccagacacgatgaggcgagtggtacgacagagcaagtttcggcatg

SEQ ID NO: 256296 - DNA, 75 bp, Homo sapiens
atgacaaggaggcctgagtagaccgcagggaagacaaaggcgctttggctaagctggtggaagctatcaggacca

SEQ ID NO: 256297 - DNA, 98 bp, Homo sapiens
acgcctggcaggcggccggccaggtgaccagcgccatgtccagccaggtggtgggcattgagcctctctacatcaaggcagagccggccagccctgac

SEQ ID NO: 256298 - DNA, 98 bp, Homo sapiens
ggatttgggagacatttaggaggaggtgaagtgaaatctgcaagagtcctgctcgctcaaggcctgcatacaggaaagaagcaggggaaaagcgttac

SEQ ID NO: 256299 - DNA, 87 bp, Homo sapiens
ggctgaggcggccgcggggcccgagcgcagctacgagttccagggagctctgtcctggtgaccgtgcccgggttatgacgactaatc

SEQ ID NO: 256300 - DNA, 117 bp, Homo sapiens
cgcaggcactgaaggcggcggcggggccagaggctcagcggctcccaggtgcgggagagagctgactacacagacttagtcttctccactccgtgttcctgcagctagagacatgac

SEQ ID NO: 256301 - DNA, 96 bp, Homo sapiens
gggtctgcagggcctgggccgccgctgctacctgcagcgccgtgtggcacgacacaaaaatcagaacggccggtttgtgggcgatgctgaccttga

SEQ ID NO: 256302 - DNA, 74 bp, Homo sapiens
tcttaataaactatgaagcaatcagtgcagcaacagtgcgccttcctgttgttctgcatggctcccaggccctg

SEQ ID NO: 256303 - DNA, 100 bp, Homo sapiens
ttcgagaagattagcaaaggtgctaatccagtggaaatcaggagagccttgttagatgacttggataaagaactaaacaactacattatgcgatgtagag

SEQ ID NO: 256304 - DNA, 75 bp, Homo sapiens
ccgagaagtgaccccagcaaaagaaaaatattgctgtacctaaattcaaaaaacgttgtgtgacgtgatcctcat

SEQ ID NO: 256305 - DNA, 75 bp, Homo sapiens
cacaggccgtcgctatgagcgggaccaccctgggcacagcaggcatcggagatgctggacgagaaccaccacctg

SEQ ID NO: 256306 - DNA, 51 bp, Homo sapiens
gccgtcttctttgcctgcactaatgaggaaatatcattctgcaaaagaagc

SEQ ID NO: 256307 - DNA, 89 bp, Homo sapiens
ggttaattcaacagttcaccaccattaccgatacgtgcttttcaacatgccttcagcactaatgactgctccaggaatgtctacattaa

SEQ ID NO: 256308 - DNA, 99 bp, Homo sapiens
tcgtcgcctccttgcccgtgaccgtcgctagaactcagttgtgcgttgcggccagtcgccactgctgaagctggacgctttcatctacgatgccgcagt

SEQ ID NO: 256309 - DNA, 100 bp, Homo sapiens
tgggccacaggccacgcggccacgcagtccgagcgggagccgagccgggcggggcgagggcagctccggtctcctctgagcctccggcctccataagacc

SEQ ID NO: 256310 - DNA, 75 bp, Homo sapiens
cggagtcttccaggccatcaagggtttccgcaatgcccctgttatttcctcgtcctgtgactgtggagcccatgg

SEQ ID NO: 256311 - DNA, 82 bp, Homo sapiens
tcggaggagccgcgggcggcgcggcccagctcgttccagatgccgacaaaaggatcaaggtggcgaagcccgtggtggagat

SEQ ID NO: 256312 - DNA, 127 bp, Homo sapiens
gctatatcagagaatgagttaatctcctcagaaatcactaaatactactctgaggggcttagaaattaacagggtttttgtcatccattggagggacactgtatgaggttggaaagcctgaaatgca

SEQ ID NO: 256313 - DNA, 83 bp, Homo sapiens
tctccaagaacgtgctcttcgctcacctggatgacaacgagaggagcccgtggaccgggagcccgtggaccgggagccggtgg

SEQ ID NO: 256314 - DNA, 82 bp, Homo sapiens
ggcggagggggcccgaaggacttcggcgcgggactcaagtacaactcccggcacgaggttgaactcgccttacacctgtaac

SEQ ID NO: 256315 - DNA, 95 bp, Homo sapiens
gaagagtgtgtggctgcgcgccgcgtacttcgagaagaaccatggcactcggaactctgcgaccttcaagtcgtttgaggaccgagttgggacca

SEQ ID NO: 256316 - DNA, 100 bp, Homo sapiens
ggcccccgagagccgccgacatgaagaaagacgtgcggatcctgctggtgggagaacggttgaatgtaacaactgtgagactggagaacagtgtggcgcg

SEQ ID NO: 256317 - DNA, 51 bp, Homo sapiens
aagaaaactcagcctgagaatgggccagctctcaatgttgcaagaaaaaat

SEQ ID NO: 256318 - DNA, 98 bp, Homo sapiens
ggcacgtggactccctttaatccagtgactgtcaggtcgatcatatgggaggtcatcaaggcttgggacattgccatagccaccatgaaggtggggga

SEQ ID NO: 256319 - DNA, 100 bp, Homo sapiens
tggctgtgcggggccggctgctcactgccctggtgctccccgacctgctgtactccatcgcgggggatgactcggtgacggagggggtcacagacctcgt

SEQ ID NO: 256320 - DNA, 88 bp, Homo sapiens
ctcaccagtgcgcatgcgtggctctccggcaccggagctcttgtccctggcaaagcgaaagcgcagtgactctgaggagaaggagccg

SEQ ID NO: 256321 - DNA, 98 bp, Homo sapiens
cattgatgccccaggacacagagactttatcaaaaacatgattacagggacatctcaggccttggctccttgaacttttggccgccatgtgcttcccg

SEQ ID NO: 256322 - DNA, 82 bp, Homo sapiens
ctttaggctggaagcgccttagaggagccatttttccagcctccttttagaggactcagaagaagaagaaggtgacttatgt

SEQ ID NO: 256323 - DNA, 100 bp, Homo sapiens
agaaatttgaacaactttccgaatctgcaaaagaagattgtcaagtggtcagactgttgtttgccattagcttgcagacctggggatccttatcggctaa

SEQ ID NO: 256324 - DNA, 82 bp, Homo sapiens
caagcggagctcccccaagagccggaaaggatgacatctgaactggagagcagcctaacgtctatggactggttaccacagc

SEQ ID NO: 256325 - DNA, 100 bp, Homo sapiens
gcatgcagcttactgcttgaaagaattcccgctaccagacctaccaacgcatgtggaattacatgtattccaagcagcccagcgtgttcgtgaagagcac

SEQ ID NO: 256326 - DNA, 98 bp, Homo sapiens
cgcagatgcccaccggaatggagaaggaagaggagtcggtagaacacctgaaggagaagctcattagccaggcccaggaagtgagccgactgcgatct

SEQ ID NO: 256327 - DNA, 50 bp, Homo sapiens
ccttgatggtcaaaagattaaggtacggaaaaaggaccagatcaatattg

SEQ ID NO: 256328 - DNA, 75 bp, Homo sapiens
gcttcgtccagatcgggaaggactcggtgaaatacctggagtgctcagctctcacccagagaggcctgaaaaccg

SEQ ID NO: 256329 - DNA, 75 bp, Homo sapiens
aacaaagatgatgataatgttttcagcagcaatttgccctcagaggctgagaaagtgttcatggtggctcgaggg

SEQ ID NO: 256330 - DNA, 75 bp, Homo sapiens
cacctcaagcacacccaatggacagcatgcctcaccaagtcacatgacaagcaaccgagacaacacttggactca

SEQ ID NO: 256331 - DNA, 88 bp, Homo sapiens
aactacatgaatgctggctcccggaatgctcaaaccttcggatttaaccttagctctctctgtaaaacagatctgagaacaattggca

SEQ ID NO: 256332 - DNA, 90 bp, Homo sapiens
aataaaactaacagtctatgatgtcaaggataagtctcatgacaccaggcggggtttcaccatgttgcccagactggtcttgaactcctg

SEQ ID NO: 256333 - DNA, 50 bp, Homo sapiens
gtgaaatcactgtggcaaccggggcacctgttcttcccggagcctatcag

SEQ ID NO: 256334 - DNA, 100 bp, Homo sapiens
ccggccgtggaagcggccaccgactactgtcagcagctgtgccagaacaagtaagaagtttgcgacagagcactattgccaagcgttcaaatgcagcacc

SEQ ID NO: 256335 - DNA, 100 bp, Homo sapiens
ggatctttacatgttgaatccttgcagcactaaaatttgcattagtgaccagaaggatcccaaggatcgaatggttcaggttgtgaaatggtacctctca

SEQ ID NO: 256336 - DNA, 100 bp, Homo sapiens
caaccagcagcccgaggtcttctgcaaccaggggactatattccacgccaggtacgaacctgggttaagcagtatcgagcttccgaaactagcaccatcc

SEQ ID NO: 256337 - DNA, 75 bp, Homo sapiens
agcactcggtcatgtacccggtggactcggtgaagattcctcagttccttttagatgattgctttaaaaatggta

SEQ ID NO: 256338 - DNA, 83 bp, Homo sapiens
aacccccgggcagccatgggcaactttgtggaaacacaccacagccatcagcactggaatgcaaagaccagaacaaacagaag

SEQ ID NO: 256339 - DNA, 105 bp, Homo sapiens
cccaactaacatttggaattttcgtatacgtggattctagaggggtgacagcgaaacggcagacttcttggaggaagtgaaatttgaactgcgatgtgaagaatg

SEQ ID NO: 256340 - DNA, 83 bp, Homo sapiens
gagcctttggggcaccacagagatgcgggagggccctcctggacccgggagcggaccctggtggcggtgaagcccgatggcgt

SEQ ID NO: 256341 - DNA, 75 bp, Homo sapiens
ttgtactggcctgctgctggcccgcagggatcccctaacaacagtgagagagcaatgcgagcagttggagaaatg

SEQ ID NO: 256342 - DNA, 100 bp, Homo sapiens
agcgggtacaagatctaccccggacacgggaggcgctacgccaggaccgacgggaaggtgcaggaggggtccgcgcgtcccccttcggccgtggcttgcg

SEQ ID NO: 256343 - DNA, 82 bp, Homo sapiens
ctcccagtgacgggtctggagtgcgtgggggaccggctgttggcgggtctccaaagcggcgtctgacctcatgagctactgt

SEQ ID NO: 256344 - DNA, 90 bp, Homo sapiens
gattcgcagtggtcgcttcttctccttgggtggctttgtccactatggtgaagtgaccaatgactttgtcatgctgaaaggctgtgtggt

SEQ ID NO: 256345 - DNA, 98 bp, Homo sapiens
tggatcagttggtagaaataatcaagtcatccgtccttggctcaggatttggagagcttgcaccaccaaaaatggcaaacatcaccagctcccagatt

SEQ ID NO: 256346 - DNA, 50 bp, Homo sapiens
tgattgaggacaagaccatcgagctcatgctcagaggctgagaatggtgt

SEQ ID NO: 256347 - DNA, 75 bp, Homo sapiens
gctcgcccggtttctcggcgaatgacagcacagccttgccaacattccactaacccccgagactcagcgggacca

SEQ ID NO: 256348 - DNA, 82 bp, Homo sapiens
cttggactgagtcctgcaggacacagaaaaagcttgtggtgaaggggggcaaaaaaaagaagcaagttctgaagttcactct

SEQ ID NO: 256349 - DNA, 123 bp, Homo sapiens
ttccatagatgttggaatcaacaacgaacttaaagagatgaatggtgagaccacaaacccgtgaagaatggcagaatgtgttcctcatagctgccctggtgcattacagtggtgtgatcttct

SEQ ID NO: 256350 - DNA, 100 bp, Homo sapiens
gaggctcggagaaacaggcgccgcgggctccgcgcccggccggacccgggcccgagcacaggaagtcctggagaacctgaaggaccgctggtaccaggcg

SEQ ID NO: 256351 - DNA, 101 bp, Homo sapiens
tcaggactcggtcgaagcatggctggacgatcactgggactttaccttctcatactttgttagaaaagccaccagatgtggacgagtgcctggaaccaaac

SEQ ID NO: 256352 - DNA, 50 bp, Homo sapiens
gatcagaatttaccttcactaacccgatatcaggttcttctttagactgg

SEQ ID NO: 256353 - DNA, 107 bp, Homo sapiens
cgcggagcgccccttcgcgtcccctgcaccatgagctggggcaccgagctctggcaaacggggattcagcgtccgatcctttggaacagggactcacgtgaagcttc

SEQ ID NO: 256354 - DNA, 74 bp, Homo sapiens
ggacacccgcgaggccggaaaatggtgtcagttgtacccgaggcgttctcagcagcagcaagtacctgtggtgg

SEQ ID NO: 256355 - DNA, 82 bp, Homo sapiens
tacagtcgtttttagaaggagcactgacagcgaggtctccaattgagaaacatggcactgtttttcctgcactctacccacc

SEQ ID NO: 256356 - DNA, 111 bp, Homo sapiens
ctttagagaagacgttcatatcattgtcttccacagatgtgtcaccaaaccagttcactttatccaaatgcatagatgccgtgatggtgctgggaaattcgcatttattca

SEQ ID NO: 256357 - DNA, 75 bp, Homo sapiens
caccgacagcacagacagaatccctgctaccagtggtgccaccaccacaacagaatgatcttgagattcctgaaa

SEQ ID NO: 256358 - DNA, 74 bp, Homo sapiens
ttttgttttgaattgtgaaatacttccacctcttttagagttcattttccagacactgaaagagcagaatggct

SEQ ID NO: 256359 - DNA, 100 bp, Homo sapiens
cgttgcctgctcccggagggagacgcgctgccgaggagaacccagcggatggtggatgcttccaaaagcatcgaagctgtccatgaggacatccgcgtgc

SEQ ID NO: 256360 - DNA, 100 bp, Homo sapiens
gttgctcactttcctgggtattgtagccgctgtgcttgtcaaggtgaatcagctcccggccgactttaggattcttctggattttaaattttttcttttt

SEQ ID NO: 256361 - DNA, 75 bp, Homo sapiens
ccacacaaaataaagagtggagctgaagctaagaaattgatggagtcccctgtttccacaccagcagtgctgcca

SEQ ID NO: 256362 - DNA, 90 bp, Homo sapiens
cgcgcgcggaggccgcgacggacgcaagatggcgacggcgaccatagctctcgtgaatggtgtggctctgcagggcgccgagcaccacga

SEQ ID NO: 256363 - DNA, 87 bp, Homo sapiens
aggccggaggaacccggactccggcgtagcgtaattcgccaaaatgacgaacacaaagggaaagaggagaggcacccgatatatgtt

SEQ ID NO: 256364 - DNA, 100 bp, Homo sapiens
gctgggaagaggagctggtggcgtgagttggcacagagccgcacctttctttctcctcctaaattggatgaaccttcgggatgctgagacagggaagata

SEQ ID NO: 256365 - DNA, 100 bp, Homo sapiens
ttgacatcgtggagaaccgcttcattggaatgaagtcccgagctcatcgcaaatggctccagtcacagaattcagtcggaacgaggtccccactgcagtg

SEQ ID NO: 256366 - DNA, 100 bp, Homo sapiens
agtttcagaccaccctcccagcctcctgttattggctaaggccattttgtgactacactgcagccccccaggttcgcctaatagtcttggctacttccct

SEQ ID NO: 256367 - DNA, 90 bp, Homo sapiens
ggcctccacctcggccgccctgcccagctgcctgcccccggaggtgcccacgcagctgcctggacaacctgacatttaccccggtaactg

SEQ ID NO: 256368 - DNA, 116 bp, Homo sapiens
cggcagctgtgcaggcccggggagcagccggccgggcgagcctcgggtccagccctgctgggagttttctgccacacagatttgcggaagaacctgaccgtggacgagggcaccat

SEQ ID NO: 256369 - DNA, 75 bp, Homo sapiens
gccgattcctcctccttggtcgccgcgtccttggctggcgtggctttgttcgcgggggtcacagctctcatggct

SEQ ID NO: 256370 - DNA, 50 bp, Homo sapiens
cgggacagtggccttcgcgctaacgaaggaattgagttcttctcagactt

SEQ ID NO: 256371 - DNA, 82 bp, Homo sapiens
gggagccgtggccctgatccagacctgggcagatatgtgctgattagaaggctcacttgtgcagtgtggaggataaccagtg

SEQ ID NO: 256372 - DNA, 83 bp, Homo sapiens
cagaccctggagcctcagttggaagcagccgatccagcctgcggagcctgtggggcagaccatcatcaaagaggggatgctga

SEQ ID NO: 256373 - DNA, 58 bp, Homo sapiens
ggatgaccaggaatgggaaagccccaggttgatgccggcccaggatggatcagacctg

SEQ ID NO: 256374 - DNA, 76 bp, Homo sapiens
cggagaccatgttccgagcggcggctccggggcagctccggcgggcgattgccgtatccctcaaatcgaagatgct

SEQ ID NO: 256375 - DNA, 100 bp, Homo sapiens
cgatgaagtgcagaggtttttttctgaagaacatctggtgctccagttcggccgagtgggcccagacacattcaccatggacttctgctttccatttagc

SEQ ID NO: 256376 - DNA, 100 bp, Homo sapiens
ctgcgttgtaccatccgcctgtgggacacctaccagggcctccagacggtcatccaaagggatttctttcctgatgtggagaagctccaggcacagaagg

SEQ ID NO: 256377 - DNA, 75 bp, Homo sapiens
caggaatggagacacggcttcccccaaggaatatacaggtggtctgtttttctggggggccaccaacacctcccg

SEQ ID NO: 256378 - DNA, 82 bp, Homo sapiens
tcctgggggccatcgagatcttgctgcgagaccaacatgaaagtacgtcaggcgattccagtcacctcagaattgggagaca

SEQ ID NO: 256379 - DNA, 100 bp, Homo sapiens
cccacatcccccataggtcactgtgtggccatctaccactttgaagggaaatgtttcaacgtgcgcaagcgttgcggcggcgggcagaggactactacag

SEQ ID NO: 256380 - DNA, 102 bp, Homo sapiens
gcttatgagtggaacatggctagcaggaatgcttactgttgcgtggttcgttattaacagactgcaagtggcaacgtggaagcaaaagtagtatgcttttat

SEQ ID NO: 256381 - DNA, 100 bp, Homo sapiens
gaagcagctttcttgaatgtctacaaaagattgattgacgtcccaggggcactgggcatgatgctgggcctgtgctaccggataagctgtgtgttattcc

SEQ ID NO: 256382 - DNA, 100 bp, Homo sapiens
cgcgtgcccgcgaggagccgccgcgcgcccgcgccctccgcgcgacgccaggtgatggctggaccggcggaggaggcgggagcccattgtcccgagagcc

SEQ ID NO: 256383 - DNA, 97 bp, Homo sapiens
aaaaaaccaaaagagaaagtggatgctctatcacagtttgatctcaacaattatgcaaggtggcaatgaccatgagatcttcacagaccccagaacc

SEQ ID NO: 256384 - DNA, 100 bp, Homo sapiens
atcctgaagctgacccaggtataacagagtatgcaagaggaggagacctgcacaactggatacacccagaaatgtccctggctcaacaagccttccagca

SEQ ID NO: 256385 - DNA, 75 bp, Homo sapiens
gccttctggagatgcttccgaactgtgggcaaaaatggcgaatccggacaatcagatagttcaaaccagcaagga

SEQ ID NO: 256386 - DNA, 75 bp, Homo sapiens
gaaagatattgaaacaaccaccatttcaaattttcacactcagacaacgactgaaagacctttcattcagaagct

SEQ ID NO: 256387 - DNA, 100 bp, Homo sapiens
atctccttcgcgtcaggcggagacacgtagagaaatggtcagaaggaacgacaccacagaagaaattagaatgtttaaaagaaccaggaaaaacatctgt

SEQ ID NO: 256388 - DNA, 82 bp, Homo sapiens
agccgcgaggaggcgcgggaggtgttcgagaacgaccccgagacggtctggccgtgggcctgggcttcggggcactggcaga

SEQ ID NO: 256389 - DNA, 89 bp, Homo sapiens
cagaggccaggcctacttcctgaggcctgggcagaggctgcagcccatgccttatcatcctcatcgccctcaacgtcctgctcttctac

SEQ ID NO: 256390 - DNA, 82 bp, Homo sapiens
tataattaaatgcgatatggtacccaaactggattatttcggcagaaggttctggagagaaaaaatcatgagttggtatggc

SEQ ID NO: 256391 - DNA, 83 bp, Homo sapiens
tcataagtggaattttggagatattcaaagggccggtgcataaacttctcccgagttccatctcagtaaaagggaagcaggaa

SEQ ID NO: 256392 - DNA, 90 bp, Homo sapiens
tgttgggccttggtggctgtgctcttggcagacctgttggcactgagtggtcttaaccatgaacttctctggaggagggaggcaggaagc

SEQ ID NO: 256393 - DNA, 100 bp, Homo sapiens
tttcaattacaaacccccacagaacataccagaaggggaaactgactctactctgtgatgccaagacagatgggagtttccttgtacaccactttctctc

SEQ ID NO: 256394 - DNA, 90 bp, Homo sapiens
caaacctcctgttgggccatttccgagaactcccatcagtttctgtatagtgtaaaagatcccatgcgaggcccaagaaaactagaagta

SEQ ID NO: 256395 - DNA, 100 bp, Homo sapiens
agaagatcaaagaaggaaagaagaaggggaagaaaagaaggggaagaagatcaaaacccaccatgccccaggtggaaccgtcccaaaatgtcccttgctc

SEQ ID NO: 256396 - DNA, 98 bp, Homo sapiens
gagaatggaactgtatgccagcagcttgttgtacaagccatttcctgcttttaagtcttggcaggaggactctgagtctggagaagctcagctgtctc

SEQ ID NO: 256397 - DNA, 80 bp, Homo sapiens
cgttcctggagattctgattgaggaaatctggcattttttaaagtttgcgccccacaaagaggaaatattccaaaggtac

SEQ ID NO: 256398 - DNA, 75 bp, Homo sapiens
cccgtcaaaatccgaaagattcgggccagagacgacaacccgggcctccgaggctactgcagcactggggtgtca

SEQ ID NO: 256399 - DNA, 75 bp, Homo sapiens
cacgggtgccctcggacagcgccatcacataccgcggctccatcacccacgtcctggcattgatgtgcctgctcc

SEQ ID NO: 256400 - DNA, 83 bp, Homo sapiens
cagcctgacaaccttggaacagaacaagaggacaggaggtgtcgttccagccatcactggtgcaagctatatttaacggagat

SEQ ID NO: 256401 - DNA, 82 bp, Homo sapiens
tgggcagccacggccgggggcgtctttcagagcattacgaataaacagccattggactcttcaaacaaaaacgctgtctcca

SEQ ID NO: 256402 - DNA, 88 bp, Homo sapiens
gcagcgggcccggggcgtggggcctggatcatcagctgtaaagcagagtatattagccaagctacaggaagcagtagaagctaatctt

SEQ ID NO: 256403 - DNA, 118 bp, Homo sapiens
ctcagattatcaaggaggattttgtatactttatggaggatttagtagattgcatgacactactgtgagtggcctacagatggcgctagatgtttacaacggactccttcctccctat

SEQ ID NO: 256404 - DNA, 95 bp, Homo sapiens
agtatctctagtctttatgggaaacctcagcttgatgatgtatctcagcacacagcatgcctctgcaatgccatcattgctttgctgaaagttcc

SEQ ID NO: 256405 - DNA, 75 bp, Homo sapiens
gagcgaggaggatggcggagtcggggctcctgacgatggcagatgatcagggctgtattgaagagcagggggttg

SEQ ID NO: 256406 - DNA, 100 bp, Homo sapiens
cactgcctgtgtctcgtcttgtatctctaattggaagcactacgacgaggacttcaaccatgagccgtgtcagaggaagggccacaaggcacactgggcg

SEQ ID NO: 256407 - DNA, 75 bp, Homo sapiens
ctccccagggcagaaatagcgaccatggcgaggcataatcaccagcaacacccgggacaataatacgggggccac

SEQ ID NO: 256408 - DNA, 80 bp, Homo sapiens
tacgagcagatgaacgggcctgtggcaggtgcctcccgccagacaaattcctgtcccttgtgccgctatgagctgcccac

SEQ ID NO: 256409 - DNA, 95 bp, Homo sapiens
aaccatggaagggttcacgctgatagctgatagcttttacagtgctcattcctaacagtggatttacttgtttggttgggatgttccagtaattc

SEQ ID NO: 256410 - DNA, 95 bp, Homo sapiens
taacttctactgacgaagcttggaagttgcagaagctgtgtcccgtgatcgaggcttccttcaatggcatgtatgcagacctcctgcagctggtg

SEQ ID NO: 256411 - DNA, 50 bp, Homo sapiens
caatgaatgagcgttccagcttctccatcaaagacacagctctccccttc

SEQ ID NO: 256412 - DNA, 100 bp, Homo sapiens
gaaaattggagatttgataacactggagatcagcaccaaatcccacagaggcatctgagcgacagcgatgaggaaaagaaagcgagaagaggcagatctc

SEQ ID NO: 256413 - DNA, 100 bp, Homo sapiens
cctggagcactcgctggccgactgcgccgagctgcacgtcctcgaacgcgaggccaacagccccgttactaaaccaaggagatttaactgaaagacggac

SEQ ID NO: 256414 - DNA, 100 bp, Homo sapiens
cttcatcaaaaatagtgatagctttgataagtgggaagaagagcgctatcctgaaggcatcaagtggaaattcctagaacataaaggtccagtatttgcc

SEQ ID NO: 256415 - DNA, 80 bp, Homo sapiens
gaaccacagccaccttccaccgctgcgccaagggcagccattctacaaaagtggaagctgtggtcagaactctgatgaaa

SEQ ID NO: 256416 - DNA, 51 bp, Homo sapiens
ggcgaagacaagagagctcattgggaaaagtaatagaacctctgaaagatt

SEQ ID NO: 256417 - DNA, 100 bp, Homo sapiens
ctgcccgggcctgggcaggcggagcagggccttggaccccgcggcgcccctcggcctcggagcaacgagcgcagcgccgcgccgtgccgtccctgcagtg

SEQ ID NO: 256418 - DNA, 83 bp, Homo sapiens
cactttataactcctgcactgcggtaggataactgggatgacgatgatgatgaaaaaaaagaggaagcagaagtaaaaccagg

SEQ ID NO: 256419 - DNA, 75 bp, Homo sapiens
acggcggtacccgggtggttaaacttcgcaaaatgggtgtgggccgaagatatgctcatgtggtgttgaggaaag

SEQ ID NO: 256420 - DNA, 100 bp, Homo sapiens
ccaataatttgcagcttaggtccgaggacaccacaaactctgcttaaaggaaatggctagtgatgagctgaaagagatgcggaaaaacttgaccaaagaa

SEQ ID NO: 256421 - DNA, 83 bp, Homo sapiens
cgcggattcgccgaggcaccgaggcactcagaggagacaaaaggatgccacggagaaagaaaaaagttaaagaagtctccgaa

SEQ ID NO: 256422 - DNA, 83 bp, Homo sapiens
tgaacgtttagaggcaacagaataccttgtctcagctgctgaagctgtttccttcagcattcgagtttaatgagctattcttg

SEQ ID NO: 256423 - DNA, 80 bp, Homo sapiens
acgttgaggcccttcttgtgtatctggagaaaatagaggtgctggagaatctggtaaaagcaccattgtgaagcagatga

SEQ ID NO: 256424 - DNA, 82 bp, Homo sapiens
ggcgggcaggcgtgcggaggacactcctgcgaccagggtgctttcttctgcgacctggtactcatctacctcatcaaaaaga

SEQ ID NO: 256425 - DNA, 83 bp, Homo sapiens
gtccagcagctaaggatattttgtgcaggagccgaaccaagaacatgatgtggtatggagttcttggaaccaaagagttgctg

SEQ ID NO: 256426 - DNA, 90 bp, Homo sapiens
ggtgaagaaattgcttcctcagcaagttgtcctcgaagaaggtacaattgcttttaaaaattgggttaaaacaggcacagaagtttacag

SEQ ID NO: 256427 - DNA, 75 bp, Homo sapiens
ctctgcctcggggacgaaagcagggccctccagaatttccacagcatacacctggacctgttcccaacagtttca

SEQ ID NO: 256428 - DNA, 100 bp, Homo sapiens
ggcgagggaggacagggggttcatcatgggtttggaaggtttgcagttgctgctcttcagtccaaagtagaacagtatgagcgtgaaaccaatcgcctca

SEQ ID NO: 256429 - DNA, 98 bp, Homo sapiens
tctggagcaaggaaaagatccctggaatatgaagggacacagtacggtagtcaaacccccaggtggaaccgtcccaaaatgtcccttgctcagaagaa

SEQ ID NO: 256430 - DNA, 107 bp, Homo sapiens
cggtttcaaacggcttagagcaggccgcttggttctgacccagctgagctgatggttcctgggaaggaaggtggggtaccccttgctcccaaccagcctgtccatgg

SEQ ID NO: 256431 - DNA, 75 bp, Homo sapiens
gtcccacttgttcgcggcctatagggactggtgattgcagctggaagtgcccatgaccgagctggcgtcctccgg

SEQ ID NO: 256432 - DNA, 90 bp, Homo sapiens
cgctgttgctggtctctggctccctcctcccagggccaggcgccgctcagaacggatccctctgtgacccagctgaccaacgccccgcag

SEQ ID NO: 256433 - DNA, 101 bp, Homo sapiens
gagcgcgttgaccaagactcataccagagggccacacttttcaagtgagcttgatgcattagatgccaatgatgagttgactcctttgggacgaatcctgg

SEQ ID NO: 256434 - DNA, 75 bp, Homo sapiens
gtcctgatgacacagccctcagcgagagtgccaaccaggccttcctgggtctcccttgatctgagaatggctacc

SEQ ID NO: 256435 - DNA, 100 bp, Homo sapiens
tagccgcagagtggacctgcaggtacttggatctccagtgggagctgccctctcgaaggcaggacagcggtggcggcagagacagggtctccctgtgttg

SEQ ID NO: 256436 - DNA, 98 bp, Homo sapiens
ctggttccaacgcgaggagctcatcgggcagattagcgacatccgagtgcagaacctgcaagggatcgcttacacctgagacgaactacagaacagca

SEQ ID NO: 256437 - DNA, 100 bp, Homo sapiens
ctggggcggaatttcaagatggatcgggtctgtgcagacttttgcagacaaatcaaaacaagaagctctgaagaatgacctggtggaggctttgaagaga

SEQ ID NO: 256438 - DNA, 90 bp, Homo sapiens
aacagacaagacacttttcagaaagacagggaaatcctcattgacgattcaatttgttgaaggccaatttgtggactcctacgatccaac

SEQ ID NO: 256439 - DNA, 107 bp, Homo sapiens
cacggagcagagtccctcacccccaccagctgtagctgaacgtctggatggtggagaagagcaggtgctggagaatctggtaaaagcaccattgtgaagcagatgag

SEQ ID NO: 256440 - DNA, 100 bp, Homo sapiens
cttacatttctgtcttccttcctgggtcagtgattcccggaccctggaagagaagagggtggctaatgattaagggcggcgactggcggcgcgatggacc

SEQ ID NO: 256441 - DNA, 108 bp, Homo sapiens
cgaagagttggatactcagcgtcgctggcagccgctgtacttggttaaaaggacaactctggtggatagcagaacatctgttactgatgtgaagtttgctcccaagca

SEQ ID NO: 256442 - DNA, 99 bp, Homo sapiens
ggaaattaaccggagaatggcagacgacaataagctcttcagggaggaattcaacacggtgggcaagagcagcaagatgctgcagcatattgattacag

SEQ ID NO: 256443 - DNA, 98 bp, Homo sapiens
acgagctctagctggatgggcgcagaggccagtacgggatccctgaaccatggaattttccttttcggaggagctactggtgcggacctcggcccccc

SEQ ID NO: 256444 - DNA, 99 bp, Homo sapiens
ccagcctgggcgctgacgccgcggacctccctgcgaccgtcgcggaccatgggcgacaaagggacccggtgacatttacaaagaggaaatttgggttga

SEQ ID NO: 256445 - DNA, 82 bp, Homo sapiens
ggaaatcgggctgaagcgactgagtccgcgatggagaattccacaaggcatatgcccagttggtcgatcttggcactcacta

SEQ ID NO: 256446 - DNA, 87 bp, Homo sapiens
tcgaagccattcagtcctcaatctccttttccttggctacccgtctccggataactgtgctcctgacatccttccttatggttttgg

SEQ ID NO: 256447 - DNA, 82 bp, Homo sapiens
gccacctgagtggcgcggcggtgtcagattggcggcagtaagcacacaatgaatgatcacctgcatgtcggcagccacgctc

SEQ ID NO: 256448 - DNA, 82 bp, Homo sapiens
cctggctcttgccctcatcctggttctggaatcctcagttcaaggttatatttcacactatgtgctgactgtatctacagaa

SEQ ID NO: 256449 - DNA, 75 bp, Homo sapiens
tccggatcgcattcacaaagtcgtcgtagtccgcaggagtcaggtgattatcctgaaccatccaggccaaataag

SEQ ID NO: 256450 - DNA, 98 bp, Homo sapiens
aggaactattttgttcgtgataaactggatcctgatatggctctttgccgaaatgctagagaaatgattgaggacctatccgacgcagccttcgccgc

SEQ ID NO: 256451 - DNA, 97 bp, Homo sapiens
caggaacagggacagcacctcatcccctggatgggggaccacaagatcctcatcgacaggtgtcatggagaaactccagctgggcccagagattctg

SEQ ID NO: 256452 - DNA, 98 bp, Homo sapiens
gcgatccgctggcgctagtctgaccctccgccaggcaaaaggaaggactttctgcagggcgactgcaccaaagcgaaacagaagctgaactggaagcc

SEQ ID NO: 256453 - DNA, 98 bp, Homo sapiens
tccttgactccatcgggcgcttctttggcggtgacaggggtgcgcccaagcggggctctggcaaggatctgaagaagctgaagaaaaacaggacagtg

SEQ ID NO: 256454 - DNA, 98 bp, Homo sapiens
actggatgatgcaatcaaagctcgacttctcaatcccaagtggccaaagactggaatcagccattttaccaagaaagttgggtttcttttactggcaa

SEQ ID NO: 256455 - DNA, 75 bp, Homo sapiens
attcagatccgagagaagcttgatcagttgaggacaaagatcattccactcagcctgggacgatggggaggaaaa

SEQ ID NO: 256456 - DNA, 50 bp, Homo sapiens
gtgctggaccgcttttacaatgcagatggagtttcgctcttgtcacccag

SEQ ID NO: 256457 - DNA, 100 bp, Homo sapiens
cccggacggtacttctgccactgctgctccgtggagatcgtcccgcgcctgccgagagcgcctgctcgctgtgcccccgggttatgacgacccccaataa

SEQ ID NO: 256458 - DNA, 111 bp, Homo sapiens
cggacggattcgattcaacggggttccggaccgcgctgcgctatggagcaggacctccacaaaaagtactcgtacatccgcaagaccaggcctgacggcaactgtttctat

SEQ ID NO: 256459 - DNA, 98 bp, Homo sapiens
cttttctgctgtctgcttgcagtgttgatggtggtggtgctggtcatcaatgttactcaggtagaggtttcctatgttattcgagatgaagtggagaa

SEQ ID NO: 256460 - DNA, 83 bp, Homo sapiens
cggcaggagagtccggccgcgacaggacggtcagcccaaggccaaccccactgtcactctgttcccgccctcctctgaggagc

SEQ ID NO: 256461 - DNA, 98 bp, Homo sapiens
gggaaagcataggccgtgccccgaccggactggacgcatttttatacatagggttttcctttggaatatggataaatacaccatgatacggaaactag

SEQ ID NO: 256462 - DNA, 101 bp, Homo sapiens
gtgcgggctgctgctccagagggcggagctcagcctgggcggcacagccagatgcgagatgcgtctctgctgatctgagtctgcctgcagcatggacctgg

SEQ ID NO: 256463 - DNA, 74 bp, Homo sapiens
tcagcagaaactgtacaaactgtcagatacaagtgttccatttggtttaaaaaatacttcaagtctcaggccct

SEQ ID NO: 256464 - DNA, 82 bp, Homo sapiens
gtgccacctcccgggacgctgcccacggcgtccccggtcgcggtgtaaagaagacattccagtgtgagctttgcagttacac

SEQ ID NO: 256465 - DNA, 74 bp, Homo sapiens
ttgttcctgcttggctaaatttctcaacaccacagtcagctaagtgaagaacagtccagactggcagcaagaaa

SEQ ID NO: 256466 - DNA, 100 bp, Homo sapiens
tccggatcgggggcaagcggaaggtgatgcccaagatggaccaggtttggtgcacctcgatttggaggaagtagggcagggcccttatctggaaagaagt

SEQ ID NO: 256467 - DNA, 85 bp, Homo sapiens
ggaacaagcaaggagtcatatatccttcatatgatccatcttagtgaagaattaggatacaggatacttttgtggaactctatgg

SEQ ID NO: 256468 - DNA, 100 bp, Homo sapiens
gccccatcttcccttcacacctgctctctgatgtaaaggatggagtaaatcaagcagcacctgcatttggatttggcagcagtcaagcagcaacatttat

SEQ ID NO: 256469 - DNA, 50 bp, Homo sapiens
cccgtactccagaaaacttgattgcagttgccaatacctatgcctgtaag

SEQ ID NO: 256470 - DNA, 82 bp, Homo sapiens
tttgacagaagtgaaaaatggggagaaggatatccagacagccctaagctatcaagtactagctccaactgcctattatgat

SEQ ID NO: 256471 - DNA, 98 bp, Homo sapiens
ttggatccgcgggacaagaaaattcatgcgatactgaacggctgtattcagtggtgtttcaagaaatatgtaatcgctatgacaagaaatacagctgg

SEQ ID NO: 256472 - DNA, 98 bp, Homo sapiens
ggctggataccactacatgcagcagcttcctgtggatatcttgatattgcagaacagcgcaaagatgagctggaacagagaatgtctgctctccagga

SEQ ID NO: 256473 - DNA, 100 bp, Homo sapiens
gaaattgaagccctcagcatggctttttacagcagcccggaaattctgagggtcatcatggtcacaggagaccatccaatcacagctaaagctattgcca

SEQ ID NO: 256474 - DNA, 83 bp, Homo sapiens
gcgttagccggcgtcttcgtttgggacgaggagaggatccaggaggaggagttgcagagaatccacattcatctcaatggaag

SEQ ID NO: 256475 - DNA, 98 bp, Homo sapiens
acatctgggttgaaggtgatcatcatggacacagttttgacagtaattcttttgggccggttcaaaccttgtactactcagctgatcacaagctgctt

SEQ ID NO: 256476 - DNA, 97 bp, Homo sapiens
ctgctggacccggcctgggagaagcagcagcgcaaggcctgtttaaagaagaaaacccgtatgctagatttgaaaacaactaaagcgctccagcaca

SEQ ID NO: 256477 - DNA, 132 bp, Homo sapiens
aagatccgcagctccacgcagcaagacccgcgccgccgggacccccaggacgacgtgtacctggacatcaccggtatagccaggctggagaaaagaagctgccaccatggttgcactttcactgaagatcag

SEQ ID NO: 256478 - DNA, 83 bp, Homo sapiens
caaaaacttaaattgtggaatgataaagcttcaccaagaaggttgcccaggaaacgggcacagaagagatcagtgggatctga

SEQ ID NO: 256479 - DNA, 98 bp, Homo sapiens
acttattgcctatgctgtattccataatatacagaaatctccagagaagtcctattctggtgaaaacacagctagtgccattgcccgttctgctgccg

SEQ ID NO: 256480 - DNA, 100 bp, Homo sapiens
cacccagtactcgaacaacatccggcagctgctgcacaacttccctcctgaccaggttcctggtgcatcgatactctgtgctgcagcagcatgcagaggc

SEQ ID NO: 256481 - DNA, 51 bp, Homo sapiens
ggcagtgtggttgcacgagctgaagattatgtttgagaccttcaacacccc

SEQ ID NO: 256482 - DNA, 83 bp, Homo sapiens
gtccctttaaggcgacggcgccttcctcgggtcagactaccggcggcgacgaccacaggaggagtccaatgtgctgattgctg

SEQ ID NO: 256483 - DNA, 100 bp, Homo sapiens
caattcaagaggaggagaggggttgttttataaactgcctggccgaatcagccttttcacgctcaagacaagttggatggcttgaggactggtactaaaa

SEQ ID NO: 256484 - DNA, 75 bp, Homo sapiens
ctgggaagcagcactgttactcaggaaacctcgacctgtctcccagttggttgcacagcaggttactcagcagtt

SEQ ID NO: 256485 - DNA, 74 bp, Homo sapiens
tcacccaccaacaacaccacaataatccacagccaagatgaagatcagcttcgtgcaaagggttatgacaaaac

SEQ ID NO: 256486 - DNA, 82 bp, Homo sapiens
cctgtctctgccctcctggcgggcccggcggctctcactatccaggtcatcatcagatttgaaatatttaaagtggatacaa

SEQ ID NO: 256487 - DNA, 95 bp, Homo sapiens
ctcggagatcatttgggagatccaagagattcagtatcactcgctcccttgatgatcttgagaaattctccagaatttcagaaacttctgggcat

SEQ ID NO: 256488 - DNA, 75 bp, Homo sapiens
ggcggcggtcgccccggggctccggcggcggtgcagggctcgcggcctggcaagaatgtacagctgacagagaac

SEQ ID NO: 256489 - DNA, 101 bp, Homo sapiens
ggcgacgaaccttggagagaggagaacgaacatcttctggacctttgtccagtcccggccatgatcacttcccaccccaacaccaccatcgccatcaaggg

SEQ ID NO: 256490 - DNA, 101 bp, Homo sapiens
attttatctcctcccacaccttcgtccccatcttgggcattcatgggggcgcatctatgatcatggctgacaagaagaagccattgaagatgttgaaggac

SEQ ID NO: 256491 - DNA, 100 bp, Homo sapiens
gatccgcaaggccgcccgggaactgctgacgcttgatgagaaggacccacggcgtctgttcgaaggtttacatccccaccagacaccagctcctctgccc

SEQ ID NO: 256492 - DNA, 119 bp, Homo sapiens
acagtaaaaacaaaagaaaggcaagagaatacttactagttaaaggtttctgagtcccttcaacatgatcctgggaggaatcgtggtggtgctggtgttcacagggtttgtgtgggcag

SEQ ID NO: 256493 - DNA, 100 bp, Homo sapiens
cacatatcaggaccgagtggccccgccagggtctccgtctctccaccgggggcttcatccttccagggaggagaagagggactccagaatggctgaggag

SEQ ID NO: 256494 - DNA, 82 bp, Homo sapiens
ataagtggaattttggagatattcaaagccatcactggtgcaagctatatttaacggagatcctgatgaagttcgagcacta

SEQ ID NO: 256495 - DNA, 50 bp, Homo sapiens
ggcctcgccatgtcctgctgcccggtactccaaagattcaggtttactca

SEQ ID NO: 256496 - DNA, 80 bp, Homo sapiens
caaagaccttcctggcctgccccagacagagctgaggacccctggccgtgggcttggtgagaagccctaccactgcaact

SEQ ID NO: 256497 - DNA, 50 bp, Homo sapiens
ggtcacaccttcagtccttcgagcaatgagagaaccaccaccaatttgcc

SEQ ID NO: 256498 - DNA, 88 bp, Homo sapiens
ccccggccgcggcgggacccgaggcttacggagttcctatgctagtcagcatagtcagcttgggcaagaccttcgttctgccgtgtct

SEQ ID NO: 256499 - DNA, 82 bp, Homo sapiens
aaaaacgtgtgggtacgaccttggcccagagacggaaagtacaaagactagtaaaatacatccttgcccttaaggagctaag

SEQ ID NO: 256500 - DNA, 89 bp, Homo sapiens
cggtggagcatgagtctggctgaaggaagaggcccagcagaagggactcgctgagccaccccccgccccactccatgttggctgtgctc

SEQ ID NO: 256501 - DNA, 132 bp, Homo sapiens
tgccctttaggatttgttagaaaggagacccgactgcaactgctggattgctgcaaggctgagggacgagaacgagctgttccatttcctccaagtcaccggcttacagcaaaagaagtgtttgataatgat

SEQ ID NO: 256502 - DNA, 100 bp, Homo sapiens
aaaataaagctccaggattagggaaagtcaatgtctgaccagtgcacaggacttcagggcttcctggtgttccacagctttggtgggggcactggctctg

SEQ ID NO: 256503 - DNA, 82 bp, Homo sapiens
agaccctggagcctcagttggaagcagccgatccagcctgcggagcctgtggggcagtgactctgacagttggcagtgtgaa

SEQ ID NO: 256504 - DNA, 75 bp, Homo sapiens
gcagtggtcgcttcttctccttggtgaccaagaatatggcccaggtgaccaaagccctggacaaggccctgagca

SEQ ID NO: 256505 - DNA, 73 bp, Homo sapiens
tgatgggagcaagttgactaccaccagtggagtccaggatgaggtcctgctcaggttccaatgatgtccccaa

SEQ ID NO: 256506 - DNA, 87 bp, Homo sapiens
ctgtccccagagcctcagtttgtgcaggacaccgacatggaacagggactcactggggatgtgatgtttactgggacagcagatggc

SEQ ID NO: 256507 - DNA, 100 bp, Homo sapiens
ctggagcgtcgggccaggaagacggagaactggagccccaaaggcttcctggagagctacgaggagatgctgagctatgccctgcggcccgagacctggg

SEQ ID NO: 256508 - DNA, 82 bp, Homo sapiens
atggcaccgtcactctcaaggatctccgtgtagaactccttggagaggatctaggggtgtttattcctgctcctatggctca

SEQ ID NO: 256509 - DNA, 100 bp, Homo sapiens
agaagccccagctgcactacgcgtgatacctgcaatatatcagacagaagctgatccattagctcaggttcgtcaggtccagagggaagatgacatggac

SEQ ID NO: 256510 - DNA, 75 bp, Homo sapiens
atagcaatctggttttcttgggtgccagatgcaattaaaaagtgtcagagggctggaattactgtgcggatggtc

SEQ ID NO: 256511 - DNA, 51 bp, Homo sapiens
gcactcggagcttctacagaagagatggggtttttccatgttgcccaggct

SEQ ID NO: 256512 - DNA, 74 bp, Homo sapiens
cggagctgggcgcggattcgccgaggcaccgaggcactcagaggagggccaattcctgtccccccagcagcatg

SEQ ID NO: 256513 - DNA, 100 bp, Homo sapiens
cttgtgaccagttgggatggacaaaacccaccaagatccagattgaagctattcctttggccttacaaggaattcagagcctctgaattgcttcgaagtg

SEQ ID NO: 256514 - DNA, 100 bp, Homo sapiens
gagcaagaagcagcccaaagtcgaatgattcagacttgcaagagccataagtgtgatccttggtgacaggtggaagaaaatgaagaatgaagagagaaga

SEQ ID NO: 256515 - DNA, 76 bp, Homo sapiens
ggggacgaaacaataaagaccggaagctgagtttttatccatatattcgactttatgggagaaaatttagcaaaga

SEQ ID NO: 256516 - DNA, 82 bp, Homo sapiens
tgagcaagcccaggcacagccgacgccgcgggcgtccgtctccaagagagtatgaagagagtgcgtctgtagggcagggaag

SEQ ID NO: 256517 - DNA, 74 bp, Homo sapiens
gatggctctcttcgctggtggcaaactggcagttgtgaaaaacttcaggacaaaaatgtttcatttaaggactt

SEQ ID NO: 256518 - DNA, 100 bp, Homo sapiens
ggaacgtaaacactcgaagagctacacagcgggatctggacaacgctggggagttggggaggagtcgggtttttgccaatccagaagactgtgtagcatt

SEQ ID NO: 256519 - DNA, 75 bp, Homo sapiens
acagctgttccttggccatcccaaagctattctgggggcaacagagggagataacctaattactgagtgtcgcta

SEQ ID NO: 256520 - DNA, 74 bp, Homo sapiens
aagaattcatagatttcagtgatacaggtatgcttcagaagtgtccttctgttgatgacttcgtaagtgccctc

SEQ ID NO: 256521 - DNA, 90 bp, Homo sapiens
tggatgagtatgatgaggacaagaaccccagtaagtggggcagcgtgagcaatccactcttcctcccgctgatcccaccacagtctcaag

SEQ ID NO: 256522 - DNA, 82 bp, Homo sapiens
agaaattggaccatacactttctcagatcagaatacagattctgttcatcttgctctgaaattaaataattctgaactcatg

SEQ ID NO: 256523 - DNA, 82 bp, Homo sapiens
ggacgagcggccgtgtattgatcagctcctgtactcccaggacaagcacgagtactacagcctggtccgacccccagtggca

SEQ ID NO: 256524 - DNA, 50 bp, Homo sapiens
acagaaagcacagtgtttccaaggaactttatattgctgttggaatatct

SEQ ID NO: 256525 - DNA, 50 bp, Homo sapiens
ccccggacttcggtgtgaatttcttggccaggctgactgagagatttgtg

SEQ ID NO: 256526 - DNA, 100 bp, Homo sapiens
gcgggagcgcggcgcgggagcccgaggctgagactcaccggaggaagcggcgcgagcgccccgccatcgtcccggaagcaatgaggctccccaagaacac

SEQ ID NO: 256527 - DNA, 82 bp, Homo sapiens
cgaggctcggagaaacaggcgccgcgggctccgcgcccggccggacccgggcccgaggtgaaagaaaatggcccgaaccaag

SEQ ID NO: 256528 - DNA, 75 bp, Homo sapiens
ggaggagccgatactgagcttcttcctatttgccatggtttggaaattttagcattcaggtgccaggaatgcaga

SEQ ID NO: 256529 - DNA, 75 bp, Homo sapiens
aggctccaagtagcctgtataccagcacggccagcttcaattagtggagacacaggggttatccacgtagtagag

SEQ ID NO: 256530 - DNA, 101 bp, Homo sapiens
ggcccagcgagttggtcggtcccggggtcacccgctacgggaagcaggcctcgccacaggaattcctcctgatcagcagagactgatctttgctggcaagc

SEQ ID NO: 256531 - DNA, 100 bp, Homo sapiens
ctggttactatcaaaaggagcggggtcgacggtccccactttcccctgagcctcagcacctgcttgtttggaagcatctgatacagcagttcctgagcag

SEQ ID NO: 256532 - DNA, 98 bp, Homo sapiens
cagggtgtcaggactaagagaagtcacaaaacagcagatttcccaagagcagcggaaaatgatccagtcacagtgttgacccgaatgatcagaaaaag

SEQ ID NO: 256533 - DNA, 82 bp, Homo sapiens
ctgatattaagccatcaaatgtggaacctatggaaaagaaaccatactcaggaggtctttgtctccaagaaacagcccggga

SEQ ID NO: 256534 - DNA, 90 bp, Homo sapiens
tgagccgcgctgcgcagccgacgcgggaatgaagcgggcgctgggcagagtgcagcagctgccccgagccccgtgcttggcaacattccc

SEQ ID NO: 256535 - DNA, 100 bp, Homo sapiens
ctgggacggacactgccttggggtggtctaaacaaccttcccaaagctacactttatttgaatcggttctgaagtaacggaagctaccttgtataaagac

SEQ ID NO: 256536 - DNA, 101 bp, Homo sapiens
ctgacatcgcgacgctgctcaaaacctcgctccggaaaggggacacctggatgatgaagataaactgacctggaaggatcgtttcccaggttacctgatga

SEQ ID NO: 256537 - DNA, 90 bp, Homo sapiens
tggctggctggatctctggtgagacatttttcttccttctgtcacatcacacccaatgcgtcagcttttctttcgcaaaaagctgcttca

SEQ ID NO: 256538 - DNA, 75 bp, Homo sapiens
taggcttgctggcccgcggggctgtccaggcacgcgaggcccctcaggtgaggacaccagtgatgaattctgaag

SEQ ID NO: 256539 - DNA, 100 bp, Homo sapiens
agatgttatcatgagggaattccggtcagggtcaagtcgtgttctgatcactactgacttgttgggccgttgctccagggagaactgcaaatatcttcat

SEQ ID NO: 256540 - DNA, 51 bp, Homo sapiens
tcacactgaccttcaacgttgggcaggaggagatgttaaagtaacccatct

SEQ ID NO: 256541 - DNA, 75 bp, Homo sapiens
gactgtgcccctgtggaaggagaaactatgttccaacttcctgtcaacaatcttggcagtttaagaaaagcccgg

SEQ ID NO: 256542 - DNA, 100 bp, Homo sapiens
aagctcgcacatttgacttggaagcaatgtttgaacaaactcgaagaacagctgtggaaagaagttgcaaaacactggaatgctgcttctaaattacttg

SEQ ID NO: 256543 - DNA, 75 bp, Homo sapiens
cgagaaggtggacgtgctggtgtctgagtggatggggacctgcctgctggcgggagacactatattcaatcgtgc

SEQ ID NO: 256544 - DNA, 100 bp, Homo sapiens
ggaagtgcttggggatggagtgcctccaaaggttgctgaggtagatttcgggcagacaacttgaacaagctgaagaacctatgcagcaagacaatcggag

SEQ ID NO: 256545 - DNA, 90 bp, Homo sapiens
tgaaatccatgctcagagatgccaagaagaatctagacagacaggcctttctagtttgaaagatgatgacagtggggaccatgatcagaa

SEQ ID NO: 256546 - DNA, 74 bp, Homo sapiens
acaggggccccgaagaactcccacaatgccacaggaggaggcagcaggtatggatcctggcgggagccagtcaa

SEQ ID NO: 256547 - DNA, 83 bp, Homo sapiens
accaacagatgaagacagatgcaccaacgagggaaatcctcattgacgattcaatttgttgaaggccaatttgtggactccta

SEQ ID NO: 256548 - DNA, 100 bp, Homo sapiens
ggcggagacggagcggggcctgtccaggaagcacataatcgaaggtgggaagaagagcgctatcctgaaggcatcaagtggaaattcctagaacataaag

SEQ ID NO: 256549 - DNA, 83 bp, Homo sapiens
ggcggccccggccgcctccgcgagggcaccatggaggtgaatgcaggtctcctccgggctggggctgagcaagccctcggagt

SEQ ID NO: 256550 - DNA, 101 bp, Homo sapiens
agcgtatgtgccacgccgcccaggagacccctctgctgcaccacttcatgcctcctgacaaggtgatccgggcgggccccgcaggaattttatcccctcac

SEQ ID NO: 256551 - DNA, 100 bp, Homo sapiens
aggtggaaaatattgccttggggaaaggaaacggtatcgctcctgtaacacagataacattcctgatgtagatgaagaaggctacagtattaaaccagaa

SEQ ID NO: 256552 - DNA, 74 bp, Homo sapiens
accacctgccagtctgaagcaccgagatggtgacttaagagattaaaattaatttggttgctgttggttctgaa

SEQ ID NO: 256553 - DNA, 82 bp, Homo sapiens
ctttgtctccttcgacttggagtctttgtccaggacggcaaaatacatatctcagtgcattgatgagatcaagcaggagctg

SEQ ID NO: 256554 - DNA, 51 bp, Homo sapiens
gcgggacaagaaaattcatgcgaggccatgtggaagtgttacatcaccttt

SEQ ID NO: 256555 - DNA, 51 bp, Homo sapiens
aaagatgcgcctctgcgatttgcaggtgagagatcaagcccagcgctgttc

SEQ ID NO: 256556 - DNA, 100 bp, Homo sapiens
tgaagcagttctgtgtatccaacattaatcagaaggtgaagtttcagattttaccaaatgttgcaagaactctggagttcttatggtagtaaaatgccgg

SEQ ID NO: 256557 - DNA, 75 bp, Homo sapiens
tccaaggaagccacgtgcagacatctacaaccttcgatctcctgacgagagccagcaccgctctttgaccttgcc

SEQ ID NO: 256558 - DNA, 75 bp, Homo sapiens
agtccagcacggccaagtcagccacctggacggtctcctctgagcctccggcctccataagacccaaaacagatg

SEQ ID NO: 256559 - DNA, 75 bp, Homo sapiens
gcgggcgcagccctttgcgcagccgccgggaccctggcccctgtcgaggtgggcctgggtcctccaggatgccct

SEQ ID NO: 256560 - DNA, 71 bp, Homo sapiens
agggcctaatgacaggtcagatgtggagaaaggagggaagagtaaaatgtcggttccaggaccttaccagg

SEQ ID NO: 256561 - DNA, 75 bp, Homo sapiens
tgctttaaaacagtattacttgcgctgagatctgtatctgtggacctgaatgttgatccctcgcttcagattgac

SEQ ID NO: 256562 - DNA, 132 bp, Homo sapiens
aagaaaagggcgtcttagatctgtcgtatgggccaggaccaagcctccgccctcagagaaattcggcgccttcatcagtatgtgaaatttgctgtccaagatgtgaatgatgttctagacttggagtgggat

SEQ ID NO: 256563 - DNA, 96 bp, Homo sapiens
gggcagggagctggacctggaggcgccgccgcgacagcagcagccatggaggacgagatgcccaagactctgcagactcagtgggatcctcctact

SEQ ID NO: 256564 - DNA, 98 bp, Homo sapiens
aactggagccgaggcgcaggtggcgctgggcgaggccttcttgggcagctttgtggccagcgggatggggccctcggcctcgtcccatgggagcccag

SEQ ID NO: 256565 - DNA, 87 bp, Homo sapiens
gagaaggatgacaccggagtttgacgaagaggtggtttttgagacacgatgaggcgagtggtacgacagagcaagtttcggcatgta

SEQ ID NO: 256566 - DNA, 83 bp, Homo sapiens
ggcgcgggcggcggcgccggcaggaagggcgaagctgtgctcaggcccgggctggacgcagagccagagctgtccccagagga

SEQ ID NO: 256567 - DNA, 100 bp, Homo sapiens
ataaatgaaatcttcctaagtatagaatttcagaaactgtggaggagtgtcactgtagattccatggacgaggagaaaattgaagaatatctgaagcgac

SEQ ID NO: 256568 - DNA, 98 bp, Homo sapiens
cccaaacttcttaacccctagaccggtttttagtccattgactatgcagcctaatgggtgtgggccgaagatatgctcatgtggtgttgaggaaagca

SEQ ID NO: 256569 - DNA, 83 bp, Homo sapiens
gtgcagaagatctgggtgcccgtggaccacaggccctcgttgcccagatgttgtgaccgagattcccgacgagagagactgag

SEQ ID NO: 256570 - DNA, 109 bp, Homo sapiens
cgcccgggaggaaggaacgaggcaaggagctaaagcagcgtgcgttcagccctgggaaactatgttccaacttcctgtcaacaatcttggcagtttaagaaaagcccgg

SEQ ID NO: 256571 - DNA, 75 bp, Homo sapiens
gctggttgttccgttgcgagctgcagctgcgatctctgtggtaggcccaggaaaatgtttataggaggccttagc

SEQ ID NO: 256572 - DNA, 89 bp, Homo sapiens
aacagatgaagacagatgcaccaacgaggaacctgaggatcagctttactatgtgaaatttttgtcactcccagaggtgagacaagcca

SEQ ID NO: 256573 - DNA, 109 bp, Homo sapiens
ctacagccaaacatgcaggactctagtaacccgcgaaatgatgggatagcgttgcaaatccttaaaagagtcttaacggaaaatgtttataggaggccttagctgggac

SEQ ID NO: 256574 - DNA, 100 bp, Homo sapiens
ggctcagaccgtgcagaatgttacattgtcgctcactctgcccatcacgtgccacatttgcttggggaaggtcatgatgatgggcagcgcccgagtggcg

SEQ ID NO: 256575 - DNA, 50 bp, Homo sapiens
cgcgaagacgcccagctccaagagttggccaagaagtacctgcagctcct

SEQ ID NO: 256576 - DNA, 100 bp, Homo sapiens
ctcaaagccttcactgtgtgcctccacttctacacggaactgtcctcgacccgtgggcccctgtaaagatagctgtcattttcaagcagctgagagttct

SEQ ID NO: 256577 - DNA, 99 bp, Homo sapiens
caatccattcaggatgggaaaccacgcaggcaaacgagaattaaatgccgagaaggccagtacggaaatgacttaatcgtctttttggcagaccagaat

SEQ ID NO: 256578 - DNA, 100 bp, Homo sapiens
ctattccactggattgggaaagaccatggcaggccatttggatatggttcgctttctacttgaagctggtgcagatcaagagcacaaaacagatgagatg

SEQ ID NO: 256579 - DNA, 111 bp, Homo sapiens
gttacattgtagcaaaatggcgactgtcattcacaaccccctgaaagccctttctgagaaaagtctacagcattctttctctgcaggttctcttaactacagtgacttcaa

SEQ ID NO: 256580 - DNA, 83 bp, Homo sapiens
gaaacacatttcaccttcaaagacctatacttcaaacatatctgaagagatggattaagaatgctttggattaaggattgtgg

SEQ ID NO: 256581 - DNA, 75 bp, Homo sapiens
ctacctcgaagtcgcacacatctccaggtcctggacccaagccagaagcctctgcaaagcttccttccagacctg

SEQ ID NO: 256582 - DNA, 75 bp, Homo sapiens
ttccagaaactgcgaggatccgagcgtactgtttgtgcaccacaaggattttttatcaagcagaaatgcatcgaa

SEQ ID NO: 256583 - DNA, 82 bp, Homo sapiens
ggaagatggcggcgggggcgagagggtcttacagacgtcattttataccaccaaccggatgacaagaaaaaaaacagaggct

SEQ ID NO: 256584 - DNA, 73 bp, Homo sapiens
aaacaccattgaaagtaagatggtcactctccaccgaatgggctgactggaaataccggcatgcaggattgat

SEQ ID NO: 256585 - DNA, 74 bp, Homo sapiens
gcaatggtctcaatctctggaaaaacttcttgccaaccaaaagcattgaatgaaatgtggaaatgtcaaaatct

SEQ ID NO: 256586 - DNA, 83 bp, Homo sapiens
ggcggctgccgagaaggagggaggggaaacacaaagccggctacgcgctgcgagatgcatcatcccattcagatgaaacctgc

SEQ ID NO: 256587 - DNA, 100 bp, Homo sapiens
gctccaccatcgtccccggcgagcagggagcggagtaccagcacttcatccagcagtgcacagataatcttgtgccgtggaaatcagaagggcaaaacga

SEQ ID NO: 256588 - DNA, 126 bp, Homo sapiens
ctcgtgcttcgggatggaaacctatggttatctgcagagggagtcatgctttcaaggacctcatgtaaggttcttaatgccatcgaagacaatggtttaaagaactcaacattcacgtatttcacc

SEQ ID NO: 256589 - DNA, 95 bp, Homo sapiens
cgcccggcagctgccccgtctgagaagtaccctgctgactgctcactccccaactcctgtcgccccccacccggtcactgtgcccacgtaccggg

SEQ ID NO: 256590 - DNA, 75 bp, Homo sapiens
gatttcttctgacttgagcctgcagtgtgctgtgagagatctaccactagatgggcttaggtcacgagcaaggat

SEQ ID NO: 256591 - DNA, 89 bp, Homo sapiens
ccccaaactgcaagaatacctcggcaaattccgacgtcttgaagacttccgagtagatctttggcagcatgtaagcagctgtttgccaa

SEQ ID NO: 256592 - DNA, 100 bp, Homo sapiens
gagatgtacggatgcccccatcttgatcttacagaatcagaggtgcagccgcaagaaaggtctgacagtcattttgtttactcattcagccctgttgcag

SEQ ID NO: 256593 - DNA, 96 bp, Homo sapiens
agacagtgttctgctttcatggagttcacagaagagtcgaggaggtttcacaaaatgtccaggccagaagttcagcttttggttctttccagtttg

SEQ ID NO: 256594 - DNA, 136 bp, Homo sapiens
cctctcaaggcccctagaaaggttggagctgccgccgcctgcagtcggtgaccgcgcgactcggcgcccgcccgcgcctttctgagaaaagtctacagcattctttctctgcaggttctcttaactacagtgactt

SEQ ID NO: 256595 - DNA, 51 bp, Homo sapiens
ccattttcttcagcctccttgtcctagtgctgattcctaaagaaaagcccc

SEQ ID NO: 256596 - DNA, 90 bp, Homo sapiens
cctgtcgagagatagagaatgggcgggctttaatgactgatgaaacaatatccaatgtgccaatccttatcttgggtaacaaaattgaca

SEQ ID NO: 256597 - DNA, 100 bp, Homo sapiens
tggaagataaagtcctatttgaacaagcctttagttttcatggaaagagctttcacaggattcagcaaatggtttttgccaatccagaagactgtgtagc

SEQ ID NO: 256598 - DNA, 100 bp, Homo sapiens
gatccagtccccacaggaatgggaggcgctccaggccctgacgggtctgactgcgtaccatgatatctccctggacaagtgctatgtcatcgaactcaac

SEQ ID NO: 256599 - DNA, 82 bp, Homo sapiens
tgaatatgaactggctcagtttatcacttcctgaaagacctgaaggatcataaaaggattcctctgtactagcacactcccc

SEQ ID NO: 256600 - DNA, 75 bp, Homo sapiens
agataatgacaaagccagctgtgaggactacctaatgatttcgtgtgtgtcaaggatgccacaatgccatcgacc

SEQ ID NO: 256601 - DNA, 100 bp, Homo sapiens
gtgacattggctgacatcacagttgtctgcaccctgttgtggctctataagcagagtacaggggctcaggtccaggtggcaggggatatgctacccaact

SEQ ID NO: 256602 - DNA, 74 bp, Homo sapiens
ttggttcgtgctggactacaatgcaggactgctctcctactacacgatggaagtttactgttctgattttcatg

SEQ ID NO: 256603 - DNA, 100 bp, Homo sapiens
tctgggatgttacatcccaggccacgctgctcaccatcactaaaccgtcaacaaagatgtggacgcacaggctgaaggagaagggagccgcccatccatg

SEQ ID NO: 256604 - DNA, 100 bp, Homo sapiens
tgtacatgttgtaaaagagcaaaatccaccacctgcaagccatgatggtgatgataagaaaaggccagtgattgttcatcgagccatcttgggatcagtg

SEQ ID NO: 256605 - DNA, 100 bp, Homo sapiens
tccagagtggctgggattacagcctggcacctgtgtttgctctgtttgtaccattttactgctccataccaagagtccaagtggcacaaattctgggtcc

SEQ ID NO: 256606 - DNA, 101 bp, Homo sapiens
ggccgtacgcggtgctgcgagggcagaacctggtatgaagagttaatggaagcctttaaaactttgcataaagaatatgagcagctcaagatatctggatt

SEQ ID NO: 256607 - DNA, 101 bp, Homo sapiens
tacaacgaaggtgaagccacggaagataagggacaatgactcattcttcccaggacactggttcttgtggcattcaggaagatggaaagctttatgtggtg

SEQ ID NO: 256608 - DNA, 100 bp, Homo sapiens
tgacactcgtgtccactgctgcctttacttcatctctcccacaggacactcggctttcagcaatcgtgagaccgtctagtataagacagagcacgaaagg

SEQ ID NO: 256609 - DNA, 75 bp, Homo sapiens
gtcttcagttaatgagagacctattggcaagaggaggaacgacgtagaagagaggaagagatgatgattcgtcaa

SEQ ID NO: 256610 - DNA, 100 bp, Homo sapiens
ccccttctctgaaccacactcactgcctcatgcaagatgtctttggtggacttgggaaagaggttgctagaagcagcaagaaaaggccaagatgatgaag

SEQ ID NO: 256611 - DNA, 96 bp, Homo sapiens
agagcctcattatctaccacccgagatgccccaaggtggtgcccaggcaacatgggtgactggagcgccttaggcaaactccttgacaaggttcaa

SEQ ID NO: 256612 - DNA, 96 bp, Homo sapiens
attcaccttcctgcagcagtgctgcttaaggagatacatatccagcctcatcttgcatctcttgcaaatcctactatgttgacagacatgatgaaa

SEQ ID NO: 256613 - DNA, 100 bp, Homo sapiens
ctgatctccatgtcctgttgtggggcttttacagcctttgggattgccaaggatccaagatttgaacgattaccatgtacacacaaaggaacctatgcag

SEQ ID NO: 256614 - DNA, 76 bp, Homo sapiens
atggtggaatattgtatacctggtttacagattggtacccgagaactggaagagatgggagcaaaattttgtgttg

SEQ ID NO: 256615 - DNA, 100 bp, Homo sapiens
ttcctgcatttttgcttcagagtaatccatatgtaaagcttgaagtacatctggattccttatgtgtgcatgttagcagcatttggtgtatgttctcccg

SEQ ID NO: 256616 - DNA, 75 bp, Homo sapiens
cttgaagaagtcttatgccctcccaatggtagacggaggagaagtccatccccaccacccaccagaaggcgacgg

SEQ ID NO: 256617 - DNA, 90 bp, Homo sapiens
gcagttggctgcgtcatttttgaactgcttaccttaaagaggacgtttgatgctacatctgaggacccagaagaagatgccaggttaaag

SEQ ID NO: 256618 - DNA, 100 bp, Homo sapiens
cgctcctgctgccgttgctgggcctcgccgctgctgccgtcgcggactgagaactatgagcagagaatacgtgaacaacaggaacagctgtcacttcaac

SEQ ID NO: 256619 - DNA, 100 bp, Homo sapiens
tttgggaccgtggctgctggcatggtgttggacatcgtgcaggctgattcaccccaagagtggccgttcctaccacgaggagttcaaccctccaaaagag

SEQ ID NO: 256620 - DNA, 51 bp, Homo sapiens
cgggactatgtgtgcacctggcaagacgctgaccggaaaggagattgagat

SEQ ID NO: 256621 - DNA, 95 bp, Homo sapiens
taaaaatacaaactggaaaataaagattacagagaaaaaaccaacaccttcctgtgcagtcctgttggaatttggtctcactctgttacccaggc

SEQ ID NO: 256622 - DNA, 98 bp, Homo sapiens
ccgatggccctgggtcctcgctgtggggcaatccgggcttgcagacgaggttcacgcaaagaatctgctccacaagttttgcttccagaagaagagaa

SEQ ID NO: 256623 - DNA, 75 bp, Homo sapiens
ttacaaacctccccatcaacgccaggaggaaaagctttctcaggaaaaaggtgaatctggattgggaaagtcgac

SEQ ID NO: 256624 - DNA, 90 bp, Homo sapiens
ggaggaggtcggctcagccgggcagtttgaggagctgctgcgcctcaaagccaagtgaattatgtaacctcattacgctggatgtagctc

SEQ ID NO: 256625 - DNA, 83 bp, Homo sapiens
ccttttcgaccttcaatccagttccaaggactccacgggatgtgtcagaagaattggatacaaaactccctcttgatggtgga

SEQ ID NO: 256626 - DNA, 97 bp, Homo sapiens
cagaacagttggatcttgctcagtctctgtcagaggaagatcccttgggtgaggacgcttgagcggaagttagaagcaaaaatgatcaaggaggaaa

SEQ ID NO: 256627 - DNA, 74 bp, Homo sapiens
ttccgctcagcacatcacctcaaagtgcatctgcgagtgcacacagataaatcttgcttccagccactgtttca

SEQ ID NO: 256628 - DNA, 51 bp, Homo sapiens
aaagccccgcctctgccttcggataggaggccttacatcgggaacaaatgt

SEQ ID NO: 256629 - DNA, 100 bp, Homo sapiens
acacccgctacaaccaagagacaccaatggagatctgcctcaatggaacccctgctctggcctacctggcgacatcaacgagtgtgatgaggccgaggct

SEQ ID NO: 256630 - DNA, 100 bp, Homo sapiens
cttttttatctcatattagtgcctgtgatggcatctttcatctaacacctgtgaattcctttggacaattgatgatatttatcattgtgcccagtttcta

SEQ ID NO: 256631 - DNA, 100 bp, Homo sapiens
gtgccgcgcagttaggcagcagcagccgcggagcagtagccgccgtgggagggagccatgaagcattacgaggaaccagtgaccttccgggatgtggctg

SEQ ID NO: 256632 - DNA, 101 bp, Homo sapiens
atcagttgttgcatgaagcaagacggtaccacatacttgggaatgaaatgatgtccccaaggactaggccacgcaggcacccaatatttgaaaggagagga

SEQ ID NO: 256633 - DNA, 100 bp, Homo sapiens
gtcccagctcggcccgcgggggagccccgggagccgcacggaataccaaattgacatattttttgctcagacctggacagatagtcgccttcgattcaac

SEQ ID NO: 256634 - DNA, 74 bp, Homo sapiens
aacgctttctgttcaagaggcagctgcgtatttaaaagcactaacataaatagtgactctccagttggaaaaaa

SEQ ID NO: 256635 - DNA, 100 bp, Homo sapiens
atgaagaagtgatgtgtttaaatggaaactggacggaaccacctcaatgcaaaggacagaatgacttggaagataacggagcttcgaagcttctagcaga

SEQ ID NO: 256636 - DNA, 100 bp, Homo sapiens
cacctcatgactagcggggcaggcctctaattcaccgcaggatttccgcttatcacacagactttcagccaccacaatcagctggcacagaagacccggc

SEQ ID NO: 256637 - DNA, 75 bp, Homo sapiens
tgaatgctacttggatgcctcttaagacattatgatctcaaccagctgctggagcctcgaagcataacagcagat

SEQ ID NO: 256638 - DNA, 100 bp, Homo sapiens
tacctgatgctggaccggggtcacttagactaccccaggaacccgcgccgcgagggctccttccctcaggagtggagtcaacatatcaatggagcaagtc

SEQ ID NO: 256639 - DNA, 100 bp, Homo sapiens
aatattgctgctaatattctgggagcaaaaactgaagacctgacagaagtgcagaatacagaaactgcagccatgaccacgcacgtcaccctggaagatg

SEQ ID NO: 256640 - DNA, 78 bp, Homo sapiens
tcggcgcctcattcgggtggagctgagccggagacaggagcatcagatccatgctgctgctgactcggagccccacag

SEQ ID NO: 256641 - DNA, 97 bp, Homo sapiens
actgctcctgctggccgcctggacggctcgggcgctggagggccgttgctccagggagaactgcaaatatcttcatccacccccacatttaaaaacg

SEQ ID NO: 256642 - DNA, 75 bp, Homo sapiens
ccttgtggaaatgatttcctcaggactccagattatctacaacactgatgagtggtatgtgtgcaacagagagaa

SEQ ID NO: 256643 - DNA, 83 bp, Homo sapiens
ccagcccgtgccgcgagcgcggcctgcaggagtgagacggtttaagcggaagcatcttactgccattgactgccagcatttgg

SEQ ID NO: 256644 - DNA, 130 bp, Homo sapiens
ggaactcctgggccaacatggggcaggagtgcatcaagtgccacatcaacgtgtatccacacaagcagggggccgaaggccagagaccaggatttggctacggaggcagagcgtccgactataaatcggc

SEQ ID NO: 256645 - DNA, 100 bp, Homo sapiens
cggcagtaccgcctccttcccagccgcgcggcttcctccagacctctcggcgcgggttgaaatcacaaagattagacacctttttagataggtgttcttc

SEQ ID NO: 256646 - DNA, 76 bp, Homo sapiens
aaggaaattggtacccctataatgggcagtgtctaccagatattgggtaagcttgatgattaccaggaacgaatga

SEQ ID NO: 256647 - DNA, 100 bp, Homo sapiens
gattagcttcgcagtctggaaagctttaggagttcacagtgtaaatgaaacccagttttgtgttaatattcctgctgtgagaaactttaaagtttcaaat

SEQ ID NO: 256648 - DNA, 100 bp, Homo sapiens
agtgccaaagtttaaaaaggaaaaggttcagaagcagaagacaagttcacagcctggtttggaaggtttgcagttgctgctcttcagtccaaagtagaac

SEQ ID NO: 256649 - DNA, 51 bp, Homo sapiens
gacttctgtaccctcaatatctgcggcaaacttgaagataaatcttttgac

SEQ ID NO: 256650 - DNA, 75 bp, Homo sapiens
gagaaattctggaataaatttttggagaataaatccccttggaggaaaatggtggaaccgtcccaaaatgtccct

SEQ ID NO: 256651 - DNA, 75 bp, Homo sapiens
tgaaaagcatgcccatacgattaaacctgccaccaaggatgacattgatcttgatgccttggctgcagaaataga

SEQ ID NO: 256652 - DNA, 85 bp, Homo sapiens
gcctcgagaactgtttgtgaagggcaccatgaaggacattcgtgagaacttccaggccttcatggtgaaacacctcttggagtat

SEQ ID NO: 256653 - DNA, 75 bp, Homo sapiens
cagtcccagcgctgtcgtgctcctctactcgattgctcgctgtaagcagctcatctgtgaccccagctacgtaaa

SEQ ID NO: 256654 - DNA, 103 bp, Homo sapiens
acctggagaagctgaccctgggcatcacgcgcatcctagtgccggtggtggtgtgcacattgagccccggtatagacagttcccccagctgaccagatcccag

SEQ ID NO: 256655 - DNA, 100 bp, Homo sapiens
cgaacagatggcactgtggaaatttataacttgtcagcaaactactttcaggagaaacatgatctatgttttggtgagctcttagaacaacacacagaag

SEQ ID NO: 256656 - DNA, 50 bp, Homo sapiens
ccacagtccacatgtcccggactgccccagagcacatcagctatgtgccc

SEQ ID NO: 256657 - DNA, 88 bp, Homo sapiens
tctcatcaaggtgaacgggcggcccctggagatgattgagccgcgcacgctacagtacaagctggcgttgcagacggggcgtgaaccc

SEQ ID NO: 256658 - DNA, 97 bp, Homo sapiens
ctaaatttctctccgatgtgtatcctgatggcttcaaagactatatcatcatgtacatagaaaaatccaaaggattctgcaaaaaagctactagaac

SEQ ID NO: 256659 - DNA, 82 bp, Homo sapiens
ggaacgaggcaaggagctaaagcagcgtgcgttcagccctgggtgggcctttggagtgacgctgtgggaactcatgactctg

SEQ ID NO: 256660 - DNA, 76 bp, Homo sapiens
gccttcagcttttggcagcatgaaagttagcaatgtggaagtcatgtatgactggatttctctttgtttacatggc

SEQ ID NO: 256661 - DNA, 98 bp, Homo sapiens
aagcaacagccactagtgggtttgccagtggaagaatgtatcctgtcaggtataatgtcagtgaatggcaagaaagttcttcatatggatcgaaaccc

SEQ ID NO: 256662 - DNA, 89 bp, Homo sapiens
atcaaccagagcagattccagcctccacatgtacatatatccatccttttacaatccctgctattattcgtccattcagcgtattgaac

SEQ ID NO: 256663 - DNA, 98 bp, Homo sapiens
ccgtcttcctatccttacccgacctcagatgctcccttctgctcctgggggacagccgcgccgctgctgcttttccgaagaggtgacttcgaccgagc

SEQ ID NO: 256664 - DNA, 100 bp, Homo sapiens
aggagttaggattgaatttgatgatgaaaatgatataaatgttggtggaactaacacagctgtaggaccccctggaacagctgtccctccacctactggc

SEQ ID NO: 256665 - DNA, 75 bp, Homo sapiens
tcctgctgccctcaaggtcgtgcgtctgaagcctacaagaaagaatgcagccaatcggggcttaaaagccagcga

SEQ ID NO: 256666 - DNA, 98 bp, Homo sapiens
gctaagaagacgtttggtttaaagaattaaaaggaagaacaacttaagagcttcttcaaaggaacttaaaaggagtctagaaaatccagcagaaagga

SEQ ID NO: 256667 - DNA, 80 bp, Homo sapiens
gcccccatgacatcctggctgggacggcagactgccagattcacttacagccccagctaattccaccaaacatggaggag

SEQ ID NO: 256668 - DNA, 100 bp, Homo sapiens
cacctctgagaagggagacgacgctgctgggtccgctgagcggggcgacccgaggagccgggtgtgggctgagccctgcctgattgatgctgccaaggag

SEQ ID NO: 256669 - DNA, 134 bp, Homo sapiens
gactctctgaggctcattttgcagttgttgaaattgtccccgcagttttcaatcatgacctgatggccaaaagaaaggaagaaaatttttcctctcctaaaaatgccaaaaggccaagacaagaagaattggag

SEQ ID NO: 256670 - DNA, 83 bp, Homo sapiens
gaggaggggctccggctggtctgtggtgaggcatgttatttgaaagcaattgagacgcaaccgaactttgcagtagcttggag

SEQ ID NO: 256671 - DNA, 51 bp, Homo sapiens
cacccccagacctcctcagctccagagatagagtttcaccatgttgtccag

SEQ ID NO: 256672 - DNA, 100 bp, Homo sapiens
gagagttccagttgcaccagcatctctttgatccggaacatgactatccaggcttgggcaagtggggaccagttactctccacaagaaaattcacacaac

SEQ ID NO: 256673 - DNA, 83 bp, Homo sapiens
ctgtgaccgccggatacttgctgtgtctgctttttcaacgtgggagaaggagttgcacaagatagtttttgatccccggtact

SEQ ID NO: 256674 - DNA, 100 bp, Homo sapiens
ggaaaaagcccgtgaggatgcagcccgggaaagagctaggctttaccctctgaacttctgatcgaaggtcatccctctccagcttgagtggatcaaagat

SEQ ID NO: 256675 - DNA, 83 bp, Homo sapiens
cagagattgagaatgtccatggatttgtttctcattctcatatttcaccaataaagattgtgtcagcagctaaggtgtgtgga

SEQ ID NO: 256676 - DNA, 74 bp, Homo sapiens
agcccccactccgaaggcggaagctagaacacttggagtttgggctttgcaaaactgagaacaaagccaagtcg

SEQ ID NO: 256677 - DNA, 83 bp, Homo sapiens
ctgcctcgcgcccgggagcaggaggagctgctggcgcccgcagatgggcgtgatggtgggcatgggtcagaaggattcctatg

SEQ ID NO: 256678 - DNA, 101 bp, Homo sapiens
ctgaggaaccatgtctccatccccgaccgccctcttctgtcttgcaactcctcactaagcaggacagcctggacatctacaatgaaagggatctcttcaag

SEQ ID NO: 256679 - DNA, 100 bp, Homo sapiens
gccgggaccgggaccgccgccgccgccgccaccatgaaaggcctaaagaatgtatttgacgaagcaatattggctgccctggagcctccagaaccgaaga

SEQ ID NO: 256680 - DNA, 79 bp, Homo sapiens
gggggttatggtgggaggagccgatactgagcttcttcctatttgccatgggctcctaactgggcaactcaagattctg

SEQ ID NO: 256681 - DNA, 100 bp, Homo sapiens
ccggttgctaagacttggcgaagcgctgcgctcgcgcccggatccctcaggcattgaagttgatatcgatgtggagcacggagggaaaagaagccgcctg

SEQ ID NO: 256682 - DNA, 100 bp, Homo sapiens
tataactttctgactgtgaaggagttcttggacctcgagcagagtgggactcttctggaagtcggcacctatgaaggcactggtgaaggtcaacgtgaaa

SEQ ID NO: 256683 - DNA, 75 bp, Homo sapiens
cgccttgccccttttggaacagaaacagtatcaccttttgccatgatagcatttctttcattggacagttcctta

SEQ ID NO: 256684 - DNA, 100 bp, Homo sapiens
gctgccctcggcgggcctggctggccccgcgcagagcggcggcggcgctcgctgtcactgccggaggtctaggcgttttacactgagattctccactgcc

SEQ ID NO: 256685 - DNA, 82 bp, Homo sapiens
gaaaaagaaaaagtagctgatgaagatgatgacacaacatttgcctgcaacaaggacagcggccagtggcactactttgatg

SEQ ID NO: 256686 - DNA, 100 bp, Homo sapiens
cagatcggaggtgttggttcagcaaactcttcagcggattcgacaatcagattgctgctctctgaacactatagtcgtcgaatctcacaagcgtacggtc

SEQ ID NO: 256687 - DNA, 50 bp, Homo sapiens
aggacactgtattatacggttactatacgagtaaccagctcataaatcac

SEQ ID NO: 256688 - DNA, 100 bp, Homo sapiens
agacatctttgatcaccagattcatgtatgacagttttgacaacacctatcagatgtcatctgggtgattctcagtgtggaggtgggtggacttttagga

SEQ ID NO: 256689 - DNA, 75 bp, Homo sapiens
ctcttgctccaaaaactctttcagtagcagcagcttttaatgaagatgaagatgcccgtgtatttaatgaaactc

SEQ ID NO: 256690 - DNA, 90 bp, Homo sapiens
gccgattcctcctccttggtcgccgcgtccttggctggcgttgtggacaacagtgagtatatgcggaatggagacttcttacccaccagg

SEQ ID NO: 256691 - DNA, 83 bp, Homo sapiens
cgagaccgtcctggcgcgatgcgtcaagtacactgaaattcatcctgagatgagggagtgcatccgccccaacccttttcccc

SEQ ID NO: 256692 - DNA, 100 bp, Homo sapiens
tttctcttggatttggctacacacttatagatcttctgcactgtttacaggcacaggtgtgtggaggtcattgcaaaggaaggacaaaacctgaaagagc

SEQ ID NO: 256693 - DNA, 76 bp, Homo sapiens
cagctggacccgctcaccatctacggcatccggtcgccatcatgaccgggtcctataacaacttcttcaggatgtt

SEQ ID NO: 256694 - DNA, 102 bp, Homo sapiens
gtgctggagtccgaagctgggcaaccccaggctctgcacttttcaggattagaagaggctgtgtatagaaacatacaagcttgcaaggagcttgcccaaacc

SEQ ID NO: 256695 - DNA, 100 bp, Homo sapiens
ctaggaatctatgatgctgatggtgatggagattttgatgtggatgatgccaaagttttattagatggctgttgacaggctgtcttagtagtgattggac

SEQ ID NO: 256696 - DNA, 73 bp, Homo sapiens
ttctatgattatgaagcaaacatgccagacagggaggatttccatgtcagctagaaaagttcatccagcctgc

SEQ ID NO: 256697 - DNA, 100 bp, Homo sapiens
cgtcggggatgtccccttcacgatgatttcaagctttttagatcagcaagccatcctgtttgtggacactgctgatcgcctggcctcgttagctagagat

SEQ ID NO: 256698 - DNA, 74 bp, Homo sapiens
cggacaaggcttttgaagactggctgaatgatgacctcggctcctatcaaggaaggaattacggagatatagaa

SEQ ID NO: 256699 - DNA, 83 bp, Homo sapiens
gtcccttatggctcagaggagtacttgcagctgagatctaaggtgtggagtttggagctcgtatggtcaacattgatggaaaa

SEQ ID NO: 256700 - DNA, 82 bp, Homo sapiens
tggatctctggtgagacatttttcttccttctgtcacatcacacccaatgggccttcaccgccctgtgctactctgcagacg

SEQ ID NO: 256701 - DNA, 100 bp, Homo sapiens
gacttaaggattgtctttgtacataacaagacaggtgatttggcttctgcacagttaggaggagcaccaaaccgatgggaggttttgtcagccacaccta

SEQ ID NO: 256702 - DNA, 104 bp, Homo sapiens
ccacatgttatttggctctgaccggatggagctgctggcgcacctgctgggagcctggggaggggccatggtgccaatgcacttactggggagactggagaagc

SEQ ID NO: 256703 - DNA, 83 bp, Homo sapiens
atgttcctcgtccactacgggcatcggccaagtcagaacttcgagcagccattgatcggtatgtgcaagagaagattgtgcta

SEQ ID NO: 256704 - DNA, 100 bp, Homo sapiens
gtgcaccttttcaccgccaaagaggtgtccttctccaacaagccctacttccggctttatgctgaaaaggtggccactagaggtctgtgtgccattgccc

SEQ ID NO: 256705 - DNA, 82 bp, Homo sapiens
cggaaaggggcccggcgtctgcctcgagactgaagaccggttttttattggcacctcagtctcaacattttcttttcggatt

SEQ ID NO: 256706 - DNA, 100 bp, Homo sapiens
tcatggaggagatccggcggcagggcaagctgtgcgacgtgaccctcaaggaggaaaaggcttctcttttacatcgtactcaggaagaaagaagaaagag

SEQ ID NO: 256707 - DNA, 50 bp, Homo sapiens
agctcttcttgccttgccaagttcaaaatcaaaggaagcccagaagggag

SEQ ID NO: 256708 - DNA, 82 bp, Homo sapiens
agagggaaggatacaaatggttcacagttcttcatgcttcctggagattcacgaacaagaataggattcatgacctttgata

SEQ ID NO: 256709 - DNA, 100 bp, Homo sapiens
gacgtacgtccggtgtaatggcggcgcggtggagctctagttttccaagagataacttcaccaagatgtccagtgataggcaaaggtccgatgatgagag

SEQ ID NO: 256710 - DNA, 75 bp, Homo sapiens
cattgagcaggctacagtccactccagcatgaaactccccaacttttaaatcatttgaagaaaaggtcgaaaact

SEQ ID NO: 256711 - DNA, 50 bp, Homo sapiens
gggagccccgggagccgcacgtggtctcacgtgtgaaacatggctacaga

SEQ ID NO: 256712 - DNA, 74 bp, Homo sapiens
attcattgaggaagaaaaagaagacttgcttcagcatttctcaagtggtgaaaccagaacaatatctcactttc

SEQ ID NO: 256713 - DNA, 104 bp, Homo sapiens
cggtgccatctgaagcccccttcccaggtgctgggtaggccaggtttcagcatcgcagacaagaagcgcaggacaggctgcattggggccaaacacagaatcag

SEQ ID NO: 256714 - DNA, 90 bp, Homo sapiens
gctcgggcgaagatccgcatcacctccagccccatttttatcaccttctacatcctggggctggggagaacaccaaaacaaacctggaga

SEQ ID NO: 256715 - DNA, 100 bp, Homo sapiens
gaaaagggtgaaggaggcgaattttcagttgatagattcagaatggacagtttagaagaacctcagaaaaaagtctttaaggctcgaaaaacgatgagag

SEQ ID NO: 256716 - DNA, 75 bp, Homo sapiens
tgacctctgcaatgactcatgacctttccccagacatggccaacaagggtccttcctatggcatgagccgcgaag

SEQ ID NO: 256717 - DNA, 100 bp, Homo sapiens
ctccttgcttggaattctgcccactctgcggagttagcagtcacgacctccagcacaggcacattgcaagcaacccgtgccttgatggtggttggcatcc

SEQ ID NO: 256718 - DNA, 83 bp, Homo sapiens
ggggtattcttgaaccaggtcatgctccaaatgtccagagggggcaaacctctttatttaccaccttccacaggaatttggag

SEQ ID NO: 256719 - DNA, 100 bp, Homo sapiens
tgcttgccaggcctggctccactacctgaacgacctggagcgtattgcacagagtgactacatccccacacagcaagatgtgctacggacccgcgtaaag

SEQ ID NO: 256720 - DNA, 100 bp, Homo sapiens
ggtgctggagatgataaaagaactgtggatctcactgtccaagggatgatacgttttcagacactctgagccaaaaagccgacagtgaggccagcagtgg

SEQ ID NO: 256721 - DNA, 90 bp, Homo sapiens
gtcatattacaaaaccgagggcgatgaagaagcagaggaagaacaagaagagaaccttgaagcaagtggctggcaggcgctggtgggcgc

SEQ ID NO: 256722 - DNA, 101 bp, Homo sapiens
atctctacatgcgctctttgaaagcgccccggaatgacctgtcgcctgccagctctgagtcaacaaacactcgggtcctatacttcagcatcttttcaatg

SEQ ID NO: 256723 - DNA, 98 bp, Homo sapiens
tgacccagagctgctgcgagtgacttgggccccaggcctgaagaattgcttggccatctcaggtgggtttggaggatttgggacaacatctacaactg

SEQ ID NO: 256724 - DNA, 75 bp, Homo sapiens
ctggagctctacgcctcctacgtttacctgtccatggatcccggctactcaacagaaatgaaggaggaatctgta

SEQ ID NO: 256725 - DNA, 100 bp, Homo sapiens
ggggcgggggcgatggcggcggcggcggccggagcttctctcagccggctcctgggcccccagatctgattaccttcacggaaggaagcggacgctcacc

SEQ ID NO: 256726 - DNA, 75 bp, Homo sapiens
ggagagaaacgtccggggaggcggcggcgaccccgagtggaggttgggtggagaaggaaacctactactgacctc

SEQ ID NO: 256727 - DNA, 75 bp, Homo sapiens
gagacactgccaagcagccttagccctagtgtagagctggagaatgctggaggagaccttaaggatggccaccac

SEQ ID NO: 256728 - DNA, 101 bp, Homo sapiens
cgggcgccggcatagtacaatgaggcagccagcggatcttgggtctctaattaacagaagatggcaaagcccagccacagcagctatgtccttcagcagct

SEQ ID NO: 256729 - DNA, 100 bp, Homo sapiens
aaagtcaactgcaagcgagttatgtggagtttagacccagccagctctgcagcgcttcagcgagggtgccctggagtacctagccaacctggaccgagcc

SEQ ID NO: 256730 - DNA, 75 bp, Homo sapiens
gggctgggctcgccagtcttggggacagtgtcagcgtatgatgaagccagcagggcctttgggggccaccgccac

SEQ ID NO: 256731 - DNA, 100 bp, Homo sapiens
gacacttttgggatccgatggcctgaggagcttgaatgtgacagatcagaccccaacaccaacaagattcttgaaaaactgtgaagaagtgggtttgttt

SEQ ID NO: 256732 - DNA, 83 bp, Homo sapiens
agccaccctcgctccctctgctcttcctcccttcgctcgcaccatgcatttgacattgtgcagcaaagaaatggttatggaga

SEQ ID NO: 256733 - DNA, 97 bp, Homo sapiens
ttgacgaggctgcggtgtctgctgctattctccgagcttcgcaatgtgtacatatgaagattgaagaaaagataacattaacctgtggacgagacgg

SEQ ID NO: 256734 - DNA, 100 bp, Homo sapiens
accaaaagacgagtgaaagtaacctggttgtcacatacccccagcttagaggtgcttcaccctgccccaaggtcctcagtttgcagaagacccctcccag

SEQ ID NO: 256735 - DNA, 82 bp, Homo sapiens
tagggtcgccgttgcatcggtgcagggcaagggcgtgatggtgggcatgggtcagaaggattcctatgtgggcgacgaggcc

SEQ ID NO: 256736 - DNA, 96 bp, Homo sapiens
gaagctataaggagattttttaaaaattaaacttcaacacaatgagcttccgcaggttcactcgatccaacagtgtgacgacagcagtacaggccg

SEQ ID NO: 256737 - DNA, 100 bp, Homo sapiens
caggctaaccaaaagtctgttctgaactacctgaagaagcaggtcacacccctcttcattcacttcagaaataataccaacaactggagggagatcccag

SEQ ID NO: 256738 - DNA, 98 bp, Homo sapiens
tgaagaggaggcggaagccaagggtttagaaatagtgtttcgtgtaggattagcacttcttcagatgaatcaggcagaactgatgcaacttgacatgg

SEQ ID NO: 256739 - DNA, 100 bp, Homo sapiens
aggcggccgtcagcaacctcgtccgggaatgaatctgaagtctgctgcagtaaaacacagaaggctttaaaatgttttcttgcataaaattcaaaacttt

SEQ ID NO: 256740 - DNA, 82 bp, Homo sapiens
tgcagccccggctgcccactcgcctcacctgagcctggatggagcagctatcagatgaagaaattgatcatggtgctgaaga

SEQ ID NO: 256741 - DNA, 83 bp, Homo sapiens
gtcccaatcccccactctttccgccctaatggaggtctccagtttcggtcccgagcagccccgcccaacatggacccagaccc

SEQ ID NO: 256742 - DNA, 89 bp, Homo sapiens
caacaaaccctatcctgtccgagcaaagattacctattaccagaacacactgacactgggatctagcaattgggaggcagcagacttgg

SEQ ID NO: 256743 - DNA, 100 bp, Homo sapiens
ccgggagcacgtcatcgccatcgaaggcgatgagctggagatgatccggcccagcgtctaccgcaacgtggcgcgtcagctgcacatctccctgcagtct

SEQ ID NO: 256744 - DNA, 100 bp, Homo sapiens
ccgtcagcttccatgtggtggtgtatgtgcgcttcccagggatcttgagagtgaagatctcgaaggatttcataggaaactatttgatccttgatggcta

SEQ ID NO: 256745 - DNA, 75 bp, Homo sapiens
ggcgcggcccggggtgtcagtgtggaggagactgaggatgacgcggcatggcaagaactgcaccgcaggggccgt

SEQ ID NO: 256746 - DNA, 75 bp, Homo sapiens
cttggttccgcgttccctgcacaatcctgaaggacacgcaggtgactcgacaggccttaaatgagatctcggccc

SEQ ID NO: 256747 - DNA, 103 bp, Homo sapiens
ccgcggtgcggacccagcacgcctgggccgggggctgcagcatgtttcactgttacatgccttgaagtgatgaggaggtttctgttactatatgctacacagc

SEQ ID NO: 256748 - DNA, 75 bp, Homo sapiens
gctaggagccacctagactggatgcagagcatggttgatgaagctgtagctgtactacaagcccaccaagctaaa

SEQ ID NO: 256749 - DNA, 101 bp, Homo sapiens
gggatgattacagttcttcctaaaaaagattgtttcccagagaaagctgtccaaatccttgctgaagcatgggaacacagcagggaaatcttccatcacgg

SEQ ID NO: 256750 - DNA, 101 bp, Homo sapiens
cctgagatcaaatggcacttcattggccacctacagaaacaaaatgtcaacaaattgatgggtaccaaccttcgccttttctatgacgtttgcaaactctc

SEQ ID NO: 256751 - DNA, 98 bp, Homo sapiens
gggtccagccgtccccagaacgcagatcagaggtagtcggacctttcccgctggcgcgcagcctcagctaggtacctactgtcaacaacgggaagtgg

SEQ ID NO: 256752 - DNA, 82 bp, Homo sapiens
gcggtgtgaggtgcttggtagcgcgccgtagctgcttccacgtccttgcttcacctcagtttttcagaagaagtgaagtcaa

SEQ ID NO: 256753 - DNA, 75 bp, Homo sapiens
atcatcagcgaagatgagaagaaggatgaggagatgagatttctcaggtccagctgggagctccccgacctccag

SEQ ID NO: 256754 - DNA, 75 bp, Homo sapiens
aaggagaaggataagtcgaaggggaaggcgcctgaagaggacgaaggctgttcggctcttgaatcccagcgatga

SEQ ID NO: 256755 - DNA, 99 bp, Homo sapiens
gcctcgtcgacatgagtgatgtggaggaaaacaacttcgagggcagagtgtcgtgaaaactacccctaaaagccaaaatgggaaaggaaaagactcata

SEQ ID NO: 256756 - DNA, 75 bp, Homo sapiens
aaaggtggaggctgcatcaggatttacctctgaagaaaaagcgggacgaccctgggacagtctccactggggcag

SEQ ID NO: 256757 - DNA, 101 bp, Homo sapiens
cttttgtgcacactggtgacaactcaagagcaatcagtaccatctggctggagtgtagtggcgcaatcttggatcaccacaacctccgtctcccaggttca

SEQ ID NO: 256758 - DNA, 75 bp, Homo sapiens
gaggggctggaacacctcgccaaagcagagaaatagttatcctgaatacatgtctaacaattttccttgcaacgt

SEQ ID NO: 256759 - DNA, 90 bp, Homo sapiens
ccagaagctgctaagcagaattgcaagggacaagtggccacactccctcagctaatttcttgagatagaggacagagaagatgactcgtt

SEQ ID NO: 256760 - DNA, 98 bp, Homo sapiens
attacagtggttggaataaaaaggcacagactccatcaagatggagaacgggcagagcacagccgccaagctggggctgcctcccctgacgcccgagc

SEQ ID NO: 256761 - DNA, 101 bp, Homo sapiens
cctcctgtggtggaggagaaggaaaggatcagggagcttccaaggcatttgatacctttttgatgggaagaagggctctgaggagctccaagataccccaa

SEQ ID NO: 256762 - DNA, 51 bp, Homo sapiens
cttttacctacgttggcggccccagaaggagtgaaacctcggtccggctgg

SEQ ID NO: 256763 - DNA, 100 bp, Homo sapiens
aggtgagtactacaacgtacccattccggaaggggacgaggaaggaaacatggaactcaggcagaaattcgaggacaggcgacactaacaggtgaagatc

SEQ ID NO: 256764 - DNA, 126 bp, Homo sapiens
ttgctttattgatattgcctgcgatgaaattccagagcgctactacaaagaatctgagggaagcagctcgagagtgtcgtagaaagaagaaagaatatgtgaaatgtttagaaaacagagtggcag

SEQ ID NO: 256765 - DNA, 100 bp, Homo sapiens
attgtacccacggcagagttccaagacaggatatcgaagaatcctgcaaaaatgtctctctatccatctctcgaagacttgaaggtagacaaagtaattc

SEQ ID NO: 256766 - DNA, 100 bp, Homo sapiens
agagtgcacggctgaagaagcatatacacttacagagctagagagattgcaagctgaaaatacctcggagtgggacaagagggaaatacttgaaagagaa

SEQ ID NO: 256767 - DNA, 100 bp, Homo sapiens
tagcggtgctggcatccgaacaccgggtggctggtgcagccgaggtcttcgggaattccagcgaggtgtatgggtttcgacagaccatgatgaaattgag

SEQ ID NO: 256768 - DNA, 100 bp, Homo sapiens
gtgtgattctttactcagctgagtgtgccacacaggtagccctggacggcattcagtgttttgcggctgcatttcaacaaggaaagatacctcctactcc

SEQ ID NO: 256769 - DNA, 87 bp, Homo sapiens
gaaccccagagcacgagtagtagtcttaagagctatgtccaaactgggtcttcggcaggttacaggagttactagagtcactatccg

SEQ ID NO: 256770 - DNA, 74 bp, Homo sapiens
ccagattaaaaggaatagtcccattagcaaagagacatagtcttgctctgttacccatgctggagtacggtggc

SEQ ID NO: 256771 - DNA, 100 bp, Homo sapiens
ttgataagttcaaaaaagaacatggagtggtacctcaagcagacaacgcaacgccttcagaacgatttgaaggtccatctggttggtattgacatcttta

SEQ ID NO: 256772 - DNA, 75 bp, Homo sapiens
agccttccctcctcttcccagcaggccagctcctgggcaacgtgctggtctgtgtgctggcccatcactttggca

SEQ ID NO: 256773 - DNA, 100 bp, Homo sapiens
ctctgctccgcctgctgctgcggctctgacgaggacccagccgccaggctgctgagaggggtcacggggacatctgctccctcctcctgcaacacagccc

SEQ ID NO: 256774 - DNA, 101 bp, Homo sapiens
atgcagcaaccactattttcttcctgcccctcgttgatgagagcattcgaagtgacctcagcagggcatccagctatcagttgagggatttgcagttgata

SEQ ID NO: 256775 - DNA, 100 bp, Homo sapiens
ccaccttccaccggaggtgctactggctccttcaggccaccgtgaacgcccggccgcagcgcgtcctggacacctcctccctcacgcagtcggcccccgc

SEQ ID NO: 256776 - DNA, 75 bp, Homo sapiens
ggctcgacactgccagctggaaccagaccataaacaggaccttgccctgtcactcaggatggagttcagtggtcc

SEQ ID NO: 256777 - DNA, 82 bp, Homo sapiens
cctatgcaaatgccaaaggaattggttatccaggcatcagttttgaatgtcaaggaatccaaagctcctgaaagaacggttg

SEQ ID NO: 256778 - DNA, 75 bp, Homo sapiens
ccgccaggtcgtgggctcccgctccgggcccggggccaccggctgtgccaagtcctgtatctgccatgtctgtgg

SEQ ID NO: 256779 - DNA, 100 bp, Homo sapiens
tgagctgtcagaagcaggcaatcagagagagatcatcattgcctgaatttagctttgtgactgcaagagcaagaccagttcctgtctggagacgactgtt

SEQ ID NO: 256780 - DNA, 90 bp, Homo sapiens
ctttacctccgagccaggccgccgcaaagcaggatttaaaaactggaacggtgaaggtgacagcagtcggttggagcgagcatcccccaa

SEQ ID NO: 256781 - DNA, 114 bp, Homo sapiens
ccgacggcgtggggcctcgctaaggaattcccggcccctcagggccacggctttagcggtgtcttttgcggaataggaggccttcaagattttgtgctgaaatctgcaacactg

SEQ ID NO: 256782 - DNA, 50 bp, Homo sapiens
ccgaaagtggctctacaaacccaagatccctgcatgtcactgagtccacc

SEQ ID NO: 256783 - DNA, 101 bp, Homo sapiens
ccgatcttctgtgttctgcgtggggacggccgcctagagtggttcagccacaaggagctgctgcacaggttctggaacctctggcggtctcagattgagca

SEQ ID NO: 256784 - DNA, 100 bp, Homo sapiens
ccgccctgctgaaactcatccaacagcctcaaaatgcgggccatcactgtgcatgtccccatgccctcagcaggagtcgtggacatccccattgtggaga

SEQ ID NO: 256785 - DNA, 50 bp, Homo sapiens
tgggcagcatgcagtgctttctgggctaggcagctggaagagaaagaccg

SEQ ID NO: 256786 - DNA, 75 bp, Homo sapiens
tctgctcccataaaagttcatcataatcaaacggtgatgtaaaattctcaaacaatgagatagataaaaagtacg

SEQ ID NO: 256787 - DNA, 83 bp, Homo sapiens
caaggggcggccgggcgcggccgcttccccgggcgctgcctggacaggcctgcctgcgtgctgggacatgtctggcctccaag

SEQ ID NO: 256788 - DNA, 100 bp, Homo sapiens
ggcgaggagaaccaactggtcccgaaagaggatgaatcttcaagtcatgaatgtaaccagcgcacaatccttctctatggagtcggcaaagagcgtgatg

SEQ ID NO: 256789 - DNA, 83 bp, Homo sapiens
gcgggcgcggctggccgagcaggcggagcgctacgacgacatggcctccgctatgaaggcgactcggtgaaatacctggagtg

SEQ ID NO: 256790 - DNA, 80 bp, Homo sapiens
atcaaagtccaccatgtgcttttgcacatccagtgagaagccctaccactgcaactgggacggctgcggctggaagtttg

SEQ ID NO: 256791 - DNA, 75 bp, Homo sapiens
ctgctgatgaggttgatgaatttgaaatccaagagtggttcgcctccagcacacagagctacatccttcgggacc

SEQ ID NO: 256792 - DNA, 74 bp, Homo sapiens
acggcaccaactattcgcggagctggaatgactggcaacccagcctccatcttccaagaagagcgatggttctg

SEQ ID NO: 256793 - DNA, 76 bp, Homo sapiens
tagttaggattttattactggcagcatgtatatcttttgaaacgtgtccctgatcaccacccctgttaagcattcc

SEQ ID NO: 256794 - DNA, 112 bp, Homo sapiens
tgtacctccaaagagaacagttaaaagaaatatacccaagctggatgctcagagcacaagctccgggtggataaggcagctgctgcagcagcggcactacaagccaaatcag

SEQ ID NO: 256795 - DNA, 87 bp, Homo sapiens
aatggacagttagtcacccacctacatgttgaggtagctacagcaagctgggtagcaggcagatccaaaggatatcatgaagtttcc

SEQ ID NO: 256796 - DNA, 100 bp, Homo sapiens
caggaaaacaagctcagggctcccacggattctacattatgatgcaccagcaaggaatactgaagaccgatgatctcataacaaggttctttcgtctgtg

SEQ ID NO: 256797 - DNA, 83 bp, Homo sapiens
ttgaggaaaggatgaaggagctcagagaagaggtattctctactgccgctgatggtcaaacgcaagtggaaattaaagtgtgt

SEQ ID NO: 256798 - DNA, 100 bp, Homo sapiens
gctccctcattaccgtcgccagcggagcgaacccgagagcgtggagcgggctgggccagactgaatgtggatgtcagttcacgtcaaaactggaaggaat

SEQ ID NO: 256799 - DNA, 100 bp, Homo sapiens
cagctgggaattgctgaattagaactgcagaggttcctctacagcaaggttggatggcaagcatgtggtgtttggcaaagtgaaagaaggcatgaatatt

SEQ ID NO: 256800 - DNA, 82 bp, Homo sapiens
ctgggatccggagcaagcgggcgagggcagcgccctaagcagggtggtgaaggaggagatctttgatgacaatgccaagctt

SEQ ID NO: 256801 - DNA, 75 bp, Homo sapiens
aggagctagctgaaataacccttgatcctcctcctaattgcagatgttctacatttcaactccatcaaatattaa

SEQ ID NO: 256802 - DNA, 75 bp, Homo sapiens
agcccggccccgcccgcgccggaagagccacgccgcaaattgtggctactaatttgccccctgaagatcaagatg

SEQ ID NO: 256803 - DNA, 85 bp, Homo sapiens
gtcacttctccagtactaatgtgggtccaggagagaagtggatgggccctatacctccagccgtgaatgccagactttaagattg

SEQ ID NO: 256804 - DNA, 98 bp, Homo sapiens
gccgaccctcgccttccttctctgcagcttccccgcagatgtagctgagcagtattttcaagagagcatggctcatcttaaggattctgaagggatgg

SEQ ID NO: 256805 - DNA, 98 bp, Homo sapiens
agcagcgaggaggggaagagagggttctgagcaaggttcaaccagtcaagaacaggccttatctgctcagcaagctgctgttattaaccttactggag

SEQ ID NO: 256806 - DNA, 90 bp, Homo sapiens
cggggctgttttccagagctttgccaagttcagcaaatttggagatgctttcctgctctgggaccctaccaaggtgcccccacgactgca

SEQ ID NO: 256807 - DNA, 98 bp, Homo sapiens
cccgacatggtctacacagtcagacccccaagctcccgagaatcactccagctctcctggaagcagcgaccgtggcagccatgtattacagctactac

SEQ ID NO: 256808 - DNA, 89 bp, Homo sapiens
tgccctgtcctgccggagccgctgtgtgcaaagttcctattgatggtccccccataactcagattgatggacaacttttcttaattaag

SEQ ID NO: 256809 - DNA, 100 bp, Homo sapiens
gcacgcagtacttgcttaggatggccaacaggctctttggggaaaagtcttgtgatttcctctcattgcatttgctggtctggcctttgcgtccttctac

SEQ ID NO: 256810 - DNA, 99 bp, Homo sapiens
cccggctttgacatcaaggacgttgccagggggtccactggacggggcctgagctacaacttcacccacctggacgggtacctggaccttctcagggag

SEQ ID NO: 256811 - DNA, 75 bp, Homo sapiens
cctcggtgcagggctccaccccgtcgcctcgacagtgtactaatggtcacttgatgtgcgctggctgttttatcc

SEQ ID NO: 256812 - DNA, 50 bp, Homo sapiens
gacggtgtggggcggtcccggccccgcagaattcagaaggagctggcgga

SEQ ID NO: 256813 - DNA, 88 bp, Homo sapiens
atgctgttgaggaaatggactggagtgtggactgcatttgcaacgatgcatgtctgcaagaccccatggacaactttcatctgatgca

SEQ ID NO: 256814 - DNA, 90 bp, Homo sapiens
tccgggcgccggcgtagaatctgagctgcagcagtcagtggaagagcatctgcaatgtcaaacactcctacccacagtattgctgcatcc

SEQ ID NO: 256815 - DNA, 73 bp, Homo sapiens
tcaaggcggattaattagcccaagaaacattatattcatccaaaactggacaagccaaggcatctgtagccaa

SEQ ID NO: 256816 - DNA, 75 bp, Homo sapiens
aggaattcttgtggaggatagagcaggaaaaactcattgtatccaacgaacaagaagttttgcgagttcattaca

SEQ ID NO: 256817 - DNA, 75 bp, Homo sapiens
gcgtaggcagcctccccggagcccacgaggctccccagcaccgtctactggcatctgtcccttcctgtgtggaag

SEQ ID NO: 256818 - DNA, 83 bp, Homo sapiens
atcagctacagactttcctgagtcaggatccagtttatggaaaaggaaaacttggagaaatccagggacttatcttgggaatg

SEQ ID NO: 256819 - DNA, 97 bp, Homo sapiens
cgctcacgctgggagctgtagaccagagctgttcctattcggccatcttggctcctccctcgcactgggtattgtacccctccaatatgtgtttgtt

SEQ ID NO: 256820 - DNA, 74 bp, Homo sapiens
ttccactagaagctcttctgagggaggtaaagggagaagatgaggaagagaacaatttggaagtacgtgaaacc

SEQ ID NO: 256821 - DNA, 83 bp, Homo sapiens
agaggggccactgctgggccctgaggctgcaccaagtggcgaaggagccggctccaaggtgaagatttggttccagaaccggc

SEQ ID NO: 256822 - DNA, 99 bp, Homo sapiens
tattctggtggggagatgaacccaacctagtgggtgtaatacatcatgaactgcagggtgaattatgtaacctcattacgctggatgtagctcacaatc

SEQ ID NO: 256823 - DNA, 49 bp, Homo sapiens
ctgtctgccaacctaaaactctttcgccctttggagtgaatcaacctgg

SEQ ID NO: 256824 - DNA, 83 bp, Homo sapiens
acgaaagcaggtgactctctagtcaacttccgacttggactccgaagatcgcaaaatgatgcttcaacacccaggccaggtct

SEQ ID NO: 256825 - DNA, 75 bp, Homo sapiens
ggtaagggaggcgtcgctgattccagagagctaaagccgatggttcgagaacttgtcttggacaattgcaaatca

SEQ ID NO: 256826 - DNA, 100 bp, Homo sapiens
aaaaggaccatacgagtcctagatgtcaataaccagtccttcagagaacaagagaaccttctgaggaaaggaggccatacagaaattgaacctcagcact

SEQ ID NO: 256827 - DNA, 74 bp, Homo sapiens
aaaattgaaaaaatggttgacctcacccaggtccgtgggccacatccacaggcgagtcactgaccacctgggtg

SEQ ID NO: 256828 - DNA, 100 bp, Homo sapiens
tgtcgccgagatcgtggggcggcaagtttggtgccctggttgtcagatgttggaaagcagtaggacggaacatactcttcgtggttgtgtatccgttctg

SEQ ID NO: 256829 - DNA, 136 bp, Homo sapiens
ctcctatgcaagggctattcctgaccaagaagatctaaagagaacgtctctgaaatcaagtccggatgaaggctttcagtccagtgtaaagctgttggagcgcgggagcaaaggtaaagaatgatgtaatgcgctg

SEQ ID NO: 256830 - DNA, 83 bp, Homo sapiens
atgtgcttggtggagcagctgcctgggagaatgttgactctactgcagacaatgcagatcttcgtgaagactctgactggtaa

SEQ ID NO: 256831 - DNA, 99 bp, Homo sapiens
cctggtgggcgacggcggctgcgggaagacgtcgctgctgatggtcttcgccgatggggccttccccgaggctgggatcatctgtcagctcaatgcgcg

SEQ ID NO: 256832 - DNA, 98 bp, Homo sapiens
aagtgaacttggcagacaaaaagcagagaataattctttgagaagctccaccatgaggcgaggtggatggaggaagcgagctgaaaatgatggctggg

SEQ ID NO: 256833 - DNA, 100 bp, Homo sapiens
ctgcactgtgacctacactagtcgcgggagccacgcagaggacgccggaacaccctggaagccgagaaatgttcgaaaagatataatccgcatcctcccc

SEQ ID NO: 256834 - DNA, 100 bp, Homo sapiens
catggatgcccctgtttctggtgaaatcgagctatagcagattatcttcgttcaaatggctatgaagaggcatattcagtttttaaaaaggaagctgaat

SEQ ID NO: 256835 - DNA, 100 bp, Homo sapiens
gctgcctttttatatggtcttggtttggtctacttccattataatgcatttcagtggggcgtgaatactttttctcccgaaggaagattatttcaagtgg

SEQ ID NO: 256836 - DNA, 75 bp, Homo sapiens
ggcacttcattggccacctacagaaacaaaatgtcaacaaattgatggaaatttaagatccgcattgaagaccca

SEQ ID NO: 256837 - DNA, 96 bp, Homo sapiens
cccagccagtgcaacagttgcctatatcctataccgcaggtatagggaaagcagagtgactgtgaagtgctgaccacactcaccccagacactggc

SEQ ID NO: 256838 - DNA, 50 bp, Homo sapiens
cacagacactgacctgtacacaggtatggctttcccaacgaaaggctaag

SEQ ID NO: 256839 - DNA, 83 bp, Homo sapiens
cagtgtggcaaccagatcggtgccaaggtttcgacacagccccaactgctggtacctgagaaactggactatccacacctgga

SEQ ID NO: 256840 - DNA, 75 bp, Homo sapiens
gtggctactctgcctcggggacgaaagcaggagttgatccctgaattttattatctccctgagatgtttgtcaac

SEQ ID NO: 256841 - DNA, 100 bp, Homo sapiens
aaggaaatcatgtcaagcgaagccttgaaaaagctgccctgagacggtgtcccgccgaaaggtatgccattgcattggccttaagggaaaagcagcgtgt

SEQ ID NO: 256842 - DNA, 90 bp, Homo sapiens
ttccgcccctttctggcaaagatgagggggattcttaaggtggcttctggcacagcagcttaattgaccggaacctcattgattattttg

SEQ ID NO: 256843 - DNA, 82 bp, Homo sapiens
gaagaatgagaagtcatggaatgacagttatggctgcagcttcgattgccaatattgtaaaaagttctcttggtccagttgg

SEQ ID NO: 256844 - DNA, 90 bp, Homo sapiens
tgggcgccgcagcctcccggggccctacggccgcccgccaccaggaattgaatgatctggcacgggaccctccagcacagtgttcagcag

SEQ ID NO: 256845 - DNA, 99 bp, Homo sapiens
ttcaatccgtatgagccagaacttgcaccctgggctgcagacaaaggctcttctgaaaatggattgccaagagttagtcgcacgtctcatccaagaagc

SEQ ID NO: 256846 - DNA, 95 bp, Homo sapiens
gctactaaccagagccggctctttctcggtacaggtttgcagattccgccagcagcacagcaagctctacagatgagtggctctttggcatttgg

SEQ ID NO: 256847 - DNA, 80 bp, Homo sapiens
tgcatcaattcttcgacaggaaaaaaatttgctggatattgatgcgccagtcactggtatgagaaagtgccagtcatctt

SEQ ID NO: 256848 - DNA, 100 bp, Homo sapiens
atggttcgttacatcagaaggatacagttcatgacaatgactttgagccctaccttactggacagtcaaatcaggaaaactaggtgtctgtgttcactcc

SEQ ID NO: 256849 - DNA, 75 bp, Homo sapiens
agcccacaggtgctaaagagagcagtaccctgatggagtcccttgcaggacaggcgacactaacaggtgaagatc

SEQ ID NO: 256850 - DNA, 75 bp, Homo sapiens
tgggtccgctgagcggggcgacccgagcttttgccaactttccaattaaaggttgacattcctgcataagcattt

SEQ ID NO: 256851 - DNA, 75 bp, Homo sapiens
ctggtcagtgccatgatccggcaggagcgctccacatcctaccaggaggaatatcagaagctctttcctgacatt

SEQ ID NO: 256852 - DNA, 51 bp, Homo sapiens
gtgatggctggaagttcctctgtaccagaccttctctgatggatgacctct

SEQ ID NO: 256853 - DNA, 75 bp, Homo sapiens
tgctatgaatatgggtcgaccattccaaaaaaatcgggagtttgaggacatcaccaatgcgagctttcatctgga

SEQ ID NO: 256854 - DNA, 100 bp, Homo sapiens
acaccttcgccacccactattggaccaggacacagcattgttggttttgccatgtactattttacctatgacccgtggattggcaagttattgtatcttg

SEQ ID NO: 256855 - DNA, 98 bp, Homo sapiens
ccgagagcgtgaccgagagcgcgaatatcgtcatcgttagaagctggaaaggcagctcatcatgcagagtgaaatgagggaaagacaaatggccatgc

SEQ ID NO: 256856 - DNA, 75 bp, Homo sapiens
ggcggcgacggcggcaaatctaagaaatttgctgtcattatttgtatcaaaaacaaagaatttgaaaaggcttca

SEQ ID NO: 256857 - DNA, 98 bp, Homo sapiens
ggacgcccaggcggacgaggccgtgttaggtaaaataccatgaagattttgaaaaaacaaaggggagaggctttactcccgtcgtggacgatcctgtg

SEQ ID NO: 256858 - DNA, 100 bp, Homo sapiens
aagaagcccctgaccattgaagaggtggcccccgccccgtcgggcctcacgaggaggaagagttcatcgattggtggagcaaattctttgcctccatagg

SEQ ID NO: 256859 - DNA, 82 bp, Homo sapiens
acattctgtcagtgctgttctccaagaggcccagagacatgctgaaacatcgaaggtactccaaagattcaggtttactcac

SEQ ID NO: 256860 - DNA, 96 bp, Homo sapiens
cgaggaggtgggcgcgctggagcaggagcggggccggaactggagccgaggcgcaggtggcgctgggagctctgtgtgtcgtctgagcagtcgcga

SEQ ID NO: 256861 - DNA, 100 bp, Homo sapiens
ctagaaattccccccgaagaagactcccccacatctggacttgcacctagctgcggagctggggaagactctgctggagaggaacaaggagctggagggg

SEQ ID NO: 256862 - DNA, 100 bp, Homo sapiens
cagcctcctgaggagctgggactacaggccttgtccatcaaaacctcatccctagcagaggctgagaacatggctgacctcatagacggctactgccggc

SEQ ID NO: 256863 - DNA, 75 bp, Homo sapiens
gttcaagcgaaaacatgaccgctgagcccatgagctctgtggctgtgggctgctgggagtgggcatctggctctc

SEQ ID NO: 256864 - DNA, 96 bp, Homo sapiens
catcatcttcagcaagtttgccagctccatcgtggggccctatgatgaggtggtcctcccaccacagagccaggcccagtgacgagcaccatccgg

SEQ ID NO: 256865 - DNA, 100 bp, Homo sapiens
acccgcccgcccaaggtctctcgcgggcgggagaacggaaaactcccaacttcctgggaggagagagcgatggcttttttcacccagaaggccagcccca

SEQ ID NO: 256866 - DNA, 51 bp, Homo sapiens
ttctgggtgacactcaacaggattcccggggaaaggccatacaaatgtcag

SEQ ID NO: 256867 - DNA, 87 bp, Homo sapiens
ccaaactcttctttgacaagagagacaactctgactttggaaaaaagggttgctcattttgggtatcactggagtctgatggaaaga

SEQ ID NO: 256868 - DNA, 75 bp, Homo sapiens
gaggtaccgggggtgacagctccgggaccggccgaaaggcgaggaaccggccttccggagcagtactacagcctc

SEQ ID NO: 256869 - DNA, 101 bp, Homo sapiens
ccatgcctatgatattcttctcctggttaatcaagaattctctatttctgctccgtcatccatgccactgagcgctgtgtggccgccctggctcgtgtcga

SEQ ID NO: 256870 - DNA, 100 bp, Homo sapiens
gttctccagcctttctggagggatgcagagcctttccttaggacaaacaagaacacagatatgtagaactcttcttgaattctacagcaggagcaagcgg

SEQ ID NO: 256871 - DNA, 104 bp, Homo sapiens
ggaggacagacaattgttcagttgcaaaaagaaactggagccaccatcaagctgtctaagtccaaagatttttacccagatggcttgttcaatcagtatatcag

SEQ ID NO: 256872 - DNA, 51 bp, Homo sapiens
ccaagctccagctgtttgtcaagagagcggcctcaggtggagctcaccttt

SEQ ID NO: 256873 - DNA, 100 bp, Homo sapiens
tgtttttgttttctgacttgggtcttgaattaaaatggaaaaagggctgttggccaccagtctaaagaatgccaggatcaaaatacttgctggatggtgg

SEQ ID NO: 256874 - DNA, 75 bp, Homo sapiens
ctttcgccagcccgtgccgcgagcgcggcctgcaggaggagtggaagctggacacactatgtgacttgtatgaaa

SEQ ID NO: 256875 - DNA, 99 bp, Homo sapiens
cactgtttgtgctggatcgcagcgctgcctttccttatgaagaagacacaagatttttcaagccacattcaattgataggatgaaaaaatttaagagaa

SEQ ID NO: 256876 - DNA, 90 bp, Homo sapiens
ccgtttgtgtgcaatgccccgggctgtggacagatgtaggtgcaaaaaactacagacatctctgtgctgtttattacaacaagaatcctg

SEQ ID NO: 256877 - DNA, 90 bp, Homo sapiens
attcggagagggttggggccgtcttcctcatccttccttttctcggggctcccgtgggtgcccaattacctgccctcggtgagctcagcc

SEQ ID NO: 256878 - DNA, 75 bp, Homo sapiens
ctcagccttactgtgagtctggtggtatggtcaggaaaaagactacaatgtactagtcatggatcttctgggacc

SEQ ID NO: 256879 - DNA, 75 bp, Homo sapiens
atgaggctgagagaggaggagtcacccggacccagccacacaggcattgctcagattaacctggctgactatgac

SEQ ID NO: 256880 - DNA, 146 bp, Homo sapiens
ggagatttgtgtggctgcagccgagggagaccaggaagatctgcatggtgggaaggacctgatgatacagagattttaggtgatgggcaagtcagaaagtcagatggatataactgatatcaacactccaaagccaaagaagaaac

SEQ ID NO: 256881 - DNA, 100 bp, Homo sapiens
gtgctggagagacagggagaggggcgaaccggccccccacagccactgcaggatttccatggagctgtcatgagggccttggatgacatggaccatgaag

SEQ ID NO: 256882 - DNA, 82 bp, Homo sapiens
cctggagttaaggaacagatccccggaggagacaatgcagatcttcgtgaagactctgactggtaagaccatcaccctcgag

SEQ ID NO: 256883 - DNA, 82 bp, Homo sapiens
tgacagtctgcatgtgcagttttcagagcactacaaacaccactggtttcccgaaaagccgtccaagggctccggctaccgc

SEQ ID NO: 256884 - DNA, 75 bp, Homo sapiens
ggtccaatgtcaccccaggatgatgaagcagaagagggttggcctggcagtggtcaatggacagctcatggcagt

SEQ ID NO: 256885 - DNA, 75 bp, Homo sapiens
aagaaatggtgcagagattaaatgcggtttccaagcacacggtgtggggtgatcagccccagatttgacgtgcaa

SEQ ID NO: 256886 - DNA, 51 bp, Homo sapiens
ccgagcaggctgagcgatacgacgatgggagaagaagttgtccatgttcac

SEQ ID NO: 256887 - DNA, 80 bp, Homo sapiens
gggaggataaagaccaccacgcattttgaaagcgaagcagaagccgtagaatcagcggcgagcctgttgaaagaacccac

SEQ ID NO: 256888 - DNA, 75 bp, Homo sapiens
cgtgcttcctgcttcatagataagagcaactagaagccatttgtgtcaaggtaacgtctggagaaacaaaaggtc

SEQ ID NO: 256889 - DNA, 96 bp, Homo sapiens
cgggttcaggaggtacccaaactgaaggagcactacggcgggactgccaccttctacctctctcaagcagccgatggagccaaggtgctgtgcttg

SEQ ID NO: 256890 - DNA, 100 bp, Homo sapiens
acatgctggatgtcaacggcctctgtaaacgcaaagcactgaagttgaattttgcaaatccacctttcaaatctacagcaaggtttactctgaatcccaa

SEQ ID NO: 256891 - DNA, 100 bp, Homo sapiens
ctgaggatcactccaagaaaagagatccacataccattctcaatcccactgaaattgctggcattctcaaaggcaggtaaaaatcaaggtgaccccaaga

SEQ ID NO: 256892 - DNA, 92 bp, Homo sapiens
agtgcttcagcgggccaggaagcgcatccaggagagttgtctgctggttctcagcttgaagaagattctgcagtccttattgatcctttttc

SEQ ID NO: 256893 - DNA, 80 bp, Homo sapiens
gatgtaatgctggagaactacagcaacctcacttcactggagtacaggggctcaggtccaggtggcaggggatatgctac

SEQ ID NO: 256894 - DNA, 100 bp, Homo sapiens
gttcacctcggtgtctgcagcaccctccgcttcctctcctaggcgacgagacccagtggctagtctcacagaaagttctccgctcccagacatgggtccc

SEQ ID NO: 256895 - DNA, 100 bp, Homo sapiens
gccacttgaaattctcttctgaattaggcagtataccttaaatggcaagaaggaaataaatcatctgacatcactcagattgaagaggagctttttttcc

SEQ ID NO: 256896 - DNA, 95 bp, Homo sapiens
ttgggagaaagacacagtctccatcatcccaggtcaaaatgcagatcttcgtgaaaacccttaccggcaagaccatcacccttgaggtggagccc

SEQ ID NO: 256897 - DNA, 83 bp, Homo sapiens
ccagttagtggatatagcacaccatccccagccatgtgtttcctgtaacaaatcgttcaagaaactctggtcccttcatgaac

SEQ ID NO: 256898 - DNA, 87 bp, Homo sapiens
gaagtatatgttgaagtggcctatcccaggacaggtggcactctttcaggttccagcaacagatagaaatgctttaagttcactctg

SEQ ID NO: 256899 - DNA, 98 bp, Homo sapiens
atgcagtagttgttggtggctcatggcatttcagagaaaaggtgtcttacaagtatcaagaacttactatatgtggttgaataaacaatcaaggtaaa

SEQ ID NO: 256900 - DNA, 50 bp, Homo sapiens
gacttggagtctttgtccaggacgttagtaacaggagtatgggaaggcaa

SEQ ID NO: 256901 - DNA, 82 bp, Homo sapiens
tggaatgtgtgctgaaagtcatggcttttgggattctgagccagccccagtgcctgctgagccgtttgacaacactacctac

SEQ ID NO: 256902 - DNA, 74 bp, Homo sapiens
ttcgcagtggtcgcttcttctccttggattgacaagcccaaggccctgtctctactgctccatgctgctgacat

SEQ ID NO: 256903 - DNA, 74 bp, Homo sapiens
gaaaggagacagaaccacatcatgaactttacaaggcgagtggataattccaacacaagactggcagtccaaat

SEQ ID NO: 256904 - DNA, 98 bp, Homo sapiens
tttgaccgacacctccaccctacaagtactgaaaaggcacaggacaaacttactgcagcttgaaggagccaaccatggatttgaggcgtgtgaaggaa

SEQ ID NO: 256905 - DNA, 74 bp, Homo sapiens
tattgagtgtaggtataaagaagctcgagcattctttcagctacagtctccagagtcatttgcaaagagtgtcc

SEQ ID NO: 256906 - DNA, 98 bp, Homo sapiens
gccaggaaaatttcccagatgctgaggagaacaagatattgaaagaatctgatgaaaggtggataattactgtaccttcctcatggaaaaagttttat

SEQ ID NO: 256907 - DNA, 81 bp, Homo sapiens
ccgggacgcggagcccggagctggggcgacgaggcgattgcgggggcctgggctagacaatgcagatcttcgtgaagactc

SEQ ID NO: 256908 - DNA, 100 bp, Homo sapiens
ctcgaccaacgtcagcctcaccctgcggcgtctacggtgacgtgcagcgcgtgaagatcctgttcaataagaaggagaacgccctagtgcagatggcgga

SEQ ID NO: 256909 - DNA, 118 bp, Homo sapiens
ttcatgtgggccctgaaaaacggagacttggatgaggtgaaagactatgtggccaagatggcccctgagttctgcagcctcgaggaaggcctgccctatctggacatggtgattgcag

SEQ ID NO: 256910 - DNA, 83 bp, Homo sapiens
tcgatggcttcgtggtggaggtctggaaccagctgctaagccagaagcgcgttgacccaggaggctctcacgtggagtcccca

SEQ ID NO: 256911 - DNA, 80 bp, Homo sapiens
tgccctacggcttctccgccatgcaaggctggcgcgtctccatggagtagcaggacccagtgctccataaaggataatag

SEQ ID NO: 256912 - DNA, 74 bp, Homo sapiens
ctcgcgtttccacttcagagatctgtatctggagtccatctttcaccatcttctcctgagattgtactggaccg

SEQ ID NO: 256913 - DNA, 100 bp, Homo sapiens
tgactgccctgtagaatcagtgctgtgaccccgagtaacaacgcgcgcttgagttggtataaactcctgaaggaatttatacatttggactgtttgctac

SEQ ID NO: 256914 - DNA, 100 bp, Homo sapiens
tagtcacttggggagctggaatcaagtatccccaaagagtatcagctcagcaatttgatgatgcatttttgaaaggctctccagcagaactatctcctac

SEQ ID NO: 256915 - DNA, 90 bp, Homo sapiens
actgtgacctcgaagagtgcttgtgacccctggctgtgggcttgaactgtggagtcctgacgtctgggcctcctttcatgtactctgccc

SEQ ID NO: 256916 - DNA, 115 bp, Homo sapiens
cggggaggcagcgcgggatcccagcctcaggcgtgcgcggacggtgtgcggcaagagtgagccatggagctacgtgtggggaacaagtaccgcctgggacggaagatcgggagcg

SEQ ID NO: 256917 - DNA, 82 bp, Homo sapiens
agagaccttagaaaggatcaggactggcggtgatgatgatgatgattttgatgatgaggaagctgaagaaaaagcgccagtg

SEQ ID NO: 256918 - DNA, 82 bp, Homo sapiens
agaagggctacgaagaagtgcttcagcgggccaggaagcgcatccaggagctgttaaacgtttaatgaaagaagcggcagaa

SEQ ID NO: 256919 - DNA, 74 bp, Homo sapiens
gacagattcgcagtggtcgcttcttctccttggagtgagctgagtcgacagaaacttcatacccaagagctgct

SEQ ID NO: 256920 - DNA, 129 bp, Homo sapiens
cgcggctgctgtcgcccagcgccgccccgtcgtcgtctgccttcgcttcacggcgccgagccgcggtccgaatttggaggccaatcactgccaccttttatttccctgtgggtccaggaactggatttc

SEQ ID NO: 256921 - DNA, 78 bp, Homo sapiens
tcaggacccctgctacgtggagaaaacctcggataagtgggactcaactaggaggtcttattacagtactgtgctgct

SEQ ID NO: 256922 - DNA, 90 bp, Homo sapiens
acactgcaggcctccgcgctcagtggttgcatatggccaagtccttggagttataggatattcattacttcctctcattgtaatagcccc

SEQ ID NO: 256923 - DNA, 90 bp, Homo sapiens
ggaaaggatgttggcggtccctgtgacctgtggagacacggccagatctgccctccaacctaatctgggagcctgcaagtgacaacagcc

SEQ ID NO: 256924 - DNA, 100 bp, Homo sapiens
gtgcttttcctcctgcagcccaccgtctacttgggagagccaggctcaatagggctcccaggacaaccaggagtaccaggagaagatggagctgcaggga

SEQ ID NO: 256925 - DNA, 75 bp, Homo sapiens
tgacaaggccgtggactgcttcacagctgccctcagcgttcgtcccaatctgcggctcagccccactgaccttgg

SEQ ID NO: 256926 - DNA, 83 bp, Homo sapiens
aaagagagctcaaaatcggagacagagtattgttccagctattcttcagatgctctggattttgagacggagcacaaattgga

SEQ ID NO: 256927 - DNA, 50 bp, Homo sapiens
cctggctggccaagttactggagccgatgctggagtgcggtggcgtgatc

SEQ ID NO: 256928 - DNA, 74 bp, Homo sapiens
tgcaaagatcgcctgcaccttcaaggccaaactatgcagggattgtcaatgaggcagatcagattccgatttga

SEQ ID NO: 256929 - DNA, 95 bp, Homo sapiens
gcttgtgatgacttggatgaagctgctagaatgtctgtggattctagccttgggggtctttcacgatccagcactgtggccagcctcgacacaga

SEQ ID NO: 256930 - DNA, 87 bp, Homo sapiens
ctgaccaagacttcagtgatgagaatcgcacctaccaggcttccagcccggatgaggaatttgagagcgtattttgcggtaaaactg

SEQ ID NO: 256931 - DNA, 83 bp, Homo sapiens
gagctcgctcacttgtgatgccctgactgagctgctggctaagatcaccaacacagacgtggacctagatgtgaaggctggtg

SEQ ID NO: 256932 - DNA, 100 bp, Homo sapiens
tgagagctccccaggggagttctctgtgtctgtgaagttgttggaggaagagtcttccaagagggctgaactagaaaagtggcacttggagcagcagcag

SEQ ID NO: 256933 - DNA, 50 bp, Homo sapiens
tgcggctttgatactggagctctggatagggagacgtggtgggcggtcct

SEQ ID NO: 256934 - DNA, 82 bp, Homo sapiens
tccgccgctgcgggcccgctccgacgcggaaggaaggatttgatgccctggatccctttattcccatcctggtttccaacta

SEQ ID NO: 256935 - DNA, 75 bp, Homo sapiens
tagggacattggggttgatgaaacttacctctttgaatctgaaggtttagagggagacgtggtgggcggtccttc

SEQ ID NO: 256936 - DNA, 134 bp, Homo sapiens
agagacaccaggacagaaaagacagtgttctgctttcatggagttcacagaagagtcgaggagtgtaaacaggaacatcgataagtagtgtaaaaacttgcacaatgaaatccgaagccaaggatggagaggag

SEQ ID NO: 256937 - DNA, 98 bp, Homo sapiens
cgcggctgccgagcgcggcggggcctccgcggtctgctcatggcgcacagccagcggctgctcttccgaatcggggagaaacaaaggcagcgctgccc

SEQ ID NO: 256938 - DNA, 90 bp, Homo sapiens
caacttgacttctctggggactctgaacttccctggtcgaacagttttttctaatggctattcaaggtatttgtggaaacattagacaaa

SEQ ID NO: 256939 - DNA, 83 bp, Homo sapiens
ttgtgtcaagacgtggcacgtgtcagagaatttgacgacaatgcagatcttcgtgaagactctgactggtaagaccatcaccc

SEQ ID NO: 256940 - DNA, 90 bp, Homo sapiens
ccgcgggcggctcgacgcagcagaggcgacgcgagatggcggcagcttcagcggcggcgatctcaggttgaaatcacaaagattagacac

SEQ ID NO: 256941 - DNA, 100 bp, Homo sapiens
gacgccgcggacctccctgcgaccgtcgcggaccatgggcgacaaagggacccgaacagctttgctgagccatcaaggtctaatggaagcatggttcggc

SEQ ID NO: 256942 - DNA, 100 bp, Homo sapiens
ctgatattttaggccaaggagctactgcaaatgtctttcgtggaagacataaggtgaagagcgattatatgttagagatagctgatcaagtggaccagga

SEQ ID NO: 256943 - DNA, 83 bp, Homo sapiens
ctctgaaccattaaaggacgagtttaaaaacacagtggatgcctggactttggccttttctcctgattcccagtatctggcca

SEQ ID NO: 256944 - DNA, 75 bp, Homo sapiens
cagccagtctgagtcaggtttctccagggaaagaaacagatcttatcacaccacatgggctttttatcctatttg

SEQ ID NO: 256945 - DNA, 100 bp, Homo sapiens
ctctcatgctgcctgttctcatgggctttccttaaagtttcccatgtctcaatggactcctgaatataacgagctctacaccttaaaagtggatatgaag

SEQ ID NO: 256946 - DNA, 100 bp, Homo sapiens
cagcagctgattgtaatgaatttgcccaatgttttgatgattggcagagacccactgtctgaattcaaggaagccttctccctatttgataaagatggcg

SEQ ID NO: 256947 - DNA, 88 bp, Homo sapiens
atcagcaagaaacccacgggcctcttctacctgctggacgaggagagcaacatgacatgtcctgaaggtcacctttgcctttgaaaaa

SEQ ID NO: 256948 - DNA, 100 bp, Homo sapiens
gcggaggcggcgggactggtccctggctttcatgagaaggacaagaagccatattgccgaaaggatttcttagccatgttctcacccaagtgtggtggct

SEQ ID NO: 256949 - DNA, 100 bp, Homo sapiens
gaaaaggacgcaaagttctccggcgagtaagactttgaccccgacgcaggcttcagtgattgccgcggatcagaagcctgagcactttggctcgagacaa

SEQ ID NO: 256950 - DNA, 76 bp, Homo sapiens
gtgagcgcccatatgggggttctggagagcggggtgtgggggcccagtaaatcctttagggccacctgtaccccat

SEQ ID NO: 256951 - DNA, 103 bp, Homo sapiens
agaaagcacaaagcatggagaccctccctccagatgcctgtgaggagccaccaacatttgaagctatggagctcattggtaaaccaaaaccctactatgagat

SEQ ID NO: 256952 - DNA, 100 bp, Homo sapiens
ctccagtcaggtgtctgccagcgacattggcgtcatcacgccctaccggaagcagggtggacgctcttctctggctcctgggattggctgtgaggacaaa

SEQ ID NO: 256953 - DNA, 80 bp, Homo sapiens
cacagccatcactcatgtccataaggaggttcaagattatctaagaagatttgaaagtataccagatatgcttgaattgg

SEQ ID NO: 256954 - DNA, 102 bp, Homo sapiens
gggaggctctaggctccaagacgccgtcgcttgagacgccaaggacttattgttgtgctaacactgaagacttggagacagttattcaccatgtacacagcc

SEQ ID NO: 256955 - DNA, 100 bp, Homo sapiens
aggacaagagctatatgcatctttatacaaagaccatgtgcaatatggtatttggaagtcaactggatatccattcaggtgggatagatttagcttttcc

SEQ ID NO: 256956 - DNA, 100 bp, Homo sapiens
ctgttggaggaactggcccggaaacaggaggacggaccagtccaacgtcaggcggatgcacacggctgtgaagctcaatggcgtcgtcctcaacaagtcc

SEQ ID NO: 256957 - DNA, 82 bp, Homo sapiens
acaggattcgttggctgccgtccccgctgctgtgcattgggtgtggacactgccagcggctgcagccgacttggaatgacct

SEQ ID NO: 256958 - DNA, 107 bp, Homo sapiens
gcagtgaaatggggtgaatcatttgacaaactgctttcccatagaggccccttcacagatgtagtcactacaaatcttaaattgcgaaatccatcggatagaaaagt

SEQ ID NO: 256959 - DNA, 75 bp, Homo sapiens
gaaaacatcaaagaggtctagcaaaggcttcttctcatatcggtaattccactcaggccactgtgagggatgcag

SEQ ID NO: 256960 - DNA, 75 bp, Homo sapiens
aactagtcacagtgttgctgcaacatagagctgacattaactgtcaggtgaccaagaatatggcccaggtgacca

SEQ ID NO: 256961 - DNA, 49 bp, Homo sapiens
aagatggacaccgcggaggaaggacccccgcagcaaacacaagtttaag

SEQ ID NO: 256962 - DNA, 82 bp, Homo sapiens
gtcattccaatgtgactgtccactacatttcactggccgcttctgtgaaaaagctatttgaactgctgggacctgaaggact

SEQ ID NO: 256963 - DNA, 74 bp, Homo sapiens
aagagctcggaccaagcgctcagggggcagtacccaaaggaaacgctacgaaagaatacatggagagcttgcag

SEQ ID NO: 256964 - DNA, 75 bp, Homo sapiens
tctttgggaatgggccaccagttaactacaaggtaactaggatttctacctcaaccgcgagacctatgcaaggac

SEQ ID NO: 256965 - DNA, 90 bp, Homo sapiens
cggggggaaagagccccagcaccgcccctcctggaagaaggaagagatcacttctgtatgtaacttttttacatacattcgatacattca

SEQ ID NO: 256966 - DNA, 50 bp, Homo sapiens
gtgatcatggagaccaaggagaacaggggatcatcgtcttgctcttcttt

SEQ ID NO: 256967 - DNA, 75 bp, Homo sapiens
aggaaggagccattatttatgtcatcaagaagaatgacgatggtggagctcatgaaggacttcagcatttgggtc

SEQ ID NO: 256968 - DNA, 100 bp, Homo sapiens
acggaaacaaagttattttgctcggttatgttgtgtggcatgcaggaggttgacttggcagattggcagagaaatactgtttatcgacattatacaagaa

SEQ ID NO: 256969 - DNA, 100 bp, Homo sapiens
gtccttcagggccattcagcttctattacttccatacagatgcttcctgcccttgaacattggaatacaagttcttcagctttgggactcttggaccttc

SEQ ID NO: 256970 - DNA, 75 bp, Homo sapiens
gacaaactaaagaaagacttgtgttacttacatgaacatgcagcctacttggtggacagtttatgggagagctct

SEQ ID NO: 256971 - DNA, 74 bp, Homo sapiens
aagaccctaaagttcgtcgtcgtcatcgtcgcggtcctgctgccaacacgaatgcagagtttgagtccagatcc

SEQ ID NO: 256972 - DNA, 100 bp, Homo sapiens
ggagaatgtgggtcctaggcatcgcggcaactttttgcggattgttcttgcttccagacaatgcagatcttcgtgaagactctgactggtaagaccatca

SEQ ID NO: 256973 - DNA, 75 bp, Homo sapiens
gaagatagcaccggggcatccccgggagtccgcaagatgatggatggcccaggagagaatgatcctgatttgaaa

SEQ ID NO: 256974 - DNA, 100 bp, Homo sapiens
gcttatgaatatctgtgccacttagaggaagccaaaagtacctggagtagaacagaaaaattattatgtctgtgttcccttgggactcattggaaattgt

SEQ ID NO: 256975 - DNA, 75 bp, Homo sapiens
ggggcccaacgaggcgctggtggtttcagtaagcactatcctttgtactccctcaacgtggcctccatgtggttg

SEQ ID NO: 256976 - DNA, 100 bp, Homo sapiens
cgaaaaagaacgacatgatgcaatcttcaggaaagtaagagggtggaacggcacatgtgtgatggggacattgttatcttcaaccggcagccaactctgc

SEQ ID NO: 256977 - DNA, 90 bp, Homo sapiens
ccagtgtttccgtcagtacgcgaaggatatcggtttcattaaggggactttctcattgttgaccccattgaagagggagaaaaggtgaag

SEQ ID NO: 256978 - DNA, 82 bp, Homo sapiens
gaagaagaggacgacgacgacgaggaagaggaggtttctgaggaaactttgagggaaattttgagtcactggaccttgcgga

SEQ ID NO: 256979 - DNA, 51 bp, Homo sapiens
actaagagtccactccacttagctattcaaccctatgaaaagataaaggcc

SEQ ID NO: 256980 - DNA, 100 bp, Homo sapiens
tttgaaacaactgatgagagcctgaggagccattttgagcaatggggaacgctcacggactgtgtgacctacaacaagaaaggggcctcccgaaggaaag

SEQ ID NO: 256981 - DNA, 83 bp, Homo sapiens
gaaagtgcgaactgcctatccgtcattgagacttattcatgctgtcagaggttgagccccatatgggggttggcaggcagcag

SEQ ID NO: 256982 - DNA, 101 bp, Homo sapiens
ggaagtgtcttggcaagttatggcaatgtgatcgtcatcacagtcaactatcgacttggagtactcgaagtttacaggcaagatcctactcacagaggctc

SEQ ID NO: 256983 - DNA, 100 bp, Homo sapiens
accagtgggccccacgtgggtaaaaaggaagctgaatatggtgggcatgatcagatagatttgtatgacgatgtcatatctccatctgcaaataatggag

SEQ ID NO: 256984 - DNA, 75 bp, Homo sapiens
attttatgtgctacagtctgcggaacggagcagtatttcaatgtggagttgatcatagtcgtgaaaaagaaaatg

SEQ ID NO: 256985 - DNA, 101 bp, Homo sapiens
tgacgaatcttctggatgtccctggattgaaggtgctgataagactgtgaaaggcccagatggactgaccgcctttgaagccactgacaaccaggcaatca

SEQ ID NO: 256986 - DNA, 100 bp, Homo sapiens
ctcaagtgatggtttaaggcaaagggaagttcttcggaacctttcttcccctggatgggaaaacatctcaagatcgagacatgtaagcagcatcatggag

SEQ ID NO: 256987 - DNA, 74 bp, Homo sapiens
ggggtcaccgtccagagccaaggtccagggggcaaggtcgtggaaatcactcagaaaatcctagaagctgtggg

SEQ ID NO: 256988 - DNA, 100 bp, Homo sapiens
ctccacctcattatgggcactatggggatccgtcgcacacagcatctccaacagcaagcttgcgggttcgagtacacctctaaacttcagcgcatgtttc

SEQ ID NO: 256989 - DNA, 51 bp, Homo sapiens
ctggcccggaaacaggaggacgtcgtgcacacacacaagccgcacttcatg

SEQ ID NO: 256990 - DNA, 80 bp, Homo sapiens
gctgtggaagaagcataatatggtgaacggccgcctggcaggaactgtggctgcaccatctgtcttcatcttcccgccat

SEQ ID NO: 256991 - DNA, 82 bp, Homo sapiens
ggcgtcgggcgcgggcaaggccatcggcgtcctgaccagcggcggcgacgcgcaagggactttgaacatgtcggggatcgcc

SEQ ID NO: 256992 - DNA, 75 bp, Homo sapiens
ctgtgcggctgcccggcccccgccgcgggttgattcttcaccacactgaaaccattaggaaaaatccttgtggtt

SEQ ID NO: 256993 - DNA, 48 bp, Homo sapiens
gccggcttccagtgggccaccaaggagaaaaagcggatggtggttcct

SEQ ID NO: 256994 - DNA, 80 bp, Homo sapiens
cagttaatggcaagacttgcagaggaaactaatctggattcactccctctggttgatacccactcaaaaaggacacttct

SEQ ID NO: 256995 - DNA, 98 bp, Homo sapiens
gacaaaacgccaggcggatctcagaaggccagttcaaaggtgaaaagccatacaagtgtacctgggaaggctgcgactggaggttcgcgcgatcggat

SEQ ID NO: 256996 - DNA, 50 bp, Homo sapiens
gacgagttccacatcagtgtcatcagattattaagttcctgcaacttaac

SEQ ID NO: 256997 - DNA, 101 bp, Homo sapiens
accaccaggactcagaggccgccatcaaccgccagatcaacctggagctctacgcctcctacgtttacctgtccatgaagtggtccaaaggcaaagttcgg

SEQ ID NO: 256998 - DNA, 101 bp, Homo sapiens
gggaaacacaaagccggctacgcgctgcgagggtcagtatagaccttctgatttgctgtgccctgagacatatgtttgggtacccattgagcaatgcctgc

SEQ ID NO: 256999 - DNA, 132 bp, Homo sapiens
gcccttaaactacaaagagagactttttgtacttacaaagtccatgctaacctactatgagggtcgagcagaggctgtattcatcaccaaagaaaaaacttacaccaatgcagaaatcggttagtccattag

SEQ ID NO: 257000 - DNA, 152 bp, Homo sapiens
ttgtattgcaatcatggtgcagaaataccagtccccagtgagggtgtacaaatacccctttgaattaattatggctgcctcattgctacgatttcagagtaccctggtaatagctgagcatgcaaatgattccctagcacccattactttaa

SEQ ID NO: 257001 - DNA, 75 bp, Homo sapiens
cctcggcactaggcagcggaggagcccgaccgacccggaagctcttcgtgggcggtcttgactggagcacgaccc

SEQ ID NO: 257002 - DNA, 83 bp, Homo sapiens
ctcggagacacatgaaggtggcattttttggcagctaatataatgccttcgtcgtctcatctctttggctcaatgccatgggg

SEQ ID NO: 257003 - DNA, 90 bp, Homo sapiens
ctctctgcagcgggatcaagctgtgtgcattagtacaaatgatgcagagcaaagcggcagtccccggacagggatgggctctgaccagga

SEQ ID NO: 257004 - DNA, 82 bp, Homo sapiens
gaaatggctgcgagaccctagaggcctgcggcctgcgcctgggctggaagctcttctacgtcacaggctgcctgtttgtggc

SEQ ID NO: 257005 - DNA, 94 bp, Homo sapiens
cagattcgcagtggtcgcttcttctccttggttggcaaaagcagcttttgatgatgcaattgcagaactggatacgctgagtgaagaaagctat

SEQ ID NO: 257006 - DNA, 125 bp, Homo sapiens
tgaaagcgtgctccacaaatatttacagtcggaggagtactcggtgaaatcctgtcctgaagactgtaaggtggaaatggatattgttgaaaaactggtgaaaatgataccttgtgagcatgaag

SEQ ID NO: 257007 - DNA, 100 bp, Homo sapiens
cagttttggaagaggagcgctaagctgccggggaggtcaaaatgcagatcttcgtgaaaacccttaccggcaagaccatcacccttgaggtggagcccag

SEQ ID NO: 257008 - DNA, 75 bp, Homo sapiens
ctgccgagaaggagggaggggaaacacaaagccggctacgcgctgcgaggagcatctttccttgaagaagtacat

SEQ ID NO: 257009 - DNA, 100 bp, Homo sapiens
cgaggaccctgccaagttcaagatgaagtactggggcgtagcctcctttctccagaaaggaactgtcattctaatgatcataaagctgactaagccacag

SEQ ID NO: 257010 - DNA, 100 bp, Homo sapiens
tcagagggacctctacagagaagtgatgttagagaattatgggaacgtggtctcactgggttgggggccgtcccgctcctaaggcaggaagatggtggcc

SEQ ID NO: 257011 - DNA, 75 bp, Homo sapiens
cgggcctggactgtgggctggtgtgtggaactggtccaggtgcaggtacagcagtctccgcaacaggtctcggct

SEQ ID NO: 257012 - DNA, 73 bp, Homo sapiens
cgaaggggacctcatgtccctgtgggacacaatgcccccaaggggcaagattcttgccaagagaattaatgtg

SEQ ID NO: 257013 - DNA, 75 bp, Homo sapiens
cttatttggggcaatgctaaatattgcggcagttttatgtgattttctatgatagcgactggaaccccactgtgg

SEQ ID NO: 257014 - DNA, 50 bp, Homo sapiens
agcactgactttcagctatggaatcggtcatctgtgggaagtgctccgag

SEQ ID NO: 257015 - DNA, 50 bp, Homo sapiens
gaagcagacgagttcactagacaagaaattcggaactatccgggcagatt

SEQ ID NO: 257016 - DNA, 75 bp, Homo sapiens
caagaacttaaacgaaaattgaacattctgactcgaccgagctaccagagattcactgactgctataagtgcttc

SEQ ID NO: 257017 - DNA, 100 bp, Homo sapiens
tactaagagacagtctttaaaggccataggaaaaggatacagagtagagtttcatgaacctgaaacttggtggaaatttgatcctgaagaattagaaaag

SEQ ID NO: 257018 - DNA, 90 bp, Homo sapiens
ctcatcgtctgtttcatcaagaggagtcgcggcggcaagtacccaggacagagcgggatgccaccagcttgtccaaagggaagttccagg

SEQ ID NO: 257019 - DNA, 76 bp, Homo sapiens
ccatgtgctgaaatgtttgacgacactgatggtttgcacccatatatctcccatcagcatcctaccagcctctaca

SEQ ID NO: 257020 - DNA, 90 bp, Homo sapiens
atcggcccaaggccagttctccgcagaaactgcttatcaataacagctgtagcactgtggcttttctccatggactcatggtggtctttg

SEQ ID NO: 257021 - DNA, 50 bp, Homo sapiens
gtccccgcgttcacagccccagcgcagaattaaacaaccaccatgtcgag

SEQ ID NO: 257022 - DNA, 100 bp, Homo sapiens
tgaagatcttcatcggtgtgcacttttaacagttcttccctgtggaacagtagagacctagtctgccttctttcacaagataatccttcaattatttgaa

SEQ ID NO: 257023 - DNA, 85 bp, Homo sapiens
cgattcctcctccttggtcgccgcgtccttggctggcgtgatctatcttgggatcccatggctttctttactgggctctggggcc

SEQ ID NO: 257024 - DNA, 51 bp, Homo sapiens
ttcgcagtggtcgcttcttctccttgagaagtttcacttcaagtcatggat

SEQ ID NO: 257025 - DNA, 124 bp, Homo sapiens
gacttcaacatgttccgcagccaggccgggggcgcctgcgactgcggggacagcaacgtgatgcgggagagcggtgcatctagtgagagtgaagctgaaaatcttgaagcacaaccccagtcta

SEQ ID NO: 257026 - DNA, 75 bp, Homo sapiens
gccggcgcggcgcagaagaaacccgcggcgaccacagccaaagcgggcattctttcttgtggagaagttattcat

SEQ ID NO: 257027 - DNA, 100 bp, Homo sapiens
agactatgacattccaggaaaccttcactgctaagaggaactaagatctagagtatctcctcgaggaagtacaactgataaatatgggatatcttctggt

SEQ ID NO: 257028 - DNA, 85 bp, Homo sapiens
tatcttcatgaggaagagaagatcgtcaagaagttgtgccattacagcagcagatcatcagactccaccaagagcttgggagaca

SEQ ID NO: 257029 - DNA, 76 bp, Homo sapiens
actacttaataatgacaatctcctcagggaaggggcagcacaggtggggcaccctctccatttgatagaaactttg

SEQ ID NO: 257030 - DNA, 76 bp, Homo sapiens
atgatgaggaagggaggatgatggtgaggcaggagaggaggacgaagaggtaaaaatgttgtacatcagctctcag

SEQ ID NO: 257031 - DNA, 98 bp, Homo sapiens
gcagatcggcgcccagcaatcacagaagccgacaaggcgttcaagcgaaaacatgaccgctgagcccatgagatgtgttcagagcaacattgttttgt

SEQ ID NO: 257032 - DNA, 100 bp, Homo sapiens
gcgaccccacagtgcagcgctccgtgtttgcatcggtggacaaggtgccaggaaactactttgcttcgcactttttcatgggaggagagaaattcgacac

SEQ ID NO: 257033 - DNA, 100 bp, Homo sapiens
ctggagttcctgagatctcaaggtgggaccagggagattggatctgctctcaccaggatgtgcatgaggcacagaagcattgaagccaagctgaggcagt

SEQ ID NO: 257034 - DNA, 101 bp, Homo sapiens
cggtgattgaggacaagaccatcgagctcatggatactggtatcgggatgacacaggaagagctggtgtccaacctggggacgattgccagatcggggtca

SEQ ID NO: 257035 - DNA, 83 bp, Homo sapiens
cccggagacaagctctgtccgcggagaggagtgggacaactcctaaagatgctactatcattcacgatggccatgaggagaag

SEQ ID NO: 257036 - DNA, 87 bp, Homo sapiens
aacgacgcgggcgagcggggctttggacgccggtggagacgcaggcgagaaaatatttacaccagcagctccagttcataccaataa

SEQ ID NO: 257037 - DNA, 83 bp, Homo sapiens
gagagacccgagttcatcgcctacccccatctccgcatcaggaccaaggatcagttggtaaaagaagataatattgatgcagt

SEQ ID NO: 257038 - DNA, 83 bp, Homo sapiens
caggaattgagagtcacagaggaaggacagtggagtctggcatcttattgggaaagtttaaaggaagaggaaatgatcgcagg

SEQ ID NO: 257039 - DNA, 90 bp, Homo sapiens
ccatggcggagggcggcagcccagacgggcgggcagggccgggctccgcaggtttctcttaaggttctgcagggcaaggctgtctgggac

SEQ ID NO: 257040 - DNA, 83 bp, Homo sapiens
aagaaaacctaaagtatttgccgttggtgattcaagggtgaccctggcagcaaccccaacaaacgccagaggcagccccctct

SEQ ID NO: 257041 - DNA, 100 bp, Homo sapiens
tgctggcacaagatgaagaaaggcaagcctctctagcagactgtcttaaccatgctgttggatttgcaagatttagtccatattatcgaaccaaggaaaa

SEQ ID NO: 257042 - DNA, 82 bp, Homo sapiens
gctgcgttcacggcaggattcggttagggtgtctgctgcacagccctgctggtggccgtggtggcccggaagctggagttta

SEQ ID NO: 257043 - DNA, 100 bp, Homo sapiens
tgagtattgtctttatatcctgacactatgaatgctacttggatgcctcttaagccttgcagtctcatcctactcaagtgtggctctgtatccaacaaca

SEQ ID NO: 257044 - DNA, 50 bp, Homo sapiens
ccttccacaccccctccgtgggtgtgtgattttgatgcatacgaaagaga

SEQ ID NO: 257045 - DNA, 82 bp, Homo sapiens
ttggctatgtgacgctgctggaggaaacacctcaggacacggcctacaacaccaagaggagccattccgtagtgccatcccg

SEQ ID NO: 257046 - DNA, 100 bp, Homo sapiens
atgtttcagttcctccatttaacagcaatgaggttgaaagaatgttggaaaggcatgaacgctttaaacctgaaatgtttgcagaattgctacaagcagc

SEQ ID NO: 257047 - DNA, 90 bp, Homo sapiens
aaagtacaagaggagaggggaaacccacaggtggagctgaccatgaggactgtcacaggctttggtatcaggatgattctggcctcataa

SEQ ID NO: 257048 - DNA, 82 bp, Homo sapiens
ggccttcgtacccgtcttgattgagtctttcccagggaactccgatgaagtgttccaacaaaatgagcgagtgaaccaagaa

SEQ ID NO: 257049 - DNA, 97 bp, Homo sapiens
aagcggttcggccagtggaccaagttgctctgcgtcatcaaagacaccaaactgctgaggatgtcacccccatcccctctgacagcactcgcaggaa

SEQ ID NO: 257050 - DNA, 75 bp, Homo sapiens
aagccagtgttgtggaccctagcacagagaatcctcactatggatgggctcattgaggacattaagcatcggcgg

SEQ ID NO: 257051 - DNA, 98 bp, Homo sapiens
tatgcaccacttggaacagtttatagagaacttcagaaactttcaaagtttgatgagcagagaactgctactatcaaagagccagccgagaagcaaaa

SEQ ID NO: 257052 - DNA, 100 bp, Homo sapiens
caaacccaagttggttggagatgtggattttgaaggtgtgtgcagtggcctcagggatccggaaagtctaggactgaacttctcctaacatccagtaatg

SEQ ID NO: 257053 - DNA, 51 bp, Homo sapiens
tggatgaagaggaggaggacgaagctctagcaaaagccagctgctatgcgg

SEQ ID NO: 257054 - DNA, 90 bp, Homo sapiens
gcagctgctaaagaagtcctctctgatccagccagcgtcccatgctcggtggccccagaaaagtcagtgtgtaggcctcagccacttcag

SEQ ID NO: 257055 - DNA, 90 bp, Homo sapiens
aagcaagccgccgtggagaaggaagaactgtgctgaggaatacctggaagcaattcaccatctccatgaggagtggctcatcaaaggcag

SEQ ID NO: 257056 - DNA, 82 bp, Homo sapiens
tcccgctgcccgcgggcccaggtcggcgtcggccgcgggcaagaaggctgctggcaaaggggacgtcccaacgaagagacca

SEQ ID NO: 257057 - DNA, 100 bp, Homo sapiens
gcaggcgccgcacggagttgcgtcccggggacttggggccgcagggagctgcctgtggaggaaccgattgtgtccacagatgaggtcatcttcccactca

SEQ ID NO: 257058 - DNA, 100 bp, Homo sapiens
gtgagacttcgagagccctgtcatcttctaaacagagcagcagcagcagagatgataacatgtttcagttatagctgaggtggtaccagtttaagaagtg

SEQ ID NO: 257059 - DNA, 98 bp, Homo sapiens
gtgcaccgtatcctgtcacttctggatgtgagattgccccacatcatctcattctactaaaactgtctccccatcacctgcctttcttgatgaagaag

SEQ ID NO: 257060 - DNA, 90 bp, Homo sapiens
tcctccgatacttcccgcagtcgctccctgcggtgtggccccccaagcacgcatcacaggtggcagcagtgcagtcgccggtcagtggcc

SEQ ID NO: 257061 - DNA, 97 bp, Homo sapiens
tgcagtgtctctttcaacagatagaaaggcaggagcagcttctggatgaaatacatcgtgagaagagaggtacctactgtcaacaacgggaagtgga

SEQ ID NO: 257062 - DNA, 75 bp, Homo sapiens
gtcggcaaggagagacgtcgctgaggggcttgcctgaagcgaggggtaaaatccagaatctcctgcctgatgact

SEQ ID NO: 257063 - DNA, 80 bp, Homo sapiens
agcgaaatgtgctcattggccattcctacgggacagtcattttgtttactcattcagccctgttgcaggtcccaataaac

SEQ ID NO: 257064 - DNA, 96 bp, Homo sapiens
ggaggaggacgaggacttggaagccgctactggcgccggtggaatcggttctgcagaaggaagtgccgcgccgcagtcaagtctaatgtcttctac

SEQ ID NO: 257065 - DNA, 100 bp, Homo sapiens
gccttttccgttgccggtgccggcctagcgtcctggaattacttcaatcaaatttaaattccaggttgtcatcaatggccgagagtttcccccagctgaa

SEQ ID NO: 257066 - DNA, 75 bp, Homo sapiens
ctcccaaagagctgggattacagagtttatatcccctgtatctatgtgttaaataagattgaccaaatctccatt

SEQ ID NO: 257067 - DNA, 75 bp, Homo sapiens
ggattccaagtaactcttatttggcaaaacacattcttggtcctaagagatttcgatgggcttgttcaagttatc

SEQ ID NO: 257068 - DNA, 101 bp, Homo sapiens
gccgccgccgccaccaccgccaccggaacccgagaccgagtcagaacccgagtgctgcttggcggcgagctatttccttcgtgctaccatcagccgccgcc

SEQ ID NO: 257069 - DNA, 75 bp, Homo sapiens
aagagagtcaccgaccatgacggatcctgataacttaagtgactctctcttttccggtgatgaagaaaatgctgg

SEQ ID NO: 257070 - DNA, 82 bp, Homo sapiens
gggagccgtgctctacctctatccgctctaagcgaaagacatgaggcctcagcctgaaatgaggttgttttgaggtcatctg

SEQ ID NO: 257071 - DNA, 118 bp, Homo sapiens
cctgggcgtgctggccccgggtggcgcctccctgcgactcctggaccaccgggcgctggtctgctcccagccggttgaaatcacaaagattagacacctttttagataggtgttcttc

SEQ ID NO: 257072 - DNA, 110 bp, Homo sapiens
gagaggatttgcttttgtaacttttgatgatcatgatacagttgataaaattgttggaactgtggctgcaccatctgtcttcatcttcccgccatctgatgagcagttga

SEQ ID NO: 257073 - DNA, 80 bp, Homo sapiens
tggcgaaggagccggctccaagctggtaggtgagtgctgtcctcggctcactttcctcaagctctccggctgccacggtg

SEQ ID NO: 257074 - DNA, 75 bp, Homo sapiens
taagggcgacagcaacagctctgccggctggaagtatggatggagcagatctgtgttttgaaatcgtaaagcgag

SEQ ID NO: 257075 - DNA, 75 bp, Homo sapiens
tctgccccagaaccggtcgaaaaccgtgtatgagggattcatctcggctcagtggtgaaagtggggcaggtaaaa

SEQ ID NO: 257076 - DNA, 100 bp, Homo sapiens
aagacccgcgccgccgggacccccaggacgacgtgtacctggacatcaccgatcgtaaagctgaaaattgaaatcatgaaagtagacaggactaaactga

SEQ ID NO: 257077 - DNA, 98 bp, Homo sapiens
ataagaaatattggaaagacgctcgtcaccaggacccaaggaaccagaccgtgaatagtctcccacaatacgcagagccttcctgtcccagccttcct

SEQ ID NO: 257078 - DNA, 100 bp, Homo sapiens
catcgccaaacctttccagagagaaaaccagagggggctgtattaaatgtcgaggatgctgccactcggctccagcttttaaatcgctcagctttaagat

SEQ ID NO: 257079 - DNA, 75 bp, Homo sapiens
tgctcatcctccaggaacagcaatattgcatatcaagaattggcagagggggtcgatttgggaggaaaggtgtgg

SEQ ID NO: 257080 - DNA, 100 bp, Homo sapiens
gcaccccagagagtgaggagtggagcagcagccagcctgggaaatcctcattgacgattcaatttgttgaaggccaatttgtggactcctacgatccaac

SEQ ID NO: 257081 - DNA, 75 bp, Homo sapiens
tcatccaagtggaggttcctacagagattcatatgagagttatgatgttgaaagtgtgatgaacagtgtggtatc

SEQ ID NO: 257082 - DNA, 98 bp, Homo sapiens
ccaactgcatcgtgctggccctggagcagcacctccctgatggggacaaaacgcccatgtccgagcggctgggcagcccaatggatccaatggtgatg

SEQ ID NO: 257083 - DNA, 82 bp, Homo sapiens
catgaatttgttactttttcttgtccgggtgcggataagggacccgacactgatgtatgcactccagaaagctaataataga

SEQ ID NO: 257084 - DNA, 118 bp, Homo sapiens
accgcaaagcggggacccagaccctggagcctcagttggaagcagccgatccagcctgcggagcctgtggggcagcgagaaccctctgcccacagtggagattgccatccggaacacg

SEQ ID NO: 257085 - DNA, 90 bp, Homo sapiens
ctttgctccgcctccggcagtggcttactcccggtgccaggttcttggagctgtgaggtctcggcgcggaagatggccggcggcgtggac

SEQ ID NO: 257086 - DNA, 100 bp, Homo sapiens
cctatcataccacactcttcagcgaccacgcaggcactttcccggtccccagatttgggaatggatgatgaaggagatgatgacccagttcctctaccaa

SEQ ID NO: 257087 - DNA, 90 bp, Homo sapiens
gaagattgtcaaaaccagaagctgtgggatgaagtgctttcacatcttgtggaaggaccattctaatacccgatttacaattacattgaa

SEQ ID NO: 257088 - DNA, 100 bp, Homo sapiens
tctgcagtctcagcttcaggtgaagaaggcagctctcactcaggcaaaggagttcgtgcttctgaaaggctggctgaaatagacatgccatacctcctga

SEQ ID NO: 257089 - DNA, 100 bp, Homo sapiens
ttcagctcctgcagctctgaagtggttctggctttatcctgtggataaacgcagagtgaacgagtttggggagtcctacgaggagaaggccacgcgggcg

SEQ ID NO: 257090 - DNA, 74 bp, Homo sapiens
gcggggcaagtggctcggaacacagcataatgctccaattcctcaaggagggcgtggtgcaatccagtttgtga

SEQ ID NO: 257091 - DNA, 100 bp, Homo sapiens
gaatctgccggatggtgctggccacttgcttgggatcctttatcctggtcatcttctatttccaaattggtcgcattatgtttcagctcttctcagacat

SEQ ID NO: 257092 - DNA, 100 bp, Homo sapiens
aaagaatctcaaagtgaaaggaccagttcgaatgcctaccaagccccgggagaaggggaggatgcgtttccacaagctgcagaatgtccagattgccctg

SEQ ID NO: 257093 - DNA, 90 bp, Homo sapiens
ggccggcgtgctgagcctgtcctgtgttggcgtgtgttccacatgcgcttgggcctggccacaaaactaatggcagatcccggaaatcca

SEQ ID NO: 257094 - DNA, 98 bp, Homo sapiens
ggaaattgacggataatatcaagtacgaggactgcgaggtcgcaatggaagaagagatcgccgcgctggtcattgacaatggctccggcatgtgcaaa

SEQ ID NO: 257095 - DNA, 100 bp, Homo sapiens
gagcatgacaagcgagaccctgtggtggcttattactatgagccagatgaccgaagctggctggaacatcatgtggtccatcagtactggacagccaggc

SEQ ID NO: 257096 - DNA, 82 bp, Homo sapiens
cttaatgaggaccacactccaacgcggggcgcagtgcaatggctgccatccggaagaaactggtgattgttggtgatggagc

SEQ ID NO: 257097 - DNA, 100 bp, Homo sapiens
aatgagtacaactaccgctgctggaccacaaaccgctgccagaaaacatcagacaacagtcagcgctttcgagaaacctgttttgcatttgccttgacac

SEQ ID NO: 257098 - DNA, 75 bp, Homo sapiens
gctggttctcggacctgaatgggaagagtgaagatagtgatccggggagacaggaacacgggcaagacagcgctg

SEQ ID NO: 257099 - DNA, 74 bp, Homo sapiens
ttcaggggaaatggcttcagcgcagtatattactgcagcaaagaatggccgagtggattctgaggaccggagga

SEQ ID NO: 257100 - DNA, 75 bp, Homo sapiens
ggcgccagcggccagcgctagtcggtctgggcggcgactggcggcgcgatggacctgaccgggctcctgctggac

SEQ ID NO: 257101 - DNA, 100 bp, Homo sapiens
gtggaacttgttggaaatggaacatacgggcaagtttataagcttgctgatgaccgtatggcactggtgtcaggcatcagcttagatccagaagcagcga

SEQ ID NO: 257102 - DNA, 101 bp, Homo sapiens
gctgccgctgctgctggtgttagcgctcagtcaaggacccagatgatgtggtaccagttggccaaagaagagcctggtgttggtgcatgtgctttggacta

SEQ ID NO: 257103 - DNA, 74 bp, Homo sapiens
ccgatttaaagctgagctgcgaggaaaatggcggcgggagacccaacatgagtgaagtttcctgcaagaaacgg

SEQ ID NO: 257104 - DNA, 99 bp, Homo sapiens
agacagtgttcgtcggggctacaggcagtggccagcatagcagctcctgcagtgtgatagtcctcggacagaatcacaaagcctccttcagcagagttc

SEQ ID NO: 257105 - DNA, 96 bp, Homo sapiens
cgtgaccgtcgctagaactcagttgtgcgttgcggccagtcgccactgctctccgacagttagttaatatgtgcatcaacccagatccagagaagc

SEQ ID NO: 257106 - DNA, 100 bp, Homo sapiens
tgccgctgttgctgctgctcggcctggcccgcggcgccgcgggagcgccgggccccgacgggtttacagattggtacccgagaactggaagagatgggag

SEQ ID NO: 257107 - DNA, 85 bp, Homo sapiens
tccactcaagaatcgtaggccaggctgatggagagctgaacattactcttccagaagaggtattcacaacattgtctgtgaccaa

SEQ ID NO: 257108 - DNA, 100 bp, Homo sapiens
cttcggggggccgcggctggagcgctcggccggcgtgggagcgccaaggccgcagaacatggtccaagacaattcctgggaaagttcagttcttctcaag

SEQ ID NO: 257109 - DNA, 98 bp, Homo sapiens
ttccacgtcatccgcatcaacaagatgttgtcctgtgctggggctgacaggaatgaatgacgtccttcctaacagtccgccctacttcccccgctttg

SEQ ID NO: 257110 - DNA, 100 bp, Homo sapiens
gcctcaaacaggagctggagcagctcaaagaggtgacttcatggtcatgacgattttcttcaatgtgagcaggcggtttggctatgttgcctttcaaaac

SEQ ID NO: 257111 - DNA, 99 bp, Homo sapiens
cttggcacacacaaatccagtgggctacacaggtttctaagcatgaattgaggaacagaagaagcagagcagatgatcggagcagcatttgtttctccc

SEQ ID NO: 257112 - DNA, 100 bp, Homo sapiens
ggaggaggcggtggccctgctggaggagctctggttttaacttctagtcatggcgaatgatcgcaggagagcacagactggaccctgctacgatctctct

SEQ ID NO: 257113 - DNA, 89 bp, Homo sapiens
tgagatgggcaccgcggatctggggccgtcctcaggagaatgaagtttctagattagaagacataatgcagcatttaaaatcaaagaag

SEQ ID NO: 257114 - DNA, 75 bp, Homo sapiens
cgccttgctgctgctcaaagctgctgccgccccttgggctaaaagcctgacatttaccccggtaactgctgggca

SEQ ID NO: 257115 - DNA, 96 bp, Homo sapiens
gttacctccctgtgcaattccagtcacctgataaagcagaaacccagcgtggagacccgtctgttatttctgttgactatagtcaatggggccaat

SEQ ID NO: 257116 - DNA, 100 bp, Homo sapiens
ccggcgtgccccaccatgtcagacgcagccgtagacaccagctccgaaatcaccaccaagatccgggtcttcctccagcagctcaagggccgcgtagccc

SEQ ID NO: 257117 - DNA, 76 bp, Homo sapiens
catccacgcacctgcagctctgctgagagagtgcaagccgtggggcatcaacatcgaaagctaccaggccttggta

SEQ ID NO: 257118 - DNA, 98 bp, Homo sapiens
cttgaaatacgtctccattctttttccttagtactctcgttcattcacttacggttacacttccaggggctccccactcagtccccagtcatctatcg

SEQ ID NO: 257119 - DNA, 50 bp, Homo sapiens
gctttaaagaatacacttcaaacagccccagtaagggccttggaccttgc

SEQ ID NO: 257120 - DNA, 89 bp, Homo sapiens
gagcagcgcggcgtgaagcggcccatcgtgcccgcgctggtgccggagtcgctgcaagagcagcagccgctcttctaaaacattcaaac

SEQ ID NO: 257121 - DNA, 50 bp, Homo sapiens
tggtcttcatttgtgaatacatagtgcagctgtctgcttcagaaagtgag

SEQ ID NO: 257122 - DNA, 75 bp, Homo sapiens
gaagagacatgagaccatagccaaacccccaggccatccgttgcacactggtaaactgcacatgtgaatgttttc

SEQ ID NO: 257123 - DNA, 100 bp, Homo sapiens
tggggtgatcaaaagaaagctcatcaagccagagctggagtatctcaggatagctggaatggccttagtcatgaggcttttagacttgtttcaaggcggg

SEQ ID NO: 257124 - DNA, 50 bp, Homo sapiens
ttgtggaagtggaaggaacagtgaagaaaaacaagagctggatctcagag

SEQ ID NO: 257125 - DNA, 99 bp, Homo sapiens
aatgggaggtgaatttccatgtcaacatagtccaggaagcacaagcctatgcagacgacaacagtttgctgttcatggagacatcagcaaagactgcaa

SEQ ID NO: 257126 - DNA, 74 bp, Homo sapiens
tttatcctcaagagtcagctggcagatcactaaggaggaagagcgagagaagaagttttctagaaggctaaatc

SEQ ID NO: 257127 - DNA, 100 bp, Homo sapiens
atttgactcggtcttgggtgatacggcgtcttgccaccgggcctgtcagttgacctaccccttgcacacctaccctaagacttgcacacctacccctgtg

SEQ ID NO: 257128 - DNA, 89 bp, Homo sapiens
cttcaggaacctgctgtcagtgggaatcgggaaagttgacagtcatctgcaagagcactctccaaaccaaagacttctgaagagcgtgc

SEQ ID NO: 257129 - DNA, 96 bp, Homo sapiens
cttcaggaaaatactggagttcctgagatctcaaggcaatataaagtcctggttcactctcaggaacgagagctgacccagttaagggagaagtta

SEQ ID NO: 257130 - DNA, 95 bp, Homo sapiens
caagcaggtccaaagagagagtatctactgtgcgtttcagtcaacaatacagcttgtgttcgacaatattccttgatgacagcacagccatccag

SEQ ID NO: 257131 - DNA, 100 bp, Homo sapiens
cgggaagtggcgtggccaagattcgcattgaagatgacgggagctacttccaaattaaccaagttcctccggtttaggctcagctagcagcatccaggca

SEQ ID NO: 257132 - DNA, 85 bp, Homo sapiens
gccagcctcggcaccgtcctttcctttctccctcgcgttagggggatatgagactttctactcggaatatcctgagtgttgcgtg

SEQ ID NO: 257133 - DNA, 98 bp, Homo sapiens
ctggtagcccccacccctctccgtccatggccccagatgacacttcaggagatctataaggacaggcagaaattctcagaacaggttttcaaagtggc

SEQ ID NO: 257134 - DNA, 100 bp, Homo sapiens
gaaattgttggattgccagaagaagaagaaatcccagcaaataggaaaattaagtttagtagtgctcctattaagatcacaaatgttcacagcagccggg

SEQ ID NO: 257135 - DNA, 100 bp, Homo sapiens
gggaattgtgcaccgagatctgaagccggtgatgaacaatgacaagcactgctttgaatgctatggctacgacatcatcatcgacgacaagctgaagccc

SEQ ID NO: 257136 - DNA, 75 bp, Homo sapiens
gttcctggcccgcagccgccacctacccagtgaccatgatagttttagatggagcagttgtaaaacactacagaa

SEQ ID NO: 257137 - DNA, 76 bp, Homo sapiens
ccgatttcatgactaaccagtggatccatctgtctctaagtctgtagaacgaatctttaaaatctgggaagataga

SEQ ID NO: 257138 - DNA, 74 bp, Homo sapiens
ttatatttgcaggagatacaaatctaagggatcgagaggtggattttctcagatgtatgcctgtgtttgtgact

SEQ ID NO: 257139 - DNA, 75 bp, Homo sapiens
ctcagtcactggctgcaacaggaccacagtcaagacgatcatagtcactgatggccttggtggtattggcatggg

SEQ ID NO: 257140 - DNA, 100 bp, Homo sapiens
cccacagcaggttggacagttcacaggagcctgtgacattcagggatgtggccgtgttcttcagccaggacgagtggttgcacctggactctgcccagag

SEQ ID NO: 257141 - DNA, 76 bp, Homo sapiens
gccttaatgagcatgttgacagcatcgatgctagacagacaatcaagatattttggaaactatattgatagacagc

SEQ ID NO: 257142 - DNA, 75 bp, Homo sapiens
acgagtttgaagagttccctgccgaaggtgttctgaagacgcagatcccgatattaacttaccaaggtggatcag

SEQ ID NO: 257143 - DNA, 144 bp, Homo sapiens
cgcatgtttcccacccagggcttcacggagattgtcttctgtgctgtcacctcgaatgagcaggtcaagggaccgcagatgttcatggactgcagcccacaggccctgcccatcgcatcagaggacaccacggggcagcatgac

SEQ ID NO: 257144 - DNA, 90 bp, Homo sapiens
gcggtccctgtgacctgtggagacacggccagatctgccctccagtggagtgcaactcaaaattggacccaacaaagaccactctcctca

SEQ ID NO: 257145 - DNA, 50 bp, Homo sapiens
cctgaggcctccccagccatgcagaactgctggagtgcggtggcgtgatc

SEQ ID NO: 257146 - DNA, 74 bp, Homo sapiens
ctgggcaacgtggttggaatgtatctggctcagaactatgatgtcaatgtgacggtggactacattagaccagc

SEQ ID NO: 257147 - DNA, 51 bp, Homo sapiens
ccaaggagacgctcctggcactgcagactgtgagaacattctctttgaagg

SEQ ID NO: 257148 - DNA, 106 bp, Homo sapiens
acggctcttcccggcgctctcctggctcccttctgccccagctccgtctcggcggcggcgggcaaagtgtttcatggatttcaaagctggaggcgccttatgtcac

SEQ ID NO: 257149 - DNA, 96 bp, Homo sapiens
gcctgcaggacggcgcggcagagtccccgtacgcctacagtaacggtttgtctacagattttgagcgttcgaagttgacccctgactaagtatact

SEQ ID NO: 257150 - DNA, 110 bp, Homo sapiens
tgaccagaatttgtcaagatgtttcaaatttcatgaaaaatgccaaaaatgtcaggctcacctatctgaagatgaattccctctgctgacaaccaaacgtgtgttctgga

SEQ ID NO: 257151 - DNA, 87 bp, Homo sapiens
ggaaccagatatcttgaaaagctgccagaaagtttgagttcctgagatctagttggtgagagacatgatgttctaccggttgctgtc

SEQ ID NO: 257152 - DNA, 100 bp, Homo sapiens
agcagcccgccccgcccggcagcgagcggcgccttccaactccgggaaaggccttggaaagcagtcgttgcgccagacagcccagggaagagcggcagcc

SEQ ID NO: 257153 - DNA, 97 bp, Homo sapiens
gaatttatatagagatgtgatgttggagaactacagaaacctcgtctccctggcaatggtggatgtgatctttgctgatgtggcccagccagaccag

SEQ ID NO: 257154 - DNA, 75 bp, Homo sapiens
aactttttcaacaaagcaaggtcaatatgcagaaaatgctcccaggccggaaggtggtggtcgtacgctgtgaag

SEQ ID NO: 257155 - DNA, 49 bp, Homo sapiens
aggagcgctaagctgccggggaggagatacaactcgtcaacgaatcaaa

SEQ ID NO: 257156 - DNA, 100 bp, Homo sapiens
gatctgcatcctacagagccatggatgttggcaagtctttacaatggcagtgtgtgtgtttggaatcatgaaacacagatgttggcgccagcagctggtg

SEQ ID NO: 257157 - DNA, 90 bp, Homo sapiens
ctgctctgtgcgcgcctccatctgggccatggatggtgtcttgggacaaggtgcgcattcctggtgtgctgcagcgattgggagtgacat

SEQ ID NO: 257158 - DNA, 80 bp, Homo sapiens
agattttgcattggatattcgcatgcctggggttacacctaaacagagcaacaagatatggatttggatatagaatttga

SEQ ID NO: 257159 - DNA, 97 bp, Homo sapiens
aagtcaccaagaaattactgtctcaagtgatacggtgttaagtgtgatgcttccataatacatttggatgctgtcagctaagttcacttctgaacta

SEQ ID NO: 257160 - DNA, 78 bp, Homo sapiens
cggcccggagcccccagcgcagcggccgcggtggtcctgccatcatggctgtcctctgcaaaggtctcctcgctcatt

SEQ ID NO: 257161 - DNA, 101 bp, Homo sapiens
ggcggcccaaggtggaaggaggggccgtgaggtgagagagtccgggagcccgagcttgagaatttaagaagtgcaacatggccaggggctgcctctgctgc

SEQ ID NO: 257162 - DNA, 100 bp, Homo sapiens
gacggcgaccactgctcccgggccgtgcttccccaagtagtccgatggcagcggctgcgccgaggcgcccgactcaggttactagtattggaatctactg

SEQ ID NO: 257163 - DNA, 50 bp, Homo sapiens
cctccttccacctggccaggaatcagcaaatgatggctcagacattcatt

SEQ ID NO: 257164 - DNA, 100 bp, Homo sapiens
tctctggtagactctaggagcaactctctggatcagaagtgtggaggcacagttggtgctattttcacttgtccactagaagtcattaagacacggttgc

SEQ ID NO: 257165 - DNA, 90 bp, Homo sapiens
ggcctggaggacaccaacatgagaacaccttctgcagtggggaccatgtgtcctggcacagccctttggataacagtgagtcaagaattc

SEQ ID NO: 257166 - DNA, 96 bp, Homo sapiens
tacggagcacgagaaatacggcgtgggtggtcttcaagctgacagagaagctgacggaacagaaggagtggatgaagatataattgtgacccaaag

SEQ ID NO: 257167 - DNA, 90 bp, Homo sapiens
cgcggcagggggccgggggcccaggcaccttttgatgtcccagcagaccctgaggaatgtgccaccgatagtgtttgttcaagacaaggg

SEQ ID NO: 257168 - DNA, 100 bp, Homo sapiens
tgctttgtggtgtatggattcatctcactgactgaaacctgagttttgattcaccaggtttcatgccgcctccagttcccccacctgttgtgccaccccc

SEQ ID NO: 257169 - DNA, 75 bp, Homo sapiens
ccgcgggacctctccgggccatgggtgagacctggaaccccttcaaattacagtaccagctgagaaatgtacgag

SEQ ID NO: 257170 - DNA, 75 bp, Homo sapiens
cttccatgcggttcgggtccaagatgatgccggaagttggctggaatgtgatgacttaaaaggcccatgttctga

SEQ ID NO: 257171 - DNA, 98 bp, Homo sapiens
ccggctccgtcgtggaagcaggactgcgccgcgtcttcctcaaggtacatgtcccagagcaagcacacggaggcccgggagctcatgtactcgggagc

SEQ ID NO: 257172 - DNA, 75 bp, Homo sapiens
ataagactcgctatatggggaaggaccccccaaagacacacgtgacccaccaccccatctctgaccatgaggcca

SEQ ID NO: 257173 - DNA, 74 bp, Homo sapiens
cgcccgtccccctgccccgttcacaatgaatgtagcaaacctcgagaagcctttggatttgaacaagctgtacg

SEQ ID NO: 257174 - DNA, 75 bp, Homo sapiens
cttccattggccagtatgaagtggtgaaggagtgtgtgcagcgatgcagccctgggagtgagggcagaacccaac

SEQ ID NO: 257175 - DNA, 95 bp, Homo sapiens
ggcggaggcagaggtggaggcgctttgaaagtgtggattctttaaacgctctaggtacgatgacagtgttccccgataccatgctgtaaggatcc

SEQ ID NO: 257176 - DNA, 100 bp, Homo sapiens
tggcacctgcgcgaagctggccaaagcctgcccagacggctcacctgtgcgggatggaacaaaagtctatccttcactggagtctgatgatgatgaccct

SEQ ID NO: 257177 - DNA, 89 bp, Homo sapiens
ctggacagctgcgacggcgcgctgggctggcgcggcctgggtgtgtgcagtggcctcagggatccggaaagtctaggactgaacttctc

SEQ ID NO: 257178 - DNA, 100 bp, Homo sapiens
cgaagagcggcctcctgaaggaggggaagggacgtgggggcggccacggcagggagagctggtgacggcctccaaggccatcattgaaaaggagtaccag

SEQ ID NO: 257179 - DNA, 97 bp, Homo sapiens
ctcggtgctgtggtgcagagctagttcctctccagctcagccgcgtagaggcaaatttctggagatgtgcaatgatctcttagctagagtggagcca

SEQ ID NO: 257180 - DNA, 98 bp, Homo sapiens
ggggactctgtgtgagggaaagaaaacaatttctcctgctctgcagcttctgttcagctgttccatttcctccaagtcaccggcttacagcaaaagaa

SEQ ID NO: 257181 - DNA, 75 bp, Homo sapiens
gaagcgagaaaagatgaaacggaccctgcgcctgtgtctggcagagctggtgtgagacgagacaatcctgccccg

SEQ ID NO: 257182 - DNA, 75 bp, Homo sapiens
cagctagccatcttctaattttcattccttcaaaggacctgctgaagttcccatgatgtcacccaatggatccat

SEQ ID NO: 257183 - DNA, 99 bp, Homo sapiens
ctgggagcggccccttcctccaggggatccaggtccggcacgatcaagacccaggctacatgcatcacaagtttgccatcgtggacaagagggtgctca

SEQ ID NO: 257184 - DNA, 74 bp, Homo sapiens
tattttggcagcagctagagaactctttggaaaccagactgtgatgactgggagagcgggctgaatgcaatgga

SEQ ID NO: 257185 - DNA, 90 bp, Homo sapiens
agaagataacaatcaagatgaatatgaccctatggaagcagaagaagctgaggatgaagaagatggacgagattgaggagctgcgggccg

SEQ ID NO: 257186 - DNA, 90 bp, Homo sapiens
cccagatccagatcctggatcaaccctgcaggaagcttctcctgacccatgaccttcaggctgggattactacagcatcccatttcccac

SEQ ID NO: 257187 - DNA, 100 bp, Homo sapiens
caagcaagaacttgtggacttttggatggatttcctggtcgaggccacaaagacagatgttactgtggttaggtttccaattactcttgtctctgctgct

SEQ ID NO: 257188 - DNA, 85 bp, Homo sapiens
ttaaagcacggacttacacctattggttatgaagacagtatggagtttccagaccatagtagacatttgctacagtgtctgagcg

SEQ ID NO: 257189 - DNA, 75 bp, Homo sapiens
catgatttaaacaagagatttccacagaagtctgtagatggacggcagatccgagtagaccaggcaggcaagtcg

SEQ ID NO: 257190 - DNA, 100 bp, Homo sapiens
aaggatggaagaggtcctatgacaggatcaaggtgtctgcctcctgccccggtccacagccaggagccccggagccaacggccagcctggaagacttaca

SEQ ID NO: 257191 - DNA, 100 bp, Homo sapiens
cccagcgggagtcgcggaacagcaggcccgagcccaccgcgccgggccccggacgccgcgcggaaaagctccttcgagaactcatagaacggaagaccag

SEQ ID NO: 257192 - DNA, 100 bp, Homo sapiens
tctcgccacagcggcctcggcctccccttggattcagacgccgattcgcccaggtgaatgaaaactttgccattgatttgatagcagagcagcccgtgag

SEQ ID NO: 257193 - DNA, 51 bp, Homo sapiens
gcgtcatgaagcacctgcccaaggaacagacaacgcaagctggggacgaaa

SEQ ID NO: 257194 - DNA, 120 bp, Homo sapiens
taacggcacctacacttgcgaggcgtccaataagcacggccatgcgagggcgctctacgtacttgtggtctacggccccgagcattcctctgattcagaatacactctctcagagccgga

SEQ ID NO: 257195 - DNA, 90 bp, Homo sapiens
tcggaacccgcaccaagctctgctccacactgccaaccggccagaggacgagtgtgtgttcaccctgtgcttccccttcgtcttcctcct

SEQ ID NO: 257196 - DNA, 82 bp, Homo sapiens
aatccctccacctccttttttaagagcaagttttaacccttcacaaccaccacctggacagtcattttgtttactcattcag

SEQ ID NO: 257197 - DNA, 90 bp, Homo sapiens
atgctcatgatcggcgtgtttggatgtactttacaggtgaccgggttattgatgtgggatctgaatggcgaactttcagcaatgacaaag

SEQ ID NO: 257198 - DNA, 100 bp, Homo sapiens
gtcgtgctctcgccccaacccgcgcgccaggactaccaagaagcctccaatttggaacaattcgtaactagatttttattgaaggaaaccctgaatcagc

SEQ ID NO: 257199 - DNA, 100 bp, Homo sapiens
tatgagcctccatttcttatactactgcagtgaaccaacattggatgtgaaaattgccttttgtcaggattcaacgtgggcagaagtgctggtgggagat

SEQ ID NO: 257200 - DNA, 100 bp, Homo sapiens
agcatctgaaaaagctgtggaaggctctggataaggaccagtacctgcccaggaaactgctggaacatgaaaatgcccagttaagaaatataaatttctc

SEQ ID NO: 257201 - DNA, 75 bp, Homo sapiens
ccccagaagtacaagacacactcttcgaattcatggaataaatgggagataagagtgcccaggagtggaatctgg

SEQ ID NO: 257202 - DNA, 96 bp, Homo sapiens
tccggctcctccagctaccggcccaaggccatctacctggacatcgatggacgcattcagaagggtttccaggcctgaggtgcccgccctggcccc

SEQ ID NO: 257203 - DNA, 51 bp, Homo sapiens
gggtcctttatatagaagggagagtaggactttgaagaatatcctgaacat

SEQ ID NO: 257204 - DNA, 50 bp, Homo sapiens
taaagagtaaagttgtgctcaacggttgatccaaaagactacatgttcag

SEQ ID NO: 257205 - DNA, 74 bp, Homo sapiens
agatccacagctaagacaccgggacctcctggaagccaaaaatgggtgtccgcaatgttgccagtgtctgtctg

SEQ ID NO: 257206 - DNA, 82 bp, Homo sapiens
gcagccgatccagcctgcggagcctgtggggcagccacagctccggagcaagccccagccccggcccggccataccagggcg

SEQ ID NO: 257207 - DNA, 83 bp, Homo sapiens
cttcggcctgacgcccaccctcaatggcggccttatgccagcctggaccatcttggaggcagtgtaggatcatggaagaactt

SEQ ID NO: 257208 - DNA, 98 bp, Homo sapiens
ttctttgagccagtgtttggagaaggaggaatatttggtccctggtcagtttctgctttggctcccttctgttgccacatttgggccaaggaatggag

SEQ ID NO: 257209 - DNA, 80 bp, Homo sapiens
cagagctccatgacttcatgcagagggaaaatgcaattgaccgtttggttaacatatacaaaaatgtggtacacaaaact

SEQ ID NO: 257210 - DNA, 97 bp, Homo sapiens
tcagaagtgtattgataaatgtttcggagcaacatcccctgtcacctggttgatatctcttgcggattaccctgcagtgccacgctaccatgtggga

SEQ ID NO: 257211 - DNA, 83 bp, Homo sapiens
aagcagccgatccagcctgcggagcctgtggggcagagcagcccgacggccatggaggctgaagagacgatggaatgccttca

SEQ ID NO: 257212 - DNA, 82 bp, Homo sapiens
taccagctgaagagcgacaagccgctggcagccgcggatctcaccgccgctcaggatacctactggagcaggatttcccagg

SEQ ID NO: 257213 - DNA, 90 bp, Homo sapiens
aactgatattttatattgaaatggatcctccagataacaacgaacttgatgcaagtgataggtttgccaaggtcagacctctcatcatcc

SEQ ID NO: 257214 - DNA, 100 bp, Homo sapiens
tggaggaggacattgatacccgcaaaatcaacaacagtttcctgcgcgaccacagctatgcgaccgaagtggcctggtttgctttcgaccctggctcggc

SEQ ID NO: 257215 - DNA, 75 bp, Homo sapiens
aagttttctaccaatgtccatggtttttagatcgtatggctgatgacgactggtggccaatgcagatactaatta

SEQ ID NO: 257216 - DNA, 80 bp, Homo sapiens
ctgcccaaaccgggcggggcccacagcctagaaactaatctggattcactccctctggttgatacccactcaaaaaggac

SEQ ID NO: 257217 - DNA, 101 bp, Homo sapiens
cagggagctggacgagctgatggcttcgctgtcggatttcaagtctcaggggccagccaagcccccacccccaaggaagccactgcctgccgacccccagg

SEQ ID NO: 257218 - DNA, 100 bp, Homo sapiens
gactttggttggtggaggctgtggcaatggaacaggcttgagaaacagaactgtcaagtaatccacctctggctaccatccttattcctcctcatgctcg

SEQ ID NO: 257219 - DNA, 100 bp, Homo sapiens
ctctgcatcggtcggctcaggacttacggaaacagtactgccaaatctgtcgaaagggagataatgaagaactgcttcttctttgtgatggctgtgacaa

SEQ ID NO: 257220 - DNA, 83 bp, Homo sapiens
atcattctgcaagcaggcaacctgaatacagtaactctgggtggattttaactacaactcttgtcctctcggtgatggtattg

SEQ ID NO: 257221 - DNA, 100 bp, Homo sapiens
ccaggatgtgtcgccatccagtaatctcagaaagtgaagttttccagcagttcctaaatttccgagatgagaagaataataataacctggatgcctgctg

SEQ ID NO: 257222 - DNA, 51 bp, Homo sapiens
acgcacctctgtttgggggtcctcagatacgtggttgcagtaggattggag

SEQ ID NO: 257223 - DNA, 85 bp, Homo sapiens
aggttattcttaatcctgtaaatacgaatctttccaaaggagatgcccgcctgtgactgtgaccccaggggcattgagacgccac

SEQ ID NO: 257224 - DNA, 90 bp, Homo sapiens
gagaagaaatataaatatgtggaagattacgagcaggacctcagcatggccctgccctcagggcaggtctgccacgaccagcagaggctg

SEQ ID NO: 257225 - DNA, 98 bp, Homo sapiens
ctgtgtttgggagcctcatcattggttatgccagtgccggtggtggtgtgcacattgagccccggtatagacagttcccccagctgaccagatcccag

SEQ ID NO: 257226 - DNA, 102 bp, Homo sapiens
gagctggacaatgaagactattactcgttgctgaacgtgcgcagggaggtatttgaaatatctcaccaaaaaatatttgaagaagaataatctacgtgactg

SEQ ID NO: 257227 - DNA, 100 bp, Homo sapiens
aagagagaccttagaaaggatcaggactggcggattgtgaagaggtctcttgaagtttggggtagtcaagaagcattagaagaagcaaaggaagtccgac

SEQ ID NO: 257228 - DNA, 100 bp, Homo sapiens
ccgagaccagacgcggagccatggccgaggtgttgcggacgctggccggaagtggttacctggaaggaaaggagctgcagaacttgatccaggagctcca

SEQ ID NO: 257229 - DNA, 90 bp, Homo sapiens
ggctaaagctctgcgctgacttcaaacgcacaggtattgctttcactgacctaccggtaagactttttttaaaagcagttttccattttt

SEQ ID NO: 257230 - DNA, 78 bp, Homo sapiens
ttcattttatgtgggaggatgttcagcagcgcggcagagtcatgggggatcatgtatatgaacttctcaacaccattg

SEQ ID NO: 257231 - DNA, 82 bp, Homo sapiens
gtcttcgccggcgctggtctcccgcacccgggtctgcagtccctccgccatctcgcagccaagaagtatgatgcgtttttgg

SEQ ID NO: 257232 - DNA, 75 bp, Homo sapiens
agggcagaaatagcgaccatggcgagggttcagcaccacccccttctccaacacctaacaaagagatgaagaaca

SEQ ID NO: 257233 - DNA, 90 bp, Homo sapiens
tggaggtctccactctggtcagcaagtatccagacatcagacggagtctcagtggcgtgatcctggttcactgcaacctctgggcccccc

SEQ ID NO: 257234 - DNA, 100 bp, Homo sapiens
gggttttagaaaaacaagaattacagcagccaacctatgttgccctgagttacataaataggatattaccttccaaatgatgatggagaattttatcagt

SEQ ID NO: 257235 - DNA, 90 bp, Homo sapiens
agaacaagccaggaaaaccccgaaaacgcaagaagcgtggaaatgtttcaacgtgcgcaagcgttgcggcggcgggcagaggactactac

SEQ ID NO: 257236 - DNA, 76 bp, Homo sapiens
tcatcagcagcagagcaagtgacccgactgacgctgaagctcttgggacaggaattacatgaacgacagccttcgc

SEQ ID NO: 257237 - DNA, 90 bp, Homo sapiens
ggttattcgagtgaccgagaccgcggccgggaccgaggggatgtttcagcagcccctgagaaggaagaggaggaagctgagggcccgctg

SEQ ID NO: 257238 - DNA, 90 bp, Homo sapiens
tctctgcatcccagccatcacctggatttacctgttttctgggagcttcgaaggagaggatgaagatcagtatgagcagttcatgctgcc

SEQ ID NO: 257239 - DNA, 90 bp, Homo sapiens
agtatgacttccttcagtggaccactctgcaatgacccaattgggagcagtagtttcagcccacgaccaactcaccagttctctccacca

SEQ ID NO: 257240 - DNA, 83 bp, Homo sapiens
atcgagaaatggccgcgtcggcagcaattctgtggtgttcttggtcacacatttatggagtttctgaagggcagtggagatta

SEQ ID NO: 257241 - DNA, 100 bp, Homo sapiens
acgccaccgactcttgtatcatgagcattggatttgatcacatggggtcaacatatttcactggcacctattcacaagcttgaagaagctctgtatgaat

SEQ ID NO: 257242 - DNA, 90 bp, Homo sapiens
aaaagatcacaagcaactctggatgggattgcaaaatgaaactatgttccaacttcctgtcaacaatcttggcagtttaagaaaagcccg

SEQ ID NO: 257243 - DNA, 83 bp, Homo sapiens
agtccagctcctctgacagcgaagactccgaaacagggggatatgagactttctactcggaatatcctgagtgttgcgtggat

SEQ ID NO: 257244 - DNA, 51 bp, Homo sapiens
gccagcagacccagctacgtggactagaggaactgaaacatttgatcttgg

SEQ ID NO: 257245 - DNA, 100 bp, Homo sapiens
gaagtgcttggagtgcagaactgaaagagaaacctctgtagaggagcaggatgcaaccgacaggctgtggccggacagctgctgcccagcacatggagcc

SEQ ID NO: 257246 - DNA, 74 bp, Homo sapiens
ttcgcagtggtcgcttcttctccttggaagaaggtagataatgactataatgcccttcgagaaagactcagcac

SEQ ID NO: 257247 - DNA, 75 bp, Homo sapiens
ttacttcaggacaacctcttgggcaggggtctagacagtttcaaagtgaaacagaagttcttcgctggcagccag

SEQ ID NO: 257248 - DNA, 89 bp, Homo sapiens
aacacccacacacagatgtggtgaaatgtacccagttagtaagaggtgaaagatgtcatgaaggatgtcatgtcggacctgcagcagac

SEQ ID NO: 257249 - DNA, 90 bp, Homo sapiens
agagtttgaaggttgtgaccaaaagaggctccggttgaaatcacaaagattagacacctttttagataggtgttcttcagcaccactgac

SEQ ID NO: 257250 - DNA, 82 bp, Homo sapiens
ccgagtgcggcccggaggcggcggagggcaccccgggcgggcggcggctgctggcgtgatggtgggcatgggtcagaaggat

SEQ ID NO: 257251 - DNA, 75 bp, Homo sapiens
tagcatctgaacaattgcaagcagatgatgatgctgaagctatccttgctgcagacttcgaaattggtcactttt

SEQ ID NO: 257252 - DNA, 89 bp, Homo sapiens
gctgcagccgcagccgcctccgaagatgggggatttctacgacccggagcacccgacccctgatgatgtccttgcattgcccattttta

SEQ ID NO: 257253 - DNA, 75 bp, Homo sapiens
tacctgtttttccagctcacccactgccagcagagctgagatctgtatctgtggacctgaatgttgatccctcgc

SEQ ID NO: 257254 - DNA, 75 bp, Homo sapiens
ggaggggagccaggcggccgcctcagacctagaggatcaagacataatgggagcatttttagacaagccaaagat

SEQ ID NO: 257255 - DNA, 49 bp, Homo sapiens
ttggggcaaaatgtggacaagggtacttcggccttcaaggggctccttt

SEQ ID NO: 257256 - DNA, 75 bp, Homo sapiens
ccgacctcttccactccgaggaaatcaagacgctgaccggaaaggagattgagattgacattgaacctacagaca

SEQ ID NO: 257257 - DNA, 100 bp, Homo sapiens
ccttccccacgcaaccccagatccatttacactttacagctgacaaacgggctcatcataatgcactggaacgaaaacgtagggaccacatcaaagacag

SEQ ID NO: 257258 - DNA, 90 bp, Homo sapiens
gggagatgaacccaacctagtgggtgtaatacatcatgaactgcagggagatcatgaatcagacagataaaaatcaacaagaaatcccat

SEQ ID NO: 257259 - DNA, 87 bp, Homo sapiens
cagtcagctagaaagatgtaggcttggagcagaatcaccaagcatcgccagcaccagatgcctggaatgatgtcgtcagtaatgcct

SEQ ID NO: 257260 - DNA, 76 bp, Homo sapiens
gtctgggcctgtgtttcagctgggatagggtgatggttgctgaagccttggatatttccagagaaacctacctggc

SEQ ID NO: 257261 - DNA, 74 bp, Homo sapiens
ctatatctacaagggggtccgcaaggtgattttacaacgagatgctgctctccatagggatgctcatgctgtca

SEQ ID NO: 257262 - DNA, 89 bp, Homo sapiens
cttcgcccttgcttgtaatgcttcggataagatcatcgaggagaaggcagagcccccccaggctatgaatgccctgatgcggttgaacc

SEQ ID NO: 257263 - DNA, 100 bp, Homo sapiens
atgcagcttctcttgcagtgcagacagttcgtggaagttatggctagtgctctgactggttatcttcacactatttcttctgaaaacttattggatgcag

SEQ ID NO: 257264 - DNA, 76 bp, Homo sapiens
ggggctttggcaccgtcttcgcaggacaccgcctcacagatcgactccagggaccccctggctccgcgtgcaccgg

SEQ ID NO: 257265 - DNA, 82 bp, Homo sapiens
gtcgaccccagccagcgcagcgacggggcgctgcctggcccaggcgcacacggaagtggtgtcgtgaaaactacccctaaaa

SEQ ID NO: 257266 - DNA, 100 bp, Homo sapiens
agcctcctgcaacacctgcggcctcactgggacccccaggaggtgaccctgcagcagcaacaactccaggcccagcatttatcacatggacatggtctcc

SEQ ID NO: 257267 - DNA, 75 bp, Homo sapiens
gggcaagcagtacctcctaggactctatgacacggccggacaggagtccaaaactacttacctggaagaccttcc

SEQ ID NO: 257268 - DNA, 75 bp, Homo sapiens
caggatagatgctttccaagttccacaggaagctcagggtatgttagagcccaccaaggaaccactgaaaccact

SEQ ID NO: 257269 - DNA, 101 bp, Homo sapiens
gaaaggcgggtgtcactggggacgttctgaggggtgagaactctgtctcagtcgacgggaagtgcagtgactccacgctactgagcaacttgttagaagag

SEQ ID NO: 257270 - DNA, 75 bp, Homo sapiens
cccccactgaagctctgcaagaacctcaaccgggaggctcaacaatgctgttgatggagtaatgaatggtgaata

SEQ ID NO: 257271 - DNA, 74 bp, Homo sapiens
tgtgagataaaagcttccatgggagccttccttcctaatcaaggtgaccaagtcagccatcggggtgctctaac

SEQ ID NO: 257272 - DNA, 75 bp, Homo sapiens
gtacatctcctacatacctcagatccacatgggaccagctgtgcaggtctcctctgagcctccggcctccataag

SEQ ID NO: 257273 - DNA, 121 bp, Homo sapiens
aatggactgcgtggctcatcttggctgtgatttcagtatatgatgaggaaactgaggcttggtgaagttacgaaacttgtccaaaatcacacaacttgtaaagggcacagccaagattcag

SEQ ID NO: 257274 - DNA, 75 bp, Homo sapiens
cctttgagggtcctttcgggaagatcgtgcaccagtttaatggatcgagaagtggcgttgcttgctgaaatggac

SEQ ID NO: 257275 - DNA, 95 bp, Homo sapiens
aaggagctgcgctgctacagatgttaccacttctgtggctgctaccccactcctgggccgtccctgaagaccgagtgacggttctctacaggagc

SEQ ID NO: 257276 - DNA, 80 bp, Homo sapiens
ggaggcagcggagccctgggccatcgcttccccttctcagaatcctgctcttcctccagagagattcccaggagaagagg

SEQ ID NO: 257277 - DNA, 74 bp, Homo sapiens
tggatgaagtggctccggagatttttactaaagggaggaaaaagagaggaagagaaaccatttagagactgtgc

SEQ ID NO: 257278 - DNA, 82 bp, Homo sapiens
cagcagggccagcaggggcagatggcaagtggagacagcaatctcaacttcagagctgcggtgcaaccctgggcagtttgcg

SEQ ID NO: 257279 - DNA, 83 bp, Homo sapiens
ctcttggacttcttagcctccagaattcatccggtgaaagacagagatcacatttcaactagattcttaggaagtatggattc

SEQ ID NO: 257280 - DNA, 96 bp, Homo sapiens
ctgggatcagagcctgataatttggtgattacgtggaagggtattgagtacaaagttgggaaattcccatttgctgctaacagcagagctaagaca

SEQ ID NO: 257281 - DNA, 90 bp, Homo sapiens
cgatgatcgtgtgtcggatgaggagaagtaaaggcatgacttcctggcaccacagggaaaatcgggtgcaagcccagaaactatttcccc

SEQ ID NO: 257282 - DNA, 98 bp, Homo sapiens
ggacgctggaaagtcggccaagaaagacaaagacccagtgaacaaatccgggggcaaggccaaaaagaagggctgggtcagttagaacctaaacaaac

SEQ ID NO: 257283 - DNA, 75 bp, Homo sapiens
gttgagtccaagaagcagcctccacaaattgaaaggtctcttgcagctgaatggggtaaatatggaatgcgattc

SEQ ID NO: 257284 - DNA, 83 bp, Homo sapiens
aacggggcgagcctggaggattgtcactccaacctcttttcgctggagtgtacctcacagccttctaggatctccagagtgga

SEQ ID NO: 257285 - DNA, 74 bp, Homo sapiens
tttgtttctccaaggtttgaaaagcagctggcctgcaaggttatcaatactctggctgaccatcatcatcgtgg

SEQ ID NO: 257286 - DNA, 75 bp, Homo sapiens
gcgaggcgggcagccggggcgtccaggatggcccaatggaatcagctacagcagcttgacacacggtacctggag

SEQ ID NO: 257287 - DNA, 75 bp, Homo sapiens
ggcatctttggggtctatgtcagttagagaaaagattggccccattgccacaccagactacatccagaatgcacc

SEQ ID NO: 257288 - DNA, 74 bp, Homo sapiens
gatgagcctgcagagcgcgcagtacctccgagatgggtgtaatgcctgagattgcacaagctgtggaagagatg

SEQ ID NO: 257289 - DNA, 74 bp, Homo sapiens
aagcctgaaggaaaggcagaactgcctgattacaggagctttaacagaataactgaagtgaagtgatggactcc

SEQ ID NO: 257290 - DNA, 90 bp, Homo sapiens
agagttatttcagcgtgtaggaataatacctccaaaaggctgtttgttatatggaccaccagcctgtgggccaaagctgaccaactcccc

SEQ ID NO: 257291 - DNA, 90 bp, Homo sapiens
gtcaacagctatcccagcctcttcatttttcggtctggaatggtactgctagttgaacagctcttccgcaaggagttccaaccatttttg

SEQ ID NO: 257292 - DNA, 75 bp, Homo sapiens
ctacaagctgttctggccagaatcagcccggtggttctttattcattactacaatcaacaaaacacaactttcct

SEQ ID NO: 257293 - DNA, 75 bp, Homo sapiens
ttctccagttaaggttggaaagatggatgctacttcctattctaatattgatgatgttaagaagttcaaaccggg

SEQ ID NO: 257294 - DNA, 100 bp, Homo sapiens
gaatttgttactttttcttgtccgggtgcggataagggacccgacactgattgctgggagaaggactggccaagggagaagatgcctttcgggcagtgct

SEQ ID NO: 257295 - DNA, 80 bp, Homo sapiens
ttttcaatctgggttacctcaacctgttttagcacagatatgagagatgcaggtcagctcctccagtaccacaacttctg

SEQ ID NO: 257296 - DNA, 73 bp, Homo sapiens
aggctactgggggaacaagatcggcaagccccacactgtcccttgcaaggcacccttgacagcgacagacaca

SEQ ID NO: 257297 - DNA, 74 bp, Homo sapiens
ggcaggggcggaggcggaggcagaggtggaggcgctttgaaagacctcccagtgccaagtgtataagcgtgtcc

SEQ ID NO: 257298 - DNA, 83 bp, Homo sapiens
cgtccgccgcgcctcggccaagcatcaagatggtgctcatgtggaccagtggtgacgccttcaagacggcctacttcctgctg

SEQ ID NO: 257299 - DNA, 100 bp, Homo sapiens
ctctcttggagcaaatgatgaagacatccggaagaagcttgccgaactaaagcaagaatgtcttgctcgtggtttggagaccaagggaataaagcaagat

SEQ ID NO: 257300 - DNA, 90 bp, Homo sapiens
cttcttcttttctctctcgtcctcgctgctgtacttcgtctatgtggcgcccggcatagaggaaccagactagcatttctcagtgggttc

SEQ ID NO: 257301 - DNA, 75 bp, Homo sapiens
aggactcaccgaggcgcaggggctggaggtggtgctggggatgttccaggtcatccagccagagcgtgcgctgta

SEQ ID NO: 257302 - DNA, 100 bp, Homo sapiens
gtctccgacgccgccgctcttcagtttgcccgaagcgcggacgcggtttacgaattaaacaaccaccatgtcgagcaaaaaggcaaagaccaagaccacc

SEQ ID NO: 257303 - DNA, 82 bp, Homo sapiens
catggactgcagcctcgtgcggacgctcgtgcacagatacaacccttaggagaaatcttgagagtggacagcaattgtgaag

SEQ ID NO: 257304 - DNA, 82 bp, Homo sapiens
ccatgcagatgaagacgatgaggaggaagatgattctggtcaaagaattgactgtagatccaactgctgctggtgatgttcg

SEQ ID NO: 257305 - DNA, 97 bp, Homo sapiens
gcggttggggcgggaagagccggggccgtggctgacatggagcagaatccagggcctgaaaacccagaatgaacttgtgtccatcccagagatcact

SEQ ID NO: 257306 - DNA, 74 bp, Homo sapiens
cttttcctggagctggtgccggcctaggtctgcggggtttccgagaggctcgccgggatttctggcggggggct

SEQ ID NO: 257307 - DNA, 76 bp, Homo sapiens
tgatgacacggctggaggagaagtcccgggtgcggtttctggagcagcagaacaagctgctggagaccaagtggac

SEQ ID NO: 257308 - DNA, 75 bp, Homo sapiens
cttgggagtcttctgctggaggttccttcactgtgcgtgctgaccatgggactggtttggctgaaagacaaagaa

SEQ ID NO: 257309 - DNA, 90 bp, Homo sapiens
gctgcttgccgctatggctggcagtcaggacatattcgatgccatcgtgatggcggatgagaggcatgaattgctggaggaagcccggag

SEQ ID NO: 257310 - DNA, 83 bp, Homo sapiens
ccttgcccagtatctcatcaacgccaggtggtcattgggactcccacacttaaacaaagaaaggaaattctgcaagtgattac

SEQ ID NO: 257311 - DNA, 100 bp, Homo sapiens
tttttcttgtgagagagttacttcaagttgtgtttggagctgacgtgagcgaggttggtcatgtgctcggggggggccctcagcctcttggccttgaacg

SEQ ID NO: 257312 - DNA, 82 bp, Homo sapiens
gatggcgtggagatatggcgcaactgcggcgccttcctgcctgacacagctcacttcaagaagtgcacaatgtcagaacgtg

SEQ ID NO: 257313 - DNA, 50 bp, Homo sapiens
atgtggggggtaaaccactcgactgtggatattcataaggagaaagtggc

SEQ ID NO: 257314 - DNA, 51 bp, Homo sapiens
cagtggtcgcttcttctccttggccaggctaccaacgtctttgtgaacatg

SEQ ID NO: 257315 - DNA, 82 bp, Homo sapiens
gcctgcacagccgcggcggcagcagcagtgagagtggccataatataattgtgataatgtaataaaatcaggaaacattacc

SEQ ID NO: 257316 - DNA, 75 bp, Homo sapiens
tgtgtcttgcaggagtaccagcagttcagtgatgaccagatcctggaatggtgtggggaggacgccatccactac

SEQ ID NO: 257317 - DNA, 75 bp, Homo sapiens
cagttcttacggaaacaccccaggacacaattggtggaattgcgtttgttgccataaaaggagcatttaaagttt

SEQ ID NO: 257318 - DNA, 98 bp, Homo sapiens
gcggcacagcgaggcgccggcccagactccactccccagctgtgaaagggcaatgccaccgtagataagttggaggacttcatcaacaacattaacag

SEQ ID NO: 257319 - DNA, 100 bp, Homo sapiens
tggatgcaatatgccttcatccactggaagttactggcaattcgaagttttcaagtagcccttcacatctatccaatgaaccctgaaatatggaaagaag

SEQ ID NO: 257320 - DNA, 50 bp, Homo sapiens
cgcatggcggcgcacaggaagcacggtttgatctgtggatgaaatgaatc

SEQ ID NO: 257321 - DNA, 51 bp, Homo sapiens
atgtcccttccagagctggccagaagccttgtctcgactgcattgtgagag

SEQ ID NO: 257322 - DNA, 101 bp, Homo sapiens
cagccagccctcgctggaccagaccatggccgcggccttcggctccagcccccttttggacatcgttggcggccggaaggcgaggccccgccagttcccgt

SEQ ID NO: 257323 - DNA, 83 bp, Homo sapiens
ggaaggagactgtgaaagtgacttgctggagacctgcctagagctggaacgttacctccagagcgagccctgctatgtttcag

SEQ ID NO: 257324 - DNA, 75 bp, Homo sapiens
ctacaaacagggctttgccatccccggctccagcttcctgctgtctgaaaacgtggtgaaccgcatgaaggagcc

SEQ ID NO: 257325 - DNA, 51 bp, Homo sapiens
gtctcaacccacttccttcagagataccgtcatgaatttaagtcaaacgag

SEQ ID NO: 257326 - DNA, 50 bp, Homo sapiens
ccacagcgccatcctcaagcgcgcctgctcgcctggattttttaagtttg

SEQ ID NO: 257327 - DNA, 100 bp, Homo sapiens
ccggggtgtaataatgttaactgaggtctggctagtttctgtggtgcagtttttcgtaaatatccaattgatcttgctggtcttcttcagtatgttgcca

SEQ ID NO: 257328 - DNA, 96 bp, Homo sapiens
ccttcagaaaaagcatccccgaggaggaagacgaatcgttaaacatctgaaagggtcaggtgtcatggagaaactccagctgggcccagagattct

SEQ ID NO: 257329 - DNA, 82 bp, Homo sapiens
gtactctgctggattagaattacttagcagcttcaaggttactgactttttatgatgtttggtggctatgagactatagaag

SEQ ID NO: 257330 - DNA, 75 bp, Homo sapiens
agattaagcgtcagcttcctgttttatagacaaacttggccctacagtgtttgctcctgttaagatggatcttgt

SEQ ID NO: 257331 - DNA, 75 bp, Homo sapiens
cttgactgcatttttgggaaaagacagagtaagaagactcccgagaaggacagaataacgggctcccagattcac

SEQ ID NO: 257332 - DNA, 75 bp, Homo sapiens
cgagggttgggagagcgcgttggtggcgacggccgagtcagtctgaaccggacggcttttctcatttccacttgt

SEQ ID NO: 257333 - DNA, 75 bp, Homo sapiens
gatgccttcaatactacctttatttccaccatagctatgtgatgatgatgccatttaaacgacaggctctagtgg

SEQ ID NO: 257334 - DNA, 75 bp, Homo sapiens
ccaccaggaaaatgtcctcagtgcaagagcaacacgtttccacaggctgagactcgggctgagtttgcggagagg

SEQ ID NO: 257335 - DNA, 75 bp, Homo sapiens
ggagaccggcacccagacaggtggcgaaggcagaggactgagtcagtgctgattctctcaaatagagcttgaagg

SEQ ID NO: 257336 - DNA, 100 bp, Homo sapiens
agatggcggatgccctgcagtacctgcagaaggtctctggagacatcttcagcagagccatgtccattggagcccgttcccaatcagctcgtacttactt

SEQ ID NO: 257337 - DNA, 50 bp, Homo sapiens
agagctgctgttccttatccaccaaatttggagcaagaggtggtggtggc

SEQ ID NO: 257338 - DNA, 83 bp, Homo sapiens
ccagtaccaagacccgacacaaggcagcttcccacagcaggttggacagttcacagcgtccgtctccaagagagtatgaagag

SEQ ID NO: 257339 - DNA, 88 bp, Homo sapiens
aggagtttgaggggtctgaagactgaaagagtcgaatggtttgttggcaggttgaaatcacaaagattagacacctttttagataggt

SEQ ID NO: 257340 - DNA, 87 bp, Homo sapiens
ggtctctgcatctttttaccttttgtgctgagccaactcgagccaggctgcaaaaagcctgtgcaggagacatggcggacgcagcat

SEQ ID NO: 257341 - DNA, 80 bp, Homo sapiens
attggggatgagtatgcggaggacagctctgatgaggaggctttatcctgtggataaacgcagagtgaacgagtttgggg

SEQ ID NO: 257342 - DNA, 83 bp, Homo sapiens
agaaaatatctagaacgggaagacagtaggatcgggggtagtaagcattaataatgtctttcatctttgagtggatctacaat

SEQ ID NO: 257343 - DNA, 51 bp, Homo sapiens
gtgggccccacgtgggtaaaaagtttggcttcattaactatgaagtaggag

SEQ ID NO: 257344 - DNA, 88 bp, Homo sapiens
gcctggctaactcctgccaggcagtgcccttcccggagcgtgccctcgccgctggtattagaaaactactcggatgctccaatgacac

SEQ ID NO: 257345 - DNA, 100 bp, Homo sapiens
ccttacttgagtccacaggcaaggcccatcaataagatggagtggtggagccgcttggtgtccagtgaccctgagatcaacaccaagaagattaaccctg

SEQ ID NO: 257346 - DNA, 106 bp, Homo sapiens
tgcttgatacaacaactgtactgggagagctaggatggaaaacatatccattaaatggggagattgtaagaacaacgctcttgtaccaggaaccattcaagtaaat

SEQ ID NO: 257347 - DNA, 74 bp, Homo sapiens
cggcgccggagacgatgccgttgtgaaattgccaaatacatggaaacagtgaaattactagactacactgaaaa

SEQ ID NO: 257348 - DNA, 82 bp, Homo sapiens
tactacaaccagagcgaggccggtcagcccaaggctgccccctcggtcactctgttcccgccctcctctgaggagcttcaag

SEQ ID NO: 257349 - DNA, 75 bp, Homo sapiens
aatgctgctaaaaacaagactggggctgctcccatcattgatgtggtgcgatcgagcaatggtggaacaaagcgg

SEQ ID NO: 257350 - DNA, 83 bp, Homo sapiens
cttggacgatgaccaggcggcttgggagaatgagctgcagaagatgacccgggggcagggaaacagtactgagtctggtgagg

SEQ ID NO: 257351 - DNA, 90 bp, Homo sapiens
gggttccatgtgatggtggagtaggaggcaggtctccgcggaatgttttaaaggaagttgggctactcacaagttactacataagaaagc

SEQ ID NO: 257352 - DNA, 75 bp, Homo sapiens
tgacctggccccagtgctgcgtccttatcagccgagccggatccaacgcatgcctggagtggaggactagatcat

SEQ ID NO: 257353 - DNA, 50 bp, Homo sapiens
cctgcctgaatggctgtgccaagtgagcgagtgctgtgctttcatgggcc

SEQ ID NO: 257354 - DNA, 88 bp, Homo sapiens
aaggtggaggagatcgcggccagcaagtgccgccggccggctgtcaagcagttccacgacccctcgtccagtcattgtggaacccatg

SEQ ID NO: 257355 - DNA, 100 bp, Homo sapiens
gcagtggcgtcctggagccctcctcaggtgcagcggaactgctgcctgacgctctgcaacttcagcatccccgaggagctggaattccagtaccgccggg

SEQ ID NO: 257356 - DNA, 90 bp, Homo sapiens
cccaagtcatgtacagctgaaggtagttgctggaaaccatgacattggcttccattatgactttaccgatttgttacaactcaagcaagg

SEQ ID NO: 257357 - DNA, 75 bp, Homo sapiens
acatccatgtgaaaggccagccaccagttcaggagcacttgggagtgatctagtacaacacctcaggtattgagc

SEQ ID NO: 257358 - DNA, 75 bp, Homo sapiens
atgttagtgatggaggagagaagatggcggaagcggagcttgaatgaagagttggtccagctgcttctcatccga

SEQ ID NO: 257359 - DNA, 86 bp, Homo sapiens
cgtgctctgggacgcgtgccgcgcactggcacggcaggggcgcgagccaggctgcacgcatgacgtatcccagactttactcaagg

SEQ ID NO: 257360 - DNA, 98 bp, Homo sapiens
caaagactccagtaacactcaagcaaagaagagttgagcacaatcagccagatgacgtgtactactgtggaataaagtacatcaaagatgatgtcatc

SEQ ID NO: 257361 - DNA, 100 bp, Homo sapiens
cttgaccgagatgctgcgggcctgtcagttatcgggtgtgaccgccgccgcccaggtgaaaagccatacaagtgtacctgggaaggctgcgactggaggt

SEQ ID NO: 257362 - DNA, 100 bp, Homo sapiens
cggaaggaggagaggtgctgtgctgtgtatgaagaggcagtgaagactctgccaacaggcgttgacccggacgacacctataatgagaccccctacgaga

SEQ ID NO: 257363 - DNA, 75 bp, Homo sapiens
aaatttagtggccatcccaaagggacacgtcttctgggggcccagcacgtgcttatccagttggtggcctttgct

SEQ ID NO: 257364 - DNA, 50 bp, Homo sapiens
ggaacgggaggactcagtgtgttgcaacgaaggttttgggaacagtaaaa

SEQ ID NO: 257365 - DNA, 74 bp, Homo sapiens
ctggctggagtgccctgcctggagggagccctcctggctgggggcaagctttctgaaacaaaggtcttcactgc

SEQ ID NO: 257366 - DNA, 100 bp, Homo sapiens
atatgtagcgaggaggaacgcgctaaggcaaagcacctggtttctaagcatgaattgaggaacagaagaagcagagcagatgatcggagcagcatttgtt

SEQ ID NO: 257367 - DNA, 100 bp, Homo sapiens
tccgcctcttcccggttccgggctcagggctcgttctggtctgcctagtcctgggtgcagtagacattgttgcaatcatgatcggcaatctgaaaggcac

SEQ ID NO: 257368 - DNA, 100 bp, Homo sapiens
ccttacttcatacctactcagttctcagtccaacaggaggagaaaactttacctttcagatatataaggctggcatgactcacatcgtgcgggaagtcga

SEQ ID NO: 257369 - DNA, 83 bp, Homo sapiens
ggagagaccatatatgtcattgggcagggatcagatttggagcaagaggtggtggtggccttcccccgaagaaatttggtaat

SEQ ID NO: 257370 - DNA, 75 bp, Homo sapiens
ccggtagctcccagcaaagcggcccagcggatgggcttaggtcacgagcaaggatttggagccccttgtttaaaa

SEQ ID NO: 257371 - DNA, 50 bp, Homo sapiens
agcagcgtgcgttcagccctgggagacttttcttggtctcctggtggtaa

SEQ ID NO: 257372 - DNA, 90 bp, Homo sapiens
cttggaccatgggcgcccgcggtctggacaagcgaggaagtttctttaaggattactacagcatcccatttcccacacccactactccgc

SEQ ID NO: 257373 - DNA, 89 bp, Homo sapiens
atttgttaaggattccaagtaactcttatttgggaggagtctgctactagtcttatcagctcttaaaaacagaaactcatctgtccaag

SEQ ID NO: 257374 - DNA, 89 bp, Homo sapiens
gtccaacctgctgctgagccacgccggcatcctcaagacaatgcctgtggaagacaagtcagaccccccagaggggtctgaggaagccg

SEQ ID NO: 257375 - DNA, 75 bp, Homo sapiens
agcacatctccacctcatcaggaaacagctgagacaggtgtccctggccagtgtccttccacctgtccacaagca

SEQ ID NO: 257376 - DNA, 75 bp, Homo sapiens
ggggccccaagaagggcagcggtctgctacatctcagacttcttcaaagcccgacccccacagcactgtctgaag

SEQ ID NO: 257377 - DNA, 75 bp, Homo sapiens
cagcccagccttgcccaagatgtattgcaggggaatctgtgaccaagaatatggcccaggtgaccaaagccctgg

SEQ ID NO: 257378 - DNA, 101 bp, Homo sapiens
aggagatcctgcatagccttcacagagagtccagttgccaaggcattgctaccatttatgttcgttataagcaagttcatgctctgagtcctgaagagaac

SEQ ID NO: 257379 - DNA, 75 bp, Homo sapiens
cctgctgttcccagaagcgaagtggagagcgccagagtaatggggcactctggccgtgctggccctgcagctggc

SEQ ID NO: 257380 - DNA, 104 bp, Homo sapiens
gcctgaagcacgtgaggatcccgtgcacgagtgtggcacccagcctggtccgggcagaaaatctatttcaggaacttcaggaacattttcaagctctgacggca

SEQ ID NO: 257381 - DNA, 82 bp, Homo sapiens
cccgcatccgcaggacacccaatcaccgggcaacaggggcactatggcagacaaagttaggaggcagaggccgaggaggcga

SEQ ID NO: 257382 - DNA, 100 bp, Homo sapiens
tccccttggaccgagccgatcgccgcggggcagttcgggccggctgtcctggcgcgcaatctgcagagcgctgtgtaagcacattgcttgatctaatcca

SEQ ID NO: 257383 - DNA, 100 bp, Homo sapiens
ggaccctgaagttgaggtgactattgaaggtctctaattaacagaagatggcaaagcccagccacagcagctatgtccttcagcagctaaacaaccaaag

SEQ ID NO: 257384 - DNA, 75 bp, Homo sapiens
aaaatcagaccatactggaagaattattttgaaaataccgatattctttgcacagccagagaacaacacatcaca

SEQ ID NO: 257385 - DNA, 75 bp, Homo sapiens
cagactttaatcggggtggtggcaatggtcgtggaggcttccgaggaggcagaggaggaggaggtgaccacaagc

SEQ ID NO: 257386 - DNA, 74 bp, Homo sapiens
ggtagcctctaggaagcgctagacacatgtggcgacatgtctaagaatgtgagccagtcacagatggcaaaatt

SEQ ID NO: 257387 - DNA, 100 bp, Homo sapiens
tcaggctgccccgcagtaccagggagcgactgaagtgcccatgccgcttgctccggagaaggtggaacaggaggattttgtaatggaagggcatggcaag

SEQ ID NO: 257388 - DNA, 100 bp, Homo sapiens
ctcactgcagaggtgctggagctggcagggaggtggggaagacagggctccagctaccacaggacgggctctgggtatagccgttccagtcagggacagc

SEQ ID NO: 257389 - DNA, 90 bp, Homo sapiens
aggagctgcagctacaggtccaggcccagcagcaggcctggcaggaattgaatgatctggcacgggaccctccagcacagtgttcagcag

SEQ ID NO: 257390 - DNA, 75 bp, Homo sapiens
aagctgaccaggcggcttgtgaacagtcaggaactgtggctgcaccatctgtcttcatcttcccgccatctgatg

SEQ ID NO: 257391 - DNA, 75 bp, Homo sapiens
caaaattcgatttgcaaatcattcagtgaatcccaactgttatgccaaaggccataggaaaaggatacagagtag

SEQ ID NO: 257392 - DNA, 75 bp, Homo sapiens
gcggaggtactgcacctcctccgaggtcgccgcccactactgcaagaaatatagactggtccaaggtcggctccc

SEQ ID NO: 257393 - DNA, 75 bp, Homo sapiens
gcttgaaatgctacatttccaagcagcctcccgcgacgatgcccctcaacgttagcttcaccaacaggaactatg

SEQ ID NO: 257394 - DNA, 100 bp, Homo sapiens
ggaggaagcgatggcttcagacagcatatttgagtcatttccttcgtacccacagtgcttcatgagaggacctgctgaagctcacacccgtggaccaccc

SEQ ID NO: 257395 - DNA, 75 bp, Homo sapiens
agttaggtgaaatttcagacatacacaccaaattgttgagattttgacgaagtatattatgggcagtacatctct

SEQ ID NO: 257396 - DNA, 88 bp, Homo sapiens
gataatgcaatagaagctgtggatgaatttgcttttctggaaggtggcaaatcttccaaaagactacatgataaccctcaaatatgtc

SEQ ID NO: 257397 - DNA, 90 bp, Homo sapiens
taaaaactatggagaagaccagtccaatggtaactcaactggacccaaataaatcattattggaggtaaagttgttccctcaagaaaccc

SEQ ID NO: 257398 - DNA, 75 bp, Homo sapiens
ctcattaagagcttggaggcggcccgcgggaggagcatattatttaatatctagaagtctagggccagaatttgg

SEQ ID NO: 257399 - DNA, 100 bp, Homo sapiens
tccggagctcgcccaagccgcgtccccagagagcgccctgagagaacagggtggccgcttggtccagatggcagtggcagcaccatgatgcaaaccaaga

SEQ ID NO: 257400 - DNA, 75 bp, Homo sapiens
tctgaagtagcaaaggaatgcagcatatatctcattggaggctctgtgactggggcaacctgcaaggagctggcc

SEQ ID NO: 257401 - DNA, 95 bp, Homo sapiens
acgcttcagccttcggttaaagacggacttattgtatatgaagactcacctttggcttcatcatctactttggctatggcctgtggcacagcgag

SEQ ID NO: 257402 - DNA, 98 bp, Homo sapiens
gtgcccctgcccgcgaccatggcctcctccgaggtggcgcggcacctggcggaagcccggctcgctgcaaaacgggcggcccgcgcggaggctcgcga

SEQ ID NO: 257403 - DNA, 100 bp, Homo sapiens
agtgaaagtaactttgcccgagcatatgcacagggtatcagccgaaccaagtactgggaggacacatgacggaagtgtgtatttttgggccactccacgg

SEQ ID NO: 257404 - DNA, 100 bp, Homo sapiens
gtgaactaaggccccctgcccccttttcctggtgcatgtgaagttatcaaaaacagacctgtcatttactccatcctttatagtgatgctacaggacgaa

SEQ ID NO: 257405 - DNA, 90 bp, Homo sapiens
tgccagttggaaagaaccttttccaagcacagtgacaatccagactcagcggtgtttagagacttggaaagagtttgagaagccacttag

SEQ ID NO: 257406 - DNA, 98 bp, Homo sapiens
taaagagtatggacaaatagaatctgtacgatttcgttctctgagctttgaaggtacaatcgtgtgggagagccaagacctccacggccttgtgtcaa

SEQ ID NO: 257407 - DNA, 101 bp, Homo sapiens
cgtcctgctcgcggacccaggggcgcccacgccagggcaacaggtttgtctatgctggctctaactcgggcgtggtccaggccccgctggccttctgtggg

SEQ ID NO: 257408 - DNA, 51 bp, Homo sapiens
atttatggagcatatattatggaacacaggttctccaaaaaatgtggaatc

SEQ ID NO: 257409 - DNA, 90 bp, Homo sapiens
ggcgcaggcccgcggggagcgcagcccggcggaggtggctttcctgggggaatgcctggtaattttcccggaggaatgcctggaatggga

SEQ ID NO: 257410 - DNA, 75 bp, Homo sapiens
acggcgagcgcgagcggcgcgagaaagccctgggaggagcggggacactgaggacctctctccaaattggcctct

SEQ ID NO: 257411 - DNA, 98 bp, Homo sapiens
tttcattgttgggacatgtatattggcccttctgcagaaaaatgtagagtgtgcccgtgtgtatgccgagaacgccatccgcaagaagaacgaaggtg

SEQ ID NO: 257412 - DNA, 82 bp, Homo sapiens
gaagggcgaggaaagcggagtggactctaagcgaaagacatgaggcctcagcctgaaatgaggttgttttgaggtcatctga

SEQ ID NO: 257413 - DNA, 101 bp, Homo sapiens
gaatggacttcagactggtggactgttcatcattctgttgaagaaacgcttaacccagtggaaccgtcccaaaatgtcccttgctcagaagaaggatcggg

SEQ ID NO: 257414 - DNA, 100 bp, Homo sapiens
aacaaaatgtcaacaaattgatggctgttaaaaagaaagctggctttatcactccagttccaggaggtgtgggacccatgacagtggcaatgcttctgaa

SEQ ID NO: 257415 - DNA, 100 bp, Homo sapiens
gggaaaataatccagagatttccacagaaggactgggatgatacaccttttccacagggaattgagttggtattccagcgtcttcaggaaacagtttaga

SEQ ID NO: 257416 - DNA, 101 bp, Homo sapiens
gatcagggaatagccaaggcagcaccagggcataccttgtcccttcatattcctttggtgagaacgaagttttcaatcaggagaccttccctgagggcacg

SEQ ID NO: 257417 - DNA, 50 bp, Homo sapiens
cacctttccctttatttccggagagtaatcaagtcagaggattatatgac

SEQ ID NO: 257418 - DNA, 75 bp, Homo sapiens
gtggaactactctacggcatctggagcaactgatcgtcagtatttaaacagatcacatcatgcgtgagtacaagc

SEQ ID NO: 257419 - DNA, 101 bp, Homo sapiens
cttttcttcagaagctggtcgccgccggcaggcttgaccactatgctatcatcaagtttccgctgaccactgagtctgccatgaagaagatagaagacaac

SEQ ID NO: 257420 - DNA, 118 bp, Homo sapiens
ttgtgttgtacagccagaaaccggggaccttaacaatccacctaagaaattcagaggtgcgagaagatgtactaaattcattgaataacaactttcttcaaacgctaaatcaagcttg

SEQ ID NO: 257421 - DNA, 100 bp, Homo sapiens
cccggggagagccccaggatggactctactgcatccggaactcctctaccaagtcggggaaggggccttttgagcagctgcttctgcaagaggacatccg

SEQ ID NO: 257422 - DNA, 107 bp, Homo sapiens
ccctgtagctctgctacccaccctccagcttctggcgccccgagaaccaggatccctctgtgacccagctgaccaacgccccgcagggcggcctggcggaattcaac

SEQ ID NO: 257423 - DNA, 98 bp, Homo sapiens
cggcctcgcctcctcgcagcagcgccatggccaagtcctgtatctgccatgtctgtggcgtccacctcaacaggctgcattcctgcctctactgtgtc

SEQ ID NO: 257424 - DNA, 100 bp, Homo sapiens
gaaaaacggggactatggggagaaaaaagattcagattacgaggattatggatgaacgtaacagacagatatgtgtcacaaagatgtctacacggaactg

SEQ ID NO: 257425 - DNA, 90 bp, Homo sapiens
aaaataaaatctcatattcaacagcttcgggtagaagaagatgtaccatcatcaaagaggggatgctgaccaaacagaacaattcattcc

SEQ ID NO: 257426 - DNA, 50 bp, Homo sapiens
ctacatttagcgcatcatgtgatccgggtcaggttagtgtggtgcaagtg

SEQ ID NO: 257427 - DNA, 50 bp, Homo sapiens
atctcgtacaagatccttctttctcctgaaattcttagttatgatcctat

SEQ ID NO: 257428 - DNA, 83 bp, Homo sapiens
cagctgcccggtgcccgaggaggcagccaagctcatggcctgccactgcgtgcccctgggcgctgcctatggcacagccaaga

SEQ ID NO: 257429 - DNA, 100 bp, Homo sapiens
cagctcacataactgggaccagaggaagaagcaacacattgtcttctccaagctgtgaagcttcatggaggtatcgatatcctagtctccaatgctgctg

SEQ ID NO: 257430 - DNA, 74 bp, Homo sapiens
agaggaactaaggcggaggaactgagacgtttcgaattccaggtaaaagatacctgctttcttcagcctatgta

SEQ ID NO: 257431 - DNA, 74 bp, Homo sapiens
gaccaaacctcaaagcatggctaagagtgttcagtagaaatggatattgatgaccatgagatccctgctcagaa

SEQ ID NO: 257432 - DNA, 82 bp, Homo sapiens
ctacattctgggtgacacgctgggggtcggcaccttcggcaaagtgaagggaacaggaaatatagtggtcattatgattagc

SEQ ID NO: 257433 - DNA, 82 bp, Homo sapiens
ccggcggggctgaccacttaccgcagcatccaagtcggccctgatgaaggatttgggggcagagcacttggcaggtcatgaa

SEQ ID NO: 257434 - DNA, 75 bp, Homo sapiens
agagatcaccgacaagatcaccacggacgagatgatcaaacgcctgaagaactgtgtcatgagtctctgcagcag

SEQ ID NO: 257435 - DNA, 102 bp, Homo sapiens
ctgggagaaactggcaaggagaagctcccgcggtactacaagaacatcggtctgggcttcaagacacccaaggaggctatggaaagggcaaatggaatggag

SEQ ID NO: 257436 - DNA, 74 bp, Homo sapiens
gcaatttatgtttccaggaacaccacttcatccagtgatgttcccacaagcctgcatttccagagcatgctgaa

SEQ ID NO: 257437 - DNA, 82 bp, Homo sapiens
ccaagtacctgcagatcctgacctctctgatgagatggatcggggcggcctgagctgacacccatagcgatcatggccggga

SEQ ID NO: 257438 - DNA, 83 bp, Homo sapiens
cctgtcttcagatcttcacagcacagttcctgggaaggtggagccaccagcctctccctgttcctgtaaccagcacagtgcct

SEQ ID NO: 257439 - DNA, 100 bp, Homo sapiens
cggcagcagcccgacgcaaaccaaggatctggggatcttcgcactatcccaaggacacattcagctaacgtattttagcaggtggagtgaggttgaagat

SEQ ID NO: 257440 - DNA, 100 bp, Homo sapiens
ggagatcagcatttgcatggaacacatggaaggatatggagtaatagtactaaatcccaatgaaaactatattgaagtagaaaagccgaagatacacgta

SEQ ID NO: 257441 - DNA, 100 bp, Homo sapiens
tgagatttacctgtgagatgtttcatcccaacactatactcttgctggtcttgacaccattgaatgcctggccgacggcaagtggagtagaagtgaccag

SEQ ID NO: 257442 - DNA, 90 bp, Homo sapiens
gcggaaggtgatgcccaagatggaccagaaatcaatgtggactgaacataaatcacctgatggaaggacttactactacaacactgaaac

SEQ ID NO: 257443 - DNA, 75 bp, Homo sapiens
ctctggtgagacatttttcttccttctgtcacatcacacccaatggatgggtaggctcttggtctgactgcccgg

SEQ ID NO: 257444 - DNA, 76 bp, Homo sapiens
gctttatatttctctcagaccattcccatcagtgagcattacagaaaaatggctactggacaggatcgagtggttg

SEQ ID NO: 257445 - DNA, 99 bp, Homo sapiens
aggacacgaagtttgtcggcccttgccttggcagagctgaggattttgcctaccattttacagtatttgtcttctattttggagcctttttattggaag

SEQ ID NO: 257446 - DNA, 74 bp, Homo sapiens
accgttccattccggattatcgtcccaccaagtcctcagaatggttggaatgaccctccagctttgaacagagt

SEQ ID NO: 257447 - DNA, 100 bp, Homo sapiens
atacagcatgtgttaccaagctgtttcctaccaggtcacacactgttgcagcgcaggagatctataaggacaggcagaaattctcagaacaggttttcaa

SEQ ID NO: 257448 - DNA, 76 bp, Homo sapiens
cacctactaacctcactgtcctacaaagtgctaactgccaaagaaaggaaaactcaaattgatgatagaaacaaat

SEQ ID NO: 257449 - DNA, 88 bp, Homo sapiens
ccggcgaagccatgggcgccgggaccccgccgccgccgccgccgccgccgtctggccccaggtgggtttggaggatttgggacaacat

SEQ ID NO: 257450 - DNA, 98 bp, Homo sapiens
aaagaatgaaaagcaagcctagggagaacaagacagtctgatgtttacatggtctccagagaatacagagggcaaagatggatccaaagtaactaaac

SEQ ID NO: 257451 - DNA, 100 bp, Homo sapiens
ccgccgtcggcagcaagaacagagagagaggtggacagatctgagagatactgagatcgagacgctccctccggagctcttccagtgccggaagctgcgg

SEQ ID NO: 257452 - DNA, 76 bp, Homo sapiens
atcttctgagtaacggaggacaattcaccatagttttctttaagtccactggggatcaggcattagaagttctaca

SEQ ID NO: 257453 - DNA, 145 bp, Homo sapiens
gcagacgcagtggagctggatgctacagctgtgctgctgtatcgaggcacacctgaaggagaacgctgcctactttcagaatgataacactttgtgtccaggattgagaaatgccaaagttgaagatttaaggagtttagccaac

SEQ ID NO: 257454 - DNA, 83 bp, Homo sapiens
gccccgcactctctcgatgagtcggagaagtccccatgtccggcatgatttcgggtggcaacaaccccttgggaactcccggc

SEQ ID NO: 257455 - DNA, 98 bp, Homo sapiens
acggagtgtgcgacggattgggagttacagatgtagagctaaaacgactgaaggatgctttcaagaggacctgtggactctcatattacatgggccag

SEQ ID NO: 257456 - DNA, 75 bp, Homo sapiens
atggtctttgtgcacatttacatcaagggctgtgtggtctttgaggatgtgtttgtatacttctctcgggaagaa

SEQ ID NO: 257457 - DNA, 138 bp, Homo sapiens
ctgaccaggggcttgagagctgggttctattttccctcctcaaactgactttgcagccacggagaggtgtcatggagaaactccagctgggcccagagattctgcagcgggaaaatccaaggcttatttatgccaggc

SEQ ID NO: 257458 - DNA, 83 bp, Homo sapiens
gtcttctcgtcggattgcccatgcacttgttgcagaaacagccaagacaatgcagatcttcgtgaagactctgactggtaaga

SEQ ID NO: 257459 - DNA, 100 bp, Homo sapiens
cagaggtatggcagttattggcaggctgccatgacaaccaggcaatgctggatagataccgaattcttatcacaaagaatatttctcttagaagatgaca

SEQ ID NO: 257460 - DNA, 103 bp, Homo sapiens
caagcaggtccggacccactggctgctggagcttgtcaccaccaggtggagtttgtccatatgctcaatgctaccatgtgcgccactacccgtaccatctgcg

SEQ ID NO: 257461 - DNA, 99 bp, Homo sapiens
agatttttcaaatgctagtacaactggactttttgacccatataaggctcatcatatgcccgaagctcagtggttacggctgtgaaatttacaatttct

SEQ ID NO: 257462 - DNA, 100 bp, Homo sapiens
aggaataaacatgcaatgaacccaaaaggaatccagactccaaaatgatgcaaatcaacctgactggatttttgaatggaaaaaatgctcgagaatttat

SEQ ID NO: 257463 - DNA, 74 bp, Homo sapiens
gccaacaagattgtccccattgccatccaggtggaatatgtgatcaagtgtgacatgtcagctctgcagaagat

SEQ ID NO: 257464 - DNA, 75 bp, Homo sapiens
ccagactcggtgctgtacccgccgacatggatttgattgacatactttggaggcaagatatagatcttggagtaa

SEQ ID NO: 257465 - DNA, 83 bp, Homo sapiens
gtcagtcacagccatgtgggctacacactctcctacaacatcatggccagcccaagaaccaggaaggttcttaaagaagtcag

SEQ ID NO: 257466 - DNA, 101 bp, Homo sapiens
cggcgcgtctggaggaggctgcagcagcggaagaccccagtccagatcctgataacttaagtgactctctcttttccggtgatgaagaaaatgctgggact

SEQ ID NO: 257467 - DNA, 100 bp, Homo sapiens
aaggccacggtatttaggaatccaaggagataaagaatactgtattactagagaagactacagttttacagcttatgctaccatttcgtatttgaaaata

SEQ ID NO: 257468 - DNA, 90 bp, Homo sapiens
cagaaggtggacagggtaaaagaaagagacttttttctaaagaatcactagaaagtttgggatttggctcttacatcagtgaagtaaaag

SEQ ID NO: 257469 - DNA, 74 bp, Homo sapiens
aaggccctacgggagaaaaccgggcgcaagtggaatgcagtagccctctgggcctgggatattgtggttgataa

SEQ ID NO: 257470 - DNA, 51 bp, Homo sapiens
ctgagcctgacgcgggccgcgcggaagattttgtgattcaggcaaaggctg

SEQ ID NO: 257471 - DNA, 83 bp, Homo sapiens
tcgtcccctttgatccctgtgtgctgaagaggttgattcttcaccacactgaaaccattaggaaaaatccttgtggttaacag

SEQ ID NO: 257472 - DNA, 49 bp, Homo sapiens
cgcctactcactctggagccgtgcagaggccaagaccgttttgcccaag

SEQ ID NO: 257473 - DNA, 73 bp, Homo sapiens
aaaatggagttgatgtattgcctaaaatcatccaggaatgtatcctgtcaggtataatgtcagtgaatggcaa

SEQ ID NO: 257474 - DNA, 100 bp, Homo sapiens
ctcgggcgggacccgatcctccgctcctgaggcccccacaatgaagcagtcggacgcgtctccccaagaaaggagttccgattctgaagaggcatttgag

SEQ ID NO: 257475 - DNA, 97 bp, Homo sapiens
aaagcccaactgcagctctctagaacaggaggatttcatccctctacttcagcaccagtggcagttcgcagcctccaggacttggctcgcatcgcca

SEQ ID NO: 257476 - DNA, 90 bp, Homo sapiens
acaaactggccaagaagggccttactccttcacagatcgcttagcagtgtctgcaaaaacgaatcttttcctacaacctgttaactgact

SEQ ID NO: 257477 - DNA, 74 bp, Homo sapiens
gactattccattgtctagactttgtgttccaagatcagagtgcaccaattccagctggacatcactgtgaaaat

SEQ ID NO: 257478 - DNA, 100 bp, Homo sapiens
tcaacaaaacctggagaagcaaaagaaacccatgaagacttcctagagaattcacatcttcaagaggcacagttgaatgctgttgatgctttgattgact

SEQ ID NO: 257479 - DNA, 75 bp, Homo sapiens
gcctgggcccaggctatgatgcaccagaacaagcgagtgagcatcaataaagatgagctgaagtcaacgtcaaaa

SEQ ID NO: 257480 - DNA, 100 bp, Homo sapiens
actatcccagggagtgcaagcttagagcgtctggccaagaatcagaggaagtggactcctttctacgaaaccgttcaagttctgaccatgaagctacagc

SEQ ID NO: 257481 - DNA, 82 bp, Homo sapiens
acagctttggtcagagtccctacctcgagttcccggggactgtccacctggagggtgcagagtcggaggagtccagcggtga

SEQ ID NO: 257482 - DNA, 88 bp, Homo sapiens
cccagcctggcgggagaaggaggaggagcagcaggcctccgggcccggcgccgccgcccgcaggtccataattcagcagccaaatctt

SEQ ID NO: 257483 - DNA, 75 bp, Homo sapiens
cacactgcgagctactttctgactgcccgcctggcactgaagccgagctcaaagaccccaccaacaactgaacgc

SEQ ID NO: 257484 - DNA, 100 bp, Homo sapiens
gtgggagtcggagcgggatattcggaggctggatcaggtagacagagctgataccttccctcaggtactaaaaaaagtaattgactggatgaaattgaag

SEQ ID NO: 257485 - DNA, 74 bp, Homo sapiens
ataaacatgtggtacagagtgttgagaagtttattcagaaagtgaaaagaacggaggggagcccgatgacgctg

SEQ ID NO: 257486 - DNA, 75 bp, Homo sapiens
ttaattttagggtcctttatatagaagggagagtagaatcggcaaggttggaaaccagaagcgtgttgttggtgt

SEQ ID NO: 257487 - DNA, 75 bp, Homo sapiens
ggccaagcagcaccagcgtgcctttgggtgataaggggcgggggcacgaacagcatcaccgtgaggaatgccaca

SEQ ID NO: 257488 - DNA, 73 bp, Homo sapiens
acaagtcttgcctcaagtatcagctggaaaacaggctccttctcctgaaaaagccgaggaggagagtgagagg

SEQ ID NO: 257489 - DNA, 97 bp, Homo sapiens
gggcgacccggtgtgtggcgcgcccagagccccgcgtttcagccctagggaaggaggtggaatttaattctcctccccttgaatatgggctggacaa

SEQ ID NO: 257490 - DNA, 90 bp, Homo sapiens
ccaccctaccattataatacccattattcaacagcaacatctactttatcctggcttgttcgaattgttctaaattagttccattctgga

SEQ ID NO: 257491 - DNA, 122 bp, Homo sapiens
ccaggccgggcacctccgagcgcaaggacagcgcgaggtccgcgcagcccagcgcagccataacaagttgaaatcatcgcagaaggataaagttcgtcagtttatgatcttcacacaatcta

SEQ ID NO: 257492 - DNA, 100 bp, Homo sapiens
cggccctgctctcccgcctgaaggcaccttggccaggtccccgtccattgatagcattcagaaagatcccaggaaccacgtgaatgttgagggggcgaca

SEQ ID NO: 257493 - DNA, 100 bp, Homo sapiens
ctattcccagaggcaggtggtgctgaccctgtaacccaaaggaggaaacagctggctaagctcatcattgttactgaaggtgacctgctgagaaaagtgg

SEQ ID NO: 257494 - DNA, 100 bp, Homo sapiens
cagggatctaggcccccggatcaggcctgcacaggggatcctgaactgcccgagagggggatgccggcgccgcaggttgttcgccgcaggacccagcgga

SEQ ID NO: 257495 - DNA, 74 bp, Homo sapiens
cgcagggttcggatgagaccagtgaacacttgtcctgctccttcacctttttcttgcatggagacagcaatgtt

SEQ ID NO: 257496 - DNA, 101 bp, Homo sapiens
aagcaatcctcctgcgtcgactttccaaagcgctggaattatgggcgtgagccactgtgcccagcagcctcgtcttacagcgtgactgcaaagaaaaagac

SEQ ID NO: 257497 - DNA, 75 bp, Homo sapiens
gaggatccacctggagctgaggaaccggaccccggcagctgagtggagtcaacatatcaatggagcaagtcacag

SEQ ID NO: 257498 - DNA, 82 bp, Homo sapiens
aactcccagctcaatgcaatgagcataaatgcccagtggatgagcgggagcaactggaagaaaccttgcccctgattttggg

SEQ ID NO: 257499 - DNA, 75 bp, Homo sapiens
cgttgcggccagtcgccactgcttgagaaagatcagtctaaagaaaaggagaagaaagtgaaaaaaacaattcct

SEQ ID NO: 257500 - DNA, 75 bp, Homo sapiens
cgaagccctgcatggtggtgtggcttgtggatccctcacagagcttcgggctcagaatcaggttctgaaaaaagg

SEQ ID NO: 257501 - DNA, 82 bp, Homo sapiens
acgccagccgcaccatgccgctcctaagcctgcacagccgcggcggcagcagcagtgagagtaatttctatgcagcccccga

SEQ ID NO: 257502 - DNA, 100 bp, Homo sapiens
cgctgtcactagcgccgcctgctcccgcgggcccgcggacccagctgtcaggcaaggatcaaaatacttgctggatggtggactcagagaccaataaaaa

SEQ ID NO: 257503 - DNA, 97 bp, Homo sapiens
ctcgggacgctgcacctcccgcgccgcacggtggacgagattcccgacagttaagcaatggggagacatttggctttgctcctgcttctgctccttc

SEQ ID NO: 257504 - DNA, 74 bp, Homo sapiens
tggttaaaacctgacacttttaacaggcaagatgatgatgaatgaagtcctggcagcttcctgtgtcccaggcc

SEQ ID NO: 257505 - DNA, 135 bp, Homo sapiens
accatgtccgtggccttcgcgtctgcccggccaagaggcaaaggggaggttacgcagcaaaccatccagaaggtggatccataaagaacccagccaacccgcagagggaggggaggggctgagctgtgaggagag

SEQ ID NO: 257506 - DNA, 97 bp, Homo sapiens
aactgtcaggtacctcaaagcacacagggctgggtgactccgtatgctccagccccagtatctccagcaccaccagccccaagctcgacccgccccc

SEQ ID NO: 257507 - DNA, 100 bp, Homo sapiens
tgaaatggaagcctcccagtctgaattctgtggattttcgtctaaaaataacaagaatgggaggagaaggcctgattacatcaaccccagagccgtgcag

SEQ ID NO: 257508 - DNA, 75 bp, Homo sapiens
accggctgttcgaggccttgactgtaggtcctagctggtgcattaaaacaagaaataagagatacaagaatcaga

SEQ ID NO: 257509 - DNA, 101 bp, Homo sapiens
aagcagtgacatccaacctgtatcaagtcttctaatctgtgaacatgcaagatcaactttatacctgggctgcagttagtcaacccacacactcattggac

SEQ ID NO: 257510 - DNA, 90 bp, Homo sapiens
ggccggctgaggagcgccgctgcctcgcctcgggttcatagtggcgtcatgcacgcagactcctgcaagttcccctaagttcttagagga

SEQ ID NO: 257511 - DNA, 74 bp, Homo sapiens
agaaatgtaatgcacgttggactacagaagagcagcttctcgccgtacaagcttcttggacacttaatgattgt

SEQ ID NO: 257512 - DNA, 98 bp, Homo sapiens
agatgtgatgttggagaactacagaaacctggtctccctaggcatcaagcatgatggaaccatgtgtgatacctgccgccagcaaccaatcattggca

SEQ ID NO: 257513 - DNA, 51 bp, Homo sapiens
cctcccgagtagctggtattacaggaaaatgtttcaacgtgcgcaagagtt

SEQ ID NO: 257514 - DNA, 75 bp, Homo sapiens
ctgaaagagccaaatcttaccttctggaccatggttggatggcaagcatgtggtgtttggcaaagtgaaagaagg

SEQ ID NO: 257515 - DNA, 101 bp, Homo sapiens
cagcagcgccccctctagaagtttctgaggaacagaatgatatggaacctagcaaagctgttccactgaatgcatctaagcaagatggacctatgccaaaa

SEQ ID NO: 257516 - DNA, 90 bp, Homo sapiens
tatgataagctgagcagagccctgcgatactattatgacaagcaattcacagaagctgtgagtccttcagtgctacccccttcagctttg

SEQ ID NO: 257517 - DNA, 117 bp, Homo sapiens
cggtggcggcggcggcagctgcagtgacatgtccagcatgaatcccgaatactcccagatggacgtatcatcaaagttgggggagagagatttgaagcaccagaagctttatttcag

SEQ ID NO: 257518 - DNA, 75 bp, Homo sapiens
cagacgatgagacagagttgcgaccgcgcggcagagatgcgctggcagctgagcgagcagctgcgctgcctggag

SEQ ID NO: 257519 - DNA, 80 bp, Homo sapiens
tctgcctaacgttcacttcactcacgaagctccaccatgaggcgaggtggatggaggaagcgagctgaaaatgatggctg

SEQ ID NO: 257520 - DNA, 90 bp, Homo sapiens
ggagaggccaggcgggagaactaccgcagcaggacttggtgaaatgtgaaaataagaagaatgctacacccagaactaatttgaaatttc

SEQ ID NO: 257521 - DNA, 75 bp, Homo sapiens
cagggacctgcccgcctgcggctgctccgggcaagaaaattggatgtatattttgaatatgaagaaaaaataatg

SEQ ID NO: 257522 - DNA, 88 bp, Homo sapiens
accttcccagaaagtccaagctcgtgtggacatcctcatcatggatgatgacgacgtccccagctggcctcccaccaagctgtccccg

SEQ ID NO: 257523 - DNA, 101 bp, Homo sapiens
ggtccctcagcaaagatggtacaaaagagtctttggaggatgcggctttgatggggcactccagtgtttgtccatgctggcccgtttgccaacatcgcaca

SEQ ID NO: 257524 - DNA, 98 bp, Homo sapiens
ggactaataaaggccatggcgccagcagaaatcctgaacgggaaggagatctccgcacctagaggatcaagacataatgggagcatttttagacaagc

SEQ ID NO: 257525 - DNA, 90 bp, Homo sapiens
caaagtgaaaatctccccgcagctcctcctggccgctcatcgcttcctagccacagagctatgaaccagatgagctgaccaaagagatgg

SEQ ID NO: 257526 - DNA, 73 bp, Homo sapiens
tctgggttttacatcaccggtctgggcatcttccgtgtgtgctaagatcgtgcagctcctggggcagaatgag

SEQ ID NO: 257527 - DNA, 101 bp, Homo sapiens
ttacacgcaaagatattcaaactctaaaccatctgaattggctcaatgatgaggttttggtaatcgatgtggaaaacccaaaggaccaagagatccacctt

SEQ ID NO: 257528 - DNA, 95 bp, Homo sapiens
aattatttccgaaccgtgggatttgaggagcaagctagtgcttttcaggaacagcatgcagtgacctggagttcagggaagtggcaaacagattg

SEQ ID NO: 257529 - DNA, 74 bp, Homo sapiens
tctggtctaaaaagggtccagaaggaggcaccgacatcatctcctgcttcatgggccacaatttttctcttcct

SEQ ID NO: 257530 - DNA, 98 bp, Homo sapiens
acgcggactgtgatgaccagtctgatgagcgcaactgcaatggacgacgaagacacgttgttacctaggaagttacaggcagctctggagcaggctct

SEQ ID NO: 257531 - DNA, 83 bp, Homo sapiens
cttgccaccaaagacctgcgactttgctcagcaggttacgggcaggacttgagtggcttcggacagggcttctcagaccccag

SEQ ID NO: 257532 - DNA, 100 bp, Homo sapiens
cggcgagacgcgcgtgtgtgagcgcgccggaccaagcgggcccagaagcggctccaccgggggacggctacgtgcaggcggacgcccggggccccccgga

SEQ ID NO: 257533 - DNA, 96 bp, Homo sapiens
cgaccgggccctgggctggaggtaaaaccccacgattaacgtcttcaaggacccagttgctgatcccaacaaaaggtccaaaaagggccgattatc

SEQ ID NO: 257534 - DNA, 103 bp, Homo sapiens
ctttgtccttactcaagttctcagaagactcatctaactagacatatgcgtactcattcagagtgcacatttggccatgatcgataccctcatgatggcttat

SEQ ID NO: 257535 - DNA, 83 bp, Homo sapiens
ggaggagttgcagaatgactcggaggcgattgaccagctggccctggagtcccctgaggagctgacatggacccaaatcctcg

SEQ ID NO: 257536 - DNA, 98 bp, Homo sapiens
agtcaatgaagcctgtgagtggacacccttttctcaaaaaggagaccctcctgttcttaactgtgggcgatgagaaaggtggtggactcttcttactg

SEQ ID NO: 257537 - DNA, 98 bp, Homo sapiens
cgccgctcaccccgcggccgcaccttcccgccttctcaggtggcagtagagaagagcatcacagaagttgctcaggagctgacagagctggtggaaca

SEQ ID NO: 257538 - DNA, 83 bp, Homo sapiens
ggctgtctcctctctccgccatgctggtaggtgagtgctgtcctcggctcactttcctcaagctctccggctgccacggtgtg

SEQ ID NO: 257539 - DNA, 49 bp, Homo sapiens
gcggaccatgggcgacaaagggacccgatttaggcctattaaaggaagg

SEQ ID NO: 257540 - DNA, 121 bp, Homo sapiens
gggcggccgacgacgttcgtcatttagtgcgggagggatcctgaaccgcgcggccgaaccctccgggagctgcagtccatggctgaccaggagcaggtgtcaccagccgccatcaagaaga

SEQ ID NO: 257541 - DNA, 98 bp, Homo sapiens
gccaaccagctccgcgagctgcccgaggttgggtgattgtgggtgagattgtgcagtaggaataacagctgctggttgagaattacccctcaaaagtg

SEQ ID NO: 257542 - DNA, 98 bp, Homo sapiens
tacctgccgctgagcctggcgggcgctgcctatttgctgagctcccttcccggcctggctcaggatgactttgacaacgatgtggatgctctgctgga

SEQ ID NO: 257543 - DNA, 75 bp, Homo sapiens
caacggagataaattcccggaaccgcgattcggcgtgtcagatggactcaccctgtcacccaggttggactgcac

SEQ ID NO: 257544 - DNA, 82 bp, Homo sapiens
ggccagcggccgggatagccccggcggagcccgcagcttccctgccgtgcctacaccaactaatgttacaattgaatcctat

SEQ ID NO: 257545 - DNA, 100 bp, Homo sapiens
gtgagttttccagcctggagaggccgaaccagcgcgggggtcgagtttgaaggatgacctctaggaagaaagtgttgctgaaggttatcatcctgggaga

SEQ ID NO: 257546 - DNA, 100 bp, Homo sapiens
tagaagtctatctttctgatgctccatcccactactctcaagatacgccaatgcgctcaaaggcaaaaagggccccgtctgaggtctggcagtcagagac

SEQ ID NO: 257547 - DNA, 100 bp, Homo sapiens
ctctagactcagatgagagtgaggatgaagaagatgactaccaggttgctccttgagggcaggacagttcttatggctttatccgttgcgtaagcacaga

SEQ ID NO: 257548 - DNA, 102 bp, Homo sapiens
gtggcctgcgtgtcggcggagtcgatcatcaatgctgtggtactgttgattttattgagtgccctggctgatccggatcagtataacttttcaagttctgaa

SEQ ID NO: 257549 - DNA, 90 bp, Homo sapiens
gcgcgagtgaggaaaggaggtactgtagctgaaccttagccggccgatcgaggagcagggccccctggacgtcatcatccacaagctgac

SEQ ID NO: 257550 - DNA, 111 bp, Homo sapiens
gaaagaagttcctgtgctaatataactgtcaggcgaaggcaagagtttgtcgatgcttatgtggattacatattcaataaatcagtggcttccttatttgatgcttttcat

SEQ ID NO: 257551 - DNA, 100 bp, Homo sapiens
ccagctcgcgcttcagcgtcccggcgccgtcgcgccactcctccgaggccgttgctccagggagaactgcaaatatcttcatccacccccacatttaaaa

SEQ ID NO: 257552 - DNA, 100 bp, Homo sapiens
cacgtgacatcaagaggaagcggaaaccagtggccacagcatctttgtctagccccagtgcaggaactgcaagcacatgttgaccagataactgaaatgg

SEQ ID NO: 257553 - DNA, 90 bp, Homo sapiens
aagagtcagtgaggacttccttggccttagatgagtccctatttagaggaaggcaaatcaaggtatgtgcactgcgcgtgaccagccggg

SEQ ID NO: 257554 - DNA, 75 bp, Homo sapiens
gcggggctgaagaagcagttctacaaggcgagccagacttgggaagatccccatgaaaaagataagagcacgaac

SEQ ID NO: 257555 - DNA, 100 bp, Homo sapiens
ctcagagaaagcagcagatggcagagctttggacatcagacagtgcaggagaagaatgtgatgcggcagaaggggctgaaaactaaatccatacagggtg

SEQ ID NO: 257556 - DNA, 101 bp, Homo sapiens
gctgggcctgccatcattcaaaccaggggaagttcctgttaacattggaagagctggtgcatgtgttgtagtggtgaagctaccctaaagctatctatctt

SEQ ID NO: 257557 - DNA, 97 bp, Homo sapiens
tccagcgagcacaccaccgtctgcaccacaggcatgccgcacagggtatttgaagtataccatacaactgttttgaaaatccagcgtggacaatggc

SEQ ID NO: 257558 - DNA, 50 bp, Homo sapiens
gccagacagagtccccggaggtctccaaacgtccacaactatcccgatat

SEQ ID NO: 257559 - DNA, 100 bp, Homo sapiens
gaaaaagcagggaggttatgaggcttaataaagaaggtgacttaagagattaaaattaatttggttgctgttggttctgaacaaataatgagttctttta

SEQ ID NO: 257560 - DNA, 100 bp, Homo sapiens
cagtccgacttggccttcttcaggttcccgcgggaccctgccagactttatattcagagcaccaatcaaattaagcaagcctggggaacttcgtgaggaa

SEQ ID NO: 257561 - DNA, 100 bp, Homo sapiens
gctgcctgagcgatacatgatgaacagcgtcctggaaaacttcaccatcctccagctgagctgactgctgcccactttggaggaggcggtgggctccttc

SEQ ID NO: 257562 - DNA, 100 bp, Homo sapiens
aacctagatctacagctgaacctgctttaccaacagggacgcttatgtcaactgggcagtgaattttgtgaattggaagtttttgctaaagtactgagag

SEQ ID NO: 257563 - DNA, 75 bp, Homo sapiens
agaaggaaggcatggaaagttccagccggttcgagagctagttggaatcgaagcctcttaaaatggcagatgact

SEQ ID NO: 257564 - DNA, 100 bp, Homo sapiens
tctgttggtgcacaaaaagacacttatactatgaaagagcaactggatgatgctcgcaacaaagctgacaatcaagaaaaggcaatacttaatattcaag

SEQ ID NO: 257565 - DNA, 110 bp, Homo sapiens
tacgacttgactactcgcatcgcgcactttttggatcggcatctagtctttccgcttcttgaatttctctctgtaaaggaggctaaaagagatgctaagagaatgcctgc

SEQ ID NO: 257566 - DNA, 100 bp, Homo sapiens
ctagtaatttgccttctggattagtgatagattcgtgtggcctttcaaatgattgtgaagtggtggaaatggatccaaaataataagtgacttctctacc

SEQ ID NO: 257567 - DNA, 50 bp, Homo sapiens
cccaaagctcccaaattagaggaaagagccaacacagatctatagatttc

SEQ ID NO: 257568 - DNA, 80 bp, Homo sapiens
cagtccacccaccgccgccgcctcccaggcgagtttataccgaggtggctacagccgatttgccccctactgaagtgacg

SEQ ID NO: 257569 - DNA, 75 bp, Homo sapiens
caggatggtgatccgtgtatatattgcatcttcctctggctctacagcgggacgacctggaccaattggaattca

SEQ ID NO: 257570 - DNA, 100 bp, Homo sapiens
cagaacccaagaagattccgataagaaacacggaatattccctgggcttttgaggcaataaagcaagcaagtgaatgggtaagaagaactgaaggacagt

SEQ ID NO: 257571 - DNA, 75 bp, Homo sapiens
agattgattgcgttctactgtgtcagtagaacatgttcttcaagtatacatggaataactttttgcatacacaag

SEQ ID NO: 257572 - DNA, 100 bp, Homo sapiens
ggatttcttgctaagtccagcatagttgaagggttacacatcattttggaatgactgtatatcatctggattacgtggctgtatgttaattgaattagca

SEQ ID NO: 257573 - DNA, 130 bp, Homo sapiens
gacccctacggagccccagcttgcccacgcaccccactcggcgtcgcgcggcgtgccctgcttgtcacagtttcaccagtgatcattaaagaatgggcagcttacaaaggaaagtctcctcaaaccccgg

SEQ ID NO: 257574 - DNA, 90 bp, Homo sapiens
ctctcctgggaccctccaagagcactagtgtctagaaggcactaaggaatcctcactatggatgggctcattgaggacattaagcatcgg

SEQ ID NO: 257575 - DNA, 75 bp, Homo sapiens
caccactagctgagccaggagctggcaaaggtctgcgttcagaacatcggcctccagggtcgtatagacctcccc

SEQ ID NO: 257576 - DNA, 83 bp, Homo sapiens
cgagtccacgggcctgaagaaggcctgaagctgcccagcaggcattccaaggcctgggtcctggtttctccggttacacaccc

SEQ ID NO: 257577 - DNA, 101 bp, Homo sapiens
tgcctgtgtcccacttgttcgcggcctatagactcagcccacctgcacccaggtgaaataaacagctttattgctcacacgaagcctgtttggtggtctct

SEQ ID NO: 257578 - DNA, 50 bp, Homo sapiens
cggcgccctgcaccgcgcctcgcaaaatggaacagattaaaagggccaat

SEQ ID NO: 257579 - DNA, 76 bp, Homo sapiens
catgggtgtcgtcgtcagcttgggaacaggatgtacagttacccagcacgtgtacctcctcctcctcctattgctc

SEQ ID NO: 257580 - DNA, 75 bp, Homo sapiens
ggctattgagcatgcagattttgcaggtgtggaacgcctagctcttgtcacagataccgaaactggcaacaccca

SEQ ID NO: 257581 - DNA, 80 bp, Homo sapiens
gtgcctttgaccttctgccatgattgtgaggcctccccagccacgtgaaactgttatttcttatgagggtcatggatatc

SEQ ID NO: 257582 - DNA, 83 bp, Homo sapiens
tgaagatgtcagtgggctgtgcctgtcctggctaccggctctctgaccagttccacgacatcctcattcgaaagtttgacagg

SEQ ID NO: 257583 - DNA, 101 bp, Homo sapiens
accctctgatgttccagaaactccaggaccaggaagtaccaccaagaacagggaaggacaagccagaggctggaggaagatacctgcagaacacagacctg

SEQ ID NO: 257584 - DNA, 75 bp, Homo sapiens
cgcgggcgagcggggctttggacgccggtggagacgcaggcgaggatctaagcattgaagaacagtcagagtgtg

SEQ ID NO: 257585 - DNA, 75 bp, Homo sapiens
gtgcaatcctggagccccccagtgagggatttgaagcattcattaccatctggacttggtctctcagaaacccaa

SEQ ID NO: 257586 - DNA, 90 bp, Homo sapiens
aggaagagctgcagtctttgtgggacaagtacggcaagaagaagctgaaatacctgccctacaatcaccagcacgaatacttcttcctga

SEQ ID NO: 257587 - DNA, 101 bp, Homo sapiens
ggaggatgaagttgattgactatggtctctccggctaccagacaatgcagatcttcgtgaagactctgactggtaagaccatcaccctcgaggttgagccc

SEQ ID NO: 257588 - DNA, 82 bp, Homo sapiens
cgggactcgggcttagggcctgctgtggaggcagcggcggacgccgagctaagcaggtggcaaccaactatatctgaggacc

SEQ ID NO: 257589 - DNA, 75 bp, Homo sapiens
gccccatgttctgcagcgtggcttcctttggtgccagctctttgtctagcttatgtccctgatgccaaaaatgca

SEQ ID NO: 257590 - DNA, 99 bp, Homo sapiens
aaagccaagaggaggacagttcgctacacagcaatgcatcgagagcatccgggcatcgggccttatcctgttggaaacgatcctttttggatctctgct

SEQ ID NO: 257591 - DNA, 75 bp, Homo sapiens
tttttgtttttggaaggagaaggatagacttggctttgagccatcatcgtctacagactgccgtggacctggaaa

SEQ ID NO: 257592 - DNA, 101 bp, Homo sapiens
gattgtggtcactcgaagtgagttgctgatagtccaactccaccgccaccacctccaccagatgacattcccatgtttgatgactctccacctcccccacc

SEQ ID NO: 257593 - DNA, 100 bp, Homo sapiens
cctgtgggtgacaagtctggtttctctggaaaatgtaaacaagactgcagagtgggatgaacttgcagatatgctttgtcaacgacagtggcagtgataa

SEQ ID NO: 257594 - DNA, 75 bp, Homo sapiens
tctacaaagaacagctggctagactggaggagaggagtttacccttacctgtgtcgggccttgaaaacattcgtc

SEQ ID NO: 257595 - DNA, 95 bp, Homo sapiens
ttgaccattcagatggttcgatttttttataaagagaaggaatctgtgaatgccaaagttcttaaggccctcttcgctcgcttattacttcaaga

SEQ ID NO: 257596 - DNA, 88 bp, Homo sapiens
cgagttcgctgccagccccaagaaggagaccctcatccagctgatgcccttcttcgttgtaaacaggaacatcgataagtagtgtaaa

SEQ ID NO: 257597 - DNA, 51 bp, Homo sapiens
atgtggggggtaaaccactcggtcatcctgtacagttctacagcatgaata

SEQ ID NO: 257598 - DNA, 100 bp, Homo sapiens
gccgacggcagccggcacctgacggcgtgaccgacccgagccggcctccggtgtggctgtctctgatggtgtcatcaaggtgttcaacgacatgaaggtg

SEQ ID NO: 257599 - DNA, 143 bp, Homo sapiens
cgaaggttgtttggcttgtttaacagcatataccatcttcctatgcatggaaactcattatgagaaggtgtgcaactgaggaacatggctcaagaaactaatcacagccaagtgcctatgctttgttccactggctgtggatt

SEQ ID NO: 257600 - DNA, 100 bp, Homo sapiens
gctcctcactcaccgcgtggacacgatcggtcacctcctccaagccccacaacccaaaggaggccaacactaagtgctcccctcgcaaggcccacatccg

SEQ ID NO: 257601 - DNA, 50 bp, Homo sapiens
accgttatgtgggaagcgaatccagctgaactcacgggaatcaaatggcg

SEQ ID NO: 257602 - DNA, 82 bp, Homo sapiens
gggaaaatctccccggtgactttcaggaggaatgccccccacgccgcaggccgcgcagctcgctggacagaggcagagtcag

SEQ ID NO: 257603 - DNA, 83 bp, Homo sapiens
ctgaccatggctccctgcagtaccctttaacgggacaagcagatcttttgaaatatgctaagaatgagacattggagaacctg

SEQ ID NO: 257604 - DNA, 83 bp, Homo sapiens
gccgagttcaacatcctcctggccaccgactcctacaaggtcgggaaagaggttaaagaagacacgcaagtatgatatcatca

SEQ ID NO: 257605 - DNA, 82 bp, Homo sapiens
gacgacagcgtcctcagcacccccaagccgaagctgcggcgggtgaaaatgaaagccggctgtagcatcgtggaaaagccag

SEQ ID NO: 257606 - DNA, 82 bp, Homo sapiens
caccaatcagatgtctgtctgccggattggaggtggacacaaaggaagaggcagccagacagctacttcagcgtcctcaacg

SEQ ID NO: 257607 - DNA, 51 bp, Homo sapiens
attgtgggaccttgtgattgtaaaaagcttgtggtgaaggggggcaaaaaa

SEQ ID NO: 257608 - DNA, 83 bp, Homo sapiens
aaagccaagaggaggacagttcgctacacagcaatgcatcgaggcagtatttggcagtcgtattcagagataaacccctggag

SEQ ID NO: 257609 - DNA, 100 bp, Homo sapiens
tcacccctctcttccaaatcctgtagccataaatgtctggctaatggcatttacaggagtgcagttcccaaagataaggacagacagtgctttaaactac

SEQ ID NO: 257610 - DNA, 75 bp, Homo sapiens
atggcagccatttatttgtcccgtgaaaacggtccggatgtaccccttccagattcacagcatcgctctctccac

SEQ ID NO: 257611 - DNA, 100 bp, Homo sapiens
tttggaaaggcacgaagaagcagagtctgataagccagtggtgattggttccatcagacatgtggttcagggccgagatggacgaaaaaatgtggttcct

SEQ ID NO: 257612 - DNA, 82 bp, Homo sapiens
ggggtgctgtggtcaggaggcgcgtgggcggcagggatcatagacggtatttctatgtaaacgaacagtcgggcgagtctca

SEQ ID NO: 257613 - DNA, 75 bp, Homo sapiens
ccatgtgtgacaagcacactgcctccgtggagaagtctcagggccatgctatgatagtggaagcttatccaaaat

SEQ ID NO: 257614 - DNA, 99 bp, Homo sapiens
cttctttgctggtggctgcttgcttgctcctgagaccaaggctgtcattcattggattatggatattccttttgtgctttctgccaatctccatggagg

SEQ ID NO: 257615 - DNA, 75 bp, Homo sapiens
tggaaacctgctctccattgtgaccagtggagccaaggaagtatcgcctggggatgctggaggagaggctagttc

SEQ ID NO: 257616 - DNA, 75 bp, Homo sapiens
gggaaaaattacttactacgtatgtgcaatgccattaagaagcctgtgggaaagacaaaggaggaactggctttg

SEQ ID NO: 257617 - DNA, 75 bp, Homo sapiens
gtgacagtccatatgtaaccaaatattatggatcctatctgaagggaggagtctgctactagtcttatcagctct

SEQ ID NO: 257618 - DNA, 49 bp, Homo sapiens
caggtttcggcacatggagattgatgtgaaacctcacctgctatccagc

SEQ ID NO: 257619 - DNA, 113 bp, Homo sapiens
gcctcagtttgtgcaggacaccgacatggaacagggactcactgggggtgtcatggagaaactccagctgggcccagagattctgcagcgggaaaatccaaggcttatttatg

SEQ ID NO: 257620 - DNA, 82 bp, Homo sapiens
tgggagagaggtacctctccttttccctctccctttccctaaggccctgccctgggagaagccctgccacacgtcgtgccca

SEQ ID NO: 257621 - DNA, 98 bp, Homo sapiens
ggggttcggtggcctctagtgagatctggagtatgtgccaagagttgtaacctctgcacaacagaaagcaggaagaactattacagcccggatcacag

SEQ ID NO: 257622 - DNA, 80 bp, Homo sapiens
ttgcctgtgtcccacttgttcgcggcctatagatgttggatgacaataaccatcttattcagtgtataatggactctcag

SEQ ID NO: 257623 - DNA, 74 bp, Homo sapiens
cttactcgggagctggctgaagatggctactctggagttgaggggaacatagatggctggagacagaatctaga

SEQ ID NO: 257624 - DNA, 74 bp, Homo sapiens
aggaagtacacatcggtttcccttccagccattggaacagctgtcacgggaagtctttttaggataaacgtagg

SEQ ID NO: 257625 - DNA, 82 bp, Homo sapiens
gccatcctgaacgtctctccctgtcctagctctgtaactgtttacagtgacttaagagattaaaattaatttggttgctgtt

SEQ ID NO: 257626 - DNA, 74 bp, Homo sapiens
ctaaaaagtttacaagctactgccctccgaatttatggcaagatgatgatgaatgaagtcctggcagcttcctg

SEQ ID NO: 257627 - DNA, 83 bp, Homo sapiens
tcccgaaggggaagcccaaatcggggcgagtgtggaaggaccgctccaagaaaagcccagcgacttctccgtgtcccttaaag

SEQ ID NO: 257628 - DNA, 51 bp, Homo sapiens
cttccgacgtgcagcctggcagtgcagtgcttccttcaaaatgtctactgt

SEQ ID NO: 257629 - DNA, 105 bp, Homo sapiens
tgaaaatggggcggaagaaaatacaaatcacacgcataatggatgaaaggaaccgacagaatgtgaaagatgttgcagaagtgttccagaagtggctgaagatag

SEQ ID NO: 257630 - DNA, 98 bp, Homo sapiens
cggcggaagtggccggcgagcccggtccccgccggcaccatgcctgctgagggatgcccaagaagttccagggtgagaacaccaagtcggcagcggcc

SEQ ID NO: 257631 - DNA, 98 bp, Homo sapiens
tattttggagtggtgttttatgtgccttcagtttctcagctgcagcaggagattaccagtcagcagataagcagagagccctagaagaaaccaaagcc

SEQ ID NO: 257632 - DNA, 74 bp, Homo sapiens
cgtgggcctgtggactgcagcctcggcggtcagcaggtttgactatggagagcgcttctgggacatcaaaggca

SEQ ID NO: 257633 - DNA, 83 bp, Homo sapiens
caagaaatgactaatcaagagtctgccgtacatgtgaaaatgaatccacattcatctcaatggaaggatcctgccttaagtca

SEQ ID NO: 257634 - DNA, 75 bp, Homo sapiens
gtggcagcgcttggtgagcccttgaacatcaaagatgcatatgagatgcttgggatttgctttacattctaagtg

SEQ ID NO: 257635 - DNA, 96 bp, Homo sapiens
tcaatgcctatacctccagagagcagactgtatactatgccaaagcattctctaaagacttgccaagagaggagaaggcagagcccccccaggcta

SEQ ID NO: 257636 - DNA, 100 bp, Homo sapiens
atcaggcatttcgggaatgtacactggagaccacagttcatgccagcggctggaataaggagcttgaagaaatccgcaaatgtgggatgaaaaacttccg

SEQ ID NO: 257637 - DNA, 83 bp, Homo sapiens
ttggatctcctcctcgctttcccttcttgccagccaccactcagtctcctgctcgaatgagtccctggaacgccagatgcgtg

SEQ ID NO: 257638 - DNA, 78 bp, Homo sapiens
atggcgagaggctgcggctgtaccagatgagtgtgggtcagagagccaaactgactatatctccagattatgcctatg

SEQ ID NO: 257639 - DNA, 54 bp, Homo sapiens
acaccgtgttgctgcaaaaggactatcaggaaacctgtaggaagtgtcagggac

SEQ ID NO: 257640 - DNA, 95 bp, Homo sapiens
cttccatctgctcgggcgaagatccgcatcacctccagccccatttttatcaccttctacatcctggccacgtgctgtacgccgacatcaagatg

SEQ ID NO: 257641 - DNA, 100 bp, Homo sapiens
ctggagccaccttgccgggattgtacctgcaggcagaaagtcttcctacgaccgtcttttcccttagaggcaccaggagcatccccccggtccttcagaa

SEQ ID NO: 257642 - DNA, 78 bp, Homo sapiens
aaaaagcagggaggttatgaggcttaataaagaagtgaaagatgtcatgtatatctgcccatttatgggagcagtgag

SEQ ID NO: 257643 - DNA, 98 bp, Homo sapiens
cctcaatctttgatgactttgcacattatgaaaagcgtcaagaagaggaggaagccatgcgtaggtgcacccagagaaaagtctcagaaagctatcca

SEQ ID NO: 257644 - DNA, 74 bp, Homo sapiens
tccggccgcctggctccccatactagtcgccgtgatgatgatgatgattttgatgatgaggaagctgaagaaaa

SEQ ID NO: 257645 - DNA, 82 bp, Homo sapiens
ccatgtctcgccgcaagcaaggcaaaccccagcacttaagcaaacgggaattctcgcgatgatcggctgaatgtaacagagg

SEQ ID NO: 257646 - DNA, 75 bp, Homo sapiens
aaatgctgcgtatagtggaaccttatgtgacctgggggcagaagaagcgcaacggaaattgaaaagacaaaatag

SEQ ID NO: 257647 - DNA, 83 bp, Homo sapiens
cactgatcaagaacttcttctgaggacagacaggagggtgaggacaaaatcttcttaatcaacaagcttcactccatctacga

SEQ ID NO: 257648 - DNA, 100 bp, Homo sapiens
ctttttcaatcaagaatcagtttacagaaggcaagtgtaaagggtgctgctgtggggcccagcggccgtggagcatcacaagacgtgccggagcctgggc

SEQ ID NO: 257649 - DNA, 88 bp, Homo sapiens
ggaaggtcaccattgacagcagctatgacattgccaagatatcccagaaagatatggagagagatttgaaggctgactcaaacatgcc

SEQ ID NO: 257650 - DNA, 87 bp, Homo sapiens
aggacgaggaaacaatcgtggctacaaaaatcaatctcagggctacaaccagtggcagcagggtcgggaacttcattgcaggccgtg

SEQ ID NO: 257651 - DNA, 83 bp, Homo sapiens
cttggatccgcgggacaagaaaattcatgcggtatttacctcctgagtgttttgtagttggaaaagagccaccaaagatttcc

SEQ ID NO: 257652 - DNA, 100 bp, Homo sapiens
gtctcggggcctgtattctaatttctggtgcggaatcacccctaagaaaatgtgccagaggaacttcaagaaccattttacacagatcagtatgaccagg

SEQ ID NO: 257653 - DNA, 74 bp, Homo sapiens
cgggtgcagggaaaggagaaacaccagacactggaagtctcactgtctcgagatacagttgatatattagttgg

SEQ ID NO: 257654 - DNA, 75 bp, Homo sapiens
gcccctcgcgcgtgaggatctatctcaggttgctcgtgggggccccgcgggcagaagcgcttccactgcagagag

SEQ ID NO: 257655 - DNA, 75 bp, Homo sapiens
aaaagatgatattattgagtttgctcacagagtatctggattgatgtacagctatatattttgtcctttctttca

SEQ ID NO: 257656 - DNA, 51 bp, Homo sapiens
cagctctctctgggcatctggaaaggatcaatgtgactctaagaacaaatg

SEQ ID NO: 257657 - DNA, 101 bp, Homo sapiens
agcacatctccacctcatcaggaaacagctgagacaggtactccaaagattcaggtttactcacgtcatccagcagagaatggaaagtcaaatttcctgaa

SEQ ID NO: 257658 - DNA, 83 bp, Homo sapiens
ccgagaaccgccgcggagccctcatccctaacggtgaaagactcggtgaaatacctggagtgctcagctctcacccagagagg

SEQ ID NO: 257659 - DNA, 100 bp, Homo sapiens
ctctgtccaacctctgcctcaagatcaatgtcaaacttggtggcattaacaacatcctagtcccacaccagcgaccggggctttgagctcacattcaaga

SEQ ID NO: 257660 - DNA, 80 bp, Homo sapiens
aatttccccgtaccgcagcccccgggcacgacctctcggacacggtgcaggcaggccttgtttgtatgaagtccagcaca

SEQ ID NO: 257661 - DNA, 82 bp, Homo sapiens
gatgttgtgttgcccgccaccatgagctacacagttcaaatctgaacatcaatgatgtactagggaactactcattgactct

SEQ ID NO: 257662 - DNA, 75 bp, Homo sapiens
gggaggcttaccgagagtttgaaagtgcgattgtggaagctgctcgggcatccaggctggagaagcagaacagca

SEQ ID NO: 257663 - DNA, 82 bp, Homo sapiens
ggattccaagtaactcttatttgctgtcgcctggttgggcccggaaatgggacgtcgcgctttctcagggagcgtagaagca

SEQ ID NO: 257664 - DNA, 83 bp, Homo sapiens
cggagctgggtctggagacgccgtggcagcctgaacggagtgtgcgacggattgggagcatgcttttcacttccactgcatct

SEQ ID NO: 257665 - DNA, 75 bp, Homo sapiens
tgagcaaagtgcgtgaggagtttaaggagctgaaagcgcgggttgggacaaccgaggaggctgcggcaccccctg

SEQ ID NO: 257666 - DNA, 97 bp, Homo sapiens
tgtggaaaatttcctagaagcttgcagaaaaattggtgtacctcagatcttgagccagatgattgtgcatccatttacatctttaatgtagatccac

SEQ ID NO: 257667 - DNA, 83 bp, Homo sapiens
aagaaccaacccccaaattggctgggacaggtccaatagaaaaagttggtgtgctggagctacctcacctcagcttgagagag

SEQ ID NO: 257668 - DNA, 94 bp, Homo sapiens
cccagcccggccccgcccgcgccggaagagccacgccggtcaaaatgcagatcttcgtgaaaacccttaccggcaagaccatcacccttgaggt

SEQ ID NO: 257669 - DNA, 98 bp, Homo sapiens
gatgaagatgctgttctgatggatggaatgactgaatctgatacagcttcagttaatgaaaatgggctaggttatggaggttttgatgactatggtgg

SEQ ID NO: 257670 - DNA, 100 bp, Homo sapiens
aagatccttgacagccaagagagagcgttctgggacgtgcacaggcccgtgcaggaggagcaatctcagaactgttatgaagaccttcgaagttcttcat

SEQ ID NO: 257671 - DNA, 100 bp, Homo sapiens
gcacctcctcgccagcagccgtccggagccagccaacgagcggcacgcacagaggctgggctgcggtccagatgcgtttgctccatgaattggtctacgc

SEQ ID NO: 257672 - DNA, 151 bp, Homo sapiens
gtttctaaaattggaagtgaatggccccatggtgacggtggccctgtcagtggctctcttggccctcctgaaatgggagaagatgtcaaccggacactagaaggtggaaggaaacctcttcattatgcagcagattgtgggcagcttgaaa

SEQ ID NO: 257673 - DNA, 90 bp, Homo sapiens
aaaaagataaaactgagaaagaattgcccaaaatgagccagattgcccccgaggaattagcacttgttcacaacttgaggaaaatgatga

SEQ ID NO: 257674 - DNA, 97 bp, Homo sapiens
gaagtttgatgtgccgtgtggaggaagagattgcagtgggggctgccagtgctaccctgagaaaggtggacgttcttaggaaaagtcctcagtgctg

SEQ ID NO: 257675 - DNA, 74 bp, Homo sapiens
acgtccactgcgggccggcgaaagctggagaactacgatgacccgcacaaaacccctgcctccccagttgtcca

SEQ ID NO: 257676 - DNA, 100 bp, Homo sapiens
agagattgaaaagaatgctgaaagtagcaaggttccagcgccagaacaagttgaaaaaggtggtgtgagcaatgtaacagaagccaaactcatagttttc

SEQ ID NO: 257677 - DNA, 103 bp, Homo sapiens
gcagccgcagaagagccagcggggtcgcctagtgtcatgaccagggcgggagatcacaaccgccagagaggatgctgtgatatttggagttcttacaacatgg

SEQ ID NO: 257678 - DNA, 75 bp, Homo sapiens
tcctcctgctgctactgtgtccagcgcagggatggagcctatagaggtgcctcttgaggaaaatagtgaacggac

SEQ ID NO: 257679 - DNA, 98 bp, Homo sapiens
acaaccctggcgtccatgagcctggcctacatttgaatttgggagataccattatgaaagattatgaatatctctggaataccgtatcaaagttggtc

SEQ ID NO: 257680 - DNA, 100 bp, Homo sapiens
ccattgctgcggcccagtgggccatctcacaggcctccaccgctatgtctggctggtttacgagcaggacaggccgctaaagtgtgacgagcccatcctc

SEQ ID NO: 257681 - DNA, 100 bp, Homo sapiens
cgggcgcaaagattgcttgaagaaatccatgccatgaaggacccagattcaagaacatggcatcattatgtataccagcccaaatatctggatcagcaaa

SEQ ID NO: 257682 - DNA, 100 bp, Homo sapiens
gtggagagcccgtccgacagcgctgagctctcaggagaagtgattttgcaaattgccaacgaacctgttctgccctttaatgcacttgatatagctttag

SEQ ID NO: 257683 - DNA, 75 bp, Homo sapiens
tcttccctggacaagcgacataccgtggagagacagtggtctggaactgaaagtgatgcgtatttctgagttatg

SEQ ID NO: 257684 - DNA, 100 bp, Homo sapiens
gttacctcagccaaacaggacaagcagtttgtctttcctagatccagacacggggactgcagagaaaggctgtgtgcatccgctgtctactccactgtct

SEQ ID NO: 257685 - DNA, 90 bp, Homo sapiens
cccggacctcttcattgcctaaagtcctgggaactccaacaagggagcaaatcagagaaatgaacccaaactacacagaatttaaattcc

SEQ ID NO: 257686 - DNA, 90 bp, Homo sapiens
cccctgttcccgccccctactcctctggagccctccccgactctgcctgacctggatgtagtggcagctctgttcactcggagagcccgc

SEQ ID NO: 257687 - DNA, 82 bp, Homo sapiens
ccgaccttctcggcctgcagtggcgcgactgtgtacgccgccagctgggtagaggggaagagattgaactttgctgaccttt

SEQ ID NO: 257688 - DNA, 76 bp, Homo sapiens
tcctccgtgaaattcagcccgaatggagagtggctggcaagttcatgacaatctctatgggaagcagaaggcaagg

SEQ ID NO: 257689 - DNA, 82 bp, Homo sapiens
tctagcctctactcttccagttgcggcttattgcatcacagtaattgctgtacgaagctgcggttggatttctcacgatgtc

SEQ ID NO: 257690 - DNA, 100 bp, Homo sapiens
aatgggaaagttcatgttgctgaaagctgtttggaagaaacaggtggcctgggagtagatattgtcctagatgctggagaaaccaaagcccaaaccccgg

SEQ ID NO: 257691 - DNA, 75 bp, Homo sapiens
ggaggaaggatgcagagagaaaggagagcccaagaagatgaaaggattgttcttgttgacaacaaatgtaagtgt

SEQ ID NO: 257692 - DNA, 89 bp, Homo sapiens
ggctccgatgagtccgaggccacttgcaatcgatgctatagaagacaaacaagggaaggttttttttccttttgcatcatggctcaatt

SEQ ID NO: 257693 - DNA, 100 bp, Homo sapiens
gccagtatctgtgtcgccgccgcccgcggcgtccccggtttggtgttgcggcgcccaccttcgggaggatcagaaaactctcccaccatgtcgcagaatg

SEQ ID NO: 257694 - DNA, 82 bp, Homo sapiens
tgaagccagtgggctggggactcacggccgggacactcagggcaggggcagaaccccttcgagctggccttctccctagacc

SEQ ID NO: 257695 - DNA, 80 bp, Homo sapiens
ccccaggaggccttgccgggccggaaggaacagacccctgtagcgggtattagaaaactactcggatgctccaatgacac

SEQ ID NO: 257696 - DNA, 109 bp, Homo sapiens
ggcaccgggatcgtgaccgagaccgtgaccgagagcgtgaccgagagcgcgaatatcgtcatcgttagaagacattgggacctgtgcaatcactgctattccttttgag

SEQ ID NO: 257697 - DNA, 51 bp, Homo sapiens
acaccagcaagctgttcaatgaggaggagagaaggttcaaggtcaatgatg

SEQ ID NO: 257698 - DNA, 50 bp, Homo sapiens
atgggaagttttaaagacagaggagataaacctctcataatgaaggcccc

SEQ ID NO: 257699 - DNA, 98 bp, Homo sapiens
ctatgttaagaaaacataccaatattgttgcacagactagttgggtttcagtaacacctaattttaaggacagactgcatctccgaggctatacacct

SEQ ID NO: 257700 - DNA, 88 bp, Homo sapiens
atgatgctgatggtgatggagattttgatgtggatgatgccaaagttttattaggagttaaagttcctcgtaattttcgcttgttgga

SEQ ID NO: 257701 - DNA, 83 bp, Homo sapiens
tttccctcggcgtgctactgtgcgctcgatccagcaccatggggaagcgggacaatcgggtgctctcatgggaggttgaatgg

SEQ ID NO: 257702 - DNA, 100 bp, Homo sapiens
gtccactctgtctctaccgacatttctcttctaagagaagtagtaaaaccagctgcagtgttatcaaagatataaagacctgatgccacatgatttggct

SEQ ID NO: 257703 - DNA, 50 bp, Homo sapiens
gcatcatggactgtgcgcccaaggcttgtgacaaggactcccaatgtggt

SEQ ID NO: 257704 - DNA, 51 bp, Homo sapiens
aagcggaaggtgatgcccaagatggaccagaacaccttccaccatgaccac

SEQ ID NO: 257705 - DNA, 76 bp, Homo sapiens
acctgttgaaaaaaatctgggaggttgaacttattaattgacttctgacagctctctccatggaaggaggcggcgg

SEQ ID NO: 257706 - DNA, 90 bp, Homo sapiens
agattgtgaagaagaatttcgatctccgccctggggtcattgtcagtgccctgcaggagtcattaaatcaaaacttcatgctgatcatca

SEQ ID NO: 257707 - DNA, 75 bp, Homo sapiens
gagagacacttgtgaacattcaagtgaagcaaaagcctttcatgattattatagcgtaagcactgtccacctgcg

SEQ ID NO: 257708 - DNA, 114 bp, Homo sapiens
cggccagtcatgtatcaaagactgtttgttcaacatatctacaatctcggtactacagtttaagctatgaagaaggacatccctcacactctgaaacagatctccttcagagac

SEQ ID NO: 257709 - DNA, 74 bp, Homo sapiens
ccttccccctgctttgcatggctcccggggcgctgactgcgtgttaacatcagacggagtctcgctctgtcacc

SEQ ID NO: 257710 - DNA, 98 bp, Homo sapiens
aagacaagagagacggcgaggcgcgctccctgcccggcagcgactcggaggcatcagcaatgcagaagcacggcagccagggaaggcccccaacttca

SEQ ID NO: 257711 - DNA, 100 bp, Homo sapiens
gaagaaacccagcttgatatgttgaatcccaaggactgcagcaaagccaaaaagctggtgtgtaatatcaacaaaggctgtggctatggctgtcagctcc

SEQ ID NO: 257712 - DNA, 100 bp, Homo sapiens
gaagtccacccagaaggtgctagacaccaagaaggacgcactgactcgcctcaagcacctgcgcatcgtcatcggaaacagcatcctccattcagctgct

SEQ ID NO: 257713 - DNA, 100 bp, Homo sapiens
agcgtgggtgagcggcgcagcggcggcagcggagagcgagagaggggagcagccggttgttatgacaatggaaaacactatcagataaatcaacagtggg

SEQ ID NO: 257714 - DNA, 83 bp, Homo sapiens
ggagtgtggctccagggaatggggaggaggtcatcagctttgctactgtcacaggtgttacacataatattgcattacttcga

SEQ ID NO: 257715 - DNA, 87 bp, Homo sapiens
tcaaggctcggaagaatgtggagagttttctagaagcctgtcgaaaaatgggggtgcctgaggccgccatggcatcagatgaaggca

SEQ ID NO: 257716 - DNA, 79 bp, Homo sapiens
gacaacgcagatatagaacatttcttttatcacatatctctcagaagatagaagtgtgcaagaagtactacagaagcat

SEQ ID NO: 257717 - DNA, 100 bp, Homo sapiens
gaaattgcagccagggatattgagaaacttctgagcaacagatctaaagccctggtgatttttcaagaggtaaaaagtagtgatattgccaagaccttcc

SEQ ID NO: 257718 - DNA, 90 bp, Homo sapiens
aaaaagatgagcaggaatgttttgctacaaatggaggaggaggaggacgacgacgatggggatatcgcatgtcaaaagcaaccaggaatt

SEQ ID NO: 257719 - DNA, 90 bp, Homo sapiens
ggtcgctgccttcacccgctgactctggtctcggcgatgacaacaagagtgagaatggtgaggcatatcagagaaagaaggcggcagcca

SEQ ID NO: 257720 - DNA, 101 bp, Homo sapiens
cgactcgcggaccggcgtccccggcgcgaagaggctggactcggattcgttgcctgagggtgttgaaagcagcaggggcctagaagacattaaaccgatac

SEQ ID NO: 257721 - DNA, 100 bp, Homo sapiens
ctggagcctcagttggaagcagccgatccagcctgcggagcctgtggggcaggacccagtggcttttaaggatgtggctgtgaacttcacccaggaggag

SEQ ID NO: 257722 - DNA, 97 bp, Homo sapiens
aggggacggacgtcctcccacgtaccatttagaagggcaggctgtccctgcaggatcccacgtacggctgaatcttcagactggggaaagagaggca

SEQ ID NO: 257723 - DNA, 75 bp, Homo sapiens
ggcctatgcgaccggtggcgccggcgcggcttctgcctggagagctgtggaaatacaaagaactctgaatcaact

SEQ ID NO: 257724 - DNA, 75 bp, Homo sapiens
cgaaggggcttcttccagagccaaggaggaagggttgtccggttccatgccattgcagtgtcaactaggcctcag

SEQ ID NO: 257725 - DNA, 74 bp, Homo sapiens
ctcactcccagtagtttctgcatttagtgagataaggtttccaccgtgcacattatgaagaaaagaaatggagg

SEQ ID NO: 257726 - DNA, 75 bp, Homo sapiens
acttggaggaattaacaatgtgcttgtgcctcatcaaagggatcttagcaacatcaattgtgaagagcttggtcc

SEQ ID NO: 257727 - DNA, 75 bp, Homo sapiens
tgtatgatggcctggcgacccattcaggcacttatggccatttcagccagcagctgctcccaaccccagaacctt

SEQ ID NO: 257728 - DNA, 100 bp, Homo sapiens
ataggacacctctgtatgaccttcgtattgaccaaaagaaaaaagcttgtggtgaaggggggcaaaaaaaagaagcaagttctgaagttcactcttgatt

SEQ ID NO: 257729 - DNA, 100 bp, Homo sapiens
acaagggccacaaagtgaccaagaacgtgagcaagcccaggcacagccgacgccgcggggagtcatactccatgggtttatgtgataaatgatcttggca

SEQ ID NO: 257730 - DNA, 75 bp, Homo sapiens
gcggcgcgggccgagaaggaagtgtctttctcgagaagcaggtggaaacatgagcattcagtttcttggtacagt

SEQ ID NO: 257731 - DNA, 141 bp, Homo sapiens
cttgaaagtagggcatccttcacccatctgaagggaggaaatagtggcaggtgacagtctgcatgtgcagttttcagttggttgaatctggcgatgtggaacccatggatatggagggctgactatatacaccatgttttt

SEQ ID NO: 257732 - DNA, 75 bp, Homo sapiens
gctgttgcaatcaaggccatggcaaaataactggctcccaggatggtcgtgtgttcatttggacctgtgatgatg

SEQ ID NO: 257733 - DNA, 80 bp, Homo sapiens
cgagctgagtggttgtgtggtcgcgtctcggaaaccggtagcgcttgcagcatggattgtgcagactggtgcttaaaatg

SEQ ID NO: 257734 - DNA, 100 bp, Homo sapiens
cccgggttcaagcgattctcctgcctcagcctcccataccagttcaactttttcagattccacgtctcatctttgggtgaaaaattgtcgggatcttctg

SEQ ID NO: 257735 - DNA, 96 bp, Homo sapiens
cacatatgaccacctgggagactcccccaaaattcttcaagacattgcttcgggaagccatccatttagccaggcagagaaggtgctgcagtttga

SEQ ID NO: 257736 - DNA, 51 bp, Homo sapiens
caactggagtaaacttcccctcaccagaagtgagggccccaaggctgttgc

SEQ ID NO: 257737 - DNA, 112 bp, Homo sapiens
gccgaggagtcgaggttcacattgttgctgatgccacctcatcaagaagcatgatggacaggatgtttgccctcgagtttcagttcttgccggagagtttccagatttctcc

SEQ ID NO: 257738 - DNA, 125 bp, Homo sapiens
gcatagggagcacggtctacagcaaacactggctcttcggcgtcctcagcggactcatccagattgatatcagtaaatgccattatttagtggatttggacaccatgagagaaacaccccgggag

SEQ ID NO: 257739 - DNA, 100 bp, Homo sapiens
cccagcagaatttgtatagagatgtgatgttggagaactacagaaacctggtctccctagcattatgccagtacatacaggcttctaaagccagggatgg

SEQ ID NO: 257740 - DNA, 89 bp, Homo sapiens
gcaaaacagattgtctttggaggaactcggagagtttcaaggaatgttctaagctggtctatgtccatcaccttcttggagaaggagcc

SEQ ID NO: 257741 - DNA, 75 bp, Homo sapiens
ccagaacctgcacggcccccctggacaggctcaaggtgctcatgcagggagatacttcaggggattaccggaaga

SEQ ID NO: 257742 - DNA, 74 bp, Homo sapiens
actgaatctgatgagcatttttcgacaaagcttatgtatgaaggacgcgctccaggagatatataatcagaagg

SEQ ID NO: 257743 - DNA, 100 bp, Homo sapiens
tggagctctccttgcagatcggtgacacagttcacatcctggagatgtacgagggtgtatgagctcagtggagagcaccatgacgaagagtggtcagtga

SEQ ID NO: 257744 - DNA, 100 bp, Homo sapiens
ggacacacggagctcagggaggcagcagtggcagtccatcgaggggaccaaactctccatcacccaggctctctgatgtaaaggatggagtaaatcaagc

SEQ ID NO: 257745 - DNA, 50 bp, Homo sapiens
gctgagcctgccacgccgaggacgtggctgcggttggatttctcacgatg

SEQ ID NO: 257746 - DNA, 83 bp, Homo sapiens
ggccttagctgtgctcgcgctactctctctttctggcctggaggctatccagcgtaaggggcctggataccaagaagtgactg

SEQ ID NO: 257747 - DNA, 90 bp, Homo sapiens
agatggagaaggagaggctgcggctgaaacagcaagaactgcttcggcagattttggaaccagtactagcagtggaggactctttggaac

SEQ ID NO: 257748 - DNA, 100 bp, Homo sapiens
ggactccccagccaaggactcaacagcagctgtgaggcccagatgttcacagttgactcacaggtatggagcatcacctaccacagctggctgaccttcg

SEQ ID NO: 257749 - DNA, 100 bp, Homo sapiens
aaaacggctggtccggggacagcgcgccggtcgagctgattctgagcgatgaggagatagcagatctcacagaacaaattgctgaaaatggcaaaaccat

SEQ ID NO: 257750 - DNA, 75 bp, Homo sapiens
cgctgatcgcctaacttctactgacgaagcttggaagttgcagaaggtgaccattgtgaggtagatattttgttc

SEQ ID NO: 257751 - DNA, 75 bp, Homo sapiens
cgaacagccatcccgggcactatgtgaatttggggttgaaatcacaaagattagacacctttttagataggtgtt

SEQ ID NO: 257752 - DNA, 75 bp, Homo sapiens
cttcttcttcgagaattacaccggggtccaggttctgaagaaagtctccaaatacattcaagagcagaatgagaa

SEQ ID NO: 257753 - DNA, 100 bp, Homo sapiens
cttgtttaacagcatataccatcttcctatgcatggaaactcattatgagaagtgggctaccttgagaatggagcgaggagccaaggagaagaaccacca

SEQ ID NO: 257754 - DNA, 75 bp, Homo sapiens
cactgtgcagtttcttattagcaaaggtcttttgccaactcctattactcagcaagccagtttgacatctctggc

SEQ ID NO: 257755 - DNA, 100 bp, Homo sapiens
tggagacgggagccaaccagggctgcattggagatccagtccttctgtggaacttctgaacatcttttattagtggaaatattttctacacaatgaagtc

SEQ ID NO: 257756 - DNA, 82 bp, Homo sapiens
caaaacaagtggctgcggccgtcgcccaggagtcatcggacgccagaatctgcgtccgtctccaagagagtatgaagagagt

SEQ ID NO: 257757 - DNA, 92 bp, Homo sapiens
ccgcggcatccgtaaccacaaggaggacgaggtgagaagccctaccactgcaactgggacggctgcggctggaagtttgcgcgctcagacga

SEQ ID NO: 257758 - DNA, 75 bp, Homo sapiens
ccgtggccaccctgtgggcctggcgctggaggcagcggtgcacgtgcaggccgagacgcatccagagctttcgtg

SEQ ID NO: 257759 - DNA, 75 bp, Homo sapiens
tatggagcctttggtgttgtctggagtggctgtaaggtgaagaagcatgaaactcagtctctcgccctggatgca

SEQ ID NO: 257760 - DNA, 80 bp, Homo sapiens
ccagggggactgctgcgtcaaggtggccgtcagggactccgcaaagctgaaagaggtagacaaagccaacctcacagtaa

SEQ ID NO: 257761 - DNA, 72 bp, Homo sapiens
caagttgctttgtggaaaaaactcactggggatactacacctggccaaatcaggatggctaaaggtgacccc

SEQ ID NO: 257762 - DNA, 100 bp, Homo sapiens
cagggtcacagctctcacccaggaaatggatcagacaatggctgccaatgctcagaagaataaattcttgattgatgggtttccaagaaatcaagacaac

SEQ ID NO: 257763 - DNA, 75 bp, Homo sapiens
gactacatctcagactgctgggatagcatttttcacaacaactggtggagcagctgcgccaggccattgaagaac

SEQ ID NO: 257764 - DNA, 82 bp, Homo sapiens
caggagaggagcactttgaggacatggcctccgacgaggacatgctaccggctctctgaccagttccacgacatcctcattc

SEQ ID NO: 257765 - DNA, 83 bp, Homo sapiens
ccattgacgccatgtcgggttattcgagtgaccgagaccgcggccgggaccgaggttcccagtgacctgacagcagaggagcg

SEQ ID NO: 257766 - DNA, 90 bp, Homo sapiens
cccacgccgacctgcttcactgagcaggtgaccattgtgaggtagatattttgttctaattttccagatgaggaagctgagaccctaaaa

SEQ ID NO: 257767 - DNA, 98 bp, Homo sapiens
ttcaacatgcgcaaaatcaccaaagggaatgtgactatcaaggtctgaatttcctgctgctgttcacaaagatgctttttatctttaactttttgttt

SEQ ID NO: 257768 - DNA, 100 bp, Homo sapiens
cccgacgcacaaatatgtccgcctcctgacaaggtgatccgggcgggccccgcaggaattttatcccctcaccggcctcacactagtatcgcatgtccac

SEQ ID NO: 257769 - DNA, 98 bp, Homo sapiens
gactaagagaagtcacaaaacagcagatttcccaagagcagcggaaaatgatccagtcacagagtgtgaacatggctacgcctcttcattcccgtcca

SEQ ID NO: 257770 - DNA, 90 bp, Homo sapiens
ctcacatagagttcctgaccagacaagacttgctggaaatttcccaggatcttccttccttaagctgagattggggattttgatgaagcc

SEQ ID NO: 257771 - DNA, 93 bp, Homo sapiens
cctcttccgctcctgttttatactgcttccatatttacagtatttgggaataagatgatcattccttccctggatggagccctcttccagtgg

SEQ ID NO: 257772 - DNA, 96 bp, Homo sapiens
cgagcgagccgcgaaccgagcgggcggcgggcgcgcgcaccatgggggagaaacccgggaccagactgtaccccatctggagacctgagccccctg

SEQ ID NO: 257773 - DNA, 80 bp, Homo sapiens
gcctgagaaggagcatttcatccgggcggagaccaaggagatcgtcagtgggtcaaaatgcagatcttcgtgaaaaccct

SEQ ID NO: 257774 - DNA, 50 bp, Homo sapiens
gaacgccctctttttaaaaaagaaactcatcgcatacgggcacatcactg

SEQ ID NO: 257775 - DNA, 83 bp, Homo sapiens
gagagggctaccttgtgaagaagggaattggctcgggaaaaggtaatgcgagaagttaaagccttagccaagcttgaacaccc

SEQ ID NO: 257776 - DNA, 116 bp, Homo sapiens
gccccccgaagcccagggagagcaaggcgcgcggcgactccggactcacaccacccggcaagaactgctcactacggctccctgccccagaagtcacacggccggacccaagatga

SEQ ID NO: 257777 - DNA, 95 bp, Homo sapiens
ggaggtctgacattcaaggatatttatctaaaaattcttcttttgagtgccagtaaaggtcatttaatgaacctgaagtactatgtctctccttc

SEQ ID NO: 257778 - DNA, 80 bp, Homo sapiens
ctatcgtctatcattggatgaagtggctccggagatgtactccaaagattcaggtttactcacgtcatccagcagagaat

SEQ ID NO: 257779 - DNA, 100 bp, Homo sapiens
ttctccgacagcagcacacccgtacatcaggaacgtctctatcaagaatacaatttcagcaaggctgagggccatctgaaacagatggagaagatatata

SEQ ID NO: 257780 - DNA, 100 bp, Homo sapiens
cagagacagtagccatccagccaggttggtcatcattttatccaagcttgactgtggtacagcatggcattccatgttgtgaagttcatattggcgatgt

SEQ ID NO: 257781 - DNA, 102 bp, Homo sapiens
gagtgtctcgcagcctgcgagggttccagggagatcaaggacttcaaggatttctacctttccatagcaggaagaggatcacctagcccgggtagaagaggc

SEQ ID NO: 257782 - DNA, 100 bp, Homo sapiens
gcatataagccaggcatgtctcccgaggagtgcaggcgcttcaccacagacggggactacccgctggttcccggcaacaagctggtcttctcctcctacc

SEQ ID NO: 257783 - DNA, 98 bp, Homo sapiens
aagcagctggcttagaagcagatctggaatgcaaacagatctggcaaaatttgggctactgtgtgaagacattcacaggacacagagaatgggtacgt

SEQ ID NO: 257784 - DNA, 100 bp, Homo sapiens
tgaccgcctccaactggacgctggtgatggagggcgagtggatgctgaaattcacaagcccaccgtactgttgtgtggatctgtattcacttcgtactgg

SEQ ID NO: 257785 - DNA, 90 bp, Homo sapiens
caagaacatgaagatgttcctatttgtattcattgcagtcagacacagtcttctgcaccatggatgggaccaaattatggagtgcaaccg

SEQ ID NO: 257786 - DNA, 82 bp, Homo sapiens
ttggggacggagcagcgcgtcgtggggcgagcggcagatctgccttctggagactgcgccgtcctcccgggagagccagaaa

SEQ ID NO: 257787 - DNA, 90 bp, Homo sapiens
caaggatttatcctcttcatctttctccgatcccagttagcaggaatactttagcctggaaggtgctggagaatctggtaaaagcaccat

SEQ ID NO: 257788 - DNA, 102 bp, Homo sapiens
gctctccaaggaggaagatggtccaggctgggagcatccccttagcagcagcctctgggacaacaccttccatccacatatgggacgccatgaccaaacaca

SEQ ID NO: 257789 - DNA, 82 bp, Homo sapiens
ttctcagatgttggatatttgcttggaaaaacgtgtgggtacgaccttggaatgacactgtgcgctttgctttggatgtcct

SEQ ID NO: 257790 - DNA, 51 bp, Homo sapiens
caagatcaggaacctgccctggtaaacagattcaagtgttatcgggccacc

SEQ ID NO: 257791 - DNA, 82 bp, Homo sapiens
accaattaccaagcatataggtttggtgtacagtggcatgggccccgattacagaaggcagacggtaacaagtactccttgc

SEQ ID NO: 257792 - DNA, 96 bp, Homo sapiens
ggcagacatcgagaagcataatgacattgtggacagtgacagcgatgctgaggatcgaggaacgttgtctggcacaaatcctgaagagcccgtggg

SEQ ID NO: 257793 - DNA, 83 bp, Homo sapiens
accatgacgcccatgcactaccacctgcgggagatcatcatctgcacctaccgccagttgtgaatgggagagttcacatccgc

SEQ ID NO: 257794 - DNA, 101 bp, Homo sapiens
gtggcctcctaccaggagctcatggttgagtgtacgaagaaatggacccagatgatgtggtaccagttggccaaagaagagcctggtgttggtgcatgtgc

SEQ ID NO: 257795 - DNA, 110 bp, Homo sapiens
aagtatcagatgttagcgttcgtccatcgcttgccctgccgggatgacgatagtgtgactgccaaagatcttagcaaggcatgtcaacatcgctctaattcagagataat

SEQ ID NO: 257796 - DNA, 90 bp, Homo sapiens
cgatggttacattgaatactacatatgtcgagggaatgcagaaagagttaaggaaggcaggcagcttggatcttaaaagcaagagcgcta

SEQ ID NO: 257797 - DNA, 100 bp, Homo sapiens
tatccagttggtggaatcgggggatttgcagaaagaaatagcgtctgagatcataggattactgatgctggagatctttaagatagagcgtgaaggcgaa

SEQ ID NO: 257798 - DNA, 90 bp, Homo sapiens
gtggccctgatccagacctgggcagattcgtccacatctcctgggtcagctttaaagacaccttcgtcaactggaatgacgaactctctc

SEQ ID NO: 257799 - DNA, 75 bp, Homo sapiens
tgaacttaatacagcaagaaagaccatcaagtttaccagcctttgtggaggcccagaataagattactgtgccat

SEQ ID NO: 257800 - DNA, 95 bp, Homo sapiens
agctcccgcggtactacaagaacatcggtctgggcttcaagacacccaaggaggcccagagcaagagaggcatcctcaccctgaagtaccccatc

SEQ ID NO: 257801 - DNA, 100 bp, Homo sapiens
agcttggcgatgatgacgtttttacacacaaacgtgcagatatctgatagccctttccgttgcactcaagaggaagcaagatcattagttgaatcggtaa

SEQ ID NO: 257802 - DNA, 75 bp, Homo sapiens
aaaaattttcagaagcacatgtattataacagaaaaagttggtgattcaaggaaagcacattgcaatgcattata

SEQ ID NO: 257803 - DNA, 83 bp, Homo sapiens
tgcagcagtacgacctgcagggccagccctacgggtgagaactctgtctcagtcgacgggaagtgcagtgactccacgctact

SEQ ID NO: 257804 - DNA, 90 bp, Homo sapiens
tggcaaagtagaaaaacactatctcttctatgacggagaatccgtttcaggaaagtgtgcccaagagtgtaaacatcttcctgaatctct

SEQ ID NO: 257805 - DNA, 78 bp, Homo sapiens
ggcgtggaggcgcgaggaggagagtgacagagctgggcctggcagtgaagcgtcttcagaagcagaatccggagaagg

SEQ ID NO: 257806 - DNA, 100 bp, Homo sapiens
gggacttcgtgggcactgctgcccatctggtacagccccgcggccccctgcgctggctcgatcctgagagacacggcgtcttttggaaagagtggtatat

SEQ ID NO: 257807 - DNA, 75 bp, Homo sapiens
acagtctgcatgtgcagttttcagagggtgatgagacaggagtgatggataatctgctggaggccttgcagtccg

SEQ ID NO: 257808 - DNA, 100 bp, Homo sapiens
gggccctgctggaccagctcatgggcacggctcgggacgaacactgagctgaaggttgaagtggagagcttgaaacgagaactccaggacaagaaacagc

SEQ ID NO: 257809 - DNA, 100 bp, Homo sapiens
atgttccaggcttgtacattgctgtgcagcaatcgaaattcagattctgcaggcccatttgcagtgcctgaccatcttcggcaagatgtagaagaattcg

SEQ ID NO: 257810 - DNA, 76 bp, Homo sapiens
gcaaatgaagcaactgaaaaaccccttggaaatagtcagcatacctgggaacgtgctcagtcactttcaatgggca

SEQ ID NO: 257811 - DNA, 100 bp, Homo sapiens
caggcaccttcctcagtcgcgccgtgcaggatcacctgctgttaccagctaccacccataacaagaccacaagaccaaaaatgtcaattgtgttaccagc

SEQ ID NO: 257812 - DNA, 75 bp, Homo sapiens
tctttacctgcttcccaatcccactgatgaggatcagcccatgtatgtggagggatcttttgagaaatacctgga

SEQ ID NO: 257813 - DNA, 80 bp, Homo sapiens
gctgtcatcctcattgctactgccctctgcgctcctgcatctgcctccccatgcaccatgactcctgtgaggatgcagca

SEQ ID NO: 257814 - DNA, 75 bp, Homo sapiens
tttgtggatggacttgattctgatgagagaagccactggtgaaggaccgggaagctgagcttctgtactttgctg

SEQ ID NO: 257815 - DNA, 75 bp, Homo sapiens
gctgaaggcagcagcagcagcaagctggaaattatcaagaatgatctgtgggttaaccctctacgctactacctg

SEQ ID NO: 257816 - DNA, 100 bp, Homo sapiens
cggtacctctgcccgcggtcctcgctctcgggcggggcggcggcgacgcggacctgcggactagcgaacccggagctgtgtcagcgtgttatgatgccgt

SEQ ID NO: 257817 - DNA, 88 bp, Homo sapiens
cctgtttgaccaggcccagaggtccgtgcggcagcagctccagagctttgtcaaagagactcagaattcatgattgaagaaatgcagg

SEQ ID NO: 257818 - DNA, 82 bp, Homo sapiens
ctccatgactcaaggcacagactctccaggactcctgcactgactcctgaggacttttgtctgggattggtcatcactcttc

SEQ ID NO: 257819 - DNA, 76 bp, Homo sapiens
gccctgcagtacctgcagaaggtctctggagacatcttcagcagacctcctgccccccgaggtctgcagtctcctg

SEQ ID NO: 257820 - DNA, 75 bp, Homo sapiens
agagagaggtccgtctaatgaagaacagctgcggcttgatgagacccaggaggcagagttccaggcccttcggca

SEQ ID NO: 257821 - DNA, 82 bp, Homo sapiens
ggacgggtcccgcggcgagcgagctcctgaggaggatacgaagcgttttcggcttcctgcccggagctgtgcagcaaacagt

SEQ ID NO: 257822 - DNA, 82 bp, Homo sapiens
gggtgcgctgctcaaggacacggtctacaccgacttcgacgcttgtgctgcattgcacctgtcctcgcggccaaggtgctca

SEQ ID NO: 257823 - DNA, 75 bp, Homo sapiens
cgagggcatggacgagatggagttcaccgaggccgctatgcagggtagcactgggaacaggagacccacctgagg

SEQ ID NO: 257824 - DNA, 76 bp, Homo sapiens
attacaccatctgaattgcctgcaaacccaggtgtgcaactgaggaacatggctcaagaaactaatcacagccaag

SEQ ID NO: 257825 - DNA, 100 bp, Homo sapiens
gccggtgatctacaccatggagaacaagcccatcgtcacctagccccagtttgagggacagcgggatatccaccatgctgctgtgagactcgggcagttg

SEQ ID NO: 257826 - DNA, 96 bp, Homo sapiens
cggaggacggcagcttttgggggccgggcgggagaagcgtccgttcatccgcggaaccaagctgaggaacggcagagtcgaaacaaacaatgaggg

SEQ ID NO: 257827 - DNA, 100 bp, Homo sapiens
gaaccgcgtgaccgagctggagagcgtggacaagagcgcggggcaagtggctcggaacacagggctcattgtcatccccaagccaggccagttctccagg

SEQ ID NO: 257828 - DNA, 97 bp, Homo sapiens
tcctgccaggccgacccccgacaccaggggcaccgcgtgcagccggtgaaggacactgcccacgactttcggggccggtcactccgcgcaagtttgg

SEQ ID NO: 257829 - DNA, 82 bp, Homo sapiens
ctggcctggaggctatccagctctgtggcccagacccaggcaagtggtaaatatttaccttcacgctggagccaagatcgct

SEQ ID NO: 257830 - DNA, 98 bp, Homo sapiens
tcagactgaccgtgtcttacatcagttcagagagaaagatcaactgaaatcggcaaacttctgagttcctacttgcaaaagaaaagtgacgtggagga

SEQ ID NO: 257831 - DNA, 100 bp, Homo sapiens
ccactggcggccgaggtagaggcagtggcgcttgagttggtcgggggcagcggcagcttgtactcccagagtacctcatccacgctttcttctgtgtcat

SEQ ID NO: 257832 - DNA, 83 bp, Homo sapiens
cctgaagaaggtcagtgtgcttgcttggagatcaggacgcaaagtgcctccggagccagcgtggtggccatagacaacaagat

SEQ ID NO: 257833 - DNA, 97 bp, Homo sapiens
cagcactatcccaagactgctggcaacaggcaaagaggccatgctgcgacagaaggactatgagaccgccaccctctcggagatcaaggccctgctc

SEQ ID NO: 257834 - DNA, 82 bp, Homo sapiens
catggctgactacctgctgtacaccctcaacaaacaccagcgctttgggggttgtagaaggtgatttagctgccatagaagc

SEQ ID NO: 257835 - DNA, 98 bp, Homo sapiens
tcgggcaggccttccgagaggaacctctatgccgacatcgacgccgcctggcaggccctgcgcaccagaccacagcaccgggaagtccagtcagcggc

SEQ ID NO: 257836 - DNA, 100 bp, Homo sapiens
ttacaattttttttcaagaactgccgtcttctttgcctgcactaatggtgctggagaatctggtaaaagcaccattgtgaagcagatgaggatcctgcat

SEQ ID NO: 257837 - DNA, 75 bp, Homo sapiens
ctctggaataccaggaatgcaacattttgccctgcccagatggagtctcactctctcccccaggctggggtgcag

SEQ ID NO: 257838 - DNA, 98 bp, Homo sapiens
agttggtgctatggcaaggctgggaaactgcagcctgacttgggctgccctgatcatcctgctgctccccggaaacacaggaggagaggaagacacag

SEQ ID NO: 257839 - DNA, 75 bp, Homo sapiens
acaagcacctcctgctccagtaattgattgagaggatccagaatccagatctctggaatagctaccaggcaaaga

SEQ ID NO: 257840 - DNA, 75 bp, Homo sapiens
cagcaggcgctggctcctgctcaggttccagtgggtagtgactcgcaaaatgtggtccagccgcctttccagcaa

SEQ ID NO: 257841 - DNA, 100 bp, Homo sapiens
aatagaggacacgagcggcgccttctcagggctcgacagcctcagcaagctggccacaggagaatggtatgctgctcggcatggagtgaagaccaccccg

SEQ ID NO: 257842 - DNA, 90 bp, Homo sapiens
gattagatgagcttgagaaagccatcaccactcaaaactgtaatactaaatgtgttaccataccaaggaaggatctgagtctctccctgc

SEQ ID NO: 257843 - DNA, 50 bp, Homo sapiens
gctgaaaggcgggaaggcttattccaagtgctcaagtaaagctctttgtg

SEQ ID NO: 257844 - DNA, 83 bp, Homo sapiens
gagcagttgtctgatgaagagaagacaatgcagatcttcgtgaagactctgactggtaagaccatcaccctcgaggttgagcc

SEQ ID NO: 257845 - DNA, 83 bp, Homo sapiens
ggctatggccgtgccctggggctgagccctcaggaatgccatatggcagccgagagaactccctcctctactctgagattccc

SEQ ID NO: 257846 - DNA, 75 bp, Homo sapiens
gatgaatggacaccttgaagcagaggagcagcaggaccagcacagacgcagtcttcagcaaggaagtgctgggaa

SEQ ID NO: 257847 - DNA, 98 bp, Homo sapiens
gagcagatgtgatctgcgctaggtggcatctcctctcacggatgcctcggatttgaatttgttgaaatgagcagtcgtaaatcaaagagtaacagctt

SEQ ID NO: 257848 - DNA, 83 bp, Homo sapiens
tggaagatagcttgaacagggctgacaacatttttccttttccgattgccttctctcagcacagcaattttatggacctggta

SEQ ID NO: 257849 - DNA, 75 bp, Homo sapiens
ccagttttgaaatcgacacacaaagaatagagttgagcctgtgggacacttcggattgtaaaccatggctgtgtg

SEQ ID NO: 257850 - DNA, 82 bp, Homo sapiens
actcagcgaattgtaatggaaagcatatggacaggtctacgccacatcacttagggtcagcagcctctggacccgtgaaaga

SEQ ID NO: 257851 - DNA, 96 bp, Homo sapiens
gaacagtactctcagagttcctgtggttgtgctagccacagtgcagcctggccagaatttccacatgttcacaaaggaagaacttgaagaggttat

SEQ ID NO: 257852 - DNA, 74 bp, Homo sapiens
aaatccttgaaagaagaagatggagaagaaatagttacctatgatcatggatcctgagcttgaaaaaaaactga

SEQ ID NO: 257853 - DNA, 75 bp, Homo sapiens
tttaagcgcactgatgattttgaggaaagcaacagaatgcatggtatgaacatagacagtgaaactaaagcaaat

SEQ ID NO: 257854 - DNA, 99 bp, Homo sapiens
ggaagagtacagacagcccggtagagtgtatgggccaggagaaaggggaattcagagtgtggatcagtgttaaaagtgcttcatggagaaatggaggcc

SEQ ID NO: 257855 - DNA, 90 bp, Homo sapiens
ggctgcctcctgcagcccccatagcaggtattgatgaagatgaccctactgctgatgataccagtgctgctgtaactgaagaaatgccac

SEQ ID NO: 257856 - DNA, 98 bp, Homo sapiens
gagccgccaccaaaatgcagattttcgtgaaaacccttacggggaagaccatcaccctcgagaatatgtggatcgagagaaccatatatacaactgca

SEQ ID NO: 257857 - DNA, 82 bp, Homo sapiens
tgcgactcgcggaccggcgtccccggcgcgaagaggctggactcggattcgttgcctgagcacaggagaaaacgacgctcca

SEQ ID NO: 257858 - DNA, 73 bp, Homo sapiens
aacaagattactatcactaatgacaagggctgttttatgctgtggatgttgacgacgatatttgggaagatga

SEQ ID NO: 257859 - DNA, 82 bp, Homo sapiens
ggaagctggagccacctgcgggtgacttaagagattaaaattaatttggttgctgttggttctgaacaaataatgagttctt

SEQ ID NO: 257860 - DNA, 100 bp, Homo sapiens
tggagtctgcgaaggccgggacccggttccccggcccacagtgggggtgtgcaaacccgagagaactggccgtgttgccgcccgctgtgctatgagcagt

SEQ ID NO: 257861 - DNA, 96 bp, Homo sapiens
tatcaagctttagagcctggctactcacagttgaagcctgattgcagggacacttggcattcagggacgtggccatagaattccctcaggaggagt

SEQ ID NO: 257862 - DNA, 101 bp, Homo sapiens
tgctgtggtctgagctagagggtgaagctggcggagcaggaggatgggcgtggctttgaagcgtatgttgaatttcaatgtgcctcatattaaaaacagca

SEQ ID NO: 257863 - DNA, 89 bp, Homo sapiens
gggactgcaacccagcgagggacgcgggcagccatggccgaagcggcgcctgcccgggactggggttcagactttccgcagagaccatg

SEQ ID NO: 257864 - DNA, 100 bp, Homo sapiens
atcaatcttattccactgcatgtatttgtgttgttactgatgcagagatacagcaaaagagtctacatagatcagaaactgtttgccagcctcctcatca

SEQ ID NO: 257865 - DNA, 103 bp, Homo sapiens
agacgaagtcttttggaatacaaggattgtaccgattttgcgtgaattagaaaaggcaggaacgaatgcaggaatttgggaactgagctgtgcaagtgctgaa

SEQ ID NO: 257866 - DNA, 116 bp, Homo sapiens
cgacgtggccttcctcgtggccgcctccttcttcctcatcgtggcagctctggtgtttacaggcattggagtttttacatgctaatcaagtgatccacagagacatcaaaagtgac

SEQ ID NO: 257867 - DNA, 100 bp, Homo sapiens
gaacggtcaaagacattcacaacatggatggaaggatttgatgccctggatccctttattcccatcctggtttccaactataacccaaaggaatttgaaa

SEQ ID NO: 257868 - DNA, 76 bp, Homo sapiens
aactacagaaacctggtctccctagcggagctccctgggtcctcagcagtgaggctggcctccctgcgtgacctgc

SEQ ID NO: 257869 - DNA, 83 bp, Homo sapiens
cgggactcccgccgctgctaaatatatccgtaggaatggagagggaccggatctcaggattctgaaaccttccttgtatccct

SEQ ID NO: 257870 - DNA, 75 bp, Homo sapiens
caagagtaacagcagcgccgtcccgtccgacagccaggcccgggagaacttgcaagcaatactttgagaagtatc

SEQ ID NO: 257871 - DNA, 83 bp, Homo sapiens
cgctccgtggccttagctgtgctcgcgctactctctctttctggcctggaggctatccagctaccatggggcgcaagttggac

SEQ ID NO: 257872 - DNA, 75 bp, Homo sapiens
gcggcttctggttctcacttgtcggcagtgctcggaatgtgaccaggcagggagcagtgacatggaagcagatat

SEQ ID NO: 257873 - DNA, 96 bp, Homo sapiens
cgtgggcggcggcaacggggcactgacctgggtgttcaaatctgaacatcaatgatgtactagggaactactcattgactcttgttgatgcattgg

SEQ ID NO: 257874 - DNA, 100 bp, Homo sapiens
tttcgtcgagagattcactatggaatcggtatcagcagatgttgcacacaaacttggtataccttgctacaatagcagattctaatcaaaatatgcagtc

SEQ ID NO: 257875 - DNA, 83 bp, Homo sapiens
ctcaccgagacggcgatccgggcgctcgagacttaccagagccacaaggaggaccccgttctggagcgttatttcaaaggcca

SEQ ID NO: 257876 - DNA, 99 bp, Homo sapiens
atcatcatgaaggacgtgcccgactggaagtgtactaatggtcacttgatgtgcgctggctgttttatccacctactagcagatgcccggctgaaggag

SEQ ID NO: 257877 - DNA, 100 bp, Homo sapiens
gaagagagaaagaagaaaattgctggaataatgaccttgaatagaggaaatgggatatcatctggaagatgaagatccctttcctcctactgttctttct

SEQ ID NO: 257878 - DNA, 100 bp, Homo sapiens
tgttagaaacagcagtatacgatgctggctaagaaatctcatctcaaggtacaggtttgcagattccgccagcagcacagcaagctctacagatgagtgg

SEQ ID NO: 257879 - DNA, 74 bp, Homo sapiens
ggaaccaaagcggatcagagagggctaccttgtgaagaaggccttagaaaatttacgtgtatacctgtgtgaga

SEQ ID NO: 257880 - DNA, 82 bp, Homo sapiens
ctcgggttctgacaagatggccgggctgccccgcaggatcatcaagatgtgtatatctcatgattgatatggagaaactagt

SEQ ID NO: 257881 - DNA, 100 bp, Homo sapiens
tttatactcccactgtgggtctggcttgccaacaatatagtttggtgtttcggaagccaagatgctctacccatggtaccccaggaccagaaggcaacca

SEQ ID NO: 257882 - DNA, 83 bp, Homo sapiens
tgagtcatgtggcagtggaaaatgcgctcgggctggaccagcaggcctgacctctcgggacacacccagccctgtggacccag

SEQ ID NO: 257883 - DNA, 75 bp, Homo sapiens
cagaaacgtcactatcaagaagctggcatactgtgtagtgcagtttttagaaaaggacagcaccctcacggaacc

SEQ ID NO: 257884 - DNA, 98 bp, Homo sapiens
ctaaatttattattgataacacaaaaggtcaaatgttgggacttgggaatcccagcttttcagatccatttacagatcagagaaacctgggcatgtct

SEQ ID NO: 257885 - DNA, 74 bp, Homo sapiens
agccaggcctgcagaggctgttctacaggggcaaacaggccatgacgctgatggagtacctcatcaagaccggc

SEQ ID NO: 257886 - DNA, 75 bp, Homo sapiens
acccacagggaacttggcagaaggtgatacaggtggttcagtcagggctctgcctgccacaattcatgagctggc

SEQ ID NO: 257887 - DNA, 75 bp, Homo sapiens
cctgaaccttgctccgagagggagtcctcgcggacgtcagccaagtgttgatgggaaccattttcagcatcctgc

SEQ ID NO: 257888 - DNA, 83 bp, Homo sapiens
aggacaacatcgaggaagccctcctgctcctcctcatcagcgaatccatgccttatgccagcctggaccatcttggaggcagt

SEQ ID NO: 257889 - DNA, 80 bp, Homo sapiens
aaagtgctacgctatgaaggcttctttggactgtatagaggtacatcgaggaggccattgagaaactaagcaagcggcac

SEQ ID NO: 257890 - DNA, 111 bp, Homo sapiens
cccgaatccgaggtatttgagatcacggacttcaccactgcctcggaatgggaaaggtgatgatgaacagtctacacagatggctgcaagttgggaagatgataaagttac

SEQ ID NO: 257891 - DNA, 75 bp, Homo sapiens
tgactgtcgggcggtggtgatctctggtgcaggaaaaatgttcactgcagccctgggcgctgcctatggcacagc

SEQ ID NO: 257892 - DNA, 100 bp, Homo sapiens
tgcataccctggaccagcagaaacctagagtggacccagatgatgtggtaccagttggccaaagaagagcctggtgttggtgcatgtgctttggactagc

SEQ ID NO: 257893 - DNA, 100 bp, Homo sapiens
cgtaccagaggtggaagtccaagtcaaacgcagaaggactgcctcactgagcaaccaagagttccccacgtgtgaaagtcaagaatctgattgaaagcat

SEQ ID NO: 257894 - DNA, 100 bp, Homo sapiens
ctgggaatttggcgacgtaattcccgactatgtgctgggccagagcacctgtgccctgttcctcagcattctctgttcacccccacacctagaccctgac

SEQ ID NO: 257895 - DNA, 75 bp, Homo sapiens
agctggagagtgactgtagagcctcaggatggggaatttagcatggatcttcgtaccaagagcaccggtggggcc

SEQ ID NO: 257896 - DNA, 83 bp, Homo sapiens
ttttataagacaaaagaaatagcaagaactgaggagcaccaggagacgcaactcatcgggcagaagctcctcctggggtagag

SEQ ID NO: 257897 - DNA, 99 bp, Homo sapiens
ccaaaatggcgaccggcaactactttggattcacccacagcggggcggcggcggcggcggctgcggcccaatataggcatccagtaccctgctgactct

SEQ ID NO: 257898 - DNA, 100 bp, Homo sapiens
ctggaacgacagccgcttcactgacctaccccctggacctggtcagagcgcggatggccgtaaccccgaaggaaatagggaagtggaatcccgattgctt

SEQ ID NO: 257899 - DNA, 75 bp, Homo sapiens
ctcaatttaagcctgatctaacccctagaaacagagtccgaaattgaagttcagaggaagaattgccttccaccg

SEQ ID NO: 257900 - DNA, 100 bp, Homo sapiens
ggaggtgggaaggtgtgtccggaggtttgcaggggtgcagtgtgtctggtcttatgaggtcagttgctgataaagaggccattgcaaatttcacaaatca

SEQ ID NO: 257901 - DNA, 98 bp, Homo sapiens
tgcgcaaggaggaggagacgctgctgcggttgaaggcagccctgcacgaccagctgaaccgcctcaagagctacttcctcagccgagcccagagcctg

SEQ ID NO: 257902 - DNA, 74 bp, Homo sapiens
cggagccgcgcagccctcggagcacggtacgaggaacagcaaattcaggaaaaagtggcgacctttcgactcat

SEQ ID NO: 257903 - DNA, 75 bp, Homo sapiens
catcagtctaccagctttgggctgatgctgacatcaccgattatgtttcgaggggaagtacgtttaaatgtggaa

SEQ ID NO: 257904 - DNA, 82 bp, Homo sapiens
tgaaaaagtatcgtcgagaagcctatcatcggatgttttagaagaatgtatgtctcttcccaagctatcttcttattctgga

SEQ ID NO: 257905 - DNA, 124 bp, Homo sapiens
tgagccgttgccgaacgtggtggagctgtggcaggcagaagaaggggaactcctgctgcccactcaggaaaccacccctactcctaatcccccgactacagaagaggagaaaacggaatctaat

SEQ ID NO: 257906 - DNA, 96 bp, Homo sapiens
gctgcactcctgaccgcttccctgaaggctgcacgtgctcatctctcagagatctagaacttgcctaccaagtacatggccttttaaaaaccggag

SEQ ID NO: 257907 - DNA, 82 bp, Homo sapiens
gcgggagcctttggggcaccacagagatgcggggtggcccagttgaaatccttcccttcctctaccttggaagtgcctacca

SEQ ID NO: 257908 - DNA, 75 bp, Homo sapiens
aagaagatggacaagatggtgcagaagaagaacgcgcttcttccagaccagctggtcttgcttctggagcatctc

SEQ ID NO: 257909 - DNA, 127 bp, Homo sapiens
cccgttcttgcctcaggccagtcgcctccaggccaagagggatccttcacccgtgtctgggtgagaactctgtctcagtcgacgggaagtgcagtgactccacgctactgagcaacttgttagaaga

SEQ ID NO: 257910 - DNA, 75 bp, Homo sapiens
ctgtgcgagagcctcctcacttggatctcccttgagtttagaaatctggctgagaaataccaaacagtgattgcc

SEQ ID NO: 257911 - DNA, 100 bp, Homo sapiens
aaaggttctgattgagggctccatcaactctgtccgggtcagcattgctgtgaaacaggaaaaacaagaatggtggtggctttacattgcagataggaag

SEQ ID NO: 257912 - DNA, 90 bp, Homo sapiens
gacatttaattttagggtcctttatatagaagggagagtaggcagctgacacacaagagttcaggaccaaactgcacaaagtatttcgtg

SEQ ID NO: 257913 - DNA, 74 bp, Homo sapiens
cggaggcggaggcagaggtggaggcgctttgaaaggagccttcacgtaaatgggtccagtcatgcctcccagta

SEQ ID NO: 257914 - DNA, 100 bp, Homo sapiens
tgagcacaacccgaagcggcctgtgacctgtgaacagggctgtggagacgagttgtactgctgtcacaggaaatggacgctggattacaagcatggcagc

SEQ ID NO: 257915 - DNA, 83 bp, Homo sapiens
gtgagatccaggcgcgcgccaagagggtcagctgggacttcaagacggccgagagccactgctattccatctgcagtgaacct

SEQ ID NO: 257916 - DNA, 100 bp, Homo sapiens
ttgctgtccagccagctgtaaagccttgggctcccttgcaggattcagaagtgtatttagcatctctagggtgattgtgttgttacagtgctgcttgctg

SEQ ID NO: 257917 - DNA, 82 bp, Homo sapiens
cctaaagaacatccacagaatagacctgaagacaaaaatccagaagtacaagcagtctgcaaattgtggctactaatttgcc

SEQ ID NO: 257918 - DNA, 116 bp, Homo sapiens
ctgattatttcaaccgaaactgttatcaggatgatattaacagaccattaaaaatctcaagtgacgactttgggaaactctggttatccttcgcaaatgatgtgaaacaaaatgta

SEQ ID NO: 257919 - DNA, 75 bp, Homo sapiens
gaatggataaggcaaaacggaggctgggtacagaatgagcacatgttgttggtgtacgccaggtggtgcttccac

SEQ ID NO: 257920 - DNA, 99 bp, Homo sapiens
gcgccgcccgccgctgagggaccgcggggttagccactgctggctgcttccagtgttcgccgagagatgcctgaggaaacccagacccaagaccaaccg

SEQ ID NO: 257921 - DNA, 114 bp, Homo sapiens
cccatctaatcacagactcctatttgaagtatttgacgaaaatagactgtattctaccttgtaaatactgttatttgtatatactgtaaatgatgacatcggtgggcactaacc

SEQ ID NO: 257922 - DNA, 83 bp, Homo sapiens
cgcagtttctcacgacgggccgagcctgccactgttaacacagaaatctgcctcctgggccatgccgcttctaaggcctgttt

SEQ ID NO: 257923 - DNA, 82 bp, Homo sapiens
ctaggatggaaaacatatccattaaatggggaccctggtttgatatgtacctatctgctcgagactccgttgttctgaactt

SEQ ID NO: 257924 - DNA, 75 bp, Homo sapiens
ctcgcccgccaccctgcgctgccgccgctctgaggagttaaaggaactttaatggaattgggtatctccccaatt

SEQ ID NO: 257925 - DNA, 80 bp, Homo sapiens
aaaccctgctgatgtcagtgttatatcctccaggaatactggccaggccagaagcctgtcttagatgttcatgcagaact

SEQ ID NO: 257926 - DNA, 98 bp, Homo sapiens
gaacccagaagaggactgatcatttcttgcagctctaaaaaccatggctcggatttggatttacagtgtgagataatcagctacatagaagtacccac

SEQ ID NO: 257927 - DNA, 97 bp, Homo sapiens
gatggcgaaggtctcagagctttacgatgtcacttgggaaggctaagaaatggcatttcaaaaggcagtgaaagggacgattcttgttggaggaggt

SEQ ID NO: 257928 - DNA, 50 bp, Homo sapiens
gctttcacaatgtcattccagtaaatgaattggcagcaatgaaacagatt

SEQ ID NO: 257929 - DNA, 102 bp, Homo sapiens
aggaagttccagctctgcgccgatctatgcacgcagatgctggagaagtccccttatgaccaggctcagctggaagctcagaaagccacgcaggacttccag

SEQ ID NO: 257930 - DNA, 73 bp, Homo sapiens
gggccgctcctggaggaggaggtgggagatgagctttgatccaaaccttctccacaacaatggacataatggg

SEQ ID NO: 257931 - DNA, 99 bp, Homo sapiens
ataagaaaagatatgagaacacagattctgatatgctttcccatggtttggcatggacattgggggaactctagtaaagctctcgtactttgaacctat

SEQ ID NO: 257932 - DNA, 88 bp, Homo sapiens
tggacacagacctcgtcctggctgcttttctaacccaaactgtatgtcttgatgacactacagtaaagtttgaaatatgggatacagc

SEQ ID NO: 257933 - DNA, 96 bp, Homo sapiens
gcagatggcggatgccctgcagtacctgcagaaggtctctggagacatcttcagcaggtcccctcttgctgttggctgcacatcaggaaggctgtg

SEQ ID NO: 257934 - DNA, 96 bp, Homo sapiens
taaaaacgtccgggtccaaagagagacctcatgatgatcctgagacttgtcttgttgctgctctgagcatctggaggaacagaaaactaagttcat

SEQ ID NO: 257935 - DNA, 82 bp, Homo sapiens
gatccagcctgcggagcctgtggggcagcacatccgcgtgggctgggagcagctgctcaccaccattgcccgcaccatcaac

SEQ ID NO: 257936 - DNA, 100 bp, Homo sapiens
gtggcgcgtgtcttcatgcagcaattaggtgagcacctgcggatctgtccccagggctacacctgctgcaccagcgagatggaggagaacctggccaacc

SEQ ID NO: 257937 - DNA, 87 bp, Homo sapiens
gacctttgcacagaaaatgccatcatgctgaaacgattcaatagcactggatgtgtgtgagaagtggggagaaatgccaccactaca

SEQ ID NO: 257938 - DNA, 51 bp, Homo sapiens
gaggagcgggcagcaagcggaaacaccgatttgggatgttgcccctggatg

SEQ ID NO: 257939 - DNA, 75 bp, Homo sapiens
gttgaatctgcaaaacttattcgggataaagtagcagccatggattgcaaagatagaccagcttttccagttaag

SEQ ID NO: 257940 - DNA, 100 bp, Homo sapiens
tccgtttgttggtggaggaggtggcaggcctcggcgcactgaacctaccagatgtatttgggttggtcgtcctcccattggaactgaaactacggatctt

SEQ ID NO: 257941 - DNA, 96 bp, Homo sapiens
gtgtcaaacatccatatcataagtggaattttggagatattcaaaggttttcaattcaaaaacagctgaactacttagtcatcatcaagtagaaat

SEQ ID NO: 257942 - DNA, 95 bp, Homo sapiens
cgcgtctctctgctgcggcgcggggaccgctgtgctctcgatctgtggagctccatggctcaactctttccacgaagctctttccatctgaaagg

SEQ ID NO: 257943 - DNA, 100 bp, Homo sapiens
gtgggtgctgggacttcccgtccgcggcgtggaggcttcaagaatccagaggctttaggaagaagataaaacgccttgaggagtcaaacaagaagttggc

SEQ ID NO: 257944 - DNA, 87 bp, Homo sapiens
ttgacatgtcctctttcacaaagtttgagataacagagtcaaattgactttatcagctttaatcgatgggaagaacttcagtgcagg

SEQ ID NO: 257945 - DNA, 80 bp, Homo sapiens
gccatctgttctgccctggctgcctcagccctaccagcactggtcatgtctaaaggaataaagggattcattcctcattt

SEQ ID NO: 257946 - DNA, 76 bp, Homo sapiens
cggtcacgaaaactggacaaagtcacacagcggcagtgataaagagcacagggatgtggagagatctcaagaacaa

SEQ ID NO: 257947 - DNA, 97 bp, Homo sapiens
cctcgctgggcacccagccggacttgggctctgccctctaccagctaacaggcctcacctcttccattccggagatgatccttggacatcttttcag

SEQ ID NO: 257948 - DNA, 74 bp, Homo sapiens
tggaacttgccctgtctcctcgcagatgagggaggagtctgctactagtcttatcagctcttaaaaacagaaac

SEQ ID NO: 257949 - DNA, 142 bp, Homo sapiens
atctgttgagatctccatccatcaaactgcgcaggagtaaggcaggaaaccgacgagaggacctcagctccaagggcagcgaggtcacaggccccacctttgctgatggcgagctcatccccagggaacccggcttttttcc

SEQ ID NO: 257950 - DNA, 75 bp, Homo sapiens
gtccctcagtcacacatgccagagattgctcaggaagcaatggaggcacagatgttaaagatgccaaggtgataa

SEQ ID NO: 257951 - DNA, 90 bp, Homo sapiens
tgttccttcagccaaagaaacaagccgtggaataggtgtatcaagtaatggtgcaaagcctgaaatttcaggtatgctgctgaaagtggg

SEQ ID NO: 257952 - DNA, 87 bp, Homo sapiens
aaaggtgtacttgcaagaaacctcaggacttgagtaacagcaacatggaactggagaagatgatgactatgttgatgattttaatag

SEQ ID NO: 257953 - DNA, 89 bp, Homo sapiens
caatcgcttgggagagctcctgggccacccctcctttcaggtcaagttcctgggcttcccgatggactcgagtttttactatgtgagca

SEQ ID NO: 257954 - DNA, 101 bp, Homo sapiens
cggatcctaataaggggaaaatggtcacctggagcctgggggccggcccagctctctcaggattcagcagacattggaggtggcagtgaaggatacagtgg

SEQ ID NO: 257955 - DNA, 97 bp, Homo sapiens
tacagagcctgcttgtatgaacgggttttgttagccctacatgatcgagggtctcactgtgccacccagctggagtatagtggtgcaaacacagctt

SEQ ID NO: 257956 - DNA, 117 bp, Homo sapiens
tttttgttactcttcagtacaatgtcaccctcccagcaacaggtttgaagatgccgcatttggattggatgaattccaaattctgcttgcttgctttttaatattgatatgcttata

SEQ ID NO: 257957 - DNA, 100 bp, Homo sapiens
ccggggccccgaagaggacagagcccgcggccgcgccgagcgggtgtgctcactgatccgcctccagggccaccgccatgtcgagccgcggtgggaagaa

SEQ ID NO: 257958 - DNA, 100 bp, Homo sapiens
ggccagtgttgtccctactgcataggtgcagattcactttataggaacagcttcagcttcagtgatgaaaaactgaattctccaacagactctaccccag

SEQ ID NO: 257959 - DNA, 100 bp, Homo sapiens
attattagtgctgggcacaagtatatggaacctctgcaggagattccatttgttatcccacgacccatccttgaagaagatggagtcttgctctgccgcc

SEQ ID NO: 257960 - DNA, 87 bp, Homo sapiens
cggggcggagcacgcgagctatgggagtgcatccgccccaacccttttccccctcgtctcctgtgagaattccccgtcggatacgag

SEQ ID NO: 257961 - DNA, 100 bp, Homo sapiens
cccggctgtgccaaccaagctctgatcagcaagaagcttaatgattatcgcaaagtgaggctgctgaccctggggctgtccctcctgcatgccgatgtgg

SEQ ID NO: 257962 - DNA, 84 bp, Homo sapiens
gacgttggggcggcctggctccctcagacaatgcagatcttcgtgaagactctgactggtaagaccatcaccctcgaggttgag

SEQ ID NO: 257963 - DNA, 100 bp, Homo sapiens
caccccatgatcgacatcaatggcatcatcgtgtttggcacccggatcctggatgaggaggtgtttgagctcagctcacctatgaaccccgtcagcagca

SEQ ID NO: 257964 - DNA, 100 bp, Homo sapiens
gagtccctcgccacctgcaagagcctgcagcagtcgcttctccgcaggtgctggagaatctggtaaaagcaccattgtgaagcagatgaggatcctgcat

SEQ ID NO: 257965 - DNA, 75 bp, Homo sapiens
ccaagaagaatctagacagacaggcctttctaggttgctccttgagggcaggacagttcttatggctttatccgt

SEQ ID NO: 257966 - DNA, 100 bp, Homo sapiens
tgtgacagccaatcggatgctgaagcagatgcttttcaggagctcactggtggcctctgcgggcttggagagccacggccggaccccatctccatcccca

SEQ ID NO: 257967 - DNA, 76 bp, Homo sapiens
gcagatcaaggacatggagaagatgttcaagcaaagtttccaagggtcacttgtgtctcgtccgtgggaagaccgg

SEQ ID NO: 257968 - DNA, 100 bp, Homo sapiens
ctgtgccactgtcaccattggaggaattgctgaggaatgtaaacaagtttgctgggccttgcgagacttcaccaggttgtttcgatagctcacactcctg

SEQ ID NO: 257969 - DNA, 102 bp, Homo sapiens
gctgacgacgggcgcccccgagccgccgccgctgtccggagccccacagaacaaatcacctgctgcagtaacagaaccagagacaaataaatttgatagtac

SEQ ID NO: 257970 - DNA, 90 bp, Homo sapiens
ttcgattagctaataaccaactgcaattcctacctccagaaaccgaaacttcattgccccttcaatgtgggaatccagccagaccctatt

SEQ ID NO: 257971 - DNA, 75 bp, Homo sapiens
cacagagaatatactgacggcataaaagggcagaaccatagcagggtgcggtaccgggaagccagtgttgaagtg

SEQ ID NO: 257972 - DNA, 50 bp, Homo sapiens
cggctctccgcgctctctctgacagtataccaaatactacattcaccgaa

SEQ ID NO: 257973 - DNA, 51 bp, Homo sapiens
cgccttaaggatctctttggcaagtttggtggcgacatgtctaagaatgtg

SEQ ID NO: 257974 - DNA, 82 bp, Homo sapiens
gaagcgcaggcacaggaagctggtgacggcgatgaacgcaaaatgatgcttcaacacccaggccaggtctctgcctcggaag

SEQ ID NO: 257975 - DNA, 100 bp, Homo sapiens
gccaaagtgtcacaggttacccacagttagtaacaggagtatgggaaggcaaatacaacttcttctgtcagggcacacgcaccgcaggagaatcagatat

SEQ ID NO: 257976 - DNA, 100 bp, Homo sapiens
cggagcccttgggtgaaattgttaggcgtggagagggagtgatgtcttccagactcggtgctgtacccgccgttgcgtaggaggctctgtctggtatctt

SEQ ID NO: 257977 - DNA, 75 bp, Homo sapiens
accagacactccctggcccacacctcccgctcatcgcccgccacgggtgtcaaattgagaaccaggtagatcccc

SEQ ID NO: 257978 - DNA, 50 bp, Homo sapiens
ccacagtcagcagcacaacagaggcggacggagtcttgctctgttaccca

SEQ ID NO: 257979 - DNA, 90 bp, Homo sapiens
caagctcatattttgaagtgtttacgggttgaaatcacaaagattagacacctttttagataggtgttcttcagcaccactgacaacacg

SEQ ID NO: 257980 - DNA, 100 bp, Homo sapiens
aactcctacgaggacaaaagcaacgacttcgtatgggcggcgactggcggcgcgatggacctgaccgggctcctgctggacgaagaaggcaccttctccc

SEQ ID NO: 257981 - DNA, 97 bp, Homo sapiens
ccagagtaaactcttagataaaatgacgacgtccttctggaagaggcgaaactgggatacccacccaccatcccagggtctacaacatccacagccg

SEQ ID NO: 257982 - DNA, 74 bp, Homo sapiens
attatctctggtgctgcagctctgacttcagaaatgggcttgggaaccagctgagttcaggatcccacacctct

SEQ ID NO: 257983 - DNA, 100 bp, Homo sapiens
tgccttttatatcatggcaaagatccaatggatttgaacagaagcgctttgccaggcttgccagcaagaaggcagtggaggaacttgcctacaaatggag

SEQ ID NO: 257984 - DNA, 74 bp, Homo sapiens
ccaagcctgcagcggtggctgctgaaaatgaagagtctcctaaagagcccgaacagctgaggaagctcttcatt

SEQ ID NO: 257985 - DNA, 83 bp, Homo sapiens
aagtgtgtggagtttgcaaacaaattattgacggtcaaggtatttcatgccgagtaatgctacagccctttgactatgatccg

SEQ ID NO: 257986 - DNA, 75 bp, Homo sapiens
agaacaggcgctgcggctgatcatctccatcttcctggagtcttgctttgtcgcccaggttggagtgcagtggca

SEQ ID NO: 257987 - DNA, 100 bp, Homo sapiens
cctctggaagaaccacaggccctggcctgccttgggccggggatttaacacagagctgctgcagatccaggcatcccaggaaaaacagcagaaagagaac

SEQ ID NO: 257988 - DNA, 142 bp, Homo sapiens
gctggccctccacgttcccacacctggaaaggtgcaggtgcaggcctctcagctttcctccctgccacaggaaattcaatcatatctgtgaacagacaaggttcaaaaactaagcatccagaggccctgagcagctttcagc

SEQ ID NO: 257989 - DNA, 51 bp, Homo sapiens
gcgacctcatccacgccatgccagtgaaactggagccccccatgctgcgga

SEQ ID NO: 257990 - DNA, 73 bp, Homo sapiens
ttttgagccatacttaagtagccagacaaatcaggcccatgggacgtgcatgtgcacagtgatttggcaaagg

SEQ ID NO: 257991 - DNA, 114 bp, Homo sapiens
ctgcttctgtacctcaaagcactgggaatgctctggatcaaggatctgtgccagttcagaagcaggcgagcctcttccctgatgaaaaagaagataacttgctgggtaccacat

SEQ ID NO: 257992 - DNA, 100 bp, Homo sapiens
gcgagcgcgaatggcacgagctggagggagaatttcaagaactgcaggttattgttcagttccagccctcctcagtgccagatgaatggggcaccacgca

SEQ ID NO: 257993 - DNA, 100 bp, Homo sapiens
gtgctttgtgtcttgaattgttagtaaacaacggggcagatgttaacattcagggctgtcacatggtgactgaagaacttcattccataacgtttgaaac

SEQ ID NO: 257994 - DNA, 101 bp, Homo sapiens
catcttcctgcacctggagcatgtgcaagcaaaaactgcgaggccagaactagtttatctgaacacctcagctgctgtaagcttctcctctctcaccccgt

SEQ ID NO: 257995 - DNA, 88 bp, Homo sapiens
tttgaagacttgctagttaggattttattactggcagcatgtatatctttttgagagggtccaagcctggtaagaatgtccagcttca

SEQ ID NO: 257996 - DNA, 101 bp, Homo sapiens
gcccgaaggatacaacctgaaggatgaagaggggaaacttaaggacctgtccacggtgacgtcactgcagcaacagggagctgccaccaccgtgtactgtg

SEQ ID NO: 257997 - DNA, 100 bp, Homo sapiens
ggcccccctggccctgctggtgctgctggccctgctggcccccctggtccccctggccctcctggacctccaggtgtaagcggtggtggttatgactttg

SEQ ID NO: 257998 - DNA, 74 bp, Homo sapiens
caaggttcttaatgaatgtctaagagacattttaaatcctaaggatgtgatcacaactcgctttgagaattcct

SEQ ID NO: 257999 - DNA, 75 bp, Homo sapiens
gtaaagtcagcatgagcaaaaactccaaactcctctccaccagcgccaagagacagagtctagctctttcaccca

SEQ ID NO: 258000 - DNA, 83 bp, Homo sapiens
atctatgacgccgagaagcagaggccccgaggtgagaagccctaccactgcaactgggacggctgcggctggaagtttgcgcg

SEQ ID NO: 258001 - DNA, 100 bp, Homo sapiens
agagaggggaaaccccgtaaagtggttggttgcagttgtgtagtagttaagatgcgagccacccctctggctgctcctgcgggttccctgtccaggaaga

SEQ ID NO: 258002 - DNA, 100 bp, Homo sapiens
tcagccagggctgaacccccgcaggcggccaacatgtctgggacatttggaggagccaacatgcccaacctgtaccctggggcccctggggctggctacc

SEQ ID NO: 258003 - DNA, 100 bp, Homo sapiens
cttggcagaggaagcccctggcggccggcttggagaggccgagggtttgatgaaggtggaggcagcgcggctctcagacagccctcagcgcctttttcca

SEQ ID NO: 258004 - DNA, 75 bp, Homo sapiens
agccgctccatccagggccaccatgtctgcctcctggtgaaaaaggacacaactcagatgggaagttcatcgccc

SEQ ID NO: 258005 - DNA, 98 bp, Homo sapiens
ccaaaagtccattatgaaactgggactttgaatccaaagcaaaccatcttggtgattctggtgggactcctgtgaagacccggaggcattcctggagg

SEQ ID NO: 258006 - DNA, 100 bp, Homo sapiens
aaagaagtgataggagggctctgtaggatgcagcaccgaggcttcctcctcctcaccctcctcgccctgctggcgctcacctccgcggtcgccaaaaaga

SEQ ID NO: 258007 - DNA, 82 bp, Homo sapiens
gttgtacggcctggcactgcgcttcttcaaagtgaaagcaagttgaatacattggtgcagaagcttcatgacttccttgcac

SEQ ID NO: 258008 - DNA, 98 bp, Homo sapiens
ccgcgggacccggacggcgacgacgggggaatgtggcgctggatccggcagcagctggaaatgcacaattttgaggaagagttaacttgtcccatatg

SEQ ID NO: 258009 - DNA, 100 bp, Homo sapiens
tcgctgctcgccgcgctcttcttcttttctctctcgtcctcgctgctgtacttcgtctatgtggcgcccggcatagttgacattttgctaaaggctgtgg

SEQ ID NO: 258010 - DNA, 75 bp, Homo sapiens
atcctgaatgaatttagagccaaactgtccaaggctttggcagagttcgtgatgattgtcgtctttggtttggag

SEQ ID NO: 258011 - DNA, 75 bp, Homo sapiens
gctgtcctcgtccccagcggtcccgcccaacgcccgactcttgagaaggcaaccaaagtgcaggacatcaaaaac

SEQ ID NO: 258012 - DNA, 101 bp, Homo sapiens
aaataatgcacgccagctggtagaaattgcagccagggatattgagaaacttctgagcaacagatctaaagccctggtgattgatgaactcccagagggcg

SEQ ID NO: 258013 - DNA, 82 bp, Homo sapiens
cggtaaccgggacccggtgtctgctcctgtcgccttcgcctcctaatccctagccactatgcagccattgtttgatgtcctg

SEQ ID NO: 258014 - DNA, 90 bp, Homo sapiens
tctcagcatcggtgcacttgtaatatacttcatagattcatcaaatgcctgtttgcgcattccctccggaaattttccatgagagactgg

SEQ ID NO: 258015 - DNA, 100 bp, Homo sapiens
ggagtggtttgaatatcgtaagcgcacgtttaaacatctcaagaaattggctggtggaaaaaaatcaaacatgaagattgcagttttgttttgttttttt

SEQ ID NO: 258016 - DNA, 83 bp, Homo sapiens
agaaagatcacctcgaactgcaccatagtaagactttgaccccgacgcaggcttcagtgattgccgcggatcagaagcctgag

SEQ ID NO: 258017 - DNA, 82 bp, Homo sapiens
ttctctcggccagcgcctccgcgatcatggaagggaagtggttgctgtgtatgttactggtgcttggaactgctattgttga

SEQ ID NO: 258018 - DNA, 96 bp, Homo sapiens
gacaacagtatcttcatgacgcactgggaagtgagctcacaatgactcaagctgccacatagtgttgattgtgaaatgccagttgaagcatatgtc

SEQ ID NO: 258019 - DNA, 80 bp, Homo sapiens
agtatcattggccttgaggaagaagacatgctctacagtgctcagtctttgaggtcacgcatgaagggagcaccgtggag

SEQ ID NO: 258020 - DNA, 90 bp, Homo sapiens
aggcccgcgaccgtccgccagtcgtcccgaggaggctactcacagtcgaactacaactccccggggtccggccagaactacagtggccct

SEQ ID NO: 258021 - DNA, 75 bp, Homo sapiens
catggcggtgatggaaggagacttggtgaagaaggaaagtccctgcactaggtcagacaatcccctttggggtac

SEQ ID NO: 258022 - DNA, 90 bp, Homo sapiens
tgggaaaggctcggctcatgttctgggacttaggagggcaggaagagctgcagtctttgtgggacaaggacaagtacatggcggacatgg

SEQ ID NO: 258023 - DNA, 100 bp, Homo sapiens
aggaaacaggcgtacatcaggggctgttcttttgctgcaaatgaagttgatggaattacactgtgatacgactgactgtttcctgaaatgcagtttttcc

SEQ ID NO: 258024 - DNA, 75 bp, Homo sapiens
ctcagtgcgaagaagctgcagccgcacctggccaagggtaacctggatgaggacatcattgcagaagagaacatc

SEQ ID NO: 258025 - DNA, 50 bp, Homo sapiens
ccgtggaggcagaggtggcatgggcaagctatagtcagcagactggacct

SEQ ID NO: 258026 - DNA, 103 bp, Homo sapiens
gctttcaaagatgcactgcagagagcccggcagcttaacagagcgttccaaaaagaggactctccagctactttttattgcatcagtatgcagtggtttagag

SEQ ID NO: 258027 - DNA, 99 bp, Homo sapiens
ctcggcgcctggaaagatggaggcagcggagacagaggcggaagctgcagccctagagtagtggtagcagagaattttgatgaaatagtgaataatgaa

SEQ ID NO: 258028 - DNA, 100 bp, Homo sapiens
cttggtagaggagagcaacgtgcagagggtggactcgccagtcacaagtacaggggctcaggtccaggtggcaggggatatgctacccaactcaactgag

SEQ ID NO: 258029 - DNA, 75 bp, Homo sapiens
attcgggtgggagtgacccgattttccagttgacgaaggatcagagattggtgtattcgggcagactgcttcccg

SEQ ID NO: 258030 - DNA, 151 bp, Homo sapiens
aatatgtctcaagatggcggccaatgtgggatcgatgtttcaatattggaagcgctttgatttacagcagctgcaggcctccaggcccaaggtcagcatcccactgtcagccatcattgaggtccgcaccaccatgcccctggaaatgcca

SEQ ID NO: 258031 - DNA, 90 bp, Homo sapiens
attaggcgagaacgagagaggcagacaaacccatcagccatgaccactctgcttcatttttgggagaaaacttctcacactatggcagcc

SEQ ID NO: 258032 - DNA, 73 bp, Homo sapiens
cagcccaaccgtgttgtatgtgagtggaggaaatacgcaggccccatcacaggtatatggaggagtgacctac

SEQ ID NO: 258033 - DNA, 100 bp, Homo sapiens
cggacggcggaattgcagtgtggaacatggatgttagcagagaagagactgaatgtggatgtcagttcacgtcaaaactggaaggaatgtttagggatat

SEQ ID NO: 258034 - DNA, 75 bp, Homo sapiens
attaatgtattccaccacctccgccagttaagaggaaaaaggcgagtgttgtgtataaaggaagttgaaatcctg

SEQ ID NO: 258035 - DNA, 118 bp, Homo sapiens
gaagatgatgaggatgacgacctttacgatgatccacttccatctaatgattggtgctgtgctggccattggtgacccaaagatgatgaaaaatatgttcctgcccacaaggagttag

SEQ ID NO: 258036 - DNA, 90 bp, Homo sapiens
agcatgggcttcggaggcctatagcccgcaggtacatgtcccagagcaagcacacggaggcccgggagctcatgtactcgggagccctgc

SEQ ID NO: 258037 - DNA, 83 bp, Homo sapiens
ccacgcaccgactatgtcgcctgccaccgagccgggcccacctccccaccaaggaagctgctcagatggaagataaaaagccc

SEQ ID NO: 258038 - DNA, 75 bp, Homo sapiens
gttgcgtgtgattttcgcagggaaggagctgaggaatgactggactgtgcaggtcagcttttgccaactgttttc

SEQ ID NO: 258039 - DNA, 75 bp, Homo sapiens
cagcgtgcgttcagccctggggttgccaaggaaagtgtactgcagttttacccgaaagctaatatcgttgcctac

SEQ ID NO: 258040 - DNA, 60 bp, Homo sapiens
tgtgtatgaccttcacctcattaacaaatcaggaaacccaggcccaacggcaggtggatg

SEQ ID NO: 258041 - DNA, 101 bp, Homo sapiens
gtccgccccgcgagcacagagcctcgcctttgccgatccgccgcccgtccacacccgccgccaggtattaatctctggagaagacacatccacagttagca

SEQ ID NO: 258042 - DNA, 100 bp, Homo sapiens
accttataaaaagcagcttaatgaggaactccagcggcgctcttcagcattagacatgccttgaattggaacgctacctacagacggagccccggaggat

SEQ ID NO: 258043 - DNA, 83 bp, Homo sapiens
tcgcggaccggcgtccccggcgcgaagaggctggactcggattcgttgcctgaggttacctaaccaaactcctgcaaaaccac

SEQ ID NO: 258044 - DNA, 78 bp, Homo sapiens
ctcaacaagctgcgggctcggcatgcccagattgctctggaagcagccaaagcactggatgacaagaactgctgggaa

SEQ ID NO: 258045 - DNA, 90 bp, Homo sapiens
gtgacctaaagctggagtattttgagattggagaattaagtgcacttgcccccgtggccgccatcatccccccgccccccgacgtccagc

SEQ ID NO: 258046 - DNA, 100 bp, Homo sapiens
agtgcctgagcaacatccgcgagttcctgcgcggctgcggggcttccctgcggctggagtttacatccacgtgttctctgccttgattgtgatcatcgct

SEQ ID NO: 258047 - DNA, 101 bp, Homo sapiens
ctgaacccatcagcaataaactgtggcccagagttgctcagaattggagcagagcctgagacgtatctgcagatcctgtcatcagctggcaagtccaggag

SEQ ID NO: 258048 - DNA, 89 bp, Homo sapiens
agagaagcagtgaaggagtgcagaggcatcacctgaaagatgatgaccactggatcgtcgacacagactacgacacgtatgccgtgcag

SEQ ID NO: 258049 - DNA, 75 bp, Homo sapiens
gggctgaccttcacctgtcactgtgcccagccaagatcgggaagcagcacccagaccgcgtggtggagaccagca

SEQ ID NO: 258050 - DNA, 100 bp, Homo sapiens
accgccgcacgccccgcctggcgctggctgtcagcctcagcatctgggtaggttccagcaacagatagaaatgctttaagttcactctggggaaagctgg

SEQ ID NO: 258051 - DNA, 100 bp, Homo sapiens
tttcttacaacgggcattgtcgtgtcagcttttggactccctattgtatttgccagagcacatctgggttggggtgctggaggactgcttcaccttcctg

SEQ ID NO: 258052 - DNA, 113 bp, Homo sapiens
ccacctccaaggggcccaagagagctggaattctataatatgattctgcttctcagaagatgcactattatagatactctaacgccaaggtcagctgctggtacaagtacctc

SEQ ID NO: 258053 - DNA, 89 bp, Homo sapiens
agccaccatggcgctcctgctgtgcttcgtgctcctgtgcggagtagtggctatatgttctcctttcagccaagacctttcaccagtgc

SEQ ID NO: 258054 - DNA, 75 bp, Homo sapiens
cagcgttgcagcctcgattcattcaactctttcaggctgagcttggtgattacgatcctgatgagcatcctgaga

SEQ ID NO: 258055 - DNA, 100 bp, Homo sapiens
cctcccctgcagcgactcggaagattcgaggcggcgggggacaagtcggcgccccagagcggacgagagctcctgaaattattcttgggttaccattttg

SEQ ID NO: 258056 - DNA, 100 bp, Homo sapiens
gttgttcacattgaacgcttcaagaataaaatcacagttgtttctgagaaacagttctctaaaaggatttctctgcctcttccaaacttttcctccctga

SEQ ID NO: 258057 - DNA, 83 bp, Homo sapiens
atccagcctatattgttacaattttttttcaagaactgccgtcttctttgcctgcactaatgagttgtctgctggttctcagc

SEQ ID NO: 258058 - DNA, 88 bp, Homo sapiens
ggccggggcttttttaaaatcaaaagtaacaagagaacagcaagtgcaccaaacttagtaagagattcaacactacatttaaaagagg

SEQ ID NO: 258059 - DNA, 90 bp, Homo sapiens
tgctgcaggcacagcccgagaaaccgcagcactacacgaactcaccttcgaggcttggaaaccacagccacgtatgaccctgaaacccag

SEQ ID NO: 258060 - DNA, 75 bp, Homo sapiens
cggagatgcctggaatacagtaagatggagatcttataacaatttttgatagttctgacctttcctttgcaattc

SEQ ID NO: 258061 - DNA, 72 bp, Homo sapiens
tttgataaatgaaatcttcctaagtatagggtttcccaaactctcgattgcctcttgcaagcagatgacctg

SEQ ID NO: 258062 - DNA, 75 bp, Homo sapiens
ggcacattacaacttcaagaaaattacggtggtgccgtccgccaaggggaaggtgtggctcattgactttaatcc

SEQ ID NO: 258063 - DNA, 98 bp, Homo sapiens
cggagagatgctgggcgtggcggccgggatgacccacagtttcttaaacaattaggtctacatcctaactggcaattcgttgatgtatatggaatgga

SEQ ID NO: 258064 - DNA, 75 bp, Homo sapiens
ctctgggggtcctctctgagtcaaatccagtgggcacctccaggtgggcaggagctaccactcagcaccatgagc

SEQ ID NO: 258065 - DNA, 83 bp, Homo sapiens
gagggctttcttcgccgtgctggccgcggcccgcctcagcatctggtacagccgaacctacgtctaccagtggccctggacgc

SEQ ID NO: 258066 - DNA, 83 bp, Homo sapiens
ggattacagagtataacaatcagtgccgagcaattgtgatgagatattctgctgagtggaagaccctacagcttggggcctgg

SEQ ID NO: 258067 - DNA, 100 bp, Homo sapiens
tggcttcagacagcatatttgagtcatttccttcgtacccacagtgcttcatgagaggatggagctatgacattgaagagaggaaggttccaaaacccaa

SEQ ID NO: 258068 - DNA, 74 bp, Homo sapiens
tacgccctcatggggaaaatctccccggtgactttcagatttatgtgatcagtttggctgaaccccgtctgccc

SEQ ID NO: 258069 - DNA, 82 bp, Homo sapiens
gccaaagatttacagattggaacaactctccggagtctgaaagatgcacttttcaaggttcatacgttttatgaagctgtgg

SEQ ID NO: 258070 - DNA, 74 bp, Homo sapiens
cagcccgctcgtgcccggcttctggtcctgctccctctcactggcagcaccttccatgaccagatagccatgct

SEQ ID NO: 258071 - DNA, 50 bp, Homo sapiens
cctggaccagcagaaacctagagtgattgtcactgctgttccaagggcac

SEQ ID NO: 258072 - DNA, 82 bp, Homo sapiens
gggaaacctgggggctccctggacaactccgagcagcaagagtgagccatggagctacgtgtggggaacaagtaccgcctgg

SEQ ID NO: 258073 - DNA, 75 bp, Homo sapiens
ccggagacttcttagatctgaaggctgggtggagaaggaaacctactattagccccccgtcctgcacgccgtgga

SEQ ID NO: 258074 - DNA, 100 bp, Homo sapiens
tggccctctcgctgttgctggtctctggctccctcctcccagggccaggcgccgctcagaacgaaagtatgctgaggccttggattaccaccgtcaggca

SEQ ID NO: 258075 - DNA, 75 bp, Homo sapiens
cttggacagatgatgccagttaattactttgaatgtagttgtcctgggaacccctgcagaagaagatggtggtgg

SEQ ID NO: 258076 - DNA, 90 bp, Homo sapiens
cgcaggcatttcaatcacattatggtcgcgtctccttcttcacctcggggtccgagaacctacaccgcgtggagaaggtccactggggca

SEQ ID NO: 258077 - DNA, 90 bp, Homo sapiens
cactggtaatgtgtccattcgagggcggatcctctctgtaccgggaccctctggtgataatggcatcagtgttacaatgatcttggtagc

SEQ ID NO: 258078 - DNA, 80 bp, Homo sapiens
ggacctgaaacagaaattctggaacacctatatggctctgctgaccgagatgatggaaaggtgtaagaaactaggaaaca

SEQ ID NO: 258079 - DNA, 82 bp, Homo sapiens
tacttcacaggaattgccatttgcaagaaattatagagcagcttctatcaaatattttccacaaggagaaaaatgagtcagc

SEQ ID NO: 258080 - DNA, 82 bp, Homo sapiens
cgctcgctcgggtggcgacttcctccccgcgccccctccccctcgccatgaaggcattcctgcatcgcatccggcagaacgt

SEQ ID NO: 258081 - DNA, 90 bp, Homo sapiens
agaaactggacaaccaacggctcaagaatttcaagaacaaaggccgcgacttggagagagaacgaggtgctcaaagtccaactgaagaaa

SEQ ID NO: 258082 - DNA, 100 bp, Homo sapiens
ggccttctttccccaagatttgttgatgttcagccttccagtttaagccaagaaggagatggataaagcagatgtttattggggcattccttatcccagc

SEQ ID NO: 258083 - DNA, 95 bp, Homo sapiens
catcactggattatgttataatgtggaacctggatgaatgtagagagaaagtacttcaagggctagttgcacatagtgatttagatgaaagagct

SEQ ID NO: 258084 - DNA, 100 bp, Homo sapiens
aaccaagataccattttgctgctttggaaaagacctattatgagaggcttccatatcgccaccagtgaagactataagctcctggaaaatatgaataaac

SEQ ID NO: 258085 - DNA, 100 bp, Homo sapiens
gtcggcggcggcgccagcgggaattaaatcgcagaaagtaccaggcactaggtcggcgctgccgggagatcgagcagttccagaaagctgagtctgatct

SEQ ID NO: 258086 - DNA, 98 bp, Homo sapiens
ttacatgcagccagaagaggactgggaccgggacctgctcctggacccggcctgggagaagcagcagagaaaggttgtccgcacaaaccagtgtgcag

SEQ ID NO: 258087 - DNA, 82 bp, Homo sapiens
gaccccaaaacatcgagacgctgcagaacgcgggattttttatcaagcagaaatgcatcgaacaacgagaatcaagatcact

SEQ ID NO: 258088 - DNA, 75 bp, Homo sapiens
ccacctgtctggatggacaggtcattggctctgccaaggttcctcaacttaaaagggatgaggagaccttggaga

SEQ ID NO: 258089 - DNA, 74 bp, Homo sapiens
ggagccgctggggtcccttttgcctcagatactattttgaaggacccccgcagcaaacacaagtttaagatcca

SEQ ID NO: 258090 - DNA, 75 bp, Homo sapiens
gcccgaggaggagccaagtgtggcagcagttcgtgaagtctgtgaggagtccacctggaaggccgctgtggtgga

SEQ ID NO: 258091 - DNA, 50 bp, Homo sapiens
aagagacgaagagacagctggatgaacccgtggaccgggagcccgtggac

SEQ ID NO: 258092 - DNA, 75 bp, Homo sapiens
aaccaccaaagtgggaaacattgaaatcaaggtcaataactgggagatggacaaactagagatggaagatgcagt

SEQ ID NO: 258093 - DNA, 97 bp, Homo sapiens
gcggaaggactcctggaatgccacaaatgcaaatacttgtgcactgggagagagacacccgccatttcacccagtaagcgggcccggcctgcggagg

SEQ ID NO: 258094 - DNA, 100 bp, Homo sapiens
gtggcggcgatggcttctctttccacctggagcaggaaactttgagggaaattttgagtcactggaccttgcggaatttgctaagaagcagccatggtgg

SEQ ID NO: 258095 - DNA, 95 bp, Homo sapiens
gtggaggtaggacctgtgctggccgcgggagaggtaaacagaacaccaggacatcccagagtctgggaaatggtggaacacctgcagcaggagac

SEQ ID NO: 258096 - DNA, 100 bp, Homo sapiens
ggggacgctctcagctctcggcgcacggcccagagagccttcaacgccctgtgtcacagcacccacttgtacgggcggaggctggtgctggagtgggccg

SEQ ID NO: 258097 - DNA, 46 bp, Homo sapiens
ctccacagccatgtggaactgtctgctgctaccagctagtccaagc

SEQ ID NO: 258098 - DNA, 100 bp, Homo sapiens
ctcagaaatgtctactgaaataggaacaatgatctcggtatcatctgcagaatatggtactaatgcaaaggttcaagggcagacggggtttttgaggagg

SEQ ID NO: 258099 - DNA, 74 bp, Homo sapiens
tttcacattccagaagaggcgtccttctttgcacggttggctcaaaaacagaagttgctgagtgcaaggagaaa

SEQ ID NO: 258100 - DNA, 100 bp, Homo sapiens
caatgctgacctcggtttcctggacccattccgactcagttccagaaagctgagtctgatctggattacattcaatacaggctggaatatgaaatcaaga

SEQ ID NO: 258101 - DNA, 82 bp, Homo sapiens
ctctgagggaattgggaggtcggcggccccaaaaggagcatcgagtacagctgtccggcctccaacgagtgtgagatcacca

SEQ ID NO: 258102 - DNA, 75 bp, Homo sapiens
gggggcctctccagggagtgctctgttcacggctccatcgctgttagtcaagaacttcactgaggtccaccctga

SEQ ID NO: 258103 - DNA, 100 bp, Homo sapiens
tgacttgggctatggaacccttttagaaagaatgaaagaaattgtgccatccttcatcaacaaagatacagaaaccataaatatgatgtcagaatttgtt

SEQ ID NO: 258104 - DNA, 75 bp, Homo sapiens
aactgggcgacggagcctttgggaaagtgtacaaggcatgtggagaccccaaggcaaaaccatcctatcttatcg

SEQ ID NO: 258105 - DNA, 101 bp, Homo sapiens
aggagcaccgccgaggactccagcacaccgaggatttctccacccaggtgaactcctccctcacctccccgacggggcgaggctccatggctgccccctcg

SEQ ID NO: 258106 - DNA, 75 bp, Homo sapiens
gagcctcacgagtcgaggtcctgcaggtggagctccggcagccgccctgctcaccatggatgatgatatcgccgc

SEQ ID NO: 258107 - DNA, 75 bp, Homo sapiens
actgtgcctttgctccagggcatttgtggagaagcttctctctgtctgtcagagactttgaccctgtgcatggtg

SEQ ID NO: 258108 - DNA, 100 bp, Homo sapiens
ataaaactaacagtctatgatgtcaaggataagtctcatgacaccaatggctttactcctttatacatggctgcccaagagaatcacattgatgttgtaa

SEQ ID NO: 258109 - DNA, 100 bp, Homo sapiens
atctttatccaatcaagtgcccttggacaaagcctgaaaccaggtcgagtctatgctgtcttgtcaaagagagaaggtcgggtacttcaagaagaaatga

SEQ ID NO: 258110 - DNA, 100 bp, Homo sapiens
cgctgccatggctcagaccgtgcagaatgttacattgtcgctcactctgcccatcacgtgccacatttgcttggggaagacctggccagaggactgtgga

SEQ ID NO: 258111 - DNA, 80 bp, Homo sapiens
aggggagactctgctgacacccatcacccacatctcacagagtgtggccatctggggccgtgtggtatttgccactcagg

SEQ ID NO: 258112 - DNA, 98 bp, Homo sapiens
ctgggatccagtacgagttgaatcattgttcaaataagggctgtcacatggtgactgaagaacttcattccataacgtttgaaacacagatctgcctc

SEQ ID NO: 258113 - DNA, 100 bp, Homo sapiens
cggccggcaaccgagggacccgcgtccagatacctgaaaaaagcggcagtctgcaacccagaagagggccttacttggaacctaaccatgctggtaccct

SEQ ID NO: 258114 - DNA, 83 bp, Homo sapiens
atagagttgagcctgtgggacacttcggatgatgccatggagagcagcaagcctggtccagtgcaggttgttttggttcagaa

SEQ ID NO: 258115 - DNA, 100 bp, Homo sapiens
caaatgccacctctgcaactacgcctgccgccggagggacgccctcactggccacctgaggacgcactccggttatatgtcaccacacccatctccatta

SEQ ID NO: 258116 - DNA, 59 bp, Homo sapiens
ctgcgggcccgggccatggccgccgccgatgccgagcctttgacgacccctatgccctg

SEQ ID NO: 258117 - DNA, 83 bp, Homo sapiens
gctatactgctcttagccagagtccagatgaaaacctggtgtccctcgactctgacaggtttgccaataggattatcctgctg

SEQ ID NO: 258118 - DNA, 128 bp, Homo sapiens
gagatgatgatgaaattcagtttgatgacattggagatgatgatgaagatattgatgacattacattcagatattttggcagagacttcttcaatcctcttgtacctttttcttagaaatatttttgt

SEQ ID NO: 258119 - DNA, 100 bp, Homo sapiens
agtcctgtgcaaaattcacagtgtggatctgcaggctgtgggacttgaagactatgggaagcaaggtgctcatggaaacaacctcattgctgttctagcc

SEQ ID NO: 258120 - DNA, 100 bp, Homo sapiens
tgacgtctgctgatgatttcttccaaggaaccaaggcggccctggctgggggaaccactatgatcagtcggcggaagcagaagtgggctgtggatcctca

SEQ ID NO: 258121 - DNA, 90 bp, Homo sapiens
ctggctggacctgaaggaggccggtgactttcacttccagccagctgtgaagaagaaaaagcttgtggtgaaggggggcaaaaaaaagaa

SEQ ID NO: 258122 - DNA, 98 bp, Homo sapiens
aagaaatgaggacatatcagtatcggaaccttttgaggatggctttgcaaatggggaagaaagtactccaaccagagatgctgtggtcacgtatactg

SEQ ID NO: 258123 - DNA, 75 bp, Homo sapiens
ctcagccccaacggcaagcaacttggtatttaccttgctgtggattgctgactggatggtccatcacttctggag

SEQ ID NO: 258124 - DNA, 97 bp, Homo sapiens
cgtacgtggccctcgatgtgctctgcgtgttgctgggcattttgttcccaacatcacctttggtcaccctgtggtagaaagccttcgaaagcagcta

SEQ ID NO: 258125 - DNA, 75 bp, Homo sapiens
tgataatcaagaaggcagtgtgggtaaagaacaagcacctttggagatgagtatgcatccagcggcaagcgctcc

SEQ ID NO: 258126 - DNA, 83 bp, Homo sapiens
ggacttgagaactgtccttacgtgacctaaagctggagtattttgagattggagaattaaggaggactggaatgaaattgacc

SEQ ID NO: 258127 - DNA, 100 bp, Homo sapiens
gcgaaggccgggacccggttccccggcccacagtgggggtgtgcaaacccgagagaactgggttggatttggtctagggagtcccagaaagaagtagaaa

SEQ ID NO: 258128 - DNA, 74 bp, Homo sapiens
aaacaagttctgaaaatggaagttgctgttttgaaaaagctgcaaggtctagtgacggagcccgcgcgcggcgc

SEQ ID NO: 258129 - DNA, 75 bp, Homo sapiens
tggagcttggtttcgggatctcggtgctgcagacggcgagacctcctgcacaggattcggaaacttcagatacga

SEQ ID NO: 258130 - DNA, 75 bp, Homo sapiens
tatccattcagcactcagatggagagagtcaggggatccacaccacccatgactgtgttcaaggggaacaaacgg

SEQ ID NO: 258131 - DNA, 90 bp, Homo sapiens
cttgtaccccggggagagacgagccccgagcccggctggacgccgctgcctcagttcctctgtgacgagggtgcaggtatctctggggac

SEQ ID NO: 258132 - DNA, 99 bp, Homo sapiens
aggaagagctggtgtccaacctggggacgattgccagatcggggtcaaagcgttttgctgctgacatcatctccgttttggccatgaccatgagtgggg

SEQ ID NO: 258133 - DNA, 82 bp, Homo sapiens
cacgaaaacggtgaaggtcggaaccgacagcctcctccgagaagggtactccaaagattcaggtttactcacgtcatccagc

SEQ ID NO: 258134 - DNA, 50 bp, Homo sapiens
taaaaatcaccagttactttaatgagtttgttggcatccaaagctgttgg

SEQ ID NO: 258135 - DNA, 75 bp, Homo sapiens
ccaggacctccactaatcaccagaacaaaatgtgcaggtcgtttatacgcaatgcagactggaatgaagatcgat

SEQ ID NO: 258136 - DNA, 95 bp, Homo sapiens
attggccacctacagaaacaaaatgtcaacaaattgatggatctgcaaagcccctgagcccaaaacagtctcctactgcagcccgtccgtgcccg

SEQ ID NO: 258137 - DNA, 100 bp, Homo sapiens
tcaaaaagtgaatcccgactaaaacatctgttgcagcgagccccagattattgcccagagacaatgtcagccataatggcaggtgaagaaattaatgaag

SEQ ID NO: 258138 - DNA, 90 bp, Homo sapiens
ctgtgcccaaatggtgcccgctgtgccacctggtttcaagaccctacccgcttcactggcaccatggaagagagaagggcacagttacct

SEQ ID NO: 258139 - DNA, 82 bp, Homo sapiens
agaggctggactcggattcgttgcctgaggacagagcgggatgccaccagcttgtccaaagggaagttccaggagctcctgg

SEQ ID NO: 258140 - DNA, 75 bp, Homo sapiens
cacgggatccagagcgccgcgcacttcgtcatgttcttcgcgccctggttctgggccggagaaggggcgacgttc

SEQ ID NO: 258141 - DNA, 100 bp, Homo sapiens
aaaaaaaagaagaagctagatgaccagtctgaagatgaggcacttgaattagaggggcctcttatcactcctggatcagtacttggaccatgagactgtt

SEQ ID NO: 258142 - DNA, 97 bp, Homo sapiens
tccccctgaagattctgccgctgattgctatcacttctgcagaatccagtggggctgatcccttatccaacatggttctaaccttcagtactaaaga

SEQ ID NO: 258143 - DNA, 75 bp, Homo sapiens
ctcaaatgccttctcatccccacataaacagctttgctgagccatcaaggtctaatggaagcatggttcggcatt

SEQ ID NO: 258144 - DNA, 76 bp, Homo sapiens
atgaagtgcatcatggggcaggatggcaccagccttggcttggccttcgtgcctctgcagatctggtccaaagtcc

SEQ ID NO: 258145 - DNA, 75 bp, Homo sapiens
cgggttgtgcctggaggtggaggggaaggaagccatcttcgacaagagcacagggaaggttgttttgaagacgtt

SEQ ID NO: 258146 - DNA, 83 bp, Homo sapiens
ctccggcttctgctgttgctcttctccgccgcggcactgatccccacagggtttggaaatcccttgtctccaggttgctggga

SEQ ID NO: 258147 - DNA, 100 bp, Homo sapiens
cgccctcttgcagtctgcagcttctcctgtcatcggaaatgccaggccaagacaatggcgatgaccactcagaaggaggcctggtggagaaccacgtgga

SEQ ID NO: 258148 - DNA, 96 bp, Homo sapiens
gaaacagcttgaagaagcgaaagaactgcagagccccctcccttgctgcactcagggacatgactgtcagcacttctaccccccctcagacttcac

SEQ ID NO: 258149 - DNA, 90 bp, Homo sapiens
gcggggagtcgcgggcgcctccgcctcaggtgaagagcgattatatgttagagatagctgatcaagtggaccaggaaattgctttgaagt

SEQ ID NO: 258150 - DNA, 100 bp, Homo sapiens
tccgccgctgcgggcccgctccgacgcggaaggcatgttatgttacccagagaactttccaaacaagtacctaaaactcatctgatgtctgaagaggagt

SEQ ID NO: 258151 - DNA, 82 bp, Homo sapiens
cctcagcctcccgagtggctgggattacaggcttggagtcccgatttcagagcaagtctggctatctgagatacagctgtga

SEQ ID NO: 258152 - DNA, 75 bp, Homo sapiens
ggcggtgaagtggatggtggtgtttgccattggagtctgcactggcctgaaagatcatacggtggtgaaacttcg

SEQ ID NO: 258153 - DNA, 75 bp, Homo sapiens
gccagttaagattattcttaaaactctgggtgtccgcaatgttgccagtgtctgtctgcagattggctacccaac

SEQ ID NO: 258154 - DNA, 51 bp, Homo sapiens
ctcagggaaggggcagcacagttgtccttctattcaggccactcttcgttt

SEQ ID NO: 258155 - DNA, 139 bp, Homo sapiens
attgattcctgcatttctgaagatctcaagatctggactactgttgaaaaaatttccagtgagaatcctcactatggatgggctcattgaggacattaagcatcggcggtattatgagaagccatgccgccggcgacag

SEQ ID NO: 258156 - DNA, 75 bp, Homo sapiens
cggcggcgggccgaggagccgggcgcaatggagcggaagagcttcggaaccaaaaagaagcttcccagagccggg

SEQ ID NO: 258157 - DNA, 98 bp, Homo sapiens
acagagctatgaacagaatatcaaacagattggcacctttgcctctgtggatcatccatgccatggagtatgaacttcagatccgtggcggagacaag

SEQ ID NO: 258158 - DNA, 51 bp, Homo sapiens
ggatggtgaactcattagaagagtggcaaaattctattcagaagaatgcag

SEQ ID NO: 258159 - DNA, 97 bp, Homo sapiens
ttcctcaacccggtcgaccccatctcccatgacctgcttgtgaacctggcccgggacctgcagtgccccaagaagggtactggaagatgaaagagac

SEQ ID NO: 258160 - DNA, 75 bp, Homo sapiens
ggcggcgaagagcccgccctgtcccagtaccagaccatcctcatgtcccccaaattccactgtacagaggagatc

SEQ ID NO: 258161 - DNA, 100 bp, Homo sapiens
gcggcccctgtggctgtgtaagatctgcagtgagcaaagagagggggcagctggcattttatgctatgtgggagcctatgtcttcatcacttatgatgac

SEQ ID NO: 258162 - DNA, 100 bp, Homo sapiens
ttgtggttgtggtgatagcagttgttgctggaattgttgtgctggaactagaggctgctatccagccagatactagcctggtgtcagtcatgactgtgaa

SEQ ID NO: 258163 - DNA, 74 bp, Homo sapiens
cttcaactatggcagcagcgtggcctccgccaccgtgcacatccgaatggactgccaatctggctgaagccaat

SEQ ID NO: 258164 - DNA, 51 bp, Homo sapiens
ggaatatcctcaaaatatgctccagatgttaatagaagatgaaattgcaac

SEQ ID NO: 258165 - DNA, 90 bp, Homo sapiens
gagggatggagggcgccgtgctgcccgtgtggagtgcgcacggggaagcagtagcagccagatgaagaagcggccaacatctgcagtggg

SEQ ID NO: 258166 - DNA, 82 bp, Homo sapiens
tcttgtgctgtttggcccctgcctactcggaatggaacaaaggacttaaccaccaccatgtcgagcaaaagaacaaagacca

SEQ ID NO: 258167 - DNA, 101 bp, Homo sapiens
cacaggagccaggtatttacacctggccagagaagacacgaataatctgttcagctcagccttagggataacgacctgatctcgctgcctaaggaaatcgg

SEQ ID NO: 258168 - DNA, 75 bp, Homo sapiens
cagcctagcagtcgggaccgtactgagactgtggatattcataaggagaaagtggcacgaagagagattggtatt

SEQ ID NO: 258169 - DNA, 75 bp, Homo sapiens
aacccacttcgttcaagacaggtgtttaagcgccataggaaaaggatacagagtagagtttcatgaacctgaaac

SEQ ID NO: 258170 - DNA, 100 bp, Homo sapiens
aagaaaagaaagaagacaaggtggaaaagttgcagtttgaagaggaggactttgtctttactgggattttcacagcagaaatggttctcaagatcattgc

SEQ ID NO: 258171 - DNA, 100 bp, Homo sapiens
ttggagaggtgttaccggaacggcggcgacaagggtgttcccgaactagagtgggtccaagacaagctgctgctatctgcgtgccacttactggtctcac

SEQ ID NO: 258172 - DNA, 75 bp, Homo sapiens
ccgagcgggactatgtgggcacgctggagttcctggtgtcggcagccttaagtgccttgaaacaattttctgaac

SEQ ID NO: 258173 - DNA, 101 bp, Homo sapiens
acatatccttacaggcagagaggatctagtgaaaagccatttgatgtatgcggtcagagaagaagtggaggtcctcaaagagcaaatcaaagaactaatag

SEQ ID NO: 258174 - DNA, 95 bp, Homo sapiens
agacgcattctgctgttgttgattttgaagcattaaatgttatcgtaaggaagcattcagaattgtctgaattgaatgttaaagtcctggaagct

SEQ ID NO: 258175 - DNA, 74 bp, Homo sapiens
gaggtttcagagcgcagccatcggtgcgctgcagaacagttcctctccccactctggggtgtccagacaggtgc

SEQ ID NO: 258176 - DNA, 100 bp, Homo sapiens
agagaggaggacctgttgaccttactttgaagcagccaagatgttttgtattaatggatcacattttgaatttgaaggcattggaatggatacttgtgtc

SEQ ID NO: 258177 - DNA, 88 bp, Homo sapiens
gcgtctgagcggttctcgaggcgttctcgcctcggtctctggcgagtgcacgggtggataattactgtaccttcctcatggaaaaagt

SEQ ID NO: 258178 - DNA, 100 bp, Homo sapiens
gtacagaaagtcagagaacacttacagaacttggaaaagagacactttgagactccgaacaattctggaagcaatacagaagcacattcattcttcctcc

SEQ ID NO: 258179 - DNA, 51 bp, Homo sapiens
gatatctctactcgctccaaagagacggagtttcgtcatgttggccaggcc

SEQ ID NO: 258180 - DNA, 101 bp, Homo sapiens
gggctggacctgctggtgttcgcccacgaccatgatctttaatctcatgaagtacgacagctacagccgcttcttaaagtctgacttgtttttaaaacaca

SEQ ID NO: 258181 - DNA, 99 bp, Homo sapiens
ggatcaacaccggggagtctgcggtgctgctgcagcacggagctgacccaaacattcggaacactgatgggaaatcagccctggacctggcagatcctt

SEQ ID NO: 258182 - DNA, 100 bp, Homo sapiens
gcagcatctacaaccctgaagtgcttgatatcacagaggaaactctgcattctcgcttcctggaggggctgcttgctctcggtgactacatgaatgtcca

SEQ ID NO: 258183 - DNA, 100 bp, Homo sapiens
ccttctcgacagccttttactgtgaacagagccataagtgtgatccttggtgacaggtggaagaaaatgaagaatgaagagagaagaatgtacacattag

SEQ ID NO: 258184 - DNA, 100 bp, Homo sapiens
ctcagcaagactctcgagcccatgttacacttccaggggctccccactcagtccccagtcatctatcgacagtgagctgagtacttcagaattggaggat

SEQ ID NO: 258185 - DNA, 101 bp, Homo sapiens
acatttcctgtaattgaaaccaaaatgtcatttatagatccttaccagcacattatactggtgctcaagaccgaatcggctgggcttttggcctaggatta

SEQ ID NO: 258186 - DNA, 95 bp, Homo sapiens
taagcgaaaagcagaagacagtgacagtgaacctgagccagaggataatgtcaggaagcatcggagagcaagagacaggtccagatcctcctcct

SEQ ID NO: 258187 - DNA, 82 bp, Homo sapiens
ccttggagtccagcactctgcatgtgactccccgcagcctggacagcctgctataactgcggtagaggtggccacattgcca

SEQ ID NO: 258188 - DNA, 80 bp, Homo sapiens
gtggccttagctgtgctcgcgctactctctctttctggcctggaggctatccagccttatgttcctgaggaagaattgaa

SEQ ID NO: 258189 - DNA, 83 bp, Homo sapiens
cctgccagaatggaagcatacagatctgggaccgaaatttgactgttttaaaatcaaagatgggaaaatcggagaaaattgcc

SEQ ID NO: 258190 - DNA, 100 bp, Homo sapiens
ggatctggaggacgtccggagctacagggcggagatttcatctcgaaacctggcggaccacagccgctttgtcaactgtgtgcgattctctcctgatggg

SEQ ID NO: 258191 - DNA, 100 bp, Homo sapiens
ctcctcggtctctccctgaagcccaccggtccccaacgcatcatgccagggagccaagcgtcctgcccggccatgcctaccttaatgcctctgaaacaac

SEQ ID NO: 258192 - DNA, 83 bp, Homo sapiens
cgggaagagccggggccgtggctgacatggagcagactgaaatcgccaagagattgaatacgatttgtgcacaagtcatccca

SEQ ID NO: 258193 - DNA, 97 bp, Homo sapiens
ccaggatgaagaggttggagatgggaccacatcagtaattattcttggcatgcccaagagaatcgtaaatgcaaaaattgcttgccttgacttcagc

SEQ ID NO: 258194 - DNA, 78 bp, Homo sapiens
ctttttgcacccttaaatgtaagacatgtcctggacttgaacagtatgctattaagaagtttgctgaggcatttgaag

SEQ ID NO: 258195 - DNA, 71 bp, Homo sapiens
acaaccaagaggtgcaaaaacgaaagcaactggagctcagatatgagatcctgactccaaactccattccc

SEQ ID NO: 258196 - DNA, 74 bp, Homo sapiens
cgctgcccgcagctgccaggcggcggcgcccaggcaaatgttctgaaaaagactctgcatgggaatggcctgcc

SEQ ID NO: 258197 - DNA, 98 bp, Homo sapiens
tagccatggcacaagaatatacgtttagtcacatcaagaaatagaacagaattcagccatggccccaagaaagagaggtggacgaggtatttcattca

SEQ ID NO: 258198 - DNA, 74 bp, Homo sapiens
cccggcgtctgcctcgagactgaagaccgaacttacagtgtgctgcatctactgctcaggaatcctgtcctcct

SEQ ID NO: 258199 - DNA, 100 bp, Homo sapiens
cttgtcccgctgcagccgagatgccgggggagcggggccttccacaccccctccgtgggtgtgtggatatgtgaacttttgcaaagcggagccataatga

SEQ ID NO: 258200 - DNA, 75 bp, Homo sapiens
tcagccgccaaagaccccgtccggtagagagcgcctgctcgctgtgcccccgggttatgacgacccccaataaag

SEQ ID NO: 258201 - DNA, 75 bp, Homo sapiens
aatgattgttataaatgaaggctctcttgattactgtaagattgatgttaaaggcatggtgttcaccccacttca

SEQ ID NO: 258202 - DNA, 50 bp, Homo sapiens
taaatctgaatgatgcttccagcagtggtactttgaattttatgaggggc

SEQ ID NO: 258203 - DNA, 98 bp, Homo sapiens
caggaactcgactcagacgtggataaagataatcccggcggctatgagaggttttcctccgagtacccagaattctgttctaaaaccaaggccctggc

SEQ ID NO: 258204 - DNA, 75 bp, Homo sapiens
acaaatcacacgcataatggatgaaaggaaccgacagggacttcagtactagtgctaataacatccagattgata

SEQ ID NO: 258205 - DNA, 100 bp, Homo sapiens
ttttcccagctgtacctggaagctgagcagcagcttgccgctctagaagctgagatctgtatctgtggacctgaatgttgatccctcgcttcagattgac

SEQ ID NO: 258206 - DNA, 83 bp, Homo sapiens
gaacatttctgggtgacactcaacaggattcccgagaaaattcctgttccaagagaaaataaggcaacatcaatgaaggagag

SEQ ID NO: 258207 - DNA, 75 bp, Homo sapiens
gggccctggcatggccgacatagcactcttaaaagacccattttacatgggcttgtaccagaaacgagatcgcac

SEQ ID NO: 258208 - DNA, 80 bp, Homo sapiens
aagagtgattcttctcctctgccttcagagaagtctgatgaagatgatgataaagtgatggcatgaatgcctatatggca

SEQ ID NO: 258209 - DNA, 83 bp, Homo sapiens
cacaaccgagcagcactgtcagcagatgtcgaataaaacctgcctagagctggaacgttacctccagagcgagccctgctatg

SEQ ID NO: 258210 - DNA, 99 bp, Homo sapiens
aattactgtctcaagtgatacgggaggctgccggcgtggaccgcgggaaggcggggctggggctcggcgggaggccacccccacagccgccccgggagg

SEQ ID NO: 258211 - DNA, 83 bp, Homo sapiens
accacagtcaaagcaacagaaacaaaagcaggcaaatggagtcgttgggaatcggaccgagaaagtcgttacgaggaagaaga

SEQ ID NO: 258212 - DNA, 100 bp, Homo sapiens
tatccaaagccattcactacctgcacaacgttcaaccatgctcggtcatctgtggcagtatatcaagatttccatgaggacaacttacaaggacctgtat

SEQ ID NO: 258213 - DNA, 75 bp, Homo sapiens
ggaagagacaggaagatggtgcccaggcgccccagcgggatcccagagaaggatctgcacagtgttatggcaccc

SEQ ID NO: 258214 - DNA, 100 bp, Homo sapiens
cagcggccgcggtgggttcttcaggatttgcagatttacagaatggctgcacattaatggaaagagaagcataaacctatcttctttcattatggaggga

SEQ ID NO: 258215 - DNA, 100 bp, Homo sapiens
ggacccgcggtccccgctcttgctgcgggagatacagatgacccaccaagaattactcagaaccctgtgatcaatgggaatgtggccctgagtgatggac

SEQ ID NO: 258216 - DNA, 75 bp, Homo sapiens
tgatgacatgggacttggaaaaacagtacagagtaagagggaccatctcctcatgaacgtcaaatggtactaccg

SEQ ID NO: 258217 - DNA, 83 bp, Homo sapiens
cggcgaacgcggagagcacgccatgaaggcctcgggcacggattctgtttcactgaggccatctatccgatttcaaggaagcc

SEQ ID NO: 258218 - DNA, 100 bp, Homo sapiens
ctcctttgaccagatccatgactgttggtgatgatttgtcattaattcggaagaacagaatggctctctttcaacaattgacatgtgtgcttcctatcct

SEQ ID NO: 258219 - DNA, 73 bp, Homo sapiens
aaaaagagcctttgactgtgaagagacatgagatggtgaatgaacccccagacggagtttcactcttgttgcc

SEQ ID NO: 258220 - DNA, 75 bp, Homo sapiens
caccgtgctccgttggagccccagtggaaactgcctgctgtctggggacaggataagaaggctgactgcacaatc

SEQ ID NO: 258221 - DNA, 98 bp, Homo sapiens
ccgccgaagaagcatcgttaaagtctctcttcaccctgccgtcatgtctaagtcagagagaacgccaagggtgagaccttggagctgttccagtctgt

SEQ ID NO: 258222 - DNA, 75 bp, Homo sapiens
gaaaaattcaagaagttgaaaaacgcttttcacgtcacctggagagatgcacagatgccatggacaatattacca

SEQ ID NO: 258223 - DNA, 100 bp, Homo sapiens
cattatcctctgtttctctgctgcaccgacctcgacgtcttgcctgtgtcccacttgttcgcggcctataggggacggcaaaacagaacagaaaggcgga

SEQ ID NO: 258224 - DNA, 75 bp, Homo sapiens
cgccgcgggcaggacgcgcgctgcaggatcttagaaatgaagttgaaaaattacgcaatgaagtgaatgaaagag

SEQ ID NO: 258225 - DNA, 74 bp, Homo sapiens
ctgcctccgggcacacccggctccccggacgcctcggtgagaggggccagtgtatcctttctactccaccgaaa

SEQ ID NO: 258226 - DNA, 75 bp, Homo sapiens
gaggaaagcaggaggaggtggcggcggcgggaagatgagcttactccacgggaacagcctctagataatctgagt

SEQ ID NO: 258227 - DNA, 74 bp, Homo sapiens
ctgcggcgcctgggcgctctgagctgggatagatgggcagcagaagatcatgtgcttcgtgataccgatgaaaa

SEQ ID NO: 258228 - DNA, 100 bp, Homo sapiens
aggagggctggttccggctgcagcccgaccagtccaagagccggcggcatgacgaagtgcatctccctcgccccctgagagtctcgtggaggaggagcga

SEQ ID NO: 258229 - DNA, 50 bp, Homo sapiens
attggatatggagcctttggtgttgtctgtgtatcctactcagtacatgt

SEQ ID NO: 258230 - DNA, 60 bp, Homo sapiens
ggacaaatgtgtacctggatgcattggtaggagatcaaatcattgaaatcaatggggaaa

SEQ ID NO: 258231 - DNA, 100 bp, Homo sapiens
cgtcgttgctgccgggattttggaggccggggccgcgctgagggcgcccagctgatgccttcaattaagttgcagagttctgatggagagatatttgaag

SEQ ID NO: 258232 - DNA, 50 bp, Homo sapiens
aaagctttctacaaatcattttcaaagggtggagccagccatcctgagac

SEQ ID NO: 258233 - DNA, 74 bp, Homo sapiens
cttcaccttcggcagccggctgtacgcacacaccatcgcagagatatagatcagctatcaggaagggacttctg

SEQ ID NO: 258234 - DNA, 100 bp, Homo sapiens
ctccactcagctctcctctaccaaactcacccagaatggtctgtgcagacttttgcagacaaatcaaaacaagaagctctgaagaatgacctggtggagg

SEQ ID NO: 258235 - DNA, 50 bp, Homo sapiens
ccaagatgcggatccgggcctttccggaaattatcagttcattgcctagc

SEQ ID NO: 258236 - DNA, 89 bp, Homo sapiens
ggaacaggcatcatggactgtgcgcccaagtgtgctttctggtgaccatgaatggatgctgtcagtagatgccttggtgctctttacgg

SEQ ID NO: 258237 - DNA, 97 bp, Homo sapiens
tcggtctcctggggtcggcgccgagtgggaggatggcggaacctttgacgacccctatgccctggtggtgctggctgaggaggagctggtggtgatt

SEQ ID NO: 258238 - DNA, 89 bp, Homo sapiens
catctttactggaaaaaagtgaaggaaaaccagtagattcccagacatcgcgaagtgaatctgaaattgtgccaaaagttgctaaaatg

SEQ ID NO: 258239 - DNA, 100 bp, Homo sapiens
tgaagggagagaagtggatttgggagacatttaggaggaattgaatgatctggcacgggaccctccagcacagtgttcagcaggtcctgttggagatgat

SEQ ID NO: 258240 - DNA, 83 bp, Homo sapiens
gtcaaagccttcttaattatgtctgagaaaagcattgcagtgtcgagatggctatgaaccctgtgtaaatgaaggaatgtgtg

SEQ ID NO: 258241 - DNA, 75 bp, Homo sapiens
ccgagtcgcgcggaggcggaggcttgggcaaaatgatgcttcaacacccaggccaggtctctgcctcggaagtga

SEQ ID NO: 258242 - DNA, 97 bp, Homo sapiens
ccaagatggtgaagcagatcgagagcaaggttatcaatactctggctgaccatcatcatcgtgggactgactttggtggaagtccttggttacatgt

SEQ ID NO: 258243 - DNA, 75 bp, Homo sapiens
tcctgacgttgtaaatcaggaccccaacaataacttacagggcttccgagtggacctgccaatcaagtcggcccg

SEQ ID NO: 258244 - DNA, 74 bp, Homo sapiens
gcattgctgatcttgtacttggattcagcaaggaaccttccgggagtggacatccgccataacaaggaccgaaa

SEQ ID NO: 258245 - DNA, 100 bp, Homo sapiens
ttttgcggaacctgaaaaattcaagaagttgaaaaacgcttttcacgtcacctggagagatgcacagattgaaaaggaagatcaggccaaccccaaagaa

SEQ ID NO: 258246 - DNA, 49 bp, Homo sapiens
ctgaattatacaccagcagattatgagcgagatgcgagaacacttttgg

SEQ ID NO: 258247 - DNA, 73 bp, Homo sapiens
ccgggatcgtgaccgtggagggacatgatccacatcgcggacaccaaggtcgccaggcgttatggggatttct

SEQ ID NO: 258248 - DNA, 100 bp, Homo sapiens
aagtgaagaagacccggaggaaactaacctcaacctctgccatcacaagggacccagagttcaacaatacagatcagattgacctgtatgatgatgtgct

SEQ ID NO: 258249 - DNA, 87 bp, Homo sapiens
gggtactctacacttgcttccaatccatacaggcccaaaagagttcagagctaaaaggtcagattcctgaaattaaacagactttgg

SEQ ID NO: 258250 - DNA, 95 bp, Homo sapiens
ttactttttgccttctcactgccctcagaaggcattgtgatatgttggtggtcccagcttcaaagaaatcactgctcagcacgcaggcatgtgag

SEQ ID NO: 258251 - DNA, 90 bp, Homo sapiens
ggcctactcgcccgccaccctgcgctgccgccgctctgaggagttaaaggttctgccggagacttccatttggcctcaatgtgaaattaa

SEQ ID NO: 258252 - DNA, 75 bp, Homo sapiens
gaactggaggagcgatttgccatcgtgctggctggcagtgatggtgaaagcataggaaactgccccttttcccag

SEQ ID NO: 258253 - DNA, 80 bp, Homo sapiens
atcgccagctgcacactcttggggctctacctctttttcaaaacctgcctagagctggaacgttacctccagagcgagcc

SEQ ID NO: 258254 - DNA, 100 bp, Homo sapiens
ttttcttatttagccggagtgagaagcaagaaggccctggacacagcaatatctctgggctttcacagggtcctggcggcagagaccacgtcccagcagg

SEQ ID NO: 258255 - DNA, 100 bp, Homo sapiens
catggcagatggcaacagaggatgtcaacaattttttggaggtgctttgtaacagagccagactggtttcctatctcccaggattttgctctttagttaa

SEQ ID NO: 258256 - DNA, 98 bp, Homo sapiens
ctcatctggaattttgccgatttcatgactaaccagtctgtcccctttcctccaacccaacggcttactttcaaggaagtatttgagaatgggaaacc

SEQ ID NO: 258257 - DNA, 75 bp, Homo sapiens
ctgttccagaactgctggaagctgagctttatcttcaagccaggatgaagggagactgggcaagactcttacgcc

SEQ ID NO: 258258 - DNA, 101 bp, Homo sapiens
cgcaaacggaggcgtgaggaggacgccaggtggacacgcccatccttggacttcctgaaaatgacccaggcggtgcgtctttctacgtgaataggattttg

SEQ ID NO: 258259 - DNA, 100 bp, Homo sapiens
ctccttacagatggggttggccgccgtgagaaaggatttcagatgcagtggtttgtttacgcctctacggcagacacatgcaggccaacccagaaccacc

SEQ ID NO: 258260 - DNA, 75 bp, Homo sapiens
ctcagccccacgcaggtgcccaccggcctcggcctggatgggcagcgccagaggctctggctacagttgtaccag

SEQ ID NO: 258261 - DNA, 75 bp, Homo sapiens
ttttgtccctgtggaacagatggggaaactgaagctccagaggccctgggctgcatcttgtacctgctgtgcttc

SEQ ID NO: 258262 - DNA, 100 bp, Homo sapiens
tggagaagctgcggctgcacacggtcaactccaggcacgaggccagcctgaagttgtacaagggtccccggtggcatatagatctccagccttgggcagg

SEQ ID NO: 258263 - DNA, 100 bp, Homo sapiens
gattggcgactcaggggttggaaagtcttgccttcttcttaggtttgcagatacaacttcagtattaaaggaggaacatgttacaacctttgaagatgaa

SEQ ID NO: 258264 - DNA, 74 bp, Homo sapiens
cccctatccagacggctgcccttcaagtaccaacaatgcagatcttcgtgaagactctgactggtaagaccatc

SEQ ID NO: 258265 - DNA, 106 bp, Homo sapiens
tcggatcatgtctggtggctccgcggattataacaggtacatgtcccagagcaagcacacggaggcccgggagctcatgtactcgggagccctgctcttcttcagc

SEQ ID NO: 258266 - DNA, 100 bp, Homo sapiens
gtcactgagcagctggcgcacctggtgcgggccctctggaccctggagtacaccccgcagcacagccgcgacttcaaggagtatgttgcaagtgagggtg

SEQ ID NO: 258267 - DNA, 50 bp, Homo sapiens
tgatacccttgttgctattgacacctgatattggtgctggaaaaggcaaa

SEQ ID NO: 258268 - DNA, 98 bp, Homo sapiens
tgatgccactgggcctggtaggaagacagaatatctgttttggaccttaacagacccaacatgagtgaagtttcctgcaagaaacgggacgactattt

SEQ ID NO: 258269 - DNA, 74 bp, Homo sapiens
attcggcagatttatccacagctaaagttgaaagtttgatgattacccccttcttgcctgttgtagcatttgga

SEQ ID NO: 258270 - DNA, 75 bp, Homo sapiens
gatatatgatggggagcttgaggacacttaccacgaactcaaagcttggattctgccgtgccactcacgaatggc

SEQ ID NO: 258271 - DNA, 100 bp, Homo sapiens
cacgaacacaaatgcaggagggagaggtgccaagaagcagcggtacacgtcaaaatgcagatcttcgtgaaaacccttaccggcaagaccatcacccttg

SEQ ID NO: 258272 - DNA, 82 bp, Homo sapiens
caccctgcccccaagaaggaagtcatcatgggccggcctggaacaggatgaccgagtgggagacagcagcaccagcggtggc

SEQ ID NO: 258273 - DNA, 100 bp, Homo sapiens
tctgggaccttctccctgcctggacccctactattgcaacaagacagtcttgcactgtttcctaggctggagtgcagtggcacaatcacagctcactgca

SEQ ID NO: 258274 - DNA, 98 bp, Homo sapiens
tctgcagagcctggacggctccctccacgtccctgatccgtatgtgaaactttcattgtacgtagcggatgagaatagagaacttgctttggtccaga

SEQ ID NO: 258275 - DNA, 98 bp, Homo sapiens
cccgatggctctgtgcaacggagactccaaggtgtccctggccagtgtccttccacctgtccacaagcatggggaacatcttcgccaacctcttcaag

SEQ ID NO: 258276 - DNA, 100 bp, Homo sapiens
tgagaagctgcggggagatgtggccatcaagctcaagttcctggaagaaaacaaggtcctccgcgacatcctcaaggaggttcagagtaacatggtgccg

SEQ ID NO: 258277 - DNA, 89 bp, Homo sapiens
cagttccgcacgcgctgggattcggagcttcagcgggaaggaggttgtgtttgccacgccaggaatgctgcacgctgggcagtccctgc

SEQ ID NO: 258278 - DNA, 100 bp, Homo sapiens
aacaaaagaaagaagaaataaaagctttacaagggcagctggcagcactgaaagaaattcaggctgaagttcagatcccagctctcctgttggcttcgtg

SEQ ID NO: 258279 - DNA, 75 bp, Homo sapiens
ggcaccccgattgtcgatgggctcgctccagaggacatgagcaaggagcaggtatgaacatgctaatgatgataa

SEQ ID NO: 258280 - DNA, 100 bp, Homo sapiens
agaaggccctggacacagcaatatctctgggctttcacaggctgtagaaaatctctgttcttacaagatttctgcaaacttgtacaaacagctgagacag

SEQ ID NO: 258281 - DNA, 82 bp, Homo sapiens
ggaggtcatcgacggcttcgccatcgccagcttcagcaccctggaggccctggagagcactgacacggctcccgggacctcg

SEQ ID NO: 258282 - DNA, 100 bp, Homo sapiens
tctgggcggccgccgcgcttctgctctcagtgtcccggacttcagtttcaccagtgatcattaaagaatgggcagcttacaaaggaaagtctcctcaaac

SEQ ID NO: 258283 - DNA, 100 bp, Homo sapiens
agcgtgaccgagagcgcgaatatcgtcatcgttagaaggtacgtttgcgggagcacatgggtgaaaagtatacaacttacagtgtgaaagctcgccagtt

SEQ ID NO: 258284 - DNA, 100 bp, Homo sapiens
tcaaagtaaaggagcagtctttggaaaatctaatcaaggtccgcaagcaggtggtgaacatcccgtccttcattgtccgcctggattcccagaagcacat

SEQ ID NO: 258285 - DNA, 83 bp, Homo sapiens
gtgggatcgatgtttcaatattggaagcgctttgatttacagcagctgcagcgccatcatgaccgggtcctataacaacttct

SEQ ID NO: 258286 - DNA, 85 bp, Homo sapiens
cgcggcggggctgaggcggccgcggggcccgagcgcaggattatatctgtccaagatgcgagtctggttttatcgaggagcttcc

SEQ ID NO: 258287 - DNA, 50 bp, Homo sapiens
atcgtcccctggactctctcaagcacacaaaccaatggtctggactttca

SEQ ID NO: 258288 - DNA, 50 bp, Homo sapiens
aagatgctagcaatgcgatgccggccctgttaaacctggcagagcgactg

SEQ ID NO: 258289 - DNA, 80 bp, Homo sapiens
tgttcagctgcagcatggagagatagataaacggtattgggtaccctgtggtaactttggggtttggcttcaaaagttac

SEQ ID NO: 258290 - DNA, 95 bp, Homo sapiens
tggcgggaccttttttataaactggctgaagcccatccagactgtttgatgctgaacttcaccgttaaggagcagcttgttgctatataccattg

SEQ ID NO: 258291 - DNA, 100 bp, Homo sapiens
agtggagatttatagacatgtgggagaaaaagtgaggatggatctttataagagaggaattccccctgctagagttgtggaaagtaaaaatgtagcccta

SEQ ID NO: 258292 - DNA, 50 bp, Homo sapiens
gaacccagagattttgcatatgactcagatggagtcttgctctgttgcca

SEQ ID NO: 258293 - DNA, 88 bp, Homo sapiens
gaggaaaagtagaaattgatcagcaacaactaactcagcagcaacttaatggaaactagcctttgaagtaaattttatggatgatgta

SEQ ID NO: 258294 - DNA, 83 bp, Homo sapiens
ggcatttctattttagaaagcagttcgggatcagtgtccttcagtgatgtggctgtgggcttcacccaggaggagtggcagca

SEQ ID NO: 258295 - DNA, 88 bp, Homo sapiens
tatccgccagtcaataggaagtacgagttgcaccaattccagctggacatcactgtgaaaatgggacgggataaagtccgagaaatgt

SEQ ID NO: 258296 - DNA, 90 bp, Homo sapiens
gtaacaatgtggagaaagacattacaccatctgaattgcctgcaaacccaggtattatgagacaggaagcatcaagcctggggtaattgg

SEQ ID NO: 258297 - DNA, 50 bp, Homo sapiens
aaactcaagaatttgaacacactgctggagcattggatttgctaaaggag

SEQ ID NO: 258298 - DNA, 90 bp, Homo sapiens
ctcctccttggtcgccgcgtccttggctggcgttaaccctccactgagtgaagaaatgttgcctcctggagagtggatgtgtcaccggtg

SEQ ID NO: 258299 - DNA, 75 bp, Homo sapiens
agcagcgggtgggcgacctcttccagaagctggccatgaccttgcctcctttcctggagttcggtgtcccgtccc

SEQ ID NO: 258300 - DNA, 100 bp, Homo sapiens
aagcaagtttacctaacacgtctttgcaaggccccgcagggtggagcccgtctgctcagggttgcaggcccagattctccactgctaccgagatcgcccg

SEQ ID NO: 258301 - DNA, 82 bp, Homo sapiens
aaaaatagatgatctgatcgacaacagtgtaaaagaaatcatttcactgttagtttcaaagagatgctgttcagttaaatgt

SEQ ID NO: 258302 - DNA, 74 bp, Homo sapiens
gaaggccttggcatttcaattacagttaactccgttgactgccaaaatagcatccccaacgtgcagccctccgc

SEQ ID NO: 258303 - DNA, 50 bp, Homo sapiens
tggagacagcaatctcaacttcagctccgacagttagttaatatgtgcat

SEQ ID NO: 258304 - DNA, 98 bp, Homo sapiens
gactacgacggcgttgatatcggtggtaacgacggcctcagcaggcggggaagatgaaagggtggaagttgatgggtcgaaactaaatgtgaccagca

SEQ ID NO: 258305 - DNA, 75 bp, Homo sapiens
ttcaagcgattatccagtacacattgataagctcaccatggatgatgatatcgccgcgctcgtcgtcgacaacgg

SEQ ID NO: 258306 - DNA, 75 bp, Homo sapiens
cgcggccgagcggaggcggagtcggcgccgagaacatgcttccgaagaactgaccattgctggcatgacgtttac

SEQ ID NO: 258307 - DNA, 76 bp, Homo sapiens
acaaggtgtcaacaatgtgccgggtgcaaatagctatgggcaacttggcctcggccataaggaagatgtgctgttg

SEQ ID NO: 258308 - DNA, 100 bp, Homo sapiens
tggagtctgcgaaggccgggacccggttccccggcccacagtgggggtgtgcaaacccgagagaactggatgccaaacgtctgattggacgcagatttga

SEQ ID NO: 258309 - DNA, 75 bp, Homo sapiens
gccaccctgcggtggattgactacggcaaagtggccactcagcagaagatggctgtgccacccacgtatgccgat

SEQ ID NO: 258310 - DNA, 100 bp, Homo sapiens
ccttctccaaggaccacgagcaactctacatcatgtcagagaggcaggtcaaccacacagtagccctcagcacaatcggggagtccaactaccacttcgg

SEQ ID NO: 258311 - DNA, 90 bp, Homo sapiens
ccatgctggactcctgaagaagttaaatgaactggaatctgacctaacctttaaaataggcccagagcaagagaggcatcctcaccctga

SEQ ID NO: 258312 - DNA, 100 bp, Homo sapiens
ctttacgtgaagtggaggcccaaggacagtgaggagctgggtggtcccagcctggagctgtgccagcctgacatggagacctcatccttcaacagctgaa

SEQ ID NO: 258313 - DNA, 75 bp, Homo sapiens
atggatgttcttcttcgagtatttgtagaaggcggagcgtgctttggacaccatgaattttgatgttataaaggg

SEQ ID NO: 258314 - DNA, 101 bp, Homo sapiens
ggatgccagctaaaccagatggcatcaaacagtgaaatacaggcctggctttcagacttggtatcctccatgaaatgtgggatccttccaatttctcaaga

SEQ ID NO: 258315 - DNA, 82 bp, Homo sapiens
gctcagcgagtttgccctccagagcgacctggaccaacccgccttccaacagctggtgtccctggccagtgtccttccacct

SEQ ID NO: 258316 - DNA, 100 bp, Homo sapiens
ccaagactgcgttcctgctcaacatccaggttggtgttcgaggaagagacattgttgttcttggtgtggagaagaagtcagtggccaaactgcaggatga

SEQ ID NO: 258317 - DNA, 100 bp, Homo sapiens
gttacagaggtctccagagccttctctctcctggtgaaggacttaactaagtacttggatcccagtgggctcggcgtgatcagctttgaagacttctacc

SEQ ID NO: 258318 - DNA, 101 bp, Homo sapiens
gtgaaattttaagcgactgtgactctgctgcaagttccccagatcttgaggttacccaggagatttcagatgaaacaagagttttccgcttattaggatca

SEQ ID NO: 258319 - DNA, 100 bp, Homo sapiens
cagtggataggcctcaatgacaagatgtttgagcatgacttccgttggactgatggcagcacactggtgaacggaagagtccttatgttgcagtatgctg

SEQ ID NO: 258320 - DNA, 83 bp, Homo sapiens
acggtggctactctgcctcggggacgaaagcaggaaccctaaggactctgcaatatgaataattccctagagaacaccatctc

SEQ ID NO: 258321 - DNA, 98 bp, Homo sapiens
ttgggatgatgacaatgtagaggatgacttctctaatcagttacgggatgggcgtgttttgggcgtgctagaggtgtcacgctccattggggacgggc

SEQ ID NO: 258322 - DNA, 82 bp, Homo sapiens
gccaacaacagtgacggaatgcctccatacattgagaaagatcagtctaaagaaaaggagaagaaagtgaaaaaaacaattc

SEQ ID NO: 258323 - DNA, 109 bp, Homo sapiens
tgtaggaaatggtaaacatcgggcaaactcctcaggaaggtctagcctacaacacagcagtcccctcaggatgagcaggaaaagctcttggatgaagccatacaggctg

SEQ ID NO: 258324 - DNA, 90 bp, Homo sapiens
cgcagttgggtgtgtggtgctgaatgaagggatgaaggaggactgctagcgtctaaggtaagaatgattgatgttggctgatattggagt

SEQ ID NO: 258325 - DNA, 83 bp, Homo sapiens
ggaatgtggactcgagcggcaacaagagcgttttgatggagcggctgaagaagctattcaggattatgaaactgctcaggaac

SEQ ID NO: 258326 - DNA, 100 bp, Homo sapiens
gtccagccagggagtgtagcagacagacagatgtgctggtgctgagctgtgatctgataacagacgttgccttacatgaggttgtggacctgtttagagc

SEQ ID NO: 258327 - DNA, 100 bp, Homo sapiens
agagtggacaggtgtatgtaaatgacttacctgtaaatagtggtgtaacccgaataagctgtcagactttgatagggcgctatgtggctgctcgttgcac

SEQ ID NO: 258328 - DNA, 97 bp, Homo sapiens
cagactctgaagatgatcagacaaggcaaagcgaaattggtcattctcgctaacaactgcccagctttgagatttgtcccatcagatgaaaagaaga

SEQ ID NO: 258329 - DNA, 98 bp, Homo sapiens
tacccaaaatcacaaacttgaaagaaaggaaaacaagtttgtcagacctaaatgatccaaggcttcgtgggacacatatgcaacatgcctatgatttt

SEQ ID NO: 258330 - DNA, 83 bp, Homo sapiens
ctgatcatcagttcactgagctcacgcgcctgtacctcaccatccacaggatgttgcttcagagtgtgaagtcaaatgcatgc

SEQ ID NO: 258331 - DNA, 75 bp, Homo sapiens
cacaccgccgctgcctcagtcatgccggacacattcagctaacgtattttagcaggtggagtgaggttgaagatt

SEQ ID NO: 258332 - DNA, 117 bp, Homo sapiens
cgcagaactgttcagccaagctcccacggagaagaaagaagctaaccccaagctgaacatggtgaagttcctgcagagctcgtccgcatggtgctgaatggctgaggaccttcccag

SEQ ID NO: 258333 - DNA, 76 bp, Homo sapiens
ctcttggcatttggctttgcctttctggacacagaagtatttgtgacagaggatgaagtttttgctgctgcagcag

SEQ ID NO: 258334 - DNA, 100 bp, Homo sapiens
cccacaaaaactcctggcagaacaagtagcactctctcagaagatcagatgagccgtcttgccaagtgtgagatcaaggtggcccagcccaaagaagtct

SEQ ID NO: 258335 - DNA, 130 bp, Homo sapiens
cagattcttccaagaaaggaatgacagttaagaaccttattgatgcagagattattaaaggtggcgacatgtctaagaatgtgagccagtcacagatggcaaaattgaaccaacaaatggccaaaatgat

SEQ ID NO: 258336 - DNA, 100 bp, Homo sapiens
cacagatatattggatatgaaactggaagacatcctggtcagctttgtgaaagaagctatcatgaaggtgttgaacttggctctcatgtttgcagacggt

SEQ ID NO: 258337 - DNA, 82 bp, Homo sapiens
ccacgcctccgcgggcagttaccagctttggctgctcgcgcctccccaactcgggctgcctgctgtttcccggggagatcat

SEQ ID NO: 258338 - DNA, 75 bp, Homo sapiens
ggatgatgcggaaattaaccccaaggtcagcccaaggccaaccccactgtcactctgttcccgccctcctctgag

SEQ ID NO: 258339 - DNA, 96 bp, Homo sapiens
ccgagttatgcccaccctccaactttgcgacggaaatgtgtcatcgaaagccaggaaacttccattttagaagaatacagtatcaattggactcag

SEQ ID NO: 258340 - DNA, 100 bp, Homo sapiens
ctgattcttgtcactttaattacttgagaatttataatggaattggagtcagcagaactgaaataggttctggcctataggaacaagacattttcagtaa

SEQ ID NO: 258341 - DNA, 51 bp, Homo sapiens
agatgagaaaccatacaagctgtgcaggaacgaatgcaggaatttgggaac

SEQ ID NO: 258342 - DNA, 82 bp, Homo sapiens
ggaggaatttgtggctggctggatctctgagggtggttctgggctggactccagccccttcctgtcggaggccaatgccgag

SEQ ID NO: 258343 - DNA, 100 bp, Homo sapiens
accgttgggttttggctcctgatcatcattttctgggtggaagtattcagctaaagactggttgatgagtgatgtagactatttcagcttcttattttcc

SEQ ID NO: 258344 - DNA, 76 bp, Homo sapiens
cgtatattatggctccagggctgttacatgcctacccggttgtaaatgtcttaaaatccttattgtcaaatcttga

SEQ ID NO: 258345 - DNA, 96 bp, Homo sapiens
gccccgtcctccttcgccgccgcgcacaaccgcacgtgcaggattgtcagtggcttcgccccgaggagagctgactgccctgggctgctgcctccg

SEQ ID NO: 258346 - DNA, 100 bp, Homo sapiens
cttaaatacaccactcgccaccattttctccagtctcggaagggtgctgacctggaccgggagaagaaggctgccgagtgcaaggtggacagcatcggga

SEQ ID NO: 258347 - DNA, 90 bp, Homo sapiens
cgtggacgccgccgaagaagcatcgttaaagtctctcttcaccctgccgtcatgtctaagtcagaggtatcagacttggtgataattctg

SEQ ID NO: 258348 - DNA, 83 bp, Homo sapiens
cgctgcatccccatcttcggcatgtccttcgcctgccagtcattcctggtcgggtggcttccagtggtcttcagtctgtcgtg

SEQ ID NO: 258349 - DNA, 96 bp, Homo sapiens
gctgatcctccacttcacacagaagaatcgcatgaaccctgagggcgacatcaagggtgtgataccaggatttggagttccatggagtgatgagat

SEQ ID NO: 258350 - DNA, 75 bp, Homo sapiens
tttgttcaagacaagggaaatgcagctctagctgagatggcaacatgatttcagcttctaccttgatggatattt

SEQ ID NO: 258351 - DNA, 82 bp, Homo sapiens
gaagacatggaccagggctacggagggtcccctggaagtgacgctgactcagccagtgaggagcgggcctgtctccaacagg

SEQ ID NO: 258352 - DNA, 75 bp, Homo sapiens
caccatggcgctcctgctgtgcttcgtgctcctgtgcggagtagtgggctactgataaagatactggcaattata

SEQ ID NO: 258353 - DNA, 108 bp, Homo sapiens
ggggcctcgggcgccccgcagccccccaacatcctgctcctgctcatggacgacgaaggtgctcgggtcttcggggcactgggtcccatcggtccctcctcacctggg

SEQ ID NO: 258354 - DNA, 100 bp, Homo sapiens
tatagccagcaccatctctgctgttagctcgtcgtcaaggtgcacatgaatgataacagcacaaagtcactgatggtggatgagcggcagctggcccgag

SEQ ID NO: 258355 - DNA, 100 bp, Homo sapiens
gccacaatgcatcgctggaagtagccatgtcttctacaaatgcttctgggaactggaggacccagttaaccatagggctgtcggattacgagactccagc

SEQ ID NO: 258356 - DNA, 100 bp, Homo sapiens
acgggaagaacaaagacttagactcggtatcatgatattagctggtttgacatcaagtcatttgtgagtcatcagatcttctcctgaaaatgggagacac

SEQ ID NO: 258357 - DNA, 50 bp, Homo sapiens
atgaagctccccaaggagctgcagttgctgccaaacaaggtgaatccgac

SEQ ID NO: 258358 - DNA, 96 bp, Homo sapiens
ctggtcgacctgttgtgttgtggtgccatcctcttcccagtggtgtggaattacatgaacgacagccttcgcaccgacgtcttcgtgcggttccag

SEQ ID NO: 258359 - DNA, 51 bp, Homo sapiens
gttcatccctaagggtcctaaccggggagacccagctaagttcctctgaaa

SEQ ID NO: 258360 - DNA, 127 bp, Homo sapiens
cgagatgtctcgctccgtggccttagctgtgctcgcgctactctctctttctggcctggaggctatccagccgccgtgccgtccctgcagtgacaccgaggtgctcctagccgtctgcaccagcgac

SEQ ID NO: 258361 - DNA, 82 bp, Homo sapiens
tggtgtccccactgagctcttggaagagagacctgcctagagctggaacgttacctccagagcgagccctgctatgtttcag

SEQ ID NO: 258362 - DNA, 90 bp, Homo sapiens
gtctgatcccttgctcccatccctgcagcatgaacaaggtaacttgggtttttactcctgtaacaactgaaataacaagtcttgatacag

SEQ ID NO: 258363 - DNA, 75 bp, Homo sapiens
tgcttctaggacctctcagaacacagtggacagtgacaaggagccatgtctgaccaggacgtttggaagatcata

SEQ ID NO: 258364 - DNA, 80 bp, Homo sapiens
tggacgtgggagtcacctgaaagccaggaaatgggatttcagtcataatcggttgtctaactggaacatcagcttggaat

SEQ ID NO: 258365 - DNA, 90 bp, Homo sapiens
gggaaatgaaagagcgccttgggacagggggatttggaaatgtcatccgatggcacaatcagggcagagcggcttgggtaaatccacctt

SEQ ID NO: 258366 - DNA, 100 bp, Homo sapiens
ccttgcccgtgaccgtcgctagaactcagttgtgcgttgcggccagtcgccactgctgtgtggatgaggtcaccattgtcaacattttgaccaaccgcag

SEQ ID NO: 258367 - DNA, 100 bp, Homo sapiens
ctgcacttcgcattttggcattgacatttaattttagggtcctttatatagaagggagagtagctctgtggcactctgtaagctgctccagcatggcatc

SEQ ID NO: 258368 - DNA, 83 bp, Homo sapiens
acgagctgaccctgggagacatcgacggtgcagacattccatggaggcctgctgcagcacatggagaagaacaccaagctgga

SEQ ID NO: 258369 - DNA, 107 bp, Homo sapiens
ccggcagcgggacccggcgaagacgcgaccgcggcgcgagtcaccatggtgagaagccctaccactgcaactgggacggctgcggctggaagtttgcgcgctcagac

SEQ ID NO: 258370 - DNA, 75 bp, Homo sapiens
tcgtaggaggctgtcctgtctgcagggctccgtaggcaccaactgcaaggacccctccccctgcgggcgctccca

SEQ ID NO: 258371 - DNA, 118 bp, Homo sapiens
cgtcatgaaactgtaatgcatgaacagaactcaggagttgtctggccagcttagtgacaatgcagatcttcgtgaagactctgactggtaagaccatcaccctcgaggttgagcccag

SEQ ID NO: 258372 - DNA, 98 bp, Homo sapiens
agcaaccaatgatatatatctgtggaggtgctggagaatctggtaaaagcaccattgtgaagcagatgaggatcctgcatgttaatgggtttaatgga

SEQ ID NO: 258373 - DNA, 100 bp, Homo sapiens
gctccacgcgcggacggtcgcggccgccgcgcttcccggggagagaggcgagcgcggcgcccggaccgcggtcctgaacgaggctgtgggggccctgatg

SEQ ID NO: 258374 - DNA, 90 bp, Homo sapiens
agcatgtgagattcctggatttagaagtatatcagagaattccctggtagcaatggacttctcaggccagaaaagcagagttatagaaaa

SEQ ID NO: 258375 - DNA, 75 bp, Homo sapiens
cggcgcagggcagccccgcggccgccgcggccgcaggcagcatggtgattcatttgatgcttccagaaaccagag

SEQ ID NO: 258376 - DNA, 75 bp, Homo sapiens
ctggaaaactgtgggctcctggtgtctctggtgcaccgtccaggtgaggttagagctggggcatcgcgcccaact

SEQ ID NO: 258377 - DNA, 98 bp, Homo sapiens
ctggaaacaatggcatttacagaaagagtcaacagcagtggcaacagcccttagagatttgtttgattccatggataaaacttcttccagtattccac

SEQ ID NO: 258378 - DNA, 83 bp, Homo sapiens
ttccttagttgaaaggtgcgccctgctgtgacagggccgttgttcgagagagaactgcaagtatcttcaccctccgacacact

SEQ ID NO: 258379 - DNA, 82 bp, Homo sapiens
tacgacgtccctcaaaccttgcttctaggagataaaaagagatagagtttcaccatgttgtccagggtggtctcaaaactcc

SEQ ID NO: 258380 - DNA, 117 bp, Homo sapiens
agagagcgagctgagtggttgtgtggtcgcgtctcggaaaccggtagcgcttgcagcatggtgtcgtgaaaactacccctaaaagccaaaatgggaaaggaaaagactcatatcaac

SEQ ID NO: 258381 - DNA, 100 bp, Homo sapiens
tgcttaacaatctccaagacttccttgctgtgaggctcgtgtggaccccagagcatgcacaggctgggctggtgaattaccagatctctgtcaagggcag

SEQ ID NO: 258382 - DNA, 50 bp, Homo sapiens
gggaaccctggtcaccgtctcctcagatccctttgggcgtcccacaagct

SEQ ID NO: 258383 - DNA, 90 bp, Homo sapiens
ctcaaaacctcgctccggaaaggggacacctggtaaccccccgcggcctagcctggagcccgaggagcccaagaggcctgtccccgcaga

SEQ ID NO: 258384 - DNA, 101 bp, Homo sapiens
ccggctctcggtccgggacgtgcgcttccccacgtcgcttgggggccacggcgcggacgccatggtcccgtcaggaagcccaagtatgtggaaagccccag

SEQ ID NO: 258385 - DNA, 100 bp, Homo sapiens
tggagcttcacaatcctaaagcaatagcagtagatccaatagcaggggtaagacgtgaccttttgaggtgactataactgaagattgctttacagaagcc

SEQ ID NO: 258386 - DNA, 98 bp, Homo sapiens
tagctctggtccttgccaatcccagaaggtttttagttcaacaagtgtcacggcatacaagcagtcaccaggagactaaagtccatcaaaaacatcca

SEQ ID NO: 258387 - DNA, 100 bp, Homo sapiens
gcagctatgatggagactttgtctttgatgactcagaagctattgttaacaataagggtcctgatgaagaagctgttgtggatcttggcaaaactagctc

SEQ ID NO: 258388 - DNA, 75 bp, Homo sapiens
aggacatcacgtggaggcggccccaggcggtaaccagcgtgagctcgcccgccagaagaatatgaaaaagcagag

SEQ ID NO: 258389 - DNA, 90 bp, Homo sapiens
cgccagttccgtaaccgccgcaagatactgatccggggcctcccgggggacgtgaccaaccaggcctccggtgtggctgtctctgatggt

SEQ ID NO: 258390 - DNA, 124 bp, Homo sapiens
gcggagagcacggagatttctggggctttggagggaatcgtgagcgggcgggaggaggccggggaccacacaggaaaatgtttataggaggccttagctgggacactacaaagaaagatctgaa

SEQ ID NO: 258391 - DNA, 100 bp, Homo sapiens
ataccatctctctctctagcttctgaagtggaatttcttcacatggctcctggagaagtgaccatcacagttcgcctcatccgttcctttgaacatcgca

SEQ ID NO: 258392 - DNA, 98 bp, Homo sapiens
tttaattcgccaggatcttataaaacaaatgctgctgctatgaatatgggtcgaccattccaaaaaaatcggtgccgtgagcgatgtggagatgcagg

SEQ ID NO: 258393 - DNA, 100 bp, Homo sapiens
tgtggaacgatgccaaagaattgagctgaagcagggctacacatttttcatcccttccggaattacatgaatgacagtcttcgaaccaatgtgtttgttc

SEQ ID NO: 258394 - DNA, 98 bp, Homo sapiens
gggtcgcccctggcccggcgcgcccgtccccggcagcgacaatgagaatccacacaggcgacagaccctacaagtgcccacatcctggctgcgagaag

SEQ ID NO: 258395 - DNA, 74 bp, Homo sapiens
ttctcatgttttggctttggggctaggctccggtgtcggcgggtggcgcggcgcccccggagggggccatatct

SEQ ID NO: 258396 - DNA, 100 bp, Homo sapiens
tgacccttgaaggaatcaaacagttttatattaatgttgagagagaggaatctggaaaaccaggggctcatgtaactgtgaagaagctgtttgttggcgg

SEQ ID NO: 258397 - DNA, 100 bp, Homo sapiens
cttgaagatgttactgctcaatttgaaagtgagaaagatcagtctaaagaaaaggagaagaaagtgaaaaaaacaattccttcctgggctaccctttctg

SEQ ID NO: 258398 - DNA, 88 bp, Homo sapiens
tacccctaacgcacaataatatggctccgatgggctcaaagagctctcgatgttctgaagtatgaggaagttgacatggattcattag

SEQ ID NO: 258399 - DNA, 100 bp, Homo sapiens
cctgctcaacgtgaagatgatgaggatgaagacctttatgatgatccacttctacttattaaataccacatgaaatgaagatcacctctgcctatctaca

SEQ ID NO: 258400 - DNA, 50 bp, Homo sapiens
cacatttgtcatgatgacagtgacaaggctttccttaaagtttcccatgt

SEQ ID NO: 258401 - DNA, 80 bp, Homo sapiens
aattctgaaagctccggtattattctttgatagaaatccaataggtactccaaagattcaggtttactcacgtcatccag

SEQ ID NO: 258402 - DNA, 90 bp, Homo sapiens
gaaatttcaaagagaacttatacagaatggttttacaagtcaggccttgaaaagaggatagaccaggctgtggaggagtggaatattgag

SEQ ID NO: 258403 - DNA, 82 bp, Homo sapiens
gactacagcgactcactgacggagaagcagtggctcaagccgcggcgagtcctttgcacatgttggcaacacacgcatccgc

SEQ ID NO: 258404 - DNA, 75 bp, Homo sapiens
ctgatgagaaaggagagatgcagcttagcagtgtctgcaaaaacgaatcttttcctacaacctgttaactgactg

SEQ ID NO: 258405 - DNA, 143 bp, Homo sapiens
caggtcaagccactgatctggattgagtctgtcattgagaagttctcccacagccgcgtggagatcatggtcaagaacctcaagaaggcatgaagccagcccctgcagtgccgtccacccgcccctctgggcctgcctgtggc

SEQ ID NO: 258406 - DNA, 76 bp, Homo sapiens
ctgaaactgctagtcgcgatgactgaacacaacccaactttcacaaggtattaaacctttcagaaaagagatatga

SEQ ID NO: 258407 - DNA, 74 bp, Homo sapiens
agagcgcgcctagccggctcgcgactattgacctgaaaagtggttctggaaaagtgtaccaaggccctgcaaaa

SEQ ID NO: 258408 - DNA, 51 bp, Homo sapiens
ataaagccagtatgatagcaatgatggcagcaaagtgtgggatgctgtctc

SEQ ID NO: 258409 - DNA, 98 bp, Homo sapiens
aagtcaacagtggagtgggccagaaactggcgatggaatatgagaggagccctctggaaagaaaaggacagaccctgtgctttcatgaaagtgaagat

SEQ ID NO: 258410 - DNA, 90 bp, Homo sapiens
gaagaacttatcagagattgagaatgtccatggatttgtttctcattctcatatttcaccaataaaggattcaagttcgaaatatggcaa

SEQ ID NO: 258411 - DNA, 75 bp, Homo sapiens
gtccgccaggccctgcaggacctgctttcggagtacatgggcaataggatggcattccctgtggatatgctggaa

SEQ ID NO: 258412 - DNA, 100 bp, Homo sapiens
taccctcaaactgctccctctgctcactggtctctttgccgtctcccgcttaatcagagggcttgttttggaccacggagcacggcatcctgatatgaag

SEQ ID NO: 258413 - DNA, 100 bp, Homo sapiens
ctgttctttaggaaacttggaaaccttgtgaagaacaccctagaaaaatgtcagagagaaaatggatttatatacagtactgtagtcttgaagagaaaat

SEQ ID NO: 258414 - DNA, 101 bp, Homo sapiens
ccacgcgaggtgtgagctcctgccagcagtgcctggctgtgagccccatgtgtgcctggtgctctgatgagctatcagttgagggatttgcagttgataaa

SEQ ID NO: 258415 - DNA, 100 bp, Homo sapiens
gtagtagtccctgggatccgtatgtccattaaacttcatcagaaaaagcttgtggtgaaggggggcaaaaaaaagaagcaagttctgaagttcactcttg

SEQ ID NO: 258416 - DNA, 83 bp, Homo sapiens
cagggtctcagcgcgggggacgactcaggttgattcttcaccacactgaaaccattaggaaaaatccttgtggttaacagcag

SEQ ID NO: 258417 - DNA, 50 bp, Homo sapiens
atggagtgagtctcagggtcacagcgaagctgccgcccatgctgtcgcca

SEQ ID NO: 258418 - DNA, 50 bp, Homo sapiens
cttggaatctcgagcgggaaaagctcaggtgcctaaaaggccagaggggc

SEQ ID NO: 258419 - DNA, 83 bp, Homo sapiens
tgaccatggctccctgcagtaccctttaacgcaaccatgaagttgaaggacacaaaatcaaggccaaagcagtcaagctgtgg

SEQ ID NO: 258420 - DNA, 100 bp, Homo sapiens
ttgatgtgactcgtcggcgaatgcaattaggaactgttctgccggaatttgaaaagtgcctttcttctcaccactaaatccaatacgagttcatattgat

SEQ ID NO: 258421 - DNA, 100 bp, Homo sapiens
agcagcactcttcaccctgcacagccttgttaggcttgatggtgtcaggctatgctgtgactggggctgtcctgggccaagacaggctgatcaactatgc

SEQ ID NO: 258422 - DNA, 96 bp, Homo sapiens
ggactgaaaattcttcaaaccggagtcgggtcgattcctatgaccctagcagagtggagagggtgtgatgaaatgccggtggagcttgcattccgt

SEQ ID NO: 258423 - DNA, 74 bp, Homo sapiens
cgccgcgtaggagcgtgcgttcgggccctcttctcccacctgttcgctctttcgacgtgtagcagcagctttgc

SEQ ID NO: 258424 - DNA, 98 bp, Homo sapiens
gggacaacagtgacgaagagaactgtctcctggtgaccgagcacccgcctccgggcatcttcaactaacactatggctatgcatcctccaacgtcagc

SEQ ID NO: 258425 - DNA, 83 bp, Homo sapiens
cgagcggcggcggtggcggcgaaggccgaggcgagaaccatggagtctggcagtaccgccgccagtgaggaggcacgcagcct

SEQ ID NO: 258426 - DNA, 101 bp, Homo sapiens
tccagccatcacagctgttcgacttcgatgatttactgaaatttgatgacctagatggaacacatgctctgatgcagtcctgcgttaactgcggccgggag

SEQ ID NO: 258427 - DNA, 73 bp, Homo sapiens
gaaaacactttccttctcaagtttttaacccagtatccactccagttgcacttcccacaccagctctttctcc

SEQ ID NO: 258428 - DNA, 74 bp, Homo sapiens
tcagcgccggtgcatgtcgatgttgtttttcaccattcagaacattgcctgaagcaggtccaccatgccgttag

SEQ ID NO: 258429 - DNA, 75 bp, Homo sapiens
gccacgtccaagcaaaccgggaaaggagaggatcccggagccgggctatgagggcctcgtggagggaggtgagaa

SEQ ID NO: 258430 - DNA, 100 bp, Homo sapiens
agctcatcgacttcggttcgggtgcgctgctcaaggacacggtctacaccgacttcgacggtgagagaacgccgagccgtcgccgcagcctccgccgccg

SEQ ID NO: 258431 - DNA, 80 bp, Homo sapiens
aggcaagagtaacagcagcgccgtcccgtccgacagccaggcccgggagaacagaaaaatatggctcaggagactaacca

SEQ ID NO: 258432 - DNA, 100 bp, Homo sapiens
catggagcaagtctgtcagcaccatctttctaacagtaacccattaacccaggagaaatcaagtgatcctcaaggctgatgacattgaacatgcgcatag

SEQ ID NO: 258433 - DNA, 100 bp, Homo sapiens
ccggcccccgacggctctgcagttaacgggaccagctctgcggagattgttaaaatgagtcttcggaagcaaacccctagtgacttcttaaagcaaatca

SEQ ID NO: 258434 - DNA, 100 bp, Homo sapiens
gtgtgagagccacgtgtgccgcgctctgggcacagccttggaaagtcaggaccgcgacggcagcagagcaggtgtccgcaatgttgccagtgtctgtctg

SEQ ID NO: 258435 - DNA, 100 bp, Homo sapiens
aaacagttgaaactgtcttgtttacagtttataggattgaatatggcagctttacttgaagcaaggctaaaggttggtcttcaggttgtggcagtcaagg

SEQ ID NO: 258436 - DNA, 82 bp, Homo sapiens
gttgatgagagcattcgaagtgacctcagcagggcatccagggccaggaaaattctctgtgttggactgctttagacaaaaa

SEQ ID NO: 258437 - DNA, 75 bp, Homo sapiens
gtcaaaactgatttcagaaatgcatagttttatccagatgacaatgaggggagcagcagtgatactgcccctctg

SEQ ID NO: 258438 - DNA, 90 bp, Homo sapiens
gccaccgcaggtcgaggacggtcggactcccgcggcgggaggagcctgttcccctgaggacttgtcagtcacatctgtaacctgctcact

SEQ ID NO: 258439 - DNA, 100 bp, Homo sapiens
gcttgctgccatgtgggaaagtccttggacgagttgtctgcttgcggagaggtgtctgcggctcagagaaaccctaaagcaggcagcagctcagaagtcc

SEQ ID NO: 258440 - DNA, 90 bp, Homo sapiens
ggaccccgctgctaactcggctacaacatttggcagagctgccacgtgccgtgggtacccagacattgagtggtgctggtctcctcaaga

SEQ ID NO: 258441 - DNA, 101 bp, Homo sapiens
cttttcctcgctggggtgtacggctcatgcacaattagttcgagaagttgatgtggagaaggtgtctgcttttgagaatccatatgtagatgcaataaaga

SEQ ID NO: 258442 - DNA, 82 bp, Homo sapiens
cgggacaccgcacagccgggaaatgtcaccttcaggccattcagaggaggaaagagaggggaatatgaagtcagccaagccc

SEQ ID NO: 258443 - DNA, 75 bp, Homo sapiens
ctgagcagagctctccgggttccccggctcgcggggcccggcgaagggcagatgccttcaattaagttgcagagt

SEQ ID NO: 258444 - DNA, 101 bp, Homo sapiens
cccccggcctgagaaagaaggaggagtgggggaggcgaacagtctcgttgctgcctctgtgtacgctgaggggggagagctaaagttgcagacaagatcca

SEQ ID NO: 258445 - DNA, 100 bp, Homo sapiens
cttggggacaagctgcgcatgatcgtcatgggacacagaaggttcatgacatcttctatcccttcccccaatcagagggagaggacgagctctgctttct

SEQ ID NO: 258446 - DNA, 74 bp, Homo sapiens
ccagtaccaggagagcctgaggatccaaggccctgccctgggagaagccctgccacacgtcgtgcccacgctga

SEQ ID NO: 258447 - DNA, 90 bp, Homo sapiens
agagacatgagatggtagccaacccctcagggctgatcccttatccaacatggttctaaccttcagtactaaagaagatgcagtttcctt

SEQ ID NO: 258448 - DNA, 97 bp, Homo sapiens
gtgggcttatggcaactggggagagggctctttggtgacgtgtgagttcctcctacagaatggtgctaatgtcaaccaaagagatgtccaagggcgg

SEQ ID NO: 258449 - DNA, 82 bp, Homo sapiens
agcaggaggaggtggcggcggcgggaagatatacagatcacttggattcagtcgagtttgctttgctccgtgggaactgcac

SEQ ID NO: 258450 - DNA, 100 bp, Homo sapiens
gccgctgccgctatggatgatcgagaggatctggtgtaccaggcgaagctggccgagcaggctgagcgatacgacgttggcaaacatgaattgactgggc

SEQ ID NO: 258451 - DNA, 100 bp, Homo sapiens
gtttatctcaaggcctgagtagccggtaacaaacgagggttcccgggattggaccgacgcagccatgtgcacgatctgattttctggagagatgtgaaga

SEQ ID NO: 258452 - DNA, 75 bp, Homo sapiens
gtcttccatcaatcatatctcacaggttgcacgttttcaaaaaatacctaatggtgaaaatgagacaatgattcc

SEQ ID NO: 258453 - DNA, 100 bp, Homo sapiens
ccttctgtatcctgtgaaagacctgtcttgagaaaaggccagtgttgtccctactgcataggtctctaattaacagaagatggcaaagcccagccacagc

SEQ ID NO: 258454 - DNA, 98 bp, Homo sapiens
ttctccatcgatgaggagctggtctatgaaaagaccctttagatcctacaagatcagtgattgtgatccgctccctggtagcagatggtgtagcagaa

SEQ ID NO: 258455 - DNA, 76 bp, Homo sapiens
tggtcttcatttgtgaatacataggttattcagcttctcaaggctggaaaagcgaaggaagtttcctacaatgcac

SEQ ID NO: 258456 - DNA, 96 bp, Homo sapiens
gtagtggttcagccctacaattcactcctgacactcaagaggctgacgcagaacgcagattgtgtggcggcttacagggagaacacagttggcctc

SEQ ID NO: 258457 - DNA, 100 bp, Homo sapiens
cagatggatccctctgtgcttctggaggcaaggatgccaggccaaggtggagcaagcggtggagacagagccggagcccgagctgcgccagcagaccgag

SEQ ID NO: 258458 - DNA, 95 bp, Homo sapiens
cgcggtccctgtattggtctcctgctcctagaggtcttattagtaggtaagaaacagctgctcctccacctccaccccagccccatggagcttgc

SEQ ID NO: 258459 - DNA, 100 bp, Homo sapiens
ccgggggttgctcggctcctgtgtgcagctaatggtcgtcgtcggcatcctcctggcctacctggcagtatgcaggaagcaggcggtcaatgcctctggg

SEQ ID NO: 258460 - DNA, 74 bp, Homo sapiens
ggcccaggcggccttcgagaaaatgcaggagaagcgggctgttcggctcttgaatcccagcgatgaaaccagga

SEQ ID NO: 258461 - DNA, 75 bp, Homo sapiens
tggaatatgaagagacacagtatggtagccacacccccagcataacatggcttgaagtaaaaggcagtatccaag

SEQ ID NO: 258462 - DNA, 75 bp, Homo sapiens
tgtactggctattggaaggaggagattctgaagataaggagatgtacattgaagatgtcagtttctacatgtggg

SEQ ID NO: 258463 - DNA, 75 bp, Homo sapiens
gagcctcccgagccctctctccatttcccacaattgtgctgaaaaagcttgtggtgaaggggggcaaaaaaaaga

SEQ ID NO: 258464 - DNA, 108 bp, Homo sapiens
gatccctcaagactggtccacggagtgtatgaccacaaacagccatcaaggaccaggagctgcattatctattctagacaaatttcttgaagaatcctccaaactgca

SEQ ID NO: 258465 - DNA, 95 bp, Homo sapiens
gttgttttccttctctccgtgcaacgctggcaagtctcaaagtcgccacagaattgaagatgttcctgctccttctacatctgcagataaagtgg

SEQ ID NO: 258466 - DNA, 73 bp, Homo sapiens
acggctggggccgtcccagttcgcaatgagaaagaaattgtatgctgctatgcatgaacctgatggagtggcc

SEQ ID NO: 258467 - DNA, 75 bp, Homo sapiens
tcacctgtgaagagctggctgaaaaagacgacatcaagtaccgtacctctatgctatggaaagggcaaatggaat

SEQ ID NO: 258468 - DNA, 100 bp, Homo sapiens
cgcttctaacccgagatgctgctgccggcgcccgcgctccgccgcgccctgctgtcccgcccctggaccggggccggatatcagttttagagaatgtggc

SEQ ID NO: 258469 - DNA, 101 bp, Homo sapiens
aatgccatccagagctgtgcctcccagcaccacagtccttctgcagtccctcgtccagccacccccagtatggaagctccaaaaggaaagataccagattg

SEQ ID NO: 258470 - DNA, 99 bp, Homo sapiens
acattctctccctccttctgcaaggctatcatttcacagctgattcctgggagcacatccatttcattggcaaggtgttacacataatattgcattact

SEQ ID NO: 258471 - DNA, 75 bp, Homo sapiens
gaatctgggcgtcgctctagaggtcttagaaaaataccccaatacacccatgagtcataaagaaattcttcaagt

SEQ ID NO: 258472 - DNA, 101 bp, Homo sapiens
tcatcaacatcaactacgtccctctgaagaacacaccacagccatcagcactggaatgcaaagaccagaacaaacagaaggaagccagcagccaagccggg

SEQ ID NO: 258473 - DNA, 70 bp, Homo sapiens
cgccgcgccgcgctccaaccgcctcctcctcctcagtaacgcgggctccaggaacactcggaggtgtctg

SEQ ID NO: 258474 - DNA, 100 bp, Homo sapiens
cgaaagatgtccaggtcgggcgcggcggctgagaaggcggactccagacagcgaccccagatgaagtgtaaactggagttgctggtgggcagccctgctt

SEQ ID NO: 258475 - DNA, 98 bp, Homo sapiens
ctgcggccgccgcggagatgtgacccggcagtacggcaaatatggcggagatgaacgggaccgggttcagaagaaaacgttcaccaagtgggtcaaca

SEQ ID NO: 258476 - DNA, 98 bp, Homo sapiens
ggaggcatggagcccgaggaggagccaagtgtggcagcagttcgtgaagtctgtgaggagctcgagagtcaggatgtctcagatttaacaacagttga

SEQ ID NO: 258477 - DNA, 50 bp, Homo sapiens
gccgcggatctcaccgccgctcagggtcttatatccagatggccaggctc

SEQ ID NO: 258478 - DNA, 74 bp, Homo sapiens
tgtttgtggatcgctgtgatcgtcacttgtgcctccggagccagcgtggtggccatagacaacaagatcgaaca

SEQ ID NO: 258479 - DNA, 131 bp, Homo sapiens
ccgctgctgggagatgggcctactcgcccgccaccctgcgctgccgccgctctgaggagttaaaggtgtcatggagaaactccagctgggcccagagattctgcagcgggaaaatccaaggcttatttatg

SEQ ID NO: 258480 - DNA, 98 bp, Homo sapiens
cattctttggcggtcctggcggcttcagctttgaaggcaagatcctcatcattggaggcagcatcgcaaacttcaccaacgtggctgccacgttcaag

SEQ ID NO: 258481 - DNA, 133 bp, Homo sapiens
ctgccgcgacacatccgcacccacacgggcgagaagccctacgagtgcaacatctgcaaggtccgcttcaccaggtgagaagccctaccactgcaactgggacggctgcggctggaagtttgcgcgctcagac

SEQ ID NO: 258482 - DNA, 100 bp, Homo sapiens
gtgcaatcgatgagccccacgctgggaaaaaccaccttcgtgatcatggtatcttccctgccagtggtgatcatgtgtgcgagcagtgacaccatccgga

SEQ ID NO: 258483 - DNA, 50 bp, Homo sapiens
ggaaccctggtcaccgtctcctcaggctccttcctcagagaagcttcctg

SEQ ID NO: 258484 - DNA, 75 bp, Homo sapiens
cgccaacagtacctcattgctctttggcgactcttattgcttcatattctccaattcagcctcattctctaataa

SEQ ID NO: 258485 - DNA, 97 bp, Homo sapiens
aggcctggtcctcagagctcacgtgtcatggagaaactccagctgggcccagagattctgcagcgggaaaatccaaggcttatttatgccaggctga

SEQ ID NO: 258486 - DNA, 96 bp, Homo sapiens
acttacactgttcttgtagatggctgctctattgcaggacaaacaacgagtaaatgtatcgagtggatggggggagtaggctacaccaaagattac

SEQ ID NO: 258487 - DNA, 100 bp, Homo sapiens
gaatgaatttggaatcttcccttgaagaggaagttcagaaaaaagtgtcacgttttaatctgcagatggacataagtggattaattcctggtctagtgtc

SEQ ID NO: 258488 - DNA, 75 bp, Homo sapiens
gcctttgtgaagatgaagaatcttaaagagctggtccttttgtacaagtggatgaactgatggaaattttccgaa

SEQ ID NO: 258489 - DNA, 98 bp, Homo sapiens
ggaagttactgccgcgccaccgagtccggaccggagactttggggcctaactagatattcctatcattccggatctggaggaagtacaggaagaagac

SEQ ID NO: 258490 - DNA, 50 bp, Homo sapiens
gtaatggcccggaaccgtgaagacaaatcttcctattttcaagctgaaag

SEQ ID NO: 258491 - DNA, 83 bp, Homo sapiens
cccgactgcagctccgtggatttcagtgtcttttctgcctgctcagttccagttgtcacggggatatgagactttctactcgg

SEQ ID NO: 258492 - DNA, 88 bp, Homo sapiens
cagaacacaggagtgtggctagtcaagatttatcagcaagactgttgaacgcataactgcccaagatgcctgtccctccccctccagc

SEQ ID NO: 258493 - DNA, 122 bp, Homo sapiens
aaaacttcaaggggtctatttgaagaaatgaagaaaacagcaaacaacaatgctgtacaggcagcttgaaatccactctccagatgctaagcacacggtgatcctaaggagcaaggactcag

SEQ ID NO: 258494 - DNA, 83 bp, Homo sapiens
cgcttgcctacccgccggcccgcgggtctacttcctcaaagtgatcagggccaaagcggtcagtgagaaggaagtggactctg

SEQ ID NO: 258495 - DNA, 74 bp, Homo sapiens
gggatgtgagcggcgccccgcggcatggcagcctcagatggtcatcatgggccagtgctactacaacgagacca

SEQ ID NO: 258496 - DNA, 75 bp, Homo sapiens
gtccaaggatgatgggcactgtgagaagaggggatgtcctggcagcatggagtggaatccgtcctcttgttacag

SEQ ID NO: 258497 - DNA, 75 bp, Homo sapiens
actgttccaaaaacagtggataattttgtggccttagctacaggagaggtttgctgtaatggcacaagagtattt

SEQ ID NO: 258498 - DNA, 100 bp, Homo sapiens
gccgatcagcggaagaccaaagaggatgagaaggacgacaagcccatccgaggtggatatcatccagtgaaaattggagacctcttcaatggccggtatc

SEQ ID NO: 258499 - DNA, 74 bp, Homo sapiens
cattcaagctgataggctgcgctaccggaatgtcatccagcgagtgattagatattaaggctaagacatactgc

SEQ ID NO: 258500 - DNA, 75 bp, Homo sapiens
cttcaaagacgttctcaaggagaaggcagacctgggtacatccaagcagaagtccagttccctccaggtagcaga

SEQ ID NO: 258501 - DNA, 83 bp, Homo sapiens
cccacctgagcccccgctgagcagcccagccagtcagcacaaaggaggacgtgatgagatccgaaatggcccataccgacagc

SEQ ID NO: 258502 - DNA, 76 bp, Homo sapiens
cccggctctgggctacggactatgggcgaatagctctgaccacccggcgaaggtccagcatcctttgaagcatgag

SEQ ID NO: 258503 - DNA, 82 bp, Homo sapiens
caaggagctaaagcagcgtgcgttcagccctgggctccagaaggtcctgagcctcggccacatcagcaccgactacccgctg

SEQ ID NO: 258504 - DNA, 75 bp, Homo sapiens
taaaattgcaactgaagcaaactcagacaggatctgtggttgtggttccggagaatctggttgtgctgtgtgtgg

SEQ ID NO: 258505 - DNA, 100 bp, Homo sapiens
cgcagggtcgcgatgctgcccggtttggcactgctcctgctggccgcctggacggctcgggcgctggagaatgttggctcaattaagaaacatcagggag

SEQ ID NO: 258506 - DNA, 100 bp, Homo sapiens
gcaggagtcggcggctcagttgtccatgaccctgaaggtccaggagtacccgaccctcaaggagtggagtcaacatatcaatggagcaagtcacagtcgt

SEQ ID NO: 258507 - DNA, 50 bp, Homo sapiens
aaaaatagtgatagctttgataaagctacattcatgggagcagccaggct

SEQ ID NO: 258508 - DNA, 100 bp, Homo sapiens
caccagcgtgccaaaagagcagtctcacatgaagaccaatttttacgtctagatttccatgcccatggaagtggcaccactgcaagtggaggtgagaacg

SEQ ID NO: 258509 - DNA, 100 bp, Homo sapiens
agaagataacaatcaagatgaatatgaccctatggaagcagaagaagctgaggatgaagaagatgctgctgaggagcttgatatggaaaatgaattttta

SEQ ID NO: 258510 - DNA, 100 bp, Homo sapiens
gggagcgcagcttccgggactatgtgctgtgaaaggtgtagcagtcactcggcctacacccacagcatcgaccttgtgaacccagcgacctgactgcctt

SEQ ID NO: 258511 - DNA, 88 bp, Homo sapiens
attatagtctctcgccacagcggcctcggcctccccttggattcagacgccgattcgcccagcatgcaatgatgctacctgttctgac

SEQ ID NO: 258512 - DNA, 100 bp, Homo sapiens
gaagctggtctctgaggtctggcataagaaacgaggttgacggatatattcagacgttacgacacggatcaggacggctggattcaggtgtcgtacgaac

SEQ ID NO: 258513 - DNA, 51 bp, Homo sapiens
ttcacaactccgtcttacagaggaaactaaatatattttgccaactttgga

SEQ ID NO: 258514 - DNA, 76 bp, Homo sapiens
gtggctcccttggtgttccccttttactgccaggacactgagatttggagagctccagaaacatgacaaggaggac

SEQ ID NO: 258515 - DNA, 75 bp, Homo sapiens
cgggccaactgttgatctgggaaatgtgcctaatggcagtgccctgacagatgtgactgagttttcaaagaaaac

SEQ ID NO: 258516 - DNA, 102 bp, Homo sapiens
acaagatcaccatcatgcccaagcatgaggacctcaagggacgtccagatcggtgacatcgtcacagtgggcgagtgccggcctctgagcaagacagtgcgc

SEQ ID NO: 258517 - DNA, 90 bp, Homo sapiens
ctggaatgtcacccagacaagcatcctgaaaaccccaaagctggccgtttgagcaaggaagacattgaacgtatggtccaggaagctgag

SEQ ID NO: 258518 - DNA, 99 bp, Homo sapiens
cgcgctactctctctttctggcctggaggctatccagcacggcgggcgctaacaccaccgacaaggagctagaggttctctccttgcacaacgtcacct

SEQ ID NO: 258519 - DNA, 100 bp, Homo sapiens
tctagtaacccgcgaaatgatgggatagcgttgcaaatccttaaaagagtcttaacggattggtccaaaggaagattttttccattgtttgaaatgtaac

SEQ ID NO: 258520 - DNA, 82 bp, Homo sapiens
agtgttcctgtggtctctgcacctcctttctgatattagaaatggctactccccagtcaattttcatctttgcaatctgcat

SEQ ID NO: 258521 - DNA, 83 bp, Homo sapiens
gccggcccgcgggtctacttcctcaaagatcgcaccccctccctccctggcggagcccctgaaggagctgttcaggcagcagg

SEQ ID NO: 258522 - DNA, 75 bp, Homo sapiens
cggcgctcttcctcccggagtatggcaggagtagggctgattggagccattgtacagtgtcgggaacataccagg

SEQ ID NO: 258523 - DNA, 82 bp, Homo sapiens
gagcgcaaggacagcgcgaggtccgcgcagcccagcgcagccatcaaattgtggctactaatttgccccctgaagatcaaga

SEQ ID NO: 258524 - DNA, 76 bp, Homo sapiens
gacgccgacatcgtgtgccgctgccagctgttctgtaggaagttatacaatcaattttcgggtaatgagttgtgat

SEQ ID NO: 258525 - DNA, 98 bp, Homo sapiens
aaaaaaatatattaagatcccatttcaagtgtgtcaggaagctgtctgggaagccttcaggactttttgggatcgacttcctgggcgtgaggaatatc

SEQ ID NO: 258526 - DNA, 98 bp, Homo sapiens
ccagtcggtgctccggggaggtcacctgacgaggagatgccaacgtccggcggtacctccagctgacacagtcagaactcagcagctaccatagaaaa

SEQ ID NO: 258527 - DNA, 74 bp, Homo sapiens
atgatttcacctgtgaaaaaatagggtctggcttcttttctgaagtgttcaagctcgaatatgagactcaaatt

SEQ ID NO: 258528 - DNA, 100 bp, Homo sapiens
gctgggaaagaagttatgcttgttggaattggtgacaaaatcagaggcatactttatagaagaagcctgagaagatgatgcacagatagagaggcaccag

SEQ ID NO: 258529 - DNA, 83 bp, Homo sapiens
cgaacaggcgctggcgtccggcctgaaaaaggttgaaagctgctgaagcagacagcaaactgaaacaggtctacattcccacc

SEQ ID NO: 258530 - DNA, 50 bp, Homo sapiens
gggacccgcccgcccgcgggaggcggtcaagaagcagatcgagacggcgg

SEQ ID NO: 258531 - DNA, 88 bp, Homo sapiens
tgagcccgggacggcagcggcctggggacccagcaagttttcggctttgtgagaaaccttaccatcaaacacgatggccagcaacgtt

SEQ ID NO: 258532 - DNA, 100 bp, Homo sapiens
ctggaagaaaatggtttggctgtgataggagtatttttaaaggagctgtgactgatgagaattaaaggccatggatgaagatgggcttgaattacaacaa

SEQ ID NO: 258533 - DNA, 51 bp, Homo sapiens
agtgctcatggggatgaagaaccagctcgattttggggtaagtgcgttcct

SEQ ID NO: 258534 - DNA, 100 bp, Homo sapiens
catgttcttggtgaagtcggccagcctgagcaagcggaggacctacgccggcctggtggccctcatggagcacagcaactgctcgtcggagcccggcttc

SEQ ID NO: 258535 - DNA, 118 bp, Homo sapiens
ggcgccacgccgcctcctctgggttcggcctccgcgcggtgcagcgcagtctcaggccgcgggacaagagtgatcagcagctggactgtgccttggacctaatgaggcgcctgcctcc

SEQ ID NO: 258536 - DNA, 74 bp, Homo sapiens
aaagtttcatctgtggatggagtattgggaggtggggaagacagggctccagctaccacaggacgggctctggg

SEQ ID NO: 258537 - DNA, 101 bp, Homo sapiens
atgctcgctcgtctctgagtgccagtcacccaatggtgggcaagtggctggagaaacaagaacaggaagatgagaatgtgcctactgctcctgatcctcca

SEQ ID NO: 258538 - DNA, 127 bp, Homo sapiens
gttaagtctctcatcaaaacaccagagcgactttcattagaaggagagcgacagcccaagtcaccagtgtctgcactgcttggggaggaagatgaagaggcactgcattatttgaccagagttgaag

SEQ ID NO: 258539 - DNA, 75 bp, Homo sapiens
caaggatggagtgaaatacagggttcaaggagtagttccagttccagagaggccacctgaacctcgagccatgga

SEQ ID NO: 258540 - DNA, 75 bp, Homo sapiens
ctcagttggaagcagccgatccagcctgcggagcctgtggggcaggatgacactcctgtccaggacactaaaatg

SEQ ID NO: 258541 - DNA, 74 bp, Homo sapiens
gcgtccctgagccaggccagcgccgacctggagttccagaaagctgagtctgatctggattacattcaatacag

SEQ ID NO: 258542 - DNA, 90 bp, Homo sapiens
cgcagtcggcaaggagagacgtcgctgaggggcttgcctgaagcgagggaccagagtgaactccgagcaggaacacttcctcattgtccc

SEQ ID NO: 258543 - DNA, 90 bp, Homo sapiens
ggaatttattatatcctacaactgggttatatggtgctggagaatctggtaaaagcaccattgtgaagcagatgaggatcctgcatgtta

SEQ ID NO: 258544 - DNA, 101 bp, Homo sapiens
ccaagatggcggcggcggcggcagcgacagcagcagcagcagccagtattcgggaaaggcagacaggaaaaagctcctcaatttctgaagagaaaggtgac

SEQ ID NO: 258545 - DNA, 100 bp, Homo sapiens
aaggaaactcacttgactaatcttcgggcagagagaaggaaacacttagaggaagttctggagatgaaaagcggatgcggggtccagggaaggaccccac

SEQ ID NO: 258546 - DNA, 83 bp, Homo sapiens
cgcctggctagccggcgagttgagtggcgaggcgtgatggtgggcatgggtcagaaggattcctatgtgggcgacgaggccca

SEQ ID NO: 258547 - DNA, 50 bp, Homo sapiens
gtttgactaccctaaggacctcacagtctcgctctgtagccaggctggag

SEQ ID NO: 258548 - DNA, 100 bp, Homo sapiens
aatggatgactgtggaatcctcatgaaagtcaagagcaatctgaatccaaatgcaaaggagtttgttcctggggtgaagtacggaaatatttgagtagac

SEQ ID NO: 258549 - DNA, 99 bp, Homo sapiens
agatgcgcctcttgtctgcgtgcgcacagacggcgagggcgaggatccggagtgtctgggagaaggtgtcatggagaaactccagctgggcccagagat

SEQ ID NO: 258550 - DNA, 75 bp, Homo sapiens
ggccggcgatatgatgatcctgaagtacagaaagacatgacgactgggtttggattcagaagaggattattatac

SEQ ID NO: 258551 - DNA, 74 bp, Homo sapiens
acaaagaacagctggctagactggaggagaggacctcccagtgccaagtgtataagcgtgtccagaattggtgg

SEQ ID NO: 258552 - DNA, 82 bp, Homo sapiens
ctgcagaacccccagaccatcatgtgaggcggaaccaaccctcctggccatgggaggggccgtggtggacgagggccccaca

SEQ ID NO: 258553 - DNA, 97 bp, Homo sapiens
cttctcagcgttcccctctggcgcctttgctgctcctctctctgcacggtactccaaagattcaggtttactcacgtcatccagcagagaatggaaa

SEQ ID NO: 258554 - DNA, 83 bp, Homo sapiens
cggagccgccaagcggctacgttcttctcggcccgccgagatggcgctcgaccccgcagacaatgcagatcttcgtgaagact

SEQ ID NO: 258555 - DNA, 100 bp, Homo sapiens
cccgcctcgcccgccgtgagcgcccggagcggtccgcgagccaccgaggcccaggaggatcccttttcccccagaaattactcaatgctgaaacctctca

SEQ ID NO: 258556 - DNA, 76 bp, Homo sapiens
gaagaagaagacttggaaatggagtccgtgctcctgtgacgtttgatgacatcactgtgtacttactccaggagga

SEQ ID NO: 258557 - DNA, 82 bp, Homo sapiens
agaacatcggcaatgggattatttcctccccactgactggaaagtttttggctttcacccccaaccagtgaccaaagacttg

SEQ ID NO: 258558 - DNA, 74 bp, Homo sapiens
catcctaaccgtcactgagaacatctttagctccatgggtgatgctggttcatggatcaacatccggagatgga

SEQ ID NO: 258559 - DNA, 100 bp, Homo sapiens
tgcctgggtccatgccactgtctactcccaggttggagagaatggggctgggaagtctaccatgctgaagctgcttttgggggacctggcacctgttcgg

SEQ ID NO: 258560 - DNA, 90 bp, Homo sapiens
gttgggtgactgaaagcactttatcattatgcttcctcaagatcgaggggcttcaggacagtgaacatgctggagcgcaatggcgcgatc

SEQ ID NO: 258561 - DNA, 100 bp, Homo sapiens
caagagcaagtgtcagaactgcttcaagccccgcgagtcgcatctgctcaacgacgaggacctgacgcagggacctgatgcccagaaccctggacgggca

SEQ ID NO: 258562 - DNA, 75 bp, Homo sapiens
tgtgactcatcagagtgtgggggttgtgaaaggccgttaattaaggaaaagttgagccagggcgtgaccctcgtc

SEQ ID NO: 258563 - DNA, 87 bp, Homo sapiens
tatgagaacgactgcatctttgacaagtttgagtgttgctggaacggttcggataggattgacttctaaggactcttggtacatgag

SEQ ID NO: 258564 - DNA, 96 bp, Homo sapiens
ctggatgtcatttggaaaaacactagagacagacggctggcagatacttgccagaactaatacagctgatgaaatacctgaccttttctgctccag

SEQ ID NO: 258565 - DNA, 100 bp, Homo sapiens
ccaggacgaaggccctactgggcaaggtctatgctccatcagcaagcactgccgactacaatagggactcgccaggctatccttcctccaaaccagcaac

SEQ ID NO: 258566 - DNA, 100 bp, Homo sapiens
ccttatgcaaacggtgaccctcatgttggacatgctttaaataaggatatttggccttgacattaaaggcagagactgtggcaatgaggcagctaagtgg

SEQ ID NO: 258567 - DNA, 75 bp, Homo sapiens
ccccgcttctatgtcctgtacacaatcttcatgaaagactcgctctccgtctccagcaatgacgccagtccaccc

SEQ ID NO: 258568 - DNA, 52 bp, Homo sapiens
caaatcacaagccctccccagaccaggatcaactcactatcctgaaggtcca

SEQ ID NO: 258569 - DNA, 82 bp, Homo sapiens
ccggaatcccgcgcgctgcccacgattcgcttctgagacagaatgttgctgcgggatgtaaaagctcttaccctccactatg

SEQ ID NO: 258570 - DNA, 75 bp, Homo sapiens
aataatttctatatacttacatctaaagagctagggagtgcctcctctccagtcaactgccagtgggacttctat

SEQ ID NO: 258571 - DNA, 96 bp, Homo sapiens
ctacattctgggtgacacgctgggggtcggcaccttcggcaaagtgaagggtaaaaaagctccagttttatttaataaagaaatgattgagtcaat

SEQ ID NO: 258572 - DNA, 90 bp, Homo sapiens
gttaaggattccaagtaactcttatttgagtattgggaaagggtcgttgtggtgcatagacccagagtatagacaaaatctaattcaggc

SEQ ID NO: 258573 - DNA, 85 bp, Homo sapiens
gtttgtggatcgctgtgatcgtcacttggcagcctgcttctgcaaagtggtacgatcgaagggactatgtcttcattgaattttg

SEQ ID NO: 258574 - DNA, 82 bp, Homo sapiens
atcgtgaaggacgccagcatcatacaccggctgttcgaggccttgactgtaggatccatgctgcagaatggtgtctctgatt

SEQ ID NO: 258575 - DNA, 74 bp, Homo sapiens
agctgtggccctcagaatttaaacttaaggaaagagtgggaaagtgagggtaaattcgaaccaccattatttca

SEQ ID NO: 258576 - DNA, 101 bp, Homo sapiens
ggaggagccgagccgcgggcacagttttgacagtgtttcctgccttgctgactcttcttccctctcggacatcacctttgatggcaatcccatagctcaag

SEQ ID NO: 258577 - DNA, 75 bp, Homo sapiens
catatgcctgtggctctggcataccagagaatttcgctaaggagtttgtgatcagtgatcggaaggagctggagg

SEQ ID NO: 258578 - DNA, 108 bp, Homo sapiens
cctgctttgaggtggcagagttaacactactcttcgttataagctctcgtctggggcaactcagaagaacgaacgtcaaggtcgtgggaaataaaaggcagttctaca

SEQ ID NO: 258579 - DNA, 100 bp, Homo sapiens
cgacgaccggatcctgaggaggcagctgcggtggcagctgctgagttctcggtgaaggtattgttgcagcatctggcagtgagactgaggatgaggacag

SEQ ID NO: 258580 - DNA, 100 bp, Homo sapiens
aagatgacgtgtatggaaactcatcaggacggaagcacaggggccactcagagtcgcccgagaacaaaccagtccagctacgggggcccagccagccagc

SEQ ID NO: 258581 - DNA, 133 bp, Homo sapiens
agcgctcgaggtcgtatgaacgcacaggccgtcgctatgagcgggaccaccctgggcacagcaggcatcggaggtggctattatcatggaaaactaatttttcccagagaatttcctttcaaacctcccagta

SEQ ID NO: 258582 - DNA, 100 bp, Homo sapiens
ggtcatggtcacccaggagagtgacagcagctttctggtcaaggtgaaaggtgtagcagtcactcggcctacacccacagcatcgaccttgtgaacccag

SEQ ID NO: 258583 - DNA, 96 bp, Homo sapiens
tgtgatgagaatgaggatgatttcatccaagtcactaaaaatggatcagacatatctgaagagatggattaagaatgctttggattaaggattgtg

SEQ ID NO: 258584 - DNA, 83 bp, Homo sapiens
cgagaagccggtacaggtgccctgcggacacgtgttgtgaccgagattcccgacgagagagactgaggggaagagaggaagga

SEQ ID NO: 258585 - DNA, 98 bp, Homo sapiens
tcgaggtgccctgctctgaggactacgacagtcaccgcaggttcgaagacctgggatgacgaactggagaagtctgctgcagcgtgggccagtcagtg

SEQ ID NO: 258586 - DNA, 90 bp, Homo sapiens
tttatggacatcgccatgctggtggagaatcagcttcaaaagcagtggactgtcttttggattcaaagtgggcaaaggccaagaaaggag

SEQ ID NO: 258587 - DNA, 78 bp, Homo sapiens
gaaagtgatgtccctctgaaaactgaggaatttgaagtgaccaaaacagcaggagttgtcacagcagaaatgtttaga

SEQ ID NO: 258588 - DNA, 100 bp, Homo sapiens
ggccagacctggacccgtgaagtcttcagctcctgcagctctgaagtggttctgggtctgggagagtcgggggtgttcctggggtgttccgtgtttttcg

SEQ ID NO: 258589 - DNA, 75 bp, Homo sapiens
gtttctcattctcatatttcaccaataaagattctgaaaaagagttccacgtcctcccttatcgagtctttgttc

SEQ ID NO: 258590 - DNA, 83 bp, Homo sapiens
ctgagctgttgagttagagccaacatgagtgagagattctacattgcattgactgggattccagtagcaattttcataactct

SEQ ID NO: 258591 - DNA, 132 bp, Homo sapiens
ctgcgagcgagccgcgaaccgagcgggcggcgggcgcgcgcaccatgggggagaaacccgggaccaggctaccggctctctgaccagttccacgacatcctcattcgaaagtttgacaggcagggacggggg

SEQ ID NO: 258592 - DNA, 98 bp, Homo sapiens
cttcatcagccgtctgctggccatcgtggcagacctctacgagcaggagcagtacaggcccgatgagagaaagggaaagttaaggatgctggagcaga

SEQ ID NO: 258593 - DNA, 50 bp, Homo sapiens
ctgcaagtgagaacatatttaacagctccccccacccgctgcctgcggtt

SEQ ID NO: 258594 - DNA, 100 bp, Homo sapiens
cacagtgatggccaccggttggcgagctttgcacagaccctacaggaaaccctgaaaggctcttgcagccaatgccggaacaggatttgctgttgctgag

SEQ ID NO: 258595 - DNA, 89 bp, Homo sapiens
agatgacaaaacttcaagccaaacatcaagcagaatgtgatttgcttgaagatatgaggctgcattaggaattatgcagatggttgaag

SEQ ID NO: 258596 - DNA, 95 bp, Homo sapiens
aacgacatcatccccaatgtcctggagtggtgctcatcggggactcaggcgtgggcaagagcaacctgctgtcgcgcttcacccgcaacgagttc

SEQ ID NO: 258597 - DNA, 100 bp, Homo sapiens
gtgtcccccgccaactctgacctggccaattctgacgccctcaaggtcgccaaggaggtggacccccaggaaaatggacccaagtggggtcaaagtgctg

SEQ ID NO: 258598 - DNA, 83 bp, Homo sapiens
gtccgctgtcctctgctgccagtcccctgccccgggcaaagcccatctggtccgccgagcagtgactcgatggaaacagaaga

SEQ ID NO: 258599 - DNA, 95 bp, Homo sapiens
gtttcaatattggaagcgctttgatttacagcagctgcagtgccggatggagtgctgtgatgtgccagccgagacactctacgacgtcctacacg

SEQ ID NO: 258600 - DNA, 100 bp, Homo sapiens
ctctgagagtcctgaattcttactgggttggtgaagatcttcggcaagatatgttagctttacagatgataaagattatggataagatctggcttaaaga

SEQ ID NO: 258601 - DNA, 75 bp, Homo sapiens
taatgataaaatttcatggagaagaaggccttgactacggaggggttgccagctttaccaacagggacgcttatg

SEQ ID NO: 258602 - DNA, 50 bp, Homo sapiens
acgtcatggaggatgaacgacagcatgttggcagataaattgaacatgac

SEQ ID NO: 258603 - DNA, 75 bp, Homo sapiens
gcctcctacgtttacctgtccatgcacccaccctggagccatggtccacgccttcctcattcacaccttgagggc

SEQ ID NO: 258604 - DNA, 82 bp, Homo sapiens
cacgttcttccaagaaaccaacattcccaacagccaccaccaccaccagatgggcagcgaggtcacaggccccacctttgct

SEQ ID NO: 258605 - DNA, 75 bp, Homo sapiens
gcgaggccggacgcacctctgtttgggggtcctcaggtgaagcacttgaggaagaactggattccatggcaaaac

SEQ ID NO: 258606 - DNA, 75 bp, Homo sapiens
gctaagtacatgctggattgtagaacttctctctctggaagtttggttggcttagtggattatccagatgatgaa

SEQ ID NO: 258607 - DNA, 51 bp, Homo sapiens
atcacttctgcagaatccagtgggcatttaaacttccctcttagaactgct

SEQ ID NO: 258608 - DNA, 100 bp, Homo sapiens
tacttgcatggccatttgctgcaatttcaacagtatgctgtcctgaaaagctgacccacccaataactggttggaggagctccagggcccacaacggcag

SEQ ID NO: 258609 - DNA, 90 bp, Homo sapiens
ctgcccctcctctatcttcttccagagccccgagaccctggcttcctaccctgccccccaggaggtgagaaagatcagtctaaagaaaag

SEQ ID NO: 258610 - DNA, 87 bp, Homo sapiens
ggaccgggatcgtgaccgtggaggatggcagaagattttcaagtcccggctggtggagttgttagtgtcctatggcaacaccttctt

SEQ ID NO: 258611 - DNA, 100 bp, Homo sapiens
ggcagcacggcatcccagcctcagggctgcccggacggtgttggttggggtgctgcagcgcagtaaatgtaatttgaagaaggcagaaggaacccatggc

SEQ ID NO: 258612 - DNA, 83 bp, Homo sapiens
ggaggctacacgtgcgtctgccgcccgcgcttcaccgggggatatgagactttctactcggaatatcctgagtgttgcgtgga

SEQ ID NO: 258613 - DNA, 100 bp, Homo sapiens
cttgtacagcgccggtcaacatcgcggtcatcaagtactaggctgtggccaggccagctgggctcggggagcgccagcctgagaggagcgcgtgagcgtc

SEQ ID NO: 258614 - DNA, 83 bp, Homo sapiens
ggctcgcctcgactccaaatggttgaaaacagatatacagacaagagtgagaatggtgaggcatatcagagaaagaaggcggc

SEQ ID NO: 258615 - DNA, 90 bp, Homo sapiens
ctctgccatattgtgtcttccccggccggtccctcgcctcccggccgagctgacgggagcttctgataattggaggtgttgcagcccggg

SEQ ID NO: 258616 - DNA, 82 bp, Homo sapiens
cccgagtatgcttcgtttttcgccgtcatgggcgcctcggccgccatggtcttcagcgatcaggatcctcatgaccagccaa

SEQ ID NO: 258617 - DNA, 90 bp, Homo sapiens
cccgagaagaagttgaggcgctattttttcccctacatcctgctgctctttgcgatcctcctgtacctgcccccgctgttctggcgtttc

SEQ ID NO: 258618 - DNA, 80 bp, Homo sapiens
atcgggctgaagcgactgagtccgcgatggagatagcagactccttgaaagcagggtccttgtttagtgcatctttgccc

SEQ ID NO: 258619 - DNA, 51 bp, Homo sapiens
aagccacacagtgtccagatacgaggggatttcttcagtgccaaccccttc

SEQ ID NO: 258620 - DNA, 51 bp, Homo sapiens
ggccagccgccccatccgggagggaattgacataggggatagcttaactat

SEQ ID NO: 258621 - DNA, 75 bp, Homo sapiens
ccgacccgggctcccacctgctcctccagcgcaccagtttcctgttttccagcacccaacataacttgtaaggat

SEQ ID NO: 258622 - DNA, 100 bp, Homo sapiens
tgtcaccctgagagtgaccggcgaggtgcacattggaggcgtgatgcttaagctggtggagaaactcggtcctacctcgagcataagacctcaatgaact

SEQ ID NO: 258623 - DNA, 50 bp, Homo sapiens
aggtcgccctcaaggccatgatcaaaacattgaagcactgaagtcattct

SEQ ID NO: 258624 - DNA, 60 bp, Homo sapiens
gcagttcatcacatcattcatgattttcaggctatgtccaaactgggtcttcggcaggtt

SEQ ID NO: 258625 - DNA, 100 bp, Homo sapiens
cggggctctcctcgtctatgatatcaccagcactgccagtgaaagatgtagaagataaacctgaacaacaaaccagaacaagagagactgacaaatcacc

SEQ ID NO: 258626 - DNA, 101 bp, Homo sapiens
acagcagtatgatgaactggaggctgagtacgacagcctcaaacaggagctggagcagctcaaagagttacggtagcagttctcagagcagcagctatggg

SEQ ID NO: 258627 - DNA, 100 bp, Homo sapiens
gtgcgagtcttcggagcgaccccggcaggtgtatgcaacagcgttattgcaacaggctaacgaaaacagacaaaattcaactggaaaagcatgttttggc

SEQ ID NO: 258628 - DNA, 49 bp, Homo sapiens
actcgcctcagctgagcctggctgccactgcagagccccgccatggaag

SEQ ID NO: 258629 - DNA, 152 bp, Homo sapiens
agaattattgatgacagtgaaattacaaaagaagatgatgctttgtggcctccccctgatagggttggccgacaggccttcattcaatctcagatttatgaaaataattactggattggattatcatatgatgaaagggaaagtaagtggaa

SEQ ID NO: 258630 - DNA, 100 bp, Homo sapiens
ccctgcactctcatcgctctcggcctcggcctcggcctccgacacgaagcgagatgagcgcagtgtgaagagcacagctgtgcgggtggtagactttggc

SEQ ID NO: 258631 - DNA, 98 bp, Homo sapiens
ggacacgggctgcaacctgcagcacatcagcgaccgggagaacatagacgaaagcgtggatacccatcaacgaagttttgatattggaattcagattg

SEQ ID NO: 258632 - DNA, 100 bp, Homo sapiens
ctccgccaacgcggtcatctcgcagaacgccatcaaccagctacaggtgatttggcttctgcacagttaggaggagcaccaaaccgatgggaggttttgt

SEQ ID NO: 258633 - DNA, 100 bp, Homo sapiens
agctacagctccgcgcccgccagttgcttgatcaggtggaacagattcagaaggagcaggattaccaaagggtataaagatggctgtgaccacatcgggg

SEQ ID NO: 258634 - DNA, 75 bp, Homo sapiens
cgcccgcagcctggacgacatcgacctgtccgccctgcggaacctttcagctcttggggcattggtgagtctcag

SEQ ID NO: 258635 - DNA, 100 bp, Homo sapiens
tcctctgtggcgctcagcaactgcgatgggctgtacaagcgtgggggacctatcattgccgtgcaggtggagaatgaatatggttcctataataaagacc

SEQ ID NO: 258636 - DNA, 75 bp, Homo sapiens
gtgactgtgagcacggcatggccagcgtcatctccaggaacttgctactaccagcaccatgccctaccaatatcc

SEQ ID NO: 258637 - DNA, 98 bp, Homo sapiens
aaagttgactgaaaatggggcggaagaaaatacaaatcacacgcataatggatgaaaggaaccgacagttttcaatggttccagcaggtcaacacggg

SEQ ID NO: 258638 - DNA, 82 bp, Homo sapiens
accctggtcaccgtctcctcaggaattagtaacctttgaggacgtgtccatggacttctcccaggaggagtgggagttgctg

SEQ ID NO: 258639 - DNA, 75 bp, Homo sapiens
tggagtaaaagctgatgatcggaatgattacaggatttgtacacacagatatgacgaaagacttgaaagaagaac

SEQ ID NO: 258640 - DNA, 51 bp, Homo sapiens
gccgcgggcgcgatgcggcactgcaggttttggagatcatattcattggag

SEQ ID NO: 258641 - DNA, 50 bp, Homo sapiens
gccctacgccgtggacttccagcgcagggtatgagtattatagaacaatt

SEQ ID NO: 258642 - DNA, 101 bp, Homo sapiens
aagaggcgtttctataagaattggtgttcgaaatccgcaccactgatgacctcactgaggcctggctccaagaaaagttgtctttctttcgttgatctctg

SEQ ID NO: 258643 - DNA, 83 bp, Homo sapiens
atccagtccagcgtgcgacgacttactggcttcatgcattactctactgactggcagagacaggagaggtagatgtccacgcc

SEQ ID NO: 258644 - DNA, 99 bp, Homo sapiens
atcctttgatgggttgggcatcaacatttctacctggacaaggactggtactatacccacagataggagacaaattggatattatttgccccaaagtgg

SEQ ID NO: 258645 - DNA, 75 bp, Homo sapiens
cttccaggttacatacagcttacatcttgcatcctcaagcggagtcagtggatcggtggggaaaatgctgcttac

SEQ ID NO: 258646 - DNA, 100 bp, Homo sapiens
aagactggggtgatgctgcctcgagttgtcctgactcctctgaaggtaaacggggcccacgtggaatctgcatcagcttacatcacgagaaaaagcagcc

SEQ ID NO: 258647 - DNA, 80 bp, Homo sapiens
gccagagcaagagctggatctcgtctttctagcaatggtggaacaaagcggcaaaagatatcccatcaaaattatatagc

SEQ ID NO: 258648 - DNA, 96 bp, Homo sapiens
gttgaaacgctgcctggaaaggaagtaccaggacttgcacaggcttgagtttgaagaaacagaagaacctgattttactgcattatgtcagaaatt

SEQ ID NO: 258649 - DNA, 75 bp, Homo sapiens
aaaatgtcttgaaatcacatcaggctcatcaaagacatttatatacgtttgatgcaaatgatttgtatcaggggc

SEQ ID NO: 258650 - DNA, 78 bp, Homo sapiens
aaaagtcaaagcctctgtggacatgtttgatcagcttttgcaagcaggtgccgtgagcgatgtggagatgcaggaaca

SEQ ID NO: 258651 - DNA, 100 bp, Homo sapiens
aaaaccttcctcaccgtgtactatcttgctgacgtcttgactgtgaacccggactcaccggcgtcggaccctacggttttccacaagcgctatttgaaaa

SEQ ID NO: 258652 - DNA, 90 bp, Homo sapiens
cctctcctaccagtctgcctggctcacggtgctgccagaaatatgagattacggagcagcgcaagattgatcagaaagctgtggactcac

SEQ ID NO: 258653 - DNA, 100 bp, Homo sapiens
cccgtatgaacttctcttcgcatcggcggcggcttccgtcacctccgctcccccgatcctattcccagtcgttactatactggcaattgctggagaagat

SEQ ID NO: 258654 - DNA, 100 bp, Homo sapiens
catacttgaccggggtcatcctagggaaaacactatcctctgagatcccagatcatgagctcggggtgtggttttctctcggttgtgcctatttggcctt

SEQ ID NO: 258655 - DNA, 100 bp, Homo sapiens
cattcgttgccgccggaggggaagcttgggatcatggccatcaccatcgaggctgagccaagagctgatggcagccgccggaccacccgctatgacatcg

SEQ ID NO: 258656 - DNA, 100 bp, Homo sapiens
agctcgcccaagccgcgtccccagagagcgccctgagagaacagggtggccgcttggtccaggcagaggtggaggagacactgaagcgactgcagagcca

SEQ ID NO: 258657 - DNA, 100 bp, Homo sapiens
agatgatgtctttaatgaaaagggatggaactacattcttgaggttgggtatctacagccattggttgctgttcaggtcagctttgctcctaacaacact

SEQ ID NO: 258658 - DNA, 100 bp, Homo sapiens
ggctcctccgagtcaacagattcaggaaccctaaggactctgcaatatgaataattccctagagaacaccatctcctttgaagagtacatccgagtaaag

SEQ ID NO: 258659 - DNA, 75 bp, Homo sapiens
agaaaattttctcctggtagacctcggtccaaacagtgtttcctgaggttataggcgggtgtttgaggagtacat

SEQ ID NO: 258660 - DNA, 90 bp, Homo sapiens
aggacatctgggggccacaaatgctccttctcctggagacgcaactcaagggaacttaggctgcggaactatgtcccggaggatgaggac

SEQ ID NO: 258661 - DNA, 101 bp, Homo sapiens
ggctgtgatttacctgggtgagacagcttgagccccatcgtggattccaagacatccctgctgagagagccaagatgaacaagagaactgggcaacccatg

SEQ ID NO: 258662 - DNA, 76 bp, Homo sapiens
cacgcgggctgctcatcgtcagcagggagaggctgatggcccactgcgtgaccttggttcagctgtccatttcctg

SEQ ID NO: 258663 - DNA, 75 bp, Homo sapiens
ttttgccagagaaaggacgagcagcaagtcagggagcttaagcacttttccagccattaactccaggctctcgag

SEQ ID NO: 258664 - DNA, 101 bp, Homo sapiens
gccagatgcagatctgaagacctattttactgataagaaaacacatctttacacactaaatgccatgaagtacaccattgtggtgtcggctacggcctcgg

SEQ ID NO: 258665 - DNA, 100 bp, Homo sapiens
ggcatgacgtttacaacttttgatctgggtggacatgttcaagcaaggacacccaggcccattattttcctccagcctccatggaccacagtcttccaag

SEQ ID NO: 258666 - DNA, 82 bp, Homo sapiens
tcgggtgcgctgctcaaggacacggtctacaccgacttcgacgctgtgccacgaccgtggctatctggtgacccaggacgag

SEQ ID NO: 258667 - DNA, 95 bp, Homo sapiens
ctcccgagtagctggggttacagattcctcctgaagacacagcatccacccgatcttcattcactgtccaagaccttaaaccttttacagaatat

SEQ ID NO: 258668 - DNA, 76 bp, Homo sapiens
cgggcggcccctggagatgattgagccgcgcacgctacagtacaaggagcacgtgaattgcctctgcttacgttca

SEQ ID NO: 258669 - DNA, 50 bp, Homo sapiens
cgacagaagcgactttggtgagactctgctgctacaggagctgagagacc

SEQ ID NO: 258670 - DNA, 87 bp, Homo sapiens
tttattgacttctcagtgtacaacgccaacattaacctgttctgtgtggtcaggacacattcagctaacgtattttagcaggtggag

SEQ ID NO: 258671 - DNA, 83 bp, Homo sapiens
ggcaggctgcggcagacggcgacagtggcggcggcgccatggcagggcttgcagcagaagatggctgtgccacccacgtatgc

SEQ ID NO: 258672 - DNA, 75 bp, Homo sapiens
atccggctgccgaaggtcctcgccagaaagaaatttcagagcttccaagaccacaaacttaaaataagtaaagaa

SEQ ID NO: 258673 - DNA, 108 bp, Homo sapiens
ctggaacaatagatgacagagagccccttgctaatgcaatcaaaagtgactctgcagtaattggagatattgatgatgttaagaagttcaaaccgggttacctggaag

SEQ ID NO: 258674 - DNA, 100 bp, Homo sapiens
ctcagggtccacgccatccacgcctgtagagtttgattcccgaaggaccttaactaggtgaccatgccccggactcaccatctggagagaacagtccagc

SEQ ID NO: 258675 - DNA, 75 bp, Homo sapiens
aacgaatcatccacgcacctgcagctctgctgagagagtgcaagccgtggggtgtgtgcggattttaggcaaaca

SEQ ID NO: 258676 - DNA, 80 bp, Homo sapiens
aaccttgtgtcaaccatccattccaggagccagctatctgagatgagttttgatcatcctgagaaaaatgggccttggcc

SEQ ID NO: 258677 - DNA, 100 bp, Homo sapiens
ggggccgcagtctggccacccgcttccatgcggttcgggtccaagatgatgccgttttcggctttgtgagaaaccttaccatcaaacacgatggccagca

SEQ ID NO: 258678 - DNA, 100 bp, Homo sapiens
actgaatcacctcatgactagcggggcaggcctctaattcaccgcaggatttccgaggctgaaagacactcctcggaagcagctgcgatttgaaggggag

SEQ ID NO: 258679 - DNA, 83 bp, Homo sapiens
ggatattatagatattcagaagaaggatgctgttaaaagcaattttccagattattcaaagtatcaggatgggcatgtgaagt

SEQ ID NO: 258680 - DNA, 82 bp, Homo sapiens
cactgcttctccgtgggcagcattggcgaccagcgcttcacggtcagcccaaggccaaccccactgtcactctgttcccgcc

SEQ ID NO: 258681 - DNA, 100 bp, Homo sapiens
ggacaggaagaagcggagggcgaggaggagcagaggagcacacagatgaagcaggcggccggcgcggggcgcaggcggcgcggccatgggctcgcagggc

SEQ ID NO: 258682 - DNA, 50 bp, Homo sapiens
cagtaatgtcccggcggatatgttgctgatatgtgttcaagatgagtggg

SEQ ID NO: 258683 - DNA, 98 bp, Homo sapiens
tttcagttctttggaattccattcttttccttattcttctgatgtggatccagtcttgatggcagaggtgcaattagattccctgaaacagaaaggag

SEQ ID NO: 258684 - DNA, 74 bp, Homo sapiens
tttacacttgtcaacttcctcttcagtcatcagtgttatcaatactctggctgaccatcatcatcgtgggactg

SEQ ID NO: 258685 - DNA, 83 bp, Homo sapiens
cgcgcctcagcgtgtcgggcgaggtgcggtgagaagccctaccactgcaactgggacggctgcggctggaagtttgcgcgctc

SEQ ID NO: 258686 - DNA, 75 bp, Homo sapiens
ggctgcttttgctgcgccctctcagcttcccaagaaaggaaattggccttgcctctctgggtgcacctgatgaat

SEQ ID NO: 258687 - DNA, 100 bp, Homo sapiens
tgttccaccaggacttgatgaatataatccattctcggattctagaacagacaaccctccatatgataagggagccttcagaatcgaaatcaactttcca

SEQ ID NO: 258688 - DNA, 75 bp, Homo sapiens
tacacccacctaccttgaaccaggttcgtgagccacacatctccccacaccaagctcctccatacaagacctcgg

SEQ ID NO: 258689 - DNA, 75 bp, Homo sapiens
gcaggcaaggacaaggccacagagtcggggtcttcacggacatggatttgattgacatactttggaggcaagata

SEQ ID NO: 258690 - DNA, 127 bp, Homo sapiens
tgagttagtggtggacctgtttgtgcgcacagtgctggtctgcctgacatgttgaattgaccaaagcaatggtgatggagaagcctagtcccctgctggtcgggcgggaatttgtgagacagtatta

SEQ ID NO: 258691 - DNA, 100 bp, Homo sapiens
ctggccacgatcgcagactccaaccagaacatgcagtccctgcttcctgccgtttgggaagtagctgctccatacattgaaaaatacagaatggagcata

SEQ ID NO: 258692 - DNA, 100 bp, Homo sapiens
aggaggttgccgacgccatcaggctcaacgaggaactcaaagtggatgaggaaagtactccaaagattcaggtttactcacgtcatccagcagagaatgg

SEQ ID NO: 258693 - DNA, 97 bp, Homo sapiens
gagggattaagaagaactcttaggagcagcttggcctaaagggtgtcagcttcctctggtgcaaccagcaagtcttccagtatgaatcccacagaaa

SEQ ID NO: 258694 - DNA, 90 bp, Homo sapiens
caaaaccagacttaaaaagtgtcatattgctgttggatctcctggctaaagaacgtgccaatggaatggagcttgatgggcgtaggatca

SEQ ID NO: 258695 - DNA, 100 bp, Homo sapiens
aagctgcacgtggatcctgagaacttcaggtggcatccagcagctggagggtctgtcagccatggaggtggaagtcaggtgcagctgcagcggccgtcac

SEQ ID NO: 258696 - DNA, 75 bp, Homo sapiens
gaccggtgccggagagccacgcatgcgcactgggaaagaaaccttccaaggaaagattgactgcggatccaggag

SEQ ID NO: 258697 - DNA, 88 bp, Homo sapiens
tctgttgacatggaaaacaaggaaaatggctctgtcggtgtaaaaaatgtcccttttgatgagaagaataagcctcattctgattcaa

SEQ ID NO: 258698 - DNA, 100 bp, Homo sapiens
ctgtcacagcaactcctttgcaagatgccccggcatcatggccgccctcagaccccttgtgaagcccaagatcgtcaaaaagagaaccaagaagttcatc

SEQ ID NO: 258699 - DNA, 100 bp, Homo sapiens
ttatgtgagtgatggaaccagtcgttcagaaattcacagcatcaatatcaccattgaggaggagatgttaaagtaacccatcttgcaggacgacattgaa

SEQ ID NO: 258700 - DNA, 98 bp, Homo sapiens
ccaggatggccgggacgaggccaattgccaatggaaaactcctctctgtggaaaggagcaaccgaatcgtagtggatgaagtttatgactatcaccag

SEQ ID NO: 258701 - DNA, 97 bp, Homo sapiens
ggcgtgctcaaggagggcttcctggtcaagaggaggcttcgtgacggagttatcagagacattgagaggcaaattcggaaaaaagaaaacattcgtc

SEQ ID NO: 258702 - DNA, 75 bp, Homo sapiens
gtgatctgctcttccaagccctgggccgcacctacagaagatgagaatgtgcctactgctcctgatcctccaagt

SEQ ID NO: 258703 - DNA, 96 bp, Homo sapiens
gctgaaccttgtgtcaaccatccattccaggagccagctatctgagacagagtttcactcctgttacccaggctggaggacaatgatgtgatctcg

SEQ ID NO: 258704 - DNA, 100 bp, Homo sapiens
gtttgcaatgcaagaagggctgggccctgcatcacctcaagtgtgtagggcttcgtgggacacatatgcaacatgcctatgatttttacaagcctgatat

SEQ ID NO: 258705 - DNA, 100 bp, Homo sapiens
ctacaaggaagctctgatgatccccgccaaggatggcgttaagctgccttacttcttccacgccggagaaacagcaaatcgcagtcttctccaggctgac

SEQ ID NO: 258706 - DNA, 100 bp, Homo sapiens
gttaaacaatttcatcagattaaagaacacagttctctggctttttggaaaactgatgcatccgatgtaaagccatgctaaggtggttttcagattccac

SEQ ID NO: 258707 - DNA, 75 bp, Homo sapiens
tcacttccttccttactttgtcttggtatactacatggcaaaatgggaaaggtattatacctgaagaaccttagc

SEQ ID NO: 258708 - DNA, 75 bp, Homo sapiens
atctatgagttcaagatcacatggtgaaactggcgatggaatatgagaggagccctctggaaagaaaaggacaga

SEQ ID NO: 258709 - DNA, 88 bp, Homo sapiens
ggggggcatggagtgcaccctggggcaggttgcacactgggccacagaggatccagcaaggatgaagaaatggagcagcacagacttg

SEQ ID NO: 258710 - DNA, 75 bp, Homo sapiens
cgccactgcaatcacagtgactttggccttgttactagcctatgtgattggcacattgcaagcaacccgtgcctt

SEQ ID NO: 258711 - DNA, 97 bp, Homo sapiens
cgctgcgccaagggcggccccctgagcccgcgcaaggacgccgggcgtgcaaaggacaggaaggaccccaggaagaggaggaggaggaagaggagga

SEQ ID NO: 258712 - DNA, 82 bp, Homo sapiens
ttcattgtctcggacgtgcggggcctgggcctcccggtccgcaagcaggatcagtggtcaattggtcaggacagggactaca

SEQ ID NO: 258713 - DNA, 100 bp, Homo sapiens
gaaatgcagaaaaaagatcacaagcaactctggatgggattgcaaaatgtaaataacagatgcgggtgaaagatccaactaaagctttacctgagaaagc

SEQ ID NO: 258714 - DNA, 75 bp, Homo sapiens
ggcgaacccgcggcgcaataacggatgggagctacagtttttgtccagcccctggacctggtgaagaaccggatg

SEQ ID NO: 258715 - DNA, 80 bp, Homo sapiens
aaagatcagatagcagagctgaatcatgaggggcactatgaacgaagaggagcagtttgtaaacattgatttgaatgatg

SEQ ID NO: 258716 - DNA, 83 bp, Homo sapiens
ccgctctgggatcccggccaccagcaattgtccgggcgaactttctgaccaagtatacaactacccagagggcctaggagaag

SEQ ID NO: 258717 - DNA, 50 bp, Homo sapiens
caagatcctggctggggacaaggtcatacttacctggttgcttgcgcatc

SEQ ID NO: 258718 - DNA, 127 bp, Homo sapiens
ggcaggggagccccacacccggcaggaggaccaggacgcgagcggcggcgcctcggccctgggctgtttagcggcaacctttggcactgcatccatgagcatgcccacaggattcggcactcctgct

SEQ ID NO: 258719 - DNA, 98 bp, Homo sapiens
atttggggaccagagatggacggtcactcagcctatggagtccaatatcagatggaaatgatgcggagccttcgccatgtaaacattgatcatcttca

SEQ ID NO: 258720 - DNA, 122 bp, Homo sapiens
cagggaaccagggaggaggatgacgtagtgagcgaggacctggtacaacaggatgtccaggtttgaagatgccgcatttggattggatgaattccaaattctgcttgcttgctttttaatat

SEQ ID NO: 258721 - DNA, 100 bp, Homo sapiens
gcaagtcatcagactgcataaaatcagtctgcgctcctcagaccaccggcaggtgaacagcctgatgcagaccgaggagtgcccacctatgctagacgcc

SEQ ID NO: 258722 - DNA, 100 bp, Homo sapiens
cggaactggtgggttcttggtctcactgacttcaagaatgaagccgcggaccctcgcgagaaaagaggctggttgtccctgagactctggtctgtggctg

SEQ ID NO: 258723 - DNA, 100 bp, Homo sapiens
agcaagaacagagagagaggtggacagatctgagagatactgaggaaggcgcaatggcgaggaagttatctgtaatcttgatcctgacctttgccctctc

SEQ ID NO: 258724 - DNA, 101 bp, Homo sapiens
accggagaaggaggatcaaaagaggtggtggggacttttaagatttggaagtcaaaccagaaacttcaggctctactacgatggcaagcactttgttgggg

SEQ ID NO: 258725 - DNA, 50 bp, Homo sapiens
cctgaagagggaagacacgcggaaacaggagcaggccatagaggtgctga

SEQ ID NO: 258726 - DNA, 90 bp, Homo sapiens
ctcctgagtagctgggactgcagggctccaacaaaagaatcctctgaagaggagtatgactctggagttgaagaagaaggatggccccgc

SEQ ID NO: 258727 - DNA, 83 bp, Homo sapiens
ggatctcagggcctgccgccccattatgatgatgtcgagttaagggaagaaagtcggaggctggctttggctgcgaaaagaga

SEQ ID NO: 258728 - DNA, 82 bp, Homo sapiens
gcgtgcactccgcacctcggggacattattgcgcgtggaacggctgcttttggaaggtcatcatcagatttgaaatatttaa

SEQ ID NO: 258729 - DNA, 100 bp, Homo sapiens
atgagcaacaaattcctgggcacctggaaacttgtctctagtgagaactttgacgattacatgaaagctctgggtcttaattctgaaggactataccgag

SEQ ID NO: 258730 - DNA, 51 bp, Homo sapiens
cgcggcctttgtctcgcagtcaggagggggccaatctcaaagtcatcagca

SEQ ID NO: 258731 - DNA, 74 bp, Homo sapiens
attacaacttcaagaaaattacggtggtgccgtccgccaaggagaccctgccctggttcaccaaaggccagcgc

SEQ ID NO: 258732 - DNA, 99 bp, Homo sapiens
ttactacctgtggagatttctgcattttggctacaaaagctgatgaaaatcatcctcaggacatccaggcagaaattgatgcccacaatgacatattta

SEQ ID NO: 258733 - DNA, 88 bp, Homo sapiens
gccgtcagtatttgaggagaaagcatttggtccaggtgcaggtacagcagtctccgcaacaggtctcggctcagctctccccacaact

SEQ ID NO: 258734 - DNA, 97 bp, Homo sapiens
taaagtgaatgactccaacgaattaggtggtctgactaccagtggctctgcagaggcatgaccccttgttaattcctggcaatgatcagattgacaa

SEQ ID NO: 258735 - DNA, 100 bp, Homo sapiens
cttgggccagagttccaggggctctgggagtggctgccaggttggtgttcgaggaagagacattgttgttcttggtgtggagaagaagtcagtggccaaa

SEQ ID NO: 258736 - DNA, 98 bp, Homo sapiens
ccggatctcaacaatcccttcaaggctcttgcagccaatgccggaacaggatttgctgttgctgagcctcaaatcgcaatgttttgtgggaagttaaa

SEQ ID NO: 258737 - DNA, 100 bp, Homo sapiens
ctggagcctaggaagcaaagtgaagcacacactcctgcttccttccttccctgcagttgagtctagtcctcaactctaaccaaagtaaaggaaactggaa

SEQ ID NO: 258738 - DNA, 100 bp, Homo sapiens
gtgatatcttagtggatgacaacacagttatgacctcagcagccatgtcgaagccccatagtgaagccgggactgccttcattcagacccagcagctgca

SEQ ID NO: 258739 - DNA, 100 bp, Homo sapiens
ctggcagtaaagacaaagatgtcaggcctgcggcccggcactcaagtggaccctgagattgagctttttgtaaagctcgttttgacaggagccattcaag

SEQ ID NO: 258740 - DNA, 96 bp, Homo sapiens
cacttggaaagattttactgtaacccagaaaatgatagaatgagaatgaagtatgggggatcccaacaagccctcaggattcagaagtgttaaagc

SEQ ID NO: 258741 - DNA, 75 bp, Homo sapiens
caaggtggggacagacttgctggaggaggagatcaccaagtttgaggagcacctttgtgtccctggtgatgttgg

SEQ ID NO: 258742 - DNA, 74 bp, Homo sapiens
gaaacccagcagcagattcaagcagctatgggattcaagattgatgcctcaccctgtgatcccactttcatcct

SEQ ID NO: 258743 - DNA, 100 bp, Homo sapiens
caacatcgtccctgtcatcgccaaggcggacacactcaccctggaggagagggtccacttcaaacagcggaattttgccacctctctttattccatgatt

SEQ ID NO: 258744 - DNA, 50 bp, Homo sapiens
cattggatgaagtggctccggagatacgtgtcttaaagacattaacagag

SEQ ID NO: 258745 - DNA, 121 bp, Homo sapiens
caaagaagaagtaactattatgaggggccacacaccagccactcaagatggactctgtgactacatgactaataaaatatggcagaaatgacaccatgcagtttccaagcccaggccttag

SEQ ID NO: 258746 - DNA, 100 bp, Homo sapiens
tggaatatgagtgatgacaaaccctttctatgtactgcgcctggatgtggccagcccccaaatacatcaagatgtttgtactggatgaagctgacgaaat

SEQ ID NO: 258747 - DNA, 76 bp, Homo sapiens
ccctacttcaaggataagggtgacagcaacagctcggcgggctggaagcttggtgatccagctatttttcctgccg
